United States Patent Application Publication US 2025/0311734 A1 - sequence listing, part 2

SEQ ID NO: 2711 - protein, 248 aa, Aspergillus fumigatus
MTLSKITSIAGLLASASLVAGHGFVSGIVADGKYYGGYLVNQYPYMSNPPDTIAWSTTATDLGFVDGTGYQSPDIICHRDAKNGKLTATVAAGSQIEFQWTTWPESHHGPLITYLAPCNGDCATVDKTTLKFVKIAAQGLIDGSNPPGVWADDEMIANNNTATVTIPASYAPGNYVLRHEIIALHSAGHLNGAQNYPQCFNIQITGGGSAQGSGTAGTSLYKNTDPGIKFDIYSDLSGGYPIPGPALF

SEQ ID NO: 2712 - protein, 248 aa, Aspergillus fumigatus
MTLSKITSIAGLLASASLVAGHGFVSGIVADGKYYGGYLVNQYPYMSNPPDTIAWSTTATDLGFVDGTGYQSPDIICHRDAKNGKLTATVAAGSQIEFQWTTWPESHHGPLITYLAPCNGDCATVDKTTLKFVKIAAQGLIDGSNPPGVWADDEMIANNNTATVTIPASYAPGNYVLRHEIIALHSAGNLNGAQNYPQCFNIQITGPGSAQGSGTAGTSLYKNTDPGIKFDIYSDLSGGYPIPGPALF

SEQ ID NO: 2713 - protein, 248 aa, Aspergillus fumigatus
MTLSKITSIAGLLASASLVAGHGFVSGIVADGKYYGGYLVNIYPYMSNPPDTIAWSTTATDLGFVDGTGYQSPDIICHRDAKNGKLTATVAAGSQIEFQWTTWPESHHGPLITYLAPCNGDCATVDKTTLKFVKIAAQGLIDGSNPPGVWADDEMIANNNTATVTIPASYAPGNYVLRHEIIALHSAGNLNGAQNYPQCFNIQITGGGSAQGSGTAGTSLYKNTDPGIKFDIYSDLSGGYPIPGPALF

SEQ ID NO: 2714 - protein, 248 aa, Aspergillus fumigatus
MTLSKITSIAGLLASASLVAGHGFVSGIVADGKYYGGYLVNQYPYMLNPPDTIAWSTTATDLGFVDGTGYQSPDIICHRDAKNGKLTATVAAGSQIEFQWTTWPESHHGPLITYLAPCNGDCATVDKTTLKFVKIAAQGLIDGSNPPGVWADDEMIANNNTATVTIPASYAPGNYVLRHEIIALHSAGNLNGAQNYPQCFNIQITGGGSAQGSGTAGTSLYKNTDPGIKFDIYSDLSGGYPIPGPALF

SEQ ID NO: 2715 - protein, 248 aa, Aspergillus fumigatus
MTLSKITSIAGLLASASLVAGHGFVSGIVADGKYYGGYLANQYPYMSNPPDTIAWSTTATDLGFVDGTGYQSPDIICHRDAKNGKLTATVAAGSQIEFQWTTWPESHHGPLITYLAPCNGDCATVDKTTLKFVKIAAQGLIDGSNPPGVWADDEMIANNNTATVTIPASYAPGNYVLRHEIIALHSAGNLNGAQNYPQCFNIQITGGGSAQGSGTAGTSLYKNTDPGIKFDIYSDLSGGYPIPGPALF

SEQ ID NO: 2716 - protein, 248 aa, Aspergillus fumigatus
MTLSKITSIAGLLASASLVAGHGFVSGIVADGKYYGGYLVNQYPYMSNPPDTIAWSTTATDLGFVDGTGYQSPDIICHRDAKNGKLTATVAAGSQIEFQWTTWPESHHGPLITYLAPCNGDCATVDKTTLKFVKIAAQGLIDGSNPPGVWADDEMIANNNTATCTIPASYAPGNYVLRHEIIALHSAGNLNGAQNYPQCFNIQITGGGSAQGSGTAGTSLYKNTDPGIKFDIYSDLSGGYPIPGPALF

SEQ ID NO: 2717 - protein, 248 aa, Aspergillus fumigatus
MTLSKITSIAGLLASASLVAGHGFVSGIVADGKYYGGYLVNVYPYMSNPPDTIAWSTTATDLGFVDGTGYQSPDIICHRDAKNGKLTATVAAGSQIEFQWTTWPESHHGPLITYLAPCNGDCATVDKTTLKFVKIAAQGLIDGSNPPGVWADDEMIANNNTATVTIPASYAPGNYVLRHEIIALHSAGNLNGAQNYPQCFNIQITGGGSAQGSGTAGTSLYKNTDPGIKFDIYSDLSGGYPIPGPALF

SEQ ID NO: 2718 - protein, 240 aa, unidentified
LAFAGLAGLLSAPLVKAHGFVQGIVVDGTFYSGYIVDEFPYMSNPPPVIGWSTTATDLGFVDGSEYQEPDIICHRNGTPALLTAEVKAGGTVELQWTPWPSSHHGPVITYLANCGGDCSDVDKTQLEFFKIEQSGLVNGSDPPGTWATDNLISNNNSWTVTIPSTLEPGGYVLRHEIIALHSAGQLNGAQNYPQCINIQITQGGSVEPTGTKGEALYTDTDPGILIDIYETIATYDIPGP

SEQ ID NO: 2719 - protein, 240 aa, unidentified
LAFAGLAGLLSAPLVKAHGFVSGIVVDGTFYSGYIVDEYPYMSNPPPVIGWSTTATDLGFVDGTEYQEPDIICHRNATPALLTAEVKAGGTVELQWTPWPSSHHGPVITYLANCGGNCSDVDKTQLEFFKIEQSGLVNDSDPPGTWATDNLISNNNSWTVTIPSTLEPGGYVLRHEIIALHSAGQLNGAQNYPQCINIQITQGGSVEPTGAKGEALYTNTDPGILIDIYETIATYDIPGP

SEQ ID NO: 2720 - protein, 224 aa, Aspergillus clavatus
HGFVTGAVVDGTYHTGYLVNNYPYSSNPPKTIGWSETATDLGFVDGTGYASGDIICHKNAKPGALSADIKAGGKVEFQWTQWPESHHGPVITYMANCNGDCASVDKSQLEFFKIEEKGLIGSGHWASDDLIANNNSWTVTVPSSLAAGNYVMRHEIIGLHSAGNANGAQNYPQCINLKVTGGGSDKPVGTLGTKLYKATDPGILVNIYGSLTSYTIPGPALWTG

SEQ ID NO: 2721 - protein, 244 aa, Aspergillus niger
MSVAKIAGVVLGSAALVAGHGYVSGAVIDGEYYGGYIVSSYAYESDPPETIAWSTTATDLGFVDGSEYSDPDIICHKSAKPGAISADVKAGGTVELQWTDWPSSHHGPVLTYLANCNGDCSDVTKTDLEFFKIDESGLISDTEVPGTWATDNLISNNNSWTVTIPSTLEAGNYVLRHEIIALHSAENKDGAQNYPQCLNLKVTGSGSSTYSGTKGEALYKDTDPGILVNIYETLSSYDIPGPAI

SEQ ID NO: 2722 - protein, 223 aa, Synthetic construct
HGFVSGIVVDGTFYSGYIVDEFPYMSNPPPVIGWSTTATDLGFVDGSEYQEPDIICHRNATPALLTAEVKAGGDVELQWTPWPSSHHGPVITYLANCGGNCSDVDKTQLEFFKIEQSGLVNGSDPPGTWATDNLISNNNSWTVTIPSTLEPGGYVLRHEIIALHSAGNKDGAQNYPQCINIQITQGGTVEPTGAKGEALYTNTDPGILIDIYETIATYDIPGP

SEQ ID NO: 2723 - protein, 248 aa, unidentified
SSALALAGVLLSSAPFVSAHGFVSGIVIGDKFYSGYIVDEFPYMSDPPPVIGWATTATDLGFVDGTEYAEPDIICHRNATPALLTAPVAAGGDVELQWTPWPSSHHGPVITYLAPCNGNCSEVDKTTLKFFKIDEGGLVNDTDVPGTWASDELIANNNSWTVKIPTSIEPGGYVLRHEIIALHSAENLDGAQNYPQCINIKVTQTSGTVTPSGTLGTALYTDTAPGILIDIYEPIATYTIPGPPLYTG

SEQ ID NO: 2724 - protein, 241 aa, unidentified
LAFAGLAGLLSAPLVKAHGFVSGIVIDGTFYSGYIVDEYPYMSNPPPVIGWSTTATDLGFVDGSEYQEPDIICHRNATPALLTAEVKAGGDVELQWTPWPSSHHGPVITYLANCGGNCSDVDKTQLEFFKIEQSGLVNDSDPPGTWATDNLISNNNTWTVTIPSTLEPGGYVLRHEIIALHSAGQLNGAQNYPQCINIQITGGGSVEPTGAKGEALYTNTDPGILIDIYETIATYDIPGPP

SEQ ID NO: 2725 - protein, 241 aa, unidentified
LAFAGLAGLLSAPLVKAHGFVQGIVVDGTFYSGYIVDEYPYMSNPPPVIGWSTTATDLGFVDGSEYQEPDIICHRNATPALLTAEVKAGGDVELQWTPWPSSHHGPVITYLANCGGNCSDVDKTQLEFFKIEQSGLVNDSDPPGTWATDNLISNNNTWTVTIPSTLEPGGYVLRHEIIALHSAGQLNGAQNYPQCINIQVTQGGSVEPTGAKGEALYTNTDPGILIDIYETIATYDIPGPP

SEQ ID NO: 2726 - protein, 243 aa, Aspergillus clavatus
MSVTKIAGILLGSAAMVAGHGFVTGAVVDGTYHTGYLVNNYPYSSNPPKTIGWSETATDLGFVDGTGYASGDIICHKNAKPGALSADIKAGGKVEFQWTQWPESHHGPVITYMANCNGDCASVDKSQLEFFKIEEKGLIGSGHWASDDLIANNNSWTVTVPSSLAAGNYVMRHEIIGLHSAGNANGAQNYPQCINLKVTGGGSDKPVGTLGTKLYKATDPGILVNIYGSLTSYTIPGPALWTG

SEQ ID NO: 2727 - protein, 236 aa, Unidentified
LATILGTASLVSGHGYVQGIVADGKYYGGYIVTQYPYTNDPPELVAWSTEATDLGFVDGSGYASGDIICHKSAQPAALAAEVPAGGKVELQWTEWPESHHGPVLDYLAPCNGNCADVDKTALEFFKIDQGGLVDDSSPPGTWASDQLISNNNSWTVTIPSTIAPGNYVLRHEIIALHSAGNKDGAQNYPQCINIKVTGSGTDSPSGTLGTSLYKDTDPGILVNIYQTLSDYSIPGP

SEQ ID NO: 2728 - protein, 245 aa, Unidentified
MSVAKIAGVVLGSAALVAGHGYVSGAVVDGQYYGGYIVSSYAYESDPPETIAWSTEATDLGFVDGSEYAEPDIICHKSAKPGAISADVKAGGTVELQWTDWPSSHHGPVLTYLANCNGDCSDVTKTDLEFFKIDESGLISDTEVPGTWATDNLISNNNSWTVTIPSTLESGNYVLRHEIIALHSAGNKDGAQNYPQCLNLKVTGSGSSTYSGTKGEALYKDTDPGILVNIYQSLSSYDIPGPAMY

SEQ ID NO: 2729 - protein, 243 aa, unidentified
LAFAGLAGLLSAPLVKAHGFVSGIVVGDQFYSGYIVNEYPYQSDPPPVIGWATTATDLGFVDGSEYQDPDIICHRNATPALLTAPVAAGGDVELQWTPWPSSHHGPVITYLANCNGNCSEVDKTQLNFFKIDQSGLINGSDPPGTWASDELIANNNTWTVKIPTTLEPGNYVLRHEIIALHSAGNKDGAQNYPQCINIKITQGGTVEPTGTLGEALYHDTDPGIIIDIYEPIATYDIPGPPEY

SEQ ID NO: 2730 - protein, 244 aa, Aspergillus fumigatus
TLSKITSIAGLLASASLVAGHGFVSGIVADGKYYGGYLVNQYPYMSNPPDTIAWSTTATDLGFVDGTGYQSPDIICHRDAKNGKLTATVAAGSQIEFQWTPWPDSHHGPVITYLAPCNGDCATVDKTTLKFVKIAAQGLIDGSNPPGVWASDELIANNNTWTVTIPASYAPGNYVLRHEIIALHSAGNLNGAQNYPQCFNIQITGGGSAQGSGTAGTSLYKNTDPGIKFDIYSDLSGGYPIPGP

SEQ ID NO: 2731 - protein, 247 aa, Penicillium roqueforti
MSVSKIAGLLLSSAAMVAGHGFVSGAVVDGTYHGGFIVNTYNYMTEVPANIGWSEKATDLGYIDGSGYTGSDIICHKEATPGAISAEVKAGGSVELQWTDWPESHHGPVITYMANCNGDCSVVDKTTLKFFKIAEAGLIDDTNVPGTWASDQLIAANNSATVTIPSTIAAGNYVLRHEIIALHSAGDANGAQNYPQCINLKVTGGGSDSPDGVLGTALYTPTDPGILISIYSALESYVIPGPALYTG

SEQ ID NO: 2732 - protein, 229 aa, unidentified
HGFVQGIVVGDKFYSGYIVNEFPYESDPPPVIGWATTATDLGFVDGTEYAEPDIICHRNATPALLTAPVAAGGTVELQWTPWPSSHHGPVITYLAPCNGDCTEVDKTTLKFFKIDQGGLVNDTDPPGVWASDELISNNNTWTVTIPTSLAPGGYVLRHEIIALHSAEQLNGAQNYPQCINIQVTQTSGTVTPSGTLGEALYTNTAPGIIIDIYEPIATYTIPGPPMYTG

SEQ ID NO: 2733 - protein, 228 aa, Penicillium roqueforti
HGFVSGAVVDGTYHGGFIVNTYNYMTEVPANIGWSEKATDLGYIDGSGYTGSDIICHKEATPGAISAEVKAGGSVELQWTDWPESHHGPVITYMANCNGDCSVVDKTTLKFFKIAEAGLIDDTNVPGTWASDQLIAANNSATVTIPSTIAAGNYVLRHEIIALHSAGDANGAQNYPQCINLKVTGGGSDSPDGVLGTALYTPTDPGILISIYSALESYVIPGPALYTG

SEQ ID NO: 2734 - protein, 240 aa, unidentified
LAFAGLAGLLSAPLVKAHGFVSGIVVDGTFYSGYIVDEFPYMSNPPPVIGWSTTATDLGFVDGTEYQEPDIICHRNATPALLTAEVKAGGTVELQWTPWPSSHHGPVITYLANCGGNCSDVDKTQLEFFKIEQSGLVNDSDPPGTWATDNLISNNNTWTVTIPSTLEPGGYVLRHEIIALHSAGQLNGAQNYPQCINIQITQGGSVEPTGAKGEALYTNTDPGILIDIYETIATYDIPGP

SEQ ID NO: 2735 - protein, 240 aa, unidentified
LAFAGLAGLLSAPLVKAHGFVSGIVVGDEFYSGYIVNEFPYQSNPPPVIGWATTATDLGFVDGTEYQDPDIICHRNATPALITAEVKAGGTVELQWTPWPSSHHGPVITYLANCNGNCSTVDKTQLEFFKIDQSGLVNDSDPPGTWASDNLISNNNSWTVTIPSTLEPGGYVLRHEIIALHSAGQLNGAQNYPQCINIKITQGGSVEPTGALGEDLYHNTDPGILIDIYEPIATYTIPGP

SEQ ID NO: 2736 - protein, 233 aa, Aspergillus terreus
IAGVVLGSAALVAGHGYVTGAVVDGKYYAGYDVTSAPYSSDPPATIGWSTTATDLGFVDGTEYSEPDIICHKDAKPGSLSAEITAGGKVELQWTEWPESHHGPVITYLANCNGDCSSVDKTSLEFFKIDQKGLIEGNTWASDQLISNNNSWTVTIPSSIASGNYVLRHEIIGLHSAGNKDGAQNYPQCMNLKVTGGGSDKPAGTLGTALYKDTDPGILVNIYQTLSSYVIPGP

SEQ ID NO: 2737 - protein, 244 aa, Aspergillus fumigatus
TLSKITSIAGLLASASLVAGHGFVSGIVADGKYYGGYLVNQYPYMSNPPDTIAWATTATDLGFVDGTGYQSPDIICHRDAKNGKLTATVAAGSQIEFQWTTWPESHHGPVITYLAPCNGDCATVDKTTLKFVKIAAQGLIDGSNPPGVWASDELIANNNTWTVTIPASYAPGNYVLRHEIIALHSAGNLNGAQNYPQCFNIQITGGGSAQGSGTAGTSLYKNTDPGIWFDIYSDLSGGYPIPGP

SEQ ID NO: 2738 - protein, 235 aa, Thermoascus thermophilus
IAGAITYASVAAAHGYVQGIVVDGSYYGGYLVTQYPYTSQPPEVIAWSTKATDLGFVDGTGYASPDIICHKGAEPGSLSAKVPAGGTVELQWTAWPESHKGPVIDYLAACNGNCSSVDKTALKFFKIDESGLTDGSGSGTWASDTLIKNNNSWTVTIPSTIAPGNYVLRHEIIALHSAENKDGAQNYPQCINLEVTGGGTDNPAGTLGTALYTDTDPGILVNIYQGLSNYSIPGP

SEQ ID NO: 2739 - protein, 244 aa, Talaromyces leycettanus
MAFSKVAAIGGLLVSASLVAGHGYVSGIIADGTFYSGFLEDKDIYVSPIPQRVGWTVDVPDLGFVDGTGYQGPDIICHRNATNAKLYASVTAGTSVTLQWTPWPNTHHGPVITYLANCNGDCTTVDKTTLKFVKFDAKGLIDDTTPPGTWATDELIANNNSWTVTIPSSIASGNYVLRHEIIALHSAINKDGAQNYPQCINLEISGGGSANPTGTLGENLYKDTDPGILFDIYETQTSYPIPGP

SEQ ID NO: 2740 - protein, 223 aa, Aspergillus niger
HGYVSGAVIDGEYYGGYIVSSYPYESDPPETIAWSTTATDLGFVDGSEYSDPDIICHKSAKPGAISADVKAGGTVELQWTDWPSSHHGPVLTYLANCNGDCSDVTKTDLEFFKIDESGLISDTEVPGTWATDNLISNNNSWTVTIPSTLEAGNYVLRHEIIALHSAENKDGAQNYPQCLNLKVTGSGSSTYSGTKGEALYKDTDPGILVNIYETLSSYDIPGP

SEQ ID NO: 2741 - protein, 248 aa, unidentified
SSALALAGVLLSSAPFVSAHGFVQGIVIGDKFYSGYIVDEYPYESDPPPVIGWATTATDLGFVDGTEYAEPDIICHRNATPALLTAEVKAGGTVELQWTPWPSSHHGPVITYLAPCNGNCSEVDKTTLEFFKIDQSGLVNDSDPPGVWASDELISNNNTWTVTIPTSIAPGGYVLRHEIIALHSAEQLDGAQNYPQCINIEITQTSGTVTPTGTLGEALYTDTAPGILVDIYEPIATYTIPGPPMYTG

SEQ ID NO: 2742 - protein, 248 aa, unidentified
SSALALAGVLLSSAPFVSAHGFVQGIVVGDKFYSGYIVNEFPYESDPPPVIGWATTATDLGFVDGSEYAEPDIICHRDATPALLTAPVAAGGTVELQWTPWPSSHHGPVITYLAPCNGNCSEVDKTQLEFFKIDQSGLVNDSDPPGTWASDELIANNNSWTVTIPTSIEPGGYVLRHEIIALHSAEQLDGAQNYPQCINIEITQTSGTVTPSGTLGEALYTNTAAGIIIDIYEPIATYTIPGPPLYTG

SEQ ID NO: 2743 - protein, 232 aa, Penicillium parvum
LASASLVAGHGYVSSIVANGQNYTGYLADSYPYMSNPPKSVGWATTATDLGFEDGTEYADPNIICHRNGTNAQLSAPVQAGSKVEIQWTPWPDSHHGPVITYLASCNGDCSTVDKSTLEFFKIDAVGLIDDSSVPGTWGTDKLIEAGNRWTVTIPDSIAAGNYVMRHEIIALHSASQKDGAQNYPQCLNLQVTGGGEGVPQGTLGEKLYKDTDPGILVNIYTTLSNYVIPGP

SEQ ID NO: 2744 - protein, 244 aa, Aspergillus flavus
MSIAKIAGIVLGSAALVAAHGHVSGAVVDGQYYPGYDISYHYMPDPPKVIGWSTDATDNGFVDGSSYADADIICHKNAKNGAISAEIAAGKQVELQWTAWPESHKGPVITYLANCNGDCATVDKTQLEFFKIDEKGLISGSDNTWATDNLIASNNSWTVTIPSSIAAGNYVMRHEIIGLHSAGQKDGAQNYPQCLNFKVTGGGSDKPEGTLGTALYKDTDPGIQINIYQTLTSYTIPGPALYSG

SEQ ID NO: 2745 - protein, 240 aa, unidentified
LAFAGLAGLLSAPLVKAHGFVSGIVVDGTFYSGYIVDEFPYMSNPPPVIGWSTTATDLGFVDGSEYQEPDIICHRNATPALLTAEVKAGGDVELQWTPWPSSHHGPVITYLANCGGNCSDVDKTQLEFFKIEQSGLVNGSDPPGTWATDNLISNNNSWTVTIPSTLEPGGYVLRHEIIALHSAGNKDGAQNYPQCINIQITQGGTVEPTGAKGEALYTNTDPGILIDIYETIATYDIPGP

SEQ ID NO: 2746 - protein, 248 aa, Penicillium oxalicum
MVSSKATTLSAMLACVSMVAGHGFVSSIMAGGKNYTGYLANSYPYMSNPPQSVGWATTATDLGFEDGTEYQSANIICHRDGKNAALSAPVTAGSKVEIQWTSWPDSHHGPVITYLASCGGDCSTVDKTTLKFFKIDEAGLIDDSNPPGTWATDQLIAAGNRWTVTIPKSIASGNYVMRHEIIALHSSGSKDGAQNYPQCLNLQVTGGGSAKPQGTLGEALYKDTDPGILINIYQSLKSYVIPGPALYS

SEQ ID NO: 2747 - protein, 244 aa, Aspergillus fumigatus
TLSKITSIAGLLASASLVAGHGFVSGIVADGKYYGGYLVNQYPYMSNPPDTIAWSTTATDLGFVDGTGYQSPDIICHRDAKNGKLTATVAAGSQIEFQWTTWPESHHGPVITYLAPCNGDCATVDKTTLKFVKIAAQGLIDGSNPPGVWASDELIANNNTWTVTIPASYAPGNYVLRHEIIALHSAGNLNGAQNYPQCFNIQITGGGSAQGSGTAGTSLYKNTDPGIKFDIYSDLSGGYPIPGP

SEQ ID NO: 2748 - protein, 244 aa, Aspergillus fumigatus
TLSKITSIAGLLASASLVAGHGFVSGIVADGKYYGGYLVNQYPYMSNPPDTIAWSTTATDLGFVDGTGYQSPDIICHRDAKNGKLTATVAAGSQIEFQWTTWPESHHGPVITYLAPCNGDCATVDKTTLKFVKIAAQGLIDGSNPPGVWASDELIANNNTWTVTIPASYAPGNYVLRHEIIALHSAGNLNGAQNYPQCFNIQITGGGSAQGSGTYGTSLYKNTDPGIWFDIYSDLSGGYPIPGP

SEQ ID NO: 2749 - protein, 244 aa, Aspergillus fumigatus
TLSKITSIAGLLASASLVAGHGFVSGIVADGKYYGGYLVNQYPYMSNPPDTIAWSTTATDLGFVDGTGYQSPDIICHRDAKNGKLTATVAAGSQIEFQWTTWPESHHGPVITYLAPCNGDCATVDKTTLKFVKIAAQGLIDGSNPPGVWASDELIANNNTWTVTIPASYAPGNYVLRHEIIALHSAGNLNGAQNYPQCFNIQITGGGSAQGSGTAGTSLYKNTDPGIWFDIYSDLSGGYPIPGP

SEQ ID NO: 2750 - protein, 244 aa, Aspergillus fumigatus
TLSKITSIAGLLASASLVAGHGFVSGIVADGKYYGGYLVNQYPYMSNPPDTIAWSTTATDLGFVDGTGYQSPDIICHRDAKNGKLTATVAAGSQIEFQWTTWPESHHGPVITYLAPCNGDCATVDKTTLKFVKIAAQGLIDGSNPPGVWASDELIANNNTWTVTIPASYAPGNYVLRHEIIALHSAFNLNGAQNYPQCFNIQITGGGSAQGSGTAGTSLYKNTDPGIWFDIYSDLSGGYPIPGP

SEQ ID NO: 2751 - protein, 244 aa, Aspergillus fumigatus
TLSKITSIAGLLASASLVAGHGFVSGIVADGKYYGGYLVNQYPYMSNPPDTIAWSTTATDLGFVDGTGYQSPDIICHRDAKNGKLTATVAAGSQIEFQWTKWPKSHHGPVITYLAPCNGDCATVDKTTLKFVKIAAQGLIDGSNPPGVWASDELIANNNTWTVTIPASYAPGNYVLRHEIIALHSAGNLNGAQNYPQCFNIQITGGGSAQGSGTAGTSLYKNTDPGIWFDIYSDLSGGYPIPGP

SEQ ID NO: 2752 - protein, 244 aa, Aspergillus fumigatus
TLSKITSIAGLLASASLVAGHGFVSGIVADGKYYGGYLVNQYPYMSNPPDTIAWSTTATDLGFVDGTGYQSPDIICHRDAKNGKLTATVAAGSQIEFQWTKWPESHHGPVITYLAPCNGDCATVDKTTLKFVKIAAQGLIDGSNPPGVWASDELIANNNTWTVTIPASYAPGNYVLRHEIIALHSAGNLNGAQNYPQCFNIQITGGGSAQGSGTAGTSLYKNTDPGIWFDIYSDLSGGYPIPGP

SEQ ID NO: 2753 - protein, 244 aa, Aspergillus fumigatus
TLSKITSIAGLLASASLVAGHGFVSGIVADGKYYGGYLVNQYPYMSNPPDTIAWSTTATDLGFVDGTGYQSPDIICHRDAKNGKLTATVAAGSQIEFQWTTWPESHHGPVITYLAPCNGDCATVDKTTLKFVKIAAQGLIDGSNPPGVWASDELIANNNTWTVTIPASYAPGNYVLRHEIIALHSAGNLNGAQNYPQCFNIQITGGGSAQGSGTAGTSLYKNTDPGIWFDIYGDLSGGYPIPGP

SEQ ID NO: 2754 - protein, 244 aa, Aspergillus fumigatus
TLSKITSIAGLLASASLVAGHGFVSGIVADGKYYGGYLVNQYPYMSNPPDTIAWSTTATDLGFVDGTGYQSPDIICHRDAKNGKLTATVAAGSQIEFQWTTWPESHHGPVITYLAPCNGDCATVDKTTLKFVKIAAQGLIDGSNPPGVWASDELIANNNTWTVTIPASYAPGNYVLRHEIIALHSAANLNGAQNYPQCFNIQITGGGSAQGSGTAGTSLYKNTDPGIKFDIYSDLSGGYPIPGP

SEQ ID NO: 2755 - protein, 244 aa, Thermoascus aurantiacus
SFSKIIATAGVLASASLVAGHGFVQNIVIDGKYYGGYLVNQYPYMSNPPEVIAWSTTATDLGFVDGTGYQTPDIICHRGAKPGKLTATVAAGSQIEFQWTTWPESHHGPLITYLAPCNGDCATVDKTTLKFVKIAAQGLIDGSNPPGVWADDEMIANNNTATVTIPASYAPGNYVLRHEIIALHSAGNLNGAQNYPQCFNIQITGGGSDNPAGTLGTALYHDTDPGILINIYQKLSSYIIPGPP

SEQ ID NO: 2756 - protein, 560 aa, Bacillus licheniformis; identical to SEQ ID NO: 16

SEQ ID NO: 2757 - protein, 560 aa, Bacillus licheniformis
EGVMSGGDGDKVAVGKDGMVATAHPLASKIGAEVLKKGGNAIDAAIAIQYALNVTEPMMSGIGGGGFMMVYDGETKETSIINSRERAPEGAKPDMFLDEDGKVIPFSERSRHGNAVGVPGTLKGLEAAHKKWGTKKMEDLISPSIKLAEEGFPIDSVLADAIKDHQDKLSKTAAKDIFLPDGEPLKEGDILVQKDLAKTFKLIRKEGSKAFYDGEIGRAIADVVQDFGGSMTPDDLSRYEVTTDKPIWGEYHGYDIASMPPPSSGGVFMLQMLKLIDDFHLSQYDPKSFEKYHLLAETMHLSYADRAAYAGDPEFVDVPLRGLLDPDYIKERQKLISLDSMNRDVKEGDPWKYEEGEPNYEIVPQPEDKTIGETTHFTVTDQWGNVVSYTTTIEQLFGTGILVPGYGLFLNNELTDFDAIPGGANEVQPNKRPLSSMTPTIVFKDEKPVLTVGSPGGTTIIASVFQTILNYFEYGMSLQDAIEEPRIYTNSLTSYRYESGMPEDVRRKLNDFGHKFGSNPVDIGNVQSIFIDRENKTFMGVADSSRNGTAVGVNIKTSAK

SEQ ID NO: 2758 - protein, 551 aa, Bacillus subtilis
GNKVAVGKDGMVATAHPLASEIGADVLKKGGNAVDAAVAIQYALNVTEPMMSGIGGGGFMMVYDGKTKETSIINSRERAPQGATPDMFLTDDGKVIPFAERSTHGNAVGVPGTVKGLEAALDKWGTRSMKELIEPSIQLAEDGFEIDSVLAKAIDDHQAKLKKTAAAPIFLPNDQPLEEGDLLVQPGLAKTFKLIAKKGSKAFYEGKVAKALANTVQDFGGTMTSKDIKRYEVKTDKPIWGDYKGYQLASMPPPSSGGVFMLQILKILDHFNLSQYDPKSFEKYQLLAETMHLSYADRAAYAGDPEFVDVPLKGLLDDDYISERASLIQLDQMNRSPKEGDPWAYEDEKNPSPIVPQPEDKTIGETTHFTVADQWGNVVSFTTTIEQLFGTGILVPEYGFFLNNELTDFDARPGGANEVQPNKRPLSSMTPTIIFKDGEPVMTVGSPGGTTIIASVSQTILNLLEYDMELQDAVEEPRIYTNSLTSYRYEVGVPLDVRTKLNDMGHQFGSSPIDIGNVQALLIDRKAGTFTGVADSTRNGTAVGVNLKVAA

SEQ ID NO: 2759 - protein, 551 aa, Synthetic construct
GNKVAVGKDGMVATAHPLASEIGADVLKKGGNAVDAAVAIQYALNVTEPMMSGIGGGGFMMVYDGKTKETSIINSRERAPQGATPDMFLTDDGKVIPFAERSTHGNAVGVPGTVKGLEAALDKWGTRSMKELIEPSIQLAEDGFEIDSVLAKAIDDHQAKLKKTAAAPIFLPNDQPLEEGDLLVQPGLAKTFKLIAKKGSKAFYEGKVAKALANTVQDFGGTMTSKDIKRYEVKTDKPIWGDYKGYQLASMPPPSSGGVFMLQILKILDHFNLSQYDPKSFEKYQLLAETMHLSYADRAAYAGDPEFVDVPLKGLLDDDYISERASLIQLDQMNRSPKEGDPWAYEDEKNPSPIVPQPEDKTIGETTHFPVADQWGNVVSFTTTIEQLFGTGILVPEYGFFLNNELTDFDARPGGANEVQPNKRPLSSMTPTIIFKDGEPVMTVGSPGGTTIIASVSQTILNLLEYDMELQDAVEEPRIYTNSLTSYRYEVGVPLDVRTKLNDMGHQFGSSPIDIGNVQALLIDRKAGTFTGVADSTRNGTAVGVNLKVAA

SEQ ID NO: 2760 - protein, 551 aa, Synthetic construct
GNKVAVGKDGMVATAHPLASEIGADVLKKGGNAVDAAVAIQYALNVTEPMMSGIGGGGFMMVYDGKTKETSIINSRERAPQGATPDMFLTDDGKVIPFAERSTHGNAVGVPGTVKGLEAALDKWGTRSMKELIEPSIQLAEDGFEIDSVLAKAIDDHQAKLKKTAAAPIFLPNDQPLEEGDLLVQPGLAKTFKLIAKKGSKAFYEGKVAKALANTVQDFGGTMTSKDIKRYEVKTDKPIWGDYKGYQLASMPPPSSGGVFMLQILKILDHFNLSQYDPKSFEKYQLLAETMHLSYADRAAYAGDPEFVDVPLKGLLDDDYISERASLIQLDQMNRSPKEGDPWAYEDEKNPSPIVPQPEDKTIGETTHFTVADQWGNVVSFTTTIEQLFGSGILVPEYGFFLNNELTDFDARPGGANEVQPNKRPLSSMTPTIIFKDGEPVMTVGSPGGTTIIASVSQTILNLLEYDMELQDAVEEPRIYTNSLTSYRYEVGVPLDVRTKLNDMGHQFGSSPIDIGNVQALLIDRKAGTFTGVADSTRNGTAVGVNLKVAA

SEQ ID NO: 2761 - protein, 551 aa, Bacillus subtilis subsp. subtilis str. 168
GNKVAVGKDGMVATAHPLASEIGADVLKKGGNAVDAAVAIQYALNVTEPMMSGIGGGGFMMVYDGKTKETSIINSRERAPQGATPDMFLTDDGKVIPFAERSTHGNAVGVPGTVKGLEAALDKWGTRSMKELIEPSIQLAEDGFEIDSVLAKAIDDHQAKLKKTAAAPIFLPNDQPLEEGDLLVQPGLAKTFKLIAKKGSKAFYEGKVAKALANTVQDFGGTMTSKDIKRYEVKTDKPIWGDYKGYQLASMPPPSSGGVFMLQILKILDHFNLSQYDPKSFEKYQLLAETMHLSYADRAAYAGDPEFVDVPLKGLLDDDYISERASLIQLDQMNRSPKEGDPWAYEDEKNPSPIVPQPEDKTIGETTHFTVADQWGNVVSFTCTIEQLFGTGILVPEYGFFLNNELTDFDARPGGANEVQPNKRPLSSMTPTIIFKDGEPVMTVGSPGGTTIIASVSQTILNLLEYDMELQDAVEEPRIYTNSLTSYRYEVGVPLDVRTKLNDMGHQFGSSPIDIGNVQALLIDRKAGTFTGVADSTRNGTAVGVNLKVAA

SEQ ID NO: 2762 - protein, 551 aa, Bacillus subtilis
GNKVAVGKDGMVATAHPLASEIGADVLKKGGNAVDAAVAIQYALNVTEPMMSGIGGGGFMMVYDGKTKETSIINSRERAPQGATPDMFLTDDGKVIPFAERSTHGNAVGVPGTVKGLEAALDKWGTRSMKELIEPSIQLAEDGFEIDSVLAKAIDDHQAKLKKTAAAPIFLPNDQPLEEGDLLVQPGLAKTFKLIAKKGSKAFYEGKVAKALANTVQDFGGTMTSKDIKRYEVKTDKPIWGDYKGYQLASMPPPSSGGVFMLQILKILDHFNLSQYDPKSFEKYQLLAETMHLSYADRAAYAGDPEFVDVPLKGLLDDDYISERASLIQLDQMNRSPKEGDPWAYEDEKNPSPIVPQPEDKTIGETTHFTVADQWGNVVSFCTTIEQLFGTGILVPEYGFFLNNELTDFDARPGGANEVQPNKRPLSSMTPDIIFKDGEPVMTVGSPGGTTIIASVSQTILNLLEYDMELQDAVEEPRIYTNSLTSYRYEVGVPLDVRTKLNDMGHQFGSSPIDIGNVQALLIDRKAGTFTGVADSTRNGTAVGVNLKVAA

SEQ ID NO: 2763 - protein, 546 aa, Bacillus subtilis
QVDVGKDGMVATAHPLASEIGADVLKKGGNAIDAAVAIQFALNVTEPMMSGIGGGGFMMVYDGKTKDTTIIDSRERAPAGATPDMFLDESGKAIPFSERVTKGTAVGVPGTLKGLEEALDKWGTRSMKQLITPSIKLAEKGFPIDSVLADAISDYQEKLSRTAAKDVFLPNGEPLKEGDTLIQKDLAKTFKLIRSNGTDAFYKGKFAKTLSDTVQDFGGSMTEKDLENYDITIDEPIWGDYQGYQIATTPPPSSGGIFLLQMLKILDDFNLSQYDVRSWEKYQLLAETMHLSYADRASYAGDPEFVNVPLKGLLHPDYIKERQQLINLDQVNKKPKAGDPWKYQEGSANYKQVEQPKDKVEGQTTHFTVADRWGNVVSYTTTIEQLFGTGIMVPDYGVILNNELTDFDAKPGGANEVQPNKRPLSSMTPTILFKDDKPVLTVGSPGGATIISSVLQTILYHIEYGMELKAAVEEPRIYTNSMSSYRYEDGVPKDVLSKLNGMGHKFGTSPVDIGNVQSISIDHENGTFKGVADSSRNGAAIGINLK

SEQ ID NO: 2764 - protein, 546 aa, Bacillus subtilis
QVDVGKDGMVATAHPLASEIGADVLKKGGNAIDAAVAIQFALNVTEPMMSGIGGGGFMMVYDGKTKDTTIIDSRERAPAGATPDMFLDENGKAIPFSERVTKGTAVGVPGTLKGLEEALDKWGTRSMKQLITPSIKLAEKGFPIDSVLAEAISDYQEKLSRTAAKDVFLPNGEPLKEGDTLIQKDLAKTFKLIRSKGTDAFYKGKFAKTLSDTVQDFGGSMTEKDLENYDITIDEPIWGDYQGYQIATTPPPSSGGIFLLQMLKILDHFNLSQYDVRSWEKYQLLAETMHLSYADRASYAGDPEFVNVPLKGLLHPDYIKERQQLINLDQVNKKPKAGDPWKYQEGSANYKQVEQPKDKVEGQTTHFTVADRWGNVVSYTTTIEQLFGTGIMVPDYGVILNNELTDFDAIPGGANEVQPNKRPLSSMTPTILFKDDKPVLTVGSPGGATIISSVLQTILYHIEYGMELKAAVEEPRIYTNSMSSYRYEDGVPKDVLSKLNGMGHKFGTSPVDIGNVQSISIDHENGTFKGVADSSRNGAAIGINLK

SEQ ID NO: 2765 - protein, 550 aa, Bacillus amyloliquefaciens
QVDVGKDGMVATAHPLASQIGADVLKKGGNAVDAAVAIQFALNVTEPMMSGIGGGGFMMVYDAKTKDTTIIDSRERAPAGATPDMFLDENGKAIPFSERVTKGTAVGVPGTLKGLEKALDKWGTRSMKQLITPSIKLASKGFPIDSVLADAISDYKDKLSHTAAKDVFLPDGEPLKEGDTLIQKDLAKTFTAIKYKGTKAFYDGAFSKKLAETVQEFGGSMTEKDIKNFNVTIDEPIWGDYQGYHIATAPPPSSGGVFLLQMLNLLDDFKLSQYDIRSWQKYQLLAETMHLAYADRAAFAGDPEFVNVPLKGLLNPDYINARRQLIDIDKVNKKPKAGDPWAYQEGSANYKQVKQPTDKQEGQTTHFTVTDRFGNVVSYTTTIEQLFGSGIMVPGYGVVLNNELTDFDAVPGGANEVQPNKRPLSSMTPTILFKNNEPVLTVGSPGGATIISSVLQTILNKVEYGMDLKAAVEEPRIYTNSMTSYRYEKGVPEEARTKLNEMGHKFGSSPVDIGNVQSILIDRENGTFTGVADSSRNGAAIGVNLKQYKK

SEQ ID NO: 2766 - protein, 550 aa, Bacillus amyloliquefaciens
QVDVGKDGMVATAHPLASQIGADVLKKGGNAIDAAVAIQFALNVTEPMMSGIGGGGFMMVYDAKTKDTTIIDSRERAPAGATPDMFLDENGKAIPFSERVTKGTAVGVPGTLKGLEKALDKWGTRSMKQLITPSIKLASKGFPIDSALADAISDYKDKLSHTAAKDVFLPDGEPLKEGDTLIQKDLAKTFTAIKYKGTKAFYDGAFSKKLAETVQEFGGSMTEKDIKNFNVTIDEPIWGDYQGYHIATAPPPSSGGVFLLQMLNLLDDFKLSQYDIRSWQKYQLLAETMHLAYADRAAFAGDPEFVNVPLKGLLNPDYINARRQLIDIDKVNKKPKAGDPWSYQEGSANYKQVEQPTDKQEGQTTHFTVTDRFGNVVSYTTTIEQLFGSGIMVPGYGVVLNNELTDFDAVPGGANEVQPNKRPLSSMTPTILFKNNEPVLTVGSPGGATIISSVLQTILNKVEYGMDLKAAVEEPRIYTNSMTSYRYEKGVPEEARTKLNEMGHKFGSSPVDIGNVQSILIDRENGTFTGVADSSRNGAAIGVNLKNYKK

SEQ ID NO: 2767 - protein, 546 aa, Bacillus subtilis
QVDVGKDGMVATAHALASEIGADVLKKGGNAIDAAVAIQFALNVTEPMMSGIGGGGFMMVYDGKTKDTTIIDSRERAPAGATPDMFLDENGKAIPFSERVTKGTAVGVPGTLKGLEEALDKWGTRSMKLLITLTIKLAEKGFPIDSVLADAISDYQEKLSRTAAKDVFLPNGEPLKEGDTLIQKDLAKTFKLIRSKGTDAFYKGKFAKTLSDTVQDFGGSMTEKDLENYDITIDEPIWGDYQGYQIATTPPPSSGGIFLLQMLKILDDFNLSQYDVRSWEKYQLLAETMHLSYADRASYAGDPEFVNVPLKGLLHPDYIKERQQLINLDQVNKKPKAGDPWKYQEGSANYKQVEQPKDKVEGQTTHFTVADRWGNVVSYTTTIEQLFGTGIMVPDYGVILNNELTDFDAIPGGANEVQPNKRPLSSMTPTILFKDDKPVLTVGSPGGATIISSVLQTILYHIEYGMGLKAAVEEPRIYTTSMSSYRYEDGVPKDVLSKLNGMGHRFGTSPVDIGNVQSISIDHENGTFKGVVISGSNDAAIGINLK

SEQ ID NO: 2768 - protein, 546 aa, Bacillus subtilis
QVDVGKDGMVATAHALASEIGADVLKKGGNAIDAAVAIQFALNVTEPMMSGIGGGGFMMVYDGKTKDTTIIDSRERAPAGATPDMFLDENGKAIPFSERVTKGTAVGVPGTLKGLEEALDKWGTRSMKLLITLTIKLAEKGFPIDSVLADAISDYQEKLSRTAAKDVFLPNGEPLKEGDTLIQKDLAKTFKLIRSKGTDAFYRGKFAKTLSDTVQDFGGSMTEKDLENYDITIDEPIWGDYQGYQIATTPPPSSGGIFLLQMLKILDDFNLSQYDVRSWEKYQLLAETMHLSYADRASYAGDPEFVNVPLKGLLHPDYIKERQQLINLDQVNKKPKAGDPWKYQEGSANYKQVEQPKDKVEGQTTHFTVADRWGNVVSYTTTIEQLFGTGIMVPDYGVILNNELTDFDAIPGGANEVQPNKRPLSSMTPTILFKDDKPVLTVGSPGGATIISSVLQTILYHIEYGMGLKAAVEEPRIYTTSMSSYRYEDGVPKDVLSKLNGMGHRFGTSPVDIGNVQSISIDHENGTFKGVVISGSNDAAIGINLK

SEQ ID NO: 2769 - protein, 550 aa, Bacillus subtilis
QVDVGKDGMVATAHPLASQIGADVLKKGGNAIDAAVAIQFALNVTEPMMSGIGGRGFMMVYDAKTKDTTIIDSRERAPAGATPDMFLDENAKAIPFSERVTKGTAVGVPGTLKGLEKALDKWGTRSMKQLITPSIKLASKGFPIDSVLADAISDYKDKLSHTAAKDVFLPDGEPLKEGDTLIQKDLAKTFTAIKYKGTKAFYDGAFSKKLAETVQEFGGSMTEKDIKNFNVTIDEPIWGDYQGYHIATAPPPSSGGVFLLQMLNLLDDFKLSQYDIRSWQKYQLLAETMHLAYADRAAFAGDPEFVNVPLKGLLNPDYINARRQLIDIDKVNKKPKAGDPWAYQERSANYKQVEQPTDKQEGQTTHFTVTDRFGNLVSYTTTIEQLFGSGIMVPGYGVVLNNELTDFDAVPGGANELQPNKRPLSSMTPTILFKNNEPVLTVGSPGGATIISSVLQTILNKVEYAMDLKAAVEEPRIYTNSMTSYRYEKGVPEEARTKLNEMGHKFGSSPVDIGNVQSILIDRENGTFTGVADSSRNGAAIGVNLKNYKK

SEQ ID NO: 2770 - protein, 314 aa, Aspergillus aculeatus
ASRTTAPSGAIVVAKSGGDYTTIGDAIDALSTSTTDTQTIFIEEGTYDEQVYLPAMTGKVIIYGQTENTDSYADNLVTITHAISYEDAGESDDLTATFRNKAVGSQVYNLNIANTCGQACHQALALSAWADQQGYYGCNFTGYQDTLLAQTGNQLYINSYIEGAVDFIFGQHARAWFQNVDIRVVEGPTSASITANGRSSETDTSYYVINKSTVAAKEGDDVAEGTYYLGRPWSEYARVVFQQTSMTNVINSLGWTEWSTSTPNTEYVTFGEYANTGAGSEGTRASFAEKLDAKLTITDILGSDYTSWVDTSYF

SEQ ID NO: 2771 - protein, 331 aa, Aspergillus aculeatus; identical to SEQ ID NO: 25

SEQ ID NO: 2772 - protein, 331 aa, Aspergillus aculeatus
MVKSVLASATFAVSATAASRTTAPSGAIVVAKSGGDYTTIGDAIDALSTSTTDTQTIFIEEGTYDEQVYLPAMTGKVIIYGQTENTDSYADNTVTITHAISYEDAGESDDTTATFRNKAVGSQVYNTNIANTCGQACHQALALSAWADQQGYYGCNFTGYQDTTTAQTGNQTYINSYIEGAVDFIFGQHARAWFQNVDIRVVEGPTSASITANGRSSETDTSYYVINKSTVAAKEGDDVAEGTYYTGRPWSEYARVVFQQTSMTNVINSTGWTEWSTSTPNTEYVTFGEYANQPAPAPRAPAHVAEKTDAKTTITDITGSDYTSWVDTSYF

SEQ ID NO: 2773 - protein, 329 aa, Aspergillus tubingensis
MVKSILASVLFAATALAASRMTAPSGAIVVAKSGGDYDTISAAVDALSTTSTETQTIFIEEGSYDEQVYIPALSGKLIVYGQTEDTTTYTSNLVNITHAIALADVDNDDETATLRNYAEGSAIYNLNIANTCGQACHQALAVSAYASEQGYYACQFTGYQDTLLAETGYQVYAGTYIEGAVDFIFGQHARAWFHECDIRVLEGPSSASITANGRSSESDDSYYVIHKSTVAAADGNDVSSGTYYLGRPWSQYARVCFQKTSMTDVINHLGWTEWSTSTPNTENVTFVEYGNTGTGAEGPRANFSSELTEPITISWLLGSDWEDWVDTSY

SEQ ID NO: 2774 - protein, 311 aa, Aspergillus niger
SRMTAPSGAIVVAKSGGDYDTISAAVDALSTTSTETQTIFIEEGSYDEQVYIPALSGKLIVYGQTEDTTTYTSNLVNITHAIALADVDNDDETATLRNYAEGSAIYNLNIANTCGQACHQALAVSAYASEQGYYACQFTGYQDTLLAETGYQVYAGTYIEGAVDFIFGQHARAWFHECDIRVLEGPSSASITANGRSSESDDSYYVIHKSTVAAADGNDVSSGTYYLGRPWSQYARVCFQKTSMTDVINHLGWTEWSTSTPNTENVTFVEYGNTGTGAEGPRANFSSELTEPITISWLLGSDWEDWVDTSY

SEQ ID NO: 2775 - protein, 329 aa, Aspergillus niger
MVKSILASVLFAATALAASRMTAPSGAIVVAKSGGDYDTISAAVDALSTTSTETQTIFIEEGSYDEQVYIPALSGKLIVYGQTEDTTTYTSNLVNITHAIALADVDNDDETATLRNYAEGSAIYNLNIANTCGQACHQALAVSAYASEQGYYACQFTGYQDTLLAETGYQVYAGTYIEGAVDFIFGQHARAWFHECDIRVLEGPSSASITANGRSSESDDSYYVIHKSTVAAADGNDVSSGTYYLGRPWSQYARVCFQKTSMTDVINHLGWTEWSTSTPNTENVTFVEYGNTGTGAKGPRANFSSELTEPITISWLLGSDWEDWVDTSY

SEQ ID NO: 2776 - protein, 329 aa, Aspergillus niger
MVKSILASVFFAATALAASRMTAPSGAIVVAKSGGDYDTISAAVDALSTTSTETQTIFIEEGSYDEQVYIPALSGKLIVYGQTEDTTTYTSNLVNITHAIALADVDNDDETATLRNYAEGSAIYNLNIANTCGQACHQALAVSAYATEQGYYACQFTGYQDTLLAETGYQVYAGTYIEGAVDFIFGQHARAWFHECDIRVLEGPSSASITANGRSSESDDSYYVIHKSTVAAADGNDVSSGTYYLGRPWSQYARVCFQKTSMTDVINHLGWTEWSTSTPNTENVTFVEYGNTGAGSKGPRANFSSELTEPISISTLLGSDWEDWVDTSY

SEQ ID NO: 2777 - protein, 312 aa, Aspergillus tubingensis
ASRMTAPSGAIVVAKSGGDYDTISAAVDALSTTSTETQTIFIEEGSYDEQVYIPALSGKLIVYGQTEDTTTYTSNLVNITHAIALADVDNDDETATLRNYAEGSAIYNLNIANTCGQACHQALAVSAYASEQGYYACQFTGYQDTLLAETGYQVYAGTYIEGAVDFIFGQHARAWFHECDIRVLEGPSSASITANGRSSESDDSYYVIHKSTVAAADGNDVSSGTYYLGRPWSQYARVCFQKTSMTDVINHLGWTEWSTSTPNTENVTFVEYGNTGTGAKGPRANFSSELTEPITISWLLGSDWEDWVDTSY

SEQ ID NO: 2778 - protein, 266 aa, Thermomyces lanuginosus
QDLFNQFNLFAQYSAAAYCGKNNDAPAGTNITCTGNACPEVEKADATFLYSFEDSGVGDVTGFLALDNTNKLIVLSFRGSRSIENWIGNLNFDLKEINDICSGCRGHDGFTSSWRSVADTLRQKVEDAVREHPDYRVVFTGHSLGGALATVAGADLRGNGYDIDVFSYGAPRVGNRAFAEFLTVQTGGTLYRITHTNDIVPRLPPREFGYSHSSPEYWIKSGTLVPVTRNDIVKIEGIDATGGNNQPNIPDIPAHLWYFGLIGTCL

SEQ ID NO: 2779 - protein, 289 aa, Thermomyces lanuginosus
MRSSLVLFFVSAWTALASPIRREVSQDLFNQFNLFAQYSAAAYCGKNNDAPAGTNITCTGNACPEVEKADATFLYSFEDSGVGDVTGFLALDNTNKLIVLSFRGSRSIENWIGNLNFDLKEINDICSGCRGHDGFTSSWRSVADTLRQKVEDAVREHPDYRVVFTGHSLGGALATVAGADLRGNGYDIDVFSYGAPRVGNRAFAEFLTVQTGGTLYRITHTNDIVPRLPPREGSHSSPEYWIKSGTLVPVTRNDIVKIEGIDATGGNNQPNIPDIPAHLWYFGLIGTCL

SEQ ID NO: 2780 - protein, 289 aa, Thermomyces lanuginosus
MRSSLVLFFVSAWTALASPIRREVSQDLFNQFNLFAQYSAAAYCGKNNDAPAGTNITCTGNACPEVEKADATFLYSFEDSGVGDVTGFLALDNTNKLIVLSFRGSRSIENWIGNLNFDLKEINDICSGCRGHDGFTSSWRSVADTLRQKVEDAVREHPDYRVVFTGHSLGGALATVAGADLRGNGYDIDVFSYGAPRVGNRAFAEFLTVQTGGTLYRITHTNDIVPRLPPFGYSHSSPEYWIKSGTLVPVTRNDIVKIEGIDATGGNNQPNIPDIPAHLWYFGLIGTCL

SEQ ID NO: 2781 - protein, 269 aa, Thermomyces lanuginosus [sequence omitted]

SEQ ID NO: 2782 - protein, 288 aa, Thermomyces lanuginosus
MRSSLVLFFVSAWTALASPIRREVSQDLFNQFNLFAQYSAAAYCGKNNDAPAGTNITCTGNACPEVEKADATFLYSFEDSGVGDVTGFLALDNTNKLIVLSFRGSRSIENWIGNLNFDLKEINDICSGCRGHDGFTSSWRSVADTLRQKVEDAVREHPDYRVVFTGHSLGGALATVAGADLRGNGYDIDVFSYGAPRVGNRAFAEFLTVQTGGTLYRITHTNDIVPRLPPREFGYSHSSPEYWIKSGTLVPVTRNDIVKIGATGGNNQPNIPDIPAHLWYFGLIGTCL

SEQ ID NO: 2783 - protein, 291 aa, Thermomyces lanuginosus; identical to SEQ ID NO: 17

SEQ ID NO: 2784 - protein, 290 aa, Thermomyces lanuginosus
MRSSLVLFFVSAWTALASPIRREVSQDLFNQFNLFAQYSAAAYCGKNNDAPAGTNITCTGNACPEVEKADATFLYSFEDSGVGDVTGFLALDNTNKLIVLSFRGSRSIENWIGNLNFDLKEINDICSGCRGHDGFTSSWRSVADTLRQKVEDAVREHPDYRVVFTGHSLGGALATVAGADLRGNGYDIDVFSYGAPRVGNRAFAEFLTVQTGGTLYRITHTNDIVPRLPPREFGYSHSSPEYWIKSGTLVVTRNDIVKIEGIDATGGNNQPNIPDIPAHLWYFGLIGTCL

SEQ ID NO: 2785 - protein, 194 aa, Humicola insolens; identical to SEQ ID NO: 19

SEQ ID NO: 2786 - protein, 315 aa, Cryphonectria parasitica; identical to SEQ ID NO: 22

SEQ ID NO: 2787 - protein, 290 aa, Thermomyces lanuginosus
MRSSLVLFFVSAWTALASPIRREVSQDLFNQFNLFAQYSAAAYCGKNNDAPAGTNITCTGNACPEVEKADATFLYSFEDSGVGDVTGFLALDNTNKLIVLSFRGSRSIENWIGNLNFDLKEINDICSGCRGHDGFTSSWRSVADTLRQKVEDAVREHPDYRVVFTGHSLGGALATVAGADLRGNGYDIDVFSYGAPRVGNRAFAEFLTVQTGGTLYRITHTNDIVPRLPPREFGYSHSSPEYWIKSGTLVPVTRNDIVKIEGIDATGGNNQPNIPDIPAHLWYFGLIGTC

SEQ ID NO: 2788 - protein, 273 aa, Thermomyces lanuginosus
SPIRREVSQDLFNQFNLFAQYSAAAYCGKNNDAPAGTNITCTGNACPEVEKADATFLYSFEDSGVGDVTGFLALDNTNKLIVLSFRGSRSIENWIGNLNFDLKEINDICSGCRGHDGFTSSWRSVADTLRQKVEDAVREHPDYRVVFTGHSLGGALATVAGADLRGNGYDIDVFSYGAPRVGNRAFAEFLTVQTGGTLYRITHTNDIVPRLPPREFGYSHSSPEYWIKSGTLVPVRRRDIVKIEGIDATGGNNQPNIPDIPAHLWYFGLIGTC

SEQ ID NO: 2789 - protein, 270 aa, Thermomyces lanuginosus
EVSQDLFNQFNLFAQYSAAAYCGKNNDAPAGTNITCTGNACPEVEKADATFLYSFEDSGVGDVTGFLALDNTNKLIVLSFRGSRSIENWIGNLNFDLKEINDICSGCRGHDGFTSSWRSVADTLRQKVEDAVREHPDYRVVFTGHSLGGALATVAGADLRGNGYDIDVFSYGAPRVGNRAFAEFLTVQTGGTLYRITHTNDIVPRLPPREFGYSHSSPEYWIKSRGTLVPVTRNDIVKIEGIDATGGNNQPNIPDIPAHLWYFGLIGTCL

SEQ ID NO: 2790 - protein, 270 aa, Thermomyces lanuginosus
EVSQDLFNQFNLFAQYSAAAYCGKNNDAPAGTNITCTGNACPEVEKADATFLYSFEDSGVGDVTGFLALDNTNKLIVLSFRGSRSIENWIGNLNFDLKEINDICSGCRGHDGFTSSWRSVADTLRQKVEDAVREHPDYRVVFTGHSLGGALATVAGADLRGNGYDIDVFSYGAPRVGNRAFAEFLTVQTGGTLYRITHTNDIVPRLPPREFGYSHSSPEYWIKSGTLRVPVTRNDIVKIEGIDATGGNNQPNIPDIPAHLWYFGLIGTCL

SEQ ID NO: 2791 - protein, 270 aa, Thermomyces lanuginosus
EVSQDLFNQFNLFAQYSAAAYCGKNNDAPAGTNITCTGNACPEVEKADATFLYSFEDSGVGDVTGFLALDNTNKLIVLSFRGSRSIENWIGNLNFDLKEINDICSGCRGHDGFTSSWRSVADTLRQKVEDAVREHPDYRVVFTGHSLGGALATVAGADLRGNGYDIDVFSYGAPRVGNRAFAEFLTVQTGGTLYRITHTNDIVPRLPPREFGYSHSSPEYWIKSGTLVPRVTRNDIVKIEGIDATGGNNQPNIPDIPAHLWYFGLIGTCL

SEQ ID NO: 2792 - protein, 270 aa, Thermomyces lanuginosus
EVSQDLFNQFNLFAQYSAAAYCGKNNDAPAGTNITCTGNACPEVEKADATFLYSFEDSGVGDVTGFLALDNTNKLIVLSFRGSRSIENWIGNLNFDLKEINDICSGCRGHDGFTSSWRSVADTLRQKVEDAVREHPDYRVVFTGHSLGGALATVAGADLRGNGYDIDVFSYGAPRVGNRAFAEFLTVQTGGTLYRITHTNDIVPRLPPREFGYSHSSPEYWIKSGTLVRPVTRNDIVKIEGIDATGGNNQPNIPDIPAHLWYFGLIGTCL

SEQ ID NO: 2793 - protein, 270 aa, Thermomyces lanuginosus
EVSQDLFNQFNLFAQYSAAAYCGKNNDAPAGTNITCTGNACPEVEKADATFLYSFEDSGVGDVTGFLALDNTNKLIVLSFRGSRSIENWIGNLNFDLKEINDICSGCRGHDGFTSSWRSVADTLRQKVEDAVREHPDYRVVFTGHSLGGALATVAGADLRGNGYDIDVFSYGAPRVGNRAFAEFLTVQTGGTLYRITHTNDIVPRLPPREFGYSHSSPEYWIKSGTLVPVTRRNDIVKIEGIDATGGNNQPNIPDIPAHLWYFGLIGTCL

SEQ ID NO: 2794 - protein, 270 aa, Thermomyces lanuginosus
EVSQDLFNQFNLFAQYSAAAYCGKNNDAPAGTNITCTGNACPEVEKADATFLYSFEDSGVGDVTGFLALDNTNKLIVLSFRGSRSIENWIGNLNFDLKEINDICSGCRGHDGFTSSWRSVADTLRQKVEDAVREHPDYRVVFTGHSLGGALATVAGADLRGNGYDIDVFSYGAPRVGNRAFAEFLTVQTGGTLYRITHTNDIVPRLPPREFGYSHSSPEYWIKSGTRLVPVTRNDIVKIEGIDATGGNNQPNIPDIPAHLWYFGLIGTCL

SEQ ID NO: 2795 - protein, 270 aa, Thermomyces lanuginosus
EVSQDLFNQFNLFAQYSAAAYCGKNNDAPAGTNITCTGNACPEVEKADATFLYSFEDSGVGDVTGFLALDNTNKLIVLSFRGSRSIENWIGNLNFDLKEINDICSGCRGHDGFTSSWRSVADTLRQKVEDAVREHPDYRVVFTGHSLGGALATVAGADLRGNGYDIDVFSYGAPRVGNRAFAEFLTVQTGGTLYRITHTNDIVPRLPPREFGYSHSSPEYWIKSGTLVPVTRNDIVKIEGIDATRGGNNQPNIPDIPAHLWYFGLIGTCL

SEQ ID NO: 2796 - protein, 268 aa, Thermomyces lanuginosus
VSQDLFNQFNLFAQYSAAAYCGKNNDAPAGTNITCTGNACPEVEKADATFLYSFEDSGVGDVTGFLALDNTNKLIVLSFRGSRSIENWIGNLNFDLKEINDICSGCRGHDGFTSSWRSVADTLRQKVEDAVREHPDYRVVFTGHSLGGALATVAGADLRGNGYDIDVFSYGAPRVGNRAFAEFLTVQTGGTLYRITHTNDIVPRLPPREFGYSHSSPEYWIKSGTLVPVTRNDIVKIEGIDATGGNNQPNIPDIPAHLWYFGLIGTCL

SEQ ID NO: 2797 - protein, 268 aa, Thermomyces lanuginosus
EVSQDLFNQFNLFAQYSAAAYCGKNNDAPAGTNITCTGNACPEVEKADATFLYSFEDSGVGDVTGFLALDNTNKLIVLSFRGSRSIENWIGNLNFDLKEINDICSGCRGHDGFTSSWRSVADTLRQKVEDAVREHPDYRVVFTGHSLGGALATVAGADLRGNGYDIDVFSYGAPRVGNRAFAEFLTVQTGGTLYRITHTNDIVPRLPPREFGYSHSSPEYWIKSGTLVPVTRNDIVKIEGIDATGGNNQPNIPDIPAHLWYFGLIGTC

SEQ ID NO: 2798 - protein, 267 aa, Thermomyces lanuginosus
SQDLFNQFNLFAQYSAAAYCGKNNDAPAGTNITCTGNACPEVEKADATFLYSFEDSGVGDVTGFLALDNTNKLIVLSFRGSRSIENWIGNLNFDLKEINDICSGCRGHDGFTSSWRSVADTLRQKVEDAVREHPDYRVVFTGHSLGGALATVAGADLRGNGYDIDVFSYGAPRVGNRAFAEFLTVQTGGTLYRITHTNDIVPRLPPREFGYSHSSPEYWIKSGTLVPVTRNDIVKIEGIDATGGNNQPNIPDIPAHLWYFGLIGTCL

SEQ ID NO: 2799 - protein, 271 aa, Thermomyces lanuginosus
EVSQDLFNQFNLFAQYSAAAYCGKNNDAPAGTNITCTGNACPEVEKADATFLYSFEDSGVGDVTGFLALDNTNKLIVLSFRGSRSIENWIGNLNFDLKEINDICSGCRGHDGFTSSWRSVADTLRQKVEDAVREHPDYRVVFTGHSLGGALATVAGADLRGNGYDIDVFSYGAPRVGNRAFAEFLTVQTGGTLYRITHTNDIVPRLPPREFGYSHSSPEYWIKSRGTLVRPVTRNDIVKIEGIDATGGNNQPNIPDIPAHLWYFGLIGTCL

SEQ ID NO: 2800 - protein, 271 aa, Thermomyces lanuginosus
EVSQDLFNQFNLFAQYSAAAYCGKNNDAPAGTNITCTGNACPEVEKADATFLYSFEDSGVGDVTGFLALDNTNKLIVLSFRGSRSIENWIGNLNFDLKEINDICSGCRGHDGFTSSWRSVADTLRQKVEDAVREHPDYRVVFTGHSLGGALATVAGADLRGNGYDIDVFSYGAPRVGNRAFAEFLTVQTGGTLYRITHTNDIVPRLPPREFGYSHSSPEYWIKSGTLVPVTRNDIVKIEGIDATRRGGNNQPNIPDIPAHLWYFGLIGTCL

SEQ ID NO: 2801 - protein, 271 aa, Thermomyces lanuginosus
EVSQDLFNQFNLFAQYSAAAYCGKNNDAPAGTNITCTGNACPEVEKADATFLYSFEDSGVGDVTGFLALDNTNKLIVLSFRGSRSIENWIGNLNFDLKEINDICSGCRGHDGFTSSWRSVADTLRQKVEDAVREHPDYRVVFTGHSLGGALATVAGADLRGNGYDIDVFSYGAPRVGNRAFAEFLTVQTGGTLYRITHTNDIVPRLPPREFGYSHSSPEYWIKSGTLVPRVTRRNDIVKIEGIDATGGNNQPNIPDIPAHLWYFGLIGTCL

SEQ ID NO: 2802 - protein, 271 aa, Thermomyces lanuginosus
EVSQDLFNQFNLFAQYSAAAYCGKNNDAPAGTNITCTGNACPEVEKADATFLYSFEDSGVGDVTGFLALDNTNKLIVLSFRGSRSIENWIGNLNFDLKEINDICSGCRGHDGFTSSWRSVADTLRQKVEDAVREHPDYRVVFTGHSLGGALATVAGADLRGNGYDIDVFSYGAPRVGNRAFAEFLTVQTGGTLYRITHTNDIVPRLPPREFGYSHSSPEYWIKSGTLVPVTRRRNDIVKIEGIDATGGNNQPNIPDIPAHLWYFGLIGTCL

SEQ ID NO: 2803 - protein, 275 aa, Synthetic construct
ASPIRREVSQDLFNQFNLFAQYSAAAYCGKNNDAPAGTNITCTGNACPEVEKADATFLYSFEDSGVGDVTGFLALDNTNKLIVLSFRGSRSIENWIGNLNFDLKEINDICSGCRGHDGFTSSWRSVADTLRQKVEDAVREHPDYRVVFTGHSLGGALATVAGADLRGNGYDIDVFSYGAPRVGNRAFAEFLTVQTGGTLYRITHTNDIVPRLPPREFGYSHSSPEYWIKSGTLVPVTRNDIVKIEGIDATGGNNQPNIPDIPAHLWYFGLIGTCL

SEQ ID NO: 2804 - protein, 274 aa, Haloquadratum walsbyi DSM 16790
SPIRREVSQDLFNQFNLFAQYSAAAYCGKNNDAPAGTNITCTGNACPEVEKADATFLYSFEDSGVGDVTGFLALDNTNKLIVLSFRGSRSIENWIGNLNFDLKEINDICSGCRGHDGFTSSWRSVADTLRQKVEDAVREHPDYRVVFTGHSLGGALATVAGADLRGNGYDIDVFSYGAPRVGNRAFAEFLTVQTGGTLYRITHTNDIVPRLPPREFGYSHSSPEYWIKSGTLVPVTRNDIVKIEGIDATGGNNQPNIPDIPAHLWYFGLIGTCL

SEQ ID NO: 2805 - protein, 291 aa, Thermomyces lanuginosus
MRSSLVLFFVSAWTALASPIRREVSQDLFNQFNLFAQYSAAAYCGKNNDAPAGTNITCTGNACPEVEKADATFLYSFEDSGVGDVTGFLALDNTNKLIVLSFRGSRSIENWIGNLNFDLKEINDICSGCRGHDGFTSSWRSVADTLRQKVEDAVREHPDYRVVFTGHSLGGALATVAGADLRGNGYDIDVFSYGAPRVGNRAFAEFLTVQTGGTLYRITHTNDIVPRLPPREFGYSHSSPEYWIKSGTLVPVTRNDIVKIEGIDATGGNNQPNIPDTPAHLWYFGLIGTCL

SEQ ID NO: 2806 - protein, 291 aa, Synthetic construct
MRSSLVLFFVSAWTALASPIRREVSQDLFNQFNLFAQYSAAAYCGKNNDAPAGTNITCTGNACPEVEKADATFLYSFEDSGVGDVTGFLALDNTNKLIVLSFRGSRSIENWIGNLNFDLKEINDICSGCRGHDGFTSSWRSVADTLRQKVEDAVREHPDYRVVFTGHSLGGALATVAGADLRGNGYDIDVFSYGAPRVGNRAFAEFLTVQTGGTLYRITHTNDIVPRPPPREFGYSHSSPEYWIKSGTLVPVTRNDIVKIEGIDATGGNNQPNIPDIPAHLWYFGLIGTCL

SEQ ID NO: 2807 - protein, 291 aa, Thermomyces lanuginosus
MRSSLVLFFVSAWTALASPIRREVSQDLFNQFNLFAQYSAAAYCGKNNDAPAGTNITCTGNACPEVEKADATFLYSFEDSGVGDVTGFLALDNTNKLIVLSFRGSRSIENWIGNLNFDLKEINDICSGCRGHDGFTSSWRSVADTLRQKVEDAVREHPDYRVVFTGHSLGGALATVAGADLRGNGYDIDVFSYGAPRVGNRAFAEFLTVQTGGTLYRITHTNDIVPRLPPREFGYSHPSPEYWIKSGTLVPVTRNDIVKIEGIDATGGNNQPNIPDIPAHLWYFGLIGTCL

SEQ ID NO: 2808 - protein, 291 aa, Synthetic construct
MRSSLVLFFVSAWTALASPIRREVSQDLFNQFNLFAQYSAAAYCGKNNDAPAGTNITCTGNACPEVEKADATFLYSFEDSGVGDVTGFLALDNTNKLIVLSFRGSRSIENWIGNLNFDLKEINDICSGCRGHDGFTSSWRSVADTLRQKVEDAVREHPDYRVVFTGHSLGGALATVAGADLRGNGYDIDVFSYGAPRVGNRAFAEFLTVQTGGTLYRITHTNDIVPREPPREFGYSHSSPEYWIKSGTLVPVTRNDIVKIEGIDATGGNNQPNIPDIPAHLWYFGLIGTCL

SEQ ID NO: 2809 - protein, 291 aa, Thermomyces lanuginosus
MRSSLVLFFVSAWTALASPIRREVSQDLFNQFNLFAQYSAAAYCGKNNDAPAGTNITCTGNACPEVEKADATFLYSFEDSGVGDVTGFLALDNTNKLIVLSFRGSRSIENWIDNLNFDLKEINDICSGCRGHDGFTSSWRSVADTLRQKVEDAVREHPDYRVVFTGHSLGGALATVAGADLRGNGYDIDVFSYGAPRVGNRAFAEFLTVQTGGTLYRITHTNDIVPRLPPREFGYSHSSPEYWIKSGTLVPVTRNDIVKIEGIDATGGNNQPNIPDIPAHLWYFGLIGTCL

SEQ ID NO: 2810 - protein, 291 aa, Thermomyces lanuginosus
MRSSLVLFFVSAWTALASPIRREVSQDLFNQFNLFAQYSAAAYCGKNNDAPAGTNITCTGNACPEVEKADATFLYSFEDSGVGDVTGFLALDNTNKLIVLSFRGSRSIENWIANLNFDLKEINDICSGCRGHDGFTSSWRSVADTLRQKVEDAVREHPDYRVVFTGHSLGGALATVAGADLRGNGYDIDVFSYGAPRVGNRAFAEFLTVQTGGTLYRITHTNDIVPRLPPREFGYSHSSPEYWIKSGTLVPVTRNDIVKIEGIDATGGNNQPNIPDIPAHLWYFGLIGTCL

SEQ ID NO: 2811 - protein, 291 aa, Thermomyces lanuginosus
MRSSLVLFFVSAWTALASPIRREVSQDLFNQFNLFAQYSAAAYCGKNNDAPAGTNITCTGNACPEVEKADATFLYSFEDSGVGDVTGFLALDNTNKLIVLSFRGSRSIENWTGNLNFDLKEINDICSGCRGHDGFTSSWRSVADTLRQKVEDAVREHPDYRVVFTGHSLGGALATVAGADLRGNGYDIDVFSYGAPRVGNRAFAEFLTVQTGGTLYRITHTNDIVPRLPPREFGYSHSSPEYWIKSGTLVPVTRNDIVKIEGIDATGGNNQPNIPDIPAHLWYFGLIGTCL

SEQ ID NO: 2812 - protein, 291 aa, Synthetic construct
MRSSLVLFFVSAWTALASPIRREVSQDLFNQFNLFAQYSAAAYCGKNNDAPAGTNITCTGNACPEVEKADATFLYSFEDSGVGDVTGFLALDNTNKLIVLSFRGSRSIENWIGNLNFMLKEINDICSGCRGHDGFTSSWRSVADTLRQKVEDAVREHPDYRVVFTGHSLGGALATVAGADLRGNGYDIDVFSYGAPRVGNRAFAEFLTVQTGGTLYRITHTNDIVPRLPPREFGYSHSSPEYWIKSGTLVPVTRNDIVKIEGIDATGGNNQPNIPDIPAHLWYFGLIGTCL

SEQ ID NO: 2813 - protein, 291 aa, Synthetic construct
MRSSLVLFFVSAWTALASPIRREVSQDLFNQFNLFAQYSAAAYCGKNNDAPAGTNITCTGNACPEVEKADATFLYSFEDSGVGDVTGFLALDNTNKLIVLSFRGSRSIENWIGNLNFDLKEINDICSGCRGHDGFTSSWRSVADTLRQKVEDAVREHPDYRVVFTGHSLGGALATVAGADLRGNGYDIDVFSYGAPRVGNRAFAEFLTVQTGGTLYRITHTNDIVPRMPPREFGYSHSSPEYWIKSGTLVPVTRNDIVKIEGIDATGGNNQPNIPDIPAHLWYFGLIGTCL

SEQ ID NO: 2814 - protein, 291 aa, Thermomyces lanuginosus
MRSSLVLFFVSAWTALASPIRREVSQDLFNQFNLFAQYSAAAYCGKNNDAPAGTNITCTGNACPEVEKADATFLYSFEDSGVGDVTGFLALDNTNKLIVLSFRGSRSIENWIGNLNFDLKEINDICSGCRGHDGFTSSWRSVADTLRQKVEDAVREHPDYRVVFTGHSLGGALATVAGADLRGNGYDIDVFSYGAPRVGNRAFAEFLTVQTGGTLYRITHTNDLVPRLPPREFGYSHSSPEYWIKSGTLVPVTRNDIVKIEGIDATGGNNQPNIPDIPAHLWYFGLIGTCL

SEQ ID NO: 2815 - protein, 291 aa, Synthetic construct
MRSSLVLFFVSAWTALASPIRREVSQDLFNQFNLFAQYSAAAYCGKNNDAPAGTNITCTGNACPEVEKADATFLYSFEDSGVGDVTGFLALDNTNKLIVLSFRGSRSIENWIGNLNFDLKEINDICSGCRGHDGFTSSWRSVADTLRQKVEDAVREHPDYRVVFTGHSLGGALATVAGADLRGNGYDIDVFSYGAPRVGNRAFAEFLTVQTGGTLYRITHTNDIVPRYPPREFGYSHSSPEYWIKSGTLVPVTRNDIVKIEGIDATGGNNQPNIPDIPAHLWYFGLIGTCL

SEQ ID NO: 2816 - protein, 291 aa, Synthetic construct
MRSSLVLFFVSAWTALASPIRREVSQDLFNQFNLFAQYSAAAYCGKNNDAPAGTNITCTGNACPEVEKADATFLYSFEDSGVGDVTGFLALDNTNKLIVLSFRGSRSIENWIGNLNFFLKEINDICSGCRGHDGFTSSWRSVADTLRQKVEDAVREHPDYRVVFTGHSLGGALATVAGADLRGNGYDIDVFSYGAPRVGNRAFAEFLTVQTGGTLYRITHTNDIVPRLPPREFGYSHSSPEYWIKSGTLVPVTRNDIVKIEGIDATGGNNQPNIPDIPAHLWYFGLIGTCL

SEQ ID NO: 2817 - protein, 291 aa, Thermomyces lanuginosus
MRSSLVLFFVSAWTALASPIRREVSQDLFNQFNLFAQYSAAAYCGKNNDAPAGTNITCTGNACPEVEKADATFLYSFEDSGVGDVTGFLALDNTNKLIVLSFRGSRSIENWIPNLNFDLKEINDICSGCRGHDGFTSSWRSVADTLRQKVEDAVREHPDYRVVFTGHSLGGALATVAGADLRGNGYDIDVFSYGAPRVGNRAFAEFLTVQTGGTLYRITHTNDIVPRLPPREFGYSHSSPEYWIKSGTLVPVTRNDIVKIEGIDATGGNNQPNIPDIPAHLWYFGLIGTCL

SEQ ID NO: 2818 - protein, 291 aa, Synthetic construct
MRSSLVLFFVSAWTALASPIRREVSQDLFNQFNLFAQYSAAAYCGKNNDAPAGTNITCTGNACPEVEKADATFLYSFEDSGVGDVTGFLALDNTNKLIVLSFRGSRSIENWIGNLNFDLKEINDICSGCRGHDGFTSSWRSVADTLRQKVEDAVREHPDYRVVFTGHSLGGALATVAGADLRGNGYDIDVFSYGAPRVGNRAFAEFLTVQTGGTLYRITHTNDIVPRDPPREFGYSHSSPEYWIKSGTLVPVTRNDIVKIEGIDATGGNNQPNIPDIPAHLWYFGLIGTCL

SEQ ID NO: 2819 - protein, 291 aa, Thermomyces lanuginosus
MRSSLVLFFVSAWTALASPIRREVSQDLFNQFNLFAQYSAAAYCGKNNDAPAGTNITCTGNACPEVEKADATFLYSFEDSGVGDVTGFLALDNTNKLIVLSFRGSRSIENWIGNLNFDLKKINDICSGCRGHDGFTSSWRSVADTLRQKVEDAVREHPDYRVVFTGHSLGGALATVAGADLRGNGYDIDVFSYGAPRVGNRAFAEFLTVQTGGTLYRITHTNDIVPRLPPREFGYSHSSPEYWIKSGTLVPVTRNDIVKIEGIDATGGNNQPNIPDIPAHLWYFGLIGTCL

SEQ ID NO: 2820 - protein, 291 aa, Synthetic construct
MRSSLVLFFVSAWTALASPIRREVSQDLFNQFNLFAQYSAAAYCGKNNDAPAGTNITCTGNACPEVEKADATFLYSFMDSGVGDVTGFLALDNTNKLIVLSFRGSRSIENWIGNLNFDLKEINDICSGCRGHDGFTSSWRSVADTLRQKVEDAVREHPDYRVVFTGHSLGGALATVAGADLRGNGYDIDVFSYGAPRVGNRAFAEFLTVQTGGTLYRITHTNDIVPRLPPREFGYSHSSPEYWIKSGTLVPVTRNDIVKIEGIDATGGNNQPNIPDIPAHLWYFGLIGTCL

SEQ ID NO: 2821 - protein, 291 aa, Synthetic construct
MRSSLVLFFVSAWTALASPIRREVSQDLFNQFNLFAQYSAAAYCGKNNDAPAGTNITCTGNACPEVEKADATFLYSFEDSGVGDVTGFLALDNTNKLIVLSFRGSRSIENWIGNLNFDLKEINDICSGCRGHDGFTSSWRSVADTLRQKVEDAVREHPDYRVVFTGHSLGGALATVAGADLRGNGYDIDVFSYGAPRVGNRAFAEFLTVQTGGTLYRITHTNDIVPRLPPREFGYSHSSPEYWIKSGTLVPVTRNDIVKIEGIDATGGNNQPNIPDIPAHHWYFGLIGTCL

SEQ ID NO: 2822 - protein, 291 aa, Thermomyces lanuginosus
MRSSLVLFFVSAWTALASPIRREVSQDLFNQFNLFAQYSAAAYCGKNNDAPAGTNITCTGNACPEVEKADATFLYSFEDSGVGDVTGFLALDNTNKLIVLSFRGSRSIENWIGNLNFDLKEINDICSGCRGHDGFTSSWRSVADTLRQKVEDAVREHPDYRVVFTGHSLGGALATVAGADLRGNGYDIDVFSYGAPRVGNRAFAEFLTVQTGGTLYRITHTNDIVPRLPPRAFGYSHSSPEYWIKSGTLVPVTRNDIVKIEGIDATGGNNQPNIPDIPAHLWYFGLIGTCL

SEQ ID NO: 2823 - protein, 291 aa, Synthetic construct
MRSSLVLFFVSAWTALASPIRREVSQDLFNQFNLFAQYSAAAYCGKNNDAPAGTNITCTGNACPEVEKADATFLYSFEDSGVGDVTGFLALDNTNKLIVLSFRGSRSIENWIGNLNFDLKEINDICSGCRGHDGFTSSWRSVADTLRQKVEDAVREHPDYRVVFTGHSLGGALATVAGADLRGNGYDIDVFSYGAPRVGNRAFAEFLTVQTGGTLYRITHTNDIVPRKPPREFGYSHSSPEYWIKSGTLVPVTRNDIVKIEGIDATGGNNQPNIPDIPAHLWYFGLIGTCL

SEQ ID NO: 2824 - protein, 291 aa, Thermomyces lanuginosus
MRSSLVLFFVSAWTALASPIRREVSQDLFNQFNLFAQYSAAAYCGKNNDAPAGTNITCTGNACPEVEKADATFLYSFEDSGVGDVTGFLALDNTNKLIVLSFRGSRSIENWIGNLNFGLKEINDICSGCRGHDGFTSSWRSVADTLRQKVEDAVREHPDYRVVFTGHSLGGALATVAGADLRGNGYDIDVFSYGAPRVGNRAFAEFLTVQTGGTLYRITHTNDIVPRLPPREFGYSHSSPEYWIKSGTLVPVTRNDIVKIEGIDATGGNNQPNIPDIPAHLWYFGLIGTCL

SEQ ID NO: 2825 - protein, 291 aa, Synthetic construct
MRSSLVLFFVSAWTALASPIRREVSQDLFNQFNLFAQYSAAAYCGKNNDAPAGTNITCTGNACPEVEKADATFLYSFEDSGVGDVTGFLALDNTNKLIVLSFRGSRSIENWIGNLNFDLKEINDICSGCRGHDGFTSSWRSVADTLRQKVEDAVREHPDYRVVFTGHSLGGALATVAGADLRGNGYDIDVFSYGAPRVGNRAFAEFLTVQTGGTLYRITHTNDIVPRFPPREFGYSHSSPEYWIKSGTLVPVTRNDIVKIEGIDATGGNNQPNIPDIPAHLWYFGLIGTCL

SEQ ID NO: 2826 - protein, 291 aa, Synthetic construct
MRSSLVLFFVSAWTALASPIRREVSQDLFNQFNLFAQYSAAAYCGKNNDAPAGTNITCTGNACPEVEKADATFLYSFEDSGVGDVTGFLALDNTNKLIVLSFRGSRSIENWIGNLNFDLKEINDICSGCRGHDGFTSSWRSVADTLRQKVEDAVREHPDYRVVFTGHSLGGALATVAGADLRGNGYDIDVFSYGAPRVGNRAFAEFLTVQTGGTLYRITHTNDIVPRLPPREFGYSHSSPEYWIKSGTLVPVTRNDIVKIEGIDATGGNNQPNIPDIPAHYWYFGLIGTCL

SEQ ID NO: 2827 - protein, 291 aa, Thermomyces lanuginosus
MRSSLVLFFVSAWTALASPIRREVSQDLFNQFNLFAQYSAAAYCGKNNDAPAGTNITCEGNACPEVEKADATFLYSFEDSGVGDVTGFLALDNTNKLIVLSFRGSRSIENWIGNLNFDLKEINDICSGCRGHDGFTSSWRSVADTLRQKVEDAVREHPDYRVVFTGHSLGGALATVAGADLRGNGYDIDVFSYGAPRVGNRAFAEFLTVQTGGTLYRITHTNDIVPRLPPREFGYSHSSPEYWIKSGTLVPVTRNDIVKIEGIDATGGNNQPNIPDIPAHLWYFGLIGTCL

SEQ ID NO: 2828 - protein, 291 aa, Synthetic construct
MRSSLVLFFVSAWTALASPIRREVSQDLFNQFNLFAQYSAAAYCGKNNDAPAGTNITCTGNACPEVEKADATFLYSFEDSGVGDVTGFLALDNTNKLIVLSFRGSRSIENWIGNLNFDLKEINDICSGCRGHDGFTSSWRSVADTLRQKVEDAVREHPDYRVVFTGHSLGGALATVAGADLRGNGYDIDVFSYGAPRVGNRAFAEFLTVQTGGTLYRITHTNDIVPRHPPREFGYSHSSPEYWIKSGTLVPVTRNDIVKIEGIDATGGNNQPNIPDIPAHLWYFGLIGTCL

SEQ ID NO: 2829 - protein, 291 aa, Synthetic construct
MRSSLVLFFVSAWTALASPIRREVSQDLFNQFNLFAQYSAAAYCGKNNDAPAGTNITCTGNACPEVEKADATFLYSFEDSGVGDVTGFLALDNTNKLIVLSFRGSRSIENWIGNLNFYLKEINDICSGCRGHDGFTSSWRSVADTLRQKVEDAVREHPDYRVVFTGHSLGGALATVAGADLRGNGYDIDVFSYGAPRVGNRAFAEFLTVQTGGTLYRITHTNDIVPRLPPREFGYSHSSPEYWIKSGTLVPVTRNDIVKIEGIDATGGNNQPNIPDIPAHLWYFGLIGTCL

SEQ ID NO: 2830 - protein, 291 aa, Synthetic construct
MRSSLVLFFVSAWTALASPIRREVSQDLFNQFNLFAQYSAAAYCGKNNDAPAGTNITCTGNACPEVEKADATFLYSFEDSGVGDVTGFLALDNTNKLIVLSFRGSRSIENWIGNLNFCLKEINDICSGCRGHDGFTSSWRSVADTLRQKVEDAVREHPDYRVVFTGHSLGGALATVAGADLRGNGYDIDVFSYGAPRVGNRAFAEFLTVQTGGTLYRITHTNDIVPRLPPREFGYSHSSPEYWIKSGTLVPVTRNDIVKIEGIDATGGNNQPNIPDIPAHLWYFGLIGTCL

SEQ ID NO: 2831 - protein, 291 aa, Synthetic construct
MRSSLVLFFVSAWTALASPIRREVSQDLFNQFNLFAQYSAAAYCGKNNDAPAGTNITCTGNACPEVEKADATFLYSFEDSGVGDVTGFLALDNTNKLIVLSFRGSRSIENWIGNLNFDLKEINDICSGCRGHDGFTSSWRSVADTLRQKVEDAVREHPDYRVVFTGHSLGGALATVAGADLRGNGYDIDVFSYGAPRVGNRAFAEFLTVQTGGTLYRITHTNDIVPRLPPREFGYSHSSPEYWIKSGTLVPVTRNDIVKIEGIDATGGNNQPNIPDIPAHMWYFGLIGTCL

SEQ ID NO: 2832 - protein, 291 aa, Thermomyces lanuginosus
MRSSLVLFFVSAWTALASPIRREVSQDLFNQFNLFAQYSAAAYCGKNNDAPAGTNITCNGNACPEVEKADATFLYSFEDSGVGDVTGFLALDNTNKLIVLSFRGSRSIENWIGNLNFDLKEINDICSGCRGHDGFTSSWRSVADTLRQKVEDAVREHPDYRVVFTGHSLGGALATVAGADLRGNGYDIDVFSYGAPRVGNRAFAEFLTVQTGGTLYRITHTNDIVPRLPPREFGYSHSSPEYWIKSGTLVPVTRNDIVKIEGIDATGGNNQPNIPDIPAHLWYFGLIGTCL

SEQ ID NO: 2833 - protein, 291 aa, Thermomyces lanuginosus
MRSSLVLFFVSAWTALASPIRREVSQDLFNQFNLFAQYSAAAYCGKNNDAPAGTNITCTGNACPEVEKADATFLYSFEDSGVGDVTGFLALDNTNKLIVLSFRGSRSIENWIHNLNFDLKEINDICSGCRGHDGFTSSWRSVADTLRQKVEDAVREHPDYRVVFTGHSLGGALATVAGADLRGNGYDIDVFSYGAPRVGNRAFAEFLTVQTGGTLYRITHTNDIVPRLPPREFGYSHSSPEYWIKSGTLVPVTRNDIVKIEGIDATGGNNQPNIPDIPAHLWYFGLIGTCL

SEQ ID NO: 2834 - protein, 291 aa, Thermomyces lanuginosus
MRSSLVLFFVSAWTALASPIRREVSQDLFNQFNLFAQYSAAAYCGKNNDAPAGTNITCTGLACPEVEKADATFLYSFEDSGVGDVTGFLALDNTNKLIVLSFRGSRSIENWIGNLNFDLKEINDICSGCRGHDGFTSSWRSVADTLRQKVEDAVREHPDYRVVFTGHSLGGALATVAGADLRGNGYDIDVFSYGAPRVGNRAFAEFLTVQTGGTLYRITHTNDIVPRLPPREFGYSHSSPEYWIKSGTLVPVTRNDIVKIEGIDATGGNNQPNIPDIPAHLWYFGLIGTCL

SEQ ID NO: 2835 - protein, 291 aa, Bacillus sp.
MRSSLVLFFVSAWTALASPIRREVSQDLFNQFNLFAQYSAAAYCGKNNDAPAGTNITCTGNACPEVEKADATFLYSFEDSGVGDVTGFLALDNTNKLIVLSFRGSRSIENWIGNLNFLLKEINDICSGCRGHDGFTSSWRSVADTLRQKVEDAVREHPDYRVVFTGHSLGGALATVAGADLRGNGYDIDVFSYGAPRVGNRAFAEFLTVQTGGTLYRITHTNDIVPRLPPREFGYSHSSPEYWIKSGTLVPVTRNDIVKIEGIDATGGNNQPNIPDIPAHLWYFGLIGTCL

SEQ ID NO: 2836 - protein, 291 aa, Thermomyces lanuginosus
MRSSLVLFFVSAWTALASPIRREVSQDLFNQFNLFAQYSAAAYCGKNNDAPAGTAITCTGNACPEVEKADATFLYSFEDSGVGDVTGFLALDNTNKLIVLSFRGSRSIENWIGNLNFDLKEINDICSGCRGHDGFTSSWRSVADTLRQKVEDAVREHPDYRVVFTGHSLGGALATVAGADLRGNGYDIDVFSYGAPRVGNRAFAEFLTVQTGGTLYRITHTNDIVPRLPPREFGYSHSSPEYWIKSGTLVPVTRNDIVKIEGIDATGGNNQPNIPDIPAHLWYFGLIGTCL

SEQ ID NO: 2837 - protein, 291 aa, Thermomyces lanuginosus
MRSSLVLFFVSAWTALASPIRREVSQDLFNQFNLFAQYSAAAYCGKNNDAPAGTNITCTGNACPEVEKADATFLYSFEDSGVGDVTGFLALDNTNKLIVLSFRGSRSIENWIGNLNKDLKEINDICSGCRGHDGFTSSWRSVADTLRQKVEDAVREHPDYRVVFTGHSLGGALATVAGADLRGNGYDIDVFSYGAPRVGNRAFAEFLTVQTGGTLYRITHTNDIVPRLPPREFGYSHSSPEYWIKSGTLVPVTRNDIVKIEGIDATGGNNQPNIPDIPAHLWYFGLIGTCL

SEQ ID NO: 2838 - protein, 291 aa, Thermomyces lanuginosus
MRSSLVLFFVSAWTALASPIRREVSQDLFNQFNLFAQYSAAAYCGKNNDAPAGTNITCHGNACPEVEKADATFLYSFEDSGVGDVTGFLALDNTNKLIVLSFRGSRSIENWIGNLNFDLKEINDICSGCRGHDGFTSSWRSVADTLRQKVEDAVREHPDYRVVFTGHSLGGALATVAGADLRGNGYDIDVFSYGAPRVGNRAFAEFLTVQTGGTLYRITHTNDIVPRLPPREFGYSHSSPEYWIKSGTLVPVTRNDIVKIEGIDATGGNNQPNIPDIPAHLWYFGLIGTCL

SEQ ID NO: 2839 - protein, 291 aa, Synthetic construct
MRSSLVLFFVSAWTALASPIRREVSQDLFNQFNLFAQYSAAAYCGKNNDAPAGTNITCTGNACPEVEKADATFLYSFEDSGVGDVTGFLALDNTNKLIVLSFRGSRSIENWIGNLNFDLKEINDICSGCRGHDGFTSSWRSVADTLRQKVEDAVREHPDYRVVFTGHSLGGALATVAGADLRGNGYDIDVFSYGAPRVGNRAFAEFLTVQTGGTLYRITHTNDIVPRLPPREFGYSHSSPEYWIKSGTLVPVTRNDIVKIEGIDATGGNNQPNIPDIPAHDWYFGLIGTCL

SEQ ID NO: 2840 - protein, 291 aa, Thermomyces lanuginosus
MRSSLVLFFVSAWTALASPIRREVSQDLFNQFNLFAQYSAAAYCGKNNDAPAGTNITCTGNACPEVEKADATFLYSFEDSGVGDVTGFLALDNTNKLIVLSFRGSRSIENWIGNLNFDLKEINDICSGCRGHDGFTSSWRSVADTLRQKVEDAVREHPDYRVVFTGHSLGGALATVAGADLRGNGYDIDVFSYGAPRVGNRAFAEFLTVQTGGTLYRITHTNDIVPRLPPREFGYSHSSPEYWIKSGTLVPVTRNDIVKIEGIDATGGNNQRNIPDIPAHLWYFGLIGTCL

SEQ ID NO: 2841 - protein, 291 aa, Thermomyces lanuginosus
MRSSLVLFFVSAWTALASPIRREVSQDLFNQFNLFAQYSAAAYCGKNNDAPAGTNITCTGMACPEVEKADATFLYSFEDSGVGDVTGFLALDNTNKLIVLSFRGSRSIENWIGNLNFDLKEINDICSGCRGHDGFTSSWRSVADTLRQKVEDAVREHPDYRVVFTGHSLGGALATVAGADLRGNGYDIDVFSYGAPRVGNRAFAEFLTVQTGGTLYRITHTNDIVPRLPPREFGYSHSSPEYWIKSGTLVPVTRNDIVKIEGIDATGGNNQPNIPDIPAHLWYFGLIGTCL

SEQ ID NO: 2842 - protein, 291 aa, Synthetic construct
MRSSLVLFFVSAWTALASPIRREVSQDLFNQFNLFAQYSAAAYCGKNNDAPAGTNITCTGNACPEVEKADATFLYSFVDSGVGDVTGFLALDNTNKLIVLSFRGSRSIENWIGNLNFDLKEINDICSGCRGHDGFTSSWRSVADTLRQKVEDAVREHPDYRVVFTGHSLGGALATVAGADLRGNGYDIDVFSYGAPRVGNRAFAEFLTVQTGGTLYRITHTNDIVPRLPPREFGYSHSSPEYWIKSGTLVPVTRNDIVKIEGIDATGGNNQPNIPDIPAHLWYFGLIGTCL

SEQ ID NO: 2843 - protein, 291 aa, Thermomyces lanuginosus
MRSSLVLFFVSAWTALASPIRREVSQDLFNQFNLFAQYSAAAYCGKNNDAPAGTNITCTGIACPEVEKADATFLYSFEDSGVGDVTGFLALDNTNKLIVLSFRGSRSIENWIGNLNFDLKEINDICSGCRGHDGFTSSWRSVADTLRQKVEDAVREHPDYRVVFTGHSLGGALATVAGADLRGNGYDIDVFSYGAPRVGNRAFAEFLTVQTGGTLYRITHTNDIVPRLPPREFGYSHSSPEYWIKSGTLVPVTRNDIVKIEGIDATGGNNQPNIPDIPAHLWYFGLIGTCL

SEQ ID NO: 2844 - protein, 291 aa, Thermomyces lanuginosus
MRSSLVLFFVSAWTALASPIRREVSQDLFNQFNLFAQYSAAAYCGKNNDAPAGTNITCTGNACPEVEKADATFLYSFEDSGVGDVTGFLALDNTNKLIVLSFRGSRSIENWINNLNFDLKEINDICSGCRGHDGFTSSWRSVADTLRQKVEDAVREHPDYRVVFTGHSLGGALATVAGADLRGNGYDIDVFSYGAPRVGNRAFAEFLTVQTGGTLYRITHTNDIVPRLPPREFGYSHSSPEYWIKSGTLVPVTRNDIVKIEGIDATGGNNQPNIPDIPAHLWYFGLIGTCL

SEQ ID NO: 2845 - protein, 291 aa, Thermomyces lanuginosus
MRSSLVLFFVSAWTALASPIRREVSQDLFNQFNLFAQYSAAAYCGKNNDAPAGTNITCTGVACPEVEKADATFLYSFEDSGVGDVTGFLALDNTNKLIVLSFRGSRSIENWIGNLNFDLKEINDICSGCRGHDGFTSSWRSVADTLRQKVEDAVREHPDYRVVFTGHSLGGALATVAGADLRGNGYDIDVFSYGAPRVGNRAFAEFLTVQTGGTLYRITHTNDIVPRLPPREFGYSHSSPEYWIKSGTLVPVTRNDIVKIEGIDATGGNNQPNIPDIPAHLWYFGLIGTCL

SEQ ID NO: 2846 - protein, 291 aa, Thermomyces lanuginosus
MRSSLVLFFVSAWTALASPIRREVSQDLFNQFNLFAQYSAAAYCGKNNDAPAGTNITCTGNACPEVEKADATFLYSFEDSGVGDVTGFLALDNTNKLIVLSFRGSRSIENWIVNLNFDLKEINDICSGCRGHDGFTSSWRSVADTLRQKVEDAVREHPDYRVVFTGHSLGGALATVAGADLRGNGYDIDVFSYGAPRVGNRAFAEFLTVQTGGTLYRITHTNDIVPRLPPREFGYSHSSPEYWIKSGTLVPVTRNDIVKIEGIDATGGNNQPNIPDIPAHLWYFGLIGTCL

SEQ ID NO: 2847 - protein, 291 aa, Thermomyces lanuginosus
MRSSLVLFFVSAWTALASPIRREVSQDLFNQFNLFAQYSAAAYCGKNNDAPAGTNITCTGNACPEVEKADATFLYSFEDSGVGDVTGFLALDNTNKLIVLSFRGSRSIENWIGNLRFDLKEINDICSGCRGHDGFTSSWRSVADTLRQKVEDAVREHPDYRVVFTGHSLGGALATVAGADLRGNGYDIDVFSYGAPRVGNRAFAEFLTVQTGGTLYRITHTNDIVPRLPPREFGYSHSSPEYWIKSGTLVPVTRNDIVKIEGIDATGGNNQPNIPDIPAHLWYFGLIGTCL

SEQ ID NO: 2848 - protein, 291 aa, Thermomyces lanuginosus
MRSSLVLFFVSAWTALASPIRREVSQDLFNQFNLFAQYSAAAYCGKNNDAPAGTNITCLGNACPEVEKADATFLYSFEDSGVGDVTGFLALDNTNKLIVLSFRGSRSIENWIGNLNFDLKEINDICSGCRGHDGFTSSWRSVADTLRQKVEDAVREHPDYRVVFTGHSLGGALATVAGADLRGNGYDIDVFSYGAPRVGNRAFAEFLTVQTGGTLYRITHTNDIVPRLPPREFGYSHSSPEYWIKSGTLVPVTRNDIVKIEGIDATGGNNQPNIPDIPAHLWYFGLIGTCL

SEQ ID NO: 2849 - protein, 291 aa, Thermomyces lanuginosus
MRSSLVLFFVSAWTALASPIRREVSQDLFNQFNLFAQYSAAAYCGKNNDAPAGTNITCTGRACPEVEKADATFLYSFEDSGVGDVTGFLALDNTNKLIVLSFRGSRSIENWIGNLNFDLKEINDICSGCRGHDGFTSSWRSVADTLRQKVEDAVREHPDYRVVFTGHSLGGALATVAGADLRGNGYDIDVFSYGAPRVGNRAFAEFLTVQTGGTLYRITHTNDIVPRLPPREFGYSHSSPEYWIKSGTLVPVTRNDIVKIEGIDATGGNNQPNIPDIPAHLWYFGLIGTCL

SEQ ID NO: 2850 - protein, 291 aa, Thermomyces lanuginosus
MRSSLVLFFVSAWTALASPIRREVSQDLFNQFNLFAQYSAAAYCGKNNDAPAGTNITCTGNACPEVEKADATFLYSFEDSGVGDVTGFLALDNTNKLIVLSFRGSRSIENWIGNLNFDLKEINDICSGCRGHDGFTSSWRSVADTLRQKVEDAVREHPDYRVVFTGHSLGGGLATVAGADLRGNGYDIDVFSYGAPRVGNRAFAEFLTVQTGGTLYRITHTNDIVPRLPPREFGYSHSSPEYWIKSGTLVPVTRNDIVKIEGIDATGGNNQPNIPDIPAHLWYFGLIGTCL

SEQ ID NO: 2851 - protein, 291 aa, Thermomyces lanuginosus
MRSSLVLFFVSAWTALASPIRREVSQDLFNQFNLFAQYSAAAYCGKNNDAPAGTNITCTGNACPEVEKADATFLYSFEDSGVGDVTGFLALDNTNKLIVLSFRGSRSIENWIGNLNFDLKEINDICSGCRGHDGFTSSWRSVADTLRQKVEDAVREHPDYRVVFTGHSLGGALATVAGADLRGNGYDIDVFSYGAPRVGNRAFAEFLTVQTGGTLYRITHTNDIVPRTPPREFGYSHSSPEYWIKSGTLVPVTRNDIVKIEGIDATGGNNQPNIPDIPAHLWYFGLIGTCL

SEQ ID NO: 2852 - protein, 291 aa, Thermomyces lanuginosus
MRSSLVLFFVSAWTALASPIRREVSQDLFNQFNLFAQYSAAAYCGKNNDAPAGTNITCFGNACPEVEKADATFLYSFEDSGVGDVTGFLALDNTNKLIVLSFRGSRSIENWIGNLNFDLKEINDICSGCRGHDGFTSSWRSVADTLRQKVEDAVREHPDYRVVFTGHSLGGALATVAGADLRGNGYDIDVFSYGAPRVGNRAFAEFLTVQTGGTLYRITHTNDIVPRLPPREFGYSHSSPEYWIKSGTLVPVTRNDIVKIEGIDATGGNNQPNIPDIPAHLWYFGLIGTCL

SEQ ID NO: 2853 - protein, 291 aa, Synthetic construct
MRSSLVLFFVSAWTALASPIRREVSQDLFNQFNLFAQYSAAAYCGKNNDAPAGTNITCTGNACPEVEKADATFLYSFEDSGVGDVTGFLALDNTNKLIVLSFRGSRSIENWIGNLNFDLKEINDICSGCRGHDGFTSSWRSVADTLRQKVEDAVREHPDYRVVFTGHSLGGALATVAGADLRGNGYDIDVFSYGAPRVGNRAFAEFLTVQTGGTLYRITHTNDIVPRQPPREFGYSHSSPEYWIKSGTLVPVTRNDIVKIEGIDATGGNNQPNIPDIPAHLWYFGLIGTCL

SEQ ID NO: 2854 - protein, 291 aa, Thermomyces lanuginosus
MRSSLVLFFVSAWTALASPIRREVSQDLFNQFNLFAQYSAAAYCGKNNDAPAGTNITCTGNACPEVEKADATFLYSFEDSGVGDVTGFLALDNTNKLIVLSFRGSRSIENWIGNLNFDLKEINDICSGCRGHDGFTSSWRSVADTLRQKVEDAVREHPDYRVVFSGHSLGGALATVAGADLRGNGYDIDVFSYGAPRVGNRAFAEFLTVQTGGTLYRITHTNDIVPRLPPREFGYSHSSPEYWIKSGTLVPVTRNDIVKIEGIDATGGNNQPNIPDIPAHLWYFGLIGTCL

SEQ ID NO: 2855 - protein, 291 aa, Synthetic construct
MRSSLVLFFVSAWTALASPIRREVSQDLFNQFNLFAQYSAAAYCGKNNDAPAGTNITCTGNACPEVEKADATFLYSFEDSGVGDVTGFLALDNTNKLIVLSFRGSRSIENWIGNLNFHLKEINDICSGCRGHDGFTSSWRSVADTLRQKVEDAVREHPDYRVVFTGHSLGGALATVAGADLRGNGYDIDVFSYGAPRVGNRAFAEFLTVQTGGTLYRITHTNDIVPRLPPREFGYSHSSPEYWIKSGTLVPVTRNDIVKIEGIDATGGNNQPNIPDIPAHLWYFGLIGTCL

SEQ ID NO: 2856 - protein, 291 aa, Synthetic construct
MRSSLVLFFVSAWTALASPIRREVSQDLFNQFNLFAQYSAAAYCGKNNDAPAGTNITCTGNACPEVEKADATFLYSFEDSGVGDVTGFLALDNTNKLIVLSFRGSRSIENWIGNLNFILKEINDICSGCRGHDGFTSSWRSVADTLRQKVEDAVREHPDYRVVFTGHSLGGALATVAGADLRGNGYDIDVFSYGAPRVGNRAFAEFLTVQTGGTLYRITHTNDIVPRLPPREFGYSHSSPEYWIKSGTLVPVTRNDIVKIEGIDATGGNNQPNIPDIPAHLWYFGLIGTCL

SEQ ID NO: 2857 - protein, 291 aa, Thermomyces lanuginosus
MRSSLVLFFVSAWTALASPIRREVSQDLFNQFNLFAQYSAAAYCGKNNDAPAGTNITCRGNACPEVEKADATFLYSFEDSGVGDVTGFLALDNTNKLIVLSFRGSRSIENWIGNLNFDLKEINDICSGCRGHDGFTSSWRSVADTLRQKVEDAVREHPDYRVVFTGHSLGGALATVAGADLRGNGYDIDVFSYGAPRVGNRAFAEFLTVQTGGTLYRITHTNDIVPRLPPREFGYSHSSPEYWIKSGTLVPVTRNDIVKIEGIDATGGNNQPNIPDIPAHLWYFGLIGTCL

SEQ ID NO: 2858 - protein, 291 aa, Synthetic construct
MRSSLVLFFVSAWTALASPIRREVSQDLFNQFNLFAQYSAAAYCGKNNDAPAGTNITCTGNACPEVEKADATFLYSFEDSGVGDVTGFLALDNTNKLIVLSFRGSRSIENWIGNLNFDLKEINDICSGCRGHDGFTSSWRSVADTLRQKVEDAVREHPDYRVVFTGHSLGGALATVAGADLRGNGYDIDVFSYGAPRVGNRAFAEFLTVQTGGTLYRITHTNDIVPRLPPREFGYSHSSPEYWIKSGTLVPVTRNDIVKIEGIDATGGNNQPNIPDIPAHFWYFGLIGTCL

SEQ ID NO: 2859 - protein, 291 aa, Thermomyces lanuginosus
MRSSLVLFFVSAWTALASPIRREVSQDLFNQFNLFAQYSAAAYCGKNNDAPAGTNITCPGNACPEVEKADATFLYSFEDSGVGDVTGFLALDNTNKLIVLSFRGSRSIENWIGNLNFDLKEINDICSGCRGHDGFTSSWRSVADTLRQKVEDAVREHPDYRVVFTGHSLGGALATVAGADLRGNGYDIDVFSYGAPRVGNRAFAEFLTVQTGGTLYRITHTNDIVPRLPPREFGYSHSSPEYWIKSGTLVPVTRNDIVKIEGIDATGGNNQPNIPDIPAHLWYFGLIGTCL

SEQ ID NO: 2860 - protein, 291 aa, Thermomyces lanuginosus
MRSSLVLFFVSAWTALASPIRREVSQDLFNQFNLFAQYSAAAYCGKNNDAPAGTNITCYGNACPEVEKADATFLYSFEDSGVGDVTGFLALDNTNKLIVLSFRGSRSIENWIGNLNFDLKEINDICSGCRGHDGFTSSWRSVADTLRQKVEDAVREHPDYRVVFTGHSLGGALATVAGADLRGNGYDIDVFSYGAPRVGNRAFAEFLTVQTGGTLYRITHTNDIVPRLPPREFGYSHSSPEYWIKSGTLVPVTRNDIVKIEGIDATGGNNQPNIPDIPAHLWYFGLIGTCL

SEQ ID NO: 2861 - protein, 291 aa, Thermomyces lanuginosus
MRSSLVLFFVSAWTALASPIRREVSQDLFNQFNLFAQYSAAAYCGKNNDAPAGTNITCTGNACPEVEKADATFLYSFEDSGVGDVTGFLALDNTNKLIVLSFRGSRSIENWIGNLNFDLKEINDICSGCRGHDGFTSSWRSVADTLRQKVEDAVREHPDYRVVFTGHSLGGALATVAGADLRGNGYDIDVFSYGAPRVGNRAFAEFLTVQTGGTLYRITHTNDIVPRLPPREFGYSHSSPEYWIKSRTLVPVTRNDIVKIEGIDATGGNNQPNIPDIPAHLWYFGLIGTCL

SEQ ID NO: 2862 - protein, 291 aa, Thermomyces lanuginosus
MRSSLVLFFVSAWTALASPIRREVSQDLFNQFNLFAQYSAAAYCGKNNDAPAGTNITCTGNACPEVEKADATFLYSFEDSGVGDVTGFLALDNTNKLIVLSFRGSRSIENWIGNLNFDLKEINDICSGCRGHDGFTSSWRSVADTLRQKVEDAVREHPDYRVVFTGHSLGGALATVAGADLRGNKYDIDVFSYGAPRVGNRAFAEFLTVQTGGTLYRITHTNDIVPRLPPREFGYSHSSPEYWIKSGTLVPVTRNDIVKIEGIDATGGNNQPNIPDIPAHLWYFGLIGTCL

SEQ ID NO: 2863 - protein, 291 aa, Thermomyces lanuginosus
MRSSLVLFFVSAWTALASPIRREVSQDLFNQFNLFAQYSAAAYCGKNNDAPAGTNITCAGNACPEVEKADATFLYSFEDSGVGDVTGFLALDNTNKLIVLSFRGSRSIENWIGNLNFDLKEINDICSGCRGHDGFTSSWRSVADTLRQKVEDAVREHPDYRVVFTGHSLGGALATVAGADLRGNGYDIDVFSYGAPRVGNRAFAEFLTVQTGGTLYRITHTNDIVPRLPPREFGYSHSSPEYWIKSGTLVPVTRNDIVKIEGIDATGGNNQPNIPDIPAHLWYFGLIGTCL

SEQ ID NO: 2864 - protein, 291 aa, Thermomyces lanuginosus
MRSSLVLFFVSAWTALASPIRREVSQDLFNQFNLFAQYSAAAYCGKNNDAPAGTNITCTGNACPEVEKADATFLYSFEDSGVGDVTGFLALDNTNKLIVLSFRGSRSIENWIRNLNFDLKEINDICSGCRGHDGFTSSWRSVADTLRQKVEDAVREHPDYRVVFTGHSLGGALATVAGADLRGNGYDIDVFSYGAPRVGNRAFAEFLTVQTGGTLYRITHTNDIVPRLPPREFGYSHSSPEYWIKSGTLVPVTRNDIVKIEGIDATGGNNQPNIPDIPAHLWYFGLIGTCL

SEQ ID NO: 2865 - protein, 291 aa, Thermomyces lanuginosus
MRSSLVLFFVSAWTALASPIRREVSQDLFNQFNLFAQYSAAAYCGKNNDAPAGTNITCTGNACPEVEKADATFLYSFEDSGVGDVTGFLALDNTNKLIVLSFRGSRSIENWIGNLNFDLKEINDICSGCRGHNGFTSSWRSVADTLRQKVEDAVREHPDYRVVFTGHSLGGALATVAGADLRGNGYDIDVFSYGAPRVGNRAFAEFLTVQTGGTLYRITHTNDIVPRLPPREFGYSHSSPEYWIKSGTLVPVTRNDIVKIEGIDATGGNNQPNIPDIPAHLWYFGLIGTCL

SEQ ID NO: 2866 - protein, 291 aa, Thermomyces lanuginosus
MRSSLVLFFVSAWTALASPIRREVSQDLFNQFNLFAQYSAAAYCGKNNDAPAGTNITCTGNACPEVEKADATFLYSFEDSGVGDVTGFLALDNTNKLIVLSFRGSRSIENWIGNLNFDLKEINDICSGCRGHDGFTSSWRSVADTLRQKVEDAVREHPDYRVVFTGHSLGGALATVAGADLRGNGYDIDVFSYGAPRVGNRAFAEFLTVQTGGTLYRITHTNDIVPRLPPREFGYSHSSPEYWIKSGTLVPVRRNDIVKIEGIDATGGNNQPNIPDIPAHLWYFGLIGTCL

SEQ ID NO: 2867 - protein, 291 aa, Thermomyces lanuginosus
MRSSLVLFFVSAWTALASPIRREVSQDLFNQFNLFAQYSAAAYCGKNNDAPAGTNITCTGNACPEVEKADATFLYSFEDAGVGDVTGFLALDNTNKLIVLSFRGSRSIENWIGNLNFDLKEINDICSGCRGHDGFTSSWRSVADTLRQKVEDAVREHPDYRVVFTGHSLGGALATVAGADLRGNGYDIDVFSYGAPRVGNRAFAEFLTVQTGGTLYRITHTNDIVPRLPPREFGYSHSSPEYWIKSGTLVPVTRNDIVKIEGIDATGGNNQPNIPDIPAHLWYFGLIGTCL

SEQ ID NO: 2868 - protein, 291 aa, Synthetic construct
MRSSLVLFFVSAWTALASPIRREVSQDLFNQFNLFAQYSAAAYCGKNNDAPAGTNITCTGNACPEVEKADATFLYSFEDSGVGDVTGFLALDNTNKLIVLSFRGSRSIENWIGNLNFDLKEINDICSGCRGHDGFWSSWRSVADTLRQKVEDAVREHPDYRVVFTGHSLGGALATVAGADLRGNGYDIDVFSYGAPRVGNRAFAEFLTVQTGGTLYRITHTNDIVPRLPPREFGYSHSSPEYWIKSGTLVPVTRNDIVKIEGIDATGGNNQPNIPDIPAHLWYFGLIGTCL

SEQ ID NO: 2869 - protein, 291 aa, Synthetic construct
MRSSLVLFFVSAWTALASPIRREVSQDLFNQFNLFAQYSAAAYCGKNNDAPAGTNITCTGNACPEVEKADATFLYSFCDSGVGDVTGFLALDNTNKLIVLSFRGSRSIENWIGNLNFDLKEINDICSGCRGHDGFTSSWRSVADTLRQKVEDAVREHPDYRVVFTGHSLGGALATVAGADLRGNGYDIDVFSYGAPRVGNRAFAEFLTVQTGGTLYRITHTNDIVPRLPPREFGYSHSSPEYWIKSGTLVPVTRNDIVKIEGIDATGGNNQPNIPDIPAHLWYFGLIGTCL

SEQ ID NO: 2870 - protein, 291 aa, Synthetic construct
MRSSLVLFFVSAWTALASPIRREVSQDLFNQFNLFAQYSAAAYCGKNNDAPAGTNITCTGNACPEVEKADATFLYSFHDSGVGDVTGFLALDNTNKLIVLSFRGSRSIENWIGNLNFDLKEINDICSGCRGHDGFTSSWRSVADTLRQKVEDAVREHPDYRVVFTGHSLGGALATVAGADLRGNGYDIDVFSYGAPRVGNRAFAEFLTVQTGGTLYRITHTNDIVPRLPPREFGYSHSSPEYWIKSGTLVPVTRNDIVKIEGIDATGGNNQPNIPDIPAHLWYFGLIGTCL

SEQ ID NO: 2871 - protein, 291 aa, Thermomyces lanuginosus
MRSSLVLFFVSAWTALASPIRREVSQDLFNQFNLFAQYSAAAYCGKNNDAPAGTNITCTGDACPEVEKADATFLYSFEDSGVGDVTGFLALDNTNKLIVLSFRGSRSIENWIGNLNFDLKEINDICSGCRGHDGFTSSWRSVADTLRQKVEDAVREHPDYRVVFTGHSLGGALATVAGADLRGNGYDIDVFSYGAPRVGNRAFAEFLTVQTGGTLYRITHTNDIVPRLPPREFGYSHSSPEYWIKSGTLVPVTRNDIVKIEGIDATGGNNQPNIPDIPAHLWYFGLIGTCL

SEQ ID NO: 2872 - protein, 291 aa, Thermomyces lanuginosus
MRSSLVLFFVSAWTALASPIRREVSQDLFNQFNLFAQYSAAAYCGKNNDAPAGTNITCTGNACPEVEKADATFLYSFEDSGVGDVTGFLALDNTNKLIVLSFRGSRSIENWIGNLNFDLKEINDICSGCRGHDGFTSSWRSVADTLRQKVEDAVREHPDYRVVFAGHSLGGALATVAGADLRGNGYDIDVFSYGAPRVGNRAFAEFLTVQTGGTLYRITHTNDIVPRLPPREFGYSHSSPEYWIKSGTLVPVTRNDIVKIEGIDATGGNNQPNIPDIPAHLWYFGLIGTCL

SEQ ID NO: 2873 - protein, 291 aa, Thermomyces lanuginosus
MRSSLVLFFVSAWTALASPIRREVSQDLFNQFNLFAQYSAAAYCGKNNDAPAGTNITCTGNACPEVEKADATFLYSFEDSGVGDVTGFLALDNTNKLIVLSFRGSRSIENWIKNLNFDLKEINDICSGCRGHDGFTSSWRSVADTLRQKVEDAVREHPDYRVVFTGHSLGGALATVAGADLRGNGYDIDVFSYGAPRVGNRAFAEFLTVQTGGTLYRITHTNDIVPRLPPREFGYSHSSPEYWIKSGTLVPVTRNDIVKIEGIDATGGNNQPNIPDIPAHLWYFGLIGTCL

SEQ ID NO: 2874 - protein, 291 aa, Synthetic construct
MRSSLVLFFVSAWTALASPIRREVSQDLFNQFNLFAQYSAAAYCGKNNDAPAGTNITCTGNACPEVEKADATFLYSFIDSGVGDVTGFLALDNTNKLIVLSFRGSRSIENWIGNLNFDLKEINDICSGCRGHDGFTSSWRSVADTLRQKVEDAVREHPDYRVVFTGHSLGGALATVAGADLRGNGYDIDVFSYGAPRVGNRAFAEFLTVQTGGTLYRITHTNDIVPRLPPREFGYSHSSPEYWIKSGTLVPVTRNDIVKIEGIDATGGNNQPNIPDIPAHLWYFGLIGTCL

SEQ ID NO: 2875 - protein, 291 aa, Thermomyces lanuginosus
MRSSLVLFFVSAWTALASPIRREVSQDLFNQFNLFAQYSAAAYCGKNNDAPAGTNITCTGNACPEVEKADATFLYSFEDSGVGDVTGFLALDNTNKLIVLSFRGSRSVENWIGNLNFDLKEINDICSGCRGHDGFTSSWRSVADTLRQKVEDAVREHPDYRVVFTGHSLGGALATVAGADLRGNGYDIDVFSYGAPRVGNRAFAEFLTVQTGGTLYRITHTNDIVPRLPPREFGYSHSSPEYWIKSGTLVPVTRNDIVKIEGIDATGGNNQPNIPDIPAHLWYFGLIGTCL

SEQ ID NO: 2876 - protein, 291 aa, Thermomyces lanuginosus
MRSSLVLFFVSAWTALASPIRREVSQDLFNQFNLFAQYSAAAYCGKNNDAPAGTNITCIGNACPEVEKADATFLYSFEDSGVGDVTGFLALDNTNKLIVLSFRGSRSIENWIGNLNFDLKEINDICSGCRGHDGFTSSWRSVADTLRQKVEDAVREHPDYRVVFTGHSLGGALATVAGADLRGNGYDIDVFSYGAPRVGNRAFAEFLTVQTGGTLYRITHTNDIVPRLPPREFGYSHSSPEYWIKSGTLVPVTRNDIVKIEGIDATGGNNQPNIPDIPAHLWYFGLIGTCL

SEQ ID NO: 2877 - protein, 291 aa, Thermomyces lanuginosus
MRSSLVLFFVSAWTALASPIRREVSQDLFNQFNLFAQYSAAAYCGKNNDAPAGTNITCVGNACPEVEKADATFLYSFEDSGVGDVTGFLALDNTNKLIVLSFRGSRSIENWIGNLNFDLKEINDICSGCRGHDGFTSSWRSVADTLRQKVEDAVREHPDYRVVFTGHSLGGALATVAGADLRGNGYDIDVFSYGAPRVGNRAFAEFLTVQTGGTLYRITHTNDIVPRLPPREFGYSHSSPEYWIKSGTLVPVTRNDIVKIEGIDATGGNNQPNIPDIPAHLWYFGLIGTCL

SEQ ID NO: 2878 - protein, 291 aa, Synthetic construct
MRSSLVLFFVSAWTALASPIRREVSQDLFNQFNLFAQYSAAAYCGKNNDAPAGTNITCTGNACPEVEKADATFLYSFPDSGVGDVTGFLALDNTNKLIVLSFRGSRSIENWIGNLNFDLKEINDICSGCRGHDGFTSSWRSVADTLRQKVEDAVREHPDYRVVFTGHSLGGALATVAGADLRGNGYDIDVFSYGAPRVGNRAFAEFLTVQTGGTLYRITHTNDIVPRLPPREFGYSHSSPEYWIKSGTLVPVTRNDIVKIEGIDATGGNNQPNIPDIPAHLWYFGLIGTCL

SEQ ID NO: 2879 - protein, 291 aa, Synthetic construct
MRSSLVLFFVSAWTALASPIRREVSQDLFNQFNLFAQYSAAAYCGKNNDAPAGTNITCTGNACPEVEKADATFLYSFEDSGVGDVTGFLALDNTNKLIVLSFRGSRSIENWIGNLNFDLKEINDICSGCRGHDGFTSSWRSVADTLRQKVEDAVREHPDYRVVFTGHSLGGALATVAGADLRGNGYDIDVFSYGAPRVGNRAFAEFLTVQTGGTLYRITHTNDIVPRLPPREFGYSHSSPEYWIKSGTLVPVTRNDIVKIEGIDATGGNNQPNIPDIPAHQWYFGLIGTCL

SEQ ID NO: 2880 - protein, 291 aa, Thermomyces lanuginosus
MRSSLVLFFVSAWTALASPIRREVSQDLFNQFNLFAQYSAAAYCGKNNDAPAGTNITCTGYACPEVEKADATFLYSFEDSGVGDVTGFLALDNTNKLIVLSFRGSRSIENWIGNLNFDLKEINDICSGCRGHDGFTSSWRSVADTLRQKVEDAVREHPDYRVVFTGHSLGGALATVAGADLRGNGYDIDVFSYGAPRVGNRAFAEFLTVQTGGTLYRITHTNDIVPRLPPREFGYSHSSPEYWIKSGTLVPVTRNDIVKIEGIDATGGNNQPNIPDIPAHLWYFGLIGTCL

SEQ ID NO: 2881 - protein, 291 aa, Thermomyces lanuginosus
MRSSLVLFFVSAWTALASPIRREVSQDLFNQFNLFAQYSAAAYCGKNNDAPAGTNITCGGNACPEVEKADATFLYSFEDSGVGDVTGFLALDNTNKLIVLSFRGSRSIENWIGNLNFDLKEINDICSGCRGHDGFTSSWRSVADTLRQKVEDAVREHPDYRVVFTGHSLGGALATVAGADLRGNGYDIDVFSYGAPRVGNRAFAEFLTVQTGGTLYRITHTNDIVPRLPPREFGYSHSSPEYWIKSGTLVPVTRNDIVKIEGIDATGGNNQPNIPDIPAHLWYFGLIGTCL

SEQ ID NO: 2882 - protein, 291 aa, Thermomyces lanuginosus
MRSSLVLFFVSAWTALASPIRREVSQDLFNQFNLFAQYSAAAYCGKNNDAPAGTNITCSGNACPEVEKADATFLYSFEDSGVGDVTGFLALDNTNKLIVLSFRGSRSIENWIGNLNFDLKEINDICSGCRGHDGFTSSWRSVADTLRQKVEDAVREHPDYRVVFTGHSLGGALATVAGADLRGNGYDIDVFSYGAPRVGNRAFAEFLTVQTGGTLYRITHTNDIVPRLPPREFGYSHSSPEYWIKSGTLVPVTRNDIVKIEGIDATGGNNQPNIPDIPAHLWYFGLIGTCL

SEQ ID NO: 2883 - protein, 291 aa, Thermomyces lanuginosus
MRSSLVLFFVSAWTALASPIRREVSQDLFNQFNLFAQYSAAAYCGKNNDAPAGTNITCTGQACPEVEKADATFLYSFEDSGVGDVTGFLALDNTNKLIVLSFRGSRSIENWIGNLNFDLKEINDICSGCRGHDGFTSSWRSVADTLRQKVEDAVREHPDYRVVFTGHSLGGALATVAGADLRGNGYDIDVFSYGAPRVGNRAFAEFLTVQTGGTLYRITHTNDIVPRLPPREFGYSHSSPEYWIKSGTLVPVTRNDIVKIEGIDATGGNNQPNIPDIPAHLWYFGLIGTCL

SEQ ID NO: 2884 - protein, 291 aa, Synthetic construct
MRSSLVLFFVSAWTALASPIRREVSQDLFNQFNLFAQYSAAAYCGKNNDAPAGTNITCTGNACPEVEKADATFLYSFEDSGVGDVTGFLALDNTNKLIVLSFRGSRSIENWIGNLNFDLKEINDICSGCRGHDGFTSSWRSVADTLRQKVEDAVREHPDYRVVFTGHSLGGALATVAGADLRGNGYDIDVFSYGAPRVGNRAFAEFLTVQTGGTLYRITHTNDIVPRCPPREFGYSHSSPEYWIKSGTLVPVTRNDIVKIEGIDATGGNNQPNIPDIPAHLWYFGLIGTCL

SEQ ID NO: 2885 - protein, 291 aa, Thermomyces lanuginosus
MRSSLVLFFVSAWTALASPIRREVSQDLFNQFNLFAQYSAAAYCGKNNDAPAGTNITCDGNACPEVEKADATFLYSFEDSGVGDVTGFLALDNTNKLIVLSFRGSRSIENWIGNLNFDLKEINDICSGCRGHDGFTSSWRSVADTLRQKVEDAVREHPDYRVVFTGHSLGGALATVAGADLRGNGYDIDVFSYGAPRVGNRAFAEFLTVQTGGTLYRITHTNDIVPRLPPREFGYSHSSPEYWIKSGTLVPVTRNDIVKIEGIDATGGNNQPNIPDIPAHLWYFGLIGTCL

SEQ ID NO: 2886 - protein, 291 aa, Thermomyces lanuginosus
MRSSLVLFFVSAWTALASPIRREVSQDLFNQFNLFAQYSAAAYCGKNNDAPAGTNITCTGNACPEVEKADATFLYSFEDSGVGDVTGFLALDNTNKLIVLSFRGSRSIENWIGNLNFDLKEINDICSGCRGHDGFTSSWRSVADTLRQKVEDAVREHPDYRVVFTGHSLGGALATVAGADLRGNGYDIDVFSYGAPRVGNRAFAEFLTVQTGGTLYRITHTNDIVPRLPPREFGYSHSSPEYWIKSGTGVPVTRNDIVKIEGIDATGGNNQPNIPDIPAHLWYFGLIGTCL

SEQ ID NO: 2887 - protein, 291 aa, Thermomyces lanuginosus
MRSSLVLFFVSAWTALASPIRREVSQDLFNQFNLFAQYSAAAYCGKNNDAPAGTNITCTGNACPEVEKADATFLYSFEDSGVGDVTGFLALDNTNKLIVLSFRGSRSIENWILNLNFDLKEINDICSGCRGHDGFTSSWRSVADTLRQKVEDAVREHPDYRVVFTGHSLGGALATVAGADLRGNGYDIDVFSYGAPRVGNRAFAEFLTVQTGGTLYRITHTNDIVPRLPPREFGYSHSSPEYWIKSGTLVPVTRNDIVKIEGIDATGGNNQPNIPDIPAHLWYFGLIGTCL

SEQ ID NO: 2888 - protein, 291 aa, Synthetic construct
MRSSLVLFFVSAWTALASPIRREVSQDLFNQFNLFAQYSAAAYCGKNNDAPAGTNITCTGNACPEVEKADATFLYSFEDSGVGDVTGFLALDNTNKLIVLSFRGSRSIENWIGNLNFDLKEINDICSGCRGHDGFTSSWRSVADTLRQKVEDAVREHPDYRVVFTGHSLGGALATVAGADLRGNGYDIDVFSYGAPRVGNRAFAEFLTVQTGGTLYRITHTNDIVPRLPPREFGYSHSSPEYWIKSGTLVPVTRNDIVKIEGIDATGGNNQPNIPDIPAHCWYFGLIGTCL

SEQ ID NO: 2889 - protein, 291 aa, Thermomyces lanuginosus
MRSSLVLFFVSAWTALASPIRREVSQDLFNQFNLFAQYSAAAYCGKNNDAPAGTNITCTGPACPEVEKADATFLYSFEDSGVGDVTGFLALDNTNKLIVLSFRGSRSIENWIGNLNFDLKEINDICSGCRGHDGFTSSWRSVADTLRQKVEDAVREHPDYRVVFTGHSLGGALATVAGADLRGNGYDIDVFSYGAPRVGNRAFAEFLTVQTGGTLYRITHTNDIVPRLPPREFGYSHSSPEYWIKSGTLVPVTRNDIVKIEGIDATGGNNQPNIPDIPAHLWYFGLIGTCL

SEQ ID NO: 2890 - protein, 291 aa, Synthetic construct
MRSSLVLFFVSAWTALASPIRREVSQDLFNQFNLFAQYSAAAYCGKNNDAPAGTNITCTGNACPEVEKADATFLYSFEDSGVGDVTGFLALDNTNKLIVLSFRGSRSIENWIGNLNFDLKEINDICSGCRGHDGFTSSWRSVADTLRQKVEDAVREHPDYRVVFTGHSLGGALATVAGADLRGNGYDIDVFSYGAPRVGNRAFAEFLTVQTGGTLYRITHTNDIVPRLPPREFGYSHSSPEYWIKSGTLVPVTRNDIVKIEGIDATGGNNQPNIPDIPAHPWYFGLIGTCL

SEQ ID NO: 2891 - protein, 291 aa, Synthetic construct
MRSSLVLFFVSAWTALASPIRREVSQDLFNQFNLFAQYSAAAYCGKNNDAPAGTNITCTGNACPEVEKADATFLYSFEDSGVGDVTGFLALDNTNKLIVLSFRGSRSIENWIGNLNFDLKEINDICSGCRGHDGFTSSWRSVADTLRQKVEDAVREHPDYRVVFTGHSLGGALATVAGADLRGNGYDIDVFSYGAPRVGNRAFAEFLTVQTGGTLYRITHTNDIVPRRPPREFGYSHSSPEYWIKSGTLVPVTRNDIVKIEGIDATGGNNQPNIPDIPAHLWYFGLIGTCL

SEQ ID NO: 2892 - protein, 291 aa, Thermomyces lanuginosus
MRSSLVLFFVSAWTALASPIRREVSQDLFNQFNLFAQYSAAAYCGKNNDAPAGTNITCTGNACPEVEKADATFLYSFEDSGVGDVTGFLALDNTNKLIVLSFRGSRSIENWIGNLNFDLKEINDICSGCRGHDGFTSSWRSVADTLRQKVEDAVREHPDYRVVFTGHSLGGALATVAGADLRGNGYDIDVFSYGAPRVGNRAFAEFLTVQTGGTLYRITHTNDIVPRLPPRQFGYSHSSPEYWIKSGTLVPVTRNDIVKIEGIDATGGNNQPNIPDIPAHLWYFGLIGTCL

SEQ ID NO: 2893 - protein, 291 aa, Thermomyces lanuginosus
MRSSLVLFFVSAWTALASPIRREVSQDLFNQFNLFAQYSAAAYCGKNNDAPAGTNITCTGWACPEVEKADATFLYSFEDSGVGDVTGFLALDNTNKLIVLSFRGSRSIENWIGNLNFDLKEINDICSGCRGHDGFTSSWRSVADTLRQKVEDAVREHPDYRVVFTGHSLGGALATVAGADLRGNGYDIDVFSYGAPRVGNRAFAEFLTVQTGGTLYRITHTNDIVPRLPPREFGYSHSSPEYWIKSGTLVPVTRNDIVKIEGIDATGGNNQPNIPDIPAHLWYFGLIGTCL

SEQ ID NO: 2894 - protein, 291 aa, Synthetic construct
MRSSLVLFFVSAWTALASPIRREVSQDLFNQFNLFAQYSAAAYCGKNNDAPAGTNITCTGNACPEVEKADATFLYSFEDSGVGDVTGFLALDNTNKLIVLSFRGSRSIENWIGNLNFWLKEINDICSGCRGHDGFTSSWRSVADTLRQKVEDAVREHPDYRVVFTGHSLGGALATVAGADLRGNGYDIDVFSYGAPRVGNRAFAEFLTVQTGGTLYRITHTNDIVPRLPPREFGYSHSSPEYWIKSGTLVPVTRNDIVKIEGIDATGGNNQPNIPDIPAHLWYFGLIGTCL

SEQ ID NO: 2895 - protein, 291 aa, Synthetic construct
MRSSLVLFFVSAWTALASPIRREVSQDLFNQFNLFAQYSAAAYCGKNNDAPAGTNITCTGNACPEVEKADATFLYSFEDSGVGDVTGFLALDNTNKLIVLSFRGSRSIENWIGNLNFDLKEINDICSGCRGHDGFTSSWRSVADTLRQKVEDAVREHPDYRVVFTGHSLGGALATVAGADLRGNGYDIDVFSYGAPRVGNRAFAEFLTVQTGGTLYRITHTNDIVPRLPPREFGYSHSSPEYWIKSGTLVPVTRNDIVKIEGIDATGGNNQPNIPDIPAHNWYFGLIGTCL

SEQ ID NO: 2896 - protein, 291 aa, Thermomyces lanuginosus
MRSSLVLFFVSAWTALASPIRREVSQDLFNQFNLFAQYSAAAYCGKNNDAPAGTNITCTGNACPEVEKADATFLYSFEDSGVGDVTGFLALDNTNKLIVLSFRGSRSIENWIGNLNFDLKEINDICSGCRGHDGFTSSWRSVADTLRQKVEDAVREHPDYRVVFTGHSLGGALATVAGADLRGNGYDIDVFSYGAPRVGNRAFAEFLTVQTGGTLYRITHTNDIVPRLPPRXFGYSHSSPEYWIKSGTLVPVTRNDIVKIEGIDATGGNNQPNIPDIPAHLWYFGLIGTCL

SEQ ID NO: 2897 - protein, 291 aa, Thermomyces lanuginosus
MRSSLVLFFVSAWTALASPIRREVSQDLFNQFNLFAQYSAAAYCGKNNDAPAGTNITCTGNACPEVEKADATFLYSFEDSGVGDVTGFLALDNTNKLIVLSFRGSRSIENWIGNLNFDLKEINAICSGCRGHDGFTSSWRSVADTLRQKVEDAVREHPDYRVVFTGHSLGGALATVAGADLRGNGYDIDVFSYGAPRVGNRAFAEFLTVQTGGTLYRITHTNDIVPRLPPREFGYSHSSPEYWIKSGTLVPVTRNDIVKIEGIDATGGNNQPNIPDIPAHLWYFGLIGTCL

SEQ ID NO: 2898 - protein, 291 aa, Synthetic construct
MRSSLVLFFVSAWTALASPIRREVSQDLFNQFNLFAQYSAAAYCGKNNDAPAGTNITCTGNACPEVEKADATFLYSFEDSGVGDVTGFLALDNTNKLIVLSFRGSRSIENWIGNLNFVLKEINDICSGCRGHDGFTSSWRSVADTLRQKVEDAVREHPDYRVVFTGHSLGGALATVAGADLRGNGYDIDVFSYGAPRVGNRAFAEFLTVQTGGTLYRITHTNDIVPRLPPREFGYSHSSPEYWIKSGTLVPVTRNDIVKIEGIDATGGNNQPNIPDIPAHLWYFGLIGTCL

SEQ ID NO: 2899 - protein, 291 aa, Thermomyces lanuginosus
MRSSLVLFFVSAWTALASPIRREVSQDLFNQFNLFAQYSAAAYCGKNNDAPAGTNITCTGAACPEVEKADATFLYSFEDSGVGDVTGFLALDNTNKLIVLSFRGSRSIENWIGNLNFDLKEINDICSGCRGHDGFTSSWRSVADTLRQKVEDAVREHPDYRVVFTGHSLGGALATVAGADLRGNGYDIDVFSYGAPRVGNRAFAEFLTVQTGGTLYRITHTNDIVPRLPPREFGYSHSSPEYWIKSGTLVPVTRNDIVKIEGIDATGGNNQPNIPDIPAHLWYFGLIGTCL

SEQ ID NO: 2900 - protein, 291 aa, Thermomyces lanuginosus
MRSSLVLFFVSAWTALASPIRREVSQDLFNQFNLFAQYSAAAYCGKNNDAPAGTNITCTGKACPEVEKADATFLYSFEDSGVGDVTGFLALDNTNKLIVLSFRGSRSIENWIGNLNFDLKEINDICSGCRGHDGFTSSWRSVADTLRQKVEDAVREHPDYRVVFTGHSLGGALATVAGADLRGNGYDIDVFSYGAPRVGNRAFAEFLTVQTGGTLYRITHTNDIVPRLPPREFGYSHSSPEYWIKSGTLVPVTRNDIVKIEGIDATGGNNQPNIPDIPAHLWYFGLIGTCL

SEQ ID NO: 2901 - protein, 291 aa, Thermomyces lanuginosus
MRSSLVLFFVSAWTALASPIRREVSQDLFNQFNLFAQYSAAAYCGKNNDAPAGTNITCWGNACPEVEKADATFLYSFEDSGVGDVTGFLALDNTNKLIVLSFRGSRSIENWIGNLNFDLKEINDICSGCRGHDGFTSSWRSVADTLRQKVEDAVREHPDYRVVFTGHSLGGALATVAGADLRGNGYDIDVFSYGAPRVGNRAFAEFLTVQTGGTLYRITHTNDIVPRLPPREFGYSHSSPEYWIKSGTLVPVTRNDIVKIEGIDATGGNNQPNIPDIPAHLWYFGLIGTCL

SEQ ID NO: 2902 - protein, 291 aa, Thermomyces lanuginosus
MRSSLVLFFVSAWTALASPIRREVSQDLFNQFNLFAQYSAAAYCGKNNDAPAGTNITCTGNACPEVEKADATFLYSFEDSGVGDVTGFLALDNTNKLIVLSFRGSRSIENWIGNLNFDLIEINDICSGCRGHDGFTSSWRSVADTLRQKVEDAVREHPDYRVVFTGHSLGGALATVAGADLRGNGYDIDVFSYGAPRVGNRAFAEFLTVQTGGTLYRITHTNDIVPRLPPREFGYSHSSPEYWIKSGTLVPVTRNDIVKIEGIDATGGNNQPNIPDIPAHLWYFGLIGTCL

SEQ ID NO: 2903 - protein, 291 aa, Thermomyces lanuginosus
MRSSLVLFFVSAWTALASPIRREVSQDLFNQFNLFAQYSAAAYCGKNNDAPAGTNITCTGGACPEVEKADATFLYSFEDSGVGDVTGFLALDNTNKLIVLSFRGSRSIENWIGNLNFDLKEINDICSGCRGHDGFTSSWRSVADTLRQKVEDAVREHPDYRVVFTGHSLGGALATVAGADLRGNGYDIDVFSYGAPRVGNRAFAEFLTVQTGGTLYRITHTNDIVPRLPPREFGYSHSSPEYWIKSGTLVPVTRNDIVKIEGIDATGGNNQPNIPDIPAHLWYFGLIGTCL

SEQ ID NO: 2904 - protein, 291 aa, Thermomyces lanuginosus
MRSSLVLFFVSAWTALASPIRREVSQDLFNQFNLFAQYSAAAYCGKNNDAPAGTNITCTGNACPEVEKADATFLYSFEDSGVGDVTGFLALDNTNKLIVLSFRGSRSIENWIQNLNFDLKEINDICSGCRGHDGFTSSWRSVADTLRQKVEDAVREHPDYRVVFTGHSLGGALATVAGADLRGNGYDIDVFSYGAPRVGNRAFAEFLTVQTGGTLYRITHTNDIVPRLPPREFGYSHSSPEYWIKSGTLVPVTRNDIVKIEGIDATGGNNQPNIPDIPAHLWYFGLIGTCL

SEQ ID NO: 2905 - protein, 291 aa, Synthetic construct
MRSSLVLFFVSAWTALASPIRREVSQDLFNQFNLFAQYSAAAYCGKNNDAPAGTNITCTGNACPEVEKADATFLYSFFDSGVGDVTGFLALDNTNKLIVLSFRGSRSIENWIGNLNFDLKEINDICSGCRGHDGFTSSWRSVADTLRQKVEDAVREHPDYRVVFTGHSLGGALATVAGADLRGNGYDIDVFSYGAPRVGNRAFAEFLTVQTGGTLYRITHTNDIVPRLPPREFGYSHSSPEYWIKSGTLVPVTRNDIVKIEGIDATGGNNQPNIPDIPAHLWYFGLIGTCL

SEQ ID NO: 2906 - protein, 291 aa, Thermomyces lanuginosus
MRSSLVLFFVSAWTALASPIRREVSQDLFNQFNLFAQYSAAAYCGKNNDAPAGTNITCTGNACPEVEKADATFLYSFEDSGVGDVTGFLALDNTNKLIVLSFRGSRSIENWISNLNFDLKEINDICSGCRGHDGFTSSWRSVADTLRQKVEDAVREHPDYRVVFTGHSLGGALATVAGADLRGNGYDIDVFSYGAPRVGNRAFAEFLTVQTGGTLYRITHTNDIVPRLPPREFGYSHSSPEYWIKSGTLVPVTRNDIVKIEGIDATGGNNQPNIPDIPAHLWYFGLIGTCL

SEQ ID NO: 2907 - protein, 291 aa, Thermomyces lanuginosus
MRSSLVLFFVSAWTALASPIRREVSQDLFNQFNLFAQYSAAAYCGKNNDAPAGTNITCTGTACPEVEKADATFLYSFEDSGVGDVTGFLALDNTNKLIVLSFRGSRSIENWIGNLNFDLKEINDICSGCRGHDGFTSSWRSVADTLRQKVEDAVREHPDYRVVFTGHSLGGALATVAGADLRGNGYDIDVFSYGAPRVGNRAFAEFLTVQTGGTLYRITHTNDIVPRLPPREFGYSHSSPEYWIKSGTLVPVTRNDIVKIEGIDATGGNNQPNIPDIPAHLWYFGLIGTCL

SEQ ID NO: 2908 - protein, 291 aa, Thermomyces lanuginosus
MRSSLVLFFVSAWTALASPIRREVSQDLFNQFNLFAQYSAAAYCGKNNDAPAGTNITCTGNACPEVEKADATFLYSFEDSGVGDVTGFLALDNTNKLIVLSFRGSRSIENWIGNLNFDLKEINDICSGCRGHDGFTSSWRSVADTLRQKVEDAVREHPDYRVVFTGHSLGGALATVAGADLRGNGYDIDVFSYGAPRVGNRAFAEFLTVQTGGTLYRITHTNDIVPRLPPREFGYSHSSPEYWIKSGTLVPVTRNDIVKIEGIDATGGNNQPNIPDIPAHTWYFGLIGTCL

SEQ ID NO: 2909 - protein, 291 aa, Thermomyces lanuginosus
MRSSLVLFFVSAWTALASPIRREVSQDLFNQFNLFAQYSAAAYCGKNNDAPAGTNITCQGNACPEVEKADATFLYSFEDSGVGDVTGFLALDNTNKLIVLSFRGSRSIENWIGNLNFDLKEINDICSGCRGHDGFTSSWRSVADTLRQKVEDAVREHPDYRVVFTGHSLGGALATVAGADLRGNGYDIDVFSYGAPRVGNRAFAEFLTVQTGGTLYRITHTNDIVPRLPPREFGYSHSSPEYWIKSGTLVPVTRNDIVKIEGIDATGGNNQPNIPDIPAHLWYFGLIGTCL

SEQ ID NO: 2910 - protein, 291 aa, Thermomyces lanuginosus
MRSSLVLFFVSAWTALASPIRREVSQDLFNQFNLFAQYSAAAYCGKNNDAPAGTNITCTGNACPEVEKADATFLYSFEDSGVGDVTGFLALDNTNKLIVLSFRGSRSIENWIGNLNFDLKEINDICSGCRGHDGFTSSWRSVADTLRQKVEDAVREHPDYRVVFTGHSLGGALATVAGADLRGNGYDIDVFSYGAPRVGNRAFAEFLTVQTGGTLYRITHTNDIVPRLPPREFGYSHSSPEYWIKSGTLVPVTRNDIVKIEGIDATGGNNQPNIPDIKAHLWYFGLIGTCL

SEQ ID NO: 2911 - protein, 291 aa, Synthetic construct
MRSSLVLFFVSAWTALASPIRREVSQDLFNQFNLFAQYSAAAYCGKNNDAPAGTNITCTGNACPEVEKADATFLYSFWDSGVGDVTGFLALDNTNKLIVLSFRGSRSIENWIGNLNFDLKEINDICSGCRGHDGFTSSWRSVADTLRQKVEDAVREHPDYRVVFTGHSLGGALATVAGADLRGNGYDIDVFSYGAPRVGNRAFAEFLTVQTGGTLYRITHTNDIVPRLPPREFGYSHSSPEYWIKSGTLVPVTRNDIVKIEGIDATGGNNQPNIPDIPAHLWYFGLIGTCL

SEQ ID NO: 2912 - protein, 291 aa, Synthetic construct
MRSSLVLFFVSAWTALASPIRREVSQDLFNQFNLFAQYSAAAYCGKNNDAPAGTNITCTGNACPEVEKADATFLYSFEDSGVGDVTGFLALDNTNKLIVLSFRGSRSIENWIGNLNFPLKEINDICSGCRGHDGFTSSWRSVADTLRQKVEDAVREHPDYRVVFTGHSLGGALATVAGADLRGNGYDIDVFSYGAPRVGNRAFAEFLTVQTGGTLYRITHTNDIVPRLPPREFGYSHSSPEYWIKSGTLVPVTRNDIVKIEGIDATGGNNQPNIPDIPAHLWYFGLIGTCL

SEQ ID NO: 2913 - protein, 291 aa, Synthetic construct
MRSSLVLFFVSAWTALASPIRREVSQDLFNQFNLFAQYSAAAYCGKNNDAPAGTNITCTGNACPEVEKADATFLYSFEDSGVGDVTGFLALDNTNKLIVLSFRGSRSIENWIGNLNFDLKEINDICSGCRGHDGFTSSWRSVADTLRQKVEDAVREHPDYRVVFTGHSLGGALATVAGADLRGNGYDIDVFSYGAPRVGNRAFAEFLTVQTGGTLYRITHTNDIVPRIPPREFGYSHSSPEYWIKSGTLVPVTRNDIVKIEGIDATGGNNQPNIPDIPAHLWYFGLIGTCL

SEQ ID NO: 2914 - protein, 291 aa, Thermomyces lanuginosus
MRSSLVLFFVSAWTALASPIRREVSQDLFNQFNLFAQYSAAAYCGKNNNAPAGTNITCTGNACPEVEKADATFLYSFEDSGVGDVTGFLALDNTNKLIVLSFRGSRSIENWIGNLNFDLKEINDICSGCRGHDGFTSSWRSVADTLRQKVEDAVREHPDYRVVFTGHSLGGALATVAGADLRGNGYDIDVFSYGAPRVGNRAFAEFLTVQTGGTLYRITHTNDIVPRLPPREFGYSHSSPEYWIKSGTLVPVTRNDIVKIEGIDATGGNNQPNIPDIPAHLWYFGLIGTCL

SEQ ID NO: 2915 - protein, 291 aa, Thermomyces lanuginosus
MRSSLVLFFVSAWTALASPIRREVSQDLFNQFNLFAQYSAAAYCGKNNDAPAGTNITCTGNACPEVEKADATFLYSFEDSGVGDVTGFLALDNTNKLIVLSFRGSRSIENWIWNLNFDLKEINDICSGCRGHDGFTSSWRSVADTLRQKVEDAVREHPDYRVVFTGHSLGGALATVAGADLRGNGYDIDVFSYGAPRVGNRAFAEFLTVQTGGTLYRITHTNDIVPRLPPREFGYSHSSPEYWIKSGTLVPVTRNDIVKIEGIDATGGNNQPNIPDIPAHLWYFGLIGTCL

SEQ ID NO: 2916 - protein, 291 aa, Synthetic construct
MRSSLVLFFVSAWTALASPIRREVSQDLFNQFNLFAQYSAAAYCGKNNDAPAGTNITCTGNACPEVEKADATFLYSFEDSGVGDVTGFLALDNTNKLIVLSFRGSRSIENWIGNLNFDLKEINDICSGCRGHDGFTSSWRSVADTLRQKVEDAVREHPDYRVVFTGHSLGGALATVAGADLRGNGYDIDVFSYGAPRVGNRAFAEFLTVQTGGTLYRITHTNDIVPRWPPREFGYSHSSPEYWIKSGTLVPVTRNDIVKIEGIDATGGNNQPNIPDIPAHLWYFGLIGTCL

SEQ ID NO: 2917 - protein, 291 aa, Synthetic construct
MRSSLVLFFVSAWTALASPIRREVSQDLFNQFNLFAQYSAAAYCGKNNDAPAGTNITCTGNACPEVEKADATFLYSFEDSGVGDVTGFLALDNTNKLIVLSFRGSRSIENWIGNLNFDLKEINDICSGCRGHDGFTSSWRSVADTLRQKVEDAVREHPDYRVVFTGHSLGGALATVAGADLRGNGYDIDVFSYGAPRVGNRAFAEFLTVQTGGTLYRITHTNDIVPRNPPREFGYSHSSPEYWIKSGTLVPVTRNDIVKIEGIDATGGNNQPNIPDIPAHLWYFGLIGTCL

SEQ ID NO: 2918 - protein, 291 aa, Thermomyces lanuginosus
MRSSLVLFFVSAWTALASPIRREVSQDLFNQFNLFAQYSAAAYCGKNNDAPAGTNITCTGNACPEVEKADATFLYSFEDSGVGDVTGFLALDNTNKLIVLSFRGSRSIENWITNLNFDLKEINDICSGCRGHDGFTSSWRSVADTLRQKVEDAVREHPDYRVVFTGHSLGGALATVAGADLRGNGYDIDVFSYGAPRVGNRAFAEFLTVQTGGTLYRITHTNDIVPRLPPREFGYSHSSPEYWIKSGTLVPVTRNDIVKIEGIDATGGNNQPNIPDIPAHLWYFGLIGTCL

SEQ ID NO: 2919 - protein, 291 aa, Thermomyces lanuginosus
MRSSLVLFFVSAWTALASPIRREVSQDLFNQFNLFAQYSAAAYCGKNNDAPAGTNITCTGNACPEVEKADATFLYSFEDSGVGDVTGFLALDNTNKLIVLSFRGSRSTENWIGNLNFDLKEINDICSGCRGHDGFTSSWRSVADTLRQKVEDAVREHPDYRVVFTGHSLGGALATVAGADLRGNGYDIDVFSYGAPRVGNRAFAEFLTVQTGGTLYRITHTNDIVPRLPPREFGYSHSSPEYWIKSGTLVPVTRNDIVKIEGIDATGGNNQPNIPDIPAHLWYFGLIGTCL

SEQ ID NO: 2920 - protein, 291 aa, Synthetic construct
MRSSLVLFFVSAWTALASPIRREVSQDLFNQFNLFAQYSAAAYCGKNNDAPAGTNITCTGNACPEVEKADATFLYSFYDSGVGDVTGFLALDNTNKLIVLSFRGSRSIENWIGNLNFDLKEINDICSGCRGHDGFTSSWRSVADTLRQKVEDAVREHPDYRVVFTGHSLGGALATVAGADLRGNGYDIDVFSYGAPRVGNRAFAEFLTVQTGGTLYRITHTNDIVPRLPPREFGYSHSSPEYWIKSGTLVPVTRNDIVKIEGIDATGGNNQPNIPDIPAHLWYFGLIGTCL

SEQ ID NO: 2921 - protein, 291 aa, Thermomyces lanuginosus
MRSSLVLFFVSAWTALASPIRREVSQDLFNQFNLFAQYSAAAYCGKNNDAPAGTNITCTGFACPEVEKADATFLYSFEDSGVGDVTGFLALDNTNKLIVLSFRGSRSIENWIGNLNFDLKEINDICSGCRGHDGFTSSWRSVADTLRQKVEDAVREHPDYRVVFTGHSLGGALATVAGADLRGNGYDIDVFSYGAPRVGNRAFAEFLTVQTGGTLYRITHTNDIVPRLPPREFGYSHSSPEYWIKSGTLVPVTRNDIVKIEGIDATGGNNQPNIPDIPAHLWYFGLIGTCL

SEQ ID NO: 2922 - protein, 291 aa, Synthetic construct
MRSSLVLFFVSAWTALASPIRREVSQDLFNQFNLFAQYSAAAYCGKNNDAPAGTNITCTGNACPEVEKADATFLYSFEDSGVGDVTGFLALDNTNKLIVLSFRGSRSIENWIGNLNFDLKEINDICSGCRGHDGFTSSWRSVADTLRQKVEDAVREHPDYRVVFTGHSLGGALATVAGADLRGNGYDIDVFSYGAPRVGNRAFAEFLTVQTGGTLYRITHTNDIVPRLPPREFGYSHSSPEYWIKSGTLVPVTRNDIVKIEGIDATGGNNQPNIPDIPAHIWYFGLIGTCL

SEQ ID NO: 2923 - protein, 291 aa, Thermomyces lanuginosus
MRSSLVLFFVSAWTALASPIRREVSQDLFNQFNLFAQYSAAAYCGKNNDAPAGTNITCTGNACPEVEKADATFLYSFEDSGVGDVTGFLALDNTNKLIVLSFRGSRSIENWIINLNFDLKEINDICSGCRGHDGFTSSWRSVADTLRQKVEDAVREHPDYRVVFTGHSLGGALATVAGADLRGNGYDIDVFSYGAPRVGNRAFAEFLTVQTGGTLYRITHTNDIVPRLPPREFGYSHSSPEYWIKSGTLVPVTRNDIVKIEGIDATGGNNQPNIPDIPAHLWYFGLIGTCL

SEQ ID NO: 2924 - protein, 291 aa, Synthetic construct
MRSSLVLFFVSAWTALASPIRREVSQDLFNQFNLFAQYSAAAYCGKNNDAPAGTNITCTGNACPEVEKADATFLYSFGDSGVGDVTGFLALDNTNKLIVLSFRGSRSIENWIGNLNFDLKEINDICSGCRGHDGFTSSWRSVADTLRQKVEDAVREHPDYRVVFTGHSLGGALATVAGADLRGNGYDIDVFSYGAPRVGNRAFAEFLTVQTGGTLYRITHTNDIVPRLPPREFGYSHSSPEYWIKSGTLVPVTRNDIVKIEGIDATGGNNQPNIPDIPAHLWYFGLIGTCL

SEQ ID NO: 2925 - protein, 291 aa, Synthetic construct
MRSSLVLFFVSAWTALASPIRREVSQDLFNQFNLFAQYSAAAYCGKNNDAPAGTNITCTGNACPEVEKADATFLYSFEDSGVGDVTGFLALDNTNKLIVLSFRGSRSIENWIGNLNFDLKEINDICSGCRGHDGFTSSWRSVADTLRQKVEDAVREHPDYRVVFTGHSLGGALATVAGADLRGNGYDIDVFSYGAPRVGNRAFAEFLTVQTGGTLYRITHTNDIVPRLPPREFGYSHSSPEYWIKSGTLVPVTRNDIVKIEGIDATGGNNQPNIPDIPAHWWYFGLIGTCL

SEQ ID NO: 2926 - protein, 291 aa, Thermomyces lanuginosus
MRSSLVLFFVSAWTALASPIRREVSQDLFNQFNLFAQYSAAAYCGKNNDAPAGTNITCTGCACPEVEKADATFLYSFEDSGVGDVTGFLALDNTNKLIVLSFRGSRSIENWIGNLNFDLKEINDICSGCRGHDGFTSSWRSVADTLRQKVEDAVREHPDYRVVFTGHSLGGALATVAGADLRGNGYDIDVFSYGAPRVGNRAFAEFLTVQTGGTLYRITHTNDIVPRLPPREFGYSHSSPEYWIKSGTLVPVTRNDIVKIEGIDATGGNNQPNIPDIPAHLWYFGLIGTCL

SEQ ID NO: 2927 - protein, 291 aa, Thermomyces lanuginosus
MRSSLVLFFVSAWTALASPIRREVSQDLFNQFNLFAQYSAAAYCGKNNDAPAGTNITCTGEACPEVEKADATFLYSFEDSGVGDVTGFLALDNTNKLIVLSFRGSRSIENWIGNLNFDLKEINDICSGCRGHDGFTSSWRSVADTLRQKVEDAVREHPDYRVVFTGHSLGGALATVAGADLRGNGYDIDVFSYGAPRVGNRAFAEFLTVQTGGTLYRITHTNDIVPRLPPREFGYSHSSPEYWIKSGTLVPVTRNDIVKIEGIDATGGNNQPNIPDIPAHLWYFGLIGTCL

SEQ ID NO: 2928 - protein, 291 aa, Thermomyces lanuginosus
MRSSLVLFFVSAWTALASPIRREVSQDLFNQFNLFAQYSAAAYCGKNNDAPAGTNITCTGNACPEVEKADATFLYSFEDSGVGDVTGFLALDNTNKLIVLSFRGSRSIENWIGNLNFDLKEINDICSGCRGHDGFTSSWRSVADTLRQKVEDAVREHPDYRVVFTGHSLGGALATVAGADLRGNGYDIDVFSYGAPRVGNRAFAEFLTVQTGGTLYRITHTNDIVPRLPPREFGYSHSSPEYWIKSGTLVPVTRRDIVKIEGIDATGGNNQPNIPDIPAHLWYFGLIGTCL

SEQ ID NO: 2929 - protein, 291 aa, Synthetic construct
MRSSLVLFFVSAWTALASPIRREVSQDLFNQFNLFAQYSAAAYCGKNNDAPAGTNITCTGNACPEVEKADATFLYSFEDSGVGDVTGFLALDNTNKLIVLSFRGSRSIENWIGNLNFELKEINDICSGCRGHDGFTSSWRSVADTLRQKVEDAVREHPDYRVVFTGHSLGGALATVAGADLRGNGYDIDVFSYGAPRVGNRAFAEFLTVQTGGTLYRITHTNDIVPRLPPREFGYSHSSPEYWIKSGTLVPVTRNDIVKIEGIDATGGNNQPNIPDIPAHLWYFGLIGTCL

SEQ ID NO: 2930 - protein, 291 aa, Thermomyces lanuginosus
MRSSLVLFFVSAWTALASPIRRXVSQDLFNQFNLFAQYSAAAYCGKNNDAPAGTNITCTGNACPEVEKADATFLYSFEDSGVGDVTGFLALDNTNKLIVLSFRGSRSIENWIGNLNFDLKEINDICSGCRGHDGFTSSWRSVADTLRQKVEDAVREHPDYRVVFTGHSLGGALATVAGADLRGNGYDIDVFSYGAPRVGNRAFAEFLTVQTGGTLYRITHTNDIVPRLPPREFGYSHSSPEYWIKSGTLVPVTRNDIVKIEGIDATGGNNQPNIPDIPAHLWYFGLIGTCL

SEQ ID NO: 2931 - protein, 291 aa, Thermomyces lanuginosus
MRSSLVLFFVSAWTALASPIRREVSQDLFNQFNLFAQYSAAAYCGKNNRAPAGTNITCTGNACPEVEKADATFLYSFEDSGVGDVTGFLALDNTNKLIVLSFRGSRSIENWIGNLNFDLKEINDICSGCRGHDGFTSSWRSVADTLRQKVEDAVREHPDYRVVFTGHSLGGALATVAGADLRGNGYDIDVFSYGAPRVGNRAFAEFLTVQTGGTLYRITHTNDIVPRLPPREFGYSHSSPEYWIKSGTLVPVTRNDIVKIEGIDATGGNNQPNIPDIPAHLWYFGLIGTCL

SEQ ID NO: 2932 - protein, 291 aa, Synthetic construct
MRSSLVLFFVSAWTALASPIRREVSQDLFNQFNLFAQYSAAAYCGKNNDAPAGTNITCTGNACPEVEKADATFLYSFEDSGVGDVTGFLALDNTNKLIVLSFRGSRSIENWIGNLNFDLKEINDICSGCRGHDGFTSSWRSVADTLRQKVEDAVREHPDYRVVFTGHSLGGALATVAGADLRGNGYDIDVFSYGAPRVGNRAFAEFLTVQTGGTLYRITHTNDIVPRLPPREFGYSHSSPEYWIKSGTLVPVTRNDIVKIEGIDATGGNNQPNIPDIPAHEWYFGLIGTCL

SEQ ID NO: 2933 - protein, 291 aa, Thermomyces lanuginosus
MRSSLVLFFVSAWTALASPIRREVSQDLFNQFNLFAQYSAAAYCGKNNDAPAGTNITCTGNACPEVEKADATFLYSFEDSGVGDVTGFLALDNTNKLIVLSFRGTRSIENWIGNLNFDLKEINDICSGCRGHDGFTSSWRSVADTLRQKVEDAVREHPDYRVVFTGHSLGGALATVAGADLRGNGYDIDVFSYGAPRVGNRAFAEFLTVQTGGTLYRITHTNDIVPRLPPREFGYSHSSPEYWIKSGTLVPVTRNDIVKIEGIDATGGNNQPNIPDIPAHLWYFGLIGTCL

SEQ ID NO: 2934 - protein, 285 aa, Thermomyces lanuginosus
MRSSLVLFFVSAWTALASPIRREVSQDLFNQFNLFAQYSAAAYTGKNNDAPAGTNITCTGNACPEVEKADATFLYSFEDSGVGDVTGFLALDNTNKLIVLSFRGSRSIENWIGNLNFDLKEINDICSGCRGHDGFTSSWRSVADTLRQKVEDAVREHPDYRVVFTGHSLGGALATVAGADLRGNGYDIDVFSYGAPRVGNRAFAEFLTVQTGGTLYRITHTNDIVPRLPPREFGYSHSSPEYWIKSGTLVPVTRNDIVKIEGIDATGGNNQPNIPDIPAHLWYFG

SEQ ID NO: 2935 - protein, 275 aa, Synthetic construct
SSPIRREVSQDLFNQFNLFAQYSAAAYCGKNNDAPAGTNITCTGNACPEVEKADATFLYSFEDSGVGDVTGFLALDNTNKLIVLSFRGSRSIENWIGNLNFDLKEINDICSGCRGHDGFTSSWRSVADTLRQKVEDAVREHPDYRVVFTGHSLGGALATVAGADLRGNGYDIDVFSYGAPRVGNRAFAEFLTVQTGGTLYRITHTNDIVPRLPPREFGYSHSSPEYWIKSGTLVPVTRNDIVKIEGIDATGGNNQPNIPDIPAHLWYFGLIGTCL

SEQ ID NO: 2936 - protein, 274 aa, Thermomyces lanuginosus
SPIRREVSQDLFNQFNLFAQYSAAAYCGKNNDAPAGTNITCTGNACPEVEKADATFLYSFEDSGVGDVTGFLALDNTNKLIVLSFRGSRSIENWIGNLNFDLKEINDICSGCRGHDGFTSSWRSVADTLRQKVEDAVREHPDYRVVFTGHSLGGALATVAGADLRGNGYAIDVFSYGAPRVGNRAFAEFLTVQTGGTLYRITHTNDIVPRLPPREFGYSHSSPEYWIKSGTLVPVTRNDIVKIEGIDATGGNNQPNIPDIPAHLWYFGLIGTCL

SEQ ID NO: 2937 - protein, 274 aa, Thermomyces lanuginosus
SPIRREVSQDLFNQFNLFAQYSAAAYCGKNNDAPAGTNITCTGNACPEVEKADATFLYSFEDSGVGDVTGFLALDNTNKLIVLSFRGSRSIENWIGNLNFDLKEINDICSGCRGHKGFTSSWRSVADTLRQKVEDAVREHPDYRVVFTGHSLGGALATVAGADLRGNGYDIDVFSYGAPRVGNRAFAEFLTVQTGGTLYRITHTNDIVPRLPPREFGYSHSSPEYWIKSGTLVPVTRNDIVKIEGIDATGGNNQPNIPDIPAHLWYFGLIGTCL

SEQ ID NO: 2938 - protein, 274 aa, Thermomyces lanuginosus
SPIRREVSQDLFNQFNLFAQYSAAAYCGKNNDAPAGTNITCTGNACPEVEKADATFLYSFEDSGVGDVTGFLALDNTNKLIVLSFRGSRSIENWIGNLNFDLKEINDICSGCRGHDGFTSSWRSVADTLRQKVEDAVREHPDYRVVFTGHSLGGALATVAGAFLRGNGYDIDVFSYGAPRVGNRAFAEFLTVQTGGTLYRITHTNDIVPRLPPREFGYSHSSPEYWIKSGTLVPVTRNDIVKIEGIDATGGNNQPNIPDIPAHLWYFGLIGTCL

SEQ ID NO: 2939 - protein, 274 aa, Thermomyces lanuginosus
SPIRREVSQDLFNQFNLFAQYSAAAYCGKNNDAPAGTNITCTGNACPEVEKADATFLYSFEDSGVGDVTGFLALDNTNKLIVLSFRGSRSIENWIGNLNFDLKEINDICSGCRGHDGFTSSWRSVADTLRQKVEDAVREHPDYRVVFTGHSLGGALATVAGADLRGNGYDIDVFSYGAPRVGNRAFAEFLTVQTGGTLYRITHTNDIVPRLPPREFGYSHSSPEYWIKSGTLVPVTRNDIVKIEGIDATGGNNQPNIPYIPAHLWYFGLIGTCL

SEQ ID NO: 2940 - protein, 274 aa, Thermomyces lanuginosus
SPIRREVSQDLFNQFNLFAQYSAAAYCGKNNDAPAGTNITCTGNACPEVEKADATFLYSFEDSGVGDVTGFLALDNTNKLIVLSFRGSRSIENWIGNLNFDLKEINDICSGCRGHDGFTSSWRSVADTLRQKVEDAVREHPDYRVVFTGHSLGGALATVAGADLRGNGYDIDVFSYGAPRVGNRAFAEFLTVQTGGTLYRITHTNDIVPRLPPREFGYSHSSPEYWIKSGTLVPVRRRGIVKIEGIDATGGNNQPNIPDIPAHLWYFGLIGTCL

SEQ ID NO: 2941 - protein, 274 aa, Thermomyces lanuginosus
SPIRREVSQDLFNQFNLFAQYSAAAYCGKNNDAPAGTNITCTGNACPEVEKADATFLYSFEDSGVGDVTGFLALDNTNKLIVLSFRGSRSIENWRGNLNFDLKEINDICSGCRGHDGFTSSWRSVADTLRQKVEDAVREHPDYRVVFTGHSLGGALATVAGADLRGNGYDIDVFSYGAPRVGNRAFAEFLTVQTGGTLYRITHTNDIVPRLPPREFGYSHSSPEYWIKSGTLVPVRRRDIVKIEGIDATGGNNQPNIPDIPAHLWYFGLIGTCL

SEQ ID NO: 2942 - protein, 274 aa, Thermomyces lanuginosus
SPIRREVSQDLFNQFNLFAQYSAAAYCGKNNDAPAGTNITCTGNACPEVEKADATFLYSFEDSGVGDVTGFLALDNTNKLIVLSFRGSRSIENWIGNLNFDLKEINDICSGCRGHDGFTSSWRSVADTLRQKVEDAVREHPDYRVVFTGHSLGGALATVAGADLRGNGYDIDVFSYGAPRVGNRAFAEFLTVQTGGTLYRITHTNDIVPRLPPREFGYSHSSPEYWIKSGTLVPVRRRDIVKIEGIDATGGNNQPNIPDPPAHLWYFGLIGTCL

SEQ ID NO: 2943 - protein, 274 aa, Thermomyces lanuginosus
SPIRREVSQDLFNQFNLFAQYSAAAYCGKNNDAPAGTNITCTGNACPEVEKADATFLYSFEDSGVGDVTGFLALDNTNKLIVLSFRGSRSIENWIGNLNFDLKEINDICSGCRGHDGFTSSWRSVADTLRQKVEDAVREHPDYRVVFTGHSLGGALATVAGADLRGNGYDIDVFSYGAPRVGNRAFAEFLTVQTGGTLYRITHTNDIVPRLPPREFGYSHPSPEYWIKSGTLVPVRRRDIVKIEGIDATGGNNQPNIPDIPAHLWYFGLIGTCL

SEQ ID NO: 2944 - protein, 274 aa, Thermomyces lanuginosus
SPIRREVSQDLFNQFNLFAQYSAAAYCGKNNDAPAGTNITCTGNACPEVEKADATFLYSFEDSGVGDVTGFLALDNTNKLIVLSFRGSRSIENWIGNLNFDLKEINDICSGCRGHDGFTSSWRSVADTLRQKVEDAVREHPDYRVVFTGHSLGGALATVAGADLRGNGYDIDVFSYGAPRVGNRAFAEFLTVQTGGTLYRITHTNDIVPRLPPREFGYSHSSPEYWIKSGTLVPVRRNDIVKIEGIDATGGNNQPNIPDIPAHLWYFGLIGTCL

SEQ ID NO: 2945 - protein, 274 aa, Thermomyces lanuginosus
SPIRREVSQDLFNQFNLFAQYSAAAYCGKNNDAPAGTNITCTGNACPEVEKADATFLYSFEDSGVGDVTGFLALDNTNKLIVLSFRGSRSIENWIGNLNFDLKEINDICSGCRGHDGFTSSWRSVADTLRQKVEDAVREHPDYRVVFTGHSLGGALATVAGADLRGNGYDIDVFSYGAPRVGNRAFAEFLTVQTGGTLYRITHTNDIVPRLPPREFGYSHSSPEYWIKSGTLVPVRRRDIVKIEGIDATGGNNQPNIPTIPAHLWYFGLIGTCL

SEQ ID NO: 2946 - protein, 274 aa, Thermomyces lanuginosus
SPIRREVSQDLFNQFNLFAQYSAAAYCGKNNRAPAGTNITCTGNACPEVEKADATFLYSFEDSGVGDVTGFLALDNTNKLIVLSFRGSRSIENWIGNLNFDLKEINDICSGCRGHDGFTSSWRSVADTLRQKVEDAVREHPDYRVVFTGHSLGGALATVAGADLRGNGYDIDVFSYGAPRVGNRAFAEFLTVQTGGTLYRITHTNDIVPRLPPREFGYSHSSPEYWIKSGTLVPVRRRDIVKIEGIDATGGNNQPNIPDIPAHLWYFGLIGTCL

SEQ ID NO: 2947 - protein, 274 aa, Thermomyces lanuginosus
SPIRREVSQDLFNQFNLFAQYSAAAYCGKNNDAPAGTNITCTGNACPEVEKADATFLYSFEDSGVGDVTGFLALDNTNKLIVLSFRGSRSIENWIGNLNFDLKEINDICSGCRGHDGFTSSWRSVADTLRQKVEDAVREHPDYRVVFTGHSLGGGLATVAGADLRGNGYDIDVFSYGAPRVGNRAFAEFLTVQTGGTLYRITHTNDIVPRLPPREFGYSHSSPEYWIKSGTLVPVRRRDIVKIEGIDATGGNNQPNIPDIPAHLWYFGLIGTCL

SEQ ID NO: 2948 - protein, 274 aa, Thermomyces lanuginosus
SPIRREVSQDLFNQFNLFAQYSAAAYCGKNNDAPAGTNITCTGNACPEVEKADATFLYSFEDSGVGDVTGFLALDNTNKLIVLSFRGSRSIENWIGNLNFDLKEINDICSGCRGHDGFTSSWRSVADTLRQKVEDAVREHPDYRVVFTGHSLGGALATVAGADLRGNGYDIDVFSYGAPRVGNRAFAEFLTVQTGGTLYRITHTNDIVPRLPPREFGYSHSSPEYWIKSGTLVPVRRRDIVKIEGIDATGGNNQPNIPDSPAHLWYFGLIGTCL

SEQ ID NO: 2949 - protein, 274 aa, Thermomyces lanuginosus
SPIRREVSQDLFNQFNLFAQYSAAAYCGKNNDAPAGTNITCTGNACPEVEKADATFLYSFEDSGVGDVTGFLALDNTNKLIVLSFRGSRSIENWIGNLNFDLKEINDICSGCRGHDGFTSSWRSVADTLRQKVEDAVREHPDYRVVFTGHSLGGALATVAGADLRGNGYDIDVFSYGAPRVGNRAFAEFLTVQTGGTLYRITHTNDIVPRLPPREFGYSHSSPEYWIKSGTLVPVRRRDIVKIEGIDATGGNNQPNIPNIPAHLWYFGLIGTCL

SEQ ID NO: 2950 - protein, 274 aa, Thermomyces lanuginosus
SPIRREVSQDLFNQFNLFAQYSAAAYCGKNNDAPAGTNITCTGNACPEVEKADATFLYSFEDSGVGDVTGFLALDNTNKLIVLSFRGSRSIENWIGNLNFDLKEINDICSGCRGHDGFTSSWRSVADTLRQKVEDAVREHPDYRVVFTGHSLGGALATVAGADLRGNGYDIDVFSYGAPRVGNRAFAEFLTVQTGGTLYRITHTNDIVPRLPPREFGYSHSSPEYWIKSGTLVPVRRRDIVKIEGIDATGGNNQPNIPDAPAHLWYFGLIGTCL

SEQ ID NO: 2951 - protein, 274 aa, Thermomyces lanuginosus
SPIRREVSQDLFNQFNLFAQYSAAAYCGKNNDAPAGTNITCTGNACPEVEKADATFLYSFEDSGVGDVTGFLALDNTNKLIVLSFRGSRSIENWIGNLNFDLKEINDICSGCRGHDGFTSSWRSVADTLRQKVEDAVREHPDYRVVFTGHSLGGALATVAGADLRGNGYDIDVFSYGAPRVGNRAFAEFLTVQTGGTLYRITHTNDIVPRLPPREFGYSHSSPEYWIKSGTLVPVTRRDIVKIEGIDATGGNNQPNIPDIPAHLWYFGLIGTCL

SEQ ID NO: 2952 - protein, 274 aa, Thermomyces lanuginosus
SPIRREVSQDLFNQFNLFAQYSAAAYCGKNNDAPAGTNITCTGNACPEVEKADATFLYSFEDSGVGDVTGFLALDNTNKLIVLSFRGSRSIENWIGNLNFDLKEINDICSGCRGHDGFTSSWRSVADTLRQKVEDAVREHPDYRVVFTGHSLGGALATVAGADLRGNGYDIDVFSYGAPRVGNRAFAEFLTVQTGGTLYRITHTNDIVPRLPPREFGYSHSSPEYWIKSGTLVPVRRRDIVKIEGIDATGGNNQPNIPHIPAHLWYFGLIGTCL

SEQ ID NO: 2953 - protein, 274 aa, Thermomyces lanuginosus
SPIRREVSQDLFNQFNLFAQYSAAAYCGKNNDAPAGTNITCTGNACPEVEKADATFLYSFEDSGVGDVTGFLALDNTNKLIVLSFRGSRSIENWIGNLNFDLKEINDICSGCRGHDGFTSSWRSVADTLRQKVEDAVREHPDYRVVFTGHSLGGALATVAGADLRGNGYDIDVFSYGAPRVGNRAFAEFLTVQTGGTLYRITHTNDIVPRLPPREFGYSHSSPEYWIKSGTLVPVRRRDIVKIEGIDATGGNNQPNIPSIPAHLWYFGLIGTCL

SEQ ID NO: 2954 - protein, 274 aa, Thermomyces lanuginosus
SPIRREVSQDLFNQFNLFAQYSAAAYCGKNNDAPAGTNITCTGNACPEVEKADATFLYSFEDSGVGDVTGFLALDNTNKLIVLSFRGSRSIENWIGNLNFDLKEINDICSGCRGHDGFTSSWRSVADTLRQKVEDAVREHPDYRVVFTGHSLGGALATVAGADLRGNGYDIDVFSYGAPRVGNRAFAEFLTVQTGGTLYRITHTNDIVPRLPPREFGYSHSSPEYWIKSGTLVPVRRRDIVKIEGIDATGGNNQPNIPYIPAHLWYFGLIGTCL

SEQ ID NO: 2955 - protein, 274 aa, Thermomyces lanuginosus
SPIRREVSQDLFNQFNLFAQYSAAAYCGKNNDAPAGTNITCTGNACPEVEKADATFLYSFEDSGVGDVTGFLALDNTNKLIVLSFRGSRSIENWIGNLNFDLKEINDICSGCRGHDGFTSSWRSVADTLRQKVEDAVREHPDYRVVFTGHSLGGALATVAGADLRGNGYDIDVFSYGAPRVGNRAFAEFLTVQTGGTLYRITHTNDIVPRLPPREFGYSHSSPEYWIKSGTGVPVRRRDIVKIEGIDATGGNNQPNIPDIPAHLWYFGLIGTCL

SEQ ID NO: 2956 - protein, 274 aa, Thermomyces lanuginosus
SPIRREVSQDLFNQFNLFAQYSAAAYCGKNNDAPAGTNITCTGNACPEVEKADATFLYSFEDSGVGDVTGFLALDNTNKLIVLSFRGSRSIENWIGNLNFDLKEINDICSGCRGHDGFTSSWRSVADTLRQKVEDAVREHPDYRVVFTGHSLGGALATVAGADLRGNGYDIDVFSYGAPRVGNRAFAEFLTVQTGGTLYRITHTNDVVPRLPPREFGYSHSSPEYWIKSGTLVPVRRRDIVKIEGIDATGGNNQPNIPDIPAHLWYFGLIGTCL

SEQ ID NO: 2957 - protein, 274 aa, Thermomyces lanuginosus
SPIRREVSQDLFNQFNLFAQYSAAAYCGKNNDAPAGTNITCTGNACPEVEKADATFLYSFEDSGVGDVTGFLALDNTNKLIVLSFRGSRSIENWIGNLNFNLKEINDICSGCRGHDGFTSSWRSVADTLRQKVEDAVREHPDYRVVFTGHSLGGALATVAGADLRGNGYDIDVFSYGAPRVGNRAFAEFLTVQTGGTLYRITHTNDIVPRLPPREFGYSHSSPEYWIKSGTLVPVRRRDIVKIEGIDATGGNNQPNIPDIPAHLWYFGLIGTCL

SEQ ID NO: 2958 - protein, 274 aa, Thermomyces lanuginosus
SPIRREVSQDLFNQFNLFAQYSAAAYCGKNNDAPAGTNITCTGNACPEVEKADATFLYSFEDSGVGDVTGFLALDNTNKLIVLSFRGSRSIENWAGNLNFDLKEINDICSGCRGHDGFTSSWRSVADTLRQKVEDAVREHPDYRVVFTGHSLGGALATVAGADLRGNGYDIDVFSYGAPRVGNRAFAEFLTVQTGGTLYRITHTNDIVPRLPPREFGYSHSSPEYWIKSGTLVPVRRRDIVKIEGIDATGGNNQPNIPDIPAHLWYFGLIGTCL

SEQ ID NO: 2959 - protein, 274 aa, Thermomyces lanuginosus
SPIRREVSQDLFNQFNLFAQYSAAAYCGKNNDAPAGTNITCTGNACPEVEKADATFLYSFEDSGVGDVTGFLALDNTNKLIVLSFRGSRSIENWIGNLNFDLKEINDICSGCRGHDGFTSSWRSVADTLRQKVEDAVREHPDYRVVFTGHSLGGALATVAGADLRGNGYDIDVFSYGAPRVGNRAFAEFLTVQTGGTLYRITHTNDIVPRLPPREFGYSHSSPEYWIKSGTLVPVRRRDIVKIEGIDATGGNNQPNIPLIPAHLWYFGLIGTCL

SEQ ID NO: 2960 - protein, 274 aa, Thermomyces lanuginosus
SPIRREVSQDLFNQFNLFAQYSAAAYCGKNNDAPAGTNITCTGNACPEVEKADATFLYSFEDSGVGDVTGFLALDNTNKLIVLSFRGSRSGENWIGNLNFDLKEINDICSGCRGHDGFTSSWRSVADTLRQKVEDAVREHPDYRVVFTGHSLGGALATVAGADLRGNGYDIDVFSYGAPRVGNRAFAEFLTVQTGGTLYRITHTNDIVPRLPPREFGYSHSSPEYWIKSGTLVPVRRRDIVKIEGIDATGGNNQPNIPDIPAHLWYFGLIGTCL

SEQ ID NO: 2961 - protein, 274 aa, Thermomyces lanuginosus
SPIRREVSQDLFNQFNLFAQYSAAAYCGKNNDAPAGTNITCTGNACPEVEKADATFLYSFEDSGVGDVTGFLALDNTNKLIVLSFRGSRSIENWIGNLNFDLKEINDICSGCRGHDGFTSSWRSVADTLRQKVEDAVREHPDYRVVFTGHSLGGALATVAGADLRGNGYDIDVFSYGAPRVGNRAFAEFLTVQTGGTLYRITHTNDIVPRLPPREFGYSHSSPEYWIKSGTLVPVRRRDIVKIEGIDATGGNNQPNIPDIKAHLWYFGLIGTCL

SEQ ID NO: 2962 - protein, 274 aa, Thermomyces lanuginosus
SPIRREVSQDLFNQFNLFAQYSAAAYCGKNNDAPAGTNITCTGNACPEVEKADATFLYSFEDSGVGDVTGFLALDNTNKLIVLSFRGSRSIENWIGNLNFDLKEINDICSGCRGHDGFTSSWRSVADTLRQKVEDAVREHPDYRVVFTGHSLGGALATVAGADLRGNGYDIDVFSYGAPRVGNRAFAEFLTVQTGGTLYRITHTNDIVPRLPPREFGYSHSSPEYWIKSGTLVPVRRRDIVKIEGIDATGGNNQPNIPQIPAHLWYFGLIGTCL

SEQ ID NO: 2963 - protein, 274 aa, Thermomyces lanuginosus
SPIRREVSQDLFNQFNLFAQYSAAAYCGKNNDAPAGTNITCTGNACPEVEKADATFLYSFEDSGVGDVTGFLALDNTNKLIVLSFRGSRSIENWIGNLNFDLKEINDICSGCRGHDGFTSSWRSVADTLRQKVEDAVREHPDYRVVFTGHSLGGALATVAGADLRGNGYDIDVFSYGAPRVGNRAFAEFLTVQTGGTLYRITHTNDIVPRLPPRKFGYSHSSPEYWIKSGTLVPVRRRDIVKIEGIDATGGNNQPNIPDIPAHLWYFGLIGTCL

SEQ ID NO: 2964 - protein, 274 aa, Thermomyces lanuginosus
SPIRREVSQDLFNQFNLFAQYSAAAYCGKNNDAPAGTNITCTGNACPEVEKADATFLYSFEDSGVGDVTGFLALDNTNKLIVLSFRGSRSIENWIGNLNFDVKEINDICSGCRGHDGFTSSWRSVADTLRQKVEDAVREHPDYRVVFTGHSLGGALATVAGADLRGNGYDIDVFSYGAPRVGNRAFAEFLTVQTGGTLYRITHTNDIVPRLPPREFGYSHSSPEYWIKSGTLVPVRRRDIVKIEGIDATGGNNQPNIPDIPAHLWYFGLIGTCL

SEQ ID NO: 2965 - protein, 273 aa, Thermomyces lanuginosus
SPIRREVSQDLFNQFNLFAQYSAAAYCGKNNDAPAGTNITCTGNACPEVEKADATFLYSFEDSGVGDVTGFLALDNTNKLIVLSFRGSRSIENWIVNLNFDLKEINDICSGCRGHDGFTSSWRSVADTLRQKVEDAVREHPDYRVVFTGHSLGGALATVAGADLRGNGYDIDVFSYGAPRVGNRAFAEFLTVQTGGTLYRITHTNDIVPRLPPREFGYSHSSPEYWIKSGTLVPVTRNDIVKIEGIDATGGNNQPNIPDIPAHLWYFGLIGTC

SEQ ID NO: 2966 - protein, 273 aa, Thermomyces lanuginosus
SPIRREVSQDLFNQFNLFAQYSAAAYCGKNNDAPAGTNITCTGNACPEVEKADATFLYSFEDSGVGDVTGFLALDNTNKLIVLSFRGSRSIENWIGNLNFDLKEINDICSGCRGHDGFTSSWRSVADTLRQKVEDAVREHPDYRVVFTGHSLGGALATVAGADLRGNGYDIDVFSYGAPRVGNRAFAEFLTVQTGGTLYRITHTNDIVPRLPRREFGYSHSSPEYWIKSGTLVPVTRNDIVKIEGIDATGGNNQPNIPDIPAHLWYFGLIGTC

SEQ ID NO: 2967 - protein, 273 aa, Thermomyces lanuginosus
SPIRREVSQDLFNQFNLFAQYSAAAYCGKNNDAPAGTNITCTGNACPEVEKADATFLYSFEDSGVGDVTGFLALDNTNKLIVLSFRGSRSIENWIGNLNFDLKEINDICSGCRGHDGFTSSWRSVADTLRQKVEDAVREHPDYRVVFTGHSLGGALATVAGADLRGNGYDIDVFSYGAPRVGNRAFAEFLTAQTGGTLYRITHTNDIVPRLPPREFGYSHSSPEYWIKSGTLVPVTRNDIVKIEGIDATGGNNQPNIPDIPAHLWYFGLIGTC

SEQ ID NO: 2968 - protein, 273 aa, Thermomyces lanuginosus
PIRREVSQDLFNQFNLFAQYSAAAYCGKNNDAPAGTNITCTGNACPEVEKADATFLYSFEDSGVGDVTGFLALDNTNKLIVLSFRGSRSIENWICNLNFDLKEINDICSGCRGHDGFTSSWRSVADTLRQKVEDAVREHPDYRVVFTGHSLGGALATVAGADLRGNGYDIDVFSYGAPRVGNRAFAEFLTVQTGGTLYRITHTNDIVPRLPPREFGYSHSSPEYWIKSGTLVPVTRNDIVKIEGIDATGGNNQPNIPDIPAHLWYFGLIGTCL

SEQ ID NO: 2969 - protein, 271 aa, Thermomyces lanuginosus
RGEVSQDLFNQFNLFAQYSAAAYCGKNNDAPAGTNITCTGNACPEVEKADATFLYSFEDSGVGDVTGFLALDNTNKLIVLSFRGSRSIENWIGNLNFDLKEINDICSGCRGHDGFTSSWRSVADTLRQKVEDAVREHPDYRVVFTGHSLGGALATVAGADLRGNGYDIDVFSYGAPRVGNRAFAEFLTVQTGGTLYRITHTNDIVPRLPPREFGYSHSSPEYWIKSGTLVPVTRNDIVKIEGIDATGGNNQPNIPDIPAHLWYFGLIGTCL

SEQ ID NO: 2970 - protein, 270 aa, Thermomyces lanuginosus
RRVSQDLFNQFNLFAQYSAAAYCGKNNDAPAGTNITCTGNACPEVEKADATFLYSFEDSGVGDVTGFLALDNTNKLIVLSFRGSRSIENWIGNLNFDLKEINDICSGCRGHDGFTSSWRSVADTLRQKVEDAVREHPDYRVVFTGHSLGGALATVAGADLRGNGYDIDVFSYGAPRVGNRAFAEFLTVQTGGTLYRITHTNDIVPRLPPREFGYSHSSPEYWIKSGTLVPVTRNDIVKIEGIDATGGNNQPNIPDIPAHLWYFGLIGTCL

SEQ ID NO: 2971 - protein, 270 aa, Thermomyces lanuginosus
KEVSQDLFNQFNLFAQYSAAAYCGKNNDAPAGTNITCTGNACPEVEKADATFLYSFEDSGVGDVTGFLALDNTNKLIVLSFRGSRSIENWIGNLNFDLKEINDICSGCRGHDGFTSSWRSVADTLRQKVEDAVREHPDYRVVFTGHSLGGALATVAGADLRGNGYDIDVFSYGAPRVGNRAFAEFLTVQTGGTLYRITHTNDIVPRLPPREFGYSHSSPEYWIKSGTLVPVTRNDIVKIEGIDATGGNNQPNIPDIPAHLWYFGLIGTCL

SEQ ID NO: 2972 - protein, 269 aa, Thermomyces lanuginosus
EVSQDLFNQFNLFAQYSAAAYCGKNNDAPAGTNITCTGNACPEVEKADATFLYSFEDSGVGDVTGFLALDNTNKLIVLSFRGSRSIENWIGNLNFDLKEINDICSGCRGHDGFTSSWRSVADTLRQKVEDAVREHPDYRVVFTGHSLGGALATVAGADLRGNGYDIDVFSYGAPRVGNRAFAEFLTVQTGGTLYRITHTNDIVPRLPPREFGYSHSSPEYWIKSGTLVPVTRNDIVKIEGIDAPGGNNQPNIPDIPAHLWYFGLIGTCL

SEQ ID NO: 2973 - protein, 269 aa, Thermomyces lanuginosus
EVSQDLFNQFNLFAQYSAAAYCGKNNDAPAGTNITCTGNACPEVEKADATFLYSFEDSGVGDVTGFLALDNTNKLIVLSFRGSRSIENWIGNLNFDLKEINDICSGCRGHDGFTSSWRSVANTLRQKVEDAVREHPDYRVVFTGHSLGGALATVAGADLRGNGYDIDVFSYGAPRVGNRAFAEFLTVQTGGTLYRITHTNDIVPRLPPREFGYSHSSPEYWIKSGTLVPVTRNDIVKIEGIDATGGNNQPNIPDIPAHLWYFGLIGTCL

SEQ ID NO: 2974 - protein, 269 aa, Thermomyces lanuginosus
EVSQDLFNQFNLVAQYSAAAYCGKNNDAPAGTNITCTGNACPEVEKADATFLYSFEDSGVGDVTGFLALDNTNKLIVLSFRGSRSIENWIGNLNFDLKEINDICSGCRGHDGFTSSWRSVADTLRQKVEDAVREHPDYRVVFTGHSLGGALATVAGADLRGNGYDIDVFSYGAPRVGNRAFAEFLTVQTGGTLYRITHTNDIVPRLPPREFGYSHSSPEYWIKSGTLVPVTRNDIVKIEGIDATGGNNQPNIPDIPAHLWYFGLIGTCL

SEQ ID NO: 2975 - protein, 269 aa, Thermomyces lanuginosus
EVSQDLFNQFNLFAQYSAAAYCGKNNDAPAGTNITCTGNACPEVEKADATFLYSFEDSGVGDVTGFQALDNTNKLIVLSFRGSRSIENWIGNLNFDLKEINDICSGCRGHDGFTSSWRSVADTLRQKVEDAVREHPDYRVVFTGHSLGGALATVAGADLRGNGYDIDVFSYGAPRVGNRAFAEFLTVQTGGTLYRITHTNDIVPRLPPREFGYSHSSPEYWIKSGTLVPVTRNDIVKIEGIDATGGNNQPNIPDIPAHLWYFGLIGTCL

SEQ ID NO: 2976 - protein, 269 aa, Thermomyces lanuginosus
EVSQDLFNQFNLFAQYSAAAYCGKNNDAPAGTNITCTGNACPEVEKADATFLYSFEDSGVGDVTGFLALDNTNKLIVLSFRGSRSIENWIVNLNFDLKEINDICSGCRGHDGFTSSWRSVADTLRQKVEDAVREHPDYRVVFTGHSLGGALATVAGADLRGNGYDIDVFSYGAPRVGNRAFAEFLTVQTGGTLYRITHTNDIVPRLPPREFGYSHSSPEYWIKSGTLVPVTRNDIVKIEGIDATGGNNQPNIPDIPAHLWYFGLIGTCL

SEQ ID NO: 2977 - protein, 269 aa, Thermomyces lanuginosus
EVSQDLFNQFNLFAQYSAAAYCGKNNDAPAGRNITCTGNACPEVEKADATFLYSFEDSGVGDVTGFLALDNTNKLIVLSFRGSRSIENWIGNLNFDLKEINDICSGCRGHDGFTSSWRSVADTLRQKVEDAVREHPDYRVVFTGHSLGGALATVAGADLRGNGYDIDVFSYGAPRVGNRAFAEFLTVQTGGTLYRITHTNDIVPRLPPREFGYSHSSPEYWIKSGTLVPVTRNDIVKIEGIDATGGNNQPNIPDIPAHLWYFGLIGTCL

SEQ ID NO: 2978 - protein, 269 aa, Thermomyces lanuginosus
EVSQDLFNQFNLFAQYSAAAYCGKNNDAPAGTNITCTGNACPEVEKADATFLYSFEDSGVGDVTGFLALDNTNKIIVLSFRGSRSIENWIGNLNFDLKEINDICSGCRGHDGFTSSWRSVADTLRQKVEDAVREHPDYRVVFTGHSLGGALATVAGADLRGNGYDIDVFSYGAPRVGNRAFAEFLTVQTGGTLYRITHTNDIVPRLPPREFGYSHSSPEYWIKSGTLVPVTRNDIVKIEGIDATGGNNQPNIPDIPAHLWYFGLIGTCL

SEQ ID NO: 2979 - protein, 269 aa, Thermomyces lanuginosus
EVAQDLFNQFNLFAQYSAAAYCGKNNDAPAGTNITCTGNACPEVEKADATFLYSFEDSGVGDVTGFLALDNTNKLIVLSFRGSRSIENWIGNLNFDLKEINDICSGCRGHDGFTSSWRSVADTLRQKVEDAVREHPDYRVVFTGHSLGGALATVAGADLRGNGYDIDVFSYGAPRVGNRAFAEFLTVQTGGTLYRITHTNDIVPRLPPREFGYSHSSPEYWIKSGTLVPVTRNDIVKIEGIDATGGNNQPNIPDIPAHLWYFGLIGTCL

SEQ ID NO: 2980 - protein, 269 aa, Thermomyces lanuginosus
EVSQDVFNQFNLFAQYSAAAYCGKNNDAPAGTNITCTGNACPEVEKADATFLYSFEDSGVGDVTGFLALDNTNKLIVLSFRGSRSIENWIGNLNFDLKEINDICSGCRGHDGFTSSWRSVADTLRQKVEDAVREHPDYRVVFTGHSLGGALATVAGADLRGNGYDIDVFSYGAPRVGNRAFAEFLTVQTGGTLYRITHTNDIVPRLPPREFGYSHSSPEYWIKSGTLVPVTRNDIVKIEGIDATGGNNQPNIPDIPAHLWYFGLIGTCL

SEQ ID NO: 2981 - protein, 269 aa, Thermomyces lanuginosus
EVSQDLFNQFNLFAQYSAAAYCGKNNDAPAGTNITCTGNACPEVEKADATFLYSFEDSGVGDVTGFLALDNTNKAIVLSFRGSRSIENWIGNLNFDLKEINDICSGCRGHDGFTSSWRSVADTLRQKVEDAVREHPDYRVVFTGHSLGGALATVAGADLRGNGYDIDVFSYGAPRVGNRAFAEFLTVQTGGTLYRITHTNDIVPRLPPREFGYSHSSPEYWIKSGTLVPVTRNDIVKIEGIDATGGNNQPNIPDIPAHLWYFGLIGTCL

SEQ ID NO: 2982 - protein, 269 aa, Thermomyces lanuginosus
EVSQDLFNQFNLFAQYSAAAYCGKNNDAPAGTNITCTGNACPEVEKADATFLYSFEDSGVGDVTGFLALDNTNKLIVLSFRGSRSIENWIGNLNFDLKEINDICSGCRGHDGFTSSWRSVADTLRQKVEDAVREHPQYRVVFTGHSLGGALATVAGADLRGNGYDIDVFSYGAPRVGNRAFAEFLTVQTGGTLYRITHTNDIVPRLPPREFGYSHSSPEYWIKSGTLVPVTRNDIVKIEGIDATGGNNQPNIPDIPAHLWYFGLIGTCL

SEQ ID NO: 2983 - protein, 269 aa, Thermomyces lanuginosus
EVSQDLFNQFNLFAQYSAAAYCGKNNDAPAGTNITCTGNACPEVEKADATFLYSFEDSGVGDVTGFLALDNTNKLIVLSFRGSRSIENWIGNLNFDAKEINDICSGCRGHDGFTSSWRSVADTLRQKVEDAVREHPDYRVVFTGHSLGGALATVAGADLRGNGYDIDVFSYGAPRVGNRAFAEFLTVQTGGTLYRITHTNDIVPRLPPREFGYSHSSPEYWIKSGTLVPVTRNDIVKIEGIDATGGNNQPNIPDIPAHLWYFGLIGTCL

SEQ ID NO: 2984 - protein, 269 aa, Thermomyces lanuginosus
EVSQDLFNQFNLFAQYSCAAYCGKNNDAPAGTNITCTGNACPEVEKADATFLYSFEDSGVGDVTGFLALDNTNKLIVLSFRGSRSIENWIGNLNFDLKEINDICSGCRGHDGFTSSWRSVADTLRQKVEDAVREHPDYRVVFTGHSLGGALATVAGADLRGNGYDIDVFSYGAPRVGNRAFAEFLTVQTGGTLYRITHTNDIVPRLPPREFGYSHSSPEYWIKSGTLVPVTRNDIVKIEGIDATGGNNQPNIPDIPAHLWYFGLIGTCL

SEQ ID NO: 2985 - protein, 269 aa, Thermomyces lanuginosus
EVSQDLFNQFNLFAQYSAAAYCGKNNDAPAGTNITCTGNACPEVEKADATFLYSFEDSGVGDVTGFLALDNTNKLIVLSFRGSRSIENWIGNLNFDLKEINDICSGCRGHDGFTSSWRSVADTLRQKVEDAVREHPVYRVVFTGHSLGGALATVAGADLRGNGYDIDVFSYGAPRVGNRAFAEFLTVQTGGTLYRITHTNDIVPRLPPREFGYSHSSPEYWIKSGTLVPVTRNDIVKIEGIDATGGNNQPNIPDIPAHLWYFGLIGTCL

SEQ ID NO: 2986 - protein, 269 aa, Thermomyces lanuginosus
EVSQDLFNQFNLFAQYSAAAYCGKNNDAPAGTNITCTGNACPEVEKADATFLYSFEDSGVGDVTGFLALDDTNKLIVLSFRGSRSIENWIGNLNFDLKEINDICSGCRGHDGFTSSWRSVADTLRQKVEDAVREHPDYRVVFTGHSLGGALATVAGADLRGNGYDIDVFSYGAPRVGNRAFAEFLTVQTGGTLYRITHTNDIVPRLPPREFGYSHSSPEYWIKSGTLVPVTRNDIVKIEGIDATGGNNQPNIPDIPAHLWYFGLIGTCL

SEQ ID NO: 2987 - protein, 269 aa, Thermomyces lanuginosus
EVSQDLFNQFNLFAQYSAAAYCGKNNDAPAGTNITCTGNACPEVEKADATFLYSFEDSGVGDVTGFLALDNTNKLIVLSFRGSRSIENWIGNLNFDLKEINDICSGCRGHDGFTSSWRSVADTLRQKVEDSVREHPDYRVVFTGHSLGGALATVAGADLRGNGYDIDVFSYGAPRVGNRAFAEFLTVQTGGTLYRITHTNDIVPRLPPREFGYSHSSPEYWIKSGTLVPVTRNDIVKIEGIDATGGNNQPNIPDIPAHLWYFGLIGTCL

SEQ ID NO: 2988 - protein, 269 aa, Thermomyces lanuginosus
EVSQDLFNQFNLFAQYSAAAYCGKNNDAPAGTNITCTGNACPEVEKADATFLYSFEDSGVGDVTGFLALDNTNKLIVLSFRGSRSIENWIGNLNFDLKEINDICSGCRGHDGFTSSWRSVADTLRQKVEDAVREHPDYRVVFTGHSLGGALATVAGADLRGNGYDIDVFSYGAPRVGNRAFAEFLTVQTGGTLYRITHTNDIVPRLPPREFGYSHSSPEYWIKAGTLVPVTRNDIVKIEGIDATGGNNQPNIPDIPAHLWYFGLIGTCL

SEQ ID NO: 2989 - protein, 269 aa, Thermomyces lanuginosus
EVSQDLFNQFNLFAQYSAAAYCGKNNDAPAGTNITCTGNACPEVEKADATFLYSFEDSGVGDVTGFLALDNTNKLIVLSFRGSRSIENWIGNLNFDLKEINDICSGCRGHDGFTSSWRSVADTLRQKVEDAVREHPDYRVVFTGHSLGGALATVAGADLRGNGYDIDVFSYGAPRIGNRAFAEFLTVQTGGTLYRITHTNDIVPRLPPREFGYSHSSPEYWIKSGTLVPVTRNDIVKIEGIDATGGNNQPNIPDIPAHLWYFGLIGTCL

SEQ ID NO: 2990 - protein, 269 aa, Thermomyces lanuginosus
EVSQDLFNQFNLFAQYSAAAYCKKNNDAPAGTNITCTGNACPEVEKADATFLYSFEDSGVGDVTGFLALDNTNKLIVLSFRGSRSIENWIGNLNFDLKEINDICSGCRGHDGFTSSWRSVADTLRQKVEDAVREHPDYRVVFTGHSLGGALATVAGADLRGNGYDIDVFSYGAPRVGNRAFAEFLTVQTGGTLYRITHTNDIVPRLPPREFGYSHSSPEYWIKSGTLVPVTRNDIVKIEGIDATGGNNQPNIPDIPAHLWYFGLIGTCL

SEQ ID NO: 2991 - protein, 269 aa, Thermomyces lanuginosus
EVSQDLFNQFNLFAQYSAAAYCGKNNDAPAGTNITCTGNACPEVEKADATFLYSFEDSGVGDVTGFLALDNTNKLIVLSFRGSRSIENWIGNLNFDLKEINDICSGCRGHDGFTSSWRSVADTLRQKVEDAVREHPDYRVVFTGHSLGGALATVAGADLRGNGYDIDVFSYGAPRVGNRAFAEFLTVQTGGTLYRITHTNDIVPRLPPREFGYSHSSPEYWIKSGTLVPVTRNDIVKIEGIDATGGNNQTNIPDIPAHLWYFGLIGTCL

SEQ ID NO: 2992 - protein, 269 aa, Thermomyces lanuginosus
EVSQILFNQFNLFAQYSAAAYCGKNNDAPAGTNITCTGNACPEVEKADATFLYSFEDSGVGDVTGFLALDNTNKLIVLSFRGSRSIENWIGNLNFDLKEINDICSGCRGHDGFTSSWRSVADTLRQKVEDAVREHPDYRVVFTGHSLGGALATVAGADLRGNGYDIDVFSYGAPRVGNRAFAEFLTVQTGGTLYRITHTNDIVPRLPPREFGYSHSSPEYWIKSGTLVPVTRNDIVKIEGIDATGGNNQPNIPDIPAHLWYFGLIGTCL

SEQ ID NO: 2993 - protein, 269 aa, Thermomyces lanuginosus
EVSQDLFNQFNLFAQYSAAAYCGKNNDAPAGTNITCTGNACPEVEKADATFLYSFEDSGVGDVTGFLALDNTNKLIVLSFRGSRSIENWIGNLNFDLKEINDICSGCRGHDGFTSSWRSVADTLRQKVEDAVREHPDYRVVFTGHSLGGALATVAGADLRGNGYDIDVFSYGAPRVGNRAFAEFLTVHTGGTLYRITHTNDIVPRLPPREFGYSHSSPEYWIKSGTLVPVTRNDIVKIEGIDATGGNNQPNIPDIPAHLWYFGLIGTCL

SEQ ID NO: 2994 - protein, 269 aa, Thermomyces lanuginosus
EVSQDLFNQFNLFAQYSAAAYCGKNNDAPVGTNITCTGNACPEVEKADATFLYSFEDSGVGDVTGFLALDNTNKLIVLSFRGSRSIENWIGNLNFDLKEINDICSGCRGHDGFTSSWRSVADTLRQKVEDAVREHPDYRVVFTGHSLGGALATVAGADLRGNGYDIDVFSYGAPRVGNRAFAEFLTVQTGGTLYRITHTNDIVPRLPPREFGYSHSSPEYWIKSGTLVPVTRNDIVKIEGIDATGGNNQPNIPDIPAHLWYFGLIGTCL

SEQ ID NO: 2995 - protein, 269 aa, Thermomyces lanuginosus
EVSQDTFNQFNLFAQYSAAAYCGKNNDAPAGTNITCTGNACPEVEKADATFLYSFEDSGVGDVTGFLALDNTNKLIVLSFRGSRSIENWIGNLNFDLKEINDICSGCRGHDGFTSSWRSVADTLRQKVEDAVREHPDYRVVFTGHSLGGALATVAGADLRGNGYDIDVFSYGAPRVGNRAFAEFLTVQTGGTLYRITHTNDIVPRLPPREFGYSHSSPEYWIKSGTLVPVTRNDIVKIEGIDATGGNNQPNIPDIPAHLWYFGLIGTCL

SEQ ID NO: 2996 - protein, 269 aa, Thermomyces lanuginosus
EVSQDLFNQFNLFAQYSAAAYCGKNNDAPAGTNITCTGNACPEVEKADATFLYSFEDSGVGDQTGFLALDNTNKLIVLSFRGSRSIENWIGNLNFDLKEINDICSGCRGHDGFTSSWRSVADTLRQKVEDAVREHPDYRVVFTGHSLGGALATVAGADLRGNGYDIDVFSYGAPRVGNRAFAEFLTVQTGGTLYRITHTNDIVPRLPPREFGYSHSSPEYWIKSGTLVPVTRNDIVKIEGIDATGGNNQPNIPDIPAHLWYFGLIGTCL

SEQ ID NO: 2997 - protein, 269 aa, Thermomyces lanuginosus
EVSQDLFNQFNLFAQYSAAAYCGKNNDAPAGTNITCTGNACPEVEKADATFLYSFEDSGVGDVTGFLALDNTNKLIVLSFRGSRSIENWIGNLPFDLKEINDICSGCRGHDGFTSSWRSVADTLRQKVEDAVREHPDYRVVFTGHSLGGALATVAGADLRGNGYDIDVFSYGAPRVGNRAFAEFLTVQTGGTLYRITHTNDIVPRLPPREFGYSHSSPEYWIKSGTLVPVTRNDIVKIEGIDATGGNNQPNIPDIPAHLWYFGLIGTCL

SEQ ID NO: 2998 - protein, 269 aa, Thermomyces lanuginosus
EVSQDLFNQFNLFAQYSAAAYCGKNNDAPAGTNITCTGNACPEVEKADATFLESFEDSGVGDVTGFLALDNTNKLIVLSFRGSRSIENWIGNLNFDLKEINDICSGCRGHDGFTSSWRSVADTLRQKVEDAVREHPDYRVVFTGHSLGGALATVAGADLRGNGYDIDVFSYGAPRVGNRAFAEFLTVQTGGTLYRITHTNDIVPRLPPREFGYSHSSPEYWIKSGTLVPVTRNDIVKIEGIDATGGNNQPNIPDIPAHLWYFGLIGTCL

SEQ ID NO: 2999 - protein, 269 aa, Thermomyces lanuginosus
EVSQDLFNQFNLFAQYSAAAYCGKNNDAPAGTNITCTGNACPEVEKADATFLYSFEDSGVGDVTGFLALDNSNKLIVLSFRGSRSIENWIGNLNFDLKEINDICSGCRGHDGFTSSWRSVADTLRQKVEDAVREHPDYRVVFTGHSLGGALATVAGADLRGNGYDIDVFSYGAPRVGNRAFAEFLTVQTGGTLYRITHTNDIVPRLPPREFGYSHSSPEYWIKSGTLVPVTRNDIVKIEGIDATGGNNQPNIPDIPAHLWYFGLIGTCL

SEQ ID NO: 3000 - protein, 269 aa, Thermomyces lanuginosus
EVSQDLFNQFNLFAQYSAAAYCGKNNDAPAGTNITCTGNACPEVEKADATFLYSFEDSGVGDVTGFLALDNTNKLIVLSFRGSRSIENWIGNLNFDLKEINDICSGCRGHDGFTSSWRSVADTLRQKVEDAVREHPDYRVVFTGHSLGGALATVAGADLRGNGYDIDVFSYGAPRVGNIAFAEFLTVQTGGTLYRITHTNDIVPRLPPREFGYSHSSPEYWIKSGTLVPVTRNDIVKIEGIDATGGNNQPNIPDIPAHLWYFGLIGTCL

SEQ ID NO: 3001 - protein, 269 aa, Thermomyces lanuginosus
EVSQDLFNQFNLFAQYSWAAYCGKNNDAPAGTNITCTGNACPEVEKADATFLYSFEDSGVGDVTGFLALDNTNKLIVLSFRGSRSIENWIGNLNFDLKEINDICSGCRGHDGFTSSWRSVADTLRQKVEDAVREHPDYRVVFTGHSLGGALATVAGADLRGNGYDIDVFSYGAPRVGNRAFAEFLTVQTGGTLYRITHTNDIVPRLPPREFGYSHSSPEYWIKSGTLVPVTRNDIVKIEGIDATGGNNQPNIPDIPAHLWYFGLIGTCL

SEQ ID NO: 3002 - protein, 269 aa, Thermomyces lanuginosus
EVSQDLFNQFNLFAQYSAAAYCGKNNDAPAGTNITCTGNACPEVEKADATFLYSFEDSGVGDVTGFLALDNTNKLIVLSFRGSRSIENWIGNXNFDLKEINDICSGCRGHDGFTSSWRSVADTLRQKVEDAVREHPDYRVVFTGHSLGGALATVAGADLRGNGYDIDVFSYGAPRVGNRAFAEFLTVQTGGTLYRITHTNDIVPRLPPREFGYSHSSPEYWIKSGTLVPVTRNDIVKIEGIDATGGNNQPNIPDIPAHLWYFGLIGTCL

SEQ ID NO: 3003 - protein, 269 aa, Thermomyces lanuginosus
EVSQDLFNQFNLFAQYSAAAYCGKNNDAPAGTNITCTGNACPEVEKADATFLYSFEDSGVGDVNGFLALDNTNKLIVLSFRGSRSIENWIGNLNFDLKEINDICSGCRGHDGFTSSWRSVADTLRQKVEDAVREHPDYRVVFTGHSLGGALATVAGADLRGNGYDIDVFSYGAPRVGNRAFAEFLTVQTGGTLYRITHTNDIVPRLPPREFGYSHSSPEYWIKSGTLVPVTRNDIVKIEGIDATGGNNQPNIPDIPAHLWYFGLIGTCL

SEQ ID NO: 3004 - protein, 269 aa, Thermomyces lanuginosus
EVSQDLFNQFNLFAQYSAAAYCGKNNDAPAGTNITCTGNACPEVEKADATFLYSFEDSGVGDVTGFLALDNTNKLIVLSFRGSRSIENWIGNLNFDLKEINDICSGCRGHDGFTSSWRSVADTLRQKVEDAVREHPDYRVVFTGHSLGGALATIAGADLRGNGYDIDVFSYGAPRVGNRAFAEFLTVQTGGTLYRITHTNDIVPRLPPREFGYSHSSPEYWIKSGTLVPVTRNDIVKIEGIDATGGNNQPNIPDIPAHLWYFGLIGTCL

SEQ ID NO: 3005 - protein, 269 aa, Thermomyces lanuginosus
EVSQDLFNQFNLFAQYSAAAYCGKNNDAPAGTNITCTGNACPEVEKADATFLYSFEDSGVGDVTGFLALDNTNKLIVLSFRGSRSIENWIGNLNFDLKEINDICSGCRGHDGFTSSWRSVADTLRQKVEDAVREHPDYRVVFTGHSLGGALATVAGADLRGNGYDIDVFSYGAPRVGNRAFAEFLTVQTGGTLYRITHTNDIVPRLPPREFGYSHSSPEYWIKSGTLVPVTRNDIVKIEGIDATGGNNQPAIPDIPAHLWYFGLIGTCL

SEQ ID NO: 3006 - protein, 269 aa, Thermomyces lanuginosus
EVSQDLFNQFNLFAQYSAAAYCGKNNDAPNGTNITCTGNACPEVEKADATFLYSFEDSGVGDVTGFLALDNTNKLIVLSFRGSRSIENWIGNLNFDLKEINDICSGCRGHDGFTSSWRSVADTLRQKVEDAVREHPDYRVVFTGHSLGGALATVAGADLRGNGYDIDVFSYGAPRVGNRAFAEFLTVQTGGTLYRITHTNDIVPRLPPREFGYSHSSPEYWIKSGTLVPVTRNDIVKIEGIDATGGNNQPNIPDIPAHLWYFGLIGTCL

SEQ ID NO: 3007 - protein, 269 aa, Thermomyces lanuginosus
EVSQDLFNQFNLFAQYSAAAYCGKNNDAPAGTNITCTGNACPEVEKADATFLYSFEDSGVGDVTGFLALDNTNKLIVLSFRGSRSIENWIGNLNFDLKEINDICSGCRGHDGFTSSWRSVADTLRQKVEDAVREHPDYRVVFTGHSLGGALATVAWADLRGNGYDIDVFSYGAPRVGNRAFAEFLTVQTGGTLYRITHTNDIVPRLPPREFGYSHSSPEYWIKSGTLVPVTRNDIVKIEGIDATGGNNQPNIPDIPAHLWYFGLIGTCL

SEQ ID NO: 3008 - protein, 269 aa, Thermomyces lanuginosus
EVSQDLFNQFNLFAQYSAAAYCGKNNDAPAGTNITCTGNACPEVEKADATFLYSFEDSGVGDVTGFLALDNTNKLIVLSFRGSRSIENWIGNLNFDLKEINDICSGCRGHDGFTSSWRSVADTLRQKVEDAVREHPDYRVVFTGHSLGGALATVAGADLRGNGYPIDVFSYGAPRVGNRAFAEFLTVQTGGTLYRITHTNDIVPRLPPREFGYSHSSPEYWIKSGTLVPVTRNDIVKIEGIDATGGNNQPNIPDIPAHLWYFGLIGTCL

SEQ ID NO: 3009 - protein, 269 aa, Thermomyces lanuginosus
EVSQDLFNQFNLFAQYSAAAYCGKNNDAPAGTNITCTGNACPEVEKADATFLYSFEDSGVGDVTGFLALDNTNKLIVLSFRGSRSIENWIGNLNFDLKEINDICSGCRGHDGFTSSWRSVADTLRQKVEDAVREHPDYRVVFTGHSLGGALATVAGADLRGNGYDIDLFSYGAPRVGNRAFAEFLTVQTGGTLYRITHTNDIVPRLPPREFGYSHSSPEYWIKSGTLVPVTRNDIVKIEGIDATGGNNQPNIPDIPAHLWYFGLIGTCL

SEQ ID NO: 3010 - protein, 269 aa, Thermomyces lanuginosus
EVSQDLFNQFNLFAQYSAAAYCGKNNDAPAGTNITCTGNACPEVEKADATFLYSFEDSGVGDVTGFLALDNTNKTIVLSFRGSRSIENWIGNLNFDLKEINDICSGCRGHDGFTSSWRSVADTLRQKVEDAVREHPDYRVVFTGHSLGGALATVAGADLRGNGYDIDVFSYGAPRVGNRAFAEFLTVQTGGTLYRITHTNDIVPRLPPREFGYSHSSPEYWIKSGTLVPVTRNDIVKIEGIDATGGNNQPNIPDIPAHLWYFGLIGTCL

SEQ ID NO: 3011 - protein, 269 aa, Thermomyces lanuginosus
EVSQDLFNQFNLFAQYSAAAYCGKNNDAPAGTNITCTGNACPEVEKADATFLYSFEDSGVGDVTGFLALDNTNKLIVLSFRGSRSIENWIGNLNFDLKEINDICSGCRGHDGFTSSWRSVADTLRQKVEDAVRLHPDYRVVFTGHSLGGALATVAGADLRGNGYDIDVFSYGAPRVGNRAFAEFLTVQTGGTLYRITHTNDIVPRLPPREFGYSHSSPEYWIKSGTLVPVTRNDIVKIEGIDATGGNNQPNIPDIPAHLWYFGLIGTCL

SEQ ID NO: 3012 - protein, 269 aa, Thermomyces lanuginosus
EVSQDLFNQFNLFAQWSAAAYCGKNNDAPAGTNITCTGNACPEVEKADATFLYSFEDSGVGDVTGFLALDNTNKLIVLSFRGSRSIENWIGNLNFDLKEINDICSGCRGHDGFTSSWRSVADTLRQKVEDAVREHPDYRVVFTGHSLGGALATVAGADLRGNGYDIDVFSYGAPRVGNRAFAEFLTVQTGGTLYRITHTNDIVPRLPPREFGYSHSSPEYWIKSGTLVPVTRNDIVKIEGIDATGGNNQPNIPDIPAHLWYFGLIGTCL

SEQ ID NO: 3013 - protein, 269 aa, Thermomyces lanuginosus
EVSQDLFNQFNLFAQYSAAAYCGKNNNAPAGTNITCTGNACPEVEKADATFLYSFEDSGVGDVTGFLALDNTNKLIVLSFRGSRSIENWIGNLNFDLKEINDICSGCRGHDGFTSSWRSVADTLRQKVEDAVREHPDYRVVFTGHSLGGALATVAGADLRGNGYDIDVFSYGAPRVGNRAFAEFLTVQTGGTLYRITHTNDIVPRLPPREFGYSHSSPEYWIKSGTLVPVTRNDIVKIEGIDATGGNNQPNIPDIPAHLWYFGLIGTCL

SEQ ID NO: 3014 - protein, 269 aa, Thermomyces lanuginosus
EVSQDLFNQFNLFAQYSAAAYCGKNNDAPAGTNITCTGNACPEVEKADATFLYSFEDSGVGDVTGFLALDNTNKLIVLSFRGSRSIENWIGNLNFDLKEINDICSGCRGHDGFTSSWRSVADTLRQKVEDAVREHPDYRVVFTGHSLGGALATVAGADLRGMGYDIDVFSYGAPRVGNRAFAEFLTVQTGGTLYRITHTNDIVPRLPPREFGYSHSSPEYWIKSGTLVPVTRNDIVKIEGIDATGGNNQPNIPDIPAHLWYFGLIGTCL

SEQ ID NO: 3015 - protein, 269 aa, Thermomyces lanuginosus
EVSQDLFNQFNLFAQYSAAAYCGKNNDAPAGTNITCTGNACPEVEKADATFLYSFEDSGVGDVTGFLALDNTNKLIVLSFRGSRSIENWIGNLNFDLKEINDICSGCRGHDGFTSSWRSVADTLRQKVEDAVREHPDYRVVFTGHSLGGALATVAGADLRGNGYDIDVFSYGAPRVGNRAFAEFLTVQTGGTLYRITHTNDIVPRLPPREFGYSHSSPEYWIKSGTLVPVTRNDIVKIEGIDAFGGNNQPNIPDIPAHLWYFGLIGTCL

SEQ ID NO: 3016 - protein, 269 aa, Thermomyces lanuginosus
EVSQDLFNQFNLFAQYSAAAYCGKNNDAPAGTNITCTGNACPEVEKADATFLYSFEDSGVGDVTGFLALDNTNKLIVLSFRGSRSIENWIGNLNFDLKEINDICSGCRGHDGFTSSWRSVADTLRQKVEDAVREHPDYRVVFTGHSLGGALATVAGADLRGNGYDIDVFSYGAPRVGNRAFAEFLTVQTGGTLYRITHTNDIVPRLPPREFGYSHSSPEYWIKSGTLVPVTRNDIVKIEGIDATGGNNQPNIPTIPAHLWYFGLIGTCL

SEQ ID NO: 3017 - protein, 269 aa, Thermomyces lanuginosus
EVSQDLFNQFNLFAMYSAAAYCGKNNDAPAGTNITCTGNACPEVEKADATFLYSFEDSGVGDVTGFLALDNTNKLIVLSFRGSRSIENWIGNLNFDLKEINDICSGCRGHDGFTSSWRSVADTLRQKVEDAVREHPDYRVVFTGHSLGGALATVAGADLRGNGYDIDVFSYGAPRVGNRAFAEFLTVQTGGTLYRITHTNDIVPRLPPREFGYSHSSPEYWIKSGTLVPVTRNDIVKIEGIDATGGNNQPNIPDIPAHLWYFGLIGTCL

SEQ ID NO: 3018 - protein, 269 aa, Thermomyces lanuginosus
EVSQDLFNQFNLFAQYSAAAYCGKNNDAYAGTNITCTGNACPEVEKADATFLYSFEDSGVGDVTGFLALDNTNKLIVLSFRGSRSIENWIGNLNFDLKEINDICSGCRGHDGFTSSWRSVADTLRQKVEDAVREHPDYRVVFTGHSLGGALATVAGADLRGNGYDIDVFSYGAPRVGNRAFAEFLTVQTGGTLYRITHTNDIVPRLPPREFGYSHSSPEYWIKSGTLVPVTRNDIVKIEGIDATGGNNQPNIPDIPAHLWYFGLIGTCL

SEQ ID NO: 3019 - protein, 269 aa, Thermomyces lanuginosus
EVSQDLFNQFNLFAQYSAAAYCGKNSDAPAGTNITCTGNACPEVEKADATFLYSFEDSGVGDVTGFLALDNTNKLIVLSFRGSRSIENWIGNLNFDLKEINDICSGCRGHDGFTSSWRSVADTLRQKVEDAVREHPDYRVVFTGHSLGGALATVAGADLRGNGYDIDVFSYGAPRVGNRAFAEFLTVQTGGTLYRITHTNDIVPRLPPREFGYSHSSPEYWIKSGTLVPVTRNDIVKIEGIDATGGNNQPNIPDIPAHLWYFGLIGTCL

SEQ ID NO: 3020 - protein, 269 aa, Thermomyces lanuginosus
EVSQDLFNQFNLFAQYSAAAYCGKNNDAPAGTNITCTGNACPEVEKADATFLYSFEDSGVGDVTGFLALDNTNKLIVLSFRGSRSIENWIGNLNFDLKEINDICSGCRGHDGFTSSWRSVADTLRQKCEDAVREHPDYRVVFTGHSLGGALATVAGADLRGNGYDIDVFSYGAPRVGNRAFAEFLTVQTGGTLYRITHTNDIVPRLPPREFGYSHSSPEYWIKSGTLVPVTRNDIVKIEGIDATGGNNQPNIPDIPAHLWYFGLIGTCL

SEQ ID NO: 3021 - protein, 269 aa, Thermomyces lanuginosus
EVSQDLFNQFNLFAQYSAAAYCGNNNDAPAGTNITCTGNACPEVEKADATFLYSFEDSGVGDVTGFLALDNTNKLIVLSFRGSRSIENWIGNLNFDLKEINDICSGCRGHDGFTSSWRSVADTLRQKVEDAVREHPDYRVVFTGHSLGGALATVAGADLRGNGYDIDVFSYGAPRVGNRAFAEFLTVQTGGTLYRITHTNDIVPRLPPREFGYSHSSPEYWIKSGTLVPVTRNDIVKIEGIDATGGNNQPNIPDIPAHLWYFGLIGTCL

SEQ ID NO: 3022 - protein, 269 aa, Thermomyces lanuginosus
EVSQDLFNQFNLFAQYSAAAYCGKNNDAPAGTNITCTGNACPEVEKADATFLYSFEDSGVGDVTGFLALDNTNKLIVLSFRGSRSIENWIGNLNFDLKSINDICSGCRGHDGFTSSWRSVADTLRQKVEDAVREHPDYRVVFTGHSLGGALATVAGADLRGNGYDIDVFSYGAPRVGNRAFAEFLTVQTGGTLYRITHTNDIVPRLPPREFGYSHSSPEYWIKSGTLVPVTRNDIVKIEGIDATGGNNQPNIPDIPAHLWYFGLIGTCL

SEQ ID NO: 3023 - protein, 269 aa, Thermomyces lanuginosus
EVSQDLFNQFNLFAQYSAAAYCGKNNDAPAGTNITCTGNACPEVEKADATFLYSFEDSGVGDVTGFLALDNTNKLIVLSFRGSRSIENWIGNLNFDLKEINDICSGCRGHDGFTSSWRSVADTLRQKVEDAVREHPDYRVVFTGHSLGGALATVAGADLRGNGYDIDVFSYGAPRVGNEAFAEFLTVQTGGTLYRITHTNDIVPRLPPREFGYSHSSPEYWIKSGTLVPVTRNDIVKIEGIDATGGNNQPNIPDIPAHLWYFGLIGTCL

SEQ ID NO: 3024 - protein, 269 aa, Thermomyces lanuginosus
EVSQDLFNQFNLFAQYSAAAYCGKNNDAPAGTNITCTGNACPEVEKADATFLYSFEDSGVGDVTGFLALDNTNKLIVLSFRGSRSIENWIGNLNFDLKEINDICSGCRGHDGFTSSWRSVADTLRQKVEDAVREHPDYRVVFTGHSLGGALATVAGADLRGNGYDIDVFSYGAPRVGNRAFAEFLTVQTGGTLYRITHVNDIVPRLPPREFGYSHSSPEYWIKSGTLVPVTRNDIVKIEGIDATGGNNQPNIPDIPAHLWYFGLIGTCL

SEQ ID NO: 3025 - protein, 269 aa, Thermomyces lanuginosus
EVSQDLFNQFNLFAQYSAAAYCGKNNDAPAGTNITCTGNACPEVEKADATFLYSFEDSGVGDVTGFLALDNTNKLIVLSFRGSRSIENWIGNLNFDLKEINDICSGCRGHDGFTSSWRSVADTLRQKVEDAVREHPAYRVVFTGHSLGGALATVAGADLRGNGYDIDVFSYGAPRVGNRAFAEFLTVQTGGTLYRITHTNDIVPRLPPREFGYSHSSPEYWIKSGTLVPVTRNDIVKIEGIDATGGNNQPNIPDIPAHLWYFGLIGTCL

SEQ ID NO: 3026 - protein, 269 aa, Thermomyces lanuginosus
EVSQDLFNQFNLFAQYSAAAYCGKNNDAPAGTNITCTGNACPEVEKADATFLYSFEDSGVGDVTGFLALDNTNKLIVLSFRGSRSIENWIGNLNFDLKEINDICSGCRGHDGFTSSWRSVADTLRQKVEDAVREHPDYRVVFTGHSLGGALATVAGADLRGNGYDIDVFSYGAPRVGNRAFAEFLTVQTGGTLYRITHTNDIVPRLPPREFGYSHSSPEYWIKSGTLVPVTRNDIVKIEGIDATGGNNQPNDPDIPAHLWYFGLIGTCL

SEQ ID NO: 3027 - protein, 269 aa, Thermomyces lanuginosus
EVSQDLFNQFNLFAQYSAAAYCGKNNDAPAGTNITCTGNACPEVEKADASFLYSFEDSGVGDVTGFLALDNTNKLIVLSFRGSRSIENWIGNLNFDLKEINDICSGCRGHDGFTSSWRSVADTLRQKVEDAVREHPDYRVVFTGHSLGGALATVAGADLRGNGYDIDVFSYGAPRVGNRAFAEFLTVQTGGTLYRITHTNDIVPRLPPREFGYSHSSPEYWIKSGTLVPVTRNDIVKIEGIDATGGNNQPNIPDIPAHLWYFGLIGTCL

SEQ ID NO: 3028 - protein, 269 aa, Thermomyces lanuginosus
EVSQDLFNQFNLFAQYSAAAYCGKNNDAPAGTNITCTGNACPEVEKADATFLYSFEDSGVGDVTGRLALDNTNKLIVLSFRGSRSIENWIGNLNFDLKEINDICSGCRGHDGFTSSWRSVADTLRQKVEDAVREHPDYRVVFTGHSLGGALATVAGADLRGNGYDIDVFSYGAPRVGNRAFAEFLTVQTGGTLYRITHTNDIVPRLPPREFGYSHSSPEYWIKSGTLVPVTRNDIVKIEGIDATGGNNQPNIPDIPAHLWYFGLIGTCL

SEQ ID NO: 3029 - protein, 269 aa, Thermomyces lanuginosus
EVSQDLFNQFNLFAQYSAAAYCCKNNDAPAGTNITCTGNACPEVEKADATFLYSFEDSGVGDVTGFLALDNTNKLIVLSFRGSRSIENWIGNLNFDLKEINDICSGCRGHDGFTSSWRSVADTLRQKVEDAVREHPDYRVVFTGHSLGGALATVAGADLRGNGYDIDVFSYGAPRVGNRAFAEFLTVQTGGTLYRITHTNDIVPRLPPREFGYSHSSPEYWIKSGTLVPVTRNDIVKIEGIDATGGNNQPNIPDIPAHLWYFGLIGTCL

SEQ ID NO: 3030 - protein, 269 aa, Thermomyces lanuginosus
EVSQDLFNQFNLFAQYSAAAYCGKNNDAPAGTNITCTGNACPEVEKADATFLYSFEDSGVGDVTGFLALDNTNKLIVLSFRGSRSIENWIGNLNFDLIEINDICSGCRGHDGFTSSWRSVADTLRQKVEDAVREHPDYRVVFTGHSLGGALATVAGADLRGNGYDIDVFSYGAPRVGNRAFAEFLTVQTGGTLYRITHTNDIVPRLPPREFGYSHSSPEYWIKSGTLVPVTRNDIVKIEGIDATGGNNQPNIPDIPAHLWYFGLIGTCL

SEQ ID NO: 3031 - protein, 269 aa, Thermomyces lanuginosus
EVSQDLFNQFNLFAQYSAAAYCGKNNDAPAGTNITCTGNACPEVEKADATFLYSFEDSGVGDVTGFLALDNTNKLIVLSFRGSRSIENWIGNLNFDLKEINDICSGCRGHDGFTSSWRSVADTLRQKVEDAVREHPDYRVVFTGHSLGGALATVAGADLRGNGYDIDVFSYGAPRVGNRAFAEFLTVQTGGTLYRITHTNDIVPRLPPRAFGYSHSSPEYWIKSGTLVPVTRNDIVKIEGIDATGGNNQPNIPDIPAHLWYFGLIGTCL

SEQ ID NO: 3032 - protein, 269 aa, Thermomyces lanuginosus
EVSQDLFNQFNLFAQYSAAAYCGKNNDAPAGTNITCTGNACPEVEKADATFLYSFEDSGVGDVTGFLALDNTNKLIVLSFRGSRSIENWIGNLNFDLKEINDICSGCRGHDGFTSSWRSVADTLRQKVEDAVREHPDYRVVFTGHSLGGALATVAGADLRGNGNDIDVFSYGAPRVGNRAFAEFLTVQTGGTLYRITHTNDIVPRLPPREFGYSHSSPEYWIKSGTLVPVTRNDIVKIEGIDATGGNNQPNIPDIPAHLWYFGLIGTCL

SEQ ID NO: 3033 - protein, 269 aa, Thermomyces lanuginosus
EVSNDLFNQFNLFAQYSAAAYCGKNNDAPAGTNITCTGNACPEVEKADATFLYSFEDSGVGDVTGFLALDNTNKLIVLSFRGSRSIENWIGNLNFDLKEINDICSGCRGHDGFTSSWRSVADTLRQKVEDAVREHPDYRVVFTGHSLGGALATVAGADLRGNGYDIDVFSYGAPRVGNRAFAEFLTVQTGGTLYRITHTNDIVPRLPPREFGYSHSSPEYWIKSGTLVPVTRNDIVKIEGIDATGGNNQPNIPDIPAHLWYFGLIGTCL

SEQ ID NO: 3034 - protein, 269 aa, Thermomyces lanuginosus
EVSQDLFNQFNLFAQYSAAAYCGKNNDAPAGTNITCTGNACPEVEKADATFLYSFEDSGVGDVTGFLALDNTNKLIVLSFRGSRSIENWIGNLNFDLKEINDICSGCRGHDGFTSSWRSVADTLRQKVEDAVREHPDYRVVFTGHSLGGALATVAGADLRGNGYDIDVFSYGAPRVGNRAFAEFLTVQTGGTLYRITHTNDIVPRLPPREFGYSHSSPEYWIKSGTLVPVTRNDIVKIEGIDATGGNNQPNIPDIPAHMWYFGLIGTCL

SEQ ID NO: 3035 - protein, 269 aa, Thermomyces lanuginosus
EVSQDLFNQFNLFAQYSAAAYCGKNNDAPAGTNITCTGNACPEVEKADATFLYSFEDSGVGDVTGFLALDNTNKLIVLSFRGSRSIENWIGNLNFDLKEINDICSGCRGHDGFTSSWRSVADTLRQKSEDAVREHPDYRVVFTGHSLGGALATVAGADLRGNGYDIDVFSYGAPRVGNRAFAEFLTVQTGGTLYRITHTNDIVPRLPPREFGYSHSSPEYWIKSGTLVPVTRNDIVKIEGIDATGGNNQPNIPDIPAHLWYFGLIGTCL

SEQ ID NO: 3036 - protein, 269 aa, Thermomyces lanuginosus
EVSQDLFNQFNLFAQYSAAAYCGKNNDAPAGTNITCTGNACPEVEKADATFLYSFEDSGVGDVTGFLALDNTNKLIVLSFRGSRSIENWIGNLNFDLKEINDICSGCRGHDGFTSSWRSVADTLRQKVEDAVREHPDYRVVFTGHSLGGALATVAGADLRGNGYDIDVFSYGAPRVGNRAFAEFLTVQTGGTLYRITHTNDLVPRLPPREFGYSHSSPEYWIKSGTLVPVTRNDIVKIEGIDATGGNNQPNIPDIPAHLWYFGLIGTCL

SEQ ID NO: 3037 - protein, 269 aa, Thermomyces lanuginosus
EVSQDLFNQFNLFAQYSAAAYCGKNNDAPAGTNITCTGNACPEVEKADATFLYSFEDSGVGDVTGFLALDNTNKLIVLSFRGSRSIENWIGNLNFDLKEINDICSGCRGHDGFTSSWRSVADTLRQKVEDAVREHPDYRVVFTGHSLGGALATVAGADLRGNGYDIDVFSYGAPRVGNRAFAEFLTVQTGGTLYRITHTNDIVPRLPPREFGYSHSSPEYWIKSGTLVPVTRNDIVKIEGIDATGGNNQPNIRDIPAHLWYFGLIGTCL

SEQ ID NO: 3038 - protein, 269 aa, Thermomyces lanuginosus
EVSQDLFNQFNLFAQYSAAAYCGKNNDAPAGTNITCTGNACPEVEKADATFLYSFEDSGVGDVTGFLALDNTNKLIVLSFRGSRSIENWIGNLNFDLKEINDICSGCRGHDGFTSSWRSVADTLRQKVEDAVREHPDYRVVFTGHSLGGALATVAGADLRGNGYDIDVFSYGAPRVGNRAFAEFLTVQTGGTLYRITHTNDIVPRLPPREFGYSHSSPEYWIKSGTLVPVTRNDIVKIEGIDATGGNNQPNGPDIPAHLWYFGLIGTCL

SEQ ID NO: 3039 - protein, 269 aa, Thermomyces lanuginosus
EVSQDLFNQFNLFAQYSAAAYCGKNNDAPAGTNITCTGNACPEVEKADATFLYSFEDSGVGDVTGFLALDNTEKLIVLSFRGSRSIENWIGNLNFDLKEINDICSGCRGHDGFTSSWRSVADTLRQKVEDAVREHPDYRVVFTGHSLGGALATVAGADLRGNGYDIDVFSYGAPRVGNRAFAEFLTVQTGGTLYRITHTNDIVPRLPPREFGYSHSSPEYWIKSGTLVPVTRNDIVKIEGIDATGGNNQPNIPDIPAHLWYFGLIGTCL

SEQ ID NO: 3040 - protein, 269 aa, Thermomyces lanuginosus
EVSQDLFNQFNLFAQYSAAAYCGKNNDAPAGTNITCTGNACPEVEKADATFLYSFEDSGVGDVTGFLALDNTNKLIVLSFRGSRSIENWIGNLNFDLKEINDICSGCRGHDGFTSSWRSVADTLRQKVEDAVREHPDYRVVFTGHSLGGALATVAGADLRGNGYDIDVFSYGAPRVGNRAFAEFLTVQTGGTLYRITHTNDIVPRLPPREFGYSHSSPEYWIKSGTLVPVTCNDIVKIEGIDATGGNNQPNIPDIPAHLWYFGLIGTCL

SEQ ID NO: 3041 - protein, 269 aa, Thermomyces lanuginosus
EVSQDLFNQFNLFAQYSAAAYCGKNNDAPAGTNITCTGNACPEVEKADATFLYSFEDSGVGDVTLFLALDNTNKLIVLSFRGSRSIENWIGNLNFDLKEINDICSGCRGHDGFTSSWRSVADTLRQKVEDAVREHPDYRVVFTGHSLGGALATVAGADLRGNGYDIDVFSYGAPRVGNRAFAEFLTVQTGGTLYRITHTNDIVPRLPPREFGYSHSSPEYWIKSGTLVPVTRNDIVKIEGIDATGGNNQPNIPDIPAHLWYFGLIGTCL

SEQ ID NO: 3042 - protein, 269 aa, Thermomyces lanuginosus
EVSQDLFNQFNLFAQYSAAAYCGKNNDAPAGTNITCTGNACPEVEKADATFLYSFEDSGVGDVTGFLALDNTNKLIVLSFRGSRSIENWNGNLNFDLKEINDICSGCRGHDGFTSSWRSVADTLRQKVEDAVREHPDYRVVFTGHSLGGALATVAGADLRGNGYDIDVFSYGAPRVGNRAFAEFLTVQTGGTLYRITHTNDIVPRLPPREFGYSHSSPEYWIKSGTLVPVTRNDIVKIEGIDATGGNNQPNIPDIPAHLWYFGLIGTCL

SEQ ID NO: 3043 - protein, 269 aa, Thermomyces lanuginosus
EVSQDLFNQFNLFAQYSAAAYCGKNNDAPAGTNITCTGNACPEVEKADATFLYSFEDSGVGDVTGFLALDNTNKLIVLSFRGSRSIENWIGNLNFDLKEINDICSGCRGHDGFTSSWRSVADTLRQKVEDAVREHPDYRQVFTGHSLGGALATVAGADLRGNGYDIDVFSYGAPRVGNRAFAEFLTVQTGGTLYRITHTNDIVPRLPPREFGYSHSSPEYWIKSGTLVPVTRNDIVKIEGIDATGGNNQPNIPDIPAHLWYFGLIGTCL

SEQ ID NO: 3044 - protein, 269 aa, Thermomyces lanuginosus
EVSQDLFNQFNLFAQYSAAAYCGKNNDAPAGTNITCTGNACPEVEKADATFLYSFEDSGVGDVTGFLALDNTNKLIVLSFRGSRSIENWIGNLNFDLKEINDICSGCRGHDGFTSSWRSVADTLRQRVEDAVREHPDYRVVFTGHSLGGALATVAGADLRGNGYDIDVFSYGAPRVGNRAFAEFLTVQTGGTLYRITHTNDIVPRLPPREFGYSHSSPEYWIKSGTLVPVTRNDIVKIEGIDATGGNNQPNIPDIPAHLWYFGLIGTCL

SEQ ID NO: 3045 - protein, 269 aa, Thermomyces lanuginosus
ELSQDLFNQFNLFAQYSAAAYCGKNNDAPAGTNITCTGNACPEVEKADATFLYSFEDSGVGDVTGFLALDNTNKLIVLSFRGSRSIENWIGNLNFDLKEINDICSGCRGHDGFTSSWRSVADTLRQKVEDAVREHPDYRVVFTGHSLGGALATVAGADLRGNGYDIDVFSYGAPRVGNRAFAEFLTVQTGGTLYRITHTNDIVPRLPPREFGYSHSSPEYWIKSGTLVPVTRNDIVKIEGIDATGGNNQPNIPDIPAHLWYFGLIGTCL

SEQ ID NO: 3046 - protein, 269 aa, Thermomyces lanuginosus
DVSQDLFNQFNLFAQYSAAAYCGKNNDAPAGTNITCTGNACPEVEKADATFLYSFEDSGVGDVTGFLALDNTNKLIVLSFRGSRSIENWIGNLNFDLKEINDICSGCRGHDGFTSSWRSVADTLRQKVEDAVREHPDYRVVFTGHSLGGALATVAGADLRGNGYDIDVFSYGAPRVGNRAFAEFLTVQTGGTLYRITHTNDIVPRLPPREFGYSHSSPEYWIKSGTLVPVTRNDIVKIEGIDATGGNNQPNIPDIPAHLWYFGLIGTCL

SEQ ID NO: 3047 - protein, 269 aa, Thermomyces lanuginosus
EVSQDLFNQFNLFAQYSAAAYCGKNNDAPAGTNITCTGNACPEVEKADATFLYSFEDSGVGDVTGFLALDNTNKLIVLSFRGSRSIENWIGNLNFDLKEINDICSGCRGHDGFTSSWRSVADTLRQKVEDAVREHPDYRVVFTGHSLGGALATVAGADLRGNGYDIDVFSYGAPRVGNRAFAEFLTVQTGGTLYRITHTNDIVPRLPPREFGYSHSSTEYWIKSGTLVPVTRNDIVKIEGIDATGGNNQPNIPDIPAHLWYFGLIGTCL

SEQ ID NO: 3048 - protein, 269 aa, Thermomyces lanuginosus
EVSQDLFNQFNLFAQYSAAAYCGKNNYAPAGTNITCTGNACPEVEKADATFLYSFEDSGVGDVTGFLALDNTNKLIVLSFRGSRSIENWIGNLNFDLKEINDICSGCRGHDGFTSSWRSVADTLRQKVEDAVREHPDYRVVFTGHSLGGALATVAGADLRGNGYDIDVFSYGAPRVGNRAFAEFLTVQTGGTLYRITHTNDIVPRLPPREFGYSHSSPEYWIKSGTLVPVTRNDIVKIEGIDATGGNNQPNIPDIPAHLWYFGLIGTCL

SEQ ID NO: 3049 - protein, 269 aa, Thermomyces lanuginosus
EVSQDLFNQFNLFAQYSAAAYCGKNNDAPAGTNITCTGNACPEVEKADATFLYSFEDSGVGDVTGFLALDNTNKLIVLSFRGSRSIENWIGNLNFDLKEINDICSGCRGHDGFTSSWRSVADTLRQKVEDAVREHPDYRVVFTGHSLGGALATVAGADLRGRGYDIDVFSYGAPRVGNRAFAEFLTVQTGGTLYRITHTNDIVPRLPPREFGYSHSSPEYWIKSGTLVPVTRNDIVKIEGIDATGGNNQPNIPDIPAHLWYFGLIGTCL

SEQ ID NO: 3050 - protein, 269 aa, Thermomyces lanuginosus
EVSQDLFEQFNLFAQYSAAAYCGKNNDAPAGTNITCTGNACPEVEKADATFLYSFEDSGVGDVTGFLALDNTNKLIVLSFRGSRSIENWIGNLNFDLKEINDICSGCRGHDGFTSSWRSVADTLRQKVEDAVREHPDYRVVFTGHSLGGALATVAGADLRGNGYDIDVFSYGAPRVGNRAFAEFLTVQTGGTLYRITHTNDIVPRLPPREFGYSHSSPEYWIKSGTLVPVTRNDIVKIEGIDATGGNNQPNIPDIPAHLWYFGLIGTCL

SEQ ID NO: 3051 - protein, 269 aa, Thermomyces lanuginosus
EVSQDLFNQFNLFAQYSHAAYCGKNNDAPAGTNITCTGNACPEVEKADATFLYSFEDSGVGDVTGFLALDNTNKLIVLSFRGSRSIENWIGNLNFDLKEINDICSGCRGHDGFTSSWRSVADTLRQKVEDAVREHPDYRVVFTGHSLGGALATVAGADLRGNGYDIDVFSYGAPRVGNRAFAEFLTVQTGGTLYRITHTNDIVPRLPPREFGYSHSSPEYWIKSGTLVPVTRNDIVKIEGIDATGGNNQPNIPDIPAHLWYFGLIGTCL

SEQ ID NO: 3052 - protein, 269 aa, Thermomyces lanuginosus
EVSQDLFNQFNLFAQYSAAAYCGKNNDAPAGTNITCTGNACPEVEKADATFLYSFEDSGVGDVTGFLALDNTNKLIVLSFRGSRSIENWIGNLNFDLKEINDICSGCRGHDGFTSSWRSVADLLRQKVEDAVREHPDYRVVFTGHSLGGALATVAGADLRGNGYDIDVFSYGAPRVGNRAFAEFLTVQTGGTLYRITHTNDIVPRLPPREFGYSHSSPEYWIKSGTLVPVTRNDIVKIEGIDATGGNNQPNIPDIPAHLWYFGLIGTCL

SEQ ID NO: 3053 - protein, 269 aa, Thermomyces lanuginosus
EVSQDLFNQFNLFAQYSAAAYCGKNNDAPAGTNITCTGNACPEVEKADATFLYSFEDSGVGDVTGFLALDNTNKLIVLSFRGSRSIENWIGNLNFDLKEINDICSGCRGHDGFTSSWRSVADTLRQKVEDAVREHPDYRVVFTGHSLGGALATVAGADLRGNGYDIDVFSYGAPRVGNRAFAEFLTVQTGGTLYRITHTNDIVPRLPPREFGYSHSSPEYWIKSGTLVPVTRNDIVKIEGIDATGGNNQQNIPDIPAHLWYFGLIGTCL

SEQ ID NO: 3054 - protein, 269 aa, Thermomyces lanuginosus
EVSQDLFNQFNLFAQYSAAAYCGKNNDAPAGTNITCHGNACPEVEKADATFLYSFEDSGVGDVTGFLALDNTNKLIVLSFRGSRSIENWIGNLNFDLKEINDICSGCRGHDGFTSSWRSVADTLRQKVEDAVREHPDYRVVFTGHSLGGALATVAGADLRGNGYDIDVFSYGAPRVGNRAFAEFLTVQTGGTLYRITHTNDIVPRLPPREFGYSHSSPEYWIKSGTLVPVTRNDIVKIEGIDATGGNNQPNIPDIPAHLWYFGLIGTCL

SEQ ID NO: 3055 - protein, 269 aa, Thermomyces lanuginosus
EVSQDQFNQFNLFAQYSAAAYCGKNNDAPAGTNITCTGNACPEVEKADATFLYSFEDSGVGDVTGFLALDNTNKLIVLSFRGSRSIENWIGNLNFDLKEINDICSGCRGHDGFTSSWRSVADTLRQKVEDAVREHPDYRVVFTGHSLGGALATVAGADLRGNGYDIDVFSYGAPRVGNRAFAEFLTVQTGGTLYRITHTNDIVPRLPPREFGYSHSSPEYWIKSGTLVPVTRNDIVKIEGIDATGGNNQPNIPDIPAHLWYFGLIGTCL

SEQ ID NO: 3056 - protein, 269 aa, Thermomyces lanuginosus
EVSQDLFNQFNLFAQYSAAAYCGKNNDAPAGTNITCTGNACPEVEKADATFLYSFEDSGVGDVTGFLALDNTNKLIVLSFRGSRSIENWIGNLNFDLKEINDICSGCRGHDGFTSSWRSVADTLRQKVEDAIREHPDYRVVFTGHSLGGALATVAGADLRGNGYDIDVFSYGAPRVGNRAFAEFLTVQTGGTLYRITHTNDIVPRLPPREFGYSHSSPEYWIKSGTLVPVTRNDIVKIEGIDATGGNNQPNIPDIPAHLWYFGLIGTCL

SEQ ID NO: 3057 - protein, 269 aa, Thermomyces lanuginosus
EVSQDLFNQFNLFAQYSAAAYCGKNNDAPAGTNITCTGNACPEVEKADATFLYVFEDSGVGDVTGFLALDNTNKLIVLSFRGSRSIENWIGNLNFDLKEINDICSGCRGHDGFTSSWRSVADTLRQKVEDAVREHPDYRVVFTGHSLGGALATVAGADLRGNGYDIDVFSYGAPRVGNRAFAEFLTVQTGGTLYRITHTNDIVPRLPPREFGYSHSSPEYWIKSGTLVPVTRNDIVKIEGIDATGGNNQPNIPDIPAHLWYFGLIGTCL

SEQ ID NO: 3058 - protein, 269 aa, Thermomyces lanuginosus
EVSQDLFNQFNLFAQYSAAAYCGKNNDAPAGTNITCTGNACPEVEKADATFLYSFEDSGVGDVTGFLALDNTNKLIVLSFRGSRSYENWIGNLNFDLKEINDICSGCRGHDGFTSSWRSVADTLRQKVEDAVREHPDYRVVFTGHSLGGALATVAGADLRGNGYDIDVFSYGAPRVGNRAFAEFLTVQTGGTLYRITHTNDIVPRLPPREFGYSHSSPEYWIKSGTLVPVTRNDIVKIEGIDATGGNNQPNIPDIPAHLWYFGLIGTCL

SEQ ID NO: 3059 - protein, 269 aa, Thermomyces lanuginosus
EVSQDLFNQFNLFAQYSAAAYCGKNNDAPAGTNITCTGNACPEVEKADATFLYSFEDSGVGDVTGFLALDNTNKLIVLSFRGSRSIENWIGNHNFDLKEINDICSGCRGHDGFTSSWRSVADTLRQKVEDAVREHPDYRVVFTGHSLGGALATVAGADLRGNGYDIDVFSYGAPRVGNRAFAEFLTVQTGGTLYRITHTNDIVPRLPPREFGYSHSSPEYWIKSGTLVPVTRNDIVKIEGIDATGGNNQPNIPDIPAHLWYFGLIGTCL

SEQ ID NO: 3060 - protein, 269 aa, Thermomyces lanuginosus
EVSQDLFNQFNLFAQYSAAAYCGKNNDAPAGTNITCTGNACPEVEKADATFLYSFEDSGVGDVTGFLALDNTNKLIVLSFRGSRSIENWIGNLNFDLKEINDICSGCRGHDGFTSSWRSVADTLRQKVETAVREHPDYRVVFTGHSLGGALATVAGADLRGNGYDIDVFSYGAPRVGNRAFAEFLTVQTGGTLYRITHTNDIVPRLPPREFGYSHSSPEYWIKSGTLVPVTRNDIVKIEGIDATGGNNQPNIPDIPAHLWYFGLIGTCL

SEQ ID NO: 3061 - protein, 269 aa, Thermomyces lanuginosus
EVSQDLFNGFNLFAQYSAAAYCGKNNDAPAGTNITCTGNACPEVEKADATFLYSFEDSGVGDVTGFLALDNTNKLIVLSFRGSRSIENWIGNLNFDLKEINDICSGCRGHDGFTSSWRSVADTLRQKVEDAVREHPDYRVVFTGHSLGGALATVAGADLRGNGYDIDVFSYGAPRVGNRAFAEFLTVQTGGTLYRITHTNDIVPRLPPREFGYSHSSPEYWIKSGTLVPVTRNDIVKIEGIDATGGNNQPNIPDIPAHLWYFGLIGTCL

SEQ ID NO: 3062 - protein, 269 aa, Thermomyces lanuginosus
EVSQDLFNQFNLFAQYSAAAYCGKNNDAPAGTNITCTGCACPEVEKADATFLYSFEDSGVGDVTGFLALDNTNKLIVLSFRGSRSIENWIGNLNFDLKEINDICSGCRGHDGFTSSWRSVADTLRQKVEDAVREHPDYRVVFTGHSLGGALATVAGADLRGNGYDIDVFSYGAPRVGNRAFAEFLTVQTGGTLYRITHTNDIVPRLPPREFGYSHSSPEYWIKSGTLVPVTRNDIVKIEGIDATGGNNQPNIPDIPAHLWYFGLIGTCL

SEQ ID NO: 3063 - protein, 269 aa, Thermomyces lanuginosus
EVSQDLFNQFNLFAQYSAAAYCGKNNDAPAGTNITCTGNACPEVEKADATFLYSFEDSGVGDVTGFLALDNTNKLIVLSFRGSRSIENWIGNLNFDLKEINDICSGCRGHDGFTSSWRSVADTLRQKVEDAVREHPDYRVVFTGHSLGGALATVAGADLRGNGYDIDVFSYGAPRVGNRAFAEFLTVQTGGTLYRITHTNDIVPRLPPREFGYSHSSPEYWIKSGTLVPVTDNDIVKIEGIDATGGNNQPNIPDIPAHLWYFGLIGTCL

SEQ ID NO: 3064 - protein, 269 aa, Thermomyces lanuginosus
EVSQDLFKQFNLFAQYSAAAYCGKNNDAPAGTNITCTGNACPEVEKADATFLYSFEDSGVGDVTGFLALDNTNKLIVLSFRGSRSIENWIGNLNFDLKEINDICSGCRGHDGFTSSWRSVADTLRQKVEDAVREHPDYRVVFTGHSLGGALATVAGADLRGNGYDIDVFSYGAPRVGNRAFAEFLTVQTGGTLYRITHTNDIVPRLPPREFGYSHSSPEYWIKSGTLVPVTRNDIVKIEGIDATGGNNQPNIPDIPAHLWYFGLIGTCL

SEQ ID NO: 3065 - protein, 269 aa, Thermomyces lanuginosus
EVSQDLFNQFNLFAQYSAAAYCGKNNDAPAGTNITCTGNACPEVEKADATFLYSFEDSGVGDVTGFLALDNTNKLIVLSFRGSRSIENWIGNLNFDLKEINDICSGCRGHWGFTSSWRSVADTLRQKVEDAVREHPDYRVVFTGHSLGGALATVAGADLRGNGYDIDVFSYGAPRVGNRAFAEFLTVQTGGTLYRITHTNDIVPRLPPREFGYSHSSPEYWIKSGTLVPVTRNDIVKIEGIDATGGNNQPNIPDIPAHLWYFGLIGTCL

SEQ ID NO: 3066 - protein, 269 aa, Thermomyces lanuginosus
EVSQKLFNQFNLFAQYSAAAYCGKNNDAPAGTNITCTGNACPEVEKADATFLYSFEDSGVGDVTGFLALDNTNKLIVLSFRGSRSIENWIGNLNFDLKEINDICSGCRGHDGFTSSWRSVADTLRQKVEDAVREHPDYRVVFTGHSLGGALATVAGADLRGNGYDIDVFSYGAPRVGNRAFAEFLTVQTGGTLYRITHTNDIVPRLPPREFGYSHSSPEYWIKSGTLVPVTRNDIVKIEGIDATGGNNQPNIPDIPAHLWYFGLIGTCL

SEQ ID NO: 3067 - protein, 269 aa, Thermomyces lanuginosus
EVSQDLFNQFNLFAQYSAAAYCGKNNDAPAGTNITCTGNACPEVEKADATFLYSFEDSGVGDVTGFLALDNTNKLIVLSFRGSRSIENWIGNLNFDLKEINDICSGCRGHDGFTSSWRSVADTLRQKVEDAVREHPDYRVVFTGHSLGGALATVAGADLRGHGYDIDVFSYGAPRVGNRAFAEFLTVQTGGTLYRITHTNDIVPRLPPREFGYSHSSPEYWIKSGTLVPVTRNDIVKIEGIDATGGNNQPNIPDIPAHLWYFGLIGTCL

SEQ ID NO: 3068 - protein, 269 aa, Thermomyces lanuginosus
EVSQDLFNQFNLFAQYSAAAYCGKNNDAPAGTNITCTGNACPEVEKADATFLYSFEDSGVGDVTGFLALDNTNKLIVLSFRGSRSIENWIGNLNFDLKEINDICSGCRGHDGFTSSWRSVADTLRQKVEDAVREHPDYRVVFTGHSLGGALATVAGADLRGNGYDIDVFSYGAPRVGNRAFAEFLTVQTGGTLYRITHTNDIVPRLPPREFGYSHSSPEYWIKSGTLVPVHRNDIVKIEGIDATGGNNQPNIPDIPAHLWYFGLIGTCL

SEQ ID NO: 3069 - protein, 269 aa, Thermomyces lanuginosus
EVSQDLFNQFNLFAQYSAAAYCGKNNDAGAGTNITCTGNACPEVEKADATFLYSFEDSGVGDVTGFLALDNTNKLIVLSFRGSRSIENWIGNLNFDLKEINDICSGCRGHDGFTSSWRSVADTLRQKVEDAVREHPDYRVVFTGHSLGGALATVAGADLRGNGYDIDVFSYGAPRVGNRAFAEFLTVQTGGTLYRITHTNDIVPRLPPREFGYSHSSPEYWIKSGTLVPVTRNDIVKIEGIDATGGNNQPNIPDIPAHLWYFGLIGTCL

SEQ ID NO: 3070 - protein, 269 aa, Thermomyces lanuginosus
EVSQDLFNQFNLFAQYSAAAYCGKNNDAPAGTNITCTGNSCPEVEKADATFLYSFEDSGVGDVTGFLALDNTNKLIVLSFRGSRSIENWIGNLNFDLKEINDICSGCRGHDGFTSSWRSVADTLRQKVEDAVREHPDYRVVFTGHSLGGALATVAGADLRGNGYDIDVFSYGAPRVGNRAFAEFLTVQTGGTLYRITHTNDIVPRLPPREFGYSHSSPEYWIKSGTLVPVTRNDIVKIEGIDATGGNNQPNIPDIPAHLWYFGLIGTCL

SEQ ID NO: 3071 - protein, 269 aa, Thermomyces lanuginosus
EVSQDLFNQFNLFAQYSAAAYCGKNNDAPAGTNITCTGNACPEVEKADATFLYSFEDSGVGDVTGFLALDNTNKLIVLSFRGSRSIENWIGNVNFDLKEINDICSGCRGHDGFTSSWRSVADTLRQKVEDAVREHPDYRVVFTGHSLGGALATVAGADLRGNGYDIDVFSYGAPRVGNRAFAEFLTVQTGGTLYRITHTNDIVPRLPPREFGYSHSSPEYWIKSGTLVPVTRNDIVKIEGIDATGGNNQPNIPDIPAHLWYFGLIGTCL

SEQ ID NO: 3072 - protein, 269 aa, Thermomyces lanuginosus
EVSQDLFNQFNLFAQYSAAAYCGKNNDAPAGTNITCTGNACPEVEKADATFLYSFEDSGVGDVTGFLALDNTNKLIVLSFRGSRSIENWIGNLNFDLKEINDICSGCRGHDGFTSSWRSVADTLRQKVEDAVREHPDYRCVFTGHSLGGALATVAGADLRGNGYDIDVFSYGAPRVGNRAFAEFLTVQTGGTLYRITHTNDIVPRLPPREFGYSHSSPEYWIKSGTLVPVTRNDIVKIEGIDATGGNNQPNIPDIPAHLWYFGLIGTCL

SEQ ID NO: 3073 - protein, 269 aa, Thermomyces lanuginosus
EVSQDLFNQFNLFAQYSAAAYCGKNNQAPAGTNITCTGNACPEVEKADATFLYSFEDSGVGDVTGFLALDNTNKLIVLSFRGSRSIENWIGNLNFDLKEINDICSGCRGHDGFTSSWRSVADTLRQKVEDAVREHPDYRVVFTGHSLGGALATVAGADLRGNGYDIDVFSYGAPRVGNRAFAEFLTVQTGGTLYRITHTNDIVPRLPPREFGYSHSSPEYWIKSGTLVPVTRNDIVKIEGIDATGGNNQPNIPDIPAHLWYFGLIGTCL

SEQ ID NO: 3074 - protein, 269 aa, Thermomyces lanuginosus
EVSQDLFNQFNLFAQYSAAAYCGKNNDAPAGTNITCTGNACPEVEKADATFLYSFEDSGVGDVTGFLALDNTNKLIVLSFRGSRSIENWIGNLNFDLKEIYDICSGCRGHDGFTSSWRSVADTLRQKVEDAVREHPDYRVVFTGHSLGGALATVAGADLRGNGYDIDVFSYGAPRVGNRAFAEFLTVQTGGTLYRITHTNDIVPRLPPREFGYSHSSPEYWIKSGTLVPVTRNDIVKIEGIDATGGNNQPNIPDIPAHLWYFGLIGTCL

SEQ ID NO: 3075 - protein, 269 aa, Thermomyces lanuginosus
EVSQDLFNQFNLFAQYSAAAYCGKNNDAPAGTNITCTYNACPEVEKADATFLYSFEDSGVGDVTGFLALDNTNKLIVLSFRGSRSIENWIGNLNFDLKEINDICSGCRGHDGFTSSWRSVADTLRQKVEDAVREHPDYRVVFTGHSLGGALATVAGADLRGNGYDIDVFSYGAPRVGNRAFAEFLTVQTGGTLYRITHTNDIVPRLPPREFGYSHSSPEYWIKSGTLVPVTRNDIVKIEGIDATGGNNQPNIPDIPAHLWYFGLIGTCL

SEQ ID NO: 3076 - protein, 269 aa, Thermomyces lanuginosus
EVSQDLFNQFNLFAQYSAAAYCGKNNDAPAGTNITCIGNACPEVEKADATFLYSFEDSGVGDVTGFLALDNTNKLIVLSFRGSRSIENWIGNLNFDLKEINDICSGCRGHDGFTSSWRSVADTLRQKVEDAVREHPDYRVVFTGHSLGGALATVAGADLRGNGYDIDVFSYGAPRVGNRAFAEFLTVQTGGTLYRITHTNDIVPRLPPREFGYSHSSPEYWIKSGTLVPVTRNDIVKIEGIDATGGNNQPNIPDIPAHLWYFGLIGTCL

SEQ ID NO: 3077 - protein, 269 aa, Thermomyces lanuginosus
EVSQDLFNQFNLFAQYSAAAYCGKNNDAPAGTNITCTGNACPEVEKADATFLYSFEDSGVGDVTGFLALDNTNKLIVLSFRGSRSIENWIGNLNFDLKEINDICSGCRGHDGFTSSWRSVADTLRQKVEDAVREHPDYRVVFTGHSLGGALATVAGADLRGNGYDIDVFSYGAPRVGNRAFAEFLTVQTGGTLYRITHTNDIVPRLPPREFGYSHSSPEYWIKSGTDVPVTRNDIVKIEGIDATGGNNQPNIPDIPAHLWYFGLIGTCL

SEQ ID NO: 3078 - protein, 269 aa, Thermomyces lanuginosus
EVSQDLFNQFNLFAQYSAAAYCGKNNDAPAGTNITCTGNACPEVEKADATFLYSFEDSGVGDVTGFLALDNTNKDIVLSFRGSRSIENWIGNLNFDLKEINDICSGCRGHDGFTSSWRSVADTLRQKVEDAVREHPDYRVVFTGHSLGGALATVAGADLRGNGYDIDVFSYGAPRVGNRAFAEFLTVQTGGTLYRITHTNDIVPRLPPREFGYSHSSPEYWIKSGTLVPVTRNDIVKIEGIDATGGNNQPNIPDIPAHLWYFGLIGTCL

SEQ ID NO: 3079 - protein, 269 aa, Thermomyces lanuginosus
EVSQDLFNQFNLFAQYSAAAYCPKNNDAPAGTNITCTGNACPEVEKADATFLYSFEDSGVGDVTGFLALDNTNKLIVLSFRGSRSIENWIGNLNFDLKEINDICSGCRGHDGFTSSWRSVADTLRQKVEDAVREHPDYRVVFTGHSLGGALATVAGADLRGNGYDIDVFSYGAPRVGNRAFAEFLTVQTGGTLYRITHTNDIVPRLPPREFGYSHSSPEYWIKSGTLVPVTRNDIVKIEGIDATGGNNQPNIPDIPAHLWYFGLIGTCL

SEQ ID NO: 3080 - protein, 269 aa, Thermomyces lanuginosus
EVSQDLFNQFNLFAQYSAAAYCGKNNDAPAGTNITCTGNACPEVEKADATFLYKFEDSGVGDVTGFLALDNTNKLIVLSFRGSRSIENWIGNLNFDLKEINDICSGCRGHDGFTSSWRSVADTLRQKVEDAVREHPDYRVVFTGHSLGGALATVAGADLRGNGYDIDVFSYGAPRVGNRAFAEFLTVQTGGTLYRITHTNDIVPRLPPREFGYSHSSPEYWIKSGTLVPVTRNDIVKIEGIDATGGNNQPNIPDIPAHLWYFGLIGTCL

SEQ ID NO: 3081 - protein, 269 aa, Thermomyces lanuginosus
EVSQDLFNQFNLFAQYSAAAYCGKNNDAPAGTNITCTGNACPEVEKHDATFLYSFEDSGVGDVTGFLALDNTNKLIVLSFRGSRSIENWIGNLNFDLKEINDICSGCRGHDGFTSSWRSVADTLRQKVEDAVREHPDYRVVFTGHSLGGALATVAGADLRGNGYDIDVFSYGAPRVGNRAFAEFLTVQTGGTLYRITHTNDIVPRLPPREFGYSHSSPEYWIKSGTLVPVTRNDIVKIEGIDATGGNNQPNIPDIPAHLWYFGLIGTCL

SEQ ID NO: 3082 - protein, 269 aa, Thermomyces lanuginosus
EVSQDLFNQFNLFAQYSAAAYCGKNNRAPAGTNITCTGNACPEVEKADATFLYSFEDSGVGDVTGFLALDNTNKLIVLSFRGSRSIENWIGNLNFDLKEINDICSGCRGHDGFTSSWRSVADTLRQKVEDAVREHPDYRVVFTGHSLGGALATVAGADLRGNGYDIDVFSYGAPRVGNRAFAEFLTVQTGGTLYRITHTNDIVPRLPPREFGYSHSSPEYWIKSGTLVPVTRNDIVKIEGIDATGGNNQPNIPDIPAHLWYFGLIGTCL

SEQ ID NO: 3083 - protein, 269 aa, Thermomyces lanuginosus
EVSQDLFNQFNLFAQYSAAAYCGKNNDAPAGTNITCTGNACPEVEKADATFLYSFEDSGVGDVTGFLALDNTNKLIVLSFRGTRSIENWIGNLNFDLKEINDICSGCRGHDGFTSSWRSVADTLRQKVEDAVREHPDYRVVFTGHSLGGALATVAGADLRGNGYDIDVFSYGAPRVGNRAFAEFLTVQTGGTLYRITHTNDIVPRLPPREFGYSHSSPEYWIKSGTLVPVTRNDIVKIEGIDATGGNNQPNIPDIPAHLWYFGLIGTCL

SEQ ID NO: 3084 - protein, 269 aa, Thermomyces lanuginosus
EVSQDLFNQFNLFAQYSAAAYCGKNNDAPAGTNITCTGNACPEVEKADATFLYSFEDSGVGDVTGFLALDNTNKLIVLSFRGSRSIENWIGNLNFDLKEINDICSGCRGHDGFTSSWRSVADTLRQKVEDAVREHPDYRVVFTGHSLGGALATVAGADLRGNSYDIDVFSYGAPRVGNRAFAEFLTVQTGGTLYRITHTNDIVPRLPPREFGYSHSSPEYWIKSGTLVPVTRNDIVKIEGIDATGGNNQPNIPDIPAHLWYFGLIGTCL

SEQ ID NO: 3085 - protein, 269 aa, Thermomyces lanuginosus
EVSQDLFNQFNLFAQYSAAAYCGKNNDAPAGTNITCTGNACPEVEKADATFLYSWEDSGVGDVTGFLALDNTNKLIVLSFRGSRSIENWIGNLNFDLKEINDICSGCRGHDGFTSSWRSVADTLRQKVEDAVREHPDYRVVFTGHSLGGALATVAGADLRGNGYDIDVFSYGAPRVGNRAFAEFLTVQTGGTLYRITHTNDIVPRLPPREFGYSHSSPEYWIKSGTLVPVTRNDIVKIEGIDATGGNNQPNIPDIPAHLWYFGLIGTCL

SEQ ID NO: 3086 - protein, 269 aa, Thermomyces lanuginosus
EVSQDLFNQFNLFAQYSAAAYCGKNNDAPAGTNITCTGNACPEVEMADATFLYSFEDSGVGDVTGFLALDNTNKLIVLSFRGSRSIENWIGNLNFDLKEINDICSGCRGHDGFTSSWRSVADTLRQKVEDAVREHPDYRVVFTGHSLGGALATVAGADLRGNGYDIDVFSYGAPRVGNRAFAEFLTVQTGGTLYRITHTNDIVPRLPPREFGYSHSSPEYWIKSGTLVPVTRNDIVKIEGIDATGGNNQPNIPDIPAHLWYFGLIGTCL

SEQ ID NO: 3087 - protein, 269 aa, Thermomyces lanuginosus
EVSQDLFNQFNLFAQYSAAAYCGKNNDAPAGTNITCTGNACPEVEKADATFLSSFEDSGVGDVTGFLALDNTNKLIVLSFRGSRSIENWIGNLNFDLKEINDICSGCRGHDGFTSSWRSVADTLRQKVEDAVREHPDYRVVFTGHSLGGALATVAGADLRGNGYDIDVFSYGAPRVGNRAFAEFLTVQTGGTLYRITHTNDIVPRLPPREFGYSHSSPEYWIKSGTLVPVTRNDIVKIEGIDATGGNNQPNIPDIPAHLWYFGLIGTCL

SEQ ID NO: 3088 - protein, 269 aa, Thermomyces lanuginosus
EVSQDLFNQFNLFAQYSAAAYCGKNNDAPAGTNITCTGNACPEVEKADATFLYSFEDSGVGDVTGFLALDNTNKLIVLSFRGSRSIENWIINLNFDLKEINDICSGCRGHDGFTSSWRSVADTLRQKVEDAVREHPDYRVVFTGHSLGGALATVAGADLRGNGYDIDVFSYGAPRVGNRAFAEFLTVQTGGTLYRITHTNDIVPRLPPREFGYSHSSPEYWIKSGTLVPVTRNDIVKIEGIDATGGNNQPNIPDIPAHLWYFGLIGTCL

SEQ ID NO: 3089 - protein, 269 aa, Thermomyces lanuginosus
EVSQDLFNQFNLFAQYSAAAYCGKNNDAPAGTNITCTGNACPEVEKADATFLYSFEDSGVGDVTVFLALDNTNKLIVLSFRGSRSIENWIGNLNFDLKEINDICSGCRGHDGFTSSWRSVADTLRQKVEDAVREHPDYRVVFTGHSLGGALATVAGADLRGNGYDIDVFSYGAPRVGNRAFAEFLTVQTGGTLYRITHTNDIVPRLPPREFGYSHSSPEYWIKSGTLVPVTRNDIVKIEGIDATGGNNQPNIPDIPAHLWYFGLIGTCL

SEQ ID NO: 3090 - protein, 269 aa, Thermomyces lanuginosus
EVSQDLFNQFNLFAQYSAAAYCGKNNDAPAGTNITCTGNACPEVEKEDATFLYSFEDSGVGDVTGFLALDNTNKLIVLSFRGSRSIENWIGNLNFDLKEINDICSGCRGHDGFTSSWRSVADTLRQKVEDAVREHPDYRVVFTGHSLGGALATVAGADLRGNGYDIDVFSYGAPRVGNRAFAEFLTVQTGGTLYRITHTNDIVPRLPPREFGYSHSSPEYWIKSGTLVPVTRNDIVKIEGIDATGGNNQPNIPDIPAHLWYFGLIGTCL

SEQ ID NO: 3091 - protein, 269 aa, Thermomyces lanuginosus
EVSQDLFNQFNLFAQYSAAAYCGKNNDAPAGTNITCTGNACPEVEKADATFLYSFEDSGVGDVTGFLALDNTNKLIVLSFRGSRSIENWIGNLNFDLKEINDICSGCRGHDGFTSSWRSVADTLRQKVEDAVREHPDYRVVFTGHSLGGALATVAGADLRGNGYDIDVFSYGAPRVGNRAFAVFLTVQTGGTLYRITHTNDIVPRLPPREFGYSHSSPEYWIKSGTLVPVTRNDIVKIEGIDATGGNNQPNIPDIPAHLWYFGLIGTCL

SEQ ID NO: 3092 - protein, 269 aa, Thermomyces lanuginosus
EVSQDLFNQFNLFAQYSAAAYCGKNNDAPAGTNITCFGNACPEVEKADATFLYSFEDSGVGDVTGFLALDNTNKLIVLSFRGSRSIENWIGNLNFDLKEINDICSGCRGHDGFTSSWRSVADTLRQKVEDAVREHPDYRVVFTGHSLGGALATVAGADLRGNGYDIDVFSYGAPRVGNRAFAEFLTVQTGGTLYRITHTNDIVPRLPPREFGYSHSSPEYWIKSGTLVPVTRNDIVKIEGIDATGGNNQPNIPDIPAHLWYFGLIGTCL

SEQ ID NO: 3093 - protein, 269 aa, Thermomyces lanuginosus
EVSQDLFNQFNLFAQYSAAAYCGKNNDAPAGTNITCTGNACPEVEKADATFLYSFEDSGVGDVTGFLALDNTNKLIVLSFRGSRSIENWIGNLNFDLKEINDICSGCRGHDGFTSSWRSVADTLRQKVEDAVREHPDYRVVFTGHSLGGALATVAGADLRGNGYDIDVFSYGAPRVGNRAFAEFLTVQTGGTLYRITHTNDIVPRLPPREFGYSHDSPEYWIKSGTLVPVTRNDIVKIEGIDATGGNNQPNIPDIPAHLWYFGLIGTCL

SEQ ID NO: 3094 - protein, 269 aa, Thermomyces lanuginosus
EVSQDLFNQFNLFAQYSAAAYCGKNNDAPAGTNITCTGNACPEVEKADATFLYSFEDSGVGDVTGFLALDNTNKLIVLSFRGSRSIENWIGNLNFDLKEINDICKGCRGHDGFTSSWRSVADTLRQKVEDAVREHPDYRVVFTGHSLGGALATVAGADLRGNGYDIDVFSYGAPRVGNRAFAEFLTVQTGGTLYRITHTNDIVPRLPPREFGYSHSSPEYWIKSGTLVPVTRNDIVKIEGIDATGGNNQPNIPDIPAHLWYFGLIGTCL

SEQ ID NO: 3095 - protein, 269 aa, Thermomyces lanuginosus
EVSQDLFNQFNLFAQYSAAAYCGKNNDAPAGTNITCTGNACPEVEKADATFLYSFEDSGVGDVTGFLALDNTNKLIVLSFRGSRSIENWIGNLNFDLKEINDICSGCRGHDGFTSSWRSVADTLRQKVEDAVREHPDYRVVFTGHSLGGALATVAGADLRGNGYDIDVFSYGAPRVGNRAFAEFLTVQTGGTLYRITHTNDIVPRLPPREFGYSHSSPEYYIKSGTLVPVTRNDIVKIEGIDATGGNNQPNIPDIPAHLWYFGLIGTCL

SEQ ID NO: 3096 - protein, 269 aa, Thermomyces lanuginosus
EVSQDLFNQFNLFAQYSAAAYCGKNNDAPAGTNITCTGNACPEVEKADATFLYYFEDSGVGDVTGFLALDNTNKLIVLSFRGSRSIENWIGNLNFDLKEINDICSGCRGHDGFTSSWRSVADTLRQKVEDAVREHPDYRVVFTGHSLGGALATVAGADLRGNGYDIDVFSYGAPRVGNRAFAEFLTVQTGGTLYRITHTNDIVPRLPPREFGYSHSSPEYWIKSGTLVPVTRNDIVKIEGIDATGGNNQPNIPDIPAHLWYFGLIGTCL

SEQ ID NO: 3097 - protein, 269 aa, Thermomyces lanuginosus
EVSQDLFNQFNLFAQYSAAAYCGKNNDPPAGTNITCTGNACPEVEKADATFLYSFEDSGVGDVTGFLALDNTNKLIVLSFRGSRSIENWIGNLNFDLKEINDICSGCRGHDGFTSSWRSVADTLRQKVEDAVREHPDYRVVFTGHSLGGALATVAGADLRGNGYDIDVFSYGAPRVGNRAFAEFLTVQTGGTLYRITHTNDIVPRLPPREFGYSHSSPEYWIKSGTLVPVTRNDIVKIEGIDATGGNNQPNIPDIPAHLWYFGLIGTCL

SEQ ID NO: 3098 - protein, 269 aa, Thermomyces lanuginosus
EVSQDLFNQFNLFAQYSAAAYCGKNNDAPAGTNITCTGNACPEVEKADATFLYSFEDSGVGDVTGFLALDNTNKLIVLSFRGSRSIENWIGNLNFDLKEINDICSGCRGHDGFTSSWRSVADTLRQKVEDAVREHPDYRVVFTGHSLGGALATVAGADLRGNGYDIDVFSYGAPRVGNRAFAEFLTVQTGGTLYRITHTNDIVPRLPPREFGYSHSSPEYWIKSGTLVPVTRNDIVKIEGIDSTGGNNQPNIPDIPAHLWYFGLIGTCL

SEQ ID NO: 3099 - protein, 269 aa, Thermomyces lanuginosus
EVSQDLFNQFNLFAQYSAAAYCGKNNDAPAGTNITCTGNACPEVEKADATFLYSFEDSGVGDVTGFLALDNTNKLIVLSFRGSRSIENWIGNLNFDLKEINDICSGCRGHDGFTSSWRSVADTLRQKVEDAVREHPDYRVVFTGHSLGGALATVAGADLRGNGYYIDVFSYGAPRVGNRAFAEFLTVQTGGTLYRITHTNDIVPRLPPREFGYSHSSPEYWIKSGTLVPVTRNDIVKIEGIDATGGNNQPNIPDIPAHLWYFGLIGTCL

SEQ ID NO: 3100 - protein, 269 aa, Thermomyces lanuginosus
EVSQDLFNQFNLFAQYSAAAYCGKNNDAPAGTNITCTGNACPEVEKADATFLYSFEDSGVGDVTGFLALDNTNKLIVLSFRGSRSIENWIGNLNFDLKEINDICSGCRGHDGFTSSWRSVADTLRQKVEDAVREHPDYRVVFTGHSLGGALATVAGAELRGNGYDIDVFSYGAPRVGNRAFAEFLTVQTGGTLYRITHTNDIVPRLPPREFGYSHSSPEYWIKSGTLVPVTRNDIVKIEGIDATGGNNQPNIPDIPAHLWYFGLIGTCL

SEQ ID NO: 3101 - protein, 269 aa, Thermomyces lanuginosus
EVSQDLFNQFNLFAQYSAAAYCGKNNDAPAGTNITCTGNACPEVEKADATFLYSFEDSGVGDVTGFLALDNTNKLIVLSFRGSRSIENWIGNLNFDLKEINDICSGCRGHDGFTSSWRSVADTLRQKVEDAVREHPDYRVVFTGHSLGGALATVAGADLRGNGYDIDVFSYGAPRVGNRAFAEFLTVQTGGTLYRITHTNDIVPRLPPREFGYSHSKPEYWIKSGTLVPVTRNDIVKIEGIDATGGNNQPNIPDIPAHLWYFGLIGTCL

SEQ ID NO: 3102 - protein, 269 aa, Thermomyces lanuginosus
EVSQDLFNQFNLFAQYSAAAYCGKNNDAPAGTNITCTGNACPEVEKADATFLYSFEDSGVGDVTGFLALDNTNKLIVLSFRGSRSIENWIGNLNFDLKEINDICSGCRGHDGFTSSWRSVADTLRQKVEDAVREHPDYRVVFTGHSLGGALATVAGADLRGNGYDIDVFSYGAPRVGNRAFAEFLTVQTGGTLYRITHTNDIVPRLPPREFGYSHSSPEYWIKSGTLVPVTRNDIVKIEGIDATGGNNTPNIPDIPAHLWYFGLIGTCL

SEQ ID NO: 3103 - protein, 269 aa, Thermomyces lanuginosus
EVSQDLFNQFNLFAQYSAAAYCGKNNDAPAGTNITCTGNACPEVEKADATFLYSFEDSGVGDVTGFLALDNTNKLIVLSFRGSRSIENWIGNLNFDLKEINDICSGCRGHDGFTSSWRSVADTLRQKVEDAVREHPIYRVVFTGHSLGGALATVAGADLRGNGYDIDVFSYGAPRVGNRAFAEFLTVQTGGTLYRITHTNDIVPRLPPREFGYSHSSPEYWIKSGTLVPVTRNDIVKIEGIDATGGNNQPNIPDIPAHLWYFGLIGTCL

SEQ ID NO: 3104 - protein, 269 aa, Thermomyces lanuginosus
EVSQDLFNQFNLFAQYSAAAYCGKNNDAPAGTNITCTGNACPEVEKADATFLYSFEDSGVGDVTGFLALDNTNKLIVLSFRGSRSIENWIGNLNFDLKEINDICSGCRGHDGFTSSWRSVADTLRQKVEDAVREHPDYRVVFTGHSLGGALATVAMADLRGNGYDIDVFSYGAPRVGNRAFAEFLTVQTGGTLYRITHTNDIVPRLPPREFGYSHSSPEYWIKSGTLVPVTRNDIVKIEGIDATGGNNQPNIPDIPAHLWYFGLIGTCL

SEQ ID NO: 3105 - protein, 269 aa, Thermomyces lanuginosus
EVSQDLFNQFNLFAQYSAAAYCGKNNDAPAGTNITCTGNACPEVEKADATFLYSFEDSGVGDVTGFLALDNTNKLIVLSFRGSRSIENWIGNLNFDLKEINDICSGCRGHDGFTSSWRSVADTLRQKVEDAVREHPDYRVVFTGHSLGGALATVAGADLRGNGYDIDVFSYGAPRNGNRAFAEFLTVQTGGTLYRITHTNDIVPRLPPREFGYSHSSPEYWIKSGTLVPVTRNDIVKIEGIDATGGNNQPNIPDIPAHLWYFGLIGTCL

SEQ ID NO: 3106 - protein, 269 aa, Thermomyces lanuginosus
EVSQDLFNQFHLFAQYSAAAYCGKNNDAPAGTNITCTGNACPEVEKADATFLYSFEDSGVGDVTGFLALDNTNKLIVLSFRGSRSIENWIGNLNFDLKEINDICSGCRGHDGFTSSWRSVADTLRQKVEDAVREHPDYRVVFTGHSLGGALATVAGADLRGNGYDIDVFSYGAPRVGNRAFAEFLTVQTGGTLYRITHTNDIVPRLPPREFGYSHSSPEYWIKSGTLVPVTRNDIVKIEGIDATGGNNQPNIPDIPAHLWYFGLIGTCL

SEQ ID NO: 3107 - protein, 269 aa, Thermomyces lanuginosus
EVSQDLFNQFNLFAQYSAAAYCGKNNDAPAGTNITCTGNACPEVEKADATFLYSFEDSGVGDVTGFLALDNTNKLIVLSFRGSRSIENWIGNLNFDLKEINDICSGCRGHDGFTSSWRSVADTLRQKVEDAVREHPDYRVVFTGHSLGGALATVAGADLRGSGYDIDVFSYGAPRVGNRAFAEFLTVQTGGTLYRITHTNDIVPRLPPREFGYSHSSPEYWIKSGTLVPVTRNDIVKIEGIDATGGNNQPNIPDIPAHLWYFGLIGTCL

SEQ ID NO: 3108 - protein, 269 aa, Thermomyces lanuginosus
EVSQDLFNQFNLFAQYSAAAYCGKNNDAPAGTNITCTGNACWEVEKADATFLYSFEDSGVGDVTGFLALDNTNKLIVLSFRGSRSIENWIGNLNFDLKEINDICSGCRGHDGFTSSWRSVADTLRQKVEDAVREHPDYRVVFTGHSLGGALATVAGADLRGNGYDIDVFSYGAPRVGNRAFAEFLTVQTGGTLYRITHTNDIVPRLPPREFGYSHSSPEYWIKSGTLVPVTRNDIVKIEGIDATGGNNQPNIPDIPAHLWYFGLIGTCL

SEQ ID NO: 3109 - protein, 269 aa, Thermomyces lanuginosus
EVSQDLFNQFNLFAQYSAAAYCGKNNDAPAGTNITCTGNACPEVEKADATFLYSFEDSGVGDVTGFLALDNTNKLIVLSFRGSRSIENWIGNLNFDLKEINDICSGCRGHDGFTSSWRSVADTLRQKVEDAVREHPDYRVVFTGHSLGGALATVAGADLRGNGYDIDVFSYGAPRVGNRAFAEFLTVQTGGTLYRITHTNDIVPRLPPREFGYSHSSPEYWIKSGTLVPVTRNDIVKIEGIDATGGNLQPNIPDIPAHLWYFGLIGTCL

SEQ ID NO: 3110 - protein, 269 aa, Thermomyces lanuginosus
EVSQDLFNQFNLFAQYSAAAYCGKNNDAPAGTNITCTGNACPEVEKADATFLYSFEDSGVGDVTGFLALDNTNKLIVLSFRGSRSIENWIGNLNFDLKEINDICSGCRGHDGFTSSWRSVADTLRQKVEDAVREHPDYRVVFTGHSLGGALATVAGADLRGNGYDINVFSYGAPRVGNRAFAEFLTVQTGGTLYRITHTNDIVPRLPPREFGYSHSSPEYWIKSGTLVPVTRNDIVKIEGIDATGGNNQPNIPDIPAHLWYFGLIGTCL

SEQ ID NO: 3111 - protein, 269 aa, Thermomyces lanuginosus
EVSQDLFNQFNLFAQYSAAAYCGKNNDAPAGTNITCTGNACPEVEKADATFLYSFEDSGVGDVTGFLALDNTNKLIVLSFRGSRSIENWIGNLNFDLKEINDICSGCRGHDGFTSSWRSVADTLRQKVEDAVREHPDYRVVFTGHSLGGALATVAGADLRGNGYDIDVFSYGAPRVGNRAFAEFLTVQTGGTLYRITHTNDIVPRLPPREFGYSHSSPEYWIKSGTLVPVTRNDIVKIEGIDALGGNNQPNIPDIPAHLWYFGLIGTCL

SEQ ID NO: 3112 - protein, 269 aa, Thermomyces lanuginosus
EVSQDLFNQFNLFAQYSAAAYCGKNNDAPAGTNITCTGNACPEVEKADATFLYSFEDSGVGDVTGFLALDNTNKLIVLSFRGSRSIENWINNLNFDLKEINDICSGCRGHDGFTSSWRSVADTLRQKVEDAVREHPDYRVVFTGHSLGGALATVAGADLRGNGYDIDVFSYGAPRVGNRAFAEFLTVQTGGTLYRITHTNDIVPRLPPREFGYSHSSPEYWIKSGTLVPVTRNDIVKIEGIDATGGNNQPNIPDIPAHLWYFGLIGTCL

SEQ ID NO: 3113 - protein, 269 aa, Thermomyces lanuginosus
EVSQDLFNQFNLFAQYSAAAYCWKNNDAPAGTNITCTGNACPEVEKADATFLYSFEDSGVGDVTGFLALDNTNKLIVLSFRGSRSIENWIGNLNFDLKEINDICSGCRGHDGFTSSWRSVADTLRQKVEDAVREHPDYRVVFTGHSLGGALATVAGADLRGNGYDIDVFSYGAPRVGNRAFAEFLTVQTGGTLYRITHTNDIVPRLPPREFGYSHSSPEYWIKSGTLVPVTRNDIVKIEGIDATGGNNQPNIPDIPAHLWYFGLIGTCL

SEQ ID NO: 3114 - protein, 269 aa, Thermomyces lanuginosus
EVSQDLFNQFNLFAQYSAAAYCGKNNIAPAGTNITCTGNACPEVEKADATFLYSFEDSGVGDVTGFLALDNTNKLIVLSFRGSRSIENWIGNLNFDLKEINDICSGCRGHDGFTSSWRSVADTLRQKVEDAVREHPDYRVVFTGHSLGGALATVAGADLRGNGYDIDVFSYGAPRVGNRAFAEFLTVQTGGTLYRITHTNDIVPRLPPREFGYSHSSPEYWIKSGTLVPVTRNDIVKIEGIDATGGNNQPNIPDIPAHLWYFGLIGTCL

SEQ ID NO: 3115 - protein, 269 aa, Thermomyces lanuginosus
EVSQDLFNQFNLFAQYSAAAYCGKNNDAPAGTNITCTGNACPEVEKADATFLYSFEDSGVGDVTGFLALDNTNKLIVLSFRGSRSIENWIGNLNHDLKEINDICSGCRGHDGFTSSWRSVADTLRQKVEDAVREHPDYRVVFTGHSLGGALATVAGADLRGNGYDIDVFSYGAPRVGNRAFAEFLTVQTGGTLYRITHTNDIVPRLPPREFGYSHSSPEYWIKSGTLVPVTRNDIVKIEGIDATGGNNQPNIPDIPAHLWYFGLIGTCL

SEQ ID NO: 3116 - protein, 269 aa, Thermomyces lanuginosus
EVSQDLFNQFNLFAQYSAAAYCGKNNDAPAGTNITCTGNACPEVEKADATFLYSFEDSGVGDVTGFLALDNTNKLIVLSFRGSRSIENWIGNLNFDLKEINDICAGCRGHDGFTSSWRSVADTLRQKVEDAVREHPDYRVVFTGHSLGGALATVAGADLRGNGYDIDVFSYGAPRVGNRAFAEFLTVQTGGTLYRITHTNDIVPRLPPREFGYSHSSPEYWIKSGTLVPVTRNDIVKIEGIDATGGNNQPNIPDIPAHLWYFGLIGTCL

SEQ ID NO: 3117 - protein, 269 aa, Thermomyces lanuginosus
EVSQDLFNQFNLFAQYSAAAYCGENNDAPAGTNITCTGNACPEVEKADATFLYSFEDSGVGDVTGFLALDNTNKLIVLSFRGSRSIENWIGNLNFDLKEINDICSGCRGHDGFTSSWRSVADTLRQKVEDAVREHPDYRVVFTGHSLGGALATVAGADLRGNGYDIDVFSYGAPRVGNRAFAEFLTVQTGGTLYRITHTNDIVPRLPPREFGYSHSSPEYWIKSGTLVPVTRNDIVKIEGIDATGGNNQPNIPDIPAHLWYFGLIGTCL

SEQ ID NO: 3118 - protein, 269 aa, Thermomyces lanuginosus
EVSQDLFNQFNLFAQYSAAAYCGKNNDAPAGTNITCTGNACPEVEVADATFLYSFEDSGVGDVTGFLALDNTNKLIVLSFRGSRSIENWIGNLNFDLKEINDICSGCRGHDGFTSSWRSVADTLRQKVEDAVREHPDYRVVFTGHSLGGALATVAGADLRGNGYDIDVFSYGAPRVGNRAFAEFLTVQTGGTLYRITHTNDIVPRLPPREFGYSHSSPEYWIKSGTLVPVTRNDIVKIEGIDATGGNNQPNIPDIPAHLWYFGLIGTCL

SEQ ID NO: 3119 - protein, 269 aa, Thermomyces lanuginosus
EVSQDLFNQFNLFAQYSAAAYCGKNNDAPAGTNITCTGNACPEVEKADATFLYSFEDSGVGDVRGFLALDNTNKLIVLSFRGSRSIENWIGNLNFDLKEINDICSGCRGHDGFTSSWRSVADTLRQKVEDAVREHPDYRVVFTGHSLGGALATVAGADLRGNGYDIDVFSYGAPRVGNRAFAEFLTVQTGGTLYRITHTNDIVPRLPPREFGYSHSSPEYWIKSGTLVPVTRNDIVKIEGIDATGGNNQPNIPDIPAHLWYFGLIGTCL

SEQ ID NO: 3120 - protein, 269 aa, Thermomyces lanuginosus
EVSQDLFNQFNLFAQYSAAAYCGKNNDAHAGTNITCTGNACPEVEKADATFLYSFEDSGVGDVTGFLALDNTNKLIVLSFRGSRSIENWIGNLNFDLKEINDICSGCRGHDGFTSSWRSVADTLRQKVEDAVREHPDYRVVFTGHSLGGALATVAGADLRGNGYDIDVFSYGAPRVGNRAFAEFLTVQTGGTLYRITHTNDIVPRLPPREFGYSHSSPEYWIKSGTLVPVTRNDIVKIEGIDATGGNNQPNIPDIPAHLWYFGLIGTCL

SEQ ID NO: 3121 - protein, 269 aa, Thermomyces lanuginosus
EVSQDLFNQFNLFAQYSAAAYCGKNNDAPAGQNITCTGNACPEVEKADATFLYSFEDSGVGDVTGFLALDNTNKLIVLSFRGSRSIENWIGNLNFDLKEINDICSGCRGHDGFTSSWRSVADTLRQKVEDAVREHPDYRVVFTGHSLGGALATVAGADLRGNGYDIDVFSYGAPRVGNRAFAEFLTVQTGGTLYRITHTNDIVPRLPPREFGYSHSSPEYWIKSGTLVPVTRNDIVKIEGIDATGGNNQPNIPDIPAHLWYFGLIGTCL

SEQ ID NO: 3122 - protein, 269 aa, Thermomyces lanuginosus
EVSQDLFNQFNLFAQYSAAAYCGKNNDAPAGTNITCTGNACPEVEKADATFLYSFEDSGVGDVTGFLALDNTNKLIVLSFRGSRSIENWIGNLNFDLKEINDICSGCRGHDGFTSSWRSVADTLRQKVEDAVREHPDYRVVFTGHSLGGALVTVAGADLRGNGYDIDVFSYGAPRVGNRAFAEFLTVQTGGTLYRITHTNDIVPRLPPREFGYSHSSPEYWIKSGTLVPVTRNDIVKIEGIDATGGNNQPNIPDIPAHLWYFGLIGTCL

SEQ ID NO: 3123 - protein, 269 aa, Thermomyces lanuginosus
EVSQDLFNQFNLFAQYSAAAYCGKNNDAPAGTNITCTGNACPEVEKADATFLYSFEDSGVGDVTGFLALDNTNKLIVLSFRGSRSQENWIGNLNFDLKEINDICSGCRGHDGFTSSWRSVADTLRQKVEDAVREHPDYRVVFTGHSLGGALATVAGADLRGNGYDIDVFSYGAPRVGNRAFAEFLTVQTGGTLYRITHTNDIVPRLPPREFGYSHSSPEYWIKSGTLVPVTRNDIVKIEGIDATGGNNQPNIPDIPAHLWYFGLIGTCL

SEQ ID NO: 3124 - protein, 269 aa, Thermomyces lanuginosus
EVSQDLFNQFNLFAQYSAAAYCGKNNDAPAGTNITCTGNACPEVEKADATFLYSFEDSGVGDVTGFLALDNTNKLIVLSFRGSRSIENWIGNLNFDLKEINDICSGCRGHDGFTSSWRSVADTLIQKVEDAVREHPDYRVVFTGHSLGGALATVAGADLRGNGYDIDVFSYGAPRVGNRAFAEFLTVQTGGTLYRITHTNDIVPRLPPREFGYSHSSPEYWIKSGTLVPVTRNDIVKIEGIDATGGNNQPNIPDIPAHLWYFGLIGTCL

SEQ ID NO: 3125 - protein, 269 aa, Thermomyces lanuginosus
EVQQDLFNQFNLFAQYSAAAYCGKNNDAPAGTNITCTGNACPEVEKADATFLYSFEDSGVGDVTGFLALDNTNKLIVLSFRGSRSIENWIGNLNFDLKEINDICSGCRGHDGFTSSWRSVADTLRQKVEDAVREHPDYRVVFTGHSLGGALATVAGADLRGNGYDIDVFSYGAPRVGNRAFAEFLTVQTGGTLYRITHTNDIVPRLPPREFGYSHSSPEYWIKSGTLVPVTRNDIVKIEGIDATGGNNQPNIPDIPAHLWYFGLIGTCL

SEQ ID NO: 3126 - protein, 269 aa, Thermomyces lanuginosus
EVSQDLFNQFNLFAQYSAAAYCGKNNDAPAGTNITCTGNACPEVEKADATFLYSFEDSGVGDVTGQLALDNTNKLIVLSFRGSRSIENWIGNLNFDLKEINDICSGCRGHDGFTSSWRSVADTLRQKVEDAVREHPDYRVVFTGHSLGGALATVAGADLRGNGYDIDVFSYGAPRVGNRAFAEFLTVQTGGTLYRITHTNDIVPRLPPREFGYSHSSPEYWIKSGTLVPVTRNDIVKIEGIDATGGNNQPNIPDIPAHLWYFGLIGTCL

SEQ ID NO: 3127 - protein, 269 aa, Thermomyces lanuginosus
EVSQDLFNQFNLFAQYSAAAYCGKNNDAPAGTQITCTGNACPEVEKADATFLYSFEDSGVGDVTGFLALDNTNKLIVLSFRGSRSIENWIGNLNFDLKEINDICSGCRGHDGFTSSWRSVADTLRQKVEDAVREHPDYRVVFTGHSLGGALATVAGADLRGNGYDIDVFSYGAPRVGNRAFAEFLTVQTGGTLYRITHTNDIVPRLPPREFGYSHSSPEYWIKSGTLVPVTRNDIVKIEGIDATGGNNQPNIPDIPAHLWYFGLIGTCL

SEQ ID NO: 3128 - protein, 269 aa, Thermomyces lanuginosus
EVSQDLFNQFNLFAQYSAAAYCGKNNDAPAGTNITCTGNACPEVEKADATFLYSFEDSGVGNVTGFLALDNTNKLIVLSFRGSRSIENWIGNLNFDLKEINDICSGCRGHDGFTSSWRSVADTLRQKVEDAVREHPDYRVVFTGHSLGGALATVAGADLRGNGYDIDVFSYGAPRVGNRAFAEFLTVQTGGTLYRITHTNDIVPRLPPREFGYSHSSPEYWIKSGTLVPVTRNDIVKIEGIDATGGNNQPNIPDIPAHLWYFGLIGTCL

SEQ ID NO: 3129 - protein, 269 aa, Thermomyces lanuginosus
EVSQDLFNQFNLFAQYSAAAYCGKNNDAPAGTNITCTGNACPEVEKADATFLYSFEDSGVGDVTGFLALDNTNKLIVLSFRGSRSIENWIGNLNFDLKEINDICSGCRGHDGFTSSWRSVADTLRQKVEDAVREHPDYRVVFTGHSLGGALATVAGADLRGNGYDIDVFSYGAPRVGNRAFAEFLTVQTGGTLYRITHTNDIVPRLPPREFGYSHSSPEYWIKSGTLVPVTRNDIVKIEGIDATGGNNQPNIPDIPAHQWYFGLIGTCL

SEQ ID NO: 3130 - protein, 269 aa, Thermomyces lanuginosus
EVSQDLFNQFNLFAQYSAAAYCGKNNDAPAGTNITCTGNACPEVEKADATFLYHFEDSGVGDVTGFLALDNTNKLIVLSFRGSRSIENWIGNLNFDLKEINDICSGCRGHDGFTSSWRSVADTLRQKVEDAVREHPDYRVVFTGHSLGGALATVAGADLRGNGYDIDVFSYGAPRVGNRAFAEFLTVQTGGTLYRITHTNDIVPRLPPREFGYSHSSPEYWIKSGTLVPVTRNDIVKIEGIDATGGNNQPNIPDIPAHLWYFGLIGTCL

SEQ ID NO: 3131 - protein, 269 aa, Thermomyces lanuginosus
EVSQDLFNQFNLFAQYSAAAYCGKNNDAPAGTNITCTGNACPEVEKADATFLYSFEDSGVGDVTGFLALDNTNKLIVLSFRGSRSIENWIGNLNFDLKEINDICSGCRGHDGFTSSWRSVADTLRQKVEDAVREHPDYRVVFTGHSLGGALATVAGADLRGIGYDIDVFSYGAPRVGNRAFAEFLTVQTGGTLYRITHTNDIVPRLPPREFGYSHSSPEYWIKSGTLVPVTRNDIVKIEGIDATGGNNQPNIPDIPAHLWYFGLIGTCL

SEQ ID NO: 3132 - protein, 269 aa, Thermomyces lanuginosus
EVSQDLFYQFNLFAQYSAAAYCGKNNDAPAGTNITCTGNACPEVEKADATFLYSFEDSGVGDVTGFLALDNTNKLIVLSFRGSRSIENWIGNLNFDLKEINDICSGCRGHDGFTSSWRSVADTLRQKVEDAVREHPDYRVVFTGHSLGGALATVAGADLRGNGYDIDVFSYGAPRVGNRAFAEFLTVQTGGTLYRITHTNDIVPRLPPREFGYSHSSPEYWIKSGTLVPVTRNDIVKIEGIDATGGNNQPNIPDIPAHLWYFGLIGTCL

SEQ ID NO: 3133 - protein, 269 aa, Thermomyces lanuginosus
EVSQTLFNQFNLFAQYSAAAYCGKNNDAPAGTNITCTGNACPEVEKADATFLYSFEDSGVGDVTGFLALDNTNKLIVLSFRGSRSIENWIGNLNFDLKEINDICSGCRGHDGFTSSWRSVADTLRQKVEDAVREHPDYRVVFTGHSLGGALATVAGADLRGNGYDIDVFSYGAPRVGNRAFAEFLTVQTGGTLYRITHTNDIVPRLPPREFGYSHSSPEYWIKSGTLVPVTRNDIVKIEGIDATGGNNQPNIPDIPAHLWYFGLIGTCL

SEQ ID NO: 3134 - protein, 269 aa, Thermomyces lanuginosus
EVSQDLFNQFNLFAQYSAAAYCGKNNDAPAGTNITCTGNACPEVEKADATFLYSFEDSGVGDVTGFLALDNTNKLIVLSFRGSRSIENWIGNLNFDLKEINDICSGCRGHDGFTSSWRSVADTLRQKVEDAVREHPDYRVVFTGHSLGGALATVAGADLRGNGYDIDVFSYGAPRVGNRAFAEFLTVQTGGTLYRITHTNDIVPRLPPREFGYSHSSPEYWIKSGTLVPVTRHDIVKIEGIDATGGNNQPNIPDIPAHLWYFGLIGTCL

SEQ ID NO: 3135 - protein, 269 aa, Thermomyces lanuginosus
EVSQDLFNQFNLFAQYSAAAYCGKNNDARAGTNITCTGNACPEVEKADATFLYSFEDSGVGDVTGFLALDNTNKLIVLSFRGSRSIENWIGNLNFDLKEINDICSGCRGHDGFTSSWRSVADTLRQKVEDAVREHPDYRVVFTGHSLGGALATVAGADLRGNGYDIDVFSYGAPRVGNRAFAEFLTVQTGGTLYRITHTNDIVPRLPPREFGYSHSSPEYWIKSGTLVPVTRNDIVKIEGIDATGGNNQPNIPDIPAHLWYFGLIGTCL

SEQ ID NO: 3136 - protein, 269 aa, Thermomyces lanuginosus
EVSQDLFNQFNLFAQYSAAAYCGKNNDAPAGTNITCTGNACPEVEKAGATFLYSFEDSGVGDVTGFLALDNTNKLIVLSFRGSRSIENWIGNLNFDLKEINDICSGCRGHDGFTSSWRSVADTLRQKVEDAVREHPDYRVVFTGHSLGGALATVAGADLRGNGYDIDVFSYGAPRVGNRAFAEFLTVQTGGTLYRITHTNDIVPRLPPREFGYSHSSPEYWIKSGTLVPVTRNDIVKIEGIDATGGNNQPNIPDIPAHLWYFGLIGTCL

SEQ ID NO: 3137 - protein, 269 aa, Thermomyces lanuginosus
EVSQDLFNQFNLFAQYSAAAYCGKNNDAPAGTNITCTGNACPEVEKADATFLYSFEDSGVGDVTGFLANDNTNKLIVLSFRGSRSIENWIGNLNFDLKEINDICSGCRGHDGFTSSWRSVADTLRQKVEDAVREHPDYRVVFTGHSLGGALATVAGADLRGNGYDIDVFSYGAPRVGNRAFAEFLTVQTGGTLYRITHTNDIVPRLPPREFGYSHSSPEYWIKSGTLVPVTRNDIVKIEGIDATGGNNQPNIPDIPAHLWYFGLIGTCL

SEQ ID NO: 3138 - protein, 269 aa, Thermomyces lanuginosus
EVSQDLFNQFNLFAQYSAAAYCGKNNDAPAGTNITCTGNACPEVEKADATFLYSFEDSGVGDVTGFLALDNTNKLIVLSFRGSRSIENWIGNLNFDLKEINDICSGCRGHDGFTSSWRSVADTLRQKVEDAVREHPDYRVVFTGHSLGGALATVAGADLRGNAYDIDVFSYGAPRVGNRAFAEFLTVQTGGTLYRITHTNDIVPRLPPREFGYSHSSPEYWIKSGTLVPVTRNDIVKIEGIDATGGNNQPNIPDIPAHLWYFGLIGTCL

SEQ ID NO: 3139 - protein, 269 aa, Thermomyces lanuginosus
EVSQDLFNQFNLFAQYSAAAYCGKNNDAPAGTNITCTGNACPEVEKADATFLYSFEDSGVGDVTGFLALDNTNKLIVLSFRGSRSIENWIGNLNFDLKEINDICSGCRGHDGFTSSWRSVADTLRQKVEDAVREHPDYRVVFTGHSLGGALATVAGADLRGNGYDIDVFSYGAPRVGNRAFAEFLTVQTGGTLYRITHTNDIVPRLPPREFGYSHSSPEYWIKSGTLVPVTRNDIVKIEGIDATGINNQPNIPDIPAHLWYFGLIGTCL

SEQ ID NO: 3140 - protein, 269 aa, Thermomyces lanuginosus
EVSQDLFNQFNLFAQYSAAAYCGKNNDAPAGTNITCTGNACPEVEKADATFLYSFEDSGVGDVTGFLALDNTNKLIVLSFRGSRSIENWIGNLNFDLKEINDICSGCRGHDGFTSSWRSVADTLRQKVEDAVREHPDYRVVFTGHSLGGANATVAGADLRGNGYDIDVFSYGAPRVGNRAFAEFLTVQTGGTLYRITHTNDIVPRLPPREFGYSHSSPEYWIKSGTLVPVTRNDIVKIEGIDATGGNNQPNIPDIPAHLWYFGLIGTCL

SEQ ID NO: 3141 - protein, 269 aa, Thermomyces lanuginosus
EVTQDLFNQFNLFAQYSAAAYCGKNNDAPAGTNITCTGNACPEVEKADATFLYSFEDSGVGDVTGFLALDNTNKLIVLSFRGSRSIENWIGNLNFDLKEINDICSGCRGHDGFTSSWRSVADTLRQKVEDAVREHPDYRVVFTGHSLGGALATVAGADLRGNGYDIDVFSYGAPRVGNRAFAEFLTVQTGGTLYRITHTNDIVPRLPPREFGYSHSSPEYWIKSGTLVPVTRNDIVKIEGIDATGGNNQPNIPDIPAHLWYFGLIGTCL

SEQ ID NO: 3142 - protein, 269 aa, Thermomyces lanuginosus
EVSQDLFNQFNLFAQYSAAAYCGKNNDAPAGTNITCTGNACPEVEKADATFLYSFEDSGVGDVTGFLALDNNNKLIVLSFRGSRSIENWIGNLNFDLKEINDICSGCRGHDGFTSSWRSVADTLRQKVEDAVREHPDYRVVFTGHSLGGALATVAGADLRGNGYDIDVFSYGAPRVGNRAFAEFLTVQTGGTLYRITHTNDIVPRLPPREFGYSHSSPEYWIKSGTLVPVTRNDIVKIEGIDATGGNNQPNIPDIPAHLWYFGLIGTCL

SEQ ID NO: 3143 - protein, 269 aa, Thermomyces lanuginosus
EVSQDLFNQFNLFAQYSAAAYCGKNNDAPAGTNITCTGNACPEVEKADATFLYSFEDSGVGDVTGFLALDNTNKLIVLSFRGSRSIENWIGNLNFDLKEINDICSGCRGHDGFTSSWRSVADTLRQKVEDAVREHPDYRVVFTGHSLGGALATVAGADLRGNGYDIDVFSYGAPRVGNRAFAEFLTVQTSGTLYRITHTNDIVPRLPPREFGYSHSSPEYWIKSGTLVPVTRNDIVKIEGIDATGGNNQPNIPDIPAHLWYFGLIGTCL

SEQ ID NO: 3144 - protein, 269 aa, Thermomyces lanuginosus
EVSQDLFNQFNLFAQYSAAAYCGKNNDAPAGTNITCTGNACPEVEKADATFLYSFEDSGVGDVTGFLALDNTNKLIVLSFRGSRSIENWIGNLNFDLKEINDICSGCRGHDGFTSSWRSVADTLRQKVEDAVREHPDYRVVFTGHSLGGALATVAGADLRGNLYDIDVFSYGAPRVGNRAFAEFLTVQTGGTLYRITHTNDIVPRLPPREFGYSHSSPEYWIKSGTLVPVTRNDIVKIEGIDATGGNNQPNIPDIPAHLWYFGLIGTCL

SEQ ID NO: 3145 - protein, 269 aa, Thermomyces lanuginosus
EVSQDLFNQFNLFAQYSAAAYCGKNNDAPAGTNITCTGNACPEVEKADATFLYSFEDSGVGDVTGFLALDNTNKYIVLSFRGSRSIENWIGNLNFDLKEINDICSGCRGHDGFTSSWRSVADTLRQKVEDAVREHPDYRVVFTGHSLGGALATVAGADLRGNGYDIDVFSYGAPRVGNRAFAEFLTVQTGGTLYRITHTNDIVPRLPPREFGYSHSSPEYWIKSGTLVPVTRNDIVKIEGIDATGGNNQPNIPDIPAHLWYFGLIGTCL

SEQ ID NO: 3146 - protein, 269 aa, Thermomyces lanuginosus
EVSQDLFNQFNLFAQYSAAAYCGKNNDAPAGTNITCTGNACPEVEKADATFLYSFEDSGVGDVTGFLALDNTNKLIVLSFRGSRSIENWIGNLNFDLKEINDICSGCRGHDGFTSSWRSVADTLRQKVEDAVREHPDYRVVFTGHSLGGALATVAGADLRGNGYDIDVFSYGAPRVGNRAFAEFLTVQTGGTLYRITHTNDIVPRLPPREFGYSHSSPEYWIKSGTLVPVTRNDIVKIEGIDATGGNNQPNIPDIPAHLWYFGEIGTCL

SEQ ID NO: 3147 - protein, 269 aa, Thermomyces lanuginosus
EVSQDLFNHFNLFAQYSAAAYCGKNNDAPAGTNITCTGNACPEVEKADATFLYSFEDSGVGDVTGFLALDNTNKLIVLSFRGSRSIENWIGNLNFDLKEINDICSGCRGHDGFTSSWRSVADTLRQKVEDAVREHPDYRVVFTGHSLGGALATVAGADLRGNGYDIDVFSYGAPRVGNRAFAEFLTVQTGGTLYRITHTNDIVPRLPPREFGYSHSSPEYWIKSGTLVPVTRNDIVKIEGIDATGGNNQPNIPDIPAHLWYFGLIGTCL

SEQ ID NO: 3148 - protein, 269 aa, Thermomyces lanuginosus
EVSQDLFNQFNLFAQYSAAAYCGKNNDAPAGTNITCTGNACPEVEKADATFLYSFEDSGVGDVTGFLALDNTNKLIVLSFRGSRSIENWIGNLNFDLKEINDICSGCRGHDGFTSSWRSVADTLRQKVEDAVREHPDYRVVFTGHSLGGALATVAGADLRGNGYDIDVFSYGAPRVGNRAFAEFLTVQTGGTLYRITHTNDIVPRLPPREFGYSHSSPEYWIKSGTLVPVTRNDIVKIEGIDAQGGNNQPNIPDIPAHLWYFGLIGTCL

SEQ ID NO: 3149 - protein, 269 aa, Thermomyces lanuginosus
EVSQSLFNQFNLFAQYSAAAYCGKNNDAPAGTNITCTGNACPEVEKADATFLYSFEDSGVGDVTGFLALDNTNKLIVLSFRGSRSIENWIGNLNFDLKEINDICSGCRGHDGFTSSWRSVADTLRQKVEDAVREHPDYRVVFTGHSLGGALATVAGADLRGNGYDIDVFSYGAPRVGNRAFAEFLTVQTGGTLYRITHTNDIVPRLPPREFGYSHSSPEYWIKSGTLVPVTRNDIVKIEGIDATGGNNQPNIPDIPAHLWYFGLIGTCL

SEQ ID NO: 3150 - protein, 269 aa, Thermomyces lanuginosus
EVSQDLFNQFNLFAQYSAAAYCGKNNDAPAGTNITCTGNACPEVEKADATFLYPFEDSGVGDVTGFLALDNTNKLIVLSFRGSRSIENWIGNLNFDLKEINDICSGCRGHDGFTSSWRSVADTLRQKVEDAVREHPDYRVVFTGHSLGGALATVAGADLRGNGYDIDVFSYGAPRVGNRAFAEFLTVQTGGTLYRITHTNDIVPRLPPREFGYSHSSPEYWIKSGTLVPVTRNDIVKIEGIDATGGNNQPNIPDIPAHLWYFGLIGTCL

SEQ ID NO: 3151 - protein, 269 aa, Thermomyces lanuginosus
EVSQDLFNQFNLFAQYSAAAYCGKNNDRPAGTNITCTGNACPEVEKADATFLYSFEDSGVGDVTGFLALDNTNKLIVLSFRGSRSIENWIGNLNFDLKEINDICSGCRGHDGFTSSWRSVADTLRQKVEDAVREHPDYRVVFTGHSLGGALATVAGADLRGNGYDIDVFSYGAPRVGNRAFAEFLTVQTGGTLYRITHTNDIVPRLPPREFGYSHSSPEYWIKSGTLVPVTRNDIVKIEGIDATGGNNQPNIPDIPAHLWYFGLIGTCL

SEQ ID NO: 3152 - protein, 269 aa, Thermomyces lanuginosus
EVSQDLFNQFNLNAQYSAAAYCGKNNDAPAGTNITCTGNACPEVEKADATFLYSFEDSGVGDVTGFLALDNTNKLIVLSFRGSRSIENWIGNLNFDLKEINDICSGCRGHDGFTSSWRSVADTLRQKVEDAVREHPDYRVVFTGHSLGGALATVAGADLRGNGYDIDVFSYGAPRVGNRAFAEFLTVQTGGTLYRITHTNDIVPRLPPREFGYSHSSPEYWIKSGTLVPVTRNDIVKIEGIDATGGNNQPNIPDIPAHLWYFGLIGTCL

SEQ ID NO: 3153 - protein, 269 aa, Thermomyces lanuginosus
EVSQDLFNQFNLFAQYSAAAYCGKNNDAPAGTNITCTGNACPEVEKADATFLYSFEDSGVGDVTGFLALDNTNKLIVLSFRGSRSIENWIGNLNFDLKEINDICSGCRGHDGFTSSWRSVADTLRQKVEDAVREHPDYRVVFTGHSLGGALATVAGADLRGNGYDIDVFSYGAPRVGNRAFAEFLTVQTGGTLYRITHTNDIVPDLPPREFGYSHSSPEYWIKSGTLVPVTRNDIVKIEGIDATGGNNQPNIPDIPAHLWYFGLIGTCL

SEQ ID NO: 3154 - protein, 269 aa, Thermomyces lanuginosus
EVSQDLFNQFNLFAQYSAAAYCGKNNDAPAGTNITCTGNACPEVEKADATFLYSFEDSGVGDVTGFLALDNRNKLIVLSFRGSRSIENWIGNLNFDLKEINDICSGCRGHDGFTSSWRSVADTLRQKVEDAVREHPDYRVVFTGHSLGGALATVAGADLRGNGYDIDVFSYGAPRVGNRAFAEFLTVQTGGTLYRITHTNDIVPRLPPREFGYSHSSPEYWIKSGTLVPVTRNDIVKIEGIDATGGNNQPNIPDIPAHLWYFGLIGTCL

SEQ ID NO: 3155 - protein, 269 aa, Thermomyces lanuginosus
EVSQDLFNQFNLFAQYSAAAYCGKNNDAPAGTNITCTGNACPEVEKADATFLYSFEDSGVGDVTGFLALDNTNKLIVLSFRGSRSIENWIGNLNFDLKEINDICSGCRGHDGFTSSWRSVADTLRQKVEDAVREHPDYRVVFTGHSLGGALATVAGADLRGNGYDIDVFSYGAPRVGNRAFAEFLTVQTGGTLYRITHTNDIVPRLPPREFGYSHSSPEYWIKSGTLVPVTRNDIVKIEGIDATGGNNEPNIPDIPAHLWYFGLIGTCL

SEQ ID NO: 3156 - protein, 269 aa, Thermomyces lanuginosus
EVSQDLFNQFNLFAQYSAAAYCGKNNDAPAGTNITCTGNACPEHEKADATFLYSFEDSGVGDVTGFLALDNTNKLIVLSFRGSRSIENWIGNLNFDLKEINDICSGCRGHDGFTSSWRSVADTLRQKVEDAVREHPDYRVVFTGHSLGGALATVAGADLRGNGYDIDVFSYGAPRVGNRAFAEFLTVQTGGTLYRITHTNDIVPRLPPREFGYSHSSPEYWIKSGTLVPVTRNDIVKIEGIDATGGNNQPNIPDIPAHLWYFGLIGTCL

SEQ ID NO: 3157 - protein, 269 aa, Thermomyces lanuginosus
EVSQDLFNQFNLFAQYSAAAYCGKNNDAPAGTNITCTGNACPEVEKADATFLYSFEDSGVGDVTGFLALDNTNKEIVLSFRGSRSIENWIGNLNFDLKEINDICSGCRGHDGFTSSWRSVADTLRQKVEDAVREHPDYRVVFTGHSLGGALATVAGADLRGNGYDIDVFSYGAPRVGNRAFAEFLTVQTGGTLYRITHTNDIVPRLPPREFGYSHSSPEYWIKSGTLVPVTRNDIVKIEGIDATGGNNQPNIPDIPAHLWYFGLIGTCL

SEQ ID NO: 3158 - protein, 269 aa, Thermomyces lanuginosus
EVSQDLFNQFNLFAQYSAAAYCGKNNDAPAGTNITCTGNACPEVEKADATFLYSFEDSGVGDVTGFLALDNTNKLIVLSFRGSRSIENWIGNLNFDLKEINDICSGCRGHDGFTSSWRSVADTLRQKVEDAVREHPDYRVVFTGHSLGGALATVAGADLRGNGYDIDVFSYGAPRVGNRAFAEFLTVQTGGTLYRITHTNDIVPRLPPREFGYSHSSPEYWIKSGTLVPVTRNDIVKIEGIDATGGNNQPNIPDIPAHLWYFGHIGTCL

SEQ ID NO: 3159 - protein, 269 aa, Thermomyces lanuginosus
EVSQDLFNQFNLFAQYSAAAYCGKNNDAPAGTNITCTGNACPEVEKADATFLYSFEDSGVGDVTGFLALDNTNKLIVLSFRGSRSIENWIGNINFDLKEINDICSGCRGHDGFTSSWRSVADTLRQKVEDAVREHPDYRVVFTGHSLGGALATVAGADLRGNGYDIDVFSYGAPRVGNRAFAEFLTVQTGGTLYRITHTNDIVPRLPPREFGYSHSSPEYWIKSGTLVPVTRNDIVKIEGIDATGGNNQPNIPDIPAHLWYFGLIGTCL

SEQ ID NO: 3160 - protein, 269 aa, Thermomyces lanuginosus
EVSQDLFLQFNLFAQYSAAAYCGKNNDAPAGTNITCTGNACPEVEKADATFLYSFEDSGVGDVTGFLALDNTNKLIVLSFRGSRSIENWIGNLNFDLKEINDICSGCRGHDGFTSSWRSVADTLRQKVEDAVREHPDYRVVFTGHSLGGALATVAGADLRGNGYDIDVFSYGAPRVGNRAFAEFLTVQTGGTLYRITHTNDIVPRLPPREFGYSHSSPEYWIKSGTLVPVTRNDIVKIEGIDATGGNNQPNIPDIPAHLWYFGLIGTCL

SEQ ID NO: 3161 - protein, 269 aa, Thermomyces lanuginosus
EVSQDLFNQFNLFAQYSAAAYCGKNNDAPAGTRITCTGNACPEVEKADATFLYSFEDSGVGDVTGFLALDNTNKLIVLSFRGSRSIENWIGNLNFDLKEINDICSGCRGHDGFTSSWRSVADTLRQKVEDAVREHPDYRVVFTGHSLGGALATVAGADLRGNGYDIDVFSYGAPRVGNRAFAEFLTVQTGGTLYRITHTNDIVPRLPPREFGYSHSSPEYWIKSGTLVPVTRNDIVKIEGIDATGGNNQPNIPDIPAHLWYFGLIGTCL

SEQ ID NO: 3162 - protein, 269 aa, Thermomyces lanuginosus
EVSQDLFNQFNLFAQYSAAAYCGKNNDAPAGTNITCTGNACPEVEKADATFLYSFEDSGVGDVTGFLALDNTNKLIVLSFRGSRSIENWIGNLNFDLKEICDICSGCRGHDGFTSSWRSVADTLRQKVEDAVREHPDYRVVFTGHSLGGALATVAGADLRGNGYDIDVFSYGAPRVGNRAFAEFLTVQTGGTLYRITHTNDIVPRLPPREFGYSHSSPEYWIKSGTLVPVTRNDIVKIEGIDATGGNNQPNIPDIPAHLWYFGLIGTCL

SEQ ID NO: 3163 - protein, 269 aa, Thermomyces lanuginosus
EVSQDLFNQFNLFAQYSAAAYCGKNNDAPAGTNITCTGNACPEVEKADATFLYSFEDWGVGDVTGFLALDNTNKLIVLSFRGSRSIENWIGNLNFDLKEINDICSGCRGHDGFTSSWRSVADTLRQKVEDAVREHPDYRVVFTGHSLGGALATVAGADLRGNGYDIDVFSYGAPRVGNRAFAEFLTVQTGGTLYRITHTNDIVPRLPPREFGYSHSSPEYWIKSGTLVPVTRNDIVKIEGIDATGGNNQPNIPDIPAHLWYFGLIGTCL

SEQ ID NO: 3164 - protein, 269 aa, Thermomyces lanuginosus
EVRQDLFNQFNLFAQYSAAAYCGKNNDAPAGTNITCTGNACPEVEKADATFLYSFEDSGVGDVTGFLALDNTNKLIVLSFRGSRSIENWIGNLNFDLKEINDICSGCRGHDGFTSSWRSVADTLRQKVEDAVREHPDYRVVFTGHSLGGALATVAGADLRGNGYDIDVFSYGAPRVGNRAFAEFLTVQTGGTLYRITHTNDIVPRLPPREFGYSHSSPEYWIKSGTLVPVTRNDIVKIEGIDATGGNNQPNIPDIPAHLWYFGLIGTCL

SEQ ID NO: 3165 - protein, 269 aa, Thermomyces lanuginosus
EVSQDLFNQFNLFAQYSAAAYCGKNNDAPAGTNITCTGNACPEVEKADATFLYSFEDSGVGDVTGFLALDNTNKLIVLSFRGSRSIENWIGNLNFDLKEINDICSGCRGHDGFTSSWRSVADTLRQKVEDAVREHPDYRVVFTGHSLGGALATVAGADLRGNGYDIDVFSYGAPRVGNRAFAEFLTVQTGGTLYRITHTNDIVPRLPPREWGYSHSSPEYWIKSGTLVPVTRNDIVKIEGIDATGGNNQPNIPDIPAHLWYFGLIGTCL

SEQ ID NO: 3166 - protein, 269 aa, Thermomyces lanuginosus
EVSQDLFNQFNLFAQYSAAAYCGKNNDAPAGTNITCTGNACPEVEKADATFLYSFEDSGVGDVTGFLALDNTNKLIVLSFRGSRSIENWIGNLNFDLKEIHDICSGCRGHDGFTSSWRSVADTLRQKVEDAVREHPDYRVVFTGHSLGGALATVAGADLRGNGYDIDVFSYGAPRVGNRAFAEFLTVQTGGTLYRITHTNDIVPRLPPREFGYSHSSPEYWIKSGTLVPVTRNDIVKIEGIDATGGNNQPNIPDIPAHLWYFGLIGTCL

SEQ ID NO: 3167 - protein, 269 aa, Thermomyces lanuginosus
EVSQDLFNQFNLFAQYSAAAYCGKNNDAPHGTNITCTGNACPEVEKADATFLYSFEDSGVGDVTGFLALDNTNKLIVLSFRGSRSIENWIGNLNFDLKEINDICSGCRGHDGFTSSWRSVADTLRQKVEDAVREHPDYRVVFTGHSLGGALATVAGADLRGNGYDIDVFSYGAPRVGNRAFAEFLTVQTGGTLYRITHTNDIVPRLPPREFGYSHSSPEYWIKSGTLVPVTRNDIVKIEGIDATGGNNQPNIPDIPAHLWYFGLIGTCL

SEQ ID NO: 3168 - protein, 269 aa, Thermomyces lanuginosus
EVSQDLFNQFNLFAQYSAAAYCGKNNDAPAGTNITCTGNACPRVEKADATFLYSFEDSGVGDVTGFLALDNTNKLIVLSFRGSRSIENWIGNLNFDLKEINDICSGCRGHDGFTSSWRSVADTLRQKVEDAVREHPDYRVVFTGHSLGGALATVAGADLRGNGYDIDVFSYGAPRVGNRAFAEFLTVQTGGTLYRITHTNDIVPRLPPREFGYSHSSPEYWIKSGTLVPVTRNDIVKIEGIDATGGNNQPNIPDIPAHLWYFGLIGTCL

SEQ ID NO: 3169 - protein, 269 aa, Thermomyces lanuginosus
EVSQDLFNQFNLFAQYSAAAYCGKNNDAPAGTNITCTGNACPEVEKADATFLYSFEDSGVGDVTGFLALDNTNKLIVLSFRGSRSIENWIGNLNFDLKEINDICSGCRGHDGFTSSWRSVADTLRQKVEDAVREHPDYRNVFTGHSLGGALATVAGADLRGNGYDIDVFSYGAPRVGNRAFAEFLTVQTGGTLYRITHTNDIVPRLPPREFGYSHSSPEYWIKSGTLVPVTRNDIVKIEGIDATGGNNQPNIPDIPAHLWYFGLIGTCL

SEQ ID NO: 3170 - protein, 269 aa, Thermomyces lanuginosus
EVSQDLFNQFNLFAQYSAAAYCGKNNDAPAGTNITCTGNACPEVEKADATFLYSFEDSGVGDVTGFLALDNTNKLIVLSFRGSRSIENWIKNLNFDLKEINDICSGCRGHDGFTSSWRSVADTLRQKVEDAVREHPDYRVVFTGHSLGGALATVAGADLRGNGYDIDVFSYGAPRVGNRAFAEFLTVQTGGTLYRITHTNDIVPRLPPREFGYSHSSPEYWIKSGTLVPVTRNDIVKIEGIDATGGNNQPNIPDIPAHLWYFGLIGTCL

SEQ ID NO: 3171 - protein, 269 aa, Thermomyces lanuginosus
EVSQDLFNQFNLFAQYSAAAYCGKNNDAPAGTIITCTGNACPEVEKADATFLYSFEDSGVGDVTGFLALDNTNKLIVLSFRGSRSIENWIGNLNFDLKEINDICSGCRGHDGFTSSWRSVADTLRQKVEDAVREHPDYRVVFTGHSLGGALATVAGADLRGNGYDIDVFSYGAPRVGNRAFAEFLTVQTGGTLYRITHTNDIVPRLPPREFGYSHSSPEYWIKSGTLVPVTRNDIVKIEGIDATGGNNQPNIPDIPAHLWYFGLIGTCL

SEQ ID NO: 3172 - protein, 269 aa, Thermomyces lanuginosus
EVSQDLFHQFNLFAQYSAAAYCGKNNDAPAGTNITCTGNACPEVEKADATFLYSFEDSGVGDVTGFLALDNTNKLIVLSFRGSRSIENWIGNLNFDLKEINDICSGCRGHDGFTSSWRSVADTLRQKVEDAVREHPDYRVVFTGHSLGGALATVAGADLRGNGYDIDVFSYGAPRVGNRAFAEFLTVQTGGTLYRITHTNDIVPRLPPREFGYSHSSPEYWIKSGTLVPVTRNDIVKIEGIDATGGNNQPNIPDIPAHLWYFGLIGTCL

SEQ ID NO: 3173 - protein, 269 aa, Thermomyces lanuginosus
EVSQDLFNQFNLFAQYSAAAYCGKNNDAPAGTNITCTGNACPEVEKADATFLYSFEDSGVGDVTGFLALDNTNKLIVLSFRGSRSIENWIGNLNFDLKEINDICSGCRGHDGFTSSWRSVADTLRQKVEDAVREHPDYRVVFTGHSLGGALATVAGADLRGNGYDIDVFSYGAPRVGNRAFAEFLTVQTGGTLYRITHTNDIVPRLPPREFGYSHSSPEYWIKSGTLVPVTRNDIVKIEGIDATGGNNQPNIPDITAHLWYFGLIGTCL

SEQ ID NO: 3174 - protein, 269 aa, Thermomyces lanuginosus
EVSQDLFNQFNLFAQYSAAAYCGKNNDAPAGTNITCTGNACPEVEKADATFLYSFEDSGVGDVTGFLALDNTNKLIVLSFRGSRSIENWIGNLNFDLKEINDICSGCRGHDGFTSSWRSVADTLRQKVEDAVREHPDYRVVFTGHSLGGALATVAGADLRGNGYDIDVFSYGAPRVGNRAFAEFLTVQTGGTLYRITHTNDIVPRLPPREFGYSHSSPEYWIKSGTLVPVTRNDIVKIEGIDATGGNNQPNIPDIPAHLWYFVLIGTCL

SEQ ID NO: 3175 - protein, 269 aa, Thermomyces lanuginosus
EVSQDLFNQFNLFAQYSAAAYCGKNNDAPAGTNITCTGNACPEVEKADATFLYSFEDSGVGDVTGFLALDNTNKLIVLSFRGSRSIENWIGNLNFDLKEINDICSGCRGHDGFTSSWRSVADTLRQKVEDAVREHPTYRVVFTGHSLGGALATVAGADLRGNGYDIDVFSYGAPRVGNRAFAEFLTVQTGGTLYRITHTNDIVPRLPPREFGYSHSSPEYWIKSGTLVPVTRNDIVKIEGIDATGGNNQPNIPDIPAHLWYFGLIGTCL

SEQ ID NO: 3176 - protein, 269 aa, Thermomyces lanuginosus
EVSQDLFNQFNLFAQYSAAAYCGKNNDAPAGTNITCTGNACPEVEKADATFLYSFEDSGVGDVTGFLALDNTNKLIVLSFRGSRSIENWIGNLNFDLKEINDICSGCRGHDGFTSSWRSVADTLRQKVEDAVREHPDYRVVFTGHSLGGALATVAGADLRGNGYDIDVFSYGAPRVGNRAFAEFLTVQTGGTLYRITHTNDIVPRLPPREFGYSHSSPEYWIKSGTLVPVGRNDIVKIEGIDATGGNNQPNIPDIPAHLWYFGLIGTCL

SEQ ID NO: 3177 - protein, 269 aa, Thermomyces lanuginosus
EVSQDLFNQFNLFAQYSAAAYCGKNNDAPAGTNITCTGNACPEVEKADATFLYSFEDSGVGDVTGFLALDNTNKLIVLSFRGSRSIENWIGNLNFDLKEINDICSGCRGHDGFTSSWRSVADTLRQKVEDAVREHPDYRVVFTGHSLGGALATVAGADLRGNGYDIDVFSYGAPRVGNRAFAEFLTVQTGGTLYRITHTNDIVPRLPPREFGYSHSSPEYWIKSGTLVPVTRNDIVKIEGIDATGGNNQPNIPPIPAHLWYFGLIGTCL

SEQ ID NO: 3178 - protein, 269 aa, Thermomyces lanuginosus
EVSQDLFNQFNLFAQYSAAAYCGKNNDAPAGTNITCTGNACPEVEKADATFLYSFEDSGVGDVTGFLALDNTNKLIVLSFRGSRSIENWIGNLNFDLKEINDICSGCRGHEGFTSSWRSVADTLRQKVEDAVREHPDYRVVFTGHSLGGALATVAGADLRGNGYDIDVFSYGAPRVGNRAFAEFLTVQTGGTLYRITHTNDIVPRLPPREFGYSHSSPEYWIKSGTLVPVTRNDIVKIEGIDATGGNNQPNIPDIPAHLWYFGLIGTCL

SEQ ID NO: 3179 - protein, 269 aa, Thermomyces lanuginosus
EVSQDLFNQFNLFAQYSAAAYCGKNNDAPAGTNITCTGNACPEVEKADATFLYSFEDSGVGDVTGFLALDNINKLIVLSFRGSRSIENWIGNLNFDLKEINDICSGCRGHDGFTSSWRSVADTLRQKVEDAVREHPDYRVVFTGHSLGGALATVAGADLRGNGYDIDVFSYGAPRVGNRAFAEFLTVQTGGTLYRITHTNDIVPRLPPREFGYSHSSPEYWIKSGTLVPVTRNDIVKIEGIDATGGNNQPNIPDIPAHLWYFGLIGTCL

SEQ ID NO: 3180 - protein, 269 aa, Thermomyces lanuginosus
EVSQDLFNQFNLFAQYSAAAYCGKNNDATAGTNITCTGNACPEVEKADATFLYSFEDSGVGDVTGFLALDNTNKLIVLSFRGSRSIENWIGNLNFDLKEINDICSGCRGHDGFTSSWRSVADTLRQKVEDAVREHPDYRVVFTGHSLGGALATVAGADLRGNGYDIDVFSYGAPRVGNRAFAEFLTVQTGGTLYRITHTNDIVPRLPPREFGYSHSSPEYWIKSGTLVPVTRNDIVKIEGIDATGGNNQPNIPDIPAHLWYFGLIGTCL

SEQ ID NO: 3181 - protein, 269 aa, Thermomyces lanuginosus
EVSQDLFNQFNLFAQYSAAAYCGKNNDAPAGTNITCTGNACPEVEKADATFLYSFEDSGVGDVTGFLALDNLNKLIVLSFRGSRSIENWIGNLNFDLKEINDICSGCRGHDGFTSSWRSVADTLRQKVEDAVREHPDYRVVFTGHSLGGALATVAGADLRGNGYDIDVFSYGAPRVGNRAFAEFLTVQTGGTLYRITHTNDIVPRLPPREFGYSHSSPEYWIKSGTLVPVTRNDIVKIEGIDATGGNNQPNIPDIPAHLWYFGLIGTCL

SEQ ID NO: 3182 - protein, 269 aa, Thermomyces lanuginosus
EVSQDLFNQFNLFAQYSALAYCGKNNDAPAGTNITCTGNACPEVEKADATFLYSFEDSGVGDVTGFLALDNTNKLIVLSFRGSRSIENWIGNLNFDLKEINDICSGCRGHDGFTSSWRSVADTLRQKVEDAVREHPDYRVVFTGHSLGGALATVAGADLRGNGYDIDVFSYGAPRVGNRAFAEFLTVQTGGTLYRITHTNDIVPRLPPREFGYSHSSPEYWIKSGTLVPVTRNDIVKIEGIDATGGNNQPNIPDIPAHLWYFGLIGTCL

SEQ ID NO: 3183 - protein, 269 aa, Thermomyces lanuginosus
EVSQDLFNQFNLFAQYSAAAYCGKNNDAPAGTNITCTGNACPEVEKADATFLYSFEDSGVGDVTGFLALDNTNKLIVLSFRGSRSIDNWIGNLNFDLKEINDICSGCRGHDGFTSSWRSVADTLRQKVEDAVREHPDYRVVFTGHSLGGALATVAGADLRGNGYDIDVFSYGAPRVGNRAFAEFLTVQTGGTLYRITHTNDIVPRLPPREFGYSHSSPEYWIKSGTLVPVTRNDIVKIEGIDATGGNNQPNIPDIPAHLWYFGLIGTCL

SEQ ID NO: 3184 - protein, 269 aa, Thermomyces lanuginosus
EVSQDLFNQFNLFAQYSAAAYCGKNNDAPAGTNITCTGNACPEVEKADATFLYSFEDSGVGDVTGFLALDNTNKLIVLSFRGSRSIENWIGNLNFDLKEINDICSGCRGHDGFTSSWRSVADTLRQKVEDAVREHPDYRVVFTGHSLGGALATVAGADLRGNGYDIDVFSYGAPRVGNRAFAEFLTVQTGGTLYRITHTNDIVPRLPPSEFGYSHSSPEYWIKSGTLVPVTRNDIVKIEGIDATGGNNQPNIPDIPAHLWYFGLIGTCL

SEQ ID NO: 3185 - protein, 269 aa, Thermomyces lanuginosus
EVSQDLFNQFNLFAQYSAAAYCGKNNDAPAGTNITCTGNACPEVEKADATFLYSFEDSGVGDVTGFLALDNTNKLIVLSFRGSRSIENWIGNLNFDLKEINDICSGCRGHDGFTSSWRSVADTLRQKVEYAVREHPDYRVVFTGHSLGGALATVAGADLRGNGYDIDVFSYGAPRVGNRAFAEFLTVQTGGTLYRITHTNDIVPRLPPREFGYSHSSPEYWIKSGTLVPVTRNDIVKIEGIDATGGNNQPNIPDIPAHLWYFGLIGTCL

SEQ ID NO: 3186 - protein, 269 aa, Thermomyces lanuginosus
EVSQDLFNQFNLFAQYSAAAYCGKNNDAPAGTNITCTGNACPEVEKADATFLYSFEDSGVGDVTGFLALDYTNKLIVLSFRGSRSIENWIGNLNFDLKEINDICSGCRGHDGFTSSWRSVADTLRQKVEDAVREHPDYRVVFTGHSLGGALATVAGADLRGNGYDIDVFSYGAPRVGNRAFAEFLTVQTGGTLYRITHTNDIVPRLPPREFGYSHSSPEYWIKSGTLVPVTRNDIVKIEGIDATGGNNQPNIPDIPAHLWYFGLIGTCL

SEQ ID NO: 3187 - protein, 269 aa, Thermomyces lanuginosus
EVSQDLFNQFNLFAQYSAAAYCGKNNDAPAGTNITCTGNACPEVEKADATFLYSFEDSGVGDVTGFLALDNTNKLIVLSFRGSRSIENWIGNLNFELKEINDICSGCRGHDGFTSSWRSVADTLRQKVEDAVREHPDYRVVFTGHSLGGALATVAGADLRGNGYDIDVFSYGAPRVGNRAFAEFLTVQTGGTLYRITHTNDIVPRLPPREFGYSHSSPEYWIKSGTLVPVTRNDIVKIEGIDATGGNNQPNIPDIPAHLWYFGLIGTCL

SEQ ID NO: 3188 - protein, 269 aa, Thermomyces lanuginosus
EVSQDLFNQFNLFAQYSAAAYCGKNNDAPAGTNITCTGNACPEVEKADATSLYSFEDSGVGDVTGFLALDNTNKLIVLSFRGSRSIENWIGNLNFDLKEINDICSGCRGHDGFTSSWRSVADTLRQKVEDAVREHPDYRVVFTGHSLGGALATVAGADLRGNGYDIDVFSYGAPRVGNRAFAEFLTVQTGGTLYRITHTNDIVPRLPPREFGYSHSSPEYWIKSGTLVPVTRNDIVKIEGIDATGGNNQPNIPDIPAHLWYFGLIGTCL

SEQ ID NO: 3189 - protein, 269 aa, Thermomyces lanuginosus
EVSQDLFNQFNLFAQYSAAAYCGKNNDAPAGSNITCTGNACPEVEKADATFLYSFEDSGVGDVTGFLALDNTNKLIVLSFRGSRSIENWIGNLNFDLKEINDICSGCRGHDGFTSSWRSVADTLRQKVEDAVREHPDYRVVFTGHSLGGALATVAGADLRGNGYDIDVFSYGAPRVGNRAFAEFLTVQTGGTLYRITHTNDIVPRLPPREFGYSHSSPEYWIKSGTLVPVTRNDIVKIEGIDATGGNNQPNIPDIPAHLWYFGLIGTCL

SEQ ID NO: 3190 - protein, 269 aa, Thermomyces lanuginosus
EVSQDLFNQFNLFAQYSAAAYCGKNNDAPAGTNITCTGNACPEVEKADATFLYSFEDSGVGDVTGFLALDNTNKLIVLSFRGSRSIENWIGNLNFDLKEINDICSGCRGHDGFTSSWRSVADTLRQKVEDAVREHPDYRVVFTGHSLGGALATVAGADLRGNGYDIDVFSYGAPRVGNRAFAEFLTLQTGGTLYRITHTNDIVPRLPPREFGYSHSSPEYWIKSGTLVPVTRNDIVKIEGIDATGGNNQPNIPDIPAHLWYFGLIGTCL

SEQ ID NO: 3191 - protein, 269 aa, Thermomyces lanuginosus
EVSQDLFNQFNLFAQYSAAAYCGKNNDAPAGTNITCTGNACPEVEKADATFLYSFEDSGVGDVTGFLALDNTNKLIVLSFRGSRSIENWQGNLNFDLKEINDICSGCRGHDGFTSSWRSVADTLRQKVEDAVREHPDYRVVFTGHSLGGALATVAGADLRGNGYDIDVFSYGAPRVGNRAFAEFLTVQTGGTLYRITHTNDIVPRLPPREFGYSHSSPEYWIKSGTLVPVTRNDIVKIEGIDATGGNNQPNIPDIPAHLWYFGLIGTCL

SEQ ID NO: 3192 - protein, 269 aa, Thermomyces lanuginosus
EVSLDLFNQFNLFAQYSAAAYCGKNNDAPAGTNITCTGNACPEVEKADATFLYSFEDSGVGDVTGFLALDNTNKLIVLSFRGSRSIENWIGNLNFDLKEINDICSGCRGHDGFTSSWRSVADTLRQKVEDAVREHPDYRVVFTGHSLGGALATVAGADLRGNGYDIDVFSYGAPRVGNRAFAEFLTVQTGGTLYRITHTNDIVPRLPPREFGYSHSSPEYWIKSGTLVPVTRNDIVKIEGIDATGGNNQPNIPDIPAHLWYFGLIGTCL

SEQ ID NO: 3193 - protein, 269 aa, Thermomyces lanuginosus
EVSQDLFNQFNLFAQYSAAAYCGKNNDAPAGTNITCTGNACPEVEKADATFLYSFEDSGVGDVTGFLALDNTNKLIVLSFRGSRSIENWIGNLNFDLKEINDICSGCRGHDGFTSSWRSVADTLRQKVEDAVREHPDYRVVFTGHSLGGALATVAGADLRGNGYDIDVFSYGAPRVGNRAFAEFLTVQTGGTLYRITHTNDIVPRLPPREFGYSHSSPEYWIKSGTLVPVTRNDIVKIEGIDATGGNNGPNIPDIPAHLWYFGLIGTCL

SEQ ID NO: 3194 - protein, 269 aa, Thermomyces lanuginosus
EVSQDLFNQFNLFAQYSAAAYCGKNNDAPAGTNITCTGNACPEVEKADATFLYSFEDSGVGDVTGFLALDNTNKLIVLSFRGSRSIENWIGNLNFDLKEINDICSGCRGHDGFTSSWRSVADTLRQKVEDAVREHPDYRVVFTGHSLGGALATVAGADLRGNGYDIDVFSYGAPRVGNRAFAEFLTVQTGGTLYRITHTNDIVPRLPPREFGYSHSSPEYWIKSGTLVPVTRNDIVKIEGIDATGGNNQPNIPDIPYHLWYFGLIGTCL

SEQ ID NO: 3195 - protein, 269 aa, Thermomyces lanuginosus
EVSQDLFNQFNLFAQYSAAAYCGKNNDAPAGTNITCTGNACPEVEKADATFLYSFEDSGVGDVTGFLALDNDNKLIVLSFRGSRSIENWIGNLNFDLKEINDICSGCRGHDGFTSSWRSVADTLRQKVEDAVREHPDYRVVFTGHSLGGALATVAGADLRGNGYDIDVFSYGAPRVGNRAFAEFLTVQTGGTLYRITHTNDIVPRLPPREFGYSHSSPEYWIKSGTLVPVTRNDIVKIEGIDATGGNNQPNIPDIPAHLWYFGLIGTCL

SEQ ID NO: 3196 - protein, 269 aa, Thermomyces lanuginosus
EVSQDLFNQFNLHAQYSAAAYCGKNNDAPAGTNITCTGNACPEVEKADATFLYSFEDSGVGDVTGFLALDNTNKLIVLSFRGSRSIENWIGNLNFDLKEINDICSGCRGHDGFTSSWRSVADTLRQKVEDAVREHPDYRVVFTGHSLGGALATVAGADLRGNGYDIDVFSYGAPRVGNRAFAEFLTVQTGGTLYRITHTNDIVPRLPPREFGYSHSSPEYWIKSGTLVPVTRNDIVKIEGIDATGGNNQPNIPDIPAHLWYFGLIGTCL

SEQ ID NO: 3197 - protein, 269 aa, Thermomyces lanuginosus
EVSQDLFNQFNLFAQYSAAAYCGKNNDAPAGTNITCTGNACPEVEKADATFLYSFEDSGVGDVTGFLALDNTNKLIVLSFRGSRSIENWIGNLNFDLKEINDICSGCRGHDGFTSSWRSVADTLRQKVEDAVREHPDYRVVFTGHSLGGALATVAGADLRGNGYDIDVFSYGAPRVGNRAFAEFLTVQRGGTLYRITHTNDIVPRLPPREFGYSHSSPEYWIKSGTLVPVTRNDIVKIEGIDATGGNNQPNIPDIPAHLWYFGLIGTCL

SEQ ID NO: 3198 - protein, 269 aa, Thermomyces lanuginosus
EVSQDLFNQFNLFAQYSAAAYCGKNNDAPAGTNITCTGNACPEVEKADATFLYSFEDSGVGDVTGFLALDNTNKLIVLSFRGSRSIENWIGNLNFDLKEINDICSGCRGHDGFTSSWRSVADTLRQKVEDAVREHPDYRVVFTGHSLGGALATVAGADLRGNGYDIDVFSYGAPRVGNRAFAEFLTVQTGGTLYRITHTNDIVPRLPPREFGYSHSSPEYWIKSGTLVPVTRNDIVKIEGIDATGGNNQPNIPDIPAHLWYFGCIGTCL

SEQ ID NO: 3199 - protein, 269 aa, Thermomyces lanuginosus
EVSQDLFNQFNLFAQYSAAGYCGKNNDAPAGTNITCTGNACPEVEKADATFLYSFEDSGVGDVTGFLALDNTNKLIVLSFRGSRSIENWIGNLNFDLKEINDICSGCRGHDGFTSSWRSVADTLRQKVEDAVREHPDYRVVFTGHSLGGALATVAGADLRGNGYDIDVFSYGAPRVGNRAFAEFLTVQTGGTLYRITHTNDIVPRLPPREFGYSHSSPEYWIKSGTLVPVTRNDIVKIEGIDATGGNNQPNIPDIPAHLWYFGLIGTCL

SEQ ID NO: 3200 - protein, 269 aa, Thermomyces lanuginosus
EVSQDLFNQFNLFAQYSAAAYCGKNNDAPAGTNITCTGNACPEVEKADATFLYSFEDSGVGDVTGFLALDNTNKLIVLSFRGSRSIENWIGNLNFRLKEINDICSGCRGHDGFTSSWRSVADTLRQKVEDAVREHPDYRVVFTGHSLGGALATVAGADLRGNGYDIDVFSYGAPRVGNRAFAEFLTVQTGGTLYRITHTNDIVPRLPPREFGYSHSSPEYWIKSGTLVPVTRNDIVKIEGIDATGGNNQPNIPDIPAHLWYFGLIGTCL

SEQ ID NO: 3201 - protein, 269 aa, Thermomyces lanuginosus
EVSQDLFNQFNLFAQYSAAAYCGKNNDAPAGTNITCTGNACPEVEKADATFLYSFEDSGVGDVTGFLALDNTNKLIVLSFRGSRSIENWIGNLNFDLKEINDICSGCRGHDGFTSSWRSVADTLRQKVEDAVREHPDYRVVFTGHSLGGALATVAGADLRGNGYDIDVFSYGAPRVGNRAFAEFLTVQTGGTLYRITHTNDIVPRLPPREFGYSHSSPEYWIKSGTLVPVTRNDIVKIEGIDATGGNNQPMIPDIPAHLWYFGLIGTCL

SEQ ID NO: 3202 - protein, 269 aa, Thermomyces lanuginosus
EVSQYLFNQFNLFAQYSAAAYCGKNNDAPAGTNITCTGNACPEVEKADATFLYSFEDSGVGDVTGFLALDNTNKLIVLSFRGSRSIENWIGNLNFDLKEINDICSGCRGHDGFTSSWRSVADTLRQKVEDAVREHPDYRVVFTGHSLGGALATVAGADLRGNGYDIDVFSYGAPRVGNRAFAEFLTVQTGGTLYRITHTNDIVPRLPPREFGYSHSSPEYWIKSGTLVPVTRNDIVKIEGIDATGGNNQPNIPDIPAHLWYFGLIGTCL

SEQ ID NO: 3203 - protein, 269 aa, Thermomyces lanuginosus
EVSQDLFNQFNLFAQYSAAAYCGKNNDAPAGTNITCTGNACPEVEKADATFLYSFEDSGVGDVTGFLALDNTNKLIVLSFRGSRSIENWIGNLNFDLKEINDICSGCRGHDGFTSSWRSVADTLRQKVEDAVREHPDYRVVFTGHSLGGALATVAGADLRGNGYDIDVFSYGAPRVGNRAFAEFLTVQSGGTLYRITHTNDIVPRLPPREFGYSHSSPEYWIKSGTLVPVTRNDIVKIEGIDATGGNNQPNIPDIPAHLWYFGLIGTCL

SEQ ID NO: 3204 - protein, 269 aa, Thermomyces lanuginosus
EVSQDLFNQFNLFAQYSAAAYCGKNNDAPAGTNITCTGNACPEVEKADATFLYSFEDSGVGDVTGFLALDNTNKLIVLSFRGSRSIENWIGNLTFDLKEINDICSGCRGHDGFTSSWRSVADTLRQKVEDAVREHPDYRVVFTGHSLGGALATVAGADLRGNGYDIDVFSYGAPRVGNRAFAEFLTVQTGGTLYRITHTNDIVPRLPPREFGYSHSSPEYWIKSGTLVPVTRNDIVKIEGIDATGGNNQPNIPDIPAHLWYFGLIGTCL

SEQ ID NO: 3205 - protein, 269 aa, Thermomyces lanuginosus
EVSQDLFNQFNLFAQYSAAAYCGFNNDAPAGTNITCTGNACPEVEKADATFLYSFEDSGVGDVTGFLALDNTNKLIVLSFRGSRSIENWIGNLNFDLKEINDICSGCRGHDGFTSSWRSVADTLRQKVEDAVREHPDYRVVFTGHSLGGALATVAGADLRGNGYDIDVFSYGAPRVGNRAFAEFLTVQTGGTLYRITHTNDIVPRLPPREFGYSHSSPEYWIKSGTLVPVTRNDIVKIEGIDATGGNNQPNIPDIPAHLWYFGLIGTCL

SEQ ID NO: 3206 - protein, 269 aa, Thermomyces lanuginosus
EVSQDLFNQFNLFAQYSAAAYCGKNNDAPAGTNITCTGNACPEVEKADATFLYSFEDSGVGDVTGFLALDNTNKLIVLSFRGSRSIENWIGNLNFDLKEINDICSGCRGHDGFTSSWRSVADTLRQKVEDAVREHPDYRVVFTGHSLGGALATVAGADLRGNGYDIDVFSYGAPRVGNRAFAEFLTVQTGGTLYRITHTNDIVPRLPPREFGYSHSSPEYWILSGTLVPVTRNDIVKIEGIDATGGNNQPNIPDIPAHLWYFGLIGTCL

SEQ ID NO: 3207 - protein, 269 aa, Thermomyces lanuginosus
EVSQDLFNQFNLFAQYSAAAYCGKNNDAPAGTNITCTGNACPEVEKADATFLYSFEDSGVGDVTGFLALDNTNKLIVLSFRGSRSIENWIGNLNFDLKEINDICSGCRGHDGFTSSWRSVKDTLRQKVEDAVREHPDYRVVFTGHSLGGALATVAGADLRGNGYDIDVFSYGAPRVGNRAFAEFLTVQTGGTLYRITHTNDIVPRLPPREFGYSHSSPEYWIKSGTLVPVTRNDIVKIEGIDATGGNNQPNIPDIPAHLWYFGLIGTCL

SEQ ID NO: 3208 - protein, 269 aa, Thermomyces lanuginosus
EVSQDLFNQFNLFAQYSAAAYCGKNNDAPAGTNITCTGNACPEVEKADATFLYSFEDSGVGDVTGFLALDNTNKLIVLSFRGSRSIENWIGNLNFDLKEINDICSGCRGHDGFTSSWRSVADTLRQKVEDAVREHPDYRVVFTGHSLGGALATVAGADLRGNGYDIDVFSYGAPRVGNRAFAEFLTVQTGGTLYRITHTNDIVPRLPPREFGYSHSSPEYWIKSGTLVPVTRNDIVKIEGIDATGGNNQPNIPDIPAHWWYFGLIGTCL

SEQ ID NO: 3209 - protein, 269 aa, Thermomyces lanuginosus
EVSQDLFNNFNLFAQYSAAAYCGKNNDAPAGTNITCTGNACPEVEKADATFLYSFEDSGVGDVTGFLALDNTNKLIVLSFRGSRSIENWIGNLNFDLKEINDICSGCRGHDGFTSSWRSVADTLRQKVEDAVREHPDYRVVFTGHSLGGALATVAGADLRGNGYDIDVFSYGAPRVGNRAFAEFLTVQTGGTLYRITHTNDIVPRLPPREFGYSHSSPEYWIKSGTLVPVTRNDIVKIEGIDATGGNNQPNIPDIPAHLWYFGLIGTCL

SEQ ID NO: 3210 - protein, 269 aa, Thermomyces lanuginosus
EVSQDLFNQFNLFAQYSAAAYCGKNNDAPAGTNITCTGNACPEVEKAQATFLYSFEDSGVGDVTGFLALDNTNKLIVLSFRGSRSIENWIGNLNFDLKEINDICSGCRGHDGFTSSWRSVADTLRQKVEDAVREHPDYRVVFTGHSLGGALATVAGADLRGNGYDIDVFSYGAPRVGNRAFAEFLTVQTGGTLYRITHTNDIVPRLPPREFGYSHSSPEYWIKSGTLVPVTRNDIVKIEGIDATGGNNQPNIPDIPAHLWYFGLIGTCL

SEQ ID NO: 3211 - protein, 269 aa, Thermomyces lanuginosus
EVSIDLFNQFNLFAQYSAAAYCGKNNDAPAGTNITCTGNACPEVEKADATFLYSFEDSGVGDVTGFLALDNTNKLIVLSFRGSRSIENWIGNLNFDLKEINDICSGCRGHDGFTSSWRSVADTLRQKVEDAVREHPDYRVVFTGHSLGGALATVAGADLRGNGYDIDVFSYGAPRVGNRAFAEFLTVQTGGTLYRITHTNDIVPRLPPREFGYSHSSPEYWIKSGTLVPVTRNDIVKIEGIDATGGNNQPNIPDIPAHLWYFGLIGTCL

SEQ ID NO: 3212 - protein, 269 aa, Thermomyces lanuginosus
EVSQDLFNQFNLFAQYSAAAYCGKNNDAPAGTNITCTGNACPEVEKADATFLYSFEDSGVGDVTGFLALDNTNKLIVLSFRGSRSIENWIGNLNFDLKEINDICSGCRGHDGFTSSWRSVADTLRQKVEDAVREHPDYRVVFTGHSLGGALATVAGADLRGNGYDIDVFSYGAPRVGNRAFAEFLTVQTGGTLYRITHTNDIVPRLPPREFGYSHSSPEYWIKSGTLVPVTRNDIVHIEGIDATGGNNQPNIPDIPAHLWYFGLIGTCL

SEQ ID NO: 3213 - protein, 269 aa, Thermomyces lanuginosus
EVSQDLFNQFNLFAQYSAAAYCGKNNDAPAGTNITCTGNACPEVEKADATFLYGFEDSGVGDVTGFLALDNTNKLIVLSFRGSRSIENWIGNLNFDLKEINDICSGCRGHDGFTSSWRSVADTLRQKVEDAVREHPDYRVVFTGHSLGGALATVAGADLRGNGYDIDVFSYGAPRVGNRAFAEFLTVQTGGTLYRITHTNDIVPRLPPREFGYSHSSPEYWIKSGTLVPVTRNDIVKIEGIDATGGNNQPNIPDIPAHLWYFGLIGTCL

SEQ ID NO: 3214 - protein, 269 aa, Thermomyces lanuginosus
EVSQDLFNQFNLFAQYSAAAYCGKNNDAPAGTNITCTGNACPEVEKADATFLYSFEDSGVGDVGGFLALDNTNKLIVLSFRGSRSIENWIGNLNFDLKEINDICSGCRGHDGFTSSWRSVADTLRQKVEDAVREHPDYRVVFTGHSLGGALATVAGADLRGNGYDIDVFSYGAPRVGNRAFAEFLTVQTGGTLYRITHTNDIVPRLPPREFGYSHSSPEYWIKSGTLVPVTRNDIVKIEGIDATGGNNQPNIPDIPAHLWYFGLIGTCL

SEQ ID NO: 3215 - protein, 269 aa, Thermomyces lanuginosus
EVSQDLFNQFNLFAQYSAAAYCGKNCDAPAGTNITCTGNACPEVEKADATFLYSFEDSGVGDVTGFLALDNTNKLIVLSFRGSRSIENWIGNLNFDLKEINDICSGCRGHDGFTSSWRSVADTLRQKVEDAVREHPDYRVVFTGHSLGGALATVAGADLRGNGYDIDVFSYGAPRVGNRAFAEFLTVQTGGTLYRITHTNDIVPRLPPREFGYSHSSPEYWIKSGTLVPVTRNDIVKIEGIDATGGNNQPNIPDIPAHLWYFGLIGTCL

SEQ ID NO: 3216 - protein, 269 aa, Thermomyces lanuginosus
EVSQDLFNQFNLFAQYSAAAYCGKNNDAPAGTNITCTGNACPEVEKADATFLYSFEDSGVLDVTGFLALDNTNKLIVLSFRGSRSIENWIGNLNFDLKEINDICSGCRGHDGFTSSWRSVADTLRQKVEDAVREHPDYRVVFTGHSLGGALATVAGADLRGNGYDIDVFSYGAPRVGNRAFAEFLTVQTGGTLYRITHTNDIVPRLPPREFGYSHSSPEYWIKSGTLVPVTRNDIVKIEGIDATGGNNQPNIPDIPAHLWYFGLIGTCL

SEQ ID NO: 3217 - protein, 269 aa, Thermomyces lanuginosus
EVSQDLFNQFNLFAQYSAAAYCGKNNDAPAGTNITCTGNACPEVEKADATFLYSFEDSGVGDVTGFLALDNTNKLIVLSFRGSRSIENWIGNWNFDLKEINDICSGCRGHDGFTSSWRSVADTLRQKVEDAVREHPDYRVVFTGHSLGGALATVAGADLRGNGYDIDVFSYGAPRVGNRAFAEFLTVQTGGTLYRITHTNDIVPRLPPREFGYSHSSPEYWIKSGTLVPVTRNDIVKIEGIDATGGNNQPNIPDIPAHLWYFGLIGTCL

SEQ ID NO: 3218 - protein, 269 aa, Thermomyces lanuginosus
EVSQDLFNQFNLFAQYSAAAYCGKNNDAPAGTNITCTGNACPEVEKADATFLYSFEDSGVGDVTGFLALDNTNKLIVLSFRGSRSIENWIGNLNFDLKEINDICSGCRGHDGFTSSWRSVADTLRQKVEDADREHPDYRVVFTGHSLGGALATVAGADLRGNGYDIDVFSYGAPRVGNRAFAEFLTVQTGGTLYRITHTNDIVPRLPPREFGYSHSSPEYWIKSGTLVPVTRNDIVKIEGIDATGGNNQPNIPDIPAHLWYFGLIGTCL

SEQ ID NO: 3219 - protein, 269 aa, Thermomyces lanuginosus
EVSQDLFNQFNLFAQYSAAAYCGKNNDAPAGTNITCTGNACPEVEKADATFLYSFEDSGVGDVTGFLALDNYNKLIVLSFRGSRSIENWIGNLNFDLKEINDICSGCRGHDGFTSSWRSVADTLRQKVEDAVREHPDYRVVFTGHSLGGALATVAGADLRGNGYDIDVFSYGAPRVGNRAFAEFLTVQTGGTLYRITHTNDIVPRLPPREFGYSHSSPEYWIKSGTLVPVTRNDIVKIEGIDATGGNNQPNIPDIPAHLWYFGLIGTCL

SEQ ID NO: 3220 - protein, 269 aa, Thermomyces lanuginosus
EVSQDLFNQFNLFAQYSAAAYCGKNNDAPAGTNITCTGNACPEVEKADATFLYSFEDSGVGDVTGFLALDNTNKLIVLSFRGSRSIENWIGNLNFDLKEINDICSGCRGHDGFTSSWRSVADTLRQKVEDAVREHPDYRVVFTGHSLGGALATVAGADLRGNGYDIDVFSYGAPRVGNRAFAEFLTVQTGGTLYRITHTNDIVPRLPPREFGYSHSSPEYWIKSGTLVPVTRNDIVKIEGIDATGGNNQPNINDIPAHLWYFGLIGTCL

SEQ ID NO: 3221 - protein, 269 aa, Thermomyces lanuginosus
EVSQDLFNQFNLFSQYSAAAYCGKNNDAPAGTNITCTGNACPEVEKADATFLYSFEDSGVGDVTGFLALDNTNKLIVLSFRGSRSIENWIGNLNFDLKEINDICSGCRGHDGFTSSWRSVADTLRQKVEDAVREHPDYRVVFTGHSLGGALATVAGADLRGNGYDIDVFSYGAPRVGNRAFAEFLTVQTGGTLYRITHTNDIVPRLPPREFGYSHSSPEYWIKSGTLVPVTRNDIVKIEGIDATGGNNQPNIPDIPAHLWYFGLIGTCL

SEQ ID NO: 3222 - protein, 269 aa, Thermomyces lanuginosus
EVSQDLFNQFNLFAQYSAAAYCGKNNDAPAGTNITCTGNACPEVEFADATFLYSFEDSGVGDVTGFLALDNTNKLIVLSFRGSRSIENWIGNLNFDLKEINDICSGCRGHDGFTSSWRSVADTLRQKVEDAVREHPDYRVVFTGHSLGGALATVAGADLRGNGYDIDVFSYGAPRVGNRAFAEFLTVQTGGTLYRITHTNDIVPRLPPREFGYSHSSPEYWIKSGTLVPVTRNDIVKIEGIDATGGNNQPNIPDIPAHLWYFGLIGTCL

SEQ ID NO: 3223 - protein, 269 aa, Thermomyces lanuginosus
EVSQDLFNQFNLFAQYSAAAYCGKNNDAPAGTNITCTGNACPEVEKADATFLYSFEDSGVGDVTGFLALDNTNKLIVLSFRGSRSIENWIGNLNFDLKEINDICSGCMGHDGFTSSWRSVADTLRQKVEDAVREHPDYRVVFTGHSLGGALATVAGADLRGNGYDIDVFSYGAPRVGNRAFAEFLTVQTGGTLYRITHTNDIVPRLPPREFGYSHSSPEYWIKSGTLVPVTRNDIVKIEGIDATGGNNQPNIPDIPAHLWYFGLIGTCL

SEQ ID NO: 3224 - protein, 269 aa, Thermomyces lanuginosus
EVSQDLFNQFNLFAQYSAAAYCGKNNDAPAGTNITCTGNACPEVEKADATFLYSFEDSGVGDVTGFLALDNTNKLIVLSFRGSRSIENWIGNLNFDLKEINDICSGCKGHDGFTSSWRSVADTLRQKVEDAVREHPDYRVVFTGHSLGGALATVAGADLRGNGYDIDVFSYGAPRVGNRAFAEFLTVQTGGTLYRITHTNDIVPRLPPREFGYSHSSPEYWIKSGTLVPVTRNDIVKIEGIDATGGNNQPNIPDIPAHLWYFGLIGTCL

SEQ ID NO: 3225 - protein, 269 aa, Thermomyces lanuginosus
EVSQDLFNQFNLFAQYSAAAYCGKNNDAPAGTNITCTGNACPEVEKADATFLYSFEDSGVGDVTGFLALDNTNKLIVLSFRGSRSIENWIGNLNFDLKEINDICSGCRGHDGFTSSWRSVADTLRQKVEDAVREHPDYRVVFTGHSLGGALATVAGADLRGNGYDIDVFSYGAPRVGNRAFAEFLTVQTGGTLYRITHTNDIVPRLPPREFGYSHSSPEYWIKSGTLVPVTRNDIVKIEGIDATGGNNQPNEPDIPAHLWYFGLIGTCL

SEQ ID NO: 3226 - protein, 269 aa, Thermomyces lanuginosus
EVSQDLFNQFNLFAQYSAAAYCGKNNDAPAGTNITCTGNACPEVEKADATFLYSFEDSGVGDVTGFLALDNTNKLIVLSFRGSRSIENWIGNLNFDLKEINDICSGCRGHDGFTSSWRSVADTLRQKVEDAVREHPDYRVVFTGHSLGGALATVAGADLRGNGYDIDVFSYGAPRVGNRAFAEFLTVQTGGTLYRITHTNDIVPRLPPREFGYSHSSPEYWITSGTLVPVTRNDIVKIEGIDATGGNNQPNIPDIPAHLWYFGLIGTCL

SEQ ID NO: 3227 - protein, 269 aa, Thermomyces lanuginosus
EVSQDLFNQFNLFAQYSAAAYCGKNNDAPAGTNITCTGNACPEVEKADATFLYSFEDSGVGDVTGFLALDNTNKLIVLSFRGSRSIENWIGNLNFDLKEINDICSGCRGHDGFTSSWRSVADTLRQKVEDAVREHRDYRVVFTGHSLGGALATVAGADLRGNGYDIDVFSYGAPRVGNRAFAEFLTVQTGGTLYRITHTNDIVPRLPPREFGYSHSSPEYWIKSGTLVPVTRNDIVKIEGIDATGGNNQPNIPDIPAHLWYFGLIGTCL

SEQ ID NO: 3228 - protein, 269 aa, Thermomyces lanuginosus
EVSQDLFNQFNLFAQYSAAAYCGKNNDAPAGTNITCTGNACPEVEKADATFLYSFEDSGVGDVTGFLAKDNTNKLIVLSFRGSRSIENWIGNLNFDLKEINDICSGCRGHDGFTSSWRSVADTLRQKVEDAVREHPDYRVVFTGHSLGGALATVAGADLRGNGYDIDVFSYGAPRVGNRAFAEFLTVQTGGTLYRITHTNDIVPRLPPREFGYSHSSPEYWIKSGTLVPVTRNDIVKIEGIDATGGNNQPNIPDIPAHLWYFGLIGTCL

SEQ ID NO: 3229 - protein, 269 aa, Thermomyces lanuginosus
EVSQDLFNQFNLFAQYSAAAYCGKNNDAPAGTNITCTGNACPEVEKADATFLYSFEDSGVGDVTGFLALDNTNKLIVLSFRGSRSIENWIGNLNFDLKEINDICSGCRGHDGFTSSWRSVADTLRQKVEDAVREHPDYRVVFTGHSLGGALATVAGADLRGNGYDIDVFSYGAPRVGNRAFAEFLTVQTGGTLYRITHTNDIVPRLPPREFGYSHSSPEYWIKSGTLVPVTRDDIVKIEGIDATGGNNQPNIPDIPAHLWYFGLIGTCL

SEQ ID NO: 3230 - protein, 269 aa, Thermomyces lanuginosus
EVSQDLFNQFNLFAQYSAAAYCGKNNDAPAGTNITCTGNACPEVEKADATFLYSFEDSGVGDVTGFLALDNTNKLIVLSFRGSRSIENWIGNLNFDLKEINDICSGCRGHDGFTSSWRSVADTLRQKVEDAVREHPDYRVVFTGHSLGGALATVAGADLRGNGYDIDVFSYGAPRVGNRAFAEFLTVQTGGTLYRITSTNDIVPRLPPREFGYSHSSPEYWIKSGTLVPVTRNDIVKIEGIDATGGNNQPNIPDIPAHLWYFGLIGTCL

SEQ ID NO: 3231 - protein, 269 aa, Thermomyces lanuginosus
EVSQDLFNQFNLFAQYSAAAYCGKNNDAPAGTNITCTGNACPEVEKADATFLYSFEDSGVGDVTGFLALDNTNKLIVLSFRGSRSIENWIGNLNFDLKEINDICSGCRGHDGFTSSWRSVADTLRQKVEDAVREHPDYRVVFTGHSLGGALATVAGADLRGNGYDIDVFSYGAPRVGNRAFAEFLTVQTGGTLYRITHTNDIVPRLPPREFGYSHSSPEYWIKSGTLVPVTRNDIVKIEGIDATGGNNQPNIPDIPWHLWYFGLIGTCL

SEQ ID NO: 3232 - protein, 269 aa, Thermomyces lanuginosus
EVSQDLFNQFNLFAQYSAAAYCGKNNDAPAGTNIKCTGNACPEVEKADATFLYSFEDSGVGDVTGFLALDNTNKLIVLSFRGSRSIENWIGNLNFDLKEINDICSGCRGHDGFTSSWRSVADTLRQKVEDAVREHPDYRVVFTGHSLGGALATVAGADLRGNGYDIDVFSYGAPRVGNRAFAEFLTVQTGGTLYRITHTNDIVPRLPPREFGYSHSSPEYWIKSGTLVPVTRNDIVKIEGIDATGGNNQPNIPDIPAHLWYFGLIGTCL

SEQ ID NO: 3233 - protein, 269 aa, Thermomyces lanuginosus
EVSQDLFNQFNLFAQYSAAAYCGKNNDAPAGTNITCTGNACPEVEKADATFLYSFEDSGVGDVTGFLALDNTNKLIVLSFRGSRSIENWIGNLNFDLKEINDICSGCRGHDGFTSSWRSVADTLRQKVEDAVREHPDYRVVFTGHSLGGALATVAGADLRGNGYDIDVFSYGAPRVGNRAFAEFLTVQTGGTLYRITHTNDIVPRLPPREFGYSHGSPEYWIKSGTLVPVTRNDIVKIEGIDATGGNNQPNIPDIPAHLWYFGLIGTCL

SEQ ID NO: 3234 - protein, 269 aa, Thermomyces lanuginosus
EVSQDLFNQFNLFAQYSAAAYCGKNNDAPAVTNITCTGNACPEVEKADATFLYSFEDSGVGDVTGFLALDNTNKLIVLSFRGSRSIENWIGNLNFDLKEINDICSGCRGHDGFTSSWRSVADTLRQKVEDAVREHPDYRVVFTGHSLGGALATVAGADLRGNGYDIDVFSYGAPRVGNRAFAEFLTVQTGGTLYRITHTNDIVPRLPPREFGYSHSSPEYWIKSGTLVPVTRNDIVKIEGIDATGGNNQPNIPDIPAHLWYFGLIGTCL

SEQ ID NO: 3235 - protein, 269 aa, Thermomyces lanuginosus
EMSQDLFNQFNLFAQYSAAAYCGKNNDAPAGTNITCTGNACPEVEKADATFLYSFEDSGVGDVTGFLALDNTNKLIVLSFRGSRSIENWIGNLNFDLKEINDICSGCRGHDGFTSSWRSVADTLRQKVEDAVREHPDYRVVFTGHSLGGALATVAGADLRGNGYDIDVFSYGAPRVGNRAFAEFLTVQTGGTLYRITHTNDIVPRLPPREFGYSHSSPEYWIKSGTLVPVTRNDIVKIEGIDATGGNNQPNIPDIPAHLWYFGLIGTCL

SEQ ID NO: 3236 - protein, 269 aa, Thermomyces lanuginosus
EVSQDLFWQFNLFAQYSAAAYCGKNNDAPAGTNITCTGNACPEVEKADATFLYSFEDSGVGDVTGFLALDNTNKLIVLSFRGSRSIENWIGNLNFDLKEINDICSGCRGHDGFTSSWRSVADTLRQKVEDAVREHPDYRVVFTGHSLGGALATVAGADLRGNGYDIDVFSYGAPRVGNRAFAEFLTVQTGGTLYRITHTNDIVPRLPPREFGYSHSSPEYWIKSGTLVPVTRNDIVKIEGIDATGGNNQPNIPDIPAHLWYFGLIGTCL

SEQ ID NO: 3237 - protein, 269 aa, Thermomyces lanuginosus
EVSQDLFNQFNLFAQYSAAAYCGKNNDAPAGTNITCTGNACPEVEKADATFLYSFEDSGVGDVTGFLALDNTNKLIVLSFRGSRSIENWIGNLNFDLKEINDICSGCRGHDGFTSSWRSGADTLRQKVEDAVREHPDYRVVFTGHSLGGALATVAGADLRGNGYDIDVFSYGAPRVGNRAFAEFLTVQTGGTLYRITHTNDIVPRLPPREFGYSHSSPEYWIKSGTLVPVTRNDIVKIEGIDATGGNNQPNIPDIPAHLWYFGLIGTCL

SEQ ID NO: 3238 - protein, 269 aa, Thermomyces lanuginosus
EVSQDLFNQFNLFAQYSAAAYCGKNNDAPAGTNITCTANACPEVEKADATFLYSFEDSGVGDVTGFLALDNTNKLIVLSFRGSRSIENWIGNLNFDLKEINDICSGCRGHDGFTSSWRSVADTLRQKVEDAVREHPDYRVVFTGHSLGGALATVAGADLRGNGYDIDVFSYGAPRVGNRAFAEFLTVQTGGTLYRITHTNDIVPRLPPREFGYSHSSPEYWIKSGTLVPVTRNDIVKIEGIDATGGNNQPNIPDIPAHLWYFGLIGTCL

SEQ ID NO: 3239 - protein, 269 aa, Thermomyces lanuginosus
EVSQDLFNQFNLFAQYSAAAYCGKNNDAPAGTNITCTGNACPEVEKADATFLYSFEDSDVGDVTGFLALDNTNKLIVLSFRGSRSIENWIGNLNFDLKEINDICSGCRGHDGFTSSWRSVADTLRQKVEDAVREHPDYRVVFTGHSLGGALATVAGADLRGNGYDIDVFSYGAPRVGNRAFAEFLTVQTGGTLYRITHTNDIVPRLPPREFGYSHSSPEYWIKSGTLVPVTRNDIVKIEGIDATGGNNQPNIPDIPAHLWYFGLIGTCL

SEQ ID NO: 3240 - protein, 269 aa, Thermomyces lanuginosus
EVSQDLFNQFNLFAQYSAAAYCGKNNDAPAGTNITCTGNACPEVEKADATFLYSFEDSGVGDVTGFLALDNTNKLIVLSFRGSRSIENWIGNLNFDLKEINDICSGCRGHDGFTSSWRSVADTLRQKVEDAVREHPDYRVVFTGHSLGGALATVAGADLRGNGYDIDVFSYGAPRVGNRAFAEFLTVQTGGTLYRITHTNDIVPRLPPREFGYSHSSPEYWIKSGTLVPVTRNDIVKIEGIDATGGNNQPNIPDIPAHLWDFGLIGTCL

SEQ ID NO: 3241 - protein, 269 aa, Thermomyces lanuginosus
EVSQDLFNQFNLFAQYSAAAYCGKNNDAPAGTNITCTGNACPEVEKADATFLYSFEDSGVGDVTGFLALDNTNKLIVLSFRGSRSIENWIGNLNFDLKEINDICSGCRGHDGFTSSWRSVADTLRQKVEDAVQEHPDYRVVFTGHSLGGALATVAGADLRGNGYDIDVFSYGAPRVGNRAFAEFLTVQTGGTLYRITHTNDIVPRLPPREFGYSHSSPEYWIKSGTLVPVTRNDIVKIEGIDATGGNNQPNIPDIPAHLWYFGLIGTCL

SEQ ID NO: 3242 - protein, 269 aa, Thermomyces lanuginosus
EVSQDLFNQFNLFAQYSAAAYCGKNNDAPAGTNITCTGNACPEVEKADATFLYSFEDSGVGDVTGFLALDNTNKLIVLSFRGSRSIENWIGNLNFDLKEINDICSGCRGHDGFTSSWRSVADTLRQKVEDAVREHPDYRVVFTGHSLGGALATFAGADLRGNGYDIDVFSYGAPRVGNRAFAEFLTVQTGGTLYRITHTNDIVPRLPPREFGYSHSSPEYWIKSGTLVPVTRNDIVKIEGIDATGGNNQPNIPDIPAHLWYFGLIGTCL

SEQ ID NO: 3243 - protein, 269 aa, Thermomyces lanuginosus
EVSQDLFNQFNLFAQYSAAAYCGKNNDAPAGTNITCTGNACPEVEKADATFLYSFEDSGVGDVTGFLALDNTNKLIVLSFRGSRSIENWIGNLNFDLKEINDICSGCRGHDGFTSSWRSVADTLRQKVEDAVREHPDYRVVFTGHSLGGALATVAGADLRGNGYDIDVFSYGAPRVGNRAFAEFLTNQTGGTLYRITHTNDIVPRLPPREFGYSHSSPEYWIKSGTLVPVTRNDIVKIEGIDATGGNNQPNIPDIPAHLWYFGLIGTCL

SEQ ID NO: 3244 - protein, 269 aa, Thermomyces lanuginosus
EVSQDLFNQFNLFAQYSAAAYCGKNNDAPAGTNITCTGNACPEVEKADATFLYSFEDSGVGDVTGFLALDNTNKLIVLSFRGSRSIENWIGNLNFDLKEINDICSGCRGHDGFTSSWRSVADTLRQKVEDAVREHPDYRVVFTGHSLGGALATVAGADLRGNGYDIDVFSYGAPRVGNRAFAEFLTVQTGGTLYRITHTNDIVPRLPPREFGYSHSSPEYWIKSGTLVPVTRNDIVKIEGIDATGGNNQPNIPDIPAHLWYFGQIGTCL

SEQ ID NO: 3245 - protein, 269 aa, Thermomyces lanuginosus
EVSQDLFNQFNLFAQYSAAAYCGKNNDAPAGTNITCTGNACPEVEKADATFLYSFEDSGVGDVTGFLALDNTNKLIVLSFRGSRSIENWIGNLNFDLKEINDICSGCRGHDGFTSSWRSVADTLRQKVEDAVREHPDYRVVFTGHSLGGALATVAGADLRGNGYDIDVFSYGAPRVGNRDFAEFLTVQTGGTLYRITHTNDIVPRLPPREFGYSHSSPEYWIKSGTLVPVTRNDIVKIEGIDATGGNNQPNIPDIPAHLWYFGLIGTCL

SEQ ID NO: 3246 - protein, 269 aa, Thermomyces lanuginosus
EVSWDLFNQFNLFAQYSAAAYCGKNNDAPAGTNITCTGNACPEVEKADATFLYSFEDSGVGDVTGFLALDNTNKLIVLSFRGSRSIENWIGNLNFDLKEINDICSGCRGHDGFTSSWRSVADTLRQKVEDAVREHPDYRVVFTGHSLGGALATVAGADLRGNGYDIDVFSYGAPRVGNRAFAEFLTVQTGGTLYRITHTNDIVPRLPPREFGYSHSSPEYWIKSGTLVPVTRNDIVKIEGIDATGGNNQPNIPDIPAHLWYFGLIGTCL

SEQ ID NO: 3247 - protein, 269 aa, Thermomyces lanuginosus
EVSQDLFNQFNLFAQYSAAAYCGKNNAAPAGTNITCTGNACPEVEKADATFLYSFEDSGVGDVTGFLALDNTNKLIVLSFRGSRSIENWIGNLNFDLKEINDICSGCRGHDGFTSSWRSVADTLRQKVEDAVREHPDYRVVFTGHSLGGALATVAGADLRGNGYDIDVFSYGAPRVGNRAFAEFLTVQTGGTLYRITHTNDIVPRLPPREFGYSHSSPEYWIKSGTLVPVTRNDIVKIEGIDATGGNNQPNIPDIPAHLWYFGLIGTCL

SEQ ID NO: 3248 - protein, 269 aa, Thermomyces lanuginosus
EVSQDLFNQFNLFAQYSAAAYCGKNNDAPAGTNITCTGNACPEVEKADATDLYSFEDSGVGDVTGFLALDNTNKLIVLSFRGSRSIENWIGNLNFDLKEINDICSGCRGHDGFTSSWRSVADTLRQKVEDAVREHPDYRVVFTGHSLGGALATVAGADLRGNGYDIDVFSYGAPRVGNRAFAEFLTVQTGGTLYRITHTNDIVPRLPPREFGYSHSSPEYWIKSGTLVPVTRNDIVKIEGIDATGGNNQPNIPDIPAHLWYFGLIGTCL

SEQ ID NO: 3249 - protein, 269 aa, Thermomyces lanuginosus
EVSQDLFNQFNLFAQYSAAAYCGKNNDAPAGTNITCTGNACPEVEKADATFLYSFEDSGVGDVTGFLALDNTNKLIVLSFRGSRTIENWIGNLNFDLKEINDICSGCRGHDGFTSSWRSVADTLRQKVEDAVREHPDYRVVFTGHSLGGALATVAGADLRGNGYDIDVFSYGAPRVGNRAFAEFLTVQTGGTLYRITHTNDIVPRLPPREFGYSHSSPEYWIKSGTLVPVTRNDIVKIEGIDATGGNNQPNIPDIPAHLWYFGLIGTCL

SEQ ID NO: 3250 - protein, 269 aa, Thermomyces lanuginosus
EVSQDLFNQFNFFAQYSAAAYCGKNNDAPAGTNITCTGNACPEVEKADATFLYSFEDSGVGDVTGFLALDNTNKLIVLSFRGSRSIENWIGNLNFDLKEINDICSGCRGHDGFTSSWRSVADTLRQKVEDAVREHPDYRVVFTGHSLGGALATVAGADLRGNGYDIDVFSYGAPRVGNRAFAEFLTVQTGGTLYRITHTNDIVPRLPPREFGYSHSSPEYWIKSGTLVPVTRNDIVKIEGIDATGGNNQPNIPDIPAHLWYFGLIGTCL

SEQ ID NO: 3251 - protein, 269 aa, Thermomyces lanuginosus
EVSQDLFNQFNLFAQYSAAAYCGKNNDAPAGTNITCTGNACPEVEKADATFLYSFEDSGVGDVTGFLALDNTNKLIVLSFRGSRSIENWIGNLNFDLKEINDICSGCRGHDGFTSSWRSVADTLRQKVEDAVREHPDYRVVFTGHSLGGALATVAGADLRGNGYDIDVFSYGAPRVGNRAFAEFLTVQTGGTLYRITHTNDIVPRLPPREFGYSHSSPEYWIKSETLVPVTRNDIVKIEGIDATGGNNQPNIPDIPAHLWYFGLIGTCL

SEQ ID NO: 3252 - protein, 269 aa, Thermomyces lanuginosus
EVSQDLFNQFNLFAQYSAAAYCGKNNDAPAGTNITCTGNACPEVEKADATFLYSFEDSGVGDVTGFLALDNTNKLIVLSFRGSRSIENWIGNLNFDLKEINDICSGCRGHDGFTSSWRSVADTLRQKVEDAVREHPDYRVVFTGHSLGGALATVAGADLRGNGYDIDVFSYGAPRVGNRAFAEFLTVQTGGTLYRITHTNDIVPRLPPREFGYSHSSPEYWIKSGTHVPVTRNDIVKIEGIDATGGNNQPNIPDIPAHLWYFGLIGTCL

SEQ ID NO: 3253 - protein, 269 aa, Thermomyces lanuginosus
EVSQDLFNQFNLFAQYSAAAYCGKNNDAPAGTNITCTGNACPEVEKADATFLYSFEDSGVGDVTGFLALDNTNKLIVLSFRGSRSIENWIGNLNFDLKEINDICSGCRGHDGFTSSWRSVADTLRIKVEDAVREHPDYRVVFTGHSLGGALATVAGADLRGNGYDIDVFSYGAPRVGNRAFAEFLTVQTGGTLYRITHTNDIVPRLPPREFGYSHSSPEYWIKSGTLVPVTRNDIVKIEGIDATGGNNQPNIPDIPAHLWYFGLIGTCL

SEQ ID NO: 3254 - protein, 269 aa, Thermomyces lanuginosus
ETSQDLFNQFNLFAQYSAAAYCGKNNDAPAGTNITCTGNACPEVEKADATFLYSFEDSGVGDVTGFLALDNTNKLIVLSFRGSRSIENWIGNLNFDLKEINDICSGCRGHDGFTSSWRSVADTLRQKVEDAVREHPDYRVVFTGHSLGGALATVAGADLRGNGYDIDVFSYGAPRVGNRAFAEFLTVQTGGTLYRITHTNDIVPRLPPREFGYSHSSPEYWIKSGTLVPVTRNDIVKIEGIDATGGNNQPNIPDIPAHLWYFGLIGTCL

SEQ ID NO: 3255 - protein, 269 aa, Thermomyces lanuginosus
EVSQDLFNQFNLFAQYSAAAYCGKNNDAPAGTNITCTGNACPEVEKADATFLYSFEDSGVGDVTGFLALDNTNKLIVLSFRGSRSIENWIGNLNFDLKEINDICSGCRGHDGFTSSWRSVADTLRQKVEDAVREHPDYRVVFTGHSLGGALATVAGADLRGNGYDIDVFSYGAPRVGNRAFAEFLTVQTGGTLYRITHTNDIVPRLPPREFGYSHSSPEYWIKSGTLVPVTRNDIVIIEGIDATGGNNQPNIPDIPAHLWYFGLIGTCL

SEQ ID NO: 3256 - protein, 269 aa, Thermomyces lanuginosus
EVSQDLFNQFNLFAQYSAAAYCGKNNDAPAGTNITCTGNACPEVEKADATFLYSFEDSGVGDVTGFLALDNTNKLIVLSFRGSRSIENWIGNLNFDLKEINDICSGCRGHDGFTSSWRSVADTLRQKVEDAVREHPDYRVVFTGHSLGGALATVAGADLRGNGYDIDVFSYGAPRVGNRAFAQFLTVQTGGTLYRITHTNDIVPRLPPREFGYSHSSPEYWIKSGTLVPVTRNDIVKIEGIDATGGNNQPNIPDIPAHLWYFGLIGTCL

SEQ ID NO: 3257 - protein, 269 aa, Thermomyces lanuginosus
EVSQDLFNQFNLFAQYSAAAYCGKNNDAPAGTNITCTGNACPEVEKADATFLYSFEDSGVGDVTGFLALDNANKLIVLSFRGSRSIENWIGNLNFDLKEINDICSGCRGHDGFTSSWRSVADTLRQKVEDAVREHPDYRVVFTGHSLGGALATVAGADLRGNGYDIDVFSYGAPRVGNRAFAEFLTVQTGGTLYRITHTNDIVPRLPPREFGYSHSSPEYWIKSGTLVPVTRNDIVKIEGIDATGGNNQPNIPDIPAHLWYFGLIGTCL

SEQ ID NO: 3258 - protein, 269 aa, Thermomyces lanuginosus
EVSQDLFNQFNLFAQYSAAAYCGKNNDAPAGTNITCTGNACPEVEKADARFLYSFEDSGVGDVTGFLALDNTNKLIVLSFRGSRSIENWIGNLNFDLKEINDICSGCRGHDGFTSSWRSVADTLRQKVEDAVREHPDYRVVFTGHSLGGALATVAGADLRGNGYDIDVFSYGAPRVGNRAFAEFLTVQTGGTLYRITHTNDIVPRLPPREFGYSHSSPEYWIKSGTLVPVTRNDIVKIEGIDATGGNNQPNIPDIPAHLWYFGLIGTCL

SEQ ID NO: 3259 - protein, 269 aa, Thermomyces lanuginosus
EVSQDLFNQFNLFAQYSAAAYCGKNNDAPAGTNITCTGNACPEVEKADATFLYSFEDSGVGDVTGFLALDNTNKLIVLSFRGSRSIENWIGNLNFDLKEINDICSGCRGHDGFTSSWRSVADTLRQKVEDAVREHPDYRVVFTGHSLGGALATVAGADLRGNGYDIDVFSYGAPRVGNRAFAEFLTVQTGGTLYRITHTNDIVPRLPPREFGYSHSSPEYWIKSGTLVPVTRNDIVKIEGIDATGGNNQPNIHDIPAHLWYFGLIGTCL

SEQ ID NO: 3260 - protein, 269 aa, Thermomyces lanuginosus
EVSQDLFNQFNLFAQYSAAAYCGKNNDAPAGTNITCTGNACPEVEKADATFLYSFEDSGVGDTTGFLALDNTNKLIVLSFRGSRSIENWIGNLNFDLKEINDICSGCRGHDGFTSSWRSVADTLRQKVEDAVREHPDYRVVFTGHSLGGALATVAGADLRGNGYDIDVFSYGAPRVGNRAFAEFLTVQTGGTLYRITHTNDIVPRLPPREFGYSHSSPEYWIKSGTLVPVTRNDIVKIEGIDATGGNNQPNIPDIPAHLWYFGLIGTCL

SEQ ID NO: 3261 - protein, 269 aa, Thermomyces lanuginosus
EVSQDLFNQFNLFAQYSAAAYCGKNNDAPAGTNITCTGNACPEVEKADATFLYSFEDSGVGDVTGFLALDNTNKLIVLSFRGSRSIENWIGNLNFGLKEINDICSGCRGHDGFTSSWRSVADTLRQKVEDAVREHPDYRVVFTGHSLGGALATVAGADLRGNGYDIDVFSYGAPRVGNRAFAEFLTVQTGGTLYRITHTNDIVPRLPPREFGYSHSSPEYWIKSGTLVPVTRNDIVKIEGIDATGGNNQPNIPDIPAHLWYFGLIGTCL

SEQ ID NO: 3262 - protein, 269 aa, Thermomyces lanuginosus
EVSQDLFNQFNLFAQYSAAAYCGKNNDAPAGTNITCTGNACPEVEKADATFLYSFEDSGVGDVTGFLALDNTNKLIVLSFRGSRSIENWIGNLNFDLKEINDICSGCRGHDGFTSSWRSVADTLRQKVEDAVREHPDYRVVFTGHSLGGALATVAGADLRGNGYDIDVFSYGAPRVGNRAFAEFLTVQTGGTLYRITHTNDIVPRLPPREFGYSHSSPEYWIKSGTLVPVTRNDIVKIEGIDATGGNNQPNIPDIPAHLWYFGPIGTCL

SEQ ID NO: 3263 - protein, 269 aa, Thermomyces lanuginosus
EVSQDLFNQFNLFAQYSAAAYCGKNNDAPAGTNITCTGNACPEVEKADAFFLYSFEDSGVGDVTGFLALDNTNKLIVLSFRGSRSIENWIGNLNFDLKEINDICSGCRGHDGFTSSWRSVADTLRQKVEDAVREHPDYRVVFTGHSLGGALATVAGADLRGNGYDIDVFSYGAPRVGNRAFAEFLTVQTGGTLYRITHTNDIVPRLPPREFGYSHSSPEYWIKSGTLVPVTRNDIVKIEGIDATGGNNQPNIPDIPAHLWYFGLIGTCL

SEQ ID NO: 3264 - protein, 269 aa, Thermomyces lanuginosus
EVSQDLFNQFNLFAQYSAAAYCGKNNDAPAGTNITCTGNACPEVEKADATFLYSFEDSGVGDVTGFLALDNTNKLIVLSFRGSRSIENWIGNLNFDLKEINDICSGCRGHDGFTSSWRSVADTLRQDVEDAVREHPDYRVVFTGHSLGGALATVAGADLRGNGYDIDVFSYGAPRVGNRAFAEFLTVQTGGTLYRITHTNDIVPRLPPREFGYSHSSPEYWIKSGTLVPVTRNDIVKIEGIDATGGNNQPNIPDIPAHLWYFGLIGTCL

SEQ ID NO: 3265 - protein, 269 aa, Thermomyces lanuginosus
EVSQDLFNQFNLFAQYSAAAYCGKNNDAPAGTNITCTGNACPEVEKADATFLYSFEDSGVGDVCGFLALDNTNKLIVLSFRGSRSIENWIGNLNFDLKEINDICSGCRGHDGFTSSWRSVADTLRQKVEDAVREHPDYRVVFTGHSLGGALATVAGADLRGNGYDIDVFSYGAPRVGNRAFAEFLTVQTGGTLYRITHTNDIVPRLPPREFGYSHSSPEYWIKSGTLVPVTRNDIVKIEGIDATGGNNQPNIPDIPAHLWYFGLIGTCL

SEQ ID NO: 3266 - protein, 269 aa, Thermomyces lanuginosus
EVSGDLFNQFNLFAQYSAAAYCGKNNDAPAGTNITCTGNACPEVEKADATFLYSFEDSGVGDVTGFLALDNTNKLIVLSFRGSRSIENWIGNLNFDLKEINDICSGCRGHDGFTSSWRSVADTLRQKVEDAVREHPDYRVVFTGHSLGGALATVAGADLRGNGYDIDVFSYGAPRVGNRAFAEFLTVQTGGTLYRITHTNDIVPRLPPREFGYSHSSPEYWIKSGTLVPVTRNDIVKIEGIDATGGNNQPNIPDIPAHLWYFGLIGTCL

SEQ ID NO: 3267 - protein, 269 aa, Thermomyces lanuginosus
EVSQDLFNQFNLFAQYSAAAYCGKNNDAPAGTNITCTGNACPEVEKADATFLYSFEDSGVGDVTGFLALDNTNKLIVLSFRGSRSIENWIGNLNFDLKEINDICSGCRGHDGFTSSWRSVADMLRQKVEDAVREHPDYRVVFTGHSLGGALATVAGADLRGNGYDIDVFSYGAPRVGNRAFAEFLTVQTGGTLYRITHTNDIVPRLPPREFGYSHSSPEYWIKSGTLVPVTRNDIVKIEGIDATGGNNQPNIPDIPAHLWYFGLIGTCL

SEQ ID NO: 3268 - protein, 269 aa, Thermomyces lanuginosus
EVSQDLFNQFNLFAQYSAAAYCGKNNDAPAGTNITCTGNACPEVEKADATFLYSFEDSGVGDVDGFLALDNTNKLIVLSFRGSRSIENWIGNLNFDLKEINDICSGCRGHDGFTSSWRSVADTLRQKVEDAVREHPDYRVVFTGHSLGGALATVAGADLRGNGYDIDVFSYGAPRVGNRAFAEFLTVQTGGTLYRITHTNDIVPRLPPREFGYSHSSPEYWIKSGTLVPVTRNDIVKIEGIDATGGNNQPNIPDIPAHLWYFGLIGTCL

SEQ ID NO: 3269 - protein, 269 aa, Thermomyces lanuginosus
EVSQDLFNQFNLFAQYSAAAYCGKNNDAPAGTNITCTGNACPEVEKADATFLYSFEDSGVGDVTGFLALDNENKLIVLSFRGSRSIENWIGNLNFDLKEINDICSGCRGHDGFTSSWRSVADTLRQKVEDAVREHPDYRVVFTGHSLGGALATVAGADLRGNGYDIDVFSYGAPRVGNRAFAEFLTVQTGGTLYRITHTNDIVPRLPPREFGYSHSSPEYWIKSGTLVPVTRNDIVKIEGIDATGGNNQPNIPDIPAHLWYFGLIGTCL

SEQ ID NO: 3270 - protein, 269 aa, Thermomyces lanuginosus
EVSQDLFNQFNLFAQYSAAAYCGKNNDNPAGTNITCTGNACPEVEKADATFLYSFEDSGVGDVTGFLALDNTNKLIVLSFRGSRSIENWIGNLNFDLKEINDICSGCRGHDGFTSSWRSVADTLRQKVEDAVREHPDYRVVFTGHSLGGALATVAGADLRGNGYDIDVFSYGAPRVGNRAFAEFLTVQTGGTLYRITHTNDIVPRLPPREFGYSHSSPEYWIKSGTLVPVTRNDIVKIEGIDATGGNNQPNIPDIPAHLWYFGLIGTCL

SEQ ID NO: 3271 - protein, 269 aa, Thermomyces lanuginosus
EVSQDLFNQFNLFAQYSAAAYCGKNNDDPAGTNITCTGNACPEVEKADATFLYSFEDSGVGDVTGFLALDNTNKLIVLSFRGSRSIENWIGNLNFDLKEINDICSGCRGHDGFTSSWRSVADTLRQKVEDAVREHPDYRVVFTGHSLGGALATVAGADLRGNGYDIDVFSYGAPRVGNRAFAEFLTVQTGGTLYRITHTNDIVPRLPPREFGYSHSSPEYWIKSGTLVPVTRNDIVKIEGIDATGGNNQPNIPDIPAHLWYFGLIGTCL

SEQ ID NO: 3272 - protein, 269 aa, Thermomyces lanuginosus
EVSQDLFNQFNLFAQYSAAAYCGKNNDAPAGTNITCTGNACPEVEKADATFLYSGEDSGVGDVTGFLALDNTNKLIVLSFRGSRSIENWIGNLNFDLKEINDICSGCRGHDGFTSSWRSVADTLRQKVEDAVREHPDYRVVFTGHSLGGALATVAGADLRGNGYDIDVFSYGAPRVGNRAFAEFLTVQTGGTLYRITHTNDIVPRLPPREFGYSHSSPEYWIKSGTLVPVTRNDIVKIEGIDATGGNNQPNIPDIPAHLWYFGLIGTCL

SEQ ID NO: 3273 - protein, 269 aa, Thermomyces lanuginosus
EVSQDMFNQFNLFAQYSAAAYCGKNNDAPAGTNITCTGNACPEVEKADATFLYSFEDSGVGDVTGFLALDNTNKLIVLSFRGSRSIENWIGNLNFDLKEINDICSGCRGHDGFTSSWRSVADTLRQKVEDAVREHPDYRVVFTGHSLGGALATVAGADLRGNGYDIDVFSYGAPRVGNRAFAEFLTVQTGGTLYRITHTNDIVPRLPPREFGYSHSSPEYWIKSGTLVPVTRNDIVKIEGIDATGGNNQPNIPDIPAHLWYFGLIGTCL

SEQ ID NO: 3274 - protein, 269 aa, Thermomyces lanuginosus
EVSQDLFNQFNLFAQYSAAAYCGKNNDAPAGTNITCTGNACPEVEKADATFLYSFEDSGVGDVTGFLALDNTNKLIVLSFRGSRSIENWIGNLNFDLKEINDICSGCRGHDGFTSSWRSVADTLRQKVEDAVREHPDYRVVFTGHSLGGALASVAGADLRGNGYDIDVFSYGAPRVGNRAFAEFLTVQTGGTLYRITHTNDIVPRLPPREFGYSHSSPEYWIKSGTLVPVTRNDIVKIEGIDATGGNNQPNIPDIPAHLWYFGLIGTCL

SEQ ID NO: 3275 - protein, 269 aa, Thermomyces lanuginosus
EVSQDLFNQFNLFAQYSAAAYCGKNNDALAGTNITCTGNACPEVEKADATFLYSFEDSGVGDVTGFLALDNTNKLIVLSFRGSRSIENWIGNLNFDLKEINDICSGCRGHDGFTSSWRSVADTLRQKVEDAVREHPDYRVVFTGHSLGGALATVAGADLRGNGYDIDVFSYGAPRVGNRAFAEFLTVQTGGTLYRITHTNDIVPRLPPREFGYSHSSPEYWIKSGTLVPVTRNDIVKIEGIDATGGNNQPNIPDIPAHLWYFGLIGTCL

SEQ ID NO: 3276 - protein, 269 aa, Thermomyces lanuginosus
EVSQDLFNQFNLFAQYSAAAYCGKNNDAPAGTNITCTGNACPEVEKADATFLYSFEDSGVGDVTGFLALDNTNKLIVLSFRGSRSIENWIGNLNFDLKEINDICSGCRGHDGFTSSWRSVADTLRQKVEHAVREHPDYRVVFTGHSLGGALATVAGADLRGNGYDIDVFSYGAPRVGNRAFAEFLTVQTGGTLYRITHTNDIVPRLPPREFGYSHSSPEYWIKSGTLVPVTRNDIVKIEGIDATGGNNQPNIPDIPAHLWYFGLIGTCL

SEQ ID NO: 3277 - protein, 269 aa, Thermomyces lanuginosus
EVSQDLFNQFNLFAQYSAAAYCGKNNDAPAGTNITCTGNACPEVEGADATFLYSFEDSGVGDVTGFLALDNTNKLIVLSFRGSRSIENWIGNLNFDLKEINDICSGCRGHDGFTSSWRSVADTLRQKVEDAVREHPDYRVVFTGHSLGGALATVAGADLRGNGYDIDVFSYGAPRVGNRAFAEFLTVQTGGTLYRITHTNDIVPRLPPREFGYSHSSPEYWIKSGTLVPVTRNDIVKIEGIDATGGNNQPNIPDIPAHLWYFGLIGTCL

SEQ ID NO: 3278 - protein, 269 aa, Thermomyces lanuginosus
EVSQDLFNQFNLFAQYSAAAYCGKNGDAPAGTNITCTGNACPEVEKADATFLYSFEDSGVGDVTGFLALDNTNKLIVLSFRGSRSIENWIGNLNFDLKEINDICSGCRGHDGFTSSWRSVADTLRQKVEDAVREHPDYRVVFTGHSLGGALATVAGADLRGNGYDIDVFSYGAPRVGNRAFAEFLTVQTGGTLYRITHTNDIVPRLPPREFGYSHSSPEYWIKSGTLVPVTRNDIVKIEGIDATGGNNQPNIPDIPAHLWYFGLIGTCL

SEQ ID NO: 3279 - protein, 269 aa, Thermomyces lanuginosus
EVSQDLFNQFNLFAQYSAAAYCGKNNDAPAGTNITCTGNACPEVEKADATFLYSFEDSGVGDVTGFLALDNTNKLIVLSFRGSRSIENWIGNLNFDLKEINDICSGCRGHDGFTSSWRSVADTLRQKVEDAVREHPDYRVVFTGHSLGGALATVAGADLRGNGYDIDVFSYGAPRVGNRAFAEFLTVQTGGTLYRITHTNDIVPRLPPREFGYSHSSPEYWIKSGTLVPVTRNDIVKIEGIDATGGNNQPNIPDIPAHLWYFGLIGTCM

SEQ ID NO: 3280 - protein, 269 aa, Thermomyces lanuginosus
EVSQDLFNQFNLFAQYSAAAYCGKNNDAPAGTNITCTGNACPEVEKADATFLYSFEDSGVGDVTGFLALDNTNKLIVLSFRGSRSIENWIGNLNFDLKDINDICSGCRGHDGFTSSWRSVADTLRQKVEDAVREHPDYRVVFTGHSLGGALATVAGADLRGNGYDIDVFSYGAPRVGNRAFAEFLTVQTGGTLYRITHTNDIVPRLPPREFGYSHSSPEYWIKSGTLVPVTRNDIVKIEGIDATGGNNQPNIPDIPAHLWYFGLIGTCL

SEQ ID NO: 3281 - protein, 269 aa, Thermomyces lanuginosus
EVSQDLFNQFNLFAQYSAAAYCGKNNDAPAGTNITCTGNACPEVEKADATFLYSFEDSGVGDVTGFLALDNTNKLIVLSFRGSRSIENWIGNLNFDLKPINDICSGCRGHDGFTSSWRSVADTLRQKVEDAVREHPDYRVVFTGHSLGGALATVAGADLRGNGYDIDVFSYGAPRVGNRAFAEFLTVQTGGTLYRITHTNDIVPRLPPREFGYSHSSPEYWIKSGTLVPVTRNDIVKIEGIDATGGNNQPNIPDIPAHLWYFGLIGTCL

SEQ ID NO: 3282 - protein, 269 aa, Thermomyces lanuginosus
EVSQDLFNQFNLFAQYSAAAYCGKNNDAPAGTNITCTGNACPEVEKDDATFLYSFEDSGVGDVTGFLALDNTNKLIVLSFRGSRSIENWIGNLNFDLKEINDICSGCRGHDGFTSSWRSVADTLRQKVEDAVREHPDYRVVFTGHSLGGALATVAGADLRGNGYDIDVFSYGAPRVGNRAFAEFLTVQTGGTLYRITHTNDIVPRLPPREFGYSHSSPEYWIKSGTLVPVTRNDIVKIEGIDATGGNNQPNIPDIPAHLWYFGLIGTCL

SEQ ID NO: 3283 - protein, 269 aa, Thermomyces lanuginosus
EVSQDLFNQFNLFAQYSAAAYCGKNNDAPAGTNITCTGNACPEVEKADATFLYSFEDSGVGDVTGFLALDNTNKLIVLSFRGSRSIENWIGNLNFDLKEINDICSGCRGHDGFTSSWRSVADTLRQKVEDAVREHPDYRVVFTGHSLGGALATVAGADLRGNGYDIDVFSYGAPRVGNRAFAEFLTVQTGGTLYRITHTNDIVPRLPPREFGYSHSSPEYWIKSGTLVPVTRNDIVKIEGIDATGGNNQPNIPDIPAHLWYFGLILTCL

SEQ ID NO: 3284 - protein, 269 aa, Thermomyces lanuginosus
EVSQDLFNQFNLFAQYSAAAYCGKNNDAPAGTNITCTGNACPEVEKADATFLYSFEDSGVGDVTGFLALDNTNKLIVLSFRGSRSIENWIGNLNFDLKEINDICSGCRGHDGFTSSWRSVADTLRQKVEDAVREHPDYRVVFTGHSLGGALATVAGADLRGNGYDIDVFSYGAPRVGNRAFAEFLTVQNGGTLYRITHTNDIVPRLPPREFGYSHSSPEYWIKSGTLVPVTRNDIVKIEGIDATGGNNQPNIPDIPAHLWYFGLIGTCL

SEQ ID NO: 3285 - protein, 269 aa, Thermomyces lanuginosus
EVSQDLFNQFNLFAQYSAAAYCGKNNDAPAGTNITCTGNACPEVEKADATFLYSFEDSGVGDVTGWLALDNTNKLIVLSFRGSRSIENWIGNLNFDLKEINDICSGCRGHDGFTSSWRSVADTLRQKVEDAVREHPDYRVVFTGHSLGGALATVAGADLRGNGYDIDVFSYGAPRVGNRAFAEFLTVQTGGTLYRITHTNDIVPRLPPREFGYSHSSPEYWIKSGTLVPVTRNDIVKIEGIDATGGNNQPNIPDIPAHLWYFGLIGTCL

SEQ ID NO: 3286 - protein, 269 aa, Thermomyces lanuginosus
EVSQDLFNQFNLFAQYSAAAYCGKNNDAPAGTNITCTGNACPEVEKADATFLYSFEDSGVGDVTGFLALDNTNKLIVLSFRGSRSIENWIGNLNFDLKEINDICSGCRGHDGFTSSWRSVADTLRQKVEDAVREHPDYRVVFTGHSLGGALATVAGADLRGNGRDIDVFSYGAPRVGNRAFAEFLTVQTGGTLYRITHTNDIVPRLPPREFGYSHSSPEYWIKSGTLVPVTRNDIVKIEGIDATGGNNQPNIPDIPAHLWYFGLIGTCL

SEQ ID NO: 3287 - protein, 269 aa, Thermomyces lanuginosus
EVSQDLFNQFNLFAQYSAAAYCGKNNDAPDGTNITCTGNACPEVEKADATFLYSFEDSGVGDVTGFLALDNTNKLIVLSFRGSRSIENWIGNLNFDLKEINDICSGCRGHDGFTSSWRSVADTLRQKVEDAVREHPDYRVVFTGHSLGGALATVAGADLRGNGYDIDVFSYGAPRVGNRAFAEFLTVQTGGTLYRITHTNDIVPRLPPREFGYSHSSPEYWIKSGTLVPVTRNDIVKIEGIDATGGNNQPNIPDIPAHLWYFGLIGTCL

SEQ ID NO: 3288 - protein, 269 aa, Thermomyces lanuginosus
EVSQDLFNQFNLFAQYSAAAYCGKNNDAPAGTNITCTENACPEVEKADATFLYSFEDSGVGDVTGFLALDNTNKLIVLSFRGSRSIENWIGNLNFDLKEINDICSGCRGHDGFTSSWRSVADTLRQKVEDAVREHPDYRVVFTGHSLGGALATVAGADLRGNGYDIDVFSYGAPRVGNRAFAEFLTVQTGGTLYRITHTNDIVPRLPPREFGYSHSSPEYWIKSGTLVPVTRNDIVKIEGIDATGGNNQPNIPDIPAHLWYFGLIGTCL

SEQ ID NO: 3289 - protein, 269 aa, Thermomyces lanuginosus
EVSQDLFNQFNLFAQYSAAAYCGKNNDAPAGTNITCTGQACPEVEKADATFLYSFEDSGVGDVTGFLALDNTNKLIVLSFRGSRSIENWIGNLNFDLKEINDICSGCRGHDGFTSSWRSVADTLRQKVEDAVREHPDYRVVFTGHSLGGALATVAGADLRGNGYDIDVFSYGAPRVGNRAFAEFLTVQTGGTLYRITHTNDIVPRLPPREFGYSHSSPEYWIKSGTLVPVTRNDIVKIEGIDATGGNNQPNIPDIPAHLWYFGLIGTCL

SEQ ID NO: 3290 - protein, 269 aa, Thermomyces lanuginosus
EVSQDLFNQFNLFAQYSAAAYCGKNNDAPAGTNITCTGNACPEVEKADATFLYSFEDSGVGDVTGFLALDNTNKLIVLSFRGSRSIENWIGNLNFDLKEINDICSGCRGHDGFTSSWRSVADTLRQKVEDAVREHPDYRVVFTGHSLGGALATVAGADLRGNGYDIDVFSYGAPRVGNRAFAEFLTVQTGGTLYRITHTNDIVPRLPPREFGYSHSSPEYWIKSGTLVPVTRNDIVKIEGIDATGGNNQPDIPDIPAHLWYFGLIGTCL

SEQ ID NO: 3291 - protein, 269 aa, Thermomyces lanuginosus
EVSQDLFNQFNLFAQYSAAAYCGKNNDAPAGTNITCTGNACPEVEKADATMLYSFEDSGVGDVTGFLALDNTNKLIVLSFRGSRSIENWIGNLNFDLKEINDICSGCRGHDGFTSSWRSVADTLRQKVEDAVREHPDYRVVFTGHSLGGALATVAGADLRGNGYDIDVFSYGAPRVGNRAFAEFLTVQTGGTLYRITHTNDIVPRLPPREFGYSHSSPEYWIKSGTLVPVTRNDIVKIEGIDATGGNNQPNIPDIPAHLWYFGLIGTCL

SEQ ID NO: 3292 - protein, 269 aa, Thermomyces lanuginosus
EVSQDLFNQFNLFAQYSAAAYCGKCNDAPAGTNITCTGNACPEVEKADATFLYSFEDSGVGDVTGFLALDNTNKLIVLSFRGSRSIENWIGNLNFDLKEINDICSGCRGHDGFTSSWRSVADTLRQKVEDAVREHPDYRVVFTGHSLGGALATVAGADLRGNGYDIDVFSYGAPRVGNRAFAEFLTVQTGGTLYRITHTNDIVPRLPPREFGYSHSSPEYWIKSGTLVPVTRNDIVKIEGIDATGGNNQPNIPDIPAHLWYFGLIGTCL

SEQ ID NO: 3293 - protein, 269 aa, Thermomyces lanuginosus
EVSQDLFNQFNLFAQYSAAAYCGKTNDAPAGTNITCTGNACPEVEKADATFLYSFEDSGVGDVTGFLALDNTNKLIVLSFRGSRSIENWIGNLNFDLKEINDICSGCRGHDGFTSSWRSVADTLRQKVEDAVREHPDYRVVFTGHSLGGALATVAGADLRGNGYDIDVFSYGAPRVGNRAFAEFLTVQTGGTLYRITHTNDIVPRLPPREFGYSHSSPEYWIKSGTLVPVTRNDIVKIEGIDATGGNNQPNIPDIPAHLWYFGLIGTCL

SEQ ID NO: 3294 - protein, 269 aa, Thermomyces lanuginosus
EVSQDLFNQFNLFAQYSAAAYCGKINDAPAGTNITCTGNACPEVEKADATFLYSFEDSGVGDVTGFLALDNTNKLIVLSFRGSRSIENWIGNLNFDLKEINDICSGCRGHDGFTSSWRSVADTLRQKVEDAVREHPDYRVVFTGHSLGGALATVAGADLRGNGYDIDVFSYGAPRVGNRAFAEFLTVQTGGTLYRITHTNDIVPRLPPREFGYSHSSPEYWIKSGTLVPVTRNDIVKIEGIDATGGNNQPNIPDIPAHLWYFGLIGTCL

SEQ ID NO: 3295 - protein, 269 aa, Thermomyces lanuginosus
EVSQDLFNIFNLFAQYSAAAYCGKNNDAPAGTNITCTGNACPEVEKADATFLYSFEDSGVGDVTGFLALDNTNKLIVLSFRGSRSIENWIGNLNFDLKEINDICSGCRGHDGFTSSWRSVADTLRQKVEDAVREHPDYRVVFTGHSLGGALATVAGADLRGNGYDIDVFSYGAPRVGNRAFAEFLTVQTGGTLYRITHTNDIVPRLPPREFGYSHSSPEYWIKSGTLVPVTRNDIVKIEGIDATGGNNQPNIPDIPAHLWYFGLIGTCL

SEQ ID NO: 3296 - protein, 269 aa, Thermomyces lanuginosus
EVSQDLFNQFNLFAQYSKAAYCGKNNDAPAGTNITCTGNACPEVEKADATFLYSFEDSGVGDVTGFLALDNTNKLIVLSFRGSRSIENWIGNLNFDLKEINDICSGCRGHDGFTSSWRSVADTLRQKVEDAVREHPDYRVVFTGHSLGGALATVAGADLRGNGYDIDVFSYGAPRVGNRAFAEFLTVQTGGTLYRITHTNDIVPRLPPREFGYSHSSPEYWIKSGTLVPVTRNDIVKIEGIDATGGNNQPNIPDIPAHLWYFGLIGTCL

SEQ ID NO: 3297 - protein, 269 aa, Thermomyces lanuginosus
EVSQDLFNQFNLFAQYSAAAYCGKNNDAPAGTNITCTGNACPEVEKADATFLYSFEDSGVGDVTGFLALDNTNKLIVLSFRGSRSIENWIGNLNFDLKEINDICSGCRGHDGFTSSWRSVADTLRQKVEDAVREHPDYRVVFTGHSLGGALATVAGADLRGNGYDIDVFSYGAPRVGNRAFAEFLTVQTGGTLYRITHTNDIVPRLPPREFGYSHSSPEYWIKSGTFVPVTRNDIVKIEGIDATGGNNQPNIPDIPAHLWYFGLIGTCL

SEQ ID NO: 3298 - protein, 269 aa, Thermomyces lanuginosus
EVSQDLFNQFNLFAQYSAAAYCGKNNDACAGTNITCTGNACPEVEKADATFLYSFEDSGVGDVTGFLALDNTNKLIVLSFRGSRSIENWIGNLNFDLKEINDICSGCRGHDGFTSSWRSVADTLRQKVEDAVREHPDYRVVFTGHSLGGALATVAGADLRGNGYDIDVFSYGAPRVGNRAFAEFLTVQTGGTLYRITHTNDIVPRLPPREFGYSHSSPEYWIKSGTLVPVTRNDIVKIEGIDATGGNNQPNIPDIPAHLWYFGLIGTCL

SEQ ID NO: 3299 - protein, 269 aa, Thermomyces lanuginosus
EVSQDLFNQFNLFAQYSAAAYCGKNNDAPAGTNITCTGNACPEVEKADATFLYSFEDSGVGDVTGFLALDNTNKLIVLSFRGSRSIENWIGNLNFDLKEINDICSGCRGHDGFTSSWRSVADTLRQKVEDAVREHPDYRVVFTGHSLGGALATVAGADLRGNGYIIDVFSYGAPRVGNRAFAEFLTVQTGGTLYRITHTNDIVPRLPPREFGYSHSSPEYWIKSGTLVPVTRNDIVKIEGIDATGGNNQPNIPDIPAHLWYFGLIGTCL

SEQ ID NO: 3300 - protein, 269 aa, Thermomyces lanuginosus
EVSQDLFNQFNLFAQYSAAAYCGKNNDAPAGTNITCTGNACPEVEKADATFLYSFEDSGVGDVTGFLALDNTNKLIVLSFRGSRSIENWIGNLNFDLKEINDICSGCRGHDGFTSSWRSVADTLRQKVEDAVREHPDYRVVFTGHSLGGALATVAGADLRGNGYDIDVFSYGAPRVGNRAFAEFLTVQTGGTLYRITHTNDIVPRLPPREFGYSHWSPEYWIKSGTLVPVTRNDIVKIEGIDATGGNNQPNIPDIPAHLWYFGLIGTCL

SEQ ID NO: 3301 - protein, 269 aa, Thermomyces lanuginosus
EVSQDLFNQFNLFAQYSAAAYCGKNNDAPAGTNITCTGNACPEVEKADATFLYSFEDSGVGDVTGFLALDNTNKLIVLSFRGSRSIENWIGNLNFDLKEINDICSGCRGHDGFTSSWRSVADTLQQKVEDAVREHPDYRVVFTGHSLGGALATVAGADLRGNGYDIDVFSYGAPRVGNRAFAEFLTVQTGGTLYRITHTNDIVPRLPPREFGYSHSSPEYWIKSGTLVPVTRNDIVKIEGIDATGGNNQPNIPDIPAHLWYFGLIGTCL

SEQ ID NO: 3302 - protein, 269 aa, Thermomyces lanuginosus
EVSQDLFNQFNLFAQYSAAAYCGKNNDAPAGTNITCTGNACPEVEKADATFLYSFEDSGVGDVTGFLALDNTNKLIVLSFRGSRSIENWIGNLNFDLKEINDICSGCRGHDGFTSSWRSVADTLRQKVEDYVREHPDYRVVFTGHSLGGALATVAGADLRGNGYDIDVFSYGAPRVGNRAFAEFLTVQTGGTLYRITHTNDIVPRLPPREFGYSHSSPEYWIKSGTLVPVTRNDIVKIEGIDATGGNNQPNIPDIPAHLWYFGLIGTCL

SEQ ID NO: 3303 - protein, 269 aa, Thermomyces lanuginosus
EVSQDLFNQFNLFAQYSAAAYCGKNNDAPAGTNITCAGNACPEVEKADATFLYSFEDSGVGDVTGFLALDNTNKLIVLSFRGSRSIENWIGNLNFDLKEINDICSGCRGHDGFTSSWRSVADTLRQKVEDAVREHPDYRVVFTGHSLGGALATVAGADLRGNGYDIDVFSYGAPRVGNRAFAEFLTVQTGGTLYRITHTNDIVPRLPPREFGYSHSSPEYWIKSGTLVPVTRNDIVKIEGIDATGGNNQPNIPDIPAHLWYFGLIGTCL

SEQ ID NO: 3304 - protein, 269 aa, Thermomyces lanuginosus
EVSQDLFNQFNLFAQYSAAAYCGKNNDAPAGTNITCTGNACPEVEKADATFLYSFEDSGVGDVTGFLALDVTNKLIVLSFRGSRSIENWIGNLNFDLKEINDICSGCRGHDGFTSSWRSVADTLRQKVEDAVREHPDYRVVFTGHSLGGALATVAGADLRGNGYDIDVFSYGAPRVGNRAFAEFLTVQTGGTLYRITHTNDIVPRLPPREFGYSHSSPEYWIKSGTLVPVTRNDIVKIEGIDATGGNNQPNIPDIPAHLWYFGLIGTCL

SEQ ID NO: 3305 - protein, 269 aa, Thermomyces lanuginosus
EVSQDLFNQFNLFAQYSAAAYCGKNNDAPAGTNITCTGNACPEVEKADATFLYSFEDSGVGDVTGFLALDNTNKLIVLSFRGSRSIENWIGNLNFDLKEINDICSGCRGHDGFTSSWRSVADTLRQKVEDAVREHPDYRVVFTGHSLGGALATVAGADLRGNGYDIDVFSYGAPRVGNRAFAEFLTVQTGGTLYRITHTNDIVPRLPPHEFGYSHSSPEYWIKSGTLVPVTRNDIVKIEGIDATGGNNQPNIPDIPAHLWYFGLIGTCL

SEQ ID NO: 3306 - protein, 269 aa, Thermomyces lanuginosus
EVSQDLFNQFNLFAQYSAAAYCGKNNDAPAGTNITCTGNACPEVEKADATFLYSFEDSGVGDVTGFLALDNTNKLIVLSFRGSRSIENWIGNLNFDLKEINDICSGCRGHDGFTSSWRSVADTLRQKVEDAVREHPDYRVVFTGHSLGGALATVAGADLRGNGYDIDVFSYGAPRVGNRAFAEFLTVQTGGTLYRITHTNDIVPRLPPREFGYSHSSPEYWIKSGTLVPVTRNDIVKIEGIDATGGNNQPNIPDIPAHLWYFGLIATCL

SEQ ID NO: 3307 - protein, 269 aa, Thermomyces lanuginosus
EVSQDLFNQFNLFAQYSAAAYCGKNNDAPAGTNITCTGNACPEVEKADATFLYSFEDSGVGDVTGFLALDNTNKLIVLSFRGSRSIENWIGNLNFDLKEINDICSGCRGHDGFTSSWRSVADTLRQKVEDAVREHPDYRVVFTGHSLGGALATVAGADLRGNGYDIDVFSYGAPRVGNRAFAEFLTVQTGGTLYRITHTNDIVPRLPPREFGYSHSSPEYWIKSGTLVPVRRNDIVKIEGIDATGGNNQPNIPDIPAHLWYFGLIGTCL

SEQ ID NO: 3308 - protein, 269 aa, Thermomyces lanuginosus
EVEQDLFNQFNLFAQYSAAAYCGKNNDAPAGTNITCTGNACPEVEKADATFLYSFEDSGVGDVTGFLALDNTNKLIVLSFRGSRSIENWIGNLNFDLKEINDICSGCRGHDGFTSSWRSVADTLRQKVEDAVREHPDYRVVFTGHSLGGALATVAGADLRGNGYDIDVFSYGAPRVGNRAFAEFLTVQTGGTLYRITHTNDIVPRLPPREFGYSHSSPEYWIKSGTLVPVTRNDIVKIEGIDATGGNNQPNIPDIPAHLWYFGLIGTCL

SEQ ID NO: 3309 - protein, 269 aa, Thermomyces lanuginosus
EVSQDLFNQFNLFAQYSAAAYCGKNNDAPAGTNITCTGNACPEVEKAEATFLYSFEDSGVGDVTGFLALDNTNKLIVLSFRGSRSIENWIGNLNFDLKEINDICSGCRGHDGFTSSWRSVADTLRQKVEDAVREHPDYRVVFTGHSLGGALATVAGADLRGNGYDIDVFSYGAPRVGNRAFAEFLTVQTGGTLYRITHTNDIVPRLPPREFGYSHSSPEYWIKSGTLVPVTRNDIVKIEGIDATGGNNQPNIPDIPAHLWYFGLIGTCL

SEQ ID NO: 3310 - protein, 269 aa, Thermomyces lanuginosus
EVSQDLFNQFNLFAQYSAAAYCGKNNDAPAGTNITCTGNACPEVEKADATFLYSFEDSGVGDVTGFLALDNTNKLIVLSFRGSRSIENWIGNLNFDLKEINDICSGCRGHDGFTSSWRSVADTLRQKVEDAVREHPSYRVVFTGHSLGGALATVAGADLRGNGYDIDVFSYGAPRVGNRAFAEFLTVQTGGTLYRITHTNDIVPRLPPREFGYSHSSPEYWIKSGTLVPVTRNDIVKIEGIDATGGNNQPNIPDIPAHLWYFGLIGTCL

SEQ ID NO: 3311 - protein, 269 aa, Thermomyces lanuginosus
EVSQDLFNQFNLFAQYSAAAYCGKNNDAPAGTNITCTGNACPEVEKADATFLYSFEDSGVGDVTGFLALDNTNKLIVLSFRGSRSIENWIGNLNFDLKEINDICSGCRGHDGFTSSWRSHADTLRQKVEDAVREHPDYRVVFTGHSLGGALATVAGADLRGNGYDIDVFSYGAPRVGNRAFAEFLTVQTGGTLYRITHTNDIVPRLPPREFGYSHSSPEYWIKSGTLVPVTRNDIVKIEGIDATGGNNQPNIPDIPAHLWYFGLIGTCL

SEQ ID NO: 3312 - protein, 269 aa, Thermomyces lanuginosus
EVSQDLFNQFNLFAQYSAAAYCGKNNDAPAGTNITCTGNACPEVEKADATFLYSFEDSGVGDVTGFLALDNTNKLIVLSFRGSRSIENWIGNLNFDLKEINDICSGCRGHDGFTSSWRSVADTLRQKVEDAVREHPDYRVVFTGHSLGGALATVAGADLRGNPYDIDVFSYGAPRVGNRAFAEFLTVQTGGTLYRITHTNDIVPRLPPREFGYSHSSPEYWIKSGTLVPVTRNDIVKIEGIDATGGNNQPNIPDIPAHLWYFGLIGTCL

SEQ ID NO: 3313 - protein, 269 aa, Thermomyces lanuginosus
EVSQDLFNQFNLFAQYSAAAYCGKNNDAPAGTNITCTGNACPEVEKADATFLYSFEDSGVGDVTGFLALDNTNKLIVLSFRGSRSIENWIGNLNFDLKEINDICSGCRGHDGFTSSWRSVADTLRQKVEDAVREHPDYRVVFTGHSLGGALATVAGADLRGNGYDIDVFSYGAPRVGNRAFAEFLTVQTGGTLYRITHTNDIVPRLPPREFQYSHSSPEYWIKSGTLVPVTRNDIVKIEGIDATGGNNQPNIPDIPAHLWYFGLIGTCL

SEQ ID NO: 3314 - protein, 269 aa, Thermomyces lanuginosus
EVSQDLFNQFNLFAQYSAAAYCGKNNDAPAGTNITCTGNACPEVEKADATFLYSFEDSGVGDVTGFLALDNTNKLIVLSFRGSRSIENWIGNLNFDLKEINDICSGCRGHDGFTSSWRSVADTLRQKVEDAVREHPDYRVVFTGHSLGGALATVAGADLRGNGYDIDVFSYGAPRVGNRAFAEWLTVQTGGTLYRITHTNDIVPRLPPREFGYSHSSPEYWIKSGTLVPVTRNDIVKIEGIDATGGNNQPNIPDIPAHLWYFGLIGTCL

SEQ ID NO: 3315 - protein, 269 aa, Thermomyces lanuginosus
EVSQDLFNQFNLFAQYSAAAYCGKNNDAPAGTNITCTGNACPEVEKADATFLYSFEDSGVGDVTGFLALDNTNKLIVLSFRGSRSIENWIGNLNFDLKEINDICSGCRGHDGFTSSWRSVADTLRQKVEDAVIEHPDYRVVFTGHSLGGALATVAGADLRGNGYDIDVFSYGAPRVGNRAFAEFLTVQTGGTLYRITHTNDIVPRLPPREFGYSHSSPEYWIKSGTLVPVTRNDIVKIEGIDATGGNNQPNIPDIPAHLWYFGLIGTCL

SEQ ID NO: 3316 - protein, 269 aa, Thermomyces lanuginosus
EVSQDLFNQFNLFAQYSAAAYCGKNNDAPAGTNITCTGNACPEVEKADATFLYSFEDSGVGDVTGFLALDNTNKLIVLSFRGSRSIENWIGNLNFDLKEINDICSGCRGHDGFTSSWRSVADTLRQKVEDAVREHPDYRVVFTGHSLGGALATVAGADLRGNGYDIDVFSYGAPRVGNRAFAEFLTVQMGGTLYRITHTNDIVPRLPPREFGYSHSSPEYWIKSGTLVPVTRNDIVKIEGIDATGGNNQPNIPDIPAHLWYFGLIGTCL

SEQ ID NO: 3317 - protein, 269 aa, Thermomyces lanuginosus
EVSQDLFNQFNLFAQYSAAAYCGKNNDAWAGTNITCTGNACPEVEKADATFLYSFEDSGVGDVTGFLALDNTNKLIVLSFRGSRSIENWIGNLNFDLKEINDICSGCRGHDGFTSSWRSVADTLRQKVEDAVREHPDYRVVFTGHSLGGALATVAGADLRGNGYDIDVFSYGAPRVGNRAFAEFLTVQTGGTLYRITHTNDIVPRLPPREFGYSHSSPEYWIKSGTLVPVTRNDIVKIEGIDATGGNNQPNIPDIPAHLWYFGLIGTCL

SEQ ID NO: 3318 - protein, 269 aa, Thermomyces lanuginosus
EVSQDLFNQFNLFAQYSAAAYCGKNNDAPAGTNITCTGNACPEVEKADATFLYSFEDSGVGDVTGFLALDNTNKLIVLSFRGSRSIENWIGNLNFDLKEINDICSGCRGHDGFTSSWRSVADTLGQKVEDAVREHPDYRVVFTGHSLGGALATVAGADLRGNGYDIDVFSYGAPRVGNRAFAEFLTVQTGGTLYRITHTNDIVPRLPPREFGYSHSSPEYWIKSGTLVPVTRNDIVKIEGIDATGGNNQPNIPDIPAHLWYFGLIGTCL

SEQ ID NO: 3319 - protein, 269 aa, Thermomyces lanuginosus
EVSQDLFNQFNLFAQYSAIAYCGKNNDAPAGTNITCTGNACPEVEKADATFLYSFEDSGVGDVTGFLALDNTNKLIVLSFRGSRSIENWIGNLNFDLKEINDICSGCRGHDGFTSSWRSVADTLRQKVEDAVREHPDYRVVFTGHSLGGALATVAGADLRGNGYDIDVFSYGAPRVGNRAFAEFLTVQTGGTLYRITHTNDIVPRLPPREFGYSHSSPEYWIKSGTLVPVTRNDIVKIEGIDATGGNNQPNIPDIPAHLWYFGLIGTCL

SEQ ID NO: 3320 - protein, 269 aa, Thermomyces lanuginosus
EVSQDLFAQFNLFAQYSAAAYCGKNNDAPAGTNITCTGNACPEVEKADATFLYSFEDSGVGDVTGFLALDNTNKLIVLSFRGSRSIENWIGNLNFDLKEINDICSGCRGHDGFTSSWRSVADTLRQKVEDAVREHPDYRVVFTGHSLGGALATVAGADLRGNGYDIDVFSYGAPRVGNRAFAEFLTVQTGGTLYRITHTNDIVPRLPPREFGYSHSSPEYWIKSGTLVPVTRNDIVKIEGIDATGGNNQPNIPDIPAHLWYFGLIGTCL

SEQ ID NO: 3321 - protein, 269 aa, Thermomyces lanuginosus
EVSQDLFNQFNLFAQYSAAAYCGKNNDAPAGTNITCTGNACPEVEKADATFLYSFEDSGVGDVTGFLALDNTNKLIVLSFRGSRSIENWIGNLNFDLKEINDICSGCRGHDGFTSSWRSVATTLRQKVEDAVREHPDYRVVFTGHSLGGALATVAGADLRGNGYDIDVFSYGAPRVGNRAFAEFLTVQTGGTLYRITHTNDIVPRLPPREFGYSHSSPEYWIKSGTLVPVTRNDIVKIEGIDATGGNNQPNIPDIPAHLWYFGLIGTCL

SEQ ID NO: 3322 - protein, 269 aa, Thermomyces lanuginosus
EVSQDLFNQFNLFAQYSAAPYCGKNNDAPAGTNITCTGNACPEVEKADATFLYSFEDSGVGDVTGFLALDNTNKLIVLSFRGSRSIENWIGNLNFDLKEINDICSGCRGHDGFTSSWRSVADTLRQKVEDAVREHPDYRVVFTGHSLGGALATVAGADLRGNGYDIDVFSYGAPRVGNRAFAEFLTVQTGGTLYRITHTNDIVPRLPPREFGYSHSSPEYWIKSGTLVPVTRNDIVKIEGIDATGGNNQPNIPDIPAHLWYFGLIGTCL

SEQ ID NO: 3323 - protein, 269 aa, Thermomyces lanuginosus
EVSQDLFNQFNLFAQYSAAAYCGKNNDAPAGTNITCTGNACPMVEKADATFLYSFEDSGVGDVTGFLALDNTNKLIVLSFRGSRSIENWIGNLNFDLKEINDICSGCRGHDGFTSSWRSVADTLRQKVEDAVREHPDYRVVFTGHSLGGALATVAGADLRGNGYDIDVFSYGAPRVGNRAFAEFLTVQTGGTLYRITHTNDIVPRLPPREFGYSHSSPEYWIKSGTLVPVTRNDIVKIEGIDATGGNNQPNIPDIPAHLWYFGLIGTCL

SEQ ID NO: 3324 - protein, 269 aa, Thermomyces lanuginosus
EVSQVLFNQFNLFAQYSAAAYCGKNNDAPAGTNITCTGNACPEVEKADATFLYSFEDSGVGDVTGFLALDNTNKLIVLSFRGSRSIENWIGNLNFDLKEINDICSGCRGHDGFTSSWRSVADTLRQKVEDAVREHPDYRVVFTGHSLGGALATVAGADLRGNGYDIDVFSYGAPRVGNRAFAEFLTVQTGGTLYRITHTNDIVPRLPPREFGYSHSSPEYWIKSGTLVPVTRNDIVKIEGIDATGGNNQPNIPDIPAHLWYFGLIGTCL

SEQ ID NO: 3325 - protein, 269 aa, Thermomyces lanuginosus
EVSQDLFNQFNLFAQYSAAAYCGKNNDAPAGTMITCTGNACPEVEKADATFLYSFEDSGVGDVTGFLALDNTNKLIVLSFRGSRSIENWIGNLNFDLKEINDICSGCRGHDGFTSSWRSVADTLRQKVEDAVREHPDYRVVFTGHSLGGALATVAGADLRGNGYDIDVFSYGAPRVGNRAFAEFLTVQTGGTLYRITHTNDIVPRLPPREFGYSHSSPEYWIKSGTLVPVTRNDIVKIEGIDATGGNNQPNIPDIPAHLWYFGLIGTCL

SEQ ID NO: 3326 - protein, 269 aa, Thermomyces lanuginosus
EVSQDLFNQFNLFAQYSAAAYCGKNNDAPAGTNITCTGIACPEVEKADATFLYSFEDSGVGDVTGFLALDNTNKLIVLSFRGSRSIENWIGNLNFDLKEINDICSGCRGHDGFTSSWRSVADTLRQKVEDAVREHPDYRVVFTGHSLGGALATVAGADLRGNGYDIDVFSYGAPRVGNRAFAEFLTVQTGGTLYRITHTNDIVPRLPPREFGYSHSSPEYWIKSGTLVPVTRNDIVKIEGIDATGGNNQPNIPDIPAHLWYFGLIGTCL

SEQ ID NO: 3327 - protein, 269 aa, Thermomyces lanuginosus
EVSQDLFNQFNLFAQYSAAAYCGKNNDAPAGTNITCTGNACPEVEKADATFLYSFEDSGVGDVTGFLALDNTNKLIVLSFRGSRSIENWIGNLNFDLKEINDICSGCRGHDGFTSSWRSVADTLRQKVEDAVREHPDYRVVFTGHSLGGALATVAGADLRGNGYDIDVFSYGAPRVGNRAFAEFLTVQTGGTLYRITHTNDIVPRLPPREFGYSHQSPEYWIKSGTLVPVTRNDIVKIEGIDATGGNNQPNIPDIPAHLWYFGLIGTCL

SEQ ID NO: 3328 - protein, 269 aa, Thermomyces lanuginosus
EVSQDLFNQFNLFAQYSAAAYCGKNNDAPAGTNITCTGNACPEVEKADATFLYSFEDSGVGDVTGFLALDNTNKLIVLSFRGSRSIENWIGNLNFDLKEINDICSGCRGHDGFTSSWRSVADTLRQKVEDAVREHPDYRVVFTGHSLGGALATVAGADLRGNGYDIDVFSYGAPRVGNRAFAEFLTVQTGGTLYRITHTNDIVPRLPPREFGYSHSSPEYWIKSGTLVPVTRNDIVKIEGIDATGGNNQPNIFDIPAHLWYFGLIGTCL

SEQ ID NO: 3329 - protein, 269 aa, Thermomyces lanuginosus
EVSQDLFNQFNLFAQYSAAAYCGKNNDAPAGTNITCTGNACPEVEKADATFLYSFEDSGVGDVTGFLALDNTNKLIVLSFRGSRSIENWIGNLNFDLKEINDICSGCRGHDGFTSSWRSNADTLRQKVEDAVREHPDYRVVFTGHSLGGALATVAGADLRGNGYDIDVFSYGAPRVGNRAFAEFLTVQTGGTLYRITHTNDIVPRLPPREFGYSHSSPEYWIKSGTLVPVTRNDIVKIEGIDATGGNNQPNIPDIPAHLWYFGLIGTCL

SEQ ID NO: 3330 - protein, 269 aa, Thermomyces lanuginosus
EVSQDLFNQFNLFAQYSAAAYCGKNNDAPAGTNITCTGNACPEVEKADATFLYSFEDSGVGDVTGFLALDNTNKLIVLSFRGSRSIENWIGNLNFDLKEINDICSGCRGHTGFTSSWRSVADTLRQKVEDAVREHPDYRVVFTGHSLGGALATVAGADLRGNGYDIDVFSYGAPRVGNRAFAEFLTVQTGGTLYRITHTNDIVPRLPPREFGYSHSSPEYWIKSGTLVPVTRNDIVKIEGIDATGGNNQPNIPDIPAHLWYFGLIGTCL

SEQ ID NO: 3331 - protein, 269 aa, Thermomyces lanuginosus
EVSQDLFNQFNLFAQYSAAAYCGKNNDAPAGTNITCTGNACPEVEKADATFLYSFEDSGVGDVTGFLALDNTNKLIVLSFRGSRSIENWIGNLNFDLKEINDICSGCRGHDGFTSSWRSVADTLRQKVEDAVREHPDYRVVFSGHSLGGALATVAGADLRGNGYDIDVFSYGAPRVGNRAFAEFLTVQTGGTLYRITHTNDIVPRLPPREFGYSHSSPEYWIKSGTLVPVTRNDIVKIEGIDATGGNNQPNIPDIPAHLWYFGLIGTCL

SEQ ID NO: 3332 - protein, 269 aa, Thermomyces lanuginosus
EVSQDLFNQFNLFAQYSAAAYCGKNNDAPAGTNITCTWNACPEVEKADATFLYSFEDSGVGDVTGFLALDNTNKLIVLSFRGSRSIENWIGNLNFDLKEINDICSGCRGHDGFTSSWRSVADTLRQKVEDAVREHPDYRVVFTGHSLGGALATVAGADLRGNGYDIDVFSYGAPRVGNRAFAEFLTVQTGGTLYRITHTNDIVPRLPPREFGYSHSSPEYWIKSGTLVPVTRNDIVKIEGIDATGGNNQPNIPDIPAHLWYFGLIGTCL

SEQ ID NO: 3333 - protein, 269 aa, Thermomyces lanuginosus
EVSQDLFNQFNLFAQYSAAAYCGKNNDAPAGTNITCTGNACPEVEKADATFLYSFEDSGVGDVTGFLALDNTNKLIVLMFRGSRSIENWIGNLNFDLKEINDICSGCRGHDGFTSSWRSVADTLRQKVEDAVREHPDYRVVFTGHSLGGALATVAGADLRGNGYDIDVFSYGAPRVGNRAFAEFLTVQTGGTLYRITHTNDIVPRLPPREFGYSHSSPEYWIKSGTLVPVTRNDIVKIEGIDATGGNNQPNIPDIPAHLWYFGLIGTCL

SEQ ID NO: 3334 - protein, 269 aa, Thermomyces lanuginosus
EVSQDLFNQFNLFAQYSAAAYCGKNNDAPAGTNITCTGNACPEVEKADATFLYSFEDSGVGDVTGFLALDNTNKLIVLSFRGSRSIENWIGNLNFDLKEINDICSGCRGHDGFTSSWRSVADTLRQKVEDAVREHPDYRVVFTGHSLGGALATVAGADLRGNGYDIDVFSYGAPRVGNRAFAEFLTVQTGGTLYRITHTNDIVPRLPPREFGYSHSSPEYWIKSGTLVPVTRNDIVKIEGIDAIGGNNQPNIPDIPAHLWYFGLIGTCL

SEQ ID NO: 3335 - protein, 269 aa, Thermomyces lanuginosus
EVSQDLFNQFNLFAQYSAAAYCGKNNDAPAGTNITCTGNACPEVEKADATFLYSFEDSGVGDVTGFLALDNTNKLIVLSFRGSRSIENWIGNLNFDLKEINDICSGCRGHDGFTLSWRSVADTLRQKVEDAVREHPDYRVVFTGHSLGGALATVAGADLRGNGYDIDVFSYGAPRVGNRAFAEFLTVQTGGTLYRITHTNDIVPRLPPREFGYSHSSPEYWIKSGTLVPVTRNDIVKIEGIDATGGNNQPNIPDIPAHLWYFGLIGTCL

SEQ ID NO: 3336 - protein, 269 aa, Thermomyces lanuginosus
EVSQDLFNQFNLFAQYSAAAYCGKNNDAPAGTNITCTGNACPEVEKADATFLYSFEDSGVGDVTGFLALDNTNKLIVLSFRGSRSIENWIGNLNFDLKEINDICSGCRGHDGFTSSWRSVADTLRQKVEDAVREHPDYRVVFTGHSLGGALATVAGADLRGNGYDIDVFSYGAPRVGNRAFAEFLTVQTGGTLYRITHTNDIVPRLPPREFGYSHSSPEYWIQSGTLVPVTRNDIVKIEGIDATGGNNQPNIPDIPAHLWYFGLIGTCL

SEQ ID NO: 3337 - protein, 269 aa, Thermomyces lanuginosus
EVSQDLFNQFNLFAQYSAAAYCGDNNDAPAGTNITCTGNACPEVEKADATFLYSFEDSGVGDVTGFLALDNTNKLIVLSFRGSRSIENWIGNLNFDLKEINDICSGCRGHDGFTSSWRSVADTLRQKVEDAVREHPDYRVVFTGHSLGGALATVAGADLRGNGYDIDVFSYGAPRVGNRAFAEFLTVQTGGTLYRITHTNDIVPRLPPREFGYSHSSPEYWIKSGTLVPVTRNDIVKIEGIDATGGNNQPNIPDIPAHLWYFGLIGTCL

SEQ ID NO: 3338 - protein, 269 aa, Thermomyces lanuginosus
EVSQDLFNQFNLFAQYSAAAYCGKNNDAPAGTNITCTGNACPEVEKADATFLYSFEDSGVGDVTGFLALDNTNKLIVLSFRGSRSIENWIGNLNFDLKEINDICSGCRGHDGFTSSWRSVADTLRQKVEDAVREHPDYRVVFTGHSLGGALATVAGADLRGNGYDIDVFSYGAPRVGNRAFAEFLTQQTGGTLYRITHTNDIVPRLPPREFGYSHSSPEYWIKSGTLVPVTRNDIVKIEGIDATGGNNQPNIPDIPAHLWYFGLIGTCL

SEQ ID NO: 3339 - protein, 269 aa, Thermomyces lanuginosus
EVSQDLFNQFNLFAQYSAAAYCGKNNDAPAGTNITCTGNACPEVEKADATFLYSFEDSGVGDVTGFLALDNTNKLIVLSFRGSRSIENWIGNLNFDLKEINDICSGCRGHDGFTSSWRSVADQLRQKVEDAVREHPDYRVVFTGHSLGGALATVAGADLRGNGYDIDVFSYGAPRVGNRAFAEFLTVQTGGTLYRITHTNDIVPRLPPREFGYSHSSPEYWIKSGTLVPVTRNDIVKIEGIDATGGNNQPNIPDIPAHLWYFGLIGTCL

SEQ ID NO: 3340 - protein, 269 aa, Thermomyces lanuginosus
EVSQDLFNQFNLFAQYSAAAYCGKNNDAPAGTNITCTGNACPEVEKADATFLYSFEDSGVGDVTGFLALDNTNKLIVLSFRGSRSIENWIGNLNFDLKEINDICSGCRGHDGFTSSWRSVADTLRQKVEDAVREHPDYRVVFTGHSLGGALATVAGADMRGNGYDIDVFSYGAPRVGNRAFAEFLTVQTGGTLYRITHTNDIVPRLPPREFGYSHSSPEYWIKSGTLVPVTRNDIVKIEGIDATGGNNQPNIPDIPAHLWYFGLIGTCL

SEQ ID NO: 3341 - protein, 269 aa, Thermomyces lanuginosus
EVSQDLFNQFNLFAQYSAAAYCGKNNDAPAGTNITCTGNACPEVEKADATFLYSFEDSGVGDVTGFLALDNTNKLIVLSFRGSRSIENWIGNLNFDLKEINDICSGCRGHDGFTSSWRSVADTLRQKVEDAVREHPDYRVVFTGHSLGGALATVAGADLRGNGYDIDVFSYGAPRVGNRAFAEFLTVQTGGTLYRITHTNDIVPRLPPREFGYSHSSPEYWIKSGTLVPVTRNDIVKIKGIDATGGNNQPNIPDIPAHLWYFGLIGTCL

SEQ ID NO: 3342 - protein, 269 aa, Thermomyces lanuginosus
EVSQDLFNQFNLFAQYSAAAYCGKNNDAPAGTNITCTGNACPEVEKADATFLYSFEDSGVGDVTGFLALDNTNKLIVLSFRGSRSIENWIGNLNGDLKEINDICSGCRGHDGFTSSWRSVADTLRQKVEDAVREHPDYRVVFTGHSLGGALATVAGADLRGNGYDIDVFSYGAPRVGNRAFAEFLTVQTGGTLYRITHTNDIVPRLPPREFGYSHSSPEYWIKSGTLVPVTRNDIVKIEGIDATGGNNQPNIPDIPAHLWYFGLIGTCL

SEQ ID NO: 3343 - protein, 269 aa, Thermomyces lanuginosus
EVSQDLFNQFNLFAQYSAAAYCGKNNDAPAGTNITCTGNACPEVEKADATFLYSFEDSGVGDVTGFLALDNTNKLIVLSFRGSRSIENWIGNLNFDLKEINDICSGCRGHDGFTSSWRSVADTLRQKVEDAVREHPDYRVVFTGHSLGGALATVAGADLRGNGYDIDVFSYGAPRVGNRAFAEFLTVQTGGTLYRITHTNDIVPRLPPREFGYSHSSPEYWIKSGTLVPVTRNDIVKIEGIDATGGNNQRNIPDIPAHLWYFGLIGTCL

SEQ ID NO: 3344 - protein, 269 aa, Thermomyces lanuginosus
EVSQDLFNQFNLFAQYSAAAYCGKNNDAPAGTNITCTGNACPEVEKADATFLYSFEDSGVGDVTGFLALDNTNKLIVLSFRGSRSIENWIGNLNFDLKEINDICSGCRGHDGFFSSWRSVADTLRQKVEDAVREHPDYRVVFTGHSLGGALATVAGADLRGNGYDIDVFSYGAPRVGNRAFAEFLTVQTGGTLYRITHTNDIVPRLPPREFGYSHSSPEYWIKSGTLVPVTRNDIVKIEGIDATGGNNQPNIPDIPAHLWYFGLIGTCL

SEQ ID NO: 3345 - protein, 269 aa, Synthetic construct
EVSQDLFNQFNLFAQYSAAAYCGKNNDAPAGTNITCTGNACPEVEKADATFLYSFEDSGVGDVTGFLALDNTNKLIVLSFRGSRSIENWIGNLNFDLKEINKICSGCRGHDGFTSSWRSVADTLRQKVEDAVREHPDYRVVFTGHSLGGALATVAGADLRGNGYDIDVFSYGAPRVGNRAFAEFLTVQTGGTLYRITHTNDIVPRLPPREFGYSHSSPEYWIKSGTLVPVTRNDIVKIEGIDATGGNNQPNIPDIPAHLWYFGLIGTCL

SEQ ID NO: 3346 - protein, 269 aa, Thermomyces lanuginosus
EVSQDLFNQFNLFAQYSAAAYCGKNNDAPAGTNITCTGNACPEVEKADATFLYSFEDSGVGDVTGFLALDNTNKLIVLSFRGSRSIENWIGNLNFDLKEINDICSGCRGHDGFTSSWRSVADTLRQKVEDAVREHPDYRVVFTGHSLGGALITVAGADLRGNGYDIDVFSYGAPRVGNRAFAEFLTVQTGGTLYRITHTNDIVPRLPPREFGYSHSSPEYWIKSGTLVPVTRNDIVKIEGIDATGGNNQPNIPDIPAHLWYFGLIGTCL

SEQ ID NO: 3347 - protein, 269 aa, Thermomyces lanuginosus
EVSQDLFNQFNLFAQYSAAAYCGKNNDAPAGTNITCTGNACPEVEKADATFLYSFEDSGVGDVTGFLALDNTNKLIVLSFRGSRSIENWIGNLNFDLKEINDICSGCRGHDGFTSSWRSVADTLRQKVEDRVREHPDYRVVFTGHSLGGALATVAGADLRGNGYDIDVFSYGAPRVGNRAFAEFLTVQTGGTLYRITHTNDIVPRLPPREFGYSHSSPEYWIKSGTLVPVTRNDIVKIEGIDATGGNNQPNIPDIPAHLWYFGLIGTCL

SEQ ID NO: 3348 - protein, 269 aa, Thermomyces lanuginosus
EVSQDLFNQFNLFAQYSAAAYCGKNNDAPAGTNITCTGNACPEVEKADATFLYSFEDSGVGDVTGFLALDNTNKLIVLSFRGSRSIENWIGNLNFDLKEINDICSGCRGHDGFTSSWRSVADTLRQKVEDAVREHPDYRVVFTGHSLGGALATVAGADLRGNGYDIDVFSYGAPRVGNRAFAEFLTVQTGGTLYRITHTNDIVPRLPPREFGYSHSSPEYWIKSGTLVPVTRNDIVKIEGIDATGGNNQPNIPDIPXHLWYFGLIGTCL

SEQ ID NO: 3349 - protein, 269 aa, Thermomyces lanuginosus
EVSQDLFNQFNLFAQYSAAAYCGKDNDAPAGTNITCTGNACPEVEKADATFLYSFEDSGVGDVTGFLALDNTNKLIVLSFRGSRSIENWIGNLNFDLKEINDICSGCRGHDGFTSSWRSVADTLRQKVEDAVREHPDYRVVFTGHSLGGALATVAGADLRGNGYDIDVFSYGAPRVGNRAFAEFLTVQTGGTLYRITHTNDIVPRLPPREFGYSHSSPEYWIKSGTLVPVTRNDIVKIEGIDATGGNNQPNIPDIPAHLWYFGLIGTCL

SEQ ID NO: 3350 - protein, 269 aa, Thermomyces lanuginosus
EVSQDLFNQFNLFAQYSAAAYCGKNLDAPAGTNITCTGNACPEVEKADATFLYSFEDSGVGDVTGFLALDNTNKLIVLSFRGSRSIENWIGNLNFDLKEINDICSGCRGHDGFTSSWRSVADTLRQKVEDAVREHPDYRVVFTGHSLGGALATVAGADLRGNGYDIDVFSYGAPRVGNRAFAEFLTVQTGGTLYRITHTNDIVPRLPPREFGYSHSSPEYWIKSGTLVPVTRNDIVKIEGIDATGGNNQPNIPDIPAHLWYFGLIGTCL

SEQ ID NO: 3351 - protein, 269 aa, Thermomyces lanuginosus
EVSQDLFNQFNLFAQYSAAAYCGKNNDAPAGTNITCTGNACPEVEKADATFLYSFEDSGVGDVTGFLALDNTNKLIVLSFRGSRSIENWIGNLNFDLKEINDICSGCRGHDGFTSSWRSVADTLRQKVEDAVREHPDYRVVFTGHSLGGALATVAGADLRGNGYDIDVFSYGAPRVGNRAFAEFLTVQTGGTLYRITHTNDIVPRLPPREFGYSHSSPEYWIKSGTLVPVTRNDIVKIEGIDATGGNNQPNTPDIPAHLWYFGLIGTCL

SEQ ID NO: 3352 - protein, 269 aa, Thermomyces lanuginosus
EVSQDLFNQFNLFAQYSAAAYCGKNNDAPAGTNITCTGNACPEVEKADATFLYSFEDSGVGDVTGFLALDNTNKLIVLSFRGSRSIENWIGNLNFDLKEINDICSGCRGHDGFTSSWRSVADTLRQKVEDAVREHPDYRVVFTGHSLGGALATVAGADLRGNGYDIDVFSYGAPRVGNRAFAEFLTVQTGGTLYRITHTNDIVPRLPPREFGYSHSSPEYWIKSGTLVPVTRNDIVKIEGIDATGGNNQPNNPDIPAHLWYFGLIGTCL

SEQ ID NO: 3353 - protein, 269 aa, Thermomyces lanuginosus
EVSQDLFNQFNLFAQYSAATYCGKNNDAPAGTNITCTGNACPEVEKADATFLYSFEDSGVGDVTGFLALDNTNKLIVLSFRGSRSIENWIGNLNFDLKEINDICSGCRGHDGFTSSWRSVADTLRQKVEDAVREHPDYRVVFTGHSLGGALATVAGADLRGNGYDIDVFSYGAPRVGNRAFAEFLTVQTGGTLYRITHTNDIVPRLPPREFGYSHSSPEYWIKSGTLVPVTRNDIVKIEGIDATGGNNQPNIPDIPAHLWYFGLIGTCL

SEQ ID NO: 3354 - protein, 269 aa, Thermomyces lanuginosus
EVSQDLFNQFNLFAQYSAAAYCGKNNDAPAGTNITCTGNACPEVEKADATFLYSFEDSGVGDVTGFLALDNTNKLIVLSFRGSRSIENWIGNLNFDLKEINDICSGCRGHDGFTMSWRSVADTLRQKVEDAVREHPDYRVVFTGHSLGGALATVAGADLRGNGYDIDVFSYGAPRVGNRAFAEFLTVQTGGTLYRITHTNDIVPRLPPREFGYSHSSPEYWIKSGTLVPVTRNDIVKIEGIDATGGNNQPNIPDIPAHLWYFGLIGTCL

SEQ ID NO: 3355 - protein, 269 aa, Thermomyces lanuginosus
EVSQDLFNQFNLFAQYSAAAYCGKNNDAPAGTNITCTGNACPEVEKADATFLYSFEDSGVGDVTGFLALDNTNKLIVLSFRGSRSIENWIGNLNFDLKEINDICSGCRGHDGFTSSWRSVADTLRQKVEDAVREHPMYRVVFTGHSLGGALATVAGADLRGNGYDIDVFSYGAPRVGNRAFAEFLTVQTGGTLYRITHTNDIVPRLPPREFGYSHSSPEYWIKSGTLVPVTRNDIVKIEGIDATGGNNQPNIPDIPAHLWYFGLIGTCL

SEQ ID NO: 3356 - protein, 269 aa, Thermomyces lanuginosus
EVSQDLFNQFNLFAQYSAAAYCGKNNDAPAGTNITCTGNACPEVEKADATFLYSFEDSGVGDVTGFLALDNTNKLIVLSFRGSRSIENWIGNLNFDLKEINDICSGCRGHDGFTSSWRSVADTLRQKVEDAVREHPDYRVVFTGHSLGGALATVAGADLRGNGYDIDVFSYGAPRVGNRAFAEFLTVQTGGTLYRITHTNDIVPRLPPREFGYSHSSPEYWIKSGTLVPVTRNDIVKIEGIDATGGNNQPNIPDIAAHLWYFGLIGTCL

SEQ ID NO: 3357 - protein, 269 aa, Thermomyces lanuginosus
EVSQDLFNQFNLFAQYSAAAYCQKNNDAPAGTNITCTGNACPEVEKADATFLYSFEDSGVGDVTGFLALDNTNKLIVLSFRGSRSIENWIGNLNFDLKEINDICSGCRGHDGFTSSWRSVADTLRQKVEDAVREHPDYRVVFTGHSLGGALATVAGADLRGNGYDIDVFSYGAPRVGNRAFAEFLTVQTGGTLYRITHTNDIVPRLPPREFGYSHSSPEYWIKSGTLVPVTRNDIVKIEGIDATGGNNQPNIPDIPAHLWYFGLIGTCL

SEQ ID NO: 3358 - protein, 269 aa, Thermomyces lanuginosus
EVSQDLFNQFNLFAQYSAAAYCGKNNDAPAGTNITCTGNACPEVEKADATFLYSFEDSGVGDVTGFLALDNTNKLIVLSFRGSRSIENWIGNLNFDLKEINDICSGCRGHDGFTSSWRSVADTLRQKVEDAVREHPDYREVFTGHSLGGALATVAGADLRGNGYDIDVFSYGAPRVGNRAFAEFLTVQTGGTLYRITHTNDIVPRLPPREFGYSHSSPEYWIKSGTLVPVTRNDIVKIEGIDATGGNNQPNIPDIPAHLWYFGLIGTCL

SEQ ID NO: 3359 - protein, 269 aa, Thermomyces lanuginosus
EVSQDLFNQFNLFAQYSAAAYCGKNNDAPAMTNITCTGNACPEVEKADATFLYSFEDSGVGDVTGFLALDNTNKLIVLSFRGSRSIENWIGNLNFDLKEINDICSGCRGHDGFTSSWRSVADTLRQKVEDAVREHPDYRVVFTGHSLGGALATVAGADLRGNGYDIDVFSYGAPRVGNRAFAEFLTVQTGGTLYRITHTNDIVPRLPPREFGYSHSSPEYWIKSGTLVPVTRNDIVKIEGIDATGGNNQPNIPDIPAHLWYFGLIGTCL

SEQ ID NO: 3360 - protein, 269 aa, Thermomyces lanuginosus
EVSQDLFNQFNLFAQYSAAAYCGKNNDAPAGTNITCTGNACPEVEKADATFLYSFEDSGVGDVTGFLALDNTNKLIVLSFRGSRSIENWIGNLNFDLEEINDICSGCRGHDGFTSSWRSVADTLRQKVEDAVREHPDYRVVFTGHSLGGALATVAGADLRGNGYDIDVFSYGAPRVGNRAFAEFLTVQTGGTLYRITHTNDIVPRLPPREFGYSHSSPEYWIKSGTLVPVTRNDIVKIEGIDATGGNNQPNIPDIPAHLWYFGLIGTCL

SEQ ID NO: 3361 - protein, 269 aa, Thermomyces lanuginosus
EVSQDLFNQFNLFAQYSAAAYCGKNNDAPAGTNITCTGNACPEVEKADATFLYSFEDSGVGDVTGFLALDNTNKLIVLSFRGSRSIENWIGNLNFDLKEINDICSGCRGHDGFTSSWRSVADTLRQKVEDAVREHPDYRVVFTGHSLGGALATVAGADLRGNGYDIDVFSYGAPRVGNRAFAEFLTVQTGGTLYRITHTNDIVPRLPPREFGYSHSSPEYWIKSGTLVPVTRNDIVKIEGIDATGGNNQPNIPDIPAHLWYFGGIGTCL

SEQ ID NO: 3362 - protein, 269 aa, Thermomyces lanuginosus
EVSQDLFNQFNLFAQYSAAAYCGKNNDAPAGTNITCTGNACPEVEKADATFLYSFEDSGVGDVTGFLALDNTNKLIVLSFRGSRSIENWIGNLNFDLKEINDICSGCRGHDGFTSSWRSVADTLRQKVEDAVREHPDYRVVFTGHSLGGALATVAGADLRGNGYDIDVFSYGAPRVGNRAFAEFLTVQTGGTLYRITHTNDIVPRLPPREFGYSHSSPEYWIKSGTLVPVTRNDIVKIEGIDATGGNNQKNIPDIPAHLWYFGLIGTCL

SEQ ID NO: 3363 - protein, 269 aa, Thermomyces lanuginosus
EVSQDLFNQFNLFAQYSAAAYCGKNNDFPAGTNITCTGNACPEVEKADATFLYSFEDSGVGDVTGFLALDNTNKLIVLSFRGSRSIENWIGNLNFDLKEINDICSGCRGHDGFTSSWRSVADTLRQKVEDAVREHPDYRVVFTGHSLGGALATVAGADLRGNGYDIDVFSYGAPRVGNRAFAEFLTVQTGGTLYRITHTNDIVPRLPPREFGYSHSSPEYWIKSGTLVPVTRNDIVKIEGIDATGGNNQPNIPDIPAHLWYFGLIGTCL

SEQ ID NO: 3364 - protein, 269 aa, Thermomyces lanuginosus
EVSQDLFNQFNLFAQYSAAAYCGKNNDAPAGTNITCTGNACPEVEKADATFLYSFEDSGVGDVTGFLALDNTNKLIVLSFRGSRSIENWIGNLNFDLKEIEDICSGCRGHDGFTSSWRSVADTLRQKVEDAVREHPDYRVVFTGHSLGGALATVAGADLRGNGYDIDVFSYGAPRVGNRAFAEFLTVQTGGTLYRITHTNDIVPRLPPREFGYSHSSPEYWIKSGTLVPVTRNDIVKIEGIDATGGNNQPNIPDIPAHLWYFGLIGTCL

SEQ ID NO: 3365 - protein, 269 aa, Thermomyces lanuginosus
EVSQDLFNQFNLFAQYSAAAYCGKNNDAPAGTNITCTGNACPEVEKADATFLYSFEDSGVGDVTGFLALDNTNKLIVLSFRGSRSIENWIGNLNFDLKEINDICSGCRGHDGFTSSWRSVADTLRQKVEDAVREHPDYRVVFTGHSLGGALATVAGADLRGNGYDIDVFSYGAPRVGNRAFAEFLTVQTGGTLYRITHTNDIVPRLPPREFGYSHSSPEYWIKSGTLVPVTRNDIVKIEGIDATGGNNQPNIPDIPAHNWYFGLIGTCL

SEQ ID NO: 3366 - protein, 269 aa, Thermomyces lanuginosus
EVSQDLFNQFNLFAQYSAAAYCGKNNDAPAGTNITCTGNACPEVEKADATFLYSFEDSGVGDVTGFLALDNTNKLIVLSFRGSRSIENWIGNLNFDLKEINDICSGCRGHDGFTSSWRSVADTLRQKVEDAVREHPDYRVVFTGHSLGGALATVAGADLRGNGYDIDVFSYGAPRVGNRAFAEFLTVQTGGTLYRITHTNDIVPRLPPREFGYSHSSPEYWIKSGTLVPVTRNDIVKIEGIDATGGNNQPNIPDIPAHLHYFGLIGTCL

SEQ ID NO: 3367 - protein, 269 aa, Thermomyces lanuginosus
EVSQDLFNQFNLFAQYSAAAYCGKNNDAPAGTNITCTGNACPEVEKADATFLYSFEDSGVGDVTGFLALDNTNKLIVLSFRGSRSIENWIGNLNFDLKEINDICSGCRGHDGFTSSWRSVADTLRQKVEDAVREHPDYRVVFTGHSLGGALATVAGADLRGNGYDIDVFSYGAPRVGNRAFAEFLTVQTGGTLYRITHTNDIVPRLPPREFGYSHSSPEYWIKSGTLVPVTRRDIVKIEGIDATGGNNQPNIPDIPAHLWYFGLIGTCL

SEQ ID NO: 3368 - protein, 269 aa, Thermomyces lanuginosus
EVSQDLFNQFNLFAQYSAAAYCGKNNDAPAGTNITCTGNACPEVEKADATFLYSFEDSGVGDVTGFLAIDNTNKLIVLSFRGSRSIENWIGNLNFDLKEINDICSGCRGHDGFTSSWRSVADTLRQKVEDAVREHPDYRVVFTGHSLGGALATVAGADLRGNGYDIDVFSYGAPRVGNRAFAEFLTVQTGGTLYRITHTNDIVPRLPPREFGYSHSSPEYWIKSGTLVPVTRNDIVKIEGIDATGGNNQPNIPDIPAHLWYFGLIGTCL

SEQ ID NO: 3369 - protein, 269 aa, Thermomyces lanuginosus
EVSQDLFNQFNLFAQYSAAAYCGKNNDAPAGTNITCTGNACPEVEKADATFLYFFEDSGVGDVTGFLALDNTNKLIVLSFRGSRSIENWIGNLNFDLKEINDICSGCRGHDGFTSSWRSVADTLRQKVEDAVREHPDYRVVFTGHSLGGALATVAGADLRGNGYDIDVFSYGAPRVGNRAFAEFLTVQTGGTLYRITHTNDIVPRLPPREFGYSHSSPEYWIKSGTLVPVTRNDIVKIEGIDATGGNNQPNIPDIPAHLWYFGLIGTCL

SEQ ID NO: 3370 - protein, 269 aa, Thermomyces lanuginosus
EVSQDLFNQFNLFAQYSAAAYCGKNNDAPAGTNITCTGNACPEVEKADATFLYSFEDSGVGDVTGFLALDNTNKLIVLSFRGSRSIENWIGNLNFDLKEINDICSGCRGHDGFTSSWRSVADTLRQKVEDAVREHPDYRVVFTGHSLGGALATVAGADLRGNNYDIDVFSYGAPRVGNRAFAEFLTVQTGGTLYRITHTNDIVPRLPPREFGYSHSSPEYWIKSGTLVPVTRNDIVKIEGIDATGGNNQPNIPDIPAHLWYFGLIGTCL

SEQ ID NO: 3371 - protein, 269 aa, Thermomyces lanuginosus
EVSQDLFNQFNLFAQYSAAAYCGKNNDAPAGTNITCTGNACPEVEKADATFLYSFEDSGVGDVTGFLALDNTNKLIVLSFRGSRSIENWIGNLNFDLKEINDICSGCRGHDGFTSSWRSVADTLRQKVEDAVREHPDYRVVFTGHSLGGALATVAGADLRGNGYDIDVFSYGAPRVGNRAFAEFLTHQTGGTLYRITHTNDIVPRLPPREFGYSHSSPEYWIKSGTLVPVTRNDIVKIEGIDATGGNNQPNIPDIPAHLWYFGLIGTCL

SEQ ID NO: 3372 - protein, 269 aa, Thermomyces lanuginosus
EVSQDLFNQFNLFAQYSAAAYCGKNNDAPAGTNITCTGNACPEVEKADATFLYSFEDSGVGDVTGFLALDNTNKLIVLSFRGSRSIENWIANLNFDLKEINDICSGCRGHDGFTSSWRSVADTLRQKVEDAVREHPDYRVVFTGHSLGGALATVAGADLRGNGYDIDVFSYGAPRVGNRAFAEFLTVQTGGTLYRITHTNDIVPRLPPREFGYSHSSPEYWIKSGTLVPVTRNDIVKIEGIDATGGNNQPNIPDIPAHLWYFGLIGTCL

SEQ ID NO: 3373 - protein, 269 aa, Thermomyces lanuginosus
EVSQDLFNQFNLFAQYSAAAYCGWNNDAPAGTNITCTGNACPEVEKADATFLYSFEDSGVGDVTGFLALDNTNKLIVLSFRGSRSIENWIGNLNFDLKEINDICSGCRGHDGFTSSWRSVADTLRQKVEDAVREHPDYRVVFTGHSLGGALATVAGADLRGNGYDIDVFSYGAPRVGNRAFAEFLTVQTGGTLYRITHTNDIVPRLPPREFGYSHSSPEYWIKSGTLVPVTRNDIVKIEGIDATGGNNQPNIPDIPAHLWYFGLIGTCL

SEQ ID NO: 3374 - protein, 269 aa, Thermomyces lanuginosus
EVSQDLFNQFNLFAQYSAAAYCGKNNDAPAGTNITCTGNACPEVEKADATFLYSFEDSGVGDVTGFLALDNTNKLIVLSFRGSRSIENWIGNLNFDLKEINDICSGCRGHDGFTSSWRSVADTLRQKVEDAVREHPDYRVVFTGHSLGGALATVAGADLRGNKYDIDVFSYGAPRVGNRAFAEFLTVQTGGTLYRITHTNDIVPRLPPREFGYSHSSPEYWIKSGTLVPVTRNDIVKIEGIDATGGNNQPNIPDIPAHLWYFGLIGTCL

SEQ ID NO: 3375 - protein, 269 aa, Thermomyces lanuginosus
EVSQDLFNQFNLFAQYSAAAYCGKNNDAPAGTNITCTGNACPEVEKADATFLYSFEDSGVGDVTGFLALDNTNKLIVLSFRGSRSIENWIGNLNFDLKEINDICSGCRGHDGFTSSWRSVADTLRQKVEDAVREHPDYRVVFTGHSLGGALATVAGADLRGNGYDIDVFSYGAPRVGNRAFAEFLTVQTGGTLYRITHTNDIVPRLPPREFGYSHSSPEYWIKSGTLVPVTRNDIVKIEGIDATGGNNQPNIPHIPAHLWYFGLIGTCL

SEQ ID NO: 3376 - protein, 269 aa, Thermomyces lanuginosus
EVSQDLFNQFNLFAQYSAAAYCGKNNDAPAGTNITCTGNACPEVEKADATFLYSFEDSGVGDVTGFLALDNTNKLIVLSFRGSRSIENWIGNLNFDLKEINDICSGCRGHDGFTSSWRSVADTLRQKVEDAVREHPDYRVVFTGHSLGGALATVAGADLRGNGYDIDVFSYGAPRVGNRAFAEFLTVQTGGTLYRITHTNDIVPRLPPREFGYSHSSPEYWIKSGTLVMVTRNDIVKIEGIDATGGNNQPNIPDIPAHLWYFGLIGTCL

SEQ ID NO: 3377 - protein, 269 aa, Thermomyces lanuginosus
EVSQDLFNQFNLFAQYSAAAYCGKNNDAPAGTNITCTGNACPEVEKADATFLYSFEDSGVGDVTGFLALDNTNKLIVLSFRGSRSIENWIGNLNFDLKEINDICSGCRGHDGFTSSWRSVADTLRQKVEDAVREHPDYRVVFTGHSLGGALATVAGADLRGNGYDIDVFSYGAPRVGNRAFAEFLTVQTGGTLYRITHTNDIVPRLPPREFGYSHSSPEYWIKSGTLVPVTRNDIVKIEGIDATGGNNQPNIPDIPAHLWYFCLIGTCL

SEQ ID NO: 3378 - protein, 269 aa, Thermomyces lanuginosus
EVSQDLFNQFNLFAQYSAAAYCGKNNDAPAGTNITCTGNACPEVEKADATFLYSFEDSGVGDVTGFLALDNTNKLIVLSFRGSRSIENWIGNLNFDLKEINDICSGCRGHDGFTSSWRSVADTLRQKVEDAVREHPDYRVVFTGHSLGGALATVAGADLRGNGYDIDVFSYGAPRVGNRAFAEFLTGQTGGTLYRITHTNDIVPRLPPREFGYSHSSPEYWIKSGTLVPVTRNDIVKIEGIDATGGNNQPNIPDIPAHLWYFGLIGTCL

SEQ ID NO: 3379 - protein, 269 aa, Thermomyces lanuginosus
EVSQDLFNQFNLFAQYSAAAYCGKNNDAPAGTNITCTGNACPEVEKADATFLYSFEDSGVGDVTGFLALDNTNKLIVLSFRGSRSIENWIGNLNFDLKEINDICSGCRGHDGFMSSWRSVADTLRQKVEDAVREHPDYRVVFTGHSLGGALATVAGADLRGNGYDIDVFSYGAPRVGNRAFAEFLTVQTGGTLYRITHTNDIVPRLPPREFGYSHSSPEYWIKSGTLVPVTRNDIVKIEGIDATGGNNQPNIPDIPAHLWYFGLIGTCL

SEQ ID NO: 3380 - protein, 269 aa, Thermomyces lanuginosus
EVSQDLFNQFNLFAQYSAAAYCGKNNDAPAGTNITCQGNACPEVEKADATFLYSFEDSGVGDVTGFLALDNTNKLIVLSFRGSRSIENWIGNLNFDLKEINDICSGCRGHDGFTSSWRSVADTLRQKVEDAVREHPDYRVVFTGHSLGGALATVAGADLRGNGYDIDVFSYGAPRVGNRAFAEFLTVQTGGTLYRITHTNDIVPRLPPREFGYSHSSPEYWIKSGTLVPVTRNDIVKIEGIDATGGNNQPNIPDIPAHLWYFGLIGTCL

SEQ ID NO: 3381 - protein, 269 aa, Thermomyces lanuginosus
EVSQDLFNQFNLFAQYSAAAYCGLNNDAPAGTNITCTGNACPEVEKADATFLYSFEDSGVGDVTGFLALDNTNKLIVLSFRGSRSIENWIGNLNFDLKEINDICSGCRGHDGFTSSWRSVADTLRQKVEDAVREHPDYRVVFTGHSLGGALATVAGADLRGNGYDIDVFSYGAPRVGNRAFAEFLTVQTGGTLYRITHTNDIVPRLPPREFGYSHSSPEYWIKSGTLVPVTRNDIVKIEGIDATGGNNQPNIPDIPAHLWYFGLIGTCL

SEQ ID NO: 3382 - protein, 269 aa, Thermomyces lanuginosus
EVSQDLFNQFNLFAQYSAAAYCGKNYDAPAGTNITCTGNACPEVEKADATFLYSFEDSGVGDVTGFLALDNTNKLIVLSFRGSRSIENWIGNLNFDLKEINDICSGCRGHDGFTSSWRSVADTLRQKVEDAVREHPDYRVVFTGHSLGGALATVAGADLRGNGYDIDVFSYGAPRVGNRAFAEFLTVQTGGTLYRITHTNDIVPRLPPREFGYSHSSPEYWIKSGTLVPVTRNDIVKIEGIDATGGNNQPNIPDIPAHLWYFGLIGTCL

SEQ ID NO: 3383 - protein, 269 aa, Thermomyces lanuginosus
EVSQDLFNQFNLFAQYSAAAYCGKNNDAPAGTNITCTGNACPEVEKADATFLYSFEDSGVGDVTGFLALDNTNKLIVLSFRGSRSIENWIGNLNFDLKEINDICSGCRGHDGFTSSWRSVADTLRQKVEDAVREHPDYRVVFGGHSLGGALATVAGADLRGNGYDIDVFSYGAPRVGNRAFAEFLTVQTGGTLYRITHTNDIVPRLPPREFGYSHSSPEYWIKSGTLVPVTRNDIVKIEGIDATGGNNQPNIPDIPAHLWYFGLIGTCL

SEQ ID NO: 3384 - protein, 269 aa, Thermomyces lanuginosus
EVSQDLFNQFNLFAQYSAAAYCGKNNDAPAGTNITCTGNACPEVEKADATFLYSFEDSGVGDVTGFLALDNTNKLIVLSFRGSRSIENWIGNLNFDLKEINDICSGCRGHDGFTSSWRSVADTLRQKWEDAVREHPDYRVVFTGHSLGGALATVAGADLRGNGYDIDVFSYGAPRVGNRAFAEFLTVQTGGTLYRITHTNDIVPRLPPREFGYSHSSPEYWIKSGTLVPVTRNDIVKIEGIDATGGNNQPNIPDIPAHLWYFGLIGTCL

SEQ ID NO: 3385 - protein, 269 aa, Thermomyces lanuginosus
EVSQDLFNQFNLFAQYSAAAYCGINNDAPAGTNITCTGNACPEVEKADATFLYSFEDSGVGDVTGFLALDNTNKLIVLSFRGSRSIENWIGNLNFDLKEINDICSGCRGHDGFTSSWRSVADTLRQKVEDAVREHPDYRVVFTGHSLGGALATVAGADLRGNGYDIDVFSYGAPRVGNRAFAEFLTVQTGGTLYRITHTNDIVPRLPPREFGYSHSSPEYWIKSGTLVPVTRNDIVKIEGIDATGGNNQPNIPDIPAHLWYFGLIGTCL

SEQ ID NO: 3386 - protein, 269 aa, Thermomyces lanuginosus
EVSQDLFNQFNLFAQYSAAAYCGKNNDAPAGTNITCTGNACPEVEKADATFLYSFEDSGVGDVTGFLALDNTNKLIVLSFRGSRSIENWIGNLRFDLKEINDICSGCRGHDGFTSSWRSVADTLRQKVEDAVREHPDYRVVFTGHSLGGALATVAGADLRGNGYDIDVFSYGAPRVGNRAFAEFLTVQTGGTLYRITHTNDIVPRLPPREFGYSHSSPEYWIKSGTLVPVTRNDIVKIEGIDATGGNNQPNIPDIPAHLWYFGLIGTCL

SEQ ID NO: 3387 - protein, 269 aa, Thermomyces lanuginosus
EVSQDLFNQFNLFAQYSAAAYCGKNNDAPAGTNITCTGNACPEVEKADATFLYSFEDSGVGDVTGFLALDNTNKLIVLSFRGSRSVENWIGNLNFDLKEINDICSGCRGHDGFTSSWRSVADTLRQKVEDAVREHPDYRVVFTGHSLGGALATVAGADLRGNGYDIDVFSYGAPRVGNRAFAEFLTVQTGGTLYRITHTNDIVPRLPPREFGYSHSSPEYWIKSGTLVPVTRNDIVKIEGIDATGGNNQPNIPDIPAHLWYFGLIGTCL

SEQ ID NO: 3388 - protein, 269 aa, Thermomyces lanuginosus
EVSDDLFNQFNLFAQYSAAAYCGKNNDAPAGTNITCTGNACPEVEKADATFLYSFEDSGVGDVTGFLALDNTNKLIVLSFRGSRSIENWIGNLNFDLKEINDICSGCRGHDGFTSSWRSVADTLRQKVEDAVREHPDYRVVFTGHSLGGALATVAGADLRGNGYDIDVFSYGAPRVGNRAFAEFLTVQTGGTLYRITHTNDIVPRLPPREFGYSHSSPEYWIKSGTLVPVTRNDIVKIEGIDATGGNNQPNIPDIPAHLWYFGLIGTCL

SEQ ID NO: 3389 - protein, 269 aa, Thermomyces lanuginosus
EVSQDLFNQFNLFAQYSAAAYCGKNNDAPAGTNITCTGNACPEVEKADATFLYSFEDSGVGDVTGFLALDNTNKLIVLSFRGSRSIENWIGNLNFDLKEINDICSGCRGHDGFTSSWRSVADTLRQKVEDAVREHPDYRVVFTGHSLGGALATVAGADLRGNGYDIDVFSYGAPRVGNRAFAEFLTVQTGGTLYRITHTNDIVPRLPPREFGYSHSVPEYWIKSGTLVPVTRNDIVKIEGIDATGGNNQPNIPDIPAHLWYFGLIGTCL

SEQ ID NO: 3390 - protein, 269 aa, Thermomyces lanuginosus
EVSQDLFNQFNLFAQYSAAAYCGKNNDAPAGTNITCTGNACPEVEKADATFLYSFEDSGVGDVTGFLALDNTNKLIVLSFRGSRSIENWIGNLNFDLKEINDICSGCRGHDGFTSSWRSVADTLRQKVEDAVREHPDYRVVFTGHSLGGALATVAGADLRGNGYDIDVFSYGAPRVGNRAFAEFLTVQTGGTLYRITHTNDIVPRLPPREFGYSHSSPEYWIKSGTLVPVTRNDIVKIEGIDATGGNNQPNIPDIPAHLWYFGSIGTCL

SEQ ID NO: 3391 - protein, 269 aa, Thermomyces lanuginosus
EVSQDLFNQFNLFAQYSAAAYCGKNNDAPAGTNITCTGNACPEIEKADATFLYSFEDSGVGDVTGFLALDNTNKLIVLSFRGSRSIENWIGNLNFDLKEINDICSGCRGHDGFTSSWRSVADTLRQKVEDAVREHPDYRVVFTGHSLGGALATVAGADLRGNGYDIDVFSYGAPRVGNRAFAEFLTVQTGGTLYRITHTNDIVPRLPPREFGYSHSSPEYWIKSGTLVPVTRNDIVKIEGIDATGGNNQPNIPDIPAHLWYFGLIGTCL

SEQ ID NO: 3392 - protein, 269 aa, Thermomyces lanuginosus
EVSQDLFNQFNLFAQYSAAAYCGKNNDAPAGTNITCTGNACPEVEKADATFLYSFEDSGVGDVTGFLALDNTNKLIVLSFRGSRSIENWIGNLNFDLKEINDICSGCRGHDQFTSSWRSVADTLRQKVEDAVREHPDYRVVFTGHSLGGALATVAGADLRGNGYDIDVFSYGAPRVGNRAFAEFLTVQTGGTLYRITHTNDIVPRLPPREFGYSHSSPEYWIKSGTLVPVTRNDIVKIEGIDATGGNNQPNIPDIPAHLWYFGLIGTCL

SEQ ID NO: 3393 - protein, 269 aa, Thermomyces lanuginosus
EVSQDLFNQFNLFAQYSAAAYCGKNNDAPAGTNITCTGNACPEVEKADATFLYSFEDSGVGDVTGFLALDNTNKLSVLSFRGSRSIENWIGNLNFDLKEINDICSGCRGHDGFTSSWRSVADTLRQKVEDAVREHPDYRVVFTGHSLGGALATVAGADLRGNGYDIDVFSYGAPRVGNRAFAEFLTVQTGGTLYRITHTNDIVPRLPPREFGYSHSSPEYWIKSGTLVPVTRNDIVKIEGIDATGGNNQPNIPDIPAHLWYFGLIGTCL

SEQ ID NO: 3394 - protein, 269 aa, Thermomyces lanuginosus
EVSQDLFNQFNLFAQYSAAAYCGKNNDAPASTNITCTGNACPEVEKADATFLYSFEDSGVGDVTGFLALDNTNKLIVLSFRGSRSIENWIGNLNFDLKEINDICSGCRGHDGFTSSWRSVADTLRQKVEDAVREHPDYRVVFTGHSLGGALATVAGADLRGNGYDIDVFSYGAPRVGNRAFAEFLTVQTGGTLYRITHTNDIVPRLPPREFGYSHSSPEYWIKSGTLVPVTRNDIVKIEGIDATGGNNQPNIPDIPAHLWYFGLIGTCL

SEQ ID NO: 3395 - protein, 269 aa, Thermomyces lanuginosus
EVSQDLFNQFNLFAQYSAAAYCGKNNDAPAGTNITCTGNACPEVEKADATELYSFEDSGVGDVTGFLALDNTNKLIVLSFRGSRSIENWIGNLNFDLKEINDICSGCRGHDGFTSSWRSVADTLRQKVEDAVREHPDYRVVFTGHSLGGALATVAGADLRGNGYDIDVFSYGAPRVGNRAFAEFLTVQTGGTLYRITHTNDIVPRLPPREFGYSHSSPEYWIKSGTLVPVTRNDIVKIEGIDATGGNNQPNIPDIPAHLWYFGLIGTCL

SEQ ID NO: 3396 - protein, 269 aa, Thermomyces lanuginosus
EVSYDLFNQFNLFAQYSAAAYCGKNNDAPAGTNITCTGNACPEVEKADATFLYSFEDSGVGDVTGFLALDNTNKLIVLSFRGSRSIENWIGNLNFDLKEINDICSGCRGHDGFTSSWRSVADTLRQKVEDAVREHPDYRVVFTGHSLGGALATVAGADLRGNGYDIDVFSYGAPRVGNRAFAEFLTVQTGGTLYRITHTNDIVPRLPPREFGYSHSSPEYWIKSGTLVPVTRNDIVKIEGIDATGGNNQPNIPDIPAHLWYFGLIGTCL

SEQ ID NO: 3397 - protein, 269 aa, Thermomyces lanuginosus
EVSQDLFNQFNLFAQYSAAAYCGKNNDAPAGTNITCTGNACPEVEKADATFLYSFEDDGVGDVTGFLALDNTNKLIVLSFRGSRSIENWIGNLNFDLKEINDICSGCRGHDGFTSSWRSVADTLRQKVEDAVREHPDYRVVFTGHSLGGALATVAGADLRGNGYDIDVFSYGAPRVGNRAFAEFLTVQTGGTLYRITHTNDIVPRLPPREFGYSHSSPEYWIKSGTLVPVTRNDIVKIEGIDATGGNNQPNIPDIPAHLWYFGLIGTCL

SEQ ID NO: 3398 - protein, 269 aa, Thermomyces lanuginosus
EVSQDLFNQFNLFAQYSAAAYCGKNNDAPAGTNITCTGNACPEVEKADATFLYSFEDSGVGDVTGFLALDNTNKSIVLSFRGSRSIENWIGNLNFDLKEINDICSGCRGHDGFTSSWRSVADTLRQKVEDAVREHPDYRVVFTGHSLGGALATVAGADLRGNGYDIDVFSYGAPRVGNRAFAEFLTVQTGGTLYRITHTNDIVPRLPPREFGYSHSSPEYWIKSGTLVPVTRNDIVKIEGIDATGGNNQPNIPDIPAHLWYFGLIGTCL

SEQ ID NO: 3399 - protein, 269 aa, Thermomyces lanuginosus
EVSQDLFNQFNLFAQYSAAAYCGKNNDAPAGTNITCTGNACPEVEKADATFLYSFEDSGVGDVTGFLALDNTNKLIVLSFRGSRSIENWIGNLNFDLKEINDICSGCRGHDGFTSSWRSVADTLRQKVEDAVREHPDYRVVFTGHSLGGALATVAGADLRGNGYDIDVFSYGAPRVGNRAFAEFLTVQTGGTLYRITHTNDIVPRLPPREFGYSHSSPEYWIKSGTLVPVTLNDIVKIEGIDATGGNNQPNIPDIPAHLWYFGLIGTCL

SEQ ID NO: 3400 - protein, 269 aa, Thermomyces lanuginosus
EVSQDLFNQFNLFAQYSAAAYCGKNNDAPAGTNITCTGNACPEVEKFDATFLYSFEDSGVGDVTGFLALDNTNKLIVLSFRGSRSIENWIGNLNFDLKEINDICSGCRGHDGFTSSWRSVADTLRQKVEDAVREHPDYRVVFTGHSLGGALATVAGADLRGNGYDIDVFSYGAPRVGNRAFAEFLTVQTGGTLYRITHTNDIVPRLPPREFGYSHSSPEYWIKSGTLVPVTRNDIVKIEGIDATGGNNQPNIPDIPAHLWYFGLIGTCL

SEQ ID NO: 3401 - protein, 269 aa, Thermomyces lanuginosus
EVSQDLFNQFNLFAQYSAAAYCGKNNDAPAGTNITCTGNACPEVEKADADFLYSFEDSGVGDVTGFLALDNTNKLIVLSFRGSRSIENWIGNLNFDLKEINDICSGCRGHDGFTSSWRSVADTLRQKVEDAVREHPDYRVVFTGHSLGGALATVAGADLRGNGYDIDVFSYGAPRVGNRAFAEFLTVQTGGTLYRITHTNDIVPRLPPREFGYSHSSPEYWIKSGTLVPVTRNDIVKIEGIDATGGNNQPNIPDIPAHLWYFGLIGTCL

SEQ ID NO: 3402 - protein, 269 aa, Thermomyces lanuginosus
EVSQDLFNQFNLFAQYSAAAYCGKNNDAPAGTNITCTGNACPEVEKADATFLYSFEDSGVGDVTGFLALDNTNKLIVLSFRGSRSIENWIGNLNFDLKEINDICSGCRGHDGFTSSWRSVADTLRQKVEDAVREHPDYRVVFTGHSLGGALATVAGADLRGNGYDIDVFSYGAPRVGNRAFAEFLTVQTGGTLYRITHTNDIVPRLPPREFGYSHPSPEYWIKSGTLVPVTRNDIVKIEGIDATGGNNQPNIPDIPAHLWYFGLIGTCL

SEQ ID NO: 3403 - protein, 269 aa, Thermomyces lanuginosus
EVSQDLFNQFNLFAQYSAAAYCGKNNDAPAGTNITCTGNACPEVEKADATFLYSFEDSGVGDVTGFLALDNTNKLIVLSFRGSRSIENWIGNLNFDLKEIDDICSGCRGHDGFTSSWRSVADTLRQKVEDAVREHPDYRVVFTGHSLGGALATVAGADLRGNGYDIDVFSYGAPRVGNRAFAEFLTVQTGGTLYRITHTNDIVPRLPPREFGYSHSSPEYWIKSGTLVPVTRNDIVKIEGIDATGGNNQPNIPDIPAHLWYFGLIGTCL

SEQ ID NO: 3404 - protein, 269 aa, Thermomyces lanuginosus
EVSQDLFNQFNLFAQYSAAAYCGKNNDAPAGTNITCTGNACPEVEKADATFLYSFEDSGVGDVIGFLALDNTNKLIVLSFRGSRSIENWIGNLNFDLKEINDICSGCRGHDGFTSSWRSVADTLRQKVEDAVREHPDYRVVFTGHSLGGALATVAGADLRGNGYDIDVFSYGAPRVGNRAFAEFLTVQTGGTLYRITHTNDIVPRLPPREFGYSHSSPEYWIKSGTLVPVTRNDIVKIEGIDATGGNNQPNIPDIPAHLWYFGLIGTCL

SEQ ID NO: 3405 - protein, 269 aa, Thermomyces lanuginosus
EVSQDLFNQFNLFAQYSAAAYCVKNNDAPAGTNITCTGNACPEVEKADATFLYSFEDSGVGDVTGFLALDNTNKLIVLSFRGSRSIENWIGNLNFDLKEINDICSGCRGHDGFTSSWRSVADTLRQKVEDAVREHPDYRVVFTGHSLGGALATVAGADLRGNGYDIDVFSYGAPRVGNRAFAEFLTVQTGGTLYRITHTNDIVPRLPPREFGYSHSSPEYWIKSGTLVPVTRNDIVKIEGIDATGGNNQPNIPDIPAHLWYFGLIGTCL

SEQ ID NO: 3406 - protein, 269 aa, Thermomyces lanuginosus
EVSQDLFNQFNLFAQYSAAAYCGKNNDAPAGTNITCTGNACPEVEKADATFLYSFEDSGVGDVTGFLALDNTNKLIVLSFRGSRFIENWIGNLNFDLKEINDICSGCRGHDGFTSSWRSVADTLRQKVEDAVREHPDYRVVFTGHSLGGALATVAGADLRGNGYDIDVFSYGAPRVGNRAFAEFLTVQTGGTLYRITHTNDIVPRLPPREFGYSHSSPEYWIKSGTLVPVTRNDIVKIEGIDATGGNNQPNIPDIPAHLWYFGLIGTCL

SEQ ID NO: 3407 - protein, 269 aa, Thermomyces lanuginosus
EVSQDLFNQFNLFAQYSAAIYCGKNNDAPAGTNITCTGNACPEVEKADATFLYSFEDSGVGDVTGFLALDNTNKLIVLSFRGSRSIENWIGNLNFDLKEINDICSGCRGHDGFTSSWRSVADTLRQKVEDAVREHPDYRVVFTGHSLGGALATVAGADLRGNGYDIDVFSYGAPRVGNRAFAEFLTVQTGGTLYRITHTNDIVPRLPPREFGYSHSSPEYWIKSGTLVPVTRNDIVKIEGIDATGGNNQPNIPDIPAHLWYFGLIGTCL

SEQ ID NO: 3408 - protein, 269 aa, Thermomyces lanuginosus
EVSQDLFNQFNLFAQYSAAAYCGKNNDAPAGTNITCTGNACPEVEKADATFLYSFEDSGVGDVTGFLALDNKNKLIVLSFRGSRSIENWIGNLNFDLKEINDICSGCRGHDGFTSSWRSVADTLRQKVEDAVREHPDYRVVFTGHSLGGALATVAGADLRGNGYDIDVFSYGAPRVGNRAFAEFLTVQTGGTLYRITHTNDIVPRLPPREFGYSHSSPEYWIKSGTLVPVTRNDIVKIEGIDATGGNNQPNIPDIPAHLWYFGLIGTCL

SEQ ID NO: 3409 - protein, 269 aa, Thermomyces lanuginosus
EVSQDLFNQFNLFAQYSAAAYCGKNNDAPAGTNITCTGNAVPEVEKADATFLYSFEDSGVGDVTGFLALDNTNKLIVLSFRGSRSIENWIGNLNFDLKEINDICSGCRGHDGFTSSWRSVADTLRQKVEDAVREHPDYRVVFTGHSLGGALATVAGADLRGNGYDIDVFSYGAPRVGNRAFAEFLTVQTGGTLYRITHTNDIVPRLPPREFGYSHSSPEYWIKSGTLVPVTRNDIVKIEGIDATGGNNQPNIPDIPAHLWYFGLIGTCL

SEQ ID NO: 3410 - protein, 269 aa, Thermomyces lanuginosus
EVSQDLFNQFNLFAQYSAAAYCGKNNDAPAGTNITCTGNACPEVEKADATFLYSFEDSGVGDVTGFLALDNTNKLIVLSFRGSRSIENWIGNLNFDLKEINDICSGCRGHDGFTSSWRSVADTLRQKVEDAVREHPDYRVVFTGHSLGGALATVAGADLRGNGYDIDVFSYGAPRVGNRAFAEFLTVQTGGTLYRITHTNDIVPRLPPREFGYSHSSPEYWIKSGTLVPVTRNDIVKIEGIDATGGNNQPNIPDIPAHLWYFGLIETCL

SEQ ID NO: 3411 - protein, 269 aa, Thermomyces lanuginosus
EVSQDLFNQFNLFAQYSAAAYCGKNNDAPAGTNITCTGNACPEVEKADATFLYSFEDSGVGDVTGFLALDNTNKLIVLSFRGSRSIENWIGNLNFDLKEINDICSGCRGHDGFTSSWRSVADTLRQKVEDAVREHPDYRVVFTGHSLGGALATVAGADLRGNGYDIDVFSYGAPRVGNRAFAEFLTVQTGGTLYRITHTNDIVPRLPPREFGYSHSSPEYWIKSGTLVPVTRNDIVKIEGIDATGGNNQPNIPDIPAHLWYFGLRGTCL

SEQ ID NO: 3412 - protein, 269 aa, Thermomyces lanuginosus
EVSQDLFNQFNLFAQYSAAAYCGKNNDAPAGTNITCTGNACPEVEKADATFLYSFEDSGVGDVTGFLALDNTNKLIVLSFRGSRSIENWIGNLNFDLKEINDICSGCRGHDGFTSSWRSVADTLRQKVEDAVREHPDYRVVFTGHSLGGALATVAGADLRGNGYDIDVFSYGAPRVGNRAFAEFLTVQTGGTLYRITHTNDIVPRLPPREFGYSHSSPEYWIKSGTMVPVTRNDIVKIEGIDATGGNNQPNIPDIPAHLWYFGLIGTCL

SEQ ID NO: 3413 - protein, 269 aa, Thermomyces lanuginosus
EVSQDLFNQFNLFAQYSAAAYCGKNNDAPAGTNITCTMNACPEVEKADATFLYSFEDSGVGDVTGFLALDNTNKLIVLSFRGSRSIENWIGNLNFDLKEINDICSGCRGHDGFTSSWRSVADTLRQKVEDAVREHPDYRVVFTGHSLGGALATVAGADLRGNGYDIDVFSYGAPRVGNRAFAEFLTVQTGGTLYRITHTNDIVPRLPPREFGYSHSSPEYWIKSGTLVPVTRNDIVKIEGIDATGGNNQPNIPDIPAHLWYFGLIGTCL

SEQ ID NO: 3414 - protein, 269 aa, Thermomyces lanuginosus
EVSQDLFNQFNLFAQYSAAAYCGKNNDAPAGTNITCTDNACPEVEKADATFLYSFEDSGVGDVTGFLALDNTNKLIVLSFRGSRSIENWIGNLNFDLKEINDICSGCRGHDGFTSSWRSVADTLRQKVEDAVREHPDYRVVFTGHSLGGALATVAGADLRGNGYDIDVFSYGAPRVGNRAFAEFLTVQTGGTLYRITHTNDIVPRLPPREFGYSHSSPEYWIKSGTLVPVTRNDIVKIEGIDATGGNNQPNIPDIPAHLWYFGLIGTCL

SEQ ID NO: 3415 - protein, 269 aa, Thermomyces lanuginosus
EVSQDLFNQFNLFAQYSAAAYCGKNNDAPAGTNITCTGNACPEVEKADATFLYSFEDSGVGDVTGFLALDNTNKLIVLSFRGSRSIENWIGNLNFDDKEINDICSGCRGHDGFTSSWRSVADTLRQKVEDAVREHPDYRVVFTGHSLGGALATVAGADLRGNGYDIDVFSYGAPRVGNRAFAEFLTVQTGGTLYRITHTNDIVPRLPPREFGYSHSSPEYWIKSGTLVPVTRNDIVKIEGIDATGGNNQPNIPDIPAHLWYFGLIGTCL

SEQ ID NO: 3416 - protein, 269 aa, Thermomyces lanuginosus
EVSQDLFNQFNLFAQYSAAAYCGKNNDAPAGTNITCTGNACPEVEKADATFLYSFEDSGVGDVTGFLALDNTNKLIVLSFRGSRSIENWIGNLNFDLKEINDICSGCRGHDGFTSSWRSVADTLRQKVEDAVREHPYYRVVFTGHSLGGALATVAGADLRGNGYDIDVFSYGAPRVGNRAFAEFLTVQTGGTLYRITHTNDIVPRLPPREFGYSHSSPEYWIKSGTLVPVTRNDIVKIEGIDATGGNNQPNIPDIPAHLWYFGLIGTCL

SEQ ID NO: 3417 - protein, 269 aa, Thermomyces lanuginosus
EVSQDLFNQFNLFAQYSAAAYCGKNNDAPAGTNITCTGNACPEVEKADATFLYSFEDSGVGDVTGFLALDNTNKLIVLSFRGSRSIENWIGNLNFDLKEINDICSGCRGHDGFTSSWRSVADTLRQKVEDAVREHPDYLVVFTGHSLGGALATVAGADLRGNGYDIDVFSYGAPRVGNRAFAEFLTVQTGGTLYRITHTNDIVPRLPPREFGYSHSSPEYWIKSGTLVPVTRNDIVKIEGIDATGGNNQPNIPDIPAHLWYFGLIGTCL

SEQ ID NO: 3418 - protein, 269 aa, Thermomyces lanuginosus
EVSQDLFNQFNLFAQYSAAAYCGKNNDAPAGTNITCTGNACPEVEKADATFLYSFEDSGVGDVTGFLALDNTNKLIVLSFRGSRSIENWIGNLNFDLKEINDICSGCRGHDGFTSSWRSVADTLRQKVEDAVREHPDYRVVFTGHSLGGALATVAGADLRGNGYDIDVFSYGAPRVGNRAFAEFLTVQTGGTLYRITHTNDIVPRLPPREFGYSHSSPEYWIKSGTCVPVTRNDIVKIEGIDATGGNNQPNIPDIPAHLWYFGLIGTCL

SEQ ID NO: 3419 - protein, 269 aa, Thermomyces lanuginosus
EVSQDLFNQFNLFAQYSAAAYCGKNNDAPAGTNITCTGNACPEVEKADATFLYSFEDSGVGDVTGFLALDNTNKLIVLSFRGSRSIENWIGNLNFDLKEINDICSGCRGHDGFTSSWRSVADTLRQKVEDAVREHPDYRVVFTGHSLGGALATVAGADLRGNGYDIDVFSYGAPRVGNRAFAEFLTVQTGGTLYRITHTNDIVPRLPPREFGYSHSSPEYWIKSGTLVPVTRNDIVKIEGIDATGGNNQPNIPDIPAHLWYFGLIWTCL

SEQ ID NO: 3420 - protein, 269 aa, Thermomyces lanuginosus
EVSQDLFNQFNLFAQYSAAAYCGKNNDAPAGTNITCTGNACPEVEKADATFLYSFEDSGVGDVTGFLALDNTNKLIVLSFRGSRSIENWIGNLNFDLKEINDICRGCRGHDGFTSSWRSVADTLRQKVEDAVREHPDYRVVFTGHSLGGALATVAGADLRGNGYDIDVFSYGAPRVGNRAFAEFLTVQTGGTLYRITHTNDIVPRLPPREFGYSHSSPEYWIKSGTLVPVTRNDIVKIEGIDATGGNNQPNIPDIPAHLWYFGLIGTCL

SEQ ID NO: 3421 - protein, 269 aa, Thermomyces lanuginosus
EVSQDLFMQFNLFAQYSAAAYCGKNNDAPAGTNITCTGNACPEVEKADATFLYSFEDSGVGDVTGFLALDNTNKLIVLSFRGSRSIENWIGNLNFDLKEINDICSGCRGHDGFTSSWRSVADTLRQKVEDAVREHPDYRVVFTGHSLGGALATVAGADLRGNGYDIDVFSYGAPRVGNRAFAEFLTVQTGGTLYRITHTNDIVPRLPPREFGYSHSSPEYWIKSGTLVPVTRNDIVKIEGIDATGGNNQPNIPDIPAHLWYFGLIGTCL

SEQ ID NO: 3422 - protein, 269 aa, Thermomyces lanuginosus
EVSQDLFNQFNLFAQYSAAAYCGKNNEAPAGTNITCTGNACPEVEKADATFLYSFEDSGVGDVTGFLALDNTNKLIVLSFRGSRSIENWIGNLNFDLKEINDICSGCRGHDGFTSSWRSVADTLRQKVEDAVREHPDYRVVFTGHSLGGALATVAGADLRGNGYDIDVFSYGAPRVGNRAFAEFLTVQTGGTLYRITHTNDIVPRLPPREFGYSHSSPEYWIKSGTLVPVTRNDIVKIEGIDATGGNNQPNIPDIPAHLWYFGLIGTCL

SEQ ID NO: 3423 - protein, 269 aa, Thermomyces lanuginosus
EVSQDLFNQFNLFAQYSAAAYCGKNNDAPAGTNITCTGNACPEVEKADATFLYSFEDSGVGDVTGFLALDNTSKLIVLSFRGSRSIENWIGNLNFDLKEINDICSGCRGHDGFTSSWRSVADTLRQKVEDAVREHPDYRVVFTGHSLGGALATVAGADLRGNGYDIDVFSYGAPRVGNRAFAEFLTVQTGGTLYRITHTNDIVPRLPPREFGYSHSSPEYWIKSGTLVPVTRNDIVKIEGIDATGGNNQPNIPDIPAHLWYFGLIGTCL

SEQ ID NO: 3424 - protein, 269 aa, Thermomyces lanuginosus
EVSQDLFNQFNLFAQYSAAAYCGKNNDAPAGTNITCTGNACPEVEKADATFLYSFEDSGVGDVTGFLALDNTNKLIVLSFRGSRSIENWIGNLNFDLKEINDICSGCRGHDGFTSSWRSVADTLRQKVEDAVREHPDYRVVFTGHSLGGALATVAGADLRGNGYDIDVFSYGAPRVGNRAFAEFLTVQTGGTLYRITHTNDIVPRLPPREFGYSHSSPEYWIKSGTLVPVTRNDIVKIEGIDATGGNNQPNIPDIPAHLWYFGLIVTCL

SEQ ID NO: 3425 - protein, 269 aa, Thermomyces lanuginosus
EVSQDLFNQFNLFAQYSAAAYCGKNNDAPAGTDITCTGNACPEVEKADATFLYSFEDSGVGDVTGFLALDNTNKLIVLSFRGSRSIENWIGNLNFDLKEINDICSGCRGHDGFTSSWRSVADTLRQKVEDAVREHPDYRVVFTGHSLGGALATVAGADLRGNGYDIDVFSYGAPRVGNRAFAEFLTVQTGGTLYRITHTNDIVPRLPPREFGYSHSSPEYWIKSGTLVPVTRNDIVKIEGIDATGGNNQPNIPDIPAHLWYFGLIGTCL

SEQ ID NO: 3426 - protein, 269 aa, Thermomyces lanuginosus
EVSQDLFNQFNLFAQYSAAAYCGKNNDAPAGTNITCTGNACPEVEKADLTFLYSFEDSGVGDVTGFLALDNTNKLIVLSFRGSRSIENWIGNLNFDLKEINDICSGCRGHDGFTSSWRSVADTLRQKVEDAVREHPDYRVVFTGHSLGGALATVAGADLRGNGYDIDVFSYGAPRVGNRAFAEFLTVQTGGTLYRITHTNDIVPRLPPREFGYSHSSPEYWIKSGTLVPVTRNDIVKIEGIDATGGNNQPNIPDIPAHLWYFGLIGTCL

SEQ ID NO: 3427 - protein, 269 aa, Thermomyces lanuginosus
EVSQDLFNQFNLFAQYSAAAYCGKNNDAPAGTNITCTGNACPEVEKADATFLYSFEDSGVGDVTGFLALDNTNKLIVLSFRGSRSIENWIGNLNFDLKEINDICSGCRGHDGFTSSWRSVADTLRQKVEDAVREHPDYRVVFTGHSLGGALATVAGADLRGNGYDIDVFSYGAPRVGNRAFAEFLTVQTGGTLYRITHTNDIVPRLPPREFGYSHSSPEYWIKSGTLVPVTRNDIVKIEGIDATGGNNQPNIPDIPAHLWYFGLIGICL

SEQ ID NO: 3428 - protein, 269 aa, Thermomyces lanuginosus
EVSQDLFNQFNLFAQYSAAAYCGKNNDAPAGTNITCTGNACPEVEKADATFLYSFEDSGVGDVTGFLALDNTNKLIVLSFRGSRSIENWIGNLNFDLKEINDICSGCRGHDGFTSSWRSVADTLRQKVEDAVREHPDYTVVFTGHSLGGALATVAGADLRGNGYDIDVFSYGAPRVGNRAFAEFLTVQTGGTLYRITHTNDIVPRLPPREFGYSHSSPEYWIKSGTLVPVTRNDIVKIEGIDATGGNNQPNIPDIPAHLWYFGLIGTCL

SEQ ID NO: 3429 - protein, 269 aa, Thermomyces lanuginosus
EVSQDLFNQFNLFAQYSAAAYCGKNNDAPAGTNITCTGNACPEVEKADGTFLYSFEDSGVGDVTGFLALDNTNKLIVLSFRGSRSIENWIGNLNFDLKEINDICSGCRGHDGFTSSWRSVADTLRQKVEDAVREHPDYRVVFTGHSLGGALATVAGADLRGNGYDIDVFSYGAPRVGNRAFAEFLTVQTGGTLYRITHTNDIVPRLPPREFGYSHSSPEYWIKSGTLVPVTRNDIVKIEGIDATGGNNQPNIPDIPAHLWYFGLIGTCL

SEQ ID NO: 3430 - protein, 269 aa, Thermomyces lanuginosus
EVSQDLFNQFNLFAQYSAAAICGKNNDAPAGTNITCTGNACPEVEKADATFLYSFEDSGVGDVTGFLALDNTNKLIVLSFRGSRSIENWIGNLNFDLKEINDICSGCRGHDGFTSSWRSVADTLRQKVEDAVREHPDYRVVFTGHSLGGALATVAGADLRGNGYDIDVFSYGAPRVGNRAFAEFLTVQTGGTLYRITHTNDIVPRLPPREFGYSHSSPEYWIKSGTLVPVTRNDIVKIEGIDATGGNNQPNIPDIPAHLWYFGLIGTCL

SEQ ID NO: 3431 - protein, 269 aa, Thermomyces lanuginosus
EVSQDLFNQFNLFAQYSAAAYCGKNNDAPAGTNITCTGNACPEVEKADATFLYSFEDSGVGDVTGFLALDNTNKLIVLSFRGSRSIENWIGNLNFDLKEINDICSGCRGHDGFTSSWRSVADTLRQKVEDAVREHPDYRVVFTGHSLGGALATVAGADLRGNGYDIDVFSYGAPRVGNRAFAEFLTVQTGGTLYRITHTNDIVPRLPPREFGYSHSSPEYWIKSGTLVPVTRNDIVKIEGIDATGGNNQPNIPDIPAHLWYFILIGTCL

SEQ ID NO: 3432 - protein, 269 aa, Thermomyces lanuginosus
EVSQDLFNQFNLFAQYSAAAYCGKNNDAPAGTNITCTGNACPEVEKADATRLYSFEDSGVGDVTGFLALDNTNKLIVLSFRGSRSIENWIGNLNFDLKEINDICSGCRGHDGFTSSWRSVADTLRQKVEDAVREHPDYRVVFTGHSLGGALATVAGADLRGNGYDIDVFSYGAPRVGNRAFAEFLTVQTGGTLYRITHTNDIVPRLPPREFGYSHSSPEYWIKSGTLVPVTRNDIVKIEGIDATGGNNQPNIPDIPAHLWYFGLIGTCL

SEQ ID NO: 3433 - protein, 269 aa, Thermomyces lanuginosus
EVSQDLFNQFNLFAQYSAAAYCGKNNDAPAGTNITCTGNACPEVEKADATFLYSFEDSGVGDVTGFLALDNTNKLIVLSFRGSRSIENWIGNLNFDLKEINDICSGCRGHDGFTSSWRSVADTLRQKVEDAVREHPDYRVVFTGHSLGGALATVAGADLRGNGYDIDVFSYGAPRVGNRAFAEFLTVQTGGTLYRITHNNDIVPRLPPREFGYSHSSPEYWIKSGTLVPVTRNDIVKIEGIDATGGNNQPNIPDIPAHLWYFGLIGTCL

SEQ ID NO: 3434 - protein, 269 aa, Thermomyces lanuginosus
EVSQDLFNQFNLFAQYSAAAYCGKNNDAPAGTNITCTGNACPEVEKADATFLYSFEDSGVGDVTGFLALDNTHKLIVLSFRGSRSIENWIGNLNFDLKEINDICSGCRGHDGFTSSWRSVADTLRQKVEDAVREHPDYRVVFTGHSLGGALATVAGADLRGNGYDIDVFSYGAPRVGNRAFAEFLTVQTGGTLYRITHTNDIVPRLPPREFGYSHSSPEYWIKSGTLVPVTRNDIVKIEGIDATGGNNQPNIPDIPAHLWYFGLIGTCL

SEQ ID NO: 3435 - protein, 269 aa, Thermomyces lanuginosus
EVSQDLFNQFNLFAQYSAAAYCGKNNDAPAGTNITCTGNACPEVEEADATFLYSFEDSGVGDVTGFLALDNTNKLIVLSFRGSRSIENWIGNLNFDLKEINDICSGCRGHDGFTSSWRSVADTLRQKVEDAVREHPDYRVVFTGHSLGGALATVAGADLRGNGYDIDVFSYGAPRVGNRAFAEFLTVQTGGTLYRITHTNDIVPRLPPREFGYSHSSPEYWIKSGTLVPVTRNDIVKIEGIDATGGNNQPNIPDIPAHLWYFGLIGTCL

SEQ ID NO: 3436 - protein, 269 aa, Thermomyces lanuginosus
EVSQDLFNQFNLFAQYSAAAYCGKNNDAPAGTNITCTGNACPEVEKADATFLYSFEDSGVGDVTGFLWLDNTNKLIVLSFRGSRSIENWIGNLNFDLKEINDICSGCRGHDGFTSSWRSVADTLRQKVEDAVREHPDYRVVFTGHSLGGALATVAGADLRGNGYDIDVFSYGAPRVGNRAFAEFLTVQTGGTLYRITHTNDIVPRLPPREFGYSHSSPEYWIKSGTLVPVTRNDIVKIEGIDATGGNNQPNIPDIPAHLWYFGLIGTCL

SEQ ID NO: 3437 - protein, 269 aa, Thermomyces lanuginosus
EVSQDLFNQFNLFAQYSAAAYCGKNNDAPAGTNITCTGNACPEVEKADATFLYSFEDSGVGDVTGFLALDNTNKLIVLSFRGSRSIENWIGNLNFDLKEINDICSGCRGHDGFTSSWRSVADTLRQKVEDAVREHPDYRVVFTGHSLGGALATVAGADLRGNGYDIDVFSYGAPRVGNRAFAEFLTVQTGGTLYRITHTNDIVPRLPPREFGYSHSSPEYWIKSGTLVPVTRNDIVKIEGIDATGGNNQPNIPDIPAHLWYFGLIDTCL

SEQ ID NO: 3438 - protein, 269 aa, Thermomyces lanuginosus
EVSQDLFNQFNLFAQYSAAAYCGKNNDAPAGTNITCTGNACPEVEKADATFLYSFEDSGVGDVTGFLALDNTNKLIVLSFRGSRSIENWIGNLNFDLKEINDICSGCRGHDGFTSSWRSVADTLRQKVEDAVREHPDYRVVFTGHSLGGALATVAGADLRGNGYDIDVFSYGAPRVGNRAFAEFLTVQTGGTLYRITHTNDIVPRLPPREFGYSHSSPEYWIKSGTLVPVTRNDIVKIEGIDATGGNNQPNIPNIPAHLWYFGLIGTCL

SEQ ID NO: 3439 - protein, 269 aa, Thermomyces lanuginosus
EVSQDLFNQFNLFAQYSAAAYCGKNNDAPAGTNITCTGNACPEVEKADATFLYMFEDSGVGDVTGFLALDNTNKLIVLSFRGSRSIENWIGNLNFDLKEINDICSGCRGHDGFTSSWRSVADTLRQKVEDAVREHPDYRVVFTGHSLGGALATVAGADLRGNGYDIDVFSYGAPRVGNRAFAEFLTVQTGGTLYRITHTNDIVPRLPPREFGYSHSSPEYWIKSGTLVPVTRNDIVKIEGIDATGGNNQPNIPDIPAHLWYFGLIGTCL

SEQ ID NO: 3440 - protein, 269 aa, Thermomyces lanuginosus
EVSQDLFNQFNLFAQYSAAAYCGKNNDAPAGTNITCTGNACPEVEKADATILYSFEDSGVGDVTGFLALDNTNKLIVLSFRGSRSIENWIGNLNFDLKEINDICSGCRGHDGFTSSWRSVADTLRQKVEDAVREHPDYRVVFTGHSLGGALATVAGADLRGNGYDIDVFSYGAPRVGNRAFAEFLTVQTGGTLYRITHTNDIVPRLPPREFGYSHSSPEYWIKSGTLVPVTRNDIVKIEGIDATGGNNQPNIPDIPAHLWYFGLIGTCL

SEQ ID NO: 3441 - protein, 269 aa, Thermomyces lanuginosus
EVSQDLFNQFNLFAQYSAAAYCGKNNDAPAGTNITCTGNACPEVEKADATFLYSFEDSGVGDVTGFLALDNTNKLIVLSFRGSRSIENWIGNLNFDLKEINDICSGCRGHDGFTSSWRSVADTLRQKVEDCVREHPDYRVVFTGHSLGGALATVAGADLRGNGYDIDVFSYGAPRVGNRAFAEFLTVQTGGTLYRITHTNDIVPRLPPREFGYSHSSPEYWIKSGTLVPVTRNDIVKIEGIDATGGNNQPNIPDIPAHLWYFGLIGTCL

SEQ ID NO: 3442 - protein, 269 aa, Thermomyces lanuginosus
EVSQDLFNQFNLFAQYSAAAYCGKNNDAPAGTNITCTGNACPEVEKADATFLYSFEDSGVGDVTGFLALDNTNKLIVLSFRGSRSIENWIGNLNFDLKEINDICSGCRGHDGFTSSWRSVADTLRQKVEDAVREHPDYRVVFTGHSLGGALATVAGADLRGNGYDIDVFSYGAPRVGNRAFAEFLTVQTGGTLYRITHTNDIVPRLPPTEFGYSHSSPEYWIKSGTLVPVTRNDIVKIEGIDATGGNNQPNIPDIPAHLWYFGLIGTCL

SEQ ID NO: 3443 - protein, 269 aa, Thermomyces lanuginosus
EVSQDLFNQFNLFAQYSAAAYCGKNNDAPAGTNITCTGNACPEVEKADATFLYSFEDSGVGDVTGFLALDNTNKLIVLSFRGSRSIENWIGNNNFDLKEINDICSGCRGHDGFTSSWRSVADTLRQKVEDAVREHPDYRVVFTGHSLGGALATVAGADLRGNGYDIDVFSYGAPRVGNRAFAEFLTVQTGGTLYRITHTNDIVPRLPPREFGYSHSSPEYWIKSGTLVPVTRNDIVKIEGIDATGGNNQPNIPDIPAHLWYFGLIGTCL

SEQ ID NO: 3444 - protein, 269 aa, Thermomyces lanuginosus
EVSQDLFNQFNLFAQYSAAAYCGKNNDAPAGTNITCTGNACPEVEKADATFLYSFEDSGVGDVTGFLALDNTNKLIVLSFRGSRSIENWIGNLNFDLKEINDICSGCRGHDGFTSSWRSVADTLRQTVEDAVREHPDYRVVFTGHSLGGALATVAGADLRGNGYDIDVFSYGAPRVGNRAFAEFLTVQTGGTLYRITHTNDIVPRLPPREFGYSHSSPEYWIKSGTLVPVTRNDIVKIEGIDATGGNNQPNIPDIPAHLWYFGLIGTCL

SEQ ID NO: 3445 - protein, 269 aa, Thermomyces lanuginosus
EVSQDLFNQFNLFAQYSAAAYCGKNNDAPAGTNITCTGNACPIVEKADATFLYSFEDSGVGDVTGFLALDNTNKLIVLSFRGSRSIENWIGNLNFDLKEINDICSGCRGHDGFTSSWRSVADTLRQKVEDAVREHPDYRVVFTGHSLGGALATVAGADLRGNGYDIDVFSYGAPRVGNRAFAEFLTVQTGGTLYRITHTNDIVPRLPPREFGYSHSSPEYWIKSGTLVPVTRNDIVKIEGIDATGGNNQPNIPDIPAHLWYFGLIGTCL

SEQ ID NO: 3446 - protein, 269 aa, Thermomyces lanuginosus
EVSQDLFNQFNLFAQYSAAAYCGKNNDAPAGTNITCTGNACPEVEKADATFLYSFEDSGVGDVTGFLALDNTNKLIVLSFRGSRSIENWIGNLGFDLKEINDICSGCRGHDGFTSSWRSVADTLRQKVEDAVREHPDYRVVFTGHSLGGALATVAGADLRGNGYDIDVFSYGAPRVGNRAFAEFLTVQTGGTLYRITHTNDIVPRLPPREFGYSHSSPEYWIKSGTLVPVTRNDIVKIEGIDATGGNNQPNIPDIPAHLWYFGLIGTCL

SEQ ID NO: 3447 - protein, 269 aa, Thermomyces lanuginosus
EVSQDLFNQFNLFAQYSAAAYCGKNNDAPAGTNITCTGNACPEVEKADATFLYSFEDSGVGDVTGFLALDNTNKLIVLSFRGSRSIENWIGNLKFDLKEINDICSGCRGHDGFTSSWRSVADTLRQKVEDAVREHPDYRVVFTGHSLGGALATVAGADLRGNGYDIDVFSYGAPRVGNRAFAEFLTVQTGGTLYRITHTNDIVPRLPPREFGYSHSSPEYWIKSGTLVPVTRNDIVKIEGIDATGGNNQPNIPDIPAHLWYFGLIGTCL

SEQ ID NO: 3448 - protein, 269 aa, Thermomyces lanuginosus
EVSQDLFNQFNLFAQYSAWAYCGKNNDAPAGTNITCTGNACPEVEKADATFLYSFEDSGVGDVTGFLALDNTNKLIVLSFRGSRSIENWIGNLNFDLKEINDICSGCRGHDGFTSSWRSVADTLRQKVEDAVREHPDYRVVFTGHSLGGALATVAGADLRGNGYDIDVFSYGAPRVGNRAFAEFLTVQTGGTLYRITHTNDIVPRLPPREFGYSHSSPEYWIKSGTLVPVTRNDIVKIEGIDATGGNNQPNIPDIPAHLWYFGLIGTCL

SEQ ID NO: 3449 - protein, 269 aa, Thermomyces lanuginosus
EVSQDLFNQFNLFAQYSAAAYCGKNNDAPAGTNITCTGNACPEVEKADATFLYSFEDSGVGDVTGFLALDNTNKLIVLSFRGSRSIENWIGNLNFDLKEINDICSGCRGHDGFTSSWRSVADTLRQKVEDAHREHPDYRVVFTGHSLGGALATVAGADLRGNGYDIDVFSYGAPRVGNRAFAEFLTVQTGGTLYRITHTNDIVPRLPPREFGYSHSSPEYWIKSGTLVPVTRNDIVKIEGIDATGGNNQPNIPDIPAHLWYFGLIGTCL

SEQ ID NO: 3450 - protein, 269 aa, Thermomyces lanuginosus
EVSQDLFNQFNLFAQYSAAAYCGKNNDAPAGTNITCTGNACPEVEKADAWFLYSFEDSGVGDVTGFLALDNTNKLIVLSFRGSRSIENWIGNLNFDLKEINDICSGCRGHDGFTSSWRSVADTLRQKVEDAVREHPDYRVVFTGHSLGGALATVAGADLRGNGYDIDVFSYGAPRVGNRAFAEFLTVQTGGTLYRITHTNDIVPRLPPREFGYSHSSPEYWIKSGTLVPVTRNDIVKIEGIDATGGNNQPNIPDIPAHLWYFGLIGTCL

SEQ ID NO: 3451 - protein, 269 aa, Thermomyces lanuginosus
EVSQDLFNQFNLFAQYSAAAYCGKNNDAPAGTNITCTGNACPEVEKADATFLYSFEDSGVGDVTGFLALDNTNKLIVLSFRGSWSIENWIGNLNFDLKEINDICSGCRGHDGFTSSWRSVADTLRQKVEDAVREHPDYRVVFTGHSLGGALATVAGADLRGNGYDIDVFSYGAPRVGNRAFAEFLTVQTGGTLYRITHTNDIVPRLPPREFGYSHSSPEYWIKSGTLVPVTRNDIVKIEGIDATGGNNQPNIPDIPAHLWYFGLIGTCL

SEQ ID NO: 3452 - protein, 269 aa, Thermomyces lanuginosus
EVSQDLFNQFNLFAQYSAAAYCGKNNDAPAGTNITCTGNACPEVEKADATFWYSFEDSGVGDVTGFLALDNTNKLIVLSFRGSRSIENWIGNLNFDLKEINDICSGCRGHDGFTSSWRSVADTLRQKVEDAVREHPDYRVVFTGHSLGGALATVAGADLRGNGYDIDVFSYGAPRVGNRAFAEFLTVQTGGTLYRITHTNDIVPRLPPREFGYSHSSPEYWIKSGTLVPVTRNDIVKIEGIDATGGNNQPNIPDIPAHLWYFGLIGTCL

SEQ ID NO: 3453 - protein, 269 aa, Thermomyces lanuginosus
EVSQDLFNQFNWFAQYSAAAYCGKNNDAPAGTNITCTGNACPEVEKADATFLYSFEDSGVGDVTGFLALDNTNKLIVLSFRGSRSIENWIGNLNFDLKEINDICSGCRGHDGFTSSWRSVADTLRQKVEDAVREHPDYRVVFTGHSLGGALATVAGADLRGNGYDIDVFSYGAPRVGNRAFAEFLTVQTGGTLYRITHTNDIVPRLPPREFGYSHSSPEYWIKSGTLVPVTRNDIVKIEGIDATGGNNQPNIPDIPAHLWYFGLIGTCL

SEQ ID NO: 3454 - protein, 269 aa, Thermomyces lanuginosus
EVSQDLFNQFNLFAQYSAAAYCGKNNDAPAGTNITCTGNACPEVEKADATFLYSFEDSGVGDVTGFLALDNTNKLIVLSFRGSRSIENWIGNLNFDLKEINDICSGCRGHDGFTSSWRSVADTLRQKVEDAVREHPDYRVVFTGHSLGGALATVAGADLRGNGYDIDVFSYGAPRVGNRAFAEFLTVQTGGTLYRITHTNDIVPRLPPREFGYSHSSPEYWIKSGTLVPVTRNDIVKIEGIDATGGNNQPNFPDIPAHLWYFGLIGTCL

SEQ ID NO: 3455 - protein, 269 aa, Thermomyces lanuginosus
EVSQDLFNQFNLFAQYSAAAYCGKNNDAPAGTNITCTGNACPEVEKADATFLYSFEDSGVGDVTGFLALDNTNKLIVLSFRGSRSIENWIGNLNFDLKEINDICSGCRGHDGFTSSWRSVADTLRQKVEDAVREHPDYRVVFTGHSLGGALATVAGADLRGNGYDIDVFSYGAPRVGNRAFAEFLTVQTGGTLYRITHTNDIVPRLPPREFGYSHSSPEYWIKSGTLVPVTRNDIVKIEGIDATGGNNQPNIPDIPAHSWYFGLIGTCL

SEQ ID NO: 3456 - protein, 269 aa, Thermomyces lanuginosus
EVSQDLFNQFNLFAQYSAAAYCGKNNDAPAGTNITCTGNACPEVEKADATFLYSFEDSGVGDVTGFLALDNTNKLIVLSFRGSRSIENWIGNLNFDLKEINDICSGCRGHDGFTSSWRSVADTLRMKVEDAVREHPDYRVVFTGHSLGGALATVAGADLRGNGYDIDVFSYGAPRVGNRAFAEFLTVQTGGTLYRITHTNDIVPRLPPREFGYSHSSPEYWIKSGTLVPVTRNDIVKIEGIDATGGNNQPNIPDIPAHLWYFGLIGTCL

SEQ ID NO: 3457 - protein, 269 aa, Thermomyces lanuginosus
EVSQDLFNQFNLFAQYSAAAYCGKNNDAPAGTNITCTGNACPEVEKADATFLYSFEDSGVGDVTGILALDNTNKLIVLSFRGSRSIENWIGNLNFDLKEINDICSGCRGHDGFTSSWRSVADTLRQKVEDAVREHPDYRVVFTGHSLGGALATVAGADLRGNGYDIDVFSYGAPRVGNRAFAEFLTVQTGGTLYRITHTNDIVPRLPPREFGYSHSSPEYWIKSGTLVPVTRNDIVKIEGIDATGGNNQPNIPDIPAHLWYFGLIGTCL

SEQ ID NO: 3458 - protein, 269 aa, Thermomyces lanuginosus
EVSQDLFVQFNLFAQYSAAAYCGKNNDAPAGTNITCTGNACPEVEKADATFLYSFEDSGVGDVTGFLALDNTNKLIVLSFRGSRSIENWIGNLNFDLKEINDICSGCRGHDGFTSSWRSVADTLRQKVEDAVREHPDYRVVFTGHSLGGALATVAGADLRGNGYDIDVFSYGAPRVGNRAFAEFLTVQTGGTLYRITHTNDIVPRLPPREFGYSHSSPEYWIKSGTLVPVTRNDIVKIEGIDATGGNNQPNIPDIPAHLWYFGLIGTCL

SEQ ID NO: 3459 - protein, 269 aa, Thermomyces lanuginosus
EVSQDLFNQFNLFAQYSAAAYCGKNNDAPAGTNITCTGNACPEVEKADATFLYSFEDSGVGDVTGFLALDNTNKLIVLSFRGSRSIENWIGNLSFDLKEINDICSGCRGHDGFTSSWRSVADTLRQKVEDAVREHPDYRVVFTGHSLGGALATVAGADLRGNGYDIDVFSYGAPRVGNRAFAEFLTVQTGGTLYRITHTNDIVPRLPPREFGYSHSSPEYWIKSGTLVPVTRNDIVKIEGIDATGGNNQPNIPDIPAHLWYFGLIGTCL

SEQ ID NO: 3460 - protein, 269 aa, Thermomyces lanuginosus
EVSQDLFNQFNLFAQYSIAAYCGKNNDAPAGTNITCTGNACPEVEKADATFLYSFEDSGVGDVTGFLALDNTNKLIVLSFRGSRSIENWIGNLNFDLKEINDICSGCRGHDGFTSSWRSVADTLRQKVEDAVREHPDYRVVFTGHSLGGALATVAGADLRGNGYDIDVFSYGAPRVGNRAFAEFLTVQTGGTLYRITHTNDIVPRLPPREFGYSHSSPEYWIKSGTLVPVTRNDIVKIEGIDATGGNNQPNIPDIPAHLWYFGLIGTCL

SEQ ID NO: 3461 - protein, 269 aa, Thermomyces lanuginosus
EVSQDLFNQFNLFAQYSAAAYCGKNNDAPAGTNITCTGNACPEVEKADATFLYSFEDSGVGDVTGFLALDNTNKLIVLSFRGSRSIENWIGNLNFDLKEINDICSGCRGHDGFTSSWRSVADTLRQKVEDAVREHPDYRVVFTGHSLGGALATVAGADLRGNFYDIDVFSYGAPRVGNRAFAEFLTVQTGGTLYRITHTNDIVPRLPPREFGYSHSSPEYWIKSGTLVPVTRNDIVKIEGIDATGGNNQPNIPDIPAHLWYFGLIGTCL

SEQ ID NO: 3462 - protein, 269 aa, Thermomyces lanuginosus
EVSQDLFNQFNLFAQYSAAAYCGKNNDAPAGTNITCTGNACPEVEKADATFLYSFEDSGVGDVTGFLALDNTNKLIVLSFRGSRSIENWIGNLNFDLKEINDICSGCRGHDGFTSSWRSVADTLRQKVEDAVREHPDYRVVFTGHSLGGALATVAGADLRGNGYDIDVFSYGAPRVGNRAFAEFLTVQTGGTLYRITHTNDIVPRLPPREFGYSHSSPEYWIKSGTGVPVTRNDIVKIEGIDATGGNNQPNIPDIPAHLWYFGLIGTCL

SEQ ID NO: 3463 - protein, 269 aa, Thermomyces lanuginosus
EVSQDLFNQFNLFAQYSAAAYCGKNNDAPAGTNITCTGNACPEVEKADATFLYSFEDKGVGDVTGFLALDNTNKLIVLSFRGSRSIENWIGNLNFDLKEINDICSGCRGHDGFTSSWRSVADTLRQKVEDAVREHPDYRVVFTGHSLGGALATVAGADLRGNGYDIDVFSYGAPRVGNRAFAEFLTVQTGGTLYRITHTNDIVPRLPPREFGYSHSSPEYWIKSGTLVPVTRNDIVKIEGIDATGGNNQPNIPDIPAHLWYFGLIGTCL

SEQ ID NO: 3464 - protein, 269 aa, Thermomyces lanuginosus
EVSQDLFNQFNLFAQYSAAAYCGKNNDAPAGTNITCTGNACPEVEKADATFLYSFEDHGVGDVTGFLALDNTNKLIVLSFRGSRSIENWIGNLNFDLKEINDICSGCRGHDGFTSSWRSVADTLRQKVEDAVREHPDYRVVFTGHSLGGALATVAGADLRGNGYDIDVFSYGAPRVGNRAFAEFLTVQTGGTLYRITHTNDIVPRLPPREFGYSHSSPEYWIKSGTLVPVTRNDIVKIEGIDATGGNNQPNIPDIPAHLWYFGLIGTCL

SEQ ID NO: 3465 - protein, 269 aa, Thermomyces lanuginosus
EVSQDLFNQFNLFAQYSAAAYCGKNNDAPAGTNITCTGNACPEVEKADATFLYSFEDSGVGDVTGFLALDNTNKLIVLSFRGSRSIENWIGNLNFDLKEINDICSGCRGHDGFTSSWRSVADTLRQKVEDAVREHPDYRVVFTGHSLGGALATVAGADLRGNGYDIDVFSYGAPRVGNRAFAEFLTVQTGGTLYRITHTNDIVPRLPPREFGYSHSSPEYWIKSGTLVPVTRNDIVKIEGIDATGGNNQPNIPDIPAHLWYDGLIGTCL

SEQ ID NO: 3466 - protein, 269 aa, Thermomyces lanuginosus
EVSQDLFNQFNLFAQYSAAAYCGKNNDAPAGTNITCTGNACPEVEKADATTLYSFEDSGVGDVTGFLALDNTNKLIVLSFRGSRSIENWIGNLNFDLKEINDICSGCRGHDGFTSSWRSVADTLRQKVEDAVREHPDYRVVFTGHSLGGALATVAGADLRGNGYDIDVFSYGAPRVGNRAFAEFLTVQTGGTLYRITHTNDIVPRLPPREFGYSHSSPEYWIKSGTLVPVTRNDIVKIEGIDATGGNNQPNIPDIPAHLWYFGLIGTCL

SEQ ID NO: 3467 - protein, 269 aa, Thermomyces lanuginosus
EVSQDLFNQFNLFAQYSAAAYCGKNNDAPAGTNITCTGNACPEVEKADATFLYSFEDSGVGDVTGFLALDNTNKLIVLSFRGSRSIENWIGNLNFDLKEINDICSGCRGHFGFTSSWRSVADTLRQKVEDAVREHPDYRVVFTGHSLGGALATVAGADLRGNGYDIDVFSYGAPRVGNRAFAEFLTVQTGGTLYRITHTNDIVPRLPPREFGYSHSSPEYWIKSGTLVPVTRNDIVKIEGIDATGGNNQPNIPDIPAHLWYFGLIGTCL

SEQ ID NO: 3468 - protein, 269 aa, Thermomyces lanuginosus
EVSQDLFNQFNLFAQYSAAAYCGKNNDAPAGTNITCTGNACPEVEKADATFLYSFEDSGVGDVTGFLALDNTNKLIVLSFRGSRSIENWIGNLNFDLKEINDICSGCRGHDGFTSSWRSVADILRQKVEDAVREHPDYRVVFTGHSLGGALATVAGADLRGNGYDIDVFSYGAPRVGNRAFAEFLTVQTGGTLYRITHTNDIVPRLPPREFGYSHSSPEYWIKSGTLVPVTRNDIVKIEGIDATGGNNQPNIPDIPAHLWYFGLIGTCL

SEQ ID NO: 3469 - protein, 269 aa, Thermomyces lanuginosus
EVSQDLFNQFNLFAQYSAAAYCGKNNDAPAGTNITCTGNACPEVEKADATFLYSFEDSGVGDVTGFLALDNTNKLIVLSFRGSRSIENWIGNLNFDLKEINDICSGCRGHDGFTSSWRSVADTLRQKVEDAVREHPDYRVVFTGHSLGGALATVAGADLRGNGYDIDVFSYGAPRVGNRAFAEFLTVQTGGTLYRITHTNDIVPRLPPREFGYSHSSPEYWIKSGTLVPVTRNDIVKIEGIDATGGNNQPNWPDIPAHLWYFGLIGTCL

SEQ ID NO: 3470 - protein, 269 aa, Thermomyces lanuginosus
EVSQDLFNQFNLFAQYSAAAYCGKNNDAPAGTNITCTGNACPEVEKADATFLYSFEDSGVGDVTGFLALDNTNKLIVLSFRGSRSIENWIGNLNFDLKEINDICSGCRGHDGFTSSWRSVADTLRQKVEEAVREHPDYRVVFTGHSLGGALATVAGADLRGNGYDIDVFSYGAPRVGNRAFAEFLTVQTGGTLYRITHTNDIVPRLPPREFGYSHSSPEYWIKSGTLVPVTRNDIVKIEGIDATGGNNQPNIPDIPAHLWYFGLIGTCL

SEQ ID NO: 3471 - protein, 269 aa, Thermomyces lanuginosus
EVSQDLFNQFNLFAQYSAAAYCGKNNDAPAGTNITCTGNACPEVEKADATFLYSFEDSGVGDVTGFLALDNTNKLIVLSFRGSRSIENWIGNLNFDIKEINDICSGCRGHDGFTSSWRSVADTLRQKVEDAVREHPDYRVVFTGHSLGGALATVAGADLRGNGYDIDVFSYGAPRVGNRAFAEFLTVQTGGTLYRITHTNDIVPRLPPREFGYSHSSPEYWIKSGTLVPVTRNDIVKIEGIDATGGNNQPNIPDIPAHLWYFGLIGTCL

SEQ ID NO: 3472 - protein, 269 aa, Thermomyces lanuginosus
EVSQDLFNQFNLFAQYSAAAYCGKNNDAPAGTNITCTGNACPEVEKADATFLYSFEDSGVGDVTGFLALDNTNKLIVLSFRGSRSMENWIGNLNFDLKEINDICSGCRGHDGFTSSWRSVADTLRQKVEDAVREHPDYRVVFTGHSLGGALATVAGADLRGNGYDIDVFSYGAPRVGNRAFAEFLTVQTGGTLYRITHTNDIVPRLPPREFGYSHSSPEYWIKSGTLVPVTRNDIVKIEGIDATGGNNQPNIPDIPAHLWYFGLIGTCL

SEQ ID NO: 3473 - protein, 269 aa, Thermomyces lanuginosus
EVSQDLFNQFNLFAQYSAAAYCGYNNDAPAGTNITCTGNACPEVEKADATFLYSFEDSGVGDVTGFLALDNTNKLIVLSFRGSRSIENWIGNLNFDLKEINDICSGCRGHDGFTSSWRSVADTLRQKVEDAVREHPDYRVVFTGHSLGGALATVAGADLRGNGYDIDVFSYGAPRVGNRAFAEFLTVQTGGTLYRITHTNDIVPRLPPREFGYSHSSPEYWIKSGTLVPVTRNDIVKIEGIDATGGNNQPNIPDIPAHLWYFGLIGTCL

SEQ ID NO: 3474 - protein, 269 aa, Thermomyces lanuginosus
EVSQDLFNQFNLFAQYSAAAYCGKNNDAPAGTNITCTGNACPEVEKADATFLYSFEDSGVGDVTGFLALDNTNKLIVLSFRGSRSPENWIGNLNFDLKEINDICSGCRGHDGFTSSWRSVADTLRQKVEDAVREHPDYRVVFTGHSLGGALATVAGADLRGNGYDIDVFSYGAPRVGNRAFAEFLTVQTGGTLYRITHTNDIVPRLPPREFGYSHSSPEYWIKSGTLVPVTRNDIVKIEGIDATGGNNQPNIPDIPAHLWYFGLIGTCL

SEQ ID NO: 3475 - protein, 269 aa, Thermomyces lanuginosus
EVSQDLFNQFNLFAQYSAAAYCGKNNDAPAGTNITCTGNACPEVEKADATFLYSFEDSGLGDVTGFLALDNTNKLIVLSFRGSRSIENWIGNLNFDLKEINDICSGCRGHDGFTSSWRSVADTLRQKVEDAVREHPDYRVVFTGHSLGGALATVAGADLRGNGYDIDVFSYGAPRVGNRAFAEFLTVQTGGTLYRITHTNDIVPRLPPREFGYSHSSPEYWIKSGTLVPVTRNDIVKIEGIDATGGNNQPNIPDIPAHLWYFGLIGTCL

SEQ ID NO: 3476 - protein, 269 aa, Thermomyces lanuginosus
EVSQDLFNQFNLFAQYSAAAYCGKNNDAPAGTNITCTGNACPEVEKADATFLYSFEDSGVGDVTGFLALDNTNKLIVLSFRGSRSIENWIGNLNFDLKEINDICSGCRGHDGFTSSWRSVADTLRQKVEDAVREHPDYRVVFTGHSLGGALATVAGADLRGNGYDIDVFSYGAPRVGNRAFAEFLTVQTGGTLYRITHTNDIVPRLPPREFGYSHSSPEYWIKSCTLVPVTRNDIVKIEGIDATGGNNQPNIPDIPAHLWYFGLIGTCL

SEQ ID NO: 3477 - protein, 269 aa, Thermomyces lanuginosus
EVSQDLFNQFNLFAQYSAAAYCGKNNDASAGTNITCTGNACPEVEKADATFLYSFEDSGVGDVTGFLALDNTNKLIVLSFRGSRSIENWIGNLNFDLKEINDICSGCRGHDGFTSSWRSVADTLRQKVEDAVREHPDYRVVFTGHSLGGALATVAGADLRGNGYDIDVFSYGAPRVGNRAFAEFLTVQTGGTLYRITHTNDIVPRLPPREFGYSHSSPEYWIKSGTLVPVTRNDIVKIEGIDATGGNNQPNIPDIPAHLWYFGLIGTCL

SEQ ID NO: 3478 - protein, 269 aa, Thermomyces lanuginosus
EVSQDLFNQFNLFAQYSAAAYCGKNNDAPAGTNITCTGNACPEVEKADATFLYSFEDSGVGDVVGFLALDNTNKLIVLSFRGSRSIENWIGNLNFDLKEINDICSGCRGHDGFTSSWRSVADTLRQKVEDAVREHPDYRVVFTGHSLGGALATVAGADLRGNGYDIDVFSYGAPRVGNRAFAEFLTVQTGGTLYRITHTNDIVPRLPPREFGYSHSSPEYWIKSGTLVPVTRNDIVKIEGIDATGGNNQPNIPDIPAHLWYFGLIGTCL

SEQ ID NO: 3479 - protein, 269 aa, Thermomyces lanuginosus
EVSQDLFNQFNLFAQYSAAAYCGKNNDAPAGTNITCTGNACPEVEKADATFLYSFEDSGVGDVTGFLALDNTNKLIVLSFRGSRSTENWIGNLNFDLKEINDICSGCRGHDGFTSSWRSVADTLRQKVEDAVREHPDYRVVFTGHSLGGALATVAGADLRGNGYDIDVFSYGAPRVGNRAFAEFLTVQTGGTLYRITHTNDIVPRLPPREFGYSHSSPEYWIKSGTLVPVTRNDIVKIEGIDATGGNNQPNIPDIPAHLWYFGLIGTCL

SEQ ID NO: 3480 - protein, 269 aa, Synthetic construct
EVSQDLFNQFNLFAQYSAAAYCGKNNDAPAGTNITCTGNACPEVEKADATFLYSFEDSGVGDVTGFLALDNTNKLIVLSFRGSRSIENWIGNLNFDLKEINDICSGCRGHDGFTSSWRSVADTLRQKVEDAVREHPDYRVVFTGHSLGGALATVAGADLRGNGYDIGVFSYGAPRVGNRAFAEFLTVQTGGTLYRITHTNDIVPRLPPREFGYSHSSPEYWIKSGTLVPVTRNDIVKIEGIDATGGNNQPNIPDIPAHLWYFGLIGTCL

SEQ ID NO: 3481 - protein, 269 aa, Thermomyces lanuginosus
EVSQDLFNQFNLFAQYSAAAYCGKNNDAPAGTNITCTGNACPEVEKADATFLYSFEDSGVGDVTGFLALDNTNKLIVLSFRGSRSIENWIGNLNFDLKEINDICSGCRGHDGFTSSWRSVADTLRQKVEDAVREHPDYRVVFTGHSLGGALATVAGADLRGNGYDIDVFSYGAPRVGNRAFAEFLTVQTGGTLYRITHTNDIVPRLPPREFGYSHSSPEYWIKSGTLVPVTRNDIVKIEGIDATGGNNQPNIPDIPAHFWYFGLIGTCL

SEQ ID NO: 3482 - protein, 269 aa, Thermomyces lanuginosus
EVSQDLFNQFNLFAQYSAAAYCGKNNDAPAGTNITCTGNACPEVEKADATFLYSFEDSGVGDVTGFLALDNTNKLIVLSFRGSHSIENWIGNLNFDLKEINDICSGCRGHDGFTSSWRSVADTLRQKVEDAVREHPDYRVVFTGHSLGGALATVAGADLRGNGYDIDVFSYGAPRVGNRAFAEFLTVQTGGTLYRITHTNDIVPRLPPREFGYSHSSPEYWIKSGTLVPVTRNDIVKIEGIDATGGNNQPNIPDIPAHLWYFGLIGTCL

SEQ ID NO: 3483 - protein, 269 aa, Thermomyces lanuginosus
EVSQDLFNQFNLFAQYSAAAYCGKNNDAPAGTNITCTGNACPEVEKADATFLYSFEDSGVGDVTGFLALDNTNKLIVLSFRGSRSIENWIGNLNFDLKEINDICSGCQGHDGFTSSWRSVADTLRQKVEDAVREHPDYRVVFTGHSLGGALATVAGADLRGNGYDIDVFSYGAPRVGNRAFAEFLTVQTGGTLYRITHTNDIVPRLPPREFGYSHSSPEYWIKSGTLVPVTRNDIVKIEGIDATGGNNQPNIPDIPAHLWYFGLIGTCL

SEQ ID NO: 3484 - protein, 269 aa, Thermomyces lanuginosus
EVSQDLFNQFNLFAQYSAAAYCGKNNDAPAGTNITCTGNACPEVEKADATFLYSFEDSGVGDVTGFLALDNTNKLIVLSFRGSRSIENWIGNLNFDLKEINDICSGCRGHDGFTSSWRSVADTLRQKVEDAVREHPDYRVVFTGHSLGGALATVAGADLRGNGYDIDVFSYGAPRVGNRALAEFLTVQTGGTLYRITHTNDIVPRLPPREFGYSHSSPEYWIKSGTLVPVTRNDIVKIEGIDATGGNNQPNIPDIPAHLWYFGLIGTCL

SEQ ID NO: 3485 - protein, 269 aa, Thermomyces lanuginosus
EVSQDLFNQFNLFAQYSAAAYCGKNNDAPAGTNITCTGNACPEVEKADATFLYSFEDSGVGDVTGFLALDNTNKLIVLSFRGSRSIENWIGNLNFDLKEINDICSGCRGHDGFTSSWRSVADTLRQKVEDAVREHPDYRVVFTGHSLGGALATVTGADLRGNGYDIDVFSYGAPRVGNRAFAEFLTVQTGGTLYRITHTNDIVPRLPPREFGYSHSSPEYWIKSGTLVPVTRNDIVKIEGIDATGGNNQPNIPDIPAHLWYFGLIGTCL

SEQ ID NO: 3486 - protein, 269 aa, Thermomyces lanuginosus
EVSQDLFNQFNLFAQYSAAAYCGKNNDAPAGTNITCTGNACPEVEKADATFLYSFEDSGVGDVTGFLALDNTNKLIVLSFRGSRSIENWIGNLNFDLKEINDICSGCRGHDGFTSSWRSVADTLRQKVEDAVREHPDYRVVFTGHSLGGALATVAGADLRGNGYDIDVFSYGAPRVGNRAFAEFLTVQKGGTLYRITHTNDIVPRLPPREFGYSHSSPEYWIKSGTLVPVTRNDIVKIEGIDATGGNNQPNIPDIPAHLWYFGLIGTCL

SEQ ID NO: 3487 - protein, 269 aa, Thermomyces lanuginosus
EVSQDLFNQFNLFAQYSAAAYCGKNNDAPAGTNITCTGNACPEVEKADATFLYSFEDSGVGDVTGFLALDNTNKLIVLSFRGSRSIENWIGNLNFDLKEINDICSGCRGHDGFTSSWRSVADTLRQKVEDAVREHPDYRVVFTGHSLGGALATVSGADLRGNGYDIDVFSYGAPRVGNRAFAEFLTVQTGGTLYRITHTNDIVPRLPPREFGYSHSSPEYWIKSGTLVPVTRNDIVKIEGIDATGGNNQPNIPDIPAHLWYFGLIGTCL

SEQ ID NO: 3488 - protein, 269 aa, Thermomyces lanuginosus
EVSQDLFNQFNLFAQYSAAAYCGKNNDAPAGTNITCTGNACPEVEKADATFLYSFEDSGVGDVTGFLALDNTNKLIVLSFRGSRSIENWIGNLNFDLKEINDICSGCRGHDGFTSSWRSVADTLRQKVEDAVREHPDYRVVFTGHSLGGALATVAGADLRGNGYDIDVFSYGAPRVGNRAFAEFLTVQTGGTLYRITHTNDIVPRLPPREFGYSHSSPEYWIKSRTLVPVTRNDIVKIEGIDATGGNNQPNIPDIPAHLWYFGLIGTCL

SEQ ID NO: 3489 - protein, 269 aa, Thermomyces lanuginosus
EVSQDLFNQFNLFAQYSAAAYCGKNNDAPAGTNITCTGVACPEVEKADATFLYSFEDSGVGDVTGFLALDNTNKLIVLSFRGSRSIENWIGNLNFDLKEINDICSGCRGHDGFTSSWRSVADTLRQKVEDAVREHPDYRVVFTGHSLGGALATVAGADLRGNGYDIDVFSYGAPRVGNRAFAEFLTVQTGGTLYRITHTNDIVPRLPPREFGYSHSSPEYWIKSGTLVPVTRNDIVKIEGIDATGGNNQPNIPDIPAHLWYFGLIGTCL

SEQ ID NO: 3490 - protein, 269 aa, Thermomyces lanuginosus
EVSQDLFNQFNLFAQYSAAAYCGKNNDAPAGTNITCTGNACPEVEKADATFLYSFEDSGVGDVTGFLALDNTNKLIVLSFRGSLSIENWIGNLNFDLKEINDICSGCRGHDGFTSSWRSVADTLRQKVEDAVREHPDYRVVFTGHSLGGALATVAGADLRGNGYDIDVFSYGAPRVGNRAFAEFLTVQTGGTLYRITHTNDIVPRLPPREFGYSHSSPEYWIKSGTLVPVTRNDIVKIEGIDATGGNNQPNIPDIPAHLWYFGLIGTCL

SEQ ID NO: 3491 - protein, 269 aa, Thermomyces lanuginosus
EVSQDLFNQFNLFAQYSAAAYCGKNNDAPAGANITCTGNACPEVEKADATFLYSFEDSGVGDVTGFLALDNTNKLIVLSFRGSRSIENWIGNLNFDLKEINDICSGCRGHDGFTSSWRSVADTLRQKVEDAVREHPDYRVVFTGHSLGGALATVAGADLRGNGYDIDVFSYGAPRVGNRAFAEFLTVQTGGTLYRITHTNDIVPRLPPREFGYSHSSPEYWIKSGTLVPVTRNDIVKIEGIDATGGNNQPNIPDIPAHLWYFGLIGTCL

SEQ ID NO: 3492 - protein, 269 aa, Thermomyces lanuginosus
EVSQDLFNQFNLFAQYSAAAYCGKNNDAPAGTNIECTGNACPEVEKADATFLYSFEDSGVGDVTGFLALDNTNKLIVLSFRGSRSIENWIGNLNFDLKEINDICSGCRGHDGFTSSWRSVADTLRQKVEDAVREHPDYRVVFTGHSLGGALATVAGADLRGNGYDIDVFSYGAPRVGNRAFAEFLTVQTGGTLYRITHTNDIVPRLPPREFGYSHSSPEYWIKSGTLVPVTRNDIVKIEGIDATGGNNQPNIPDIPAHLWYFGLIGTCL

SEQ ID NO: 3493 - protein, 269 aa, Thermomyces lanuginosus
EVSQDLFNQFNLFAQYEAAAYCGKNNDAPAGTNITCTGNACPEVEKADATFLYSFEDSGVGDVTGFLALDNTNKLIVLSFRGSRSIENWIGNLNFDLKEINDICSGCRGHDGFTSSWRSVADTLRQKVEDAVREHPDYRVVFTGHSLGGALATVAGADLRGNGYDIDVFSYGAPRVGNRAFAEFLTVQTGGTLYRITHTNDIVPRLPPREFGYSHSSPEYWIKSGTLVPVTRNDIVKIEGIDATGGNNQPNIPDIPAHLWYFGLIGTCL

SEQ ID NO: 3494 - protein, 269 aa, Thermomyces lanuginosus
EVSQDLFNQFNLFAQYSAAAYCGKNNDAPAGTNITCTGNACPEVEKADATFLYSFEDSGVGDVTGFLALDNTNKLIVLSFRGSRSIENWIGNLNFDLKEINDICSGCRGHDGFTSSWRSVADTLRQKVEDAVREHPDYRVVFTGHSLGGALATVAGADLRGNGVDIDVFSYGAPRVGNRAFAEFLTVQTGGTLYRITHTNDIVPRLPPREFGYSHSSPEYWIKSGTLVPVTRNDIVKIEGIDATGGNNQPNIPDIPAHLWYFGLIGTCL

SEQ ID NO: 3495 - protein, 269 aa, Thermomyces lanuginosus
EVSQDLFNQFNLFAQYSAAAYCGKNNDAPAGTNITCTGNACPEVEKADATFLYSFEDSGVGDVTGFLALDNTNKLIVLSFRGSRSIENWIGNLNFDLKEINDICSGCRGHDGFTSSWRSVADTLRQKVEDAVREHPDYRVVFTGHSLGGALATVAGADLRGNGYDIDVFSYGAPRVGNRAFAEFLTVQTGGTLYRITHTNDIVPRLPPREFGYSHSSPEYWIKSGTLVPVTRNDIVKIEGIDATGGNNQSNIPDIPAHLWYFGLIGTCL

SEQ ID NO: 3496 - protein, 269 aa, Thermomyces lanuginosus
EVSQDLFNQFNLFAQYSAAAYCGKNNDAPAGTNITCTNNACPEVEKADATFLYSFEDSGVGDVTGFLALDNTNKLIVLSFRGSRSIENWIGNLNFDLKEINDICSGCRGHDGFTSSWRSVADTLRQKVEDAVREHPDYRVVFTGHSLGGALATVAGADLRGNGYDIDVFSYGAPRVGNRAFAEFLTVQTGGTLYRITHTNDIVPRLPPREFGYSHSSPEYWIKSGTLVPVTRNDIVKIEGIDATGGNNQPNIPDIPAHLWYFGLIGTCL

SEQ ID NO: 3497 - protein, 269 aa, Thermomyces lanuginosus
EVSQDLFNQFNLFAQYSAAAYCGKNNDAPAGTNITCTGNACPEVEKADATFLYSFEDSGVGDVTGFLALDNTNKLIVLSFRGSRSIENWIGNLNFDLKEINDICSGCRGHDGFTSSWRSVADTLRQKVEDAVREHPDYRVVFTGHSLGGALATVAGADLRGNGYDIDVFSYGAPRVGNRAFAEFLTVQTGGTLYRITHTNDMVPRLPPREFGYSHSSPEYWIKSGTLVPVTRNDIVKIEGIDATGGNNQPNIPDIPAHLWYFGLIGTCL

SEQ ID NO: 3498 - protein, 269 aa, Thermomyces lanuginosus
EVSQDLFNQFNLFAQYSAAAYCGKNNDAPAGTNITCTGNACPEVEKADATFLYSFEDSGVGDVTGFLALDNTNKLIVLSFRGSRSIENWIGNLNFDLKEINDICSGCRGHDGFTSSWRSVADTLRQKVEDAVREHPDYRVVFTGHSLGGALATVAGADLRGNGYDIDVFSYGAPRVGNRAFAEFLTVQTGGTLYRITHTNDIVPRFPPREFGYSHSSPEYWIKSGTLVPVTRNDIVKIEGIDATGGNNQPNIPDIPAHLWYFGLIGTCL

SEQ ID NO: 3499 - protein, 269 aa, Thermomyces lanuginosus
EVSQDLFNQFNLFAQYSAAAYCGKNNDAPAGTNITCTGTACPEVEKADATFLYSFEDSGVGDVTGFLALDNTNKLIVLSFRGSRSIENWIGNLNFDLKEINDICSGCRGHDGFTSSWRSVADTLRQKVEDAVREHPDYRVVFTGHSLGGALATVAGADLRGNGYDIDVFSYGAPRVGNRAFAEFLTVQTGGTLYRITHTNDIVPRLPPREFGYSHSSPEYWIKSGTLVPVTRNDIVKIEGIDATGGNNQPNIPDIPAHLWYFGLIGTCL

SEQ ID NO: 3500 - protein, 269 aa, Thermomyces lanuginosus
EVSQDLFNQFNLFAQYSAAAYCGKNNDAPAGTNITCTGNACPEVEKADATFLYSFEDSGVGDVTGFLALDNTNKLIVLSFRGSRSIENWIGNLNFDLKEINDICSGCRGHDGFTSSWRSVADTLRQKVEDAVREHPDYRVVFTGHSLGGALATVAGADLRGNGYDWDVFSYGAPRVGNRAFAEFLTVQTGGTLYRITHTNDIVPRLPPREFGYSHSSPEYWIKSGTLVPVTRNDIVKIEGIDATGGNNQPNIPDIPAHLWYFGLIGTCL

SEQ ID NO: 3501 - protein, 269 aa, Thermomyces lanuginosus
EVSQDLFNQFNLFAQYSAAAYCGKNNTAPAGTNITCTGNACPEVEKADATFLYSFEDSGVGDVTGFLALDNTNKLIVLSFRGSRSIENWIGNLNFDLKEINDICSGCRGHDGFTSSWRSVADTLRQKVEDAVREHPDYRVVFTGHSLGGALATVAGADLRGNGYDIDVFSYGAPRVGNRAFAEFLTVQTGGTLYRITHTNDIVPRLPPREFGYSHSSPEYWIKSGTLVPVTRNDIVKIEGIDATGGNNQPNIPDIPAHLWYFGLIGTCL

SEQ ID NO: 3502 - protein, 269 aa, Thermomyces lanuginosus
EVSQDLFNQFNLFAQYSAAAYCGKNNDAPLGTNITCTGNACPEVEKADATFLYSFEDSGVGDVTGFLALDNTNKLIVLSFRGSRSIENWIGNLNFDLKEINDICSGCRGHDGFTSSWRSVADTLRQKVEDAVREHPDYRVVFTGHSLGGALATVAGADLRGNGYDIDVFSYGAPRVGNRAFAEFLTVQTGGTLYRITHTNDIVPRLPPREFGYSHSSPEYWIKSGTLVPVTRNDIVKIEGIDATGGNNQPNIPDIPAHLWYFGLIGTCL

SEQ ID NO: 3503 - protein, 269 aa, Thermomyces lanuginosus
EVSQDLFNQFNLFAQYSAAAYCGKNNDAPAGTNITCTGNACPEVEKADATFLLSFEDSGVGDVTGFLALDNTNKLIVLSFRGSRSIENWIGNLNFDLKEINDICSGCRGHDGFTSSWRSVADTLRQKVEDAVREHPDYRVVFTGHSLGGALATVAGADLRGNGYDIDVFSYGAPRVGNRAFAEFLTVQTGGTLYRITHTNDIVPRLPPREFGYSHSSPEYWIKSGTLVPVTRNDIVKIEGIDATGGNNQPNIPDIPAHLWYFGLIGTCL

SEQ ID NO: 3504 - protein, 269 aa, Thermomyces lanuginosus
EVSQDLFNQFNLMAQYSAAAYCGKNNDAPAGTNITCTGNACPEVEKADATFLYSFEDSGVGDVTGFLALDNTNKLIVLSFRGSRSIENWIGNLNFDLKEINDICSGCRGHDGFTSSWRSVADTLRQKVEDAVREHPDYRVVFTGHSLGGALATVAGADLRGNGYDIDVFSYGAPRVGNRAFAEFLTVQTGGTLYRITHTNDIVPRLPPREFGYSHSSPEYWIKSGTLVPVTRNDIVKIEGIDATGGNNQPNIPDIPAHLWYFGLIGTCL

SEQ ID NO: 3505 - protein, 269 aa, Thermomyces lanuginosus
EVSQDLFNQFNLFAQYSAAAYCGKNNDAPAGTNITCTGNACPEVEKADATFLYSFEDSGVGDVTGFLALDNTNKLIVLSFRGSRSIENWIGNLNFDLKEINDICSGCRGHDGFTSSWRSVAETLRQKVEDAVREHPDYRVVFTGHSLGGALATVAGADLRGNGYDIDVFSYGAPRVGNRAFAEFLTVQTGGTLYRITHTNDIVPRLPPREFGYSHSSPEYWIKSGTLVPVTRNDIVKIEGIDATGGNNQPNIPDIPAHLWYFGLIGTCL

SEQ ID NO: 3506 - protein, 269 aa, Thermomyces lanuginosus
EVSQDLFNQFNLFAQYSAAAYCGKNNDAPAGTNITCTGNACPEVEKADATFLYSFEDSGVGDVTGFLALDNTNKLIVLSFRGSRSIENWIGNLNFDLKEINDICSGCRGHDGFTSSWRSVADTLRQKVEDAVREHPDYRVVFTGHSLGGALATVAGADLRGGGYDIDVFSYGAPRVGNRAFAEFLTVQTGGTLYRITHTNDIVPRLPPREFGYSHSSPEYWIKSGTLVPVTRNDIVKIEGIDATGGNNQPNIPDIPAHLWYFGLIGTCL

SEQ ID NO: 3507 - protein, 269 aa, Thermomyces lanuginosus
EVSQDLFNQFNLFAQYSAAAYCGKNNDAPAGTNITCTGNACPEVEKADATFLYSFEDSGVGDVTGFLALDNTNKLIVLSFRGSRSIENWIGNLNFDLKEINDICSGCRGHDGFTSSWRSVADTLRQKVEDAVREHPDYRVVFTGHSLGGALATVAGADLRGNGYDIDVFSYGAPRVGNRAFAEFLTVQTGGTLYRITHTNDIVPRLPPREFGYSHSSPEYWIKSGTLVPVTRNDIVKIEGIDATGGNNQPNIPDIPAHLWYFGRIGTCL

SEQ ID NO: 3508 - protein, 269 aa, Thermomyces lanuginosus
EVSQDLFNQFNLFAQYSAAAYCGKNNDAPAETNITCTGNACPEVEKADATFLYSFEDSGVGDVTGFLALDNTNKLIVLSFRGSRSIENWIGNLNFDLKEINDICSGCRGHDGFTSSWRSVADTLRQKVEDAVREHPDYRVVFTGHSLGGALATVAGADLRGNGYDIDVFSYGAPRVGNRAFAEFLTVQTGGTLYRITHTNDIVPRLPPREFGYSHSSPEYWIKSGTLVPVTRNDIVKIEGIDATGGNNQPNIPDIPAHLWYFGLIGTCL

SEQ ID NO: 3509 - protein, 269 aa, Thermomyces lanuginosus
EVSQDLFNQFNLFAQYSAAAYCGKNNDAPWGTNITCTGNACPEVEKADATFLYSFEDSGVGDVTGFLALDNTNKLIVLSFRGSRSIENWIGNLNFDLKEINDICSGCRGHDGFTSSWRSVADTLRQKVEDAVREHPDYRVVFTGHSLGGALATVAGADLRGNGYDIDVFSYGAPRVGNRAFAEFLTVQTGGTLYRITHTNDIVPRLPPREFGYSHSSPEYWIKSGTLVPVTRNDIVKIEGIDATGGNNQPNIPDIPAHLWYFGLIGTCL

SEQ ID NO: 3510 - protein, 269 aa, Thermomyces lanuginosus
EVSQDLFNQFNLFAQYSAAAYCGKNNDAPAGTNITCTGNACPEVEKADATFLYSFEDSGVGDVTGFLALDNTNKLIVLSFRGSRSIENWIGNLNFDLKEINDICSGCRGHDGFTSSWRSVADTLRQKVEDAVREHPDYRVVFTGHSLGGALATVAGADLRGDGYDIDVFSYGAPRVGNRAFAEFLTVQTGGTLYRITHTNDIVPRLPPREFGYSHSSPEYWIKSGTLVPVTRNDIVKIEGIDATGGNNQPNIPDIPAHLWYFGLIGTCL

SEQ ID NO: 3511 - protein, 269 aa, Thermomyces lanuginosus
EVSQDLFNQFNLFAQYSAAAYCGKNNDAPAGTNITCTGNACPEVEKADATFLYSFEDSGVGDVTGFLALDNTNKLIVLSFRGSRSIENWIGNLNFDLKEINDICSGCRGHDGFTSSWRSVADTLRQKVEDAVREHPDYRVVFTGHSLGGALATVAGADWRGNGYDIDVFSYGAPRVGNRAFAEFLTVQTGGTLYRITHTNDIVPRLPPREFGYSHSSPEYWIKSGTLVPVTRNDIVKIEGIDATGGNNQPNIPDIPAHLWYFGLIGTCL

SEQ ID NO: 3512 - protein, 269 aa, Thermomyces lanuginosus
EVSQDLFNQFNLFAQYSAAAYCGKNNFAPAGTNITCTGNACPEVEKADATFLYSFEDSGVGDVTGFLALDNTNKLIVLSFRGSRSIENWIGNLNFDLKEINDICSGCRGHDGFTSSWRSVADTLRQKVEDAVREHPDYRVVFTGHSLGGALATVAGADLRGNGYDIDVFSYGAPRVGNRAFAEFLTVQTGGTLYRITHTNDIVPRLPPREFGYSHSSPEYWIKSGTLVPVTRNDIVKIEGIDATGGNNQPNIPDIPAHLWYFGLIGTCL

SEQ ID NO: 3513 - protein, 269 aa, Thermomyces lanuginosus
EVSQDLFNQFNLFAQYSAAAYCGKNNDAPAGTNITCTGNACPEVEKADATFLYSFEDSGVGDVTGFLALDNTNKLIVLSFRGSRSIENWIGNLNFDLKEINDICSGCRGHDGFTSSWRSVADTLRQKVEDAVREHPDYRVVFTGHSLGGALATVAGADLRGNGYDIDVFSYGAPRVGNRAFAEFLTVQTGGTLYRITHTNDIVPRXPPREFGYSHSSPEYWIKSGTLVPVTRNDIVKIEGIDATGGNNQPNIPDIPAHLWYFGLIGTCL

SEQ ID NO: 3514 - protein, 269 aa, Thermomyces lanuginosus
EVSQDLFNQFNLFAQYSAAAYCGKNNDAPAGTNITCTGNACPEVEKADATFLYSFEDSGVGDVTGFLALDNTNKLIVLSFRGSRSIENWIGNLNFPLKEINDICSGCRGHDGFTSSWRSVADTLRQKVEDAVREHPDYRVVFTGHSLGGALATVAGADLRGNGYDIDVFSYGAPRVGNRAFAEFLTVQTGGTLYRITHTNDIVPRLPPREFGYSHSSPEYWIKSGTLVPVTRNDIVKIEGIDATGGNNQPNIPDIPAHLWYFGLIGTCL

SEQ ID NO: 3515 - protein, 269 aa, Thermomyces lanuginosus
EVSQDLFNQFNLFAQYSAAAYCGKKNDAPAGTNITCTGNACPEVEKADATFLYSFEDSGVGDVTGFLALDNTNKLIVLSFRGSRSIENWIGNLNFDLKEINDICSGCRGHDGFTSSWRSVADTLRQKVEDAVREHPDYRVVFTGHSLGGALATVAGADLRGNGYDIDVFSYGAPRVGNRAFAEFLTVQTGGTLYRITHTNDIVPRLPPREFGYSHSSPEYWIKSGTLVPVTRNDIVKIEGIDATGGNNQPNIPDIPAHLWYFGLIGTCL

SEQ ID NO: 3516 - protein, 269 aa, Thermomyces lanuginosus
EVSQHLFNQFNLFAQYSAAAYCGKNNDAPAGTNITCTGNACPEVEKADATFLYSFEDSGVGDVTGFLALDNTNKLIVLSFRGSRSIENWIGNLNFDLKEINDICSGCRGHDGFTSSWRSVADTLRQKVEDAVREHPDYRVVFTGHSLGGALATVAGADLRGNGYDIDVFSYGAPRVGNRAFAEFLTVQTGGTLYRITHTNDIVPRLPPREFGYSHSSPEYWIKSGTLVPVTRNDIVKIEGIDATGGNNQPNIPDIPAHLWYFGLIGTCL

SEQ ID NO: 3517 - protein, 269 aa, Thermomyces lanuginosus
EVSQDHFNQFNLFAQYSAAAYCGKNNDAPAGTNITCTGNACPEVEKADATFLYSFEDSGVGDVTGFLALDNTNKLIVLSFRGSRSIENWIGNLNFDLKEINDICSGCRGHDGFTSSWRSVADTLRQKVEDAVREHPDYRVVFTGHSLGGALATVAGADLRGNGYDIDVFSYGAPRVGNRAFAEFLTVQTGGTLYRITHTNDIVPRLPPREFGYSHSSPEYWIKSGTLVPVTRNDIVKIEGIDATGGNNQPNIPDIPAHLWYFGLIGTCL

SEQ ID NO: 3518 - protein, 269 aa, Thermomyces lanuginosus
EVSQDLFNQFNLFAQYSAAAYCGKNNDAPAGTNITCTGNACPEVEKADATFLYSFEDSGVGDVTGFLALDQTNKLIVLSFRGSRSIENWIGNLNFDLKEINDICSGCRGHDGFTSSWRSVADTLRQKVEDAVREHPDYRVVFTGHSLGGALATVAGADLRGNGYDIDVFSYGAPRVGNRAFAEFLTVQTGGTLYRITHTNDIVPRLPPREFGYSHSSPEYWIKSGTLVPVTRNDIVKIEGIDATGGNNQPNIPDIPAHLWYFGLIGTCL

SEQ ID NO: 3519 - protein, 269 aa, Thermomyces lanuginosus
EVSQDLFNQFNLFAQYSAAAYCGKNNDAPAGTNITCTGNACPEVEKADATFLYSFEDSGVGDVTGFLALDNTNKLIVLSFRGSRSIENWIGNLNFDLKEINDICSGCRGHDGFTISWRSVADTLRQKVEDAVREHPDYRVVFTGHSLGGALATVAGADLRGNGYDIDVFSYGAPRVGNRAFAEFLTVQTGGTLYRITHTNDIVPRLPPREFGYSHSSPEYWIKSGTLVPVTRNDIVKIEGIDATGGNNQPNIPDIPAHLWYFGLIGTCL

SEQ ID NO: 3520 - protein, 269 aa, Thermomyces lanuginosus
EVSQDLFNQFNLFAQYSAAAYCGKNNDAPAGTNITCTGNACPEVEKADATFLYSFEDSGVADVTGFLALDNTNKLIVLSFRGSRSIENWIGNLNFDLKEINDICSGCRGHDGFTSSWRSVADTLRQKVEDAVREHPDYRVVFTGHSLGGALATVAGADLRGNGYDIDVFSYGAPRVGNRAFAEFLTVQTGGTLYRITHTNDIVPRLPPREFGYSHSSPEYWIKSGTLVPVTRNDIVKIEGIDATGGNNQPNIPDIPAHLWYFGLIGTCL

SEQ ID NO: 3521 - protein, 269 aa, Thermomyces lanuginosus
EVSQDLFNQFNLFAQYSAAAYCGKNNDAPAGTNITCTGNACPEVEKADATFLYSFEDSGVGDVTGFLALDNTNKLIVLSFRGSRSIENWIGNLNFDLKEINDICSGCRGHDGFTVSWRSVADTLRQKVEDAVREHPDYRVVFTGHSLGGALATVAGADLRGNGYDIDVFSYGAPRVGNRAFAEFLTVQTGGTLYRITHTNDIVPRLPPREFGYSHSSPEYWIKSGTLVPVTRNDIVKIEGIDATGGNNQPNIPDIPAHLWYFGLIGTCL

SEQ ID NO: 3522 - protein, 269 aa, Thermomyces lanuginosus
EVSQDLFNQFNLFAQYSAAAYCGKNNDAPAGTNITCTGNACPEVEKADATFLYSFEDSGVGDVTGFLALDNTNKLIVLSFRGSRSIENWIGNLNFDLKEINDICSGCRGHDGFTSSWRSVADTLRQKVEDAKREHPDYRVVFTGHSLGGALATVAGADLRGNGYDIDVFSYGAPRVGNRAFAEFLTVQTGGTLYRITHTNDIVPRLPPREFGYSHSSPEYWIKSGTLVPVTRNDIVKIEGIDATGGNNQPNIPDIPAHLWYFGLIGTCL

SEQ ID NO: 3523 - protein, 269 aa, Thermomyces lanuginosus
EVSQDLFNQFNLFAQYSAAAYCGKNNDAPAGTNITCTGNACPEVEKADATFLYSFEDSGVGDVTGFLALDNTNKLIVLSFRGSRSIENWIGNLNFDLKEINDICSGCRGHDGFTSSWRSVADTLRQKVEDAVREHPDYRVVFTGHSLGGALATVAGADLRGNGYDIDVFSYGAPRVGNRAFAEFLTVRTGGTLYRITHTNDIVPRLPPREFGYSHSSPEYWIKSGTLVPVTRNDIVKIEGIDATGGNNQPNIPDIPAHLWYFGLIGTCL

SEQ ID NO: 3524 - protein, 269 aa, Thermomyces lanuginosus
EVSQDLFNQFNLFAQYSAAAYCGKNNDAPAGTNITCTGNACPEVEKADATFLYSFEDSGVGDVTGFLALDNTNKLIVLSFRGSRSIENWIGNLNFDLKEINDICSGCRGHDGFTSSWRSVADTLRQKVEDAVREHPDYRVVFTGHSLGGALATVAGADLRGNGYDIDVFSYGAPRVGNRAFAEFLTVQTGGTLYRITHTNDIVPRLPPREFGYSHSSPEYWIKSGTLVPVTINDIVKIEGIDATGGNNQPNIPDIPAHLWYFGLIGTCL

SEQ ID NO: 3525 - protein, 269 aa, Thermomyces lanuginosus
EVSQDLFNQFNLFAQYSAAAYCGKNNDAPAGTNITCTGNACPEVEKADATFLYSFEDSGVGDVTGFLALDNTNKLIVLSFRGSRSIENWIGNLNFDLKEINDICSGCRGHDGFTSSWRSVADTLRQKVEDAVREHPDYRVVFTGHSLGGALATVAGADLRGNGYDIDVFSYGAPRVGNRAFAEFLTVQTGLTLYRITHTNDIVPRLPPREFGYSHSSPEYWIKSGTLVPVTRNDIVKIEGIDATGGNNQPNIPDIPAHLWYFGLIGTCL

SEQ ID NO: 3526 - protein, 269 aa, Thermomyces lanuginosus
EVSQDLFNQFNLFAQYSAAAYCGKNNDAPAGTNITCTGNACPEVEKADATFLYSFEDSGVGDVTGFLALDNTNKLIVLSFRGSRSIENWIGNLNFDLKEINDICSGCRGHDGFTSSWRSVADTLRQKVEDAVREHPHYRVVFTGHSLGGALATVAGADLRGNGYDIDVFSYGAPRVGNRAFAEFLTVQTGGTLYRITHTNDIVPRLPPREFGYSHSSPEYWIKSGTLVPVTRNDIVKIEGIDATGGNNQPNIPDIPAHLWYFGLIGTCL

SEQ ID NO: 3527 - protein, 269 aa, Thermomyces lanuginosus
EVSQDLFNQFNLFAQYSAAAYCGKNNDAPAGTNITCTGNACPEVEKADATFLYSFEDSGVGDVTGFLALDNPNKLIVLSFRGSRSIENWIGNLNFDLKEINDICSGCRGHDGFTSSWRSVADTLRQKVEDAVREHPDYRVVFTGHSLGGALATVAGADLRGNGYDIDVFSYGAPRVGNRAFAEFLTVQTGGTLYRITHTNDIVPRLPPREFGYSHSSPEYWIKSGTLVPVTRNDIVKIEGIDATGGNNQPNIPDIPAHLWYFGLIGTCL

SEQ ID NO: 3528 - protein, 269 aa, Thermomyces lanuginosus
EVSQDLFNQFNLFAQYSAAAYCGKNNDAPAGTNITCTGNACPEVEKADATFLYSFEDSGVGDVTGFLALDNTNKLIVLSFRGSRSIENWIGNLNFDLKEINDICSGCRGHDGFTSSWRSVADTLRQKVEDAVREHPDYRVVFTGHSLGGALATVAGADLRGNGYDIDVFSYGAPRVGNRAFAEFLTVQTGGTLYRITHTNDIVPRLPPRXFGYSHSSPEYWIKSGTLVPVTRNDIVKIEGIDATGGNNQPNIPDIPAHLWYFGLIGTCL

SEQ ID NO: 3529 - protein, 269 aa, Thermomyces lanuginosus
EVSQDLFNQFNLFAQYSAAAYCGRNNDAPAGTNITCTGNACPEVEKADATFLYSFEDSGVGDVTGFLALDNTNKLIVLSFRGSRSIENWIGNLNFDLKEINDICSGCRGHDGFTSSWRSVADTLRQKVEDAVREHPDYRVVFTGHSLGGALATVAGADLRGNGYDIDVFSYGAPRVGNRAFAEFLTVQTGGTLYRITHTNDIVPRLPPREFGYSHSSPEYWIKSGTLVPVTRNDIVKIEGIDATGGNNQPNIPDIPAHLWYFGLIGTCL

SEQ ID NO: 3530 - protein, 269 aa, Thermomyces lanuginosus
EVSQDLFNQFNLFAQYSAAAYCGKNNDAPAGTNITCTGNACPEVEKADATFLYSFEDSGVGDVTGFLALDNTNKLIVLSFRGSRSIENWIGNLNFDLKEINDICSGCRGHDGFTSSWRSVADTLRQKVEDAVFEHPDYRVVFTGHSLGGALATVAGADLRGNGYDIDVFSYGAPRVGNRAFAEFLTVQTGGTLYRITHTNDIVPRLPPREFGYSHSSPEYWIKSGTLVPVTRNDIVKIEGIDATGGNNQPNIPDIPAHLWYFGLIGTCL

SEQ ID NO: 3531 - protein, 269 aa, Thermomyces lanuginosus
EVSQDLFNQFNLFAQYSAAAYCGKNNDAPAGTNITCTKNACPEVEKADATFLYSFEDSGVGDVTGFLALDNTNKLIVLSFRGSRSIENWIGNLNFDLKEINDICSGCRGHDGFTSSWRSVADTLRQKVEDAVREHPDYRVVFTGHSLGGALATVAGADLRGNGYDIDVFSYGAPRVGNRAFAEFLTVQTGGTLYRITHTNDIVPRLPPREFGYSHSSPEYWIKSGTLVPVTRNDIVKIEGIDATGGNNQPNIPDIPAHLWYFGLIGTCL

SEQ ID NO: 3532 - protein, 269 aa, Thermomyces lanuginosus
EVSQDLFNQFNLFAQYSAAAYCGKNNDAPAGTNITCTGNACPEVEKADATFLYSFEDSGVGDVTGFLALDNTNKLIVLSFRGSRSIENWIGNLNFDLKEINDICSGCRGHDGFTSSWRSVADTLRQKVEDAVREHPDYRVVFTGHSLGGALATVAGADLRGNGYDIDVFSYGAPRVGNRAFAEFLTSQTGGTLYRITHTNDIVPRLPPREFGYSHSSPEYWIKSGTLVPVTRNDIVKIEGIDATGGNNQPNIPDIPAHLWYFGLIGTCL

SEQ ID NO: 3533 - protein, 269 aa, Thermomyces lanuginosus
EVSQDLFNQFNLFAQYSAAAYCGKNNDAPAGTNITCTGNACPEVEKADHTFLYSFEDSGVGDVTGFLALDNTNKLIVLSFRGSRSIENWIGNLNFDLKEINDICSGCRGHDGFTSSWRSVADTLRQKVEDAVREHPDYRVVFTGHSLGGALATVAGADLRGNGYDIDVFSYGAPRVGNRAFAEFLTVQTGGTLYRITHTNDIVPRLPPREFGYSHSSPEYWIKSGTLVPVTRNDIVKIEGIDATGGNNQPNIPDIPAHLWYFGLIGTCL

SEQ ID NO: 3534 - protein, 269 aa, Thermomyces lanuginosus
EVSQDLFNQFNLFAQYSAAAYCGKNNDAPAGTNITCTGNACPEVEKADATFLYSFEDSGVGDVTGFLALDNTNKLIVLSFRGSRSIENWIGNLNFDLKEINDICSGCRGHDGFTSSWRSVADTLRQKVEDAVREHPDYRVVFTGHSLGGALATVAGAYLRGNGYDIDVFSYGAPRVGNRAFAEFLTVQTGGTLYRITHTNDIVPRLPPREFGYSHSSPEYWIKSGTLVPVTRNDIVKIEGIDATGGNNQPNIPDIPAHLWYFGLIGTCL

SEQ ID NO: 3535 - protein, 269 aa, Thermomyces lanuginosus
EVDQDLFNQFNLFAQYSAAAYCGKNNDAPAGTNITCTGNACPEVEKADATFLYSFEDSGVGDVTGFLALDNTNKLIVLSFRGSRSIENWIGNLNFDLKEINDICSGCRGHDGFTSSWRSVADTLRQKVEDAVREHPDYRVVFTGHSLGGALATVAGADLRGNGYDIDVFSYGAPRVGNRAFAEFLTVQTGGTLYRITHTNDIVPRLPPREFGYSHSSPEYWIKSGTLVPVTRNDIVKIEGIDATGGNNQPNIPDIPAHLWYFGLIGTCL

SEQ ID NO: 3536 - protein, 269 aa, Thermomyces lanuginosus
EVSQDLFNQFNLFAQYSAAAYCGKNNDAPAGTNITCTGNACPEVEKADATFLYSFEDSGVGDVTGFLALDNTNKLIVLSFRGSRSIENWIGNLNFDLKEINDICSGCRGHDGFTNSWRSVADTLRQKVEDAVREHPDYRVVFTGHSLGGALATVAGADLRGNGYDIDVFSYGAPRVGNRAFAEFLTVQTGGTLYRITHTNDIVPRLPPREFGYSHSSPEYWIKSGTLVPVTRNDIVKIEGIDATGGNNQPNIPDIPAHLWYFGLIGTCL

SEQ ID NO: 3537 - protein, 269 aa, Thermomyces lanuginosus
EVSQDLFNQFNLFAQYSAAAYCGKNNDAPAGTNITCTGNACPEVEKADATFLYSFEDSGVGDVTGFLALDNTNKLIVLSFRGSRSIENWIGNLNFDLKEINDICSGCRGHDGFTSSWRSVADTLRQKVEDAVREHPDYRMVFTGHSLGGALATVAGADLRGNGYDIDVFSYGAPRVGNRAFAEFLTVQTGGTLYRITHTNDIVPRLPPREFGYSHSSPEYWIKSGTLVPVTRNDIVKIEGIDATGGNNQPNIPDIPAHLWYFGLIGTCL

SEQ ID NO: 3538 - protein, 269 aa, Thermomyces lanuginosus
EVSQDLFNQFNLFAQYSAAAYCGKNNDAPADTNITCTGNACPEVEKADATFLYSFEDSGVGDVTGFLALDNTNKLIVLSFRGSRSIENWIGNLNFDLKEINDICSGCRGHDGFTSSWRSVADTLRQKVEDAVREHPDYRVVFTGHSLGGALATVAGADLRGNGYDIDVFSYGAPRVGNRAFAEFLTVQTGGTLYRITHTNDIVPRLPPREFGYSHSSPEYWIKSGTLVPVTRNDIVKIEGIDATGGNNQPNIPDIPAHLWYFGLIGTCL

SEQ ID NO: 3539 - protein, 269 aa, Thermomyces lanuginosus
EVSQDLFNQFNLFAQYSAAAYCGKNNDAPAGTFITCTGNACPEVEKADATFLYSFEDSGVGDVTGFLALDNTNKLIVLSFRGSRSIENWIGNLNFDLKEINDICSGCRGHDGFTSSWRSVADTLRQKVEDAVREHPDYRVVFTGHSLGGALATVAGADLRGNGYDIDVFSYGAPRVGNRAFAEFLTVQTGGTLYRITHTNDIVPRLPPREFGYSHSSPEYWIKSGTLVPVTRNDIVKIEGIDATGGNNQPNIPDIPAHLWYFGLIGTCL

SEQ ID NO: 3540 - protein, 269 aa, Thermomyces lanuginosus
EVSQDLFNQFNLFAQYSAAAYCGKNNDAPAGTNITCTGNACPEVEKADATFLYSFEDSGVGDVTGFLALDNTNQLIVLSFRGSRSIENWIGNLNFDLKEINDICSGCRGHDGFTSSWRSVADTLRQKVEDAVREHPDYRVVFTGHSLGGALATVAGADLRGNGYDIDVFSYGAPRVGNRAFAEFLTVQTGGTLYRITHTNDIVPRLPPREFGYSHSSPEYWIKSGTLVPVTRNDIVKIEGIDATGGNNQPNIPDIPAHLWYFGLIGTCL

SEQ ID NO: 3541 - protein, 269 aa, Thermomyces lanuginosus
EVSQDLFNQFNLFAQYSAAAYCGKNNDAPAGTNITCTGNACPEVEKADATFLYSFEDSGVGDVTGFLALDNTNKLIVLSFRGSRSIENWIGNLNFDLKEINDICSGCRGHDGFTSSWRSVADTLRQKVEDAVREHPDYRVVFTGHSLGGALATVAGADLRGNGYDIDVFSYGAPRVGNRAFAEFLTVQTGGTLYRITHTNDIVPRLPPREFGYSHSSPEYWIKSGTLVPVTRNDIVKIEGIDATGGNNQPNAPDIPAHLWYFGLIGTCL

SEQ ID NO: 3542 - protein, 269 aa, Thermomyces lanuginosus
EVSQDLFNQFNLFAQYSAAAYCGKNNDAPAGTNITCTGNACPEVEKADATFLYSFEDSGVGDVTGFLALDNTNKLIVLSFRGSRSIENWIGNLNFDLKEINDICSGCRGHDGFTSSWRSVADTLRQKVEDAVREHPDYRVVFTGHSLGGALATVAGADLRGNGYDIDVFSYGAPRVGNRAFAEFLTVQTGGTLYRITHTNDIVPRLPPREFGYSHSSPEYWIKSGTLVPVTRNDIVKIEGIDATGGNNQPNIPDIPAHYWYFGLIGTCL

SEQ ID NO: 3543 - protein, 269 aa, Thermomyces lanuginosus
EVSQDLFNQFNLFAQYSAAAYCGKNNDAPAGTNITCTGNACPEVEKADATFLYSFEDSGVGDVTGFLALDNTNKLIVLSFRGSRSIENWIGNLNFDLKEINDICSGCRGHDGFTSSWRSVADTLRQKVEDAVREHPDYRVVFTGHSLGGALATVAGADQRGNGYDIDVFSYGAPRVGNRAFAEFLTVQTGGTLYRITHTNDIVPRLPPREFGYSHSSPEYWIKSGTLVPVTRNDIVKIEGIDATGGNNQPNIPDIPAHLWYFGLIGTCL

SEQ ID NO: 3544 - protein, 269 aa, Thermomyces lanuginosus
EVSQDLFNQFNLFAQYSAAAYCGKNNDAPAGTNITCTGNACPEVEKADATFLYSFEDSGVGDVTGFLALDNTNKLIVLSFRGSRSIENWIGNLNFDLKEINDICSGCRGHDGFTSSWRSVADTLRQKVEDAVREHPDYRVVFTGHSLGGALATVAGADLRGNGYDIDVFSYGAPRVGNRAFAEFLTVQTGGPLYRITHTNDIVPRLPPREFGYSHSSPEYWIKSGTLVPVTRNDIVKIEGIDATGGNNQPNIPDIPAHLWYFGLIGTCL

SEQ ID NO: 3545 - protein, 269 aa, Thermomyces lanuginosus
EVSQDLFNQFNLQAQYSAAAYCGKNNDAPAGTNITCTGNACPEVEKADATFLYSFEDSGVGDVTGFLALDNTNKLIVLSFRGSRSIENWIGNLNFDLKEINDICSGCRGHDGFTSSWRSVADTLRQKVEDAVREHPDYRVVFTGHSLGGALATVAGADLRGNGYDIDVFSYGAPRVGNRAFAEFLTVQTGGTLYRITHTNDIVPRLPPREFGYSHSSPEYWIKSGTLVPVTRNDIVKIEGIDATGGNNQPNIPDIPAHLWYFGLIGTCL

SEQ ID NO: 3546 - protein, 269 aa, Thermomyces lanuginosus
EVSQDLFNQFNLFAQYSAAAYCGKNNDAPAGTNITCTGNACPEVEKADATFLYSFEDSGVGDVTGFLALDNTNKLIVLSFRGSRSIENWIGNLNFDLKEINDICSGCRGHDGFTSSWRSVAHTLRQKVEDAVREHPDYRVVFTGHSLGGALATVAGADLRGNGYDIDVFSYGAPRVGNRAFAEFLTVQTGGTLYRITHTNDIVPRLPPREFGYSHSSPEYWIKSGTLVPVTRNDIVKIEGIDATGGNNQPNIPDIPAHLWYFGLIGTCL

SEQ ID NO: 3547 - protein, 269 aa, Thermomyces lanuginosus
EVSQDLFNQFNLFAQYSAAAYCGKNNDAPAGTNITCTGNACPEVEKADATFLYSFEDSGVGDVTGFLALDNTNKLIVLSFRGSRSIENWIGNLNFDLKEINDICSGCRGHDGFTSSWRSIADTLRQKVEDAVREHPDYRVVFTGHSLGGALATVAGADLRGNGYDIDVFSYGAPRVGNRAFAEFLTVQTGGTLYRITHTNDIVPRLPPREFGYSHSSPEYWIKSGTLVPVTRNDIVKIEGIDATGGNNQPNIPDIPAHLWYFGLIGTCL

SEQ ID NO: 3548 - protein, 269 aa, Thermomyces lanuginosus
EVSQDLFNQFNLFAQYSAAAYCGKNNDAPAGTNITCTGNACPEVEKADATFLYSFEDSGVGDVTGFLALDNTNKLIVLSFRGSRSIENWIGNLNFDLKEINDICSGCRGHDGFTSSWRSVADTLRQKVEDAVREHPDYRVVFTGHSLGGALATVAGADLRGNGYDIDVFSYGAPRVGNRAFAEFLTVQTGGTLYRITHTNDIVPRLPPREFGYSHSSPEYWIKSGTLVPVTRNDIVKIEGIDATGGNNQPNIPDIPAHLWYFGLMGTCL

SEQ ID NO: 3549 - protein, 269 aa, Thermomyces lanuginosus
EVSQDLFNQFNLFAQYSACAYCGKNNDAPAGTNITCTGNACPEVEKADATFLYSFEDSGVGDVTGFLALDNTNKLIVLSFRGSRSIENWIGNLNFDLKEINDICSGCRGHDGFTSSWRSVADTLRQKVEDAVREHPDYRVVFTGHSLGGALATVAGADLRGNGYDIDVFSYGAPRVGNRAFAEFLTVQTGGTLYRITHTNDIVPRLPPREFGYSHSSPEYWIKSGTLVPVTRNDIVKIEGIDATGGNNQPNIPDIPAHLWYFGLIGTCL

SEQ ID NO: 3550 - protein, 269 aa, Thermomyces lanuginosus
EVSQDLFNQFNLFAQYSAAAYCGKNNDAPAGTNITCTGNACPEVEKADATFLYSFEDSGVGDVTGFLALDNTNKLIVLSFRGSRSIENWIGNLNFDLKEINDICSGCRGHDGFTSSWRSVADTLRQKVEDAVREHPDYRVVFTGHSLGGALATVAGADLRGNGYDIDVFSYGAPRVGNRAFAEFLTVQTGGTLYRITHTNDIXPRLPPREFGYSHSSPEYWIKSGTLVPVTRNDIVKIEGIDATGGNNQPNIPDIPAHLWYFGLIGTCL

SEQ ID NO: 3551 - protein, 269 aa, Thermomyces lanuginosus
EVSQDLFNQFNLFAQYSAAAYCGKNNDAPAGTNITCTGNACPEVEKADATFLYSFEDSGVGDVTGFLALDNTNKLIVLSFRGSRSIENWIGNLNFDLKEINDICSGCRGHDGFTSSWRSVADTLRQKVEDAVREHPDYRVVFTGHSLGGALATVGGADLRGNGYDIDVFSYGAPRVGNRAFAEFLTVQTGGTLYRITHTNDIVPRLPPREFGYSHSSPEYWIKSGTLVPVTRNDIVKIEGIDATGGNNQPNIPDIPAHLWYFGLIGTCL

SEQ ID NO: 3552 - protein, 269 aa, Thermomyces lanuginosus
EVSQDLFNQFNLFAQYSAAAYCGKNNDAPAGTNITCTGNACPEVEKADATFLYSFEDSGVGDVTGFLALDNTNKLIVLSFRGSRSIENWIGNLNFDLKEINDICSGCRGHDGFTSSWRSVADTLRQKVEDAVREHPDYRVVFTGHSLGGALATVAGADLRGQGYDIDVFSYGAPRVGNRAFAEFLTVQTGGTLYRITHTNDIVPRLPPREFGYSHSSPEYWIKSGTLVPVTRNDIVKIEGIDATGGNNQPNIPDIPAHLWYFGLIGTCL

SEQ ID NO: 3553 - protein, 269 aa, Thermomyces lanuginosus
EVSQDLFNQFNLFAQYSAAAYCGKNNDAPAGTNITCTGNACPEVEKADATFLYSFEDSGVGDVTGFLALDNTNKLIVLSFRGSRSIENWIGNLNFDLKEINDICSGCRGHDGFTSSWRSVADTLRQKVEDWVREHPDYRVVFTGHSLGGALATVAGADLRGNGYDIDVFSYGAPRVGNRAFAEFLTVQTGGTLYRITHTNDIVPRLPPREFGYSHSSPEYWIKSGTLVPVTRNDIVKIEGIDATGGNNQPNIPDIPAHLWYFGLIGTCL

SEQ ID NO: 3554 - protein, 269 aa, Thermomyces lanuginosus
EVSQDLFNQFNLFAQYSAAAYCGKNNDAPAGTNITCTGNACPEVEKADATFLGSFEDSGVGDVTGFLALDNTNKLIVLSFRGSRSIENWIGNLNFDLKEINDICSGCRGHDGFTSSWRSVADTLRQKVEDAVREHPDYRVVFTGHSLGGALATVAGADLRGNGYDIDVFSYGAPRVGNRAFAEFLTVQTGGTLYRITHTNDIVPRLPPREFGYSHSSPEYWIKSGTLVPVTRNDIVKIEGIDATGGNNQPNIPDIPAHLWYFGLIGTCL

SEQ ID NO: 3555 - protein, 269 aa, Thermomyces lanuginosus
EVHQDLFNQFNLFAQYSAAAYCGKNNDAPAGTNITCTGNACPEVEKADATFLYSFEDSGVGDVTGFLALDNTNKLIVLSFRGSRSIENWIGNLNFDLKEINDICSGCRGHDGFTSSWRSVADTLRQKVEDAVREHPDYRVVFTGHSLGGALATVAGADLRGNGYDIDVFSYGAPRVGNRAFAEFLTVQTGGTLYRITHTNDIVPRLPPREFGYSHSSPEYWIKSGTLVPVTRNDIVKIEGIDATGGNNQPNIPDIPAHLWYFGLIGTCL

SEQ ID NO: 3556 - protein, 269 aa, Thermomyces lanuginosus
EVSQDLFNQFNLFAQYSAAAYCGKNNDAPAGTNITCTGNACPEVEKADATFLYSFEDSGVGDVTGFLALDNTNKLIVLSFRGSRSIENWIGNLNFDLKEINDICSGCRGHDGFTSSWRSVADTLRQKVEDAVREHPDYRVVFTGHSLGGALATVAGADLRGNGYDIDVFSYGAPRVGNRAFAEYLTVQTGGTLYRITHTNDIVPRLPPREFGYSHSSPEYWIKSGTLVPVTRNDIVKIEGIDATGGNNQPNIPDIPAHLWYFGLIGTCL

SEQ ID NO: 3557 - protein, 269 aa, Thermomyces lanuginosus
EVGQDLFNQFNLFAQYSAAAYCGKNNDAPAGTNITCTGNACPEVEKADATFLYSFEDSGVGDVTGFLALDNTNKLIVLSFRGSRSIENWIGNLNFDLKEINDICSGCRGHDGFTSSWRSVADTLRQKVEDAVREHPDYRVVFTGHSLGGALATVAGADLRGNGYDIDVFSYGAPRVGNRAFAEFLTVQTGGTLYRITHTNDIVPRLPPREFGYSHSSPEYWIKSGTLVPVTRNDIVKIEGIDATGGNNQPNIPDIPAHLWYFGLIGTCL

SEQ ID NO: 3558 - protein, 269 aa, Thermomyces lanuginosus
EVSQDLFNQFNLFAQYSAAAYCGKNNDAPAGTNITCTGNACPEVEKADATFLYSFEDSGVGDVTGFLALDNTNKLIVLSFRGSRSIENWIGNLNFDLKEINDICSGCRGHDGFTSSWRSVADTLNQKVEDAVREHPDYRVVFTGHSLGGALATVAGADLRGNGYDIDVFSYGAPRVGNRAFAEFLTVQTGGTLYRITHTNDIVPRLPPREFGYSHSSPEYWIKSGTLVPVTRNDIVKIEGIDATGGNNQPNIPDIPAHLWYFGLIGTCL

SEQ ID NO: 3559 - protein, 269 aa, Thermomyces lanuginosus
EVSQDLFNQFNLFAQYSAAAYCGKNNDAPAGTNITCTGNACPEVEKADATFLYSFEDSGVGDVTGFLALDNTNKLIVLSFRGSRSIENWIGNLNFDLKEINDICSGCRGHDGFTSSWRSVADTLRQKVEDAVREHPDYRVVFTGHSLGGALATVAGADLRGPGYDIDVFSYGAPRVGNRAFAEFLTVQTGGTLYRITHTNDIVPRLPPREFGYSHSSPEYWIKSGTLVPVTRNDIVKIEGIDATGGNNQPNIPDIPAHLWYFGLIGTCL

SEQ ID NO: 3560 - protein, 269 aa, Thermomyces lanuginosus
EVSQDLFNQFNLFAQYSAAAYCGKNNDAPAGTNITCTGNACPEVEKADATFLYSFEDSGVGDVTGFLALDNTNKLIVLSFRGSRSIENWIGNLNFDLKEINDICSGCRGHDGFTSSWRSVADTLRQKVEDAVREHPDYRVVFTGHSLGGALATVAGADLRGNGYDIDVFSYGAPRVGNRAFAEFLTVQTGGTLYRITHTNDIVPRLPPREFGYSHSSPEYWIKSGTLVPVTRNDIVKIEGIDATGGNNQENIPDIPAHLWYFGLIGTCL

SEQ ID NO: 3561 - protein, 269 aa, Thermomyces lanuginosus
EVSQDLFNQFNLFAQYSAAAYCGKNNDAPAGTNITCTGNACPEVEKADATFLYSFEDSGVGDVTGFLALDNTNKLIVLSFRGSRSIENWIGNLNFDLKEINDICSGCRGHDGFTSSWRSVADTLRQKVEDAVREHPDYRVVFTGHSLGGALATVAGADLRGNGYDIDVFSYGAPRVGNRAFAEFLTVQVGGTLYRITHTNDIVPRLPPREFGYSHSSPEYWIKSGTLVPVTRNDIVKIEGIDATGGNNQPNIPDIPAHLWYFGLIGTCL

SEQ ID NO: 3562 - protein, 269 aa, Thermomyces lanuginosus
EVSQDLFNQFNLFAQYSAAAYCGKNNDAPAGTNITCTGNACPEVEKTDATFLYSFEDSGVGDVTGFLALDNTNKLIVLSFRGSRSIENWIGNLNFDLKEINDICSGCRGHDGFTSSWRSVADTLRQKVEDAVREHPDYRVVFTGHSLGGALATVAGADLRGNGYDIDVFSYGAPRVGNRAFAEFLTVQTGGTLYRITHTNDIVPRLPPREFGYSHSSPEYWIKSGTLVPVTRNDIVKIEGIDATGGNNQPNIPDIPAHLWYFGLIGTCL

SEQ ID NO: 3563 - protein, 269 aa, Thermomyces lanuginosus
EVSQDLFNQFNLFAQYSAAAYCGKNNDAPAGTNITCTGNACPEVEKADATFLYSFEDSGVGDVTGFLALDNTNKLIVLSFRGSRSIENWIGNLNFDLKEINDICSGCRGHDGFTSSWRSVADELRQKVEDAVREHPDYRVVFTGHSLGGALATVAGADLRGNGYDIDVFSYGAPRVGNRAFAEFLTVQTGGTLYRITHTNDIVPRLPPREFGYSHSSPEYWIKSGTLVPVTRNDIVKIEGIDATGGNNQPNIPDIPAHLWYFGLIGTCL

SEQ ID NO: 3564 - protein, 269 aa, Thermomyces lanuginosus
EVSQDLFNQFNLFAQYSAAAYCGKNNDAPAGTNITCTGNACPEVEKADATFLYSFEDSGVGDVTGFLALDNTNKLIVLSFRGSRSIENWIGNLNFDLKEINDICSGCRGHDGFTSSWRSVADTLRQKVEDAVREHPDYRVVFTGHSLGGALATVAGADLRGNGYDIDVFSYGAPRVGNRAFAEFLTVQTGGTLYRITHTNDIVPRLPPREFGYSHSSPEYWIKSGTLVPVTRNDIVKIEGIDATGGNNQPNIPDIPAHLWYFGMIGTCL

SEQ ID NO: 3565 - protein, 269 aa, Thermomyces lanuginosus
EVSQDLFNQFNLFAQYSAAAYCGKNNDAPAGTNITCTGNACPEVEKADATFLYSFEDSGVGDVEGFLALDNTNKLIVLSFRGSRSIENWIGNLNFDLKEINDICSGCRGHDGFTSSWRSVADTLRQKVEDAVREHPDYRVVFTGHSLGGALATVAGADLRGNGYDIDVFSYGAPRVGNRAFAEFLTVQTGGTLYRITHTNDIVPRLPPREFGYSHSSPEYWIKSGTLVPVTRNDIVKIEGIDATGGNNQPNIPDIPAHLWYFGLIGTCL

SEQ ID NO: 3566 - protein, 269 aa, Thermomyces lanuginosus
EVSQDLFNQFNLFAQYSAAAYCGKNNDAPAGTNITCTGNACPEVEKADATFLYSFEDSGVGDVKGFLALDNTNKLIVLSFRGSRSIENWIGNLNFDLKEINDICSGCRGHDGFTSSWRSVADTLRQKVEDAVREHPDYRVVFTGHSLGGALATVAGADLRGNGYDIDVFSYGAPRVGNRAFAEFLTVQTGGTLYRITHTNDIVPRLPPREFGYSHSSPEYWIKSGTLVPVTRNDIVKIEGIDATGGNNQPNIPDIPAHLWYFGLIGTCL

SEQ ID NO: 3567 - protein, 269 aa, Thermomyces lanuginosus
EVSQDLFNQFNLFAQYSAAAYCGKNNDAPAGTNITCTGNACPEVEKADATFLYSFEDSGVGDVTGFLALDNTNKLIVLSFRGSRSIENWIGNRNFDLKEINDICSGCRGHDGFTSSWRSVADTLRQKVEDAVREHPDYRVVFTGHSLGGALATVAGADLRGNGYDIDVFSYGAPRVGNRAFAEFLTVQTGGTLYRITHTNDIVPRLPPREFGYSHSSPEYWIKSGTLVPVTRNDIVKIEGIDATGGNNQPNIPDIPAHLWYFGLIGTCL

SEQ ID NO: 3568 - protein, 269 aa, Thermomyces lanuginosus
EVSQDLFNQFNLFAQYSAAAYCGKNNDAPAGTNITCTGNACPEVEKADATFLYSFEDSGVGDVTGFLALDNTNKLIVLSFRGSRSIENWIGNLNFDLKEINDICSHCRGHDGFTSSWRSVADTLRQKVEDAVREHPDYRVVFTGHSLGGALATVAGADLRGNGYDIDVFSYGAPRVGNRAFAEFLTVQTGGTLYRITHTNDIVPRLPPREFGYSHSSPEYWIKSGTLVPVTRNDIVKIEGIDATGGNNQPNIPDIPAHLWYFGLIGTCL

SEQ ID NO: 3569 - protein, 269 aa, Thermomyces lanuginosus
EVSQDLFNQFNLFAQYSAAAYCGKNNDAPAGTNITCTGNACPEVEKADATFLYSFEDSGVGDVTGFLALDNTNKLIVLSFRGSRSIENWIGNLNFDLKEINDICSGCRGHDGFTSSWRSVADTLRQKVEDAVVEHPDYRVVFTGHSLGGALATVAGADLRGNGYDIDVFSYGAPRVGNRAFAEFLTVQTGGTLYRITHTNDIVPRLPPREFGYSHSSPEYWIKSGTLVPVTRNDIVKIEGIDATGGNNQPNIPDIPAHLWYFGLIGTCL

SEQ ID NO: 3570 - protein, 269 aa, Thermomyces lanuginosus
EVSQDLFNQFNLFAQYSAAAYCGKNNDLPAGTNITCTGNACPEVEKADATFLYSFEDSGVGDVTGFLALDNTNKLIVLSFRGSRSIENWIGNLNFDLKEINDICSGCRGHDGFTSSWRSVADTLRQKVEDAVREHPDYRVVFTGHSLGGALATVAGADLRGNGYDIDVFSYGAPRVGNRAFAEFLTVQTGGTLYRITHTNDIVPRLPPREFGYSHSSPEYWIKSGTLVPVTRNDIVKIEGIDATGGNNQPNIPDIPAHLWYFGLIGTCL

SEQ ID NO: 3571 - protein, 269 aa, Thermomyces lanuginosus
EVSQDLFNQFNLFAQYSAAAYCGKNNDAPAGTNITCTGNACPEVEKADATFLYSFEDSGVGDVLGFLALDNTNKLIVLSFRGSRSIENWIGNLNFDLKEINDICSGCRGHDGFTSSWRSVADTLRQKVEDAVREHPDYRVVFTGHSLGGALATVAGADLRGNGYDIDVFSYGAPRVGNRAFAEFLTVQTGGTLYRITHTNDIVPRLPPREFGYSHSSPEYWIKSGTLVPVTRNDIVKIEGIDATGGNNQPNIPDIPAHLWYFGLIGTCL

SEQ ID NO: 3572 - protein, 269 aa, Thermomyces lanuginosus
EVSQDLFNQFNLFAQYSAAAYCGKNNDAPAGTNITCTGNACPEVEKADATFLYSFEDSGVGDVTGFLALDNTNKLIVLSFRGSRSIENWIGNLNFDLKEINDICSGCRGHDGFTSSWRSVADTLRQKVEDAVREHPDYRVVFTGHSLGGALATVAGADLRGNGYDIDVFSYGAPRVGNRAFAEFLTVQTGGTLYRITHTNDIVPRLPPREFGSSHSSPEYWIKSGTLVPVTRNDIVKIEGIDATGGNNQPNIPDIPAHLWYFGLIGTCL

SEQ ID NO: 3573 - protein, 269 aa, Thermomyces lanuginosus
EVSQDLFNQFNLFAQYSAAAYCGKNNDAPAGTNITCTGNACPEVEKADATFLYSFEDSGVGDVTGFLALDNTNKLIVLSFRGSRSIENWIGNLNFDLKEINDICSGCRGHDGFTSSWRSVADTLRQKVEDAVRETPDYRVVFTGHSLGGALATVAGADLRGNGYDIDVFSYGAPRVGNRAFAEFLTVQTGGTLYRITHTNDIVPRLPPREFGYSHSSPEYWIKSGTLVPVTRNDIVKIEGIDATGGNNQPNIPDIPAHLWYFGLIGTCL

SEQ ID NO: 3574 - protein, 269 aa, Thermomyces lanuginosus
EVSQDLFNQFNLFAQYSAAAYCGKNNDAPAGTNITCTGNACPEVEKADATFLYSFEDSGVGDVTGFLALDNTNKLIVLSFRGSRSIENWIGNLNFDLKEINDICSGCRGHDGFTSSWRSVADTLRQKIEDAVREHPDYRVVFTGHSLGGALATVAGADLRGNGYDIDVFSYGAPRVGNRAFAEFLTVQTGGTLYRITHTNDIVPRLPPREFGYSHSSPEYWIKSGTLVPVTRNDIVKIEGIDATGGNNQPNIPDIPAHLWYFGLIGTCL

SEQ ID NO: 3575 - protein, 269 aa, Thermomyces lanuginosus
EVSQDLFNQFNLFAQYSAAAYCGKNQDAPAGTNITCTGNACPEVEKADATFLYSFEDSGVGDVTGFLALDNTNKLIVLSFRGSRSIENWIGNLNFDLKEINDICSGCRGHDGFTSSWRSVADTLRQKVEDAVREHPDYRVVFTGHSLGGALATVAGADLRGNGYDIDVFSYGAPRVGNRAFAEFLTVQTGGTLYRITHTNDIVPRLPPREFGYSHSSPEYWIKSGTLVPVTRNDIVKIEGIDATGGNNQPNIPDIPAHLWYFGLIGTCL

SEQ ID NO: 3576 - protein, 269 aa, Thermomyces lanuginosus
EFSQDLFNQFNLFAQYSAAAYCGKNNDAPAGTNITCTGNACPEVEKADATFLYSFEDSGVGDVTGFLALDNTNKLIVLSFRGSRSIENWIGNLNFDLKEINDICSGCRGHDGFTSSWRSVADTLRQKVEDAVREHPDYRVVFTGHSLGGALATVAGADLRGNGYDIDVFSYGAPRVGNRAFAEFLTVQTGGTLYRITHTNDIVPRLPPREFGYSHSSPEYWIKSGTLVPVTRNDIVKIEGIDATGGNNQPNIPDIPAHLWYFGLIGTCL

SEQ ID NO: 3577 - protein, 269 aa, Thermomyces lanuginosus
EVSQDLFNQFNLFAQYSAAAYCGKNNDAPAGTNITCTGNACPEVEKADATFLYSFEDSGVGDVTGFLALDNTNKLIVLSFRGSRSIENWIGNLNFDLKEINDICSGCRGHDGFTSSWRSVADTLRQKVEDAVREHPDYRVVFTGHSLGGALATVAGADLRGNGYDIDVFSYGAPRVGNRAFAEFLTVQTGGTLYRITHTNDIVPRLPPREFGYDHSSPEYWIKSGTLVPVTRNDIVKIEGIDATGGNNQPNIPDIPAHLWYFGLIGTCL

SEQ ID NO: 3578 - protein, 269 aa, Thermomyces lanuginosus
EVSQDLFNQFNLFAQYSAAAYCLKNNDAPAGTNITCTGNACPEVEKADATFLYSFEDSGVGDVTGFLALDNTNKLIVLSFRGSRSIENWIGNLNFDLKEINDICSGCRGHDGFTSSWRSVADTLRQKVEDAVREHPDYRVVFTGHSLGGALATVAGADLRGNGYDIDVFSYGAPRVGNRAFAEFLTVQTGGTLYRITHTNDIVPRLPPREFGYSHSSPEYWIKSGTLVPVTRNDIVKIEGIDATGGNNQPNIPDIPAHLWYFGLIGTCL

SEQ ID NO: 3579 - protein, 269 aa, Thermomyces lanuginosus
EVSQDLFNQFNLFAQYSAAAYCMKNNDAPAGTNITCTGNACPEVEKADATFLYSFEDSGVGDVTGFLALDNTNKLIVLSFRGSRSIENWIGNLNFDLKEINDICSGCRGHDGFTSSWRSVADTLRQKVEDAVREHPDYRVVFTGHSLGGALATVAGADLRGNGYDIDVFSYGAPRVGNRAFAEFLTVQTGGTLYRITHTNDIVPRLPPREFGYSHSSPEYWIKSGTLVPVTRNDIVKIEGIDATGGNNQPNIPDIPAHLWYFGLIGTCL

SEQ ID NO: 3580 - protein, 269 aa, Thermomyces lanuginosus
EVSQDLFNQFNLFAQYSAAAYCGKNNDAPAGTNITCTGNACVEVEKADATFLYSFEDSGVGDVTGFLALDNTNKLIVLSFRGSRSIENWIGNLNFDLKEINDICSGCRGHDGFTSSWRSVADTLRQKVEDAVREHPDYRVVFTGHSLGGALATVAGADLRGNGYDIDVFSYGAPRVGNRAFAEFLTVQTGGTLYRITHTNDIVPRLPPREFGYSHSSPEYWIKSGTLVPVTRNDIVKIEGIDATGGNNQPNIPDIPAHLWYFGLIGTCL

SEQ ID NO: 3581 - protein, 269 aa, Thermomyces lanuginosus
EVSQDLFNQFNLFAQYSAAAYCGKNNDAPAGTNITCTGNACPEVEKADATFLYSFEDSGVGDVTGFLALDNTNKLIVLSFRGSRSIENWIGNLNLDLKEINDICSGCRGHDGFTSSWRSVADTLRQKVEDAVREHPDYRVVFTGHSLGGALATVAGADLRGNGYDIDVFSYGAPRVGNRAFAEFLTVQTGGTLYRITHTNDIVPRLPPREFGYSHSSPEYWIKSGTLVPVTRNDIVKIEGIDATGGNNQPNIPDIPAHLWYFGLIGTCL

SEQ ID NO: 3582 - protein, 269 aa, Thermomyces lanuginosus
EVSQDLFNQFNLFAQYSAAAYCGKNNDAPAGTNITCTGNACPEVEKADATFLYSFEDSGVGDVTGFLALDNTNKLIVLSFRGSRSIENWIGNLNFDLKEINDICSGCRGHDGFTSSWRSVADTLRQKVEDAVREHPDYRVVFTGHSLGGALATVAGADLRGNGYDIDVFSYGAPRVGNRAFAEFLTVQTGGTLYRITHTNDIVPRLPEREFGYSHSSPEYWIKSGTLVPVTRNDIVKIEGIDATGGNNQPNIPDIPAHLWYFGLIGTCL

SEQ ID NO: 3583 - protein, 269 aa, Thermomyces lanuginosus
EVSQDLFNQFNLFAQYSAAAYCGKNNDAPAPTNITCTGNACPEVEKADATFLYSFEDSGVGDVTGFLALDNTNKLIVLSFRGSRSIENWIGNLNFDLKEINDICSGCRGHDGFTSSWRSVADTLRQKVEDAVREHPDYRVVFTGHSLGGALATVAGADLRGNGYDIDVFSYGAPRVGNRAFAEFLTVQTGGTLYRITHTNDIVPRLPPREFGYSHSSPEYWIKSGTLVPVTRNDIVKIEGIDATGGNNQPNIPDIPAHLWYFGLIGTCL

SEQ ID NO: 3584 - protein, 269 aa, Thermomyces lanuginosus
EVSQDLFNQFNVFAQYSAAAYCGKNNDAPAGTNITCTGNACPEVEKADATFLYSFEDSGVGDVTGFLALDNTNKLIVLSFRGSRSIENWIGNLNFDLKEINDICSGCRGHDGFTSSWRSVADTLRQKVEDAVREHPDYRVVFTGHSLGGALATVAGADLRGNGYDIDVFSYGAPRVGNRAFAEFLTVQTGGTLYRITHTNDIVPRLPPREFGYSHSSPEYWIKSGTLVPVTRNDIVKIEGIDATGGNNQPNIPDIPAHLWYFGLIGTCL

SEQ ID NO: 3585 - protein, 269 aa, Thermomyces lanuginosus
EVSQDLFNQFNLFAQYSAAAYCGKNNDAPAGTNITCTGNACPEVEKADATFLYSFEDSGVGDVTGFLALDNTNKLIVLSFRGSRSIENWIGNLDFDLKEINDICSGCRGHDGFTSSWRSVADTLRQKVEDAVREHPDYRVVFTGHSLGGALATVAGADLRGNGYDIDVFSYGAPRVGNRAFAEFLTVQTGGTLYRITHTNDIVPRLPPREFGYSHSSPEYWIKSGTLVPVTRNDIVKIEGIDATGGNNQPNIPDIPAHLWYFGLIGTCL

SEQ ID NO: 3586 - protein, 269 aa, Thermomyces lanuginosus
EVSQDLFNQFNLFAQYSAAAYCGKNNDAPAGTNITCTGNACPEVEKADATFLYSFEDSGVGDVTGFLALDNTNKLIVLSFRGSRSIENWIGNLNFDLKEINDICSGCEGHDGFTSSWRSVADTLRQKVEDAVREHPDYRVVFTGHSLGGALATVAGADLRGNGYDIDVFSYGAPRVGNRAFAEFLTVQTGGTLYRITHTNDIVPRLPPREFGYSHSSPEYWIKSGTLVPVTRNDIVKIEGIDATGGNNQPNIPDIPAHLWYFGLIGTCL

SEQ ID NO: 3587 - protein, 269 aa, Thermomyces lanuginosus
EVSQDLFNQFNLFAQYSAAAYCGKNNDAPAGTNITCTGNACPEVEKADATFLYSFEDSGVGDVTGFLALDNTNKLIVLSFRGSRSIENWISNLNFDLKEINDICSGCRGHDGFTSSWRSVADTLRQKVEDAVREHPDYRVVFTGHSLGGALATVAGADLRGNGYDIDVFSYGAPRVGNRAFAEFLTVQTGGTLYRITHTNDIVPRLPPREFGYSHSSPEYWIKSGTLVPVTRNDIVKIEGIDATGGNNQPNIPDIPAHLWYFGLIGTCL

SEQ ID NO: 3588 - protein, 269 aa, Thermomyces lanuginosus
EVSQDLFNQFNLFAQYSAAAYCGKHNDAPAGTNITCTGNACPEVEKADATFLYSFEDSGVGDVTGFLALDNTNKLIVLSFRGSRSIENWIGNLNFDLKEINDICSGCRGHDGFTSSWRSVADTLRQKVEDAVREHPDYRVVFTGHSLGGALATVAGADLRGNGYDIDVFSYGAPRVGNRAFAEFLTVQTGGTLYRITHTNDIVPRLPPREFGYSHSSPEYWIKSGTLVPVTRNDIVKIEGIDATGGNNQPNIPDIPAHLWYFGLIGTCL

SEQ ID NO: 3589 - protein, 269 aa, Thermomyces lanuginosus
EVSQDLFNQFNLFAQYSAAAYCGKNNDAPAGTNITCTGNACPEVEKADATFLYSFEDSGVGDVTGFLALDNTNKLIVLSFRGSRSIENWIGNLNFDLKEINDICSGCRGHDGFTSSWRSVADTLRQKVEDAVREHPDYRVVFTGHSLGGALATVAGADLRGNGYDIDVFSYGAPRVGNRAFAEFLTVQTGGTLYRITHTNDIVPRLPPREIGYSHSSPEYWIKSGTLVPVTRNDIVKIEGIDATGGNNQPNIPDIPAHLWYFGLIGTCL

SEQ ID NO: 3590 - protein, 269 aa, Thermomyces lanuginosus
EVSQDLFNQFNLFAQYSAAAYCGKNNDAPAGTNITCTGNACPEVEKADATFLYSFEDSGVGDVTGFLALDNTNKLIVLSFRGSRSIENWIGNLNFDLKEINDICSGCRGHDGFTSSWRSVADTLRQKVEDAVREHPDYRVVFTGHSLGGALATVAGADLRGNGYDIDVFSYGAPRVGNRAFAEFLTVQTGGTLYRITHTNDIVPRLPPREFGYSHSSPEYWIKSPTLVPVTRNDIVKIEGIDATGGNNQPNIPDIPAHLWYFGLIGTCL

SEQ ID NO: 3591 - protein, 269 aa, Thermomyces lanuginosus
EVSQDLFNQFNLFAQYSAAAYCGKNNDAPAGTNITCYGNACPEVEKADATFLYSFEDSGVGDVTGFLALDNTNKLIVLSFRGSRSIENWIGNLNFDLKEINDICSGCRGHDGFTSSWRSVADTLRQKVEDAVREHPDYRVVFTGHSLGGALATVAGADLRGNGYDIDVFSYGAPRVGNRAFAEFLTVQTGGTLYRITHTNDIVPRLPPREFGYSHSSPEYWIKSGTLVPVTRNDIVKIEGIDATGGNNQPNIPDIPAHLWYFGLIGTCL

SEQ ID NO: 3592 - protein, 269 aa, Thermomyces lanuginosus
EVSQDLFNQFNLFAQYSAAAYCGKNNDAPAGTNITCTGNACPEVEKADATNLYSFEDSGVGDVTGFLALDNTNKLIVLSFRGSRSIENWIGNLNFDLKEINDICSGCRGHDGFTSSWRSVADTLRQKVEDAVREHPDYRVVFTGHSLGGALATVAGADLRGNGYDIDVFSYGAPRVGNRAFAEFLTVQTGGTLYRITHTNDIVPRLPPREFGYSHSSPEYWIKSGTLVPVTRNDIVKIEGIDATGGNNQPNIPDIPAHLWYFGLIGTCL

SEQ ID NO: 3593 - protein, 269 aa, Thermomyces lanuginosus
EVSQDLFNQFNLFAQYSAAAYCGKNNDAPAGTNITCTGNACPEVEKADATFLYSFEDSGVGDVTGFLALDNTNKLIVLSFRGSRSIENWIGNLNFALKEINDICSGCRGHDGFTSSWRSVADTLRQKVEDAVREHPDYRVVFTGHSLGGALATVAGADLRGNGYDIDVFSYGAPRVGNRAFAEFLTVQTGGTLYRITHTNDIVPRLPPREFGYSHSSPEYWIKSGTLVPVTRNDIVKIEGIDATGGNNQPNIPDIPAHLWYFGLIGTCL

SEQ ID NO: 3594 - protein, 269 aa, Thermomyces lanuginosus
EVSQDLFNQFNLFAQYSAAAYCGKNNDAPAGTNITCTGNACPEVEKADATFLYSFEDSGVGDVTGFLALDNTNKLIVLSFRGSRSIENWIGNLNFDLKEINDICSGCRGHDGFTSSWRSVADTLRQKVEDAVREHPLYRVVFTGHSLGGALATVAGADLRGNGYDIDVFSYGAPRVGNRAFAEFLTVQTGGTLYRITHTNDIVPRLPPREFGYSHSSPEYWIKSGTLVPVTRNDIVKIEGIDATGGNNQPNIPDIPAHLWYFGLIGTCL

SEQ ID NO: 3595 - protein, 269 aa, Thermomyces lanuginosus
EVSQDLFNQFNLFAQYSAAAYCGKNNDAPAGTNITCTGNACPEVEKADATFLYSFEDSGVGDVTGFLALDNTNKLIVLSFRGSRSIENWIGNLNFDLKEINDICSGCRGHDGFTSSWRSVADTLRQKVEDAVREHPDYRVVFTGHSLGGALATVAGADLRGNGYDIDVFSYGAPRVGNRAFAEFLTVQTGGTLYRITHTNDIVPRLPPREFGYSHSSPEYWIKSGTLVPVTRNDIVKIEGIDATGGNNQPNIPDIPAHLWYFGLIGPCL

SEQ ID NO: 3596 - protein, 269 aa, Thermomyces lanuginosus
EVSQDLFNQFNLFAQYSAAAYCGKNNDAPAGTNITCTGNACPEVEKADATFLYSFEDSGVGDVTGFLALDNTNKLIVLSFRGSRSIENWIGNLNFDLKEINDICSGCRGHDGFTSSWRSVADTLRQKVEDAVNEHPDYRVVFTGHSLGGALATVAGADLRGNGYDIDVFSYGAPRVGNRAFAEFLTVQTGGTLYRITHTNDIVPRLPPREFGYSHSSPEYWIKSGTLVPVTRNDIVKIEGIDATGGNNQPNIPDIPAHLWYFGLIGTCL

SEQ ID NO: 3597 - protein, 269 aa, Thermomyces lanuginosus
EVSQDLFNQFNLFAQYSAAAYCGKNNDAPAGTNITCTGNACPEVEKADATFLYSFEDSGVGDVTGFLALDNTNKLIVLSFRGSRSIENWIGNLNFDLKEINDICSGCRGHDGFTSSWRSVADTLRQKVEDAVREHPDYRVVFTGHSLGGALATVAGADLRGNGYDIDVFSYGAPRVGNRAFAEFLTVQTGGTLYRITHTNDIVPRLPPREFGYSHSSPEYFIKSGTLVPVTRNDIVKIEGIDATGGNNQPNIPDIPAHLWYFGLIGTCL

SEQ ID NO: 3598 - protein, 269 aa, Thermomyces lanuginosus
EVSQDLFNQFNLFAQYSAAAYCGKNNDAPAGTNITCTGNACPEVEKADATFTYSFEDSGVGDVTGFLALDNTNKLIVLSFRGSRSIENWIGNLNFDLKEINDICSGCRGHDGFTSSWRSVADTLRQKVEDAVREHPDYRVVFTGHSLGGALATVAGADLRGNGYDIDVFSYGAPRVGNRAFAEFLTVQTGGTLYRITHTNDIVPRLPPREFGYSHSSPEYWIKSGTLVPVTRNDIVKIEGIDATGGNNQPNIPDIPAHLWYFGLIGTCL

SEQ ID NO: 3599 - protein, 269 aa, Thermomyces lanuginosus
EVSQDLFNQFNLFAQYSAAAYCGKNNDAPAGTNITCTGNACPEVEKADATFLYSFEDSGVGDVTGFLALDNTNKLIILSFRGSRSIENWIGNLNFDLKEINDICSGCRGHDGFTSSWRSVADTLRQKVEDAVREHPDYRVVFTGHSLGGALATVAGADLRGNGYDIDVFSYGAPRVGNRAFAEFLTVQTGGTLYRITHTNDIVPRLPPREFGYSHSSPEYWIKSGTLVPVTRNDIVKIEGIDATGGNNQPNIPDIPAHLWYFGLIGTCL

SEQ ID NO: 3600 - protein, 269 aa, Thermomyces lanuginosus
EVSQDLFNQFNLFAQYSAAAYCGKNNDAPAGTNITCTGNACPEVEKADATFLYSFEDSGVGDVTGFLALDHTNKLIVLSFRGSRSIENWIGNLNFDLKEINDICSGCRGHDGFTSSWRSVADTLRQKVEDAVREHPDYRVVFTGHSLGGALATVAGADLRGNGYDIDVFSYGAPRVGNRAFAEFLTVQTGGTLYRITHTNDIVPRLPPREFGYSHSSPEYWIKSGTLVPVTRNDIVKIEGIDATGGNNQPNIPDIPAHLWYFGLIGTCL

SEQ ID NO: 3601 - protein, 269 aa, Thermomyces lanuginosus
EVSQDLFNQFNLFAQYSAAAYCGKNNDAPAGTNITCTGNACPEVEKADATFLYSFEDSGVGDVTGFLALDNTNKLIVLSFRGSRSIENWIGNLNFDLKEINDICSGCRGHDGFTSSWRSVADTLRQKVEDAVREHPDYRVVFTGHSLGGALATVAGADLRGNGYDIDVSSYGAPRVGNRAFAEFLTVQTGGTLYRITHTNDIVPRLPPREFGYSHSSPEYWIKSGTLVPVTRNDIVKIEGIDATGGNNQPNIPDIPAHLWYFGLIGTCL

SEQ ID NO: 3602 - protein, 269 aa, Thermomyces lanuginosus
EVSQDLFNQFNLFAQYSAAAYCGKNNDAPAGTNITCTGNACPEVEKADATFLYSFEDSGVGDVTGFLALDNTNKLIVLSFRGSXSIENWIGNLNFDLKEINDICSGCRGHDGFTSSWRSVADTLRQKVEDAVREHPDYRVVFTGHSLGGALATVAGADLRGNGYDIDVFSYGAPRVGNRAFAEFLTVQTGGTLYRITHTNDIVPRLPPREFGYSHSSPEYWIKSGTLVPVTRNDIVKIEGIDATGGNNQPNIPDIPAHLWYFGLIGTCL

SEQ ID NO: 3603 - protein, 269 aa, Thermomyces lanuginosus
EVSQDLFNQFNLFAQYSAAAYCGKNNDAPAGTNITCTGNACPEVEKADATFLYSFEDSGVGDVTGFLALDNTNKLIVLSFRGSRSIENWIGNLNFDLKEINDICSGCFGHDGFTSSWRSVADTLRQKVEDAVREHPDYRVVFTGHSLGGALATVAGADLRGNGYDIDVFSYGAPRVGNRAFAEFLTVQTGGTLYRITHTNDIVPRLPPREFGYSHSSPEYWIKSGTLVPVTRNDIVKIEGIDATGGNNQPNIPDIPAHLWYFGLIGTCL

SEQ ID NO: 3604 - protein, 269 aa, Thermomyces lanuginosus
EVSQDLFNQFNLFAQYSAAAYCGKNNDAPAGTNITCTGNACPEVEKADATFLYSFEDSGVGDVTGFLALDNTNKLIVLSFRGSRSIENWIGNLNFDLKEINDICSGCRGHDGFTSSWRSVADTLCQKVEDAVREHPDYRVVFTGHSLGGALATVAGADLRGNGYDIDVFSYGAPRVGNRAFAEFLTVQTGGTLYRITHTNDIVPRLPPREFGYSHSSPEYWIKSGTLVPVTRNDIVKIEGIDATGGNNQPNIPDIPAHLWYFGLIGTCL

SEQ ID NO: 3605 - protein, 269 aa, Thermomyces lanuginosus
EVSQDLFIQFNLFAQYSAAAYCGKNNDAPAGTNITCTGNACPEVEKADATFLYSFEDSGVGDVTGFLALDNTNKLIVLSFRGSRSIENWIGNLNFDLKEINDICSGCRGHDGFTSSWRSVADTLRQKVEDAVREHPDYRVVFTGHSLGGALATVAGADLRGNGYDIDVFSYGAPRVGNRAFAEFLTVQTGGTLYRITHTNDIVPRLPPREFGYSHSSPEYWIKSGTLVPVTRNDIVKIEGIDATGGNNQPNIPDIPAHLWYFGLIGTCL

SEQ ID NO: 3606 - protein, 269 aa, Thermomyces lanuginosus
EVSQDLFNQFNLFAQYSAAAYCGKNNDAPAGTNITCTGNACPEVEKADATFLYSFEDSGVGDVTGFLALDNTNKLIVLSFRGSRSIENWIGNLNFDLKEINDICSGCRGHDGFTSSWRSWADTLRQKVEDAVREHPDYRVVFTGHSLGGALATVAGADLRGNGYDIDVFSYGAPRVGNRAFAEFLTVQTGGTLYRITHTNDIVPRLPPREFGYSHSSPEYWIKSGTLVPVTRNDIVKIEGIDATGGNNQPNIPDIPAHLWYFGLIGTCL

SEQ ID NO: 3607 - protein, 269 aa, Thermomyces lanuginosus
EVSQDLFNQFNLFAQYSAAAYCGKNNDAPAGTNITCTGNACPEVEKADATFLYSFEDSGVGDVTGFLALDNTNKLIVLSFRGSRSIENWIGNLNFDLKEINDICSGCRGHDGFTSSWRSVADTLRQKVEDAVREHPDYRVVFTGHSLGGALATVAGADERGNGYDIDVFSYGAPRVGNRAFAEFLTVQTGGTLYRITHTNDIVPRLPPREFGYSHSSPEYWIKSGTLVPVTRNDIVKIEGIDATGGNNQPNIPDIPAHLWYFGLIGTCL

SEQ ID NO: 3608 - protein, 269 aa, Thermomyces lanuginosus
EVSQDLFNQFNLFAQYSAAAYCGKNNDAPAGTNITCTGNACPEVEKADATFLYSFEDSGVGDVTGFLALDNTNKLIVLSFRGSRSIENWIGNPNFDLKEINDICSGCRGHDGFTSSWRSVADTLRQKVEDAVREHPDYRVVFTGHSLGGALATVAGADLRGNGYDIDVFSYGAPRVGNRAFAEFLTVQTGGTLYRITHTNDIVPRLPPREFGYSHSSPEYWIKSGTLVPVTRNDIVKIEGIDATGGNNQPNIPDIPAHLWYFGLIGTCL

SEQ ID NO: 3609 - protein, 269 aa, Thermomyces lanuginosus
EVSQDLFNQFNLFAQYSAAAYCGKNNDAPAGTNITCTGNACPEVEKADATFLYSFEDSGVGDVTGFLALDNTNKLIVLSFRGSRSIENWIGNLNFDLKEINDICSGCRGHDGFTSSWRSVADTLYQKVEDAVREHPDYRVVFTGHSLGGALATVAGADLRGNGYDIDVFSYGAPRVGNRAFAEFLTVQTGGTLYRITHTNDIVPRLPPREFGYSHSSPEYWIKSGTLVPVTRNDIVKIEGIDATGGNNQPNIPDIPAHLWYFGLIGTCL

SEQ ID NO: 3610 - protein, 269 aa, Thermomyces lanuginosus
EVSQDLFNQFNLFAQYSAAAYCGKNNDAPAGTNITCTGNACPEVEKADATFLYSFEDSGVGDVTGFLALDNTNKLIVLSFRGSRSIENWIGNLNFDLKEINDICSGCRGHDGFTSSWRSVADTLRQKVEDAVREHPDYRVVFTGHSLGGALATVAGADLRGNGYDIDVFSYGAPRVGNRAFAEFLTVQTGGTLYRITHTNDIVPRLPPREFGYAHSSPEYWIKSGTLVPVTRNDIVKIEGIDATGGNNQPNIPDIPAHLWYFGLIGTCL

SEQ ID NO: 3611 - protein, 269 aa, Thermomyces lanuginosus
EVSKDLFNQFNLFAQYSAAAYCGKNNDAPAGTNITCTGNACPEVEKADATFLYSFEDSGVGDVTGFLALDNTNKLIVLSFRGSRSIENWIGNLNFDLKEINDICSGCRGHDGFTSSWRSVADTLRQKVEDAVREHPDYRVVFTGHSLGGALATVAGADLRGNGYDIDVFSYGAPRVGNRAFAEFLTVQTGGTLYRITHTNDIVPRLPPREFGYSHSSPEYWIKSGTLVPVTRNDIVKIEGIDATGGNNQPNIPDIPAHLWYFGLIGTCL

SEQ ID NO: 3612 - protein, 269 aa, Thermomyces lanuginosus
EVSQDLFNQFNLFAQYSAAAYCGKNNDAPAGTNITCTGNACPEVEKADATFLYSFEDSGVGDVTGFLALDNTNKLIVLSFRGSRSIENWIGNLNFDLKEINDICSGCRGHDGFTSSWRSVADTLRQKVEDAVREHPDYRIVFTGHSLGGALATVAGADLRGNGYDIDVFSYGAPRVGNRAFAEFLTVQTGGTLYRITHTNDIVPRLPPREFGYSHSSPEYWIKSGTLVPVTRNDIVKIEGIDATGGNNQPNIPDIPAHLWYFGLIGTCL

SEQ ID NO: 3613 - protein, 269 aa, Thermomyces lanuginosus
EVSQDLFNQFNLFAQYSAAAYCGKNNDAPAGTNITCTGNACPEVFKADATFLYSFEDSGVGDVTGFLALDNTNKLIVLSFRGSRSIENWIGNLNFDLKEINDICSGCRGHDGFTSSWRSVADTLRQKVEDAVREHPDYRVVFTGHSLGGALATVAGADLRGNGYDIDVFSYGAPRVGNRAFAEFLTVQTGGTLYRITHTNDIVPRLPPREFGYSHSSPEYWIKSGTLVPVTRNDIVKIEGIDATGGNNQPNIPDIPAHLWYFGLIGTCL

SEQ ID NO: 3614 - protein, 269 aa, Thermomyces lanuginosus
EVSQDLFNQFNLFAQYSAAAYCGKNNDAPAGTNITCTGNACPEVEKADATFLYSFEDSGVGDVTGFLALDNTNKLIVLSFRGSRSIENWIGNLNFDLKEINDICSGCRGHDGFTSSWRSVADTLRQKVEDAVREHPDYRVVFTGHSLGGALATVAGADLRGNGYDIDVFSYGAPRVGNRAFAEFLTVQTGFTLYRITHTNDIVPRLPPREFGYSHSSPEYWIKSGTLVPVTRNDIVKIEGIDATGGNNQPNIPDIPAHLWYFGLIGTCL

SEQ ID NO: 3615 - protein, 269 aa, Thermomyces lanuginosus
EVSQDLFNQFNLFAQYSAAAYCGKNNDAPAGTNITCTGNACPEVEKADALFLYSFEDSGVGDVTGFLALDNTNKLIVLSFRGSRSIENWIGNLNFDLKEINDICSGCRGHDGFTSSWRSVADTLRQKVEDAVREHPDYRVVFTGHSLGGALATVAGADLRGNGYDIDVFSYGAPRVGNRAFAEFLTVQTGGTLYRITHTNDIVPRLPPREFGYSHSSPEYWIKSGTLVPVTRNDIVKIEGIDATGGNNQPNIPDIPAHLWYFGLIGTCL

SEQ ID NO: 3616 - protein, 269 aa, Thermomyces lanuginosus
EVSQDLFNQFNLFAQYSAAAYCGKNNDAPAGTNITCTGNACPEVEKADATFLYSFEDSGVGDVTGFLALDNTNKLIVLSFRGSRSIENWIGNLNFDLKEINDICSGCRGHDGFTSSWRSVADTLRQKVEDAVREHPDYRVVFTGHSLGGALATVAGADLRGNGYDIDVFSYGAPRVGNRAFAEFLTVQTGGTLYRITHTNDIVPRLPPRETGYSHSSPEYWIKSGTLVPVTRNDIVKIEGIDATGGNNQPNIPDIPAHLWYFGLIGTCL

SEQ ID NO: 3617 - protein, 269 aa, Thermomyces lanuginosus
EVSQDLFNQFNLFAQYSAAAYCGKNNDAPAGTNITCTGNACPEVEKADATFLYSFEDSGVGDVTGFLALDNTNKLIVLSFRGSRSIENWIGNLNFDLKEINDICSGCRGHDGFTSSWRSVADTLRQKVEDAVREHPDYRVVFTGHSLGGALATVAGADLRGNGYDIDVFSYGAPRVGNRAFAEFLTVQTGGTLYRITHTNDIVPRLPPREFGYSHSSPEYWIKSGTLVPVTRNDIVKIEGIDATGGNNQPNIPDIPAHLWYKGLIGTCL

SEQ ID NO: 3618 - protein, 269 aa, Thermomyces lanuginosus
EVSQDLFNQFNLFAQYSAAAYCGKNNDAPAGTNITCTGNACPEVEKADATFLYSFEDSGVGDVTGFLALDNTNKLIVLSFRGSRSIENWIGNLNTDLKEINDICSGCRGHDGFTSSWRSVADTLRQKVEDAVREHPDYRVVFTGHSLGGALATVAGADLRGNGYDIDVFSYGAPRVGNRAFAEFLTVQTGGTLYRITHTNDIVPRLPPREFGYSHSSPEYWIKSGTLVPVTRNDIVKIEGIDATGGNNQPNIPDIPAHLWYFGLIGTCL

SEQ ID NO: 3619 - protein, 269 aa, Thermomyces lanuginosus
EVSQDLFNQFNLFAQYSAAAYCGKNNDAPAGTNITCTGNACPEVEKADATFLYSFEDSGVGDVTGFLALDNTNKLIVLSFRGSRSIENWIGNLNFDLKEINDICSGCRGHDGFTSSWRSVADTLRQKVEDAVREHPDYRVVFTGHSLGGALATVAGADLRGNGYDIDVFSYGAPRVGNRAFAEFLTVQTGGTLYRITHTNDIVPRLPPREFGYSHSSPEYWIKSGTLVPVTMNDIVKIEGIDATGGNNQPNIPDIPAHLWYFGLIGTCL

SEQ ID NO: 3620 - protein, 269 aa, Thermomyces lanuginosus
EVSQDLFNQFNLFAQYSAAAYCGKNNDAPAGTNITCTGNACPEVEKADATFLYSFEDSGVGDVTGFLALDNTNKMIVLSFRGSRSIENWIGNLNFDLKEINDICSGCRGHDGFTSSWRSVADTLRQKVEDAVREHPDYRVVFTGHSLGGALATVAGADLRGNGYDIDVFSYGAPRVGNRAFAEFLTVQTGGTLYRITHTNDIVPRLPPREFGYSHSSPEYWIKSGTLVPVTRNDIVKIEGIDATGGNNQPNIPDIPAHLWYFGLIGTCL

SEQ ID NO: 3621 - protein, 269 aa, Thermomyces lanuginosus
EVSQDLFNQFVLFAQYSAAAYCGKNNDAPAGTNITCTGNACPEVEKADATFLYSFEDSGVGDVTGFLALDNTNKLIVLSFRGSRSIENWIGNLNFDLKEINDICSGCRGHDGFTSSWRSVADTLRQKVEDAVREHPDYRVVFTGHSLGGALATVAGADLRGNGYDIDVFSYGAPRVGNRAFAEFLTVQTGGTLYRITHTNDIVPRLPPREFGYSHSSPEYWIKSGTLVPVTRNDIVKIEGIDATGGNNQPNIPDIPAHLWYFGLIGTCL

SEQ ID NO: 3622 - protein, 269 aa, Thermomyces lanuginosus
EVSQDLFNQFNLFAQYSAAAYCGKNNDAPAGTNITCTGNACPEVEKADATFLYSFEDSGVGDVTGFLALDNTNKLIVLSFRGSRSIENWIGNLNFDLKEINDICSGCRGHDGFTSSWRSVADTLRQKLEDAVREHPDYRVVFTGHSLGGALATVAGADLRGNGYDIDVFSYGAPRVGNRAFAEFLTVQTGGTLYRITHTNDIVPRLPPREFGYSHSSPEYWIKSGTLVPVTRNDIVKIEGIDATGGNNQPNIPDIPAHLWYFGLIGTCL

SEQ ID NO: 3623 - protein, 269 aa, Thermomyces lanuginosus
EVSQDLFNQFNLFAQYSAAAYCGKNNDAPAGTNITCTGNACPEVEKALATFLYSFEDSGVGDVTGFLALDNTNKLIVLSFRGSRSIENWIGNLNFDLKEINDICSGCRGHDGFTSSWRSVADTLRQKVEDAVREHPDYRVVFTGHSLGGALATVAGADLRGNGYDIDVFSYGAPRVGNRAFAEFLTVQTGGTLYRITHTNDIVPRLPPREFGYSHSSPEYWIKSGTLVPVTRNDIVKIEGIDATGGNNQPNIPDIPAHLWYFGLIGTCL

SEQ ID NO: 3624 - protein, 269 aa, Thermomyces lanuginosus
EVSQDLFNQFNLFAQYSAAAYCGKNNDAPAGTNITCTGNACPEVEKADAAFLYSFEDSGVGDVTGFLALDNTNKLIVLSFRGSRSIENWIGNLNFDLKEINDICSGCRGHDGFTSSWRSVADTLRQKVEDAVREHPDYRVVFTGHSLGGALATVAGADLRGNGYDIDVFSYGAPRVGNRAFAEFLTVQTGGTLYRITHTNDIVPRLPPREFGYSHSSPEYWIKSGTLVPVTRNDIVKIEGIDATGGNNQPNIPDIPAHLWYFGLIGTCL

SEQ ID NO: 3625 - protein, 269 aa, Thermomyces lanuginosus
EVSQDLFNQFNLFAQYSAAAYCGKNNDAPAGTNITCTGNACPEVVKADATFLYSFEDSGVGDVTGFLALDNTNKLIVLSFRGSRSIENWIGNLNFDLKEINDICSGCRGHDGFTSSWRSVADTLRQKVEDAVREHPDYRVVFTGHSLGGALATVAGADLRGNGYDIDVFSYGAPRVGNRAFAEFLTVQTGGTLYRITHTNDIVPRLPPREFGYSHSSPEYWIKSGTLVPVTRNDIVKIEGIDATGGNNQPNIPDIPAHLWYFGLIGTCL

SEQ ID NO: 3626 - protein, 269 aa, Thermomyces lanuginosus
EVSQDLFNQFNLFAQYSAAAYCGKNNDAPAGTEITCTGNACPEVEKADATFLYSFEDSGVGDVTGFLALDNTNKLIVLSFRGSRSIENWIGNLNFDLKEINDICSGCRGHDGFTSSWRSVADTLRQKVEDAVREHPDYRVVFTGHSLGGALATVAGADLRGNGYDIDVFSYGAPRVGNRAFAEFLTVQTGGTLYRITHTNDIVPRLPPREFGYSHSSPEYWIKSGTLVPVTRNDIVKIEGIDATGGNNQPNIPDIPAHLWYFGLIGTCL

SEQ ID NO: 3627 - protein, 269 aa, Thermomyces lanuginosus
EVSQDLFNQFNLFAQYSAAAYCGKNNDAPAGTNITCTGNACPEVEKADATFLYSFEDSGVGDVTGFLALDNTNKLIVLSFRGSRSIENWIGNLNFDLKEINDICSGCRGHDGFTSSWRSVADTLRQKVEDAVREHPDYRVVFTGHSLGGALATVAGADLRGNGYDIDVFSYGAPRVGNRAFAEFLTVQTGGTLYRITHTNDIVPRLPPREFGYSHSSPEYWIKSGTLVPVTRNDIVKIEGIDATGGNNQPNIPDIPAHLWYFGTIGTCL

SEQ ID NO: 3628 - protein, 269 aa, Thermomyces lanuginosus
EVSQDLFNQFNLFAQYSAAAYCGKNNDAPAGTNITCTGNACPEVEKADATFLHSFEDSGVGDVTGFLALDNTNKLIVLSFRGSRSIENWIGNLNFDLKEINDICSGCRGHDGFTSSWRSVADTLRQKVEDAVREHPDYRVVFTGHSLGGALATVAGADLRGNGYDIDVFSYGAPRVGNRAFAEFLTVQTGGTLYRITHTNDIVPRLPPREFGYSHSSPEYWIKSGTLVPVTRNDIVKIEGIDATGGNNQPNIPDIPAHLWYFGLIGTCL

SEQ ID NO: 3629 - protein, 269 aa, Thermomyces lanuginosus
EVSQDLFNQFNLFAQYSAAAYCGKNNDAPAGTNITCTGNACPEVEKADATFLYSFEDSGVGDVTGFLALDNTNKLIVLSFRGSRSIENWIGNLNFDLKEINDICSGCRGHDGFTSSWRSVADTLRQKVEDAVREHPDYRVVFTGHSLGGALATVAGADLRGNWYDIDVFSYGAPRVGNRAFAEFLTVQTGGTLYRITHTNDIVPRLPPREFGYSHSSPEYWIKSGTLVPVTRNDIVKIEGIDATGGNNQPNIPDIPAHLWYFGLIGTCL

SEQ ID NO: 3630 - protein, 269 aa, Thermomyces lanuginosus
EVSQDLFNQFNLFAQYSAAAYCGKNNDAPAGTNITCTGNACPEVEKADATFLYSFEDSGVGDVTGFLALDNTNKLIVLSFRGSRSIENWIGNLNFDLKEINDICSGCRGHDGFTSSWRSVADTLRQKVEDAVREHPDYRVVFTGHSLGGALATVAGADLRGNGYDIDVFSYGAPRVGNRAFAEFLTVFTGGTLYRITHTNDIVPRLPPREFGYSHSSPEYWIKSGTLVPVTRNDIVKIEGIDATGGNNQPNIPDIPAHLWYFGLIGTCL

SEQ ID NO: 3631 - protein, 269 aa, Thermomyces lanuginosus
EVSQDLFNQFNLFAQYSAAAYCGKNNDAPAGTNITCTGNACPEVEKADATFLYSFEDSGVGDVTGFLALDNTNKLIVLSFRGSRSIENWIGNLNFDLKEINDICSGCRGHDGFTSSWRSVADTLRQKVEDAVREHPDYRVVFTGHSLGGALATVAGADLRGNGYDIDVFSYGAPRVGNRAFAEFLTVQGGGTLYRITHTNDIVPRLPPREFGYSHSSPEYWIKSGTLVPVTRNDIVKIEGIDATGGNNQPNIPDIPAHLWYFGLIGTCL

SEQ ID NO: 3632 - protein, 269 aa, Thermomyces lanuginosus
EVSQDLFNQFNLFAQYSAAAYCGKNNDAPAGTNITCTGNACPEVEKADATFLYSFEDSGVGDVTGFLALDNTNKLIVLSFRGSRSIENWIGNLNFDLKEINDICSGCRGHDGFTSSWRSVADTLRQGVEDAVREHPDYRVVFTGHSLGGALATVAGADLRGNGYDIDVFSYGAPRVGNRAFAEFLTVQTGGTLYRITHTNDIVPRLPPREFGYSHSSPEYWIKSGTLVPVTRNDIVKIEGIDATGGNNQPNIPDIPAHLWYFGLIGTCL

SEQ ID NO: 3633 - protein, 269 aa, Thermomyces lanuginosus
EVSQDLFNQFNLFAQYSAAAYCGKNNDAPAGTNITCTGNACPEVEKADATFLYSFEDSGVGDVTGSLALDNTNKLIVLSFRGSRSIENWIGNLNFDLKEINDICSGCRGHDGFTSSWRSVADTLRQKVEDAVREHPDYRVVFTGHSLGGALATVAGADLRGNGYDIDVFSYGAPRVGNRAFAEFLTVQTGGTLYRITHTNDIVPRLPPREFGYSHSSPEYWIKSGTLVPVTRNDIVKIEGIDATGGNNQPNIPDIPAHLWYFGLIGTCL

SEQ ID NO: 3634 - protein, 269 aa, Thermomyces lanuginosus
EVSQDLFNQFNLFAQYSAAAYCGKNNDAPAGTNITCTGNACPEVEKAHATFLYSFEDSGVGDVTGFLALDNTNKLIVLSFRGSRSIENWIGNLNFDLKEINDICSGCRGHDGFTSSWRSVADTLRQKVEDAVREHPDYRVVFTGHSLGGALATVAGADLRGNGYDIDVFSYGAPRVGNRAFAEFLTVQTGGTLYRITHTNDIVPRLPPREFGYSHSSPEYWIKSGTLVPVTRNDIVKIEGIDATGGNNQPNIPDIPAHLWYFGLIGTCL

SEQ ID NO: 3635 - protein, 269 aa, Thermomyces lanuginosus
EVSQDLFNQFNLFAQYSAAAYCGKNNDAPAGTNITCTGNACPEVEKADATFLYSFEDSGVGDVTGFLALDNTNKLIVLSFRGSRSIPNWIGNLNFDLKEINDICSGCRGHDGFTSSWRSVADTLRQKVEDAVREHPDYRVVFTGHSLGGALATVAGADLRGNGYDIDVFSYGAPRVGNRAFAEFLTVQTGGTLYRITHTNDIVPRLPPREFGYSHSSPEYWIKSGTLVPVTRNDIVKIEGIDATGGNNQPNIPDIPAHLWYFGLIGTCL

SEQ ID NO: 3636 - protein, 269 aa, Thermomyces lanuginosus
EVSQDLFNQFNLFAQYSAAAYCGKNNDAPAGTNITCTGLACPEVEKADATFLYSFEDSGVGDVTGFLALDNTNKLIVLSFRGSRSIENWIGNLNFDLKEINDICSGCRGHDGFTSSWRSVADTLRQKVEDAVREHPDYRVVFTGHSLGGALATVAGADLRGNGYDIDVFSYGAPRVGNRAFAEFLTVQTGGTLYRITHTNDIVPRLPPREFGYSHSSPEYWIKSGTLVPVTRNDIVKIEGIDATGGNNQPNIPDIPAHLWYFGLIGTCL

SEQ ID NO: 3637 - protein, 269 aa, Thermomyces lanuginosus
EVSQDLFNQFNLFAQYSAAAYCGKNNDAPRGTNITCTGNACPEVEKADATFLYSFEDSGVGDVTGFLALDNTNKLIVLSFRGSRSIENWIGNLNFDLKEINDICSGCRGHDGFTSSWRSVADTLRQKVEDAVREHPDYRVVFTGHSLGGALATVAGADLRGNGYDIDVFSYGAPRVGNRAFAEFLTVQTGGTLYRITHTNDIVPRLPPREFGYSHSSPEYWIKSGTLVPVTRNDIVKIEGIDATGGNNQPNIPDIPAHLWYFGLIGTCL

SEQ ID NO: 3638 - protein, 269 aa, Thermomyces lanuginosus
EVSQDLFNQFNLFAQYSAAAYCGKNNDAPAGTNITCTGNACPEVEKADATFLYSFEDSGVGDVTGFLALDNTNKLIVLSFRGSRSIENWIGNLNFDLKEINDICSGCRGHDGFTSSWRSVADTLRQKVEDAVREHPDYRVVFTGHSLGGALATVAGADLRGNGYDIDVFSYGAPRVGNRAFAEFLTVQTGGTLYRITHTNDIVPRLPPREFGYSHSSPEYWIKSGTLVPVTRNDIVKIEGIDATGGNNQPNIPDIPAHLWYFGLIGTDL

SEQ ID NO: 3639 - protein, 269 aa, Thermomyces lanuginosus
EVSQDLFNQFNLFAQYSAAAYCGKNNDAPAGTNITCTGNACPEVEKADATFLYSFEDSGVGDVTGFLALDNTNKLIVLSFRGSRSIENWIGNLNFDLKEINDICSGCRGHDGFTSSWRSVADTLRQKVEDAVREHPDYRVVFTGHSLGGAWATVAGADLRGNGYDIDVFSYGAPRVGNRAFAEFLTVQTGGTLYRITHTNDIVPRLPPREFGYSHSSPEYWIKSGTLVPVTRNDIVKIEGIDATGGNNQPNIPDIPAHLWYFGLIGTCL

SEQ ID NO: 3640 - protein, 269 aa, Thermomyces lanuginosus
EVSQDLFNQFNLFAQYSAAAYCGKNNDAPAGTNITCTGNACPEVEKADATFLYSFEDSGVGDVTGFLALDNTNKLIVLSFRGSRSIENWIGNLNFDLKEINDICSGCRGHDGFTSSWRSVADTLRQKVEDAVREHPDYRVVFTGHSLGGALATVAGADLRGNGYDIDVFSYGAPRVGNRAFAEFLTVQTGGTLYRITHTNDIVPRLPPREFGYSHSSPEYWIKSGTLVPVTRNDIVKIEGIDATGGNNQPNIPDWPAHLWYFGLIGTCL

SEQ ID NO: 3641 - protein, 269 aa, Thermomyces lanuginosus
EVSQDLFNQFNLFAQYSAAAYCGKNNDAPAGTNITCTGNACPEVEKADATFLYSFEDSGVGDVTGFLALDNTNKLIVLSFRGSRSIENWIGNLNFDLKEINDICSGCRGHDGFTSSWRSVADTLRQKVEDAVREHPDYRVVHTGHSLGGALATVAGADLRGNGYDIDVFSYGAPRVGNRAFAEFLTVQTGGTLYRITHTNDIVPRLPPREFGYSHSSPEYWIKSGTLVPVTRNDIVKIEGIDATGGNNQPNIPDIPAHLWYFGLIGTCL

SEQ ID NO: 3642 - protein, 269 aa, Thermomyces lanuginosus
EVSQDLFNQFNLFAQYSAAAYCGKNNDAPAGTNITCTGNACPEVEKADATFLYSFEDSGVGDVTGFLALDNTNKLIVLSFRGSRSIENWIGNLNFDLKEINDICSGCRGHDGFTSSWRSVADTLRQKVEDAVREHPDYRVVFTGHSLGGALATVAGADLRGNGYDIDVFSYGAPRVGNRAFAEFLTVQTGGTLYRITHTNDIVPRLPPREFGYSHSSPEYWIKSGTLVPVTRNDIVKIEGIDATGGNNQPNIXDIPAHLWYFGLIGTCL

SEQ ID NO: 3643 - protein, 269 aa, Thermomyces lanuginosus
EVSQDLFNQFNLFAQYSAAAYCGKNNDAPAGTNITCTGNACPEVEKADATFLYSFEDSGVGDVTGFLALDNTNKLIVLSFRGSRSIENWIGNLNFDLKKINDICSGCRGHDGFTSSWRSVADTLRQKVEDAVREHPDYRVVFTGHSLGGALATVAGADLRGNGYDIDVFSYGAPRVGNRAFAEFLTVQTGGTLYRITHTNDIVPRLPPREFGYSHSSPEYWIKSGTLVPVTRNDIVKIEGIDATGGNNQPNIPDIPAHLWYFGLIGTCL

SEQ ID NO: 3644 - protein, 269 aa, Thermomyces lanuginosus
EVSQDLFNQFNLFAQYSAAAYCGKNNDAPAGTNITCTGNACPEVEKADATFLYSFEDSGVGDVTGFLALDNTNKLIVLSFRGSRSIENWIGNLNFDLKEINDICSGCRGHDGFTSSWRSVADTLRQKVEDAVREHPDYRVVFTGHSLGGALATVAGADLRGNGYDIDVFSYGAPRVGNRKFAEFLTVQTGGTLYRITHTNDIVPRLPPREFGYSHSSPEYWIKSGTLVPVTRNDIVKIEGIDATGGNNQPNIPDIPAHLWYFGLIGTCL

SEQ ID NO: 3645 - protein, 269 aa, Thermomyces lanuginosus
EVSQDLFNQFNLFAGYSAAAYCGKNNDAPAGTNITCTGNACPEVEKADATFLYSFEDSGVGDVTGFLALDNTNKLIVLSFRGSRSIENWIGNLNFDLKEINDICSGCRGHDGFTSSWRSVADTLRQKVEDAVREHPDYRVVFTGHSLGGALATVAGADLRGNGYDIDVFSYGAPRVGNRAFAEFLTVQTGGTLYRITHTNDIVPRLPPREFGYSHSSPEYWIKSGTLVPVTRNDIVKIEGIDATGGNNQPNIPDIPAHLWYFGLIGTCL

SEQ ID NO: 3646 - protein, 269 aa, Thermomyces lanuginosus
EVSQDLFNQFNLFAQYSAAAYCGHNNDAPAGTNITCTGNACPEVEKADATFLYSFEDSGVGDVTGFLALDNTNKLIVLSFRGSRSIENWIGNLNFDLKEINDICSGCRGHDGFTSSWRSVADTLRQKVEDAVREHPDYRVVFTGHSLGGALATVAGADLRGNGYDIDVFSYGAPRVGNRAFAEFLTVQTGGTLYRITHTNDIVPRLPPREFGYSHSSPEYWIKSGTLVPVTRNDIVKIEGIDATGGNNQPNIPDIPAHLWYFGLIGTCL

SEQ ID NO: 3647 - protein, 269 aa, Thermomyces lanuginosus
EVSQDLFNQFNLFAQYSAAAYCGKGNDAPAGTNITCTGNACPEVEKADATFLYSFEDSGVGDVTGFLALDNTNKLIVLSFRGSRSIENWIGNLNFDLKEINDICSGCRGHDGFTSSWRSVADTLRQKVEDAVREHPDYRVVFTGHSLGGALATVAGADLRGNGYDIDVFSYGAPRVGNRAFAEFLTVQTGGTLYRITHTNDIVPRLPPREFGYSHSSPEYWIKSGTLVPVTRNDIVKIEGIDATGGNNQPNIPDIPAHLWYFGLIGTCL

SEQ ID NO: 3648 - protein, 269 aa, Thermomyces lanuginosus
EVSQDLFNQFNLFAQYSAAAYCGKNNDAPAGTNITCTGNACPEVEKADATFLYSFEDSGVGDVTGFLALDNTNKLIVLSFRGSRSIENWIGNLNFDLKEINDICSGCRGHDGFTSSWRSVADTLRQKVEDAVREHPDYRVVFTGHSLGGALATVAGADLRGNGYDIDVFSYGAPRVGNRAFAEFLTVQTGGTLYRITHTNDIVPRLPPREFGYSHSSPEYWIKSGTLVPVTRNDIVKIEGIDATGGNNQPNIPDFPAHLWYFGLIGTCL

SEQ ID NO: 3649 - protein, 269 aa, Thermomyces lanuginosus
EVSQDLFNQFNLFAQYSAAAYCGKNNDAPAGTNITCTGNACPEVEKADATFLYSFEDSGVGDVTGFLALDNTNKLIVLSFRGSRSIENWIGNLNFDLKEINDICSGCRGHDGFTSSWRSVADTLRQKVEDAVREHPDYRVVFTGHSLGGALATVAGADLRGNGYDIDVFSYGAPRVGNRAFAEFLTVQTGGTLYRITHTNDIVPRLPPREFGYSHSSPEYWIKSGNLVPVTRNDIVKIEGIDATGGNNQPNIPDIPAHLWYFGLIGTCL

SEQ ID NO: 3650 - protein, 269 aa, Thermomyces lanuginosus
EVSQDLFNQFNLFAQYSAAAYCGKNNDAPAGTNITCTGKACPEVEKADATFLYSFEDSGVGDVTGFLALDNTNKLIVLSFRGSRSIENWIGNLNFDLKEINDICSGCRGHDGFTSSWRSVADTLRQKVEDAVREHPDYRVVFTGHSLGGALATVAGADLRGNGYDIDVFSYGAPRVGNRAFAEFLTVQTGGTLYRITHTNDIVPRLPPREFGYSHSSPEYWIKSGTLVPVTRNDIVKIEGIDATGGNNQPNIPDIPAHLWYFGLIGTCL

SEQ ID NO: 3651 - protein, 269 aa, Thermomyces lanuginosus
EVSQDLFNQFNLFAQYSAAAYCGKNNDAPAGTNITCTGNACPEVEKADATFLYSFEDSGVGDVTGFLALDNTNKLIVLSFRGSRSIENWIGNLNFDLKEINDICSGCRGHDGFTSSWRSVADTLRQKVEDAVREHPDYRVVFTGHSLGGALATVAGADLRGNGYDIDVFSYGAPRVGNRAFAEFLTVQTGGTLYRITHTNDVVPRLPPREFGYSHSSPEYWIKSGTLVPVTRNDIVKIEGIDATGGNNQPNIPDIPAHLWYFGLIGTCL

SEQ ID NO: 3652 - protein, 269 aa, Thermomyces lanuginosus
EVSQDLFNQFNLFAQYSAAAYCEKNNDAPAGTNITCTGNACPEVEKADATFLYSFEDSGVGDVTGFLALDNTNKLIVLSFRGSRSIENWIGNLNFDLKEINDICSGCRGHDGFTSSWRSVADTLRQKVEDAVREHPDYRVVFTGHSLGGALATVAGADLRGNGYDIDVFSYGAPRVGNRAFAEFLTVQTGGTLYRITHTNDIVPRLPPREFGYSHSSPEYWIKSGTLVPVTRNDIVKIEGIDATGGNNQPNIPDIPAHLWYFGLIGTCL

SEQ ID NO: 3653 - protein, 269 aa, Thermomyces lanuginosus
EVSQDLFNQFNLFAQYSAAAVCGKNNDAPAGTNITCTGNACPEVEKADATFLYSFEDSGVGDVTGFLALDNTNKLIVLSFRGSRSIENWIGNLNFDLKEINDICSGCRGHDGFTSSWRSVADTLRQKVEDAVREHPDYRVVFTGHSLGGALATVAGADLRGNGYDIDVFSYGAPRVGNRAFAEFLTVQTGGTLYRITHTNDIVPRLPPREFGYSHSSPEYWIKSGTLVPVTRNDIVKIEGIDATGGNNQPNIPDIPAHLWYFGLIGTCL

SEQ ID NO: 3654 - protein, 269 aa, Thermomyces lanuginosus
EVSQDLFNWFNLFAQYSAAAYCGKNNDAPAGTNITCTGNACPEVEKADATFLYSFEDSGVGDVTGFLALDNTNKLIVLSFRGSRSIENWIGNLNFDLKEINDICSGCRGHDGFTSSWRSVADTLRQKVEDAVREHPDYRVVFTGHSLGGALATVAGADLRGNGYDIDVFSYGAPRVGNRAFAEFLTVQTGGTLYRITHTNDIVPRLPPREFGYSHSSPEYWIKSGTLVPVTRNDIVKIEGIDATGGNNQPNIPDIPAHLWYFGLIGTCL

SEQ ID NO: 3655 - protein, 269 aa, Thermomyces lanuginosus
EVSQDLFNQFNLFAQYSAAAYCGKNNDAPAGTNITCTGNACPEVEKADATFLYSFEDSGVGDVTGFHALDNTNKLIVLSFRGSRSIENWIGNLNFDLKEINDICSGCRGHDGFTSSWRSVADTLRQKVEDAVREHPDYRVVFTGHSLGGALATVAGADLRGNGYDIDVFSYGAPRVGNRAFAEFLTVQTGGTLYRITHTNDIVPRLPPREFGYSHSSPEYWIKSGTLVPVTRNDIVKIEGIDATGGNNQPNIPDIPAHLWYFGLIGTCL

SEQ ID NO: 3656 - protein, 269 aa, Thermomyces lanuginosus
EVSQDLFNQFNLFAQYSAAAYCGKNNDAPAGTNITCTGNACPEVEKADATFLYSFEDSGVGDVTGFLYLDNTNKLIVLSFRGSRSIENWIGNLNFDLKEINDICSGCRGHDGFTSSWRSVADTLRQKVEDAVREHPDYRVVFTGHSLGGALATVAGADLRGNGYDIDVFSYGAPRVGNRAFAEFLTVQTGGTLYRITHTNDIVPRLPPREFGYSHSSPEYWIKSGTLVPVTRNDIVKIEGIDATGGNNQPNIPDIPAHLWYFGLIGTCL

SEQ ID NO: 3657 - protein, 269 aa, Thermomyces lanuginosus
EVSQDLFNQFNLFAQYSAAAYCGKNNDAPAGTNITCTGNACPEVEKADATFLYSFEDSGVGDVTGFLALDTTNKLIVLSFRGSRSIENWIGNLNFDLKEINDICSGCRGHDGFTSSWRSVADTLRQKVEDAVREHPDYRVVFTGHSLGGALATVAGADLRGNGYDIDVFSYGAPRVGNRAFAEFLTVQTGGTLYRITHTNDIVPRLPPREFGYSHSSPEYWIKSGTLVPVTRNDIVKIEGIDATGGNNQPNIPDIPAHLWYFGLIGTCL

SEQ ID NO: 3658 - protein, 269 aa, Thermomyces lanuginosus
EVSQDLFNQFNLFAQYSAAAYCGKNNDAPAGTNITCTGNACPEVEKADATFLYSFEDSGVGDVTGFLALDNTNKLIVLSFRGSRSIENWIGNLNFDLKEINDICSGCRGHDGFTSSWRSVADTLRQKVEDAVREHPDYRVVFTGHSLGGALATVAGADLRGNGYDIDVFSYGAPRVGNRAFAEFLTVQTGGTLYRITHTNDIVPRLPPREFGYSHSSPEYWIKPGTLVPVTRNDIVKIEGIDATGGNNQPNIPDIPAHLWYFGLIGTCL

SEQ ID NO: 3659 - protein, 269 aa, Thermomyces lanuginosus
EVSQDLFNQFNLFAQYSAAAYCGKNNDAPAGTNITCTGNACPEVEKADATFLYSFEDSGVDDVTGFLALDNTNKLIVLSFRGSRSIENWIGNLNFDLKEINDICSGCRGHDGFTSSWRSVADTLRQKVEDAVREHPDYRVVFTGHSLGGALATVAGADLRGNGYDIDVFSYGAPRVGNRAFAEFLTVQTGGTLYRITHTNDIVPRLPPREFGYSHSSPEYWIKSGTLVPVTRNDIVKIEGIDATGGNNQPNIPDIPAHLWYFGLIGTCL

SEQ ID NO: 3660 - protein, 269 aa, Thermomyces lanuginosus
EVSQDLFNQFNLFAQYSAAAYCGKNNDAPAGTNITCTGNACPEVEKADATFLYSFEDSGVGDVTGFLALDNTNGLIVLSFRGSRSIENWIGNLNFDLKEINDICSGCRGHDGFTSSWRSVADTLRQKVEDAVREHPDYRVVFTGHSLGGALATVAGADLRGNGYDIDVFSYGAPRVGNRAFAEFLTVQTGGTLYRITHTNDIVPRLPPREFGYSHSSPEYWIKSGTLVPVTRNDIVKIEGIDATGGNNQPNIPDIPAHLWYFGLIGTCL

SEQ ID NO: 3661 - protein, 269 aa, Thermomyces lanuginosus
EVSQDLFNQFNLFAQYSAAAYCGKNNDAPAGTNITCTGNACPEVEKADATGLYSFEDSGVGDVTGFLALDNTNKLIVLSFRGSRSIENWIGNLNFDLKEINDICSGCRGHDGFTSSWRSVADTLRQKVEDAVREHPDYRVVFTGHSLGGALATVAGADLRGNGYDIDVFSYGAPRVGNRAFAEFLTVQTGGTLYRITHTNDIVPRLPPREFGYSHSSPEYWIKSGTLVPVTRNDIVKIEGIDATGGNNQPNIPDIPAHLWYFGLIGTCL

SEQ ID NO: 3662 - protein, 269 aa, Thermomyces lanuginosus
EVSQDLFNQFNLFAQYSAAAYCGKNNDAPAGTNITCTGNACPEVEKADATFLYSFEDSGVGDVTGFLALDNTNKQIVLSFRGSRSIENWIGNLNFDLKEINDICSGCRGHDGFTSSWRSVADTLRQKVEDAVREHPDYRVVFTGHSLGGALATVAGADLRGNGYDIDVFSYGAPRVGNRAFAEFLTVQTGGTLYRITHTNDIVPRLPPREFGYSHSSPEYWIKSGTLVPVTRNDIVKIEGIDATGGNNQPNIPDIPAHLWYFGLIGTCL

SEQ ID NO: 3663 - protein, 269 aa, Thermomyces lanuginosus
EVSQDLFNQFKLFAQYSAAAYCGKNNDAPAGTNITCTGNACPEVEKADATFLYSFEDSGVGDVTGFLALDNTNKLIVLSFRGSRSIENWIGNLNFDLKEINDICSGCRGHDGFTSSWRSVADTLRQKVEDAVREHPDYRVVFTGHSLGGALATVAGADLRGNGYDIDVFSYGAPRVGNRAFAEFLTVQTGGTLYRITHTNDIVPRLPPREFGYSHSSPEYWIKSGTLVPVTRNDIVKIEGIDATGGNNQPNIPDIPAHLWYFGLIGTCL

SEQ ID NO: 3664 - protein, 269 aa, Thermomyces lanuginosus
EVSQDLFNQFNLFAQYSAAAYCGKNNDAPAGINITCTGNACPEVEKADATFLYSFEDSGVGDVTGFLALDNTNKLIVLSFRGSRSIENWIGNLNFDLKEINDICSGCRGHDGFTSSWRSVADTLRQKVEDAVREHPDYRVVFTGHSLGGALATVAGADLRGNGYDIDVFSYGAPRVGNRAFAEFLTVQTGGTLYRITHTNDIVPRLPPREFGYSHSSPEYWIKSGTLVPVTRNDIVKIEGIDATGGNNQPNIPDIPAHLWYFGLIGTCL

SEQ ID NO: 3665 - protein, 269 aa, Thermomyces lanuginosus
EVSQDLFNQFNLFAQYSAAAYCGKNNDAPAGTNITCTGNACPEVEKADATFLYSFEDSGVGDVTGFLALDNTNKLIVLSFRGSRSIENWIGNLNFDLKEINDICSGCRGHDGFTSSWRSVADTLRQKVEDAVRPHPDYRVVFTGHSLGGALATVAGADLRGNGYDIDVFSYGAPRVGNRAFAEFLTVQTGGTLYRITHTNDIVPRLPPREFGYSHSSPEYWIKSGTLVPVTRNDIVKIEGIDATGGNNQPNIPDIPAHLWYFGLIGTCL

SEQ ID NO: 3666 - protein, 269 aa, Thermomyces lanuginosus
EVSQDLFNQFNLFAQYSAAAYCGKNNDAPAGTNITCTGNACPEVEKADATFLYSFEDSGVGDVTGFLALDNTNKLIVLSFRGSRSIENWIGNLNFDLKEINDICSGCRGHDGFTSSWRSVADTLRQKVEDAVREHPDYRVVFTGHSLGGALATYAGADLRGNGYDIDVFSYGAPRVGNRAFAEFLTVQTGGTLYRITHTNDIVPRLPPREFGYSHSSPEYWIKSGTLVPVTRNDIVKIEGIDATGGNNQPNIPDIPAHLWYFGLIGTCL

SEQ ID NO: 3667 - protein, 269 aa, Thermomyces lanuginosus
EVSQDLFNAFNLFAQYSAAAYCGKNNDAPAGTNITCTGNACPEVEKADATFLYSFEDSGVGDVTGFLALDNTNKLIVLSFRGSRSIENWIGNLNFDLKEINDICSGCRGHDGFTSSWRSVADTLRQKVEDAVREHPDYRVVFTGHSLGGALATVAGADLRGNGYDIDVFSYGAPRVGNRAFAEFLTVQTGGTLYRITHTNDIVPRLPPREFGYSHSSPEYWIKSGTLVPVTRNDIVKIEGIDATGGNNQPNIPDIPAHLWYFGLIGTCL

SEQ ID NO: 3668 - protein, 269 aa, Thermomyces lanuginosus
EVSQDLFNQFNLFAQYSAAAYCGKNNDAPAGTNITCTGNACPEVEKADATFLYSFEDSGVGDVTGFLALDNTNSLIVLSFRGSRSIENWIGNLNFDLKEINDICSGCRGHDGFTSSWRSVADTLRQKVEDAVREHPDYRVVFTGHSLGGALATVAGADLRGNGYDIDVFSYGAPRVGNRAFAEFLTVQTGGTLYRITHTNDIVPRLPPREFGYSHSSPEYWIKSGTLVPVTRNDIVKIEGIDATGGNNQPNIPDIPAHLWYFGLIGTCL

SEQ ID NO: 3669 - protein, 269 aa, Thermomyces lanuginosus
EVSQDLFNQFNLFAQYSAAAYCGKNNDAPAGTNITCTGNACPEVEKADATFLYSFEDSGVGDVTGFLALDNTNKLIVLSFRGSRSIENWIGNLNFDLKEINDICSGCRGHDGFTSSWRSVQDTLRQKVEDAVREHPDYRVVFTGHSLGGALATVAGADLRGNGYDIDVFSYGAPRVGNRAFAEFLTVQTGGTLYRITHTNDIVPRLPPREFGYSHSSPEYWIKSGTLVPVTRNDIVKIEGIDATGGNNQPNIPDIPAHLWYFGLIGTCL

SEQ ID NO: 3670 - protein, 269 aa, Thermomyces lanuginosus
EVSQDLFNQFNLFAQYSAAAYCGKNNDAPAGTNITCTGNACPEVEKADATFLYSFEDSGVGDVTGFLCLDNTNKLIVLSFRGSRSIENWIGNLNFDLKEINDICSGCRGHDGFTSSWRSVADTLRQKVEDAVREHPDYRVVFTGHSLGGALATVAGADLRGNGYDIDVFSYGAPRVGNRAFAEFLTVQTGGTLYRITHTNDIVPRLPPREFGYSHSSPEYWIKSGTLVPVTRNDIVKIEGIDATGGNNQPNIPDIPAHLWYFGLIGTCL

SEQ ID NO: 3671 - protein, 269 aa, Thermomyces lanuginosus
EVSQDLFNQFNLFAQYSAAAYCGKNNDAPAGTNITCTGNACPEVEKADATFLYSFEDSGVGDVTGFLALDNTNKLIVLSFRGSRSIENWIGNLNFDLKEINDICSGCRGHDGFTSSWRSVADTLRQKVEDAVREHPDYRVVFTGHSLGGALATVAGADLRGNGYDIDVFSYGAPRVGNRAFAEFLTVQTGGTLYRITHTNDIVPRLPPREFGYSHSSPEYWIKSGTLVPVTRNDIVKIEGITATGGNNQPNIPDIPAHLWYFGLIGTCL

SEQ ID NO: 3672 - protein, 269 aa, Thermomyces lanuginosus
EVSQDLFNQFNLFAQYSAAAYCHKNNDAPAGTNITCTGNACPEVEKADATFLYSFEDSGVGDVTGFLALDNTNKLIVLSFRGSRSIENWIGNLNFDLKEINDICSGCRGHDGFTSSWRSVADTLRQKVEDAVREHPDYRVVFTGHSLGGALATVAGADLRGNGYDIDVFSYGAPRVGNRAFAEFLTVQTGGTLYRITHTNDIVPRLPPREFGYSHSSPEYWIKSGTLVPVTRNDIVKIEGIDATGGNNQPNIPDIPAHLWYFGLIGTCL

SEQ ID NO: 3673 - protein, 269 aa, Thermomyces lanuginosus
EVSQDLFNQFNLFAQYSAAAYCGKNNDAPAGTNITCTGNACPEVEKADATFLYSFEDSGVGDVTGFLALDRTNKLIVLSFRGSRSIENWIGNLNFDLKEINDICSGCRGHDGFTSSWRSVADTLRQKVEDAVREHPDYRVVFTGHSLGGALATVAGADLRGNGYDIDVFSYGAPRVGNRAFAEFLTVQTGGTLYRITHTNDIVPRLPPREFGYSHSSPEYWIKSGTLVPVTRNDIVKIEGIDATGGNNQPNIPDIPAHLWYFGLIGTCL

SEQ ID NO: 3674 - protein, 269 aa, Thermomyces lanuginosus
EVSQDLFGQFNLFAQYSAAAYCGKNNDAPAGTNITCTGNACPEVEKADATFLYSFEDSGVGDVTGFLALDNTNKLIVLSFRGSRSIENWIGNLNFDLKEINDICSGCRGHDGFTSSWRSVADTLRQKVEDAVREHPDYRVVFTGHSLGGALATVAGADLRGNGYDIDVFSYGAPRVGNRAFAEFLTVQTGGTLYRITHTNDIVPRLPPREFGYSHSSPEYWIKSGTLVPVTRNDIVKIEGIDATGGNNQPNIPDIPAHLWYFGLIGTCL

SEQ ID NO: 3675 - protein, 269 aa, Thermomyces lanuginosus
EVSQDLFNQFNLFAQYSAAAYCGKNNDAPAGTNITCTGNACPEVQKADATFLYSFEDSGVGDVTGFLALDNTNKLIVLSFRGSRSIENWIGNLNFDLKEINDICSGCRGHDGFTSSWRSVADTLRQKVEDAVREHPDYRVVFTGHSLGGALATVAGADLRGNGYDIDVFSYGAPRVGNRAFAEFLTVQTGGTLYRITHTNDIVPRLPPREFGYSHSSPEYWIKSGTLVPVTRNDIVKIEGIDATGGNNQPNIPDIPAHLWYFGLIGTCL

SEQ ID NO: 3676 - protein, 269 aa, Thermomyces lanuginosus
EVSQDLFNQFNLFAQYSAAAYCGKNNDAPAGTNITCTGNACPEVEKADATFLYSFEDSGVGDVTGFLALDNTNKLIVLSFRGSRSIENWIGNLNFDLKEINDICSGCRGHDGFTSSWRSVADTLRQKVEDAVREHPDYRVVFTGHSLGGALATVAGADLRGNGYDIDVFSYGAPRVGNRAFAEFLTVQTDGTLYRITHTNDIVPRLPPREFGYSHSSPEYWIKSGTLVPVTRNDIVKIEGIDATGGNNQPNIPDIPAHLWYFGLIGTCL

SEQ ID NO: 3677 - protein, 269 aa, Thermomyces lanuginosus
EVSQDLFNQFNLFAQYSAAAYCGKNNDAPAGTNITCTGNACPEVEKADATFLYSFEDSGVGDVTGFLALDNTNKLHVLSFRGSRSIENWIGNLNFDLKEINDICSGCRGHDGFTSSWRSVADTLRQKVEDAVREHPDYRVVFTGHSLGGALATVAGADLRGNGYDIDVFSYGAPRVGNRAFAEFLTVQTGGTLYRITHTNDIVPRLPPREFGYSHSSPEYWIKSGTLVPVTRNDIVKIEGIDATGGNNQPNIPDIPAHLWYFGLIGTCL

SEQ ID NO: 3678 - protein, 269 aa, Thermomyces lanuginosus
EVSQDLFNQFNLFAQYSAAAYCGKNNDAPAGTNITCCGNACPEVEKADATFLYSFEDSGVGDVTGFLALDNTNKLIVLSFRGSRSIENWIGNLNFDLKEINDICSGCRGHDGFTSSWRSVADTLRQKVEDAVREHPDYRVVFTGHSLGGALATVAGADLRGNGYDIDVFSYGAPRVGNRAFAEFLTVQTGGTLYRITHTNDIVPRLPPREFGYSHSSPEYWIKSGTLVPVTRNDIVKIEGIDATGGNNQPNIPDIPAHLWYFGLIGTCL

SEQ ID NO: 3679 - protein, 269 aa, Thermomyces lanuginosus
EVSQDLFNQFNLFAQYSAAAYCGKNNDAPAGTNITCTGNACPEVEKADATFLYSFEDSGVGDVTGFLALDNTNKLIVLSFRGSRSIENWIGNLNFDLKEINDICSGCRGHDGFTSSWRSVADTLRQKVEDAVREHPDYRVVFTGHSLGGALATVAGADLRGNGYDIDVFSYGAPRVGNRAFAEFLTVQTGGTLYRITHTNDPVPRLPPREFGYSHSSPEYWIKSGTLVPVTRNDIVKIEGIDATGGNNQPNIPDIPAHLWYFGLIGTCL

SEQ ID NO: 3680 - protein, 269 aa, Thermomyces lanuginosus
EVSQDLFNQFNLFAQYSAAAYCGKWNDAPAGTNITCTGNACPEVEKADATFLYSFEDSGVGDVTGFLALDNTNKLIVLSFRGSRSIENWIGNLNFDLKEINDICSGCRGHDGFTSSWRSVADTLRQKVEDAVREHPDYRVVFTGHSLGGALATVAGADLRGNGYDIDVFSYGAPRVGNRAFAEFLTVQTGGTLYRITHTNDIVPRLPPREFGYSHSSPEYWIKSGTLVPVTRNDIVKIEGIDATGGNNQPNIPDIPAHLWYFGLIGTCL

SEQ ID NO: 3681 - protein, 269 aa, Thermomyces lanuginosus
EVSQDLFNQFNLFAQYSAAAYCGKANDAPAGTNITCTGNACPEVEKADATFLYSFEDSGVGDVTGFLALDNTNKLIVLSFRGSRSIENWIGNLNFDLKEINDICSGCRGHDGFTSSWRSVADTLRQKVEDAVREHPDYRVVFTGHSLGGALATVAGADLRGNGYDIDVFSYGAPRVGNRAFAEFLTVQTGGTLYRITHTNDIVPRLPPREFGYSHSSPEYWIKSGTLVPVTRNDIVKIEGIDATGGNNQPNIPDIPAHLWYFGLIGTCL

SEQ ID NO: 3682 - protein, 269 aa, Thermomyces lanuginosus
EVSQDLFNQFNLFAQYSAAAYCGKNNDAPAGTNITCTGNACPEVEKADATFLYSFEDSGVGDVTGFLALDNTNKLIVLSFRGSRSIENWIGNLNFDLKEMNDICSGCRGHDGFTSSWRSVADTLRQKVEDAVREHPDYRVVFTGHSLGGALATVAGADLRGNGYDIDVFSYGAPRVGNRAFAEFLTVQTGGTLYRITHTNDIVPRLPPREFGYSHSSPEYWIKSGTLVPVTRNDIVKIEGIDATGGNNQPNIPDIPAHLWYFGLIGTCL

SEQ ID NO: 3683 - protein, 269 aa, Thermomyces lanuginosus
EVSQDLFTQFNLFAQYSAAAYCGKNNDAPAGTNITCTGNACPEVEKADATFLYSFEDSGVGDVTGFLALDNTNKLIVLSFRGSRSIENWIGNLNFDLKEINDICSGCRGHDGFTSSWRSVADTLRQKVEDAVREHPDYRVVFTGHSLGGALATVAGADLRGNGYDIDVFSYGAPRVGNRAFAEFLTVQTGGTLYRITHTNDIVPRLPPREFGYSHSSPEYWIKSGTLVPVTRNDIVKIEGIDATGGNNQPNIPDIPAHLWYFGLIGTCL

SEQ ID NO: 3684 - protein, 269 aa, Thermomyces lanuginosus
EVSQDLFNQFNLFAQYSAAAYCGKNNDAPAGTNITCTGNACPEVEKADATFLYSFEDSGVGDVTGFLALDKTNKLIVLSFRGSRSIENWIGNLNFDLKEINDICSGCRGHDGFTSSWRSVADTLRQKVEDAVREHPDYRVVFTGHSLGGALATVAGADLRGNGYDIDVFSYGAPRVGNRAFAEFLTVQTGGTLYRITHTNDIVPRLPPREFGYSHSSPEYWIKSGTLVPVTRNDIVKIEGIDATGGNNQPNIPDIPAHLWYFGLIGTCL

SEQ ID NO: 3685 - protein, 269 aa, Thermomyces lanuginosus
EVSQDLFNQFNLFAQYSAAAYCGKNNDAPAGTNITCTGNACPEVEKADATFLYSFEDSGVGDVTGFLALDNTNKLIVLSFRGSRSIENWIGNLNFDLKEINDICSGCRGHDGFTSSWRSVADTLRQKVEDAVREHPDYRVVFTGHSLGGATATVAGADLRGNGYDIDVFSYGAPRVGNRAFAEFLTVQTGGTLYRITHTNDIVPRLPPREFGYSHSSPEYWIKSGTLVPVTRNDIVKIEGIDATGGNNQPNIPDIPAHLWYFGLIGTCL

SEQ ID NO: 3686 - protein, 269 aa, Thermomyces lanuginosus
EVSQDLFNQFNLFAQYSAAAYCGKNNDAPAGTNITCTGNACPEVEKADATFLYSFEDSGVGDVTGTLALDNTNKLIVLSFRGSRSIENWIGNLNFDLKEINDICSGCRGHDGFTSSWRSVADTLRQKVEDAVREHPDYRVVFTGHSLGGALATVAGADLRGNGYDIDVFSYGAPRVGNRAFAEFLTVQTGGTLYRITHTNDIVPRLPPREFGYSHSSPEYWIKSGTLVPVTRNDIVKIEGIDATGGNNQPNIPDIPAHLWYFGLIGTCL

SEQ ID NO: 3687 - protein, 269 aa, Thermomyces lanuginosus
EVSQDLFNQFNLFAQYSAAAYCSKNNDAPAGTNITCTGNACPEVEKADATFLYSFEDSGVGDVTGFLALDNTNKLIVLSFRGSRSIENWIGNLNFDLKEINDICSGCRGHDGFTSSWRSVADTLRQKVEDAVREHPDYRVVFTGHSLGGALATVAGADLRGNGYDIDVFSYGAPRVGNRAFAEFLTVQTGGTLYRITHTNDIVPRLPPREFGYSHSSPEYWIKSGTLVPVTRNDIVKIEGIDATGGNNQPNIPDIPAHLWYFGLIGTCL

SEQ ID NO: 3688 - protein, 269 aa, Thermomyces lanuginosus
EVSQDLFNQFNLFAQYSAAAYCGKNNDAPAGTNITCTGNACPEVEKADATFLYSFEDSGVGDVTGFLALDNTNKLIVLSFRGSRSIENWIGNLNFDLKEINDICSGCRGHDGFTSSWRSVADTLRQKVEDAVREHPDYRVVFTGHSLGGALATVAGADLRGNGYDIDVFSYGAPRVGNRAFAEFLTVQTGGTLYRITHTNDIVPRLPPREFGYSHSSPEYWIKSGTLVPVTRQDIVKIEGIDATGGNNQPNIPDIPAHLWYFGLIGTCL

SEQ ID NO: 3689 - protein, 269 aa, Thermomyces lanuginosus
EVSQDLFNQFNLFAQYSAAAYCGKNNDAQAGTNITCTGNACPEVEKADATFLYSFEDSGVGDVTGFLALDNTNKLIVLSFRGSRSIENWIGNLNFDLKEINDICSGCRGHDGFTSSWRSVADTLRQKVEDAVREHPDYRVVFTGHSLGGALATVAGADLRGNGYDIDVFSYGAPRVGNRAFAEFLTVQTGGTLYRITHTNDIVPRLPPREFGYSHSSPEYWIKSGTLVPVTRNDIVKIEGIDATGGNNQPNIPDIPAHLWYFGLIGTCL

SEQ ID NO: 3690 - protein, 269 aa, Thermomyces lanuginosus
EVSQDLFNQFNLFAQYSAAAYCGKNNDAPAGTNITCTGNACPEVEKADATFLYSFEDSGVGDVTGFLALDNTNKLIVLSFRGSRSIENWIGNLNFDLKEINDICSGCRGHDGFTSSWRSVADTLRQKVEDAVREHPDYRVVFTGHSLGGALATVAGADLRGNGYDIDVFSYGAPRVGNRAFAEFLTVQTGGTLYRITHTNDIVPRLPPREFGYSHSSPEYWIKSGTLVPVTRNDIVKIEGIDATGGNNQPNIPDIPAHLWYFHLIGTCL

SEQ ID NO: 3691 - protein, 269 aa, Thermomyces lanuginosus
EVSQDLFNQFNLFAQYSAAAYCGKNNDAPAGTNITCTGNACPEVEKADATFLYSFEDSGVGDVTGFLALDNTNKLIVLSFRGSRSIENWIGNLNFDLKEINDICSGCRGHDGFTSSWRSVADTLRQKVEDAVREHPDYRVVFTGHSLGGALATVAGADLRGNGYDIDVFSYGAPRVGNRAFAEFLTVQTGGTLYRITHTNDIVPRLPPREFGYSHSSPEYWIKSGTLVPVTRNDIVKIEGIDATGGNNQPNKPDIPAHLWYFGLIGTCL

SEQ ID NO: 3692 - protein, 269 aa, Thermomyces lanuginosus
QVSQDLFNQFNLFAQYSAAAYCGKNNDAPAGTNITCTGNACPEVEKADATFLYSFEDSGVGDVTGFLALDNTNKLIVLSFRGSRSIENWIGNLNFDLKEINDICSGCRGHDGFTSSWRSVADTLRQKVEDAVREHPDYRVVFTGHSLGGALATVAGADLRGNGYDIDVFSYGAPRVGNRAFAEFLTVQTGGTLYRITHTNDIVPRLPPREFGYSHSSPEYWIKSGTLVPVTRNDIVKIEGIDATGGNNQPNIPDIPAHLWYFGLIGTCL

SEQ ID NO: 3693 - protein, 269 aa, Thermomyces lanuginosus
EVSQDLFNQFNLFAQYSAAAYCGKNNDAPAGTNITCTGNACPEVEKADATFLYSFEDSGVGDVTGFLALDNTNKLIVLSFRGSRSIENWIGNLNFDLDEINDICSGCRGHDGFTSSWRSVADTLRQKVEDAVREHPDYRVVFTGHSLGGALATVAGADLRGNGYDIDVFSYGAPRVGNRAFAEFLTVQTGGTLYRITHTNDIVPRLPPREFGYSHSSPEYWIKSGTLVPVTRNDIVKIEGIDATGGNNQPNIPDIPAHLWYFGLIGTCL

SEQ ID NO: 3694 - protein, 269 aa, Thermomyces lanuginosus
EVSQDLFNQFNLFAQYSAAAYCGKNNDAPAGTNITCTGEACPEVEKADATFLYSFEDSGVGDVTGFLALDNTNKLIVLSFRGSRSIENWIGNLNFDLKEINDICSGCRGHDGFTSSWRSVADTLRQKVEDAVREHPDYRVVFTGHSLGGALATVAGADLRGNGYDIDVFSYGAPRVGNRAFAEFLTVQTGGTLYRITHTNDIVPRLPPREFGYSHSSPEYWIKSGTLVPVTRNDIVKIEGIDATGGNNQPNIPDIPAHLWYFGLIGTCL

SEQ ID NO: 3695 - protein, 269 aa, Thermomyces lanuginosus
EVSQDLFNQFNLFAQYSAAAYCGKNNDAPAGTNITCTGNACPEVEKADATFLYSFEDSGVGDVTGFLALDNTNKLIVLSFRGSRSIENWIGNLNFDLKEINDICSGCRGHDGFTSSWRSVADTLRQKVEDTVREHPDYRVVFTGHSLGGALATVAGADLRGNGYDIDVFSYGAPRVGNRAFAEFLTVQTGGTLYRITHTNDIVPRLPPREFGYSHSSPEYWIKSGTLVPVTRNDIVKIEGIDATGGNNQPNIPDIPAHLWYFGLIGTCL

SEQ ID NO: 3696 - protein, 269 aa, Thermomyces lanuginosus
EVSQDLFNQFNLFAQYSAAAYCGKNNDAPAGTNITCTGNACPEVEKADATFLYSFEDSGVGDVTGFLALDNTNKLIVLSFRGSRSIENWIGNLNFDLKEINDICSGCRGHDGFTSSWRSVADTLRQKVEDAVREHPDYRVVFTGHSLGGALATVAGADLRGNGYDIDVFSYGAPRVGNLAFAEFLTVQTGGTLYRITHTNDIVPRLPPREFGYSHSSPEYWIKSGTLVPVTRNDIVKIEGIDATGGNNQPNIPDIPAHLWYFGLIGTCL

SEQ ID NO: 3697 - protein, 269 aa, Thermomyces lanuginosus
EVSQDLFNQFNLFAQYSAAAYCGKNNDAPAGTNITCTGNACPEVEKADATFLYSFEDSGVGDVTGFLALDNTNKLIVLSFRGSRSIENWIGNLNFDLKEINDICSGCRGHDGFTSSWRSVADTLRQKVEDAVREHPDYRVVFTGHSLGGALATVAGADLRGNGYDIDVFSYGAPRVGNRAFAEFLTWQTGGTLYRITHTNDIVPRLPPREFGYSHSSPEYWIKSGTLVPVTRNDIVKIEGIDATGGNNQPNIPDIPAHLWYFGLIGTCL

SEQ ID NO: 3698 - protein, 269 aa, Thermomyces lanuginosus
EVSQDLFNQFNLFAQYSAAAYCGKNNDAPAGTNITCTGNACPEVEKADATFLYSFEDSGVGDVTGNLALDNTNKLIVLSFRGSRSIENWIGNLNFDLKEINDICSGCRGHDGFTSSWRSVADTLRQKVEDAVREHPDYRVVFTGHSLGGALATVAGADLRGNGYDIDVFSYGAPRVGNRAFAEFLTVQTGGTLYRITHTNDIVPRLPPREFGYSHSSPEYWIKSGTLVPVTRNDIVKIEGIDATGGNNQPNIPDIPAHLWYFGLIGTCL

SEQ ID NO: 3699 - protein, 269 aa, Thermomyces lanuginosus
EVSQDLFNQFNLFAQYSAAAYCGKNNDAPAGTNITCTGNACPEVEKADATFLYSFEDSGVGDVTGFLALDNTNKLIVLSFRGSRSIENWILNLNFDLKEINDICSGCRGHDGFTSSWRSVADTLRQKVEDAVREHPDYRVVFTGHSLGGALATVAGADLRGNGYDIDVFSYGAPRVGNRAFAEFLTVQTGGTLYRITHTNDIVPRLPPREFGYSHSSPEYWIKSGTLVPVTRNDIVKIEGIDATGGNNQPNIPDIPAHLWYFGLIGTCL

SEQ ID NO: 3700 - protein, 269 aa, Thermomyces lanuginosus
EVSQDLFNQFNLFAQYSAAAYCGKNNDAPAGTNITCTGNACPEVEKADATFLYSFEDSGVGDVTGFLALDNTNKLIVLSFRGSRSIENWIGNLNFDLKEINDICSGCRGHDGFTSSWRSVADTLRQKVEDAVREHPRYRVVFTGHSLGGALATVAGADLRGNGYDIDVFSYGAPRVGNRAFAEFLTVQTGGTLYRITHTNDIVPRLPPREFGYSHSSPEYWIKSGTLVPVTRNDIVKIEGIDATGGNNQPNIPDIPAHLWYFGLIGTCL

SEQ ID NO: 3701 - protein, 269 aa, Thermomyces lanuginosus
EVSQDLFNQFNLFAQYSAAAYCGKNNDAMAGTNITCTGNACPEVEKADATFLYSFEDSGVGDVTGFLALDNTNKLIVLSFRGSRSIENWIGNLNFDLKEINDICSGCRGHDGFTSSWRSVADTLRQKVEDAVREHPDYRVVFTGHSLGGALATVAGADLRGNGYDIDVFSYGAPRVGNRAFAEFLTVQTGGTLYRITHTNDIVPRLPPREFGYSHSSPEYWIKSGTLVPVTRNDIVKIEGIDATGGNNQPNIPDIPAHLWYFGLIGTCL

SEQ ID NO: 3702 - protein, 269 aa, Thermomyces lanuginosus
EVSQDLFNQFNLKAQYSAAAYCGKNNDAPAGTNITCTGNACPEVEKADATFLYSFEDSGVGDVTGFLALDNTNKLIVLSFRGSRSIENWIGNLNFDLKEINDICSGCRGHDGFTSSWRSVADTLRQKVEDAVREHPDYRVVFTGHSLGGALATVAGADLRGNGYDIDVFSYGAPRVGNRAFAEFLTVQTGGTLYRITHTNDIVPRLPPREFGYSHSSPEYWIKSGTLVPVTRNDIVKIEGIDATGGNNQPNIPDIPAHLWYFGLIGTCL

SEQ ID NO: 3703 - protein, 269 aa, Thermomyces lanuginosus
EVSQDLFNQFNLFAQYSAAAYCGKNNDAPAGTNITCTGNACPEVEKADATFLYSFEDSGVGDVTGFLALDNTNKLIVLSFRGSRSIENWIGNLNFDLKEINDICSGCRGHDGFTSSWRSVADTLRQKVEDAVREHPDYRVVFTGHSLGGALATVAGADLRGNGYDIDVFSYGAPRVGNRAFAEFLTVQTGGNLYRITHTNDIVPRLPPREFGYSHSSPEYWIKSGTLVPVTRNDIVKIEGIDATGGNNQPNIPDIPAHLWYFGLIGTCL

SEQ ID NO: 3704 - protein, 269 aa, Thermomyces lanuginosus
EVSQDLFNQFNLFAQYSAAAYCGKNNDAPAGTNITCTGNACPEVEKADATFLYSFEDSGVGDVTGFLALDNTNKLIVLSFRGSRSIENWIGNLNFDLKEINDICSGCRGHDGFTSSWRSVADTLRQKVEDQVREHPDYRVVFTGHSLGGALATVAGADLRGNGYDIDVFSYGAPRVGNRAFAEFLTVQTGGTLYRITHTNDIVPRLPPREFGYSHSSPEYWIKSGTLVPVTRNDIVKIEGIDATGGNNQPNIPDIPAHLWYFGLIGTCL

SEQ ID NO: 3705 - protein, 269 aa, Thermomyces lanuginosus
EVSQDLFNQFNLFAQYSAAAYCGKNNDAPAGTNITCTGNACPEVEKADATFLYSFEDGGVGDVTGFLALDNTNKLIVLSFRGSRSIENWIGNLNFDLKEINDICSGCRGHDGFTSSWRSVADTLRQKVEDAVREHPDYRVVFTGHSLGGALATVAGADLRGNGYDIDVFSYGAPRVGNRAFAEFLTVQTGGTLYRITHTNDIVPRLPPREFGYSHSSPEYWIKSGTLVPVTRNDIVKIEGIDATGGNNQPNIPDIPAHLWYFGLIGTCL

SEQ ID NO: 3706 - protein, 269 aa, Thermomyces lanuginosus
EVSQDLFNQFNLFAQYSAAAYCGKNNDAPAGTNITCTGNACPEVEKADATFLYSFEDSGVGDVTGFLALDNTNKLIVLSFRGSQSIENWIGNLNFDLKEINDICSGCRGHDGFTSSWRSVADTLRQKVEDAVREHPDYRVVFTGHSLGGALATVAGADLRGNGYDIDVFSYGAPRVGNRAFAEFLTVQTGGTLYRITHTNDIVPRLPPREFGYSHSSPEYWIKSGTLVPVTRNDIVKIEGIDATGGNNQPNIPDIPAHLWYFGLIGTCL

SEQ ID NO: 3707 - protein, 269 aa, Thermomyces lanuginosus
EVSQDLFNQFNLFAQYSAAAYCGKNNDAPAGTNPTCTGNACPEVEKADATFLYSFEDSGVGDVTGFLALDNTNKLIVLSFRGSRSIENWIGNLNFDLKEINDICSGCRGHDGFTSSWRSVADTLRQKVEDAVREHPDYRVVFTGHSLGGALATVAGADLRGNGYDIDVFSYGAPRVGNRAFAEFLTVQTGGTLYRITHTNDIVPRLPPREFGYSHSSPEYWIKSGTLVPVTRNDIVKIEGIDATGGNNQPNIPDIPAHLWYFGLIGTCL

SEQ ID NO: 3708 - protein, 269 aa, Thermomyces lanuginosus
EVSQDLFNQFNLFAQYSAAAYCGKNNDAPAGTNITCTGNACPEVEKADATFEYSFEDSGVGDVTGFLALDNTNKLIVLSFRGSRSIENWIGNLNFDLKEINDICSGCRGHDGFTSSWRSVADTLRQKVEDAVREHPDYRVVFTGHSLGGALATVAGADLRGNGYDIDVFSYGAPRVGNRAFAEFLTVQTGGTLYRITHTNDIVPRLPPREFGYSHSSPEYWIKSGTLVPVTRNDIVKIEGIDATGGNNQPNIPDIPAHLWYFGLIGTCL

SEQ ID NO: 3709 - protein, 269 aa, Thermomyces lanuginosus
EVSQDLFNQFNLFAQYSAAAYCGKNNDAPAGTNITCTGNACPEVEKADATFLYSFEDSGVGDVTGFLALDNTNKLIVLSFRGSRSIENWIGNLNFDLKEINDICSGCRGHDGFTSSWRSVADTLRQKVEDAVREHPPYRVVFTGHSLGGALATVAGADLRGNGYDIDVFSYGAPRVGNRAFAEFLTVQTGGTLYRITHTNDIVPRLPPREFGYSHSSPEYWIKSGTLVPVTRNDIVKIEGIDATGGNNQPNIPDIPAHLWYFGLIGTCL

SEQ ID NO: 3710 - protein, 269 aa, Thermomyces lanuginosus
EVSQDLFNQFNLFAQYSAAAYCGKNNDHPAGTNITCTGNACPEVEKADATFLYSFEDSGVGDVTGFLALDNTNKLIVLSFRGSRSIENWIGNLNFDLKEINDICSGCRGHDGFTSSWRSVADTLRQKVEDAVREHPDYRVVFTGHSLGGALATVAGADLRGNGYDIDVFSYGAPRVGNRAFAEFLTVQTGGTLYRITHTNDIVPRLPPREFGYSHSSPEYWIKSGTLVPVTRNDIVKIEGIDATGGNNQPNIPDIPAHLWYFGLIGTCL

SEQ ID NO: 3711 - protein, 269 aa, Thermomyces lanuginosus
EVSQDLFNQFNLFAQYSAAAYCGKNNDAPAGTNITCTGNACPEVEKADATFLYSFEDSGVGDVTGFLALDNTNKLIVLSFRGSRSIENWIGNLNFDLKEINDICSGCRGHDGFTSSWRSVADTLRQKVEDAVREHPDYRVVFTGHSLGGALATVAGADLRGNGYDIDVFSYGAPRVGRRAFAEFLTVQTGGTLYRITHTNDIVPRLPPREFGYSHSSPEYWIKSGTLVPVTRNDIVKIEGIDATGGNNQPNIPDIPAHLWYFGLIGTCL

SEQ ID NO: 3712 - protein, 269 aa, Thermomyces lanuginosus
EVSQDLMNQFNLFAQYSAAAYCGKNNDAPAGTNITCTGNACPEVEKADATFLYSFEDSGVGDVTGFLALDNTNKLIVLSFRGSRSIENWIGNLNFDLKEINDICSGCRGHDGFTSSWRSVADTLRQKVEDAVREHPDYRVVFTGHSLGGALATVAGADLRGNGYDIDVFSYGAPRVGNRAFAEFLTVQTGGTLYRITHTNDIVPRLPPREFGYSHSSPEYWIKSGTLVPVTRNDIVKIEGIDATGGNNQPNIPDIPAHLWYFGLIGTCL

SEQ ID NO: 3713 - protein, 269 aa, Thermomyces lanuginosus
EVSQDLFNQFNLFAQYSAAAYCGKNNDAPAGTNITCTGNACPEVEKADATFLYSFEDSGVGDVTGFLAADNTNKLIVLSFRGSRSIENWIGNLNFDLKEINDICSGCRGHDGFTSSWRSVADTLRQKVEDAVREHPDYRVVFTGHSLGGALATVAGADLRGNGYDIDVFSYGAPRVGNRAFAEFLTVQTGGTLYRITHTNDIVPRLPPREFGYSHSSPEYWIKSGTLVPVTRNDIVKIEGIDATGGNNQPNIPDIPAHLWYFGLIGTCL

SEQ ID NO: 3714 - protein, 269 aa, Thermomyces lanuginosus
EVSQDLFNQFYLFAQYSAAAYCGKNNDAPAGTNITCTGNACPEVEKADATFLYSFEDSGVGDVTGFLALDNTNKLIVLSFRGSRSIENWIGNLNFDLKEINDICSGCRGHDGFTSSWRSVADTLRQKVEDAVREHPDYRVVFTGHSLGGALATVAGADLRGNGYDIDVFSYGAPRVGNRAFAEFLTVQTGGTLYRITHTNDIVPRLPPREFGYSHSSPEYWIKSGTLVPVTRNDIVKIEGIDATGGNNQPNIPDIPAHLWYFGLIGTCL

SEQ ID NO: 3715 - protein, 269 aa, Thermomyces lanuginosus
EVSQDLFNQFNLFAQYSAAAYCGKENDAPAGTNITCTGNACPEVEKADATFLYSFEDSGVGDVTGFLALDNTNKLIVLSFRGSRSIENWIGNLNFDLKEINDICSGCRGHDGFTSSWRSVADTLRQKVEDAVREHPDYRVVFTGHSLGGALATVAGADLRGNGYDIDVFSYGAPRVGNRAFAEFLTVQTGGTLYRITHTNDIVPRLPPREFGYSHSSPEYWIKSGTLVPVTRNDIVKIEGIDATGGNNQPNIPDIPAHLWYFGLIGTCL

SEQ ID NO: 3716 - protein, 269 aa, Thermomyces lanuginosus
EVSQDLFNQFNLFAQYSAAAYCIKNNDAPAGTNITCTGNACPEVEKADATFLYSFEDSGVGDVTGFLALDNTNKLIVLSFRGSRSIENWIGNLNFDLKEINDICSGCRGHDGFTSSWRSVADTLRQKVEDAVREHPDYRVVFTGHSLGGALATVAGADLRGNGYDIDVFSYGAPRVGNRAFAEFLTVQTGGTLYRITHTNDIVPRLPPREFGYSHSSPEYWIKSGTLVPVTRNDIVKIEGIDATGGNNQPNIPDIPAHLWYFGLIGTCL

SEQ ID NO: 3717 - protein, 269 aa, Thermomyces lanuginosus
EVSQDLFNQFNLFAQYSAAAYCGKNNDAPAGTNITCTGNACPEVEKADATFLYSFEDSGVGDVTGFLALDNTNKLIVLSFRGSRSIENWIGNQNFDLKEINDICSGCRGHDGFTSSWRSVADTLRQKVEDAVREHPDYRVVFTGHSLGGALATVAGADLRGNGYDIDVFSYGAPRVGNRAFAEFLTVQTGGTLYRITHTNDIVPRLPPREFGYSHSSPEYWIKSGTLVPVTRNDIVKIEGIDATGGNNQPNIPDIPAHLWYFGLIGTCL

SEQ ID NO: 3718 - protein, 269 aa, Thermomyces lanuginosus
EVSQDLFNQFNLFAQYSAAAYCGKNNDAPAGTNITCTGNACPEVEKADVTFLYSFEDSGVGDVTGFLALDNTNKLIVLSFRGSRSIENWIGNLNFDLKEINDICSGCRGHDGFTSSWRSVADTLRQKVEDAVREHPDYRVVFTGHSLGGALATVAGADLRGNGYDIDVFSYGAPRVGNRAFAEFLTVQTGGTLYRITHTNDIVPRLPPREFGYSHSSPEYWIKSGTLVPVTRNDIVKIEGIDATGGNNQPNIPDIPAHLWYFGLIGTCL

SEQ ID NO: 3719 - protein, 269 aa, Synthetic construct
EVSQDLFNQFNLFAQYSAAAYCGKNNDAPAGTNITCTGNACPEVEKADATFLYSFEDSGVGDVTGFLALDNTNKLIVLSFRGSRSIENWIGNLNFDLKEINDICSGCRGHDGFTSSWRSVADTLRQKVEDAVREHPDYRVVFTGHSLGGALATVAGADLRGNGYDIDVFSYGAPRVGNRAFAEFLTVQTGGTLYRITHTNDIVPRLPPRWFGYSHSSPEYWIKSGTLVPVTRNDIVKIEGIDATGGNNQPNIPDIPAHLWYFGLIGTCL

SEQ ID NO: 3720 - protein, 269 aa, Thermomyces lanuginosus
EVSQDLFNQFNLFAQYSAAAYCGKNNDAPAGTNITCTGNACPEVEKADATFLYSFEDSGVGDVTGFLALDNTNKLIVLSFRGSRSIENWIGNLNFDLKEINDICSGCRGHDGFTSSWRSVADTLRQFVEDAVREHPDYRVVFTGHSLGGALATVAGADLRGNGYDIDVFSYGAPRVGNRAFAEFLTVQTGGTLYRITHTNDIVPRLPPREFGYSHSSPEYWIKSGTLVPVTRNDIVKIEGIDATGGNNQPNIPDIPAHLWYFGLIGTCL

SEQ ID NO: 3721 - protein, 269 aa, Thermomyces lanuginosus
EVSQDLFNQFNLFAQYSAAACCGKNNDAPAGTNITCTGNACPEVEKADATFLYSFEDSGVGDVTGFLALDNTNKLIVLSFRGSRSIENWIGNLNFDLKEINDICSGCRGHDGFTSSWRSVADTLRQKVEDAVREHPDYRVVFTGHSLGGALATVAGADLRGNGYDIDVFSYGAPRVGNRAFAEFLTVQTGGTLYRITHTNDIVPRLPPREFGYSHSSPEYWIKSGTLVPVTRNDIVKIEGIDATGGNNQPNIPDIPAHLWYFGLIGTCL

SEQ ID NO: 3722 - protein, 269 aa, Thermomyces lanuginosus
EVSQDLFNQFNLFAQYSAAAYCGKNNDAPAGTNITCTGNACPEVEKADATFLYSFEDSGVGDVTGFLASDNTNKLIVLSFRGSRSIENWIGNLNFDLKEINDICSGCRGHDGFTSSWRSVADTLRQKVEDAVREHPDYRVVFTGHSLGGALATVAGADLRGNGYDIDVFSYGAPRVGNRAFAEFLTVQTGGTLYRITHTNDIVPRLPPREFGYSHSSPEYWIKSGTLVPVTRNDIVKIEGIDATGGNNQPNIPDIPAHLWYFGLIGTCL

SEQ ID NO: 3723 - protein, 269 aa, Thermomyces lanuginosus
EVSQDLFNQFNLFAQYSAAAYCGKNNDAPAGTNITCTGNACPEVEKADATFLYSFEDSGVGDVTGFLALDNTNKLIVLSFRGSRSIENWIGNLNFDLKEINDICSGCRGHDGFTSSWRSVADTLRQKVEDAVREHPDYRVVFTGHSLGGALATVAGADLRGNGYDIDVFSYGAPRVGNRAFAEFLTVQTGGTLYRITHTNDIVPRLPPREFGYSHSSPEYWIKSGTLVPVTRGDIVKIEGIDATGGNNQPNIPDIPAHLWYFGLIGTCL

SEQ ID NO: 3724 - protein, 269 aa, Thermomyces lanuginosus
EVSQDLFNQFNLFAQYSAAAYCGKNKDAPAGTNITCTGNACPEVEKADATFLYSFEDSGVGDVTGFLALDNTNKLIVLSFRGSRSIENWIGNLNFDLKEINDICSGCRGHDGFTSSWRSVADTLRQKVEDAVREHPDYRVVFTGHSLGGALATVAGADLRGNGYDIDVFSYGAPRVGNRAFAEFLTVQTGGTLYRITHTNDIVPRLPPREFGYSHSSPEYWIKSGTLVPVTRNDIVKIEGIDATGGNNQPNIPDIPAHLWYFGLIGTCL

SEQ ID NO: 3725 - protein, 269 aa, Thermomyces lanuginosus
EVSSDLFNQFNLFAQYSAAAYCGKNNDAPAGTNITCTGNACPEVEKADATFLYSFEDSGVGDVTGFLALDNTNKLIVLSFRGSRSIENWIGNLNFDLKEINDICSGCRGHDGFTSSWRSVADTLRQKVEDAVREHPDYRVVFTGHSLGGALATVAGADLRGNGYDIDVFSYGAPRVGNRAFAEFLTVQTGGTLYRITHTNDIVPRLPPREFGYSHSSPEYWIKSGTLVPVTRNDIVKIEGIDATGGNNQPNIPDIPAHLWYFGLIGTCL

SEQ ID NO: 3726 - protein, 269 aa, Thermomyces lanuginosus
EVSQDLFNQFNLFAQYSAAAYCGKNNDAPAGTNITCTGNACPEVEKADATFLYSFEDSGVGDVTGFLALDNTNKLIVLSFRGSRSIENWIGNLNXDLKEINDICSGCRGHDGFTSSWRSVADTLRQKVEDAVREHPDYRVVFTGHSLGGALATVAGADLRGNGYDIDVFSYGAPRVGNRAFAEFLTVQTGGTLYRITHTNDIVPRLPPREFGYSHSSPEYWIKSGTLVPVTRNDIVKIEGIDATGGNNQPNIPDIPAHLWYFGLIGTCL

SEQ ID NO: 3727 - protein, 269 aa, Thermomyces lanuginosus
EVSQDLFNQFNLFAQYSAAAYCGKNNDAPAGTNITCTGNACPEVEKADATFLYSFEDSGVGDVTGFLALDNTNKLIVLSFRGSRSIENWIGNLNFDLKEINDICSGCRGHDGFTSSWRSVADTLRQKVEDAVREHPDYRVVFTGHSLGGALATVAGADLRGNGYDIDVFSYGAPRVGNRAFAEFLTVETGGTLYRITHTNDIVPRLPPREFGYSHSSPEYWIKSGTLVPVTRNDIVKIEGIDATGGNNQPNIPDIPAHLWYFGLIGTCL

SEQ ID NO: 3728 - protein, 269 aa, Thermomyces lanuginosus
EVSQDLFNQFNLFAQYSAAAYCGKNNDAPAGTNITCTGNACPEVEKADATFMYSFEDSGVGDVTGFLALDNTNKLIVLSFRGSRSIENWIGNLNFDLKEINDICSGCRGHDGFTSSWRSVADTLRQKVEDAVREHPDYRVVFTGHSLGGALATVAGADLRGNGYDIDVFSYGAPRVGNRAFAEFLTVQTGGTLYRITHTNDIVPRLPPREFGYSHSSPEYWIKSGTLVPVTRNDIVKIEGIDATGGNNQPNIPDIPAHLWYFGLIGTCL

SEQ ID NO: 3729 - protein, 269 aa, Thermomyces lanuginosus
EVSQDLFNQFNLFAQYSAAAYCGKNNDAVAGTNITCTGNACPEVEKADATFLYSFEDSGVGDVTGFLALDNTNKLIVLSFRGSRSIENWIGNLNFDLKEINDICSGCRGHDGFTSSWRSVADTLRQKVEDAVREHPDYRVVFTGHSLGGALATVAGADLRGNGYDIDVFSYGAPRVGNRAFAEFLTVQTGGTLYRITHTNDIVPRLPPREFGYSHSSPEYWIKSGTLVPVTRNDIVKIEGIDATGGNNQPNIPDIPAHLWYFGLIGTCL

SEQ ID NO: 3730 - protein, 269 aa, Thermomyces lanuginosus
EVSQDLFNQFNLFAQYSAAAYCGKNNDAPAGTNITCTGNACPEVEKADATFLYSFEDSGVGDVTGFLALDNTNKLIVLSFRGSRSIENWIGNLNFDLKEINDICSGCRGHDGFTSSWRSVADTLRQKVEDAVREHDDYRVVFTGHSLGGALATVAGADLRGNGYDIDVFSYGAPRVGNRAFAEFLTVQTGGTLYRITHTNDIVPRLPPREFGYSHSSPEYWIKSGTLVPVTRNDIVKIEGIDATGGNNQPNIPDIPAHLWYFGLIGTCL

SEQ ID NO: 3731 - protein, 269 aa, Thermomyces lanuginosus
EVSQDLFNQFNLFAQYSAAAYCGKNNDAPAGTNITCTGNACPEVEKADATFLYSFEDSGVGDVTGFLALDNTNKLIVLSFRGSRSIENWIGNLNFDLKEINDICSGCRGHDGFTSSWRSVADTLRQEVEDAVREHPDYRVVFTGHSLGGALATVAGADLRGNGYDIDVFSYGAPRVGNRAFAEFLTVQTGGTLYRITHTNDIVPRLPPREFGYSHSSPEYWIKSGTLVPVTRNDIVKIEGIDATGGNNQPNIPDIPAHLWYFGLIGTCL

SEQ ID NO: 3732 - protein, 269 aa, Thermomyces lanuginosus
EVSQDLFNQFNLFAQYSAAAYCGKNNDAPAGTNITCTGNACPEVEKADATFLYSFEDSGVGDVTGFLALDNTNKLIVLSFRGSRSIENWIGNLNFDLKEINDICSGCRGHDGFTSSWRSVAYTLRQKVEDAVREHPDYRVVFTGHSLGGALATVAGADLRGNGYDIDVFSYGAPRVGNRAFAEFLTVQTGGTLYRITHTNDIVPRLPPREFGYSHSSPEYWIKSGTLVPVTRNDIVKIEGIDATGGNNQPNIPDIPAHLWYFGLIGTCL

SEQ ID NO: 3733 - protein, 269 aa, Thermomyces lanuginosus
EVSQDLFNQFNLFAQYSAAAYCGKNNDAPAGTNITCTGNACPEVEKADATFLYSFEDSGVGDVTGFLALDNTNKLIVLSFRGSRSIENWIGNLNFDLKEINDICSGCRGHDGFTSSWRSVADTLRQKVEDAVREHPDYRVVFTGHSLGGALATVAGADLRGNGYDIDVFSYGAPRVGNRAFAEFLTVQTGGTLYRITHTNDIVPRLPPREFGYSHSSPEYWIKSGTLVPVTRNDIVKIEGIDATGGNNQPNIPDIPAHLWYFGLIGTHL

SEQ ID NO: 3734 - protein, 269 aa, Thermomyces lanuginosus
EVSQDLFNQFNLFAQYSAAAYCGKNNDAPAGTNITCTHNACPEVEKADATFLYSFEDSGVGDVTGFLALDNTNKLIVLSFRGSRSIENWIGNLNFDLKEINDICSGCRGHDGFTSSWRSVADTLRQKVEDAVREHPDYRVVFTGHSLGGALATVAGADLRGNGYDIDVFSYGAPRVGNRAFAEFLTVQTGGTLYRITHTNDIVPRLPPREFGYSHSSPEYWIKSGTLVPVTRNDIVKIEGIDATGGNNQPNIPDIPAHLWYFGLIGTCL

SEQ ID NO: 3735 - protein, 269 aa, Thermomyces lanuginosus
EVSQDLFNQFNLFAQYSAAAYCGKNNDAPAGTNITCGGNACPEVEKADATFLYSFEDSGVGDVTGFLALDNTNKLIVLSFRGSRSIENWIGNLNFDLKEINDICSGCRGHDGFTSSWRSVADTLRQKVEDAVREHPDYRVVFTGHSLGGALATVAGADLRGNGYDIDVFSYGAPRVGNRAFAEFLTVQTGGTLYRITHTNDIVPRLPPREFGYSHSSPEYWIKSGTLVPVTRNDIVKIEGIDATGGNNQPNIPDIPAHLWYFGLIGTCL

SEQ ID NO: 3736 - protein, 269 aa, Thermomyces lanuginosus
EVSQDLFNQFNLFAQYSAAAYCGKNNDAPAGTNITCTGNACPEVEKAPATFLYSFEDSGVGDVTGFLALDNTNKLIVLSFRGSRSIENWIGNLNFDLKEINDICSGCRGHDGFTSSWRSVADTLRQKVEDAVREHPDYRVVFTGHSLGGALATVAGADLRGNGYDIDVFSYGAPRVGNRAFAEFLTVQTGGTLYRITHTNDIVPRLPPREFGYSHSSPEYWIKSGTLVPVTRNDIVKIEGIDATGGNNQPNIPDIPAHLWYFGLIGTCL

SEQ ID NO: 3737 - protein, 269 aa, Thermomyces lanuginosus
EVSQDLFNQFNLFAQYSAAAYCGKNNDAPAGTNITCTGNACPEVEKADATFLYSFEDSGVGDVTGFLALDNTNKLIVLSFRGSRIIENWIGNLNFDLKEINDICSGCRGHDGFTSSWRSVADTLRQKVEDAVREHPDYRVVFTGHSLGGALATVAGADLRGNGYDIDVFSYGAPRVGNRAFAEFLTVQTGGTLYRITHTNDIVPRLPPREFGYSHSSPEYWIKSGTLVPVTRNDIVKIEGIDATGGNNQPNIPDIPAHLWYFGLIGTCL

SEQ ID NO: 3738 - protein, 269 aa, Thermomyces lanuginosus
EVSQDLFNQFNLFAQYSAAAYCGKNNDAPAGTNITCTGNACPEVEKADATFLYSFEDSGVGDVTGFLALDNTNKLIVLSFRGSRSIENWIGNLNFDLKEINDICDGCRGHDGFTSSWRSVADTLRQKVEDAVREHPDYRVVFTGHSLGGALATVAGADLRGNGYDIDVFSYGAPRVGNRAFAEFLTVQTGGTLYRITHTNDIVPRLPPREFGYSHSSPEYWIKSGTLVPVTRNDIVKIEGIDATGGNNQPNIPDIPAHLWYFGLIGTCL

SEQ ID NO: 3739 - protein, 269 aa, Thermomyces lanuginosus
EVSQDLFNQFNLFAQYSAAAYCGKNNDAPAGTNITCTGNACPEVEKADATFLYSFEDSGVGDVTGFLALDNTNKLIVLSFRGSRSIENWIGNLNFDLKEINDICSGCRGHDGFTSSWRSVADTLRQKVEDAVREHPDYRVVFTGHSLGGALATVAGADLRGNGYDIDVFSYGAPRVGNRAFAEFLTVQTGGTLYRITHTNDIVPRLPPRSFGYSHSSPEYWIKSGTLVPVTRNDIVKIEGIDATGGNNQPNIPDIPAHLWYFGLIGTCL

SEQ ID NO: 3740 - protein, 269 aa, Thermomyces lanuginosus
EVSQDLFNQFNLFAQYSAAAYCGTNNDAPAGTNITCTGNACPEVEKADATFLYSFEDSGVGDVTGFLALDNTNKLIVLSFRGSRSIENWIGNLNFDLKEINDICSGCRGHDGFTSSWRSVADTLRQKVEDAVREHPDYRVVFTGHSLGGALATVAGADLRGNGYDIDVFSYGAPRVGNRAFAEFLTVQTGGTLYRITHTNDIVPRLPPREFGYSHSSPEYWIKSGTLVPVTRNDIVKIEGIDATGGNNQPNIPDIPAHLWYFGLIGTCL

SEQ ID NO: 3741 - protein, 269 aa, Thermomyces lanuginosus
EVSQDLFNQFNLFAQYSAAAYCGKNNDAPAGTNITCTGNACPEVEKADATFLYSFEDSGVGDVTGFLALDNTNKLIVLSFRGSRQIENWIGNLNFDLKEINDICSGCRGHDGFTSSWRSVADTLRQKVEDAVREHPDYRVVFTGHSLGGALATVAGADLRGNGYDIDVFSYGAPRVGNRAFAEFLTVQTGGTLYRITHTNDIVPRLPPREFGYSHSSPEYWIKSGTLVPVTRNDIVKIEGIDATGGNNQPNIPDIPAHLWYFGLIGTCL

SEQ ID NO: 3742 - protein, 269 aa, Thermomyces lanuginosus
EVSQDLFNQFNLFAQYSAAAYCGKNNDAPAGTNITCTGNACPEVEKADATFLYSFEDSGVGDVTGFLALDNTNKLIVLSFRGSRSIENWIGNLNFKLKEINDICSGCRGHDGFTSSWRSVADTLRQKVEDAVREHPDYRVVFTGHSLGGALATVAGADLRGNGYDIDVFSYGAPRVGNRAFAEFLTVQTGGTLYRITHTNDIVPRLPPREFGYSHSSPEYWIKSGTLVPVTRNDIVKIEGIDATGGNNQPNIPDIPAHLWYFGLIGTCL

SEQ ID NO: 3743 - protein, 269 aa, Thermomyces lanuginosus
EVSQDLFNQFNLFAQYSAAAYCGKNNDAPAGTNITCTGNACPEVEKADATFLYSFEDSGGGDVTGFLALDNTNKLIVLSFRGSRSIENWIGNLNFDLKEINDICSGCRGHDGFTSSWRSVADTLRQKVEDAVREHPDYRVVFTGHSLGGALATVAGADLRGNGYDIDVFSYGAPRVGNRAFAEFLTVQTGGTLYRITHTNDIVPRLPPREFGYSHSSPEYWIKSGTLVPVTRNDIVKIEGIDATGGNNQPNIPDIPAHLWYFGLIGTCL

SEQ ID NO: 3744 - protein, 269 aa, Thermomyces lanuginosus
EVSQDLFNQFNLFAQYSAAAYCGKNNDAPAGTNITCTGNACPEVEKADATFLYSFEDSGVGDVTGFLALDNTNKLIVLSFRGSRSLENWIGNLNFDLKEINDICSGCRGHDGFTSSWRSVADTLRQKVEDAVREHPDYRVVFTGHSLGGALATVAGADLRGNGYDIDVFSYGAPRVGNRAFAEFLTVQTGGTLYRITHTNDIVPRLPPREFGYSHSSPEYWIKSGTLVPVTRNDIVKIEGIDATGGNNQPNIPDIPAHLWYFGLIGTCL

SEQ ID NO: 3745 - protein, 269 aa, Thermomyces lanuginosus
EVSQDLFNQFNLFAQYSAASYCGKNNDAPAGTNITCTGNACPEVEKADATFLYSFEDSGVGDVTGFLALDNTNKLIVLSFRGSRSIENWIGNLNFDLKEINDICSGCRGHDGFTSSWRSVADTLRQKVEDAVREHPDYRVVFTGHSLGGALATVAGADLRGNGYDIDVFSYGAPRVGNRAFAEFLTVQTGGTLYRITHTNDIVPRLPPREFGYSHSSPEYWIKSGTLVPVTRNDIVKIEGIDATGGNNQPNIPDIPAHLWYFGLIGTCL

SEQ ID NO: 3746 - protein, 269 aa, Thermomyces lanuginosus
EVSQDLFNQFNLFAQYSAAAYCGKNNDAPAGTNITCTGNACPEVEKADATFLYSFEDSGVGDVTGLLALDNTNKLIVLSFRGSRSIENWIGNLNFDLKEINDICSGCRGHDGFTSSWRSVADTLRQKVEDAVREHPDYRVVFTGHSLGGALATVAGADLRGNGYDIDVFSYGAPRVGNRAFAEFLTVQTGGTLYRITHTNDIVPRLPPREFGYSHSSPEYWIKSGTLVPVTRNDIVKIEGIDATGGNNQPNIPDIPAHLWYFGLIGTCL

SEQ ID NO: 3747 - protein, 269 aa, Thermomyces lanuginosus
EVSQDLFNQFNLFAQYSAAAYCGKNNDAPAGTNITCTGNACPEVEKADATFLYSFEDSGVGDVTGFLALDNTNKLIVLSFRGSRSIENWIGNLNFDLKEINDICSGCRGHDGFTSSWRSVADTLRQKVEDAVREHPDYRVVFTGHSLGGALATVAGADLRGNGYDIDVFSYGAPRVGNRAFAEFLTVQTGGTLYRITHGNDIVPRLPPREFGYSHSSPEYWIKSGTLVPVTRNDIVKIEGIDATGGNNQPNIPDIPAHLWYFGLIGTCL

SEQ ID NO: 3748 - protein, 269 aa, Thermomyces lanuginosus
EVSQDLFNQFNLFAQYSAAAYCGKNNDAPAGTNITCTGNACPEVEKADATFLYSFEDSGVGDVTGFLALDNTNKLIVLSFRGSRSIENWIGNLNFDLKEINDICSGCRGHDGFTSSWRSVADTLRQKVEDAVREHPDYRVVFTGHSLGGALATVAGADLRGNGYDIDVFSYGAPRVGNRAFAEFLTVQTGGTLYRITHTNDIVPRLPPREFGYSHSSPEYWIKSGTLAPVTRNDIVKIEGIDATGGNNQPNIPDIPAHLWYFGLIGTCL

SEQ ID NO: 3749 - protein, 269 aa, Thermomyces lanuginosus
EVSQDAFNQFNLFAQYSAAAYCGKNNDAPAGTNITCTGNACPEVEKADATFLYSFEDSGVGDVTGFLALDNTNKLIVLSFRGSRSIENWIGNLNFDLKEINDICSGCRGHDGFTSSWRSVADTLRQKVEDAVREHPDYRVVFTGHSLGGALATVAGADLRGNGYDIDVFSYGAPRVGNRAFAEFLTVQTGGTLYRITHTNDIVPRLPPREFGYSHSSPEYWIKSGTLVPVTRNDIVKIEGIDATGGNNQPNIPDIPAHLWYFGLIGTCL

SEQ ID NO: 3750 - protein, 269 aa, Thermomyces lanuginosus
EVSQDLFNQFNLFAQYSAAAYCGKNNDAPAGTNITCTGNACPEVEKADATFLYSFEDSGVGDVTGFLALDNTNNLIVLSFRGSRSIENWIGNLNFDLKEINDICSGCRGHDGFTSSWRSVADTLRQKVEDAVREHPDYRVVFTGHSLGGALATVAGADLRGNGYDIDVFSYGAPRVGNRAFAEFLTVQTGGTLYRITHTNDIVPRLPPREFGYSHSSPEYWIKSGTLVPVTRNDIVKIEGIDATGGNNQPNIPDIPAHLWYFGLIGTCL

SEQ ID NO: 3751 - protein, 269 aa, Thermomyces lanuginosus
EVSQDLFNQFNLFAQYSAAAYCGKNNDAPAGTNITCTGNACPEVEKADATFLYSFEDSGVGDVTGFLALDNTNKLIVLSFRGSRSIENWIGNLNFDLKEINDICEGCRGHDGFTSSWRSVADTLRQKVEDAVREHPDYRVVFTGHSLGGALATVAGADLRGNGYDIDVFSYGAPRVGNRAFAEFLTVQTGGTLYRITHTNDIVPRLPPREFGYSHSSPEYWIKSGTLVPVTRNDIVKIEGIDATGGNNQPNIPDIPAHLWYFGLIGTCL

SEQ ID NO: 3752 - protein, 269 aa, Thermomyces lanuginosus
EVSQDLFNQFNLFAQYSAAAYCGKNNDAPAGTNITCTGPACPEVEKADATFLYSFEDSGVGDVTGFLALDNTNKLIVLSFRGSRSIENWIGNLNFDLKEINDICSGCRGHDGFTSSWRSVADTLRQKVEDAVREHPDYRVVFTGHSLGGALATVAGADLRGNGYDIDVFSYGAPRVGNRAFAEFLTVQTGGTLYRITHTNDIVPRLPPREFGYSHSSPEYWIKSGTLVPVTRNDIVKIEGIDATGGNNQPNIPDIPAHLWYFGLIGTCL

SEQ ID NO: 3753 - protein, 269 aa, Thermomyces lanuginosus
EVSQDLFNQFNLFAQYSAAAYCGKNNDAPAGTNITCTGNACPEVEKADATFLYSFEDSGVGDVTGFLALDNTNKLIVLSFRGSRSIENWIGNLNFDLKEINDICSGCRGHDGFTSSWRSVADTLRQKVEAAVREHPDYRVVFTGHSLGGALATVAGADLRGNGYDIDVFSYGAPRVGNRAFAEFLTVQTGGTLYRITHTNDIVPRLPPREFGYSHSSPEYWIKSGTLVPVTRNDIVKIEGIDATGGNNQPNIPDIPAHLWYFGLIGTCL

SEQ ID NO: 3754 - protein, 269 aa, Thermomyces lanuginosus
EVSQDLFNQFNLFAQYSAAAYCGKNNDAPAGTNITCTGNACPEVEKADATFLYSFEDSGVGDVTGFLALDNTNKLIVLSFRGSRSIENWIGNLNVDLKEINDICSGCRGHDGFTSSWRSVADTLRQKVEDAVREHPDYRVVFTGHSLGGALATVAGADLRGNGYDIDVFSYGAPRVGNRAFAEFLTVQTGGTLYRITHTNDIVPRLPPREFGYSHSSPEYWIKSGTLVPVTRNDIVKIEGIDATGGNNQPNIPDIPAHLWYFGLIGTCL

SEQ ID NO: 3755 - protein, 269 aa, Thermomyces lanuginosus
EVSQDLFNQFNLFAQYSAAAYCGKNNDAPAGTNITCTGNACPEVEKADATFLYSFEDSGVGDVTGFLALDNTNKLIVLSFRGSRSIENWIGNLNFDLKEINDICSGCRGHDGFTSSWRSVADTLRQKVEDAVREHPDYRVVFTGHSLGGALATVAGADLRGNGYDIDVFSYGAPRVGNRAFAEFLTVQTGGTLYRITHTNDIVPRLPPREFGYSHSSPEYWIKSGTLVPVTRNDIWKIEGIDATGGNNQPNIPDIPAHLWYFGLIGTCL

SEQ ID NO: 3756 - protein, 269 aa, Thermomyces lanuginosus
EVSQDLFNQFNLFAQYSAAAYCGKNNDAPAGTNITCTGNACPEVEKADATFLYSFEDSGVGDVTGFLALDNTNKLIVLSFRGSRSIENWIGNLNFDLKEINDICSGCRGHDGFTSSWRSVADTLRQKVEDAVREHPDYRVVFTGHSLGGALATVAGADLRGNGYDIDVFSYGAPRVGNRAFAEFLTVQTGGTLYRITHTNDIVPRLPPREFGYSHSSPEYWIKSGTLVPVMRNDIVKIEGIDATGGNNQPNIPDIPAHLWYFGLIGTCL

SEQ ID NO: 3757 - protein, 269 aa, Thermomyces lanuginosus
EVSQDLFNQFNLFAQYSAAAYCGKNNDAPAGTNITCTGNACPEVEKADATFLYSFEDSGVGDVTGFLALDNTNKLIVLSFRGSRSIENWIGNKNFDLKEINDICSGCRGHDGFTSSWRSVADTLRQKVEDAVREHPDYRVVFTGHSLGGALATVAGADLRGNGYDIDVFSYGAPRVGNRAFAEFLTVQTGGTLYRITHTNDIVPRLPPREFGYSHSSPEYWIKSGTLVPVTRNDIVKIEGIDATGGNNQPNIPDIPAHLWYFGLIGTCL

SEQ ID NO: 3758 - protein, 269 aa, Thermomyces lanuginosus
EVSQDLFNQFNLFAQYSAAAYCGKNNDAPAGTNITCTGNACPEVEKADATFLYSFEDSGVGDVTGFLALDNTNKLIVLSFRGSRSIENWIGNLNFDLKEINDICSGCRGHDGFTSSWRSVADTLRQKVEDAVREHPDYRVVFTGHSLGGALATVAGADLRGNGYDIDVFSYGAPRVGNRAFAEFLTVQTGGTLYRITHTNDIVPRLPPREFGYSHSSPEYWIKSGTLVPVTRNDIVKIEGIDATGGNNQPNIPDIPAHLWYFGNIGTCL

SEQ ID NO: 3759 - protein, 269 aa, Thermomyces lanuginosus
EVSQDLFNQFNLFAQYSAAAYCGKNNDAPAGTNITCTGNACPEVEKADATFLYSFEDSGVGDVTGFLALDNTNKLIVLSFRGSRSIENWIGNLNFDLKEINDICSGCRGHDGFTSSWRSVADTLRQKVEDAVREHPDYRVVFTGHSLGGALATVAGADLRGNGYDIDVFSYGAPRVGNRAFAEFLTVQTGGTLYRITHTNDIVPRLPPREFGYSHSSPEYWIKSGTLVPVTRNRIVKIEGIDATGGNNQPNIPDIPAHLWYFGLIGTCL

SEQ ID NO: 3760 - protein, 269 aa, Thermomyces lanuginosus
EVSQDLFNQFNLFAQYSAAAYCGKNNDAPAGTNITCTGNACPEVEKADATFLYSFEDSGVGDVTGFLALDNTNKLIVLSFRGSRSIENWIGNLNFDLKEINDICSGCRGHDGFTSSWRSVAFTLRQKVEDAVREHPDYRVVFTGHSLGGALATVAGADLRGNGYDIDVFSYGAPRVGNRAFAEFLTVQTGGTLYRITHTNDIVPRLPPREFGYSHSSPEYWIKSGTLVPVTRNDIVKIEGIDATGGNNQPNIPDIPAHLWYFGLIGTCL

SEQ ID NO: 3761 - protein, 269 aa, Thermomyces lanuginosus
EVSQDLFNQFNLFAQYSNAAYCGKNNDAPAGTNITCTGNACPEVEKADATFLYSFEDSGVGDVTGFLALDNTNKLIVLSFRGSRSIENWIGNLNFDLKEINDICSGCRGHDGFTSSWRSVADTLRQKVEDAVREHPDYRVVFTGHSLGGALATVAGADLRGNGYDIDVFSYGAPRVGNRAFAEFLTVQTGGTLYRITHTNDIVPRLPPREFGYSHSSPEYWIKSGTLVPVTRNDIVKIEGIDATGGNNQPNIPDIPAHLWYFGLIGTCL

SEQ ID NO: 3762 - protein, 269 aa, Thermomyces lanuginosus
EVSQDLFNQFNLAAQYSAAAYCGKNNDAPAGTNITCTGNACPEVEKADATFLYSFEDSGVGDVTGFLALDNTNKLIVLSFRGSRSIENWIGNLNFDLKEINDICSGCRGHDGFTSSWRSVADTLRQKVEDAVREHPDYRVVFTGHSLGGALATVAGADLRGNGYDIDVFSYGAPRVGNRAFAEFLTVQTGGTLYRITHTNDIVPRLPPREFGYSHSSPEYWIKSGTLVPVTRNDIVKIEGIDATGGNNQPNIPDIPAHLWYFGLIGTCL

SEQ ID NO: 3763 - protein, 269 aa, Thermomyces lanuginosus
EVSQDLFNQFNLFAQYSAAAYCGKNNDAPAGTNITCTGNACPEVEKADATFLYSFEDSGVGDVTGFLALDNTNKLITLSFRGSRSIENWIGNLNFDLKEINDICSGCRGHDGFTSSWRSVADTLRQKVEDAVREHPDYRVVFTGHSLGGALATVAGADLRGNGYDIDVFSYGAPRVGNRAFAEFLTVQTGGTLYRITHTNDIVPRLPPREFGYSHSSPEYWIKSGTLVPVTRNDIVKIEGIDATGGNNQPNIPDIPAHLWYFGLIGTCL

SEQ ID NO: 3764 - protein, 269 aa, Thermomyces lanuginosus
EVSQDLFNQFNLFAQYSAAAYCGKNNDAPAGTNITCTGNACPEVEKADATFLKSFEDSGVGDVTGFLALDNTNKLIVLSFRGSRSIENWIGNLNFDLKEINDICSGCRGHDGFTSSWRSVADTLRQKVEDAVREHPDYRVVFTGHSLGGALATVAGADLRGNGYDIDVFSYGAPRVGNRAFAEFLTVQTGGTLYRITHTNDIVPRLPPREFGYSHSSPEYWIKSGTLVPVTRNDIVKIEGIDATGGNNQPNIPDIPAHLWYFGLIGTCL

SEQ ID NO: 3765 - protein, 269 aa, Thermomyces lanuginosus
EVSQDLFNQFNLFAQYSAAAYCGKNNDAPAGTNITCTGNACPEVEKADATFLYSFEDSGVGDVTGFLALDNTNKLIVLSFRGSRSIENWIGNLNFDLKEINDICSGCRGHNGFTSSWRSVADTLRQKVEDAVREHPDYRVVFTGHSLGGALATVAGADLRGNGYDIDVFSYGAPRVGNRAFAEFLTVQTGGTLYRITHTNDIVPRLPPREFGYSHSSPEYWIKSGTLVPVTRNDIVKIEGIDATGGNNQPNIPDIPAHLWYFGLIGTCL

SEQ ID NO: 3766 - protein, 269 aa, Thermomyces lanuginosus
EVSQDLFNQFNLFAQYSAAAYCGKNNDAPAGTNITCTGNACPEVEKADATFLYSFEDSGVGDVTGFLALDNTNKLIVLSFRGSRSIENWIGNLNFDLKEINDICSGCRGNDGFTSSWRSVADTLRQKVEDAVREHPDYRVVFTGHSLGGALATVAGADLRGNGYDIDVFSYGAPRVGNRAFAEFLTVQTGGTLYRITHTNDIVPRLPPREFGYSHSSPEYWIKSGTLVPVTRNDIVKIEGIDATGGNNQPNIPDIPAHLWYFGLIGTCL

SEQ ID NO: 3767 - protein, 269 aa, Thermomyces lanuginosus
EVSQDLFNQFNLFAQYSAAAYCGKNNDAPAGTNITCTGNACPEVEKADATFLYSFEDSGVGDVTGFLALDNTNKLIVLSFRGSRSIENWIGNLNFDLKEINDICSGCRGHDGFTSSWRSVADTLRQKVEDAVREHPDYRVVFTGHSLGGALATVAGADLRGNGYDIDVFSYGAPRVGNRAFAEFLTVQTGGTLYRITHTNDIVPRLPPREFGYSHSSPEYWIMSGTLVPVTRNDIVKIEGIDATGGNNQPNIPDIPAHLWYFGLIGTCL

SEQ ID NO: 3768 - protein, 269 aa, Thermomyces lanuginosus
EVSQDLFNQFNLFAQYSAAAYCGKNNDAPAGTNITCTGNACPEVEKADATFLYSFEDSGVGDVTGFLALDNTNKLIVLSFRGSRSIENWITNLNFDLKEINDICSGCRGHDGFTSSWRSVADTLRQKVEDAVREHPDYRVVFTGHSLGGALATVAGADLRGNGYDIDVFSYGAPRVGNRAFAEFLTVQTGGTLYRITHTNDIVPRLPPREFGYSHSSPEYWIKSGTLVPVTRNDIVKIEGIDATGGNNQPNIPDIPAHLWYFGLIGTCL

SEQ ID NO: 3769 - protein, 269 aa, Thermomyces lanuginosus
EVSQDLFNQFNLFAQYSAAAYCGKNNDAPAGTNITCTGRACPEVEKADATFLYSFEDSGVGDVTGFLALDNTNKLIVLSFRGSRSIENWIGNLNFDLKEINDICSGCRGHDGFTSSWRSVADTLRQKVEDAVREHPDYRVVFTGHSLGGALATVAGADLRGNGYDIDVFSYGAPRVGNRAFAEFLTVQTGGTLYRITHTNDIVPRLPPREFGYSHSSPEYWIKSGTLVPVTRNDIVKIEGIDATGGNNQPNIPDIPAHLWYFGLIGTCL

SEQ ID NO: 3770 - protein, 269 aa, Thermomyces lanuginosus
EVSQDLFNQFNLFAQYSAAAYCGKNNDAPAGTNITCTGNACPTVEKADATFLYSFEDSGVGDVTGFLALDNTNKLIVLSFRGSRSIENWIGNLNFDLKEINDICSGCRGHDGFTSSWRSVADTLRQKVEDAVREHPDYRVVFTGHSLGGALATVAGADLRGNGYDIDVFSYGAPRVGNRAFAEFLTVQTGGTLYRITHTNDIVPRLPPREFGYSHSSPEYWIKSGTLVPVTRNDIVKIEGIDATGGNNQPNIPDIPAHLWYFGLIGTCL

SEQ ID NO: 3771 - protein, 269 aa, Thermomyces lanuginosus
EVSQDLFNQFNLFAQYSAAAYCGKNNDAPAGTNITCTGNACPEVEKADATFLYSFEDSGVGDVTGFLALDETNKLIVLSFRGSRSIENWIGNLNFDLKEINDICSGCRGHDGFTSSWRSVADTLRQKVEDAVREHPDYRVVFTGHSLGGALATVAGADLRGNGYDIDVFSYGAPRVGNRAFAEFLTVQTGGTLYRITHTNDIVPRLPPREFGYSHSSPEYWIKSGTLVPVTRNDIVKIEGIDATGGNNQPNIPDIPAHLWYFGLIGTCL

SEQ ID NO: 3772 - protein, 269 aa, Thermomyces lanuginosus
EVSQDLFNQFNLFAQYSAAAYCGKNNDAPAGTNITCTGNACPEVEKADATFLYSFEDSGVGDVTGFLALDNTNKLIVLSFRGSRHIENWIGNLNFDLKEINDICSGCRGHDGFTSSWRSVADTLRQKVEDAVREHPDYRVVFTGHSLGGALATVAGADLRGNGYDIDVFSYGAPRVGNRAFAEFLTVQTGGTLYRITHTNDIVPRLPPREFGYSHSSPEYWIKSGTLVPVTRNDIVKIEGIDATGGNNQPNIPDIPAHLWYFGLIGTCL

SEQ ID NO: 3773 - protein, 269 aa, Thermomyces lanuginosus
EVSQDLFNQFNLFAQYSAAAYCGKNNDAPAGTNITCTGNACPEVEKADATFLYSFEDQGVGDVTGFLALDNTNKLIVLSFRGSRSIENWIGNLNFDLKEINDICSGCRGHDGFTSSWRSVADTLRQKVEDAVREHPDYRVVFTGHSLGGALATVAGADLRGNGYDIDVFSYGAPRVGNRAFAEFLTVQTGGTLYRITHTNDIVPRLPPREFGYSHSSPEYWIKSGTLVPVTRNDIVKIEGIDATGGNNQPNIPDIPAHLWYFGLIGTCL

SEQ ID NO: 3774 - protein, 269 aa, Thermomyces lanuginosus
EVSQDLFNQFNLFAQYSAAAYCGKNNDAPAGTNITCTGNACPEVEKADATFLYSFEDSGVGDVTGFLALDNTNKLIVLSFRGSRSIENWIGNLNFDLKEINDICSGCRGHDGFTSSWRSVADTLRQKVEDAVREHPDYRVVFTGHSLGGAIATVAGADLRGNGYDIDVFSYGAPRVGNRAFAEFLTVQTGGTLYRITHTNDIVPRLPPREFGYSHSSPEYWIKSGTLVPVTRNDIVKIEGIDATGGNNQPNIPDIPAHLWYFGLIGTCL

SEQ ID NO: 3775 - protein, 269 aa, Thermomyces lanuginosus
EVSQDLFNQFNLFAQYSAAAYCGKNNDAPAGTNITCTGNACPEVEKADATFLYSFEDSGVGDVTGFLALDNTNKLIVLSFRGSRSIENWIGNLNFDLKEINDICSGCRGHDGFTSSWRSVADTLRQKVEDAVREHPDYRVVFTGHSLGGALATVAGADLRGNGYDIDVFSYGAPRVGNRAFAEFLTVQTGGTLYRITHTNDIVPRLPPREFGYSHSSPEYWIKSGTLVPVTRNDIVKIEGIDASGGNNQPNIPDIPAHLWYFGLIGTCL

SEQ ID NO: 3776 - protein, 269 aa, Thermomyces lanuginosus
EVSQDLFNQFNLFAQYSAAAYCGKNNDAPAGTNITCTGNACPEVEKADATFLYSFEDSGVGDVTGFLALDNTNKLIVLSFRGSRSIENWIGNLNFDLKEINDICSGCRGHDGFTSSWRSVADTLRQKVEDAVREHPDYRVVFTGHSLGGALATVAGADLRGNGYDIDVFSYGAPRVGNRAFAEFLTVCTGGTLYRITHTNDIVPRLPPREFGYSHSSPEYWIKSGTLVPVTRNDIVKIEGIDATGGNNQPNIPDIPAHLWYFGLIGTCL

SEQ ID NO: 3777 - protein, 269 aa, Thermomyces lanuginosus
EVSQDLFNQFNLFAQYSAAAYCGKNNDAPAGTNITCTGNACPEVEKADATFLYSFEDSGVGDVTGFLALDNTNKLIVLSFRGSRSIENWIGNLNFDLKEINDICSGCRGHDGFTRSWRSVADTLRQKVEDAVREHPDYRVVFTGHSLGGALATVAGADLRGNGYDIDVFSYGAPRVGNRAFAEFLTVQTGGTLYRITHTNDIVPRLPPREFGYSHSSPEYWIKSGTLVPVTRNDIVKIEGIDATGGNNQPNIPDIPAHLWYFGLIGTCL

SEQ ID NO: 3778 - protein, 269 aa, Thermomyces lanuginosus
EVSQDLFNQFNLFAQYSAAAYCGKNNDAPAGTNITCTGNACPEVEKADATFLYSFEDSGVGDVTGFLALDNTNKLIVLSFRGSRSIENWIGNLNFDLKEINDICSGCRGHDGFTSSWRSVADTLRQKVEDAVREHPDYRVVFNGHSLGGALATVAGADLRGNGYDIDVFSYGAPRVGNRAFAEFLTVQTGGTLYRITHTNDIVPRLPPREFGYSHSSPEYWIKSGTLVPVTRNDIVKIEGIDATGGNNQPNIPDIPAHLWYFGLIGTCL

SEQ ID NO: 3779 - protein, 269 aa, Thermomyces lanuginosus
EVSQDLFNQFNLFAQYSAAAYCGKNNDAPAGTNITCTGNACPEVEKADATFLYSFEDSGKGDVTGFLALDNTNKLIVLSFRGSRSIENWIGNLNFDLKEINDICSGCRGHDGFTSSWRSVADTLRQKVEDAVREHPDYRVVFTGHSLGGALATVAGADLRGNGYDIDVFSYGAPRVGNRAFAEFLTVQTGGTLYRITHTNDIVPRLPPREFGYSHSSPEYWIKSGTLVPVTRNDIVKIEGIDATGGNNQPNIPDIPAHLWYFGLIGTCL

SEQ ID NO: 3780 - protein, 269 aa, Thermomyces lanuginosus
EVSQDLFNQFNLFAQYSAAAYCGKNNDAPAGTNITCTGNACPEVEKADATFLYSFEDSGVGDVTGFLALDNTNHLIVLSFRGSRSIENWIGNLNFDLKEINDICSGCRGHDGFTSSWRSVADTLRQKVEDAVREHPDYRVVFTGHSLGGALATVAGADLRGNGYDIDVFSYGAPRVGNRAFAEFLTVQTGGTLYRITHTNDIVPRLPPREFGYSHSSPEYWIKSGTLVPVTRNDIVKIEGIDATGGNNQPNIPDIPAHLWYFGLIGTCL

SEQ ID NO: 3781 - protein, 269 aa, Thermomyces lanuginosus
EVSQDLFNQFNLFAQYSAAAYCGKNNDAPAGTNITCTGNACPEVEKADATFLYSFEDSGVGDVTGFLALDNTNKLIVLSFRGSRSIENWIGNLNFDLKEINDICSGCRGHDGFTSSWRSVADTLRQKVEDAVREHPDYRVVFTGHSLGGALATVAGADLRGNGYDIDVFSYGAPRVGNRAFAEFLTVQTGGTLYRITHTNDIVPRLPPREFGYSHSSPEYWIKSGTLVPVTPNDIVKIEGIDATGGNNQPNIPDIPAHLWYFGLIGTCL

SEQ ID NO: 3782 - protein, 269 aa, Thermomyces lanuginosus
EVSQDLFNQFNLFAQYSAAAYCGKNNDAPAGTNITCTFNACPEVEKADATFLYSFEDSGVGDVTGFLALDNTNKLIVLSFRGSRSIENWIGNLNFDLKEINDICSGCRGHDGFTSSWRSVADTLRQKVEDAVREHPDYRVVFTGHSLGGALATVAGADLRGNGYDIDVFSYGAPRVGNRAFAEFLTVQTGGTLYRITHTNDIVPRLPPREFGYSHSSPEYWIKSGTLVPVTRNDIVKIEGIDATGGNNQPNIPDIPAHLWYFGLIGTCL

SEQ ID NO: 3783 - protein, 269 aa, Thermomyces lanuginosus
EVSQDLFNQFNLFAQYSAAAYCGKNNDGPAGTNITCTGNACPEVEKADATFLYSFEDSGVGDVTGFLALDNTNKLIVLSFRGSRSIENWIGNLNFDLKEINDICSGCRGHDGFTSSWRSVADTLRQKVEDAVREHPDYRVVFTGHSLGGALATVAGADLRGNGYDIDVFSYGAPRVGNRAFAEFLTVQTGGTLYRITHTNDIVPRLPPREFGYSHSSPEYWIKSGTLVPVTRNDIVKIEGIDATGGNNQPNIPDIPAHLWYFGLIGTCL

SEQ ID NO: 3784 - protein, 269 aa, Thermomyces lanuginosus
EVSQDLFNQFNLFAQYSAAAYCGKNNDAPAGTNITCTGNACPEVEKADATFLYSFEDSGVGDVTGFLALDNTNKLIVLSFRGSRSIENWIGNLNFDLKEINDICSGCRGHDGFTSSWRSVADTLRQKVEDAVREHPDYRVVFTGHSLGAALATVAGADLRGNGYDIDVFSYGAPRVGNRAFAEFLTVQTGGTLYRITHTNDIVPRLPPREFGYSHSSPEYWIKSGTLVPVTRNDIVKIEGIDATGGNNQPNIPDIPAHLWYFGLIGTCL

SEQ ID NO: 3785 - protein, 269 aa, Thermomyces lanuginosus
EVSQDLFNQFNLFAQYSAAAYCGKNNDAPAGTNITCTGNACPEVEKADATFLYSFEDSGVGDVTGFLALDNTNKLIVLSFRGSRSIENWIGNLNFDQKEINDICSGCRGHDGFTSSWRSVADTLRQKVEDAVREHPDYRVVFTGHSLGGALATVAGADLRGNGYDIDVFSYGAPRVGNRAFAEFLTVQTGGTLYRITHTNDIVPRLPPREFGYSHSSPEYWIKSGTLVPVTRNDIVKIEGIDATGGNNQPNIPDIPAHLWYFGLIGTCL

SEQ ID NO: 3786 - protein, 269 aa, Thermomyces lanuginosus
EVSQDLFNQFNLFAQYSAAAYCGKNNDAPAGTNITCTGNACPEVEKADATFLYSFEDSGYGDVTGFLALDNTNKLIVLSFRGSRSIENWIGNLNFDLKEINDICSGCRGHDGFTSSWRSVADTLRQKVEDAVREHPDYRVVFTGHSLGGALATVAGADLRGNGYDIDVFSYGAPRVGNRAFAEFLTVQTGGTLYRITHTNDIVPRLPPREFGYSHSSPEYWIKSGTLVPVTRNDIVKIEGIDATGGNNQPNIPDIPAHLWYFGLIGTCL

SEQ ID NO: 3787 - protein, 269 aa, Thermomyces lanuginosus
EVSQDLFNQFNLFAQYSAAAYCGKNNDAPAGTNITCTGNACPEVEKADATFLYSFEDSGVGDVTGFLALDNTNKLIVLSFRGSRSIENWIGNLNFDLKEINDICSGCRGHDGFTSSWRSVADTLRQKVEDKVREHPDYRVVFTGHSLGGALATVAGADLRGNGYDIDVFSYGAPRVGNRAFAEFLTVQTGGTLYRITHTNDIVPRLPPREFGYSHSSPEYWIKSGTLVPVTRNDIVKIEGIDATGGNNQPNIPDIPAHLWYFGLIGTCL

SEQ ID NO: 3788 - protein, 269 aa, Thermomyces lanuginosus
EVSQDLFNQFNLFAQYSAAAYCGKNNDAPAGTNITCTGNACPEVEKADATFLYSFEDSGVGDVTGFLALDNTNKLIVLSFRGSRSIENWIGNLNFDLKEINDICSGCRGHDGFTSSWRSVADTLRQKVEDAVREHPDYRVVFTGHSLGGALATVAGADLRGNGYDIDVFSYGAPRVGNRAFAEFLTVQTGGTLYRITHTNDIVPRLPPREFGYSHSSPEYWIKSGTLVPVTRNDIVKIEGIDATGGNNQPNIPDIPAHLWYFKLIGTCL

SEQ ID NO: 3789 - protein, 269 aa, Thermomyces lanuginosus
EVSQDLFNQFNLFAQYSAAAYCGKNNDAPAGTNITCTGNACPEVEKADATFLYSFEDSGVGDVTGFLALDNTNKLIVLSFRGSRSIENWIGNLNFDLKEINDICSGCRGHDGFTSSWRSVADTLRQKVEDAVREHPDYRVVFTGHSLGGALATVAGADLRGNGYDIDVFSYGAPRVGNRAFAEFLTVQTGGTLYRITHTNDIVPRLPPREFGYSHSSPEYWIKSGTLRPVTRNDIVKIEGIDATGGNNQPNIPDIPAHLWYFGLIGTCL

SEQ ID NO: 3790 - protein, 269 aa, Thermomyces lanuginosus
EVSQDLFNQFNLFAQYSAAAYCGKNTDAPAGTNITCTGNACPEVEKADATFLYSFEDSGVGDVTGFLALDNTNKLIVLSFRGSRSIENWIGNLNFDLKEINDICSGCRGHDGFTSSWRSVADTLRQKVEDAVREHPDYRVVFTGHSLGGALATVAGADLRGNGYDIDVFSYGAPRVGNRAFAEFLTVQTGGTLYRITHTNDIVPRLPPREFGYSHSSPEYWIKSGTLVPVTRNDIVKIEGIDATGGNNQPNIPDIPAHLWYFGLIGTCL

SEQ ID NO: 3791 - protein, 269 aa, Thermomyces lanuginosus
EVSQDLFNQFNLFAQYSAAAYCGKNNDAPAGTNITCTGNACPEVEKADATFLYSFEDSGVGDVTGFLALDNTNKLIVLSFRGSRSIENWIGNLNFDLKEINDICSGCRGHDGFTSSWRSVADTLRQKVEDAVREHPDYRVVFTGHSLGGALATVAGADLRGNGYDIDVFSYGAPRVGNRAFAEFLTVQTGGTLYRITHTNDIVPRLPPREFGYSHSSPEYWIKSGTLVPVTRNDIVKIEGIDATGGNNQPNSPDIPAHLWYFGLIGTCL

SEQ ID NO: 3792 - protein, 269 aa, Thermomyces lanuginosus
EVSQDLFNQFNLFAQYSAAAYCGKNNDAPAGTNITCTGNACPEVEKADATFLYSFEDSGVGDVTGFLALDNTNKLIVLSFRGSRSIENWIGNLNFDLKEINDICSGCRGHDGFTSSWRSVADTLRQKVEDAVREHPDYRVVFTGHSLGGALATVAGADLRGNGYDIDVFSYGAPRVGNRAFAEFLTVQTGGTLYRITHTNDIVPRLPPREFGYSHSSPEYWIKSGTLVPVTRNDIVKVEGIDATGGNNQPNIPDIPAHLWYFGLIGTCL

SEQ ID NO: 3793 - protein, 269 aa, Thermomyces lanuginosus
EVSQDLFNQFNLFAQYSAAAYCGKNNDAPAGTNITCTGNACPEVEKADATFLYSFEDSGVGDVTGFLALDNTNKLIVLSFRGSRSIENWIGNLNFDLKEINDICSGCRGHDGFTSSWRSVADTLRQKVEDAVREHPDYRVVFTGHSLGGALATVAGADLRGNGYDIDVFSYGAPRVGNRAFAEFLTVQTGGTLYRITHTNDIVPRLPPREFGYSHSSPEYWIKSGTLVPVLRNDIVKIEGIDATGGNNQPNIPDIPAHLWYFGLIGTCL

SEQ ID NO: 3794 - protein, 269 aa, Thermomyces lanuginosus
EVSQDLFNQFNLFAQYSAAAYCGKNNDAPAGTNITCTGNACPEVEKADATFLYSFEDSGVGDVTGFLALDNTNKLIVLSFRGSRSIENWIGNLNFDLKEINDICSGCRGHDGFTSSWRSVADTLRQKVEDAVREHPDFRVVFTGHSLGGALATVAGADLRGNGYDIDVFSYGAPRVGNRAFAEFLTVQTGGTLYRITHTNDIVPRLPPREFGYSHSSPEYWIKSGTLVPVTRNDIVKIEGIDATGGNNQPNIPDIPAHLWYFGLIGTCL

SEQ ID NO: 3795 - protein, 269 aa, Thermomyces lanuginosus
EVSQDLFNQFNLFAQYSAAAYCGKNNDAPAGTNITCTGNACPEVEKADATFLYSFEDSGVGDVTGFLALDNTGKLIVLSFRGSRSIENWIGNLNFDLKEINDICSGCRGHDGFTSSWRSVADTLRQKVEDAVREHPDYRVVFTGHSLGGALATVAGADLRGNGYDIDVFSYGAPRVGNRAFAEFLTVQTGGTLYRITHTNDIVPRLPPREFGYSHSSPEYWIKSGTLVPVTRNDIVKIEGIDATGGNNQPNIPDIPAHLWYFGLIGTCL

SEQ ID NO: 3796 - protein, 269 aa, Thermomyces lanuginosus
EVSQDLFNQFNLFAQYSAAAYCGKNNDAPAGTNITCRGNACPEVEKADATFLYSFEDSGVGDVTGFLALDNTNKLIVLSFRGSRSIENWIGNLNFDLKEINDICSGCRGHDGFTSSWRSVADTLRQKVEDAVREHPDYRVVFTGHSLGGALATVAGADLRGNGYDIDVFSYGAPRVGNRAFAEFLTVQTGGTLYRITHTNDIVPRLPPREFGYSHSSPEYWIKSGTLVPVTRNDIVKIEGIDATGGNNQPNIPDIPAHLWYFGLIGTCL

SEQ ID NO: 3797 - protein, 269 aa, Thermomyces lanuginosus
EVSQDLFNQFNLFAQYSAAAYCGKNNDAPAGTNITCTGNACPEVEKADATFLYSFEDSGVGDVTGFLALDNTNKLIVLSFRGSRSIENWIGNLNWDLKEINDICSGCRGHDGFTSSWRSVADTLRQKVEDAVREHPDYRVVFTGHSLGGALATVAGADLRGNGYDIDVFSYGAPRVGNRAFAEFLTVQTGGTLYRITHTNDIVPRLPPREFGYSHSSPEYWIKSGTLVPVTRNDIVKIEGIDATGGNNQPNIPDIPAHLWYFGLIGTCL

SEQ ID NO: 3798 - protein, 269 aa, Thermomyces lanuginosus
EVSQDLFNQFNLFAQYSAAAYCGKNNDSPAGTNITCTGNACPEVEKADATFLYSFEDSGVGDVTGFLALDNTNKLIVLSFRGSRSIENWIGNLNFDLKEINDICSGCRGHDGFTSSWRSVADTLRQKVEDAVREHPDYRVVFTGHSLGGALATVAGADLRGNGYDIDVFSYGAPRVGNRAFAEFLTVQTGGTLYRITHTNDIVPRLPPREFGYSHSSPEYWIKSGTLVPVTRNDIVKIEGIDATGGNNQPNIPDIPAHLWYFGLIGTCL

SEQ ID NO: 3799 - protein, 269 aa, Thermomyces lanuginosus
EVSQDLFNQFNLFAQYSAAAYCGKNNDAPAGTNITCTGNACPEVEKADATFLYSFEDSGVGDVTGALALDNTNKLIVLSFRGSRSIENWIGNLNFDLKEINDICSGCRGHDGFTSSWRSVADTLRQKVEDAVREHPDYRVVFTGHSLGGALATVAGADLRGNGYDIDVFSYGAPRVGNRAFAEFLTVQTGGTLYRITHTNDIVPRLPPREFGYSHSSPEYWIKSGTLVPVTRNDIVKIEGIDATGGNNQPNIPDIPAHLWYFGLIGTCL

SEQ ID NO: 3800 - protein, 269 aa, Thermomyces lanuginosus
EVSQDLFNQFNLFAQYSAAAYCGKNNDAPAGTNITCTGNACPEVEKADATFVYSFEDSGVGDVTGFLALDNTNKLIVLSFRGSRSIENWIGNLNFDLKEINDICSGCRGHDGFTSSWRSVADTLRQKVEDAVREHPDYRVVFTGHSLGGALATVAGADLRGNGYDIDVFSYGAPRVGNRAFAEFLTVQTGGTLYRITHTNDIVPRLPPREFGYSHSSPEYWIKSGTLVPVTRNDIVKIEGIDATGGNNQPNIPDIPAHLWYFGLIGTCL

SEQ ID NO: 3801 - protein, 269 aa, Thermomyces lanuginosus
EVSQDLFNQFNLFAQYSAAAYCGKNNDAPAGTNITCTGNACPEVEKADATFLYSFEDSGVGDVTGFLALDNTNKLIVLSFRGSRSIENWIGNLNFDLKEINDICSGCRGHDGFTSSWRSVADTLRQKVEDAVREHPDYRVVFTGHSLGGALATVAGADLRGNGYDIDVFSYGAPRVGNRAFAEFLTVQTGGTLYRITHTNDIVPRLPPREFGYSHSSPEYWIKSGTLVSVTRNDIVKIEGIDATGGNNQPNIPDIPAHLWYFGLIGTCL

SEQ ID NO: 3802 - protein, 269 aa, Thermomyces lanuginosus
EVSQDLFNQFNLFAQYSAAAYCGKNNDAPAGTNITCTGNACPEVEKADATFLYSFEDSGVGDVTGFLALDNTNKLIVLSFRGSRSIENWIGNLNFDLKEINDICSGCRGHDGFTSSWRSVADTLRQKVEGAVREHPDYRVVFTGHSLGGALATVAGADLRGNGYDIDVFSYGAPRVGNRAFAEFLTVQTGGTLYRITHTNDIVPRLPPREFGYSHSSPEYWIKSGTLVPVTRNDIVKIEGIDATGGNNQPNIPDIPAHLWYFGLIGTCL

SEQ ID NO: 3803 - protein, 269 aa, Thermomyces lanuginosus
EVSQDLFNQFNLFAQYSAAAYCGKNNDAKAGTNITCTGNACPEVEKADATFLYSFEDSGVGDVTGFLALDNTNKLIVLSFRGSRSIENWIGNLNFDLKEINDICSGCRGHDGFTSSWRSVADTLRQKVEDAVREHPDYRVVFTGHSLGGALATVAGADLRGNGYDIDVFSYGAPRVGNRAFAEFLTVQTGGTLYRITHTNDIVPRLPPREFGYSHSSPEYWIKSGTLVPVTRNDIVKIEGIDATGGNNQPNIPDIPAHLWYFGLIGTCL

SEQ ID NO: 3804 - protein, 269 aa, Thermomyces lanuginosus
EVSQDLFNQFNLFAQYSAAAYCGKNNDAPAGTNITCTGNACPEVEKADATFLYSFEDSGVGDVTGFLALDNTNKLIVLSFRGSRSIENWIGNLNFDLKEINDICSGCRGHDGFTSSWRSVADTLRQKVEDAVREHPDYRVVFTGHSLGGALATVAGADLRGNGYDIDVFSYGAPRVGNRAFAEFLTVQTGGTLYRITHTNDIVPRLPPREFGYSHSSPEYWIKSGTLVPVTRNDIVKIEGIDATGGNNQPNIPDIPAHLWIFGLIGTCL

SEQ ID NO: 3805 - protein, 269 aa, Thermomyces lanuginosus
EVSMDLFNQFNLFAQYSAAAYCGKNNDAPAGTNITCTGNACPEVEKADATFLYSFEDSGVGDVTGFLALDNTNKLIVLSFRGSRSIENWIGNLNFDLKEINDICSGCRGHDGFTSSWRSVADTLRQKVEDAVREHPDYRVVFTGHSLGGALATVAGADLRGNGYDIDVFSYGAPRVGNRAFAEFLTVQTGGTLYRITHTNDIVPRLPPREFGYSHSSPEYWIKSGTLVPVTRNDIVKIEGIDATGGNNQPNIPDIPAHLWYFGLIGTCL

SEQ ID NO: 3806 - protein, 269 aa, Thermomyces lanuginosus
EVSQDLFNQFNLFAQYSAAAYCGKNNDAPAGTNITCTGNACPEVEKADATFLYSFEDSGVGDVTGFLALDNTNKLIVLSFRGSRSIENWIGNLNFDLKEINDICSGCRGHDGFTSSWRSVADTLRQKVEDACREHPDYRVVFTGHSLGGALATVAGADLRGNGYDIDVFSYGAPRVGNRAFAEFLTVQTGGTLYRITHTNDIVPRLPPREFGYSHSSPEYWIKSGTLVPVTRNDIVKIEGIDATGGNNQPNIPDIPAHLWYFGLIGTCL

SEQ ID NO: 3807 - protein, 269 aa, Thermomyces lanuginosus
EVSQDLFNQFNLFAQYSAAAYCGKNNDAPAGTNITCTGNACPEVEKADATFLYSFEDSGVGDVTGFLALDNTNKLIVLSFRGSRSIENWIGNLNFDLKEINDICSGCRGHDGFTSSWRSVADTLRQKVEDAVREHPDYRVVFTGHSLGGALATVAGADLRGNGYDIDVFSYGAPRVGNRAFAEFLTVQTGGTLYRITGTNDIVPRLPPREFGYSHSSPEYWIKSGTLVPVTRNDIVKIEGIDATGGNNQPNIPDIPAHLWYFGLIGTCL

SEQ ID NO: 3808 - protein, 269 aa, Thermomyces lanuginosus
EVSQDLFNQFNLFAQYSAAAYCGKNNDAPAGTNITCTGNACPEVEKADATFLYSFEDSGVGDVTGFLALDNTNKLIVLSFRGSRSIENWIGNLNFDLKEINDICSGCRGHDGFTSSWRSVADTLRQKVEDAVREHPDYRVVFTGHSLGGALATVAGADLRGNGYDIDVFSYGAPRVGNRAFAEFLTVQTGVTLYRITHTNDIVPRLPPREFGYSHSSPEYWIKSGTLVPVTRNDIVKIEGIDATGGNNQPNIPDIPAHLWYFGLIGTCL

SEQ ID NO: 3809 - protein, 269 aa, Thermomyces lanuginosus
EVSQDLFNQFNLFAQYSAAAYCGKNNDAPAGTNITCMGNACPEVEKADATFLYSFEDSGVGDVTGFLALDNTNKLIVLSFRGSRSIENWIGNLNFDLKEINDICSGCRGHDGFTSSWRSVADTLRQKVEDAVREHPDYRVVFTGHSLGGALATVAGADLRGNGYDIDVFSYGAPRVGNRAFAEFLTVQTGGTLYRITHTNDIVPRLPPREFGYSHSSPEYWIKSGTLVPVTRNDIVKIEGIDATGGNNQPNIPDIPAHLWYFGLIGTCL

SEQ ID NO: 3810 - protein, 269 aa, Thermomyces lanuginosus
EVSQDLFNQFNLFAQYSAAAYCGKNNDAPAGTNITCTGNACPEVEKADATFLYSFEDSGVGDVTGFLALDNTNKLIVLSFRGSRSIENWIGNLNFDLKEINDICSGCRGHDGFTSSWRSVADTLRQKVEDAVREHPDYRVVFTGHSLGGALATVAGADLRGNGYDIDVFSYGAPRVGNRAFAEFLTVQTGGTLYRITHTNDIVPRLPPREFGYSHSSPEYWIKSGTLVPVTRNDIVKIEGIDATGGNNQPNIPDIPAHLWYFGLIGWCL

SEQ ID NO: 3811 - protein, 269 aa, Thermomyces lanuginosus
EVSQDLFNQFNLFAQYSAAAYCGKNNDAPAGTNITCTGHACPEVEKADATFLYSFEDSGVGDVTGFLALDNTNKLIVLSFRGSRSIENWIGNLNFDLKEINDICSGCRGHDGFTSSWRSVADTLRQKVEDAVREHPDYRVVFTGHSLGGALATVAGADLRGNGYDIDVFSYGAPRVGNRAFAEFLTVQTGGTLYRITHTNDIVPRLPPREFGYSHSSPEYWIKSGTLVPVTRNDIVKIEGIDATGGNNQPNIPDIPAHLWYFGLIGTCL

SEQ ID NO: 3812 - protein, 269 aa, Thermomyces lanuginosus
EVSQDLFNQFNLFAQYSAAAYCGKNNDAPAGTNITCTGNACPEVEKADATFLYSFEDSGVGDVTGFLALDNTNKLIVLSFRGSRSIENWIGNLNFDLKEINDICSGCRGHDGFTSSWRSVADTLRQKVEDAQREHPDYRVVFTGHSLGGALATVAGADLRGNGYDIDVFSYGAPRVGNRAFAEFLTVQTGGTLYRITHTNDIVPRLPPREFGYSHSSPEYWIKSGTLVPVTRNDIVKIEGIDATGGNNQPNIPDIPAHLWYFGLIGTCL

SEQ ID NO: 3813 - protein, 269 aa, Thermomyces lanuginosus
EVSQDLFNQFNLFAQYSAAAYCGKNNDAPAGTNITCTGNACPEVEKADATFLYSFEDSGVGDVTGFLALDNHNKLIVLSFRGSRSIENWIGNLNFDLKEINDICSGCRGHDGFTSSWRSVADTLRQKVEDAVREHPDYRVVFTGHSLGGALATVAGADLRGNGYDIDVFSYGAPRVGNRAFAEFLTVQTGGTLYRITHTNDIVPRLPPREFGYSHSSPEYWIKSGTLVPVTRNDIVKIEGIDATGGNNQPNIPDIPAHLWYFGLIGTCL

SEQ ID NO: 3814 - protein, 269 aa, Thermomyces lanuginosus
EVSQDLFNQFNLFAQYSAAAYCGKNNDAPAGTNITCTGNACPEVEKADATFLYSFEDSGVGDVTGFLALDNTNKLIVLSFRGSRSIENWIGNLNFDLKEINDICSGCRGHDFFTSSWRSVADTLRQKVEDAVREHPDYRVVFTGHSLGGALATVAGADLRGNGYDIDVFSYGAPRVGNRAFAEFLTVQTGGTLYRITHTNDIVPRLPPREFGYSHSSPEYWIKSGTLVPVTRNDIVKIEGIDATGGNNQPNIPDIPAHLWYFGLIGTCL

SEQ ID NO: 3815 - protein, 269 aa, Thermomyces lanuginosus
EVSQDLFNQFNLFAQYSAAAYCGKNNDAPAGTNITCTGNACPEVEKADATFLYSFEDSGVGDVTGFLALDNTNKGIVLSFRGSRSIENWIGNLNFDLKEINDICSGCRGHDGFTSSWRSVADTLRQKVEDAVREHPDYRVVFTGHSLGGALATVAGADLRGNGYDIDVFSYGAPRVGNRAFAEFLTVQTGGTLYRITHTNDIVPRLPPREFGYSHSSPEYWIKSGTLVPVTRNDIVKIEGIDATGGNNQPNIPDIPAHLWYFGLIGTCL

SEQ ID NO: 3816 - protein, 269 aa, Thermomyces lanuginosus
EVSQDLFNQFNLFAQYSAAAYCTKNNDAPAGTNITCTGNACPEVEKADATFLYSFEDSGVGDVTGFLALDNTNKLIVLSFRGSRSIENWIGNLNFDLKEINDICSGCRGHDGFTSSWRSVADTLRQKVEDAVREHPDYRVVFTGHSLGGALATVAGADLRGNGYDIDVFSYGAPRVGNRAFAEFLTVQTGGTLYRITHTNDIVPRLPPREFGYSHSSPEYWIKSGTLVPVTRNDIVKIEGIDATGGNNQPNIPDIPAHLWYFGLIGTCL

SEQ ID NO: 3817 - protein, 269 aa, Thermomyces lanuginosus
EVSQDLFNQFNLFAQYSAAAYCGKNNDAPAGTNITCTGWACPEVEKADATFLYSFEDSGVGDVTGFLALDNTNKLIVLSFRGSRSIENWIGNLNFDLKEINDICSGCRGHDGFTSSWRSVADTLRQKVEDAVREHPDYRVVFTGHSLGGALATVAGADLRGNGYDIDVFSYGAPRVGNRAFAEFLTVQTGGTLYRITHTNDIVPRLPPREFGYSHSSPEYWIKSGTLVPVTRNDIVKIEGIDATGGNNQPNIPDIPAHLWYFGLIGTCL

SEQ ID NO: 3818 - protein, 269 aa, Thermomyces lanuginosus
EVSQDLFNQFNLFAQYSAAAYCGKNNDAPAGTNITCTGNACPEVEKADATFLYSFEDSGVGDVTGFLALDNTNKLIVLSFRGSRSIENWIGNLNFDLKEINDICSGCRGHDGFTSSWRSVADGLRQKVEDAVREHPDYRVVFTGHSLGGALATVAGADLRGNGYDIDVFSYGAPRVGNRAFAEFLTVQTGGTLYRITHTNDIVPRLPPREFGYSHSSPEYWIKSGTLVPVTRNDIVKIEGIDATGGNNQPNIPDIPAHLWYFGLIGTCL

SEQ ID NO: 3819 - protein, 269 aa, Thermomyces lanuginosus
EVSQDLFNQFNLFAQYSAAAYCGKNNDAPAGTNITCTGNACPEVEKADATFLYSFEDSGVGDVTGFLALDNTNKLIVLSFRGSRSIENWIGNLNFDLKEINDICSGCRGHDGFTSSWRSVADTLRQKHEDAVREHPDYRVVFTGHSLGGALATVAGADLRGNGYDIDVFSYGAPRVGNRAFAEFLTVQTGGTLYRITHTNDIVPRLPPREFGYSHSSPEYWIKSGTLVPVTRNDIVKIEGIDATGGNNQPNIPDIPAHLWYFGLIGTCL

SEQ ID NO: 3820 - protein, 269 aa, Thermomyces lanuginosus
EVSQDLFNQFNLFAQYSAAAYCGKNNDAPAGTNITCTGNACPEVEKADATFLYSFEDSGVGDVTGFLALDNTNKLIVLSFRGSRSIENWIGNLNFDLKEINDICSGCRGHDGFTSSWRSVADTLRQKVEDAVREHPDYRVVFTGHSLGGALATVAGADLRGNGYDIDVFSYGAPRVGNRAFAEFLTVQTRGTLYRITHTNDIVPRLPPREFGYSHSSPEYWIKSGTLVPVTRNDIVKIEGIDATGGNNQPNIPDIPAHLWYFGLIGTCL

SEQ ID NO: 3821 - protein, 269 aa, Thermomyces lanuginosus
EVSQDLFNQFNLFAQYSAAAYCGKNNDAPAGTNITCTGNACPEVEKADATFLYSFEDSGVGDVTGFLALDNTNKLIVLSFRGSRSIENWIGNLNFDLKEINDICSGCRGHDGFTSSWRSVADTLRQKVEDAVREHPDYRVVFTGHSLGGALATVAGADLRGNGYDIDVFSYGAPRVGNRAFAEFLTVQTGGTLYRITHTNDIVPRLPPREFGYSHSSPEYWIKSGTLVPVTRNDIVKIEGIDATGGNNQPNRPDIPAHLWYFGLIGTCL

SEQ ID NO: 3822 - protein, 269 aa, Thermomyces lanuginosus
EVSQDLFNQFNLFAQYSAAAYCGKNNDAPAGTNITCTGNACPEVEKADWTFLYSFEDSGVGDVTGFLALDNTNKLIVLSFRGSRSIENWIGNLNFDLKEINDICSGCRGHDGFTSSWRSVADTLRQKVEDAVREHPDYRVVFTGHSLGGALATVAGADLRGNGYDIDVFSYGAPRVGNRAFAEFLTVQTGGTLYRITHTNDIVPRLPPREFGYSHSSPEYWIKSGTLVPVTRNDIVKIEGIDATGGNNQPNIPDIPAHLWYFGLIGTCL

SEQ ID NO: 3823 - protein, 269 aa, Thermomyces lanuginosus
EVSQDLFNQFNLFAQYSAAAYCGKNNDAPAGTNITCTGNACPEVEKADATFLYSFEDSGVGDVTGFLALDNTNKLIVLSFRGSRSIENWIGNLNFDLKEINDICSGCRGHDGFTSSWRSVADTLRQKVEDAVREHPDYRVVFTGHSLGGALATVAGADLRGNGYDIDVFSYGAPRVGNRAFAEFLTVQTGGTLYRITHTNDIVPRLPPREFGYMHSSPEYWIKSGTLVPVTRNDIVKIEGIDATGGNNQPNIPDIPAHLWYFGLIGTCL

SEQ ID NO: 3824 - protein, 269 aa, Thermomyces lanuginosus
EVSQDLFNQFNLFAQYSAAAYCGKNNDAPAGTNITCTGNACPEVEKADATFLYSFEDSGVGDVTGFLALDNTNKLIVLSFRGSRSIENWIGNLNFDLKEINDICSGCRGHDGFTSSWRSVADTLRQKYEDAVREHPDYRVVFTGHSLGGALATVAGADLRGNGYDIDVFSYGAPRVGNRAFAEFLTVQTGGTLYRITHTNDIVPRLPPREFGYSHSSPEYWIKSGTLVPVTRNDIVKIEGIDATGGNNQPNIPDIPAHLWYFGLIGTCL

SEQ ID NO: 3825 - protein, 269 aa, Thermomyces lanuginosus
EVSQDLFNQFNLFAQYSAAAYCGKNNDAPAGTNITCTGNACPEVEKADATPLYSFEDSGVGDVTGFLALDNTNKLIVLSFRGSRSIENWIGNLNFDLKEINDICSGCRGHDGFTSSWRSVADTLRQKVEDAVREHPDYRVVFTGHSLGGALATVAGADLRGNGYDIDVFSYGAPRVGNRAFAEFLTVQTGGTLYRITHTNDIVPRLPPREFGYSHSSPEYWIKSGTLVPVTRNDIVKIEGIDATGGNNQPNIPDIPAHLWYFGLIGTCL

SEQ ID NO: 3826 - protein, 269 aa, Thermomyces lanuginosus
EVSQDLFNQFNLFAQYSAAAYCGKNNDAPAGTNITCTGNACPEVEKADATFLYSFEDSGVGDVTGFLALDNTNKLIVLSFRGSRSIENWIGNLNFDLKEINDICSGCRGHDGFTSSWRSVADTLRQKVEDAVREHPWYRVVFTGHSLGGALATVAGADLRGNGYDIDVFSYGAPRVGNRAFAEFLTVQTGGTLYRITHTNDIVPRLPPREFGYSHSSPEYWIKSGTLVPVTRNDIVKIEGIDATGGNNQPNIPDIPAHLWYFGLIGTCL

SEQ ID NO: 3827 - protein, 269 aa, Thermomyces lanuginosus
EVSQDLFNQFNLFAQYSAAAYCGKNNDAPAGTNITCTGNACPEVEKADATFLYSFEDSGVGDVTGFLALDNTNKLIVLSFRGSRSIENWIGNLNFDLKEINDICSGCRGHDGFTSSWRSVADTLRQKVEDAVREHPDYRVVFTGHSLGGALATVATADLRGNGYDIDVFSYGAPRVGNRAFAEFLTVQTGGTLYRITHTNDIVPRLPPREFGYSHSSPEYWIKSGTLVPVTRNDIVKIEGIDATGGNNQPNIPDIPAHLWYFGLIGTCL

SEQ ID NO: 3828 - protein, 269 aa, Thermomyces lanuginosus
EVSQDLFNQFNLFAQYSAAAYCGKNNDAPAGTNITCTGNACPEVEKADATFLYSFEDSGVGDVTGFLALDNTNKLIVLSFRGSRSIENWIGNLNFDLKEINDYCSGCRGHDGFTSSWRSVADTLRQKVEDAVREHPDYRVVFTGHSLGGALATVAGADLRGNGYDIDVFSYGAPRVGNRAFAEFLTVQTGGTLYRITHTNDIVPRLPPREFGYSHSSPEYWIKSGTLVPVTRNDIVKIEGIDATGGNNQPNIPDIPAHLWYFGLIGTCL

SEQ ID NO: 3829 - protein, 269 aa, Thermomyces lanuginosus
EVSQDLFNQFNLFAQYSAAAYCGKNNDAPAGTNITCTGNACPEVEKADATFLYEFEDSGVGDVTGFLALDNTNKLIVLSFRGSRSIENWIGNLNFDLKEINDICSGCRGHDGFTSSWRSVADTLRQKVEDAVREHPDYRVVFTGHSLGGALATVAGADLRGNGYDIDVFSYGAPRVGNRAFAEFLTVQTGGTLYRITHTNDIVPRLPPREFGYSHSSPEYWIKSGTLVPVTRNDIVKIEGIDATGGNNQPNIPDIPAHLWYFGLIGTCL

SEQ ID NO: 3830 - protein, 269 aa, Thermomyces lanuginosus
EVSQDLFNQFNLFAQYSAAAYCGKNNDAPAGTNITCTGNACPEVEKADATFLYSFEDSGVGDVTGFLSLDNTNKLIVLSFRGSRSIENWIGNLNFDLKEINDICSGCRGHDGFTSSWRSVADTLRQKVEDAVREHPDYRVVFTGHSLGGALATVAGADLRGNGYDIDVFSYGAPRVGNRAFAEFLTVQTGGTLYRITHTNDIVPRLPPREFGYSHSSPEYWIKSGTLVPVTRNDIVKIEGIDATGGNNQPNIPDIPAHLWYFGLIGTCL

SEQ ID NO: 3831 - protein, 269 aa, Thermomyces lanuginosus
EVSQDLFNQFNLFAQYSAAAYCGKNNDAPAGTNITCTGNACPEVEKADATFLYSFEDSGVGDVTGFLALDNTNKLIVLSFRGSRSIENWIGNLNFDLKEINDICSGCRGHDGFTSSWRSVADTLRQKVEDAVREHPDYRVVFTGHSLGGALATVAGADLRGNGYDIDVFSYGAPRVGNRAFAEFLTVQTGGTLYRITHTNDIVPRLPPREFGYSHSSPEYWIKSGTLEPVTRNDIVKIEGIDATGGNNQPNIPDIPAHLWYFGLIGTCL

SEQ ID NO: 3832 - protein, 269 aa, Thermomyces lanuginosus
EVSQDLFNQFNLTAQYSAAAYCGKNNDAPAGTNITCTGNACPEVEKADATFLYSFEDSGVGDVTGFLALDNTNKLIVLSFRGSRSIENWIGNLNFDLKEINDICSGCRGHDGFTSSWRSVADTLRQKVEDAVREHPDYRVVFTGHSLGGALATVAGADLRGNGYDIDVFSYGAPRVGNRAFAEFLTVQTGGTLYRITHTNDIVPRLPPREFGYSHSSPEYWIKSGTLVPVTRNDIVKIEGIDATGGNNQPNIPDIPAHLWYFGLIGTCL

SEQ ID NO: 3833 - protein, 269 aa, Thermomyces lanuginosus
EVSQDLFNQFNLFAQYSAAAYCGKNNDAPAGTNITCTGNACPEVEKADATFLYSFEDSGVGDVTGFLALDNTNKLIVLSFRGSRSIENWIGNLNFDLKEINDICSGCRGHDGFTSSWRSVADTLRQKVEDAVREHPDYRVVFTGHSLGGALATVAGADLRGNGYDIDVFSYGAPRVGNRAFAEFLTVQTGGTLYRITHTNDIVPRLPPREFGYSHSSPEYWIKSGTLVPVTRNDIVYIEGIDATGGNNQPNIPDIPAHLWYFGLIGTCL

SEQ ID NO: 3834 - protein, 269 aa, Thermomyces lanuginosus
EVSQDLFNQFNLFAQYSAAAYCGKNNDAPAGTNITCTGNACPEVEKADATFLYSFEDSGVGDVTGFLALDNTNKLIVLSFRGSRSIENWIGNLNFDLKEINDICSGCRGHDGFTSSWRSVADTLRQKVEDAVREHPDYRVVFTGHSLGGALATVAGADLRGNGYDIDVFSYGAPRVGNRAFAEFLTVQTGGTLYRITHTNDIVPRLPPREFGYSHSSPEYWIKSGTLVPVTRNDIVKIEGIDATGGNNQPNIPDIXAHLWYFGLIGTCL

SEQ ID NO: 3835 - protein, 269 aa, Thermomyces lanuginosus
EVSQDLFNQFNLFAQYSAAAYCGKNNDAPAGTNITCTGNACPEVEKADATFLYSFEDSGVGDVTGFLALDNTNKLIVLSFRGSRSIENWIGNLNFDLQEINDICSGCRGHDGFTSSWRSVADTLRQKVEDAVREHPDYRVVFTGHSLGGALATVAGADLRGNGYDIDVFSYGAPRVGNRAFAEFLTVQTGGTLYRITHTNDIVPRLPPREFGYSHSSPEYWIKSGTLVPVTRNDIVKIEGIDATGGNNQPNIPDIPAHLWYFGLIGTCL

SEQ ID NO: 3836 - protein, 269 aa, Thermomyces lanuginosus
EVSQDLFNQFNLFAQYSAAAYCGKNNGAPAGTNITCTGNACPEVEKADATFLYSFEDSGVGDVTGFLALDNTNKLIVLSFRGSRSIENWIGNLNFDLKEINDICSGCRGHDGFTSSWRSVADTLRQKVEDAVREHPDYRVVFTGHSLGGALATVAGADLRGNGYDIDVFSYGAPRVGNRAFAEFLTVQTGGTLYRITHTNDIVPRLPPREFGYSHSSPEYWIKSGTLVPVTRNDIVKIEGIDATGGNNQPNIPDIPAHLWYFGLIGTCL

SEQ ID NO: 3837 - protein, 269 aa, Thermomyces lanuginosus
EVSQDLFNQFNLFAQYSAAAYCGKVNDAPAGTNITCTGNACPEVEKADATFLYSFEDSGVGDVTGFLALDNTNKLIVLSFRGSRSIENWIGNLNFDLKEINDICSGCRGHDGFTSSWRSVADTLRQKVEDAVREHPDYRVVFTGHSLGGALATVAGADLRGNGYDIDVFSYGAPRVGNRAFAEFLTVQTGGTLYRITHTNDIVPRLPPREFGYSHSSPEYWIKSGTLVPVTRNDIVKIEGIDATGGNNQPNIPDIPAHLWYFGLIGTCL

SEQ ID NO: 3838 - protein, 269 aa, Thermomyces lanuginosus
EVSQDLFNQFNLFAQYSAAAYCGKNNDAPAGTNITCTGNACPEVEKADATFLYSFEDSGVGDVTGFLALDNTNKLIVLSFRGSRSIENWIGNLNFDLKEINDICSGCRGHDGFTSSWRSVADTLRQKVEDNVREHPDYRVVFTGHSLGGALATVAGADLRGNGYDIDVFSYGAPRVGNRAFAEFLTVQTGGTLYRITHTNDIVPRLPPREFGYSHSSPEYWIKSGTLVPVTRNDIVKIEGIDATGGNNQPNIPDIPAHLWYFGLIGTCL

SEQ ID NO: 3839 - protein, 269 aa, Thermomyces lanuginosus
EVSQDLFNQFNLFAQYSAAAYCGKNNDAPAGTNITCTGNACPEVEKADATFLYSFEDSGVGDVTGFLAGDNTNKLIVLSFRGSRSIENWIGNLNFDLKEINDICSGCRGHDGFTSSWRSVADTLRQKVEDAVREHPDYRVVFTGHSLGGALATVAGADLRGNGYDIDVFSYGAPRVGNRAFAEFLTVQTGGTLYRITHTNDIVPRLPPREFGYSHSSPEYWIKSGTLVPVTRNDIVKIEGIDATGGNNQPNIPDIPAHLWYFGLIGTCL

SEQ ID NO: 3840 - protein, 269 aa, Thermomyces lanuginosus
EVSQDLFNQFNLFAQYSAAAYCGKNNDAPAGTNITCTGNACPEVEKADATFLYSFEDSGVGDVTGFLALDNTNKLIVLSFRGSRSIENWIGNLNFDLKEINDICSGCRGHDGFTSSWRSVADTLRQKVEDAVREHPDYRVVFTGHSLGGALATVAGADLRGNGYDIDVFSYGAPRVGNRAFAEFLTVQTGGTLYRITHTNDIVPRLPPREFGYSHSSPEYWIKSGTLVPVTRNDIVKIEGIDATGGNNQPNIPDIPAHLWYFGLQGTCL

SEQ ID NO: 3841 - protein, 269 aa, Thermomyces lanuginosus
EVSQDLFNQFNLFAQYSMAAYCGKNNDAPAGTNITCTGNACPEVEKADATFLYSFEDSGVGDVTGFLALDNTNKLIVLSFRGSRSIENWIGNLNFDLKEINDICSGCRGHDGFTSSWRSVADTLRQKVEDAVREHPDYRVVFTGHSLGGALATVAGADLRGNGYDIDVFSYGAPRVGNRAFAEFLTVQTGGTLYRITHTNDIVPRLPPREFGYSHSSPEYWIKSGTLVPVTRNDIVKIEGIDATGGNNQPNIPDIPAHLWYFGLIGTCL

SEQ ID NO: 3842 - protein, 269 aa, Thermomyces lanuginosus
EVSQDLFNQFNLFAQYSAAAYCGKNNDAPAGTNITCTGNACPEVEKADATFLYSFEDSGVGDVTGFLALDNTNKLIVLSFRGSRSIENWIGNLNFDLKEINDICSGCRGHDGFTSSWRSVADTLRQKVEDAVREHPDYRVVFTGHSLGGALATVAGADLRGNGYDIDVFSYGAPRVGNRAFAEFLTVQTGGTLYRITHTNDIVPRLPPREFGYSHSSPEYWIKSGTLVPVTRNDIVKIEGIDATGGNNQPNIPDIPAHLWYFGLIGTCV

SEQ ID NO: 3843 - protein, 269 aa, Thermomyces lanuginosus
EVSQDLFNQFNLFAQYSAAAYCGKNNDIPAGTNITCTGNACPEVEKADATFLYSFEDSGVGDVTGFLALDNTNKLIVLSFRGSRSIENWIGNLNFDLKEINDICSGCRGHDGFTSSWRSVADTLRQKVEDAVREHPDYRVVFTGHSLGGALATVAGADLRGNGYDIDVFSYGAPRVGNRAFAEFLTVQTGGTLYRITHTNDIVPRLPPREFGYSHSSPEYWIKSGTLVPVTRNDIVKIEGIDATGGNNQPNIPDIPAHLWYFGLIGTCL

SEQ ID NO: 3844 - protein, 269 aa, Thermomyces lanuginosus
EVSQDLFNQFNLFAQYSAAAYCGKNNDAPAGTNITCTGNACPEVEKADATFLYSFEDSGVGDVTGFLALDNTNKLIVLSFRGSRSIENWIGNLNFDLKEINDICSGCRGHDGFTSSWRSVADTLRQKVEDAVREHPDYRVVFTGHSLGGALATVAGADLRGNGYDGDVFSYGAPRVGNRAFAEFLTVQTGGTLYRITHTNDIVPRLPPREFGYSHSSPEYWIKSGTLVPVTRNDIVKIEGIDATGGNNQPNIPDIPAHLWYFGLIGTCL

SEQ ID NO: 3845 - protein, 269 aa, Thermomyces lanuginosus
EVSQDLFNQFNLFAQYSAAAYCGKNNDAPAGTNITCTGNACIEVEKADATFLYSFEDSGVGDVTGFLALDNTNKLIVLSFRGSRSIENWIGNLNFDLKEINDICSGCRGHDGFTSSWRSVADTLRQKVEDAVREHPDYRVVFTGHSLGGALATVAGADLRGNGYDIDVFSYGAPRVGNRAFAEFLTVQTGGTLYRITHTNDIVPRLPPREFGYSHSSPEYWIKSGTLVPVTRNDIVKIEGIDATGGNNQPNIPDIPAHLWYFGLIGTCL

SEQ ID NO: 3846 - protein, 269 aa, Thermomyces lanuginosus
EVSQDLFNQFNLFAQYSAAAYCGKNNDAPAGTNITCTGNACPEVEKADATFLYSFEDSGVGDVTGFLALDNTNKLIVLSFRGSRSIENWIGNLNFDLKEINDICSGCRGHDGFTSSWRSVADTLRQKVEDAVREHPDYRVVFTGHSLGGALATVAGADLRGNGYDIDVFSYGAPRVGNRAFAEFLTVQTGGTLYRITHTNDIVPRLPPREFGYSHSSPEYWIKSGTLVPVTRNDIVTIEGIDATGGNNQPNIPDIPAHLWYFGLIGTCL

SEQ ID NO: 3847 - protein, 269 aa, Thermomyces lanuginosus
EVSQDLFNQFNLFAQYSAAAYCGKNNDAPAGTNITCEGNACPEVEKADATFLYSFEDSGVGDVTGFLALDNTNKLIVLSFRGSRSIENWIGNLNFDLKEINDICSGCRGHDGFTSSWRSVADTLRQKVEDAVREHPDYRVVFTGHSLGGALATVAGADLRGNGYDIDVFSYGAPRVGNRAFAEFLTVQTGGTLYRITHTNDIVPRLPPREFGYSHSSPEYWIKSGTLVPVTRNDIVKIEGIDATGGNNQPNIPDIPAHLWYFGLIGTCL

SEQ ID NO: 3848 - protein, 269 aa, Thermomyces lanuginosus
EVSQDLFNQFNLFAQYSAAAYCGPNNDAPAGTNITCTGNACPEVEKADATFLYSFEDSGVGDVTGFLALDNTNKLIVLSFRGSRSIENWIGNLNFDLKEINDICSGCRGHDGFTSSWRSVADTLRQKVEDAVREHPDYRVVFTGHSLGGALATVAGADLRGNGYDIDVFSYGAPRVGNRAFAEFLTVQTGGTLYRITHTNDIVPRLPPREFGYSHSSPEYWIKSGTLVPVTRNDIVKIEGIDATGGNNQPNIPDIPAHLWYFGLIGTCL

SEQ ID NO: 3849 - protein, 269 aa, Thermomyces lanuginosus
EVSQDLFNQFNLFAQYSAAAYCGKNNDAPAGTNITCTGNACPEVEKADATFLYSFEDSGVGDVTGFLALDNTNKLIVLSFRGSRSIENWIGNLNFDLKEINDICSGCRGHDGFVSSWRSVADTLRQKVEDAVREHPDYRVVFTGHSLGGALATVAGADLRGNGYDIDVFSYGAPRVGNRAFAEFLTVQTGGTLYRITHTNDIVPRLPPREFGYSHSSPEYWIKSGTLVPVTRNDIVKIEGIDATGGNNQPNIPDIPAHLWYFGLIGTCL

SEQ ID NO: 3850 - protein, 269 aa, Thermomyces lanuginosus
EVSQDLFNQFNLFAQYSAAAYCGKNNDAPAGTNITCTGNACPEVEKADATFLYSFEDSGVGDVTGFLALDNTNKLIVLSFRGSRSIENWIGNLNFDLKEINDICSGCRGHDGFTSSWRSVAATLRQKVEDAVREHPDYRVVFTGHSLGGALATVAGADLRGNGYDIDVFSYGAPRVGNRAFAEFLTVQTGGTLYRITHTNDIVPRLPPREFGYSHSSPEYWIKSGTLVPVTRNDIVKIEGIDATGGNNQPNIPDIPAHLWYFGLIGTCL

SEQ ID NO: 3851 - protein, 269 aa, Thermomyces lanuginosus
EVSQDLFNQFNLFAQYSAAAYCGKNNDAPAGTNITCTGNACPEVEKADATFLYSFEDSGVGDVTGFLALDNTNKLIVLSFRGSRSIENWIGNLNFDLKEINDICSGCRGHDGFTSSWRSVADTLRQKVEDAVREHPDYRVVFTGHSLGGALATVAGADLRGNGYDIDVFSYGAPRVGNRAFAEFLTVQTGGTLYRITHTNDIVPRLPPREFGYSHSSPEYWIKSGTLVPVTRNDIVKIEGIDATGGNNQGNIPDIPAHLWYFGLIGTCL

SEQ ID NO: 3852 - protein, 269 aa, Thermomyces lanuginosus
EVSQDLFNQFNLFAQYSAAAYCGKNNDAPAGTNIRCTGNACPEVEKADATFLYSFEDSGVGDVTGFLALDNTNKLIVLSFRGSRSIENWIGNLNFDLKEINDICSGCRGHDGFTSSWRSVADTLRQKVEDAVREHPDYRVVFTGHSLGGALATVAGADLRGNGYDIDVFSYGAPRVGNRAFAEFLTVQTGGTLYRITHTNDIVPRLPPREFGYSHSSPEYWIKSGTLVPVTRNDIVKIEGIDATGGNNQPNIPDIPAHLWYFGLIGTCL

SEQ ID NO: 3853 - protein, 269 aa, Thermomyces lanuginosus
EVSQDLFNQFNLFAQYSAAAYCGKNNDAPAGTNITCTGNACPEVEKADATFLYSFEDSGVGDVTGFLALDNTNKLIVLSFRGSRSIENWIGNLVFDLKEINDICSGCRGHDGFTSSWRSVADTLRQKVEDAVREHPDYRVVFTGHSLGGALATVAGADLRGNGYDIDVFSYGAPRVGNRAFAEFLTVQTGGTLYRITHTNDIVPRLPPREFGYSHSSPEYWIKSGTLVPVTRNDIVKIEGIDATGGNNQPNIPDIPAHLWYFGLIGTCL

SEQ ID NO: 3854 - protein, 269 aa, Thermomyces lanuginosus
EVSQDLFNQFNLFAQYSAAAYCGKNNDAPAGTNITCTGNACPEVEKADATFLYSFEDSGVGDVTGFLALSNTNKLIVLSFRGSRSIENWIGNLNFDLKEINDICSGCRGHDGFTSSWRSVADTLRQKVEDAVREHPDYRVVFTGHSLGGALATVAGADLRGNGYDIDVFSYGAPRVGNRAFAEFLTVQTGGTLYRITHTNDIVPRLPPREFGYSHSSPEYWIKSGTLVPVTRNDIVKIEGIDATGGNNQPNIPDIPAHLWYFGLIGTCL

SEQ ID NO: 3855 - protein, 269 aa, Thermomyces lanuginosus
EVSQDLFNQFNLFAQYSAAAYCGKNNDAPAGTNITCTGNACPEVEKADATFLYSFEDSGVGDVTGFLALDNTNKLIVLSFRGSRSIENWIGNLNFDLKEINDICSGCRGHDGFTSSWRSVADTLRQKVEDAVREHPGYRVVFTGHSLGGALATVAGADLRGNGYDIDVFSYGAPRVGNRAFAEFLTVQTGGTLYRITHTNDIVPRLPPREFGYSHSSPEYWIKSGTLVPVTRNDIVKIEGIDATGGNNQPNIPDIPAHLWYFGLIGTCL

SEQ ID NO: 3856 - protein, 269 aa, Thermomyces lanuginosus
EVSQDLFNQFNLFAQYSAAAYCGKNNDAPAGTNITCTGNACPEVEKADATFLYSFEDSGVGDVTGFLALDNTNKLIVLSFRGSRSIENWIGNLNFDLKEINDICSGCRGHDGFTSSWRSVADTLRQKVEDAVREHPDYRVVFTGHSLGGALATVAGADLRGNGYDIDVFSYGAPRVGNRAFAEFLTVQTGGTLYRITHTNDIVPRLPPRKFGYSHSSPEYWIKSGTLVPVTRNDIVKIEGIDATGGNNQPNIPDIPAHLWYFGLIGTCL

SEQ ID NO: 3857 - protein, 269 aa, Thermomyces lanuginosus
EVSQDLFNQFNLFAQYSAAAYCGKNNDAPAGTNITCTGNACPEVEKADATFLYSFEDSGVGDVTGFLALDNTNKLIVLSFRGSRSIENWIGNLNFDLKEINDICSGCRGHDGFTSSWRSVADTLRQKVEDAVREHPDYRVVFTGHSLGGALATVAGADLRGNGYDIDVFSYGAPRVGNRAFAEFLTVQTGGTLYRITHTNDIVPRLPPREFGYSHSSPEYWIKSGTLVPVTRNDIVKIEGIDATGGNNQPNIPDIPAHLWYFGLIGMCL

SEQ ID NO: 3858 - protein, 269 aa, Thermomyces lanuginosus
EVSQDLFNQFNLFAQYSAAAYCGANNDAPAGTNITCTGNACPEVEKADATFLYSFEDSGVGDVTGFLALDNTNKLIVLSFRGSRSIENWIGNLNFDLKEINDICSGCRGHDGFTSSWRSVADTLRQKVEDAVREHPDYRVVFTGHSLGGALATVAGADLRGNGYDIDVFSYGAPRVGNRAFAEFLTVQTGGTLYRITHTNDIVPRLPPREFGYSHSSPEYWIKSGTLVPVTRNDIVKIEGIDATGGNNQPNIPDIPAHLWYFGLIGTCL

SEQ ID NO: 3859 - protein, 269 aa, Thermomyces lanuginosus
EVSQDLFNQFNLFAQYSAAAYCGKNNDAPAGTNITCTGNACPEVEKADATFLYSFEDSGVGDVTGFLALDNTNKLIVLSFRGSRSIENWIGNLNFDLKEINDICSGCRGHDGFTSSWRSVADTLRQKVEDAVREHPDYRVVFTGHSLGGALATVAGADLRGNRYDIDVFSYGAPRVGNRAFAEFLTVQTGGTLYRITHTNDIVPRLPPREFGYSHSSPEYWIKSGTLVPVTRNDIVKIEGIDATGGNNQPNIPDIPAHLWYFGLIGTCL

SEQ ID NO: 3860 - protein, 269 aa, Thermomyces lanuginosus
EVSQDLFNQFNLFAQYSAAAYCGKNNDAPAGTNITCTGNACPEVEKADATFLYSFEDSGVGDVTGFLALDNTNKLIVLSFRGSRSIENWIGNLNFDLKEINDICSGCRGHDGFTSSWRSVADTLRQKVEDAVREHPDYRVVFTGHSLGGALATVAGADLRGNGYDIDVFSYGAPRVGNRAFAEFLTVQTGGTLYRVTHTNDIVPRLPPREFGYSHSSPEYWIKSGTLVPVTRNDIVKIEGIDATGGNNQPNIPDIPAHLWYFGLIGTCL

SEQ ID NO: 3861 - protein, 269 aa, Thermomyces lanuginosus
EVSQDLFNQFNLFAQYSAAAYCGKNNDAPAGTNITCTGNACPEVEKADATFLYSFEDSGVGDVTGFLALDNTNKLIVLAFRGSRSIENWIGNLNFDLKEINDICSGCRGHDGFTSSWRSVADTLRQKVEDAVREHPDYRVVFTGHSLGGALATVAGADLRGNGYDIDVFSYGAPRVGNRAFAEFLTVQTGGTLYRITHTNDIVPRLPPREFGYSHSSPEYWIKSGTLVPVTRNDIVKIEGIDATGGNNQPNIPDIPAHLWYFGLIGTCL

SEQ ID NO: 3862 - protein, 269 aa, Thermomyces lanuginosus
EVSQDLFNQFNLFAQYSAAAYCGKNNDAPAGTNITCTGNACPEVEKADATFLYSFEDSGVGDVTGFLALDNTNKLIVLSFRGSRSIENWIGNLNFDLKEINDICSGCRGHDGFTSSWRSVADKLRQKVEDAVREHPDYRVVFTGHSLGGALATVAGADLRGNGYDIDVFSYGAPRVGNRAFAEFLTVQTGGTLYRITHTNDIVPRLPPREFGYSHSSPEYWIKSGTLVPVTRNDIVKIEGIDATGGNNQPNIPDIPAHLWYFGLIGTCL

SEQ ID NO: 3863 - protein, 269 aa, Thermomyces lanuginosus
EVSADLFNQFNLFAQYSAAAYCGKNNDAPAGTNITCTGNACPEVEKADATFLYSFEDSGVGDVTGFLALDNTNKLIVLSFRGSRSIENWIGNLNFDLKEINDICSGCRGHDGFTSSWRSVADTLRQKVEDAVREHPDYRVVFTGHSLGGALATVAGADLRGNGYDIDVFSYGAPRVGNRAFAEFLTVQTGGTLYRITHTNDIVPRLPPREFGYSHSSPEYWIKSGTLVPVTRNDIVKIEGIDATGGNNQPNIPDIPAHLWYFGLIGTCL

SEQ ID NO: 3864 - protein, 269 aa, Thermomyces lanuginosus
EVSQDLFNQFNLFAQYSAAAYCGKNNDAPAGTNITCTGNACPEVEKADATFLYSFEDSGVGDVTGFLALDNTNKLIVLSFRGSRSIENWIGNLNFDLKEINDICWGCRGHDGFTSSWRSVADTLRQKVEDAVREHPDYRVVFTGHSLGGALATVAGADLRGNGYDIDVFSYGAPRVGNRAFAEFLTVQTGGTLYRITHTNDIVPRLPPREFGYSHSSPEYWIKSGTLVPVTRNDIVKIEGIDATGGNNQPNIPDIPAHLWYFGLIGTCL

SEQ ID NO: 3865 - protein, 269 aa, Thermomyces lanuginosus
EVSQDLFNQFNLFAQYSAAAYCGKNNDAPAGTNITCTGNACPEVEKADATFLYRFEDSGVGDVTGFLALDNTNKLIVLSFRGSRSIENWIGNLNFDLKEINDICSGCRGHDGFTSSWRSVADTLRQKVEDAVREHPDYRVVFTGHSLGGALATVAGADLRGNGYDIDVFSYGAPRVGNRAFAEFLTVQTGGTLYRITHTNDIVPRLPPREFGYSHSSPEYWIKSGTLVPVTRNDIVKIEGIDATGGNNQPNIPDIPAHLWYFGLIGTCL

SEQ ID NO: 3866 - protein, 269 aa, Thermomyces lanuginosus
EVSQDLFNQFNLFAQYSAAAYCGKNNDAPAGTNITCTGNACPEVEKADATFLYSFEDSGVGDVTGFVALDNTNKLIVLSFRGSRSIENWIGNLNFDLKEINDICSGCRGHDGFTSSWRSVADTLRQKVEDAVREHPDYRVVFTGHSLGGALATVAGADLRGNGYDIDVFSYGAPRVGNRAFAEFLTVQTGGTLYRITHTNDIVPRLPPREFGYSHSSPEYWIKSGTLVPVTRNDIVKIEGIDATGGNNQPNIPDIPAHLWYFGLIGTCL

SEQ ID NO: 3867 - protein, 269 aa, Thermomyces lanuginosus
EVSQDLFNQFNLFAQYSAAAYCGKNNDAPAGTNITCTGNACPEVEKADATFLYSFEDSGVGDVTGFLALDNTNKLIVLSFRGSRSIENWIGNLNFDLKEINDICFGCRGHDGFTSSWRSVADTLRQKVEDAVREHPDYRVVFTGHSLGGALATVAGADLRGNGYDIDVFSYGAPRVGNRAFAEFLTVQTGGTLYRITHTNDIVPRLPPREFGYSHSSPEYWIKSGTLVPVTRNDIVKIEGIDATGGNNQPNIPDIPAHLWYFGLIGTCL

SEQ ID NO: 3868 - protein, 269 aa, Thermomyces lanuginosus
EVSQDLFNQFNLFAQYSAAAYCGKNNDAPAGTNITCTGNACPEVEKADATFLYSFEDSGVGDVTGFLALDNTNKLIVLSFRGSRSIENWIGNLNFDLKEINDICSGCRGHDGFTSSWRSVADTLRQKVEDAVREHPDYRVVYTGHSLGGALATVAGADLRGNGYDIDVFSYGAPRVGNRAFAEFLTVQTGGTLYRITHTNDIVPRLPPREFGYSHSSPEYWIKSGTLVPVTRNDIVKIEGIDATGGNNQPNIPDIPAHLWYFGLIGTCL

SEQ ID NO: 3869 - protein, 269 aa, Thermomyces lanuginosus
EVSQDLFNQFNLFAQYSAAAYCGKNNDAPAGTNITCTGNACPEVEKADATFLYSFEDSGVGDVTGFLALDNTNKLIVLSFRGSRSIENWIGNLNFDLKEINDICSGCRGHDGFTSSWRSVADTLRQKVEDAVREHPDYRVVFTGHSLGGAMATVAGADLRGNGYDIDVFSYGAPRVGNRAFAEFLTVQTGGTLYRITHTNDIVPRLPPREFGYSHSSPEYWIKSGTLVPVTRNDIVKIEGIDATGGNNQPNIPDIPAHLWYFGLIGTCL

SEQ ID NO: 3870 - protein, 269 aa, Thermomyces lanuginosus
EVSQDLFNQFNLFAQYSAAAYCGKNNDAPAGTNITCTGNFCPEVEKADATFLYSFEDSGVGDVTGFLALDNTNKLIVLSFRGSRSIENWIGNLNFDLKEINDICSGCRGHDGFTSSWRSVADTLRQKVEDAVREHPDYRVVFTGHSLGGALATVAGADLRGNGYDIDVFSYGAPRVGNRAFAEFLTVQTGGTLYRITHTNDIVPRLPPREFGYSHSSPEYWIKSGTLVPVTRNDIVKIEGIDATGGNNQPNIPDIPAHLWYFGLIGTCL

SEQ ID NO: 3871 - protein, 269 aa, Thermomyces lanuginosus
EVSQDLFNQFNLFAQYSAAAYCGKNNDAPAGTNITCTGNACPEVEKADATFLYSFEDSGVGDVTGFLALDNTNKLIVLSFRGSRSIENWIGNLNFDLKEINDICSGCRGHDGFTSSWRSVADTLRQKVEDAVREHPDYRVVFTGHSLGGALATVAGADRRGNGYDIDVFSYGAPRVGNRAFAEFLTVQTGGTLYRITHTNDIVPRLPPREFGYSHSSPEYWIKSGTLVPVTRNDIVKIEGIDATGGNNQPNIPDIPAHLWYFGLIGTCL

SEQ ID NO: 3872 - protein, 269 aa, Thermomyces lanuginosus
EVSQDLFNQFNLFAQYSAAAYCGKNNDAPAGTNITCTGNACPEVEKADATFLYSFEDSGVGDVTYFLALDNTNKLIVLSFRGSRSIENWIGNLNFDLKEINDICSGCRGHDGFTSSWRSVADTLRQKVEDAVREHPDYRVVFTGHSLGGALATVAGADLRGNGYDIDVFSYGAPRVGNRAFAEFLTVQTGGTLYRITHTNDIVPRLPPREFGYSHSSPEYWIKSGTLVPVTRNDIVKIEGIDATGGNNQPNIPDIPAHLWYFGLIGTCL

SEQ ID NO: 3873 - protein, 269 aa, Thermomyces lanuginosus
EVSQDLFNQFNLFAQYSAAAYCGKNNDAPAGTNITCTGNACPEVEKADATFLYSFEDSGVGDVTGFLALDNTNKLVVLSFRGSRSIENWIGNLNFDLKEINDICSGCRGHDGFTSSWRSVADTLRQKVEDAVREHPDYRVVFTGHSLGGALATVAGADLRGNGYDIDVFSYGAPRVGNRAFAEFLTVQTGGTLYRITHTNDIVPRLPPREFGYSHSSPEYWIKSGTLVPVTRNDIVKIEGIDATGGNNQPNIPDIPAHLWYFGLIGTCL

SEQ ID NO: 3874 - protein, 269 aa, Thermomyces lanuginosus
EVSQDLFNYFNLFAQYSAAAYCGKNNDAPAGTNITCTGNACPEVEKADATFLYSFEDSGVGDVTGFLALDNTNKLIVLSFRGSRSIENWIGNLNFDLKEINDICSGCRGHDGFTSSWRSVADTLRQKVEDAVREHPDYRVVFTGHSLGGALATVAGADLRGNGYDIDVFSYGAPRVGNRAFAEFLTVQTGGTLYRITHTNDIVPRLPPREFGYSHSSPEYWIKSGTLVPVTRNDIVKIEGIDATGGNNQPNIPDIPAHLWYFGLIGTCL

SEQ ID NO: 3875 - protein, 269 aa, Thermomyces lanuginosus
EVSQDLFNQFNLFAQYSAAAYCGKNNDAPAGTNITCTGNACPEVEKADATFLYSFEDSGVGDVTGFLALDNTNKLIVLSFRGSRSIENWIGNLNFDLKEINDICSGCRGHDGFTSSWRSVADTLRQKVEDAVREHPDYRFVFTGHSLGGALATVAGADLRGNGYDIDVFSYGAPRVGNRAFAEFLTVQTGGTLYRITHTNDIVPRLPPREFGYSHSSPEYWIKSGTLVPVTRNDIVKIEGIDATGGNNQPNIPDIPAHLWYFGLIGTCL

SEQ ID NO: 3876 - protein, 269 aa, Thermomyces lanuginosus
EVSQDLFNQFNLFAQYSAAAYCGKNNDAPAGTNITCTGNACPEVEKADATFLYSFEDSGVGDVTGFLALDNTNKLIVLSFRGSRSIENWIGNLNFDLKEINDICSGCRGHDGFTSSWRSVADTLRQKVEDAVREHPDYRVVFTGHSLGGALATVAGADLRGNGYDIDVFSYGAPRVGNRAFAEFLTVQTGGTLYRITHTNDIVPRLPPREFGYSHSHPEYWIKSGTLVPVTRNDIVKIEGIDATGGNNQPNIPDIPAHLWYFGLIGTCL

SEQ ID NO: 3877 - protein, 269 aa, Thermomyces lanuginosus
EVSQDLFNQFNLFAQYSAAAYCGKNNDAPAGTNITCTGNACPEVEKADATLLYSFEDSGVGDVTGFLALDNTNKLIVLSFRGSRSIENWIGNLNFDLKEINDICSGCRGHDGFTSSWRSVADTLRQKVEDAVREHPDYRVVFTGHSLGGALATVAGADLRGNGYDIDVFSYGAPRVGNRAFAEFLTVQTGGTLYRITHTNDIVPRLPPREFGYSHSSPEYWIKSGTLVPVTRNDIVKIEGIDATGGNNQPNIPDIPAHLWYFGLIGTCL

SEQ ID NO: 3878 - protein, 269 aa, Thermomyces lanuginosus
EVSQLLFNQFNLFAQYSAAAYCGKNNDAPAGTNITCTGNACPEVEKADATFLYSFEDSGVGDVTGFLALDNTNKLIVLSFRGSRSIENWIGNLNFDLKEINDICSGCRGHDGFTSSWRSVADTLRQKVEDAVREHPDYRVVFTGHSLGGALATVAGADLRGNGYDIDVFSYGAPRVGNRAFAEFLTVQTGGTLYRITHTNDIVPRLPPREFGYSHSSPEYWIKSGTLVPVTRNDIVKIEGIDATGGNNQPNIPDIPAHLWYFGLIGTCL

SEQ ID NO: 3879 - protein, 269 aa, Thermomyces lanuginosus
EVSQDLFNQFNLFAQYSAAAYCGKNNDAPAGTNITCTGNACPEVEKADATFLYSFEDSGVGDVTGFLALDNTNKLIVLSFRGSRSIENWIGNLNFDLKEINDICSGCRGHDGFTSSWRSVADTLRQKVEDAVREHPDYRVVFTGHSLGGALATVAGADLRGNGYDIDVFSYGAPRVGNRAFAEFLTVQTGGTLYRITHTNDIVPRLPPREFGYSHSSPEYWIHSGTLVPVTRNDIVKIEGIDATGGNNQPNIPDIPAHLWYFGLIGTCL

SEQ ID NO: 3880 - protein, 269 aa, Thermomyces lanuginosus
EVSQDLFNQFNLFAQYSAAAYCGKNNDAPAGTNITCTGNACPEVEKADATFLYSFEDSGVGDVTGFLALDNTNKLIVLSFRGSRSIENWIGNLNFDLKEINDICSGCRGHDGFTSSWRSVADTLRQKVEDAVREHPDYRVVFTGHSLGGALATVAGADLRGNGYDIDVFSYGAPRVGNRAFASFLTVQTGGTLYRITHTNDIVPRLPPREFGYSHSSPEYWIKSGTLVPVTRNDIVKIEGIDATGGNNQPNIPDIPAHLWYFGLIGTCL

SEQ ID NO: 3881 - protein, 269 aa, Thermomyces lanuginosus
EVSQDLFNQFNLFAQYSAAAYCGKNNDAPAGTNITCTGNACPEVEKADATFLYSFEDSGVGDVTGFLALDNTNKLIVLSFRGSRSIENWIGNLNFDLKEINDICSGCRGHVGFTSSWRSVADTLRQKVEDAVREHPDYRVVFTGHSLGGALATVAGADLRGNGYDIDVFSYGAPRVGNRAFAEFLTVQTGGTLYRITHTNDIVPRLPPREFGYSHSSPEYWIKSGTLVPVTRNDIVKIEGIDATGGNNQPNIPDIPAHLWYFGLIGTCL

SEQ ID NO: 3882 - protein, 269 aa, Thermomyces lanuginosus
EVSQDLFNQFNLFAQYSAAAYCGKNNDAPAGTNITCTGNACPEVEKADATFLYSFEDSGVGDVTGFLALDNTNKLIVLSFRGSRSIENWIGNLNFDLKEINDICSGCRGHDGFTSSWRSVADTLRQKVEDAVREHPDYRVVFTGHSLGGALATVAGADLRGNGYDIDVFSYGAPRWGNRAFAEFLTVQTGGTLYRITHTNDIVPRLPPREFGYSHSSPEYWIKSGTLVPVTRNDIVKIEGIDATGGNNQPNIPDIPAHLWYFGLIGTCL

SEQ ID NO: 3883 - protein, 269 aa, Thermomyces lanuginosus
EVSQDLFNQFNLFAQYSAAAYCGKNNDAPAGTNITCTGNACPEVEKADATFLYSFEDSGVGDVTGFLALDNTNKLIVLSFRGSRSIENWIGNLNFDLKEINDICSGCRGHDGFTSSWRSVADTLRQKVEDAVREHPDYRVVFTGHSLGGALATVAGADLRGNGYDIDVFSYGAPRVGNRAFAEFLTVQTGGTLYRITHTNDIVPRLPPREFGYSHSSPEYWIKSKTLVPVTRNDIVKIEGIDATGGNNQPNIPDIPAHLWYFGLIGTCL

SEQ ID NO: 3884 - protein, 269 aa, Thermomyces lanuginosus
EVSQDLFNQFNLFAQYSAAAYCGKNNDAPAGTNITCWGNACPEVEKADATFLYSFEDSGVGDVTGFLALDNTNKLIVLSFRGSRSIENWIGNLNFDLKEINDICSGCRGHDGFTSSWRSVADTLRQKVEDAVREHPDYRVVFTGHSLGGALATVAGADLRGNGYDIDVFSYGAPRVGNRAFAEFLTVQTGGTLYRITHTNDIVPRLPPREFGYSHSSPEYWIKSGTLVPVTRNDIVKIEGIDATGGNNQPNIPDIPAHLWYFGLIGTCL

SEQ ID NO: 3885 - protein, 269 aa, Thermomyces lanuginosus
EVSQDLFNQFNLFAQYSAAAYCGKNNDAPAGTNITCTGNACPEVEKADATFLYSFEDSGVGDVTGFLALDNTNKLIVLSFRGSRSIENWIGNLNFDLKEINDICSGCRGHDGFTSSWRSVADTLRQKVEDAVREHPDYRVVFTGHSLGGALATVAGADLRGNGYDIDVFSYGAPRVGNRAFAEFLTVQTGGTLYRITHTNDIVPRLPPREFGYSHSSPEYGIKSGTLVPVTRNDIVKIEGIDATGGNNQPNIPDIPAHLWYFGLIGTCL

SEQ ID NO: 3886 - protein, 269 aa, Thermomyces lanuginosus
EVSQDLFNQFNLFAQYSAAAYCGKNNDAPAGTNITCTGNACPEVEKADATFLYSFEDSGVGDVTGFLAWDNTNKLIVLSFRGSRSIENWIGNLNFDLKEINDICSGCRGHDGFTSSWRSVADTLRQKVEDAVREHPDYRVVFTGHSLGGALATVAGADLRGNGYDIDVFSYGAPRVGNRAFAEFLTVQTGGTLYRITHTNDIVPRLPPREFGYSHSSPEYWIKSGTLVPVTRNDIVKIEGIDATGGNNQPNIPDIPAHLWYFGLIGTCL

SEQ ID NO: 3887 - protein, 269 aa, Thermomyces lanuginosus
EVSQDLFNQFNLFAQYSAAAYCGKNNDMPAGTNITCTGNACPEVEKADATFLYSFEDSGVGDVTGFLALDNTNKLIVLSFRGSRSIENWIGNLNFDLKEINDICSGCRGHDGFTSSWRSVADTLRQKVEDAVREHPDYRVVFTGHSLGGALATVAGADLRGNGYDIDVFSYGAPRVGNRAFAEFLTVQTGGTLYRITHTNDIVPRLPPREFGYSHSSPEYWIKSGTLVPVTRNDIVKIEGIDATGGNNQPNIPDIPAHLWYFGLIGTCL

SEQ ID NO: 3888 - protein, 269 aa, Thermomyces lanuginosus
EVSQDLFNQFNLFAQYSAAAYCGKNNDAPAGTNITCTGNACPEVEKADATFLYSFEDSGVGDVTGFLALDNTNKLIVLSFRGSRSIENWIQNLNFDLKEINDICSGCRGHDGFTSSWRSVADTLRQKVEDAVREHPDYRVVFTGHSLGGALATVAGADLRGNGYDIDVFSYGAPRVGNRAFAEFLTVQTGGTLYRITHTNDIVPRLPPREFGYSHSSPEYWIKSGTLVPVTRNDIVKIEGIDATGGNNQPNIPDIPAHLWYFGLIGTCL

SEQ ID NO: 3889 - protein, 269 aa, Thermomyces lanuginosus
EVSQDLFNQFNLFAQYSAAAYCGKNNDAPAGTNITCTGNACPEVEKADATFLYSFEDSGVGDVTGFLALDNTNKLIVLSFRGSRSIENWIGNLNFDLKEINDICSGCRGHDGFTSSWRSVADTLRQKVEDAVREHPDYRVVFTGHSLGGALATVAGADLRGNGYDIDVFSYGAPRVGNRAFAEFLTVQTGGTLYRITHTNDIVPRLPPREFGYSHSSPEYWIKSGTLVPWTRNDIVKIEGIDATGGNNQPNIPDIPAHLWYFGLIGTCL

SEQ ID NO: 3890 - protein, 269 aa, Thermomyces lanuginosus
EVSQDLFNQFNLFAQYSAAAYCGKNNDAPAGTNITCTGNACPEVEKADATFLYSFEDSGVGDVTGFLALDNTNKLIVLSFRGSRSIENWIRNLNFDLKEINDICSGCRGHDGFTSSWRSVADTLRQKVEDAVREHPDYRVVFTGHSLGGALATVAGADLRGNGYDIDVFSYGAPRVGNRAFAEFLTVQTGGTLYRITHTNDIVPRLPPREFGYSHSSPEYWIKSGTLVPVTRNDIVKIEGIDATGGNNQPNIPDIPAHLWYFGLIGTCL

SEQ ID NO: 3891 - protein, 269 aa, Thermomyces lanuginosus
EVSQDLFNQFNLFAQYSAAAYCGKNNDAPAGTNITCTGNACPEVEKADATFLWSFEDSGVGDVTGFLALDNTNKLIVLSFRGSRSIENWIGNLNFDLKEINDICSGCRGHDGFTSSWRSVADTLRQKVEDAVREHPDYRVVFTGHSLGGALATVAGADLRGNGYDIDVFSYGAPRVGNRAFAEFLTVQTGGTLYRITHTNDIVPRLPPREFGYSHSSPEYWIKSGTLVPVTRNDIVKIEGIDATGGNNQPNIPDIPAHLWYFGLIGTCL

SEQ ID NO: 3892 - protein, 269 aa, Thermomyces lanuginosus
EVSQDLFNQFNLFAQYSAAAYCGKNNDAPAGTNITCTGNACPEVEKADATFLYSFEDSGVGDVTGFLALDNTNKLIVLSFRGSRSIENWIGNLNFDLKEINDICSGCRGHDGFTSSWRSVADTLRQKVEDAVREHPDYRVVFTGHSLGGALATVAGAFLRGNGYDIDVFSYGAPRVGNRAFAEFLTVQTGGTLYRITHTNDIVPRLPPREFGYSHSSPEYWIKSGTLVPVTRNDIVKIEGIDATGGNNQPNIPDIPAHLWYFGLIGTCL

SEQ ID NO: 3893 - protein, 269 aa, Thermomyces lanuginosus
EVSQDLFNQFNLFAQYSAAAYCGKNNDAPAGTNITCTGNACPEVEKADATFLYSFEDSGVGDVTGFLALDNTNKLIVLSFRGSRSIENWIGNLNFDLKEINDICSGCRGHDGFTSSWRSVADTLRQKVEDAVREHPDYRVVFTGHSLGGALATVAGADLRGNGYDIDVFSYGAPRVGNRAFAEFLTVQTGGTLYRITHTNDIVPRNPPREFGYSHSSPEYWIKSGTLVPVTRNDIVKIEGIDATGGNNQPNIPDIPAHLWYFGLIGTCL

SEQ ID NO: 3894 - protein, 269 aa, Thermomyces lanuginosus
EGSQDLFNQFNLFAQYSAAAYCGKNNDAPAGTNITCTGNACPEVEKADATFLYSFEDSGVGDVTGFLALDNTNKLIVLSFRGSRSIENWIGNLNFDLKEINDICSGCRGHDGFTSSWRSVADTLRQKVEDAVREHPDYRVVFTGHSLGGALATVAGADLRGNGYDIDVFSYGAPRVGNRAFAEFLTVQTGGTLYRITHTNDIVPRLPPREFGYSHSSPEYWIKSGTLVPVTRNDIVKIEGIDATGGNNQPNIPDIPAHLWYFGLIGTCL

SEQ ID NO: 3895 - protein, 269 aa, Thermomyces lanuginosus
EVSQDLFNQFNLFAQYSAAAYCGKNNDAPAGTNITCTGNACPEVEKADATFLYSFVDSGVGDVTGFLALDNTNKLIVLSFRGSRSIENWIGNLNFDLKEINDICSGCRGHDGFTSSWRSVADTLRQKVEDAVREHPDYRVVFTGHSLGGALATVAGADLRGNGYDIDVFSYGAPRVGNRAFAEFLTVQTGGTLYRITHTNDIVPRLPPREFGYSHSSPEYWIKSGTLVPVTRNDIVKIEGIDATGGNNQPNIPDIPAHLWYFGLIGTCL

SEQ ID NO: 3896 - protein, 269 aa, Thermomyces lanuginosus
EVSQDLFNQFNLFAQYSAAAYCGKNNDAPAGTNITCTGNACPEVEKADATFLYSFEDSGVGDVTGFLALDNTNKLIVLSFRGSRSIENWIGNLNFDLKWINDICSGCRGHDGFTSSWRSVADTLRQKVEDAVREHPDYRVVFTGHSLGGALATVAGADLRGNGYDIDVFSYGAPRVGNRAFAEFLTVQTGGTLYRITHTNDIVPRLPPREFGYSHSSPEYWIKSGTLVPVTRNDIVKIEGIDATGGNNQPNIPDIPAHLWYFGLIGTCL

SEQ ID NO: 3897 - protein, 269 aa, Thermomyces lanuginosus
EVSQDLFNQFNLFAQYSAAAYCGKNNDAPAGTNITCTGNACPEVEKADATFLYSFEDSGVGDVTGFLALDNTNELIVLSFRGSRSIENWIGNLNFDLKEINDICSGCRGHDGFTSSWRSVADTLRQKVEDAVREHPDYRVVFTGHSLGGALATVAGADLRGNGYDIDVFSYGAPRVGNRAFAEFLTVQTGGTLYRITHTNDIVPRLPPREFGYSHSSPEYWIKSGTLVPVTRNDIVKIEGIDATGGNNQPNIPDIPAHLWYFGLIGTCL

SEQ ID NO: 3898 - protein, 269 aa, Thermomyces lanuginosus
EVSQDIFNQFNLFAQYSAAAYCGKNNDAPAGTNITCTGNACPEVEKADATFLYSFEDSGVGDVTGFLALDNTNKLIVLSFRGSRSIENWIGNLNFDLKEINDICSGCRGHDGFTSSWRSVADTLRQKVEDAVREHPDYRVVFTGHSLGGALATVAGADLRGNGYDIDVFSYGAPRVGNRAFAEFLTVQTGGTLYRITHTNDIVPRLPPREFGYSHSSPEYWIKSGTLVPVTRNDIVKIEGIDATGGNNQPNIPDIPAHLWYFGLIGTCL

SEQ ID NO: 3899 - protein, 269 aa, Thermomyces lanuginosus
EVSQDLFNQFNLFAQYSAAAYCGKNNDAPAGTNITCTGNACPEVEKADATFLYSFEDSGVGDVTGFLALDWTNKLIVLSFRGSRSIENWIGNLNFDLKEINDICSGCRGHDGFTSSWRSVADTLRQKVEDAVREHPDYRVVFTGHSLGGALATVAGADLRGNGYDIDVFSYGAPRVGNRAFAEFLTVQTGGTLYRITHTNDIVPRLPPREFGYSHSSPEYWIKSGTLVPVTRNDIVKIEGIDATGGNNQPNIPDIPAHLWYFGLIGTCL

SEQ ID NO: 3900 - protein, 269 aa, Thermomyces lanuginosus
EVSQDLFNQFNLFAQYSAAAYCGKNNDAPAGTNITCTGNACPEVEKADATFLYSFEDSGVGDVTGFLALDNTNKLIVLSFRGSRSIENWIGNLNFDLKEINDICSGCRGHDGFTSSWRSVADTLRQKVEDAVREHPDYRVVFTGHSLGGALATVAGADLRGNGYDIDVFSYGAPRVGNRAFAEFLTVQTGGTLYRITHTNDIVPRLPPREFGYSHSSPEYWIVSGTLVPVTRNDIVKIEGIDATGGNNQPNIPDIPAHLWYFGLIGTCL

SEQ ID NO: 3901 - protein, 269 aa, Thermomyces lanuginosus
EVSQDLFNQFNLFAQYSAAAYCGKNNDAPAGTNITCTGNACPEVEKADATFLYSFEDSGVGDVTGFLALDNTNKLIVLSFRGSRSIENWIGNLNFVLKEINDICSGCRGHDGFTSSWRSVADTLRQKVEDAVREHPDYRVVFTGHSLGGALATVAGADLRGNGYDIDVFSYGAPRVGNRAFAEFLTVQTGGTLYRITHTNDIVPRLPPREFGYSHSSPEYWIKSGTLVPVTRNDIVKIEGIDATGGNNQPNIPDIPAHLWYFGLIGTCL

SEQ ID NO: 3902 - protein, 269 aa, Thermomyces lanuginosus
EVSQDLFNQFNLFAQYSAAAYCGKNNDAPAGTNITCTGNACPEVEKADATFLYSFEDSGVGDVTGFLALDNTNKHIVLSFRGSRSIENWIGNLNFDLKEINDICSGCRGHDGFTSSWRSVADTLRQKVEDAVREHPDYRVVFTGHSLGGALATVAGADLRGNGYDIDVFSYGAPRVGNRAFAEFLTVQTGGTLYRITHTNDIVPRLPPREFGYSHSSPEYWIKSGTLVPVTRNDIVKIEGIDATGGNNQPNIPDIPAHLWYFGLIGTCL

SEQ ID NO: 3903 - protein, 269 aa, Thermomyces lanuginosus
EVSQDLFNQFNLFAQYSAAAYCGKNNDAPAGTNITCTGNACPEVEKADATFLYSFEDSGVGDVTGFLALDNTNKLIVLSFRGSRSIENWIGNLNFDLKEINDICSGCRGHDGFTSSWRSVADTLRQKVEDHVREHPDYRVVFTGHSLGGALATVAGADLRGNGYDIDVFSYGAPRVGNRAFAEFLTVQTGGTLYRITHTNDIVPRLPPREFGYSHSSPEYWIKSGTLVPVTRNDIVKIEGIDATGGNNQPNIPDIPAHLWYFGLIGTCL

SEQ ID NO: 3904 - protein, 269 aa, Thermomyces lanuginosus
EVSQDLFNQFNLFAQYSAAAYCGKNNDAPAGTNITCPGNACPEVEKADATFLYSFEDSGVGDVTGFLALDNTNKLIVLSFRGSRSIENWIGNLNFDLKEINDICSGCRGHDGFTSSWRSVADTLRQKVEDAVREHPDYRVVFTGHSLGGALATVAGADLRGNGYDIDVFSYGAPRVGNRAFAEFLTVQTGGTLYRITHTNDIVPRLPPREFGYSHSSPEYWIKSGTLVPVTRNDIVKIEGIDATGGNNQPNIPDIPAHLWYFGLIGTCL

SEQ ID NO: 3905 - protein, 269 aa, Thermomyces lanuginosus
EVSQDLFNQFNLFAQYSAAAYCGKNNDAPAGTNITCTGNACPEVEKADATFLYSFEDSGVGDVTGFLALDNTNKLIVLSFRGSRSIENWIGNLNFDLKEINDICSGCRGHDGFTSSWRSVADTLRQKVEDAVREHPDYRVVFTGHSLGGALATVAGADLRGNGYDIDVFSYGAPRVGNRAFAEFLTVQTGGTLYRITHTNDIVPRLPPREFGYSHSSPEYWIKSGTLVPVTRNDIVKIEGIDATGGNNQPYIPDIPAHLWYFGLIGTCL

SEQ ID NO: 3906 - protein, 269 aa, Thermomyces lanuginosus
EVSQDLFNQFNLFAQYSAAAYCGKNNDAPAGTNITCTGNACPEVEKADATFLYSFEDSGVGDVTGFLALDNTNKLIVLSFRGSRSIENWIGNLNFDLKEINDICSGCRGHDGFTSSWRSVADTLRQKVEDAVREHPDYRVVFTGHSLGGALATVAGADLRGNGYDIDVFSYGAPRVGNRAFAEFLTVQTGGTLYRITHTNDIVPRLPPREFGYSHSSPEYWIKSGTLVIVTRNDIVKIEGIDATGGNNQPNIPDIPAHLWYFGLIGTCL

SEQ ID NO: 3907 - protein, 269 aa, Thermomyces lanuginosus
EVSQDLFNQFNLFAQYSAAAYCGKNNDAPAGTNITCTGNACPEVEKADATFLYSFEDSGVGDVTGFLALDNTNKLIVLSFRGSRSIENWIGNLNFDLKEINDICSGCRGHDGFTSSWRSVADTLRQKVEDAVREHPDYRVVFTGHSLGGALATVAGADLRGNGYDIDVFSYGAPRVGNRAFAEFLTVQTGGTLYRITHTNDIVPRLPPREFGYSHSSPEYWISSGTLVPVTRNDIVKIEGIDATGGNNQPNIPDIPAHLWYFGLIGTCL

SEQ ID NO: 3908 - protein, 269 aa, Thermomyces lanuginosus
EVSQDLFNQFNLFAQYSAAAYCGKNNDAPAGTNITCTGNACPEVEKADATFLYSFEDSGVGDVTGFLALDNTNKLIVLSFRGSRSIENWIGNLNFDLKEINDICSGCRGHDGFTSSWRSVADTLRQKVEDAVREHPDYRVVFTGHSLGGAVATVAGADLRGNGYDIDVFSYGAPRVGNRAFAEFLTVQTGGTLYRITHTNDIVPRLPPREFGYSHSSPEYWIKSGTLVPVTRNDIVKIEGIDATGGNNQPNIPDIPAHLWYFGLIGTCL

SEQ ID NO: 3909 - protein, 269 aa, Thermomyces lanuginosus
EVSQDLFNQFNLFAQYSAAAYCGKNNDAPAGTNITCTGNACPEVEKADATFLYSFEDSGVGDVTGFLALDNTNKLIVLSFRGSRSIENWYGNLNFDLKEINDICSGCRGHDGFTSSWRSVADTLRQKVEDAVREHPDYRVVFTGHSLGGALATVAGADLRGNGYDIDVFSYGAPRVGNRAFAEFLTVQTGGTLYRITHTNDIVPRLPPREFGYSHSSPEYWIKSGTLVPVTRNDIVKIEGIDATGGNNQPNIPDIPAHLWYFGLIGTCL

SEQ ID NO: 3910 - protein, 269 aa, Thermomyces lanuginosus
EVSQDLFNQFNLFAQYSAAAYCGKNNDAPAGTNITCTGNACPEVEKADATFLYSFEDSGVGDVTGFLALDNTNKLIVLSFRGSRSIENWIGNLNFDLKEINDICSGCRGHDGFTTSWRSVADTLRQKVEDAVREHPDYRVVFTGHSLGGALATVAGADLRGNGYDIDVFSYGAPRVGNRAFAEFLTVQTGGTLYRITHTNDIVPRLPPREFGYSHSSPEYWIKSGTLVPVTRNDIVKIEGIDATGGNNQPNIPDIPAHLWYFGLIGTCL

SEQ ID NO: 3911 - protein, 269 aa, Thermomyces lanuginosus
EVSQDLFNQFNLFAQYSAAAYCGKNNDAPAGTNITCTGNACPEVEKADATFLYSFEDSGVGDVTGFLALDNTNKLIVLSFRGSRSIENWIGNLNFDLKEINDICSGCRGHDGFTSSWRSVADTLRQKVEDAVREHPDYRVVFTGHSLGGALATVAGADLRGNGYDIDVYSYGAPRVGNRAFAEFLTVQTGGTLYRITHTNDIVPRLPPREFGYSHSSPEYWIKSGTLVPVTRNDIVKIEGIDATGGNNQPNIPDIPAHLWYFGLIGTCL

SEQ ID NO: 3912 - protein, 269 aa, Thermomyces lanuginosus
EVSQDLFNQFNLFAQYSAAAYCGKNNDAPAGTNITCTGNACPEVEKADATFLYSFEDSGVGDVTGFLALDNTNKLIVLSFRGSRSIENWFGNLNFDLKEINDICSGCRGHDGFTSSWRSVADTLRQKVEDAVREHPDYRVVFTGHSLGGALATVAGADLRGNGYDIDVFSYGAPRVGNRAFAEFLTVQTGGTLYRITHTNDIVPRLPPREFGYSHSSPEYWIKSGTLVPVTRNDIVKIEGIDATGGNNQPNIPDIPAHLWYFGLIGTCL

SEQ ID NO: 3913 - protein, 269 aa, Thermomyces lanuginosus
EVSQDLFNQFNLFAQYSAAAYCGKNNDAPAGTNITCTGNACPEVEKADATFLYSFEDSGVGDVTGFLALDNTNKLIVLSFRGSRSIENWIGNLNFDLKEINDICSGCRGHDGFTSSWRSVADTLRQKVEDAVREHPDYRVVFTGHSLGGALATVAGADLRGNGYDIDVFSYGAPRVGNRAFAEFLTVQTHGTLYRITHTNDIVPRLPPREFGYSHSSPEYWIKSGTLVPVTRNDIVKIEGIDATGGNNQPNIPDIPAHLWYFGLIGTCL

SEQ ID NO: 3914 - protein, 269 aa, Thermomyces lanuginosus
EVSQDLFNQFNLFAQYSAAAYCGKNNDAPAGTNITCTGNACPEVEKADATFLYSFEDSGVGDVTGFLALDNTNKLIVLSFRGSRSIENWIGNLNFDLKEINDICSGCRGHAGFTSSWRSVADTLRQKVEDAVREHPDYRVVFTGHSLGGALATVAGADLRGNGYDIDVFSYGAPRVGNRAFAEFLTVQTGGTLYRITHTNDIVPRLPPREFGYSHSSPEYWIKSGTLVPVTRNDIVKIEGIDATGGNNQPNIPDIPAHLWYFGLIGTCL

SEQ ID NO: 3915 - protein, 269 aa, Thermomyces lanuginosus
EVSQDLVNQFNLFAQYSAAAYCGKNNDAPAGTNITCTGNACPEVEKADATFLYSFEDSGVGDVTGFLALDNTNKLIVLSFRGSRSIENWIGNLNFDLKEINDICSGCRGHDGFTSSWRSVADTLRQKVEDAVREHPDYRVVFTGHSLGGALATVAGADLRGNGYDIDVFSYGAPRVGNRAFAEFLTVQTGGTLYRITHTNDIVPRLPPREFGYSHSSPEYWIKSGTLVPVTRNDIVKIEGIDATGGNNQPNIPDIPAHLWYFGLIGTCL

SEQ ID NO: 3916 - protein, 269 aa, Thermomyces lanuginosus
EVSQDLFNQFNLFAQYSAAAYCGKNNDAPAGTNITCTGNACPEVEKADATFLYSFEDSGVGDVTGFLALDNTNKLIVLSFRGSRSIENWIGNLNFDLKEINDICSGCRGHDGFTSSWRSVADTLRQKVEDAVREHPDYRVVFTGHSLGGALATVAGADLRGNGYDIDVFSYGAPRVGNKAFAEFLTVQTGGTLYRITHTNDIVPRLPPREFGYSHSSPEYWIKSGTLVPVTRNDIVKIEGIDATGGNNQPNIPDIPAHLWYFGLIGTCL

SEQ ID NO: 3917 - protein, 269 aa, Thermomyces lanuginosus
EVSQDLFNQFNLFAQYSAAAYCGKNNDAPAGTKITCTGNACPEVEKADATFLYSFEDSGVGDVTGFLALDNTNKLIVLSFRGSRSIENWIGNLNFDLKEINDICSGCRGHDGFTSSWRSVADTLRQKVEDAVREHPDYRVVFTGHSLGGALATVAGADLRGNGYDIDVFSYGAPRVGNRAFAEFLTVQTGGTLYRITHTNDIVPRLPPREFGYSHSSPEYWIKSGTLVPVTRNDIVKIEGIDATGGNNQPNIPDIPAHLWYFGLIGTCL

SEQ ID NO: 3918 - protein, 269 aa, Thermomyces lanuginosus
EVSQDLFNQFNLFAQYSAAAYCGKNNDAPAGTNITCTGNACPEVEKADATFLYSFEDSGVGDVTGFLALDNTNKLIVLSFRGSRSIENWIGNLNFDLKEINDICSGCRGHDGFTSSWRSVADTLRQKVEDAVREHPDYRVVFTGHSLGGALATVAGADLRGNGYDIDVFSYGAPRVGNRAFAEFLTVQTGGTLYRITHTNDIVPRLPPREFGYSHSSPEYWIKSGTLVPVTRNDIVKIEGIDATGGNNQPNIPDIPAHLWYFGLISTCL

SEQ ID NO: 3919 - protein, 269 aa, Thermomyces lanuginosus
EVSQDLFNQFNLFAQYSAAAYCGKNNDAPAGTNITCTGNACPEVEKADATFLYSFEDSGVGDVTGFLALDNTNKLIVLSFRGSRSIENWIGNLNFDLKEINDICSGCRGHDGFTSSWRSVADTLRQKVEDAVREHPDYRVVFTGHSLGGALATVAGADLRGNGYDIDVFSYGAPRVGNRAFAEFLTVQTGGTLYRITHTNDIVPRLPPREFGYSHSSPEYWIKSGTLVPVTRNDIVKIEGIDATGGNNQPNIPDIPAHLWYFGLLGTCL

SEQ ID NO: 3920 - protein, 269 aa, Thermomyces lanuginosus
EVSQWLFNQFNLFAQYSAAAYCGKNNDAPAGTNITCTGNACPEVEKADATFLYSFEDSGVGDVTGFLALDNTNKLIVLSFRGSRSIENWIGNLNFDLKEINDICSGCRGHDGFTSSWRSVADTLRQKVEDAVREHPDYRVVFTGHSLGGALATVAGADLRGNGYDIDVFSYGAPRVGNRAFAEFLTVQTGGTLYRITHTNDIVPRLPPREFGYSHSSPEYWIKSGTLVPVTRNDIVKIEGIDATGGNNQPNIPDIPAHLWYFGLIGTCL

SEQ ID NO: 3921 - protein, 269 aa, Thermomyces lanuginosus
EVSQDLFNQFNLFAQYSAAAYCGKNNDAPAHTNITCTGNACPEVEKADATFLYSFEDSGVGDVTGFLALDNTNKLIVLSFRGSRSIENWIGNLNFDLKEINDICSGCRGHDGFTSSWRSVADTLRQKVEDAVREHPDYRVVFTGHSLGGALATVAGADLRGNGYDIDVFSYGAPRVGNRAFAEFLTVQTGGTLYRITHTNDIVPRLPPREFGYSHSSPEYWIKSGTLVPVTRNDIVKIEGIDATGGNNQPNIPDIPAHLWYFGLIGTCL

SEQ ID NO: 3922 - protein, 269 aa, Thermomyces lanuginosus
EVSFDLFNQFNLFAQYSAAAYCGKNNDAPAGTNITCTGNACPEVEKADATFLYSFEDSGVGDVTGFLALDNTNKLIVLSFRGSRSIENWIGNLNFDLKEINDICSGCRGHDGFTSSWRSVADTLRQKVEDAVREHPDYRVVFTGHSLGGALATVAGADLRGNGYDIDVFSYGAPRVGNRAFAEFLTVQTGGTLYRITHTNDIVPRLPPREFGYSHSSPEYWIKSGTLVPVTRNDIVKIEGIDATGGNNQPNIPDIPAHLWYFGLIGTCL

SEQ ID NO: 3923 - protein, 269 aa, Thermomyces lanuginosus
EVSQDLFNQFNLFAQYSAAAYCGKNNDAPAGTNITCTGSACPEVEKADATFLYSFEDSGVGDVTGFLALDNTNKLIVLSFRGSRSIENWIGNLNFDLKEINDICSGCRGHDGFTSSWRSVADTLRQKVEDAVREHPDYRVVFTGHSLGGALATVAGADLRGNGYDIDVFSYGAPRVGNRAFAEFLTVQTGGTLYRITHTNDIVPRLPPREFGYSHSSPEYWIKSGTLVPVTRNDIVKIEGIDATGGNNQPNIPDIPAHLWYFGLIGTCL

SEQ ID NO: 3924 - protein, 269 aa, Thermomyces lanuginosus
EVSQDLFNRFNLFAQYSAAAYCGKNNDAPAGTNITCTGNACPEVEKADATFLYSFEDSGVGDVTGFLALDNTNKLIVLSFRGSRSIENWIGNLNFDLKEINDICSGCRGHDGFTSSWRSVADTLRQKVEDAVREHPDYRVVFTGHSLGGALATVAGADLRGNGYDIDVFSYGAPRVGNRAFAEFLTVQTGGTLYRITHTNDIVPRLPPREFGYSHSSPEYWIKSGTLVPVTRNDIVKIEGIDATGGNNQPNIPDIPAHLWYFGLIGTCL

SEQ ID NO: 3925 - protein, 269 aa, Thermomyces lanuginosus
EVSQDLFNQFNLFAQYSAAAYCGKNNDAPAGTNITCTGNACPEVEKADATFLYSFEDSGVGDVTGFLALDNTNKLIVLSFRGSRNIENWIGNLNFDLKEINDICSGCRGHDGFTSSWRSVADTLRQKVEDAVREHPDYRVVFTGHSLGGALATVAGADLRGNGYDIDVFSYGAPRVGNRAFAEFLTVQTGGTLYRITHTNDIVPRLPPREFGYSHSSPEYWIKSGTLVPVTRNDIVKIEGIDATGGNNQPNIPDIPAHLWYFGLIGTCL

SEQ ID NO: 3926 - protein, 269 aa, Thermomyces lanuginosus
EVSPDLFNQFNLFAQYSAAAYCGKNNDAPAGTNITCTGNACPEVEKADATFLYSFEDSGVGDVTGFLALDNTNKLIVLSFRGSRSIENWIGNLNFDLKEINDICSGCRGHDGFTSSWRSVADTLRQKVEDAVREHPDYRVVFTGHSLGGALATVAGADLRGNGYDIDVFSYGAPRVGNRAFAEFLTVQTGGTLYRITHTNDIVPRLPPREFGYSHSSPEYWIKSGTLVPVTRNDIVKIEGIDATGGNNQPNIPDIPAHLWYFGLIGTCL

SEQ ID NO: 3927 - protein, 269 aa, Thermomyces lanuginosus
EVSQDLFNQFNLFAQYSAAAYCGKNNSAPAGTNITCTGNACPEVEKADATFLYSFEDSGVGDVTGFLALDNTNKLIVLSFRGSRSIENWIGNLNFDLKEINDICSGCRGHDGFTSSWRSVADTLRQKVEDAVREHPDYRVVFTGHSLGGALATVAGADLRGNGYDIDVFSYGAPRVGNRAFAEFLTVQTGGTLYRITHTNDIVPRLPPREFGYSHSSPEYWIKSGTLVPVTRNDIVKIEGIDATGGNNQPNIPDIPAHLWYFGLIGTCL

SEQ ID NO: 3928 - protein, 269 aa, Thermomyces lanuginosus
EVSQDLFNQFNLFAQYSAAAYCGKNNDAPAGTNITCTGNACPEVEKADATFLYSFEDSGVGDVTGFLALDNTNKLIVLSFRGSRSIENWIGNLNFDLKEINDICSGCRGHDGFTSSWRSVADTLRQKVEDAVREHPDYRVVFTGHSLGGALATVAGADLRGNGYDIDVFSYGAPRVGNRAFAEFLTVQTGGTLYRITHTNDIVPRLPPREFGYSHSSPEYWIKSGTLVPVTRNDIVKIEGIDATGGNNQPNIPDIDAHLWYFGLIGTCL

SEQ ID NO: 3929 - protein, 269 aa, Thermomyces lanuginosus
EVSQDKFNQFNLFAQYSAAAYCGKNNDAPAGTNITCTGNACPEVEKADATFLYSFEDSGVGDVTGFLALDNTNKLIVLSFRGSRSIENWIGNLNFDLKEINDICSGCRGHDGFTSSWRSVADTLRQKVEDAVREHPDYRVVFTGHSLGGALATVAGADLRGNGYDIDVFSYGAPRVGNRAFAEFLTVQTGGTLYRITHTNDIVPRLPPREFGYSHSSPEYWIKSGTLVPVTRNDIVKIEGIDATGGNNQPNIPDIPAHLWYFGLIGTCL

SEQ ID NO: 3930 - protein, 269 aa, Thermomyces lanuginosus
EVSQDLFNQFNLFAQYSAAAYCGKNNDAPAGTNITCTGNACPEVEKADATFLYSFEDSGVGDVTGFLALDNTNKLIVLSFRGSRSIENWIGNLNFDLKEINDICSGCRGHDGFTSSWRSVADTLRQKVEDAWREHPDYRVVFTGHSLGGALATVAGADLRGNGYDIDVFSYGAPRVGNRAFAEFLTVQTGGTLYRITHTNDIVPRLPPREFGYSHSSPEYWIKSGTLVPVTRNDIVKIEGIDATGGNNQPNIPDIPAHLWYFGLIGTCL

SEQ ID NO: 3931 - protein, 269 aa, Thermomyces lanuginosus
EVSQDLFNQFNLFAQYSAAAYCGKNNDAPAGTNITCTGNACPEVEKADATFLYSFEDSGVGDVTGFLALDNTNKLIVLSFRGSRSIENWIGTLNFDLKEINDICSGCRGHDGFTSSWRSVADTLRQKVEDAVREHPDYRVVFTGHSLGGALATVAGADLRGNGYDIDVFSYGAPRVGNRAFAEFLTVQTGGTLYRITHTNDIVPRLPPREFGYSHSSPEYWIKSGTLVPVTRNDIVKIEGIDATGGNNQPNIPDIPAHLWYFGLIGTCL

SEQ ID NO: 3932 - protein, 269 aa, Thermomyces lanuginosus
EVSQDLFNQFNLFAQYSAAAYCGKNNDAPAGTNITCTGNACPEVEKADATFLYSFEDSGVGDVTGFLALDNTNKLIVLSFRGSRSIENWIGNLNFDLKEINDICSGCRGHDGFTSSWRSVADTLRQKVEDAVREHPDYRVVFTGHSLGGALATVAGADLRGNGYDIDVFSYGAPRVGNRAFAEFLTVQTGGTLYRITHTNDIVPRLPPREFGYSHSSPEYWIKSGTLVPVTRNDIVKIEGIDATGGNNQPNIPDLPAHLWYFGLIGTCL

SEQ ID NO: 3933 - protein, 269 aa, Thermomyces lanuginosus
EVSQDLFNQFNLFAQYSAAAYCGKNNDAPAGTNITCTGNACPEVEKADATFLYSFEDSGVGDVTGFLALDNTNKLIVLSFRGSRSIENWIGNLNFDLKEINDICSGCRTHDGFTSSWRSVADTLRQKVEDAVREHPDYRVVFTGHSLGGALATVAGADLRGNGYDIDVFSYGAPRVGNRAFAEFLTVQTGGTLYRITHTNDIVPRLPPREFGYSHSSPEYWIKSGTLVPVTRNDIVKIEGIDATGGNNQPNIPDIPAHLWYFGLIGTCL

SEQ ID NO: 3934 - protein, 269 aa, Thermomyces lanuginosus
EVSQDLFNQFNLFAQYSAAAYCGKNNDAPAGTNITCTGNACPEVEKADATFLYSFEDSGVGDVTGFLALDNTNKLIVLSFRGSRSIENWIGNLNFDLKEINDICSGCRGHDGFTSSWRSVADTLRQKVEDAVREHPDYRVVFTGHSLGGALATVAGADLRGNGYDIDVFSYGAPRVGNRAFAHFLTVQTGGTLYRITHTNDIVPRLPPREFGYSHSSPEYWIKSGTLVPVTRNDIVKIEGIDATGGNNQPNIPDIPAHLWYFGLIGTCL

SEQ ID NO: 3935 - protein, 269 aa, Thermomyces lanuginosus
EVSQDLFNQFNLFAQYSAAAYCGKNNDAPAGTNITCTGNWCPEVEKADATFLYSFEDSGVGDVTGFLALDNTNKLIVLSFRGSRSIENWIGNLNFDLKEINDICSGCRGHDGFTSSWRSVADTLRQKVEDAVREHPDYRVVFTGHSLGGALATVAGADLRGNGYDIDVFSYGAPRVGNRAFAEFLTVQTGGTLYRITHTNDIVPRLPPREFGYSHSSPEYWIKSGTLVPVTRNDIVKIEGIDATGGNNQPNIPDIPAHLWYFGLIGTCL

SEQ ID NO: 3936 - protein, 269 aa, Thermomyces lanuginosus
EVSQDLFNQFNLFAQYSAAAYCGKNNDAPAGTNITCTGNACPEVEKADATFLYSFEDSGVGDVTGFLALDNTNKLIVLSFRGSRSIENWIGNLNFDLKEINDICSGCRGHDGFTSSWRSVADTLRQKVEDAVREHPDYRVVFTGHSLGGALATVAGADLRGNGYDIDVFSYGAPRVGNRAFAEFLTVQTGGTLYRITHTNDIVPRLPPREFGYSHSSPEYWIKSGTLVPVTTNDIVKIEGIDATGGNNQPNIPDIPAHLWYFGLIGTCL

SEQ ID NO: 3937 - protein, 269 aa, Synthetic construct
EVSQDLFNQFNLFAQYSAAAYCGKNNDAPAGTNITCTGNACPEVEKADATFLYSFEDSGVGDVTGFLALDNTNKLIVLSFRGSRSIENWIGNLNFDLKEINDICSGCRGHDGFTSSWRSVADTLRQKVEDAVREHPDYRVVFTGHSLGGALATVAGADLRGNGYDIDVFSYGAPRVGNRAFAEFLTVQTGGTLYRITHTNDIVPRLPPRVFGYSHSSPEYWIKSGTLVPVTRNDIVKIEGIDATGGNNQPNIPDIPAHLWYFGLIGTCL

SEQ ID NO: 3938 - protein, 269 aa, Thermomyces lanuginosus
EVSQDLFNQFNLFAQYSAAAYCGKNNDAPAGTNITCTGNACPEVEKADATFLYSFEDSGVGDVTGFLALDNTNKLIVLSFRGSRSIENWIGNLNFDLKEINDICSGCRGHDGFTSSWRSVADTLRQKVEDAVREHPDYRVVFTGHSLGGALATVAGADLRGNGYDIDVFGYGAPRVGNRAFAEFLTVQTGGTLYRITHTNDIVPRLPPREFGYSHSSPEYWIKSGTLVPVTRNDIVKIEGIDATGGNNQPNIPDIPAHLWYFGLIGTCL

SEQ ID NO: 3939 - protein, 269 aa, Thermomyces lanuginosus
EPSQDLFNQFNLFAQYSAAAYCGKNNDAPAGTNITCTGNACPEVEKADATFLYSFEDSGVGDVTGFLALDNTNKLIVLSFRGSRSIENWIGNLNFDLKEINDICSGCRGHDGFTSSWRSVADTLRQKVEDAVREHPDYRVVFTGHSLGGALATVAGADLRGNGYDIDVFSYGAPRVGNRAFAEFLTVQTGGTLYRITHTNDIVPRLPPREFGYSHSSPEYWIKSGTLVPVTRNDIVKIEGIDATGGNNQPNIPDIPAHLWYFGLIGTCL

SEQ ID NO: 3940 - protein, 269 aa, Thermomyces lanuginosus
EVSQDLFNQFNLFAQYSAAAYCGKNNDAPAGTNITCTGNACPEVEKADATFLYSFEDSGVGDVTGFLALDNTNKLIVLSFRGSRSIENWIGNLNFDLKEINDICSGCRGHDGFTSSWRSVADTLRQKVEDAVREHPDYRVVFTGHSLGGALATVAGADLRGNGYDIDVFSYGAPRVGNRAFAEFLTVQTGGTLYRITHTNDIVPRLPPREFGYSHSSPEYWIKSGTLVPVTRNDIVLIEGIDATGGNNQPNIPDIPAHLWYFGLIGTCL

SEQ ID NO: 3941 - protein, 269 aa, Thermomyces lanuginosus
EVSQDLFNQFNLFAQYSAAAYCGKNNDAPAGTNITCTGNACPEVEKADATFLYSFEDSGVGDVTGFLALDNTNKLIVLSFRGSRSIENWIGNLNFDLKEINDICSGCRGHDGFTSSWRSVADTLRQKVEDAVREHPDYRVVFTGHSLGGALATVAGADLRGNGYDIDVFSYGAPRVGNRAFAEFLTVQTGGTLYRITHTNDIVPRLPPREFGYSHSSPEYWIKSGTLVPVTRNDIVKIEGIDATGGNNQPNLPDIPAHLWYFGLIGTCL

SEQ ID NO: 3942 - protein, 269 aa, Thermomyces lanuginosus
EVSQDLFNQFNLFAQYSAAAYCGKNNDAPAGTNITCTGNACPEVEKADATFLYSFEDSGVGDVTGFLALDNTNKLIVLSFRGSRSIENWIGNLNFDLKEINDICSGCRGHDGFTSSWRSVADTLRQKVEDAVREHPDYRVVFTGHSLGGALATVAGADLRGNGYDIDVFSYGAPRVGNRAFAEFLTVQTGGTLYRITHTNDIVPRLPPREFGYSHNSPEYWIKSGTLVPVTRNDIVKIEGIDATGGNNQPNIPDIPAHLWYFGLIGTCL

SEQ ID NO: 3943 - protein, 269 aa, Thermomyces lanuginosus
EVSQDLFNQFNLFAQYSAAAYCGKNNDAPAGTNITCTGNACPEVEKADATFLYSFEDSGVGDVTGFLALDNTNKLIVLSFRGSRSIENWVGNLNFDLKEINDICSGCRGHDGFTSSWRSVADTLRQKVEDAVREHPDYRVVFTGHSLGGALATVAGADLRGNGYDIDVFSYGAPRVGNRAFAEFLTVQTGGTLYRITHTNDIVPRLPPREFGYSHSSPEYWIKSGTLVPVTRNDIVKIEGIDATGGNNQPNIPDIPAHLWYFGLIGTCL

SEQ ID NO: 3944 - protein, 269 aa, Thermomyces lanuginosus
EVSQDLFNQFNLFAQYSAAAYCGKNNDAPAGTNITCTGNACPEVEKADATFLYSFEDSGVGDVTGFLALDNTNKLIVLSFRGSRSIENWIGNLNFDLKEINDICSGCRGHDGFTSSWRSSADTLRQKVEDAVREHPDYRVVFTGHSLGGALATVAGADLRGNGYDIDVFSYGAPRVGNRAFAEFLTVQTGGTLYRITHTNDIVPRLPPREFGYSHSSPEYWIKSGTLVPVTRNDIVKIEGIDATGGNNQPNIPDIPAHLWYFGLIGTCL

SEQ ID NO: 3945 - protein, 269 aa, Thermomyces lanuginosus
EVSQDLFNQFNLFAQYSAAAYCGKNNDAPAGTNITCTGNACPEVEKADATFLYSFEDSGVGDKTGFLALDNTNKLIVLSFRGSRSIENWIGNLNFDLKEINDICSGCRGHDGFTSSWRSVADTLRQKVEDAVREHPDYRVVFTGHSLGGALATVAGADLRGNGYDIDVFSYGAPRVGNRAFAEFLTVQTGGTLYRITHTNDIVPRLPPREFGYSHSSPEYWIKSGTLVPVTRNDIVKIEGIDATGGNNQPNIPDIPAHLWYFGLIGTCL

SEQ ID NO: 3946 - protein, 269 aa, Thermomyces lanuginosus
EVSQDLFNQFNLFAQYSAAAYCGKNNDAPAGTNITCTGNACPEVEKADATFLYSFEDSGVGDVTGFLALDNTNALIVLSFRGSRSIENWIGNLNFDLKEINDICSGCRGHDGFTSSWRSVADTLRQKVEDAVREHPDYRVVFTGHSLGGALATVAGADLRGNGYDIDVFSYGAPRVGNRAFAEFLTVQTGGTLYRITHTNDIVPRLPPREFGYSHSSPEYWIKSGTLVPVTRNDIVKIEGIDATGGNNQPNIPDIPAHLWYFGLIGTCL

SEQ ID NO: 3947 - protein, 269 aa, Thermomyces lanuginosus
EVSQDLFNQFNLFAQYSAAAYCGKNNDAPAGTNITCTGNACPEVEKADATFLYSFEDSGVGDVTGFLALDNTNKLIVLSFRGSRSIENWIGNLNFDLKEINDICSGCRGHDGFTSSWRSVADTLRQKVEDAVREHPDYRVVFTGHSLGGALATVAGADLRGNGYDIDVFSYGAPRVGNRAFAEFLTVQTGGTLYRITHTNDIVPRLPPREFGYSHSSPEYWIKSGTLVPVTRNDIVKIEGIDATGGNNQPNIPDIKAHLWYFGLIGTCL

SEQ ID NO: 3948 - protein, 269 aa, Thermomyces lanuginosus
EVSQDLFNQFNLFAQYSAAAYCGKNNDAPAGTNITCTGNACPEVEKADATFLYSFEDSGVGDVTGFLALDNTNKLIALSFRGSRSIENWIGNLNFDLKEINDICSGCRGHDGFTSSWRSVADTLRQKVEDAVREHPDYRVVFTGHSLGGALATVAGADLRGNGYDIDVFSYGAPRVGNRAFAEFLTVQTGGTLYRITHTNDIVPRLPPREFGYSHSSPEYWIKSGTLVPVTRNDIVKIEGIDATGGNNQPNIPDIPAHLWYFGLIGTCL

SEQ ID NO: 3949 - protein, 269 aa, Thermomyces lanuginosus
EVSQDLFNQFNLFAQYSAAAYCGKNNDAPAGTNITCTGNACPEVEKADATFLYSFEDSGVGDVTGFLALDNTNKLIVLSFRGSRSIENWIGNLNFDLKEINDICSGCRGHDGFTSSWRSVADTLRQKVEDAVREHPDYRVVFTGHSLGGALATVAGADLRGNGYDIDVFSYGAPRVGNRAFAEFLTVQTGGTLYRITHTNDIVPRLPPREFGYSHSSPEYWIKSGTLVPVKRNDIVKIEGIDATGGNNQPNIPDIPAHLWYFGLIGTCL

SEQ ID NO: 3950 - protein, 269 aa, Thermomyces lanuginosus
EVSQDLFNQFNLFAQYSAAAYCGKNNDAPAGTNITCTGNACPEVEKADATFLYSFEDSGVGDVTGFLALDSTNKLIVLSFRGSRSIENWIGNLNFDLKEINDICSGCRGHDGFTSSWRSVADTLRQKVEDAVREHPDYRVVFTGHSLGGALATVAGADLRGNGYDIDVFSYGAPRVGNRAFAEFLTVQTGGTLYRITHTNDIVPRLPPREFGYSHSSPEYWIKSGTLVPVTRNDIVKIEGIDATGGNNQPNIPDIPAHLWYFGLIGTCL

SEQ ID NO: 3951 - protein, 269 aa, Thermomyces lanuginosus
EVSQDLFNQFNLFAQYSAAAYCGKNNDAPAGTNITCTGNACPEVEKADATFLYSFEDSGVGDVTGFLALDNTNKLIVLSFRGSRSIENWIGNLNFDLKEINDICSGCRGHDGFTSSWRSVADTLRQKVEDAVREHPDYRVVFTGHSLGGALATVAGADLRGNGYDIDVFSYGAPRVGNRAFAEFLTVQTGGTLYRITHTSDIVPRLPPREFGYSHSSPEYWIKSGTLVPVTRNDIVKIEGIDATGGNNQPNIPDIPAHLWYFGLIGTCL

SEQ ID NO: 3952 - protein, 269 aa, Thermomyces lanuginosus
EVSQDLFNQFNLYAQYSAAAYCGKNNDAPAGTNITCTGNACPEVEKADATFLYSFEDSGVGDVTGFLALDNTNKLIVLSFRGSRSIENWIGNLNFDLKEINDICSGCRGHDGFTSSWRSVADTLRQKVEDAVREHPDYRVVFTGHSLGGALATVAGADLRGNGYDIDVFSYGAPRVGNRAFAEFLTVQTGGTLYRITHTNDIVPRLPPREFGYSHSSPEYWIKSGTLVPVTRNDIVKIEGIDATGGNNQPNIPDIPAHLWYFGLIGTCL

SEQ ID NO: 3953 - protein, 269 aa, Thermomyces lanuginosus
EVSQDLFNQFNLFAQYSAAAYCGKNNDAPAGTNITCTGNACPEVEKADATFLYSFEDSGVGDVTGFLALDNTNKLIVLSFRGSRSIENWIGNLNFDLKEINDICSGCRGHDGFTSSWRSVADTLRQKNEDAVREHPDYRVVFTGHSLGGALATVAGADLRGNGYDIDVFSYGAPRVGNRAFAEFLTVQTGGTLYRITHTNDIVPRLPPREFGYSHSSPEYWIKSGTLVPVTRNDIVKIEGIDATGGNNQPNIPDIPAHLWYFGLIGTCL

SEQ ID NO: 3954 - protein, 269 aa, Thermomyces lanuginosus
EVSQDLFNQFNLFAQYSAAAYCGKNNDAPAGTNITCTGNACPEVEKADATFLYSFEDSGVGDVTGFLALDNTNKLIVLSFRGSRSIENWIGNLNFDLKEINDICSGCRGHDGFTSSWRSVADTLRQKVEDAVREHPDYRVVFTGHSLGGALATMAGADLRGNGYDIDVFSYGAPRVGNRAFAEFLTVQTGGTLYRITHTNDIVPRLPPREFGYSHSSPEYWIKSGTLVPVTRNDIVKIEGIDATGGNNQPNIPDIPAHLWYFGLIGTCL

SEQ ID NO: 3955 - protein, 269 aa, Thermomyces lanuginosus
EVSQDLFNQFNLFAQYSAAAYCGKNNDAPAGTNITCTGNACPEVEKADATFLYSFEDSGVGDVTGFLALDNVNKLIVLSFRGSRSIENWIGNLNFDLKEINDICSGCRGHDGFTSSWRSVADTLRQKVEDAVREHPDYRVVFTGHSLGGALATVAGADLRGNGYDIDVFSYGAPRVGNRAFAEFLTVQTGGTLYRITHTNDIVPRLPPREFGYSHSSPEYWIKSGTLVPVTRNDIVKIEGIDATGGNNQPNIPDIPAHLWYFGLIGTCL

SEQ ID NO: 3956 - protein, 269 aa, Thermomyces lanuginosus
EVSQDLFNQFNLFAQYSAAAYCGMNNDAPAGTNITCTGNACPEVEKADATFLYSFEDSGVGDVTGFLALDNTNKLIVLSFRGSRSIENWIGNLNFDLKEINDICSGCRGHDGFTSSWRSVADTLRQKVEDAVREHPDYRVVFTGHSLGGALATVAGADLRGNGYDIDVFSYGAPRVGNRAFAEFLTVQTGGTLYRITHTNDIVPRLPPREFGYSHSSPEYWIKSGTLVPVTRNDIVKIEGIDATGGNNQPNIPDIPAHLWYFGLIGTCL

SEQ ID NO: 3957 - protein, 269 aa, Thermomyces lanuginosus
EVSQDLFNQFNLFAQYSAAAYCGKNNDAPAGTNITCTGNACPEVEKADATFLYSFEDSGVGDVTGFLALDNTNKLIVLSFRGSRSIENWIGNLNFDLKEINDICSGCRGHDGFTSSWRSVADWLRQKVEDAVREHPDYRVVFTGHSLGGALATVAGADLRGNGYDIDVFSYGAPRVGNRAFAEFLTVQTGGTLYRITHTNDIVPRLPPREFGYSHSSPEYWIKSGTLVPVTRNDIVKIEGIDATGGNNQPNIPDIPAHLWYFGLIGTCL

SEQ ID NO: 3958 - protein, 269 aa, Thermomyces lanuginosus
EVSQDLFNQFNLFAQYSAAAYCGKNNDAPAGTNITCTGNACPEVEKADATFLYSFEDSGVGDVTGFLALDNTNKLIVLSFRGSRSIENWIGNLNFDLKEINDICSGCRGHDGFTSSWRSVADTLRQKVEDAVREHPDYRVVFTGHSLGGALATVAGADLRGNGYDDDVFSYGAPRVGNRAFAEFLTVQTGGTLYRITHTNDIVPRLPPREFGYSHSSPEYWIKSGTLVPVTRNDIVKIEGIDATGGNNQPNIPDIPAHLWYFGLIGTCL

SEQ ID NO: 3959 - protein, 269 aa, Thermomyces lanuginosus
EVSQDEFNQFNLFAQYSAAAYCGKNNDAPAGTNITCTGNACPEVEKADATFLYSFEDSGVGDVTGFLALDNTNKLIVLSFRGSRSIENWIGNLNFDLKEINDICSGCRGHDGFTSSWRSVADTLRQKVEDAVREHPDYRVVFTGHSLGGALATVAGADLRGNGYDIDVFSYGAPRVGNRAFAEFLTVQTGGTLYRITHTNDIVPRLPPREFGYSHSSPEYWIKSGTLVPVTRNDIVKIEGIDATGGNNQPNIPDIPAHLWYFGLIGTCL

SEQ ID NO: 3960 - protein, 269 aa, Thermomyces lanuginosus
EVSQDLFNQFNLFAQYSAAAYCGKNNDAPAGTNITCTGNACPEVEKADATFLYSFEDSGVGDVTGFLALDNTNKLIVLSFRGSRSIENWIGNLNFDLKEINDICSGCRGHDGFTSSWRSVADTLRQKVEQAVREHPDYRVVFTGHSLGGALATVAGADLRGNGYDIDVFSYGAPRVGNRAFAEFLTVQTGGTLYRITHTNDIVPRLPPREFGYSHSSPEYWIKSGTLVPVTRNDIVKIEGIDATGGNNQPNIPDIPAHLWYFGLIGTCL

SEQ ID NO: 3961 - protein, 269 aa, Thermomyces lanuginosus
EVSQDLFNQFNLFAQYSAAAYCGKNNDAPAGTNITCTGNACPEVEKADATFLYTFEDSGVGDVTGFLALDNTNKLIVLSFRGSRSIENWIGNLNFDLKEINDICSGCRGHDGFTSSWRSVADTLRQKVEDAVREHPDYRVVFTGHSLGGALATVAGADLRGNGYDIDVFSYGAPRVGNRAFAEFLTVQTGGTLYRITHTNDIVPRLPPREFGYSHSSPEYWIKSGTLVPVTRNDIVKIEGIDATGGNNQPNIPDIPAHLWYFGLIGTCL

SEQ ID NO: 3962 - protein, 269 aa, Thermomyces lanuginosus
EVSQDLFNQFNLFAQYSAAAYCGKNNDAPAGTNITCTGNACPEVEKADATFLYSFEDSGVGDVTGFLALDNTNKLILLSFRGSRSIENWIGNLNFDLKEINDICSGCRGHDGFTSSWRSVADTLRQKVEDAVREHPDYRVVFTGHSLGGALATVAGADLRGNGYDIDVFSYGAPRVGNRAFAEFLTVQTGGTLYRITHTNDIVPRLPPREFGYSHSSPEYWIKSGTLVPVTRNDIVKIEGIDATGGNNQPNIPDIPAHLWYFGLIGTCL

SEQ ID NO: 3963 - protein, 269 aa, Thermomyces lanuginosus
EVSQDLFNQFNLFAQYSAAAYCGKNNDAPAGTNITCTVNACPEVEKADATFLYSFEDSGVGDVTGFLALDNTNKLIVLSFRGSRSIENWIGNLNFDLKEINDICSGCRGHDGFTSSWRSVADTLRQKVEDAVREHPDYRVVFTGHSLGGALATVAGADLRGNGYDIDVFSYGAPRVGNRAFAEFLTVQTGGTLYRITHTNDIVPRLPPREFGYSHSSPEYWIKSGTLVPVTRNDIVKIEGIDATGGNNQPNIPDIPAHLWYFGLIGTCL

SEQ ID NO: 3964 - protein, 269 aa, Thermomyces lanuginosus
EVSQDYFNQFNLFAQYSAAAYCGKNNDAPAGTNITCTGNACPEVEKADATFLYSFEDSGVGDVTGFLALDNTNKLIVLSFRGSRSIENWIGNLNFDLKEINDICSGCRGHDGFTSSWRSVADTLRQKVEDAVREHPDYRVVFTGHSLGGALATVAGADLRGNGYDIDVFSYGAPRVGNRAFAEFLTVQTGGTLYRITHTNDIVPRLPPREFGYSHSSPEYWIKSGTLVPVTRNDIVKIEGIDATGGNNQPNIPDIPAHLWYFGLIGTCL

SEQ ID NO: 3965 - protein, 269 aa, Thermomyces lanuginosus
EVSQDLFNQFNLFAQYSAAAYCGKNNDAPAGTNITCTGNACPEVEKADATFLYSFEDSGVGDVTGFLALDNTNKLIVLSFRGSRSIENWIGNLNFDLKEINDICSGCRGHQGFTSSWRSVADTLRQKVEDAVREHPDYRVVFTGHSLGGALATVAGADLRGNGYDIDVFSYGAPRVGNRAFAEFLTVQTGGTLYRITHTNDIVPRLPPREFGYSHSSPEYWIKSGTLVPVTRNDIVKIEGIDATGGNNQPNIPDIPAHLWYFGLIGTCL

SEQ ID NO: 3966 - protein, 269 aa, Thermomyces lanuginosus
EVSQDLFNQFNLFAQYSAAAYCGKNNDAPAQTNITCTGNACPEVEKADATFLYSFEDSGVGDVTGFLALDNTNKLIVLSFRGSRSIENWIGNLNFDLKEINDICSGCRGHDGFTSSWRSVADTLRQKVEDAVREHPDYRVVFTGHSLGGALATVAGADLRGNGYDIDVFSYGAPRVGNRAFAEFLTVQTGGTLYRITHTNDIVPRLPPREFGYSHSSPEYWIKSGTLVPVTRNDIVKIEGIDATGGNNQPNIPDIPAHLWYFGLIGTCL

SEQ ID NO: 3967 - protein, 269 aa, Thermomyces lanuginosus
EVSQDLFNQFNLFAQHSAAAYCGKNNDAPAGTNITCTGNACPEVEKADATFLYSFEDSGVGDVTGFLALDNTNKLIVLSFRGSRSIENWIGNLNFDLKEINDICSGCRGHDGFTSSWRSVADTLRQKVEDAVREHPDYRVVFTGHSLGGALATVAGADLRGNGYDIDVFSYGAPRVGNRAFAEFLTVQTGGTLYRITHTNDIVPRLPPREFGYSHSSPEYWIKSGTLVPVTRNDIVKIEGIDATGGNNQPNIPDIPAHLWYFGLIGTCL

SEQ ID NO: 3968 - protein, 269 aa, Thermomyces lanuginosus
EVSQDLFNQFNLFAQYSAAAYCGKNNDAPAGTNITCTGNACPEVEDADATFLYSFEDSGVGDVTGFLALDNTNKLIVLSFRGSRSIENWIGNLNFDLKEINDICSGCRGHDGFTSSWRSVADTLRQKVEDAVREHPDYRVVFTGHSLGGALATVAGADLRGNGYDIDVFSYGAPRVGNRAFAEFLTVQTGGTLYRITHTNDIVPRLPPREFGYSHSSPEYWIKSGTLVPVTRNDIVKIEGIDATGGNNQPNIPDIPAHLWYFGLIGTCL

SEQ ID NO: 3969 - protein, 269 aa, Thermomyces lanuginosus
EVSQDLFNQFNLFAQYSAAAYCGKNNDAPAGTNITCTGNACPEVEKADATFLYSFEDSGVGDVTGFLALDNTNKLIVLSFRGSRSIENWIGNLNFDLKEINDICSGCRGHDGFTSSWRSVADTLRQKVEDIVREHPDYRVVFTGHSLGGALATVAGADLRGNGYDIDVFSYGAPRVGNRAFAEFLTVQTGGTLYRITHTNDIVPRLPPREFGYSHSSPEYWIKSGTLVPVTRNDIVKIEGIDATGGNNQPNIPDIPAHLWYFGLIGTCL

SEQ ID NO: 3970 - protein, 269 aa, Thermomyces lanuginosus
EVSQDLFNQFNLFAQYSAAAYCGKNNDAPAGTNITCTLNACPEVEKADATFLYSFEDSGVGDVTGFLALDNTNKLIVLSFRGSRSIENWIGNLNFDLKEINDICSGCRGHDGFTSSWRSVADTLRQKVEDAVREHPDYRVVFTGHSLGGALATVAGADLRGNGYDIDVFSYGAPRVGNRAFAEFLTVQTGGTLYRITHTNDIVPRLPPREFGYSHSSPEYWIKSGTLVPVTRNDIVKIEGIDATGGNNQPNIPDIPAHLWYFGLIGTCL

SEQ ID NO: 3971 - protein, 269 aa, Thermomyces lanuginosus
EVSQDLFNQFNLFAQYSAGAYCGKNNDAPAGTNITCTGNACPEVEKADATFLYSFEDSGVGDVTGFLALDNTNKLIVLSFRGSRSIENWIGNLNFDLKEINDICSGCRGHDGFTSSWRSVADTLRQKVEDAVREHPDYRVVFTGHSLGGALATVAGADLRGNGYDIDVFSYGAPRVGNRAFAEFLTVQTGGTLYRITHTNDIVPRLPPREFGYSHSSPEYWIKSGTLVPVTRNDIVKIEGIDATGGNNQPNIPDIPAHLWYFGLIGTCL

SEQ ID NO: 3972 - protein, 269 aa, Thermomyces lanuginosus
EVSQDLFNQFNLFAQYSAAAYCGKNNDAPAGTNITCTGNACPEVEKADATFLYSFEDSGVGDVTGFLALDNTNKLIVLSFRGSRSIENWIGNLNFDLKEINDICSGCRGHDGFTSSWRSVADTLRQKVECAVREHPDYRVVFTGHSLGGALATVAGADLRGNGYDIDVFSYGAPRVGNRAFAEFLTVQTGGTLYRITHTNDIVPRLPPREFGYSHSSPEYWIKSGTLVPVTRNDIVKIEGIDATGGNNQPNIPDIPAHLWYFGLIGTCL

SEQ ID NO: 3973 - protein, 269 aa, Thermomyces lanuginosus
EVSQDLFNQFNLFAQYSAAAYCGKNNDAPAGTNITCTGNACPEVEKADATFLYSFEDSGVGDVTGFLALDNTNKLIVLSFRGSRSIENWIGNLNFDLKEINDICSGCRGHDGFTSSWRSVADTLRQKVEDAVREKPDYRVVFTGHSLGGALATVAGADLRGNGYDIDVFSYGAPRVGNRAFAEFLTVQTGGTLYRITHTNDIVPRLPPREFGYSHSSPEYWIKSGTLVPVTRNDIVKIEGIDATGGNNQPNIPDIPAHLWYFGLIGTCL

SEQ ID NO: 3974 - protein, 269 aa, Thermomyces lanuginosus
EVSQDLFNQFNLFAQYSAAAYCGKNNDAPAGTNITCTINACPEVEKADATFLYSFEDSGVGDVTGFLALDNTNKLIVLSFRGSRSIENWIGNLNFDLKEINDICSGCRGHDGFTSSWRSVADTLRQKVEDAVREHPDYRVVFTGHSLGGALATVAGADLRGNGYDIDVFSYGAPRVGNRAFAEFLTVQTGGTLYRITHTNDIVPRLPPREFGYSHSSPEYWIKSGTLVPVTRNDIVKIEGIDATGGNNQPNIPDIPAHLWYFGLIGTCL

SEQ ID NO: 3975 - protein, 269 aa, Thermomyces lanuginosus
EVSQDLFNQFNLFAQYSAAAYCGKNNDAPAGTNITCTGNACPEVEKADATFLYSFEDSGVGDVTGFLALDNTNKLIVLSFRGSRSIENWIGNLNFDLKEINDICSGCRGHDGFTSSWRSVADTLRQKVEDAVREHQDYRVVFTGHSLGGALATVAGADLRGNGYDIDVFSYGAPRVGNRAFAEFLTVQTGGTLYRITHTNDIVPRLPPREFGYSHSSPEYWIKSGTLVPVTRNDIVKIEGIDATGGNNQPNIPDIPAHLWYFGLIGTCL

SEQ ID NO: 3976 - protein, 269 aa, Thermomyces lanuginosus
EVSQDLFNQFNLFAQYSAAAYCGKNNDAPAGTNITCTGNACPEVEKADATFLYSFEDSGVGDVTGFLALDNTNKLIVLSFRGSRSIENWIGNLNFDLKEINDICSGCRGHDGFTSSWRSVADTLRQKVEDAVREHPDYRVVFTGHSLGGALATVAGADLRGNGYDIDVFSYGAPRVGNRAFAEFLTVQTGGTLYRITHTNDIVPRLPPREFGYSHSSPEYWIKSGTLVPVTRNDIVKIEGIDATGGNDQPNIPDIPAHLWYFGLIGTCL

SEQ ID NO: 3977 - protein, 269 aa, Thermomyces lanuginosus
EVSQDLFNQFNLFAQYSAAAYCGKNNDAPAGTNITCTTNACPEVEKADATFLYSFEDSGVGDVTGFLALDNTNKLIVLSFRGSRSIENWIGNLNFDLKEINDICSGCRGHDGFTSSWRSVADTLRQKVEDAVREHPDYRVVFTGHSLGGALATVAGADLRGNGYDIDVFSYGAPRVGNRAFAEFLTVQTGGTLYRITHTNDIVPRLPPREFGYSHSSPEYWIKSGTLVPVTRNDIVKIEGIDATGGNNQPNIPDIPAHLWYFGLIGTCL

SEQ ID NO: 3978 - protein, 269 aa, Thermomyces lanuginosus
EVSQDLFNQFNLFAQYSAAAYCGKNNDAPAGTNITCTGNACPEVEKADATFLYSFTDSGVGDVTGFLALDNTNKLIVLSFRGSRSIENWIGNLNFDLKEINDICSGCRGHDGFTSSWRSVADTLRQKVEDAVREHPDYRVVFTGHSLGGALATVAGADLRGNGYDIDVFSYGAPRVGNRAFAEFLTVQTGGTLYRITHTNDIVPRLPPREFGYSHSSPEYWIKSGTLVPVTRNDIVKIEGIDATGGNNQPNIPDIPAHLWYFGLIGTCL

SEQ ID NO: 3979 - protein, 269 aa, Thermomyces lanuginosus
EVSQDLFNQFNLFAQYSAAAYCGKNNDAPAGTNITCTGNACPEVEKADATFLYSFEDSGVGDVTGFLALDNTNKLIVLSFRGSRSIENWIGNLNFDLKEINDICSGCRGHDGFTSSWRSVADTLRQKVEDAVREHPDYRVVFTGHSLGGALATVAFADLRGNGYDIDVFSYGAPRVGNRAFAEFLTVQTGGTLYRITHTNDIVPRLPPREFGYSHSSPEYWIKSGTLVPVTRNDIVKIEGIDATGGNNQPNIPDIPAHLWYFGLIGTCL

SEQ ID NO: 3980 - protein, 269 aa, Thermomyces lanuginosus
EVSQDLFNQFNLFAQYSAAAYCGKNNDAPAGTNITCTGNACPEVEKADATFLYSFEDSGVGDVTGFLALDNTNKLIVLSFRGSRSIENWIGNDNFDLKEINDICSGCRGHDGFTSSWRSVADTLRQKVEDAVREHPDYRVVFTGHSLGGALATVAGADLRGNGYDIDVFSYGAPRVGNRAFAEFLTVQTGGTLYRITHTNDIVPRLPPREFGYSHSSPEYWIKSGTLVPVTRNDIVKIEGIDATGGNNQPNIPDIPAHLWYFGLIGTCL

SEQ ID NO: 3981 - protein, 269 aa, Thermomyces lanuginosus
EVSQDLFNQFNLFAQYSAAAYCGKNNDAPAGTNITCTGNACPEVEKADATFLYSFEDSGVGDVTGFLALDNTNKLIVLSFRGSRSIENWIGNLNFDLKEINDICSGCRGHDGFTSSWRSVADTLRQKVEDAVREHPDYRVVFTGHSLGGALATVAGADLRGNGYDIDVFSYGAPRVGNRAFAEFLTVQTGGTLYRITHTNDIVPRLPPREFGYSHSSPEYWIKSGTLVPVTRNDIVKIEGIDATGGNNQPNIPDISAHLWYFGLIGTCL

SEQ ID NO: 3982 - protein, 269 aa, Thermomyces lanuginosus
EVSQDLFNQFNLFAQYSAAAYCGKNNDAPAGTNITCTGNACPEVEKADATFLYSFEDSGVGDVTGFLALDNTNKLIVLSFRGSRSIENWIGNLNFDLKEINDICSGCRGHDGFTSSWRSVADTLRQKVEDAVREHPDYRVVFTGHSLGGALATVAGADLRGNGYDIDVFSYGAPRVGNRAFAEFLTVQTGGTLYRITHTNDIVPRLPPREFGYSHSSPEYWIKSGTLVPVTRNDIVKIEGIDATGGNNQPNIPDIPAHLWYFGLWGTCL

SEQ ID NO: 3983 - protein, 269 aa, Thermomyces lanuginosus
EVSQDLFNQFNLFAQYSAAAYCGKNNDAPAGTNITCTGNACPEVEWADATFLYSFEDSGVGDVTGFLALDNTNKLIVLSFRGSRSIENWIGNLNFDLKEINDICSGCRGHDGFTSSWRSVADTLRQKVEDAVREHPDYRVVFTGHSLGGALATVAGADLRGNGYDIDVFSYGAPRVGNRAFAEFLTVQTGGTLYRITHTNDIVPRLPPREFGYSHSSPEYWIKSGTLVPVTRNDIVKIEGIDATGGNNQPNIPDIPAHLWYFGLIGTCL

SEQ ID NO: 3984 - protein, 269 aa, Thermomyces lanuginosus
EVSQDLFNQFNLFAQYSAAAYCGKNNDAPAGTNITCTGNACPEVEKADATFLYSFEDSGVGDVTGFLALDNTNKLIVLSFRGSRSIENWIGNLNFDLKEINDICSGCRGHDGFTSSWRSVADTLRQKVEDAVREHPDYRVVFTGHSLGGALATVAGADLRGNGYDIDVFSYGAPRVGNRAFAEFLTVQTGGTLYRITHTNDIVPRLPPREFGYSHSSPEYWIKFGTLVPVTRNDIVKIEGIDATGGNNQPNIPDIPAHLWYFGLIGTCL

SEQ ID NO: 3985 - protein, 269 aa, Thermomyces lanuginosus
EVSQDLFNQFNLFAQYSAAAYCGKNNDAPAGTNITCTGNACPEVEKADATFLYSFEDSGVGDVTGFLALDNTNKLIVLSFRGSRSIENWIGNLNFDLKEINDICSGCRGHDGFTSSWRSVADTLRQKVEDAVREHPDYRVVFTGHSLGGALATVAGADLRGNGYDIDVFSYGAPRLGNRAFAEFLTVQTGGTLYRITHTNDIVPRLPPREFGYSHSSPEYWIKSGTLVPVTRNDIVKIEGIDATGGNNQPNIPDIPAHLWYFGLIGTCL

SEQ ID NO: 3986 - protein, 269 aa, Thermomyces lanuginosus
EVSQDLFNQFNLFAQYSAAAYCGKNNDAPAGTNITCTGNACPEVEKADATYLYSFEDSGVGDVTGFLALDNTNKLIVLSFRGSRSIENWIGNLNFDLKEINDICSGCRGHDGFTSSWRSVADTLRQKVEDAVREHPDYRVVFTGHSLGGALATVAGADLRGNGYDIDVFSYGAPRVGNRAFAEFLTVQTGGTLYRITHTNDIVPRLPPREFGYSHSSPEYWIKSGTLVPVTRNDIVKIEGIDATGGNNQPNIPDIPAHLWYFGLIGTCL

SEQ ID NO: 3987 - protein, 269 aa, Thermomyces lanuginosus
EVSQDLFNQFNLFAQYSAAAYCGKNNDAPAGTNITCTGNACPEVEKADATFLYSFEDSGVGDVTGFLALDNTNKLIVLSFRGSRSIENWIGNLNFDLKEINDICSGCRGHDGFTSSWRSVADTLRQKVEDAVREHPDYRVVFTGHSLGGALATVAGADLRGNYYDIDVFSYGAPRVGNRAFAEFLTVQTGGTLYRITHTNDIVPRLPPREFGYSHSSPEYWIKSGTLVPVTRNDIVKIEGIDATGGNNQPNIPDIPAHLWYFGLIGTCL

SEQ ID NO: 3988 - protein, 269 aa, Thermomyces lanuginosus
EVSQDLFNQFNLFAQYSAAAYCGKNNDAPAGTNITCTGNACPEVEKADATFLYSFEDSGVGDVTGFLALDNTNKLIVLSFRGSRSIENWIGNLNFDLKEINDICSGCRGHDGFTSSWRSVADTLRQKVEDAVREHPDYRVVFTGHSLGGALATVAGADLRGNGYDIDVFSYGAPRVGNRAFAMFLTVQTGGTLYRITHTNDIVPRLPPREFGYSHSSPEYWIKSGTLVPVTRNDIVKIEGIDATGGNNQPNIPDIPAHLWYFGLIGTCL

SEQ ID NO: 3989 - protein, 269 aa, Thermomyces lanuginosus
EVSQDLFNQFNLFAQYSAAAYCGKNNDAPAGTNITCTGNACPEVEKADATFLYSFEDSGVGDVTGFLALDNTNKLIVLSFRGSRSIGNWIGNLNFDLKEINDICSGCRGHDGFTSSWRSVADTLRQKVEDAVREHPDYRVVFTGHSLGGALATVAGADLRGNGYDIDVFSYGAPRVGNRAFAEFLTVQTGGTLYRITHTNDIVPRLPPREFGYSHSSPEYWIKSGTLVPVTRNDIVKIEGIDATGGNNQPNIPDIPAHLWYFGLIGTCL

SEQ ID NO: 3990 - protein, 269 aa, Thermomyces lanuginosus
EVSQDLFNQFNHFAQYSAAAYCGKNNDAPAGTNITCTGNACPEVEKADATFLYSFEDSGVGDVTGFLALDNTNKLIVLSFRGSRSIENWIGNLNFDLKEINDICSGCRGHDGFTSSWRSVADTLRQKVEDAVREHPDYRVVFTGHSLGGALATVAGADLRGNGYDIDVFSYGAPRVGNRAFAEFLTVQTGGTLYRITHTNDIVPRLPPREFGYSHSSPEYWIKSGTLVPVTRNDIVKIEGIDATGGNNQPNIPDIPAHLWYFGLIGTCL

SEQ ID NO: 3991 - protein, 269 aa, Thermomyces lanuginosus
EVSQDLFNQFNLFAQYSAAAYCGKNNDAPAGTNITCTGNACPEVEKADATFLYSFEDSGVGDVTGFLALDNTNKLIVLSFRGSRSIENWIGNLNFDLKEINDICSGCRGHDGFTSSWRSVADTLRQKVEDAVREHPDYRVVFTGHSLGGALATVAGADLRGNGYDIDVFSYGAPRVGNRAFAEFLTVQTGGTLYRITHTPDIVPRLPPREFGYSHSSPEYWIKSGTLVPVTRNDIVKIEGIDATGGNNQPNIPDIPAHLWYFGLIGTCL

SEQ ID NO: 3992 - protein, 269 aa, Thermomyces lanuginosus
EVSQDLFNQFNLFAQYSAAAYCGKNNDAPAGTNITCTGNACPEVEKADATFLYSFEDSGVGDVTGFLALDNTNKLIVLSFRGSRSIENWIGNLNFDLKEINDICSGCRGHDGFTSSWRSVADTLRQKVEDAVREHPDYRVVFAGHSLGGALATVAGADLRGNGYDIDVFSYGAPRVGNRAFAEFLTVQTGGTLYRITHTNDIVPRLPPREFGYSHSSPEYWIKSGTLVPVTRNDIVKIEGIDATGGNNQPNIPDIPAHLWYFGLIGTCL

SEQ ID NO: 3993 - protein, 269 aa, Thermomyces lanuginosus
EVSQDLFNQFNLFAQYSAAAYCGKNNDAPAGMNITCTGNACPEVEKADATFLYSFEDSGVGDVTGFLALDNTNKLIVLSFRGSRSIENWIGNLNFDLKEINDICSGCRGHDGFTSSWRSVADTLRQKVEDAVREHPDYRVVFTGHSLGGALATVAGADLRGNGYDIDVFSYGAPRVGNRAFAEFLTVQTGGTLYRITHTNDIVPRLPPREFGYSHSSPEYWIKSGTLVPVTRNDIVKIEGIDATGGNNQPNIPDIPAHLWYFGLIGTCL

SEQ ID NO: 3994 - protein, 269 aa, Thermomyces lanuginosus
EVSQDLFNQFNLFAQYSAAAYCGKNNDAPAGTNITCTGNACPEVEKADATFLYSFEDSGVGDVTGFLALDNTNKLIVLSFRGSRSIENWIGNLNFDLKEINDICSGCRGHDGFTSSWRSVADTLRQKVEDAVREHPFYRVVFTGHSLGGALATVAGADLRGNGYDIDVFSYGAPRVGNRAFAEFLTVQTGGTLYRITHTNDIVPRLPPREFGYSHSSPEYWIKSGTLVPVTRNDIVKIEGIDATGGNNQPNIPDIPAHLWYFGLIGTCL

SEQ ID NO: 3995 - protein, 269 aa, Thermomyces lanuginosus
EVSQDLFNQFNLFAQYSAAAYCGKNNDAPAGTSITCTGNACPEVEKADATFLYSFEDSGVGDVTGFLALDNTNKLIVLSFRGSRSIENWIGNLNFDLKEINDICSGCRGHDGFTSSWRSVADTLRQKVEDAVREHPDYRVVFTGHSLGGALATVAGADLRGNGYDIDVFSYGAPRVGNRAFAEFLTVQTGGTLYRITHTNDIVPRLPPREFGYSHSSPEYWIKSGTLVPVTRNDIVKIEGIDATGGNNQPNIPDIPAHLWYFGLIGTCL

SEQ ID NO: 3996 - protein, 269 aa, Thermomyces lanuginosus
EVSQDLFNQFNLFAQYSAAAYCGKNNDAPAGTNITCTGNACPEVEKADATFLYSFEDSGVGDVTGFLALDNTNKLIVLSFRGSRSIENWIGNLNFDLKEINDICSGCRGHDGFTSSWRSVADTLRQKVEDAVREHPDYRVVFTGHSLGGALATVAGADLRGNGYDIDVFSYGAPRVGNRQFAEFLTVQTGGTLYRITHTNDIVPRLPPREFGYSHSSPEYWIKSGTLVPVTRNDIVKIEGIDATGGNNQPNIPDIPAHLWYFGLIGTCL

SEQ ID NO: 3997 - protein, 269 aa, Thermomyces lanuginosus
EVSQDLFNQFNLFAQYSAAAYCGKNNDAPAGTNITCTGNACPEVEKMDATFLYSFEDSGVGDVTGFLALDNTNKLIVLSFRGSRSIENWIGNLNFDLKEINDICSGCRGHDGFTSSWRSVADTLRQKVEDAVREHPDYRVVFTGHSLGGALATVAGADLRGNGYDIDVFSYGAPRVGNRAFAEFLTVQTGGTLYRITHTNDIVPRLPPREFGYSHSSPEYWIKSGTLVPVTRNDIVKIEGIDATGGNNQPNIPDIPAHLWYFGLIGTCL

SEQ ID NO: 3998 - protein, 269 aa, Thermomyces lanuginosus
EVSQDLFNQFNLFAQYSAAAYCGKNNDAPAGTNITCTGNACPEVEKADATFLYSFEDSGVGDVTGFLALDNTNKLIVLSFRGSRSIENWIGNLNFDLKEINDICSGCRGHDGFTSSWRSVADNLRQKVEDAVREHPDYRVVFTGHSLGGALATVAGADLRGNGYDIDVFSYGAPRVGNRAFAEFLTVQTGGTLYRITHTNDIVPRLPPREFGYSHSSPEYWIKSGTLVPVTRNDIVKIEGIDATGGNNQPNIPDIPAHLWYFGLIGTCL

SEQ ID NO: 3999 - protein, 269 aa, Thermomyces lanuginosus
EVSQDLFNQFNLFAQYSAAAYCGKNNDAPAGTNITCTGNACGEVEKADATFLYSFEDSGVGDVTGFLALDNTNKLIVLSFRGSRSIENWIGNLNFDLKEINDICSGCRGHDGFTSSWRSVADTLRQKVEDAVREHPDYRVVFTGHSLGGALATVAGADLRGNGYDIDVFSYGAPRVGNRAFAEFLTVQTGGTLYRITHTNDIVPRLPPREFGYSHSSPEYWIKSGTLVPVTRNDIVKIEGIDATGGNNQPNIPDIPAHLWYFGLIGTCL

SEQ ID NO: 4000 - protein, 269 aa, Thermomyces lanuginosus
EVSQDLFNQFNLFAQYSAAAYCGKNNDAPAGTNITCTGNACPEVEKADATFLYSFEDSGVGDVTGFLALDNTNKLIVLSFRGSRSIENWIGNLNFDLKTINDICSGCRGHDGFTSSWRSVADTLRQKVEDAVREHPDYRVVFTGHSLGGALATVAGADLRGNGYDIDVFSYGAPRVGNRAFAEFLTVQTGGTLYRITHTNDIVPRLPPREFGYSHSSPEYWIKSGTLVPVTRNDIVKIEGIDATGGNNQPNIPDIPAHLWYFGLIGTCL

SEQ ID NO: 4001 - protein, 269 aa, Thermomyces lanuginosus
EVSQDLFNQFNLFAQYSAAAYCGKNNDAPAGTNITCTGNACPEVEKADATFLYSFEDSGVGDVTGFLALDNTNKLIVLSFRGSRSIENWIGNLNFDLKEINDICSGCRGHDGFTSSWRSVADTLRQKVEDAVREHPDYRVVFTGHSLGGALATVAGADLRGNGYDIDVFSYGAPRVGNQAFAEFLTVQTGGTLYRITHTNDIVPRLPPREFGYSHSSPEYWIKSGTLVPVTRNDIVKIEGIDATGGNNQPNIPDIPAHLWYFGLIGTCL

SEQ ID NO: 4002 - protein, 269 aa, Thermomyces lanuginosus
EVSQDLFNQFNLFAQYSAAAYCGKNNDAPAGTNITCTGNACPEVEKADATFLYSFEDSGVGDVTGFLALDNTNKLIVLSFRGSRSIENWIGNLNFDLKEINDICSGCRGHDGFTGSWRSVADTLRQKVEDAVREHPDYRVVFTGHSLGGALATVAGADLRGNGYDIDVFSYGAPRVGNRAFAEFLTVQTGGTLYRITHTNDIVPRLPPREFGYSHSSPEYWIKSGTLVPVTRNDIVKIEGIDATGGNNQPNIPDIPAHLWYFGLIGTCL

SEQ ID NO: 4003 - protein, 269 aa, Thermomyces lanuginosus
EVSQDLFNQFNLFAQYSAAAYCGKNNDAPAGTNITCTGNACPEVEKADATFLYSFEDSGVGDVTGFLALDNTNKRIVLSFRGSRSIENWIGNLNFDLKEINDICSGCRGHDGFTSSWRSVADTLRQKVEDAVREHPDYRVVFTGHSLGGALATVAGADLRGNGYDIDVFSYGAPRVGNRAFAEFLTVQTGGTLYRITHTNDIVPRLPPREFGYSHSSPEYWIKSGTLVPVTRNDIVKIEGIDATGGNNQPNIPDIPAHLWYFGLIGTCL

SEQ ID NO: 4004 - protein, 269 aa, Thermomyces lanuginosus
EVSQDLFNQFNLFAQYSAAAYCGKNNDAPAGTNITCTGNACPEVEKADATFLYSFEDSGVGDVTGFLALDNTNKLIVLSFRGSRSIENWIGNLNFDTKEINDICSGCRGHDGFTSSWRSVADTLRQKVEDAVREHPDYRVVFTGHSLGGALATVAGADLRGNGYDIDVFSYGAPRVGNRAFAEFLTVQTGGTLYRITHTNDIVPRLPPREFGYSHSSPEYWIKSGTLVPVTRNDIVKIEGIDATGGNNQPNIPDIPAHLWYFGLIGTCL

SEQ ID NO: 4005 - protein, 269 aa, Thermomyces lanuginosus
EVSQDLFNQFNLFAQYSAAAYCGKNNDAPAGTNITCTGNACPEVEKADATFLYSFEDSGVGDVTGFLALDNTNKLIVLSFRGSRSIENWIGNLNFDLKEINDICSGCRGHLGFTSSWRSVADTLRQKVEDAVREHPDYRVVFTGHSLGGALATVAGADLRGNGYDIDVFSYGAPRVGNRAFAEFLTVQTGGTLYRITHTNDIVPRLPPREFGYSHSSPEYWIKSGTLVPVTRNDIVKIEGIDATGGNNQPNIPDIPAHLWYFGLIGTCL

SEQ ID NO: 4006 - protein, 269 aa, Thermomyces lanuginosus
EVSQDLFNQFNLFAQYSAAAYCGKNNDAPAGTNITCTGNACPEVEKADATFLYSFEDSGVGDVTGFLALDNTNKLIVLSFRGSRSIENWIGNLNFDLKEINDICSGCRGHDGFTSSWRSVASTLRQKVEDAVREHPDYRVVFTGHSLGGALATVAGADLRGNGYDIDVFSYGAPRVGNRAFAEFLTVQTGGTLYRITHTNDIVPRLPPREFGYSHSSPEYWIKSGTLVPVTRNDIVKIEGIDATGGNNQPNIPDIPAHLWYFGLIGTCL

SEQ ID NO: 4007 - protein, 269 aa, Thermomyces lanuginosus
EVSQDLFNQFNLFAQYSAAAYCGKNNDAPAGTNITCTGNACPEVEKADATFLYSFEDSGVGDVTGFLALDNTNKLIVLSFRGSRSIANWIGNLNFDLKEINDICSGCRGHDGFTSSWRSVADTLRQKVEDAVREHPDYRVVFTGHSLGGALATVAGADLRGNGYDIDVFSYGAPRVGNRAFAEFLTVQTGGTLYRITHTNDIVPRLPPREFGYSHSSPEYWIKSGTLVPVTRNDIVKIEGIDATGGNNQPNIPDIPAHLWYFGLIGTCL

SEQ ID NO: 4008 - protein, 269 aa, Thermomyces lanuginosus
EVSQDLFNQFNLFAQYSAAAYCGKNNDAPAGTNITCTGNACPEVEKADATFLYSFEDSGVGDVTGFLALDNTNKLIVLSFRGSRSIENWIGNLNFDLKEINDICSGCRGHDGFTSSWRSVADTLRQKVEDAVREHPDYRTVFTGHSLGGALATVAGADLRGNGYDIDVFSYGAPRVGNRAFAEFLTVQTGGTLYRITHTNDIVPRLPPREFGYSHSSPEYWIKSGTLVPVTRNDIVKIEGIDATGGNNQPNIPDIPAHLWYFGLIGTCL

SEQ ID NO: 4009 - protein, 269 aa, Thermomyces lanuginosus
EVSQDLFNQFNLFAQYSAAAYCGKNNDAPAGTNITCTGNMCPEVEKADATFLYSFEDSGVGDVTGFLALDNTNKLIVLSFRGSRSIENWIGNLNFDLKEINDICSGCRGHDGFTSSWRSVADTLRQKVEDAVREHPDYRVVFTGHSLGGALATVAGADLRGNGYDIDVFSYGAPRVGNRAFAEFLTVQTGGTLYRITHTNDIVPRLPPREFGYSHSSPEYWIKSGTLVPVTRNDIVKIEGIDATGGNNQPNIPDIPAHLWYFGLIGTCL

SEQ ID NO: 4010 - protein, 269 aa, Thermomyces lanuginosus
EVSQDLFNQFNLFAQYSAAAYCGKNNDAPAGTNITCTGNACPEVEKADATFLYSFEDSGVGDVTGFLALDNTNKLIVLSFRGSRSIENWIGNLNFDLKEINDICSGCRGHDGFTSSWRSVADTLRQKVEDAVREHPDYRVVFTGHSLGGALATVAGADLRGNMYDIDVFSYGAPRVGNRAFAEFLTVQTGGTLYRITHTNDIVPRLPPREFGYSHSSPEYWIKSGTLVPVTRNDIVKIEGIDATGGNNQPNIPDIPAHLWYFGLIGTCL

SEQ ID NO: 4011 - protein, 269 aa, Thermomyces lanuginosus
EVSQDLFNQFNLFAQYSAAAYCGKNNDAPAGTNITCTGNACPEVEKADATFLYSFEDSGVGDVTGFLALDNTNKLIVLSFRGSRSIENWIGNLNFDLKEINDICSGCRGHDGFTSSWRSVADTLRQKVEDAVREHPDYRVVFTGHSLGGALATVAGADLRGNGYDIDVFSYGAPRVGNRAFAEFLTVQTGGTLYRITHTNDIVPRLPPREFGYSHSSPEYWIKSGTLVKVTRNDIVKIEGIDATGGNNQPNIPDIPAHLWYFGLIGTCL

SEQ ID NO: 4012 - protein, 269 aa, Thermomyces lanuginosus
EVSQDLFNQFNLFAQYSAAAYCGKNNDAPAGTNITCTGNACPEVEKADATFLYSFEDSGVGDVTGFLALDNTNKNIVLSFRGSRSIENWIGNLNFDLKEINDICSGCRGHDGFTSSWRSVADTLRQKVEDAVREHPDYRVVFTGHSLGGALATVAGADLRGNGYDIDVFSYGAPRVGNRAFAEFLTVQTGGTLYRITHTNDIVPRLPPREFGYSHSSPEYWIKSGTLVPVTRNDIVKIEGIDATGGNNQPNIPDIPAHLWYFGLIGTCL

SEQ ID NO: 4013 - protein, 269 aa, Thermomyces lanuginosus
EVSQDLFNQFNLFAQYSAAAYCGKNNDAPAGTNITCTGNACPEVEKADATFLYSFEDSGVGDVTGFLALDNTNKLIVLSFRGSRSIENWIGNLNFDLKEINDICSGCRGHDGFTSSWRSVADTLRQKVEDAVREHPDYRVVFTGHSLGGALATVAGADLRGNGYDIDVFSYGAPRVGNRAFAEFLTVQTGGTLYRITHTNDIVPRLPPREFGYSHSSPEYWIKSGTLVPVTRNDIVKIEGIDATGGNNQPNIPDIPAHLWKFGLIGTCL

SEQ ID NO: 4014 - protein, 269 aa, Thermomyces lanuginosus
EVSQDLFNQFNLFAQYSAAAYCGKNNDAPAGTNITCTGNACPEVEKADATFLYSFEDSGVGDVTGFLALDNTNKLIVLSFRGSRSIENWIGNLNFDLKEINDICSGCYGHDGFTSSWRSVADTLRQKVEDAVREHPDYRVVFTGHSLGGALATVAGADLRGNGYDIDVFSYGAPRVGNRAFAEFLTVQTGGTLYRITHTNDIVPRLPPREFGYSHSSPEYWIKSGTLVPVTRNDIVKIEGIDATGGNNQPNIPDIPAHLWYFGLIGTCL

SEQ ID NO: 4015 - protein, 269 aa, Thermomyces lanuginosus
EVSQDLFNQFNLFAQYSAAAYCGKNNDAPAGTNITCTGNACPEVEKADATFLYSFEDSGVGDVTGFLALDNTNKLIVLSFRGSRSIENWIGNLNFDLKEINDICSGCRGHDGFTSSWRSVADTLRQKVEDAVREHPDYRVVFTGHSLGGALATVAGADLRGNGYDIDVFSYGAPRVGNRAFAEFLTVQTGGTLYRITHTADIVPRLPPREFGYSHSSPEYWIKSGTLVPVTRNDIVKIEGIDATGGNNQPNIPDIPAHLWYFGLIGTCL

SEQ ID NO: 4016 - protein, 269 aa, Thermomyces lanuginosus
EVSVDLFNQFNLFAQYSAAAYCGKNNDAPAGTNITCTGNACPEVEKADATFLYSFEDSGVGDVTGFLALDNTNKLIVLSFRGSRSIENWIGNLNFDLKEINDICSGCRGHDGFTSSWRSVADTLRQKVEDAVREHPDYRVVFTGHSLGGALATVAGADLRGNGYDIDVFSYGAPRVGNRAFAEFLTVQTGGTLYRITHTNDIVPRLPPREFGYSHSSPEYWIKSGTLVPVTRNDIVKIEGIDATGGNNQPNIPDIPAHLWYFGLIGTCL

SEQ ID NO: 4017 - protein, 269 aa, Thermomyces lanuginosus
EVSQDLFNQFNLFAQYSAAAYCGKNNDAPAGTNITCTGNACPEVEKADATFLYSFEDSGVGDVTGFLTLDNTNKLIVLSFRGSRSIENWIGNLNFDLKEINDICSGCRGHDGFTSSWRSVADTLRQKVEDAVREHPDYRVVFTGHSLGGALATVAGADLRGNGYDIDVFSYGAPRVGNRAFAEFLTVQTGGTLYRITHTNDIVPRLPPREFGYSHSSPEYWIKSGTLVPVTRNDIVKIEGIDATGGNNQPNIPDIPAHLWYFGLIGTCL

SEQ ID NO: 4018 - protein, 269 aa, Thermomyces lanuginosus
EVSQDLFNQFNLFAQYSAAAYCGKNNDAPAGTNITCTGNACPEVEKADATFLYSFEDSGVGDVTGFLILDNTNKLIVLSFRGSRSIENWIGNLNFDLKEINDICSGCRGHDGFTSSWRSVADTLRQKVEDAVREHPDYRVVFTGHSLGGALATVAGADLRGNGYDIDVFSYGAPRVGNRAFAEFLTVQTGGTLYRITHTNDIVPRLPPREFGYSHSSPEYWIKSGTLVPVTRNDIVKIEGIDATGGNNQPNIPDIPAHLWYFGLIGTCL

SEQ ID NO: 4019 - protein, 269 aa, Thermomyces lanuginosus
EVSQDLFNEFNLFAQYSAAAYCGKNNDAPAGTNITCTGNACPEVEKADATFLYSFEDSGVGDVTGFLALDNTNKLIVLSFRGSRSIENWIGNLNFDLKEINDICSGCRGHDGFTSSWRSVADTLRQKVEDAVREHPDYRVVFTGHSLGGALATVAGADLRGNGYDIDVFSYGAPRVGNRAFAEFLTVQTGGTLYRITHTNDIVPRLPPREFGYSHSSPEYWIKSGTLVPVTRNDIVKIEGIDATGGNNQPNIPDIPAHLWYFGLIGTCL

SEQ ID NO: 4020 - protein, 269 aa, Thermomyces lanuginosus
EVSRDLFNQFNLFAQYSAAAYCGKNNDAPAGTNITCTGNACPEVEKADATFLYSFEDSGVGDVTGFLALDNTNKLIVLSFRGSRSIENWIGNLNFDLKEINDICSGCRGHDGFTSSWRSVADTLRQKVEDAVREHPDYRVVFTGHSLGGALATVAGADLRGNGYDIDVFSYGAPRVGNRAFAEFLTVQTGGTLYRITHTNDIVPRLPPREFGYSHSSPEYWIKSGTLVPVTRNDIVKIEGIDATGGNNQPNIPDIPAHLWYFGLIGTCL

SEQ ID NO: 4021 - protein, 269 aa, Thermomyces lanuginosus
EVSQDLFNKFNLFAQYSAAAYCGKNNDAPAGTNITCTGNACPEVEKADATFLYSFEDSGVGDVTGFLALDNTNKLIVLSFRGSRSIENWIGNLNFDLKEINDICSGCRGHDGFTSSWRSVADTLRQKVEDAVREHPDYRVVFTGHSLGGALATVAGADLRGNGYDIDVFSYGAPRVGNRAFAEFLTVQTGGTLYRITHTNDIVPRLPPREFGYSHSSPEYWIKSGTLVPVTRNDIVKIEGIDATGGNNQPNIPDIPAHLWYFGLIGTCL

SEQ ID NO: 4022 - protein, 269 aa, Thermomyces lanuginosus
EVSQDLFNQFNLFAQYSAVAYCGKNNDAPAGTNITCTGNACPEVEKADATFLYSFEDSGVGDVTGFLALDNTNKLIVLSFRGSRSIENWIGNLNFDLKEINDICSGCRGHDGFTSSWRSVADTLRQKVEDAVREHPDYRVVFTGHSLGGALATVAGADLRGNGYDIDVFSYGAPRVGNRAFAEFLTVQTGGTLYRITHTNDIVPRLPPREFGYSHSSPEYWIKSGTLVPVTRNDIVKIEGIDATGGNNQPNIPDIPAHLWYFGLIGTCL

SEQ ID NO: 4023 - protein, 269 aa, Thermomyces lanuginosus
EVSQDLFNQFNLFAQYSAAQYCGKNNDAPAGTNITCTGNACPEVEKADATFLYSFEDSGVGDVTGFLALDNTNKLIVLSFRGSRSIENWIGNLNFDLKEINDICSGCRGHDGFTSSWRSVADTLRQKVEDAVREHPDYRVVFTGHSLGGALATVAGADLRGNGYDIDVFSYGAPRVGNRAFAEFLTVQTGGTLYRITHTNDIVPRLPPREFGYSHSSPEYWIKSGTLVPVTRNDIVKIEGIDATGGNNQPNIPDIPAHLWYFGLIGTCL

SEQ ID NO: 4024 - protein, 269 aa, Thermomyces lanuginosus
EVSQDLFNQFNLFAQYSAAAYCGKNNDAPAGTNITCTGNACPEVEKADATFLYSFEDSGVGDVTGFLALDNTNKLIVLSFRGSRSIENWIGNLNFDLKEINDICSGCRGHDGFTSSWRSVADTLRQKVEDAVREHPDYRVVFTGHSLGGALATVAGADLRGNGYDIDVFSYGAPRVGNRAFAEFLTVQTGGTLYRITHTNDIVPRLPPREFGYSHSSPEYWIKSGTLVPVTRNDIVKIEGIDATGGNNQPSIPDIPAHLWYFGLIGTCL

SEQ ID NO: 4025 - protein, 269 aa, Thermomyces lanuginosus
EVSQDLFNQFNLFAQYSAAAYCGKNNDAPAGTNITCTGNACPEVEKADATFLYSFEDSGVGDVTGFLALDNTNKLIVLSFRGSRSIENWIGNLNFDLKEINDICSGCRGHDGFTSSWRSVADTLRQKVEDAVREHPNYRVVFTGHSLGGALATVAGADLRGNGYDIDVFSYGAPRVGNRAFAEFLTVQTGGTLYRITHTNDIVPRLPPREFGYSHSSPEYWIKSGTLVPVTRNDIVKIEGIDATGGNNQPNIPDIPAHLWYFGLIGTCL

SEQ ID NO: 4026 - protein, 269 aa, Thermomyces lanuginosus
EVSQDLFNQFNLFAQYSAAAYCGKNNDAPAGTNITCTGNACPEVEKADATFLYSFEDSGVGDVTGFLALDNTNKLIVLSFRGSRSIENWIGNLNFDLKEINDICSGCRGHDGFTSSWRSVADTLRQKVEDAVREHPDYRVVFTGHSLGGALATVAGADLRGNGYDIDVFSYGAPRVGNRTFAEFLTVQTGGTLYRITHTNDIVPRLPPREFGYSHSSPEYWIKSGTLVPVTRNDIVKIEGIDATGGNNQPNIPDIPAHLWYFGLIGTCL

SEQ ID NO: 4027 - protein, 269 aa, Thermomyces lanuginosus
EVSQDLFNQFNLFAQYSAAAYCGKNNDAPAGTNITCTGNACPEVEKADATFLYSFEDSGVGDVTGFLALDNTNKLIVLSFRGSRSIENWIGNLNQDLKEINDICSGCRGHDGFTSSWRSVADTLRQKVEDAVREHPDYRVVFTGHSLGGALATVAGADLRGNGYDIDVFSYGAPRVGNRAFAEFLTVQTGGTLYRITHTNDIVPRLPPREFGYSHSSPEYWIKSGTLVPVTRNDIVKIEGIDATGGNNQPNIPDIPAHLWYFGLIGTCL

SEQ ID NO: 4028 - protein, 269 aa, Thermomyces lanuginosus
EVSQDLFNQFNLFAQYSAAAYCGKNNDAPAGTNITCTGNACPEVEKADATFLYSFEDSGVGDVTGFLALDNTRKLIVLSFRGSRSIENWIGNLNFDLKEINDICSGCRGHDGFTSSWRSVADTLRQKVEDAVREHPDYRVVFTGHSLGGALATVAGADLRGNGYDIDVFSYGAPRVGNRAFAEFLTVQTGGTLYRITHTNDIVPRLPPREFGYSHSSPEYWIKSGTLVPVTRNDIVKIEGIDATGGNNQPNIPDIPAHLWYFGLIGTCL

SEQ ID NO: 4029 - protein, 269 aa, Thermomyces lanuginosus
EVSQDLFNQFNLFAQYSAAAYCGKNNDAPAGTNITCTGNACPEVEKADATFLYSFEDSGVGDVTGYLALDNTNKLIVLSFRGSRSIENWIGNLNFDLKEINDICSGCRGHDGFTSSWRSVADTLRQKVEDAVREHPDYRVVFTGHSLGGALATVAGADLRGNGYDIDVFSYGAPRVGNRAFAEFLTVQTGGTLYRITHTNDIVPRLPPREFGYSHSSPEYWIKSGTLVPVTRNDIVKIEGIDATGGNNQPNIPDIPAHLWYFGLIGTCL

SEQ ID NO: 4030 - protein, 269 aa, Thermomyces lanuginosus
EVSQDLFNQFNLFAQYSAAAYCGKLNDAPAGTNITCTGNACPEVEKADATFLYSFEDSGVGDVTGFLALDNTNKLIVLSFRGSRSIENWIGNLNFDLKEINDICSGCRGHDGFTSSWRSVADTLRQKVEDAVREHPDYRVVFTGHSLGGALATVAGADLRGNGYDIDVFSYGAPRVGNRAFAEFLTVQTGGTLYRITHTNDIVPRLPPREFGYSHSSPEYWIKSGTLVPVTRNDIVKIEGIDATGGNNQPNIPDIPAHLWYFGLIGTCL

SEQ ID NO: 4031 - protein, 269 aa, Thermomyces lanuginosus
EVSQDLFNQFNLFAQYSAAAYCGKNNVAPAGTNITCTGNACPEVEKADATFLYSFEDSGVGDVTGFLALDNTNKLIVLSFRGSRSIENWIGNLNFDLKEINDICSGCRGHDGFTSSWRSVADTLRQKVEDAVREHPDYRVVFTGHSLGGALATVAGADLRGNGYDIDVFSYGAPRVGNRAFAEFLTVQTGGTLYRITHTNDIVPRLPPREFGYSHSSPEYWIKSGTLVPVTRNDIVKIEGIDATGGNNQPNIPDIPAHLWYFGLIGTCL

SEQ ID NO: 4032 - protein, 269 aa, Thermomyces lanuginosus
EVSQDLFNQFNLFAQYSAAAYCGKNNDAPAGTNITCTGNACPEVEKADATFIYSFEDSGVGDVTGFLALDNTNKLIVLSFRGSRSIENWIGNLNFDLKEINDICSGCRGHDGFTSSWRSVADTLRQKVEDAVREHPDYRVVFTGHSLGGALATVAGADLRGNGYDIDVFSYGAPRVGNRAFAEFLTVQTGGTLYRITHTNDIVPRLPPREFGYSHSSPEYWIKSGTLVPVTRNDIVKIEGIDATGGNNQPNIPDIPAHLWYFGLIGTCL

SEQ ID NO: 4033 - protein, 269 aa, Thermomyces lanuginosus
EVSQDLFNQFNLFAQYSAAAYCGKNNDAPAGTNITCTGNACPEVEKADATFLYSFEDSGVGDVTGFLALDNTNKLIVLSFRGSRSIENWIGNLNFDLKEINDICSGCRGHDGFTSSWRSVADTLRQKVEDAVREHPDYRVVFTGHSLGGALATVAGADLRGNGYDIDVFSYGAPRVGNRAFAEFLTVQTGGTLYRITHTNDIVPRLPPREFGYSHSSPEYWIKSGTLVPVTRNDIVEIEGIDATGGNNQPNIPDIPAHLWYFGLIGTCL

SEQ ID NO: 4034 - protein, 269 aa, Thermomyces lanuginosus
EVSQDLFNQFNLFAQYSAAAYCGKNNDAPAGTNITCTGNACPEVEKADATFLYSFEDSGVGDVTGFLALDNTNKLIVLSFRGSRSIENWIGNLNFDLKEINDICSGCRGHDGFTSSWRSVADTLRQKVEDAVREHPKYRVVFTGHSLGGALATVAGADLRGNGYDIDVFSYGAPRVGNRAFAEFLTVQTGGTLYRITHTNDIVPRLPPREFGYSHSSPEYWIKSGTLVPVTRNDIVKIEGIDATGGNNQPNIPDIPAHLWYFGLIGTCL

SEQ ID NO: 4035 - protein, 269 aa, Thermomyces lanuginosus
EVSQDLFNQFNLFAQYSAAAYCRKNNDAPAGTNITCTGNACPEVEKADATFLYSFEDSGVGDVTGFLALDNTNKLIVLSFRGSRSIENWIGNLNFDLKEINDICSGCRGHDGFTSSWRSVADTLRQKVEDAVREHPDYRVVFTGHSLGGALATVAGADLRGNGYDIDVFSYGAPRVGNRAFAEFLTVQTGGTLYRITHTNDIVPRLPPREFGYSHSSPEYWIKSGTLVPVTRNDIVKIEGIDATGGNNQPNIPDIPAHLWYFGLIGTCL

SEQ ID NO: 4036 - protein, 269 aa, Thermomyces lanuginosus
EVSQDLFNQFNLFAQYSAAAYCGKNNDAPAGTNITCTGNACPEVEKADATFLYSFEDSGVGDVTGFLALDNTNKLIVLSFRGSRSIENWIGNLNFDLKEIMDICSGCRGHDGFTSSWRSVADTLRQKVEDAVREHPDYRVVFTGHSLGGALATVAGADLRGNGYDIDVFSYGAPRVGNRAFAEFLTVQTGGTLYRITHTNDIVPRLPPREFGYSHSSPEYWIKSGTLVPVTRNDIVKIEGIDATGGNNQPNIPDIPAHLWYFGLIGTCL

SEQ ID NO: 4037 - protein, 269 aa, Thermomyces lanuginosus
EVSQDLFNQFNLFAQYSAAAYCGKNWDAPAGTNITCTGNACPEVEKADATFLYSFEDSGVGDVTGFLALDNTNKLIVLSFRGSRSIENWIGNLNFDLKEINDICSGCRGHDGFTSSWRSVADTLRQKVEDAVREHPDYRVVFTGHSLGGALATVAGADLRGNGYDIDVFSYGAPRVGNRAFAEFLTVQTGGTLYRITHTNDIVPRLPPREFGYSHSSPEYWIKSGTLVPVTRNDIVKIEGIDATGGNNQPNIPDIPAHLWYFGLIGTCL

SEQ ID NO: 4038 - protein, 269 aa, Thermomyces lanuginosus
EVSQDLFNQFNLFAQYSAAAYCGKNNDAPAGTNITCTGNACPEVEKADATFLYSFEDSGVGDVTGFLALDNTNKLIVLSFRGSRSIENWIGNLNFDLKEINDICSGCRGHDGFTSSWRSVADTLRQKVEDAVREHPDYRVVFTGHSLGGALATVAGADLRGNGYDIDVFSYGAPRVGNRAFAEFLTVQTGGTLYRITHTNDIVPRLPPRERGYSHSSPEYWIKSGTLVPVTRNDIVKIEGIDATGGNNQPNIPDIPAHLWYFGLIGTCL

SEQ ID NO: 4039 - protein, 269 aa, Thermomyces lanuginosus
EVSQDLFNQFNLFAQYSAAAYCGKNNDAPAGTNITCTGNACPEVEKADATFLYSFEDSGVGDVTGFLALDNTNKLIVLSFRGSRSIENWIGNLNFDLKEINDICSGCRGHDGFTSSWRSVADTLRQKVEDAVREHPDYRVVFTGHSLGGALATVAGADLRGNGSDIDVFSYGAPRVGNRAFAEFLTVQTGGTLYRITHTNDIVPRLPPREFGYSHSSPEYWIKSGTLVPVTRNDIVKIEGIDATGGNNQPNIPDIPAHLWYFGLIGTCL

SEQ ID NO: 4040 - protein, 269 aa, Thermomyces lanuginosus
EVSQDLFNQFNLFAQYSAAAYCGKNNDAPAGTNITCTGNACPEVEKADATFLYSFEDSGVGDVTGGLALDNTNKLIVLSFRGSRSIENWIGNLNFDLKEINDICSGCRGHDGFTSSWRSVADTLRQKVEDAVREHPDYRVVFTGHSLGGALATVAGADLRGNGYDIDVFSYGAPRVGNRAFAEFLTVQTGGTLYRITHTNDIVPRLPPREFGYSHSSPEYWIKSGTLVPVTRNDIVKIEGIDATGGNNQPNIPDIPAHLWYFGLIGTCL

SEQ ID NO: 4041 - protein, 269 aa, Thermomyces lanuginosus
EVSQDLFNQFNLFAQYSAAAYCGKNNDAPAGTNITCTGNACPEVEKADATFLYSFEDSGVGDVTGFLALDNTNKLIVLSFRGSRSIENWIGNLNKDLKEINDICSGCRGHDGFTSSWRSVADTLRQKVEDAVREHPDYRVVFTGHSLGGALATVAGADLRGNGYDIDVFSYGAPRVGNRAFAEFLTVQTGGTLYRITHTNDIVPRLPPREFGYSHSSPEYWIKSGTLVPVTRNDIVKIEGIDATGGNNQPNIPDIPAHLWYFGLIGTCL

SEQ ID NO: 4042 - protein, 269 aa, Thermomyces lanuginosus
EVSQDLFNQFNLFAQYSAAAYCGKNNDAPAGTNITCTGNACPEVEKADATFLYSFEDSGVGDVTGFIALDNTNKLIVLSFRGSRSIENWIGNLNFDLKEINDICSGCRGHDGFTSSWRSVADTLRQKVEDAVREHPDYRVVFTGHSLGGALATVAGADLRGNGYDIDVFSYGAPRVGNRAFAEFLTVQTGGTLYRITHTNDIVPRLPPREFGYSHSSPEYWIKSGTLVPVTRNDIVKIEGIDATGGNNQPNIPDIPAHLWYFGLIGTCL

SEQ ID NO: 4043 - protein, 269 aa, Thermomyces lanuginosus
EVSQDLFNQFNLFAQYSAAAYCGKNNDAPAGTNITCTGNACPEVEKADATFLYSFEDSGVRDVTGFLALDNTNKLIVLSFRGSRSIENWIGNLNFDLKEINDICSGCRGHDGFTSSWRSVADTLRQKVEDAVREHPDYRVVFTGHSLGGALATVAGADLRGNGYDIDVFSYGAPRVGNRAFAEFLTVQTGGTLYRITHTNDIVPRLPPREFGYSHSSPEYWIKSGTLVPVTRNDIVKIEGIDATGGNNQPNIPDIPAHLWYFGLIGTCL

SEQ ID NO: 4044 - protein, 269 aa, Thermomyces lanuginosus
EVSQDLFNQFNLFAQYSAAAYCGKNNDAPAGTNITCTGNACPEVEKADATFGYSFEDSGVGDVTGFLALDNTNKLIVLSFRGSRSIENWIGNLNFDLKEINDICSGCRGHDGFTSSWRSVADTLRQKVEDAVREHPDYRVVFTGHSLGGALATVAGADLRGNGYDIDVFSYGAPRVGNRAFAEFLTVQTGGTLYRITHTNDIVPRLPPREFGYSHSSPEYWIKSGTLVPVTRNDIVKIEGIDATGGNNQPNIPDIPAHLWYFGLIGTCL

SEQ ID NO: 4045 - protein, 269 aa, Thermomyces lanuginosus
EVSQDLFNQFNLFAQYSAAAYCGKNNDAPAGTNITCTGNACPEVEKADATFLYSFEDSGVGDVTGFLALDNTNKVIVLSFRGSRSIENWIGNLNFDLKEINDICSGCRGHDGFTSSWRSVADTLRQKVEDAVREHPDYRVVFTGHSLGGALATVAGADLRGNGYDIDVFSYGAPRVGNRAFAEFLTVQTGGTLYRITHTNDIVPRLPPREFGYSHSSPEYWIKSGTLVPVTRNDIVKIEGIDATGGNNQPNIPDIPAHLWYFGLIGTCL

SEQ ID NO: 4046 - protein, 269 aa, Thermomyces lanuginosus
EVSQDLFNQFNLFAQYSAAAYCGKNNDAPAGTNITCTGNACPEVEKADATFLYSFEDSGVGDVTGFLALDNTNKLIVLSFRGSRSIENWIGNLNFDLKEINDICSGCRGHDGFTSSWRSVADTLRQKVEDAVREHPDYRVVFTGHSLGGALATVAGADLRGNGYDIDVFSYGAPRVGNRAFAEFLTVQTGGTLYRITHTNDIVPRLPPREFGYSHSSPEYWIKSGTLVPVTRNDIVKIEGIDATGGNNQPNCPDIPAHLWYFGLIGTCL

SEQ ID NO: 4047 - protein, 269 aa, Thermomyces lanuginosus
EVSQDLFNQFNLFAQYSAAAYCGKSNDAPAGTNITCTGNACPEVEKADATFLYSFEDSGVGDVTGFLALDNTNKLIVLSFRGSRSIENWIGNLNFDLKEINDICSGCRGHDGFTSSWRSVADTLRQKVEDAVREHPDYRVVFTGHSLGGALATVAGADLRGNGYDIDVFSYGAPRVGNRAFAEFLTVQTGGTLYRITHTNDIVPRLPPREFGYSHSSPEYWIKSGTLVPVTRNDIVKIEGIDATGGNNQPNIPDIPAHLWYFGLIGTCL

SEQ ID NO: 4048 - protein, 269 aa, Thermomyces lanuginosus
EVSQDLFNQFNLFAQYSAAAYCGKNNDAPAGTNITCTGNACPEVEKADATFLYSFEDSGVGDVTGFLALDNTNKLIVLSFRGSRSIENWIGNLNFDLKEINDICSGCRGHDGFTSSWRSVADTLRQKVEDAVREHPDYRVVFTGHSLGGALATVAGADLRGNGYDIDVFSYGAPRVGNRAFAEFLTVQTGGTLYRITHTNDIVPRLPPREFGYSHSSPEYWIKSGTLVPVTRNDIVKIEGIDATGGNNQPWIPDIPAHLWYFGLIGTCL

SEQ ID NO: 4049 - protein, 269 aa, Thermomyces lanuginosus
EVSQDLFNQFNLFAQYSAAAYCGKNNDAPAGTNITCTGNACPEVEKADATFLYSFEDSGVGDVTGFLALDNTNKLIVLSFRGSRSIENWIGNLNFDLKEINDICSGCRGHDGFTSSWRSVADTLRQKVEDAVREHPEYRVVFTGHSLGGALATVAGADLRGNGYDIDVFSYGAPRVGNRAFAEFLTVQTGGTLYRITHTNDIVPRLPPREFGYSHSSPEYWIKSGTLVPVTRNDIVKIEGIDATGGNNQPNIPDIPAHLWYFGLIGTCL

SEQ ID NO: 4050 - protein, 269 aa, Thermomyces lanuginosus
EVSQDLFNQFNLFAQYSAAAYCGKNNDAPAGTNITCTGNACPEVEKADATFLYSFEDSGVGDVTGFLGLDNTNKLIVLSFRGSRSIENWIGNLNFDLKEINDICSGCRGHDGFTSSWRSVADTLRQKVEDAVREHPDYRVVFTGHSLGGALATVAGADLRGNGYDIDVFSYGAPRVGNRAFAEFLTVQTGGTLYRITHTNDIVPRLPPREFGYSHSSPEYWIKSGTLVPVTRNDIVKIEGIDATGGNNQPNIPDIPAHLWYFGLIGTCL

SEQ ID NO: 4051 - protein, 269 aa, Thermomyces lanuginosus
EVSQDLFNQFNLFAQYSAAAYCGKNNDAPAGTNITCTGNACPEVEKADATFLYWFEDSGVGDVTGFLALDNTNKLIVLSFRGSRSIENWIGNLNFDLKEINDICSGCRGHDGFTSSWRSVADTLRQKVEDAVREHPDYRVVFTGHSLGGALATVAGADLRGNGYDIDVFSYGAPRVGNRAFAEFLTVQTGGTLYRITHTNDIVPRLPPREFGYSHSSPEYWIKSGTLVPVTRNDIVKIEGIDATGGNNQPNIPDIPAHLWYFGLIGTCL

SEQ ID NO: 4052 - protein, 269 aa, Thermomyces lanuginosus
EVSQDLFNQFNLFAQYSAAAYCGKNNDAPAGTNITCTGNACPEVEKADATFLYSFEDMGVGDVTGFLALDNTNKLIVLSFRGSRSIENWIGNLNFDLKEINDICSGCRGHDGFTSSWRSVADTLRQKVEDAVREHPDYRVVFTGHSLGGALATVAGADLRGNGYDIDVFSYGAPRVGNRAFAEFLTVQTGGTLYRITHTNDIVPRLPPREFGYSHSSPEYWIKSGTLVPVTRNDIVKIEGIDATGGNNQPNIPDIPAHLWYFGLIGTCL

SEQ ID NO: 4053 - protein, 269 aa, Thermomyces lanuginosus
EVSQDLFNQFNLFAQYSAAAYCGKNNDAPAGTNITCTGNACPEVEKADATFLYSFEDSGVGDVTGFLALDNTNKLIVLSFRGSRSIENWIGNLNFDLKEINDICSGCRGSDGFTSSWRSVADTLRQKVEDAVREHPDYRVVFTGHSLGGALATVAGADLRGNGYDIDVFSYGAPRVGNRAFAEFLTVQTGGTLYRITHTNDIVPRLPPREFGYSHSSPEYWIKSGTLVPVTRNDIVKIEGIDATGGNNQPNIPDIPAHLWYFGLIGTCL

SEQ ID NO: 4054 - protein, 269 aa, Thermomyces lanuginosus
EVSQDLFNQFNLFAQYSAAAYCGKNNDAPAGTNITCTGNACPEVEKADATFLYSFEDSGVGDVTGFLALDNTNKLIVLSFRGSRSIENWIGNLNFDLKEINDICSGCRGHDGFTSSWRSVADTLRQKVEDAVREHPDYRVVFTGHSLGGALATVAGADLRGNGYDIDVFSYGAPRVGNRAFAYFLTVQTGGTLYRITHTNDIVPRLPPREFGYSHSSPEYWIKSGTLVPVTRNDIVKIEGIDATGGNNQPNIPDIPAHLWYFGLIGTCL

SEQ ID NO: 4055 - protein, 269 aa, Thermomyces lanuginosus
EVSQDLFNQFNLFAQYSAAAYCGKNNDAPAGTNITCTGNACPEVEKADATFLYSFEDSGVGDVTGFLALDNTNKLIVLSFRGSRSIENWIGNLNFDLKEINDICSGCRGHDGFTSSWRSVADTLRQKVEDAVREHPDYRVVFTGHSLGGALATVAGADLRGNGYDIDVFSYGAPRVGNRAFAEFLTTQTGGTLYRITHTNDIVPRLPPREFGYSHSSPEYWIKSGTLVPVTRNDIVKIEGIDATGGNNQPNIPDIPAHLWYFGLIGTCL

SEQ ID NO: 4056 - protein, 269 aa, Thermomyces lanuginosus
EVSQDLFNQFNLFAQYSAAAYCGKNNDAPAGTNITCTGNACPEVEKADATFLYSFEDSGVGDVTGFLALDNTNKLIVLSFRGSRSIENWIGNLNFDLKEINDICSGCRGHDGFTSSWRSVADTLRQKVEDAVREHPDYRVVFTGHSLGGALATVAGADLRGNGYDIDVFSYGAPRVGNRAFAEFLTVQTGGTLYRITHTNDIVPRLPPREFGYSHSSPEYWIKSGTLVPVTRNDIVKIEGIDATGGNNQPNIPDIPAHIWYFGLIGTCL

SEQ ID NO: 4057 - protein, 269 aa, Thermomyces lanuginosus
EVSQDLFNQFNLFAQYSAAAYCGKNNDAPAGTNITCTGNACPEVEKADATFLYSFEDSGVGDVTGFLALDNTNKLIVLSFRGSRSIENWIGNLNFDLKEINDICSGCRGHDGFTSSWRSVADTLRQKVEDAVREHPDYRVVFTGHSLGGALATVAGADLRGNGYDIDVFSYGAPRVGNRAFAEFLTVQTGGTLYRITHTNDIVPRLPPREFGYSHSSPEYWIKSGTLVPVTRNDIVKIEGIDATGGNNQPNQPDIPAHLWYFGLIGTCL

SEQ ID NO: 4058 - protein, 269 aa, Thermomyces lanuginosus
EVSQDLFNQFNLFAQYSAAAYCGKNNDAPAGTNITCTGNACPEVEKADATFLYSFEDSGVGDVTGFLALDNTNKLIVLSFRGSRSIENWIGNLNFDLHEINDICSGCRGHDGFTSSWRSVADTLRQKVEDAVREHPDYRVVFTGHSLGGALATVAGADLRGNGYDIDVFSYGAPRVGNRAFAEFLTVQTGGTLYRITHTNDIVPRLPPREFGYSHSSPEYWIKSGTLVPVTRNDIVKIEGIDATGGNNQPNIPDIPAHLWYFGLIGTCL

SEQ ID NO: 4059 - protein, 269 aa, Thermomyces lanuginosus
EVSQDLFNQFNLFAQYSAAAYCGKNNDAPAGTNITCTGNACPEVEKADATFLYSFEDSGVGDVTGFLALDNTNKLIVLSFRGSRSIENWIGNLNFDLKEINDICSGCRGHDGFTSSWRSVADTLRQKVEDAVREHPDYRVVFTGHSLGGALATVAGADLRGNGYDIDGFSYGAPRVGNRAFAEFLTVQTGGTLYRITHTNDIVPRLPPREFGYSHSSPEYWIKSGTLVPVTRNDIVKIEGIDATGGNNQPNIPDIPAHLWYFGLIGTCL

SEQ ID NO: 4060 - protein, 269 aa, Thermomyces lanuginosus
EVSQDLFNQFNLFAQYSATAYCGKNNDAPAGTNITCTGNACPEVEKADATFLYSFEDSGVGDVTGFLALDNTNKLIVLSFRGSRSIENWIGNLNFDLKEINDICSGCRGHDGFTSSWRSVADTLRQKVEDAVREHPDYRVVFTGHSLGGALATVAGADLRGNGYDIDVFSYGAPRVGNRAFAEFLTVQTGGTLYRITHTNDIVPRLPPREFGYSHSSPEYWIKSGTLVPVTRNDIVKIEGIDATGGNNQPNIPDIPAHLWYFGLIGTCL

SEQ ID NO: 4061 - protein, 269 aa, Thermomyces lanuginosus
EVSQDLFNQFNLFAQYSAAAYCGKNNDAPAGTNITCTGNACPEVEKADATFLYSFHDSGVGDVTGFLALDNTNKLIVLSFRGSRSIENWIGNLNFDLKEINDICSGCRGHDGFTSSWRSVADTLRQKVEDAVREHPDYRVVFTGHSLGGALATVAGADLRGNGYDIDVFSYGAPRVGNRAFAEFLTVQTGGTLYRITHTNDIVPRLPPREFGYSHSSPEYWIKSGTLVPVTRNDIVKIEGIDATGGNNQPNIPDIPAHLWYFGLIGTCL

SEQ ID NO: 4062 - protein, 269 aa, Thermomyces lanuginosus
EVSQDLFNQFNLFAQYSAAAYCGKNNDAPAGTNITCTGNACPEVEKADATFLYSFEDSGVGDVTGFLALDNTNKLIVLSFRGSRSIENWIGNLNFDLKEINDICSGCRGHDGFTSSWRSVADTLRQKVEDAVREHPDYRVVFTGHSLGGALATLAGADLRGNGYDIDVFSYGAPRVGNRAFAEFLTVQTGGTLYRITHTNDIVPRLPPREFGYSHSSPEYWIKSGTLVPVTRNDIVKIEGIDATGGNNQPNIPDIPAHLWYFGLIGTCL

SEQ ID NO: 4063 - protein, 269 aa, Thermomyces lanuginosus
EVSQDLFNQFNLFAQYSAAAYCGKNNDAPAGTNITCTGNACPEVEKADATFLYSFEDSGVGDVTGFLALDNTNKLIVLSFRGSRSIENWIGNLNFDLKEINDICSGCRGHDGFTSSWRSVADTLRQKVEDAVREHPDYRVVFTGHSLGGALATVAGADLRGNGYDIDVFSYGAPRVGNRAFAEFLTVQTGGTLYRITHTNDIVPRLPPREFGYSHSSPEYWIKSGTLVPVTRNDIVKIEGIDATGGNYQPNIPDIPAHLWYFGLIGTCL

SEQ ID NO: 4064 - protein, 269 aa, Thermomyces lanuginosus
EVSQDLFNQFNLFAQYSAAAYCGKNNDAPAGTNITCTGNACPEVEKADATFLYSFEDSGVGDVTGFLALDNTNKLIVLSFRGSRSIENWIGNLNFDLKEINDICSGCRGHDGFTSSWRSVADTLRQKVEDAVREHPDYRVVFTGHSLGGALATVAGADLRGNGYDIDVFSYGAPRVGNRAFAEFLTVQTGGTLYRITHTNDIVPRLPPREFGYSHSSPEYWIKSGTLVPVTWNDIVKIEGIDATGGNNQPNIPDIPAHLWYFGLIGTCL

SEQ ID NO: 4065 - protein, 269 aa, Thermomyces lanuginosus
EVSQDLFNQFNLFAQYSAAAYCGKNNDAPAGTNITCTGNACPEVEKADATFLYSFEDSGVGDVTGFLALDNTNKLIVLSFRGSRSIENWIGNLNFDLKEINDICSGCRGHDGFTSSWRSVADTLRQKVEDAVREHPDYRVVFTGHSLGGALATVAGADLRGNGYDIDVFSYGAPRVGNRAFAEFLTVQTGGTLYRITHTNDIVPRLPPREFGYSHSSPEYWIKSGTLVPVTRNDIVKIEGIDATGGNNQPTIPDIPAHLWYFGLIGTCL

SEQ ID NO: 4066 - protein, 269 aa, Thermomyces lanuginosus
EVSQDLFNQFNLFAQYSAAAYCGKNNDAPAGTNITCTGNACPEVEKADATFLYSFEDSGVGDVTGFLALDNTNKLIVLSFRGSRSIENWIGALNFDLKEINDICSGCRGHDGFTSSWRSVADTLRQKVEDAVREHPDYRVVFTGHSLGGALATVAGADLRGNGYDIDVFSYGAPRVGNRAFAEFLTVQTGGTLYRITHTNDIVPRLPPREFGYSHSSPEYWIKSGTLVPVTRNDIVKIEGIDATGGNNQPNIPDIPAHLWYFGLIGTCL

SEQ ID NO: 4067 - protein, 269 aa, Thermomyces lanuginosus
EVSQDLFNQFNLFAQYSAAAYCGKNNDAPAGTNITCTGNACPEVEKADATFLYSFEDSGVGDVTGFLALDNTNKLIVLSFRGSRSIENWIGNLNFDLKEINDICSGCRGHDGFTSSWRSVADTLRQKVEDAVREHPDYRVVFTGHSLGGALATVAGADLRGFGYDIDVFSYGAPRVGNRAFAEFLTVQTGGTLYRITHTNDIVPRLPPREFGYSHSSPEYWIKSGTLVPVTRNDIVKIEGIDATGGNNQPNIPDIPAHLWYFGLIGTCL

SEQ ID NO: 4068 - protein, 269 aa, Thermomyces lanuginosus
EVSQDLFNQFNLFAQYSAAAYCGKNNDAIAGTNITCTGNACPEVEKADATFLYSFEDSGVGDVTGFLALDNTNKLIVLSFRGSRSIENWIGNLNFDLKEINDICSGCRGHDGFTSSWRSVADTLRQKVEDAVREHPDYRVVFTGHSLGGALATVAGADLRGNGYDIDVFSYGAPRVGNRAFAEFLTVQTGGTLYRITHTNDIVPRLPPREFGYSHSSPEYWIKSGTLVPVTRNDIVKIEGIDATGGNNQPNIPDIPAHLWYFGLIGTCL

SEQ ID NO: 4069 - protein, 269 aa, Thermomyces lanuginosus
EVSQDLFNQFNLFAQYSAAAYCGKNNDAPAGTNITCTGNACPEVEKADATFLYSFEDSGVGDVTGFLALDNTNKLIVLSFRGSRSIENWIGNLNFDLKEINDICSGCRGHDGFTSSWRSYADTLRQKVEDAVREHPDYRVVFTGHSLGGALATVAGADLRGNGYDIDVFSYGAPRVGNRAFAEFLTVQTGGTLYRITHTNDIVPRLPPREFGYSHSSPEYWIKSGTLVPVTRNDIVKIEGIDATGGNNQPNIPDIPAHLWYFGLIGTCL

SEQ ID NO: 4070 - protein, 269 aa, Thermomyces lanuginosus
EVSQDLFNQFNLFASYSAAAYCGKNNDAPAGTNITCTGNACPEVEKADATFLYSFEDSGVGDVTGFLALDNTNKLIVLSFRGSRSIENWIGNLNFDLKEINDICSGCRGHDGFTSSWRSVADTLRQKVEDAVREHPDYRVVFTGHSLGGALATVAGADLRGNGYDIDVFSYGAPRVGNRAFAEFLTVQTGGTLYRITHTNDIVPRLPPREFGYSHSSPEYWIKSGTLVPVTRNDIVKIEGIDATGGNNQPNIPDIPAHLWYFGLIGTCL

SEQ ID NO: 4071 - protein, 269 aa, Thermomyces lanuginosus
EVSQDLFNQFNLFAQYSAAAYCGKNNDAPAGTNITCTGNACPEVEKADATFLYSFEDSGVGDVTGFLALDNTNKLIVLSFRGSRSIENWIGNLNFDLKEINDICSGCRGHDGFTSSWRSVADTLRQKVEDAVREHPDYRVVFTGHSLGGALATVAGADLRGNGYDIDVFSYGAPRVGNRAFAEFLTVQTGGTLYRITHTNDIVPRLPPREFGYSHSSPEYWIKRGTLVPVTRNDIVKIEGIDATGGNNQPNIPDIPAHLWYFGLIGTCL

SEQ ID NO: 4072 - protein, 269 aa, Thermomyces lanuginosus
EVSQDLFNQFNLFAQYSAAAYCGKNNDAPAGTNITCTGNACPEVEKADATFLYSFEDSGVGDVTGMLALDNTNKLIVLSFRGSRSIENWIGNLNFDLKEINDICSGCRGHDGFTSSWRSVADTLRQKVEDAVREHPDYRVVFTGHSLGGALATVAGADLRGNGYDIDVFSYGAPRVGNRAFAEFLTVQTGGTLYRITHTNDIVPRLPPREFGYSHSSPEYWIKSGTLVPVTRNDIVKIEGIDATGGNNQPNIPDIPAHLWYFGLIGTCL

SEQ ID NO: 4073 - protein, 269 aa, Thermomyces lanuginosus
EVSQDLFNQFNLFAQYSAAAYCGKNNDAPAGTNITCTGNACPEVEKADATFLYSFEDSGVGDVTGFLALDNTNKLIVLSFRGSRSIENWIGNLNFDLKEINDICSGCRGHDGFTSSWRSVADTLRQKVEDAVREHPDYRVVFTGHSLGGALATVAGADLRGKGYDIDVFSYGAPRVGNRAFAEFLTVQTGGTLYRITHTNDIVPRLPPREFGYSHSSPEYWIKSGTLVPVTRNDIVKIEGIDATGGNNQPNIPDIPAHLWYFGLIGTCL

SEQ ID NO: 4074 - protein, 269 aa, Thermomyces lanuginosus
EVSQDLFNDFNLFAQYSAAAYCGKNNDAPAGTNITCTGNACPEVEKADATFLYSFEDSGVGDVTGFLALDNTNKLIVLSFRGSRSIENWIGNLNFDLKEINDICSGCRGHDGFTSSWRSVADTLRQKVEDAVREHPDYRVVFTGHSLGGALATVAGADLRGNGYDIDVFSYGAPRVGNRAFAEFLTVQTGGTLYRITHTNDIVPRLPPREFGYSHSSPEYWIKSGTLVPVTRNDIVKIEGIDATGGNNQPNIPDIPAHLWYFGLIGTCL

SEQ ID NO: 4075 - protein, 269 aa, Thermomyces lanuginosus
EVSQDLFNQFNLFAQYSAAAYCGKNNDAPAGTNITCTGNACPEVEKADATFLYSFEDSGVGDVTGFLALDNTNKLIVLSFRGSRSIENWIGNLNFDMKEINDICSGCRGHDGFTSSWRSVADTLRQKVEDAVREHPDYRVVFTGHSLGGALATVAGADLRGNGYDIDVFSYGAPRVGNRAFAEFLTVQTGGTLYRITHTNDIVPRLPPREFGYSHSSPEYWIKSGTLVPVTRNDIVKIEGIDATGGNNQPNIPDIPAHLWYFGLIGTCL

SEQ ID NO: 4076 - protein, 269 aa, Thermomyces lanuginosus
EVSQDLFNQFNLFAQYSAAAYCGKNNDAPAGTNITCTGNACPEVEKADATFLYSFEDSGVGDVTGFLALDNTNKLIVLSFRGSRSIENWIGNLNFDLKEINDICSGCRGHDGFTSSWRSVAITLRQKVEDAVREHPDYRVVFTGHSLGGALATVAGADLRGNGYDIDVFSYGAPRVGNRAFAEFLTVQTGGTLYRITHTNDIVPRLPPREFGYSHSSPEYWIKSGTLVPVTRNDIVKIEGIDATGGNNQPNIPDIPAHLWYFGLIGTCL

SEQ ID NO: 4077 - protein, 269 aa, Thermomyces lanuginosus
EVSQDLFNQFNLFAQYSAAAYCGKNNDAPAGTNITCTGNACPEVEKADATFLYSFEDSGVGDVTGFLALDNTNKLIVLSFRGSRSIENWIGNLNFDLKEINDICSGCRGHDGFTSSWRSVADTLRQKVEDAVREHPDYRVVFTGHSLGGALATVAGADLRGEGYDIDVFSYGAPRVGNRAFAEFLTVQTGGTLYRITHTNDIVPRLPPREFGYSHSSPEYWIKSGTLVPVTRNDIVKIEGIDATGGNNQPNIPDIPAHLWYFGLIGTCL

SEQ ID NO: 4078 - protein, 269 aa, Thermomyces lanuginosus
EVSQDLFNQFNLFAQYSAAAYCGKNNDAPAGTNITCTGNACPEVEKADATFLYSFEDSGVGDVTGFLALDNTNKLIVLSFRGSRSIENWIGNLNFDLKEINDICSGCRGHDGFTSSWRSVADTLRQKVEDAVREHPDYRVVFTGHSLGGALATVAGADLRGNGYDIDVFSYGAPRFGNRAFAEFLTVQTGGTLYRITHTNDIVPRLPPREFGYSHSSPEYWIKSGTLVPVTRNDIVKIEGIDATGGNNQPNIPDIPAHLWYFGLIGTCL

SEQ ID NO: 4079 - protein, 269 aa, Thermomyces lanuginosus
EVSQDLFNQFNLFAQYSAAAYCGKNNDAPAGTNITCTGNACPEVEKADATFLYSFEDSGVGDVTGFLALDNTNKLIVLSFRGSRSIENWIGNLNFDLKEINDICSGCRGHDGFTSSWRSVADTLRQKVEFAVREHPDYRVVFTGHSLGGALATVAGADLRGNGYDIDVFSYGAPRVGNRAFAEFLTVQTGGTLYRITHTNDIVPRLPPREFGYSHSSPEYWIKSGTLVPVTRNDIVKIEGIDATGGNNQPNIPDIPAHLWYFGLIGTCL

SEQ ID NO: 4080 - protein, 269 aa, Thermomyces lanuginosus
EVSQDLFNQFNLFAQYSAAAYCGKNNDAPAGTNITCTGNACPEVEKADATFLYSFEDSGVGDVTGFLADDNTNKLIVLSFRGSRSIENWIGNLNFDLKEINDICSGCRGHDGFTSSWRSVADTLRQKVEDAVREHPDYRVVFTGHSLGGALATVAGADLRGNGYDIDVFSYGAPRVGNRAFAEFLTVQTGGTLYRITHTNDIVPRLPPREFGYSHSSPEYWIKSGTLVPVTRNDIVKIEGIDATGGNNQPNIPDIPAHLWYFGLIGTCL

SEQ ID NO: 4081 - protein, 269 aa, Thermomyces lanuginosus
EVSQDLFNQFNLFAQYSAAAYCGKNNDAPAGTNITCTGNACPEVEKADATFLYSFEDSGVGDVTGFLALDNTNKLIVLSFRGSRSIENWIENLNFDLKEINDICSGCRGHDGFTSSWRSVADTLRQKVEDAVREHPDYRVVFTGHSLGGALATVAGADLRGNGYDIDVFSYGAPRVGNRAFAEFLTVQTGGTLYRITHTNDIVPRLPPREFGYSHSSPEYWIKSGTLVPVTRNDIVKIEGIDATGGNNQPNIPDIPAHLWYFGLIGTCL

SEQ ID NO: 4082 - protein, 269 aa, Thermomyces lanuginosus
EVSQDLFNQFNLFAQYSAAAYCGKNNDAPAGTNITCTGNACPEVEKADATFLYSFEDSGVGDVTGVLALDNTNKLIVLSFRGSRSIENWIGNLNFDLKEINDICSGCRGHDGFTSSWRSVADTLRQKVEDAVREHPDYRVVFTGHSLGGALATVAGADLRGNGYDIDVFSYGAPRVGNRAFAEFLTVQTGGTLYRITHTNDIVPRLPPREFGYSHSSPEYWIKSGTLVPVTRNDIVKIEGIDATGGNNQPNIPDIPAHLWYFGLIGTCL

SEQ ID NO: 4083 - protein, 269 aa, Thermomyces lanuginosus
EVSQDLFNQFNLFAQYSAAAYCGKNMDAPAGTNITCTGNACPEVEKADATFLYSFEDSGVGDVTGFLALDNTNKLIVLSFRGSRSIENWIGNLNFDLKEINDICSGCRGHDGFTSSWRSVADTLRQKVEDAVREHPDYRVVFTGHSLGGALATVAGADLRGNGYDIDVFSYGAPRVGNRAFAEFLTVQTGGTLYRITHTNDIVPRLPPREFGYSHSSPEYWIKSGTLVPVTRNDIVKIEGIDATGGNNQPNIPDIPAHLWYFGLIGTCL

SEQ ID NO: 4084 - protein, 269 aa, Thermomyces lanuginosus
EVSQDLFNQFNLFAQYSAAAYCGKNNDAPAGTNITCTGNACPEVEKADATFLYSFEDIGVGDVTGFLALDNTNKLIVLSFRGSRSIENWIGNLNFDLKEINDICSGCRGHDGFTSSWRSVADTLRQKVEDAVREHPDYRVVFTGHSLGGALATVAGADLRGNGYDIDVFSYGAPRVGNRAFAEFLTVQTGGTLYRITHTNDIVPRLPPREFGYSHSSPEYWIKSGTLVPVTRNDIVKIEGIDATGGNNQPNIPDIPAHLWYFGLIGTCL

SEQ ID NO: 4085 - protein, 269 aa, Thermomyces lanuginosus
EVSQDLFNQFNLFAQYSAAAYCGKNNDAPAGTNITCTGNACPEVEKADATFLYSFEDSGVGDVTGFLALDNTNKLIVLSFRGSRSIENWIGNLNFDLKEINDICSGCRGHDGFTSSWRSVADTLRQKVEDAVREHPDYRVVFTGHSLGGALATVAGADLRGYGYDIDVFSYGAPRVGNRAFAEFLTVQTGGTLYRITHTNDIVPRLPPREFGYSHSSPEYWIKSGTLVPVTRNDIVKIEGIDATGGNNQPNIPDIPAHLWYFGLIGTCL

SEQ ID NO: 4086 - protein, 269 aa, Thermomyces lanuginosus
EVSQDLFNQFNLFAQYSAAAYCGKNNDAPAGTNITCTGNACPEVEKADATFLYSFEDSGVGDVTGFLAHDNTNKLIVLSFRGSRSIENWIGNLNFDLKEINDICSGCRGHDGFTSSWRSVADTLRQKVEDAVREHPDYRVVFTGHSLGGALATVAGADLRGNGYDIDVFSYGAPRVGNRAFAEFLTVQTGGTLYRITHTNDIVPRLPPREFGYSHSSPEYWIKSGTLVPVTRNDIVKIEGIDATGGNNQPNIPDIPAHLWYFGLIGTCL

SEQ ID NO: 4087 - protein, 269 aa, Thermomyces lanuginosus
EVSQDLFNQFNLFAQYSAAAYCGKNVDAPAGTNITCTGNACPEVEKADATFLYSFEDSGVGDVTGFLALDNTNKLIVLSFRGSRSIENWIGNLNFDLKEINDICSGCRGHDGFTSSWRSVADTLRQKVEDAVREHPDYRVVFTGHSLGGALATVAGADLRGNGYDIDVFSYGAPRVGNRAFAEFLTVQTGGTLYRITHTNDIVPRLPPREFGYSHSSPEYWIKSGTLVPVTRNDIVKIEGIDATGGNNQPNIPDIPAHLWYFGLIGTCL

SEQ ID NO: 4088 - protein, 269 aa, Thermomyces lanuginosus
EVSQDLFNQFNLFAQYSAAAYCGKNNDAPAGTNITCTGNACPEVEKADATFLYSFEDSGVGDVTGFLALDNTNKLIVLSFRGSRSIENWIGNLNFDLKEINDICSGCRGHDGFTSSWRSVADTLRQKVEDAVREHPDYRLVFTGHSLGGALATVAGADLRGNGYDIDVFSYGAPRVGNRAFAEFLTVQTGGTLYRITHTNDIVPRLPPREFGYSHSSPEYWIKSGTLVPVTRNDIVKIEGIDATGGNNQPNIPDIPAHLWYFGLIGTCL

SEQ ID NO: 4089 - protein, 269 aa, Thermomyces lanuginosus
EVSQDLFNQFNLFAQYSAAAYCGKNNDAPAGTNITCTGNACPEVEKADATFLYSFEDSGVGDVTGFLALDNTNKLIVLSFRGSRSIENWIGNLNFDLKEINDICSGCRGHDGFTSSWRSVADTLRQKVEDAVREHPDYRVVFTGHSLGGALATVAGADLRGNGYDIDVFSYGAPRVGNRAFAEFLTVQTGGTTYRITHTNDIVPRLPPREFGYSHSSPEYWIKSGTLVPVTRNDIVKIEGIDATGGNNQPNIPDIPAHLWYFGLIGTCL

SEQ ID NO: 4090 - protein, 269 aa, Thermomyces lanuginosus
EVSQDLFNQFNLFAQYSAAAYCGKNNDAPAGTNITCTGNACPEVEKADATFLYSFEDSGVGDVTGFLALDNTNKLIVLSFRGSRSIENWIGNLNFDLKEINDICSGCRGHDGFTSSWRSVADTLRQKVEDAVREHPDYRVVFTGHSLGGALATVAGADLRGNGYDIDVFSYGAPRVGNRAFAEFLTVQTGGTLYRITHTNDIVPRLPPREFGYSHSSPEYWIKSGTLVPVTRNDIVKIEGIDATGGNNQPNIPKIPAHLWYFGLIGTCL

SEQ ID NO: 4091 - protein, 269 aa, Thermomyces lanuginosus
EVSQDLFNQFNLFAQYSAAAYCGKNNDAPAGTNITCTGNACPEVEKADATFLYSFEDSGVGDVTGHLALDNTNKLIVLSFRGSRSIENWIGNLNFDLKEINDICSGCRGHDGFTSSWRSVADTLRQKVEDAVREHPDYRVVFTGHSLGGALATVAGADLRGNGYDIDVFSYGAPRVGNRAFAEFLTVQTGGTLYRITHTNDIVPRLPPREFGYSHSSPEYWIKSGTLVPVTRNDIVKIEGIDATGGNNQPNIPDIPAHLWYFGLIGTCL

SEQ ID NO: 4092 - protein, 269 aa, Thermomyces lanuginosus
EVSQDLFNQFNLFAQYSAAAYCGKNNDAPAGTNITCTGNACPEVEKADATFLYSFEDSGVGDVTGFLALDNFNKLIVLSFRGSRSIENWIGNLNFDLKEINDICSGCRGHDGFTSSWRSVADTLRQKVEDAVREHPDYRVVFTGHSLGGALATVAGADLRGNGYDIDVFSYGAPRVGNRAFAEFLTVQTGGTLYRITHTNDIVPRLPPREFGYSHSSPEYWIKSGTLVPVTRNDIVKIEGIDATGGNNQPNIPDIPAHLWYFGLIGTCL

SEQ ID NO: 4093 - protein, 269 aa, Thermomyces lanuginosus
EVSQDLFNQFNLFAQYSAAAYCGKNNDAPAGTNITCTGNACPEVEKADATFRYSFEDSGVGDVTGFLALDNTNKLIVLSFRGSRSIENWIGNLNFDLKEINDICSGCRGHDGFTSSWRSVADTLRQKVEDAVREHPDYRVVFTGHSLGGALATVAGADLRGNGYDIDVFSYGAPRVGNRAFAEFLTVQTGGTLYRITHTNDIVPRLPPREFGYSHSSPEYWIKSGTLVPVTRNDIVKIEGIDATGGNNQPNIPDIPAHLWYFGLIGTCL

SEQ ID NO: 4094 - protein, 269 aa, Thermomyces lanuginosus
EVSQDLFNQFNLFAQYSAAAYCGKNNDAPAGTNITCTGNACPEVEKADATFLYSFEDSGVGDVTGFLALDNTNKLIVLSFRGSRSIENWIGNLNFDLKEINDICSGCRGHDGFTSSWRSVADTLRQKVEDAVREHPDYRVVFTGHSLGGALATVAGADLRGNGYDIDVFSYGAPRVGNRAFAEFLTVQTGGTLYRITHTNDIVPRLPPREFGYSHSSPEYWIKSGTLVPVTRNDIVKIEGIDATGGNNQPNIPDIPAHLWYFGLIGLCL

SEQ ID NO: 4095 - protein, 269 aa, Thermomyces lanuginosus
EKSQDLFNQFNLFAQYSAAAYCGKNNDAPAGTNITCTGNACPEVEKADATFLYSFEDSGVGDVTGFLALDNTNKLIVLSFRGSRSIENWIGNLNFDLKEINDICSGCRGHDGFTSSWRSVADTLRQKVEDAVREHPDYRVVFTGHSLGGALATVAGADLRGNGYDIDVFSYGAPRVGNRAFAEFLTVQTGGTLYRITHTNDIVPRLPPREFGYSHSSPEYWIKSGTLVPVTRNDIVKIEGIDATGGNNQPNIPDIPAHLWYFGLIGTCL

SEQ ID NO: 4096 - protein, 269 aa, Thermomyces lanuginosus
EVSQDLFNQFNLFAQYSAAAYCGKNNDQPAGTNITCTGNACPEVEKADATFLYSFEDSGVGDVTGFLALDNTNKLIVLSFRGSRSIENWIGNLNFDLKEINDICSGCRGHDGFTSSWRSVADTLRQKVEDAVREHPDYRVVFTGHSLGGALATVAGADLRGNGYDIDVFSYGAPRVGNRAFAEFLTVQTGGTLYRITHTNDIVPRLPPREFGYSHSSPEYWIKSGTLVPVTRNDIVKIEGIDATGGNNQPNIPDIPAHLWYFGLIGTCL

SEQ ID NO: 4097 - protein, 269 aa, Thermomyces lanuginosus
EVSQDLFNQFNLFAQYSAAAYCGKNNDAPAGTNITCTGNACPEVEKADATFLYSFEDSGVGDVTGFLVLDNTNKLIVLSFRGSRSIENWIGNLNFDLKEINDICSGCRGHDGFTSSWRSVADTLRQKVEDAVREHPDYRVVFTGHSLGGALATVAGADLRGNGYDIDVFSYGAPRVGNRAFAEFLTVQTGGTLYRITHTNDIVPRLPPREFGYSHSSPEYWIKSGTLVPVTRNDIVKIEGIDATGGNNQPNIPDIPAHLWYFGLIGTCL

SEQ ID NO: 4098 - protein, 269 aa, Thermomyces lanuginosus
EVSQDLFNQFNLFAQYSAAAYCGKNNDAPAGTNITCTGNACPEVEKADATFLYSFEDSGVGDVTGFLALDNTNKLIVLSFRGSRSIENWIGNLNFDLKEINDICSGCRGHDGFTSSWRSVADTLRQKVEDAVREHPDYRVVFTGHSLGGALATVAGADLRGNGYDIDVFSYGAPRVGNRAFAEFLTVQTGGTLYRITHTNDIVPRLPPREFGYSHSSPEYWIKSGTLVPVTRNDIVKIEGIDATGGNNQPNIPDIPAHLWYFGLIGTNL

SEQ ID NO: 4099 - protein, 269 aa, Thermomyces lanuginosus
EVSQDLFNQFNLFAQYSAAAYCGKNNDAPAGTNITCTGNACPEVEKADATALYSFEDSGVGDVTGFLALDNTNKLIVLSFRGSRSIENWIGNLNFDLKEINDICSGCRGHDGFTSSWRSVADTLRQKVEDAVREHPDYRVVFTGHSLGGALATVAGADLRGNGYDIDVFSYGAPRVGNRAFAEFLTVQTGGTLYRITHTNDIVPRLPPREFGYSHSSPEYWIKSGTLVPVTRNDIVKIEGIDATGGNNQPNIPDIPAHLWYFGLIGTCL

SEQ ID NO: 4100 - protein, 269 aa, Thermomyces lanuginosus
EVSQDLFNQFNLFAQYSAAAYCGKNNDAPAGTNITCTGNACPEVEKADATFLYSFEDSGVGDVTGFLALDNTNKLIVLSFRGSRSIENWIMNLNFDLKEINDICSGCRGHDGFTSSWRSVADTLRQKVEDAVREHPDYRVVFTGHSLGGALATVAGADLRGNGYDIDVFSYGAPRVGNRAFAEFLTVQTGGTLYRITHTNDIVPRLPPREFGYSHSSPEYWIKSGTLVPVTRNDIVKIEGIDATGGNNQPNIPDIPAHLWYFGLIGTCL

SEQ ID NO: 4101 - protein, 269 aa, Thermomyces lanuginosus
EVSQDLFNQFNLFAQYSAAAYCGKNNDAPAGTNITCTGNACPEVEKADATFLYSFEDSGVGDVTGFLALDNTNKLIVLSFRGSRSIENWIGNLNFDLKEINDICSGCRGHDGFTSSWRSVADTLRQKVEDAVREHPDYRVVFTGHSLGGALATVAGADLRGNGYDIDVFSYGAPRVGNRAFAEFLTVQQGGTLYRITHTNDIVPRLPPREFGYSHSSPEYWIKSGTLVPVTRNDIVKIEGIDATGGNNQPNIPDIPAHLWYFGLIGTCL

SEQ ID NO: 4102 - protein, 269 aa, Thermomyces lanuginosus
EVSQDLFNQFNLFAQYSAAAYCGKNNDAPAGTNITCTGNACPEVEKADATFLYSFEDSGVGDVTGFLALDNTNKLIVLSFRGSRSIENWIGNLNFDLKEINDICSGCRGHDGFTSSWRSVADTLRQKVEDAVREHPDYRVVFTGHSLGGALATVAGADLRGNGYDIDVFSYGAPRVGNRAFAEFLTVQTGGTLYRITHTNDIVPRLPPREFGYSHSSPEYWIASGTLVPVTRNDIVKIEGIDATGGNNQPNIPDIPAHLWYFGLIGTCL

SEQ ID NO: 4103 - protein, 269 aa, Thermomyces lanuginosus
EVSQDLFNQFNLFAQYSAAAYCGKNNDAPAGTNITCTGNACPEVEKADATFLYSFEDSGVGDVTGFLALDNTNKLIVLSFRGSRSIENWIGNLNFDLKEINDICSGCRGHDGFISSWRSVADTLRQKVEDAVREHPDYRVVFTGHSLGGALATVAGADLRGNGYDIDVFSYGAPRVGNRAFAEFLTVQTGGTLYRITHTNDIVPRLPPREFGYSHSSPEYWIKSGTLVPVTRNDIVKIEGIDATGGNNQPNIPDIPAHLWYFGLIGTCL

SEQ ID NO: 4104 - protein, 269 aa, Thermomyces lanuginosus
EVSQDLFNQFNLFAQYSAAAYCGKNNDAPAGTNITCTGNACPEVEKADATFLYSFEDSGVGDVTGFLALDNTNKLIVLSFRGSRSIENWIGNLNFDLKEINDICSGCRGHDGFTSSWRSVADTLRQKVEDAVEEHPDYRVVFTGHSLGGALATVAGADLRGNGYDIDVFSYGAPRVGNRAFAEFLTVQTGGTLYRITHTNDIVPRLPPREFGYSHSSPEYWIKSGTLVPVTRNDIVKIEGIDATGGNNQPNIPDIPAHLWYFGLIGTCL

SEQ ID NO: 4105 - protein, 269 aa, Thermomyces lanuginosus
EVSQDLFNQFNLFAQYSAAAYCGKNNDAPAGTNITCTGNACPEVEKADATFLYSFEDSGVGDVTGFLALDNTNKLIVLSFRGSRSIENWIGNLNFDLKEINDICSGCRGHDGFTSSWRSVADTLRQKVEDAVREHPDYRVVFTGHSLGGALATVAGADLRGNGYDIDVFSYGAPRVGNRAFAEFLTVQTGGTLYRITHTNDIVPRLPPREFGYSHSSPEYWIKSGDLVPVTRNDIVKIEGIDATGGNNQPNIPDIPAHLWYFGLIGTCL

SEQ ID NO: 4106 - protein, 269 aa, Thermomyces lanuginosus
EVSQDLFNQFNLFAQYSAAAYCGKNNDAPAGTNITCTGNACPEVEKADATFLYSFEDSGVGDVTGFLALDNTNKLIVLSFRGSRSIENWTGNLNFDLKEINDICSGCRGHDGFTSSWRSVADTLRQKVEDAVREHPDYRVVFTGHSLGGALATVAGADLRGNGYDIDVFSYGAPRVGNRAFAEFLTVQTGGTLYRITHTNDIVPRLPPREFGYSHSSPEYWIKSGTLVPVTRNDIVKIEGIDATGGNNQPNIPDIPAHLWYFGLIGTCL

SEQ ID NO: 4107 - protein, 269 aa, Thermomyces lanuginosus
EVSQDLFNQFNLFAQYSAAAYCGKNNDAPAGTNITCTGNACPEVEKADATFAYSFEDSGVGDVTGFLALDNTNKLIVLSFRGSRSIENWIGNLNFDLKEINDICSGCRGHDGFTSSWRSVADTLRQKVEDAVREHPDYRVVFTGHSLGGALATVAGADLRGNGYDIDVFSYGAPRVGNRAFAEFLTVQTGGTLYRITHTNDIVPRLPPREFGYSHSSPEYWIKSGTLVPVTRNDIVKIEGIDATGGNNQPNIPDIPAHLWYFGLIGTCL

SEQ ID NO: 4108 - protein, 269 aa, Thermomyces lanuginosus
EISQDLFNQFNLFAQYSAAAYCGKNNDAPAGTNITCTGNACPEVEKADATFLYSFEDSGVGDVTGFLALDNTNKLIVLSFRGSRSIENWIGNLNFDLKEINDICSGCRGHDGFTSSWRSVADTLRQKVEDAVREHPDYRVVFTGHSLGGALATVAGADLRGNGYDIDVFSYGAPRVGNRAFAEFLTVQTGGTLYRITHTNDIVPRLPPREFGYSHSSPEYWIKSGTLVPVTRNDIVKIEGIDATGGNNQPNIPDIPAHLWYFGLIGTCL

SEQ ID NO: 4109 - protein, 269 aa, Thermomyces lanuginosus
EVKQDLFNQFNLFAQYSAAAYCGKNNDAPAGTNITCTGNACPEVEKADATFLYSFEDSGVGDVTGFLALDNTNKLIVLSFRGSRSIENWIGNLNFDLKEINDICSGCRGHDGFTSSWRSVADTLRQKVEDAVREHPDYRVVFTGHSLGGALATVAGADLRGNGYDIDVFSYGAPRVGNRAFAEFLTVQTGGTLYRITHTNDIVPRLPPREFGYSHSSPEYWIKSGTLVPVTRNDIVKIEGIDATGGNNQPNIPDIPAHLWYFGLIGTCL

SEQ ID NO: 4110 - protein, 269 aa, Thermomyces lanuginosus
EVSQDLFNQFNLFAQYSAAAYCGKNNDAPAGTNITCTGNACPEVEKADATFLYSFEDSGVGDVTGFLALDNTNKLIVLSFRGSRSIENWIGNLNFDLKEINDICSGCRGHDGFTSSWRSVADTLRQKVEDAVREHPDYRVVFTGHSLGGALATVAGADLRGNGYDIDVFSYGAPRVGNVAFAEFLTVQTGGTLYRITHTNDIVPRLPPREFGYSHSSPEYWIKSGTLVPVTRNDIVKIEGIDATGGNNQPNIPDIPAHLWYFGLIGTCL

SEQ ID NO: 4111 - protein, 269 aa, Thermomyces lanuginosus
EVSQDLFNQFNLFAQYSAAAYCGKNNDAPAGTNITCTGNACPEVEKADATFLYSFEDSGVGDVTGFLALDNTNKLIVLSFRGSRSIENWIWNLNFDLKEINDICSGCRGHDGFTSSWRSVADTLRQKVEDAVREHPDYRVVFTGHSLGGALATVAGADLRGNGYDIDVFSYGAPRVGNRAFAEFLTVQTGGTLYRITHTNDIVPRLPPREFGYSHSSPEYWIKSGTLVPVTRNDIVKIEGIDATGGNNQPNIPDIPAHLWYFGLIGTCL

SEQ ID NO: 4112 - protein, 269 aa, Thermomyces lanuginosus
EVSQDLFNQFNLFAQYSAAAYCGVNNDAPAGTNITCTGNACPEVEKADATFLYSFEDSGVGDVTGFLALDNTNKLIVLSFRGSRSIENWIGNLNFDLKEINDICSGCRGHDGFTSSWRSVADTLRQKVEDAVREHPDYRVVFTGHSLGGALATVAGADLRGNGYDIDVFSYGAPRVGNRAFAEFLTVQTGGTLYRITHTNDIVPRLPPREFGYSHSSPEYWIKSGTLVPVTRNDIVKIEGIDATGGNNQPNIPDIPAHLWYFGLIGTCL

SEQ ID NO: 4113 - protein, 269 aa, Thermomyces lanuginosus
EVSQDLFNQFNLFAQYSAAAYCGKNNDAPAGTNITCTGNACPEVEKADATFLYSFEDSGVGDVTGFLALDNTNKLIVLSFRGSRSIENWIGNLNFDLKEINDICSGCRGHDGFTSSWRSVADTLRQKVEDAVREHPDYRVVFTGHSLGGALATVAGADLRGNGYDIDVFSYGAPRVGNRAFAEFLTVQEGGTLYRITHTNDIVPRLPPREFGYSHSSPEYWIKSGTLVPVTRNDIVKIEGIDATGGNNQPNIPDIPAHLWYFGLIGTCL

SEQ ID NO: 4114 - protein, 269 aa, Thermomyces lanuginosus
EVSQDLFNQFNLFAQYSAAAYCGKNNDAPAGTNITCTGNACPEVEKADATFLYSFESSGVGDVTGFLALDNTNKLIVLSFRGSRSIENWIGNLNFDLKEINDICSGCRGHDGFTSSWRSVADTLRQKVEDAVREHPDYRVVFTGHSLGGALATVAGADLRGNGYDIDVFSYGAPRVGNRAFAEFLTVQTGGTLYRITHTNDIVPRLPPREFGYSHSSPEYWIKSGTLVPVTRNDIVKIEGIDATGGNNQPNIPDIPAHLWYFGLIGTCL

SEQ ID NO: 4115 - protein, 269 aa, Thermomyces lanuginosus
EVSQDLFNQFNLFAQYSAAAYCGKNNDAPAGTNITCTGNACPEVEKADATFLYSFEDSGVGDVTGFLALDNTNKLIVLSFRGSRSIENWIGNLNFDLKEINDICSGCRGHDGFTSSWRSVADTLRQKVEDAVREHPDYRVVFTGHSLGGALATVAGADLRGNGYDIDQFSYGAPRVGNRAFAEFLTVQTGGTLYRITHTNDIVPRLPPREFGYSHSSPEYWIKSGTLVPVTRNDIVKIEGIDATGGNNQPNIPDIPAHLWYFGLIGTCL

SEQ ID NO: 4116 - protein, 269 aa, Thermomyces lanuginosus
EVSQDLFNQFNLFAQYSAAAYCGKNNDAPAGTNITCTGNACPEVEKADATFLYSFEDSGVGDVTGFLALDNTNKLIVLSFRGSRSIENWIGNLNFDLKEINDICPGCRGHDGFTSSWRSVADTLRQKVEDAVREHPDYRVVFTGHSLGGALATVAGADLRGNGYDIDVFSYGAPRVGNRAFAEFLTVQTGGTLYRITHTNDIVPRLPPREFGYSHSSPEYWIKSGTLVPVTRNDIVKIEGIDATGGNNQPNIPDIPAHLWYFGLIGTCL

SEQ ID NO: 4117 - protein, 269 aa, Thermomyces lanuginosus
EVSQDLFNQFNLFAQYSAAAYCGKNNDAPAGTNITCTGNACPEVEKADATFLYSFEDSGVGDVTGFLALDNTNKLIVLSFRGSRSIENWIGNLMFDLKEINDICSGCRGHDGFTSSWRSVADTLRQKVEDAVREHPDYRVVFTGHSLGGALATVAGADLRGNGYDIDVFSYGAPRVGNRAFAEFLTVQTGGTLYRITHTNDIVPRLPPREFGYSHSSPEYWIKSGTLVPVTRNDIVKIEGIDATGGNNQPNIPDIPAHLWYFGLIGTCL

SEQ ID NO: 4118 - protein, 269 aa, Thermomyces lanuginosus
EVYQDLFNQFNLFAQYSAAAYCGKNNDAPAGTNITCTGNACPEVEKADATFLYSFEDSGVGDVTGFLALDNTNKLIVLSFRGSRSIENWIGNLNFDLKEINDICSGCRGHDGFTSSWRSVADTLRQKVEDAVREHPDYRVVFTGHSLGGALATVAGADLRGNGYDIDVFSYGAPRVGNRAFAEFLTVQTGGTLYRITHTNDIVPRLPPREFGYSHSSPEYWIKSGTLVPVTRNDIVKIEGIDATGGNNQPNIPDIPAHLWYFGLIGTCL

SEQ ID NO: 4119 - protein, 269 aa, Thermomyces lanuginosus
EVSQDLFNQFNLFAQYSQAAYCGKNNDAPAGTNITCTGNACPEVEKADATFLYSFEDSGVGDVTGFLALDNTNKLIVLSFRGSRSIENWIGNLNFDLKEINDICSGCRGHDGFTSSWRSVADTLRQKVEDAVREHPDYRVVFTGHSLGGALATVAGADLRGNGYDIDVFSYGAPRVGNRAFAEFLTVQTGGTLYRITHTNDIVPRLPPREFGYSHSSPEYWIKSGTLVPVTRNDIVKIEGIDATGGNNQPNIPDIPAHLWYFGLIGTCL

SEQ ID NO: 4120 - protein, 269 aa, Thermomyces lanuginosus
EVSQDLFNQFNLFAQYSAAAYCGKNNDAPAGTNITCTGNACPEVEKADATFLYSFEDSGVGDVYGFLALDNTNKLIVLSFRGSRSIENWIGNLNFDLKEINDICSGCRGHDGFTSSWRSVADTLRQKVEDAVREHPDYRVVFTGHSLGGALATVAGADLRGNGYDIDVFSYGAPRVGNRAFAEFLTVQTGGTLYRITHTNDIVPRLPPREFGYSHSSPEYWIKSGTLVPVTRNDIVKIEGIDATGGNNQPNIPDIPAHLWYFGLIGTCL

SEQ ID NO: 4121 - protein, 269 aa, Thermomyces lanuginosus
EVSQDLFNQFNLFAQYSAAAYCGKNNDAPAGTNITCTGNACPEVEKADATFLYSFEDSGVGDVTGFLALDNTNKLIVLSFRGSRSIENWIGNLNFDLKEINDICSGCRGHDGFTSSWRSVADTLRQKVEDAVREHPDYRVVFTGHSLGGALATVAGADLRGNGYDIDVFSYGAPRVGNRAFAEFLTVQTGGTLYRITHTNDIVPRLPPREFGYSHSSPEYWIKSGTLVPVTRNDIVKIEGIDATGGNNQPNHPDIPAHLWYFGLIGTCL

SEQ ID NO: 4122 - protein, 269 aa, Thermomyces lanuginosus
EVSQDLFNQFNLFAQYSAAAYCGKNNDAPAGTNITCTGNACPEVEKADATFLYSFEDSGVGDVTGFLALDNTNKLIVLSFRGSRSIENWIGNLNFDLKEINDICSGCRGHDGFTSSWRSVADTLRQKVEDAVREHPDYRVVFTGHSLGGALATVAGADLRGNGYDIDVFSYGAPRVGNHAFAEFLTVQTGGTLYRITHTNDIVPRLPPREFGYSHSSPEYWIKSGTLVPVTRNDIVKIEGIDATGGNNQPNIPDIPAHLWYFGLIGTCL

SEQ ID NO: 4123 - protein, 269 aa, Thermomyces lanuginosus
EVSQDLFNQFNLFAQYSAAAYCGKNNDAPAGTNITCTGNACPEVEKADATFLYSFEDSGVGDVTGFLALDNTNKLIVLSFRGSRSIENWIHNLNFDLKEINDICSGCRGHDGFTSSWRSVADTLRQKVEDAVREHPDYRVVFTGHSLGGALATVAGADLRGNGYDIDVFSYGAPRVGNRAFAEFLTVQTGGTLYRITHTNDIVPRLPPREFGYSHSSPEYWIKSGTLVPVTRNDIVKIEGIDATGGNNQPNIPDIPAHLWYFGLIGTCL

SEQ ID NO: 4124 - protein, 269 aa, Thermomyces lanuginosus
EVSQDLFNQFNLFAQYSAAAYCGKNNDAPAGTNITCTGNACPEVEKADATFLYSFEDSGVGDVTGFLALDNTNKLIVLSFRGSRSIENWIGNLNFDLKEINDICSGCRGHDGFTSSWRSVADTLRQKVEDAVREHPDYRVVFTGHSLGGALATVAGADLRGNGYDIDVFSYGAPRVGNRAFAEFLTVQTGGTLYRITHTNDIVPRLPPREFGYSHVSPEYWIKSGTLVPVTRNDIVKIEGIDATGGNNQPNIPDIPAHLWYFGLIGTCL

SEQ ID NO: 4125 - protein, 269 aa, Thermomyces lanuginosus
EVSQDLFNQFNLFAQYSAAAYCGKNNDAPAGTNITCTGNACPEVEKWDATFLYSFEDSGVGDVTGFLALDNTNKLIVLSFRGSRSIENWIGNLNFDLKEINDICSGCRGHDGFTSSWRSVADTLRQKVEDAVREHPDYRVVFTGHSLGGALATVAGADLRGNGYDIDVFSYGAPRVGNRAFAEFLTVQTGGTLYRITHTNDIVPRLPPREFGYSHSSPEYWIKSGTLVPVTRNDIVKIEGIDATGGNNQPNIPDIPAHLWYFGLIGTCL

SEQ ID NO: 4126 - protein, 269 aa, Thermomyces lanuginosus
EVSQDLFNQFNLFAQYSAAAYCGKNNDAPAGTNITCTGNACPEVELADATFLYSFEDSGVGDVTGFLALDNTNKLIVLSFRGSRSIENWIGNLNFDLKEINDICSGCRGHDGFTSSWRSVADTLRQKVEDAVREHPDYRVVFTGHSLGGALATVAGADLRGNGYDIDVFSYGAPRVGNRAFAEFLTVQTGGTLYRITHTNDIVPRLPPREFGYSHSSPEYWIKSGTLVPVTRNDIVKIEGIDATGGNNQPNIPDIPAHLWYFGLIGTCL

SEQ ID NO: 4127 - protein, 269 aa, Thermomyces lanuginosus
EVSQDLFNQFNLFAQYSSAAYCGKNNDAPAGTNITCTGNACPEVEKADATFLYSFEDSGVGDVTGFLALDNTNKLIVLSFRGSRSIENWIGNLNFDLKEINDICSGCRGHDGFTSSWRSVADTLRQKVEDAVREHPDYRVVFTGHSLGGALATVAGADLRGNGYDIDVFSYGAPRVGNRAFAEFLTVQTGGTLYRITHTNDIVPRLPPREFGYSHSSPEYWIKSGTLVPVTRNDIVKIEGIDATGGNNQPNIPDIPAHLWYFGLIGTCL

SEQ ID NO: 4128 - protein, 269 aa, Thermomyces lanuginosus
EVSQDLYNQFNLFAQYSAAAYCGKNNDAPAGTNITCTGNACPEVEKADATFLYSFEDSGVGDVTGFLALDNTNKLIVLSFRGSRSIENWIGNLNFDLKEINDICSGCRGHDGFTSSWRSVADTLRQKVEDAVREHPDYRVVFTGHSLGGALATVAGADLRGNGYDIDVFSYGAPRVGNRAFAEFLTVQTGGTLYRITHTNDIVPRLPPREFGYSHSSPEYWIKSGTLVPVTRNDIVKIEGIDATGGNNQPNIPDIPAHLWYFGLIGTCL

SEQ ID NO: 4129 - protein, 269 aa, Thermomyces lanuginosus
EVSQDLFNQFNLFAQYSAAAYCGKNNDAPAGTNITCTGNACPEVEKADATFLYSFEDSGVGDVTGFLALDNTNKLIVLSFRGSRSIENWIGNLNFDLKEINDICSGCRGHDGFTSSWRSVADTLTQKVEDAVREHPDYRVVFTGHSLGGALATVAGADLRGNGYDIDVFSYGAPRVGNRAFAEFLTVQTGGTLYRITHTNDIVPRLPPREFGYSHSSPEYWIKSGTLVPVTRNDIVKIEGIDATGGNNQPNIPDIPAHLWYFGLIGTCL

SEQ ID NO: 4130 - protein, 269 aa, Thermomyces lanuginosus
EVSQDLFNQFNLFAQYSAAAYCGKNNDAPAGTNITCTGNACPEVEKADATFLYSFEDSGVGDVTGFLALDNTNKLIVLSFRGSRSIENWIGNLNFDLKEINDICSGCRGHDGFTSSWRSVADTLRQKVEDAVREHPDYRVVFTGHSLGGALATVAGADLRGNGYDIDVFSYGAPRVGNRAFATFLTVQTGGTLYRITHTNDIVPRLPPREFGYSHSSPEYWIKSGTLVPVTRNDIVKIEGIDATGGNNQPNIPDIPAHLWYFGLIGTCL

SEQ ID NO: 4131 - protein, 269 aa, Thermomyces lanuginosus
EVSQDLFNQFNLFAQYSAAAYCDKNNDAPAGTNITCTGNACPEVEKADATFLYSFEDSGVGDVTGFLALDNTNKLIVLSFRGSRSIENWIGNLNFDLKEINDICSGCRGHDGFTSSWRSVADTLRQKVEDAVREHPDYRVVFTGHSLGGALATVAGADLRGNGYDIDVFSYGAPRVGNRAFAEFLTVQTGGTLYRITHTNDIVPRLPPREFGYSHSSPEYWIKSGTLVPVTRNDIVKIEGIDATGGNNQPNIPDIPAHLWYFGLIGTCL

SEQ ID NO: 4132 - protein, 269 aa, Thermomyces lanuginosus
EVSQDLFNQFNLFAQYSAAAYCGKNNDAPAGTNITCTGNACPEVEKADATFLYSFEDSGVGDVTGFLALDNTNKLIVLSFRGSRSIENWIGNLNFDLKEINDICSGCRGHDGFTSSWRSVADTLRQKVEDARREHPDYRVVFTGHSLGGALATVAGADLRGNGYDIDVFSYGAPRVGNRAFAEFLTVQTGGTLYRITHTNDIVPRLPPREFGYSHSSPEYWIKSGTLVPVTRNDIVKIEGIDATGGNNQPNIPDIPAHLWYFGLIGTCL

SEQ ID NO: 4133 - protein, 269 aa, Thermomyces lanuginosus
EVSQDLFNQFNLFAQYSAAAYCGKNNDAPAGTNITCTGNACPEVEKADATFLYSFEDSGVGDVTGFLALDNTNKLIVLSFRGSRSIENWIGNLNFDLKEINDICSGCRGHDGFTSSWRSVADTLRQKVEDAVRVHPDYRVVFTGHSLGGALATVAGADLRGNGYDIDVFSYGAPRVGNRAFAEFLTVQTGGTLYRITHTNDIVPRLPPREFGYSHSSPEYWIKSGTLVPVTRNDIVKIEGIDATGGNNQPNIPDIPAHLWYFGLIGTCL

SEQ ID NO: 4134 - protein, 269 aa, Thermomyces lanuginosus
EVSQDLFNQFNLFAQYSAAAYCGKNNDAPAGTNITCTGNACPEVEKADATFLYSFEDSGVGDVTGFLALDNTNKLIVLSFRGSRSIENWIGNLNFDLKEINDICSGCRGHDGFTSSWRSVADTLRQKVERAVREHPDYRVVFTGHSLGGALATVAGADLRGNGYDIDVFSYGAPRVGNRAFAEFLTVQTGGTLYRITHTNDIVPRLPPREFGYSHSSPEYWIKSGTLVPVTRNDIVKIEGIDATGGNNQPNIPDIPAHLWYFGLIGTCL

SEQ ID NO: 4135 - protein, 269 aa, Thermomyces lanuginosus
EVSQDLFNQFNLFAQYSAAAYCGKNNDAPAGTNITCTGNACPEVEKADATFLYSFEDSGVGDVTGFLATDNTNKLIVLSFRGSRSIENWIGNLNFDLKEINDICSGCRGHDGFTSSWRSVADTLRQKVEDAVREHPDYRVVFTGHSLGGALATVAGADLRGNGYDIDVFSYGAPRVGNRAFAEFLTVQTGGTLYRITHTNDIVPRLPPREFGYSHSSPEYWIKSGTLVPVTRNDIVKIEGIDATGGNNQPNIPDIPAHLWYFGLIGTCL

SEQ ID NO: 4136 - protein, 269 aa, Thermomyces lanuginosus
EVSQDLFNQFNLFAQYSAAAYCGKNNDAPAGTNITCTGNACPETEKADATFLYSFEDSGVGDVTGFLALDNTNKLIVLSFRGSRSIENWIGNLNFDLKEINDICSGCRGHDGFTSSWRSVADTLRQKVEDAVREHPDYRVVFTGHSLGGALATVAGADLRGNGYDIDVFSYGAPRVGNRAFAEFLTVQTGGTLYRITHTNDIVPRLPPREFGYSHSSPEYWIKSGTLVPVTRNDIVKIEGIDATGGNNQPNIPDIPAHLWYFGLIGTCL

SEQ ID NO: 4137 - protein, 269 aa, Thermomyces lanuginosus
EVSQDLFNQFNLFAQYSAAAYCGKNNDAPAGTNITCTGNACPEVEKADATFLYSFEDSGVGDVTGFLALDNTNKLIVLSFRGSRSIENWIGNLNFDLKEINDICSGCRGHDGFTSSWRSVADTLRQKVEDAVREFPDYRVVFTGHSLGGALATVAGADLRGNGYDIDVFSYGAPRVGNRAFAEFLTVQTGGTLYRITHTNDIVPRLPPREFGYSHSSPEYWIKSGTLVPVTRNDIVKIEGIDATGGNNQPNIPDIPAHLWYFGLIGTCL

SEQ ID NO: 4138 - protein, 269 aa, Thermomyces lanuginosus
EVSQDLFNQFNLFAQYSAAAYCNKNNDAPAGTNITCTGNACPEVEKADATFLYSFEDSGVGDVTGFLALDNTNKLIVLSFRGSRSIENWIGNLNFDLKEINDICSGCRGHDGFTSSWRSVADTLRQKVEDAVREHPDYRVVFTGHSLGGALATVAGADLRGNGYDIDVFSYGAPRVGNRAFAEFLTVQTGGTLYRITHTNDIVPRLPPREFGYSHSSPEYWIKSGTLVPVTRNDIVKIEGIDATGGNNQPNIPDIPAHLWYFGLIGTCL

SEQ ID NO: 4139 - protein, 269 aa, Thermomyces lanuginosus
EVSQDLFNQFNLFAQYSAAAYCGKNNDAPAGTNITCDGNACPEVEKADATFLYSFEDSGVGDVTGFLALDNTNKLIVLSFRGSRSIENWIGNLNFDLKEINDICSGCRGHDGFTSSWRSVADTLRQKVEDAVREHPDYRVVFTGHSLGGALATVAGADLRGNGYDIDVFSYGAPRVGNRAFAEFLTVQTGGTLYRITHTNDIVPRLPPREFGYSHSSPEYWIKSGTLVPVTRNDIVKIEGIDATGGNNQPNIPDIPAHLWYFGLIGTCL

SEQ ID NO: 4140 - protein, 269 aa, Thermomyces lanuginosus
EVSQDLFNQFNLFAQYSAAAYCGKNNDAPAGTNITCTGNACPEVEKADATFLYSFEDSGVGDVTGFLALDNTKKLIVLSFRGSRSIENWIGNLNFDLKEINDICSGCRGHDGFTSSWRSVADTLRQKVEDAVREHPDYRVVFTGHSLGGALATVAGADLRGNGYDIDVFSYGAPRVGNRAFAEFLTVQTGGTLYRITHTNDIVPRLPPREFGYSHSSPEYWIKSGTLVPVTRNDIVKIEGIDATGGNNQPNIPDIPAHLWYFGLIGTCL

SEQ ID NO: 4141 - protein, 269 aa, Thermomyces lanuginosus
EVSQDLFNQFNLFAQYSAAAYCGKNNDAPAGTNITCTGNACPDVEKADATFLYSFEDSGVGDVTGFLALDNTNKLIVLSFRGSRSIENWIGNLNFDLKEINDICSGCRGHDGFTSSWRSVADTLRQKVEDAVREHPDYRVVFTGHSLGGALATVAGADLRGNGYDIDVFSYGAPRVGNRAFAEFLTVQTGGTLYRITHTNDIVPRLPPREFGYSHSSPEYWIKSGTLVPVTRNDIVKIEGIDATGGNNQPNIPDIPAHLWYFGLIGTCL

SEQ ID NO: 4142 - protein, 269 aa, Thermomyces lanuginosus
EVSQDLFNQFNLFAQYSAAAYCGKNNDAPAGTNITCTGNACPEVEKADATFLYSFKDSGVGDVTGFLALDNTNKLIVLSFRGSRSIENWIGNLNFDLKEINDICSGCRGHDGFTSSWRSVADTLRQKVEDAVREHPDYRVVFTGHSLGGALATVAGADLRGNGYDIDVFSYGAPRVGNRAFAEFLTVQTGGTLYRITHTNDIVPRLPPREFGYSHSSPEYWIKSGTLVPVTRNDIVKIEGIDATGGNNQPNIPDIPAHLWYFGLIGTCL

SEQ ID NO: 4143 - protein, 269 aa, Thermomyces lanuginosus
EVSQDLFNQFNLFAQYSAAAYCGKNNDAPAGTNITCTGNACPEVEKADATFLYSFEDSGVGDVTGFLALDNTNKLIVLSFRGSRSIENWIGNLNFDLKQINDICSGCRGHDGFTSSWRSVADTLRQKVEDAVREHPDYRVVFTGHSLGGALATVAGADLRGNGYDIDVFSYGAPRVGNRAFAEFLTVQTGGTLYRITHTNDIVPRLPPREFGYSHSSPEYWIKSGTLVPVTRNDIVKIEGIDATGGNNQPNIPDIPAHLWYFGLIGTCL

SEQ ID NO: 4144 - protein, 269 aa, Thermomyces lanuginosus
EVSQDLFNQFNLFAQYSAAAYCGKNNDAPAGTNITCTGNACPEVEKADATFLYSFEDSGVGDVTGFLALDNTNKLIVLSFRGSRSIENWIGNLNFDLKEINDICSGCRGHDGFTSSWRSVADTLRQKVEDAVREHPDYRVVFTGHSLGGALATVAGADLRGNGYDIDVFSYGAPRVGNRAFAEFLTVQTGGTLYRITHTNDIVPRLPPREFGYSHSSPEYWIKSGTLVPVTRNDIVKIEGIDATGGNNQPNIPAIPAHLWYFGLIGTCL

SEQ ID NO: 4145 - protein, 269 aa, Thermomyces lanuginosus
EVSQDLFNQFNLFAQYSAAAYCGKNNDAPAGTNITCTGNACPEVEKADATFLYSFEDSGVGDVTGFLALDNTNKLIVLSFRGSRSIENWIGNLNFDLKEINDICSGCRGHDGFTSSWRSVADTLRQKVEWAVREHPDYRVVFTGHSLGGALATVAGADLRGNGYDIDVFSYGAPRVGNRAFAEFLTVQTGGTLYRITHTNDIVPRLPPREFGYSHSSPEYWIKSGTLVPVTRNDIVKIEGIDATGGNNQPNIPDIPAHLWYFGLIGTCL

SEQ ID NO: 4146 - protein, 269 aa, Thermomyces lanuginosus
EVSQDLFNQFNLFAQYSAAAYCGKNNDAEAGTNITCTGNACPEVEKADATFLYSFEDSGVGDVTGFLALDNTNKLIVLSFRGSRSIENWIGNLNFDLKEINDICSGCRGHDGFTSSWRSVADTLRQKVEDAVREHPDYRVVFTGHSLGGALATVAGADLRGNGYDIDVFSYGAPRVGNRAFAEFLTVQTGGTLYRITHTNDIVPRLPPREFGYSHSSPEYWIKSGTLVPVTRNDIVKIEGIDATGGNNQPNIPDIPAHLWYFGLIGTCL

SEQ ID NO: 4147 - protein, 269 aa, Thermomyces lanuginosus
EVSQDLFNQFNLFAQYSAAAYCGKNNDAPAGTNITCTGNACPEVEKADATFLYSFEDSGVGDVTGFLALDNTNKLIVLSFRGSRSIENWIGNLNFDLKEINDICSGCRGHDGFTSSWRSVADTLRQKVEVAVREHPDYRVVFTGHSLGGALATVAGADLRGNGYDIDVFSYGAPRVGNRAFAEFLTVQTGGTLYRITHTNDIVPRLPPREFGYSHSSPEYWIKSGTLVPVTRNDIVKIEGIDATGGNNQPNIPDIPAHLWYFGLIGTCL

SEQ ID NO: 4148 - protein, 269 aa, Thermomyces lanuginosus
EVSQDLFNQFNLFAQYSAAAYCGKNNDAPAGTNITCTGNACPEVEKADATFLYSFEDSGVGDVTGFLALDNTNKLIVLSFRGSRSIENWIGNLNFDLKEINDICSGCRGHDGFTSSWRSVADTLRQKVEDAVREHPDYRVVFTGHSLGGALATVAGADLRGNGYDIDVFSYGAPRVGNRAFAEFLTVQTGGTLYRITHTNDIVPRLPNREFGYSHSSPEYWIKSGTLVPVTRNDIVKIEGIDATGGNNQPNIPDIPAHLWYFGLIGTCL

SEQ ID NO: 4149 - protein, 269 aa, Thermomyces lanuginosus
EVSQDLFNQFNLFAQYSAAAYCGKNNDAPAGTNITCTGNACPEVEKADATFLYSFEDSGVGDVTGFLALDNTNKLIVLSFRGSRSIENWIGNLNFDLKEINDICSGCRGHDGFTSSWRSVADTLRQKVEDAVREHPDYRVVFTGHSLGGALATVAGADLRGNGYDIDVFSYGAPRVGNRAFAEFLTVQTGGTLYRITHTNDIVPRLPPREFGYSHSSPEYWIKSGTLVPVTRNDIVKIEGIDATGGNNQPNIPDIPAHLWYFGLIGGCL

SEQ ID NO: 4150 - protein, 269 aa, Thermomyces lanuginosus
EVSQDLFNQFNLFAQYSAAAYCGKNNDAPAGTNITCTGNACPEVEKADATFLYSFEDSGVGDVTGFLALDNTNKLIVLSFRGSRSIENWIGNLNFDLKEINDICSGCRGHDGFTSSWRSVADTLRQKVEDAVREHPDYRVVFTGHSLGGAPATVAGADLRGNGYDIDVFSYGAPRVGNRAFAEFLTVQTGGTLYRITHTNDIVPRLPPREFGYSHSSPEYWIKSGTLVPVTRNDIVKIEGIDATGGNNQPNIPDIPAHLWYFGLIGTCL

SEQ ID NO: 4151 - protein, 269 aa, Thermomyces lanuginosus
EVSQDLFNQFNLFAQYSAAAYCGKNNDAPAGTNITCTGNACPEVEKADATFLYSFEDSGVGDVTGFLALDNTNKLIVLSFRGSRSIENWIGNLNFDLKEINDICSGCRGHDGFTSSWRSVADTLRQKVEDAVREHPDYRVVFTGHSLGGALATVAGADLRGNGYDIDVFSYGAPRVGNRAFAEFLTVQTGGTLYRITHTNDIVPRLPPREFGYSHSSPEYWIKSGTLVPVTRNDIVKIEGIDAMGGNNQPNIPDIPAHLWYFGLIGTCL

SEQ ID NO: 4152 - protein, 269 aa, Thermomyces lanuginosus
EVSQDLFNQFNLFAQYSAAAYCGKNNDAPAGTNITCTGNACPEVEKADATFLYSFEDSGVGDVTGFLALDNTNKLIVLSFRGSRSIENWIGNLNFDLKEINDICSGCRGHDGFTSSWRSVADTLRQKVEDAVREHPDYRVVFTGHSLGGALATVAGADLRGNGYDIDVFSYGAPRVGNRAFAEFLTVQTGGTLYRITHTNDIVPRLPPREFGYSHSSPEYWIKSGTLVPVTRNDIVKIEGIDATGGNNQPNIPXIPAHLWYFGLIGTCL

SEQ ID NO: 4153 - protein, 269 aa, Thermomyces lanuginosus
EVSQDLFNQFNLFVQYSAAAYCGKNNDAPAGTNITCTGNACPEVEKADATFLYSFEDSGVGDVTGFLALDNTNKLIVLSFRGSRSIENWIGNLNFDLKEINDICSGCRGHDGFTSSWRSVADTLRQKVEDAVREHPDYRVVFTGHSLGGALATVAGADLRGNGYDIDVFSYGAPRVGNRAFAEFLTVQTGGTLYRITHTNDIVPRLPPREFGYSHSSPEYWIKSGTLVPVTRNDIVKIEGIDATGGNNQPNIPDIPAHLWYFGLIGTCL

SEQ ID NO: 4154 - protein, 269 aa, Thermomyces lanuginosus
EVSQDLFNQFNLFAQYSAAAYCGKNNDAPAGTNITCTGNACPEVEKADATFLYSFEDSGVGDVTGFLALDNTNKLIVLSFRGSRSIENWIGNLNFDLMEINDICSGCRGHDGFTSSWRSVADTLRQKVEDAVREHPDYRVVFTGHSLGGALATVAGADLRGNGYDIDVFSYGAPRVGNRAFAEFLTVQTGGTLYRITHTNDIVPRLPPREFGYSHSSPEYWIKSGTLVPVTRNDIVKIEGIDATGGNNQPNIPDIPAHLWYFGLIGTCL

SEQ ID NO: 4155 - protein, 269 aa, Thermomyces lanuginosus
EVSQDLFNQFNLFAQYSAAAYCGKNNDAPAGTNITCTGNACPEVEKADATFLYSFRDSGVGDVTGFLALDNTNKLIVLSFRGSRSIENWIGNLNFDLKEINDICSGCRGHDGFTSSWRSVADTLRQKVEDAVREHPDYRVVFTGHSLGGALATVAGADLRGNGYDIDVFSYGAPRVGNRAFAEFLTVQTGGTLYRITHTNDIVPRLPPREFGYSHSSPEYWIKSGTLVPVTRNDIVKIEGIDATGGNNQPNIPDIPAHLWYFGLIGTCL

SEQ ID NO: 4156 - protein, 269 aa, Thermomyces lanuginosus
EVSQDLFNQFNLFAQYSAAAYCGKNNDAPAGTNITCTGNACPEVEKADATFLYSFEDSGVGDVTGFLALDNTNKLIVLSFRGSRSIENWIGNLNFDLKEINDICSGCRGHDGFTSSWRSVADTLRQKVEDAVREHPDYRVVFTGHSLGGALATVAGADLRGNGYDIDVFSYGAPRVGNRAFAEFLTVQDGGTLYRITHTNDIVPRLPPREFGYSHSSPEYWIKSGTLVPVTRNDIVKIEGIDATGGNNQPNIPDIPAHLWYFGLIGTCL

SEQ ID NO: 4157 - protein, 269 aa, Thermomyces lanuginosus
EVSQDLFNQFNLFAQYSAAAYCGKNNDAPAGTNITCTGNACPEVEKADATFLYSFEDSGVGDVTGFLALDNTNKLIVLSFRGSRSIENWIGNLNFDLKEINDICSGCRGHDGFTSSWRSVADTLRQKVEDAVREHPDYRVVFTGHSLGGALATVAGADLRGNGYDIDVFSYGAPRVGNRAFAEFLTVQTGGTLYRITHTNDIVPRLPPREFGYSHSSPEYWIKSGTLVPVTRNDIVWIEGIDATGGNNQPNIPDIPAHLWYFGLIGTCL

SEQ ID NO: 4158 - protein, 269 aa, Thermomyces lanuginosus
EVSQDLFNQFNLFAQYSAAAYCGKNNDAPAGTNITCTGNACPEVEKADATFLYSFEDSGVGDVTGFLALDNTNKLIVLSFRGSRSIENWIGNLNFDLKEINDICSGCRGHDGFTSSWRSVADTLRQKVEDAVREHPDYRVVFTGHSLGGALATVAGADLRGNGYDIDVFSYGAPRVGNRAFAEFLTVQTGGTLYRITHTNDIVPRLPPREFGYSHSSPEYWIKSGTLVPVTRNDIVKIEGIDAAGGNNQPNIPDIPAHLWYFGLIGTCL

SEQ ID NO: 4159 - protein, 269 aa, Thermomyces lanuginosus
EVSQDLFNQFNLFAQYSAAAYCGKNNDAPAGTNITCTGNACPEVEKADAKFLYSFEDSGVGDVTGFLALDNTNKLIVLSFRGSRSIENWIGNLNFDLKEINDICSGCRGHDGFTSSWRSVADTLRQKVEDAVREHPDYRVVFTGHSLGGALATVAGADLRGNGYDIDVFSYGAPRVGNRAFAEFLTVQTGGTLYRITHTNDIVPRLPPREFGYSHSSPEYWIKSGTLVPVTRNDIVKIEGIDATGGNNQPNIPDIPAHLWYFGLIGTCL

SEQ ID NO: 4160 - protein, 269 aa, Thermomyces lanuginosus
EVSQDLFNQFNLFAQYSAAAYCGKNNDAPAGTNITCTGYACPEVEKADATFLYSFEDSGVGDVTGFLALDNTNKLIVLSFRGSRSIENWIGNLNFDLKEINDICSGCRGHDGFTSSWRSVADTLRQKVEDAVREHPDYRVVFTGHSLGGALATVAGADLRGNGYDIDVFSYGAPRVGNRAFAEFLTVQTGGTLYRITHTNDIVPRLPPREFGYSHSSPEYWIKSGTLVPVTRNDIVKIEGIDATGGNNQPNIPDIPAHLWYFGLIGTCL

SEQ ID NO: 4161 - protein, 269 aa, Thermomyces lanuginosus
EVSQDLFNQFNLFAQYSAAAYCGKNNDAPAGTNITCTGNACPEVEKADATFLYSFEDSGVGDVTGFLALDNTNKLIVLSFRGSRSIENWIGNLNFDLKEINDICSGCRGHDGFTSSWRSVADTLRQKVEDAVREHPDYRVVFTGHSLGGALATVAGADLRGNGYDIDVFSYGAPRVGNRAFAEFLTVTTGGTLYRITHTNDIVPRLPPREFGYSHSSPEYWIKSGTLVPVTRNDIVKIEGIDATGGNNQPNIPDIPAHLWYFGLIGTCL

SEQ ID NO: 4162 - protein, 269 aa, Thermomyces lanuginosus
EVSQDLFNQFNLFAQYSAAAYCGKNNDAPAGTNITCTGNACPEVEKADKTFLYSFEDSGVGDVTGFLALDNTNKLIVLSFRGSRSIENWIGNLNFDLKEINDICSGCRGHDGFTSSWRSVADTLRQKVEDAVREHPDYRVVFTGHSLGGALATVAGADLRGNGYDIDVFSYGAPRVGNRAFAEFLTVQTGGTLYRITHTNDIVPRLPPREFGYSHSSPEYWIKSGTLVPVTRNDIVKIEGIDATGGNNQPNIPDIPAHLWYFGLIGTCL

SEQ ID NO: 4163 - protein, 269 aa, Thermomyces lanuginosus
EVSQDLFNQFNLFAQYSAAAYCGKNNDEPAGTNITCTGNACPEVEKADATFLYSFEDSGVGDVTGFLALDNTNKLIVLSFRGSRSIENWIGNLNFDLKEINDICSGCRGHDGFTSSWRSVADTLRQKVEDAVREHPDYRVVFTGHSLGGALATVAGADLRGNGYDIDVFSYGAPRVGNRAFAEFLTVQTGGTLYRITHTNDIVPRLPPREFGYSHSSPEYWIKSGTLVPVTRNDIVKIEGIDATGGNNQPNIPDIPAHLWYFGLIGTCL

SEQ ID NO: 4164 - protein, 269 aa, Thermomyces lanuginosus
EVSQDLFNQFNLFAQYSAAAYCGKNNDAPAGTNITCTGNACPEVEKADATFLYSFEDSGVGDVTGFLALDNTNKLIVLSFRGSRSIENWEGNLNFDLKEINDICSGCRGHDGFTSSWRSVADTLRQKVEDAVREHPDYRVVFTGHSLGGALATVAGADLRGNGYDIDVFSYGAPRVGNRAFAEFLTVQTGGTLYRITHTNDIVPRLPPREFGYSHSSPEYWIKSGTLVPVTRNDIVKIEGIDATGGNNQPNIPDIPAHLWYFGLIGTCL

SEQ ID NO: 4165 - protein, 269 aa, Thermomyces lanuginosus
EVSQDLFNQFNLFAQYSAAAYCGKNNDAPAGTNITCTGNACPEVEKADATFLYSFEDSGVGDVTGFLALDNTNKLIVLSFRGSRSIENWIGNLNFDLKEINDICSGCRGHDGFTSSWRSVADTLRQKVEDAVREHPDYRVVFTGHSLGGALATVAGADLRGNGYDIDVFSYGAPRVGNRAFAEFLTVQTGGTLYRITHTNDIVPRLPPREFGYSHSSPEYWIKSGTLVPVTRNDIVKIEGIDATGGNNQPNIPDIPAHRWYFGLIGTCL

SEQ ID NO: 4166 - protein, 269 aa, Thermomyces lanuginosus
EVSQDLFNQFNLFAQYSAAAYCFKNNDAPAGTNITCTGNACPEVEKADATFLYSFEDSGVGDVTGFLALDNTNKLIVLSFRGSRSIENWIGNLNFDLKEINDICSGCRGHDGFTSSWRSVADTLRQKVEDAVREHPDYRVVFTGHSLGGALATVAGADLRGNGYDIDVFSYGAPRVGNRAFAEFLTVQTGGTLYRITHTNDIVPRLPPREFGYSHSSPEYWIKSGTLVPVTRNDIVKIEGIDATGGNNQPNIPDIPAHLWYFGLIGTCL

SEQ ID NO: 4167 - protein, 269 aa, Thermomyces lanuginosus
EVSQDLFNQFNLFAQYSAAAYCGKNNDAPAGTNITCTGNACPEVEKADATFLYSFEDSGVGDVTGFLALDNTNKLIVLSFRGSRSIENWIGNLNFDLKEINDICSGCRGHDGFTSSWRSVADTLRQKVEDAVREHPDYRVVFTGHSLGGALATVAGADLRGNGDDIDVFSYGAPRVGNRAFAEFLTVQTGGTLYRITHTNDIVPRLPPREFGYSHSSPEYWIKSGTLVPVTRNDIVKIEGIDATGGNNQPNIPDIPAHLWYFGLIGTCL

SEQ ID NO: 4168 - protein, 269 aa, Thermomyces lanuginosus
EVSQDLFNQFNLFAQYSAAAYCGKNNDAPAGTNITCTGNACPEVEKADATFLYSFEDRGVGDVTGFLALDNTNKLIVLSFRGSRSIENWIGNLNFDLKEINDICSGCRGHDGFTSSWRSVADTLRQKVEDAVREHPDYRVVFTGHSLGGALATVAGADLRGNGYDIDVFSYGAPRVGNRAFAEFLTVQTGGTLYRITHTNDIVPRLPPREFGYSHSSPEYWIKSGTLVPVTRNDIVKIEGIDATGGNNQPNIPDIPAHLWYFGLIGTCL

SEQ ID NO: 4169 - protein, 269 aa, Thermomyces lanuginosus
EVSQDLFNQFNLFAQYSAAAYCGKNNDAPAGTNITCTGNACPEVEKADATFLYSFEDSGVGDVTGFLALDNTNKLIVLSFRGSRSIENWIGNLNFDLKEINDICSGCRGHDGFTSSWRSVADTLRQKVEDAVREHPDYRVVFTGHSLGGALATVAGADLRGNGYDIDVFSYGAPRVGNRAFAEFLTVQTGGTLYRITHTNDIVPRLPPREFGYSHSSPEYWIKSGTLVPVTRNDIVKIEGIDATGGNNQPNIPDIPAHLWYFMLIGTCL

SEQ ID NO: 4170 - protein, 269 aa, Thermomyces lanuginosus
EVSQDLFNQFNLFAQYSAAAYCGKNNDAPAGTNITCTGNACPEVEKADATFLYSFEDSGVGDVTGFLALDNTNKLIVLSFRGSRSIENWIGNLNFDLKEINHICSGCRGHDGFTSSWRSVADTLRQKVEDAVREHPDYRVVFTGHSLGGALATVAGADLRGNGYDIDVFSYGAPRVGNRAFAEFLTVQTGGTLYRITHTNDIVPRLPPREFGYSHSSPEYWIKSGTLVPVTRNDIVKIEGIDATGGNNQPNIPDIPAHLWYFGLIGTCL

SEQ ID NO: 4171 - protein, 269 aa, Thermomyces lanuginosus
EVSQDLFNQFNLFAQYSAAAYCGKNNDAPAGTNITCTGNACPEVEKADATFLYSFEDSGVGDVTGFLALDNTNKLINLSFRGSRSIENWIGNLNFDLKEINDICSGCRGHDGFTSSWRSVADTLRQKVEDAVREHPDYRVVFTGHSLGGALATVAGADLRGNGYDIDVFSYGAPRVGNRAFAEFLTVQTGGTLYRITHTNDIVPRLPPREFGYSHSSPEYWIKSGTLVPVTRNDIVKIEGIDATGGNNQPNIPDIPAHLWYFGLIGTCL

SEQ ID NO: 4172 - protein, 269 aa, Thermomyces lanuginosus
EVSQDLFNQFNLFAQYSAAAYCGKNNDAPAGTNITCTGNACPEVEKADATFLYSFEDSGVGDVTGFLALDNTNKLIVLSFRGSRSIENWIGNLNFDLKEINDICSGCRGHDGFTSSWRSVADTLRQKVEDAVREHPDYRVVFTGHSLGGALATVAGADLRGNGYDIDVFSYGAPRVGNRAFAEFLTVQTGGTLYRITHTNDIVPRLPPREFGYSHSSPEYWIKSGTLVPVTRNDIVKIEGIDATGGNNQDNIPDIPAHLWYFGLIGTCL

SEQ ID NO: 4173 - protein, 269 aa, Thermomyces lanuginosus
EVSQDLFNQFNLFAQYSAAAYCGKNNDAPAGTNITCTGNACPEVEKADATFLYSFEDSGVGDVTGFLALDNTNKLIVLSFRGSRSIENWIFNLNFDLKEINDICSGCRGHDGFTSSWRSVADTLRQKVEDAVREHPDYRVVFTGHSLGGALATVAGADLRGNGYDIDVFSYGAPRVGNRAFAEFLTVQTGGTLYRITHTNDIVPRLPPREFGYSHSSPEYWIKSGTLVPVTRNDIVKIEGIDATGGNNQPNIPDIPAHLWYFGLIGTCL

SEQ ID NO: 4174 - protein, 269 aa, Thermomyces lanuginosus
EVSQDLFNQFNLFAQYSAAAYCGKNNDAPAGTNITCTGNACPEVEKADATFLYSFEDSGVGDVTGFLALDNTNKLIVLSFRGSRSIENWIGNLNFDLKEINDICSGCRGHDGFTSSWRSVADTLRQKVEDAVREHPDYRVVFTGHSLGGALATVAGADLRGNGYDIDVFSYGAPRVGNRAFAEFLTVQTGGTLYRITHTNDIVPRLPPREFGYSHSSPEYWIKSGTLVPVTRNDIVKIEGIDATGGNNQPNIPDIPAHLPYFGLIGTCL

SEQ ID NO: 4175 - protein, 269 aa, Thermomyces lanuginosus
EVSQDLFNQFNLFAHYSAAAYCGKNNDAPAGTNITCTGNACPEVEKADATFLYSFEDSGVGDVTGFLALDNTNKLIVLSFRGSRSIENWIGNLNFDLKEINDICSGCRGHDGFTSSWRSVADTLRQKVEDAVREHPDYRVVFTGHSLGGALATVAGADLRGNGYDIDVFSYGAPRVGNRAFAEFLTVQTGGTLYRITHTNDIVPRLPPREFGYSHSSPEYWIKSGTLVPVTRNDIVKIEGIDATGGNNQPNIPDIPAHLWYFGLIGTCL

SEQ ID NO: 4176 - protein, 269 aa, Thermomyces lanuginosus
EVSQDLFNQFNLFAQYSAAAYCGKNNDAPAGTNITCTGNACPEVEKADATFLYSFEDSGVGDVTGFLALDNTNKLIVLSFRGSRSIENWIGNLNFDLKEINAICSGCRGHDGFTSSWRSVADTLRQKVEDAVREHPDYRVVFTGHSLGGALATVAGADLRGNGYDIDVFSYGAPRVGNRAFAEFLTVQTGGTLYRITHTNDIVPRLPPREFGYSHSSPEYWIKSGTLVPVTRNDIVKIEGIDATGGNNQPNIPDIPAHLWYFGLIGTCL

SEQ ID NO: 4177 - protein, 270 aa, Thermomyces lanuginosus
EVSQDLFNQFNLFAQYSAAAYCGKNNDAPAGTNITCTGNACPEVEKADATFLYSFEDSGVGDVTGFLALDNTNKLIVLSFRGSRSIENWIGNLNFDLKEINDICSGCRGHDGFTSSWRSVADTLRQKVEDAVREHPDYRVVFTGHSLGGALATVAGADLRGNGYDIDVFSYGAPRVGNRAFAEFLTVQTGGTLYRITHTNDIVPRLPPREFGYSHSSPEYWIKSGTLVRVTRRNDIVKIEGIDATGGNNQPNIPDIPAHLWYFGLIGTCL

SEQ ID NO: 4178 - protein, 270 aa, Thermomyces lanuginosus
EVSQDLFNQFNLFAQYSAAAYCGKNNDAPAGTNITCTGNACPEVEKADATFLYSFEDSGVGDVTGFLALDNTNKLIVLSFRGSRSIENWIGNLNFDLKEINDICSGCRGHDGFTSSWRSVADTLRQKVEDAVREHPDYRVVFTGHSLGGALATVAGADLRGNGYDIDVFSYGAPRVGNRAFAEFLTVQTGGTLYRITHTNDIVPRLPPREFGYSHSSPEYWIKSGTLVPVTRRDIVKIEGIDARTGGNNQPNIPDIPAHLWYFGLIGTCL

SEQ ID NO: 4179 - protein, 269 aa, Thermomyces lanuginosus
EVSQDLFNQFNLFAQYSAAAYCGKNNDAPAGTNITCTGNACPEVEKADATFLYSFEDSGVGDVTGFLALDNTNKLIVLSFRGSRSIENWIGNLNFDLKEINDICSGCRGHDGFTSSWRSVADTLRQKVEDAVREHPDYRVVFTGHALGGALATVAGADLRGNGYDIDVFSYGAPRVGNRAFAEFLTVQTGGTLYRITHTNDIVPRLPPREFGYSHSSPEYWIKSGTLVPVTRNDIVKIEGIDATGGNNQPNIPDIPAHLWYFGLIGTCL

SEQ ID NO: 4180 - protein, 270 aa, Thermomyces lanuginosus
EVSQDLFNQFNLFAQYSAAAYCGKNNDAPAGTNITCTGNACPEVEKADATFLYSFEDSGVGDVTGFLALDNTNKLIVLSFRGSRSIENWIGNLNFDLKEINDICSGCRGHDGFTSSWRSVADTLRQKVEDAVREHPDYRVVFTGHSLGGALATVAGADLRGNGYDIDVFSYGAPRVGNRAFAEFLTVQTGGTLYRITHTNDIVPRLPPREFGYSHSSPEYWIKRGTLVRPVTRNDIVKIEGIDATGGNNQPNIPDIPAHLWYFGLIGTCL

SEQ ID NO: 4181 - protein, 270 aa, Thermomyces lanuginosus
EVSQDLFNQFNLFAQYSAAAYCGKNNDAPAGTNITCTGNACPEVEKADATFLYSFEDSGVGDVTGFLALDNTNKLIVLSFRGSRSIENWIGNLNFDLKEINDICRRGCRGHDGFTSSWRSVADTLRQKVEDAVREHPDYRVVFTGHSLGGALATVAGADLRGNGYDIDVFSYGAPRVGNRAFAEFLTVQTGGTLYRITHTNDIVPRLPPREFGYSHSSPEYWIKSGTLVPVTRNDIVKIEGIDATGGNNQPNIPDIPAHLWYFGLIGTCL

SEQ ID NO: 4182 - protein, 271 aa, Thermomyces lanuginosus
EVSQDLFNQFNLFAQYSAAAYCGKNNDAPAGTNITCTGNACPEVEKADATFLYSFEDSGVGDVTGFLALDNTNKLIVLSFRGSRSIENWIGNLNFDLKEINDICSGCRGHDGFTSSWRSVADTLRQKVEDAVREHPDYRVVFTGHSLGGALATVAGADLRGNGYDIDVFSYGAPRVGNRAFAEFLTVQTGGTLYRITHTNDIVPRLPPREFGYSHSSPEYWIKSGTLVPRVRTRNDIVKIEGIDATGGNNQPNIPDIPAHLWYFGLIGTCL

SEQ ID NO: 4183 - protein, 268 aa, Thermomyces lanuginosus
VSQDLFNQFNLFAQYSAAAYCGKNNDAPAGTNITCTGNACPEVEKADATFLYSFEDSGVGDVTGFLALDNTNKLIVLSFRGSRSIENWIGNLNFDLKEINDICSGCRGHDGFTSSWRSVADTLRQKVEDAVREHPDYRVVFTGHSLGGALATVAGADLRGNGYDIDVFSYGAPRVGNRAFAEFLTVQTGGTLYRITHTNDIVPRLPPREFGYSHSSPEYWIKSGTLVPVTRNDIVCIEGIDATGGNNQPNIPDIPAHLWYFGLIGTCL

SEQ ID NO: 4184 - protein, 268 aa, Thermomyces lanuginosus
VSQDLFNQFNLFAQYSAAAYCGKNNDAPAGTNITCTGNACPEVEKADATFLYSFEDSGVGDVTGFLALDNTNKLIVLSFRGSRSIENWIGNLNFDLKEINDICSGCRGHDGFTSSWRSVADTLRQKVEDAVREHPDYRVVFTGHSLGGALATVAGADLRGNGYDIDVFSYGAPRVGNRAFAEFLTVQTGGTLYRITHTNDIVPRLPPREFGYSHSSPEYWIKSGTLVPVTRCDIVKIEGIDATGGNNQPNIPDIPAHLWYFGLIGTCL

SEQ ID NO: 4185 - protein, 267 aa, Thermomyces lanuginosus
SQDLFNQFNLFAQYSAAAYCGKNNDAPAGTNITCTGNACPEVEKADATFLYSFEDSGVGDVTGFLALDNTNKLIVLSFRGSRSIENWIGNLNFDLKEINDICSGCRGHDGFTSSWRSVADTLRQKVEDAVREHPDYRVVFTGHSLGGALATVAGADLRGNGYDIDVFSYGAPRVGNRAFAEFLTVQTGGTLYRITHTNDIVPRLPPREFGYSHSSPEYWIKSGTLVPVTRCDIVKIEGIDATGGNNQPNIPDIPAHLWYFGLIGTCL

SEQ ID NO: 4186 - protein, 267 aa, Thermomyces lanuginosus
SRDLFNQFNLFAQYSAAAYCGKNNDAPAGTNITCTGNACPEVEKADATFLYSFEDSGVGDVTGFLALDNTNKLIVLSFRGSRSIENWIGNLNFDLKEINDICSGCRGHDGFTSSWRSVADTLRQKVEDAVREHPDYRVVFTGHSLGGALATVAGADLRGNGYDIDVFSYGAPRVGNRAFAEFLTVQTGGTLYRITHTNDIVPRLPPREFGYSHSSPEYWIKSGTLVPVTRNDIVKIEGIDATGGNNQPNIPDIPAHLWYFGLIGTCL

SEQ ID NO: 4187 - protein, 194 aa, Humicola insolens
QLGAIQNDLESGSPDACPDAILIFARGSCEPGNMGITVGPALANGLKEHIPNIWIQGVGGPYDAALATNFLPRGTSQANIDEGKRLFHLAHQKCPNTPVVAGGYSQGAALIAAAVSELSGAVKEQVKGVVLFGYTQNLQNRGGIPNYPRERTKVFCNVGDAVCTGTLIITPAHLSYTIQARGEAARFLVDRIRA

SEQ ID NO: 4188 - protein, 194 aa, Humicola insolens
QLGAIQNDLESGSPDACPDAILIFARGSIEPGNMGITVGPALANGLKEHIPNIWIQGVGGPYDAALATNFLPRGTSQANIDEGKRLFHLAHQKCPNTPVVAGGYSQGAALIAAAVSELSGAVKEQVKGVVLFGYTQNLQNRGGIPNYPRERTKVFCNVGDAVCTGTLIITPAHLSYTIQARGEAARFLVDRIRA

SEQ ID NO: 4189 - protein, 194 aa, Humicola insolens
QLGAIQNDLESGSPDACPDAILIFARGSTEPGNMGITHGPALANGLKEHIPNIWIQGVGGPYDAALATNFLPRGTSQANIDEGKRLFHLAHQKCPNTPVVAGGYSQGAALIAAAVSELSGAVKEQVKGVVLFGYTQNLQNRGGIPNYPRERTKVFCNVGDAVCTGTLIITPAHLSYTIQARGEAARFLVDRIRA

SEQ ID NO: 4190 - protein, 194 aa, Humicola insolens
QLGAIQNDLESGSPDACPDAILIFARGSMEPGNMGITVGPALANGLKEHIPNIWIQGVGGPYDAALATNFLPRGTSQANIDEGKRLFHLAHQKCPNTPVVAGGYSQGAALIAAAVSELSGAVKEQVKGVVLFGYTQNLQNRGGIPNYPRERTKVFCNVGDAVCTGTLIITPAHLSYTIQARGEAARFLVDRIRA

SEQ ID NO: 4191 - protein, 291 aa, Thermomyces lanuginosus
MRSSLVLFFVSAWTALASPIRREVSQDLFNQFNLFAQYSAAAYCGKNNDAPAGTNITCTGNACPEVEKADATFLYSFEDSGVGDVTGFLALDNTNKLIVLSFRGSRSIENWIGNLNFDLKEINDICSGCRGHDGFTSSWRSVADTLRQKVEDAVREHPDYRVVFTGHSLGGALATVAGADLRGNGYDIDVFSYGAPRVGNRAFAEFLTVQTGGTLYRITHTNDIVPRLPPREFGYSHSSPEYWIKSGTLVPVRRNDIVKIEGIDATGGNNQPNIPSIPAHLWYFGLIGTCL

SEQ ID NO: 4192 - protein, 291 aa, Thermomyces lanuginosus
MRSSLVLFFVSAWTALASPIRREVSQDLFNQFNLFAQYSAAAYCGKNNDAPAGTQITCTGNACPEVEKADATFLYSFEDSGVGDVTGFLALDNTNKLIVLSFRGSRSIENWIGNLNFDLKEINDICSGCRGHDGFTSSWRSVADTLRQKVEDAVREHPDYRVVFTGHSLGGALATVAGADLRGNGYDIDVFSYGAPRVGNRAFAEFLTVQTGGTLYRITHTNDIVPRLPPREFGYSHSSPEYWIKSGTLVPVTRNDIVKIEGIDATGGNNQPNIPQIPAHLWYFGLIGTCL

SEQ ID NO: 4193 - protein, 291 aa, Thermomyces lanuginosus
MRSSLVLFFVSAWTALASPIRREVSQDLFNQFNLFAQYSAAAYCGKNNDAPAGTNITCTGNACPEVEKADATFLYSFEDSGVGDVTGFLALDNTNKLIVLSFRGSRSIENWIGNLNFDLKEINDICSGCRGHDGFTSSWRSVADTLRQKVEDAVREHPDYRVVFTGHSLGGALATVAGADLRGNGYDIDVFSYGAPRVGNRAFAEFLTVQTGGTLYRITHTNDIVPRLPPREFGYSHSSPEYWIKSGTLVPVRRNDIVKIEGIDATGGNNQPNIPTIPAHLWYFGLIGTCL

SEQ ID NO: 4194 - protein, 291 aa, Synthetic construct
MRSSLVLFFVSAWTALASPIRREVSQDLFNQFNLFAQYSAAAYCGKNNDAPAGTNITCTGNACPEVEKADATFLYSFEDSGVGDVTGFLALDNTNKLIVLSFRGSRSIENWIGNLNFWLKEINDICSGCRGHDGFTSSWRSVADTLRQKVEDAVREHPDYRVVFTGHSLGGALATVAGADLRGNGYDIDVFSYGAPRVGNRAFAEFLTVQTGGTLYRITHTNDIVPRLPPRNFGYSHSSPEYWIKSGTLVPVTRNDIVKIEGIDATGGNNQPNIPDIPAHLWYFGLIGTCL

SEQ ID NO: 4195 - protein, 291 aa, Thermomyces lanuginosus
MRSSLVLFFVSAWTALASPIRREVSQDLFNQFNLFAQYSAAAYCGKNNDAPAGTNITCTGNACPEVEKADATFLYSFEDSGVGDVTGFLALDNTNKLIVLSFRGSRSIENWIGNLNFDLKEINDICSGCRGHDGFTSSWRSVADTLRQKVEDAVREHPDYRVVFTGHSLGGALATVAGADLRGNGYDIDVFSYGAPRVGNRAFAEFLTVQTGGTLYRITHTNDIVPRLPPREFGYSHSSPEYWIKSGTLVPVTRRDIVKIEGIDATGGNNQPNIPTIPAHLWYFGLIGTCL

SEQ ID NO: 4196 - protein, 291 aa, Thermomyces lanuginosus
MRSSLVLFFVSAWTALASPIRREVSQDLFNQFNLFAQYSAAAYCGKNNDAPAGTNITCTGNACPEVEKADATFLYSFEDSGVGDVTGFLALDNTNKLIVLSFRGSRSIENWIGNLNFDLKEINDICSGCRGHDGFTSSWRSVADTLRQKVEDAVREHPDYRVVFTGHSLGGALATVAGADLRGNGYDIDVFSYGAPRVGNRAFAEFLTVQTGGTLYRITHTNDIVPRLPPREFGYSHSSPEYWIKSGTLVPVTRRDIVKIEGIDATGGNNQPNIPQIPAHLWYFGLIGTCL

SEQ ID NO: 4197 - protein, 291 aa, Thermomyces lanuginosus
MRSSLVLFFVSAWTALASPIRREVSQDLFNQFNLFAQYSAAAYCGKNNDAPAGTNITCTGNACPEVEKADATFLYSFEDSGVGDVTGFLALDNTNKLIVLSFRGSRSIENWIGNLNFDLKEINDICSGCRGHDGFTSSWRSVADTLRQKVEDAVREHPDYRVVFTGHSLGGALATVAGADLRGNGYDIDVFSYGAPRVGNRAFAEFLTVQTGGTLYRITHTNDIVPRLPPREFGYSHSSPEYWIKSGTLVPVTRRDIVKIEGIDATGGNNQPNIPNIPAHLWYFGLIGTCL

SEQ ID NO: 4198 - protein, 291 aa, Thermomyces lanuginosus
MRSSLVLFFVSAWTALASPIRREVSQDLFNQFNLFAQYSAAAYCGKNNDAPAGTNITCTGNACPEVEKADATFLYSFEDSGVGDVTGFLALDNTNKLIVLSFRGSRSIENWIGNLNFDLKEINDICSGCRGHDGFTSSWRSVADTLRQKVEDAVREHPDYRVVFTGHSLGGALATVAGADLRGNGYDIDVFSYGAPRVGNRAFAEFLTVQTGGTLYRITHTNDIVPRLPPREFGYSHSSPEYWIKSGTLVPVTRRDIVKIEGIDATGGNNQPNIPSIPAHLWYFGLIGTCL

SEQ ID NO: 4199 - protein, 291 aa, Thermomyces lanuginosus
MRSSLVLFFVSAWTALASPIRREVSQDLFNQFNLFAQYSAAAYCGKNNDAPAGTQITCTGNACPEVEKADATFLYSFEDSGVGDVTGFLALDNTNKLIVLSFRGSRSIENWIGNLNFDLKEINDICSGCRGHDGFTSSWRSVADTLRQKVEDAVREHPDYRVVFTGHSLGGALATVAGADLRGNGYDIDVFSYGAPRVGNRAFAEFLTVQTGGTLYRITHTNDIVPRLPPREFGYSHSSPEYWIKSGTLVPVTRNDIVKIEGIDATGGNNQPNIPLIPAHLWYFGLIGTCL

SEQ ID NO: 4200 - protein, 291 aa, Synthetic construct
MRSSLVLFFVSAWTALASPIRREVSQDLFNQFNLFAQYSAAAYCGKNNDAPAGTNITCTGNACPEVEKADATFLYSFEDSGVGDVTGFLALDNTNKLIVLSFRGSRSIENWIGNLNFWLKEINNICSGCRGHDGFTSSWRSVADTLRQKVEDAVREHPDYRVVFTGHSLGGALATVAGADLRGNGYDIDVFSYGAPRVGNRAFAEFLTVQTGGTLYRITHTNDIVPRLPPREFGYSHSSPEYWIKSGTLVPVTRNDIVKIEGIDATGGNNQPNIPDIPAHLWYFGLIGTCL

SEQ ID NO: 4201 - protein, 291 aa, Thermomyces lanuginosus
MRSSLVLFFVSAWTALASPIRREVSQDLFNQFNLFAQYSAAAYCGKNNDAPAGTNITCTGNACPEVEKADATFLYSFEDSGVGDVTGFLALDNTNKLIVLSFRGSRSIENWIGNLNFDLKEINDICSGCRGHDGFTSSWRSVADTLRQKVEDAVREHPDYRVVFTGHSLGGALATVAGADLRGNGYDIDVFSYGAPRVGNRAFAEFLTVQTGGTLYRITHTNDIVPRLPPREFGYSHSSPEYWIKSGTLVPVTRRDIVKIEGIDATGGNNQPNIPHIPAHLWYFGLIGTCL

SEQ ID NO: 4202 - protein, 291 aa, Thermomyces lanuginosus
MRSSLVLFFVSAWTALASPIRREVSQDLFNQFNLFAQYSAAAYCGKNNDAPAGTNITCTGNACPEVEKADATFLYSFEDSGVGDVTGFLALDNTNKLIVLSFRGSRSIENWIGNLNFDLKEINDICSGCRGHDGFTSSWRSVADTLRQKVEDAVREHPDYRVVFTGHSLGGALATVAGADLRGNGYDIDVFSYGAPRVGNRAFAEFLTVQTGGTLYRITHTNDIVPRLPPREFGYSHSSPEYWIKSGTLVPVRRNDIVKIEGIDATGGNNQPNIPYIPAHLWYFGLIGTCL

SEQ ID NO: 4203 - protein, 291 aa, Thermomyces lanuginosus
MRSSLVLFFVSAWTALASPIRREVSQDLFNQFNLFAQYSAAAYCGKNNDAPAGTNITCTGNACPEVEKADATFLYSFEDSGVGDVTGFLALDNTNKLIVLSFRGSRSIENWIGNLNFDLKEINDICSGCRGHDGFTSSWRSVADTLRQKVEDAVREHPDYRVVFTGHSLGGALATVAGADLRGNGYDIDVFSYGAPRVGNRAFAEFLTVQTGGTLYRITHTNDIVPRLPPREFGYSHSSPEYWIKSGTLVPVTRRDIVKIEGIDATGGNNQPNIPYIPAHLWYFGLIGTCL

SEQ ID NO: 4204 - protein, 291 aa, Thermomyces lanuginosus
MRSSLVLFFVSAWTALASPIRREVSQDLFNQFNLFAQYSAAAYCGKNNDAPAGTQITCTGNACPEVEKADATFLYSFEDSGVGDVTGFLALDNTNKLIVLSFRGSRSIENWIGNLNFDLKEINDICSGCRGHDGFTSSWRSVADTLRQKVEDAVREHPDYRVVFTGHSLGGALATVAGADLRGNGYDIDVFSYGAPRVGNRAFAEFLTVQTGGTLYRITHTNDIVPRLPPREFGYSHSSPEYWIKSGTLVPVTRNDIVKIEGIDATGGNNQPNIPNIPAHLWYFGLIGTCL

SEQ ID NO: 4205 - protein, 291 aa, Thermomyces lanuginosus
MRSSLVLFFVSAWTALASPIRREVSQDLFNQFNLFAQYSAAAYCGKNNDAPAGTNITCTGNACPEVEKADATFLYSFEDSGVGDVTGFLALDNTNKLIVLSFRGSRSIENWIGNLNFDLKEINDICSGCRGHDGFTSSWRSVADTLRQKVEDAVREHPDYRVVFTGHSLGGALATVAGADLRGNGYDIDVFSYGAPRVGNRAFAEFLTVQTGGTLYRITHTNDIVPRLPPREFGYSHSSPEYWIKSGTLVPVRRRDIVKIEGIDATGGNNQPNIPDIPAHLWYFGLIGTCL

SEQ ID NO: 4206 - protein, 291 aa, Synthetic construct
MRSSLVLFFVSAWTALASPIRREVSQDLFNQFNLFAQYSAAAYCGKNNDAPAGTNITCTGNACPEVEKADATFLYSFEDSGVGDVTGFLALDNTNKLIVLSFRGSRSIENWIGNLNFLLKEINDICSGCRGHDGFTSSWRSVADTLRQKVEDAVREHPDYRVVFTGHSLGGALATVAGADLRGNGYDIDVFSYGAPRVGNRAFAEFLTVQTGGTLYRITHTNDIVPRVPPREFGYSHSSPEYWIKSGTLVPVTRNDIVKIEGIDATGGNNQPNIPDIPAHLWYFGLIGTCL

SEQ ID NO: 4207 - protein, 291 aa, Thermomyces lanuginosus
MRSSLVLFFVSAWTALASPIRREVSQDLFNQFNLFAQYSAAAYCGKNNDAPAGTQITCTGNACPEVEKADATFLYSFEDSGVGDVTGFLALDNTNKLIVLSFRGSRSIENWIGNLNFDLKEINDICSGCRGHDGFTSSWRSVADTLRQKVEDAVREHPDYRVVFTGHSLGGALATVAGADLRGNGYDIDVFSYGAPRVGNRAFAEFLTVQTGGTLYRITHTNDIVPRLPPREFGYSHSSPEYWIKSGTLVPVTRNDIVKIEGIDATGGNNQPNIPHIPAHLWYFGLIGTCL

SEQ ID NO: 4208 - protein, 291 aa, Synthetic construct
MRSSLVLFFVSAWTALASPIRREVSQDLFNQFNLFAQYSAAAYCGKNNDAPAGTNITCTGNACPEVEKADATFLYSFEDSGVGDVTGFLALDNTNKLIVLSFRGSRSIENWIVNLNFDLKEINDICSGCRGHDGFWSSWRSVADTLRQKVEDAVREHPDYRVVFTGHSLGGALATVAGADLRGNGYDIDVFSYGAPRVGNRAFAEFLTVQTGGTLYRITHTNDIVPRLPPREFGYSHSSPEYWIKSGTLVPVTRNDIVKIEGIDATGGNNQPNIPDIPAHLWYFGLIGTCL

SEQ ID NO: 4209 - protein, 291 aa, Thermomyces lanuginosus
MRSSLVLFFVSAWTALASPIRREVSQDLFNQFNLFAQYSAAAYCGKNNDAPAGTNITCTGNACPEVEKADATFLYSFEDAGVGDVTGFLALDNTNKLIVLSFRGDRSIENWIGNLNFDLKEINDICSGCRGHDGFTSSWRSVADTLRQKVEDAVREHPDYRVVFTGHSLGGALATVAGADLRGNGYDIDVFSYGAPRVGNRAFAEFLTVQTGGTLYRITHTNDIVPRLPPREFGYSHSSPEYWIKSGTLVPVTRNDIVKIEGIDATGGNNQPNIPDIPAHLWYFGLIGTCL

SEQ ID NO: 4210 - protein, 291 aa, Thermomyces lanuginosus
MRSSLVLFFVSAWTALASPIRREVSQDLFNQFNLFAQYSAAAYCGKNNDAPAGTNITCTGNACPEVEKADATFLYSFEDSGVGDVTGFLALDNTNKLIVLSFRGSRSIENWIGNLNFDLKEINDICSGCRGHDGFTSSWRSVADTLRQKVEDAVREHPDYRVVFTGHSLGGALATVAGADLRGNGYDIDVFSYGAPRVGNRAFAEFLTVQTGGTLYRITHTNDIVPRLPPREFGYSHSSPEYWIKSGTLVPVRRNDIVKIEGIDATGGNNQPNIPHIPAHLWYFGLIGTCL

SEQ ID NO: 4211 - protein, 291 aa, Thermomyces lanuginosus
MRSSLVLFFVSAWTALASPIRREVSQDLFNQFNLFAQYSAAAYCGKNNDAPAGTNITCTGNACPEVEKADATFLYSFEDSGVGDVTGFLALDNTNKLIVLSFRGSRSIENWIGNLNFDLKEINDICSGCRGHDGFTSSWRSVADTLRQKVEDAVREHPDYRVVFTGHSLGGALATVAGADLRGNGYDIDVFSYGAPRVGNRAFAEFLTVQTGGTLYRITHTNDIVPRLPPREFGYSHSSPEYWIKSGTLVPVRRNDIVKIEGIDATGGNNQPNIPLIPAHLWYFGLIGTCL

SEQ ID NO: 4212 - protein, 291 aa, Thermomyces lanuginosus
MRSSLVLFFVSAWTALASPIRREVSQDLFNQFNLFAQYSAAAYCGKNNDAPAGTNITCTGNACPEVEKADATFLYSFEDSGVGDVTGFLALDNTNKLIVLSFRGSRSIENWIADLNFDLKEINDICSGCRGHDGFTSSWRSVADTLRQKVEDAVREHPDYRVVFTGHSLGGALATVAGADLRGNGYDIDVFSYGAPRVGNRAFAEFLTVQTGGTLYRITHTNDIVPRLPPREFGYSHSSPEYWIKSGTLVPVTRNDIVKIEGIDATGGNNQPNIPDIPAHLWYFGLIGTCL

SEQ ID NO: 4213 - protein, 291 aa, Aspergillus niger
MRSSLVLFFVSAWTALASPIRREVSQDLFNQFNLFAQYSAAAYCGKNNDAPAGTNITCTGNACPEVEKADATFLYSFRDSGVGDVTGFLALDNTNKLIVLSFRGSRSIENWIGNLNFDLKEINDICSGCRGHDGFTSSWRSVADTLRQKVEDAVREHPDYRVVFTGHSLGGALATVAGADLRGNGYRIDVFSYGAPRVGNRAFAEFLTVQTGGTLYRITHTNDIVPRLPPREFGYSHSSPEYWIKSGTLVPVTRNDIVKIEGIDATGGNNQPNIPDIPAHLWYFGLIGTCL

SEQ ID NO: 4214 - protein, 291 aa, Thermomyces lanuginosus
MRSSLVLFFVSAWTALASPIRREVSQDLFNQFNLFAQYSAAAYCGKNNDAPAGTQITCTGNACPEVEKADATFLYSFEDSGVGDVTGFLALDNTNKLIVLSFRGSRSIENWIGNLNFDLKEINDICSGCRGHDGFTSSWRSVADTLRQKVEDAVREHPDYRVVFTGHSLGGALATVAGADLRGNGYDIDVFSYGAPRVGNRAFAEFLTVQTGGTLYRITHTNDIVPRLPPREFGYSHSSPEYWIKSGTLVPVTRNDIVKIEGIDATGGNNQPNIPYIPAHLWYFGLIGTCL

SEQ ID NO: 4215 - protein, 291 aa, Thermomyces lanuginosus
MRSSLVLFFVSAWTALASPIRREVSQDLFNQFNLFAQYSAAAYCGKNNDAPAGTNITCTGNACPEVEKADATFLYSFEDSGVGDVTGFLALDNTNKLIVLSFRGSRSIENWIGNLNFDLKEINDICSGCRGHDGFTSSWRSVADTLRQKVEDAVREHPDYRVVFTGHSLGGALATVAGADLRGNGYDIDVFSYGAPRVGNRAFAEFLTVQTGGTLYRITHTNDIVPRLPPAAFGYSHSSPEYWIKSGTLVPVTRNDIVKIEGIDATGGNNQPNIPDIPAHLWYFGLIGTCL

SEQ ID NO: 4216 - protein, 291 aa, Thermomyces lanuginosus
MRSSLVLFFVSAWTALASPIRREVSQDLFNQFNLFAQYSAAAYCGKNNDAPAGTNITCTGNACPEVEKADATFLYSFEDSGVGDVTGFLALDNTNKLIVLSFRGSRSIENWIGNLNFDLKEINDICSGCRGHDGFTSSWRSVADTLRQKVEDAVREHPDYRVVFTGHSLGGALATVAGADLRGNGYDIDVFSYGAPRVGNRAFAEFLTVQTGGTLYRITHTNDIVPRLPPREFGYSHPPPEYWIKSGTLVPVTRNDIVKIEGIDATGGNNQPNIPDIPAHLWYFGLIGTCL

SEQ ID NO: 4217 - protein, 291 aa, Synthetic construct
MRSSLVLFFVSAWTALASPIRREVSQDLFNQFNLFAQYSAAAYCGKNNDAPAGTNITCTGNACPEVEKADATFLYSFEDSGVGDVTGFLALDNTNKLIVLSFRGSRSIENWIGNLNFDLKEINDICSGCRGHDGFTSSWRSVADTLRQKVEDAVREHPDYRVVFTGHSLGGALATVAGADLRGNGYDIDVFSYGAPRVGNRAFAEFLTVQTGGTLYRITHTNDIVPRLPPREFGYSHSSPEYWIKSGTLVPVTRNDIVKIEGIDATGGNNQPNIPKIPAHIWYFGLIGTCL

SEQ ID NO: 4218 - protein, 291 aa, Thermomyces lanuginosus
MRSSLVLFFVSAWTALASPIRREVSQDLFNQFNLFAQYSAAAYCGKNNDAPAGTQITCTGNACPEVEKADATFLYSFEDSGVGDVTGFLALDNTNKLIVLSFRGSRSIENWIGNLNFDLKEINDICSGCRGHDGFTSSWRSVADTLRQKVEDAVREHPDYRVVFTGHSLGGALATVAGADLRGNGYDIDVFSYGAPRVGNRAFAEFLTVQTGGTLYRITHTNDIVPRLPPREFGYSHSSPEYWIKSGTLVPVTRNDIVKIEGIDATGGNNQPNIPTIPAHLWYFGLIGTCL

SEQ ID NO: 4219 - protein, 291 aa, Thermomyces lanuginosus
MRSSLVLFFVSAWTALASPIRREVSQDLFNQFNLFAQYSAAAYCGKNNDAPAGTNITCTGNACPEVEKADATFLYSFEDSGVGDVTGFLALDNTNKLIVLSFRGSRSIENWIGNLNFDLKEINDICSGCRGHDGFTSSWRSVADTLRQKVEDAVREHPDYRVVFTGHSLGGALATVAGADLRGNGYDIDVFSYGAPRVGNRAFAEFLTVQTGGTLYRITHTNDIVPRLPPREFGYSHSSPEYWIKSGTLVPVTRRDIVKIEGIDATGGNNQPNIPLIPAHLWYFGLIGTCL

SEQ ID NO: 4220 - protein, 291 aa, Thermomyces lanuginosus
MRSSLVLFFVSAWTALASPIRREVSQDLFNQFNLFAQYSAAAYCGKNNDAPAGTNITCTGNACPEVEKADATFLYSFEDSGVGDVTGFLALDNTNKLIVLSFRGSRSIENWIGNLNFDLKEINDICSGCRGHDGFTSSWRSVADTLRQKVEDAVREHPDYRVVFTGHSLGGALATVAGADLRGNGYDIDVFSYGAPRVGNRAFAEFLTVQTGGTLYRITHTNDIVPRLPPREFGYSHSSPEYWIKSGTLVPVRRNDIVKIEGIDATGGNNQPNIPNIPAHLWYFGLIGTCL

SEQ ID NO: 4221 - protein, 291 aa, Thermomyces lanuginosus
MRSSLVLFFVSAWTALASPIRREVSQDLFNQFNLFAQYSAAAYCGKNNDAPAGTNITCTGNACPEVEKADATFLYSFEDSGVGDVTGFLALDNTNKLIVLSFRGSRSIENWIGNLNFDLKEINDICSGCRGHDGFTSSWRSVADTLRQKVEDAVREHPDYRVVFTGHSLGGALATVAGADLRGNGYDIDVFSYGAPRVGNRAFAEFLTVQTGGTLYRITHTNDIVPRLPPREFGYSHSSPEYWIKSGTLVPVRRNDIVKIEGIDATGGNNQPNIPQIPAHLWYFGLIGTCL

SEQ ID NO: 4222 - protein, 291 aa, Thermomyces lanuginosus
MRSSLVLFFVSAWTALASPIRREVSQDLFNQFNLFAQYSAAAYCGKNNDAPAGTQITCTGNACPEVEKADATFLYSFEDSGVGDVTGFLALDNTNKLIVLSFRGSRSIENWIGNLNFDLKEINDICSGCRGHDGFTSSWRSVADTLRQKVEDAVREHPDYRVVFTGHSLGGALATVAGADLRGNGYDIDVFSYGAPRVGNRAFAEFLTVQTGGTLYRITHTNDIVPRLPPREFGYSHSSPEYWIKSGTLVPVTRNDIVKIEGIDATGGNNQPNIPSIPAHLWYFGLIGTCL

SEQ ID NO: 4223 - protein, 291 aa, Synthetic construct
MRSSLVLFFVSAWTALASPIRREVSQDLFNQFNLFAQYSAAAYCGKNNDAPAGTNITCTGNACPEVEKADATFLYSFEDSGVGDVTGFLALDNTNKLIVLSFRGSRSIENWIGNLNFLLKEINDICSGCRGHDGFTSSWRSVADTLRQKVEDAVREHPDYRVVFTGHSLGGALATVAGADLRGNGYDIDVFSYGAPRVGNRAFAEFLTVQTGGTLYRITHTNDIVPRSPPREFGYSHSSPEYWIKSGTLVPVTRNDIVKIEGIDATGGNNQPNIPDIPAHLWYFGLIGTCL

SEQ ID NO: 4224 - protein, 290 aa, Thermomyces lanuginosus
MRSSLVLFFVSAWTALASPIRREVSQDLFNQFNLFAQYSAAAYCGKNNDAPAGTNITCTGNACPEVEKADATFLYSFEDSGVGDVTGFLALDNTNKLIVLSFRGSRSIENWIGNLNFDLKEINDICSGCRGHDGFTSSWRSVADTLRQKVEDAVREHPDYRVVFTGHSLGGALATVAGADLRGNGYDIDVFSYGAPRVGNRAFAEFLTVQTGGTLYRITHTNDIVPRLPPREFGYSHSSPEYWIKSGTLVPVRRRDIVKIEGIDATGGNNQPNIPDIPAHLWYFGLIGTC

SEQ ID NO: 4225 - protein, 279 aa, Thermus thermophilus
TPIAVSPIRREVSQDLFNQFNLFAQYSAAAYCGKNNDAPAGTNITCTGNACPEVEKADATFLYSFEDSGVGDVTGFLALDNTNKLIVLSFRGSRSIENWIGNLNFDLKEINDICSGCRGHDGFTSSWRSVADTLRQKVEDAVREHPDYRVVFTGHSLGGALATVAGADLRGNGYDIDVFSYGAPRVGNRAFAEFLTVQTGGTLYRITHTNDIVPRLPPREFGYSHSSPEYWIKSGTLVPVTRNDIVKIEGIDATGGNNQPNIPDIPAHLWYFGLIGTCL

SEQ ID NO: 4226 - protein, 274 aa, Thermomyces lanuginosus; identical to SEQ ID NO: 20

SEQ ID NO: 4227 - protein, 274 aa, Thermomyces lanuginosus
SPIRREVSQDLFNQFNLFAQYSAAAYCGKNNDAPAGTNITCTGNACPEVEKADATFLYSFEDSGVGDVTGFLALDNTNKLIVLSFRGSRSIENWIGNLNFDLKEINDICSGCRGHDGFTSSWRSVADTLRQKVEDAVREHPDYRVVFTGHSLGGALATVAGADLRGNGYDIDVFSYGAPRVGNRAFAEFLTVQTGGTLYRITHTNDIVPRLPPREFGYSHSSPEYWIKSGTLVPVTRRDIVKIEGIDATGGNNQPNIPTIPAHLWYFGLIGTCL

SEQ ID NO: 4228 - protein, 274 aa, Thermomyces lanuginosus
SPIRREVSQDLFNQFNLFAQYSAAAYCGKNNDAPAGTNITCTGNACPEVEKADATFLYSFEDSGVGDVTGFLALDNTNKLIVLSFRGSRSIENWIGNLNFDLKEINDICSGCRGHDGFTSSWRSVADTLRQKVEDAVREHPDYRVVFTGHSLGGALATVAGADLRGNGYDIDVFSYGAPRVGNRAFAEFLTVQTGGTLYRITHTNDIVPRLPPREFGYSHSSPEYWIKSGTLVPVRRNDIVKIEGIDATGGNNQPNIPHIPAHLWYFGLIGTCL

SEQ ID NO: 4229 - protein, 274 aa, Thermomyces lanuginosus
SPIRREVSQDLFNQFNLFAQYSAAAYCGKNNDAPAGTNITCTGNACPEVEKADATFLYSFEDSGVGDVTGFLALDNTNKLIVLSFRGSRSIENWIGNLNFDLKEINDICSGCRGHDGFTSSWRSVADTLRQKVEDAVREHPDYRVVFTGHSLGGALATVAGADLRGNGYDIDVFSYGAPRVGNRAFAEFLTVQTGGTLYRITHTNDIVPRLPPRVFGYSHSSPEYWIKSGTLVPVRRRDIVKIEGIDATGGNNRPNIPDIPAHLWYFGLIGTCL

SEQ ID NO: 4230 - protein, 274 aa, Thermomyces lanuginosus
SPIRREVSQDLFNQFNLFAQYSAAAYCGKNNDAPAGTNITCTGNACPEVEKADATFLYSFEDSGVGDVTGFLALDNTNKLIVLSFRGSRSIENWIGNLNFDLKEINDICSGCRGHDGFTSSWRSVADTLRQKVEDAVREHPDYRVVFTGHSLGGALATVAGADLRGNGYDIDVFSYGAPRVGNRAFAEFLTVQTGGTLYRITHTNDIVPRLPPREFGYSHSSPEYWIKSGTLVPVRRNDIVKIEGIDATGGNNQPNIPQIPAHLWYFGLIGTCL

SEQ ID NO: 4231 - protein, 274 aa, Thermomyces lanuginosus
SPIRREVSQDLFNQFNLFAQYSAAAYCGKNNDAPAGTQITCTGNACPEVEKADATFLYSFEDSGVGDVTGFLALDNTNKLIVLSFRGSRSIENWIGNLNFDLKEINDICSGCRGHDGFTSSWRSVADTLRQKVEDAVREHPDYRVVFTGHSLGGALATVAGADLRGNGYDIDVFSYGAPRVGNRAFAEFLTVQTGGTLYRITHTNDIVPRLPPREFGYSHSSPEYWIKSGTLVPVRRRDIVKIEGIDATGGNNQPNIPYIPAHLWYFGLIGTCL

SEQ ID NO: 4232 - protein, 274 aa, Thermomyces lanuginosus
SPIRREVSQDLFNQFNLFAQYSAAAYCGKNNDAPAGTNITCTGNACPEVEKADATFLYSFEDSGVGDVTGFLALDNTNKLIVLSFRGSRSIENWIGNLNFDLKEINDICSGCRGHDGFTSSWRSVADTLRQKVEDAVREHPDYRVVFTGHSLGGALATVAGADLRGNGYDIDVFSYGAPRVGNRAFAEFLTVQTGGTLYRITHTNDIVPRLPPREFGYSHSSPEYWIKSGTLVPVRRNDIVKIEGIDATGGNNQPNIPTIPAHLWYFGLIGTCL

SEQ ID NO: 4233 - protein, 274 aa, Thermomyces lanuginosus
SPIRREVSQDLFNQFNLFAQYSAAAYCGKNNDAPAGTNITCTGNACPEVEKADATFLYSFEDSGVGDVTGFLALDNTNKLIVLSFRGSRSIENWIGNLNFDLKEINDICSGCRGHDGFTSSWRSVADTLRQKVEDAVREHPDYRVVFTGHSLGGALATVAGADLRGNGYDIDVFSYGAPRVGNRAFAEFLTVQTGGTLYRITHTNDIVPRLPPREFGYSHSSPEYWIKSGTLVPVRRNDIVKIEGIDATGGNNQPNIPLIPAHLWYFGLIGTCL

SEQ ID NO: 4234 - protein, 274 aa, Thermomyces lanuginosus
SPIRREVSQDLFNQFNLFAQYSAAAYCGKNNDAPAGTNITCTGNACPEVEKADATFLYSFEDSGVGDVTGFLALDNTNKLIVLSFRGSRSIENWIGNLNFDLKEINDICSGCRGHDGFTSSWRSVADTLRQKVEDAVREHPDYRVVFTGHSLGGALATVAGADLRGNGYDIDVFSYGAPRVGNRAFAEFLTVQTGGTLYRITHTNDIVPRLPPREFGYSHSSPEYWIKSGTLVPVRRNDIVKIEGIDATGGNNQPNIPYIPAHLWYFGLIGTCL

SEQ ID NO: 4235 - protein, 274 aa, Thermomyces lanuginosus
SPIRREVSQDLFNQFNLFAQYSAAAYCGKNNDAPAGTQITCTGNACPEVEKADATFLYSFEDSGVGDVTGFLALDNTNKLIVLSFRGSRSIENWIGNLNFDLKEINDICSGCRGHDGFTSSWRSVADTLRQKVEDAVREHPDYRVVFTGHSLGGALATVAGADLRGNGYDIDVFSYGAPRVGNRAFAEFLTVQTGGTLYRITHTNDIVPRLPPREFGYSHSSPEYWIKSGTLVPVRRRDIVKIEGIDATGGNNQPNIPLIPAHLWYFGLIGTCL

SEQ ID NO: 4236 - protein, 274 aa, Thermomyces lanuginosus
SPIRREVSQDLFNQFNLFAQYSAAAYCGKNNDAPAGTQITCTGNACPEVEKADATFLYSFEDSGVGDVTGFLALDNTNKLIVLSFRGSRSIENWIGNLNFDLKEINDICSGCRGHDGFTSSWRSVADTLRQKVEDAVREHPDYRVVFTGHSLGGALATVAGADLRGNGYDIDVFSYGAPRVGNRAFAEFLTVQTGGTLYRITHTNDIVPRLPPREFGYSHSSPEYWIKSGTLVPVRRRDIVKIEGIDATGGNNQPNIPQIPAHLWYFGLIGTCL

SEQ ID NO: 4237 - protein, 274 aa, Thermomyces lanuginosus
SPIRREVSQDLFNQFNLFAQYSAAAYCGKNNDAPAGTNITCTGNACPEVEKADATFLYSFEDSGVGDVTGFLALDNTNKLIVLSFRGSRSIENWILNLNFDLKEINDICSGCRGHDGFTSSWRSVADTLRQKVEDAVREHPDYRVVFTGHSLGGALATVAGADLRGNGYDIDVFSYGAPRVGNRAFAEFLTVQTGGTLYRITHTNDIVPRLPPRQFGYSHSSPEYWIKSGTLVPVRRRDIVKIEGIDATGGNNQPNIPDIPAHLWYFGLIGTCL

SEQ ID NO: 4238 - protein, 274 aa, Thermomyces lanuginosus
SPIRREVSQDLFNQFNLFAQYSAAAYCGKNNDAPAGTNITCTGNACPEVEKADATFLYSFEDGGGGDVTGFLALDNTNKLIVLSFRGSRSIENWIGNLNFDLKEINDICSGCRGHDGFTSSWRSVADTLRQKVEDAVREHPDYRVVFTGHSLGGALATVAGADLRGNGYDIDVFSYGAPRVGNRAFAEFLTVQTGGTLYRITHTNDIVPRLPPREFGYSHSSPEYWIKSGTLVPVRRRDIVKIEGIDATGGNNQPNIPDIPAHLWYFGLIGTCL

SEQ ID NO: 4239 - protein, 274 aa, Thermomyces lanuginosus
SPIRREVSQDLFNQFNLFAQYSAAAYCGKNNDAPAGTNITCTGNACPEVEKADATFLYSFEDSGVGDVTGFLALDNTNKLIVLSFRGSRSIENWIANLNFGLKEINDICSGCRGHDGFTSSWRSVADTLRQKVEDAVREHPDYRVVFTGHSLGGALATVAGADLRGNGYDIDVFSYGAPRVGNRAFAEFLTVQTGGTLYRITHTNDIVPRLPPREFGYSHSSPEYWIKSGTLVPVRRRDIVKIEGIDATGGNNQPNIPDIPAHLWYFGLIGTCL

SEQ ID NO: 4240 - protein, 274 aa, Thermomyces lanuginosus
SPIRREVSQDLFNQFNLFAQYSAAAYCGKNNDAPAGTNITCTGNACPEVEKADATFLYSFEDSGVGDVTGFLALDNTNKLIVLSFRGSRSIENWIGNLNFDLKEINDICSGCRGHDGFTSSWRSVADTLRQKVEDAVREHPDYRVVFTGHSLGGALATVAGADLRGNGYDIDVFSYGAPRVGNRAFAEFLTVQTGGTLYRITHTNDIVPRLPPREFGYSHSSPEYWIKSGTLVPVTRRDIVKIEGIDATGGNNQPNIPHIPAHLWYFGLIGTCL

SEQ ID NO: 4241 - protein, 274 aa, Thermomyces lanuginosus
SPIRREVSQDLFNQFNLFAQYSAAAYCGKNNDAPAGTQITCTGNACPEVEKADATFLYSFEDSGVGDVTGFLALDNTNKLIVLSFRGSRSIENWIGNLNFDLKEINDICSGCRGHDGFTSSWRSVADTLRQKVEDAVREHPDYRVVFTGHSLGGALATVAGADLRGNGYDIDVFSYGAPRVGNRAFAEFLTVQTGGTLYRITHTNDIVPRLPPREFGYSHSSPEYWIKSGTLVPVRRRDIVKIEGIDATGGNNQPNIPSIPAHLWYFGLIGTCL

SEQ ID NO: 4242 - protein, 274 aa, Thermomyces lanuginosus
SPIRREVSQDLFNQFNLFAQYSAAAYCGKNNDAPAGTQITCTGNACPEVEKADATFLYSFEDSGVGDVTGFLALDNTNKLIVLSFRGSRSIENWIGNLNFDLKEINDICSGCRGHDGFTSSWRSVADTLRQKVEDAVREHPDYRVVFTGHSLGGALATVAGADLRGNGYDIDVFSYGAPRVGNRAFAEFLTVQTGGTLYRITHTNDIVPRLPPREFGYSHSSPEYWIKSGTLVPVRRRDIVKIEGIDATGGNNQPNIPHIPAHLWYFGLIGTCL

SEQ ID NO: 4243 - protein, 274 aa, Thermomyces lanuginosus
SPIRREVSQDLFNQFNLFAQYSAAAYCGKNNDAPAGTNITCTGNACPEVEKADATFLYSFEDSGVGDVTGFLALDNTNKLIVLSFRGSRSIENWIGNLNFDLKEINDICSGCRGHDGFTSSWRSVADTLRQKVEDAVREHPDYRVVFTGHSLGGALATVAGADLRGNGYDIDVFSYGAPRVGNRAFAEFLTVQTGGTLYRITHTNDIVPRLPPREFGYSHSSPEYWIKSGTGVPVRRRDIVKIEGIDATGGNNQPNIPDIKAHLWYFGLIGTCL

SEQ ID NO: 4244 - protein, 274 aa, Thermomyces lanuginosus
SPIRREVSQDLFNQFNLFAQYSAAAYCGKNNDAPAGTQITCTGNACPEVEKADATFLYSFEDSGVGDVTGFLALDNTNKLIVLSFRGSRSIENWIGNLNFDLKEINDICSGCRGHDGFTSSWRSVADTLRQKVEDAVREHPDYRVVFTGHSLGGALATVAGADLRGNGYDIDVFSYGAPRVGNRAFAEFLTVQTGGTLYRITHTNDIVPRLPPREFGYSHSSPEYWIKSGTLVPVRRRDIVKIEGIDATGGNNQPNIPTIPAHLWYFGLIGTCL

SEQ ID NO: 4245 - protein, 274 aa, Thermomyces lanuginosus
SPIRREVSQDLFNQFNLFAQYSAAAYCGKNNDAPAGTQITCTGNACPEVEKADATFLYSFEDSGVGDVTGFLALDNTNKLIVLSFRGSRSIENWIGNLNFDLKEINDICSGCRGHDGFTSSWRSVADTLRQKVEDAVREHPDYRVVFTGHSLGGALATVAGADLRGNGYDIDVFSYGAPRVGNRAFAEFLTVQTGGTLYRITHTNDIVPRLPPREFGYSHSSPEYWIKSGTLVPVRRRDIVKIEGIDATGGNNQPNIPNIPAHLWYFGLIGTCL

SEQ ID NO: 4246 - protein, 274 aa, Thermomyces lanuginosus
SPIRREVSQDLFNQFNLFAQYSAAAYCGKNNNAPAGTNITCTGNACPEVEKADATFLYSFEDSGVGDVTGFLALDNTNKLIVLSFRGSRSIENWIGNLNFGLKEINDICSGCRGHDGFTSSWRSVADTLRQKVEDAVREHPDYRVVFTGHSLGGALATVAGADLRGNGYDIDVFSYGAPRVGNRAFAEFLTVQTGGTLYRITHTNDIVPRLPPREFGYSHSSPEYWIKSGTLVPVRRRDIVKIEGIDATGGNNQPNIPDIPAHLWYFGLIGTCL

SEQ ID NO: 4247 - protein, 274 aa, Thermomyces lanuginosus
SPIRREVSQDLFNQFNLFAQYSAAAYCGKNNDAPAGTNITCTGNACPEVEKADATFLYSFEDSGKGDVTGFLALDNTNKLIVLSFRGTRSIENWIGNLNFDLKEINDICSGCRGHDGFTSSWRSVADTLRQKVEDAVREHPDYRVVFTGHSLGGALATVAGADLRGNGYDIDVFSYGAPRVGNRAFAEFLTVQTGGTLYRITHTNDIVPRLPPREFGYSHSSPEYWIKSGTLVPVRRRDIVKIEGIDATGGNNQPNIPDIPAHLWYFGLIGTCL

SEQ ID NO: 4248 - protein, 274 aa, Thermomyces lanuginosus
SPIRREVSQDLFNQFNLFAQYSAAAYCGKNNDAPAGTNITCTGNACPEVEKADATFLYSFEDNGVGGVTGFLALDNTNKLIVLSFRGSRSIENWIGNLNFDLKEINDICSGCRGHDGFTSSWRSVADTLRQKVEDAVREHPDYRVVFTGHSLGGALATVAGADLRGNGYDIDVFSYGAPRVGNRAFAEFLTVQTGGTLYRITHTNDIVPRLPPREFGYSHSSPEYWIKSGTLVPVRRRDIVKIEGIDATGGNNQPNIPDIPAHLWYFGLIGTCL

SEQ ID NO: 4249 - protein, 274 aa, Thermomyces lanuginosus
SPIRREVSQDLFNQFNLFAQYSAAAYCGKNNDAPAGTNITCTGNACPEVEKADATFLYSFEDSGVGDVTGFLALDNTNKLIVLSFRGSRSIENWIGNLNFDLKEINDICSGCRGHDGFTSSWRSVADTLRQKVEDAVREHPDYRVVFTGHSLGGALATVAGADLRGNGYDIDVFSYGAPRVGNRAFAEFLTVQTGGTLYRITHTNDLVPRLPPREFGYSHSSPEYWIKSGTLVPVRRRDIVKIEGIDATGGNNQPNIPDAPAHLWYFGLIGTCL

SEQ ID NO: 4250 - protein, 274 aa, Thermomyces lanuginosus
SPIRREVSQDLFNQFNLFAQYSAAAYCGKNNDAPAGTNITCTGNACPEVEKADATFLYSFEDSGVGDVTGFLALDNTNKLIVLSFRGSRSIENWIGNLNFDLKEINDICSGCRGHDGFTSSWRSVADTLRQKVEDAVREHPDYRVVFTGHSLGGALATVAGADLRGNGYDIDVFSYGAPRVGNRAFAEFLTVQTGGTLYRITHTNDIVPRLPPREFGYSHSSPEYWIKSGTLVPVTRRDIVKIEGIDATGGNNQPNIPQIPAHLWYFGLIGTCL

SEQ ID NO: 4251 - protein, 274 aa, Thermomyces lanuginosus
SPIRREVSQDLFNQFNLFAQYSAAAYCGKNNDAPAGTNITCTGNACPEVEKADATFLYSFEDSGVGDVTGFLALDNTNKLIVLSFRGSRSIENWIGNLNFDLKEINDICSGCRGHDGFTSSWRSVADTLRQKVEDAVREHPDYRVVFTGHSLGGALATVAGADLRGNGYDIDVFSYGAPRVGNRAFAEFLTVQTGGTLYRITHTNDIVPRLPPREFGYSHSSPEYWIKSGTLVPVTRRDIVKIEGIDATGGNNQPNIPLIPAHLWYFGLIGTCL

SEQ ID NO: 4252 - protein, 274 aa, Thermomyces lanuginosus
SPIRREVSQDLFNQFNLFAQYSAAAYCGKNNRAPAGTNITCTGNACPEVEKADATFLYSFEDSGVGDVTGFLALDNTNKLIVLSFRGSRSIENWIGNLNFDLKEINDICSGCRGHDGFTSSWRSVADTLRQKVEDAVREHPDYRVVFTGHSLGGALATVAGADLRGNGYDIDVFSYGAPRVGNRAFAEFLTVQTGGTLYRITHTNDIVPRLPPREFGYSHSSPEYWIKSGTGVPVRRRDIVKIEGIDATGGNNQPNIPDIPAHLWYFGLIGTCL

SEQ ID NO: 4253 - protein, 274 aa, Thermomyces lanuginosus
SPIRREVSQDLFNQFNLFAQYSAAAYCGKNNDAPAGTNITCTGNACPEVEKADATFLYSFEDSGVGDVTGFLALDNTNKLIVLSFRGSRSIENWIGNLNFDLKEINDICSGCRGHDGFTSSWRSVADTLRQKVEDAVREHPDYRVVFTGHSLGGALATVAGADLRGNGYDIDVFSYGAPRVGNRAFAEFLTVQTGGTLYRITHTNDIVPRLPPREFGYSHSSPEYWIKSGTLVPVTRRDIVKIEGIDATGGNNQPNIPNIPAHLWYFGLIGTCL

SEQ ID NO: 4254 - protein, 274 aa, Thermomyces lanuginosus
SPIRREVSQDLFNQFNLFAQYSAAAYCGKNNDAPAGTNITCTGNACPEVEKADATFLYSFEDSGVGDVTGFLALDNTNKLIVLSFRGSRSIENWIGNLNFDLKEINDICSGCRGHDGFTSSWRSVADTLRQKVEDAVREHPDYRVVFTGHSLGGALATVAGADLRGNGYDIDVFSYGAPRVGNRAFAEFLTVQTGGTLYRITHTNDIVPRLPPREFGYSHSSPEYWIKSGTLVPVRRNDIVKIEGIDATGGNNQPNIPNIPAHLWYFGLIGTCL

SEQ ID NO: 4255 - protein, 274 aa, Thermomyces lanuginosus
SPIRREVSQDLFNQFNLFAQYSAAAYCGKNNDAPAGTNITCTGNACPEVEKADATFLYSFEDSGVGDVTGFLALDNTNKLIVLSFRGSRSIENWIGNLNFDLKEINDICSGCRGHDGFTSSWRSVADTLRQKVEDAVREHPDYRVVFTGHSLGGALATVAGADLRGNGYDIDVFSYGAPRVGNRAFAEFLTVQTGGTLYRITHTNDIVPRLPPREFGYSHSSPEYWIKSGTLVPVTRRDIVKIEGIDATGGNNQPNIPYIPAHLWYFGLIGTCL

SEQ ID NO: 4256 - protein, 274 aa, Thermomyces lanuginosus
SPIRREVSQDLFNQFNLFAQYSAAAYCGKNNDAPAGTNITCTGNACPEVEKADATFLYSFEDSGVGDVTGFLALDNTNKLIVLSFRGSRSIENWVGNLNFDLKEINDICSGCRGHDGFTSSWRSVADTLRQKVEDAVREHPDYRVVFTGHSLGGALATVAGADLRGNGYDIDVFSYGAPRVGNRAFAEFLTVQTGGTLYRITHTNDIVPRLPPREFGYSHSSPEYWIKSGTLVPVRRRDIVKIEGIDATGGNNQPNIPDVPAHLWYFGLIGTCL

SEQ ID NO: 4257 - protein, 274 aa, Thermomyces lanuginosus
SPIRREVSQDLFNQFNLFAQYSAAAYCGKNNDAPAGTNITCTGNACPEVEKADATFLYSFEDSGVGDVTGFLALDNTNKLIVLSFRGSRSIENWIGNLNFDLKEINDICSGCRGHDGFTSSWRSVADTLRQKVEDAVREHPDYRVVFTGHSLGGALATVAGADLRGNGYDIDVFSYGAPRVGNRAFAEFLTVQTGGTLYRITHTNDIVPRLPPREFGYSHSSPEYWIKSGTLVPVTRRDIVKIEGIDATGGNNQPNIPSIPAHLWYFGLIGTCL

SEQ ID NO: 4258 - protein, 274 aa, Thermomyces lanuginosus
SPIRREVSQDLFNQFNLFAQYSAAAYCGKNNDAPAGTNITCTGNACPEVEKADATFLYSFEDSGVGDVTGFLALDNTNKLIVLSFRGSRSIENWIGNLNFDLKEINDICSGCRGHDGFTSSWRSVADTLRQKVEDAVREHPDYRVVFTGHSLGGALATVAGADLRGNGYDIDVFSYGAPRVGNRALAEFLTVQTGGTLYRITHTNDIVPRLPPRVFGYSHSSPEYWIKSGTLVPVRRRDIVKIEGIDATGGNNQPNIPDIPAHLWYFGLIGTCL

SEQ ID NO: 4259 - protein, 274 aa, Thermomyces lanuginosus
SPIRREVSQDLFNQFNLFAQYSAAAYCGKNNDAPAGTNITCTGNACPEVEKADATFLYSFEDSGKGDVTGFLALDNTNKLIVLSFRGSRSIENWIGNLNFDLKEINDICSGCRGHDGFTSSWRSVADTLRQKVEDAVREHPDYRVVFTGHSLGGGLATVAGADLRGNGYDIDVFSYGAPRVGNRAFAEFLTVQTGGTLYRITHTNDIVPRLPPREFGYSHSSPEYWIKSGTLVPVRRRDIVKIEGIDATGGNNQPNIPDIPAHLWYFGLIGTCL

SEQ ID NO: 4260 - protein, 274 aa, Thermomyces lanuginosus
SPIRREVSQDLFNQFNLFAQYSAAAYCGKNNDAPAGTNITCTGNACPEVEKADATFLYSFEDSGVGDVTGFLALDNTNKLIVLSFRGSRSIENWIGNLNFDLKEINDICSGCRGHDGFTSSWRSVADTLRQKVEDAVREHPDYRVVFTGHSLGGALATVAGADLRGNGYDIDVFSYGAPRVGNRAFAEFLTVQTGGTLYRITHTNDIVPRLPPREFGYSHSSPEYWIKSGTLVPVRRIGIVKIEGIDATGGNNQPNIPDIPAHLWYFGLIGTCL

SEQ ID NO: 4261 - protein, 274 aa, Thermomyces lanuginosus
SPIRREVSQDLFNQFNLFAQYSAAAYCGKNNDAPAGTNITCTGNACPEVEKADATFLYSFEDSGVGDVTGFLALDNTNKLIVLSFRGSRSIENWIGNLNFDLKEINDICSGCRGHDGFTSSWRSVADTLRQKVEDAVREHPDYRVVFTGHSLGGALATVAGADLRGNGYDIDVFSYGAPRVGNRAFAEFLTVQTGGTLYRITHTNDIVPRLPPREFGYSHSSPEYWIKSGTLVPVRRNDIVKIEGIDATGGNNQPNIPSIPAHLWYFGLIGTCL

SEQ ID NO: 4262 - protein, 274 aa, Thermomyces lanuginosus
SPIRREVSQDLFNQFNLFAQYSAAAYCGKNNDAPAGTNITCTGNACPEVEKADATFLYSFEDSGVGDVTGFLALDNTNKLIVLSFRGSRSIENWIGNLNFKLKEINDICSGCRGHDGFTSSWRSVADTLRQKVEDAVREHPDYRVVFTGHSLGGALATVAGADLRGNGYDIDVFSYGAPRVGNRAFAEFLTVQTGGTLYRITHTNDIVPRLPPREFGYRHSSPEYWIKSGTLVPVTRNDIVKIEGIDATGGNNQPNIPDIPAHLWYFGLIGTCL

SEQ ID NO: 4263 - protein, 273 aa, Thermomyces lanuginosus
SPIRREVSQDLFNQFNLFAQYSAAAYCGKNNDAPAGTNITCTGNACPEVEKADATFLYSFEDAGVGDVTGFLALDNTNKLIVLSFRGSRSIENWIGNLNFDLKEINDICSGCRGHDGFTSSWRSVADTLRQKVEDAVREHPDYRVVFTGHSLGGALATVAGADLRGNGYDIDVFSYGAPRVGNRAFAEFLTVQTGGTLYRITHTNDIVPRLPRREFGYSHSSPEYWIKSGTLVPVTRNDIVKIEGIDATGGNNQPNIPDIPAHLWYFGLIGTC

SEQ ID NO: 4264 - protein, 273 aa, Thermomyces lanuginosus
SPIRREVSQDLFNQFNLFAQYSAAAYCGKNNDAPAGTNITCTGNACPEVEKADATFLYSFEDSGVGDVTGFLALDNTNKLIVLSFRGSRSIENWIGNLNFDLKEINDICSGCRGHDGFTSSWRSVADTLRQKVEDAVREHPDYRVVFTGHSLGGALATVAGADLRGNGYDIDVFSYGAPRVGNRAFAEFLTVQTGGTLYRITHTNDIVPRLPPREFGYSHSSPEYWIKSGTLVVTRNDIVKIEGIDATGGNNQPNIPDIPAHLWYFGLIGTCL

SEQ ID NO: 4265 - protein, 273 aa, Thermomyces lanuginosus
SPIRREVSQDLFNQFNLFAQYSAAAYCGKNNDAPAGTNITCTGNACPEVEKADATFLYSFEDSGVGDVTGFLALDNTNKLIVLSFRGSRSIENWIGNLNFDLKEINDICSGCRGHDGFTSSWRSVADTLRQKVEDAVREHPDYRVVFTGHSLGGALATVAGADLRGNGYDIDVFSYGAPRVGNRAFAEFLTVQTGGTLYRITHTNDIVPRLPPREFGYSHSSPEYWIKSGTLVPVTRNDIVKIEGIDATGGNNQPNIPDIPAHLWYFGLIGTC

SEQ ID NO: 4266 - protein, 272 aa, Thermomyces lanuginosus
SPIRREVSQDLFNQFNLFAQYSAAAYCGKNNDAPAGTNITCTGNACPEVEKADATFLYSFEDSGVGDVTGFLALDNTNKLIVLSFRGSRSIENWIGNLNFDLKEINDICSGCRGHDGFTSSWRSVADTLRQKVEDAVREHPDYRVVFTGHSLGGALATVAGADLRGNGYDIDVFSYGAPRVGNRAFAEFLTVQTGGTLYRITHTNDIVPRLPPFGYSHSSPEYWIKSGTLVPVTRNDIVKIEGIDATGGNNQPNIPDIPAHLWYFGLIGTCL

SEQ ID NO: 4267 - protein, 272 aa, Thermomyces lanuginosus
SPIRREVSQDLFNQFNLFAQYSAAAYCGKNNDAPAGTNITCTGNACPEVEKADATFLYSFEDSGVGDVTGFLALDNTNKLIVLSFRGSRSIENWIGNLNFDLKEINDICSGCRGHDGFTSSWRSVADTLRQKVEDAVREHPDYRVVFTGHSLGGALATVAGADLRGNGYDIDVFSYGAPRVGNRAFAEFLTVQTGGTLYRITHTNDIVPRLPPREGSHSSPEYWIKSGTLVPVTRNDIVKIEGIDATGGNNQPNIPDIPAHLWYFGLIGTCL

SEQ ID NO: 4268 - protein, 271 aa, Thermomyces lanuginosus
SPIRREVSQDLFNQFNLFAQYSAAAYCGKNNDAPAGTNITCTGNACPEVEKADATFLYSFEDSGVGDVTGFLALDNTNKLIVLSFRGSRSIENWIGNLNFDLKEINDICSGCRGHDGFTSSWRSVADTLRQKVEDAVREHPDYRVVFTGHSLGGALATVAGADLRGNGYDIDVFSYGAPRVGNRAFAEFLTVQTGGTLYRITHTNDIVPRLPPREFGYSHSSPEYWIKSGTLVPVTRNDIVKIGATGGNNQPNIPDIPAHLWYFGLIGTCL

SEQ ID NO: 4269 - protein, 269 aa, Thermomyces lanuginosus
EVSQDLFNQFNLFAQYSAAAYCGKNNDAPAGTNITCTGNACPEVEKADATFLYSFEDSGVGAVTGFLALDNTNKLIVLSFRGSRSIENWIGNLNFDLKEINDICSGCRGHDGFTSSWRSVADTLRQKVEDAVREHPDYRVVFTGHSLGGALATVAGADLRGNGYDIDVFSYGAPRVGNRAFAEFLTVQTGGTLYRITHTNDIVPRLPPREFGYSHSSPEYWIKSGTLVPVTRNDIVKIEGIDATGGNNQPNIPDIPAHLWYFGLISTCL

SEQ ID NO: 4270 - protein, 269 aa, Thermomyces lanuginosus
EVSQDLFNQFNLFAQYSAAAYCGKNNDAPAGTNITCTGNACPEVEKADATFLYSFEDSGVGDVTGFLALDNTNKLIVLSFRGSRSIENWIGNLNFDLKEINDICSGCRGHDGFTSSWRSVADTLRQKVEAAVREHPDYRVVFTGHSLGGALATVAGADLRGNGYDIDVFSYGAPRVGNRAFAEFLTVQTGGTLYRITHTNDIVPRLPPREFGYSHSSPEYWIKSGTLVPVTRNDIVKIEGIDATGGNNQPNIPDIPAHLWYFGRIGTCL

SEQ ID NO: 4271 - protein, 269 aa, Thermomyces lanuginosus
EVSQDLFNQFNLFAQYSAAAYCGKNNDAPAGTNITCTGNACPEVEKADATFLYSFEDSGVGDVTGFLALDNTNKLIVLSFRGSRSIENWIGNLNFSLKEINDICSGCRGHDGFTSSWRSVADTLRQKVEDAVREHPDYRVVFTGHSLGGALATVAGADLRGNGYDIDVFSYGAPRVGNRAFAEFLTVQTGGTLYRITHTNDIVPRLPPREFGYSHSSPEYWIKSGTLVPVTRNDIVKIEGIDATGGNNQPNIPDIPAHLWYFGLISTCL

SEQ ID NO: 4272 - protein, 269 aa, Thermomyces lanuginosus
EVSQDLFNQFNLFAQYSAAAYCGKNNDAPAGTNITCTGNACPEVEKADATFLYSFEDSGVGDVTGFLALDNTNKLIVLSFRGSRSIENWIGNLNFDLKEINDICSGCRGHDGFTSSWRSVADTLRQKVEDAVREHPDYRVVFTGHSLGGALATVAGADLRGNGYDIDVFSYGAPRVGNRAFAEFLTVQTGGTLYRITHRRDIVPRLPPREFGYSHSSPEYWIKSGTLVPVTRNDIVKIEGIDATGGNNQPNIPDIPAHLWYFGLIGTCL

SEQ ID NO: 4273 - protein, 269 aa, Thermomyces lanuginosus
EVSQDLFNQFNLFAQYSAAAYCGKNNDAPAGTNITCTRRACPEVEKADATFLYSFEDSGVGDVTGFLALDNTNKLIVLSFRGSRSIENWIGNLNFDLKEINDICSGCRGHDGFTSSWRSVADTLRQKVEDAVREHPDYRVVFTGHSLGGALATVAGADLRGNGYDIDVFSYGAPRVGNRAFAEFLTVQTGGTLYRITHTNDIVPRLPPREFGYSHSSPEYWIKSGTLVPVTRNDIVKIEGIDATGGNNQPNIPDIPAHLWYFGLIGTCL

SEQ ID NO: 4274 - protein, 269 aa, Thermomyces lanuginosus
EVSQDLFNQFNLFAQYSAAAYCGKNNDAPAGTNITCTGKACPEVEKADATFLYSFEDSGVGDVTGFLALDNTNKLIVLSFRGSRSIENWIGNLNFDLKEINDICSGCRGHDGFTSSWRSVADTLRQKVEDAVREHPDYRVVFTGHSLGGALATVAGADLRGNGYDIDVFSYGAPRVGNRAFAEFLTVQTGGTLYRITHTNDIVPRLPPREFGYSHSSPEYWIKSGTLVRVTRNDIVKIEGIDATGGNNQPNIPDIPAHLWYFGLIGTCL

SEQ ID NO: 4275 - protein, 269 aa, Thermomyces lanuginosus
EVSQDLFNQFNLFAQYSAAAYCGKNNDAPAGTNITCTGNACPEVEKADATFLYSFEDSGVGDVTGFLALDNTNKLIVLSFRGSRSIENWIGNLNFDLKEINDICSGCRGHDGFTSSWRSVADTLRQKVEDAVREHPDYRVVFTGHSLGGALATVAGADLRGNGYDIDVFSYGAPRVGNRAFAEFLTVQTGGTLYRITHTNDIVPRLPPREFGYSHSSPEYWIKSGTLVPVTRNDIVKIEGIDATRGNNRPNIPDIPAHLWYFGLIGTCL

SEQ ID NO: 4276 - protein, 269 aa, Thermomyces lanuginosus
EVSQDLFNQFNLFAQYSAAAYCGKNNDAPAGTNITCTGNACPEVEKADATFLYSFEDSGVGDVTGFLALDNTNKLIVLSFRGSRSIENWIGNLNFDLKEINDICSGCRGHDGFTSSWRSVADTLRQKVEDAVREHPDYRVVFTGHSLGGALATVAGADLRGNGYDIDVFSYGAPRVGNRAFAEFLTVQTGGTLYRITHTNDIVPRLPPREFGYSHSSPEYWIKSGTLVPVTRNDIVKIEGIDATGGNNQPNIPDIPAHLWYFALIATCL

SEQ ID NO: 4277 - protein, 269 aa, Thermomyces lanuginosus
EVSQDLFNQFNLFAQYSAAAYCGKNNDAPAGTNITCTGNACPEVEKADATFLYSFEDSGVGDVTGFLALDNTNKLIVLSFRGSRSIENWIGNLNFDLKRINDICSGCRGHDGFTSSWRSVADTLRQKVEDAVREHPDYRVVFTGHSLGGALATVAGADLRGNGYDIDVFSYGAPRVGNRAFAEFLTVQTGGTLYRITHTNDIVPRLPPREFGYSHSSPEYWIKSGTLVPVTRNDIVKIEGIDATGGNNHPNIPDIPAHLWYFGLIGTCL

SEQ ID NO: 4278 - protein, 269 aa, Thermomyces lanuginosus
EVSQDLFNQFNLFAQYSAAAYCGKNNDAPAGTNITCTGNACPEVEKADATFLYSFEDSGVGDVTGFLALDNTRKDIVLSFRGSRSIENWIGNLNFDLKEINDICSGCRGHDGFTSSWRSVADTLRQKVEDAVREHPDYRVVFTGHSLGGALATVAGADLRGNGYDIDVFSYGAPRVGNRAFAEFLTVQTGGTLYRITHTNDIVPRLPPREFGYSHSSPEYWIKSGTLVPVTRNDIVKIEGIDATGGNNQPNIPDIPAHLWYFGLIGTCL

SEQ ID NO: 4279 - protein, 269 aa, Thermomyces lanuginosus
EVSQDLFNQFNLFAQYSAAAYCGKNNDAPAGTNITCTGNACPEVEKADATFLYSFEDSGVGDVTGFLALDNTNKLIVLSFRGSRSIENWIGNLNFDLKEINDICSGCRGHDGFTSSWRSVADTLRQKVEDAVREHPDYRVVFTGHSLGGALATVAGADLRGNGYDIDVFSYGAPRVGNRAFAEFLTVQTGGTLYRITHTNDIVPRLPPREFGYSHSSPEYWIKSGTLVPVTRRDIVKIEGIDATGGNNRPNIPDIPAHLWYFGLIGTCL

SEQ ID NO: 4280 - protein, 269 aa, Thermomyces lanuginosus
EVSRDLFRQFNLFAQYSAAAYCGKNNDAPAGTNITCTGNACPEVEKADATFLYSFEDSGVGDVTGFLALDNTNKLIVLSFRGSRSIENWIGNLNFDLKEINDICSGCRGHDGFTSSWRSVADTLRQKVEDAVREHPDYRVVFTGHSLGGALATVAGADLRGNGYDIDVFSYGAPRVGNRAFAEFLTVQTGGTLYRITHTNDIVPRLPPREFGYSHSSPEYWIKSGTLVPVTRNDIVKIEGIDATGGNNQPNIPDIPAHLWYFGLIGTCL

SEQ ID NO: 4281 - protein, 269 aa, Thermomyces lanuginosus
EVSQDLFNQFNLFAQYSAAAYCGKNNDAPAGTNITCTGNACPEVEKADATFLYSFEDSGVGDVTGFLALDNTNKLIVLSFRGSRSIENWIGNLNFDLKEINDICSGCRGHDGFTSSWRSVADTLRQKVEDAVREHPDYRVVFTGHSLGGALATVAGADLRGNGYDIDVFSYGAPRVGNRAFAEFLTVQTGGTLYRITHTNDIVPRLPPREFGYSHSSPEYWIKSRRLVPVTRNDIVKIEGIDATGGNNQPNIPDIPAHLWYFGLIGTCL

SEQ ID NO: 4282 - protein, 269 aa, Thermomyces lanuginosus
EVSQDLFNQFNLFAQYSAAAYCGKNNDAPAGTNITCTGNACPEVEKADATFLYSFEDSGVGDVTGFLALDNTNKLIVLSFRGSRSIENWIGNLNFDLKEINDICSGCRGHDGFTSSWRSVADTLRQKVEDAVREHPDYRVVFTGHSLGGALATVAGADLRGNGYDIDVFSYGAPRVGNRAFAEFLTVQTGGTLYRITHTNDIVPRLPPREFGYSHSSPEYWIKSGTLRPVRRNDIVKIEGIDATGGNNQPNIPDIPAHLWYFGLIGTCL

SEQ ID NO: 4283 - protein, 269 aa, Synthetic construct
EVSQDLFNQFNLFAQYSAAAYCGKNNDAPAGTNITCTGNACPEVEKADATFLYSFEDSGVGDVTGFLALDNTNKLIVLSFRGSRSIKNWIANLNFDLKEINDICSGCRGHDGFTSSWRSVADTLRQKVEDAVREHPDYRVVFTGHSLGGALATVAGADLRGNGYDIDVFSYGAPRVGNRAFAEFLTVQTGGTLYRITHTNDIVPRLPPREFGYSHSSPEYWIKSGTLVPVTRNDIVKIEGIDATGGNNQPNIPDIPAHLWYFGLIGTCL

SEQ ID NO: 4284 - protein, 269 aa, Thermomyces lanuginosus
EVSQDLFNQFNLFAQYSAAAYCGKNNDAPAGTNITCTGNACPEVEKADATFLYSFEDSGVGDVTGFLALDNTNKLIVLSFRGSRSIENWIGNLNFDLKEINDICSGCRGHDGFTSSWRSVADTLRQKVEDAVREHPDYRVVFTGHSLGGALATVAGADLRGNGYDIDVFSYGAPRVGNRAFAEFLTVQTGGTLYRITHTNDIVPRLPPREFGYSHSSPEYWIKSRTLVPVRRNDIVKIEGIDATGGNNQPNIPDIPAHLWYFGLIGTCL

SEQ ID NO: 4285 - protein, 269 aa, Thermomyces lanuginosus
EVSQDLFNQFNLFAQYSAAAYCGKNNDAPAGTNITCTGNACPEVEKADATFLYSFEDSGVGDVTGFLALDNTNKLIVLSFRGSRSIENWIGNLNFDLKEIRDICSGCRGHDGFTSSWRSVADTLRQKVEDAVREHPDYRVVFTGHSLGGALATVAGADLRGNGYDIDVFSYGAPRVGNRAFAEFLTVQTGGTLYRITHTNDIVPRLPPREFGYSHSSPEYWIKSGTLVPVTRNDIVKIEGIDATGGNNQPNIPDIPAHSWYFGLIGTCL

SEQ ID NO: 4286 - protein, 269 aa, Thermomyces lanuginosus
EVSQDLFNQFNLFAQYSAAAYCGKNNDAPAGTNITCTGNACPEVEKADATFLYSFEDSGVGDVTGFLALDNTNKLIVLSFRGSRSIENWIGNLNFDLKEINDICSGCRGHDGFTSSWRSVADTLRQKVEAAVREHPDYRVVFTGHSLGGALATVAGADLRGNGYDIDVFSYGAPRVGNRAFAEFLTTQTGGTLYRITHTNDIVPRLPPREFGYSHSSPEYWIKSGTLVPVTRNDIVKIEGIDATGGNNQPNIPDIPAHLWYFGLIGTCL

SEQ ID NO: 4287 - protein, 269 aa, Thermomyces lanuginosus
SPIRREVSQDLFNQFNLFAQYSAAAYCGKNNDAPAGTNITCTGNACPEVEKADATFLYSFEDSGVGDVTGFLALDNTNKLIVLSFRGSRSIENWIGNLNFDLKEINDICSGCRGHDGFTSSWRSVADTLRQKVEDAVREHPDYRVVFTGHSLGGALATVAGADLRGNGYDIDVFSYGAPRVGNRAFAEFLTVQTGGTLYRITHTNDIVPRLPPREFGYSHSSPEYWIKSGTLVPVRRRDIVKIEGIDATGGNNQPNIPDIPAHLWYFGL

SEQ ID NO: 4288 - protein, 269 aa, Thermomyces lanuginosus
EVSQDLFNQFNLFAQYSAAAYCGKNNDAPAGTNITCTGNACPEVEKADATFLYSFEDSGVGDVTGFLALDNTNKLIVLSFRGSRSIENWIGNLNFDLKEINDICSGCRGHDGFTSSWRSVADTLRQKVEDAVREHPDYRVVFTGHSLGGALATVAGADLRGNGYDIDVFSYGAPRVGNRAFAEFLTVQTGGTLYRITHTNDIVPRLPPREFGYSHSSPEYWIKSGTLVPVTRNDIVKIEGIDATGGNNQPNIPRIRAHLWYFGLIGTCL

SEQ ID NO: 4289 - protein, 269 aa, Thermomyces lanuginosus
EVSQDLFNQFNLFAQYSAAAYCGKNNDAPAGTNITCTGNACPEVEKADATFLYSFEDSGVGDVTGFLALDNTNKLIVLSFRGSRSIENWIGNLKFDLKEINDICSGCRGHDGFTSSWRSVADTLRQKVEDAVREHPDYRVVFTGHSLGGALATVAGADLRGNGYDIDVFSYGAPRVGNRAFAEFLTVQTGGTLYRITHTNDIVPRLPPREFGYSHSSPEYWIKSGTLVPVTRNDIVKIEGIDATGGNNRPNIPDIPAHLWYFGLIGTCL

SEQ ID NO: 4290 - protein, 269 aa, Thermomyces lanuginosus
EVSQDLFNQFNLFAQYSAAAYCGKNNDAPAGTNITCTGNACPEVEKADATFLYSFEDSGVGDVTGFLALDNTNKLIVLSFRGSRSIENWIGNLNFDLKEINDICSGCRGHDGFTSSWRSVADTLRQKVEDAVREHPDYRVVFTGHSLGGALATVAGADLRGNGYDIDVFSYGAPRVGNRAFAEFLTVQTGGTLYRITHTNDIVPRLPPREFGYSHSSPEYWIKSGRLVPVTRNDIVKIEGIDATGGNNRPNIPDIPAHLWYFGLIGTCL

SEQ ID NO: 4291 - protein, 269 aa, Thermomyces lanuginosus
EVSQDLFNQFNLFAQYSAAAYCGKNNSAPAGTNITCTGNACPEVEKADATFLYSFEDSGVGDVTGFLALDNTNKLIVLSFRGSRSIENWIGNLNFDLKEINDICSGCRGHDGFTSSWRSVADTLRQKVEDAVREHPDYRVVFTGHSLGGALATVAGADLRGNGYDIDVFSYGAPRVGNRAFAEFLTVQTGGTLYRITHTNDIVPRLPPREFGYSHSSPEYWIKSGTLVPVTRNDIVKIEGIDATGGNNQPNIPDITAHLWYFGLIGTCL

SEQ ID NO: 4292 - protein, 269 aa, Thermomyces lanuginosus
EVSQDLFNQFNLFAQYSAAAYCGKNNDAPAGTNITCTGNACPEVEKADATFLYSFEDSGVGDVTGFLALDNTNKLIVLSFRGSRSIENWIGNLNFDLKEINDICSGCRGHDGFTSSWRSVADTLRQKVEDAVREHPDYRVVFTGHSLGGALATVAGADLRGNGYDIDVFSYGAPRVGNRAFAEFLTVQTGGTLYRITHTNDIVPRLPPREFGYSHSSPEYWIKRGTLVRVTRNDIVKIEGIDATGGNNQPNIPDIPAHLWYFGLIGTCL

SEQ ID NO: 4293 - protein, 269 aa, Thermomyces lanuginosus
EVSQDLFNQFNLFAQYSAAAYCGKNNDAPAGTNITCTGNACPEVEKADATFLYSFEDSGVGDVTGFLALDNTNKLIVLSFRGSRSIENWIGNLNFSLKEINDICSGCRGHDGFTSSWRSVADTLRQKVEDAVREHPDYRVVFTGHSLGGALATVAGADLRGNGYDIDVFSYGAPRVGNRAFAEFLTVQTGGTLYRITHTNDIVPRLPPREFGYSHSSPEYWIKSGTLVPVTRNDIVKIEGIDATGGNNQPNIPDIPAHLWYFGLIWTCL

SEQ ID NO: 4294 - protein, 269 aa, Thermomyces lanuginosus
EVSQDLFNQFNLFAQYSAAAYCGKNNDAPAGTNITCTGNACPEVEKADATFLYSFEDSGVGDVTGFLALDNTNKLIVLSFRGSRSIENWIGNLNFDLKEINDICSGCRGHDGFTSSWRSVADTLRQKVEDAVREHPDYRVVFTGHSLGGALATVAGADLRGNGYDIDVFSYGAPRVGRRRFAEFLTVQTGGTLYRITHTNDIVPRLPPREFGYSHSSPEYWIKSGTLVPVTRNDIVKIEGIDATGGNNQPNIPDIPAHLWYFGLIGTCL

SEQ ID NO: 4295 - protein, 269 aa, Thermomyces lanuginosus
EVSQDLFNQFNLFAQYSAAAYCGKNNDAPAGTNITCTGNACPEVEKADATFLYSFEDSGVGDVTGFLALDNTNKLIVLSFRGSRSIENWIGNLNFDLKEINDICSGCRGHDGFTSSWRSVADTLRQKVEDAVREHPDYRVVFTGHSLGGALATVAGADLRGNGYDIDVFSYGAPRVGNRAFAEFLTVQTGGTLYRITHTNDIVPRLPPREFGYSHSSPEYWIKSRTLVPVTRRDIVKIEGIDATGGNNQPNIPDIPAHLWYFGLIGTCL

SEQ ID NO: 4296 - protein, 269 aa, Thermomyces lanuginosus
EVSQDLFNQFNLFAQYSAAAYCGKNNDAPAGTNITCTGNACPEVEKADATFLYSFEDSGVGAVTGFLALDNTNKLIVLSFRGSRSIENWIGNLNFDLKEINDICSGCRGHDGFTSSWRSVADTLRQKVEDAVREHPDYRVVFTGHSLGGALATVAGADLRGNGYDIDVFSYGAPRVGNRAFAEFLTVQTGGTLYRITHTNDIVPRLPPREFGYSHSSPEYWIKSGTLVPVTRNDIVKIEGIDATGGNNQPNIPDIPAHLWYFGLIATCL

SEQ ID NO: 4297 - protein, 269 aa, Thermomyces lanuginosus
EVSQDLFNQFNLFAQYSAAAYCGKNNDAPAGTNITCTGNACPEVEKADATFLYSFEDSGVGDVTGFLALDNTNKLIVLSFRGSRSIENWIGNLNFDLKEINDICSGCRGHDGFTSSWRSVADTLRQKVEDAVREHPDYRVVFTGHSLGGALATVAGADLRGNGYDIDVFSYGAPRVGNRAFAEFLTVQTGGTLYRITHTNDIVPRLPPREFGYSHSSPEYWIKSGTLVPVTRRDIRKIEGIDATGGNNQPNIPDIPAHLWYFGLIGTCL

SEQ ID NO: 4298 - protein, 269 aa, Thermomyces lanuginosus
EVSQDLFNQFNLFAQYSAAAYCGANNDAPAGTNITCTGNACPEVEKADATFLYSFEDSGVGDVTGFLALDNTNKLIVLSFRGSRSIENWIGNLNFDLKEINDICSGCRGHDGFTSSWRSVADTLRQKVEDAVREHPDYRVVFTGHSLGGALATIAGADLRGNGYDIDVFSYGAPRVGNRAFAEFLTVQTGGTLYRITHTNDIVPRLPPREFGYSHSSPEYWIKSGTLVPVTRNDIVKIEGIDATGGNNQPNIPDIPAHLWYFGLIGTCL

SEQ ID NO: 4299 - protein, 269 aa, Thermomyces lanuginosus
EVSQDLFNQFNLFAQYSAAAYCGKNNSAPAGTDITCTGNACPEVEKADATFLYSFEDSGVGDVTGFLALDNTNKLIVLSFRGSRSIENWIGNLNFDLKEINDICSGCRGHDGFTSSWRSVADTLRQKVEDAVREHPDYRVVFTGHSLGGALATVAGADLRGNGYDIDVFSYGAPRVGNRAFAEFLTVQTGGTLYRITHTNDIVPRLPPREFGYSHSSPEYWIKSGTLVPVTRNDIVKIEGIDATGGNNQPNIPDIPAHLWYFGLIGTCL

SEQ ID NO: 4300 - protein, 269 aa, Thermomyces lanuginosus
EVSQDLFNQFNLFAQYSAAAYCGKNNDAPAGTNITCTGNACPEVEKADATFLYSFEDSGVGDVTGFLALDNTNKLIVLSFRGSRSIENWIGNLNFDLKEINDICSGCRGHDGFTSSWRSVADTLRQKVEDAVREHPDYRVVFTGHSLGGALATVAGADLRGNGYDIDVFSYGAPRVGNRAFAEFLTVQTGGTLYRITHTNDIVPRLPPREFGYSHSSPEYWIKSGTLVPVTRNDIVKIEGIDATGGNNRRNIPDIPAHLWYFGLIGTCL

SEQ ID NO: 4301 - protein, 269 aa, Thermomyces lanuginosus
EVSQDLFRQFNLFAQYSAAAYCGKNNDAPAGTNITCTGNACPRVEKADATFLYSFEDSGVGDVTGFLALDNTNKLIVLSFRGSRSIENWIGNLNFDLKEINDICSGCRGHDGFTSSWRSVADTLRQKVEDAVREHPDYRVVFTGHSLGGALATVAGADLRGNGYDIDVFSYGAPRVGNRAFAEFLTVQTGGTLYRITHTNDIVPRLPPREFGYSHSSPEYWIKSGTLVPVTRNDIVKIEGIDATGGNNQPNIPDIPAHLWYFGLIGTCL

SEQ ID NO: 4302 - protein, 269 aa, Thermomyces lanuginosus
EVSQDLFNQFNLFAQYSAAAYCGKNNDAPAGTNITCTGNACPEVEKADATFLYSFEDSGVGDVTGFLALDNTNKLIVLSFRGSRSIENWIGNLNFXLKEINDICSGCRGHDGFTSSWRSVADTLRQKVEDAVREHPDYRVVFTGHSLGGALATVAGADLRGNGYDIDVFSYGAPRVGNRAFAEFLTVQTGGTLYRITHTNDIVPRLPPREFGYSHSSPEYWIKSGTLVPVTRNDIVKIEGIDATGGNNHPNIPDIPAHLWYFGLIGTCL

SEQ ID NO: 4303 - protein, 269 aa, Thermomyces lanuginosus
EVSQDLFNQFNLFAQYSAAAYCGKNNDAPAGTNITCTGNACPEVEKADATFLYSFEDSGVGDVTGFLALDNTNKLIVLSFRGSRSIENWIGNLNFDLKEINDICSGCRGHDGFTSSWRSVADTLRQKVEDAVREHPDYRVVFTGHSLGGALATVAGADLRGNGYDIDVFSYGAPRVGNRAFAEFLTVQTGGTLYRITHTNDIVPRLPPREFGYSHSSPEYWIKSGTRVRVTRNDIVKIEGIDATGGNNQPNIPDIPAHLWYFGLIGTCL

SEQ ID NO: 4304 - protein, 269 aa, Thermomyces lanuginosus
EVSQDLFNQFNLFAQYSAAAYCGKNNDAPAGTNITCTGNACPEVEKADATFLYSFEDSGVGDVTGFLALDNTNKLIVLSFRGSRSIENWIGNLNFDLKEINDICSGCRGHDGFTSSWRSVADTLRQKVEDAVREHPDYRVVFTGHSLGGALATVAGADLRGNGYDIDVFSYGAPRVGNRAFAEFLTVQTGGTLYRITHTNDIVPRLPPREFGYSHSSPEYWIKSGTLVPVTRNRIRKIEGIDATGGNNQPNIPDIPAHLWYFGLIGTCL

SEQ ID NO: 4305 - protein, 269 aa, Thermomyces lanuginosus
EVSQDLFNQFNLFAQYSAAAYCGKNNDAPAGTNITCTGNACPEVEKADATFLYSFEDSGVGDVTGFLALDNTNKLIVLSFRGSRSIENWIGNLNFXLKEINDICSGCRGHDGFTSSWRSVADTLRQKVEDAVREHPDYRVVFTGHSLGGALATVAGADLRGNGYDIDVFSYGAPRVGNRAFAEFLTVQTGGTLYRITHTNDIVPRLPPREFGYSHSSPEYWIKSGTLVPVTRNDIVKIEGIDATGGNNKPNIPDIPAHLWYFGLIGTCL

SEQ ID NO: 4306 - protein, 269 aa, Thermomyces lanuginosus
EVSQDLFNQFNLFAQYSAAAYCGKNNDAPAGTNITCTGNACPEVEKADATFLYSFEDSGVGDVTGFLALDNTNKLIVLSFRGSRSIENWIGNLNFDLKEINDICSGCRGHDGFTSSWRSVADTLRQKVEDAVREHPDYRVVFTGHSLGGALATVAGADLRGNGYDIDVFSYGAPRVGNRAFAEFLTVQTGGTLYRITHTNDIVPRLPPREFGYSHSSPEYWIKSGTLVPVTRNDIVKIEGIDATGGNNQPNIPDIPAHLWWFGLIXTCL

SEQ ID NO: 4307 - protein, 269 aa, Thermomyces lanuginosus
EVSQDLFNQFNLFAQYSAAAYCGKNNDAPAGTDITCTGNACPEVFKADATFLYSFEDSGVGDVTGFLALDNTNKLIVLSFRGSRSIENWIGNLNFDLKEINDICSGCRGHDGFTSSWRSVADTLRQKVEDAVREHPDYRVVFTGHSLGGALATVAGADLRGNGYDIDVFSYGAPRVGNRAFAEFLTVQTGGTLYRITHTNDIVPRLPPREFGYSHSSPEYWIKSGTLVPVTRNDIVKIEGIDATGGNNQPNIPDIPAHLWYFGLIGTCL

SEQ ID NO: 4308 - protein, 269 aa, Thermomyces lanuginosus
EVSQDLFRQFRLFAQYSAAAYCGKNNDAPAGTNITCTGNACPEVEKADATFLYSFEDSGVGDVTGFLALDNTNKLIVLSFRGSRSIENWIGNLNFDLKEINDICSGCRGHDGFTSSWRSVADTLRQKVEDAVREHPDYRVVFTGHSLGGALATVAGADLRGNGYDIDVFSYGAPRVGNRAFAEFLTVQTGGTLYRITHTNDIVPRLPPREFGYSHSSPEYWIKSGTLVPVTRNDIVKIEGIDATGGNNQPNIPDIPAHLWYFGLIGTCL

SEQ ID NO: 4309 - protein, 269 aa, Thermomyces lanuginosus
EVSQDLFNQFNLFAQYSAAAYCGKNNDAPAGTNITCTGNACPEVEKADATVLYSFEDSGVGDVTGFLALDNTNKLIVLSFRGSRSIENWIGNLNFELKEINDICSGCRGHDGFTSSWRSVADTLRQKVEDAVREHPDYRVVFTGHSLGGALATVAGADLRGNGYDIDVFSYGAPRVGNRAFAEFLTVQTGGTLYRITHTNDIVPRLPPREFGYSHSSPEYWIKSGTLVPVTRNDIVKIEGIDATGGNNQPNIPDIPAHLWYFGLIGTCL

SEQ ID NO: 4310 - protein, 269 aa, Thermomyces lanuginosus
EVSQDLFNQFNLFAQYSAAAYCGKNNDAPAGTNITCTGNACPEVEKADATFLYSFEDSGVGDVTGFLALDNTNKLIVLSFRGSRSIENWIGNLNFDLKEINDICSGCRGHDGFTSSWRSVADTLRQKVEDAVREHPDYRVVFTGHSLGGALATVAGADLRGNGYDIDVFSYGAPRVGNRAFAEFLTVQTGGTLYRITHTNDIVPRLPPREFGYSHSSPEYWIKSGTLVPVTRNDIRKIRGIDATGGNNQPNIPDIPAHLWYFGLIGTCL

SEQ ID NO: 4311 - protein, 269 aa, Thermomyces lanuginosus
EVSQDLFNQFNLFAQYSAAAYCGKNNDALAGTNITCTGNACPEVEKADATFLYSFEDSGVGDVTGFLALDNTNKLIVLSFRGSRSIENWIGNLNFDLKEINDICSGCRGHDGFTSSWRSVADTLRQKVEDAVREHPDYRVVFTGHSLGGALATVAGADLRGNGYDIDVFSYGAPRVGNRAFAEFLTVQTGGTLYRITHTNDIVPRLPPREFGYSHSSPEYWIKSGTLVLVTRNDIVKIEGIDATGGNNQPNIPDIPAHLWYFGLIGTCL

SEQ ID NO: 4312 - protein, 269 aa, Thermomyces lanuginosus
EVSQDLFNQFNLFAQYSAAAYCGKNNDAPRGTRITCTGNACPEVEKADATFLYSFEDSGVGDVTGFLALDNTNKLIVLSFRGSRSIENWIGNLNFDLKEINDICSGCRGHDGFTSSWRSVADTLRQKVEDAVREHPDYRVVFTGHSLGGALATVAGADLRGNGYDIDVFSYGAPRVGNRAFAEFLTVQTGGTLYRITHTNDIVPRLPPREFGYSHSSPEYWIKSGTLVPVTRNDIVKIEGIDATGGNNQPNIPDIPAHLWYFGLIGTCL

SEQ ID NO: 4313 - protein, 269 aa, Thermomyces lanuginosus
EVSQDLFNQFNLFAQYSAAAYCGKNNDAPAGTNITCTGNACPEVEKADATFLYSFEDSGVGDVTGFLALDNTNKLIVLSFRGSRSIENWIGNLNFSLKEINDICSGCRGHDGFTSSWRSVADTLRQKVEDAVREHPDYRVVFTGHSLGGALATVAGADLRGNGYDIDVFSYGAPRVGNRAFAEFLTVQTGGTLYRITHTNDIVPRLPPREFGYSHSSPEYWIKSGTLVPVTRNDIVKIEGIDATGGNNQPNIPDIPAHLWYFGLIRTCL

SEQ ID NO: 4314 - protein, 269 aa, Thermomyces lanuginosus
EVSQDLFNQFNLFAQYSAAAYCGKNNNAPAGTNITCTGNACPEVEKADATFLYSFKDSGVGDVTGFLALDNTNKLIVLSFRGSRSIENWIGNLNFDLKEINDICSGCRGHDGFTSSWRSVADTLRQKVEDAVREHPDYRVVFTGHSLGGALATVAGADLRGNGYDIDVFSYGAPRVGNRAFAEFLTVQTGGTLYRITHTNDIVPRLPPREFGYSHSSPEYWIKSGTLVPVTRNDIVKIEGIDATGGNNQPNIPDIPAHLWYFGLIGTCL

SEQ ID NO: 4315 - protein, 269 aa, Thermomyces lanuginosus
EVSQDLFNQFNLFAQYSAAAYCGKNNDRRAGTNITCTGNACPEVEKADATFLYSFEDSGVGDVTGFLALDNTNKLIVLSFRGSRSIENWIGNLNFDLKEINDICSGCRGHDGFTSSWRSVADTLRQKVEDAVREHPDYRVVFTGHSLGGALATVAGADLRGNGYDIDVFSYGAPRVGNRAFAEFLTVQTGGTLYRITHTNDIVPRLPPREFGYSHSSPEYWIKSGTLVPVTRNDIVKIEGIDATGGNNQPNIPDIPAHLWYFGLIGTCL

SEQ ID NO: 4316 - protein, 269 aa, Thermomyces lanuginosus
EVSQDLFNQFNLFAQYSAAAYCGKNNDAPAGTNITCTGNACPEVEKADATFLYSFEDSGVGDVTGFLALDNTNKLIVLSFRGSRSIENWIGNLNFGLKEINDICSGCRGHDGFTSSWRSVADTLRQKVEDAVREHPDYRVVFTGHSLGGALATVAGADLRGNGYDIDVFSYGAPRVGNRAFAEFLTVQTGGTLYRITHTNDIVPRLPPREFGYSHSSPEYWIKSRTLVPVTRNDIVKIEGIDATGGNNQPNIPDIPAHLWYFGLIGTCL

SEQ ID NO: 4317 - protein, 269 aa, Thermomyces lanuginosus
EVSQDLFNQFNLFAQYSAAAYCGKNNDAPAGTNITCTGNACPEVEKADATFLYSFEDSGVGDVTGFLALDNTNKLIVLSFRGSRSIENWIGNLNFDLKEINDICSGCRGHDGFTSSWRSVADTLRQKVEDAVREHPDYRVVFTGHSLGGALATVAGADLRGNGYDIDVFSYGAPRVGNRAFAEFLTVQTGGTLYRITHTNDIVPRLPPREFGYSHSSPEYWIKSGTLVPVRRNDIRKIEGIDATGGNNQPNIPDIPAHLWYFGLIGTCL

SEQ ID NO: 4318 - protein, 269 aa, Thermomyces lanuginosus
EVSRDLFNQFRLFAQYSAAAYCGKNNDAPAGTNITCTGNACPEVEKADATFLYSFEDSGVGDVTGFLALDNTNKLIVLSFRGSRSIENWIGNLNFDLKEINDICSGCRGHDGFTSSWRSVADTLRQKVEDAVREHPDYRVVFTGHSLGGALATVAGADLRGNGYDIDVFSYGAPRVGNRAFAEFLTVQTGGTLYRITHTNDIVPRLPPREFGYSHSSPEYWIKSGTLVPVTRNDIVKIEGIDATGGNNQPNIPDIPAHLWYFGLIGTCL

SEQ ID NO: 4319 - protein, 269 aa, Thermomyces lanuginosus
EVSQDLFNQFNLFAQYSAAAYCGKNNDAPAGTNITCTGNACPEVEKADATFLYSFEDSGVGDVTGFLALDNTNKLIVLSFRGSRSIENWIGNLNFDLKEIRRICSGCRGHDGFTSSWRSVADTLRQKVEDAVREHPDYRVVFTGHSLGGALATVAGADLRGNGYDIDVFSYGAPRVGNRAFAEFLTVQTGGTLYRITHTNDIVPRLPPREFGYSHSSPEYWIKSGTLVPVTRNDIVKIEGIDATGGNNQPNIPDIPAHLWYFGLIGTCL

SEQ ID NO: 4320 - protein, 269 aa, Thermomyces lanuginosus
EVSQDLFNQFNLFAQYSAAAYCGKNNDAPAGTNITCTGNACPEVEKADATFLYSFEDSGVGDVTGFLALDNTNKLIVLSFRGSRSIENWIGNLNFSLKEINDICSGCRGHDGFTSSWRSVADTLRQKVEDAVREHPDYRVVFTGHSLGGALATVAGADLRGNGYDIDVFSYGAPRVGNRAFAEFLTVQTGGTLYRITHTNDIVPRLPPREFGYSHSSPEYWIKSGTLVPVTRNDIVKIEGIDATGGNNQPNIPDIPAHLWYFGLIVTCL

SEQ ID NO: 4321 - protein, 269 aa, Thermomyces lanuginosus
EVSQDLFNQFNLFAQYSAAAYCGKNNDAPAGTNITCTGNACPEVEKADATFLYSFEDSGVGDVTGFLALDNTNKLIVLSFRGSRSIENWIGNLNFFLKEINDICSGCRGHDGFTSSWRSVADTLRQKVEDAVREHPDYRVVFTGHSLGGALATVAGADLRGNGYDIDVFSYGAPRVGNRAFAEFLTVQTGGTLYRITHTNDIVPRLPPREFGYSHSSPEYWIKSGTLVPVTRNDIVKIEGIDATGGNNQPNIPDIPAHLWYFGLISTCL

SEQ ID NO: 4322 - protein, 269 aa, Thermomyces lanuginosus
EVSQDLFNQFNLFAQYSAAAYCGKNNDAPAGTNITCTGNACPEVEKADATFLYSFEDSGVGDVTGFLALDNTNKLIVLSFRGSRSIENWIGNLNFDLKEINDICSGCRGHDGFTSSWRSVADTLRQKVEDAVREHPDYRVVFTGHSLGGALATVAGADLRGNGYDIDVFSYGAPRVGNRAFAEFLTVQTGGTLYRITHTNDIVPRLPPREFGYSHSSPEYWIKSGTFIPVTRNDIVKIEGIDATGGNNQPNIPDIPAHLWYFGLIGTCL

SEQ ID NO: 4323 - protein, 269 aa, Thermomyces lanuginosus
EVSQDLFNQFNLFAQYSAAAYCGKNNDAPAGTNITCTGNACPEVEKADATFLYSFEDSGVGDVTGFLALDNTNKLIVLSFRGSRSIENWIGNLNFFLKEINDICSGCRGHDGFTSSWRSVADTLRQKVEDAVREHPDYRVVFTGHSLGGALATVAGADLRGNGYDIDVFSYGAPRVGNRAFAEFLTVQTGGTLYRITHTNDIVPRLPPREFGYSHSSPEYWIKSGTLVPVTRNDIVKIEGIDATGGNNQPNIPDIPAHLWYFGLIATCL

SEQ ID NO: 4324 - protein, 269 aa, Thermomyces lanuginosus
EVSQDLFNQFNLFAQYSAAAYCGKNNDAPAGTNITCTGNACPEVEKADATFLYSFEDSGVGDVTGFLALDNTNKLIVLSFRGSRSIENWIGNLNFDLKEINDICSGCRGHDGFTSSWRSVADTLRQKVEDAVREHPDYRVVFTGHSLGGALATVAGADLRGNGYDIDVFSYGAPRVGNRAFAEFLTVQTGGTLYRITHTNDIVPRLPPREFGYSHSSPEYWIKSGTLVPVTRNDIVKIEGIDATGGNNQPNIPDIPAHLWYFALIYTCL

SEQ ID NO: 4325 - protein, 269 aa, Thermomyces lanuginosus
EVSQDLFNQFNLFAQYSAAAYCGKNNDAPAGTNITCRRNACPEVEKADATFLYSFEDSGVGDVTGFLALDNTNKLIVLSFRGSRSIENWIGNLNFDLKEINDICSGCRGHDGFTSSWRSVADTLRQKVEDAVREHPDYRVVFTGHSLGGALATVAGADLRGNGYDIDVFSYGAPRVGNRAFAEFLTVQTGGTLYRITHTNDIVPRLPPREFGYSHSSPEYWIKSGTLVPVTRNDIVKIEGIDATGGNNQPNIPDIPAHLWYFGLIGTCL

SEQ ID NO: 4326 - protein, 269 aa, Thermomyces lanuginosus
EVSQDLFNQFNLFAQYSAAAYCGKNNDAPAGTNITCTGNACPEVEKADATFLYSFEDSGVGDVTGFLALDNTNKLIVLSFRGSRSIENWIGNLNFXLKEINDICSGCRGHDGFTSSWRSVADTLRQKVEDAVREHPDYRVVFTGHSLGGALATVAGADLRGNGYDIDVFSYGAPRVGNRAFAEFLTVQTGGTLYRITHTNDIVPRLPPREFGYSHSSPEYWIKSGTLVPVTRNDIVKIEGIDATGGNNRPNIPDIPAHLWYFGLIGTCL

SEQ ID NO: 4327 - protein, 269 aa, Thermomyces lanuginosus
EVSQDLFNQFNLFAQYSAAAYCGKNNDAPAGTNITCTGNACPEVEKADATFLYSFEDSGVGDVTGFLALDNTNKLIVLSFRGSRSIENWIGNLNFDLKEINDICSGCRGHDGFTSSWRSVADTLRQKVEDAVREHPDYRVVFTGHSLGGALATVAGADLRGNGYDIDVFSYGAPRVGNRAFAEFLTVQTGGTLYRITHTNDIVPRLPPRQRGYSHSSPEYWIKSGTLVPVTRNDIVKIEGIDATGGNNQPNIPDIPAHLWYFGLIGTCL

SEQ ID NO: 4328 - protein, 269 aa, Thermomyces lanuginosus
EVSQDLFNQFNLFAQYSAAAYCGKNNDAPAGTNITCTGNACPEVEKADATFLYSFEDSGVGDVTGFLALDNTNKLIVLSFRGSRSIENWIGNLNFDLKKINDICSGCRGHDGFTSSWRSVADTLRQKVEDAVREHPDYRVVFTGHSLGGALATVAGADLRGNGYDIDVFSYGAPRVGNRAFAEFLTVQTGGTLYRITHTNDIVPRLPPREFGYSHSSPEYWIKSGTLVPVTRNDIVKIEGIDATGGNNHPNIPDIPAHLWYFGLIGTCL

SEQ ID NO: 4329 - protein, 269 aa, Thermomyces lanuginosus
EVSQDLFNQFNLFAQYSAAAYCGKNNDAPAGTNITCTGNACPEVEKADATFLYSFEDSGVGDVTGFLALDNTNKQIVLSFRGSRSIENWIGNLNFDLKEINDICSGCRGHDGFTSSWRSVADTLRQKVEDAVREHPDYRVVFTGHSLGGALATVAWADLRGNGYDIDVFSYGAPRVGNRAFAEFLTVQTGGTLYRITHTNDIVPRLPPREFGYSHSSPEYWIKSGTLVPVTRNDIVKIEGIDATGGNNQPNIPDIPAHLWYFGLIGTCL

SEQ ID NO: 4330 - protein, 269 aa, Thermomyces lanuginosus
EVSXDLFNQFNLFAQYSAAAYCGKNNDAPAGTNITCTGNACPEVEKADATFLYSFEDSGVGDVTGFLALDNTNKLIVLSFRGSRSIENWIGNLNFDLKEINDICSGCRGHDGFTSSWRSVADTLRQKVEDAVREHPDYRVVFTGHSLGGALATVAGADLRGNGYDIDVFSYGAPRVGNRAFAEFLTVQTGGTLYRITHTNDIVPRLPPREFGYSHSSPEYWIKSGTXVPVTRNDIVKIEGIDATGGNNQPNIPDIPAHLWYFGLIGTCL

SEQ ID NO: 4331 - protein, 269 aa, Thermomyces lanuginosus
EVSQDLFNQFNLFAQYSAAAYCGKNNDAPRRTNITCTGNACPEVEKADATFLYSFEDSGVGDVTGFLALDNTNKLIVLSFRGSRSIENWIGNLNFDLKEINDICSGCRGHDGFTSSWRSVADTLRQKVEDAVREHPDYRVVFTGHSLGGALATVAGADLRGNGYDIDVFSYGAPRVGNRAFAEFLTVQTGGTLYRITHTNDIVPRLPPREFGYSHSSPEYWIKSGTLVPVTRNDIVKIEGIDATGGNNQPNIPDIPAHLWYFGLIGTCL

SEQ ID NO: 4332 - protein, 269 aa, Thermomyces lanuginosus
EVSQDLFNQFNLFAQYSAAAYCGKNNDAPAGTNITCTGNACPEVEKADATFLYSFEDSGVGDVTGFLALDNTNKLIVLSFRGSRSIENWIGNLNFDLKEINDICSGCRGHDGFTSSWRSVADTLRQKVEDAVREHPDYRVVFTGHSLGGALATVAGADLRGNGYDIDVFSYGAPRVGNRAFAEFLTVQTGGTLYRITHKKDIVPRLPPREFGYSHSSPEYWIKSGTLVPVTRNDIVKIEGIDATGGNNQPNIPDIPAHLWYFGLIGTCL

SEQ ID NO: 4333 - protein, 269 aa, Thermomyces lanuginosus
EVSQDLFNQFNLFAQYSAAAYCGKNNDAPAGTNITCTGNACPEVEKADATFLYSFEDSGVGDVTGFLALDNTNKLIVLSFRGSRSIENWIGNLNFDLKEINDICSGCRGHDGFTSSWRSVADTLRQKVEDAVREHPDYRVVFTGHSLGGALATVAGADLRGNGYDIDVFSYGAPRVGNRAFAEFLTVQTGGTLYRITHTNDIVPRLPPREFGYSHSSPEYWIKSGTLVPVRRRDIVKIEGIDATGGNNQPNIPDIPAHLWYFGLIGTCL

SEQ ID NO: 4334 - protein, 269 aa, Thermomyces lanuginosus
EVSQDLFNQFNLFAQYSAAAYCGKNNDAPAGTNITCTGNACPEVFKADATFLYSFEDSGVGDVTGFLALDNTNKLIVLSFRGSRSIENWIGNLNFDLKEINDICSGCRGHDGFTSSWRSVADTLRQKVEDAVREHPDYRVVFTGHSLGGALATVAGADLRGNGYDIDVFSYGAPRVGNRAFAEFLTVQDGGTLYRITHTNDIVPRLPPREFGYSHSSPEYWIKSGTLVPVTRNDIVKIEGIDATGGNNQPNIPDIPAHLWYFGLIGTCL

SEQ ID NO: 4335 - protein, 269 aa, Thermomyces lanuginosus
EVSQDLFNQFNLFAQYSAAAYCGKNNDAPAGTNITCTGNACPEVEKADATFLYSFEDSGVGDVTGFLALDNTNKLIVLSFRGSRSIENWIGNLNFDLKEINDICSGCRGHDGFTSSWRSVADTLRQKVEDAVREHPDYRVVFTGHSLGGALATVAGADLRGNGYDIDVFSYGAPRVGNRAFAEFLTVQTGGTLYRITHTNDIVPRLPPREFGYSHSSPEYWIKSGTLVPVTRNDIVKIEGIDATGGNNQRNRPDIPAHLWYFGLIGTCL

SEQ ID NO: 4336 - protein, 269 aa, Thermomyces lanuginosus
EVSQDLFNQFNLFAQYSAAAYCGKNNDAPAGTNITCTGNACPEVEKADATFLYSFEDSGVGDVTGFLALDNTNKLIVLSFRGSRSIENWIGNLRFDLKEINDICSGCRGHDGFTSSWRSVADTLRQKVEDAVREHPDYRVVFTGHSLGGALATVAGADLRGNGYDIDVFSYGAPRVGNRAFAEFLTVQTGGTLYRITHTNDIVPRLPPREFGYSHSSPEYWIKSGTLVPVTRNDIVKIEGIDATGGNNHPNIPDIPAHLWYFGLIGTCL

SEQ ID NO: 4337 - protein, 269 aa, Thermomyces lanuginosus
EVSQDLFNQFNLFAQYSAAAYCGKNNDAPAGTNITCTGNACPEVEKADATFLYSFEDSGVGDVTGFLALDNTNKLIVLSFRGSRSIENWIGNLHFDLKEINDICSGCRGHDGFTSSWRSVADTLRQKVEDAVREHPDYRVVFTGHSLGGALATVAGADLRGNGYDIDVFSYGAPRVGNRAFAEFLTVQTGGTLYRITHTNDIVPRLPPREFGYSHSSPEYWIKSGTLVPVTRNDIVKIEGIDATGGNNHPNIPDIPAHLWYFGLIGTCL

SEQ ID NO: 4338 - protein, 269 aa, Thermomyces lanuginosus
EVSQDLFNQFNLFAQYSAAAYCGKNNDAPAGTNITCTGNACPEVEKADATFLYSFEDSGVGDVTGFLALDNTNKLIVLSFRGSRSIENWIGNLNFDLKEINDICSGCRGHDGFTSSWRSVADTLRQKVEDAVREHPDYRVVFTGHSLGGALATVAGADLRGNGYDIDVFSYGAPRVGNRAFAEFLTVQTGGTLYRITHTRDIVPRLPPREFGYSHSSPEYWIKSGTLVPVRRNDIVKIEGIDATGGNNQPNIPDIPAHLWYFGLIGTCL

SEQ ID NO: 4339 - protein, 269 aa, Thermomyces lanuginosus
EVSQDLFNQFNLFAQYSAAAYCGKNNDAPAGTNITCTGNACPEVEKADATFLYSFEDSGVGDVTGFLALDNTNKLIVLSFRGSRSIENWIGNLNFDLKEINDICSGCRGHAGFTSSWRSVADTLRQKVEDAVREHPDYRVVFTGHSLGGALATVAGADLRGNGYDIDVFSYGAPRVGNRAFAEFLTVQTGGTLYRITHTNDIVPRLPPREFGYSHSSPEYWIKSGTLVPVTRNDIVKIEGIDATGGNNQPNIPDIPAHLWYFGRIGTCL

SEQ ID NO: 4340 - protein, 269 aa, Thermomyces lanuginosus
EVSQDLFNQFNLFAQYSAAAYCGKNNRAPAGTQITCTGNACPEVEKADATFLYSFEDSGVGDVTGFLALDNTNKLIVLSFRGSRSIENWIGNLNFDLKEINDICSGCRGHDGFTSSWRSVADTLRQKVEDAVREHPDYRVVFTGHSLGGALATVAGADLRGNGYDIDVFSYGAPRVGNRAFAEFLTVQTGGTLYRITHTNDIVPRLPPREFGYSHSSPEYWIKSGTLVPVTRNDIVKIEGIDATGGNNQPNIPDIPAHLWYFGLIGTCL

SEQ ID NO: 4341 - protein, 269 aa, Thermomyces lanuginosus
EVSQDLFNQFNLFAQYSAAAYCGKNNDAPAGTNITCTGNACPEVEKADATFLYSFEDSGVGDVTGFLALDNTNKLIVLSFRGSRSIENWIGNLNFDLKEINDICSGCRGHDGFTSSWRSVADTLRQKVEDAVREHPDYRVVFTGHSLGGALATVAGADLRGNGYDIDVFSYGAPRVGNRAFAEFLTVQTGGTLYRITHTNDIVPRLPPREFGYSHSSPEYCIKSGTLVPVTRNDIVKIEGIDATGCNNQPNIPDIPAHLWYFGLIGTCL

SEQ ID NO: 4342 - protein, 269 aa, Thermomyces lanuginosus
EVSQRLFRQFNLFAQYSAAAYCGKNNDAPAGTNITCTGNACPEVEKADATFLYSFEDSGVGDVTGFLALDNTNKLIVLSFRGSRSIENWIGNLNFDLKEINDICSGCRGHDGFTSSWRSVADTLRQKVEDAVREHPDYRVVFTGHSLGGALATVAGADLRGNGYDIDVFSYGAPRVGNRAFAEFLTVQTGGTLYRITHTNDIVPRLPPREFGYSHSSPEYWIKSGTLVPVTRNDIVKIEGIDATGGNNQPNIPDIPAHLWYFGLIGTCL

SEQ ID NO: 4343 - protein, 269 aa, Thermomyces lanuginosus
EVSQDLFNQFNLFAQYSAAAYCGKNNDAPAGTNITCTGNACPEVEKADATFLYSFEDSGVGDVTGFLALDNTNKLIVLSFRGSRSIENWIGNLHFDLKEINDICSGCRGHDGFTSSWRSVADTLRQKVEDAVREHPDYRVVFTGHSLGGALATVAGADLRGNGYDIDVFSYGAPRVGNRAFAEFLTVQTGGTLYRITHTNDIVPRLPPREFGYSHSSPEYWIKSGTLVPVTRNDIVKIEGIDATGGNNKPNIPDIPAHLWYFGLIGTCL

SEQ ID NO: 4344 - protein, 269 aa, Thermomyces lanuginosus
EVSQDLFNQFNLFAQYSAAAYCGKNNDAPAGTNITCTGNACPEVEKADATFLYSFEDSGVGDVTGFLALDNTNKQIVLSFRGSRSIENWIGNLNFDLKEINDICSGCRGHDGFTSSWRSVADTLRQKVEAAVREHPDYRVVFTGHSLGGALATVAGADLRGNGYDIDVFSYGAPRVGNRAFAEFLTVQTGGTLYRITHTNDIVPRLPPREFGYSHSSPEYWIKSGTLVPVTRNDIVKIEGIDATGGNNQPNIPDIPAHLWYFGLIGTCL

SEQ ID NO: 4345 - protein, 269 aa, Thermomyces lanuginosus
EVSQDLFNQFNLFAQYSAAAYCGKNNDAPAGTNITCRGRACPEVEKADATFLYSFEDSGVGDVTGFLALDNTNKLIVLSFRGSRSIENWIGNLNFDLKEINDICSGCRGHDGFTSSWRSVADTLRQKVEDAVREHPDYRVVFTGHSLGGALATVAGADLRGNGYDIDVFSYGAPRVGNRAFAEFLTVQTGGTLYRITHTNDIVPRLPPREFGYSHSSPEYWIKSGTLVPVTRNDIVKIEGIDATGGNNQPNIPDIPAHLWYFGLIGTCL

SEQ ID NO: 4346 - protein, 269 aa, Thermomyces lanuginosus
EVSQDLFNQFNLFAQYSAAAYCGKNNDAPAGTNITCTGNACPEVEKADATLLYSFEDSGVGDVTGFLALDNTNKLIVLSFRGSRSIENWIGNLNFELKEINDICSGCRGHDGFTSSWRSVADTLRQKVEDAVREHPDYRVVFTGHSLGGALATVAGADLRGNGYDIDVFSYGAPRVGNRAFAEFLTVQTGGTLYRITHTNDIVPRLPPREFGYSHSSPEYWIKSGTLVPVTRNDIVKIEGIDATGGNNQPNIPDIPAHLWYFGLIGTCL

SEQ ID NO: 4347 - protein, 269 aa, Thermomyces lanuginosus
EVSQDLFNQFNLFAQYSAAAYCGKNNDAPAGTNITCTGNACPEVEKADATFLYSFEDSGVGDVTGFLALDNTNKLIVLSFRGSRSIENWIGNLNFDLKRINDICSGCRGHDGFTSSWRSVADTLRQKVEDAVREHPDYRVVFTGHSLGGALATVAGADLRGNGYDIDVFSYGAPRVGNRAFAEFLTVQTGGTLYRITHTNDIVPRLPPREFGYSHSSPEYWIKSGTLVPVTRNDIVKIEGIDATGGNNRPNIPDIPAHLWYFGLIGTCL

SEQ ID NO: 4348 - protein, 269 aa, Thermomyces lanuginosus
EVSQDLFNQFNLFAQYSAAAYCGKNNDAPAGTNITCTGNACPEVEKADATFLYSFEDSGVGDVTGFLALDNTNKLIVLSFRGSRSIENWIGNLNFDLKEINDICSGCRGHDGFTSSWRSVADTLRQKVEDAVREHPDYRVVFTGHSLGGALATVAGADLRGNGYDIDVFSYGAPRVGNRAFAEFLTVQTGGTLYRITHTRDIVPRLPPREFGYSHSSPEYWIKSRTLVPVTRNDIVKIEGIDATGGNNQPNIPDIPAHLWYFGLIGTCL

SEQ ID NO: 4349 - protein, 269 aa, Thermomyces lanuginosus
EVSQDLFNQFNLFAQYSAAAYCGKNNNAPAGTNITCTGNACPEVEKADATFLYSFEDSGVGDVTGFLALDNTNKLIVLSFRGSRSIENWIGNLNFDLKEINDICSGCRGHAGFTSSWRSVADTLRQKVEDAVREHPDYRVVFTGHSLGGALATVAGADLRGNGYDIDVFSYGAPRVGNRAFAEFLTVQTGGTLYRITHTNDIVPRLPPREFGYSHSSPEYWIKSGTLVPVTRNDIVKIEGIDATGGNNQPNIPDIPAHLWYFGLIGTCL

SEQ ID NO: 4350 - protein, 269 aa, Thermomyces lanuginosus
EVSQDLFNQFNLFAQYSAAAYCGKNNDAPAGTNITCTGNACPEVEKADATFLYSFEDSGVGDVTGFLALDNTNKLIVLSFRGSRSIENWIGNLKFDLKEINDICSGCRGHDGFTSSWRSVADTLRQKVEDAVREHPDYRVVFTGHSLGGALATVAGADLRGNGYDIDVFSYGAPRVGNRAFAEFLTVQTGGTLYRITHTNDIVPRLPPREFGYSHSSPEYWIKSGTLVPVTRNDIVKIEGIDATGGNNHPNIPDIPAHLWYFGLIGTCL

SEQ ID NO: 4351 - protein, 269 aa, Thermomyces lanuginosus
EVSQDLFNQFNLFAQYSAAAYCGKNNDAPAGTNITCTGNACPEVEKADATFLYSFEDSGVGDVTGFLALDNTNKLIVLSFRGSRSIENWIGNLHFDLKEINDICSGCRGHDGFTSSWRSVADTLRQKVEDAVREHPDYRVVFTGHSLGGALATVAGADLRGNGYDIDVFSYGAPRVGNRAFAEFLTVQTGGTLYRITHTNDIVPRLPPREFGYSHSSPEYWIKSGTLVPVTRNDIVKIEGIDATGGNNRPNIPDIPAHLWYFGLIGTCL

SEQ ID NO: 4352 - protein, 269 aa, Thermomyces lanuginosus
EVSQDLFNQFNLFAQYSAAAYCGKNNDAPAGTNITCTGNACPEVEKADATFLYSFEDSGVGDVTGFLALDNTNKLIVLSFRGSRSIENWIGNLKFDLKEINDICSGCRGHDGFTSSWRSVADTLRQKVEDAVREHPDYRVVFTGHSLGGALATVAGADLRGNGYDIDVFSYGAPRVGNRAFAEFLTVQTGGTLYRITHTNDIVPRLPPREFGYSHSSPEYWIKSGTLVPVTRNDIVKIEGIDATGGNNKPNIPDIPAHLWYFGLIGTCL

SEQ ID NO: 4353 - protein, 269 aa, Thermomyces lanuginosus
EVSQDLFNQFNLFAQYSAAAYCGKNNDAPAGTNITCTGNACPEVEKADATFLYSFEDSGVGDVTGFLALDNTNKLIVLSFRGSRSIENWIGNLNFDLKEINDICSGCRGHDGFTSSWRSVADTLRQKVEDAVREHPDYRVVFTGHSLGGALATVAGADLRGNGYDIDVFSYGAPRVGNRAFAEFLTVQTGGTLYRITHTRDIVPRLPPREFGYSHSSPEYWIKSGTRVPVTRNDIVKIEGIDATGGNNQPNIPDIPAHLWYFGLIGTCL

SEQ ID NO: 4354 - protein, 269 aa, Thermomyces lanuginosus
EVSQDLFNQFNLFAQYSAAAYCGKNNDAPAGTNITCTGNACPEVEKADATFLYSFEDSGVGDVTGFLALDNTNKLIVLSFRGSRSIENWIGNLNFDLKEINDICSGCRGHDGFTSSWRSVADTLRQKVEDAVREHPDYRVVFTGHSLGGALATVAGADLRGNGYDIDVFSYGAPRVGNRAFAEFLTVQTGGTLYRITHTNDIVPRLPPREFGYSHSSPEYWIKSRTLRPVTRNDIVKIEGIDATGGNNQPNIPDIPAHLWYFGLIGTCL

SEQ ID NO: 4355 - protein, 269 aa, Thermomyces lanuginosus
EVSQDLFNQFNLFAQYSAAAYCQKNNDAPAGTNITCTGNACPEVEKADATFLYSFEDSGVGDVTGFLALDNTNKQIVLSFRGSRSIENWIGNLNFDLKEINDICSGCRGHDGFTSSWRSVADTLRQKVEDAVREHPDYRVVFTGHSLGGALATVAGADLRGNGYDIDVFSYGAPRVGNRAFAEFLTVQTGGTLYRITHTNDIVPRLPPREFGYSHSSPEYWIKSGTLVPVTRNDIVKIEGIDATGGNNQPNIPDIPAHLWYFGLIGTCL

SEQ ID NO: 4356 - protein, 269 aa, Synthetic construct
EVSQDLFNQFNLFAQYSAAAYCGKNNDAPAGTNITCTGNACPEVEKADATFLYSFEDSGVGDVTGFLALDNTNKLIVLSFRGSRSIKNWIGNLNFELKEINDICSGCRGHDGFTSSWRSVADTLRQKVEDAVREHPDYRVVFTGHSLGGALATVAGADLRGNGYDIDVFSYGAPRVGNRAFAEFLTVQTGGTLYRITHTNDIVPRLPPREFGYSHSSPEYWIKSGTLVPVTRNDIVKIEGIDATGGNNQPNIPDIPAHLWYFGLIGTCL

SEQ ID NO: 4357 - protein, 269 aa, Synthetic construct
EVSQDLFNQFNLFAQYSAAAYCGKNNDAPAGTNITCTGNACPEVEKADATFLYSFEDSGVGDVTGFLALDNTNKLIVLSFRGSRSIENWIGNLKFALKEINDICSGCRGHDGFTSSWRSVADTLRQKVEDAVREHPDYRVVFTGHSLGGALATVAGADLRGNGYDIDVFSYGAPRVGNRAFAEFLTVQTGGTLYRITHTNDIVPRLPPREFGYSHSSPEYWIKSGTLVPVTRNDIVKIEGIDATGGNNQPNIPDIPAHLWYFGLIGTCL

SEQ ID NO: 4358 - protein, 269 aa, Thermomyces lanuginosus
EVSQDLFNQFNLFAQYSAAAYCGKNNDAPAGTNITCTGNACPEVEKADATFLYSFEDSGVGDVTGFLALDNTNKLIVLSFRGSRSIENWIGNLNFDLKEINDICSGCRGHDGFTSSWRSVADTLRQKVEDAVREHPDYRVVFTGHSLGGALATVAGADLRGNGYDIDVFSYGAPRVGNRAFAEFLTVQTGGTLYRITHTNDIVPRLPPREFGYSHSSPEYWIKSRTRVPVTRNDIVKIEGIDATGGNNQPNIPDIPAHLWYFGLIGTCL

SEQ ID NO: 4359 - protein, 269 aa, Thermomyces lanuginosus
EVSQDLFNQFNLFAQYSAAAYCGKNNDAPAGTNITCTGNACPEVEKADATFLYSFEDSGVGDVTGFLALDNTNKLIVLSFRGSRSIENWIGNLNFDLKKINDICSGCRGHDGFTSSWRSVADTLRQKVEDAVREHPDYRVVFTGHSLGGALATVAGADLRGNGYDIDVFSYGAPRVGNRAFAEFLTVQTGGTLYRITHTNDIVPRLPPREFGYSHSSPEYWIKSGTLVPVTRNDIVKIEGIDATGGNNRPNIPDIPAHLWYFGLIGTCL

SEQ ID NO: 4360 - protein, 269 aa, Synthetic construct
EVSQDLFNQFNLFAQYSAAAYCGKNNDAPAGTNITCTGNACPEVEKADATFLYSFEDSGVGDVTGFLALDNTNKLIVLSFRGSRSIENWIGNLNCNLKEINDICSGCRGHDGFTSSWRSVADTLRQKVEDAVREHPDYRVVFTGHSLGGALATVAGADLRGNGYDIDVFSYGAPRVGNRAFAEFLTVQTGGTLYRITHTNDIVPRLPPREFGYSHSSPEYWIKSGTLVPVTRNDIVKIEGIDATGGNNQPNIPDIPAHLWYFGLIGTCL

SEQ ID NO: 4361 - protein, 269 aa, Synthetic construct
EVSQDLFNQFNLFAQYSAAAYCGKNNDAPAGTNITCTGNACPEVEKADATFLYSFEDSGVGDVTGFLALDNTNKLIVLSFRGSRSIENWIGNLNFDLKEINDICSGCRGHDGFTSSWRSVADTLRQKVEDAVREHPDYRVVFTGHSLGGALATVAGADLRGNGYDIGVFSYGAPRVGNRAFAEFLTVQTGGTLYRITHTNDIVPRLPPRVFGYSHSSPEYWIKSGTLVPVTRNDIVKIEGIDATGGNNQPNIPDIPAHLWYFGLIGTCL

SEQ ID NO: 4362 - protein, 269 aa, Thermomyces lanuginosus
EVSQDLFNQFNLFAQYSAAAYCGKNNDAPAGTNITCTGNACPEVEKADATFLYSFEDSGVGDVTGFLALDNTNKLIVLSFRGSRSIENWIGNLNFDLKEINDICRRCRGHDGFTSSWRSVADTLRQKVEDAVREHPDYRVVFTGHSLGGALATVAGADLRGNGYDIDVFSYGAPRVGNRAFAEFLTVQTGGTLYRITHTNDIVPRLPPREFGYSHSSPEYWIKSGTLVPVTRNDIVKIEGIDATGGNNQPNIPDIPAHLWYFGLIGTCL

SEQ ID NO: 4363 - protein, 269 aa, Thermomyces lanuginosus
EVSQDLFNQFNLFAQYSKAAYCGKNNDAPAGTNITCTGNACPEVEKADATFLYSFEDSGVGDVTGFLALDNTNKDIVLSFRGSRSIENWIGNLNFDLKEINDICSGCRGHDGFTSSWRSVADTLRQKVEDAVREHPDYRVVFTGHSLGGALATVAGADLRGNGYDIDVFSYGAPRVGNRAFAEFLTVQTGGTLYRITHTNDIVPRLPPREFGYSHSSPEYWIKSGTLVPVTRNDIVKIEGIDATGGNNQPNIPDIPAHLWYFGLIGTCL

SEQ ID NO: 4364 - protein, 269 aa, Thermomyces lanuginosus
EVSQDLFNQFNLFAQYSAAAYCGKNNDAPAGTNITCTGNACPEVEKADATFLYSFEDSGVGDVTGFLALDNTNKLIVLSFRGSRSIENWIGNLNFDLKEINDICSRCRGHDGFTSSWRSVADTLRQKVEDAVREHPDYRVVFTGHSLGGALATVAGADLRGNGYDIDVFSYGAPRVGRRAFAEFLTVQTGGTLYRITHTNDIVPRLPPREFGYSHSSPEYWIKSGTLVPVTRNDIVKIEGIDATGGNNQPNIPDIPAHLWYFGLIGTCL

SEQ ID NO: 4365 - protein, 269 aa, Thermomyces lanuginosus
EVSQDLFNQFNLFAQYSAAAYCGKNNDAPAGTNITCTGNACPEVEKADATFLYSFEDSGVGDVTGFLALDNTNKLIVLSFRGSRSIENWIGNKNFGLKEINDICSGCRGHDGFTSSWRSVADTLRQKVEDAVREHPDYRVVFTGHSLGGALATVAGADLRGNGYDIDVFSYGAPRVGNRAFAEFLTVQTGGTLYRITHTNDIVPRLPPREFGYSHSSPEYWIKSGTLVPVTRNDIVKIEGIDATGGNNQPNIPDIPAHLWYFGLIGTCL

SEQ ID NO: 4366 - protein, 269 aa, Thermomyces lanuginosus
EVSQDLFNQFNLFAQYSAAAYCGKNNDAPAGTNITCTGNACPEVEKADATFLYSFEDSGVGDVTGFLALDNTNKLIVLSFRGSRSIENWITNLNFDLKEINDICSRCRGHDGFTSSWRSVADTLRQKVEDAVREHPDYRVVFTGHSLGGALATVAGADLRGNGYDIDVFSYGAPRVGNRAFAEFLTVQTGGTLYRITHTNDIVPRLPPREFGYSHSSPEYWIKSGTLVPVTRNDIVKIEGIDATGGNNQPNIPDIPAHLWYFGLIGTCL

SEQ ID NO: 4367 - protein, 269 aa, Thermomyces lanuginosus
EVSQDLFNQFNLFAQYSKAAYCGKNNSAPAGTNITCTGNACPEVEKADATFLYSFEDSGVGDVTGFLALDNTNKLIVLSFRGSRSIENWIGNLNFDLKEINDICSGCRGHDGFTSSWRSVADTLRQKVEDAVREHPDYRVVFTGHSLGGALATVAGADLRGNGYDIDVFSYGAPRVGNRAFAEFLTVQTGGTLYRITHTNDIVPRLPPREFGYSHSSPEYWIKSGTLVPVTRNDIVKIEGIDATGGNNQPNIPDIPAHLWYFGLIGTCL

SEQ ID NO: 4368 - protein, 269 aa, Thermomyces lanuginosus
EVSQDLFNQFNLFAQYSAAAYCGKNNDAPAGTNITCTRNACPEVEKADATFLYSFEDSGVGDVTGFLALDNTNKLIVLSFRGSRSIENWIGNLNFDLKEINDICSGCRGHDGFTSSWRSVADTLRQKVEDAVREHPDYRVVFTGHSLGGALATVAGADLRGNGYDIDVFSYGAPRVGNRAFAEFLTVQTGGTLYRITHTNDIVPRLPPREFGYSHSSPEYWIKSGTLVRVTRNDIVKIEGIDATGGNNQPNIPDIPAHLWYFGLIGTCL

SEQ ID NO: 4369 - protein, 269 aa, Thermomyces lanuginosus
EVSQDLFNQFNLFAQYSKAAYCGKNNDAPAGTNITCTGNACPEVFKADATFLYSFEDSGVGDVTGFLALDNTNKLIVLSFRGSRSIENWIGNLNFDLKEINDICSGCRGHDGFTSSWRSVADTLRQKVEDAVREHPDYRVVFTGHSLGGALATVAGADLRGNGYDIDVFSYGAPRVGNRAFAEFLTVQTGGTLYRITHTNDIVPRLPPREFGYSHSSPEYWIKSGTLVPVTRNDIVKIEGIDATGGNNQPNIPDIPAHLWYFGLIGTCL

SEQ ID NO: 4370 - protein, 269 aa, Thermomyces lanuginosus
EVSQDLFNQFNLFAQYSAAAYCGKNNDAPAGTNITCTGNACPEVEKADATFLYSFEDSGVGDVTGFLALDNTNKLIVLSFRGSRSIENWIGNLNFDLKEINDICSGCRGHDGFTSSWRSVADTLRQKVEDAVREHPDYRVVFTGHSLGGALATVAGADLRGNGYDIDVFSYGAPRVGNRAFAEFLTVQTGGTLYRITHTNDIVPRLPPREFGYSHSSPEYWIKSGTMVPVTRNDIVKIEGIDATGGNNQPNIPDIPAHLWYFGRIGTCL

SEQ ID NO: 4371 - protein, 269 aa, Thermomyces lanuginosus
EVSQDLFNQFNLFAQYSAAAYCGKNNDAPAGTNITCTGNACPEVEKADATFLYSFKDSGVGDVTGFLALDNTNKLIVLSFRGSRSIENWIGNLNFDLKEINDICSGCRGHDGFTSSWRSVADTLRQKVEAAVREHPDYRVVFTGHSLGGALATVAGADLRGNGYDIDVFSYGAPRVGNRAFAEFLTVQTGGTLYRITHTNDIVPRLPPREFGYSHSSPEYWIKSGTLVPVTRNDIVKIEGIDATGGNNQPNIPDIPAHLWYFGLIGTCL

SEQ ID NO: 4372 - protein, 269 aa, Thermomyces lanuginosus
EVSQDLFNQFNLFAQYSAAAYCGKNNDAPAGTNITCTGNACPEVEKADATFLYSFEDSGVGDVTGFLALDNTNKLIVLSFRGSRSIENWIGNLNFDLKEINRICRGCRGHDGFTSSWRSVADTLRQKVEDAVREHPDYRVVFTGHSLGGALATVAGADLRGNGYDIDVFSYGAPRVGNRAFAEFLTVQTGGTLYRITHTNDIVPRLPPREFGYSHSSPEYWIKSGTLVPVTRNDIVKIEGIDATGGNNQPNIPDIPAHLWYFGLIGTCL

SEQ ID NO: 4373 - protein, 269 aa, Thermomyces lanuginosus
EVSQDLFNQFNLFAQYSAAAYCGKNNDAPAGTNITCTGNACPEVEKADATFLYSFEDSGVGAVTGFLALDNTNKLIVLSFRGTRSIENWIGNLNFDLKEINDICSGCRGHDGFTSSWRSVADTLRQKVEDAVREHPDYRVVFTGHSLGGALATVAGADLRGNGYDIDVFSYGAPRVGNRAFAEFLTVQTGGTLYRITHTNDIVPRLPPREFGYSHSSPEYWIKSGTLVPVTRNDIVKIEGIDATGGNNQPNIPDIPAHLWYFGLIGTCL

SEQ ID NO: 4374 - protein, 269 aa, Thermomyces lanuginosus
EVSQDLFNQFNLFAQYSAAAYCGKNNDAPAGTNITCTGNACPEVEKADATFLYSFEDSGVGDVTGFLALDNTNKLIVLSFRGSRSIENWIGNLRFDLKEINDICSGCRGHDGFTSSWRSVADTLRQKVEDAVREHPDYRVVFTGHSLGGALATVAGADLRGNGYDIDVFSYGAPRVGNRAFAEFLTVQTGGTLYRITHTNDIVPRLPPREFGYSHSSPEYWIKSGTLVPVTRNDIVKIEGIDATGGNNKPNIPDIPAHLWYFGLIGTCL

SEQ ID NO: 4375 - protein, 269 aa, Thermomyces lanuginosus
EVSQDLFNQFNLFAQYSAAAVCGKNNDAPAGTNITCTGNACPEVEKADATFLYSFEDSGVGDVTGFLALDNTNKLIVLSFRGSRSIENWIGNLNFDLKEINDICSGCRGHDGFTSSWRSVADTLRQKVEDAVREHPDYRVVFTGHSLGGALATVAGADLRGNGYDIDVFSYGAPRVGNRAFAEFLTVQTGGTLYRITHTNDIVPRLPPREFGYSHSSPEYWIKSGTLVPVTRNDIVKIEGIDATGGNNQPNIPDIPAHLWIFGLIGTCL

SEQ ID NO: 4376 - protein, 269 aa, Thermomyces lanuginosus
EVSQDLFNQFNLFAQYSAAAYCGKNNDAPAGTNITCTGNACPEVEKADATFLYSFEDSGVGDVTGFLALDNTNKLIVLSFRGSRSIENWIGNLNFDLKEINDICSGCRGHDGFTSSWRSVADTLRQKVEDAVREHPDYRVVFTGHSLGGALATVAGADLRGNGYDIDVFSYGAPRVGNRAFAEFLTVQTGGTLYRITHTNDIVPRLPPREFGYSHSSPEYWIKRRTLVPVTRNDIVKIEGIDATGGNNQPNIPDIPAHLWYFGLIGTCL

SEQ ID NO: 4377 - protein, 269 aa, Thermomyces lanuginosus
EVSQDLFNQFNLFAQYSKAAYCGKNNDAPAGTNITCTGNACPEVEKADATFLYSFEDSGVGDVTGFLALDNTNKQIVLSFRGSRSIENWIGNLNFDLKEINDICSGCRGHDGFTSSWRSVADTLRQKVEDAVREHPDYRVVFTGHSLGGALATVAGADLRGNGYDIDVFSYGAPRVGNRAFAEFLTVQTGGTLYRITHTNDIVPRLPPREFGYSHSSPEYWIKSGTLVPVTRNDIVKIEGIDATGGNNQPNIPDIPAHLWYFGLIGTCL

SEQ ID NO: 4378 - protein, 269 aa, Thermomyces lanuginosus
EVSQDLFNQFNLFAQYSAAAYCGKNNDAPAGTNITCTGNACPEVEKADATFLYSFEDSGVGDVTGFLALDNTNKLIVLSFRGSRSIENWIGNLNFDLKEINDICSGCRGHDGFTSSWRSVADTLRQKVEDAVREHPDYRVVFTGHSLGGALATVAGADLRGNGYDIDVFSYGAPRVGNRAFAEFLTVQTGGTLYRITHTNDIVPRLPPREFGYSHSSPEYWIKRGTRVPVTRNDIVKIEGIDATGGNNQPNIPDIPAHLWYFGLIGTCL

SEQ ID NO: 4379 - protein, 269 aa, Thermomyces lanuginosus
EVSQDLFNQFNLFAQYSAAAYCGKNNDAPAGTNITCTGNACPEVEKADATFLYSFEDSGVGDVTGFLALDNTNKLIVLSFRGSRSIENWIGNLNFDLKHINDICSGCRGHDGFTSSWRSVADTLRQKVEDAVREHPDYRVVFTGHSLGGALATVAGADLRGNGYDIDVFSYGAPRVGNRAFAEFLTVQTGGTLYRITHTNDIVPRLPPREFGYSHSSPEYWIKSGTLVPVTRNDIVKIEGIDATGGNNHPNIPDIPAHLWYFGLIGTCL

SEQ ID NO: 4380 - protein, 269 aa, Thermomyces lanuginosus
EVSQDLFNQFNLFAQYSAAAYCGKNNDAPAGTNITCTGNACPEVEKADATFLYSFEDSGVGDVTGFLALDNTNKLIVLSFRGSRSIENWIGNLNFDLKEINDICSGCRGHDGFTSSWRSVADTLRQKVEDAVREHPDYRVVFTGHSLGGALATVAGADLRGNGYDIDVFSYGAPRVGNRAFAEFLTVQTGGTLYRITHTNDIVPRLPPREFGYSHSSPEYWIKSGTLVPVTRNDIKKIKGIDATGGNNQPNIPDIPAHLWYFGLIGTCL

SEQ ID NO: 4381 - protein, 269 aa, Thermomyces lanuginosus
EVSQDLFNQFNLFAQYSAAAYCGKNNDAPAGTNITCTGNACPEVEKADATFLYSFEDSGVGDVTGFLALDNTNKLIVLSFRGSRSIENWIGNLNYDLKEINDICSGCRGHDGFTSSWRSVADTLRQKVEDAVREHPDYRVVFTGHSLGGALATVAGADLRGNGYDIDVFSYGAPRVGNRAFAEFLTVQTGGTLYRITHTNDIVPRLPPREEGYSHSSPEYWIKSGTLVPVTRNDIVKIEGIDATGGNNQPNIPDIPAHLWYFGLIGTCL

SEQ ID NO: 4382 - protein, 269 aa, Thermomyces lanuginosus
EVSQDLFNQFNLFAQYSAAAYCGKNNDAPAGTNITCTGNACPEVEKADATFLYSFEDSGVGDVTGFLALDNTNKLIVLSFRGSRSIENWIGNLNFDLKEINDICSGCRGHDGFTSSWRSVADTLRQKVEDAVREHPDYRVVFTGHSLGGALATVAGADLRGNGYDIDVFSYGAPRVGNRAFAEFLTVQTGGTLYRITHTNDIVPRLPPREFGYSHSSPEYWIKSGTLVPVTRNDIVKIEGIDRTRGNNQPNIPDIPAHLWYFGLIGTCL

SEQ ID NO: 4383 - protein, 269 aa, Thermomyces lanuginosus
EVSQDLFNQFNLFAQYSAAAYCGKNNDAPAGTNITCTGNACPEVEKADATFLYSFEDSGVGDVTGFLALDNTNKLIVLSFRGSRSIENWIGNLRFDLKEINDICSGCRGHDGFTSSWRSVADTLRQKVEDAVREHPDYRVVFTGHSLGGALATVAWADLRGNGYDIDVFSYGAPRVGNRAFAEFLTVQTGGTLYRITHTNDIVPRLPPREFGYSHSSPEYWIKSGTLVPVTRNDIVKIEGIDATGGNNQPNIPDIPAHLWYFGLIGTCL

SEQ ID NO: 4384 - protein, 269 aa, Thermomyces lanuginosus
EVSQDLFNQFNLFAQYSAAAYCGKNNDAPAGTNITCTGNACPEVEKADATFLYSFEDSGVGDVTGFLALDNTNKLIVLSFRGSRSIENWIGNLNFDLKEINDICSGCRGHDGFTSSWRSVADTLRQKVEAAVREHPDYRVVFTGHSLGGALATVAGADLRGNGYDIDVFSYGAPRVGNRAFAEFLTVQQGGTLYRITHTNDIVPRLPPREFGYSHSSPEYWIKSGTLVPVTRNDIVKIEGIDATGGNNQPNIPDIPAHLWYFGLIGTCL

SEQ ID NO: 4385 - protein, 269 aa, Thermomyces lanuginosus
EVSQDLFNQFNLFAQYSAAAYCGKNNDAPAGTNITCTGNACPEVEKADATFLYSFEDSGVGDVTGFLALDNTNKLIVLSFRGSRSIENWIGNLNFDLKKINDICSGCRGHDGFTSSWRSVADTLRQKVEDAVREHPDYRVVFTGHSLGGALATVAGADLRGNGYDIDVFSYGAPRVGNRAFAEFLTVQTGGTLYRITHTNDIVPRLPPREFGYSHSSPEYWIKSGTLVPVTRNDIVKIEGIDATGGNNKPNIPDIPAHLWYFGLIGTCL

SEQ ID NO: 4386 - protein, 269 aa, Thermomyces lanuginosus
EVSQDLFNQFNLFAQYSAAAYCGKNNDAPAGTNITCTGNACPEVEKADATFLYSFEDSGVGDVTGFLALDNTNKLIVLSFRGSRSIENWIGNLNFDLKEINDICSGCRGHDGFTSSWRSVADTLRQKVEDAVREHPDYRVVFTGHSLGGALATVAGADLRGNGYDIDVFSYGAPRVGNRAFAEFLTVQTGGTLYRITHTNDIVPRLPPREFGYSHSSPEYWIKKKTLVPVTRNDIVKIEGIDATGGNNQPNIPDIPAHLWYFGLIGTCL

SEQ ID NO: 4387 - protein, 269 aa, Thermomyces lanuginosus
EVSQDLFNQFNLFAQYSAAAYCGKNNNAPAGTNITCTGNACPEVEKADATFLYSFEDSGVGDVTGFLALDNTNKLIVLSFRGSRSIENWIGNLNFDLKEINDICSGCRGHDGFTSSWRSVADTLRQKVEDAVREHPDYRVVFTGHSLGGALATVAGADLRGNGYDIDVFSYGAPRVGNRAFAEFLTVQTGGTLYRITHTNDIVPRLPPREFGYSHSSPEYWIKSGTLVPVTRQDIVKIEGIDATGGNNQPNIPDIPAHLWYFGLIGTCL

SEQ ID NO: 4388 - protein, 269 aa, Thermomyces lanuginosus
EVSQDLFNQFNLFAQYSAAAYCGKNNDAPAGTNITCTGNACPEVEKADATFLYSFEDSGVGDVTGFLALDNTNKRIVLSFRGSRSIENWIGNLNFDLKEINDICSGCRGHDGFTSSWRSVADTLRQKVEDAVREHPDYRVVFTGHSLGGALATVAGADLRGNGYDIDVFSYGAPRVGNRAFAEFLTVQTGGTLYRITHTNDIVPRLPPREFGYSHSSPEYWIKSGTLVPVTRNDIVKIEGIDATGGNNQPNIPDIPAHLWYFGRIGTCL

SEQ ID NO: 4389 - protein, 269 aa, Thermomyces lanuginosus
EVSQDLFNQFNLFAQYSAAAYCGKNNDAPAGTNITCTGNACPEVEKADATFLYSFEDMGVGDVTGFLALDNTNKLIVLSFRGSRSIENWIGNLNFDLKEINDICSGCRGHDGFTSSWRSVADTLRQKVEDAVREHPDYRVVFTGHSLGGALATVAGADLRGNGYDIDVFSYGAPRVGNRAFAEFLTVQTGGTLYRITHTNDIVPRLPPREFGYSHSSPEYWIKSGTLVPVTRNDIVKIEGIDATGGNNQPNIPDIPAHLWYFGRIGTCL

SEQ ID NO: 4390 - protein, 269 aa, Thermomyces lanuginosus
EVSQDLFNQFNLFAQYSAAAYCGKNNEAPAGTNITCTGNACPEVEKADATFLYSFEDSGVGDVTGFLALDNTNKLIVLSFRGSRSIENWIGNLNFDLKEINDICSGCRGHDGFTSSWRSVADTLRQKVEDAVREHPDYRVVFTGHSLGGALATVAGADLRGNPYDIDVFSYGAPRVGNRAFAEFLTVQTGGTLYRITHTNDIVPRLPPREFGYSHSSPEYWIKSGTLVPVTRNDIVKIEGIDATGGNNQPNIPDIPAHLWYFGLIGTCL

SEQ ID NO: 4391 - protein, 269 aa, Thermomyces lanuginosus
EVSQRLFNQFRLFAQYSAAAYCGKNNDAPAGTNITCTGNACPEVEKADATFLYSFEDSGVGDVTGFLALDNTNKLIVLSFRGSRSIENWIGNLNFDLKEINDICSGCRGHDGFTSSWRSVADTLRQKVEDAVREHPDYRVVFTGHSLGGALATVAGADLRGNGYDIDVFSYGAPRVGNRAFAEFLTVQTGGTLYRITHTNDIVPRLPPREFGYSHSSPEYWIKSGTLVPVTRNDIVKIEGIDATGGNNQPNIPDIPAHLWYFGLIGTCL

SEQ ID NO: 4392 - protein, 269 aa, Thermomyces lanuginosus
EVSQDLFNQFNLFAQYSAAAYCGKNNDAPAGTNITCTGNACPEVEKADATFLYSFEDSGVGDVTGFLALDNTNKLIVLSFRGSRSIENWIGNLRFDLKEINDICSGCRGHDGFTSSWRSVADTLRQKVEDAVREHPDYRVVFTGHSLGGALATVAGADLRGNGYDIDVFSYGAPRVGNRAFAEFLTVQTGGTLYRITHTNDIVPRLPPREFGYSHSSPEYWIKSGTLVPVTRNDIVKIEGIDATGGNNRPNIPDIPAHLWYFGLIGTCL

SEQ ID NO: 4393 - protein, 269 aa, Thermomyces lanuginosus
EVSQDLFNQFNLFAQYSAAAYCGKNNDAPAGTNITCTGNACPEVFKADATFLYSFEDSGVGDVTGFLALDNTRKLIVLSFRGSRSIENWIGNLNFDLKEINDICSGCRGHDGFTSSWRSVADTLRQKVEDAVREHPDYRVVFTGHSLGGALATVAGADLRGNGYDIDVFSYGAPRVGNRAFAEFLTVQTGGTLYRITHTNDIVPRLPPREFGYSHSSPEYWIKSGTLVPVTRNDIVKIEGIDATGGNNQPNIPDIPAHLWYFGLIGTCL

SEQ ID NO: 4394 - protein, 269 aa, Thermomyces lanuginosus
EVSQDLFNQFNLFAQYSAAAYCGKNNDAPAGTNITCTGNACPEVEKADATFLYSFEDSGVGDVTGFLALDNTNKLIVLSFRGSRSIENWIGNLNFSLKEINDICSGCRGHDGFTSSWRSVADTLRQKVEDAVREHPDYRVVFTGHSLGGALATVAGADLRGNGYDIDVFSYGAPRVGNRAFAEFLTVQTGGTLYRITHTNDIVPRLPPREFGYSHSSPEYWIKSGTLVPVTRNDIVKIEGIDATGGNNQPNIPDIPAHLWYFGLIATCL

SEQ ID NO: 4395 - protein, 269 aa, Thermomyces lanuginosus
EVSQDLFNQFKLFAQYSAAAYCGKNNSAPAGTNITCTGNACPEVEKADATFLYSFEDSGVGDVTGFLALDNTNKLIVLSFRGSRSIENWIGNLNFDLKEINDICSGCRGHDGFTSSWRSVADTLRQKVEDAVREHPDYRVVFTGHSLGGALATVAGADLRGNGYDIDVFSYGAPRVGNRAFAEFLTVQTGGTLYRITHTNDIVPRLPPREFGYSHSSPEYWIKSGTLVPVTRNDIVKIEGIDATGGNNQPNIPDIPAHLWYFGLIGTCL

SEQ ID NO: 4396 - protein, 269 aa, Thermomyces lanuginosus
EVSRDLFNQFNLFAQYSAAAYCGKNNDAPAGTNITCTGNACPEVEKADATFLYSFEDSGVGDVTGFLALDNTNKLIVLSFRGSRSIENWIGNLNFDLKEINDICSGCRGHDGFTSSWRSVADTLRQKVEDAVREHPDYRVVFTGHSLGGALATVAGADLRGNGYDIDVFSYGAPRVGNRAFAEFLTVQTGGTLYRITHTNDIVPRLPPREFGYSHSSPEYWIKSGTLVPVRRNDIVKIEGIDATGGNNQPNIPDIPAHLWYFGLIGTCL

SEQ ID NO: 4397 - protein, 269 aa, Thermomyces lanuginosus
EVSQDLFNQFNLFAQYSAAAYCGKNNDAEAGTDITCTGNACPEVEKADATFLYSFEDSGVGDVTGFLALDNTNKLIVLSFRGSRSIENWIGNLNFDLKEINDICSGCRGHDGFTSSWRSVADTLRQKVEDAVREHPDYRVVFTGHSLGGALATVAGADLRGNGYDIDVFSYGAPRVGNRAFAEFLTVQTGGTLYRITHTNDIVPRLPPREFGYSHSSPEYWIKSGTLVPVTRNDIVKIEGIDATGGNNQPNIPDIPAHLWYFGLIGTCL

SEQ ID NO: 4398 - protein, 269 aa, Thermomyces lanuginosus
EVSQDLFNQFNLFAQYSAAAYCGKNNDAPAGTNITCTGNACPEVEKADATFLYSFEDSGVGDVTGFLALDNTNKLIVLSFRGSRSIENWIGNLNFDLKHINDICSGCRGHDGFTSSWRSVADTLRQKVEDAVREHPDYRVVFTGHSLGGALATVAGADLRGNGYDIDVFSYGAPRVGNRAFAEFLTVQTGGTLYRITHTNDIVPRLPPREFGYSHSSPEYWIKSGTLVPVTRNDIVKIEGIDATGGNNRPNIPDIPAHLWYFGLIGTCL

SEQ ID NO: 4399 - protein, 269 aa, Thermomyces lanuginosus
EVSQDLFNQFNLFAQYSAAAYCKKNNDAPAGTNITCTGNACPEVEKADATFLYSFEDSGVGDVTGFLALDNTNKLIVLSFRGSRSIENWIGNLNFDLKEINDICSGCRGHDGFTSSWRSVADTLRQKVEDAVREHPDYRVVFTGHSLGGALATVAGADLRGNGYDIDVFSYGAPRVGNRAFAEFLTVQTGGTLYRITHTNDIVPRLPPREFGYSHSSPEYWIKSGTLVPVTRNDIVKIEGIDATGGNNQPNIPDIPAHLWYFGRIGTCL

SEQ ID NO: 4400 - protein, 269 aa, Thermomyces lanuginosus
EVSQDLFNQFNLFAQYSKAAYCGKNNDAPAGTNITCTGNACPEVEKADATFLYSFEDSGVGDVTGFLALDNTNKLIVLSFRGSRSIENWIGNLNFDLKEINDICSGCRGHDGFTSSWRSVADTLRQKVEDAVREHPDYRVVFTGHSLGGALATVAGADLRGNGYDIDVFSYGAPRVGNRAFAEFLTVQDGGTLYRITHTNDIVPRLPPREFGYSHSSPEYWIKSGTLVPVTRNDIVKIEGIDATGGNNQPNIPDIPAHLWYFGLIGTCL

SEQ ID NO: 4401 - protein, 269 aa, Thermomyces lanuginosus
EVSQDLFNQFNLFAQYSAAAYCGKNNDAPAGTNITCTGNACPEVEKADATFLYSFEDSGVGDVTGFLALDNTNKLIVLSFRGSRSIENWIGNLNFDLKRIRDICSGCRGHDGFTSSWRSVADTLRQKVEDAVREHPDYRVVFTGHSLGGALATVAGADLRGNGYDIDVFSYGAPRVGNRAFAEFLTVQTGGTLYRITHTNDIVPRLPPREFGYSHSSPEYWIKSGTLVPVTRNDIVKIEGIDATGGNNQPNIPDIPAHLWYFGLIGTCL

SEQ ID NO: 4402 - protein, 269 aa, Thermomyces lanuginosus
EVSQDLFNQFNLFAQYSAAAYCGKNNDAPAGTNITCTGNACPEVEKADATFLYSFEDSGVGDVTGFLALDNTNKLIVLSFRGSRSIENWIGNLNFDLKEINDICSGCRGHDGFTSSWRSVADTLRQKVEDAVREHPDYRVVFTGHSLGGALATVAGADLRGNGYDIDVFSYGAPRVGNRAFAEFLTTQTGGTLYRITHTNDIVPRLPPREFGYSHSSPEYWIKSGTLVPVTRNDIVKIEGIDATGGNNQPNIPDIPAHLWYFGRIGTCL

SEQ ID NO: 4403 - protein, 269 aa, Thermomyces lanuginosus
EVSQDLFNQFNLFAQYSAAAYCKKNNDAPAGTNITCTGNACPEVEKADATFLYSFEDSGVGDVTGFLALDNTNKLIVLSFRGSRSIENWIGNLNFDLKEINDICSGCRGHDGFTSSWRSVADTLRQKVEAAVREHPDYRVVFTGHSLGGALATVAGADLRGNGYDIDVFSYGAPRVGNRAFAEFLTVQTGGTLYRITHTNDIVPRLPPREFGYSHSSPEYWIKSGTLVPVTRNDIVKIEGIDATGGNNQPNIPDIPAHLWYFGLIGTCL

SEQ ID NO: 4404 - protein, 269 aa, Thermomyces lanuginosus
EVSQDLFNQFNLFAQYSAAAYCGKNNDAPAGTNITCTGNACPEVEKADATFLYSFEDSGVGDVTGFLALDNTNKLIVLSFRGSRSIENWIGNLNFDLKEINDICSGCRGHDGFTSSWRSVADTLRQKVEAAVREHPDYRVVFTGHSLGGALATVAGADLRGNGYDIDVFSYGAPRVGNRAFAEFLTNQTGGTLYRITHTNDIVPRLPPREFGYSHSSPEYWIKSGTLVPVTRNDIVKIEGIDATGGNNQPNIPDIPAHLWYFGLIGTCL

SEQ ID NO: 4405 - protein, 269 aa, Thermomyces lanuginosus
EVSQDLFNQFNLFAQYSAAAYCGKNNDAPAGTNITCTGNACPEVEKADATFLYSFEDSGVGDVTGFLALDNTNKLIVLSFRGSRSIENWIGNLNFDLKRINDICSGCRGHDGFTSSWRSVADTLRQKVEDAVREHPDYRVVFTGHSLGGALATVAGADLRGNGYDIDVFSYGAPRVGNRAFAEFLTVQTGGTLYRITHTNDIVPRLPPREFGYSHSSPEYWIKSGTLVPVTRNDIVKIEGIDATGGNNKPNIPDIPAHLWYFGLIGTCL

SEQ ID NO: 4406 - protein, 269 aa, Thermomyces lanuginosus
EVSQDLFNQFNLFAQYSAAAYCGKNNDAPAGTNITCTGNACPEVEKADATFLYSFEDSGVGDVTGFLALDNTNKLIVLSFRGSRSIENWIGNLNFDLKEINDICSGCRGHDGFTSSWRSVADTLRQKVEDAVREHPDYRVVFTGHSLGGALATVAGADLRGNGYDIDVFSYGAPRVGNRAFAEFLTVQTGGTLYRITHTNDIVPRLPPREFGYSHSSPEYWIKSGRLRPVTRNDIVKIEGIDATGGNNQPNIPDIPAHLWYFGLIGTCL

SEQ ID NO: 4407 - protein, 269 aa, Thermomyces lanuginosus
EVSQDLFNQFNLFAQYSAAAYCGKNNDAPAGTNITCTGNACPEVEKADATFLYSFEDSGVGDVTGFLALDNTNKLIVLSFRGSRSIENWIGNLNFDLKEINDICSGCRGHGGFTSSWRSVADTLRQKVEDAVREHPDYRVVFTGHSLGGALATVAGADLRGNGYDIDVFSYGAPRVGNRAFAEFLTVQTGGTLYRITHTNDIVPRLPPREFGYSHPSPEYWIKSGTLVPVTRNDIVKIEGIDATGGNNQPNIPDIPAHLWYFGLIGTCL

SEQ ID NO: 4408 - protein, 269 aa, Thermomyces lanuginosus
EVSQDLFNQFNLFAQYSAAAYCGKNNDAPAGTNITCTGNACPEVEKADATFLYSFEDSGVGDVTGFLALDNTNKLIVLSFRGSRSIENWIGNLNFDLKEINDICSGCRGHDGFTSSWRSVADTLRQKVEDAVREHPDYRVVFTGHSLGGALATVAGADLRGNGYDIDVFSYGAPRVGNRAFAEFLTVQTGGTLYRITHTNDIVPRLPPREFGYSHSSPEYWIKKGTLVKVTRNDIVKIEGIDATGGNNQPNIPDIPAHLWYFGLIGTCL

SEQ ID NO: 4409 - protein, 269 aa, Thermomyces lanuginosus
EVSQDLFNQFNLFAQYSAAAYCGKNNDAPAGTNITCTGNACPEVEKADATTLYSFEDSGVGDVTGFLALDNTNKRIVLSFRGSRSIENWIGNLNFDLKEINDICSGCRGHDGFTSSWRSVADTLRQKVEDAVREHPDYRVVFTGHSLGGALATVAGADLRGNGYDIDVFSYGAPRVGNRAFAEFLTVQTGGTLYRITHTNDIVPRLPPREFGYSHSSPEYWIKSGTLVPVTRNDIVKIEGIDATGGNNQPNIPDIPAHLWYFGLIGTCL

SEQ ID NO: 4410 - protein, 269 aa, Thermomyces lanuginosus
EVSQDLFNQFNLFAQYSAAAYCGKNNDAPAGTNITCTGNACPEVEKADATFLYSFEDSGVGDVTGFLALDNTNKLIVLSFRGSRSIENWIGNLNFDLKEINDICSGCRGHDGFTSSWRSVADTLRQKVEDAVREHPDYRVVFTGHSLGGALATVAGADLRGNGYDIDVFSYGAPRVGNRAFAEFLTVQTGGTLYRITHTNDIVPRLPPREFGYSHSSPEYWIKSRTLVRVTRNDIVKIEGIDATGGNNQPNIPDIPAHLWYFGLIGTCL

SEQ ID NO: 4411 - protein, 269 aa, Thermomyces lanuginosus
EVSQDLFNQFNLFAQYSAAAYCGKNNDAPAGTNITCTGNACPEVEKADATFLYSFEDSGVGDVTGFLALDNTNKLIVLSFRGSRSIENWIGNLNFDLKEINDICSGCRGHDGFTSSWRSVADTLRQKVEDAVREHPDYRVVFTGHSLGGALATVAGADLRGNGYDIDVFSYGAPRVGNRAFAEFLTVQTGGTLYRITHTNDIVPRLPPREFGYSHSSPEYWIKSGTRVPVTRNDIRKIEGIDATGGNNQPNIPDIPAHLWYFGLIGTCL

SEQ ID NO: 4412 - protein, 269 aa, Thermomyces lanuginosus
EVSQDLFNQFNLFAQYSAAAYCGANNDAPAGTNITCTGNACPEVEKADATFLYSFEDSGVGDVTGFLALDNTNKQIVLSFRGSRSIENWIGNLNFDLKEINDICSGCRGHDGFTSSWRSVADTLRQKVEDAVREHPDYRVVFTGHSLGGALATVAGADLRGNGYDIDVFSYGAPRVGNRAFAEFLTVQTGGTLYRITHTNDIVPRLPPREFGYSHSSPEYWIKSGTLVPVTRNDIVKIEGIDATGGNNQPNIPDIPAHLWYFGLIGTCL

SEQ ID NO: 4413 - protein, 269 aa, Thermomyces lanuginosus
EVSQDLFNQFNLFAQYSAAAYCGKNNDAPAGTNITCTGNACPEVEKADATFLYSFEDSGVGDVTGFLALDNTNKLIVLSFRGSRSIENWIGNLNFDLKHINDICSGCRGHDGFTSSWRSVADTLRQKVEDAVREHPDYRVVFTGHSLGGALATVAGADLRGNGYDIDVFSYGAPRVGNRAFAEFLTVQTGGTLYRITHTNDIVPRLPPREFGYSHSSPEYWIKSGTLVPVTRNDIVKIEGIDATGGNNKPNIPDIPAHLWYFGLIGTCL

SEQ ID NO: 4414 - protein, 270 aa, Thermomyces lanuginosus
EVSQDLFNQFNLFAQYSAAAYCGKNNDAPAGTNITCTGNACPEVEKADATFLYSFEDSGVGDVTGFLALDNTNKLIVLSFRGSRSIENWIGNLNFDLKEINDICRRRCRGHDGFTSSWRSVADTLRQKVEDAVREHPDYRVVFTGHSLGGALATVAGADLRGNGYDIDVFSYGAPRVGNRAFAEFLTVQTGGTLYRITHTNDIVPRLPPREFGYSHSSPEYWIKSGTLVPVTRNDIVKIEGIDATGGNNQPNIPDIPAHLWYFGLIGTCL

SEQ ID NO: 4415 - protein, 268 aa, Thermomyces lanuginosus
VSQDLFNQFNLFAQYSAAAYCGKNNDAPAGTNITCTGNACPEVEKADATFLYSFEDSGVGDVTGFLALDNTNKLIVLSFRGSRSIENWIGNLNFDLKEINDICSGCRGHDGFTSSWRSVADTLRQKVEDAVREHPDYRVVFTGHSLGGALATVAGADLRGNGYDIDVFSYGAPRVGNRAFAEFLTVQTGGTLYRITHTNDIVPRLPPREFGYSHSSPEYWIKSGTLVPVRRRDIVKIEGIDATGGNNQPNIPDIPAHLWYFGLIGTCL

SEQ ID NO: 4416 - protein, 268 aa, Thermomyces lanuginosus
VSQDLFNQFNLFAQYSAAAYCGKNNDAPAGTNITCTGNACPEVEKADATFLYSFEDSGVGDVTGFLALDNTNKLIVLSFRGSRSIENWIGNLNFLLKEINDICSGCRGHDGFTSSWRSVADTLRQKVEDAVREHPDYRVVFTGHSLGGALATVAGADLRGNGYDIDVFSYGAPRVGNRAFAEFLTVQTGGTLYRITHTNDIVPRLPPREFGYSHSSPEYWIKSGTLVPVTRCDIVKIEGIDATGGNNQPNIPDIPAHLWYFGLIGTCL

SEQ ID NO: 4417 - protein, 268 aa, Thermomyces lanuginosus
VSQDLFNQFNLFAQYSAAAYCGKNNDAPAGTNITCTGNACPEVEKADATFLYSFEDSGVGDVTGFLALDNTNKLIVLSFRGSRSIENWIGNLNFDLKEINDICSGCRGHDGFTSSWRSVADTLRQKVEDAVREHPDYRVVFTGHSLGGALATVAGADLRGNGYDIDVFSYGAPRVGNRAFAEFLTVQTGGTLYRITHTNDIVPRLPPREFGYSHSSPEYWIKSRTLVPVTRNDIVKIEGIDATGGNNQPNIPDIPAHLWYFGLIDTCL

SEQ ID NO: 4418 - protein, 268 aa, Thermomyces lanuginosus
VSQDLFNQFNLFAQYSAAAYCGKNNDAPAGTNITCTGNACPEVEKADATFLYSFEDSGVGDVTGFLALDNTNKLIVLSFRGSRSIENWIGNLNFDLKEINDICSGCRGHDGFTSSWRSVADTLRQKVEDAVREHPDYRVVFTGHSLGGALATVAGADLRGNGYDIDVFSYGAPRVGNRAFAEFLTVQTGGTLYRITHTNDIVPRLPPREFGYSHSSPEYWIKSGTLVPVTRCDIVKIEGIDATGGNNQPNIPSIPAHLWYFGLIGTCL

SEQ ID NO: 4419 - protein, 268 aa, Thermomyces lanuginosus
VSQDLFNQFNLFAQYSAAAYCGKNNDAPAGTNITCTANACPEVEKADATFLYSFEDSGVGDVTGFLALDNTNKLIVLSFRGSRSIENWIGNLNFDLKEINDICSGCRGHDGFTSSWRSVADTLRQKVEDAVREHPDYRVVFTGHSLGGALATVAGADLRGNGYDIDVFSYGAPRVGNRAFAEFLTVQTGGTLYRITHTNDIVPRLPPREFGYSHSSPEYWIKSGTLVPVTRCDIVKIEGIDATGGNNQPNIPDIPAHLWYFGLIGTCL

SEQ ID NO: 4420 - protein, 268 aa, Thermomyces lanuginosus
VSQDLFNQFNLFAQYSAAAYCGKNNDAPAGTNITCTGNACPEVEKADATFLYSFEDSGVGDVTGFLALDNTNKLIVLSFRGSRSIENWIGNLNFDLKEINDICSGCRGHDGFTSSWRSVADTLRQKVEDAVREHPDYRVVFTGHSLGGALATVAGADLRGNGYDIDVFSYGAPRVGNRAFAEFLTVQTGGTLYRITHTNDIVPRLPPREFGYSHSSPEYWIKSGTGVPVTRCDIVKIEGIDATGGNNQPNIPDIPAHLWYFGLIGTCL

SEQ ID NO: 4421 - protein, 268 aa, Thermomyces lanuginosus
VSQDLFNQFNLFAQYSAAAYCGKNNDAPAGTNITCTGNACPEVEKADATFLYSFEDSGVGDVTGFLAVDNTNKLIVLSFRGSRSIENWIGNLNFDLKEINDICSGCRGHDGFTSSWRSVADTLRQKVEDAVREHPDYRVVFTGHSLGGALATVAGADLRGNGYDIDVFSYGAPRVGNRAFAEFLTVQTGGTLYRITHTNDIVPRLPPREFGYSHSSPEYWIKSGTLVPVTRCDIVKIEGIDATGGNNQPNIPDIPAHLWYFGLIGTCL

SEQ ID NO: 4422 - protein, 268 aa, Thermomyces lanuginosus
VSQDLFNQFNLFAQYSAAAYCGKNNDAPAGTNITCTGNACPEVEKADATFLYSFEDSGVGDVTGFLARDNTNKLIVLSFRGSRSIENWIGNLNFDLKEINDICSGCRGHDGFTSSWRSVADTLRQKVEDAVREHPDYRVVFTGHSLGGALATVAGADLRGNGYDIDVFSYGAPRVGNRAFAEFLTVQTGGTLYRITHTNDIVPRLPPREFGYSHSSPEYWIKSGTLVPVTRCDIVKIEGIDATGGNNQPNIPDIPAHLWYFGLIGTCL

SEQ ID NO: 4423 - protein, 268 aa, Thermomyces lanuginosus
VSQDLFNQFNLFAQYSAAAYCGKNNDAPAGTNITCTGNACPEVEKADATFLYSFEDSGVGDVTGFLASDNTNKLIVLSFRGSRSIENWIGNLNFDLKEINDICSGCRGHDGFTSSWRSVADTLRQKVEDAVREHPDYRVVFTGHSLGGALATVAGADLRGNGYDIDVFSYGAPRVGNRAFAEFLTVQTGGTLYRITHTNDIVPRLPPREFGYSHSSPEYWIKSGTLVPVTRCDIVKIEGIDATGGNNQPNIPDIPAHLWYFGLIGTCL

SEQ ID NO: 4424 - protein, 268 aa, Thermomyces lanuginosus
VSQDLFNQFNLFAQYSAAAYCGKNNDAPAGTNITCTGNACPEVEKADATFLYSFEDSGVGDVTGFLALDNTNKLIVLSFRGSRSIENWIGNLNFDLKEINDICSGCRGHDGFTSSWRSVADTLRQKVEDAVREHPDYRVVFTGHSLGGALATVAGADLRGNGYDIDVFSYGAPRVGNRAFAEFLTVQTGGTLYRITSTNDIVPRLPPREFGYSHSSPEYWIKSGTLVPVTRCDIVKIEGIDATGGNNQPNIPDIPAHLWYFGLIGTCL

SEQ ID NO: 4425 - protein, 268 aa, Thermomyces lanuginosus
VSQDLFNQFNLFAQYSAAAYCGKNNDAPAGTNITCTGNACPEVEKADATFLYSFEDSGVGDVTGFLALDNTNKLIVLSFRGSRSIENWIGNLNFDLIEINDICSGCRGHDGFTSSWRSVADTLRQKVEDAVREHPDYRVVFTGHSLGGALATVAGADLRGNGYDIDVFSYGAPRVGNRAFAEFLTVQTGGTLYRITHTNDIVPRLPPREFGYSHSSPEYWIKSGTLVPVTRCDIVKIEGIDATGGNNQPNIPDIPAHLWYFGLIGTCL

SEQ ID NO: 4426 - protein, 268 aa, Thermomyces lanuginosus
VSQDLFNQFNLFAQYSAAAYCGKNNDAPAGTNITCTGNACPEVEKADATFLYSFEDSGVGDVTGFLALDNTNKLIVLSFRGSRSIENWIGNLNFDLEEINDICSGCRGHDGFTSSWRSVADTLRQKVEDAVREHPDYRVVFTGHSLGGALATVAGADLRGNGYDIDVFSYGAPRVGNRAFAEFLTVQTGGTLYRITHTNDIVPRLPPREFGYSHSSPEYWIKSGTLVPVTRCDIVKIEGIDATGGNNQPNIPDIPAHLWYFGLIGTCL

SEQ ID NO: 4427 - protein, 268 aa, Thermomyces lanuginosus
VSQDLFNQFNLFAQYSAAAYCGKNNDAPAGTNITCTGNACPEVEKADATFLYSFEDSGVGDVTGFLALDNTNKLIVLSFRGSRSIENWIGNLNFDLKEINDICSGCRGHDGFTSSWRSVADTLRQKVEDAVREHPDYRVVFTGHSLGGALATVAGADLRGNGYDIDVFSYGAPRVGNRAFAEFLTVQTGGTLYRITHTNDIVPRLPPRTFGYSHSSPEYWIKSGTLVPVTRCDIVKIEGIDATGGNNQPNIPDIPAHLWYFGLIGTCL

SEQ ID NO: 4428 - protein, 268 aa, Thermomyces lanuginosus
VSQDLFNQFNLFAQYSAAAYCGKNNDAPAGTNITCTGNACPEVEKADATFLYSFEDSGVGDVTGFLALDNTNKLIVLSFRGSRSIENWIGNLNFDLKEINDICSGCRGHDGFTSSWRSVADTLRQKVEDAVREHPDYRVVFTGHSLGGALATVAGADLRGNGYDIDVFSYGAPRVGNRAFAEFLTVQTGGTLYRITHTNDIVPRLPPREFGYSHSSPEYWIKSGTRVPVTRCDIVKIEGIDATGGNNQPNIPDIPAHLWYFGLIGTCL

SEQ ID NO: 4429 - protein, 268 aa, Thermomyces lanuginosus
EVSQDLFNQFNLFAQYSAAAYCGKNNDAPAGTNITCTGNACPEVEKADATFLYSFEDSGVGDVTGFLALDNTNKLIVLSFRGSRSIENWIGNLNFDLKEINDICSGCRGHDGFTSSWRSVADTLRQKVEDAVREHPDYRVVFTGHSLGGALATVAGADLRGNGYDIDVFSYGAPRVGNRAFAEFLTVQTGGTLYRITHTNDIVPRLPPREFGYSHSSPEYWIKSGTLVPVRRRDIVKIEGIDATGGNNQPNIPDIPAHLWYFGLIGTC

SEQ ID NO: 4430 - protein, 268 aa, Thermomyces lanuginosus
VSQDLFNQFNLFAQYSAAAYCGKNNDAPAGTNITCTGNACPEVEKADATFLYSFEDSGVGDVTGFLALDNTNKLIVLSFRGSRSIENWIGNLNFDLREINDICSGCRGHDGFTSSWRSVADTLRQKVEDAVREHPDYRVVFTGHSLGGALATVAGADLRGNGYDIDVFSYGAPRVGNRAFAEFLTVQTGGTLYRITHTNDIVPRLPPREFGYSHSSPEYWIKSGTLVPVTRCDIVKIEGIDATGGNNQPNIPDIPAHLWYFGLIGTCL

SEQ ID NO: 4431 - protein, 268 aa, Thermomyces lanuginosus
VSQDLFNQFNLFAQYSAAAYCGKNNDAPAGTNITCTGNACPEVEKADATFLYSFEDSGVGDVTGFLAHDNTNKLIVLSFRGSRSIENWIGNLNFDLKEINDICSGCRGHDGFTSSWRSVADTLRQKVEDAVREHPDYRVVFTGHSLGGALATVAGADLRGNGYDIDVFSYGAPRVGNRAFAEFLTVQTGGTLYRITHTNDIVPRLPPREFGYSHSSPEYWIKSGTLVPVTRCDIVKIEGIDATGGNNQPNIPDIPAHLWYFGLIGTCL

SEQ ID NO: 4432 - protein, 268 aa, Thermomyces lanuginosus
VSQDLFNQFNLFAQYSAAAYCGKNNDAPAGTNITCTGNACPEVEKADATFLYSFEDSGVGDVTGFLALDNTNKLIVLSFRGSRSIENWIGNLNFDLKEINDICSGCRGHDGFTSSWRSVADTLRQKVEDAVREHPDYRVVFTGHSLGGALATVAGADLRGNGYDIDVFSYGAPRVGNRAFAEFLTVQTGGTLYRITGTNDIVPRLPPREFGYSHSSPEYWIKSGTLVPVTRCDIVKIEGIDATGGNNQPNIPDIPAHLWYFGLIGTCL

SEQ ID NO: 4433 - protein, 268 aa, Thermomyces lanuginosus
VSQDLFNQFNLFAQYSAAAYCGKNNDAPAGTNITCTGNACPEVEKADATFLYSFEDSGVGDVTGFLALDNTNKLIVLSFRGSRSIENWIGNLNFDLKEINDICSGCRGHDGFTSSWRSVADTLRQKVEDAVREHPDYRVVFTGHSLGGALATVAGADLRGNGYDIDVFSYGAPRVGNRAFAEFLTVQTGGTLYRITLTNDIVPRLPPREFGYSHSSPEYWIKSGTLVPVTRCDIVKIEGIDATGGNNQPNIPDIPAHLWYFGLIGTCL

SEQ ID NO: 4434 - protein, 268 aa, Thermomyces lanuginosus
VSQDLFNQFNLFAQYSAAAYCGKNNDAPAGTNITCTGNACPEVEKADATILYSFEDSGVGDVTGFLALDNTNKLIVLSFRGSRSIENWIGNLNFDLKEINDICSGCRGHDGFTSSWRSVADTLRQKVEDAVREHPDYRVVFTGHSLGGALATVAGADLRGNGYDIDVFSYGAPRVGNRAFAEFLTVQTGGTLYRITHTNDIVPRLPPREFGYSHSSPEYWIKSGTLVPVTRCDIVKIEGIDATGGNNQPNIPDIPAHLWYFGLIGTCL

SEQ ID NO: 4435 - protein, 268 aa, Thermomyces lanuginosus
VSQDLFNQFNLFAQYSAAAYCGKNNDAPAGTNITCTGNACPEVEKADATFLYSFEDSGVGDVTGFLALDNTNKLIVLSFRGSRSIENWIGNLNFDLKEINDICSGCRGHDGFTSSWRSVADTLRQKVEDAVREHPDYRVVFTGHSLGGALATVAGADLRGNGYDIDVFSYGAPRMGNRAFAEFLTVQTGGTLYRITHTNDIVPRLPPREFGYSHSSPEYWIKSGTLVPVTRCDIVKIEGIDATGGNNQPNIPDIPAHLWYFGLIGTCL

SEQ ID NO: 4436 - protein, 268 aa, Thermomyces lanuginosus
VSQDLFNQFNLFAQYSAAAYCGKNNDAPAGTNITCTGNACPEVEKADATFLYSFEDSGVGDVTGFLAFDNTNKLIVLSFRGSRSIENWIGNLNFDLKEINDICSGCRGHDGFTSSWRSVADTLRQKVEDAVREHPDYRVVFTGHSLGGALATVAGADLRGNGYDIDVFSYGAPRVGNRAFAEFLTVQTGGTLYRITHTNDIVPRLPPREFGYSHSSPEYWIKSGTLVPVTRCDIVKIEGIDATGGNNQPNIPDIPAHLWYFGLIGTCL

SEQ ID NO: 4437 - protein, 268 aa, Thermomyces lanuginosus
VSQDLFNQFNLFAQYSAAAYCGKNNDAPAGTNITCTGNACPEVEKADATFLYSFRDSGVGDVTGFLALDNTNKLIVLSFRGSRSIENWIGNLNFDLKEINDICSGCRGHDGFTSSWRSVADTLRQKVEDAVREHPDYRVVFTGHSLGGALATVAGADLRGNGYDIDVFSYGAPRVGNRAFAEFLTVQTGGTLYRITHTNDIVPRLPPREFGYSHSSPEYWIKSGTLVPVTRCDIVKIEGIDATGGNNQPNIPDIPAHLWYFGLIGTCL

SEQ ID NO: 4438 - protein, 268 aa, Thermomyces lanuginosus
VSQDLFNQFNLFAQYSAAAYCGKNNDAPAGTNITCTGNACPEVEKADATFLYSFEDSGVGDVTGFLALDNTNKLIVLSFRGSRSIENWIGNLNFDLKEINDICSGCRGHDGFTSSWRSVADTLRQKVEDAVREHPDYRVVFTGHSLGGALATVAGADLRGNGYDIDVFSYGAPRVGNRAFAEFLTVQTGGTLYRITHTNDIVPRLPPREFGYSHSSPEYWIKSGTLVPVTRCDIVKIEGIDATGGNNQPNIPDITAHLWYFGLIGTCL

SEQ ID NO: 4439 - protein, 268 aa, Thermomyces lanuginosus
ISQDLFNQFNLFAQYSAAAYCGKNNDAPAGTNITCTGNACPEVEKADATFLYSFEDSGVGDVTGFLALDNTNKLIVLSFRGSRSIENWIGNLNFDLKEINDICSGCRGHDGFTSSWRSVADTLRQKVEDAVREHPDYRVVFTGHSLGGALATVAGADLRGNGYDIDVFSYGAPRVGNRAFAEFLTVQTGGTLYRITHTNDIVPRLPPREFGYSHSSPEYWIKSGTLVPVTRCDIVKIEGIDATGGNNQPNIPDIPAHLWYFGLIGTCL

SEQ ID NO: 4440 - protein, 268 aa, Thermomyces lanuginosus
VSQDLFNQFNLFAQYSAAAYCGKNNDAPAGTNITCTGNACPEVEKADATFLYSFEDSGVGDVTGFLALDNTNKLIVLSFRGSRSIENWIGNLNFELKEINDICSGCRGHDGFTSSWRSVADTLRQKVEDAVREHPDYRVVFTGHSLGGALATVAGADLRGNGYDIDVFSYGAPRVGNRAFAEFLTVQTGGTLYRITHTNDIVPRLPPREFGYSHSSPEYWIKSGTLVPVTRCDIVKIEGIDATGGNNQPNIPDIPAHLWYFGLIGTCL

SEQ ID NO: 4441 - protein, 268 aa, Thermomyces lanuginosus
VSQDLFNQFNLFAQYSAAAYCGKNNDAPAGTNITCTGNACPEVEKADATLLYSFEDSGVGDVTGFLALDNTNKLIVLSFRGSRSIENWIGNLNFDLKEINDICSGCRGHDGFTSSWRSVADTLRQKVEDAVREHPDYRVVFTGHSLGGALATVAGADLRGNGYDIDVFSYGAPRVGNRAFAEFLTVQTGGTLYRITHTNDIVPRLPPREFGYSHSSPEYWIKSGTLVPVTRCDIVKIEGIDATGGNNQPNIPDIPAHLWYFGLIGTCL

SEQ ID NO: 4442 - protein, 268 aa, Thermomyces lanuginosus
VSQDLFNQFNLFAQYSAAAYCGKNNDAPAGTKITCTGNACPEVEKADATFLYSFEDSGVGDVTGFLALDNTNKLIVLSFRGSRSIENWIGNLNFDLKEINDICSGCRGHDGFTSSWRSVADTLRQKVEDAVREHPDYRVVFTGHSLGGALATVAGADLRGNGYDIDVFSYGAPRVGNRAFAEFLTVQTGGTLYRITHTNDIVPRLPPREFGYSHSSPEYWIKSGTLVPVTRCDIVKIEGIDATGGNNQPNIPDIPAHLWYFGLIGTCL

SEQ ID NO: 4443 - protein, 268 aa, Thermomyces lanuginosus
VSQDLFNQFNLFAQYSAAAYCGKNNDAPAGTQITCTGNACPEVEKADATFLYSFEDSGVGDVTGFLALDNTNKLIVLSFRGSRSIENWIGNLNFDLKEINDICSGCRGHDGFTSSWRSVADTLRQKVEDAVREHPDYRVVFTGHSLGGALATVAGADLRGNGYDIDVFSYGAPRVGNRAFAEFLTVQTGGTLYRITHTNDIVPRLPPREFGYSHSSPEYWIKSGTLVPVTRCDIVKIEGIDATGGNNQPNIPDIPAHLWYFGLIGTCL

SEQ ID NO: 4444 - protein, 268 aa, Thermomyces lanuginosus
VSQDLFNQFNLFAQYSAAAYCGKNNDAPAGTNITCTGNACPEVEKADATFLYSFEDSGVGDVTGFLALDNTNKLIVLSFRGSRSIENWIGNLNFDLKEINDICSGCRGHDGFTSSWRSVADTLRQKVEDAVREHPDYRVVFTGHSLGGALATVAGADLRGNGYDIDVFSYGAPRVGNRAFAEFLTVQTGGTLYRITHTNDIVPRLPPRNFGYSHSSPEYWIKSGTLVPVTRCDIVKIEGIDATGGNNQPNIPDIPAHLWYFGLIGTCL

SEQ ID NO: 4445 - protein, 268 aa, Thermomyces lanuginosus
VSQRLFRQFNLFAQYSAAAYCGKNNDAPAGTNITCTGNACPEVEKADATFLYSFEDSGVGDVTGFLALDNTNKLIVLSFRGSRSIENWIGNLNFDLKEINDICSGCRGHDGFTSSWRSVADTLRQKVEDAVREHPDYRVVFTGHSLGGALATVAGADLRGNGYDIDVFSYGAPRVGNRAFAEFLTVQTGGTLYRITHTNDIVPRLPPREFGYSHSSPEYWIKSGTLVPVTRNDIVKIEGIDATGGNNQPNIPDIPAHLWYFGLIGTCL

SEQ ID NO: 4446 - protein, 268 aa, Thermomyces lanuginosus
VSQDLFNQFNLFAQYSAAAYCGKNNDAPAGTNITCTGNACPEVEKADATFLYSFEDSGVGDVTGFLACDNTNKLIVLSFRGSRSIENWIGNLNFDLKEINDICSGCRGHDGFTSSWRSVADTLRQKVEDAVREHPDYRVVFTGHSLGGALATVAGADLRGNGYDIDVFSYGAPRVGNRAFAEFLTVQTGGTLYRITHTNDIVPRLPPREFGYSHSSPEYWIKSGTLVPVTRCDIVKIEGIDATGGNNQPNIPDIPAHLWYFGLIGTCL

SEQ ID NO: 4447 - protein, 268 aa, Thermomyces lanuginosus
VSQDLFNQFNLFAQYSAAAYCGKNNDAPAGTNITCTGNACPEVEKADATFLYSFEDSGVGDVTGFLALDNTNKLIVLSFRGSRSIENWIGNLNFDLVEINDICSGCRGHDGFTSSWRSVADTLRQKVEDAVREHPDYRVVFTGHSLGGALATVAGADLRGNGYDIDVFSYGAPRVGNRAFAEFLTVQTGGTLYRITHTNDIVPRLPPREFGYSHSSPEYWIKSGTLVPVTRCDIVKIEGIDATGGNNQPNIPDIPAHLWYFGLIGTCL

SEQ ID NO: 4448 - protein, 268 aa, Thermomyces lanuginosus
VSQDLFNQFNLFAQYSAAAYCGKNNDAPAGTNITCTGNACPEVEKADATFLYSFQDSGVGDVTGFLALDNTNKLIVLSFRGSRSIENWIGNLNFDLKEINDICSGCRGHDGFTSSWRSVADTLRQKVEDAVREHPDYRVVFTGHSLGGALATVAGADLRGNGYDIDVFSYGAPRVGNRAFAEFLTVQTGGTLYRITHTNDIVPRLPPREFGYSHSSPEYWIKSGTLVPVTRCDIVKIEGIDATGGNNQPNIPDIPAHLWYFGLIGTCL

SEQ ID NO: 4449 - protein, 268 aa, Thermomyces lanuginosus
VSQDLFNQFNLFAQYSAAAYCGKNNDAPAGTNITCTGNACPEVEKADATFLYSFEDSGVGDVTGFLALDNTNKLIVLSFRGSRSIENWIGNLNFDLQEINDICSGCRGHDGFTSSWRSVADTLRQKVEDAVREHPDYRVVFTGHSLGGALATVAGADLRGNGYDIDVFSYGAPRVGNRAFAEFLTVQTGGTLYRITHTNDIVPRLPPREFGYSHSSPEYWIKSGTLVPVTRCDIVKIEGIDATGGNNQPNIPDIPAHLWYFGLIGTCL

SEQ ID NO: 4450 - protein, 268 aa, Thermomyces lanuginosus
VSQDLFNQFNLFAQYSAAAYCGKNNDAPAGTNITCTGNACPEVEKADATFLYSFEDSGVGDVTGFLALDNTNKLIVLSFRGSRSIENWIGNLNFDLKEINDICSGCRGHDGFTSSWRSVADTLRQKVEDAVREHPDYRVVFTGHSLGGALATVAGADLRGNGYDIDVFSYGAPRVGNRAFAEFLTVQTGGTLYRITDTNDIVPRLPPREFGYSHSSPEYWIKSGTLVPVTRCDIVKIEGIDATGGNNQPNIPDIPAHLWYFGLIGTCL

SEQ ID NO: 4451 - protein, 268 aa, Thermomyces lanuginosus
VSQDLFNQFNLFAQYSAAAYCGKNNDAPAGTNITCTGNACPEVEKADATFLYSFEDSGVGDVTGFLALDNTNKLIVLSFRGSRSIENWIGNLNFDLTEINDICSGCRGHDGFTSSWRSVADTLRQKVEDAVREHPDYRVVFTGHSLGGALATVAGADLRGNGYDIDVFSYGAPRVGNRAFAEFLTVQTGGTLYRITHTNDIVPRLPPREFGYSHSSPEYWIKSGTLVPVTRCDIVKIEGIDATGGNNQPNIPDIPAHLWYFGLIGTCL

SEQ ID NO: 4452 - protein, 268 aa, Thermomyces lanuginosus
VSQDLFNQFNLFAQYSAAAYCGKNNDAPAGTNITCTGNACPEVEKADATFLYSFEDSGVGDVTGFLALDNTNKLIVLSFRGSRSIENWIGNLNFDLKEINDICSGCRGHDGFTSSWRSVADTLRQKVEDAVREHPDYRVVFTGHSLGGALATVAGADLRGNGYDIDVFSYGAPRVGNRAFAEFLTVQTGGTLYRITYTNDIVPRLPPREFGYSHSSPEYWIKSGTLVPVTRCDIVKIEGIDATGGNNQPNIPDIPAHLWYFGLIGTCL

SEQ ID NO: 4453 - protein, 268 aa, Thermomyces lanuginosus
VSQDLFNQFNLFAQYSAAAYCGKNNDAPAGTNITCTGNACPEVEKADATFLYSFEDSGVGDVTGFLALDNTNKLIVLSFRGSRSIENWIGNLNFDLKEINDICSGCRGHDGFTSSWRSVADTLRQKVEDAVREHPDYRVVFTGHSLGGALATVAGADLRGNGYDIDVFSYGAPRLGNRAFAEFLTVQTGGTLYRITHTNDIVPRLPPREFGYSHSSPEYWIKSGTLVPVTRCDIVKIEGIDATGGNNQPNIPDIPAHLWYFGLIGTCL

SEQ ID NO: 4454 - protein, 268 aa, Thermomyces lanuginosus
VSQDLFNQFNLFAQYSAAAYCGKNNDAPAGTNITCTGNACPEVEKADATFLYSFEDSGVGDVTGFLALDNTNKLIVLSFRGSRSIENWIGNLNFDLKEINDICSGCRGHDGFTSSWRSVADTLRQKVEDAVREHPDYRVVFTGHSLGGALATVAGADLRGNGYDIDVFSYGAPRVGNRAFAEFLTVQTGGTLYRITHTNDIVPRLPPREFGYSHSSPEYWIKSGTFVPVTRCDIVKIEGIDATGGNNQPNIPDIPAHLWYFGLIGTCL

SEQ ID NO: 4455 - protein, 268 aa, Thermomyces lanuginosus
VSQDLFNQFNLFAQYSAAAYCGKNNDAPAGTNITCTGNACPEVEKADATFLYSFEDSGVGDVTGFLATDNTNKLIVLSFRGSRSIENWIGNLNFDLKEINDICSGCRGHDGFTSSWRSVADTLRQKVEDAVREHPDYRVVFTGHSLGGALATVAGADLRGNGYDIDVFSYGAPRVGNRAFAEFLTVQTGGTLYRITHTNDIVPRLPPREFGYSHSSPEYWIKSGTLVPVTRCDIVKIEGIDATGGNNQPNIPDIPAHLWYFGLIGTCL

SEQ ID NO: 4456 - protein, 268 aa, Thermomyces lanuginosus
VSQDLFNQFNLFAQYSAAAYCGKNNDAPAGTNITCTGNACPEVEKADATMLYSFEDSGVGDVTGFLALDNTNKLIVLSFRGSRSIENWIGNLNFDLKEINDICSGCRGHDGFTSSWRSVADTLRQKVEDAVREHPDYRVVFTGHSLGGALATVAGADLRGNGYDIDVFSYGAPRVGNRAFAEFLTVQTGGTLYRITHTNDIVPRLPPREFGYSHSSPEYWIKSGTLVPVTRCDIVKIEGIDATGGNNQPNIPDIPAHLWYFGLIGTCL

SEQ ID NO: 4457 - protein, 268 aa, Thermomyces lanuginosus
VSQDLFNQFNLFAQYSAAAYCGKNNDAPAGTNITCTGNACPEVEKADATFLYSFEDSGVGDVTGFLALDNTNKLIVLSFRGSRSIENWIGNLNFDLKEINDICSGCRGHDGFTSSWRSVADTLRQKVEDAVREHPDYRVVFTGHSLGGALATVAGADLRGNGYDIDVFSYGAPRVGNRAFAEFLTVQTGGTLYRITHTNDIVPRLPPRAFGYSHSSPEYWIKSGTLVPVTRCDIVKIEGIDATGGNNQPNIPDIPAHLWYFGLIGTCL

SEQ ID NO: 4458 - protein, 268 aa, Thermomyces lanuginosus
VSQDLFNQFNLFAQYSAAAYCGKNNDAPAGTNITCTGNACPEVEKADATFLYSFEDSGVGDVTGFLALDNTNKLIVLSFRGSRSIENWIGNLNFDLKEINDICSGCRGHDGFTSSWRSVADTLRQKVEDAVREHPDYRVVFTGHSLGGALATVAGADLRGNGYDIDVFSYGAPRVGNRAFAEFLTVQTGGTLYRITHTNDIVPRLPPREFGYSHSSPEYWIKSGTLVPVRRCDIVKIEGIDATGGNNQPNIPDIPAHLWYFGLIGTCL

SEQ ID NO: 4459 - protein, 268 aa, Thermomyces lanuginosus
VSQDLFNQFNLFAQYSAAAYCGKNNDAPAGTNITCTGNACPEVEKADATFLYSFEDSGVGDVTGFLALDNTNKLIVLSFRGSRSIENWIGNLNFDLKEINDICSGCRGHDGFTSSWRSVADTLRQKVEDAVREHPDYRVVFTGHSLGGALATVAGADLRGNGYDIDVFSYGAPRVGNRAFAEFLTVQTGGTLYRITHTNDIVPRLPPREFGYSHSSPEFWIKSGTLVPVTRCDIVKIEGIDATGGNNQPNIPDIPAHLWYFGLIGTCL

SEQ ID NO: 4460 - protein, 268 aa, Thermomyces lanuginosus
VSQDLFNQFNLFAQYSAAAYCGKNNDAPAGTNITCTGNACPEVEKADATFLYSFSDSGVGDVTGFLALDNTNKLIVLSFRGSRSIENWIGNLNFDLKEINDICSGCRGHDGFTSSWRSVADTLRQKVEDAVREHPDYRVVFTGHSLGGALATVAGADLRGNGYDIDVFSYGAPRVGNRAFAEFLTVQTGGTLYRITHTNDIVPRLPPREFGYSHSSPEYWIKSGTLVPVTRCDIVKIEGIDATGGNNQPNIPDIPAHLWYFGLIGTCL

SEQ ID NO: 4461 - protein, 268 aa, Thermomyces lanuginosus
VSQDLFNQFNLFAQYSAAAYCGKNNDAPAGTNITCTGNACPEVEKADATFLYSFEDSGVGDVTGFLALDNTNKLIVLSFRGSRSIENWIGNLNFDLKEINDICSGCRGHDGFTSSWRSVADTLRQKVEDAVREHPDYRVVFTGHSLGGALATVAGADLRGNGYDIDVFSYGAPRVGNRAFAEFLTVQTGGTLYRITHTNDIVPRLPPRRFGYSHSSPEYWIKSGTLVPVTRCDIVKIEGIDATGGNNQPNIPDIPAHLWYFGLIGTCL

SEQ ID NO: 4462 - protein, 268 aa, Thermomyces lanuginosus
VSQDLFNQFNLFAQYSAAAYCGKNNDAPAGTNITCTGNACPEVEKADATFLYSFKDSGVGDVTGFLALDNTNKLIVLSFRGSRSIENWIGNLNFDLKEINDICSGCRGHDGFTSSWRSVADTLRQKVEDAVREHPDYRVVFTGHSLGGALATVAGADLRGNGYDIDVFSYGAPRVGNRAFAEFLTVQTGGTLYRITHTNDIVPRLPPREFGYSHSSPEYWIKSGTLVPVTRCDIVKIEGIDATGGNNQPNIPDIPAHLWYFGLIGTCL

SEQ ID NO: 4463 - protein, 268 aa, Thermomyces lanuginosus
VSQDLFNQFNLFAQYSAAAYCGKNNDAPAGTNITCTGNACPEVEKADATFLYSFEDSGVGDVTGFLALDNTNKLIVLSFRGSRSIENWIGNLNFDLKEINDICSGCRGHDGFTSSWRSVADTLRQKVEDAVREHPDYRVVFTGHSLGGALATVAGADLRGNGYDIDVFSYGAPRVGNRAFAEFLTVQTGGTLYRITHTNDIVPRLPPRQFGYSHSSPEYWIKSGTLVPVTRCDIVKIEGIDATGGNNQPNIPDIPAHLWYFGLIGTCL

SEQ ID NO: 4464 - protein, 268 aa, Thermomyces lanuginosus
VSQDLFNQFNLFAQYSAAAYCGKNNDAPAGTNITCTGNACPEVEKADATFLYSFEDSGVGDVTGFLALDNTNKLIVLSFRGSRSIENWIGNLNFDLKEINDICSGCRGHDGFTSSWRSVADTLRQKVEDAVREHPDYRVVFTGHSLGGALATVAGADLRGNGYDIDVFSYGAPRVGNRAFAEFLTVQTGGTLYRITTTNDIVPRLPPREFGYSHSSPEYWIKSGTLVPVTRCDIVKIEGIDATGGNNQPNIPDIPAHLWYFGLIGTCL

SEQ ID NO: 4465 - protein, 268 aa, Thermomyces lanuginosus
VSQDLFNQFNLFAQYSAAAYCGKNNDAPAGTNITCTGNACPEVEKADATFLYSFEDSGVGDVTGFLALDNTNKLIVLSFRGSRSIENWIGNLNFDLKEINDICSGCRGHDGFTSSWRSVADTLRQKVEDAVREHPDYRVVFTGHSLGGALATVAGADLRGNGYDIDVFSYGAPRVGNRAFAEFLTVQTGGTLYRITHTNDIVPRLPPRKFGYSHSSPEYWIKSGTLVPVTRCDIVKIEGIDATGGNNQPNIPDIPAHLWYFGLIGTCL

SEQ ID NO: 4466 - protein, 268 aa, Thermomyces lanuginosus
VSQDLFNQFNLFAQYSAAAYCGKNNDAPAGTNITCTGNACPEVEKADATFLYSFEDSGVGDVTGFLALDNTNKLIVLSFRGSRSIENWIGNLNFDLKEINDICSGCRGHAGFTSSWRSVADTLRQKVEDAVREHPDYRVVFTGHSLGGALATVAGADLRGNGYDIDVFSYGAPRVGNRAFAEFLTVQTGGTLYRITHTNDIVPRLPPREFGYSHSSPEYWIKSGTLVPVTRCDIVKIEGIDATGGNNQPNIPDIPAHLWYFGLIGTCL

SEQ ID NO: 4467 - protein, 267 aa, Thermomyces lanuginosus
EVSQDLFNQFNLFAQYSAAAYCGKNNDAPAGTNITCTGNACPEVEKADATFLYSFEDSGVGDVTGFLALDNTNKLIVLSFRGSRSIENWIGNLNFDLKEINDICSGCRGHDGFTSSWRSVADTLRQKVEDAVREHPDYRVVFTGHSLGGALATVAGADLRGNGYDIDVFSYGAPRVGNRAFAEFLTVQTGGTLYRITHTNDIVPRLPPREFGYSHSSPEYWIKSRRPVTRNDIVKIEGIDATGGNNQPNIPDIPAHLWYFGLIGTCL

SEQ ID NO: 4468 - protein, 267 aa, Thermomyces lanuginosus
EVSQDLFNQFNLFAQYSAAAYCGKNNDAPAGTNITCTGNACPEVEKADATFLYSFEDSGVGDVTGFLALDNTNKLIVLSFRGSRSIENWIGNLNFDLKEINDICSGCRGHDGFTSSWRSVADTLRQKVEDAVREHPDYRVVFTGHSLGGALATVAGADLRGNGYDIDVFSYGAPRVGNRAFAEFLTVQTGGTLYRITHTNDIVPRLPPREFGYSHSSPEYWIKRRVPVTRNDIVKIEGIDATGGNNQPNIPDIPAHLWYFGLIGTCL

SEQ ID NO: 4469 - protein, 267 aa, Thermomyces lanuginosus
SRDLFRQFNLFAQYSAAAYCGKNNDAPAGTNITCTGNACPEVEKADATFLYSFEDSGVGDVTGFLALDNTNKLIVLSFRGSRSIENWIGNLNFDLKEINDICSGCRGHDGFTSSWRSVADTLRQKVEDAVREHPDYRVVFTGHSLGGALATVAGADLRGNGYDIDVFSYGAPRVGNRAFAEFLTVQTGGTLYRITHTNDIVPRLPPREFGYSHSSPEYWIKSGTLVPVTRNDIVKIEGIDATGGNNQPNIPDIPAHLWYFGLIGTCL

SEQ ID NO: 4470 - protein, 266 aa, Thermomyces lanuginosus
EVSQDLFNQFNLFAQYSAAAYCGKNNDAPAGTNITCTGNACPEVEKADATFLYSFEDSGVGDVTGFLALDNTNKLIVLSFRGSRSIENWIGNLNFDLKEINDICSGCRGHDGFTSSWRSVADTLRQKVEDAVREHPDYRVVFTGHSLGGALATVAGADLRGNGYDIDVFSYGAPRVGNRAFAEFLTVQTGGTLYRITHTNDIVPRLPPREFGYSHSSPEYWIKRVRVTRNDIVKIEGIDATGGNNQPNIPDIPAHLWYFGLIGTCL

SEQ ID NO: 4471 - protein, 265 aa, Thermomyces lanuginosus
EVSQDLFNQFNLFAQYSAAAYCGKNNDAPAGTNITCTGNACPEVEKADATFLYSFEDSGVGDVTGFLALDNTNKLIVLSFRGSRSIENWIGNLNFDLKEINDICSGCRGHDGFTSSWRSVADTLRQKVEDAVREHPDYRVVFTGHSLGGALATVAGADLRGNGYDIDVFSYGAPRVGNRAFAEFLTVQTGGTLYRITHTNDIVPRLPPREFGYSHSSPEYWIKRRPTRNDIVKIEGIDATGGNNQPNIPDIPAHLWYFGLIGTCL

SEQ ID NO: 4472 - protein, 291 aa, Thermomyces lanuginosus
MRSSLVLFFVSAWTALASPIRREVSQDLFNQFNLFAQYSAAAYCGKNNDAPAGTQITCTGNACPEVEKADATFLYSFEDSGVGDVTGFLALDNTNKLIVLSFRGSRSIENWIGNLNFDLKEINDICSGCRGHDGFTSSWRSVADTLRQKVEDAVREHPDYRVVFTGHSLGGALATVAGADLRGNGYDIDVFSYGAPRVGNRAFAEFLTVQTGGTLYRITHTNDIVPRLPPREFGYSHSSPEYWIKSGTLVPVTRRDIVKIEGIDATGGNNQPNIPSIPAHLWYFGLIGTCL

SEQ ID NO: 4473 - protein, 291 aa, Thermomyces lanuginosus
MRSSLVLFFVSAWTALASPIRREVSQDLFNQFNLFAQYSAAAYCGKNNDAPAGTNITCTGNACPEVEKADATFLYSFEDSGVGDVTGFLALDNTNKLIVLSFRGSRSIENWRGNLNFDLKEINDICSGCRGHDGFTSSWRSVADTLRQKVEDAVREHPDYRVVFTGHSLGGALATVAGADLRGNGYDIDVFSYGAPRVGNRAFAEFLTVQTGGTLYRITHTNDIVPRLPPREFGYSHSSPEYWIKSGTLVPVRRRDIVKIEGIDATGGNNQPNIPDIPAHLWYFGLIGTCL

SEQ ID NO: 4474 - protein, 292 aa, Thermomyces lanuginosus
MRSSLVLFFVSAWTALASPIRREVSQDLFNQFNLFAQYSAAAYCGKNNDAPAGTNITCTGNACPEVEKADATFLYSFEDSGVGDVTGFLALDNTNKLIVLSFRGSRSIEETGSGNLNFDLKEINDICSGCRGHDGFTSSWRSVADTLRQKVEDAVREHPDYRVVFTGHSLGGALATVAGADLRGNGYDIDVFSYGAPRVGNRAFAEFLTVQTGGTLYRITHTNDIVPRLPPREFGYSHSSPEYWIKSGTLVPVTRNDIVKIEGIDATGGNNQPNIPDIPAHLWYFGLIGTCL

SEQ ID NO: 4475 - protein, 291 aa, Thermomyces lanuginosus
MRSSLVLFFVSAWTALASPIRREVSQDLFNQFNLFAQYSAAAYCGKNNDAPAGTNITCTGNACPEVEKADATFLYSFEDSGVGDVTGFLALDNTNKLIVLSFRGSRSIQNWIGNLNFNLKEINDICSGCRGHDGFTSSWRSVADTLRQKVEDAVREHPDYRVVFTGHSLGGALATVAGADLRGNGYDIDVFSYGAPRVGNRAFAEFLTVQTGGTLYRITHTNDIVPRLPPREFGYSHSSPEYWIKSGTLVPVTRNDIVKIEGIDATGGNNQPNIPNIPAHLWYFGLIGTCL

SEQ ID NO: 4476 - protein, 291 aa, Thermomyces lanuginosus
MRSSLVLFFVSAWTALASPIRREVSQDLFNQFNLFAQYSAAAYCGKNNDAPAGTNITCTGNACPEVEKADATFLYSFEDAGVGDVTGFLALDNTNKLIVLSFRGDRSIENWIGNLNFDLKEINDICSGCRGRDGFTSSWRSVADTLRQKVEDAVREHPDYRVVFTGHSLGGALATVAGADLRGNGYDIDVFSYGAPRVGNRAFAEFLTVQTGGTLYRITHTNDIVPRLPPREFGYSHSSPEYWIKSGTLVPVTRNDIVKIEGIDATGGNNQPNIPDIPAHLWYFGLIGTCL

SEQ ID NO: 4477 - protein, 291 aa, Thermomyces lanuginosus
MRSSLVLFFVSAWTALASPIRREVSQDLFNQFNLFAQYSAAAYCGKNNDAPAGTNITCTGNACPEVEKADATFLYSFEDSGVGDVTGFLALDNTNKLIVLSFRGSRSIENWIGNLNFDLKEINDICSGCRGHDGFTSSWRSVADTLRQKVEDAVREHPDYRVVFTGHSLGGALATVAGADLRGNGYDIDVFSYGAPRVGNRAFAEFLTVQTGGTLYRITHTNDIVPRTPPREFGYSHSSPEYWIKSGTLVPVTRNDIVKIEGIDATGGNNQPNIPDTPAHTWYFGLIGTCL

SEQ ID NO: 4478 - protein, 291 aa, Thermomyces lanuginosus
MRSSLVLFFVSAWTALASPIRREVSQDLFNQFNLFAQYSAAAYCGKNNDAPAGTNITCTGNACPEVEKADATFLYSFEDSGVGDVTGFLALDNTNKLIVLSFRGSRSIENWIGNLNFDVKEINDICSGCRGHDGFTSSWRSVADTLRQKVEDAVREHPDYRVVFTGHSLGGALATVAGADLRGNGYDIDVFSYGAPRVGNRAFAEFLTVQTGGTLYRITHTNDIVPRLPPREFGYSHSSPEYWIKSGTLVPVRRRDIVKIEGIDATGGNNQPNIPDIPAHLWYFGLIGTCL

SEQ ID NO: 4479 - protein, 291 aa, Thermomyces lanuginosus
MRSSLVLFFVSAWTALASPIRREVSQDLFNQFNLFAQYSAAAYCGKNNDAPAGTQITCTGNACPEVEKADATFLYSFEDSGVGDVTGFLALDNTNKLIVLSFRGSRSIENWIGNLNFDLKEINDICSGCRGHDGFTSSWRSVADTLRQKVEDAVREHPDYRVVFTGHSLGGALATVAGADLRGNGYDIDVFSYGAPRVGNRAFAEFLTVQTGGTLYRITHTNDIVPRLPPREFGYSHSSPEYWIKSGTLVPVTRRDIVKIEGIDATGGNNQPNIPHIPAHLWYFGLIGTCL

SEQ ID NO: 4480 - protein, 291 aa, Thermomyces lanuginosus
MRSSLVLFFVSAWTALASPIRREVSQDLFNQFNLFAQYSAAAYCGKNNDAPAGTNITCTGNACPEVEKADATFLYSFEDSGVGDVTGFLALDNTNKLIVLSFRGSRSIENWIGNLNFDLKEINDICSGCRGHDGFTSSWRSVADTLRQKVEDAVREHPDYRVVFTGHSLGGALATVAGADLRGNGYDIDVFSYGAPRVGNRAFAEFLTVQTGGTLYRITHTNDIVPRLPPREFGYSHSSPEYWIKSGTLVPVRRRGIVKIEGIDATGGNNQPNIPDIPAHLWYFGLIGTCL

SEQ ID NO: 4481 - protein, 291 aa, Thermomyces lanuginosus
MRSSLVLFFVSAWTALASPIRREVSQDLFNQFNLFAQYSAAAYCGKNNDAPAGTNITCTGNACPEVEKADATFLYSFEDSGVGDVTGFLALDNTNKLIVLSFRGSRSIQNWIGNLNFDLKEINDICSGCRGHDGFTSSWRSVADTLRQKVEDAVREHPDYRVVFTGHSLGGALATVAGADLRGNGYDIDVFSYGAPRVGNRAFAEFLTVQTGGTLYRITHTNDIVPRLPPRQFGYSHSSPEYWIKSGTLVPVTRNDIVKIEGIDATGGNNQPNIPNIPAHLWYFGLIGTCL

SEQ ID NO: 4482 - protein, 291 aa, Thermomyces lanuginosus
MRSSLVLFFVSAWTALASPIRREVSQDLFNQFNLFAQYSAAAYCGKNNDAPAGTQITCTGNACPEVEKADATFLYSFEDSGVGDVTGFLALDNTNKLIVLSFRGSRSIENWIGNLNFDLKEINDICSGCRGHDGFTSSWRSVADTLRQKVEDAVREHPDYRVVFTGHSLGGALATVAGADLRGNGYDIDVFSYGAPRVGNRAFAEFLTVQTGGTLYRITHTNDIVPRLPPREFGYSHSSPEYWIKSGTLVPVRRNDIVKIEGIDATGGNNQPNIPYIPAHLWYFGLIGTCL

SEQ ID NO: 4483 - protein, 291 aa, Thermomyces lanuginosus
MRSSLVLFFVSAWTALASPIRREVSQDLFNQFNLFAQYSAAAYCGKNNDAPAGTNITCTGNACPEVEKADATFLYSFEDSGVGDVTGFLALDNTNKLIVLSFRGSRSIENWIGNLNFDLKEINDICSGCRGHDGFTSSWRSVADTLRQKVEDAVREHPDYRVVFTGHSLGGALATVAGADLRGNGYDIDVFSYGAPRVGNRAFAEFLTVQTGGTLYRITHTNDIVPRLPPREFGYSHSSPEYWIKSGTLVPVRRIGIVKIEGIDATGGNNQPNIPDIPAHLWYFGLIGTCL

SEQ ID NO: 4484 - protein, 291 aa, Synthetic construct
MRSSLVLFFVSAWTALASPIRREVSQDLFNQFNLFAQYSAAAYCGKNNDAPAGTNITCTGNACPEVEKADATFLYSFEDSGVGDVTGFLALDNTNKLIVLSFRGSRSIENWIGNLNFLLKEINDICSGCRGHDGFTSSWRSVADTLRQKVEDAVREHPDYRVVFTGHSLGGALATVAGADLRGNGYDIDVFSYGAPRVGNRAFAEFLTVQTGGTLYRITHTNDIVPRVPPREFGYSHSSPEYWIKSGTLVPVTRNDIVKIEGIDATGGNNQPNIPDIPAHIWYFGLIGTCL

SEQ ID NO: 4485 - protein, 291 aa, Thermomyces lanuginosus
MRSSLVLFFVSAWTALASPIRREVSQDLFNQFNLFAQYSAAAYCGKNNDAPAGTNITCTGNACPEVEKADATFLYSFEDSGVGDVTGFLALDNTNKLIVLSFRGSRSIENWIGNLNFDLKEINDICSGCRGHDGFTSSWRSVADTLRQKVEDAVREHPDYRVVFTGHSLGGALATVAGADLRGNGYDIDVFSYGAPRVGNRAFAEFLTVQTGGTLYRITHTNDIVPRLPPREFGYSHSSPEYWIKSGTLVPVRRRDIVKIEGIDATGGNNQPNIPYIPAHLWYFGLIGTCL

SEQ ID NO: 4486 - protein, 291 aa, Thermomyces lanuginosus
MRSSLVLFFVSAWTALASPIRREVSQDLFNQFNLFAQYSAAAYCGKNNDAPAGTNITCTGNACPEVEKADATFLYSFEDSGVGDVTGFLALDNTNKLIVLSFRGSRSIENWIGNLNFDLKEINDICSGCRGHDGFTSSWRSVADTLRQKVEDAVREHPDYRVVFTGHSLGGALATVAGADLRGNGYDIDVFSYGAPRVGNRAFAEFLTVQTGGTLYRITHTNDIVPRLPPREFGYSHSSPEYWIKSGTGVPVRRRDIVKIEGIDATGGNNQPNIPDIPAHLWYFGLIGTCL

SEQ ID NO: 4487 - protein, 291 aa, Thermomyces lanuginosus
MRSSLVLFFVSAWTALASPIRREVSQDLFNQFNLFAQYSAAAYCGKNNDAPAGTNITCTGNACPEVEKADATFLYSFEDSGVGDVTGFLALDNTNKLIVLSFRGSRSIENWIGNLNFDLKEINDICSGCRGHDGFTSSWRSVADTLRQKVEDAVREHPDYRVVFTGHSLGGALATVAGADLRGNGYDIDVFSYGAPRVGNRAFAEFLTVQTGGTLYRITHTNDIVPRLPPRKFGYSHSSPEYWIKSGTLVPVRRRDIVKIEGIDATGGNNQPNIPDIPAHLWYFGLIGTCL

SEQ ID NO: 4488 - protein, 291 aa, Synthetic construct
MRSSLVLFFVSAWTALASPIRREVSQDLFNQFNLFAQYSAAAYCGKNNDAPAGTNITCTGNACPEVEKADATFLYSFQDSGVGDVTGFLALDNTNKLIVLSFRGSRSIENWIGNLNFDLKEINDICSGCRGHDGFTSSWRSVADTLRQKVEDAVREHPDYRVVFTGHSLGGALATVAGADLRGNGYDIDVFSYGAPRVGNRAFAEFLTVQTGGTLYRITHTNDIVPRVPPREFGYSHSSPEYWIKSGTLVPVTRNDIVKIEGIDATGGNNQPNIPDIPAHIWYFGLIGTCL

SEQ ID NO: 4489 - protein, 291 aa, Thermomyces lanuginosus
MRSSLVLFFVSAWTALASPIRREVSQDLFNQFNLFAQYSAAAYCGKNNDAPAGTNITCTGNACPEVEKADATFLYSFEDSGVGDVTGFLALDNTNKLIVLSFRGSRSIENWIGNLNFNLKEINDICSGCRGHDGFTSSWRSVADTLRQKVEDAVREHPDYRVVFTGHSLGGALATVAGADLRGNGYDIDVFSYGAPRVGNRAFAEFLTVQTGGTLYRITHTNDIVPRLPPREFGYSHSSPEYWIKSGTLVPVRRRDIVKIEGIDATGGNNQPNIPDIPAHLWYFGLIGTCL

SEQ ID NO: 4490 - protein, 291 aa, Thermomyces lanuginosus
MRSSLVLFFVSAWTALASPIRREVSQDLFNQFNLFAQYSAAAYCGKNNDAPAGTQITCTGNACPEVEKADATFLYSFEDSGVGDVTGFLALDNTNKLIVLSFRGSRSIENWIGNLNFDLKEINDICSGCRGHDGFTSSWRSVADTLRQKVEDAVREHPDYRVVFTGHSLGGALATVAGADLRGNGYDIDVFSYGAPRVGNRAFAEFLTVQTGGTLYRITHTNDIVPRLPPREFGYSHSSPEYWIKSGTLVPVRRNDIVKIEGIDATGGNNQPNIPLIPAHLWYFGLIGTCL

SEQ ID NO: 4491 - protein, 291 aa, Thermomyces lanuginosus
MRSSLVLFFVSAWTALASPIRREVSQDLFNQFNLFAQYSAAAYCGKNNDAPAGTQITCTGNACPEVEKADATFLYSFEDSGVGDVTGFLALDNTNKLIVLSFRGSRSIENWIGNLNFDLKEINDICSGCRGHDGFTSSWRSVADTLRQKVEDAVREHPDYRVVFTGHSLGGALATVAGADLRGNGYDIDVFSYGAPRVGNRAFAEFLTVQTGGTLYRITHTNDIVPRLPPREFGYSHSSPEYWIKSGTLVPVTRRDIVKIEGIDATGGNNQPNIPNIPAHLWYFGLIGTCL

SEQ ID NO: 4492 - protein, 291 aa, Thermomyces lanuginosus
MRSSLVLFFVSAWTALASPIRREVSQDLFNQFNLFAQYSAAAYCGKNNDAPAGTQITCTGNACPEVEKADATFLYSFEDSGVGDVTGFLALDNTNKLIVLSFRGSRSIENWIGNLNFDLKEINDICSGCRGHDGFTSSWRSVADTLRQKVEDAVREHPDYRVVFTGHSLGGALATVAGADLRGNGYDIDVFSYGAPRVGNRAFAEFLTVQTGGTLYRITHTNDIVPRLPPREFGYSHSSPEYWIKSGTLVPVRRNDIVKIEGIDATGGNNQPNIPQIPAHLWYFGLIGTCL

SEQ ID NO: 4493 - protein, 291 aa, Thermomyces lanuginosus
MRSSLVLFFVSAWTALASPIRREVSQDLFNQFNLFAQYSAAAYCGKNNDAPAGTNITCTGNACPEVEKADATFLYSFEDSGVGDVTGFLALDNTNKLIVLSFRGSRSIENWIGNLNFDLKEINDICSGCRGHDGFTSSWRSVADTLRQKVEDAVREHPDYRVVFTGHSLGGALATVAGADLRGNGYDIDVFSYGAPRVGNRAFAEFLTVQTGGTLYRITHTNDIVPRLPPREFGYSHSSPEYWIKSGTLVPVRRRDIVKIEGIDATGGNNQPNIPLIPAHLWYFGLIGTCL

SEQ ID NO: 4494 - protein, 291 aa, Thermomyces lanuginosus
MRSSLVLFFVSAWTALASPIRREVSQDLFNQFNLFAQYSAAAYCGKNNDAPAGTNITCTGNACPEVEKADATFLYSFEDSGVGDVTGFLALDNTNKLIVLSFRGSRSIENWIGNLNFDLKEINDICSGCRGHDGFTSSWRSVADTLRQKVEDAVREHPDYRVVFTGHSLGGALATVAGADLRGNGYDIDVFSYGAPRVGNRAFAEFLTVQTGGTLYRITHTNDVVPRLPPREFGYSHSSPEYWIKSGTLVPVRRRDIVKIEGIDATGGNNQPNIPDIPAHLWYFGLIGTCL

SEQ ID NO: 4495 - protein, 291 aa, Thermomyces lanuginosus
MRSSLVLFFVSAWTALASPIRREVSQDLFNQFNLFAQYSAAAYCGKNNDAPAGTNITCTGNACPEVEKADATFLYSFEDSGVGDVTGFLALDNTNKLIVLSFRGSRSIENWIGNLNFDLKEINDICSGCRGHDGFTSSWRSVADTLRQKVEDAVREHPDYRVVFTGHSLGGALATVAGADLRGNGYDIDVFSYGAPRVGNRAFAEFLTVQTGGTLYRITHTNDIVPRLPPREFGYSHSSPEYWIKSGTLVPVRRRDIVKIEGIDATGGNNQPNIPDSPAHLWYFGLIGTCL

SEQ ID NO: 4496 - protein, 291 aa, Thermomyces lanuginosus
MRSSLVLFFVSAWTALASPIRREVSQDLFNQFNLFAQYSAAAYCGKNNDAPAGTNITCTGNACPEVEKADATFLYSFEDSGVGDVTGFLALDNTNKLIVLSFRGSRSIENWAGNLNFDLKEINDICSGCRGHDGFTSSWRSVADTLRQKVEDAVREHPDYRVVFTGHSLGGALATVAGADLRGNGYDIDVFSYGAPRVGNRAFAEFLTVQTGGTLYRITHTNDIVPRLPPREFGYSHSSPEYWIKSGTLVPVRRRDIVKIEGIDATGGNNQPNIPDIPAHLWYFGLIGTCL

SEQ ID NO: 4497 - protein, 291 aa, Thermomyces lanuginosus
MRSSLVLFFVSAWTALASPIRREVSQDLFNQFNLFAQYSAAAYCGKNNDAPAGTNITCTGNACPEVEKADATFLYSFEDSGVGDVTGFLALDNTNKLIVLSFRGSRSIENWIGNLNFDLKEINDICSGCRGHDGFTSSWRSVADTLRQKVEDAVREHPDYRVVFTGHSLGGALATVAGADLRGNGYDIDVFSYGAPRVGNRAFAEFLTVQTGGTLYRITHTNDIVPRLPPREFGYSHPSPEYWIKSGTLVPVRRRDIVKIEGIDATGGNNQPNIPDIPAHLWYFGLIGTCL

SEQ ID NO: 4498 - protein, 291 aa, Thermomyces lanuginosus
MRSSLVLFFVSAWTALASPIRREVSQDLFNQFNLFAQYSAAAYCGKNNDAPAGTQITCTGNACPEVEKADATFLYSFEDSGVGDVTGFLALDNTNKLIVLSFRGSRSIENWIGNLNFDLKEINDICSGCRGHDGFTSSWRSVADTLRQKVEDAVREHPDYRVVFTGHSLGGALATVAGADLRGNGYDIDVFSYGAPRVGNRAFAEFLTVQTGGTLYRITHTNDIVPRLPPREFGYSHSSPEYWIKSGTLVPVTRRDIVKIEGIDATGGNNQPNIPYIPAHLWYFGLIGTCL

SEQ ID NO: 4499 - protein, 291 aa, Thermomyces lanuginosus
MRSSLVLFFVSAWTALASPIRREVSQDLFNQFNLFAQYSAAAYCGKNNDAPAGTNITCTGNACPEVEKADATFLYSFEDSGVGDVTGFLALDNTNKLIVLSFRGSRSIENWIGNLNFDLKEINDICSGCRGHDGFTSSWRSVADTLRQKVEDAVREHPDYRVVFTGHSLGGALATVAGADLRGNGYDIDVFSYGAPRVGNRAFAEFLTVQTGGTLYRITHTNDIVPRLPPREFGYSHSSPEYWIKSGTLVPVRRRDIVKIEGIDATGGNNQPNIPTIPAHLWYFGLIGTCL

SEQ ID NO: 4500 - protein, 291 aa, Synthetic construct
MRSSLVLFFVSAWTALASPIRREVSQDLFNQFNLFAQYSAAAYCGKNNDAPAGTNITCTGNACPEVEKADATFLYSFEDSGVGDVTGFLALDNTNKLIVLSFRGSRSIENWIVNLNFDLKEINDICSGCRGHDGFWSSWRSVADTLRQKVEDAVREHPDYRVVFTGHSLGGALATVAGADLRGNGYDIDVFSYGAPRVGNRAFAEFLTVQTGGTLYRITHTNDIVPRLPPREFGYSHSSPEYWIKSGTLVPVTRNDIVKIEGIDATGGNNQPNIPDPPAHLWYFGLIGTCL

SEQ ID NO: 4501 - protein, 291 aa, Thermomyces lanuginosus
MRSSLVLFFVSAWTALASPIRREVSQDLFNQFNLFAQYSAAAYCGKNNDAPAGTNITCTGNACPEVEKADATFLYSFEDSGVGDVTGFLALDNTNKLIVLSFRGSRSIENWIGNLNFDLKEINDICSGCRGHDGFTSSWRSVADTLRQKVEDAVREHPDYRVVFTGHSLGGALATVAGADLRGNGYDIDVFSYGAPRVGNRAFAEFLTVQTGGTLYRITHTNDIVPRLPPREFGYSHSSPEYWIKSGTLVPVRRRDIVKIEGIDATGGNNQPNIPQIPAHLWYFGLIGTCL

SEQ ID NO: 4502 - protein, 291 aa, Thermomyces lanuginosus
MRSSLVLFFVSAWTALASPIRREVSQDLFNQFNLFAQYSAAAYCGKNNRAPAGTNITCTGNACPEVEKADATFLYSFEDSGVGDVTGFLALDNTNKLIVLSFRGSRSIENWIGNLNFDLKEINDICSGCRGHDGFTSSWRSVADTLRQKVEDAVREHPDYRVVFTGHSLGGALATVAGADLRGNGYDIDVFSYGAPRVGNRAFAEFLTVQTGGTLYRITHTNDIVPRLPPREFGYSHSSPEYWIKSGTLVPVRRRDIVKIEGIDATGGNNQPNIPDIPAHLWYFGLIGTCL

SEQ ID NO: 4503 - protein, 291 aa, Thermomyces lanuginosus
MRSSLVLFFVSAWTALASPIRREVSQDLFNQFNLFAQYSAAAYCGKNNDAPAGTNITCTGNACPEVEKADATFLYSFEDSGVGDVTGFLALDNTNKLIVLSFRGSRSIENWIGNLNFDLKEINDICSGCRGHDGFTSSWRSVADTLRQKVEDAVREHPDYRVVFTGHSLGGGLATVAGADLRGNGYDIDVFSYGAPRVGNRAFAEFLTVQTGGTLYRITHTNDIVPRLPPREFGYSHSSPEYWIKSGTLVPVRRRDIVKIEGIDATGGNNQPNIPDIPAHLWYFGLIGTCL

SEQ ID NO: 4504 - protein, 291 aa, Thermomyces lanuginosus
MRSSLVLFFVSAWTALASPIRREVSQDLFNQFNLFAQYSAAAYCGKNNDAPAGTQITCTGNACPEVEKADATFLYSFEDSGVGDVTGFLALDNTNKLIVLSFRGSRSIENWIGNLNFDLKEINDICSGCRGHDGFTSSWRSVADTLRQKVEDAVREHPDYRVVFTGHSLGGALATVAGADLRGNGYDIDVFSYGAPRVGNRAFAEFLTVQTGGTLYRITHTNDIVPRLPPREFGYSHSSPEYWIKSGTLVPVRRNDIVKIEGIDATGGNNQPNIPSIPAHLWYFGLIGTCL

SEQ ID NO: 4505 - protein, 291 aa, Thermomyces lanuginosus
MRSSLVLFFVSAWTALASPIRREVSQDLFNQFNLFAQYSAAAYCGKNNDAPAGTQITCTGNACPEVEKADATFLYSFEDSGVGDVTGFLALDNTNKLIVLSFRGSRSIENWIGNLNFDLKEINDICSGCRGHDGFTSSWRSVADTLRQKVEDAVREHPDYRVVFTGHSLGGALATVAGADLRGNGYDIDVFSYGAPRVGNRAFAEFLTVQTGGTLYRITHTNDIVPRLPPREFGYSHSSPEYWIKSGTLVPVRRNDIVKIEGIDATGGNNQPNIPTIPAHLWYFGLIGTCL

SEQ ID NO: 4506 - protein, 291 aa, Thermomyces lanuginosus
MRSSLVLFFVSAWTALASPIRREVSQDLFNQFNLFAQYSAAAYCGKNNDAPAGTQITCTGNACPEVEKADATFLYSFEDSGVGDVTGFLALDNTNKLIVLSFRGSRSIENWIGNLNFDLKEINDICSGCRGHDGFTSSWRSVADTLRQKVEDAVREHPDYRVVFTGHSLGGALATVAGADLRGNGYDIDVFSYGAPRVGNRAFAEFLTVQTGGTLYRITHTNDIVPRLPPREFGYSHSSPEYWIKSGTLVPVTRRDIVKIEGIDATGGNNQPNIPLIPAHLWYFGLIGTCL

SEQ ID NO: 4507 - protein, 291 aa, Thermomyces lanuginosus
MRSSLVLFFVSAWTALASPIRREVSQDLFNQFNLFAQYSAAAYCGKNNDAPAGTNITCTGNACPEVEKADATFLYSFEDSGVGDVTGFLALDNTNKLIVLSFRGSRSGENWIGNLNFDLKEINDICSGCRGHDGFTSSWRSVADTLRQKVEDAVREHPDYRVVFTGHSLGGALATVAGADLRGNGYDIDVFSYGAPRVGNRAFAEFLTVQTGGTLYRITHTNDIVPRLPPREFGYSHSSPEYWIKSGTLVPVRRRDIVKIEGIDATGGNNQPNIPDIPAHLWYFGLIGTCL

SEQ ID NO: 4508 - protein, 291 aa, Thermomyces lanuginosus
MRSSLVLFFVSAWTALASPIRREVSQDLFNQFNLFAQYSAAAYCGKNNDAPAGTNITCTGNACPEVEKADATFLYSFEDSGVGDVTGFLALDNTNKLIVLSFRGSRSIENWIGNLNFDLKEINDICSGCRGHDGFTSSWRSVADTLRQKVEDAVREHPDYRVVFTGHSLGGALATVAGADLRGNGYDIDVFSYGAPRVGNRAFAEFLTVQTGGTLYRITHTNDIVPRLPPREFGYSHSSPEYWIKSGTLVPVRRRDIVKIEGIDATGGNNQPNIPDAPAHLWYFGLIGTCL

SEQ ID NO: 4509 - protein, 291 aa, Thermomyces lanuginosus
MRSSLVLFFVSAWTALASPIRREVSQDLFNQFNLFAQYSAAAYCGKNNDAPAGTNITCTGNACPEVEKADATFLYSFEDSGVGDVTGFLALDNTNKLIVLSFRGSRSIENWIGNLNFDLKEINDICSGCRGHDGFTSSWRSVADTLRQKVEDAVREHPDYRVVFTGHSLGGALATVAGADLRGNGYDIDVFSYGAPRVGNRAFAEFLTVQTGGTLYRITHTNDIVPRLPPREFGYSHSSPEYWIKSGTLVPVRRRDIVKIEGIDATGGNNQPNIPHIPAHLWYFGLIGTCL

SEQ ID NO: 4510 - protein, 291 aa, Thermomyces lanuginosus
MRSSLVLFFVSAWTALASPIRREVSQDLFNQFNLFAQYSAAAYCGKNNDAPAGTQITCTGNACPEVEKADATFLYSFEDSGVGDVTGFLALDNTNKLIVLSFRGSRSIENWIGNLNFDLKEINDICSGCRGHDGFTSSWRSVADTLRQKVEDAVREHPDYRVVFTGHSLGGALATVAGADLRGNGYDIDVFSYGAPRVGNRAFAEFLTVQTGGTLYRITHTNDIVPRLPPREFGYSHSSPEYWIKSGTLVPVRRNDIVKIEGIDATGGNNQPNIPHIPAHLWYFGLIGTCL

SEQ ID NO: 4511 - protein, 291 aa, Thermomyces lanuginosus
MRSSLVLFFVSAWTALASPIRREVSQDLFNQFNLFAQYSAAAYCGKNNDAPAGTNITCTGNACPEVEKADATFLYSFEDSGVGDVTGFLALDNTNKLIVLSFRGSRSIENWISNLNFVLKEINDICSGCRGHDGFTSSWRSVADTLRQKVEDAVREHPDYRVVFTGHSLGGALATVAGADLRGNGYDIDVFSYGAPRVGNRAFAEFLTVQTGGTLYRITHTNDIVPRLPPREFGYSHSSPEYWIKSGTLVPVTRNDIVKIEGIDATGGNNQPNIPRIPAHLWYFGLIGTCL

SEQ ID NO: 4512 - protein, 291 aa, Thermomyces lanuginosus
MRSSLVLFFVSAWTALASPIRREVSQDLFNQFNLFAQYSAAAYCGKNNDAPAGTNITCTGNACPEVEKADATFLYSFEDSGVGDVTGFLALDNTNKLIVLSFRGSRSIENWIGNLNFDLKEINDICSGCRGHDGFTSSWRSVADTLRQKVEDAVREHPDYRVVFTGHSLGGALATVAGADLRGNGYDIDVFSYGAPRVGNRAFAEFLTVQTGGTLYRITHTNDIVPRLPPREFGYSHSSPEYWIKSGTLVPVRRRDIVKIEGIDATGGNNQPNIPNIPAHLWYFGLIGTCL

SEQ ID NO: 4513 - protein, 291 aa, Thermomyces lanuginosus
MRSSLVLFFVSAWTALASPIRREVSQDLFNQFNLFAQYSAAAYCGKNNDAPAGTQITCTGNACPEVEKADATFLYSFEDSGVGDVTGFLALDNTNKLIVLSFRGSRSIENWIGNLNFDLKEINDICSGCRGHDGFTSSWRSVADTLRQKVEDAVREHPDYRVVFTGHSLGGALATVAGADLRGNGYDIDVFSYGAPRVGNRAFAEFLTVQTGGTLYRITHTNDIVPRLPPREFGYSHSSPEYWIKSGTLVPVTRRDIVKIEGIDATGGNNQPNIPQIPAHLWYFGLIGTCL

SEQ ID NO: 4514 - protein, 291 aa, Thermomyces lanuginosus
MRSSLVLFFVSAWTALASPIRREVSQDLFNQFNLFAQYSAAAYCGKNNDAPAGTQITCTGNACPEVEKADATFLYSFEDSGVGDVTGFLALDNTNKLIVLSFRGSRSIENWIGNLNFDLKEINDICSGCRGHDGFTSSWRSVADTLRQKVEDAVREHPDYRVVFTGHSLGGALATVAGADLRGNGYDIDVFSYGAPRVGNRAFAEFLTVQTGGTLYRITHTNDIVPRLPPREFGYSHSSPEYWIKSGTLVPVRRRDIVKIEGIDATGGNNQPNIPDIPAHLWYFGLIGTCL

SEQ ID NO: 4515 - protein, 291 aa, Thermomyces lanuginosus
MRSSLVLFFVSAWTALASPIRREVSQDLFNQFNLFAQYSAAAYCGKNNDAPAGTQITCTGNACPEVEKADATFLYSFEDSGVGDVTGFLALDNTNKLIVLSFRGSRSIENWIGNLNFDLKEINDICSGCRGHDGFTSSWRSVADTLRQKVEDAVREHPDYRVVFTGHSLGGALATVAGADLRGNGYDIDVFSYGAPRVGNRAFAEFLTVQTGGTLYRITHTNDIVPRLPPREFGYSHSSPEYWIKSGTLVPVRRNDIVKIEGIDATGGNNQPNIPNIPAHLWYFGLIGTCL

SEQ ID NO: 4516 - protein, 291 aa, Thermomyces lanuginosus
MRSSLVLFFVSAWTALASPIRREVSQDLFNQFNLFAQYSAAAYCGKNNDAPAGTNITCTGNACPEVEKADATFLYSFEDSGVGDVTGFLALDNTNKLIVLSFRGSRSIENWIGNLNFDLKEINDICSGCRGHDGFTSSWRSVADTLRQKVEDAVREHPDYRVVFTGHSLGGALATVAGADLRGNGYDIDVFSYGAPRVGNRAFAEFLTVQTGGTLYRITHTNDIVPRLPPREFGYSHSSPEYWIKSGTLVPVRRRDIVKIEGIDATGGNNQPNIPDIKAHLWYFGLIGTCL

SEQ ID NO: 4517 - protein, 291 aa, Thermomyces lanuginosus
MRSSLVLFFVSAWTALASPIRREVSQDLFNQFNLFAQYSAAAYCGKNNDAPAGTNITCTGNACPEVEKADATFLYSFEDSGVGDVTGFLALDNTNKLIVLSFRGSRSIENWIGNLNFDLKEINDICSGCRGHDGFTSSWRSVADTLRQKVEDAVREHPDYRVVFTGHSLGGALATVAGADLRGNGYDIDVFSYGAPRVGNRAFAEFLTVQTGGTLYRITHTNDIVPRLPPREFGYSHSSPEYWIKSGTLVPVRRRDIVKIEGIDATGGNNQPNIPDPPAHLWYFGLIGTCL

SEQ ID NO: 4518 - protein, 291 aa, Thermomyces lanuginosus
MRSSLVLFFVSAWTALASPIRREVSQDLFNQFNLFAQYSAAAYCGKNNDAPAGTNITCTGNACPEVEKADATFLYSFEDSGVGDVTGFLALDNTNKLIVLSFRGSRSIENWIGNLNFDLKEINDICSGCRGHDGFTSSWRSVADTLRQKVEDAVREHPDYRVVFTGHSLGGALATVAGADLRGNGYDIDVFSYGAPRVGNRAFAEFLTVQTGGTLYRITHTNDIVPRLPPREFGYSHSSPEYWIKSGTLVPVRRRDIVKIEGIDATGGNNQPNIPSIPAHLWYFGLIGTCL

SEQ ID NO: 4519 - protein, 291 aa, Thermomyces lanuginosus
MRSSLVLFFVSAWTALASPIRREVSQDLFNQFNLFAQYSAAAYCGKNNDAPAGTQITCTGNACPEVEKADATFLYSFEDSGVGDVTGFLALDNTNKLIVLSFRGSRSIENWIGNLNFDLKEINDICSGCRGHDGFTSSWRSVADTLRQKVEDAVREHPDYRVVFTGHSLGGALATVAGADLRGNGYDIDVFSYGAPRVGNRAFAEFLTVQTGGTLYRITHTNDIVPRLPPREFGYSHSSPEYWIKSGTLVPVTRRDIVKIEGIDATGGNNQPNIPTIPAHLWYFGLIGTCL

SEQ ID NO: 4520 - protein, 194 aa, Humicola insolens
QLGAIQNDLESGSPDACPDAILIFARGSTEPGNMGITVGPALANGLKEHIPNIWIQGVGGPYDAALATNFLPRGTSQANIDEGKRLFHLAHQKCPNTPVVAGGYSQGAALIAAAVSELSGAVKEQVKGVVLFGYTQNLQNRGGIPNYPRERTKVFCNVGDAVCTGIPIITPAHLSYTIQARGEAARFLVDRIRA

SEQ ID NO: 4521 - protein, 194 aa, Humicola insolens
QLGAIQNDLESGSPDACPDAILIFARGSTEPGNMGITVGPALANGLKEHIPNIWIQGVGGPYDAALATNFLPRGTSQANIDEGKRLFHLAHQKCPNTPVVAGGYSQGAALIAAAVSELSGAVKEQVKGVVLFGYTQNLQNRGGIPNYPRERTKVFCNVGDAVCTGTLIITPAHFSYTVQARGEAARFLVDRIRA

SEQ ID NO: 4522 - protein, 194 aa, Humicola insolens
QLGAIQNDLESGSPDACPDAILIFARGSTEPGNMGITVGPALANGLKEHIPNIWIQGVGGPYDAALATNFLPRGTSQANIDEGKRLFHLAHQKCPNTPVVAGGYSQGAALIAAAVSELSGAVKEQVKGVVLFGYTQNLQNRGGIPNYPRERTKVFCNVGDAVCTGMLFITPAHLSYTIQARGEAARFLVDRIRA

SEQ ID NO: 4523 - protein, 194 aa, Humicola insolens
QLGAIQNDLESGSPDACPDAILIFARGSTEPGNMGITHGPALANGLKEHIPNIWIQGVGGPYDAALATNFLPRGTSQANIDEGKRLFHLAHQKCPNTPVVAGGYSQGAALIAAAVSELSGAVKEQVKGVVLFGYTQNLQNRGGIPNYPRERTKVFCNVGDAVCTGTLITTPAHLSYTIQARGEAARFLVDRIRA

SEQ ID NO: 4524 - protein, 278 aa, Thermus thermophilus
TGEVSPIRREVSQDLFNQFNLFAQYSAAAYCGKNNDAPAGTNITCTGNACPEVEKADATFLYSFEDSGVGDVTGFLALDNTNKLIVLSFRGSRSIENWIGNLNFDLKEINDICSGCRGHDGFTSSWRSVADTLRQKVEDAVREHPDYRVVFTGHSLGGALATVAGADLRGNGYDIDVFSYGAPRVGNRAFAEFLTVQTGGTLYRITHTNDIVPRLPPREFGYSHSSPEYWIKSGTLVPVTRNDIVKIEGIDATGGNNQPNIPDIPAHLWYFGLIGTCL

SEQ ID NO: 4525 - protein, 274 aa, Thermomyces lanuginosus
SPIRREVSQDLFNQFNLFAQYSAAAYCGKNNDAPAGTQITCTGNACPEVEKADATFLYSFEDSGVGDVTGFLALDNTNKLIVLSFRGSRSIENWIGNLNFDLKEINDICSGCRGHDGFTSSWRSVADTLRQKVEDAVREHPDYRVVFTGHSLGGALATVAGADLRGNGYDIDVFSYGAPRVGNRAFAEFLTVQTGGTLYRITHTNDIVPRLPPREFGYSHSSPEYWIKSGTLVPVRRRDIVKIEGIDATGGNNQPNIPDIPAHLWYFGLIGTCL

SEQ ID NO: 4526 - protein, 274 aa, Thermomyces lanuginosus
SPIRREVSQDLFNQFNLFAQYSAAAYCGKNNDAPAGTNITCLGNACPEVEKADATFLYSFEDSGVGDVTGFLALDNTNKLIVLSFRGSRSIENWIGNLNFDLKEINDICSGCRGHDGFTSSWRSVADTLRQKVEDAVREHPDYRVVFTGHSLGGALATVAGADLRGNGYDIDVFSYGAPRVGNRAFAEFLTVQTGGTLYRITHTNDIVPRLPPREFGYSHSSPEYWIKSGTLVPVTRNDIVKIEGIDATGGNNQPNIPDIPAHLWYFGLIGTCL

SEQ ID NO: 4527 - protein, 274 aa, Thermomyces lanuginosus
SPIRREVSQDLFNQFNLFAQYSAAAYCGKNNDAPAGTQITCTGNACPEVEKADATFLYSFEDSGVGDVTGFLALDNTNKLIVLSFRGSRSIENWIGNLNFDLKEINDICSGCRGHDGFTSSWRSVADTLRQKVEDAVREHPDYRVVFTGHSLGGALATVAGADLRGNGYDIDVFSYGAPRVGNRAFAEFLTVQTGGTLYRITHTNDIVPRLPPREFGYSHSSPEYWIKSGTLVPVTRRDIVKIEGIDATGGNNQPNIPTIPAHLWYFGLIGTCL

SEQ ID NO: 4528 - protein, 274 aa, Thermomyces lanuginosus
SPIRREVSQDLFNQFNLFAQYSAAAYCGKNNDAPAGTNITCTGNACPEVEKADATFLYSFEDSGVGDVTGFLALDNTNKLIVLSFRGSRSIENWIGNLNFDLKEINDICSGCRGHDGFTSSWRSVADTLRQKVEDAVREHPDYRVVFTGHSLGGALATVAGADLRGNGYDIDVFSYGAPRVGNRAFAEFLTVQTGGTLYRITHTNDIVPRLPPRQFGYSHSSPEYWIKSGTLVPVTRNDIVKIEGIDATGGNNQPNIPDIPAHLWYFGLIGTCL

SEQ ID NO: 4529 - protein, 274 aa, Thermomyces lanuginosus
SPIRREVSQDLFNQFNLFAQYSAAAYCGKNNDAPAGTNITCTGVACPEVEKADATFLYSFEDSGVGDVTGFLALDNTNKLIVLSFRGSRSIENWIGNLNFDLKEINDICSGCRGHDGFTSSWRSVADTLRQKVEDAVREHPDYRVVFTGHSLGGALATVAGADLRGNGYDIDVFSYGAPRVGNRAFAEFLTVQTGGTLYRITHTNDIVPRLPPREFGYSHSSPEYWIKSGTLVPVTRNDIVKIEGIDATGGNNQPNIPDIPAHLWYFGLIGTCL

SEQ ID NO: 4530 - protein, 274 aa, Thermomyces lanuginosus
SPIRREVSQDLFNQFNLFAQYSAAAYCGKNNDAPAGTNITCTGNACPEVEKADATFLYSFEDSGVGDVTGFLALDNTNKLIVLSFRGSRSIENWIGNLNFDLKEINDICSGCRGHDGFTSSWRSVADTLRQKVEDAVREHPDYRVVFTGHSLGGALATVAGADLRGNGYDIDVFSYGAPRVGNRAFAEFLTVQTGGTLYRITHTNDIVPRLPPREFGYSHSSPEYWIKSGTLVPVTRNDIVKIEGIDATGGNNQPNIPDIPAHTWYFGLIGTCL

SEQ ID NO: 4531 - protein, 274 aa, Thermomyces lanuginosus
SPIRREVSQDLFNQFNLFAQYSAAAYCGKNNDAPAGTQITCTGNACPEVEKADATFLYSFEDSGVGDVTGFLALDNTNKLIVLSFRGSRSIENWIGNLNFDLKEINDICSGCRGHDGFTSSWRSVADTLRQKVEDAVREHPDYRVVFTGHSLGGALATVAGADLRGNGYDIDVFSYGAPRVGNRAFAEFLTVQTGGTLYRITHTNDIVPRLPPREFGYSHSSPEYWIKSGTLVPVRRNDIVKIEGIDATGGNNQPNIPNIPAHLWYFGLIGTCL

SEQ ID NO: 4532 - protein, 274 aa, Thermomyces lanuginosus
SPIRREVSQDLFNQFNLFAQYSAAAYCGKNNDAPAGTNITCTGNACPEVEKADATFLYSFEDAGVGDVTGFLALDNTNKLIVLSFRGSRSIENWIGNLNFDLKEINDICSGCRGHDGFTSSWRSVADTLRQKVEDAVREHPDYRVVFTGHSLGGALATVAGADLRGNGYDIDVFSYGAPRVGNRAFAEFLTVQTGGTLYRITHTNDIVPRLPPREFGYSHSSPEYWIKSGTLVPVTRNDIVKIEGIDATGGNNQPNIPDIPAHLWYFGLIGTCL

SEQ ID NO: 4533 - protein, 274 aa, Thermomyces lanuginosus
SPIRREVSQDLFNQFNLFAQYSAAAYCGKNNDAPAGTNITCWGNACPEVEKADATFLYSFEDSGVGDVTGFLALDNTNKLIVLSFRGSRSIENWIGNLNFDLKEINDICSGCRGHDGFTSSWRSVADTLRQKVEDAVREHPDYRVVFTGHSLGGALATVAGADLRGNGYDIDVFSYGAPRVGNRAFAEFLTVQTGGTLYRITHTNDIVPRLPPREFGYSHSSPEYWIKSGTLVPVTRNDIVKIEGIDATGGNNQPNIPDIPAHLWYFGLIGTCL

SEQ ID NO: 4534 - protein, 274 aa, Thermomyces lanuginosus
SPIRREVSQDLFNQFNLFAQYSAAAYCGKNNDAPAGTNITCTGNACPEVEKADATFLYSFEDSGVGDVTGFLALDNTNKLIVLSFRGSRSIENWIGNLNFDLKEINDICSGCRGHDGFTSSWRSVADTLRQKVEDAVREHPDYRVVFTGHSLGGALATVAGADLRGNKYDIDVFSYGAPRVGNRAFAEFLTVQTGGTLYRITHTNDIVPRLPPREFGYSHSSPEYWIKSGTLVPVTRNDIVKIEGIDATGGNNQPNIPDIPAHLWYFGLIGTCL

SEQ ID NO: 4535 - protein, 274 aa, Synthetic construct
SPIRREVSQDLFNQFNLFAQYSAAAYCGKNNDAPAGTNITCTGNACPEVEKADATFLYSFPDSGVGDVTGFLALDNTNKLIVLSFRGSRSIENWIGNLNFDLKEINDICSGCRGHDGFTSSWRSVADTLRQKVEDAVREHPDYRVVFTGHSLGGALATVAGADLRGNGYDIDVFSYGAPRVGNRAFAEFLTVQTGGTLYRITHTNDIVPRLPPREFGYSHSSPEYWIKSGTLVPVTRNDIVKIEGIDATGGNNQPNIPDIPAHLWYFGLIGTCL

SEQ ID NO: 4536 - protein, 274 aa, Synthetic construct
SPIRREVSQDLFNQFNLFAQYSAAAYCGKNNDAPAGTNITCTGNACPEVEKADATFLYSFEDSGVGDVTGFLALDNTNKLIVLSFRGSRSIENWIGNLNFDLKEINDICSGCRGHDGFTSSWRSVADTLRQKVEDAVREHPDYRVVFTGHSLGGALATVAGADLRGNGYDIDVFSYGAPRVGNRAFAEFLTVQTGGTLYRITHTNDIVPRLPPREFGYSHSSPEYWIKSGTLVPVTRNDIVKIEGIDATGGNNQPNIPDIPAHMWYFGLIGTCL

SEQ ID NO: 4537 - protein, 274 aa, Thermomyces lanuginosus
SPIRREVSQDLFNQFNLFAQYSAAAYCGKNNDAPAGTNITCTGNACPEVEKADATFLYSFEDSGVGDVTGFLALDNTNKLIVLSFRGSRSIENWIGNLNFDLKEINDICSGCRGHDGFTSSWRSVADTLRQKVEDAVREHPDYRVVFTGHSLGGALATVAGADLRGNGYDIDVFSYGAPRVGNRAFAEFLTVQTGGTLYRITHTNDIVPRLPPREFGYSHSSPEYWIKSGTLVPVTRNDIVKIEGIDATGGNNQRNIPDIPAHLWYFGLIGTCL

SEQ ID NO: 4538 - protein, 274 aa, Synthetic construct
SPIRREVSQDLFNQFNLFAQYSAAAYCGKNNDAPAGTNITCTGNACPEVEKADATFLYSFFDSGVGDVTGFLALDNTNKLIVLSFRGSRSIENWIGNLNFDLKEINDICSGCRGHDGFTSSWRSVADTLRQKVEDAVREHPDYRVVFTGHSLGGALATVAGADLRGNGYDIDVFSYGAPRVGNRAFAEFLTVQTGGTLYRITHTNDIVPRLPPREFGYSHSSPEYWIKSGTLVPVTRNDIVKIEGIDATGGNNQPNIPDIPAHLWYFGLIGTCL

SEQ ID NO: 4539 - protein, 274 aa, Thermomyces lanuginosus
SPIRREVSQDLFNQFNLFAQYSAAAYCGKNNDAPAGTNITCTGEACPEVEKADATFLYSFEDSGVGDVTGFLALDNTNKLIVLSFRGSRSIENWIGNLNFDLKEINDICSGCRGHDGFTSSWRSVADTLRQKVEDAVREHPDYRVVFTGHSLGGALATVAGADLRGNGYDIDVFSYGAPRVGNRAFAEFLTVQTGGTLYRITHTNDIVPRLPPREFGYSHSSPEYWIKSGTLVPVTRNDIVKIEGIDATGGNNQPNIPDIPAHLWYFGLIGTCL

SEQ ID NO: 4540 - protein, 274 aa, Synthetic construct
SPIRREVSQDLFNQFNLFAQYSAAAYCGKNNDAPAGTNITCTGNACPEVEKADATFLYSFEDSGVGDVTGFLALDNTNKLIVLSFRGSRSIENWIGNLNFDLKEINDICSGCRGHDGFTSSWRSVADTLRQKVEDAVREHPDYRVVFTGHSLGGALATVAGADLRGNGYDIDVFSYGAPRVGNRAFAEFLTVQTGGTLYRITHTNDIVPRLPPREFGYSHSSPEYWIKSGTLVPVTRNDIVKIEGIDATGGNNQPNIPDIPAHPWYFGLIGTCL

SEQ ID NO: 4541 - protein, 274 aa, Synthetic construct
SPIRREVSQDLFNQFNLFAQYSAAAYCGKNNDAPAGTNITCTGNACPEVEKADATFLYSFGDSGVGDVTGFLALDNTNKLIVLSFRGSRSIENWIGNLNFDLKEINDICSGCRGHDGFTSSWRSVADTLRQKVEDAVREHPDYRVVFTGHSLGGALATVAGADLRGNGYDIDVFSYGAPRVGNRAFAEFLTVQTGGTLYRITHTNDIVPRLPPREFGYSHSSPEYWIKSGTLVPVTRNDIVKIEGIDATGGNNQPNIPDIPAHLWYFGLIGTCL

SEQ ID NO: 4542 - protein, 274 aa, Thermomyces lanuginosus
SPIRREVSQDLFNQFNLFAQYSAAAYCGKNNDAPAGTQITCTGNACPEVEKADATFLYSFEDSGVGDVTGFLALDNTNKLIVLSFRGSRSIENWIGNLNFDLKEINDICSGCRGHDGFTSSWRSVADTLRQKVEDAVREHPDYRVVFTGHSLGGALATVAGADLRGNGYDIDVFSYGAPRVGNRAFAEFLTVQTGGTLYRITHTNDIVPRLPPREFGYSHSSPEYWIKSGTLVPVRRNDIVKIEGIDATGGNNQPNIPQIPAHLWYFGLIGTCL

SEQ ID NO: 4543 - protein, 274 aa, Thermomyces lanuginosus
SPIRREVSQDLFNQFNLFAQYSAAAYCGKNNDAPAGTQITCTGNACPEVEKADATFLYSFEDSGVGDVTGFLALDNTNKLIVLSFRGSRSIENWIGNLNFDLKEINDICSGCRGHDGFTSSWRSVADTLRQKVEDAVREHPDYRVVFTGHSLGGALATVAGADLRGNGYDIDVFSYGAPRVGNRAFAEFLTVQTGGTLYRITHTNDIVPRLPPREFGYSHSSPEYWIKSGTLVPVRRNDIVKIEGIDATGGNNQPNIPSIPAHLWYFGLIGTCL

SEQ ID NO: 4544 - protein, 274 aa, Thermomyces lanuginosus
SPIRREVSQDLFNQFNLFAQYSAAAYCGKNNDAPAGTQITCTGNACPEVEKADATFLYSFEDSGVGDVTGFLALDNTNKLIVLSFRGSRSIENWIGNLNFDLKEINDICSGCRGHDGFTSSWRSVADTLRQKVEDAVREHPDYRVVFTGHSLGGALATVAGADLRGNGYDIDVFSYGAPRVGNRAFAEFLTVQTGGTLYRITHTNDIVPRLPPREFGYSHSSPEYWIKSGTLVPVTRRDIVKIEGIDATGGNNQPNIPLIPAHLWYFGLIGTCL

SEQ ID NO: 4545 - protein, 274 aa, Thermomyces lanuginosus
SPIRREVSQDLFNQFNLFAQYSAAAYCGKNNDAPAGTNITCGGNACPEVEKADATFLYSFEDSGVGDVTGFLALDNTNKLIVLSFRGSRSIENWIGNLNFDLKEINDICSGCRGHDGFTSSWRSVADTLRQKVEDAVREHPDYRVVFTGHSLGGALATVAGADLRGNGYDIDVFSYGAPRVGNRAFAEFLTVQTGGTLYRITHTNDIVPRLPPREFGYSHSSPEYWIKSGTLVPVTRNDIVKIEGIDATGGNNQPNIPDIPAHLWYFGLIGTCL

SEQ ID NO: 4546 - protein, 274 aa, Thermomyces lanuginosus
SPIRREVSQDLFNQFNLFAQYSAAAYCGKNNDAPAGTNITCTGNACPEVEKADATFLYSFEDSGVGDVTGFLALDNTNKLIVLSFRGSRSIENWIANLNFDLKEINDICSGCRGHDGFTSSWRSVADTLRQKVEDAVREHPDYRVVFTGHSLGGALATVAGADLRGNGYDIDVFSYGAPRVGNRAFAEFLTVQTGGTLYRITHTNDIVPRLPPREFGYSHSSPEYWIKSGTLVPVTRNDIVKIEGIDATGGNNQPNIPDIPAHLWYFGLIGTCL

SEQ ID NO: 4547 - protein, 274 aa, Thermomyces lanuginosus
SPIRREVSQDLFNQFNLFAQYSAAAYCGKNNDAPAGTNITCTGLACPEVEKADATFLYSFEDSGVGDVTGFLALDNTNKLIVLSFRGSRSIENWIGNLNFDLKEINDICSGCRGHDGFTSSWRSVADTLRQKVEDAVREHPDYRVVFTGHSLGGALATVAGADLRGNGYDIDVFSYGAPRVGNRAFAEFLTVQTGGTLYRITHTNDIVPRLPPREFGYSHSSPEYWIKSGTLVPVTRNDIVKIEGIDATGGNNQPNIPDIPAHLWYFGLIGTCL

SEQ ID NO: 4548 - protein, 274 aa, Thermomyces lanuginosus
SPIRREVSQDLFNQFNLFAQYSAAAYCGKNNDAPAGTNITCTGNACPEVEKADATFLYSFEDSGVGDVTGFLALDNTNKLIVLSFRGSRSIENWIGNLNFDLKKINDICSGCRGHDGFTSSWRSVADTLRQKVEDAVREHPDYRVVFTGHSLGGALATVAGADLRGNGYDIDVFSYGAPRVGNRAFAEFLTVQTGGTLYRITHTNDIVPRLPPREFGYSHSSPEYWIKSGTLVPVTRNDIVKIEGIDATGGNNQPNIPDIPAHLWYFGLIGTCL

SEQ ID NO: 4549 - protein, 274 aa, Thermomyces lanuginosus
SPIRREVSQDLFNQFNLFAQYSAAAYCGKNNDAPAGTNITCTGNACPEVEKADATFLYSFEDSGVGDVTGFLALDNTNKLIVLSFRGSRSIENWIGNLNFDLKEINDICSGCRGHDGFTSSWRSVADTLRQKVEDAVREHPDYRVVFTGHSLGGALATVAGADLRGNGYDIDVFSYGAPRVGNRAFAEFLTVQTGGTLYRITHTNDIVPRLPPREFGYSHSSPEYWIKSRTLVPVTRNDIVKIEGIDATGGNNQPNIPDIPAHLWYFGLIGTCL

SEQ ID NO: 4550 - protein, 274 aa, Thermomyces lanuginosus
SPIRREVSQDLFNQFNLFAQYSAAAYCGKNNDAPAGTNITCTGNACPEVEKADATFLYSFEDSGVGDVTGFLALDNTNKLIVLSFRGSRSIENWIGNLNFDLKEINDICSGCRGHDGFTSSWRSVADTLRQKVEDAVREHPDYRVVFTGHSLGGALATVAGADLRGNGYDIDVFSYGAPRVGNRAFAEFLTVQTGGTLYRITHTNDIVPRLPPREFGYSHSSPEYWIKSGTLVPVTRNDIVKIEGIDATGGNNQPNIPDTPAHLWYFGLIGTCL

SEQ ID NO: 4551 - protein, 274 aa, Synthetic construct
SPIRREVSQDLFNQFNLFAQYSAAAYCGKNNDAPAGTNITCTGNACPEVEKADATFLYSFEDSGVGDVTGFLALDNTNKLIVLSFRGSRSIENWIGNLNFDLKEINDICSGCRGHDGFTSSWRSVADTLRQKVEDAVREHPDYRVVFTGHSLGGALATVAGADLRGNGYDIDVFSYGAPRVGNRAFAEFLTVQTGGTLYRITHTNDIVPRCPPREFGYSHSSPEYWIKSGTLVPVTRNDIVKIEGIDATGGNNQPNIPDIPAHLWYFGLIGTCL

SEQ ID NO: 4552 - protein, 274 aa, Synthetic construct
SPIRREVSQDLFNQFNLFAQYSAAAYCGKNNDAPAGTNITCTGNACPEVEKADATFLYSFEDSGVGDVTGFLALDNTNKLIVLSFRGSRSIENWIGNLNFDLKEINDICSGCRGHDGFTSSWRSVADTLRQKVEDAVREHPDYRVVFTGHSLGGALATVAGADLRGNGYDIDVFSYGAPRVGNRAFAEFLTVQTGGTLYRITHTNDIVPRWPPREFGYSHSSPEYWIKSGTLVPVTRNDIVKIEGIDATGGNNQPNIPDIPAHLWYFGLIGTCL

SEQ ID NO: 4553 - protein, 274 aa, Synthetic construct
SPIRREVSQDLFNQFNLFAQYSAAAYCGKNNDAPAGTNITCTGNACPEVEKADATFLYSFEDSGVGDVTGFLALDNTNKLIVLSFRGSRSIENWIGNLNFDLKEINDICSGCRGHDGFTSSWRSVADTLRQKVEDAVREHPDYRVVFTGHSLGGALATVAGADLRGNGYDIDVFSYGAPRVGNRAFAEFLTVQTGGTLYRITHTNDIVPRQPPREFGYSHSSPEYWIKSGTLVPVTRNDIVKIEGIDATGGNNQPNIPDIPAHLWYFGLIGTCL

SEQ ID NO: 4554 - protein, 274 aa, Synthetic construct
SPIRREVSQDLFNQFNLFAQYSAAAYCGKNNDAPAGTNITCTGNACPEVEKADATFLYSFEDSGVGDVTGFLALDNTNKLIVLSFRGSRSIENWIGNLNFHLKEINDICSGCRGHDGFTSSWRSVADTLRQKVEDAVREHPDYRVVFTGHSLGGALATVAGADLRGNGYDIDVFSYGAPRVGNRAFAEFLTVQTGGTLYRITHTNDIVPRLPPREFGYSHSSPEYWIKSGTLVPVTRNDIVKIEGIDATGGNNQPNIPDIPAHLWYFGLIGTCL

SEQ ID NO: 4555 - protein, 274 aa, Thermomyces lanuginosus
SPIRREVSQDLFNQFNLFAQYSAAAYCGKNNDAPAGTNITCPGNACPEVEKADATFLYSFEDSGVGDVTGFLALDNTNKLIVLSFRGSRSIENWIGNLNFDLKEINDICSGCRGHDGFTSSWRSVADTLRQKVEDAVREHPDYRVVFTGHSLGGALATVAGADLRGNGYDIDVFSYGAPRVGNRAFAEFLTVQTGGTLYRITHTNDIVPRLPPREFGYSHSSPEYWIKSGTLVPVTRNDIVKIEGIDATGGNNQPNIPDIPAHLWYFGLIGTCL

SEQ ID NO: 4556 - protein, 274 aa, Thermomyces lanuginosus
SPIRREVSQDLFNQFNLFAQYSAAAYCGKNNDAPAGTNITCTGNACPEVEKADATFLYSFEDSGVGDVTGFLALDNTNKLIVLSFRGSRSIENWIGNLNFDLKEINDICSGCRGHDGFTSSWRSVADTLRQKVEDAVREHPDYRVVFSGHSLGGALATVAGADLRGNGYDIDVFSYGAPRVGNRAFAEFLTVQTGGTLYRITHTNDIVPRLPPREFGYSHSSPEYWIKSGTLVPVTRNDIVKIEGIDATGGNNQPNIPDIPAHLWYFGLIGTCL

SEQ ID NO: 4557 - protein, 274 aa, Thermomyces lanuginosus
SPIRREVSQDLFNQFNLFAQYSAAAYCGKNNDAPAGTNITCTGNACPEVEKADATFLYSFEDNGSGDVTGFLALDNTNKLIVLSFRGSRSIENWIGNLNFDLKEINDICSGCRGHDGFTSSWRSVADTLRQKVEDAVREHPDYRVVFTGHSLGGALATVAGADLRGNGYDIDVFSYGAPRVGNRAFAEFLTVQTGGTLYRITHTNDIVPRLPPREFGYSHSSPEYWIKSGTLVPVRRRDIVKIEGIDATGGNNIPNIPDIPAHLWYFGLIGTCL

SEQ ID NO: 4558 - protein, 274 aa, Thermomyces lanuginosus
SPIRREVSQDLFNQFNLFAQYSAAAYCGKNNDAPAGTNITCTGNACPEVEKADATFLYSFEDSGVGDVTGFLALDNTNKLIVLSFRGSRSIENWITNLNFDLKEINDICSGCRGHDGFTSSWRSVADTLRQKVEDAVREHPDYRVVFTGHSLGGALATVAGADLRGNGYDIDVFSYGAPRVGNRAFAEFLTVQTGGTLYRITHTNDIVPRLPPREFGYSHSSPEYWIKSGTLVPVTRNDIVKIEGIDATGGNNQPNIPDIPAHLWYFGLIGTCL

SEQ ID NO: 4559 - protein, 274 aa, Thermomyces lanuginosus
SPIRREVSQDLFNQFNLFAQYSAAAYCGKNNDAPAGTNITCNGNACPEVEKADATFLYSFEDSGVGDVTGFLALDNTNKLIVLSFRGSRSIENWIGNLNFDLKEINDICSGCRGHDGFTSSWRSVADTLRQKVEDAVREHPDYRVVFTGHSLGGALATVAGADLRGNGYDIDVFSYGAPRVGNRAFAEFLTVQTGGTLYRITHTNDIVPRLPPREFGYSHSSPEYWIKSGTLVPVTRNDIVKIEGIDATGGNNQPNIPDIPAHLWYFGLIGTCL

SEQ ID NO: 4560 - protein, 274 aa, Thermomyces lanuginosus
SPIRREVSQDLFNQFNLFAQYSAAAYCGKNNDAPAGTNITCTGNACPEVEKADATFLYSFEDSGVGDVTGFLALDNTNKLIVLSFRGSRSIENWIWNLNFDLKEINDICSGCRGHDGFTSSWRSVADTLRQKVEDAVREHPDYRVVFTGHSLGGALATVAGADLRGNGYDIDVFSYGAPRVGNRAFAEFLTVQTGGTLYRITHTNDIVPRLPPREFGYSHSSPEYWIKSGTLVPVTRNDIVKIEGIDATGGNNQPNIPDIPAHLWYFGLIGTCL

SEQ ID NO: 4561 - protein, 274 aa, Thermomyces lanuginosus
SPIRREVSQDLFNQFNLFAQYSAAAYCGKNNDAPAGTNITCTGQACPEVEKADATFLYSFEDSGVGDVTGFLALDNTNKLIVLSFRGSRSIENWIGNLNFDLKEINDICSGCRGHDGFTSSWRSVADTLRQKVEDAVREHPDYRVVFTGHSLGGALATVAGADLRGNGYDIDVFSYGAPRVGNRAFAEFLTVQTGGTLYRITHTNDIVPRLPPREFGYSHSSPEYWIKSGTLVPVTRNDIVKIEGIDATGGNNQPNIPDIPAHLWYFGLIGTCL

SEQ ID NO: 4562 - protein, 274 aa, Thermomyces lanuginosus
SPIRREVSQDLFNQFNLFAQYSAAAYCGKNNDAPAGTNITCTGNACPEVEKADATFLYSFEDAGAGDVTGFLALDNTNKLIVLSFRGSRSVENWIGNLNFDLKEINDICSGCRGHDGFTSSWRSVADTLRQKVEDAVREHPDYRVVFTGHSLGGALATVAGADLRGNGYDIDVFSYGAPRVGNRAFAEFLTVQTGGTLYRITHTNDIVPRLPPREFGYSHSSPEYWIKSGTLVPVRRRDIVKIEGIDATGGNNQPNIPDIPAHLWYFGLIGTCL

SEQ ID NO: 4563 - protein, 274 aa, Thermomyces lanuginosus
SPIRREVSQDLFNQFNLFAQYSAAAYCGKNNDAPAGTNITCRGNACPEVEKADATFLYSFEDSGVGDVTGFLALDNTNKLIVLSFRGSRSIENWIGNLNFDLKEINDICSGCRGHDGFTSSWRSVADTLRQKVEDAVREHPDYRVVFTGHSLGGALATVAGADLRGNGYDIDVFSYGAPRVGNRAFAEFLTVQTGGTLYRITHTNDIVPRLPPREFGYSHSSPEYWIKSGTLVPVTRNDIVKIEGIDATGGNNQPNIPDIPAHLWYFGLIGTCL

SEQ ID NO: 4564 - protein, 274 aa, Thermomyces lanuginosus
SPIRREVSQDLFNQFNLFAQYSAAAYCGKNNDAPAGTNITCTGNACPEVEKADATFLYSFEDSGVGDVTGFLALDNTNKLIVLSFRGSRSTENWIGNLNFDLKEINDICSGCRGHDGFTSSWRSVADTLRQKVEDAVREHPDYRVVFTGHSLGGALATVAGADLRGNGYDIDVFSYGAPRVGNRAFAEFLTVQTGGTLYRITHTNDIVPRLPPREFGYSHSSPEYWIKSGTLVPVTRNDIVKIEGIDATGGNNQPNIPDIPAHLWYFGLIGTCL

SEQ ID NO: 4565 - protein, 274 aa, Synthetic construct
SPIRREVSQDLFNQFNLFAQYSAAAYCGKNNDAPAGTNITCTGNACPEVEKADATFLYSFEDSGVGDVTGFLALDNTNKLIVLSFRGSRSIENWIGNLNFDLKEINDICSGCRGHDGFTSSWRSVADTLRQKVEDAVREHPDYRVVFTGHSLGGALATVAGADLRGNGYDIDVFSYGAPRVGNRAFAEFLTVQTGGTLYRITHTNDIVPRYPPREFGYSHSSPEYWIKSGTLVPVTRNDIVKIEGIDATGGNNQPNIPDIPAHLWYFGLIGTCL

SEQ ID NO: 4566 - protein, 274 aa, Thermomyces lanuginosus
SPIRREVSQDLFNQFNLFAQYSAAAYCGKNNDAPAGTNITCTGNACPEVEKADATFLYSFEDSGVGDVTGFLALDNTNKLIVLSFRGSRSIENWIANLNFDLKKINDICSGCRGHDGFTSSWRSVADTLRQKVEDAVREHPDYRVVFTGHSLGGALATVAGADLRGNGYDIDVFSYGAPRVGNRAFAEFLTVQTGGTLYRITHTNDIVPRLPPREFGYSHSSPEYWIKSGTLVPVRRRDIVKIEGIDATGGNNRPNIPDIPAHLWYFGLIGTCL

SEQ ID NO: 4567 - protein, 274 aa, Synthetic construct
SPIRREVSQDLFNQFNLFAQYSAAAYCGKNNDAPAGTNITCTGNACPEVEKADATFLYSFCDSGVGDVTGFLALDNTNKLIVLSFRGSRSIENWIGNLNFDLKEINDICSGCRGHDGFTSSWRSVADTLRQKVEDAVREHPDYRVVFTGHSLGGALATVAGADLRGNGYDIDVFSYGAPRVGNRAFAEFLTVQTGGTLYRITHTNDIVPRLPPREFGYSHSSPEYWIKSGTLVPVTRNDIVKIEGIDATGGNNQPNIPDIPAHLWYFGLIGTCL

SEQ ID NO: 4568 - protein, 274 aa, Thermomyces lanuginosus
SPIRREVSQDLFNQFNLFAQYSAAAYCGKNNDAPAGTQITCTGNACPEVEKADATFLYSFEDSGVGDVTGFLALDNTNKLIVLSFRGSRSIENWIGNLNFDLKEINDICSGCRGHDGFTSSWRSVADTLRQKVEDAVREHPDYRVVFTGHSLGGALATVAGADLRGNGYDIDVFSYGAPRVGNRAFAEFLTVQTGGTLYRITHTNDIVPRLPPREFGYSHSSPEYWIKSGTLVPVTRRDIVKIEGIDATGGNNQPNIPYIPAHLWYFGLIGTCL

SEQ ID NO: 4569 - protein, 274 aa, Synthetic construct
SPIRREVSQDLFNQFNLFAQYSAAAYCGKNNDAPAGTNITCTGNACPEVEKADATFLYSFEDSGVGDVTGFLALDNTNKLIVLSFRGSRSIENWIGNLNFDLKEINDICSGCRGHDGFTSSWRSVADTLRQKVEDAVREHPDYRVVFTGHSLGGALATVAGADLRGNGYDIDVFSYGAPRVGNRAFAEFLTVQTGGTLYRITHTNDIVPREPPREFGYSHSSPEYWIKSGTLVPVTRNDIVKIEGIDATGGNNQPNIPDIPAHLWYFGLIGTCL

SEQ ID NO: 4570 - protein, 274 aa, Synthetic construct
SPIRREVSQDLFNQFNLFAQYSAAAYCGKNNDAPAGTNITCTGNACPEVEKADATFLYSFIDSGVGDVTGFLALDNTNKLIVLSFRGSRSIENWIGNLNFDLKEINDICSGCRGHDGFTSSWRSVADTLRQKVEDAVREHPDYRVVFTGHSLGGALATVAGADLRGNGYDIDVFSYGAPRVGNRAFAEFLTVQTGGTLYRITHTNDIVPRLPPREFGYSHSSPEYWIKSGTLVPVTRNDIVKIEGIDATGGNNQPNIPDIPAHLWYFGLIGTCL

SEQ ID NO: 4571 - protein, 274 aa, Thermomyces lanuginosus
SPIRREVSQDLFNQFNLFAQYSAAAYCGKNNDAPAGTNITCTGNACPEVEKADATFLYSFEDSGVGDVTGFLALDNTNKLIVLSFRGSRSIENWGGNLNFDLKEINDICSGCRGHDGFTSSWRSVADTLRQKVEDAVREHPDYRVVFTGHSLGGALATVAGADLRGNGYDIDVFSYGAPRVGNRAFAEFLTVQTGGTLYRITHTNDLVPRLPPREFGYSHSSPEYWIKSGTLVPVRRRDIVKIEGIDATGGNNQPNIPDSPAHLWYFGLIGTCL

SEQ ID NO: 4572 - protein, 274 aa, Synthetic construct
SPIRREVSQDLFNQFNLFAQYSAAAYCGKNNDAPAGTNITCTGNACPEVEKADATFLYSFEDSGVGDVTGFLALDNTNKLIVLSFRGSRSIENWIGNLNFELKEINDICSGCRGHDGFTSSWRSVADTLRQKVEDAVREHPDYRVVFTGHSLGGALATVAGADLRGNGYDIDVFSYGAPRVGNRAFAEFLTVQTGGTLYRITHTNDIVPRLPPREFGYSHSSPEYWIKSGTLVPVTRNDIVKIEGIDATGGNNQPNIPDIPAHLWYFGLIGTCL

SEQ ID NO: 4573 - protein, 274 aa, Thermomyces lanuginosus
SPIRREVSQDLFNQFNLFAQYSAAAYCGKNNDAPAGTNITCTGNACPEVEKADATFLYSFEDSGVGDVTGFLALDNTNKLIVLSFRGSRSIENWIGNLNFGLKEINDICSGCRGHDGFTSSWRSVADTLRQKVEDAVREHPDYRVVFTGHSLGGALATVAGADLRGNGYDIDVFSYGAPRVGNRAFAEFLTVQTGGTLYRITHTNDIVPRLPPREFGYSHSSPEYWIKSGTLVPVTRNDIVKIEGIDATGGNNQPNIPDIPAHLWYFGLIGTCL

SEQ ID NO: 4574 - protein, 274 aa, Thermomyces lanuginosus
SPIRREVSQDLFNQFNLFAQYSAAAYCGKNNDAPAGTNITCTGNACPEVEKADATFLYSFEDSGVGDVTGFLALDNTNKLIVLSFRGSRSIENWIGNLNFDLKEINDICSGCRGHDGFTSSWRSVADTLRQKVEDAVREHPDYRVVFTGHSLGGGLATVAGADLRGNGYDIDVFSYGAPRVGNRAFAEFLTVQTGGTLYRITHTNDIVPRLPPREFGYSHSSPEYWIKSGTLVPVTRNDIVKIEGIDATGGNNQPNIPDIPAHLWYFGLIGTCL

SEQ ID NO: 4575 - protein, 274 aa, Thermomyces lanuginosus
SPIRREVSQDLFNQFNLFAQYSAAAYCGKNNDAPAGTNITCTGNACPEVEKADATFLYSFEDSGVGDVTGFLALDNTNKLIVLSFRGSRSIENWIANLNFGLKEINDICSGCRGHDGFTSSWRSVADTLRQKVEDAVREHPDYRVVFTGHSLGGALATVAGADLRGNGYDIDVFSYGAPRVGNRAFAEFLTVQTGGTLYRITHTNDIVPRLPPREFGYSHSSPEYWIKSRTLVPVRRRDIVKIEGIDATGGNNQPNIPDIPAHLWYFGLIGTCL

SEQ ID NO: 4576 - protein, 274 aa, Thermomyces lanuginosus
SPIRREVSQDLFNQFNLFAQYSAAAYCGKNNDAPAGTNITCFGNACPEVEKADATFLYSFEDSGVGDVTGFLALDNTNKLIVLSFRGSRSIENWIGNLNFDLKEINDICSGCRGHDGFTSSWRSVADTLRQKVEDAVREHPDYRVVFTGHSLGGALATVAGADLRGNGYDIDVFSYGAPRVGNRAFAEFLTVQTGGTLYRITHTNDIVPRLPPREFGYSHSSPEYWIKSGTLVPVTRNDIVKIEGIDATGGNNQPNIPDIPAHLWYFGLIGTCL

SEQ ID NO: 4577 - protein, 274 aa, Synthetic construct
SPIRREVSQDLFNQFNLFAQYSAAAYCGKNNDAPAGTNITCTGNACPEVEKADATFLYSFEDSGVGDVTGFLALDNTNKLIVLSFRGSRSIENWIGNLNFDLKEINDICSGCRGHDGFTSSWRSVADTLRQKVEDAVREHPDYRVVFTGHSLGGALATVAGADLRGNGYDIDVFSYGAPRVGNRAFAEFLTVQTGGTLYRITHTNDIVPRFPPREFGYSHSSPEYWIKSGTLVPVTRNDIVKIEGIDATGGNNQPNIPDIPAHLWYFGLIGTCL

SEQ ID NO: 4578 - protein, 274 aa, Thermomyces lanuginosus
SPIRREVSQDLFNQFNLFAQYSAAAYCGKNNDAPAGTNITCTGPACPEVEKADATFLYSFEDSGVGDVTGFLALDNTNKLIVLSFRGSRSIENWIGNLNFDLKEINDICSGCRGHDGFTSSWRSVADTLRQKVEDAVREHPDYRVVFTGHSLGGALATVAGADLRGNGYDIDVFSYGAPRVGNRAFAEFLTVQTGGTLYRITHTNDIVPRLPPREFGYSHSSPEYWIKSGTLVPVTRNDIVKIEGIDATGGNNQPNIPDIPAHLWYFGLIGTCL

SEQ ID NO: 4579 - protein, 274 aa, Thermomyces lanuginosus
SPIRREVSQDLFNQFNLFAQYSAAAYCGKNNDAPAGTNITCTGNACPEVEKADATFLYSFEDSGVGDVTGFLALDNTNKLIVLSFRGSRSIENWIINLNFDLKEINDICSGCRGHDGFTSSWRSVADTLRQKVEDAVREHPDYRVVFTGHSLGGALATVAGADLRGNGYDIDVFSYGAPRVGNRAFAEFLTVQTGGTLYRITHTNDIVPRLPPREFGYSHSSPEYWIKSGTLVPVTRNDIVKIEGIDATGGNNQPNIPDIPAHLWYFGLIGTCL

SEQ ID NO: 4580 - protein, 274 aa, Synthetic construct
SPIRREVSQDLFNQFNLFAQYSAAAYCGKNNDAPAGTNITCTGNACPEVEKADATFLYSFEDSGVGDVTGFLALDNTNKLIVLSFRGSRSIENWIGNLNFVLKEINDICSGCRGHDGFTSSWRSVADTLRQKVEDAVREHPDYRVVFTGHSLGGALATVAGADLRGNGYDIDVFSYGAPRVGNRAFAEFLTVQTGGTLYRITHTNDIVPRLPPREFGYSHSSPEYWIKSGTLVPVTRNDIVKIEGIDATGGNNQPNIPDIPAHLWYFGLIGTCL

SEQ ID NO: 4581 - protein, 274 aa, Thermomyces lanuginosus
SPIRREVSQDLFNQFNLFAQYSAAAYCGKNNDAPAGTNITCTGMACPEVEKADATFLYSFEDSGVGDVTGFLALDNTNKLIVLSFRGSRSIENWIGNLNFDLKEINDICSGCRGHDGFTSSWRSVADTLRQKVEDAVREHPDYRVVFTGHSLGGALATVAGADLRGNGYDIDVFSYGAPRVGNRAFAEFLTVQTGGTLYRITHTNDIVPRLPPREFGYSHSSPEYWIKSGTLVPVTRNDIVKIEGIDATGGNNQPNIPDIPAHLWYFGLIGTCL

SEQ ID NO: 4582 - protein, 274 aa, Thermomyces lanuginosus
SPIRREVSQDLFNQFNLFAQYSAAAYCGKNNDAPAGTQITCTGNACPEVEKADATFLYSFEDSGVGDVTGFLALDNTNKLIVLSFRGSRSIENWIGNLNFDLKEINDICSGCRGHDGFTSSWRSVADTLRQKVEDAVREHPDYRVVFTGHSLGGALATVAGADLRGNGYDIDVFSYGAPRVGNRAFAEFLTVQTGGTLYRITHTNDIVPRLPPREFGYSHSSPEYWIKSGTLVPVTRRDIVKIEGIDATGGNNQPNIPNIPAHLWYFGLIGTCL

SEQ ID NO: 4583 - protein, 274 aa, Thermomyces lanuginosus
SPIRREVSQDLFNQFNLFAQYSAAAYCGKNNDAPAGTNITCYGNACPEVEKADATFLYSFEDSGVGDVTGFLALDNTNKLIVLSFRGSRSIENWIGNLNFDLKEINDICSGCRGHDGFTSSWRSVADTLRQKVEDAVREHPDYRVVFTGHSLGGALATVAGADLRGNGYDIDVFSYGAPRVGNRAFAEFLTVQTGGTLYRITHTNDIVPRLPPREFGYSHSSPEYWIKSGTLVPVTRNDIVKIEGIDATGGNNQPNIPDIPAHLWYFGLIGTCL

SEQ ID NO: 4584 - protein, 274 aa, Synthetic construct
SPIRREVSQDLFNQFNLFAQYSAAAYCGKNNDAPAGTNITCTGNACPEVEKADATFLYSFEDSGVGDVTGFLALDNTNKLIVLSFRGSRSIENWIGNLNFCLKEINDICSGCRGHDGFTSSWRSVADTLRQKVEDAVREHPDYRVVFTGHSLGGALATVAGADLRGNGYDIDVFSYGAPRVGNRAFAEFLTVQTGGTLYRITHTNDIVPRLPPREFGYSHSSPEYWIKSGTLVPVTRNDIVKIEGIDATGGNNQPNIPDIPAHLWYFGLIGTCL

SEQ ID NO: 4585 - protein, 274 aa, Thermomyces lanuginosus
SPIRREVSQDLFNQFNLFAQYSAAAYCGKNNRAPAGTNITCTGNACPEVEKADATFLYSFEDSGVGDVTGFLALDNTNKLIVLSFRGSRSIENWIGNLNFDLKEINDICSGCRGHDGFTSSWRSVADTLRQKVEDAVREHPDYRVVFTGHSLGGALATVAGADLRGNGYDIDVFSYGAPRVGNRAFAEFLTVQTGGTLYRITHTNDIVPRLPPREFGYSHSSPEYWIKSGTLVPVTRNDIVKIEGIDATGGNNQPNIPDIPAHLWYFGLIGTCL

SEQ ID NO: 4586 - protein, 274 aa, Thermomyces lanuginosus
SPIRREVSQDLFNQFNLFAQYSAAAYCGKNNDAPAGTNITCTGNACPEVEKADATFLYSFEDSGVGDVTGFLALDNTNKLIVLSFRGTRSIENWIGNLNFDLKEINDICSGCRGHDGFTSSWRSVADTLRQKVEDAVREHPDYRVVFTGHSLGGALATVAGADLRGNGYDIDVFSYGAPRVGNRAFAEFLTVQTGGTLYRITHTNDIVPRLPPREFGYSHSSPEYWIKSGTLVPVTRNDIVKIEGIDATGGNNQPNIPDIPAHLWYFGLIGTCL

SEQ ID NO: 4587 - protein, 274 aa, Bacillus sp.
SPIRREVSQDLFNQFNLFAQYSAAAYCGKNNDAPAGTNITCTGNACPEVEKADATFLYSFEDSGVGDVTGFLALDNTNKLIVLSFRGSRSIENWIGNLNFLLKEINDICSGCRGHDGFTSSWRSVADTLRQKVEDAVREHPDYRVVFTGHSLGGALATVAGADLRGNGYDIDVFSYGAPRVGNRAFAEFLTVQTGGTLYRITHTNDIVPRLPPREFGYSHSSPEYWIKSGTLVPVTRNDIVKIEGIDATGGNNQPNIPDIPAHLWYFGLIGTCL

SEQ ID NO: 4588 - protein, 274 aa, Thermomyces lanuginosus
SPIRREVSQDLFNQFNLFAQYSAAAYCGKNNDAPAGTNITCTGNACPEVEKADATFLYSFEDSGVGDVTGFLALDNTNKLIVLSFRGSRSIENWIKNLNFDLKEINDICSGCRGHDGFTSSWRSVADTLRQKVEDAVREHPDYRVVFTGHSLGGALATVAGADLRGNGYDIDVFSYGAPRVGNRAFAEFLTVQTGGTLYRITHTNDIVPRLPPREFGYSHSSPEYWIKSGTLVPVTRNDIVKIEGIDATGGNNQPNIPDIPAHLWYFGLIGTCL

SEQ ID NO: 4589 - protein, 274 aa, Thermomyces lanuginosus
SPIRREVSQDLFNQFNLFAQYSAAAYCGKNNDAPAGTNITCSGNACPEVEKADATFLYSFEDSGVGDVTGFLALDNTNKLIVLSFRGSRSIENWIGNLNFDLKEINDICSGCRGHDGFTSSWRSVADTLRQKVEDAVREHPDYRVVFTGHSLGGALATVAGADLRGNGYDIDVFSYGAPRVGNRAFAEFLTVQTGGTLYRITHTNDIVPRLPPREFGYSHSSPEYWIKSGTLVPVTRNDIVKIEGIDATGGNNQPNIPDIPAHLWYFGLIGTCL

SEQ ID NO: 4590 - protein, 274 aa, Thermomyces lanuginosus
SPIRREVSQDLFNQFNLFAQYSAAAYCGKNNDAPAGTNITCTGNACPEVEKADATFLYSFEDSGVGDVTGFLALDNTNKLIVLSFRGSRSIENWINNLNFDLKEINDICSGCRGHDGFTSSWRSVADTLRQKVEDAVREHPDYRVVFTGHSLGGALATVAGADLRGNGYDIDVFSYGAPRVGNRAFAEFLTVQTGGTLYRITHTNDIVPRLPPREFGYSHSSPEYWIKSGTLVPVTRNDIVKIEGIDATGGNNQPNIPDIPAHLWYFGLIGTCL

SEQ ID NO: 4591 - protein, 274 aa, Thermomyces lanuginosus
SPIRREVSQDLFNQFNLFAQYSAAAYCGKNNDAPAGTNITCTGNACPEVEKADATFLYSFEDSGVGDVTGFLALDNTNKLIVLSFRGSRSIENWIGNLNFDLKEINDICSGCRGHDGFTSSWRSVADTLRQKVEDAVREHPDYRVVFTGHSLGGALATVAGADLRGNGYDIDVFSYGAPRVGNRAFAEFLTVQTGGTLYRITHTNDIVPRLPPRXFGYSHSSPEYWIKSGTLVPVTRNDIVKIEGIDATGGNNQPNIPDIPAHLWYFGLIGTCL

SEQ ID NO: 4592 - protein, 274 aa, Thermomyces lanuginosus
SPIRREVSQDLFNQFNLFAQYSAAAYCGKNNDAPAGTNITCTGFACPEVEKADATFLYSFEDSGVGDVTGFLALDNTNKLIVLSFRGSRSIENWIGNLNFDLKEINDICSGCRGHDGFTSSWRSVADTLRQKVEDAVREHPDYRVVFTGHSLGGALATVAGADLRGNGYDIDVFSYGAPRVGNRAFAEFLTVQTGGTLYRITHTNDIVPRLPPREFGYSHSSPEYWIKSGTLVPVTRNDIVKIEGIDATGGNNQPNIPDIPAHLWYFGLIGTCL

SEQ ID NO: 4593 - protein, 274 aa, Thermomyces lanuginosus
SPIRREVSQDLFNQFNLFAQYSAAAYCGKNNDAPAGTNITCTGNACPEVEKADATFLYSFEDSGVGDVTGFLALDNTNKLIVLSFRGSRSIENWTGNLNFDLKEINDICSGCRGHDGFTSSWRSVADTLRQKVEDAVREHPDYRVVFTGHSLGGALATVAGADLRGNGYDIDVFSYGAPRVGNRAFAEFLTVQTGGTLYRITHTNDIVPRLPPREFGYSHSSPEYWIKSGTLVPVTRNDIVKIEGIDATGGNNQPNIPDIPAHLWYFGLIGTCL

SEQ ID NO: 4594 - protein, 274 aa, Thermomyces lanuginosus
SPIRREVSVDLFNQFNLFAQYSAAAYCGKNNDAPAGTNITCTGNACPEVEKADATFLYSFEDSGKGDVTGFLALDNTNKLIVLSFRGSRSIENWIGNLNFDLKEINDICSGCRGHDGFTSSWRSVADTLRQKVEDAVREHPDYRVVFTGHSLGGGLATVAGADLRGNGYDIDVFSYGAPRVGNRAFAEFLTVQTGGTLYRITHTNDIVPRLPPREFGYSHSSPEYWIKSGTLVPVRRRDIVKIEGIDATGGNNQPNIPDIPAHLWYFGLIGTCL

SEQ ID NO: 4595 - protein, 274 aa, Thermomyces lanuginosus
SPIRREVSQDLFNQFNLFAQYSAAAYCGKNNDAPAGTNITCTGNACPEVEKADATFLYSFEDSGVGDVTGFLALDNTNKLIVLSFRGSRSIENWIRNLNFDLKEINDICSGCRGHDGFTSSWRSVADTLRQKVEDAVREHPDYRVVFTGHSLGGALATVAGADLRGNGYDIDVFSYGAPRVGNRAFAEFLTVQTGGTLYRITHTNDIVPRLPPREFGYSHSSPEYWIKSGTLVPVTRNDIVKIEGIDATGGNNQPNIPDIPAHLWYFGLIGTCL

SEQ ID NO: 4596 - protein, 274 aa, Synthetic construct
SPIRREVSQDLFNQFNLFAQYSAAAYCGKNNDAPAGTNITCTGNACPEVEKADATFLYSFEDSGVGDVTGFLALDNTNKLIVLSFRGSRSIENWIGNLNFDLKEINDICSGCRGHDGFTSSWRSVADTLRQKVEDAVREHPDYRVVFTGHSLGGALATVAGADLRGNGYDIDVFSYGAPRVGNRAFAEFLTVQTGGTLYRITHTNDIVPRLPPREFGYSHSSPEYWIKSGTLVPVTRNDIVKIEGIDATGGNNQPNIPDIPAHEWYFGLIGTCL

SEQ ID NO: 4597 - protein, 274 aa, Synthetic construct
SPIRREVSQDLFNQFNLFAQYSAAAYCGKNNDAPAGTNITCTGNACPEVEKADATFLYSFEDSGVGDVTGFLALDNTNKLIVLSFRGSRSIENWIGNLNFDLKEINDICSGCRGHDGFTSSWRSVADTLRQKVEDAVREHPDYRVVFTGHSLGGALATVAGADLRGNGYDIDVFSYGAPRVGNRAFAEFLTVQTGGTLYRITHTNDIVPRLPPREFGYSHSSPEYWIKSGTLVPVTRNDIVKIEGIDATGGNNQPNIPDIPAHHWYFGLIGTCL

SEQ ID NO: 4598 - protein, 274 aa, Thermomyces lanuginosus
SPIRREVSQDLFNQFNLFAQYSAAAYCGKNNDAPAGTNITCDGNACPEVEKADATFLYSFEDSGVGDVTGFLALDNTNKLIVLSFRGSRSIENWIGNLNFDLKEINDICSGCRGHDGFTSSWRSVADTLRQKVEDAVREHPDYRVVFTGHSLGGALATVAGADLRGNGYDIDVFSYGAPRVGNRAFAEFLTVQTGGTLYRITHTNDIVPRLPPREFGYSHSSPEYWIKSGTLVPVTRNDIVKIEGIDATGGNNQPNIPDIPAHLWYFGLIGTCL

SEQ ID NO: 4599 - protein, 274 aa, Thermomyces lanuginosus
SPIRREVSQDLFNQFNLFAQYSAAAYCGKNNDAPAGTNITCTGNACPEVEKADATFLYSFEDSGVGDVTGFLALDNTNKLIVLSFRGSRSIENWIGNLNFDLIEINDICSGCRGHDGFTSSWRSVADTLRQKVEDAVREHPDYRVVFTGHSLGGALATVAGADLRGNGYDIDVFSYGAPRVGNRAFAEFLTVQTGGTLYRITHTNDIVPRLPPREFGYSHSSPEYWIKSGTLVPVTRNDIVKIEGIDATGGNNQPNIPDIPAHLWYFGLIGTCL

SEQ ID NO: 4600 - protein, 274 aa, Synthetic construct
SPIRREVSQDLFNQFNLFAQYSAAAYCGKNNDAPAGTNITCTGNACPEVEKADATFLYSFEDSGVGDVTGFLALDNTNKLIVLSFRGSRSIENWIGNLNFDLKEINDICSGCRGHDGFTSSWRSVADTLRQKVEDAVREHPDYRVVFTGHSLGGALATVAGADLRGNGYDIDVFSYGAPRVGNRAFAEFLTVQTGGTLYRITHTNDIVPRMPPREFGYSHSSPEYWIKSGTLVPVTRNDIVKIEGIDATGGNNQPNIPDIPAHLWYFGLIGTCL

SEQ ID NO: 4601 - protein, 274 aa, Thermomyces lanuginosus
SPIRREVSQDLFNQFNLFAQYSAAAYCGKNNDAPAGTNITCIGNACPEVEKADATFLYSFEDSGVGDVTGFLALDNTNKLIVLSFRGSRSIENWIGNLNFDLKEINDICSGCRGHDGFTSSWRSVADTLRQKVEDAVREHPDYRVVFTGHSLGGALATVAGADLRGNGYDIDVFSYGAPRVGNRAFAEFLTVQTGGTLYRITHTNDIVPRLPPREFGYSHSSPEYWIKSGTLVPVTRNDIVKIEGIDATGGNNQPNIPDIPAHLWYFGLIGTCL

SEQ ID NO: 4602 - protein, 274 aa, Synthetic construct
SPIRREVSQDLFNQFNLFAQYSAAAYCGKNNDAPAGTNITCTGNACPEVEKADATFLYSFEDSGVGDVTGFLALDNTNKLIVLSFRGSRSIENWIGNLNFMLKEINDICSGCRGHDGFTSSWRSVADTLRQKVEDAVREHPDYRVVFTGHSLGGALATVAGADLRGNGYDIDVFSYGAPRVGNRAFAEFLTVQTGGTLYRITHTNDIVPRLPPREFGYSHSSPEYWIKSGTLVPVTRNDIVKIEGIDATGGNNQPNIPDIPAHLWYFGLIGTCL

SEQ ID NO: 4603 - protein, 274 aa, Thermomyces lanuginosus
SPIRREVSQDLFNQFNLFAQYSAAAYCGKNNDAPAGTNITCAGNACPEVEKADATFLYSFEDSGVGDVTGFLALDNTNKLIVLSFRGSRSIENWIGNLNFDLKEINDICSGCRGHDGFTSSWRSVADTLRQKVEDAVREHPDYRVVFTGHSLGGALATVAGADLRGNGYDIDVFSYGAPRVGNRAFAEFLTVQTGGTLYRITHTNDIVPRLPPREFGYSHSSPEYWIKSGTLVPVTRNDIVKIEGIDATGGNNQPNIPDIPAHLWYFGLIGTCL

SEQ ID NO: 4604 - protein, 274 aa, Thermomyces lanuginosus
SPIRREVSQDLFNQFNLFAQYSAAAYCGKNNDAPAGTNITCTGNACPEVEKADATFLYSFEDSGVGDVTGFLALDNTNKLIVLSFRGSRSIENWIGNLNFDLKEINDICSGCRGHNGFTSSWRSVADTLRQKVEDAVREHPDYRVVFTGHSLGGALATVAGADLRGNGYDIDVFSYGAPRVGNRAFAEFLTVQTGGTLYRITHTNDIVPRLPPREFGYSHSSPEYWIKSGTLVPVTRNDIVKIEGIDATGGNNQPNIPDIPAHLWYFGLIGTCL

SEQ ID NO: 4605 - protein, 274 aa, Thermomyces lanuginosus
SPIRREVSQDLFNQFNLFAQYSAAAYCGKNNDAPAGTNITCTGNACPEVEKADATFLYSFEDSGVGDVTGFLALDNTNKLIVLSFRGSRSIENWISNLNFDLKEINDICSGCRGHDGFTSSWRSVADTLRQKVEDAVREHPDYRVVFTGHSLGGALATVAGADLRGNGYDIDVFSYGAPRVGNRAFAEFLTVQTGGTLYRITHTNDIVPRLPPREFGYSHSSPEYWIKSGTLVPVTRNDIVKIEGIDATGGNNQPNIPDIPAHLWYFGLIGTCL

SEQ ID NO: 4606 - protein, 274 aa, Synthetic construct
SPIRREVSQDLFNQFNLFAQYSAAAYCGKNNDAPAGTNITCTGNACPEVEKADATFLYSFEDSGVGDVTGFLALDNTNKLIVLSFRGSRSIENWIGNLNFFLKEINDICSGCRGHDGFTSSWRSVADTLRQKVEDAVREHPDYRVVFTGHSLGGALATVAGADLRGNGYDIDVFSYGAPRVGNRAFAEFLTVQTGGTLYRITHTNDIVPRLPPREFGYSHSSPEYWIKSGTLVPVTRNDIVKIEGIDATGGNNQPNIPDIPAHLWYFGLIGTCL

SEQ ID NO: 4607 - protein, 274 aa, Thermomyces lanuginosus
SPIRREVSQDLFNQFNLFAQYSAAAYCGKNNDAPAGTNITCTGYACPEVEKADATFLYSFEDSGVGDVTGFLALDNTNKLIVLSFRGSRSIENWIGNLNFDLKEINDICSGCRGHDGFTSSWRSVADTLRQKVEDAVREHPDYRVVFTGHSLGGALATVAGADLRGNGYDIDVFSYGAPRVGNRAFAEFLTVQTGGTLYRITHTNDIVPRLPPREFGYSHSSPEYWIKSGTLVPVTRNDIVKIEGIDATGGNNQPNIPDIPAHLWYFGLIGTCL

SEQ ID NO: 4608 - protein, 274 aa, Synthetic construct
SPIRREVSQDLFNQFNLFAQYSAAAYCGKNNDAPAGTNITCTGNACPEVEKADATFLYSFEDSGVGDVTGFLALDNTNKLIVLSFRGSRSIENWIGNLNFILKEINDICSGCRGHDGFTSSWRSVADTLRQKVEDAVREHPDYRVVFTGHSLGGALATVAGADLRGNGYDIDVFSYGAPRVGNRAFAEFLTVQTGGTLYRITHTNDIVPRLPPREFGYSHSSPEYWIKSGTLVPVTRNDIVKIEGIDATGGNNQPNIPDIPAHLWYFGLIGTCL

SEQ ID NO: 4609 - protein, 274 aa, Thermomyces lanuginosus
SPIRREVSQDLFNQFNLFAQYSAAAYCGKNNDAPAGTNITCTGNACPEVEKADATFLYSFEDSGVGDVTGFLALDNTNKLIVLSFRGSRSIENWIQNLNFDLKEINDICSGCRGHDGFTSSWRSVADTLRQKVEDAVREHPDYRVVFTGHSLGGALATVAGADLRGNGYDIDVFSYGAPRVGNRAFAEFLTVQTGGTLYRITHTNDIVPRLPPREFGYSHSSPEYWIKSGTLVPVTRNDIVKIEGIDATGGNNQPNIPDIPAHLWYFGLIGTCL

SEQ ID NO: 4610 - protein, 274 aa, Synthetic construct
SPIRREVSQDLFNQFNLFAQYSAAAYCGKNNDAPAGTNITCTGNACPEVEKADATFLYSFEDSGVGDVTGFLALDNTNKLIVLSFRGSRSIENWIGNLNFDLKEINDICSGCRGHDGFWSSWRSVADTLRQKVEDAVREHPDYRVVFTGHSLGGALATVAGADLRGNGYDIDVFSYGAPRVGNRAFAEFLTVQTGGTLYRITHTNDIVPRLPPREFGYSHSSPEYWIKSGTLVPVTRNDIVKIEGIDATGGNNQPNIPDIPAHLWYFGLIGTCL

SEQ ID NO: 4611 - protein, 274 aa, Synthetic construct
SPIRREVSQDLFNQFNLFAQYSAAAYCGKNNDAPAGTNITCTGNACPEVEKADATFLYSFEDSGVGDVTGFLALDNTNKLIVLSFRGSRSIENWIGNLNFDLKEINDICSGCRGHDGFTSSWRSVADTLRQKVEDAVREHPDYRVVFTGHSLGGALATVAGADLRGNGYDIDVFSYGAPRVGNRAFAEFLTVQTGGTLYRITHTNDIVPRDPPREFGYSHSSPEYWIKSGTLVPVTRNDIVKIEGIDATGGNNQPNIPDIPAHLWYFGLIGTCL

SEQ ID NO: 4612 - protein, 274 aa, Thermomyces lanuginosus
SPIRRXVSQDLFNQFNLFAQYSAAAYCGKNNDAPAGTNITCTGNACPEVEKADATFLYSFEDSGVGDVTGFLALDNTNKLIVLSFRGSRSIENWIGNLNFDLKEINDICSGCRGHDGFTSSWRSVADTLRQKVEDAVREHPDYRVVFTGHSLGGALATVAGADLRGNGYDIDVFSYGAPRVGNRAFAEFLTVQTGGTLYRITHTNDIVPRLPPREFGYSHSSPEYWIKSGTLVPVTRNDIVKIEGIDATGGNNQPNIPDIPAHLWYFGLIGTCL

SEQ ID NO: 4613 - protein, 274 aa, Thermomyces lanuginosus
SPIRREVSQDLFNQFNLFAQYSAAAYCGKNNDAPAGTNITCTGKACPEVEKADATFLYSFEDSGVGDVTGFLALDNTNKLIVLSFRGSRSIENWIGNLNFDLKEINDICSGCRGHDGFTSSWRSVADTLRQKVEDAVREHPDYRVVFTGHSLGGALATVAGADLRGNGYDIDVFSYGAPRVGNRAFAEFLTVQTGGTLYRITHTNDIVPRLPPREFGYSHSSPEYWIKSGTLVPVTRNDIVKIEGIDATGGNNQPNIPDIPAHLWYFGLIGTCL

SEQ ID NO: 4614 - protein, 274 aa, Thermomyces lanuginosus
SPIRREVSQDLFNQFNLFAQYSAAAYCGKNNDAPAGTNITCTGNACPEVEKADATFLYSFEDNGSGDVTGFLALDNTNKLIVLSFRGSRSIENWIGNLNFDLKEINDICSGCRGHDGFTSSWRSVADTLRQKVEDAVREHPDYRVVFTGHSLGGALATVAGANLRGNGYDIDVFSYGAPRVGNRAFAEFLTVQTGGTLYRITHTNDIVPRLPPREFGYSHSSPEYWIKSGTLVPVRRRDIVKIEGIDATGGNNQPNIPDIPAHLWYFGLIGTCL

SEQ ID NO: 4615 - protein, 274 aa, Synthetic construct
SPIRREVSQDLFNQFNLFAQYSAAAYCGKNNDAPAGTNITCTGNACPEVEKADATFLYSFEDSGVGDVTGFLALDNTNKLIVLSFRGSRSIENWIGNLNFDLKEINDICSGCRGHDGFTSSWRSVADTLRQKVEDAVREHPDYRVVFTGHSLGGALATVAGADLRGNGYDIDVFSYGAPRVGNRAFAEFLTVQTGGTLYRITHTNDIVPRIPPREFGYSHSSPEYWIKSGTLVPVTRNDIVKIEGIDATGGNNQPNIPDIPAHLWYFGLIGTCL

SEQ ID NO: 4616 - protein, 274 aa, Synthetic construct
SPIRREVSQDLFNQFNLFAQYSAAAYCGKNNDAPAGTNITCTGNACPEVEKADATFLYSFEDSGVGDVTGFLALDNTNKLIVLSFRGSRSIENWIGNLNFDLKEINDICSGCRGHDGFTSSWRSVADTLRQKVEDAVREHPDYRVVFTGHSLGGALATVAGADLRGNGYDIDVFSYGAPRVGNRAFAEFLTVQTGGTLYRITHTNDIVPRLPPREFGYSHSSPEYWIKSGTLVPVTRNDIVKIEGIDATGGNNQPNIPDIPAHNWYFGLIGTCL

SEQ ID NO: 4617 - protein, 274 aa, Thermomyces lanuginosus
SPIRREVSQDLFNQFNLFAQYSAAAYCGKNNDAPAGTNITCTGNACPEVEKADATFLYSFEDSGVGDVTGFLALDNTNKLIVLSFRGSRSIENWVGNLNFDLKEINDICSGCRGHDGFTSSWRSVADTLRQKVEDAVREHPDYRVVFTGHSLGGALATVAGADLRGNGYDIDVFSYGAPRVGNRAFAEFLTVQTGGTLYRITHTNDIVPRLPPREFGYSHSSPEYWIKSGTGVPVRRRDIVKIEGIDATGGNNQPNIPDIKAHLWYFGLIGTCL

SEQ ID NO: 4618 - protein, 274 aa, Synthetic construct
SPIRREVSQDLFNQFNLFAQYSAAAYCGKNNDAPAGTNITCTGNACPEVEKADATFLYSFEDSGVGDVTGFLALDNTNKLIVLSFRGSRSIENWIGNLNFPLKEINDICSGCRGHDGFTSSWRSVADTLRQKVEDAVREHPDYRVVFTGHSLGGALATVAGADLRGNGYDIDVFSYGAPRVGNRAFAEFLTVQTGGTLYRITHTNDIVPRLPPREFGYSHSSPEYWIKSGTLVPVTRNDIVKIEGIDATGGNNQPNIPDIPAHLWYFGLIGTCL

SEQ ID NO: 4619 - protein, 274 aa, Thermomyces lanuginosus
SPIRREVSQDLFNQFNLFAQYSAAAYCGKNNDAPAGTNITCTGNACPEVEKADATFLYSFEDSGVGDVTGFLALDNTNKLIVLSFRGSRSIENWINNLNFDLKEINDICSGCRGHDGFTSSWRSVADTLRQKVEDAVREHPDYRVVFTGHSLGGALATVAGADLRGNGYDIDVFSYGAPRVGNRAFAEFLTVQTGGTLYRITHTNDIVPRLPPRQFGYSHSSPEYWIKSGTLVPVRRRDIVKIEGIDATGGNNQRNIPDIPAHLWYFGLIGTCL

SEQ ID NO: 4620 - protein, 274 aa, Synthetic construct
SPIRREVSQDLFNQFNLFAQYSAAAYCGKNNDAPAGTNITCTGNACPEVEKADATFLYSFHDSGVGDVTGFLALDNTNKLIVLSFRGSRSIENWIGNLNFDLKEINDICSGCRGHDGFTSSWRSVADTLRQKVEDAVREHPDYRVVFTGHSLGGALATVAGADLRGNGYDIDVFSYGAPRVGNRAFAEFLTVQTGGTLYRITHTNDIVPRLPPREFGYSHSSPEYWIKSGTLVPVTRNDIVKIEGIDATGGNNQPNIPDIPAHLWYFGLIGTCL

SEQ ID NO: 4621 - protein, 274 aa, Thermomyces lanuginosus
SPIRREVSQDLFNQFNLFAQYSAAAYCGKNNDAPAGTNITCTGGACPEVEKADATFLYSFEDSGVGDVTGFLALDNTNKLIVLSFRGSRSIENWIGNLNFDLKEINDICSGCRGHDGFTSSWRSVADTLRQKVEDAVREHPDYRVVFTGHSLGGALATVAGADLRGNGYDIDVFSYGAPRVGNRAFAEFLTVQTGGTLYRITHTNDIVPRLPPREFGYSHSSPEYWIKSGTLVPVTRNDIVKIEGIDATGGNNQPNIPDIPAHLWYFGLIGTCL

SEQ ID NO: 4622 - protein, 274 aa, Thermomyces lanuginosus
SPIRREVSQDLFNQFNLFAQYSAAAYCGKNNDAPAGTQITCTGNACPEVEKADATFLYSFEDSGVGDVTGFLALDNTNKLIVLSFRGSRSIENWIGNLNFDLKEINDICSGCRGHDGFTSSWRSVADTLRQKVEDAVREHPDYRVVFTGHSLGGALATVAGADLRGNGYDIDVFSYGAPRVGNRAFAEFLTVQTGGTLYRITHTNDIVPRLPPREFGYSHSSPEYWIKSGTLVPVRRNDIVKIEGIDATGGNNQPNIPHIPAHLWYFGLIGTCL

SEQ ID NO: 4623 - protein, 274 aa, Synthetic construct
SPIRREVSQDLFNQFNLFAQYSAAAYCGKNNDAPAGTNITCTGNACPEVEKADATFLYSFEDSGVGDVTGFLALDNTNKLIVLSFRGSRSIENWIGNLNFYLKEINDICSGCRGHDGFTSSWRSVADTLRQKVEDAVREHPDYRVVFTGHSLGGALATVAGADLRGNGYDIDVFSYGAPRVGNRAFAEFLTVQTGGTLYRITHTNDIVPRLPPREFGYSHSSPEYWIKSGTLVPVTRNDIVKIEGIDATGGNNQPNIPDIPAHLWYFGLIGTCL

SEQ ID NO: 4624 - protein, 274 aa, Thermomyces lanuginosus
SPIRREVSQDLFNQFNLFAQYSAAAYCGKNNDAPAGTNITCTGWACPEVEKADATFLYSFEDSGVGDVTGFLALDNTNKLIVLSFRGSRSIENWIGNLNFDLKEINDICSGCRGHDGFTSSWRSVADTLRQKVEDAVREHPDYRVVFTGHSLGGALATVAGADLRGNGYDIDVFSYGAPRVGNRAFAEFLTVQTGGTLYRITHTNDIVPRLPPREFGYSHSSPEYWIKSGTLVPVTRNDIVKIEGIDATGGNNQPNIPDIPAHLWYFGLIGTCL

SEQ ID NO: 4625 - protein, 274 aa, Synthetic construct
SPIRREVSQDLFNQFNLFAQYSAAAYCGKNNDAPAGTNITCTGNACPEVEKADATFLYSFYDSGVGDVTGFLALDNTNKLIVLSFRGSRSIENWIGNLNFDLKEINDICSGCRGHDGFTSSWRSVADTLRQKVEDAVREHPDYRVVFTGHSLGGALATVAGADLRGNGYDIDVFSYGAPRVGNRAFAEFLTVQTGGTLYRITHTNDIVPRLPPREFGYSHSSPEYWIKSGTLVPVTRNDIVKIEGIDATGGNNQPNIPDIPAHLWYFGLIGTCL

SEQ ID NO: 4626 - protein, 274 aa, Thermomyces lanuginosus
SPIRREVSQDLFNQFNLFAQYSAAAYCGKNNDAPAGTNITCTGNACPEVEKADATFLYSFGDSGVGDVTGFLALDNTNKLIVLSFRGSRSIDNWIGNLNFDLKEINDICSGCRGHDGFTSSWRSVADTLRQKVEDAVREHPDYRVVFTGHSLGGALATVAGADLRGNGYDIDVFSYGAPRVGNRAFAEFLTVQTGGTLYRITHTNDIVPRLPPREFGYSHSSPEYWIKSGTLVPVRRRDIVKIEGIDATGGNNQPNIPAIPAHLWYFGLIGTCL

SEQ ID NO: 4627 - protein, 274 aa, Thermomyces lanuginosus
SPIRREVSQDLFNQFNLFAQYSAAAYCGKNNDAPAGTNITCTGCACPEVEKADATFLYSFEDSGVGDVTGFLALDNTNKLIVLSFRGSRSIENWIGNLNFDLKEINDICSGCRGHDGFTSSWRSVADTLRQKVEDAVREHPDYRVVFTGHSLGGALATVAGADLRGNGYDIDVFSYGAPRVGNRAFAEFLTVQTGGTLYRITHTNDIVPRLPPREFGYSHSSPEYWIKSGTLVPVTRNDIVKIEGIDATGGNNQPNIPDIPAHLWYFGLIGTCL

SEQ ID NO: 4628 - protein, 274 aa, Thermomyces lanuginosus
SPIRREVSQDLFNQFNLFAQYSAAAYCGKNNDAPAGTNITCEGNACPEVEKADATFLYSFEDSGVGDVTGFLALDNTNKLIVLSFRGSRSIENWIGNLNFDLKEINDICSGCRGHDGFTSSWRSVADTLRQKVEDAVREHPDYRVVFTGHSLGGALATVAGADLRGNGYDIDVFSYGAPRVGNRAFAEFLTVQTGGTLYRITHTNDIVPRLPPREFGYSHSSPEYWIKSGTLVPVTRNDIVKIEGIDATGGNNQPNIPDIPAHLWYFGLIGTCL

SEQ ID NO: 4629 - protein, 274 aa, Thermomyces lanuginosus
SPIRREVSQDLFNQFNLFAQYSAAAYCGKNNDAPAGTNITCTGNACPEVEKADATFLYSFEDSGVGDVTGFLALDNTNKLIVLSFRGSRSIENWIANLNFGLKEINDICSGCRGHDGFTSSWRSVADTLRQKVEDAVREHPDYRVVFTGHSLGGGLATVAGADLRGNGYDIDVFSYGAPRVGNRAFAEFLTVQTGGTLYRITHTNDIVPRLPPREFGYSHSSPEYWIKSGTLVPVRRRDIVKIEGIDATGGNNQPNIPDIPAHLWYFGLIGTCL

SEQ ID NO: 4630 - protein, 274 aa, Synthetic construct
SPIRREVSQDLFNQFNLFAQYSAAAYCGKNNDAPAGTNITCTGNACPEVEKADATFLYSFEDSGVGDVTGFLALDNTNKLIVLSFRGSRSIENWIGNLNFWLKEINDICSGCRGHDGFTSSWRSVADTLRQKVEDAVREHPDYRVVFTGHSLGGALATVAGADLRGNGYDIDVFSYGAPRVGNRAFAEFLTVQTGGTLYRITHTNDIVPRLPPREFGYSHSSPEYWIKSGTLVPVTRNDIVKIEGIDATGGNNQPNIPDIPAHLWYFGLIGTCL

SEQ ID NO: 4631 - protein, 274 aa, Synthetic construct
SPIRREVSQDLFNQFNLFAQYSAAAYCGKNNDAPAGTNITCTGNACPEVEKADATFLYSFEDSGVGDVTGFLALDNTNKLIVLSFRGSRSIENWIGNLNFDLKEINDICSGCRGHDGFTSSWRSVADTLRQKVEDAVREHPDYRVVFTGHSLGGALATVAGADLRGNGYDIDVFSYGAPRVGNRAFAEFLTVQTGGTLYRITHTNDIVPRLPPREFGYSHSSPEYWIKSGTLVPVTRNDIVKIEGIDATGGNNQPNIPDIPAHCWYFGLIGTCL

SEQ ID NO: 4632 - protein, 274 aa, Thermomyces lanuginosus
SPIRREVSQDLFNQFNLFAQYSAAAYCGKNNDAPAGTNITCTGNACPEVEKADATFLYSFEDSGVGDVTGFLALDNTNKLIVLSFRGSRSIENWIGNLRFDLKEINDICSGCRGHDGFTSSWRSVADTLRQKVEDAVREHPDYRVVFTGHSLGGALATVAGADLRGNGYDIDVFSYGAPRVGNRAFAEFLTVQTGGTLYRITHTNDIVPRLPPREFGYSHSSPEYWIKSGTLVPVTRNDIVKIEGIDATGGNNQPNIPDIPAHLWYFGLIGTCL

SEQ ID NO: 4633 - protein, 274 aa, Thermomyces lanuginosus
SPIRREVSQDLFNQFNLFAQYSAAAYCGKNNDAPAGTQITCTGNACPEVEKADATFLYSFEDSGVGDVTGFLALDNTNKLIVLSFRGSRSIENWIGNLNFDLKEINDICSGCRGHDGFTSSWRSVADTLRQKVEDAVREHPDYRVVFTGHSLGGALATVAGADLRGNGYDIDVFSYGAPRVGNRAFAEFLTVQTGGTLYRITHTNDIVPRLPPREFGYSHSSPEYWIKSGTLVPVRRNDIVKIEGIDATGGNNQPNIPTIPAHLWYFGLIGTCL

SEQ ID NO: 4634 - protein, 274 aa, Synthetic construct
SPIRREVSQDLFNQFNLFAQYSAAAYCGKNNDAPAGTNITCTGNACPEVEKADATFLYSFEDSGVGDVTGFLALDNTNKLIVLSFRGSRSIENWIGNLNFDLKEINDICSGCRGHDGFTSSWRSVADTLRQKVEDAVREHPDYRVVFTGHSLGGALATVAGADLRGNGYDIDVFSYGAPRVGNRAFAEFLTVQTGGTLYRITHTNDIVPRLPPREFGYSHSSPEYWIKSGTLVPVTRNDIVKIEGIDATGGNNQPNIPDIPAHDWYFGLIGTCL

SEQ ID NO: 4635 - protein, 274 aa, Thermomyces lanuginosus
SPIRREVSQDLFNQFNLFAQYSAAAYCGKNNDAPAGTNITCTGNACPEVEKADATFLYSFEDSGVGDVTGFLALDNTNKLIVLSFRGSRSIENWIGNLNFDLKEINDICSGCRGHDGFTSSWRSVADTLRQKVEDAVREHPDYRVVFTGHSLGGALATVAGADLRGNGYDIDVFSYGAPRVGNRAFAEFLTVQTGGTLYRITHTNDIVPRTPPREFGYSHSSPEYWIKSGTLVPVTRNDIVKIEGIDATGGNNQPNIPDIPAHLWYFGLIGTCL

SEQ ID NO: 4636 - protein, 274 aa, Thermomyces lanuginosus
SPIRREVSQDLFNQFNLFAQYSAAAYCGKNNDAPAGTNITCTGAACPEVEKADATFLYSFEDSGVGDVTGFLALDNTNKLIVLSFRGSRSIENWIGNLNFDLKEINDICSGCRGHDGFTSSWRSVADTLRQKVEDAVREHPDYRVVFTGHSLGGALATVAGADLRGNGYDIDVFSYGAPRVGNRAFAEFLTVQTGGTLYRITHTNDIVPRLPPREFGYSHSSPEYWIKSGTLVPVTRNDIVKIEGIDATGGNNQPNIPDIPAHLWYFGLIGTCL

SEQ ID NO: 4637 - protein, 274 aa, Synthetic construct
SPIRREVSQDLFNQFNLFAQYSAAAYCGKNNDAPAGTNITCTGNACPEVEKADATFLYSFVDSGVGDVTGFLALDNTNKLIVLSFRGSRSIENWIGNLNFDLKEINDICSGCRGHDGFTSSWRSVADTLRQKVEDAVREHPDYRVVFTGHSLGGALATVAGADLRGNGYDIDVFSYGAPRVGNRAFAEFLTVQTGGTLYRITHTNDIVPRLPPREFGYSHSSPEYWIKSGTLVPVTRNDIVKIEGIDATGGNNQPNIPDIPAHLWYFGLIGTCL

SEQ ID NO: 4638 - protein, 274 aa, Thermomyces lanuginosus
SPIRREVSQDLFNQFNLFAQYSAAAYCGKNNDAPAGTNITCTGNACPEVEKADATFLYSFEDSGVGDVTGFLALDNTNKLIVLSFRGSRSIENWIGNLNFDLKEINDICSGCRGHDGFTSSWRSVADTLRQKVEDAVREHPDYRVVFTGHSLGGALATVAGADLRGNGYDIDVFSYGAPRVGNRAFAEFLTVQTGGTLYRITHTNDIVPRLPPREFGYSHSSPEYWIKSGTGVPVTRNDIVKIEGIDATGGNNQPNIPDIPAHLWYFGLIGTCL

SEQ ID NO: 4639 - protein, 274 aa, Thermomyces lanuginosus
SPIRREVSQDLFNQFNLFAQYSAAAYCGKNNDAPAGTNITCTGNACPEVEKADATFLYSFEDSGVGDVTGFLALDNTNKLIVLSFRGSRSIENWIHNLNFDLKEINDICSGCRGHDGFTSSWRSVADTLRQKVEDAVREHPDYRVVFTGHSLGGALATVAGADLRGNGYDIDVFSYGAPRVGNRAFAEFLTVQTGGTLYRITHTNDIVPRLPPREFGYSHSSPEYWIKSGTLVPVTRNDIVKIEGIDATGGNNQPNIPDIPAHLWYFGLIGTCL

SEQ ID NO: 4640 - protein, 274 aa, Thermomyces lanuginosus
SPIRREVSQDLFNQFNLFAQYSAAAYCGKNNDAPAGTNITCTGTACPEVEKADATFLYSFEDSGVGDVTGFLALDNTNKLIVLSFRGSRSIENWIGNLNFDLKEINDICSGCRGHDGFTSSWRSVADTLRQKVEDAVREHPDYRVVFTGHSLGGALATVAGADLRGNGYDIDVFSYGAPRVGNRAFAEFLTVQTGGTLYRITHTNDIVPRLPPREFGYSHSSPEYWIKSGTLVPVTRNDIVKIEGIDATGGNNQPNIPDIPAHLWYFGLIGTCL

SEQ ID NO: 4641 - protein, 274 aa, Synthetic construct
SPIRREVSQDLFNQFNLFAQYSAAAYCGKNNDAPAGTNITCTGNACPEVEKADATFLYSFEDSGVGDVTGFLALDNTNKLIVLSFRGSRSIENWIGNLNFDLKEINDICSGCRGHDGFTSSWRSVADTLRQKVEDAVREHPDYRVVFTGHSLGGALATVAGADLRGNGYDIDVFSYGAPRVGNRAFAEFLTVQTGGTLYRITHTNDIVPRHPPREFGYSHSSPEYWIKSGTLVPVTRNDIVKIEGIDATGGNNQPNIPDIPAHLWYFGLIGTCL

SEQ ID NO: 4642 - protein, 274 aa, Thermomyces lanuginosus
SPIRREVSQDLFNQFNLFAQYSAAAYCGKNNDAPAGTNITCTGNACPEVEKADATFLYSFEDSGVGDVTGFLALDNTNKLIVLSFRGSRSIENWIGNLNFDLKEINDICSGCRGHDGFTSSWRSVADTLRQKVEDAVREHPDYRVVFAGHSLGGALATVAGADLRGNGYDIDVFSYGAPRVGNRAFAEFLTVQTGGTLYRITHTNDIVPRLPPREFGYSHSSPEYWIKSGTLVPVTRNDIVKIEGIDATGGNNQPNIPDIPAHLWYFGLIGTCL

SEQ ID NO: 4643 - protein, 274 aa, Synthetic construct
SPIRREVSQDLFNQFNLFAQYSAAAYCGKNNDAPAGTNITCTGNACPEVEKADATFLYSFEDSGVGDVTGFLALDNTNKLIVLSFRGSRSIENWIGNLNFDLKEINDICSGCRGHDGFTSSWRSVADTLRQKVEDAVREHPDYRVVFTGHSLGGALATVAGADLRGNGYDIDVFSYGAPRVGNRAFAEFLTVQTGGTLYRITHTNDIVPRKPPREFGYSHSSPEYWIKSGTLVPVTRNDIVKIEGIDATGGNNQPNIPDIPAHLWYFGLIGTCL

SEQ ID NO: 4644 - protein, 274 aa, Thermomyces lanuginosus
SPIRREVSQDLFNQFNLFAQYSAAAYCGKNNDAPAGTNITCTGNACPEVEKADATFLYSFEDNGSGDVTGFLALDNTNKLIVLSFRGSRSIENWIGNLNFDLKEINDICSGCRGHDGFTSSWRSVADTLRQKVEDAVREHPDYRVVFTGHSLGGALATVAGADLRGNGYDIDVFSYGAPRVGNRAFAEFLTVQTGGTLYRITHTNDIVPRLPPREFGYSHSSPEYWIKSGTLVPVRRRDIVKIEGIDATGGNNLPNIPDIPAHLWYFGLIGTCL

SEQ ID NO: 4645 - protein, 274 aa, Thermomyces lanuginosus
SPIRREVSQDLFNQFNLFAQYSAAAYCGKNNDAPAGTNITCVGNACPEVEKADATFLYSFEDSGVGDVTGFLALDNTNKLIVLSFRGSRSIENWIGNLNFDLKEINDICSGCRGHDGFTSSWRSVADTLRQKVEDAVREHPDYRVVFTGHSLGGALATVAGADLRGNGYDIDVFSYGAPRVGNRAFAEFLTVQTGGTLYRITHTNDIVPRLPPREFGYSHSSPEYWIKSGTLVPVTRNDIVKIEGIDATGGNNQPNIPDIPAHLWYFGLIGTCL

SEQ ID NO: 4646 - protein, 274 aa, Synthetic construct
SPIRREVSQDLFNQFNLFAQYSAAAYCGKNNDAPAGTNITCTGNACPEVEKADATFLYSFEDSGVGDVTGFLALDNTNKLIVLSFRGSRSIENWIGNLNFDLKEINDICSGCRGHDGFTSSWRSVADTLRQKVEDAVREHPDYRVVFTGHSLGGALATVAGADLRGNGYDIDVFSYGAPRVGNRAFAEFLTVQTGGTLYRITHTNDIVPRLPPREFGYSHSSPEYWIKSGTLVPVTRNDIVKIEGIDATGGNNQPNIPDIPAHFWYFGLIGTCL

SEQ ID NO: 4647 - protein, 274 aa, Thermomyces lanuginosus
SPIRREVSQDLFNQFNLFAQYSAAAYCGKNNDAPAGTNITCTGNACPEVEKADATFLYSFEDSGVGDVTGFLALDNTNKLIVLSFRGSRSVENWIGNLNFDLKEINDICSGCRGHDGFTSSWRSVADTLRQKVEDAVREHPDYRVVFTGHSLGGALATVAGADLRGNGYDIDVFSYGAPRVGNRAFAEFLTVQTGGTLYRITHTNDIVPRLPPREFGYSHSSPEYWIKSGTLVPVTRNDIVKIEGIDATGGNNQPNIPDIPAHLWYFGLIGTCL

SEQ ID NO: 4648 - protein, 274 aa, Thermomyces lanuginosus
SPIRREVSVDLFNQFNLFAQYSAAAYCGKNNNAPAGTNITCTGNACPEVEKADATFLYSFEDSGKGDVTGFLALDNTNKLIVLSFRGSRSIENWIGNLNFDLKEINDICSGCRGHDGFTSSWRSVADTLRQKVEDAVREHPDYRVVFTGHSLGGALATVAGADLRGNGYDIDVFSYGAPRVGNRAFAEFLTVQTGGTLYRITHTNDIVPRLPPREFGYSHSSPEYWIKSGTLVPVRRRDIVKIEGIDATGGNNQPNIPDIPAHLWYFGLIGTCL

SEQ ID NO: 4649 - protein, 274 aa, Synthetic construct
SPIRREVSQDLFNQFNLFAQYSAAAYCGKNNDAPAGTNITCTGNACPEVEKADATFLYSFEDSGVGDVTGFLALDNTNKLIVLSFRGSRSIENWIGNLNFDLKEINDICSGCRGHDGFTSSWRSVADTLRQKVEDAVREHPDYRVVFTGHSLGGALATVAGADLRGNGYDIDVFSYGAPRVGNRAFAEFLTVQTGGTLYRITHTNDIVPRLPPREFGYSHSSPEYWIKSGTLVPVTRNDIVKIEGIDATGGNNQPNIPDIPAHWWYFGLIGTCL

SEQ ID NO: 4650 - protein, 274 aa, Thermomyces lanuginosus
SPIRREVSQDLFNQFNLFAQYSAAAYCGKNNDAPAGTNITCTGNACPEVEKADATFLYSFEDSGVGDVTGFLALDNTNKLIVLSFRGSRSIENWIGNLNFDLKEINDICSGCRGHDGFTSSWRSVADTLRQKVEDAVREHPDYRVVFTGHSLGGALATVAGADLRGNGYDIDVFSYGAPRVGNRAFAEFLTVQTGGTLYRITHTNDIVPRLPPREFGYSHPSPEYWIKSGTLVPVTRNDIVKIEGIDATGGNNQPNIPDIPAHLWYFGLIGTCL

SEQ ID NO: 4651 - protein, 274 aa, Synthetic construct
SPIRREVSQDLFNQFNLFAQYSAAAYCGKNNDAPAGTNITCTGNACPEVEKADATFLYSFEDSGVGDVTGFLALDNTNKLIVLSFRGSRSIENWIGNLNFDLKEINDICSGCRGHDGFTSSWRSVADTLRQKVEDAVREHPDYRVVFTGHSLGGALATVAGADLRGNGYDIDVFSYGAPRVGNRAFAEFLTVQTGGTLYRITHTNDIVPRLPPREFGYSHSSPEYWIKSGTLVPVTRNDIVKIEGIDATGGNNQPNIPDIPAHYWYFGLIGTCL

SEQ ID NO: 4652 - protein, 274 aa, Thermomyces lanuginosus
SPIRREVSQDLFNQFNLFAQYSAAAYCGKNNDAPAGTAITCTGNACPEVEKADATFLYSFEDSGVGDVTGFLALDNTNKLIVLSFRGSRSIENWIGNLNFDLKEINDICSGCRGHDGFTSSWRSVADTLRQKVEDAVREHPDYRVVFTGHSLGGALATVAGADLRGNGYDIDVFSYGAPRVGNRAFAEFLTVQTGGTLYRITHTNDIVPRLPPREFGYSHSSPEYWIKSGTLVPVTRNDIVKIEGIDATGGNNQPNIPDIPAHLWYFGLIGTCL

SEQ ID NO: 4653 - protein, 274 aa, Thermomyces lanuginosus
SPIRREVSQDLFNQFNLFAQYSAAAYCGKNNDAPAGTNITCHGNACPEVEKADATFLYSFEDSGVGDVTGFLALDNTNKLIVLSFRGSRSIENWIGNLNFDLKEINDICSGCRGHDGFTSSWRSVADTLRQKVEDAVREHPDYRVVFTGHSLGGALATVAGADLRGNGYDIDVFSYGAPRVGNRAFAEFLTVQTGGTLYRITHTNDIVPRLPPREFGYSHSSPEYWIKSGTLVPVTRNDIVKIEGIDATGGNNQPNIPDIPAHLWYFGLIGTCL

SEQ ID NO: 4654 - protein, 274 aa, Thermomyces lanuginosus
SPIRREVSQDLFNQFNLFAQYSAAAYCGKNNDAPAGTNITCAGNACPEVEKADATFLYSFEDSGVGDVTGFLALDNTNKLIVLSFRGSRSIENWIGNLNFALKEINDICSGCRGHDGFTSSWRSVADTLRQKVEDAVREHPDYRVVFTGHSLGGALATVAGADLRGNGYDIDVFSYGAPRVGNRAFAEFLTVQTGGTLYRITHTNDIVPRLPPREFGYSHSSPEYWIKSGTLVPVRRRDIVKIEGIDATGGNNGPNIPDIPAHLWYFGLIGTCL

SEQ ID NO: 4655 - protein, 274 aa, Thermomyces lanuginosus
SPIRREVSQDLFNQFNLFAQYSAAAYCGKNNNAPAGTNITCTGNACPEVEKADATFLYSFEDSGVGDVTGFLALDNTNKLIVLSFRGSRSIENWIGNLNFDLKEINDICSGCRGHDGFTSSWRSVADTLRQKVEDAVREHPDYRVVFTGHSLGGALATVAGADLRGNGYDIDVFSYGAPRVGNRAFAEFLTVQTGGTLYRITHTNDIVPRLPPREFGYSHSSPEYWIKSGTLVPVTRNDIVKIEGIDATGGNNQPNIPDIPAHLWYFGLIGTCL

SEQ ID NO: 4656 - protein, 274 aa, Thermomyces lanuginosus
SPIRREVSQDLFNQFNLFAQYSAAAYCGKNNDAPAGTNITCTGNACPEVEKADATFLYSFEDSGVGDVTGFLALDNTNKLIVLSFRGSRSIENWIGNLNFDLKEINAICSGCRGHDGFTSSWRSVADTLRQKVEDAVREHPDYRVVFTGHSLGGALATVAGADLRGNGYDIDVFSYGAPRVGNRAFAEFLTVQTGGTLYRITHTNDIVPRLPPREFGYSHSSPEYWIKSGTLVPVTRNDIVKIEGIDATGGNNQPNIPDIPAHLWYFGLIGTCL

SEQ ID NO: 4657 - protein, 274 aa, Thermomyces lanuginosus
SPIRREVSQDLFNQFNLFAQYSAAAYCGKNNDAPAGTNITCTGNACPEVEKADATFLYSFEDSGVGDVTGFLALDNTNKLIVLSFRGSRSIENWIQNLNFDLKEINDICSGCRGHDGFTSSWRSVADTLRQKVEDAVREHPDYRVVFTGHSLGGALATVAGADLRGNGYDIDVFSYGAPRVGNRAFAEFLTVQTGGTLYRITHTNDIVPRLPPRQFGYSHSSPEYWIKSGTLVPVRRRDIVKIEGIDATGGNNQRNIPDIPAHLWYFGLIGTCL

SEQ ID NO: 4658 - protein, 274 aa, Thermomyces lanuginosus
SPIRREVSQDLFNQFNLFAQYSAAAYCGKNNDAPAGTNITCTGNACPEVEKADATFLYSFEDNGSGDVTGFLALDNTNKLIVLSFRGSRSIENWIGNLNFDLKEINDICSGCRGHDGFTKSWRSVADTLRQKVEDAVREHPDYRVVFTGHSLGGALATVAGADLRGNGYDIDVFSYGAPRVGNRAFAEFLTVQTGGTLYRITHTNDIVPRLPPREFGYSHSSPEYWIKSGTLVPVRRRDIVKIEGIDATGGNNQPNIPDIPAHLWYFGLIGTCL

SEQ ID NO: 4659 - protein, 274 aa, Thermomyces lanuginosus
SPIRREVSQDLFNQFNLFAQYSAAAYCGKNNDAPAGTNITCTGNACPEVEKADATFLYSFEDSGVGDVTGFLALDNTNKLIVLSFRGSRSIENWIPNLNFDLKEINDICSGCRGHDGFTSSWRSVADTLRQKVEDAVREHPDYRVVFTGHSLGGALATVAGADLRGNGYDIDVFSYGAPRVGNRAFAEFLTVQTGGTLYRITHTNDIVPRLPPREFGYSHSSPEYWIKSGTLVPVTRNDIVKIEGIDATGGNNQPNIPDIPAHLWYFGLIGTCL

SEQ ID NO: 4660 - protein, 274 aa, Synthetic construct
SPIRREVSQDLFNQFNLFAQYSAAAYCGKNNDAPAGTNITCTGNACPEVEKADATFLYSFEDSGVGDVTGFLALDNTNKLIVLSFRGSRSIENWIGNLNFDLKEINDICSGCRGHDGFTSSWRSVADTLRQKVEDAVREHPDYRVVFTGHSLGGALATVAGADLRGNGYDIDVFSYGAPRVGNRAFAEFLTVQTGGTLYRITHTNDIVPRLPPREFGYSHSSPEYWIKSGTLVPVTRNDIVKIEGIDATGGNNQPNIPDIPAHQWYFGLIGTCL

SEQ ID NO: 4661 - protein, 274 aa, Thermomyces lanuginosus
SPIRREVSQDLFNQFNLFAQYSAAAYCGKNNDAPAGTNITCTGRACPEVEKADATFLYSFEDSGVGDVTGFLALDNTNKLIVLSFRGSRSIENWIGNLNFDLKEINDICSGCRGHDGFTSSWRSVADTLRQKVEDAVREHPDYRVVFTGHSLGGALATVAGADLRGNGYDIDVFSYGAPRVGNRAFAEFLTVQTGGTLYRITHTNDIVPRLPPREFGYSHSSPEYWIKSGTLVPVTRNDIVKIEGIDATGGNNQPNIPDIPAHLWYFGLIGTCL

SEQ ID NO: 4662 - protein, 274 aa, Thermomyces lanuginosus
SPIRREVSQDLFNQFNLFAQYSAAAYCGKNNDAPAGTNITCTGNACPEVEKADATFLYSFEDSGVGDVTGFLALDNTNKLIVLSFRGSRSIENWIDNLNFDLKEINDICSGCRGHDGFTSSWRSVADTLRQKVEDAVREHPDYRVVFTGHSLGGALATVAGADLRGNGYDIDVFSYGAPRVGNRAFAEFLTVQTGGTLYRITHTNDIVPRLPPREFGYSHSSPEYWIKSGTLVPVTRNDIVKIEGIDATGGNNQPNIPDIPAHLWYFGLIGTCL

SEQ ID NO: 4663 - protein, 274 aa, Thermomyces lanuginosus
SPIRREVSQDLFNQFNLFAQYSAAAYCGKNNDAPAGTNITCTGNACPEVEKADATFLYSFEDSGVGDVTGFLALDNTNKLIVLSFRGSRSIENWIGNLNFDLKEINDICSGCRGHDGFTSSWRSVADTLRQKVEDAVREHPDYRVVFTGHSLGGGLATVAGADLRGNGYDIDVFSYGAPRVGNRAFAEFLTVQTGGTLYRITHTNDIVPRLPPREFGYSHSSPEYWIKSGTGVPVRRRDIVKIEGIDATGGNNQPNIPDIKAHLWYFGLIGTCL

SEQ ID NO: 4664 - protein, 274 aa, Thermomyces lanuginosus
SPIRREVSQDLFNQFNLFAQYSAAAYCGKNNDAPAGTNITCQGNACPEVEKADATFLYSFEDSGVGDVTGFLALDNTNKLIVLSFRGSRSIENWIGNLNFDLKEINDICSGCRGHDGFTSSWRSVADTLRQKVEDAVREHPDYRVVFTGHSLGGALATVAGADLRGNGYDIDVFSYGAPRVGNRAFAEFLTVQTGGTLYRITHTNDIVPRLPPREFGYSHSSPEYWIKSGTLVPVTRNDIVKIEGIDATGGNNQPNIPDIPAHLWYFGLIGTCL

SEQ ID NO: 4665 - protein, 274 aa, Synthetic construct
SPIRREVSQDLFNQFNLFAQYSAAAYCGKNNDAPAGTNITCTGNACPEVEKADATFLYSFEDSGVGDVTGFLALDNTNKLIVLSFRGSRSIENWIGNLNFDLKEINDICSGCRGHDGFTSSWRSVADTLRQKVEDAVREHPDYRVVFTGHSLGGALATVAGADLRGNGYDIDVFSYGAPRVGNRAFAEFLTVQTGGTLYRITHTNDIVPRLPPREFGYSHSSPEYWIKSGTLVPVTRNDIVKIEGIDATGGNNQPNIPDIPAHIWYFGLIGTCL

SEQ ID NO: 4666 - protein, 274 aa, Thermomyces lanuginosus
SPIRREVSQDLFNQFNLFAQYSAAAYCGKNNDAPAGTNITCTGNACPEVEKADATFLYSFEDSGVGDVTGFLALDNTNKLIVLSFRGSRSIENWIGNLNFDLKEINDICSGCRGHDGFTSSWRSVADTLRQKVEDAVREHPDYRVVFTGHSLGGALATVAGADLRGNGYDIDVFSYGAPRVGNRAFAEFLTVQTGGTLYRITHTNDLVPRLPPREFGYSHSSPEYWIKSGTLVPVTRNDIVKIEGIDATGGNNQPNIPDIPAHLWYFGLIGTCL

SEQ ID NO: 4667 - protein, 274 aa, Thermomyces lanuginosus
SPIRREVSQDLFNQFNLFAQYSAAAYCGKNNDAPAGTQITCTGNACPEVEKADATFLYSFEDSGVGDVTGFLALDNTNKLIVLSFRGSRSIENWIGNLNFDLKEINDICSGCRGHDGFTSSWRSVADTLRQKVEDAVREHPDYRVVFTGHSLGGALATVAGADLRGNGYDIDVFSYGAPRVGNRAFAEFLTVQTGGTLYRITHTNDIVPRLPPREFGYSHSSPEYWIKSGTLVPVRRNDIVKIEGIDATGGNNQPNIPYIPAHLWYFGLIGTCL

SEQ ID NO: 4668 - protein, 274 aa, Thermomyces lanuginosus
SPIRREVSQDLFNQFNLFAQYSAAAYCGKNNDAPAGTQITCTGNACPEVEKADATFLYSFEDSGVGDVTGFLALDNTNKLIVLSFRGSRSIENWIGNLNFDLKEINDICSGCRGHDGFTSSWRSVADTLRQKVEDAVREHPDYRVVFTGHSLGGALATVAGADLRGNGYDIDVFSYGAPRVGNRAFAEFLTVQTGGTLYRITHTNDIVPRLPPREFGYSHSSPEYWIKSGTLVPVTRRDIVKIEGIDATGGNNQPNIPHIPAHLWYFGLIGTCL

SEQ ID NO: 4669 - protein, 274 aa, Thermomyces lanuginosus
SPIRREVSQDLFNQFNLFAQYSAAAYCGKNNDAPAGTNITCTGNACPEVEKADATFLYSFEDSGVGDVTGFLALDNTNKLIVLSFRGSRSIENWIGNLNFDLKEINDICSGCRGHDGFTSSWRSVADTLRQKVEDAVREHPDYRVVFTGHSLGGALATVAGADLRGNGYDIDVFSYGAPRVGNRAFAEFLTVQTGGTLYRITHTNDIVPRLPPREFGYSHSSPEYWIKSGTLVPVTRNDIVKIEGIDATGGNNQPNIPDIKAHLWYFGLIGTCL

SEQ ID NO: 4670 - protein, 274 aa, Thermomyces lanuginosus
SPIRREVSQDLFNQFNLFAQYSAAAYCGKNNDAPAGTQITCTGNACPEVEKADATFLYSFEDSGVGDVTGFLALDNTNKLIVLSFRGSRSIENWIGNLNFDLKEINDICSGCRGHDGFTSSWRSVADTLRQKVEDAVREHPDYRVVFTGHSLGGALATVAGADLRGNGYDIDVFSYGAPRVGNRAFAEFLTVQTGGTLYRITHTNDIVPRLPPREFGYSHSSPEYWIKSGTLVPVRRNDIVKIEGIDATGGNNQPNIPLIPAHLWYFGLIGTCL

SEQ ID NO: 4671 - protein, 274 aa, Thermomyces lanuginosus
SPIRREVSQDLFNQFNLFAQYSAAAYCGKNNDAPAGTNITCTGNACPEVEKADATFLYSFEDSGVGDVTGFLALDNTNKLIVLSFRGSRSIENWILNLNFDLKEINDICSGCRGHDGFTSSWRSVADTLRQKVEDAVREHPDYRVVFTGHSLGGALATVAGADLRGNGYDIDVFSYGAPRVGNRAFAEFLTVQTGGTLYRITHTNDIVPRLPPREFGYSHSSPEYWIKSGTLVPVTRNDIVKIEGIDATGGNNQPNIPDIPAHLWYFGLIGTCL

SEQ ID NO: 4672 - protein, 274 aa, Thermomyces lanuginosus
SPIRREVSQDLFNQFNLFAQYSAAAYCGKNNDAPAGTNITCTGNACPEVEKADATFLYSFEDSGVGDVTGFLALDNTNKLIVLSFRGSRSIENWIGNLNFDLKEINDICSGCRGHDGFTSSWRSVADTLRQKVEDAVREHPDYRVVFTGHSLGGALATVAGADLRGNGYDIDVFSYGAPRVGNRAFAEFLTVQTGGTLYRITHTNDIVPRLPPRAFGYSHSSPEYWIKSGTLVPVTRNDIVKIEGIDATGGNNQPNIPDIPAHLWYFGLIGTCL

SEQ ID NO: 4673 - protein, 274 aa, Thermomyces lanuginosus
SPIRREVSQDLFNQFNLFAQYSAAAYCGKNNDAPAGTNITCTGNACPEVEKADATFLYSFEDSGVGDVTGFLALDNTNKLIVLSFRGSRSIENWIINLNFDLKEINDICSGCRGHDGFTSSWRSVADTLRQKVEDAVREHPDYRVVFTGHSLGGALATVAGADLRGNGYDIDVFSYGAPRVGNRAFAEFLTVQTGGTLYRITHTNDIVPRLPPRQFGYSHSSPEYWIKSGTLVPVRRRDIVKIEGIDATGGNNQRNIPDIPAHLWYFGLIGTCL

SEQ ID NO: 4674 - protein, 274 aa, Thermomyces lanuginosus
SPIRREVSQDLFNQFNLFAQYSAAAYCGKNNDAPAGTQITCTGNACPEVEKADATFLYSFEDSGVGDVTGFLALDNTNKLIVLSFRGSRSIENWIGNLNFDLKEINDICSGCRGHDGFTSSWRSVADTLRQKVEDAVREHPDYRVVFTGHSLGGALATVAGADLRGNGYDIDVFSYGAPRVGNRAFAEFLTVQTGGTLYRITHTNDIVPRLPPREFGYSHSSPEYWIKSGTLVPVTRRDIVKIEGIDATGGNNQPNIPQIPAHLWYFGLIGTCL

SEQ ID NO: 4675 - protein, 274 aa, Thermomyces lanuginosus
SPIRREVSQDLFNQFNLFAQYSAAAYCGKNNDAPAGTQITCTGNACPEVEKADATFLYSFEDSGVGDVTGFLALDNTNKLIVLSFRGSRSIENWIGNLNFDLKEINDICSGCRGHDGFTSSWRSVADTLRQKVEDAVREHPDYRVVFTGHSLGGALATVAGADLRGNGYDIDVFSYGAPRVGNRAFAEFLTVQTGGTLYRITHTNDIVPRLPPREFGYSHSSPEYWIKSGTLVPVTRRDIVKIEGIDATGGNNQPNIPSIPAHLWYFGLIGTCL

SEQ ID NO: 4676 - protein, 274 aa, Thermomyces lanuginosus
SPIRREVSQDLFNQFNLFAQYSAAAYCGKNNDAPAGTNITCTGNACPEVEKADATFLYSFEDSGVGDVTGFLALDNTNKLIVLSFRGSRSIENWIGNLNKDLKEINDICSGCRGHDGFTSSWRSVADTLRQKVEDAVREHPDYRVVFTGHSLGGALATVAGADLRGNGYDIDVFSYGAPRVGNRAFAEFLTVQTGGTLYRITHTNDIVPRLPPREFGYSHSSPEYWIKSGTLVPVTRNDIVKIEGIDATGGNNQPNIPDIPAHLWYFGLIGTCL

SEQ ID NO: 4677 - protein, 274 aa, Thermomyces lanuginosus
SPIRREVSQDLFNQFNLFAQYSAAAYCGKNNDAPAGTNITCTGIACPEVEKADATFLYSFEDSGVGDVTGFLALDNTNKLIVLSFRGSRSIENWIGNLNFDLKEINDICSGCRGHDGFTSSWRSVADTLRQKVEDAVREHPDYRVVFTGHSLGGALATVAGADLRGNGYDIDVFSYGAPRVGNRAFAEFLTVQTGGTLYRITHTNDIVPRLPPREFGYSHSSPEYWIKSGTLVPVTRNDIVKIEGIDATGGNNQPNIPDIPAHLWYFGLIGTCL

SEQ ID NO: 4678 - protein, 274 aa, Synthetic construct
SPIRREVSQDLFNQFNLFAQYSAAAYCGKNNDAPAGTNITCTGNACPEVEKADATFLYSFEDSGVGDVTGFLALDNTNKLIVLSFRGSRSIENWIGNLNFDLKEINDICSGCRGHDGFTSSWRSVADTLRQKVEDAVREHPDYRVVFTGHSLGGALATVAGADLRGNGYDIDVFSYGAPRVGNRAFAEFLTVQTGGTLYRITHTNDIVPRPPPREFGYSHSSPEYWIKSGTLVPVTRNDIVKIEGIDATGGNNQPNIPDIPAHLWYFGLIGTCL

SEQ ID NO: 4679 - protein, 274 aa, Synthetic construct
SPIRREVSQDLFNQFNLFAQYSAAAYCGKNNDAPAGTNITCTGNACPEVEKADATFLYSFEDSGVGDVTGFLALDNTNKLIVLSFRGSRSIENWIGNLNFDLKEINDICSGCRGHDGFTSSWRSVADTLRQKVEDAVREHPDYRVVFTGHSLGGALATVAGADLRGNGYDIDVFSYGAPRVGNRAFAEFLTVQTGGTLYRITHTNDIVPRNPPREFGYSHSSPEYWIKSGTLVPVTRNDIVKIEGIDATGGNNQPNIPDIPAHLWYFGLIGTCL

SEQ ID NO: 4680 - protein, 274 aa, Thermomyces lanuginosus
SPIRREVSQDLFNQFNLFAQYSAAAYCGKNNDAPAGTNITCTGDACPEVEKADATFLYSFEDSGVGDVTGFLALDNTNKLIVLSFRGSRSIENWIGNLNFDLKEINDICSGCRGHDGFTSSWRSVADTLRQKVEDAVREHPDYRVVFTGHSLGGALATVAGADLRGNGYDIDVFSYGAPRVGNRAFAEFLTVQTGGTLYRITHTNDIVPRLPPREFGYSHSSPEYWIKSGTLVPVTRNDIVKIEGIDATGGNNQPNIPDIPAHLWYFGLIGTCL

SEQ ID NO: 4681 - protein, 274 aa, Synthetic construct
SPIRREVSQDLFNQFNLFAQYSAAAYCGKNNDAPAGTNITCTGNACPEVEKADATFLYSFMDSGVGDVTGFLALDNTNKLIVLSFRGSRSIENWIGNLNFDLKEINDICSGCRGHDGFTSSWRSVADTLRQKVEDAVREHPDYRVVFTGHSLGGALATVAGADLRGNGYDIDVFSYGAPRVGNRAFAEFLTVQTGGTLYRITHTNDIVPRLPPREFGYSHSSPEYWIKSGTLVPVTRNDIVKIEGIDATGGNNQPNIPDIPAHLWYFGLIGTCL

SEQ ID NO: 4682 - protein, 274 aa, Thermomyces lanuginosus
SPIRREVSQDLFNQFNLFAQYSAAAYCGKNNDAPAGTNITCTGNACPEVEKADATFLYSFEDSGVGDVTGFLALDNTNKLIVLSFRGSRSIENWFGNLNFDLKEINDICSGCRGHDGFTSSWRSVADTLRQKVEDAVREHPDYRVVFTGHSLGGALATVAGADLRGNGYDIDVFSYGAPRVGNRAFAEFLTVQTGGTLYRITHTNDPVPRLPPREFGYSHSSPEYWIKSGTLVPVRRRDIVKIEGIDATGGNNQPNIPDLPAHLWYFGLIGTCL

SEQ ID NO: 4683 - protein, 274 aa, Thermomyces lanuginosus
SPIRREVSQDLFNQFNLFAQYSAAAYCGKNNDAPAGTNITCTGNACPEVEKADATFLYSFEDSGVGDVTGFLALDNTNKLIVLSFRGSRSIENWIVNLNFDLKEINDICSGCRGHDGFTSSWRSVADTLRQKVEDAVREHPDYRVVFTGHSLGGALATVAGADLRGNGYDIDVFSYGAPRVGNRAFAEFLTVQTGGTLYRITHTNDIVPRLPPREFGYSHSSPEYWIKSGTLVPVTRNDIVKIEGIDATGGNNQPNIPDIPAHLWYFGLIGTCL

SEQ ID NO: 4684 - protein, 274 aa, Thermomyces lanuginosus
SPIRREVSQDLFNQFNLFAQYSAAAYCGKNNDAPAGTNITCTGNACPEVEKADATFLYSFEDSGKGDVTGFLALDNTNKLIVLSFRGSRSIENWIGNLNFDLKEINDICSGCRGHDGFTSSWRSVADTLRQKVEDAVREHPDYRVVFTGHSLGGGLATVAGADLRGNGYDIDVFSYGAPRVGNRAFAEFLTVQTGGTLYRITHTNDIVPRLPPREFGYSHSSPEYWIKSGTLVPVRRRDIVKIEGIDATGGNNQPNIPDVPAHLWYFGLIGTCL

SEQ ID NO: 4685 - protein, 274 aa, Synthetic construct
SPIRREVSQDLFNQFNLFAQYSAAAYCGKNNDAPAGTNITCTGNACPEVEKADATFLYSFWDSGVGDVTGFLALDNTNKLIVLSFRGSRSIENWIGNLNFDLKEINDICSGCRGHDGFTSSWRSVADTLRQKVEDAVREHPDYRVVFTGHSLGGALATVAGADLRGNGYDIDVFSYGAPRVGNRAFAEFLTVQTGGTLYRITHTNDIVPRLPPREFGYSHSSPEYWIKSGTLVPVTRNDIVKIEGIDATGGNNQPNIPDIPAHLWYFGLIGTCL

SEQ ID NO: 4686 - protein, 274 aa, Synthetic construct
SPIRREVSQDLFNQFNLFAQYSAAAYCGKNNDAPAGTNITCTGNACPEVEKADATFLYSFEDSGVGDVTGFLALDNTNKLIVLSFRGSRSIENWIGNLNFDLKEINDICSGCRGHDGFTSSWRSVADTLRQKVEDAVREHPDYRVVFTGHSLGGALATVAGADLRGNGYDIDVFSYGAPRVGNRAFAEFLTVQTGGTLYRITHTNDIVPRRPPREFGYSHSSPEYWIKSGTLVPVTRNDIVKIEGIDATGGNNQPNIPDIPAHLWYFGLIGTCL

SEQ ID NO: 4687 - protein, 275 aa, Thermomyces lanuginosus
SPIRPRPVSQDLFNQFNLFAQYSAAAYCGKNNDAPAGTNITCTGNACPEVEKADATFLYSFEDSGVGDVTGFLALDNTNKLIVLSFRGSRSIENWIGNLNFDLKKINDICSGCRGHDGFTSSWRSVADTLRQKVEDAVREHPDYRVVFTGHSLGGALATVAGADLRGNGYDIDVFSYGAPRVGNRAFAEFLTVQTGGTLYRITHTNDIVPRLPPREFGYSHSSPEYWIKSGTLVPVTRNDIVKIEGIDATGGNNRPNIPDIPAHLWYFGLIGTCL

SEQ ID NO: 4688 - protein, 273 aa, Thermomyces lanuginosus
SPIRREVSQDLFNQFNLFAQYSAAAYCGKNNDAPAGTNITCTGNACPEVEKADATFLYSFEDAGVGDVTGFLALDNTNKLIVLSFRGDRSIENWIGNLNFDLKEINDICSGCRGHDGFTSSWRSVADTLRQKVEDAVREHPDYRVVFTGHSLGGALATVAGADLRGNGYDIDVFSYGAPRVGNRAFAEFLTVQTGGTLYRITHTNDIVPRLPRREFGYSHSSPEYWIKSGTLVPVTRNDIVKIEGIDATGGNNQPNIPDIPAHLWYFGLIGTC

SEQ ID NO: 4689 - protein, 273 aa, Thermomyces lanuginosus
SPIRREVSQDLFNQFNLFAQYSAAAYCGKNNDAPAGTNITCTGNACPEVEKADATFLYSFEDSGVGDVTGFLALDNTNKLIVLSFRGSRSIENWIGNLNFDLKEINDICSGCRGHDGFTSSWRSVADTLRQKVEDAVREHPDYRVVFTGHSLGGALATVAGADLRGNGYDIDVFSYGAPRVGNRAFAEFLTVQTGGTLYRITHTNDIVPRLPPREFGYSHSSPEYWIKSGTLVPVTRNDIVKIEGIDATGGNNQPNIPDIPAHLWYFGPISEC

SEQ ID NO: 4690 - protein, 269 aa, Thermomyces lanuginosus
EVSQDLFNQFNLFAQYSAAAYCGKNNDAPAGTNITCTGNACPEVEKADATFLYSFEDSGVGDVTGFLALDNTNKLIVLSFRGSRSIENWIGNLNFDLKEINDICSGCRGHDGFTSSWRSVADTLRQKVEDAVREHPDYRVVFGGHSLGGALATVAGADLRGNGYDIDVFSYGAPRVGNRAFAEFLTVQTGGTLYRITHTNDIVPRLPPREFGYSHSSPEYWIKSGTLVPVRRRDIVKIEGIDATGGNNQPNIPDIPAHLWYFGLIGTCL

SEQ ID NO: 4691 - protein, 269 aa, Thermomyces lanuginosus
EVSQDLFNQFNLFAQYSAAAYCGKNNDAPAGTNITCTGNACPEVEKADATFLYSFEDSGVGDVTGFLALDNTNKLIVLSFRGSRSIENWIGNLNFDLKEINDICSGCRGHAGFTSSWRSVADTLRQKVEAAVREHPDYRVVFTGHSLGGALATVAGADLRGNGYDIDVFSYGAPRVGNRAFAEFLTVQTGGTLYRITHTNDIVPRLPPREFGYSHSSPEYWIKSGTLVPVTRNDIVKIEGIDATGGNNQPNIPDIPAHLWYFGRIGTCL

SEQ ID NO: 4692 - protein, 269 aa, Thermomyces lanuginosus
EVSQDLFNQFNLFAQYSAAAYCGKNNDAPAGTNITCTGNACPEVEKADATFLYSFEDSGVGDVTGFLALDNTNKLIVLSFRGSRSIENWIGNLNFDLKRINDICSGCRGHDGFTSSWRSVADTLRQKVEDAVREHPDYRVVFTGHSLGGALATVAGADLRGNGYDIDVFSYGAPRVGNRAFAEFLTVQTGGTLYRITHTNDIVPRLPPXEFGYSHSSPEYWIKSGTLVPVTRNDIVKIEGIDATGGNNHPNIPDIPAHLWYFGLIGTCL

SEQ ID NO: 4693 - protein, 269 aa, Thermomyces lanuginosus
EVSQDLFNQFNLFAQYSAAAYCGKNNDAPAGTNITCTGNACPEVEKADATFLYSFEDSGVGDVTGFLALDNTNKDIVLSFRGSRSIENWIGNLNFDLKEINDICSGCRGHDGFTSSWRSVADTLRQKVEAAVREHPDYRVVFTGHSLGGALATVAGADLRGNGYDIDVFSYGAPRVGNRAFAEFLTHQTGGTLYRITHTNDIVPRLPPREFGYSHSSPEYWIKSGTLVPVTRNDIVKIEGIDATGGNNQPNIPDIPAHLWYFGLIGTCL

SEQ ID NO: 4694 - protein, 269 aa, Thermomyces lanuginosus
EVSQDLFNQFNLFAQYSAAAYCGKNNDAPAGTNITCTGNACPEVEKADATFLYSFEDSGVGDVTGFLALDNTNKLIVLSFRGSRSIENWIGNLNFDLKEINDICSGCRGHDGFTSSWRSVADTLRQKVEDAVREHPDYRVVFTGHSLGGALATVAGADLRGNGYDIDVFSYGAPRVGNRAFAEFLTVQTGGTLYRITHTNDIVPRLPPREFGYSHSSPEYWIKSGTLVPVRRRDIVKIEGIDATGGNNQPNIPDIQAHLWYFGLIGTCL

SEQ ID NO: 4695 - protein, 269 aa, Thermomyces lanuginosus
EVSQDLFNQFNLFAQYSAAAYCGKNNDAPAGTDITCTGNACPEVFKADATFLYSFEDSGVGDVTGFLALDNTRKLIVLSFRGSRSIENWIGNLNFDLKEINDICSGCRGHDGFTSSWRSVADTLRQKVEDAVREHPDYRVVFTGHSLGGALATVAGADLRGNGYDIDVFSYGAPRVGNRAFAEFLTVQTGGTLYRITHTNDIVPRLPPREFGYSHSSPEYWIKSGTLVPVTRNDIVKIEGIDATGGNNQPNIPDIPAHLWYFGLIGTCL

SEQ ID NO: 4696 - protein, 269 aa, Thermomyces lanuginosus
EVSQDLFNQFNLFAQYSAAAYCGKNNDAPAGTNITCTGNACPEVEKADATFLYSFEDSGVGDVTGFLALDNTNKLIVLSFRGSRSIENWIGNLNFDLKEINDICSGCRGHDGFTSSWRSVADTLRQKVEDAVREHPDYRVVFTGHSLGGALATVAGADLRGNGYDIDVFSYGAPRVGNRAFAEFLTVQTGGTLYRITFTNDIVPRLPPREFGYSHSSPEYWIKSGTLVPVRRRDIVKIEGIDATGGNNQPNIPDIPAHLWYFGLIGTCL

SEQ ID NO: 4697 - protein, 269 aa, Thermomyces lanuginosus
EVSQDLFNQFNLFAQYSAAAYCGKNNDAPAGTNITCTGNACPEVEKADATFLYSFEDSGVGDVTGFLALDNTNKLIVLSFRGSRSIENWIGNLNFDLKEINDICSGCRGHDGFTSSWRSVADTLRQKVEDAVREHPDYRVVFTGHSLGGALATVAGADLRGNGYDIDVFSYGAPRVGNRAFAEFLTVQTGGTLYRITHTNDIVPRLPPREFGYSHSSPEYWIKSGTLVPVRRRDIVKIEGIDATGGNNQPNIPDINAHLWYFGLIGTCL

SEQ ID NO: 4698 - protein, 269 aa, Thermomyces lanuginosus
EVSQDLFNQFNLFAQYSAAAYCGKNNDAPAGTNITCTGNACPEVEKADATFLYSFEDSGVGDVTGFLALDNTNKLIVLSFRGSRSIENWIGNLNFDLKEINDICSGCRGHDGFTSSWRSVADTLRQKVEDAVREHPDYRVVFTGHSLGGALATVAGADLRGNGYDIDVFSYGAPRVGNRAFAEFLTVQTGGTLYRITHTKDIVPRLPPREFGYSHSSPEYWIKSGTLVPVRRRDIVKIEGIDATGGNNQPNIPDIPAHLWYFGLIGTCL

SEQ ID NO: 4699 - protein, 269 aa, Thermomyces lanuginosus
EVSQDLFNQFNLFAQYSAAAYCGANNDAPAGTNITCTGNACPEVEKADATFLYSFEDSGVGDVTGFLALDNTNKQIVLSFRGSRSIENWIGNLNFDLKEINDICSGCRGHDGFTSSWRSVADTLRQKVEDAVREHPDYRVVFTGHSLGGALATVAWADLRGNGYDIDVFSYGAPRVGNRAFAEFLTVQTGGTLYRITHTNDIVPRLPPREFGYSHSSPEYWIKSGTLVPVTRNDIVKIEGIDATGGNNQPNIPDIPAHLWYFGLIGTCL

SEQ ID NO: 4700 - protein, 269 aa, Thermomyces lanuginosus
EVSQDLFNQFNLFAQYSAAAYCGKNNDAPAGTNITCTGNACPEVEKADATFLYSFEDSGVGDVTGFLALDNTNKLIVLSFRGSRSIENWIGNLNFDLKEINDICSGCRGHDGFTSSWRSVADTLRQKVEDAVREHPDYRVVFTGHSLGGALATVAGADLRGNGYDIDVFSYGAPRVGNRAFAEFLTVQTGGTLYRITHTNDIVPRLPPREFGYSHSSPEYWIKSGTLVRVRRRDIVKIEGIDATGGNNQPNIPDIPAHLWYFGLIGTCL

SEQ ID NO: 4701 - protein, 269 aa, Thermomyces lanuginosus
EVSQDLFNQFNLFAQYSAAAYCGKNNDAPAGTNITCTGNACPEVEKADATFLYSFEDSGVGDVTGFLALDNTNKLIVLSFRGSRSIENWIGNLNFDLKEINDICSGCRGHDGFTSSWRSVADTLRQKVEDAVREHPDYRVVFTGHSLGGALATVAGADLRGNGYDIDVFSYGAPRVGNRAFAEFLTVQTGGTLYRITHTNDIVPRLPPREFGYSHSSPEYWIKSGTLVPVRRRDIVKIEGIDATGGNNQPNIPDGPAHLWYFGLIGTCL

SEQ ID NO: 4702 - protein, 269 aa, Thermomyces lanuginosus
EVSQDLFNQFNLFAQYSAAAYCGKNNDAPAGTNITCTGNACPEVEKADATFLYSFEDSGVGDVTGFLALDNTNKLIVLSFRGSRSIENWIGNLNFDLKEINDICSGCRGHDGFTSSWRSVADTLRQKVEDAVREHPDYRVVFTGHSLGGALATVAGADLRGNGYDIDVFSYGAPRVGNRAFAEFLTVQTGGTLYRITHTNDIVPRLPPREFGYSHSSPEYWIKSGTLVPVRRRDIVKIEGIDATGGNNQPNIPDISAHLWYFGLIGTCL

SEQ ID NO: 4703 - protein, 269 aa, Thermomyces lanuginosus
EVSQDLFNQFNLFAQYSAAAYCGKNNNAPAGTNITCTGNACPEVEKADATFLYSFEDSGVGDVTGFLALDNTNKLIVLSFRGSRSIENWIGNLNFDLKEINDICSGCRGHDGFTSSWRSVADTLRQKVEDAVREHPDYRVVFTGHSLGGALATVAGADLRGNGYDIDVFSYGAPRVGNRAFAEFLTVQTGGTLYRITHTNDIVPRLPPREFGYSHSSPEYWIKSGTLVPVRRRDIVKIEGIDATGGNNQPNIPDIPAHLWYFGLIGTCL

SEQ ID NO: 4704 - protein, 269 aa, Thermomyces lanuginosus
EVSQDLFNQFNLFAQYSAAAYCGKNNDAPAGTNITCTGNACPEVEKADATFLYSFEDSGVGDVTGFLALDNTNKLIILSFRGSRSIENWIGNLNFDLKEINDICSGCRGHDGFTSSWRSVADTLRQKVEDAVREHPDYRVVFTGHSLGGALATVAGADLRGNGYDIDVFSYGAPRVGNRAFAEFLTAQDGGTLYRITHTNDIVPRLPPREFGYSHSSPEYWIKSGTLVPVTRNDIVKIEGIDATGGNNQPNIPDIPAHLWYFGLIGTCL

SEQ ID NO: 4705 - protein, 269 aa, Thermomyces lanuginosus
EVSQDLFNQFNLFAQYSAAAYCGKNNDAPAGTNITCTGNACPEVEKADATFLYSFEDSGVGDVTGFLALDNTNKLIVLSFRGSRSIENWIGNLNFDLKEINDICSGCRGHDGFTSSWRSVADTLRQKVEDAVREHPDYRVVFTGHSLGGALATVAGADLRGNSYDIDVFSYGAPRVGNRAFAEFLTVQTGGTLYRITHTNDIVPRLPPREFGYSHSSPEYWIKSGTLVPVRRRDIVKIEGIDATGGNNQPNIPDIPAHLWYFGLIGTCL

SEQ ID NO: 4706 - protein, 269 aa, Thermomyces lanuginosus
EVSQDLFNQFNLFAQYSAAAYCGKNNDAPAGTNITCTGNACPEVEKADATFLYSFEDSGVGDVTGFLALDNTNKLIVLSFRGSRSIENWIGNLNFDLKEINDICSGCRGHDGFTSSWRSVADTLRQKVEDAVREHPDYRVVFTGHSLGGALATVAGADLRGNGYDIDVFSYGAPRVGNRAFAEFLTVQTGGTLYRITHTNDVVPRLPPREFGYSHSSPEYWIKSGTLVPVRRRDIVKIEGIDATGGNNQPNIPDIPAHLWYFGLIGTCL

SEQ ID NO: 4707 - protein, 269 aa, Thermomyces lanuginosus
EVSQDLFNQFNLFAQYSAAAYCQKNNDAPAGTNITCTGNACPEVEKADVTFLYSFEDSGVGDVTGFLALDNTNKLIVLSFRGSRSIENWIGNLNFDLKEINDICSGCRGHDGFTSSWRSVADTLRQKVEDAVREHPDYRVVFTGHSLGGALATVAGADLRGNGYDIDVFSYGAPRVGNRAFAEFLTVQDGGTLYRITHTNDIVPRLPPREFGYSHSSPEYWIKSGTLVPVTRNDIVKIEGIDATGGNNQPNIPDIPAHLWYFGLIGTCL

SEQ ID NO: 4708 - protein, 269 aa, Thermomyces lanuginosus
EVSQDLFNQFNLFAQYSAAAYCGKNNDAPAGTNITCTGNACPEVEKADATFLYSFEDSGVGDVTGFLALDNTNKLIVLSFRGSRSIENWIGNLRFDLKEINDICSGCRGHDGFTSSWRSVADTLRQKVEDAVREHPDYRVVFTGHSLGGALATVAGADLRGNGYDIDVFSYGAPRVGNRAFAEFLTVQTGGTLYRITHTNDIVPRLPPXEFGYSHSSPEYWIKSGTLVPVTRNDIVKIEGIDATGGNNHPNIPDIPAHLWYFGLIGTCL

SEQ ID NO: 4709 - protein, 269 aa, Thermomyces lanuginosus
EVSQDLFNQFNLFAQYSAAAYCGKNNDAPAGTNITCTGNACPEVEKADATFLYSFEDSGVGDVTGFLALDNTNKLIVLSFRGSRSIENWAGNLNFDLKEINDICSGCRGHDGFTSSWRSVADTLRQKVEDAVREHPDYRVVFTGHSLGGALATVAGADLRGNGYDIDVFSYGAPRVGNRAFAEFLTVQTGGTLYRITHTNDIVPRLPPREFGYSHSSPEYWIKSGTLVPVRRRDIVKIEGIDATGGNNQPNIPDIPAHLWYFGLIGTCL

SEQ ID NO: 4710 - protein, 269 aa, Thermomyces lanuginosus
EVSQDLFNQFNLFAQYSAAAYCGKNNDAPAGTNITCTGNACPEVEKADATFLYSFEDSGVGDVTGFLALDNTNKLIVLSFRGSRSIENWIGNLNFDLKEINDICSGCRGHDGFTSSWRSVADTLRQKVEDAVREHPDYRVVFTGHSLGGALATVAGADLRGNGYDIDVFSYGAPRVGNRAFAEFLTVQTGGTLYRITHTNDIVPRLPPREFGYSHSSPEYWIKSGTLVPVRRRDIVKIEGIDATGGNNQPNIPDIPYHLWYFGLIGTCL

SEQ ID NO: 4711 - protein, 269 aa, Thermomyces lanuginosus
EVSQDLFNQFNLFAQYSAAAYCGKNNDAPAGTNITCTGNACPEVEKADATFLYSFEDSGVGDVTGFLALDNTNKLIVLSFRGSRSIENWIGNLNFDLKEINDICSGCRGHDGFTSSWRSVADTLRQKVEDAVREHPDYRVVFTGHSLGGALATVAGADLRGNGYDIDVFSYGAPRVGNRAFAEFLTVQTGGTLYRITHTNDIMPRLPPREFGYSHSSPEYWIKSGTLVPVRRRDIVKIEGIDATGGNNQPNIPDIPAHLWYFGLIGTCL

SEQ ID NO: 4712 - protein, 269 aa, Thermomyces lanuginosus
EVSQDLFNQFNLFAQYSAAAYCGKNNDAPAGTNITCTGNACPEVFKADATFLYSFEDSGVGDVTGFLALDNTNKDIVLSFRGSRSIENWIGNLNFDLKEINDICSGCRGHDGFTSSWRSVADTLRQKVEDAVREHPDYRVVFTGHSLGGALATVAGADLRGNGYDIDVFSYGAPRVGNRAFAEFLTVQDGGTLYRITHTNDIVPRLPPREFGYSHSSPEYWIKSGTLVPVTRNDIVKIEGIDATGGNNQPNIPDIPAHLWYFGLIGTCL

SEQ ID NO: 4713 - protein, 269 aa, Thermomyces lanuginosus
EVSQDLFNQFNLFAQYSAAAYCGKNNDAPAGTNITCTGNACPEVEKADATFLYSFEDSGVGDVTGFLALDNTNKQIVLSFRGSRSIENWIGNLNFDLKEINDICSGCRGHDGFTSSWRSVADTLRQKVEDAVREHPDYRVVFTGHSLGGALATVAWADLRGNGYDIDVFSYGAPRVGNRAFAEFLTVQDGGTLYRITHTNDIVPRLPPREFGYSHSSPEYWIKSGTLVPVTRNDIVKIEGIDATGGNNQPNIPDIPAHLWYFGLIGTCL

SEQ ID NO: 4714 - protein, 269 aa, Thermomyces lanuginosus
EVSQDLFNQFNLFAQYSAAAYCGKNNDAPAGTNITCTGNACPEVEKADATFLYSFEDSGVGDVTGFLALDNTNKLIVLSFRGSRSIENWIGNLNFDLKEINDICSGCRGHDGFTSSWRSVADTLRQKVEDAVREHPDYRVVFTGHSLGGALATVAGADLRGNGYDIDVFSYGAPRVGNRAFAEFLTVQTGGTLYRITHTNDIVPRLPNREFGYSHSSPEYWIKSGTLVPVRRRDIVKIEGIDATGGNNQPNIPDIPAHLWYFGLIGTCL

SEQ ID NO: 4715 - protein, 269 aa, Thermomyces lanuginosus
EVSQDLFNQFNLFAQYSAAAYCGKNNDAPAGTNITCTGNACPEVEKADATFLYSFEDSGVGDVTGFLALDNTNKLIVLSFRGSRSIENWIGNLNFDLKEINDICSGCRGHDGFTSSWFSVADTLRQKVEDAVREHPDYRVVFTGHSLGGALATVAGADLRGNGYDIDVFSYGAPRVGNRAFAEFLTVQTGGTLYRITHTNDIVPRLPPREFGYSHSSPEYWIKSGTLVPVRRRDIVKIEGIDATGGNNQPNIPDIPAHLWYFGLIGTCL

SEQ ID NO: 4716 - protein, 269 aa, Thermomyces lanuginosus
EVSQDLFNQFNLFAQYSAAAYCGKNNDAPAGTNITCTGNACPEVEKADATFLYSFEDSGVGDVTGFLALDNTNKLIVLSFRGSRSIENWIGNLNFDLKEINDICSGCRGHDGFTSSWRSVADTLRQKVEDAVREHPDYRVVFTGHSLGGALATVAGADLRGNGYDIDVFSYGAPRVGNRAFAEFLTVQTGGTLYRITHTNDIVPRLPPRENGYSHSSPEYWIKSGTLVPVRRRDIVKIEGIDATGGNNQPNIPDIPAHLWYFGLIGTCL

SEQ ID NO: 4717 - protein, 269 aa, Thermomyces lanuginosus
EVSQDLFNQFNLFAQYSKAAYCKKNNDAPAGTNITCTGNACPEVEKADATFLYSFEDSGVGDVTGFLALDNTNKLIVLSFRGSRSIENWIGNLNFDLKEINDICSGCRGHDGFTSSWRSVADTLRQKVEDAVREHPDYRVVFTGHSLGGALATVAWADLRGNGYDIDVFSYGAPRVGNRAFAEFLTVQTGGTLYRITHTNDIVPRLPPREFGYSHSSPEYWIKSGTLVPVTRNDIVKIEGIDATGGNNQPNIPDIPAHLWYFGLIGTCL

SEQ ID NO: 4718 - protein, 269 aa, Thermomyces lanuginosus
EVSQDLFNQFNLFAQYSAAAYCGKNNDAPAGTNITCTGNACPEVEKADATFLYSFENSGVGDVTGFLALDNTNKLIVLSFRGSRSIENWIGNLNFDLKEINDICSGCRGHDGFTSSWRSVADTLRQKVEDAVREHPDYRVVFTGHSLGGALATVAGADLRGNGYDIDVFSYGAPRVGNRAFAEFLTVQTGGTLYRITHTNDIVPRLPPREFGYSHSSPEYWIKSGTLVPVRRRDIVKIEGIDATGGNNQPNIPDIPAHLWYFGLIGTCL

SEQ ID NO: 4719 - protein, 269 aa, Thermomyces lanuginosus
EVSQDLFNQFNLFAQYSAAAYCGKNNDAPAGTNITCTGNACPEVEKADATFLYSFEDSGVGDVTGFLALDNTNKLIVLSFRGSRSIENWIGNLNFDLKEINDICSGCRGHDGFTSSWRSVADTLRQKVEDAVREHPDYRVVFTGHSLGGALATVAGADLRGNGYDIDVFSYGAPRVGNRAFAEFLTVQTGGTLYRITHTNDIVPRLPPREFGYSHSSPEYWIKSGTLVPVRRRDIVKIEGIDATGGNNQPNIPDIPAHLFYFGLIGTCL

SEQ ID NO: 4720 - protein, 269 aa, Thermomyces lanuginosus
EVSQDLFNQFNLFAQYSAAAYCGKNNDAPAGTNITCTGNACPEVEKADATFLYSFEDSGVGDVTGFLALDNTNKLIVLSFRGSRSIENWIGNLNFDVKEINDICSGCRGHDGFTSSWRSVADTLRQKVEDAVREHPDYRVVFTGHSLGGALATVAGADLRGNGYDIDVFSYGAPRVGNRAFAEFLTVQTGGTLYRITHTNDIVPRLPPREFGYSHSSPEYWIKSGTLVPVRRRDIVKIEGIDATGGNNQPNIPDIPAHLWYFGLIGTCL

SEQ ID NO: 4721 - protein, 269 aa, Thermomyces lanuginosus
EVSQDLFNQFNLFAQYSAAAYCGKNNDAPAGTNITCTGNACPEVEKADATFLYSFEDSGVGDVTGFLALDNTNKLIVLSFRGSRSIENWIGNLNFDLKEINDICSGCRGHDGFTSSWRSVADTLRQKVEDAVREHPDYRVVFTGHSLGGALATVAGADLRGNGYDIDVFSYGAPRVGNRAFAEFLTVQTGGTLYRITHTNDIVPRLPPREFGYSHSSPEYWIKSGTLVPVRRRDIVKIEGIDATGGNNQPNIPDIPAHLHYFGLIGTCL

SEQ ID NO: 4722 - protein, 269 aa, Thermomyces lanuginosus
EVSQDLFNQFNLFAQYSAAAYCGKNNDAPAGTNITCTGNACPEVEKADATFLYSFEDSGVGDVTGFLALDNTNKQIVLSFRGSRSIENWIGNLNFDLKEINDICSGCRGHDGFTSSWRSVADTLRQKVEDAVREHPDYRVVFTGHSLGGALATVAGADLRGNGYDIDVFSYGAPRVGNRAFAEFLTNQTGGTLYRITHTNDIVPRLPPREFGYSHSSPEYWIKSGTLVPVTRNDIVKIEGIDATGGNNQPNIPDIPAHLWYFGRIGTCL

SEQ ID NO: 4723 - protein, 269 aa, Thermomyces lanuginosus
EVSQDLFNQFNLFAQYSAAAYCGKNNDAPAGTNITCTGNACPEVEKADATFLYSFEDSGVGDVTGFLALDNTNKLIVLSFRGSRSIENWIGNLNFDLKEINDICSGCRGHDGFTSSWRSVADTLRQKVEDAVREHPDYRVVFTGHSLGGALATVAGADLRGNGYDIDVFSYGAPRVGNRAFAEFLTVQTGGTLYRITHTNDIVPRLPPREFGYSHSSPEYWIKSGTLVPVRRRDIVKIEGIDATGGNNQPNIPDIKAHLWYFGLIGTCL

SEQ ID NO: 4724 - protein, 269 aa, Thermomyces lanuginosus
EVSQDLFNQFNLFAQYSAAAYCGKNNDAPAGTNITCTGNACPEVEKADATFLYSFEDSGVGDVTGFLALDNTNKLIVLSFRGSRSIENWIGNLNFDLKEINDICSGCRGHDGFTSSWRSVADTLRQKVEDAVREHPDYRVVFTGHSLGGALATVAGADLRGNGYDIDVFSYGAPRVGNRAFAEFLTVQTGGTLYRITSTNDIVPRLPPREFGYSHSSPEYWIKSGTLVPVRRRDIVKIEGIDATGGNNQPNIPDIPAHLWYFGLIGTCL

SEQ ID NO: 4725 - protein, 269 aa, Thermomyces lanuginosus
EVSQDLFNQFNLFAQYSAAAYCGKNNDAPAGTNITCTGNACPEVEKADATFLYSFEDSGVGDVTGFLALDNTNKLIVLSFRGSRSIENWIGNLNFDLKEINDICSGCRGHDGFTSSWRSVADTLRQKVEDAVREHPDYRVVFTGHSLGGALATVAGADLRGNGYDIDVFSYGAPRVGNRAFAEFLTVQTGGTLYRITHTNDIVPRLPPREFGYSHSSPEYWIKSGTEVPVRRRDIVKIEGIDATGGNNQPNIPDIPAHLWYFGLIGTCL

SEQ ID NO: 4726 - protein, 269 aa, Thermomyces lanuginosus
EVSQDLFNQFNLFAQYSAAAYCGKNNDAPAGTNITCTGNACPEVEKADATFLYSFEDSGVGDVTGFLALDNTNKLIVLSFRGSRSIENWIGNLNFDLKEINDICSGCRGHDGFTSSWRSVADTLRQKVEDAVREHPDYRVVFTGHSLGGALATVAGADLRGNGYDIDVFSYGAPRVGNRAFAEFLTVQTGGTLYRITHTNDIVPRLPPREFGYSHSSPEYWIKSGTLVPVRRRDIVKIEGIDATGGNNQPNIPDIPVHLWYFGLIGTCL

SEQ ID NO: 4727 - protein, 269 aa, Thermomyces lanuginosus
EVSQDLFNQFNLFAQYSAAAYCGKNNDAPAGTNITCTGNACPEVEKADATFLYSFEDSGVGDVTGFLALDNTNKLIVLSFRGSRSIENWIVNLNFDLKEINDICSGCRGHDGFTSSWRSVADTLRQKVEDAVREHPDYRVVFTGHSLGGALATVAGADLRGNGYDIDVFSYGAPRVGNRAFAEFLTVQTGGTLYRITHTNDIVPRLPPREFGYSHSSPEYWIKSGTLVPVRRRDIVKIEGIDATGGNNQPNIPDIPAHLWYFGLIGTCL

SEQ ID NO: 4728 - protein, 269 aa, Thermomyces lanuginosus
EVSQDLFNQFNLFAQYSAAAYCGKNNDAPAGTNITCTGNACPEVEKADATFLYSFEDSGVGDVTGFLALDNTNKLIVLSFRGSRSIENWIGNLNFDLKEINDICSGCRGHDGFTSSWRSVADTLRQKVEDAVREHPDYRVVFTGHSLGGALATVAGADLRGNGYDIDVFSYGAPRVGNRAFAEFLTVQTGGTLYRITHTNDIVPRLPPREFGYSHSSPEYWIKSGTLVPVRRRDIVKIEGIDATGGNNQPNIPDIPAHLLYFGLIGTCL

SEQ ID NO: 4729 - protein, 269 aa, Thermomyces lanuginosus
EVSQDLFNQFNLFAQYSAAAYCGKNNDAPAGTNITCTGNACPEVEKADATFLYSFEDSGVGDVTGFLALDNTNKLIVLSFRGSRSIENWIGNLNFLLKEINDICSGCRGHDGFTSSWRSVADTLRQKVEDAVREHPDYRVVFTGHSLGGALATVAGADLRGNGYDIDVFSYGAPRVGNRAFAEFLTVQTGGTLYRITHTNDIVPRLPPREFGYSHSSPEYWIKSGTLVPVRRRDIVKIEGIDATGGNNQPNIPDIPAHLWYFGLIGTCL

SEQ ID NO: 4730 - protein, 269 aa, Thermomyces lanuginosus
EVSQDLFNQFNLFAQYSAAAYCGKNNDAPAGTNITCTGNACPEVEKADATFLYSFEDSGVGDVTGFLALDNTNKLIVLSFRGSRSIENWIGNLRFDLKEINDICSGCRGHDGFTSSWRSVADTLRQKVEAAVREHPDYRVVFTGHSLGGALATVAGADLRGNGYDIDVFSYGAPRVGNRAFAEFLTTQTGGTLYRITHTNDIVPRLPPREFGYSHSSPEYWIKSGTLVPVTRNDIVKIEGIDATGGNNQPNIPDIPAHLWYFGLIGTCL

SEQ ID NO: 4731 - protein, 269 aa, Thermomyces lanuginosus
EVSQDLFNQFNLFAQYSAAAYCGKNNRAPAGTNITCTGNACPEVEKADATFLYSFEDSGVGDVTGFLALDNTNKLIVLSFRGSRSIENWIGNLNFDLKEINDICSGCRGHGGFTSSWRSVADTLRQKVEDAVREHPDYRVVFTGHSLGGALATVAGADLRGNGYDIDVFSYGAPRVGNRAFAEFLTVQTGGTLYRITHTNDIVPRLPPREFGYSHPSPEYWIKSGTLVPVTRNDIVKIEGIDATGGNNQPNIPDIPAHLWYFGLIGTCL

SEQ ID NO: 4732 - protein, 269 aa, Thermomyces lanuginosus
EVSQDLFNQFNLFAQYSAAAYCGKNNDAPAGTNITCTGNACPEVEKADATFLYSFEDSGVGDVTGFLALDNTNKLIVLSFRGSRSIENWIGNLNFDLKEINDICSGCRGHDGFTSSWRSVADTLRQKVEDAVREHPDYRVVFTGHSLGGALATVAGADLRGNGYDIDVFSYGAPRVGNRAFAEFLTVQTGGTLYRITHTNDIVPRLPPREFGYSHSSPEYWIKSGTLVPVRRRDIVKIEGIDATGGNNQPNIPDAPAHLWYFGLIGTCL

SEQ ID NO: 4733 - protein, 269 aa, Thermomyces lanuginosus
EVSQDLFNQFNLFAQYSAAAYCGKNNDAPAGTNITCTGNACPEVEKADATFLYSFEDSGVGDVTGFLALDNTNKLIVLSFRGSRSIENWIGNLNFDLKEINDICSGCRGHDGFTSSWRSVADTLRQKVEDAVREHPDYRVVFTGHSLGGALATVAGADLRGNGYDIDVFSYGAPRVGNRAFAEFLTVQTGGTLYRITLTNDIVPRLPPREFGYSHSSPEYWIKSGTLVPVRRRDIVKIEGIDATGGNNQPNIPDIPAHLWYFGLIGTCL

SEQ ID NO: 4734 - protein, 269 aa, Thermomyces lanuginosus
EVSQDLFNQFNLFAQYSAAAYCGKNNDAPAGTNITCTGNACPEVEKADATFLYSFEDSGVGDVTGFLALDNTNKLIVLSFRGSRSIENWIGNLNFDLKHINDICSGCRGHDGFTSSWRSVADTLRQKVEDAVREHPDYRVVFTGHSLGGALATVAGADLRGNGYDIDVFSYGAPRVGNRAFAEFLTVQTGGTLYRITHTNDIVPRLPPXEFGYSHSSPEYWIKSGTLVPVTRNDIVKIEGIDATGGNNRPNIPDIPAHLWYFGLIGTCL

SEQ ID NO: 4735 - protein, 269 aa, Thermomyces lanuginosus
EVSQDLFNQFNLFAQYSAAAYCGKNNDAPAGTNITCTGNACPEVEKADATFLYSFEDSGVGDVTGFLALDNTNKQIVLSFRGSRSIENWIGNLNFDLKEINDICSGCRGHDGFTSSWRSVADTLRQKVEDAVREHPDYRVVFTGHSLGGALATVAWADLRGNGYDIDVFSYGAPRVGNRAFAEFLTTQTGGTLYRITHTNDIVPRLPPREFGYSHSSPEYWIKSGTLVPVTRNDIVKIEGIDATGGNNQPNIPDIPAHLWYFGLIGTCL

SEQ ID NO: 4736 - protein, 269 aa, Thermomyces lanuginosus
EVSQDLFNQFNLFAQYSAAAYCGKNNDAPAGTNITCTGNACPEVEKADATFLYSFEDSGVGDVTGFLALDNTNKLIVLSFRGXRSXENWXGNLNFDLKEINDICSGCRGHDGFTSSWRSVADTLRQKVEDAVREHPDYRVVFTGHSLGGALATVAGADLRGNGYDIDVFSYGAPRVGNRAFAEFLTVQTGGTLYRITHTNDIVPRLPPREFGYSHSSPEYWIKSGTLVPVTRNDIVKIEGIDATGGNNQPNIPDIPAHLWYFGLIGTCL

SEQ ID NO: 4737 - protein, 269 aa, Thermomyces lanuginosus
EVSQDLFNQFNLFAQYSAAAYCGKNNDAPAGTNITCTGNACPEVEKADVTFLYSFEDSGVGDVTGFLALDNTNKQIVLSFRGSRSIENWIGNLNFDLKEINDICSGCRGHDGFTSSWRSVADTLRQKVEDAVREHPDYRVVFTGHSLGGALATVAGADLRGNGYDIDVFSYGAPRVGNRAFAEFLTVQDGGTLYRITHTNDIVPRLPPREFGYSHSSPEYWIKSGTLVPVTRNDIVKIEGIDATGGNNQPNIPDIPAHLWYFGLIGTCL

SEQ ID NO: 4738 - protein, 269 aa, Synthetic construct
EVSQDLFNQFNLFAQYSAAAYCGKNNDAPAGTNITCTGNACPEVEKADATFLYSFEDSGVGDVTGFLALDNTNKLIVLSFRGSRSIENWIGNLKFALKEINDICSGCRGHDGFTSSWRSVADTLRQKVEDAVREHPDYRVVFTGHSLGGALATVAGADLRGNGYDIDVFSYGAPRVGNRAFAEFLTVQTGGTLYRITHTNDIVPRLPPREFGYSHSSPEYWIKSGTLVPVTRNDIVKIEGIDATGGNNRPNIPDIPAHLWYFGLIGTCL

SEQ ID NO: 4739 - protein, 269 aa, Thermomyces lanuginosus
EVSQDLFNQFNLFAQYSAAAYCKKNNDAPAGTNITCTGNACPEVEKADATFLYSFEDSGVGDVTGFLALDNTNKRIVLSFRGSRSIENWIGNLNFDLKEINDICSGCRGHDGFTSSWRSVADTLRQKVEDAVREHPDYRVVFTGHSLGGALATVAGADLRGNGYDIDVFSYGAPRVGNRAFAEFLTVQTGGTLYRITHTNDIVPRLPPREFGYSHSSPEYWIKSGTLVPVTRNDIVKIEGIDATGGNNQPNIPDIPAHLWYFGRIGTCL

SEQ ID NO: 4740 - protein, 269 aa, Thermomyces lanuginosus
EVSQDLFNQFNLFAQYSAAAYCGKNNDAPAGTNITCTGNACPEVEKADATFLYSFEDSGVGDVTGFLALDNTNKLIVLSFRGSRSIENWIGNLNFDLKEINDICSGCRGHDGFTSSWRSVADTLRQKVEDAVREHPDYRVVFTGHSLGGALATVAGADLRGNGYDIDVFSYGAPRVGNRAFAEFLTNQQGGTLYRITHTNDIVPRLPPREFGYSHSSPEYWIKSGTLVPVTRNDIVKIEGIDATGGNNQPNIPDIPAHLWYFGRIGTCL

SEQ ID NO: 4741 - protein, 269 aa, Thermomyces lanuginosus
EVSQDLFNQFNLFAQYSAAAYCGKNNDAPAGTQITCTGNACPEVEKADATFLYSFEDSGVGDVTGFLALDNTNKLIVLSFRGSRSIENWIGNLNFDLKEINDICSGCRGHDGFTSSWRSVADTLRQKVEDAVREHPDYRVVFTGHSLGGALATVAGADLRGNGYDIDVFSYGAPRVGNRAFAEFLTVQTGGTLYRITHTNDIVPRLPPREFGYSHSSPEYWIKSGTLVPVRRRDIVKIEGIDATGGNNQPNIPDIPAHLWYFGLIGTCL

SEQ ID NO: 4742 - protein, 269 aa, Thermomyces lanuginosus
EVSQDLFNQFNLFAQYSAAAYCGKNNDAPAGTNITCTGNACPEVEKADATFLYSFEDSGVGDVTGFLALDNTNKLIVLSFRGSRSIENWISNLNFVLKEINDICSGCRGHDGFTSSWRSVADTLRQKVEDAVREHPDYRVVFTGHSLGGALATVAGADLRGNGYDIDVFSYGAPRVGNRAFAEFLTVQTGGTLYRITHTNDIVPRLPPREFGYSHSSPEYWIKSGTLVPVTRNDIVKIEGIDATGGNNQPNIPRIPAHLWYFGLIGTCL

SEQ ID NO: 4743 - protein, 269 aa, Thermomyces lanuginosus
EVSQDLFNQFNLFAQYSAAAYCGKNNDAPAGTNITCTGNACPEVEKADATFLYSFEDSGVGDVTGFLALDNTNKLIVLSFRGSRSIENWIGNLNFDLKEINDICSGCRGHDGFTSSWRSVADTLRQKVEDAVREHPDYRVVFTGHSLGGALATVAGADLRGNGYDIDVFSYGAPRVGNRAFAEFLTVQTGGTLYRITHTNDIVPRLPPREFGYSHSSPEYWIKSGTLVHVRRRDIVKIEGIDATGGNNQPNIPDIPAHLWYFGLIGTCL

SEQ ID NO: 4744 - protein, 269 aa, Thermomyces lanuginosus
EVSQDLFNQFNLFAQYSAAAYCGKNNDAPAGTNITCRRRACPEVEKADATFLYSFEDSGVGDVTGFLALDNTNKLIVLSFRGSRSIENWIGNLNFDLKEINDICSGCRGHDGFTSSWRSVADTLRQKVEDAVREHPDYRVVFTGHSLGGALATVAGADLRGNGYDIDVFSYGAPRVGNRAFAEFLTVQTGGTLYRITHTNDIVPRLPPREFGYSHSSPEYWIKSGTLVPVTRNDIVKIEGIDATGGNNQPNIPDIPAHLWYFGLIGTCL

SEQ ID NO: 4745 - protein, 269 aa, Thermomyces lanuginosus
EVSQDLFNQFNLFAQYSAAAYCGKNNDAPAGTNITCTGNACPEVEKADATFLYSFEDSGVGDVTGFLALDNTNKLIVLSFRGSRSIENWIGNLRFDLKEINDICSGCRGHDGFTSSWRSVADTLRQKVEDAVREHPDYRVVFTGHSLGGALATVAGADLRGNGYDIDVFSYGAPRVGNRAFAEFLTVQTGGTLYRITHTNDIVPRLPPXEFGYSHSSPEYWIKSGTLVPVTRNDIVKIEGIDATGGNNRPNIPDIPAHLWYFGLIGTCL

SEQ ID NO: 4746 - protein, 269 aa, Thermomyces lanuginosus
EVSQDLFNQFNLFAQYSAAAYCGKNNDAEAGTNITCTGNACPEVEKADATFLYSFEDSGVGDVTGFLALDNTNKDIVLSFRGSRSIENWIGNLNFDLKEINDICSGCRGHDGFTSSWRSVADTLRQKVEDAVREHPDYRVVFTGHSLGGALATVAGADLRGNGYDIDVFSYGAPRVGNRAFAEFLTVQDGGTLYRITHTNDIVPRLPPREFGYSHSSPEYWIKSGTLVPVTRNDIVKIEGIDATGGNNQPNIPDIPAHLWYFGLIGTCL

SEQ ID NO: 4747 - protein, 269 aa, Thermomyces lanuginosus
EVSQDLFNQFNLFAQYSAAAYCGKNNDAPAGTNITCTGNACPEVEKADATFLYSFEDSGVGDVTGFLALDNTNKLIVLSFRGSRSIENWIGNLNFDLKEINDICSGCRGHDGFTSSWRSVADTLRQKVEDAVREHPDYRVVFTGHSLGGALATVAGADLRGNGYDIDVFSYGAPRVGNRAFAEFLTVQTGGTLYRITITNDIVPRLPPREFGYSHSSPEYWIKSGTLVPVRRRDIVKIEGIDATGGNNQPNIPDIPAHLWYFGLIGTCL

SEQ ID NO: 4748 - protein, 269 aa, Thermomyces lanuginosus
EVSQDLFNQFNLFAQYSAAAYCGKNNDAPAGTNITCTGNACPEVEKADATFLYSFEDSGVGDVTGFLALDNTNKQIVLSFRGSRSIENWIGNLNFDLKEINDICSGCRGHDGFTSSWRSVADTLRQKVEDAVREHPDYRVVFTGHSLGGALATIAGADLRGNGYDIDVFSYGAPRVGNRAFAEFLTTQTGGTLYRITHTNDIVPRLPPREFGYSHSSPEYWIKSGTLVPVTRNDIVKIEGIDATGGNNQPNIPDIPAHLWYFGLIGTCL

SEQ ID NO: 4749 - protein, 269 aa, Thermomyces lanuginosus
EVSQDLFNQFNLFAQYSAAAYCGKNNDAPAGTNITCTGNACPEVEKADATALYSFEDSGVGDVTGFLALDNTNKLIVLSFRGSRSIENWIGNLNFDLKEINDICSGCRGHDGFTSSWRSVADTLRQKVEDAVREHPDYRVVFTGHSLGGALATVAGADLRGNGYDIDVFSYGAPRVGNRAFAEFLTVQTGGTLYRITHTNDIVPRLPPREFGYSHSSPEYWIKSGTLVPVRRRDIVKIEGIDATGGNNQPNIPDIPAHLWYFGLIGTCL

SEQ ID NO: 4750 - protein, 269 aa, Thermomyces lanuginosus
EVSQDLFNQFNLFAQYSAAAYCGKNNDAPAGTNITCTGNACPEVEKADATFLYSFEDSGVGDVTGFLALDNTNKLIILSFRGSRSIENWIGNLNFDLKEINDICSGCRGHDGFTSSWRSVADTLRQKVEDAVREHPDYRVVFTGHSLGGALATVAGADLRGNGYDIDVFSYGAPRVGNRAFAEFLTQQDGGTLYRITHTNDIVPRLPPREFGYSHSSPEYWIKSGTLVPVTRNDIVKIEGIDATGGNNQPNIPDIPAHLWYFGLIGTCL

SEQ ID NO: 4751 - protein, 269 aa, Thermomyces lanuginosus
EVSQDLFNQFNLFAQYSAAAYCGKNNDAPAGTNITCTGNACPEVEKADATFLYSFEDSGVGDVTGFLALDNTNKLIILSFRGSRSIENWIGNLNFDLKEINDICSGCRGHDGFTSSWRSVADTLRQKVEAAVREHPDYRVVFTGHSLGGALATIAGADLRGNGYDIDVFSYGAPRVGNRAFAEFLTVQTGGTLYRITHTNDIVPRLPPREFGYSHSSPEYWIKSGTLVPVTRNDIVKIEGIDATGGNNQPNIPDIPAHLWYFGLIGTCL

SEQ ID NO: 4752 - protein, 269 aa, Thermomyces lanuginosus
EVSQDLFNQFNLFAQYSAAAYCGKNNDAPAGTNITCTGNACPEVEKADATFLYSFEDSGKGDVTGFLALDNTNKLIVLSFRGSRSIENWIGNLNFDLKEINDICSGCRGHDGFTSSWRSVADTLRQKVEDAVREHPDYRVVFTGHSLGGALATVAGADLRGNGYDIDVFSYGAPRVGNRAFAEFLTVQTGGTLYRITHTNDIVPRLPPREFGYSHSSPEYWIKSGTLVPVRRRDIVKIEGIDATGGNNQPNIPDIPAHLWYFGLIGTCL

SEQ ID NO: 4753 - protein, 269 aa, Synthetic construct
EVSQDLFNQFNLFAQYSAAAYCGKNNDAPAGTNITCTGNACPEVEKADATFLYSFKDSGVGDVTGFLALDNTNKLIVLSFRGSRSIENWIGNLNFDLKEINDICSGCRGHDGFTSSWRSVADTLRQKVEDAVREHPDYRVVFTGHSLGGALATVAGADLRGNGYDIGVFSYGAPRVGNRAFAEFLTVQTGGTLYRITHTNDIVPRLPPRVFGYSHSSPEYWIKSGTLVPVTRNDIVKIEGIDATGGNNQPNIPDIPAHLWYFGLIGTCL

SEQ ID NO: 4754 - protein, 269 aa, Synthetic construct
EVSQDLFNQFNLFAQYSAAAYCGKNNDAPAGTNITCTGNACPEVEKADATFLYSFEDSGVGDVTGFLALDNTNKLIVLSFRGTRSIENWIGNLKFNLKEINDICSGCRGHDGFTSSWRSVADTLRQKVEDAVREHPDYRVVFTGHSLGGALATVAGADLRGNGYDIDVFSYGAPRVGNRAFAEFLTVQTGGTLYRITHTNDIVPRLPPREFGYSHSSPEYWIKSGTLVPVTRNDIVKIEGIDATGGNNQPNIPDIPAHLWYFGLIGTCL

SEQ ID NO: 4755 - protein, 269 aa, Thermomyces lanuginosus
EVSQDLFNQFNLFAQYSAAAYCGKNNDAPAGTNITCTGNACPEVEKADATFLYSFEDSGVGDVTGFLALDNTNKLIVLSFRGSRSIENWIGNLNFDLKEINDICSGCRGHDGFTSSWRSVADTLRQKVEDAVREHPDYRVVFTGHSLGGALATVAGADLRGNGYDIDVFSYGAPRVGNRAFAEFLTVQTGGTLYRITHTNDIVPRLPPREFGYSHSSPEYWIKSGTLVPVRRRDIVKIEGIDATGGNNQPNIPDIPFHLWYFGLIGTCL

SEQ ID NO: 4756 - protein, 269 aa, Thermomyces lanuginosus
EVSQDLFNQFNLFAQYSAAAYCGKNNDAPAGTNITCTGNACPEVEKADATFLYSFEDSGVGDVTGFLALDNTNKLIVLSFRGSRSIENWIGNLNFDLKEINDICSGCRGHDGFTSSWRSVADTLRQKVEDAVREHPDYRVVFTGHSLGGALATVAGADLRGNGYDIDVFSYGAPRVGNRAFAEFLTVQTGGTLYRITHTNDIVPRLPPREFGYSHSSPEYWIKCGTLVPVRRRDIVKIEGIDATGGNNQPNIPDIPAHLWYFGLIGTCL

SEQ ID NO: 4757 - protein, 269 aa, Thermomyces lanuginosus
EVSQDLFNQFNLFAQYSKAAYCGKNNDAPAGTNITCTGNACPEVEKADVTFLYSFEDSGVGDVTGFLALDNTNKQIVLSFRGSRSIENWIGNLNFDLKEINDICSGCRGHDGFTSSWRSVADTLRQKVEDAVREHPDYRVVFTGHSLGGALATVAGADLRGNGYDIDVFSYGAPRVGNRAFAEFLTVQTGGTLYRITHTNDIVPRLPPREFGYSHSSPEYWIKSGTLVPVTRNDIVKIEGIDATGGNNQPNIPDIPAHLWYFGLIGTCL

SEQ ID NO: 4758 - protein, 269 aa, Thermomyces lanuginosus
EVSQDLFNQFNLFAQYSAAAYCGKNNDAPAGTNITCTGNACPEVEKADATFLYSFEDSGVGDVTGFLALDNTNKLIVLSFRGSRSIENWIGNLNFDLKEINDICSGCRGHDGFTSSWRSVADTLRQKVEDAVREHPDYRVVFTGHSLGGALATVAGADLRGNGYDIDVFSYGAPRVGNRAFAEFLTVQTGGTLYRITHTNDIVPRLPPREFGYSHSSPEYWIKSGTLVPVRRRDIVKIEGIDATGGNNQPNIPDIPAHLSYFGLIGTCL

SEQ ID NO: 4759 - protein, 269 aa, Thermomyces lanuginosus
EVSQDLFNQFNLFAQYSAAAYCGKNNDAPAGTNITCTGNACPEVEKADATFLYSFEDSGVGDVTGFLALDNTNKLIVLSFRGSRSIENWIGNLNFDLKEINDICSGCRGHDGFTSSWRSVADTLRQKVEDAVREHPDYRVVFTGHSLGGALATVAGADLRGNGYDIDVFSYGAPRVGNRAFAEFLTVQTGGTLYRITHTNDIVPRLPPREFGYSHSSPEYWIKSGTLVPVRRRDIVKIEGIDATGGNNQPNIPDIAAHLWYFGLIGTCL

SEQ ID NO: 4760 - protein, 269 aa, Thermomyces lanuginosus
EVSQDLFNQFNLFAQYSAAAYCGKNNDAPAGTNITCTGNACPEVEKADATFLYSFEDSGVGDVTGFLALDNTNKLIVLSFRGSRSIENWIENLNFDLKEINDICSGCRGHDGFTSSWRSVADTLRQKVEDAVREHPDYRVVFTGHSLGGALATVAGADLRGNGYDIDVFSYGAPRVGNRAFAEFLTVQTGGTLYRITHTNDIVPRLPPREFGYSHSSPEYWIKSGTLVPVRRRDIVKIEGIDATGGNNQPNIPDIPAHLWYFGLIGTCL

SEQ ID NO: 4761 - protein, 269 aa, Thermomyces lanuginosus
EVSQDLFNQFNLFAQYSKAAYCGKNNDAPAGTNITCTGNACPEVFKADATFLYSFEDSGVGDVTGFLALDNTNKLIVLSFRGSRSIENWIGNLNFDLKEINDICSGCRGHDGFTSSWRSVADTLRQKVEDAVREHPDYRVVFTGHSLGGALATVAGADLRGNGYDIDVFSYGAPRVGNRAFAEFLTVQDGGTLYRITHTNDIVPRLPPREFGYSHSSPEYWIKSGTLVPVTRNDIVKIEGIDATGGNNQPNIPDIPAHLWYFGLIGTCL

SEQ ID NO: 4762 - protein, 269 aa, Thermomyces lanuginosus
EVSQDLFNQFNLFAQYSAAAYCGKNNDAPAGTNITCTGNACPEVEKADATFLYSFEDSGVGDVTGFLALDNTNKLIVLSFRGSRSIENWIGNLNFDLKEINDICSGCRGHDGFTSSWRSVADTLRQKVEDAVREHPDYRVVFTGHSLGGALATVAGADLRGNGYDIDVFSYGAPRVGNRAFAEFLTVQTGGTLYRITHTNDIVPRLPPREFGYSHSSPEYWIKSGTLVPVRRRDIVKIEGIDATGGNNQPNIPDIPLHLWYFGLIGTCL

SEQ ID NO: 4763 - protein, 269 aa, Thermomyces lanuginosus
EVSQDLFNQFNLFAQYSAAAYCGKNNDAPAGTNITCTGNACPEVEKADATFLYSFEDSGVGDVTGFLALDNTNKLIVLSFRGSRSIENWITNLNFDLKEIRRICSGCRGHDGFTSSWRSVADTLRQKVEDAVREHPDYRVVFTGHSLGGALATVAGADLRGNGYDIDVFSYGAPRVGNRAFAEFLTVQTGGTLYRITHTNDIVPRLPPREFGYSHSSPEYWIKSGTLVPVTRNDIVKIEGIDATGGNNQPNIPDIPAHLWYFGLIGTCL

SEQ ID NO: 4764 - protein, 269 aa, Thermomyces lanuginosus
EVSQDLFNQFNLFAQYSAAAYCKKNNDAPAGTNITCTGNACPEVEKADATFLYSFEDSGVGDVTGFLALDNTNKQIVLSFRGSRSIENWIGNLNFDLKEINDICSGCRGHDGFTSSWRSVADTLRQKVEDAVREHPDYRVVFTGHSLGGALATVAGADLRGNGYDIDVFSYGAPRVGNRAFAEFLTTQTGGTLYRITHTNDIVPRLPPREFGYSHSSPEYWIKSGTLVPVTRNDIVKIEGIDATGGNNQPNIPDIPAHLWYFGLIGTCL

SEQ ID NO: 4765 - protein, 269 aa, Thermomyces lanuginosus
EVSQDLFNQFNLFAQYSAAAYCGKNNDAPAGTNITCTGNACPEVEKADATFLYSFEDSGVGDVTGFLALDNTRKDIVLSFRGSRSIENWIGNLNFDLKEINDICSGCRGHDGFTSSWRSVADTLRQKVEDAVREHPDYRVVFTGHSLGGALATVAGADLRGNGYDIDVFSYGAPRVGNRAFAEFLTVQDGGTLYRITHTNDIVPRLPPREFGYSHSSPEYWIKSGTLVPVTRNDIVKIEGIDATGGNNQPNIPDIPAHLWYFGLIGTCL

SEQ ID NO: 4766 - protein, 269 aa, Thermomyces lanuginosus
EVSQDLFNQFNLFAQYSAAAYCQKNNDAPAGTNITCTGNACPEVEKADATFLYSFEDSGVGDVTGFLALDNTNKQIVLSFRGSRSIENWIGNLNFDLKEINDICSGCRGHDGFTSSWRSVADTLRQKVEDAVREHPDYRVVFTGHSLGGALATVAGADLRGNGYDIDVFSYGAPRVGNRAFAEFLTTQTGGTLYRITHTNDIVPRLPPREFGYSHSSPEYWIKSGTLVPVTRNDIVKIEGIDATGGNNQPNIPDIPAHLWYFGLIGTCL

SEQ ID NO: 4767 - protein, 269 aa, Thermomyces lanuginosus
EVSQDLFNQFNLFAQYSAAAYCGKNNDAPAGTNITCTGNACPEVEKADATFLYSFEDSGVGDVTGFLALDNTNKLIVLSFRGSRSIENWIGNLNFDLKEINDICSGCRGHDGFTSSWRSVADTLRQKVEDAVREHPDYRVVFTGHSLGGALATVAGADLRGNGYDIDVFSYGAPRVGNRAFAEFLTVQTGGTLYRITHTNDIVPRLPPREFGYSHSSPEYWIKSGTLVPVRRIGIVKIEGIDATGGNNQPNIPDIPAHLWYFGLIGTCL

SEQ ID NO: 4768 - protein, 269 aa, Thermomyces lanuginosus
EVSQDLFNQFNLFAQYSAAAYCGKNNDAPAGTNITCTGNACPEVEKADATFLYSFEDSGVGDVTGFLALDNTNKLIVLSFRGSRSIENWIGNLNFDLKEINDICSGCRGHDGFTSSWRSVADTLRQKVEDAVREHPDYRVVFTGHSLGGALATVAGADLRGNGYDIDVFSYGAPRVGNRAFAEFLTVQTGGTLYRITHTNDIVPRLPPREFGYSHSSPEYWIKSGTLVPVRRRDIVKIEGIDATGGNNQPNIPDPPAHLWYFGLIGTCL

SEQ ID NO: 4769 - protein, 269 aa, Thermomyces lanuginosus
EVSQDLFNQFNLFAQYSAAAYCGKNNDAPAGTNITCKKKACPEVEKADATFLYSFEDSGVGDVTGFLALDNTNKLIVLSFRGSRSIENWIGNLNFDLKEINDICSGCRGHDGFTSSWRSVADTLRQKVEDAVREHPDYRVVFTGHSLGGALATVAGADLRGNGYDIDVFSYGAPRVGNRAFAEFLTVQTGGTLYRITHTNDIVPRLPPREFGYSHSSPEYWIKSGTLVPVTRNDIVKIEGIDATGGNNQPNIPDIPAHLWYFGLIGTCL

SEQ ID NO: 4770 - protein, 269 aa, Thermomyces lanuginosus
EVSQDLFNQFNLFAQYSAAAYCGKNNDAPAGTNITCTGNACPEVEKADATFLYSFEDSGVGDVTGFLALDNTNKLIVLSFRGSRSIENWIGNLNFDLKKINDICSGCRGHDGFTSSWRSVADTLRQKVEDAVREHPDYRVVFTGHSLGGALATVAGADLRGNGYDIDVFSYGAPRVGNRAFAEFLTVQTGGTLYRITHTNDIVPRLPPXEFGYSHSSPEYWIKSGTLVPVTRNDIVKIEGIDATGGNNRPNIPDIPAHLWYFGLIGTCL

SEQ ID NO: 4771 - protein, 269 aa, Thermomyces lanuginosus
EVSQDLFNQFNLFAQYSAAAYCGKNNDAPAGTNITCTGNACPEVEKADATFLYSFEDSGVGDVTGFLALDNTNKLIVLSFRGSRSIENWIGNLNFDLIEINDICSGCRGHDGFTSSWRSVADTLRQKVEDAVREHPDYRVVFTGHSLGGALATVAGADLRGNGYDIDVFSYGAPRVGNRAFAEFLTVQTGGTLYRITHTNDIVPRLPPREFGYSHSSPEYWIKSGTLVPVRRRDIVKIEGIDATGGNNQPNIPDIPAHLWYFGLIGTCL

SEQ ID NO: 4772 - protein, 269 aa, Thermomyces lanuginosus
EVSQDLFNQFNLFAQYSAAAYCGKNNDAPAGTNITCTGNACPEVEKADATFLYSFEDSGVGDVTGFLALDNTNKQIILSFRGSRSIENWIGNLNFDLKEINDICSGCRGHDGFTSSWRSVADTLRQKVEDAVREHPDYRVVFTGHSLGGALATVAGADLRGNGYDIDVFSYGAPRVGNRAFAEFLTVQDGGTLYRITHTNDIVPRLPPREFGYSHSSPEYWIKSGTLVPVTRNDIVKIEGIDATGGNNQPNIPDIPAHLWYFGLIGTCL

SEQ ID NO: 4773 - protein, 269 aa, Thermomyces lanuginosus
EVSQDLFNQFNLFAQYSAAAYCGKNNDAPAGTNITCTGNACPEVEKADATFLYSFEDSGVGDVTGFLALDNTNKLIVLSFRGSRSIENWIGNLNFDLKEINDICSGCRGHDGFTSSWRSVADTLRQKVEDAVREHPDYRVVFTGHSLGGALATVAGADLRGNGYDIDVFSYGAPRVGNRAFAEFLTVQTGGTLYRITHTNDIVPRLPPREFGYSHSSPEYWIKSGTLVPRRRRDIVKIEGIDATGGNNQPNIPDIPAHLWYFGLIGTCL

SEQ ID NO: 4774 - protein, 269 aa, Thermomyces lanuginosus
EVSQDLFNQFNLFAQYSKAAYCGKNNDAPAGTNITCTGNACPEVEKADATFLYSFEDSGVGDVTGFLALDNTNKQIVLSFRGSRSIENWIGNLNFDLKEINDICSGCRGHDGFTSSWRSVADTLRQKVEDAVREHPDYRVVFTGHSLGGALATVAGADLRGNGYDIDVFSYGAPRVGNRAFAEFLTTQTGGTLYRITHTNDIVPRLPPREFGYSHSSPEYWIKSGTLVPVTRNDIVKIEGIDATGGNNQPNIPDIPAHLWYFGLIGTCL

SEQ ID NO: 4775 - protein, 269 aa, Thermomyces lanuginosus
EVSQDLFNQFNLFAQYSAAAYCGKNNDAPAGTNITCTGNACPEVEKADATFLYSFEDSGVGDVTGFLALDNTNKLIVLSFRGSRSIENWIGNLNFDLKEINDICSGCRGHDGFTSSWRSVADTLRQKVEDAVREHPDYRVVFTGHSLGGALATVAGADLRGNGYDIDVFSYGAPRVGNRAFAEFLTVQTGGTLYRITHTNDIVPRLPPREFGYSHSSPEYWIKSGTLVPVRRRDIVKIEGIDAEGGNNQPNIPDIPAHLWYFGLIGTCL

SEQ ID NO: 4776 - protein, 269 aa, Thermomyces lanuginosus
EVSQDLFNQFNLFAQYSAAAYCGKNNDAPAGTNITCTGNACPEVEKADATFLYSFEDSGVGDVTGFLALDNTNKLIVLSFRGSRSIENWITNLNFDLKRIRDICSGCRGHDGFTSSWRSVADTLRQKVEDAVREHPDYRVVFTGHSLGGALATVAGADLRGNGYDIDVFSYGAPRVGNRAFAEFLTVQTGGTLYRITHTNDIVPRLPPREFGYSHSSPEYWIKSGTLVPVTRNDIVKIEGIDATGGNNQPNIPDIPAHLWYFGLIGTCL

SEQ ID NO: 4777 - protein, 269 aa, Thermomyces lanuginosus
EVSQDLFNQFNLFAQYSAAAYCGKNNDAPAGTNITCTGNACPEVEKADATFLYSFEDSGVGDVTGFLALDNTNKLIVLSFRGSRSIENWIGNLNFDLKEINDICSGCRGHDGFTSSWRSVADTLRQKVEDAVREHPDYRVVFTGHSLGGALATVAGADLRGNGYDIDVFSYGAPRVGNRAFAEFLTVQTGGTLYRITHTNDGVPRLPPREFGYSHSSPEYWIKSGTLVPVRRRDIVKIEGIDATGGNNQPNIPDIPAHLWYFGLIGTCL

SEQ ID NO: 4778 - protein, 269 aa, Thermomyces lanuginosus
EVSQDLFNQFNLFAQYSAAAYCGKNNDAPAGTNITCTGNACPEVEKADVTFLYSFEDSGVGDVTGFLALDNTNKLIVLSFRGSRSIENWIGNLNFDLKEINDICSGCRGHDGFTSSWRSVADTLRQKVEDAVREHPDYRVVFTGHSLGGALATVAGADLRGNGYDIDVFSYGAPRVGNRAFAEFLTTQDGGTLYRITHTNDIVPRLPPREFGYSHSSPEYWIKSGTLVPVTRNDIVKIEGIDATGGNNQPNIPDIPAHLWYFGLIGTCL

SEQ ID NO: 4779 - protein, 269 aa, Thermomyces lanuginosus
EVSQDLFNQFNLFAQYSAAAYCGKNNDAPAGTNITCTGNACPEVEKADATFLYSFEDSGVGDVTGFLALDNTNKLIVLSFRGSRSIENWIGNLRFDLKEINDICSGCRGHDGFTSSWRSVADTLRQKVEDAVREHPDYRVVFTGHSLGGALATVAGADLRGNGYDIDVFSYGAPRVGNRAFAEFLTVQTGGTLYRITHTNDIVPRLPPXEFGYSHSSPEYWIKSGTLVPVTRNDIVKIEGIDATGGNNKPNIPDIPAHLWYFGLIGTCL

SEQ ID NO: 4780 - protein, 269 aa, Thermomyces lanuginosus
EVSQDLFNQFNLFAQYSAAAYCGKNNDAPAGTNITCTGNACPEVEKADATFLYSFEDSGVGDVTGFLALDNTNKLIVLSFRGSRSIENWIGNLNFDLKEINDICSGCRGHDGFTSSWRSVADTLRQKVEDAVREHPDYRVVFSGHSLGGALATVAGADLRGNGYDIDVFSYGAPRVGNRAFAEFLTVQTGGTLYRITHTNDIVPRLPPREFGYSHSSPEYWIKSGTLVPVRRRDIVKIEGIDATGGNNQPNIPDIPAHLWYFGLIGTCL

SEQ ID NO: 4781 - protein, 269 aa, Thermomyces lanuginosus
EVSQDLFNQFNLFAQYSAAAYCGKNNDAPAGTNITCTGNACPEVEKADATFLYSFEDSGVGDVTGFLALDNTNKLIVLSFRGSRSIENWIGNLNFDLKEINDICSGCRGHDGFTSSWRSVADTLRQKVEDAVREHPDYRVVFTGHSLGGALATVAGADLRGNGYDIDVFSYGAPRVGNRAFAEFLTVQTGGTLYRITHTNDIVPRLPPREFGYSHSSPEYWIKSGTLVKVRRRDIVKIEGIDATGGNNQPNIPDIPAHLWYFGLIGTCL

SEQ ID NO: 4782 - protein, 269 aa, Thermomyces lanuginosus
EVSQDLFNQFNLFAQYSAAAYCGKNNEAPAGTNITCTGNACPEVEKADATFLYSFEDMGVGDVTGFLALDNTNKLIVLSFRGSRSIENWIGNLNFDLKEINDICSGCRGHDGFTSSWRSVADTLRQKVEDAVREHPDYRVVFTGHSLGGALATVAGADLRGNPYDIDVFSYGAPRVGNRAFAEFLTVQTGGTLYRITHTNDIVPRLPPREFGYSHSSPEYWIKSGTLVPVTRNDIVKIEGIDATGGNNQPNIPDIPAHLWYFGLIGTCL

SEQ ID NO: 4783 - protein, 269 aa, Thermomyces lanuginosus
EVSQDLFNQFNLFAQYSAAAYCGKNNDAPAGTNITCTGNACPEVEKADATFLYSFEDSGVGDVTGFLALDNTNKLIVLSFRGSRSIENWIGNLNFDLKEINDICSGCRGHDGFTSSWRSVADTLRQKVEDAVREHPDYRVVFTGHSLGGALATVAGADLRGNGYDIDVFSYGAPRVGNRAFAEFLTVQTGGTLYRITHTNDIVPRLPPREFGYSHSSPEYWIKSGTLVPVRRRDIVKIEGIDATGGNNQPNIPSIPAHLWYFGLIGTCL

SEQ ID NO: 4784 - protein, 269 aa, Thermomyces lanuginosus
EVSQDLFNQFNLFAQYSKAAYCGKNNDAPAGTDITCTGNACPEVEKADATFLYSFEDSGVGDVTGFLALDNTNKDIVLSFRGSRSIENWIGNLNFDLKEINDICSGCRGHDGFTSSWRSVADTLRQKVEDAVREHPDYRVVFTGHSLGGALATVAGADLRGNGYDIDVFSYGAPRVGNRAFAEFLTVQTGGTLYRITHTNDIVPRLPPREFGYSHSSPEYWIKSGTLVPVTRNDIVKIEGIDATGGNNQPNIPDIPAHLWYFGLIGTCL

SEQ ID NO: 4785 - protein, 269 aa, Thermomyces lanuginosus
EVSQDLFNQFNLFAQYSAAAYCGKNNDAPAGTNITCTGNACPEVEKADATFLYSFEDSGVGDVTGFLALDNTNKLIVLSFRGSRSIENWIGNLNFDLKEINDICSGCRGHDGFTSSWRSVADTLRQKVEDAVREHPDYRVVFTGHSLGGALATVAGADLRGNGYDIDVFSYGAPRVGNRAFAEFLTVQTGGTLYRITHTNDIVPRLPPREFGYSHSSPEYWIKYGTLVPVRRRDIVKIEGIDATGGNNQPNIPDIPAHLWYFGLIGTCL

SEQ ID NO: 4786 - protein, 269 aa, Thermomyces lanuginosus
EVSQDLFNQFNLFAQYSAAAYCGKNNDAPAGTNITCTGNACPEVEKADATFLYSFEDSGVGDVTGFLALDNTNKLIVLSFRGSRSIENWIGNLNFDLKEINDICSGCRGHDGFTSSWRSVADTLRQKVEDAVREHPDYRVVFTGHSLGGALATVAGADLRGNGYDIDVFSYGAPRVGNRAFAEFLTVQTGGTLYRITHTRDIVPRLPPREFGYSHSSPEYWIKSGTLVPVRRRDIVKIEGIDATGGNNQPNIPDIPAHLWYFGLIGTCL

SEQ ID NO: 4787 - protein, 269 aa, Thermomyces lanuginosus
EVSQDLFNQFNLFAQYSKAAYCKKNNDAPAGTNITCTGNACPEVEKADATFLYSFEDSGVGDVTGFLALDNTNKQIVLSFRGSRSIENWIGNLNFDLKEINDICSGCRGHDGFTSSWRSVADTLRQKVEDAVREHPDYRVVFTGHSLGGALATVAGADLRGNGYDIDVFSYGAPRVGNRAFAEFLTVQTGGTLYRITHTNDIVPRLPPREFGYSHSSPEYWIKSGTLVPVTRNDIVKIEGIDATGGNNQPNIPDIPAHLWYFGLIGTCL

SEQ ID NO: 4788 - protein, 269 aa, Thermomyces lanuginosus
EVSQDLFNQFNLFAQYSAAAYCGKNNDAPAGTNITCTGNACPEVEKADATVLYSFEDSGVGDVTGFLALDNTNKLIVLSFRGSRSIENWIGNLNFDLKEINDICSGCRGHDGFTSSWRSVADTLRQKVEDAVREHPDYRVVFTGHSLGGALATVAGADLRGNGYDIDVFSYGAPRVGNRAFAEFLTVQTGGTLYRITHTNDIVPRLPPREFGYSHSSPEYWIKSGTLVPVRRRDIVKIEGIDATGGNNQPNIPDIPAHLWYFGLIGTCL

SEQ ID NO: 4789 - protein, 269 aa, Thermomyces lanuginosus
EVSQDLFNQFNLFAQYSAAAYCGKNNDAPAGTNITCTGNACPEVEKADATFLYSFEDSGVGDVTGFLALDNTNKLIVLSFRGSRSIENWIGNLNFDLKEINDICSGCRGHDGFTSSWRSVADTLRQKVEDAVREHPDYRVVFTGHSLGGALATVAGADLRGNPYDIDVFSYGAPRVGNRAFAEFLTVQTGGTLYRITHTNDIVPRLPPREFGYSHSSPEYWIKSGTMVPVTRNDIVKIEGIDATGGNNQPNIPDIPAHLWYFGRIGTCL

SEQ ID NO: 4790 - protein, 269 aa, Thermomyces lanuginosus
EVSQDLFNQFNLFAQYSAAAYCGKNNDAPAGTNITCTGNACPEVEKADATFLYSFEDSGVGDVTGFLALDNTNKLIVLSFRGSRSIENWIGNLNFDLKEIDDICSGCRGHDGFTSSWRSVADTLRQKVEDAVREHPDYRVVFTGHSLGGALATVAGADLRGNGYDIDVFSYGAPRVGNRAFAEFLTVQTGGTLYRITHTNDIVPRLPPREFGYSHSSPEYWIKSGTLVPVRRRDIVKIEGIDATGGNNQPNIPDIPAHLWYFGLIGTCL

SEQ ID NO: 4791 - protein, 269 aa, Thermomyces lanuginosus
EVSQDLFNQFNLFAQYSAAAYCGKNNRAPAGTNITCTGNACPEVEKADATFLYSFEDSGVGDVTGFLALDNTNKLIVLSFRGSRSIENWIGNLNFDLKEINDICSGCRGHDGFTSSWRSVADTLRQKVEDAVREHPDYRVVFTGHSLGGALATVAGADLRGNGYDIDVFSYGAPRVGNRAFAEFLTVQTGGTLYRITHTNDIVPRLPPREFGYSHSSPEYWIKSGTLVPVRRRDIVKIEGIDATGGNNQPNIPDIPAHLWYFGLIGTCL

SEQ ID NO: 4792 - protein, 269 aa, Thermomyces lanuginosus
EVSQDLFNQFNLFAQYSKAAYCGKNNDAPAGTNITCTGNACPEVFKADATFLYSFEDSGVGDVTGFLALDNTNKLIVLSFRGSRSIENWIGNLNFDLKEINDICSGCRGHDGFTSSWRSVADTLRQKVEDAVREHPDYRVVFTGHSLGGALATVAGADLRGNGYDIDVFSYGAPRVGNRAFAEFLTTQTGGTLYRITHTNDIVPRLPPREFGYSHSSPEYWIKSGTLVPVTRNDIVKIEGIDATGGNNQPNIPDIPAHLWYFGLIGTCL

SEQ ID NO: 4793 - protein, 269 aa, Synthetic construct
EVSQDLFNQFNLFAQYSAAAYCGKNNDAPAGTNITCTGNACPEVEKADATFLYSFEDSGVGDVTGFLALDNTNKLIVLSFRGSRSIENWIGNLKLHLKEINDICSGCRGHDGFTSSWRSVADTLRQKVEDAVREHPDYRVVFTGHSLGGALATVAGADLRGNGYDIDVFSYGAPRVGNRAFAEFLTVQTGGTLYRITHTNDIVPRLPPREFGYSHSSPEYWIKSGTLVPVTRNDIVKIEGIDATGGNNQPNIPDIPAHLWYFGLIGTCL

SEQ ID NO: 4794 - protein, 269 aa, Thermomyces lanuginosus
EVSQDLFNQFNLFAQYSAAAYCGKNNDAPAGTNITCTGNACPEVEKADATFLYSFEDSGVGDVTGFLALDNTNKLIVLSFRGSRSIENWIGNLNFDLKEINDICSGCRGHDGFTSSWRSVADTLRQKVEDAVREHPDYRVVFTGHSLGGALATVAGADLRGNGYDIDVFSYGAPRVGNRAFAEFLTVQTGGTLYRITHTNDIVPRLPPREFGYSHSSPEYWIKHGTLVPVRRRDIVKIEGIDATGGNNQPNIPDIPAHLWYFGLIGTCL

SEQ ID NO: 4795 - protein, 269 aa, Thermomyces lanuginosus
EVSQDLFNQFNLFAQYSAAAYCGKNNDAPAGTNITCTGNACPEVEKADATFLYSFEDSGVGDVTGFLALDNTNKLIVLSFRGSRSIENWIGNLNFDLKEINDICSGCRGHDGFTSSWRSVADTLRQKVEDAVREHPDYRVVFTGHSLGGALATVAGADLRGNGYDIDVFSYGAPRVGNRAFAEFLTVQTGGTLYRITHTNDIVPRLPPREFGYSHSSPEYWIKSGTLVPVRRRDIVKIEGIDATGGNNQPNIPDITAHLWYFGLIGTCL

SEQ ID NO: 4796 - protein, 269 aa, Thermomyces lanuginosus
EVSQDLFNQFNLFAQYSAAAYCGKNNDAPAGTNITCTGNACPEVEKADATFLYSFEDSGVGDVTGFLALDNTNKLIVLSFRGSRSIENWIGNLNFDLKEINDICSGCRGHDGFTSSWRSVADTLRQKVEDAVREHPDYRVVFTGHSLGGALATVAGADLRGNGYDIDVFSYGAPRVGNRAFAEFLTVQTGGTLYRITHTNDIVPRLPPREFGYSHSSPEYWIKSGTLVPVRRRDIVKIEGIDATGGNNQPNIPDYPAHLWYFGLIGTCL

SEQ ID NO: 4797 - protein, 269 aa, Thermomyces lanuginosus
EVSQDLFNQFNLFAQYSAAAYCGKNNSAPAGTNITCTGNACPEVEKADATFLYSFEDSGVGDVTGFLALDNTNKLIVLSFRGSRSIENWIGNLNFDLKEINDICSGCRGHDGFTSSWRSVADTLRQKVEDAVREHPDYRVVFTGHSLGGALATVAGADLRGNGYDIDVFSYGAPRVGNRAFAEFLTVQTGGTLYRITHTNDIVPRLPPREFGYSHSSPEYWIKSGTLVPVTRADIVKIEGIDATGGNNQPNIPDITAHLWYFGLIGTCL

SEQ ID NO: 4798 - protein, 269 aa, Thermomyces lanuginosus
EVSQDLFNQFNLFAQYSKAAYCGKNNSAPAGTNITCTGNACPEVEKADATFLYSFEDSGVGDVTGFLALDNTRKLIVLSFRGSRSIENWIGNLNFDLKEINDICSGCRGHDGFTSSWRSVADTLRQKVEDAVREHPDYRVVFTGHSLGGALATVAGADLRGNGYDIDVFSYGAPRVGNRAFAEFLTVQTGGTLYRITHTNDIVPRLPPREFGYSHSSPEYWIKSGTLVPVTRNDIVKIEGIDATGGNNQPNIPDIPAHLWYFGLIGTCL

SEQ ID NO: 4799 - protein, 269 aa, Thermomyces lanuginosus
EVSQDLFNQFNLFAQYSAAAYCGKNNDAPAGTNITCTGNACPEVEKADATFLYSFEDSGVGDVTGFLALDNTNKLIVLSFRGSRSIENWIGNLNFDLKEINDICSGCRGHAGFTSSWRSVADTLRQKVEDAVREHPDYRVVFTGHSLGGALATVAGADLRGNGYDIDVFSYGAPRVGNRAFAEFLTVQTGGTLYRITHTNDIVPRLPPREFGYSHSSPEYWIKSGTLVPVRRRDIVKIEGIDATGGNNQPNIPDIPAHLWYFGLIGTCL

SEQ ID NO: 4800 - protein, 269 aa, Thermomyces lanuginosus
EVSQDLFNQFNLFAQYSAAAYCGKNNDAPAGTNITCTGNACPEVEKADATFLYSFEDSGVGDVTGFLALDNTNKLIVLSFRGSRSIENWIGNLNFDLKEINDICSGCRGHDGFTSSWRSVADTLRQKVEDAVREHPDYRVVFTGHSLGGALATVAGADLRGNGYDIDVFSYGAPRVGNRAFAEFLTVQTGGTLYRITHTNDIVPRLPPREFGYSHSSPEYWIKSGTLVPVRRGGIVKIEGIDATGGNNQPNIPDIPAHLWYFGLIGTCL

SEQ ID NO: 4801 - protein, 269 aa, Thermomyces lanuginosus
EVSQDLFNQFNLFAQYSAAAYCGKNNDAPAGTNITCTGNACPEVEKADATFLYSFEDSGVGDVTGFLALDNTNKLIVLSFRGSRSIENWIGNLNFDLKEINDICSGCRGHDGFTSSWRSVADTLRQKVEDAVREHPDYRVVFTGHSLGGALATVAGADLRGNGYDIDVFSYGAPRVGNRAFAEFLTVQTGGTLYRITHTNDIVPRLPPREFGYSHSSPEYWIKSGTLVPVRRRDIVKIEGIDATGGNNQPNIPDIPAHLTYFGLIGTCL

SEQ ID NO: 4802 - protein, 269 aa, Thermomyces lanuginosus
EVSQDLFNQFNLFAQYSAAAYCGKNNDAPAGTNITCTGNACPEVEKADATFLYSFEDSGVGDVTGFLALDNTNKLIVLSFRGSRSIENWRGNLNFDLKEINDICSGCRGHDGFTSSWRSVADTLRQKVEDAVREHPDYRVVFTGHSLGGALATVAGADLRGNGYDIDVFSYGAPRVGNRAFAEFLTVQTGGTLYRITHTNDIVPRLPPREFGYSHSSPEYWIKSGTLVPVRRRDIVKIEGIDATGGNNQPNIPDIPAHLWYFGLIGTCL

SEQ ID NO: 4803 - protein, 269 aa, Thermomyces lanuginosus
EVSQDLFNQFNLFAQYSAAAYCGKNNDAPAGTNITCTGNACPEVEKADATFLYSFEDSGVGDVTGFLALDNTNKLIVLSFRGSRSIENWIGNLNFDLKEINDICSGCRGHDGFTSSWRSVADTLRQKVEDAVREHPDYRVVFTGHSLGGALATVAGADLRGNGYDIDVFSYGAPRVGNRAFAEFLTVQTGGTLYRITHTNDIVPRLPPREFGYSHSSPEYWIKFGTLVPVRRRDIVKIEGIDATGGNNQPNIPDIPAHLWYFGLIGTCL

SEQ ID NO: 4804 - protein, 269 aa, Thermomyces lanuginosus
EVSQDLFNQFNLFAQYSAAAYCGKNNDAPAGTNITCTGNACPEVEKADATFLYSFEDSGVGDVTGFLALDNTNKLIVLSFRGSRSIENWIGNLNFDLKEINDICSGCRGHDGFTSSWRSVADTLRQKVEDAVREHPDYRVVFTGHSLGGALATVAGADLRGNGYDIDVFSYGAPRVGNRAFAEFLTVQTGGTLYRITHTNDIVPRLPPREFGYSHSSPEYWIKSGTLVPVRRRDIVKIEGIDATGGNNQPNIPDIRAHLWYFGLIGTCL

SEQ ID NO: 4805 - protein, 269 aa, Thermomyces lanuginosus
EVSQDLFNQFNLFAQYSAAAYCGKNNDAPAGTNITCTGNACPEVEKADATFLYSFEDSGVGDVTGFLALDNTNKLIVLSFRGSRSIENWIGNLNFDLKEINDICSGCRGHDGFTSSWRSVADTLRQKVEDAVREHPDYRVVFTGHSLGGALATVAGADLRGNGYDIDVFSYGAPRVGNRAFAEFLTVQTGGTLYRITHTNDIVPRLPPRKFGYSHSSPEYWIKSGTLVPVRRRDIVKIEGIDATGGNNQPNIPDIPAHLWYFGLIGTCL

SEQ ID NO: 4806 - protein, 269 aa, Thermomyces lanuginosus
EVSQDLFNQFNLFAQYSAAAYCGKNNDAPAGTNITCTGNACPEVEKADATFLYSFEDSGVGDVTGFLALDNTNKQIVLSFRGSRSIENWIGNLNFDLKEINDICSGCRGHDGFTSSWRSVADTLRQKVEDAVREHPDYRVVFTGHSLGGALATVAWADLRGNGYDIDVFSYGAPRVGNRAFAEFLTNQTGGTLYRITHTNDIVPRLPPREFGYSHSSPEYWIKSGTLVPVTRNDIVKIEGIDATGGNNQPNIPDIPAHLWYFGLIGTCL

SEQ ID NO: 4807 - protein, 269 aa, Thermomyces lanuginosus
EVSQDLFNQFNLFAQYSAAAYCGKNNDAPAGTNITCTGNACPEVEKADATFLYSFEDSGVGDVTGFLALDNTNKLIVLSFRGSRSIENWIGNLNFDLKEINDICSGCRGHDGFTSSWRSVADTLRQKVEDAVREHPDYRVVFTGHSLGGALATVAGADLRGNGYDIDVFSYGAPRVGNRAFAEFLTVQTGGTLYRITHTHDIVPRLPPREFGYSHSSPEYWIKSGTLVPVRRRDIVKIEGIDATGGNNQPNIPDIPAHLWYFGLIGTCL

SEQ ID NO: 4808 - protein, 269 aa, Thermomyces lanuginosus
EVSQDLFNQFNLFAQYSAAAYCGKNNDAPAGTNITCTGNACPEVEKADATFLYSFEDSGVGDVTGFLALDNTNKLIVLSFRGSRSIENWIGNLNFDLKEINDICSGCRGHDGFTSSWRSVADTLRQKVEAAVREHPDYRVVFTGHSLGGALATVAGADLRGNGYDIDVFSYGAPRVGNRAFAEFLTTQTGGTLYRITHTNDIVPRLPPREFGYSHSSPEYWIKSGTLVPVTRNDIVKIEGIDATGGNNQPNIPDIPAHLWYFGRIGTCL

SEQ ID NO: 4809 - protein, 269 aa, Thermomyces lanuginosus
EVSQDLFNQFNLFAQYSAAAYCGKNNDAPAGTNITCTGNACPEVEKADATFLYSFEDSGVGDVTGFLALDNTNKLIVLSFRGSRSIENWIGNLNFDLKEINDICSGCRGHDGFTSSWRSVADTLRQKVEDAVREHPDYRVVFTGHSLGGALATVAGADLRGNGYDIDVFSYGAPRVGNRAFAEFLTVQTGGTLYRITHTNDIVPRLPPREFGYSHSSPEYWIKSGTLVPVRRRDIVKIEGIDATGGNNQPNIPDIPAHLNYFGLIGTCL

SEQ ID NO: 4810 - protein, 269 aa, Thermomyces lanuginosus
EVSQDLFNQFNLFAQYSKAAYCQKNNDAPAGTNITCTGNACPEVEKADATFLYSFEDSGVGDVTGFLALDNTNKQIVLSFRGSRSIENWIGNLNFDLKEINDICSGCRGHDGFTSSWRSVADTLRQKVEDAVREHPDYRVVFTGHSLGGALATVAGADLRGNGYDIDVFSYGAPRVGNRAFAEFLTVQTGGTLYRITHTNDIVPRLPPREFGYSHSSPEYWIKSGTLVPVTRNDIVKIEGIDATGGNNQPNIPDIPAHLWYFGLIGTCL

SEQ ID NO: 4811 - protein, 269 aa, Thermomyces lanuginosus
EVSQDLFNQFNLFAQYSAAAYCGKNNDAPAGTNITCTGNACPEVEKADATFLYSFEDSGVGDVTGFLALDNTNKLIVLSFRGSRSIENWIGNLNFDLKEINDICSGCRGHDGFTSSWRSVADTLRQKVEDAVREHPDYRVVFAGHSLGGALATVAGADLRGNGYDIDVFSYGAPRVGNRAFAEFLTVQTGGTLYRITHTNDIVPRLPPREFGYSHSSPEYWIKSGTLVPVRRRDIVKIEGIDATGGNNQPNIPDIPAHLWYFGLIGTCL

SEQ ID NO: 4812 - protein, 269 aa, Thermomyces lanuginosus
EVSQDLFNQFNLFAQYSAAAYCGKNNDAPAGTNITCTGNACPEVEKADATFLYSFEDSGVGDVTGFLALDNTNKLIVLSFRGSRSIENWIGNLNFDLKEINDICSGCRGHDGFTSSWRSVADTLRQKVEDAVREHPDYRVVFTGHSLGGALATVAGADLRGNGYDIDVFSYGAPRVGNRAFAEFLTVQTGGTLYRITHTNDIVPRLPPREFGYSHSSPEYWIKSGTLVPVRRRDIVKIEGIDATGGNNQPNIPDTPAHLWYFGLIGTCL

SEQ ID NO: 4813 - protein, 269 aa, Thermomyces lanuginosus
EVSQDLFNQFNLFAQYSAAAYCGKNNDAPAGTNITCTGNACPEVEKADATFLYSFEDSGVGDVTGFLALDNTNKLIVLSFRGSRSIENWIGNLNFXLKEINDICSGCRGHDGFTSSWRSVADTLRQKVEDAVREHPDYRVVFTGHSLGGALATVAGADLRGNGYDIDVFSYGAPRVGNRAFAEFLTVQTGGTLYRITHTNDIVPRLPPXEFGYSHSSPEYWIKSGTLVPVTRNDIVKIEGIDATGGNNHPNIPDIPAHLWYFGLIGTCL

SEQ ID NO: 4814 - protein, 269 aa, Thermomyces lanuginosus
EVSQDLFNQFNLFAQYSAAAYCGKNNSAPAGTNITCTGNACPEVEKADATFLYSFEDMGVGDVTGFLALDNTNKLIVLSFRGSRSIENWIGNLNFDLKEINDICSGCRGHDGFTSSWRSVADTLRQKVEDAVREHPDYRVVFTGHSLGGALATVAGADLRGNGYDIDVFSYGAPRVGNRAFAEFLTVQTGGTLYRITHTNDIVPRLPPREFGYSHSSPEYWIKSGTLVPVTRNDIVKIEGIDATGGNNQPNIPDITAHLWYFGLIGTCL

SEQ ID NO: 4815 - protein, 269 aa, Thermomyces lanuginosus
EVSQDLFNQFNLFAQYSAAAYCKKNNDAPAGTNITCTGNACPEVEKADATFLYSFKDSGVGDVTGFLALDNTNKLIVLSFRGSRSIENWIGNLNFDLKEINDICSGCRGHDGFTSSWRSVADTLRQKVEDAVREHPDYRVVFTGHSLGGALATVAGADLRGNGYDIDVFSYGAPRVGNRAFAEFLTTQTGGTLYRITHTNDIVPRLPPREFGYSHSSPEYWIKSGTLVPVTRNDIVKIEGIDATGGNNQPNIPDIPAHLWYFGLIGTCL

SEQ ID NO: 4816 - protein, 269 aa, Thermomyces lanuginosus
EVSQDLFNQFNLFAQYSAAAYCGKNNDAPAGTNITCTGNICPEVEKADATFLYSFEDSGVGDVTGFLALDNTNKLIVLSFRGSRSIENWIGNLNFDLKEINDICSGCRGHDGFTSSWRSVADTLRQKVEDAVREHPDYRVVFTGHSLGGALATVAGADLRGNGYDIDVFSYGAPRVGNRAFAEFLTVQTGGTLYRITHTNDIVPRLPPREFGYSHSSPEYWIKSGTLVPVRRRDIVKIEGIDATGGNNQPNIPDIPAHLWYFGLIGTCL

SEQ ID NO: 4817 - protein, 269 aa, Thermomyces lanuginosus
EVSQDLFNQFNLFAQYSAAAYCGKNNDAPAGTNITCTGNACPEVEKADATFLYSFEDSGVGDVTGFLALDNTNKLIVLSFRGSRSIENWIGNLNFDLKEINDICSGCRGHDGFTSSWRSVADTLRQKVEDAVREHPDYRVVFTGHSLGGALATVAGADLRGNGYDIDVFSYGAPRVGNRAFAEFLTVQTGGTLYRITHTNDIVPRLPPREFGYSHSSPEYWIKSGTLPPVRRRDIVKIEGIDATGGNNQPNIPDIPAHLWYFGLIGTCL

SEQ ID NO: 4818 - protein, 269 aa, Thermomyces lanuginosus
EVSQDLFNQFNLFAQYSAAAYCGKNNDAPAGTNITCTGNACPEVEKADATFLYSFEDSGVGDVTGFLALDNTNKLIVLSFRGSRSIENWIGNLNFDLKEINDICSGCRGHDGFTSSWRSVADTLRQKVEDAVREHPDYRVVFTGHSLGGGLATVAGADLRGNGYDIDVFSYGAPRVGNRAFAEFLTVQTGGTLYRITHTNDIVPRLPPREFGYSHSSPEYWIKSGTLVPVRRRDIVKIEGIDATGGNNQPNIPDIPAHLWYFGLIGTCL

SEQ ID NO: 4819 - protein, 269 aa, Thermomyces lanuginosus
EVSQDLFNQFNLFAQYSAAAYCGKNNQAPAGTNITCTGNACPEVEKADATFLYSFEDMGVGDVTGFLALDNTNKLIVLSFRGSRSIENWIGNLNFDLKEINDICSGCRGHDGFTSSWRSVADTLRQKVEDAVREHPDYRVVFTGHSLGGALATVAGADLRGNGYDIDVFSYGAPRVGNRAFAEFLTVQTGGTLYRITHTNDIVPRLPPREFGYSHSSPEYWIKSGTLVPVTRNDIVKIEGIDATGGNNQPNIPDITAHLWYFGLIGTCL

SEQ ID NO: 4820 - protein, 269 aa, Thermomyces lanuginosus
EVSQDLFNQFNLFAQYSAAAYCGKNNDAPAGTNITCTGNACPEVEKADATLLYSFEDSGVGDVTGFLALDNTNKLIVLSFRGSRSIENWIGNLNFDLKEINDICSGCRGHDGFTSSWRSVADTLRQKVEDAVREHPDYRVVFTGHSLGGALATVAGADLRGNGYDIDVFSYGAPRVGNRAFAEFLTVQTGGTLYRITHTNDIVPRLPPREFGYSHSSPEYWIKSGTLVPVRRRDIVKIEGIDATGGNNQPNIPDIPAHLWYFGLIGTCL

SEQ ID NO: 4821 - protein, 269 aa, Thermomyces lanuginosus
EVSQDLFNQFNLFAQYSAAAYCGKNNDAPAGTNITCTGNACPEVEKADATFLYSFEDSGVGDVTGFLALDNTNKLIVLSFRGSRSIENWIGNLNFNLKEINDICSGCRGHDGFTSSWRSVADTLRQKVEDAVREHPDYRVVFTGHSLGGALATVAGADLRGNGYDIDVFSYGAPRVGNRAFAEFLTVQTGGTLYRITHTNDIVPRLPPREFGYSHSSPEYWIKSGTLVPVRRRDIVKIEGIDATGGNNQPNIPDIPAHLWYFGLIGTCL

SEQ ID NO: 4822 - protein, 269 aa, Thermomyces lanuginosus
EVSQDLFNQFNLFAQYSAAAYCGKNNDAPAGTNITCTGNACPEVFKADATFLYSFEDSGVGDVTGFLALDNTRKDIVLSFRGSRSIENWIGNLNFDLKEINDICSGCRGHDGFTSSWRSVADTLRQKVEDAVREHPDYRVVFTGHSLGGALATVAGADLRGNGYDIDVFSYGAPRVGNRAFAEFLTVQTGGTLYRITHTNDIVPRLPPREFGYSHSSPEYWIKSGTLVPVTRNDIVKIEGIDATGGNNQPNIPDIPAHLWYFGLIGTCL

SEQ ID NO: 4823 - protein, 269 aa, Thermomyces lanuginosus
EVSQDLFNQFNLFAQYSAAAYCGKNNDAPAGTNITCTGNACPEVEKADATFLYSFEDSGVGDVTGFLALDNTNKLIVLSFRGSRSIENWITNLNFDLKEIRDICSRCRGHDGFTSSWRSVADTLRQKVEDAVREHPDYRVVFTGHSLGGALATVAGADLRGNGYDIDVFSYGAPRVGNRAFAEFLTVQTGGTLYRITHTNDIVPRLPPREFGYSHSSPEYWIKSGTLVPVTRNDIVKIEGIDATGGNNQPNIPDIPAHLWYFGLIGTCL

SEQ ID NO: 4824 - protein, 269 aa, Thermomyces lanuginosus
EVSQDLFNQFNLFAQYSAAAYCGKNNDAPAGTNITCTGNACPEVEKADATFLYSFEDSGVGDVTGFLALDNTNKLIVLSFRGSRSIENWIGNLNFXLKEINDICSGCRGHDGFTSSWRSVADTLRQKVEDAVREHPDYRVVFTGHSLGGALATVAGADLRGNGYDIDVFSYGAPRVGNRAFAEFLTVQTGGTLYRITHTNDIVPRLPPXEFGYSHSSPEYWIKSGTLVPVTRNDIVKIEGIDATGGNNRPNIPDIPAHLWYFGLIGTCL

SEQ ID NO: 4825 - protein, 269 aa, Thermomyces lanuginosus
EVSQDLFNQFNLFAQYSAAAYCGKNNDAPAGTNITCTGNACPEVEKADATFLYSFEDSGVGDVTGFLALDNTNKLIVLSFRGSRSIENWIGNLNFDLKEINDICSGCRGHDGFTSSWRSVADTLRQKVEDAVREHPDYRVVFTGHSLGGALATVAGADLRGNGYDIDVFSYGAPRVGNRAFAEFLTVQTGGTLYRITHTNDIVPRLPPREFGYSHSSPEYWIKSGTLVPVRRRDIVKIEGIDATGGNNQPNIPDIPAHYWYFGLIGTCL

SEQ ID NO: 4826 - protein, 269 aa, Thermomyces lanuginosus
EVSQDLFNQFNLFAQYSAAAYCGKNNDAPAGTNITCTGNACPEVEKADATILYSFEDSGVGDVTGFLALDNTNKLIVLSFRGSRSIENWIGNLNFDLKEINDICSGCRGHDGFTSSWRSVADTLRQKVEDAVREHPDYRVVFTGHSLGGALATVAGADLRGNGYDIDVFSYGAPRVGNRAFAEFLTVQTGGTLYRITHTNDIVPRLPPREFGYSHSSPEYWIKSGTLVPVRRRDIVKIEGIDATGGNNQPNIPDIPAHLWYFGLIGTCL

SEQ ID NO: 4827 - protein, 269 aa, Thermomyces lanuginosus
EVSQDLFNQFNLFAQYSAAAYCGANNDAPAGTNITCTGNACPEVEKADATFLYSFEDSGVGDVTGFLALDNTNKLIVLSFRGSRSIENWIGNLNFDLKEINDICSGCRGHDGFTSSWRSVADTLRQKVEAAVREHPDYRVVFTGHSLGGALATIAGADLRGNGYDIDVFSYGAPRVGNRAFAEFLTVQTGGTLYRITHTNDIVPRLPPREFGYSHSSPEYWIKSGTLVPVTRNDIVKIEGIDATGGNNQPNIPDIPAHLWYFGLIGTCL

SEQ ID NO: 4828 - protein, 269 aa, Thermomyces lanuginosus
EVSQDLFNQFNLFAQYSAAAYCGKNNDAPAGTNITCTGNACPEVEKADATFLYSFEDSGVGDVTGFLALDNTNKLIVLSFRGSRSIENWIGNLNFDLKEINDICSGCRGHDGFTSSWRSVADTLRQKVEDAVREHPDYRVVFTGHSLGGALATVAGADLRGNGYDIDVFSYGAPRVGNRAFAEFLTVQTGGTLYRITHTNDIVPRLPPREFGYSHSSPEYWIKIGTLVPVRRRDIVKIEGIDATGGNNQPNIPDIPAHLWYFGLIGTCL

SEQ ID NO: 4829 - protein, 269 aa, Thermomyces lanuginosus
EVSQDLFNQFNLFAQYSAAAYCGKNNDAPAGTNITCTGNACPEVEKADATFLYSFEDSGVGDVTGFLALDNTNKLIVLSFRGSRSIENWIGNLNFDLKEINDICSGCRGHDGFTSSWRSVADTLRQKVEDAVREHPDYRVVFTGHSLGGALATVAGADLRGNGYDIDVFSYGAPRVGNRAFAEFLTVQTGGTLYRITHTNDIVPRLPPREFGYSHSSPEYWIKSGTLVPVRRNDIVKIRGIDATGGNNRPNIPDIPAHLWYFGLIGTCL

SEQ ID NO: 4830 - protein, 269 aa, Thermomyces lanuginosus
EVSQDLFNQFNLFAQYSAAAYCSKNNDAPAGTNITCTGNACPEVEKADATFLYSFEDSGVGDVTGFLALDNTNKLIVLSFRGSRSIENWIGNLNFDLKEINDICSGCRGHDGFTSSWRSVADTLRQKVEDAVREHPDYRVVFTGHSLGGALATVAGADLRGNGYDIDVFSYGAPRVGNRAFAEFLTVQTGGTLYRITHTNDIVPRLPPREFGYSHSSPEYWIKSGTLVPVRRRDIVKIEGIDATGGNNQPNIPDIPAHLWYFGLIGTCL

SEQ ID NO: 4831 - protein, 269 aa, Thermomyces lanuginosus
EVSQDLFNQFNLFAQYSAAAYCGKNNDAPAGTNITCTGNACPEVEKADATFLYSFEDSGVGDVTGFLALDNTNKLIVLSFRGSRSIENWIGNLNFDLKEINDICSGCRGHDGFTSSWRSVADTLRQKVEDAVREHPDYRVVFTGHSLGGALATVAGADLRGNGYDIDVFSYGAPRVGNRAFAEFLTVQTGGTLYRITTTNDIVPRLPPREFGYSHSSPEYWIKSGTLVPVRRRDIVKIEGIDATGGNNQPNIPDIPAHLWYFGLIGTCL

SEQ ID NO: 4832 - protein, 269 aa, Thermomyces lanuginosus
EVSQDLFNQFKLFAQYSAAAYCGKNNDAPAGTNITCTGNACPEVEKADATFLYSFEDSGVGDVTGFLALDNTNKLIVLSFRGSRSIENWIGNLNFDLKEINDICSGCRGHDGFTSSWRSVADTLRQKVEDAVREHPDYRVVFTGHSLGGALATVAGADLRGNGYDIDVFSYGAPRVGNRAFAEFLTVQTGGTLYRITHTNDIVPRLPPREFGYSHSSPEYWIKSGTLVPVTRQDIVKIEGIDATGGNNQPNIPDITAHLWYFGLIGTCL

SEQ ID NO: 4833 - protein, 269 aa, Synthetic construct
EVSQDLFNQFNLFAQYSAAAYCGKNNDAPAGTNITCTGNACPEVEKADPTFLYSFEDSGVGDVTGFLALDNTNKLIVLSFRGSRSIENWIGNLNFDLKEINDICSGCRGHDGFTSSWRSVADTLRQKVEDAVREHPDYRVVFTGHSLGGALATVAGADLRGNGYDIGVFSYGAPRVGNRAFAEFLTVQTGGTLYRITHTNDIVPRLPPRVFGYSHSSPEYWIKSGTLVPVTRNDIVKIEGIDATGGNNQPNIPDIPAHLWYFGLIGTCL

SEQ ID NO: 4834 - protein, 269 aa, Thermomyces lanuginosus
EVSQDLFNQFNLFAQYSAAAYCGKNNDAPAGTNITCTGNACPEVEKADATFLYSFEDSGVGDVTGFLALDNTNKLIVLSFRGSRSIENWIGNLNFDLKEINDICSGCRGHDGFTSSWRSVADTLRQKVEDAVREHPDYRVVFTGHSLGGALATVAGADLRGNGYDIDVFSYGAPRVGNRAFAEFLTVQTGGTLYRITHTNDIVPRLPPREFGYSHSSPEYWIKSGTGVPVRRRDIVKIEGIDATGGNNQPNIPDIPAHLWYFGLIGTCL

SEQ ID NO: 4835 - protein, 269 aa, Thermomyces lanuginosus
EVSQDLFNQFNLFAQYSAAAYCQKNNDAPAGTNITCTGNACPEVEKADATFLYSFKDSGVGDVTGFLALDNTNKRIVLSFRGSRSIENWIGNLNFDLKEINDICSGCRGHDGFTSSWRSVADTLRQKVEDAVREHPDYRVVFTGHSLGGALATVAGADLRGNGYDIDVFSYGAPRVGNRAFAEFLTVQTGGTLYRITHTNDIVPRLPPREFGYSHSSPEYWIKSGTLVPVTRNDIVKIEGIDATGGNNQPNIPDIPAHLWYFGLIGTCL

SEQ ID NO: 4836 - protein, 269 aa, Thermomyces lanuginosus
EVSRDLFNQFNLFAQYSAAAYCGKNNDAPAGTNITCTGNACPEVEKADATFLYSFEDSGVGDVTGFLALDNTNKLIVLSFRGSRSIENWIGNLNFDLKEINDICSGCRGHDGFTSSWRSVADTLRQKVEDAVREHPDYRVVFTGHSLGGALATVAGADLRGNGYDIDVFSYGAPRVGNRAFAEFLTVQTGGTLYRITHTNDIVPRLPPREFGYSHSSPEYWIKSGTLRPVRRNDIVKIEGIDATGGNNQPNIPDIPAHLWYFGLIGTCL

SEQ ID NO: 4837 - protein, 269 aa, Thermomyces lanuginosus
EVSQDLFNQFNLFAQYSAAAYCGKNNDAPAGTNITCTGNACPEVEKADATFLYSFEDSGVGDVTGFLALDNTNKRIVLSFRGSRSIENWIGNLNFDLKEINDICSGCRGHDGFTSSWRSVADTLRQKVEDAVREHPDYRVVFTGHSLGGALATVAGADLRGNGYDIDVFSYGAPRVGNRAFAEFLTNQTGGTLYRITHTNDIVPRLPPREFGYSHSSPEYWIKSGTLVPVTRNDIVKIEGIDATGGNNQPNIPDIPAHLWYFGRIGTCL

SEQ ID NO: 4838 - protein, 269 aa, Thermomyces lanuginosus
EVSQDLFNQFNLFAQYSAAAYCGKNNDAPAGTNITCTGNACPEVEKADATFLYSFEDSGVGDVTGFLALDNTNKLIVLSFRGSRSIENWIGNLNFDLKEINDICSGCRGHDGFTSSWRSVADTLRQKVEDAVREHPDYRVVFTGHSLGGALATVAGADLRGNGYDIDVFSYGAPRVGNRAFAEFLTVQTGGTLYRITHTNDIVPRLPPREFGYSHSSPEYWIKKKTKVPVTRNDIVKIEGIDATGGNNQPNIPDIPAHLWYFGLIGTCL

SEQ ID NO: 4839 - protein, 269 aa, Thermomyces lanuginosus
EVSQDLFNQFNLFAQYSAAAYCGKNNDAEAGTNITCTGNACPEVEKADATFLYSFEDSGVGDVTGFLALDNTRKDIVLSFRGSRSIENWIGNLNFDLKEINDICSGCRGHDGFTSSWRSVADTLRQKVEDAVREHPDYRVVFTGHSLGGALATVAGADLRGNGYDIDVFSYGAPRVGNRAFAEFLTVQTGGTLYRITHTNDIVPRLPPREFGYSHSSPEYWIKSGTLVPVTRNDIVKIEGIDATGGNNQPNIPDIPAHLWYFGLIGTCL

SEQ ID NO: 4840 - protein, 269 aa, Thermomyces lanuginosus
EVSQDLFNQFNLFAQYSAAAYCGKNNDAPAGTNITCTGNACPEVEKADATFLYSFEDSGVGDVTGFLALDNTNKLIVLSFRGSRSIENWIGNLNFDLKEINDICSGCRGHDGFTSSWRSVADTLRQKVEDAVREHPDYRVVFTGHSLGGALATVAGADLRGNGYDIDVFSYGAPRVGNRAFAEFLTVQTGGTLYRITHTNDIVPRLPPREFGYSHSSPEYWIKSGTLVPVRRRDIVKIEGIDATGGNNQPNIPDIPAHLYYFGLIGTCL

SEQ ID NO: 4841 - protein, 269 aa, Thermomyces lanuginosus
EVSQDLFNQFNLFAQYSAAAYCGKNNDAPAGTNITCTGNACPEVEKADATFLYSFEDSGVGDVTGFLALDNTNKGIVLSFRGSRSIENWIGNLNFDLKEINDICSGCRGHDGFTSSWRSVADTLRQKVEAAVREHPDYRVVFTGHSLGGALATVAGADLRGNGYDIDVFSYGAPRVGNRAFAEFLTHQTGGTLYRITHTNDIVPRLPPREFGYSHSSPEYWIKSGTLVPVTRNDIVKIEGIDATGGNNQPNIPDIPAHLWYFGLIGTCL

SEQ ID NO: 4842 - protein, 269 aa, Synthetic construct
EVSQDLFNQFNLFAQYSAAAYCGKNNDAPAGTNITCTGNACPEVEKADATFLYSFEDSGVGDVTGFLALDNTNKLIVLSFRGSRSIENWIGNLKFLLKEINDICSGCRGHDGFTSSWRSVADTLRQKVEDAVREHPDYRVVFTGHSLGGALATVAGADLRGNGYDIDVFSYGAPRVGNRAFAEFLTVQTGGTLYRITHTNDIVPRLPPREFGYSHSSPEYWIKSGTLVPVTRNDIVKIEGIDATGGNNRPNIPDIPAHLWYFGLIGTCL

SEQ ID NO: 4843 - protein, 269 aa, Thermomyces lanuginosus
EVSQDLFNQFNLFAQYSAAAYCGKNNDAPAGTNITCTGNACPEVEKADATFLYSFEDSGVGDVTGFLALDNTNKLIVLSFRGSRSIENWIGNLNFDLKEINDICSGCRGHDGFTSSWRSVADTLRQKVEDAVREHPDYRVVFTGHSLGGALATVAGADLRGNGYDIDVFSYGAPRVGNRAFAEFLTVQTGGTLYRITHTQDIVPRLPPREFGYSHSSPEYWIKSGTLVPVRRRDIVKIEGIDATGGNNQPNIPDIPAHLWYFGLIGTCL

SEQ ID NO: 4844 - protein, 269 aa, Thermomyces lanuginosus
EVSQDLFNQFNLFAQYSAAAYCGKNNDAPAGTNITCTGNACPEVEKADATFLYSFEDSGVGDVTGFLALDNTNKLIVLSFRGSRSIENWIGNLNFDLKEINDICSGCRGHDGFTSSWRSVADTLRQKVEDAVREHPDYRVVFVGHSLGGALATVAGADLRGNGYDIDVFSYGAPRVGNRAFAEFLTVQTGGTLYRITHTNDIVPRLPPREFGYSHSSPEYWIKSGTLVPVRRRDIVKIEGIDATGGNNQPNIPDIPAHLWYFGLIGTCL

SEQ ID NO: 4845 - protein, 269 aa, Thermomyces lanuginosus
EVSQDLFNQFNLFAQYSAAAYCGKNNDAPAGTNITCTGNACPEVEKADATFLYSFEDSGVGDVTGFLALDNTNKLIVLSFRGSRSIENWIGNLNFDLKEINDICSGCRGHEGFTSSWRSVADTLRQKVEDAVREHPDYRVVFTGHSLGGALATVAGADLRGNGYDIDVFSYGAPRVGNRAFAEFLTVQTGGTLYRITHTNDIVPRLPPREFGYSHSSPEYWIKSGTLVPVRRRDIVKIEGIDATGGNNQPNIPDIPAHLWYFGLIGTCL

SEQ ID NO: 4846 - protein, 269 aa, Thermomyces lanuginosus
EVSQDLFNQFNLFAQYSAAAYCGKNNDAPAGTNITCTGNACPEVEKADATFLYSFEDSGVGDVTGFLALDNTNKLIVLSFRGSRSIENWIGNLNFDLKEINDICSGCRGHDGFTSSWRSVADTLRQKVEAAVREHPDYRVVFTGHSLGGALATIAWADLRGNGYDIDVFSYGAPRVGNRAFAEFLTVQTGGTLYRITHTNDIVPRLPPREFGYSHSSPEYWIKSGTLVPVTRNDIVKIEGIDATGGNNQPNIPDIPAHLWYFGLIGTCL

SEQ ID NO: 4847 - protein, 269 aa, Thermomyces lanuginosus
EVSQDLFNQFNLFAQYSAAAYCGKNNDAPAGTNITCTGNACPEVEKADATFLYSFRDSGVGDVTGFLALDNTNKLIVLSFRGSRSIENWIGNLNFDLKEINDICSGCRGHDGFTSSWRSVADTLRQKVEDAVREHPDYRVVFTGHSLGGALATVAGADLRGNGYDIDVFSYGAPRVGNRAFAEFLTVQTGGTLYRITHTNDIVPRLPPREFGYSHSSPEYWIKSGTLVPVRRRDIVKIEGIDATGGNNQPNIPDIPAHLWYFGLIGTCL

SEQ ID NO: 4848 - protein, 269 aa, Thermomyces lanuginosus
EVSQDLFNQFNLFAQYSAAAYCGKNNDAPAGTNITCTGNACPEVEKADATFLYSFEDSGVGDVTGFLALDNTNKLIVLSFRGSRSIENWIGNLNFDLKEIRDICSGCRGHDGFTSSWRSVADTLRQKVEDAVREHPDYRVVFTGHSLGGALATVAGADLRGNGYDIDVFSYGAPRVGNRAFAEFLTVQTGGTLYRITHTNDIVPRLPPREFGYSHSSPEYWIKSGTLVPVTRNDIVKIEGIDATGGNNQPNIPDIPAHSWDFGLIGTCL

SEQ ID NO: 4849 - protein, 269 aa, Thermomyces lanuginosus
EVSQDLFNQFNLFAQYSKAAYCGKNNDAPAGTNITCTGNACPEVEKADATFLYSFEDSGVGDVTGFLALDNTNKDIVLSFRGSRSIENWIGNLNFDLKEINDICSGCRGHDGFTSSWRSVADTLRQKVEDAVREHPDYRVVFTGHSLGGALATVAGADLRGNGYDIDVFSYGAPRVGNRAFAEFLTVQDGGTLYRITHTNDIVPRLPPREFGYSHSSPEYWIKSGTLVPVTRNDIVKIEGIDATGGNNQPNIPDIPAHLWYFGLIGTCL

SEQ ID NO: 4850 - protein, 269 aa, Thermomyces lanuginosus
EVSQDLFNQFNLFAQYSAAAYCGKNNDAEAGTDITCTGNACPEVFKADATFLYSFEDSGVGDVTGFLALDNTNKLIVLSFRGSRSIENWIGNLNFDLKEINDICSGCRGHDGFTSSWRSVADTLRQKVEDAVREHPDYRVVFTGHSLGGALATVAGADLRGNGYDIDVFSYGAPRVGNRAFAEFLTVQTGGTLYRITHTNDIVPRLPPREFGYSHSSPEYWIKSGTLVPVTRNDIVKIEGIDATGGNNQPNIPDIPAHLWYFGLIGTCL

SEQ ID NO: 4851 - protein, 269 aa, Thermomyces lanuginosus
EVSQDLFNQFNLFAQYSAAAYCGKNNRAPAGTNITCTGNACPEVEKADATFLYSFEDXGXGDVTGFLALDNTNKLIVLSFRGSRSIENWIGNLNFDLKEINDICSGCRGHDGFTSSWRSVADTLRQKVEDAVREHPDYRVVFTGHSLGGALATVAGADLRGNGYDIDVFSYGAPRVGNRAFAEFLTVQTGGTLYRITHTNDIVPRLPPREFGYSHSSPEYWIKSGTLVPVTRNDIVKIEGIDATGGNNQPNIPDIPAHLWYFGLIGTCL

SEQ ID NO: 4852 - protein, 269 aa, Thermomyces lanuginosus
EVSQDLFNQFNLFAQYSAAAYCGKNNDAPAGTNITCTGNACPEVEKADATFLYSFEDSGVGDVTGFLALDNTNKLIVLSFRGSRSIENWIGNLNFDLKEINDICSGCRGHDGFTSSWRSVADTLRQKVEDAVREHPDYRVVFTGHSLGGALATVAGADLRGNGYDIDVFSYGAPRVGNRAFAEFLTTQQGGTLYRITHTNDIVPRLPPREFGYSHSSPEYWIKSGTLVPVTRNDIVKIEGIDATGGNNQPNIPDIPAHLWYFGRIGTCL

SEQ ID NO: 4853 - protein, 269 aa, Thermomyces lanuginosus
EVSQDLFNQFNLFAQYSAAAYCKKNNDAPAGTNITCTGNACPEVEKADATFLYSFEDSGVGDVTGFLALDNTNKLIVLSFRGSRSIENWIGNLNFDLKEINDICSGCRGHDGFTSSWRSVADTLRQKVEAAVREHPDYRVVFTGHSLGGALATVAGADLRGNGYDIDVFSYGAPRVGNRAFAEFLTVQTGGTLYRITHTNDIVPRLPPREFGYSHSSPEYWIKSGTLVPVTRNDIVKIEGIDATGGNNQPNIPDIPAHLWYFGRIGTCL

SEQ ID NO: 4854 - protein, 269 aa, Thermomyces lanuginosus
EVSQDLFNQFNLFAQYSAAAYCGKNNDAPAGTNITCTGNACPEVEKADATFLYSFEDSGVGDVTGFLALDNTNKRIVLSFRGSRSIENWIGNLNFDLKEINDICSGCRGHDGFTSSWRSVADTLRQKVEDAVREHPDYRVVFTGHSLGGALATVAGADLRGNGYDIDVFSYGAPRVGNRAFAEFLTTQTGGTLYRITHTNDIVPRLPPREFGYSHSSPEYWIKSGTLVPVTRNDIVKIEGIDATGGNNQPNIPDIPAHLWYFGRIGTCL

SEQ ID NO: 4855 - protein, 269 aa, Thermomyces lanuginosus
EVSQDLFNQFNLFAQYSKAAYCGANNDAPAGTNITCTGNACPEVEKADATFLYSFEDSGVGDVTGFLALDNTNKLIVLSFRGSRSIENWIGNLNFDLKEINDICSGCRGHDGFTSSWRSVADTLRQKVEDAVREHPDYRVVFTGHSLGGALATIAGADLRGNGYDIDVFSYGAPRVGNRAFAEFLTVQTGGTLYRITHTNDIVPRLPPREFGYSHSSPEYWIKSGTLVPVTRNDIVKIEGIDATGGNNQPNIPDIPAHLWYFGLIGTCL

SEQ ID NO: 4856 - protein, 269 aa, Thermomyces lanuginosus
EVSQDLFNQFNLFAQYSAAAYCGKNNDAPAGTNITCTGNACPEVEKADATFLYSFEDSGVGDVTGFLALDNTNKLIVLSFRGSRSIENWIGNLNFDLKEINDICSGCRGHDGFTSSWRSVADTLRQKVEDAVREHPDYRVVFTGHSLGGALATVAGADLRGNGYDIDVFSYGAPRVGNRAFAEFLTVQTGGTLYRITHTNDIVPRLPPREFGYSHSSPEYWIKSGTLVPVRRRDIVKIEGIDATGGNNQPNIPDVPAHLWYFGLIGTCL

SEQ ID NO: 4857 - protein, 269 aa, Thermomyces lanuginosus
EVSQDLFNQFNLFAQYSAAAYCGKNNDAPAGTNITCTGNACPEVEKADATFLYSFEDSGVGDVTGFLALDNTNKRIVLSFRGSRSIENWIGNLNFDLKEINDICSGCRGHDGFTSSWRSVADTLRQKVEAAVREHPDYRVVFTGHSLGGALATVAGADLRGNGYDIDVFSYGAPRVGNRAFAEFLTVQTGGTLYRITHTNDIVPRLPPREFGYSHSSPEYWIKSGTLVPVTRNDIVKIEGIDATGGNNQPNIPDIPAHLWYFGRIGTCL

SEQ ID NO: 4858 - protein, 269 aa, Thermomyces lanuginosus
EVSQDLFNQFNLFAQYSAAAYCGKNNDAEAGTDITCTGNACPEVEKADATFLYSFEDSGVGDVTGFLALDNTNKDIVLSFRGSRSIENWIGNLNFDLKEINDICSGCRGHDGFTSSWRSVADTLRQKVEDAVREHPDYRVVFTGHSLGGALATVAGADLRGNGYDIDVFSYGAPRVGNRAFAEFLTVQTGGTLYRITHTNDIVPRLPPREFGYSHSSPEYWIKSGTLVPVTRNDIVKIEGIDATGGNNQPNIPDIPAHLWYFGLIGTCL

SEQ ID NO: 4859 - protein, 269 aa, Thermomyces lanuginosus
EVSQDLFNQFNLFAQYSAAAYCGKNNDAPAGTNITCTGNACPEVEKADATFLYSFEDSGVGDVTGFLALDNTNKLIVLSFRGSRSIENWIGNLNFDLKEINDICSGCRGHDGFTSSWRSVADTLRQKVEAAVREHPDYRVVFTGHSLGGALATVAGADLRGNGYDIDVFSYGAPRVGNRAFAEFLTNQTGGTLYRITHTNDIVPRLPPREFGYSHSSPEYWIKSGTLVPVTRNDIVKIEGIDATGGNNQPNIPDIPAHLWYFGRIGTCL

SEQ ID NO: 4860 - protein, 269 aa, Thermomyces lanuginosus
EVSQDLFNQFKLFAQYSAAAYCGKNNSAPAGTNITCTGNACPEVEKADATFLYSFEDMGVGDVTGFLALDNTNKLIVLSFRGSRSIENWIGNLNFDLKEINDICSGCRGHDGFTSSWRSVADTLRQKVEDAVREHPDYRVVFTGHSLGGALATVAGADLRGNGYDIDVFSYGAPRVGNRAFAEFLTVQTGGTLYRITHTNDIVPRLPPREFGYSHSSPEYWIKSGTLVPVTRNDIVKIEGIDATGGNNQPNIPDIPAHLWYFGLIGTCL

SEQ ID NO: 4861 - protein, 269 aa, Thermomyces lanuginosus
EVSQDLFNQFNLFAQYSAAAYCGKNNDAPAGTNITCTGNACPEVEKADATFLYSFEDSGVGDVTGFLALDNTNKLIVLSFRGTRSVENWXGNLNFDLKEINDICSGCRGHDGFTSSWRSVADTLRQKVEDAVREHPDYRVVFTGHSLGGALATVAGADLRGNGYDIDVFSYGAPRVGNRAFAEFLTVQTGGTLYRITHTNDIVPRLPPREFGYSHSSPEYWIKSGTLVPVTRNDIVKIEGIDATGGNNQPNIPDIPAHLWYFGLIGTCL

SEQ ID NO: 4862 - protein, 269 aa, Thermomyces lanuginosus
EVSQDLFNQFNLFAQYSAAAYCGKNNDAPAGTNITCTGNACPEVEKADATFLYSFEDSGVGDVTGFLALDNTNKLIVLSFRGSRSIENWIGNLNFDLKHINDICSGCRGHDGFTSSWRSVADTLRQKVEDAVREHPDYRVVFTGHSLGGALATVAGADLRGNGYDIDVFSYGAPRVGNRAFAEFLTVQTGGTLYRITHTNDIVPRLPPXEFGYSHSSPEYWIKSGTLVPVTRNDIVKIEGIDATGGNNKPNIPDIPAHLWYFGLIGTCL

SEQ ID NO: 4863 - protein, 269 aa, Thermomyces lanuginosus
EVSQDLKNQFNLFAQYSAAAYCGKNNDAPAGTNITCTGNACPEVEKADATFLYSFEDSGVGDVTGFLALDNTNKLIVLSFRGSRSIENWIGNLNFDLKEINDICSGCRGHDGFTSSWRSVADTLRQKVEDAVREHPDYRVVFTGHSLGGALATVAGADLRGNGYDIDVFSYGAPRVGNRAFAEFLTVQTGGTLYRITHTNDIVPRLPPREFGYSHSSPEYWIKSGTLVPVRRRDIVKIEGIDATGGNNQPNIPDIPAHLWYFGLIGTCL

SEQ ID NO: 4864 - protein, 269 aa, Thermomyces lanuginosus
EVSQDLFNQFNLFAQYSAAAYCGKNNDAPAGTNITCTGNACPEVEKADATFLYSFEDSGVGDVTGFLALDNTNKQIVLSFRGSRSIENWIGNLNFDLKEINDICSGCRGHDGFTSSWRSVADTLRQKVEAAVREHPDYRVVFTGHSLGGALATVAGADLRGNGYDIDVFSYGAPRVGNRAFAEFLTTQTGGTLYRITHTNDIVPRLPPREFGYSHSSPEYWIKSGTLVPVTRNDIVKIEGIDATGGNNQPNIPDIPAHLWYFGLIGTCL

SEQ ID NO: 4865 - protein, 269 aa, Thermomyces lanuginosus
EVSQDLFNQFNLFAQYSKAAYCGKNNDAPAGTDITCTGNACPEVEKADATFLYSFEDSGVGDVTGFLALDNTNKLIVLSFRGSRSIENWIGNLNFDLKEINDICSGCRGHDGFTSSWRSVADTLRQKVEDAVREHPDYRVVFTGHSLGGALATVAGADLRGNGYDIDVFSYGAPRVGNRAFAEFLTVQDGGTLYRITHTNDIVPRLPPREFGYSHSSPEYWIKSGTLVPVTRNDIVKIEGIDATGGNNQPNIPDIPAHLWYFGLIGTCL

SEQ ID NO: 4866 - protein, 269 aa, Thermomyces lanuginosus
EVSQDLFNQFNLFAQYSAAAYCGKNNDAPAGTNITCTGNACPEVEKADATFLYSFEDSGVGDVTGFLALDNTNKLIVLSFRGSRSIENWIGNLNFDLKEINDICSGCRGHDGFTSSWRSVADTLRQKVEDAVREHPDYRVVFTGHSLGGALATVAGADLRGNGYDIDVFSYGAPRVGNRAFAEFLTVQTGGTLYRITHTNDIVPRLPPREFGYSHSSPEYWIKSGTKVPVRRRDIVKIEGIDATGGNNQPNIPDIPAHLWYFGLIGTCL

SEQ ID NO: 4867 - protein, 269 aa, Thermomyces lanuginosus
EVSQDLFNQFNLFAQYSAAAYCGKNNDAPAGTNITCTGNACPEVEKADATFLYSFEDSGVGDVTGFLALDNTNKLIVLSFRGSRSIENWIGNLNFDLKEINDICSGCRGHDGFTSSWRSVADTLRQKVEDAVREHPDYRVVFTGHSLGGALATVAGADLRGNGYDIDVFSYGAPRVGNRAFAEFLTVQTGGTLYRITHTNDIVPRLPPREFGYSHSSPEYWIKSGTLVPLRRRDIVKIEGIDATGGNNQPNIPDIPAHLWYFGLIGTCL

SEQ ID NO: 4868 - protein, 269 aa, Thermomyces lanuginosus
EVSQDLFNQFNLFAQYSAAAYCGKNNDAPAGTNITCTGNACPEVEKADATFLYSFEDSGVGDVTGFLALDNTNKLIVLSFRGSRSIENWIGNLNFDLKRINDICSGCRGHDGFTSSWRSVADTLRQKVEDAVREHPDYRVVFTGHSLGGALATVAGADLRGNGYDIDVFSYGAPRVGNRAFAEFLTVQTGGTLYRITHTNDIVPRLPPXEFGYSHSSPEYWIKSGTLVPVTRNDIVKIEGIDATGGNNKPNIPDIPAHLWYFGLIGTCL

SEQ ID NO: 4869 - protein, 269 aa, Thermomyces lanuginosus
EVSQDLFNQFNLFAQYSAAAYCGKNNDAPAGTNITCTGNACPEVEKADATFLYSFEDSGVGDVTGFLALDNTNKLIVLSFRGSRSIENWIGNLNFDLKEINDICSGCRGHDGFTSSWRSVADTLRQKVEDAVREHPDYRVVFTGHSLGGVLATVAGADLRGNGYDIDVFSYGAPRVGNRAFAEFLTVQTGGTLYRITHTNDIVPRLPPREFGYSHSSPEYWIKSGTLVPVRRRDIVKIEGIDATGGNNQPNIPDIPAHLWYFGLIGTCL

SEQ ID NO: 4870 - protein, 269 aa, Thermomyces lanuginosus
EVSQDLFNQFNLFAQYSAAAYCGKNNDAPAGTNITCTGNACPEVEKADATFLYSFEDSGVGDVTGFLALDNTNKLIVLSFRGSRSIENWIGNLNFDLKHINDICSGCRGHDGFTSSWRSVADTLRQKVEDAVREHPDYRVVFTGHSLGGALATVAGADLRGNGYDIDVFSYGAPRVGNRAFAEFLTVQTGGTLYRITHTNDIVPRLPPXEFGYSHSSPEYWIKSGTLVPVTRNDIVKIEGIDATGGNNHPNIPDIPAHLWYFGLIGTCL

SEQ ID NO: 4871 - protein, 269 aa, Thermomyces lanuginosus
EVSQDLFNQFNLFAQYSAAAYCGKNNDAPAGTNITCTGNACPEVEKADATFLYSFEDSGVGDVTGFLALDNTNKLIVLSFRGSRSIENWIGNLHFDLKEINDICSGCRGHDGFTSSWRSVADTLRQKVEDAVREHPDYRVVFTGHSLGGALATVAGADLRGNGYDIDVFSYGAPRVGNRAFAEFLTVQTGGTLYRITHTNDIVPRLPPXEFGYSHSSPEYWIKSGTLVPVTRNDIVKIEGIDATGGNNKPNIPDIPAHLWYFGLIGTCL

SEQ ID NO: 4872 - protein, 269 aa, Thermomyces lanuginosus
EVSQDLFNQFNLFAQYSKAAYCGKNNDAPAGTNITCTGNACPEVFKADATFLYSFEDSGVGDVTGFLALDNTRKLIVLSFRGSRSIENWIGNLNFDLKEINDICSGCRGHDGFTSSWRSVADTLRQKVEDAVREHPDYRVVFTGHSLGGALATVAGADLRGNGYDIDVFSYGAPRVGNRAFAEFLTVQTGGTLYRITHTNDIVPRLPPREFGYSHSSPEYWIKSGTLVPVTRNDIVKIEGIDATGGNNQPNIPDIPAHLWYFGLIGTCL

SEQ ID NO: 4873 - protein, 269 aa, Thermomyces lanuginosus
EVSQDLFNQFNLFAQYSAAAYCGKNNDAPAGTDITCTGNACPEVEKADATFLYSFEDSGVGDVTGFLALDNTRKLIVLSFRGSRSIENWIGNLNFDLKEINDICSGCRGHDGFTSSWRSVADTLRQKVEDAVREHPDYRVVFTGHSLGGALATVAGADLRGNGYDIDVFSYGAPRVGNRAFAEFLTVQDGGTLYRITHTNDIVPRLPPREFGYSHSSPEYWIKSGTLVPVTRNDIVKIEGIDATGGNNQPNIPDIPAHLWYFGLIGTCL

SEQ ID NO: 4874 - protein, 269 aa, Thermomyces lanuginosus
EVSQDLFNQFNLFAQYSAAAYCQKNNDAPAGTNITCTGNACPEVEKADATFLYSFEDSGVGDVTGFLALDNTNKLIVLSFRGSRSIENWIGNLNFDLKEINDICSGCRGHDGFTSSWRSVADTLRQKVEAAVREHPDYRVVFTGHSLGGALATVAWADLRGNGYDIDVFSYGAPRVGNRAFAEFLTVQTGGTLYRITHTNDIVPRLPPREFGYSHSSPEYWIKSGTLVPVTRNDIVKIEGIDATGGNNQPNIPDIPAHLWYFGLIGTCL

SEQ ID NO: 4875 - protein, 269 aa, Thermomyces lanuginosus
EVSQDLFNQFNLFAQYSAAAYCGKNNDAPAGTNITCTGNACPEVEKADATFLYSFEDSGVGDVTGFLALDNTNKLIVLSFRGSRSIENWIGNLNFDLKEINDICSGCRGHDGFTSSWRSVADTLRQKVEDAVREHPDYRVVFTGHSLGGALATVAGADLRGNGYDIDVFSYGAPRVGNRAFAEFLTVQTGGTLYRITHTNDMVPRLPPREFGYSHSSPEYWIKSGTLVPVRRRDIVKIEGIDATGGNNQPNIPDIPAHLWYFGLIGTCL

SEQ ID NO: 4876 - protein, 269 aa, Thermomyces lanuginosus
EVSQDLFNQFNLFAQYSAAAYCGKNNDAPAGTNITCTGNACPEVEKADATFLYSFEDSGVGDVTGFLALDNTNKLIVLSFRGSRSIENWIGNLNFXLKEINDICSGCRGHDGFTSSWRSVADTLRQKVEDAVREHPDYRVVFTGHSLGGALATVAGADLRGNGYDIDVFSYGAPRVGNRAFAEFLTVQTGGTLYRITHTNDIVPRLPPXEFGYSHSSPEYWIKSGTLVPVTRNDIVKIEGIDATGGNNKPNIPDIPAHLWYFGLIGTCL

SEQ ID NO: 4877 - protein, 269 aa, Thermomyces lanuginosus
EVSQDLFNQFNLFAQYSAAAYCGKNNDAPAGTNITCTGNACPEVEKADATFLYSFEDSGVGDVTGFLALDNTNKLIVLSFRGSRSIENWIGNLNFDLKEINDICSGCRGHDGFTSSWRSVADTLRQKVEDAVREHPDYRVVFTGHSLGGALATVAGADLRGNGYDIDVFSYGAPRVGNRAFAEFLTVQTGGTLYRITATNDIVPRLPPREFGYSHSSPEYWIKSGTLVPVRRRDIVKIEGIDATGGNNQPNIPDIPAHLWYFGLIGTCL

SEQ ID NO: 4878 - protein, 269 aa, Thermomyces lanuginosus
EVSQDLFNQFNLFAQYSAAAYCGKNNDAPAGTNITCTGNACPEVEKADATFLYSFEDSGVGDVTGFLALDNTNKLIVLSFRGSRSIENWIGNLHFDLKEINDICSGCRGHDGFTSSWRSVADTLRQKVEDAVREHPDYRVVFTGHSLGGALATVAGADLRGNGYDIDVFSYGAPRVGNRAFAEFLTVQTGGTLYRITHTNDIVPRLPPXEFGYSHSSPEYWIKSGTLVPVTRNDIVKIEGIDATGGNNRPNIPDIPAHLWYFGLIGTCL

SEQ ID NO: 4879 - protein, 269 aa, Thermomyces lanuginosus
EVSQDLFNFFNLFAQYSAAAYCGKNNDAPAGTNITCTGNACPEVEKADATFLYSFEDSGVGDVTGFLALDNTNKLIVLSFRGSRSIENWIGNLNFDLKEINDICSGCRGHDGFTSSWRSVADTLRQKVEDAVREHPDYRVVFTGHSLGGALATVAGADLRGNGYDIDVFSYGAPRVGNRAFAEFLTVQTGGTLYRITHTNDIVPRLPPREFGYSHSSPEYWIKSGTLVPVTRQDIVKIEGIDATGGNNQPNIPDITAHLWYFGLIGTCL

SEQ ID NO: 4880 - protein, 269 aa, Thermomyces lanuginosus
EVSQDLFNQFNLFAQYSAAAYCGKNNDAPAGTNITCTGNACPEVEKADATFLYSFEDSGVGDVTGFLALDNTNKLIVLSFRGSRSIENWIGNLNFDLKEINDICSGCRGHDGFTSSWRSVADTLRQKVEDAVREHPDYRVVFTGHSLGGALATVAGADLRGNGYDIDVFSYGAPRVGNRAFAEFLTVQTGGTLYRITHTNDIVPRLPPREFGYSHSSPEYWIKSGTLVPHRRRDIVKIEGIDATGGNNQPNIPDIPAHLWYFGLIGTCL

SEQ ID NO: 4881 - protein, 269 aa, Thermomyces lanuginosus
EVSQDLFNQFNLFAQYSAAAYCGKNNDAPAGTNITCTGNACPEVEKADATFLYSFEDSGVGDVTGFLALDNTNKLIVLSFRGSRSIENWIGNLNFDLKEINDICSGCRGHDGFTSSWRSVADTLRQKVEDAVREHPDYRVVFTGHSLGGALATVAGADLRGNGYDIDVFSYGAPRVGNRAFAEFLTVQTGGTLYRITHTNDLVPRLPPREFGYSHSSPEYWIKSGTLVPVRRRDIVKIEGIDATGGNNQPNIPDIPAHLWYFGLIGTCL

SEQ ID NO: 4882 - protein, 269 aa, Thermomyces lanuginosus
EVSQDLFNQFNLFAQYSKAAYCGKNNDAPAGTNITCTGNACPEVEKADATFLYSFEDSGVGDVTGFLALDNTRKDIVLSFRGSRSIENWIGNLNFDLKEINDICSGCRGHDGFTSSWRSVADTLRQKVEDAVREHPDYRVVFTGHSLGGALATVAGADLRGNGYDIDVFSYGAPRVGNRAFAEFLTVQTGGTLYRITHTNDIVPRLPPREFGYSHSSPEYWIKSGTLVPVTRNDIVKIEGIDATGGNNQPNIPDIPAHLWYFGLIGTCL

SEQ ID NO: 4883 - protein, 269 aa, Thermomyces lanuginosus
EVSQDLFNQFNLFAQYSAAAYCGKNNDAPAGTNITCTGNACPEVEKADATFLYSFEDSGVGDVTGFLALDNTNKLIVLSFRGSRSIENWIGNLNFDLKEINDICSGCRGHDGFTSSWRSVADTLRQKVEDAVREHPDYRVVFTGHSLGGALATVAGADLRGNGYDIDVFSYGAPRVGNRAFAEFLTVQTGGTLYRITDTNDIVPRLPPREFGYSHSSPEYWIKSGTLVPVRRRDIVKIEGIDATGGNNQPNIPDIPAHLWYFGLIGTCL

SEQ ID NO: 4884 - protein, 269 aa, Thermomyces lanuginosus
EVSQDLFNQFNLFAQYSAAAYCGKNNDAPAGTNITCTGNACPEVEKADATFLYSFEDSGVGDVTGFLALDNTNKLIVLSFRGSRSIENWIGNLNFDLKEINDICSGCRGHDGFTSSWRSVADTLRQKVEDAVREHPDYRVVFTGHSLGGALATVAGADLRGNGYDIDVFSYGAPRVGNRAFAEFLTVQTGGTLYRITHTNDIVPRLPPREFGYSHSSPEYWIKSGTLVPVRRRDIVKIEGIDATGGNNQPNIPDIPAHLQYFGLIGTCL

SEQ ID NO: 4885 - protein, 269 aa, Thermomyces lanuginosus
EVSQDLFNQFNLFAQYSKAAYCGKNNDAPAGTNITCTGNACPEVEKADATFLYSFEDSGVGDVTGFLALDNTNKLIVLSFRGSRSIENWIGNLNFDLKEINDICSGCRGHDGFTSSWRSVADTLRQKVEDAVREHPDYRVVFTGHSLGGALATIAWADLRGNGYDIDVFSYGAPRVGNRAFAEFLTVQTGGTLYRITHTNDIVPRLPPREFGYSHSSPEYWIKSGTLVPVTRNDIVKIEGIDATGGNNQPNIPDIPAHLWYFGLIGTCL

SEQ ID NO: 4886 - protein, 269 aa, Thermomyces lanuginosus
EVSQDLFNQFNLFAQYSAAAYCGKNNDAPAGTNITCTGNACPEVEKADATYLYSFEDSGVGDVTGFLALDNTNKLIVLSFRGSRSIENWIGNLNFDLKEINDICSGCRGHDGFTSSWRSVADTLRQKVEDAVREHPDYRVVFTGHSLGGALATVAGADLRGNGYDIDVFSYGAPRVGNRAFAEFLTVQTGGTLYRITHTNDIVPRLPPREFGYSHSSPEYWIKSGTLVPVRRRDIVKIEGIDATGGNNQPNIPDIPAHLWYFGLIGTCL

SEQ ID NO: 4887 - protein, 269 aa, Thermomyces lanuginosus
EVSQDLHNQFNLFAQYSAAAYCGKNNDAPAGTNITCTGNACPEVEKADATFLYSFEDSGVGDVTGFLALDNTNKLIVLSFRGSRSIENWIGNLNFDLKEINDICSGCRGHDGFTSSWRSVADTLRQKVEDAVREHPDYRVVFTGHSLGGALATVAGADLRGNGYDIDVFSYGAPRVGNRAFAEFLTVQTGGTLYRITHTNDIVPRLPPREFGYSHSSPEYWIKSGTLVPVRRRDIVKIEGIDATGGNNQPNIPDIPAHLWYFGLIGTCL

SEQ ID NO: 4888 - protein, 269 aa, Thermomyces lanuginosus
EVSQDLFNQFNLFAQYSAAAYCGKNNDAPAGTNITCTGNACPEVEKADATFLYSFEDSGVGDVTGFLALDNTNKLIVLSFRGSRSIENWIGNLNFDLKEINDICSGCRGHDGFTSSWRSVADTLRQKVEDAVREHPDYRVVFTGHSLGGALATVAGADLRGNGYDIDVFSYGAPRVGNRAFAEFLTVQTGGTLYRITYTNDIVPRLPPREFGYSHSSPEYWIKSGTLVPVRRRDIVKIEGIDATGGNNQPNIPDIPAHLWYFGLIGTCL

SEQ ID NO: 4889 - protein, 269 aa, Thermomyces lanuginosus
EVSQDLFNQFNLFAQYSAAAYCQKNNDAPAGTNITCTGNACPEVEKADATFLYSFEDSGVGDVTGFLALDNTNKLIVLSFRGSRSIENWIGNLNFDLKEINDICSGCRGHAGFTSSWRSVADTLRQKVEDAVREHPDYRVVFTGHSLGGALATVAGADLRGNGYDIDVFSYGAPRVGNRAFAEFLTVQTGGTLYRITHTNDIVPRLPPREFGYSHSSPEYWIKSGTLVPVTRNDIVKIEGIDATGGNNQPNIPDIPAHLWYFGRIGTCL

SEQ ID NO: 4890 - protein, 269 aa, Thermomyces lanuginosus
EVSQDLFNQFNLFAQYSAAAYCGKNNDAPAGTNITCTGNACPEVEKADATFLYSFEDSGVGDVTGFLALDNTNKLIVLSFRGSRSIENWIANLNFWLKKINDICSGCRGHDGFTSSWRSVADTLRQKVEDAVREHPDYRVVFTGHSLGGALATVAGADLRGNGYDIDVFSYGAPRVGNRAFAEFLTVQTGGTLYRITHTNDIVPRLPPREFGYSHSSPEYWIKSGTLVPVTRNDIVKIEGIDATGGNNQPNIPDIPAHLWYFGLIGTCL

SEQ ID NO: 4891 - protein, 269 aa, Thermomyces lanuginosus
EVSQDLFNQFNLFAQYSAAAYCGKNNDAEAGTNITCTGNACPEVFKADATFLYSFEDSGVGDVTGFLALDNTNKDIVLSFRGSRSIENWIGNLNFDLKEINDICSGCRGHDGFTSSWRSVADTLRQKVEDAVREHPDYRVVFTGHSLGGALATVAGADLRGNGYDIDVFSYGAPRVGNRAFAEFLTVQTGGTLYRITHTNDIVPRLPPREFGYSHSSPEYWIKSGTLVPVTRNDIVKIEGIDATGGNNQPNIPDIPAHLWYFGLIGTCL

SEQ ID NO: 4892 - protein, 269 aa, Synthetic construct
EVSQDLFNQFNLFAQYSAAAYCGKNNDAPAGTNITCTGNACPEVEKADATFLYSFEDSGVGDVTGFLALDNTNKLIVLSFRGSRSIENWISNVNCDLKEINDICSGCRGHDGFTSSWRSVADTLRQKVEDAVREHPDYRVVFTGHSLGGALATVAGADLRGNGYDIDVFSYGAPRVGNRAFAEFLTVQTGGTLYRITHTNDIVPRLPPREFGYSHSSPEYWIKSGTLVPVTRNDIVKIEGIDATGGNNQPNIPDIPAHLWYFGLIGTCL

SEQ ID NO: 4893 - protein, 269 aa, Synthetic construct
EVSQDLFNQFNLFAQYSAAAYCGKNNDAPAGTNITCTGNACPEVEKADATFLYSFEDSGVGDVTGFLALDNTNKLIVLSFRGSRSIENWIGNLNFDLKEINDICSGCRGHDGFTSSWRSVVDTLRQKVEDAVREHPDYRVVFTGHSLGGALATVAGADLRGNGYDIDVFSYGAPRVGNRAFAEFLTVQTGGTLYRITHTNDIVPKLPPRQFGYSHSSPEYWIKSGTLVPVTRNDIVKIEGIDATGGNNQPNIPDIPAHLWYFGLIGTCL

SEQ ID NO: 4894 - protein, 269 aa, Thermomyces lanuginosus
EVSQDLFNQFNLFAQYSAAAYCGKNNDAPAGTNITCTGNACPEVEKADATFLYSFEDSGVGDVTGFLALDNTNKLIVLSFRGSRSIENWIGNLKFDLKEINDICSGCRGHDGFTSSWRSVADTLRQKVEDAVREHPDYRVVFTGHSLGGALATVAGADLRGNGYDIDVFSYGAPRVGNRAFAEFLTVQTGGTLYRITHTNDIVPRLPPXEFGYSHSSPEYWIKSGTLVPVTRNDIVKIEGIDATGGNNHPNIPDIPAHLWYFGLIGTCL

SEQ ID NO: 4895 - protein, 269 aa, Thermomyces lanuginosus
EVSQDLFNQFNLFAQYSAAAYCGKNNDAPAGTNITCTGNACPEVEKADATFLYSFEDSGVGDVTGFLALDNTNKLIVLSFRGSRSGENWIGNLNFDLKEINDICSGCRGHDGFTSSWRSVADTLRQKVEDAVREHPDYRVVFTGHSLGGALATVAGADLRGNGYDIDVFSYGAPRVGNRAFAEFLTVQTGGTLYRITHTNDIVPRLPPREFGYSHSSPEYWIKSGTLVPVRRRDIVKIEGIDATGGNNQPNIPDIPAHLWYFGLIGTCL

SEQ ID NO: 4896 - protein, 269 aa, Thermomyces lanuginosus
EVSQDLFNQFNLFAQYSAAAYCGKNNDAPAGTNITCTGNACPEVEKADATFLYSFEDSGVGDVTGFLALDNTNKLIVLSFRGSRSIENWIGNLNFDLKEINDICSGCRGHDGFTSSWRSVADTLRQKVEDAVREHPDYRVVFTGHSLGGALATVAGADLRGNGYDIDVFSYGAPRVGNRAFAEFLTVQTGGTLYRITGTNDIVPRLPPREFGYSHSSPEYWIKSGTLVPVRRRDIVKIEGIDATGGNNQPNIPDIPAHLWYFGLIGTCL

SEQ ID NO: 4897 - protein, 269 aa, Thermomyces lanuginosus
EVSQDLFNQFNLFAQYSAAAYCGKNNDAPAGTNITCTGNACPEVEKADATFLYSFEDSGVGDVTGFLALDNTNKLIVLSFRGSRSIENWITNLNFDLKEINRICRGCRGHDGFTSSWRSVADTLRQKVEDAVREHPDYRVVFTGHSLGGALATVAGADLRGNGYDIDVFSYGAPRVGNRAFAEFLTVQTGGTLYRITHTNDIVPRLPPREFGYSHSSPEYWIKSGTLVPVTRNDIVKIEGIDATGGNNQPNIPDIPAHLWYFGLIGTCL

SEQ ID NO: 4898 - protein, 269 aa, Thermomyces lanuginosus
EVSQDLFNQFNLFAQYSAAAYCQKNNDAPAGTNITCTGNACPEVEKADATFLYSFEDSGVGDVTGFLALDNTNKQIILSFRGSRSIENWIGNLNFDLKEINDICSGCRGHDGFTSSWRSVADTLRQKVEDAVREHPDYRVVFTGHSLGGALATVAGADLRGNGYDIDVFSYGAPRVGNRAFAEFLTVQTGGTLYRITHTNDIVPRLPPREFGYSHSSPEYWIKSGTLVPVTRNDIVKIEGIDATGGNNQPNIPDIPAHLWYFGLIGTCL

SEQ ID NO: 4899 - protein, 269 aa, Thermomyces lanuginosus
EVSQDLFNQFNLFAQYSAAAYCGKNNDAPAGTNITCTGNACPEVEKADATFLYSFEDSGVGDVTGFLALDNTNKLIVLSFRGSRSIENWITNLNFDLKEINDICSRCRGHDGFTSSWRSVADTLRQKVEDAVREHPDYRVVFTGHSLGGALATVAGADLRGNGYDIDVFSYGAPRVGNRRFAEFLTVQTGGTLYRITHTNDIVPRLPPREFGYSHSSPEYWIKSGTLVPVTRNDIVKIEGIDATGGNNQPNIPDIPAHLWYFGLIGTCL

SEQ ID NO: 4900 - protein, 269 aa, Thermomyces lanuginosus
EVSQDLFNQFNLFAQYSAAAYCKKNNDAPAGTNITCTGNACPEVEKADATFLYSFEDSGVGDVTGFLALDNTNKLIVLSFRGSRSIENWIGNLNFDLKEINDICSGCRGHDGFTSSWRSVADTLRQKVEDAVREHPDYRVVFTGHSLGGALATVAGADLRGNGYDIDVFSYGAPRVGNRAFAEFLTNQTGGTLYRITHTNDIVPRLPPREFGYSHSSPEYWIKSGTLVPVTRNDIVKIEGIDATGGNNQPNIPDIPAHLWYFGRIGTCL

SEQ ID NO: 4901 - protein, 269 aa, Thermomyces lanuginosus
EVSQDLFNQFNLFAQYSAAAYCGKNNDAPAGTNITCTGNACPEVEKADATFLYSFEDSGVGDVTGFLALDNTNKLIVLSFRGSRSIENWIGNLNFDLKRINDICSGCRGHDGFTSSWRSVADTLRQKVEDAVREHPDYRVVFTGHSLGGALATVAGADLRGNGYDIDVFSYGAPRVGNRAFAEFLTVQTGGTLYRITHTNDIVPRLPPXEFGYSHSSPEYWIKSGTLVPVTRNDIVKIEGIDATGGNNRPNIPDIPAHLWYFGLIGTCL

SEQ ID NO: 4902 - protein, 269 aa, Thermomyces lanuginosus
EVSQDLFNQFNLFAQYSAAAYCGKNNDAPAGTNITCTGNACPEVEKADATFLYSFEDSGVGDVTGFLALDNTNKLIVLSFRGSRSIENWIGNLNFDLKEINDICSGCRGHDGFTSSWRSVADTLRQKVEDAVREHPDYRVVFTGHSLGGALATVAGADLRGNGYDIDVFSYGAPRVGNRAFAEFLTVQTGGTLYRITHTNDIVPRLPPREFGYSHSSPEYWIKSGTLVPVRRRDIVKIEGIDATGGNNQPNINDIPAHLWYFGLIGTCL

SEQ ID NO: 4903 - protein, 269 aa, Thermomyces lanuginosus
EVSQDLFNQFNLFAQYSAAAYCGKNNDAPAGTNITCTGNACPEVEKADATFLYSFEDSGVGDVTGFLALDNTNKQIVLSFRGSRSIENWIGNLNFDLKEINDICSGCRGHDGFTSSWRSVADTLRQKVEDAVREHPDYRVVFTGHSLGGALATVAGADLRGNGYDIDVFSYGAPRVGNRAFAEFLTTQTGGTLYRITHTNDIVPRLPPREFGYSHSSPEYWIKSGTLVPVTRNDIVKIEGIDATGGNNQPNIPDIPAHLWYFGRIGTCL

SEQ ID NO: 4904 - protein, 269 aa, Thermomyces lanuginosus
EVSQDLFNQFNLFAQYSAAAYCGKNNDAPAGTNITCTGNACPEVEKADATFLYSFKDSGVGDVTGFLALDNTNKLIVLSFRGSRSIENWIGNLNFDLKEINDICSGCRGHDGFTSSWRSVADTLRQKVEAAVREHPDYRVVFTGHSLGGALATVAGADLRGNGYDIDVFSYGAPRVGNRAFAEFLTVQTGGTLYRITHTNDIVPRLPPREFGYSHSSPEYWIKSGTLVPVTRNDIVKIEGIDATGGNNQPNIPDIPAHLWYFGRIGTCL

SEQ ID NO: 4905 - protein, 269 aa, Thermomyces lanuginosus
EVSQDLFNQFNLFAQYSAAAYCGKNNSAPAGTNITCTGNACPEVEKADATFLYSFEDSGVGDVTGFLALDNTNKLIVLSFRGSRSIENWIGNLNFDLKEINDICSGCRGHDGFTSSWRSVADTLRQKVEDAVREHPDYRVVFTGHSLGGALATVAGADLRGNGYDIDVFSYGAPRVGNRAFAEFLTVQTGGTLYRITHTNDIVPRLPPREFGYSHSSPEYWIKSGTLVPVTRQDIVKIEGIDATGGNNQPNIPDITAHLWYFGLIGTCL

SEQ ID NO: 4906 - protein, 269 aa, Thermomyces lanuginosus
EVSQDLFNQFNLFAQYSAAAYCGKNNDAPAGTNITCTGNACPEVEKADATFLYSFEDSGVGDVTGFLALDNTNKLIVLSFRGSRSIENWIGNLNFELKEINDICSGCRGHDGFTSSWRSVADTLRQKVEDAVREHPDYRVVFTGHSLGGALATVAGADLRGNGYDIDVFSYGAPRVGNRAFAEFLTVQTGGTLYRITHTNDIVPRLPPREFGYSHSSPEYWIKSGTLVPVRRRDIVKIEGIDATGGNNQPNIPDIPAHLWYFGLIGTCL

SEQ ID NO: 4907 - protein, 269 aa, Thermomyces lanuginosus
EVSQDLFNQFNLFAQYSAAAYCGKNNDAPAGTNITCTGNACPEVEKADATFLYSFEDSGVGDVTGFLALDNTNKLIVLSFRGSRSIENWIGNLNFDLKEINDICSGCRGHDGFTSSWRSVADTLRQKVEDAVREHPDYRVVFTGHSLGGALATVAGADLRGNGYDIDVFSYGAPRVGNRAFAEFLTVQTGGTLYRITHTNDIVPRLPPREFGYSHSSPEYWIKSGTDVPVRRRDIVKIEGIDATGGNNQPNIPDIPAHLWYFGLIGTCL

SEQ ID NO: 4908 - protein, 269 aa, Thermomyces lanuginosus
EVSQDLFNQFNLFAQYSAAAYCGKNNDAPAGTNITCTGNACPEVEKADATFLYSFEDSGVGDVTGFLALDNTNKLIVLSFRGSRSIENWIGNLNYDLKEINDICSGCRGHDGFTSSWRSVADTLRQKVEDAVREHPDYRVVFTGHSLGGALATVAGADLRGNGYDIDVFSYGAPRVGNRAFAEFLTVQTGGTLYRITHTNDIVPRLPPREEGYSHSSPEYWIKSGTLVPVTRNDIVKIEGIDATGGNNQPNIPDNPAHLWYFGLIGTCL

SEQ ID NO: 4909 - protein, 269 aa, Thermomyces lanuginosus
EVSQDLFNQFNLFAQYSAAAYCGKNNDAPAGTNITCTGNACPEVEKADATFLYSFEDSGVGDVTGFLALDNTNKLIVLSFRGSRSIENWIGNLNFDLKKINDICSGCRGHDGFTSSWRSVADTLRQKVEDAVREHPDYRVVFTGHSLGGALATVAGADLRGNGYDIDVFSYGAPRVGNRAFAEFLTVQTGGTLYRITHTNDIVPRLPPXEFGYSHSSPEYWIKSGTLVPVTRNDIVKIEGIDATGGNNHPNIPDIPAHLWYFGLIGTCL

SEQ ID NO: 4910 - protein, 269 aa, Thermomyces lanuginosus
EVSQDLFNQFNLFAQYSAAAYCGKNNSAPAGTDITCTGNACPEVEKADATFLYSFEDSGVGDVTGFLALDNTNKLIVLSFRGSRSIENWIGNLNFDLKEINDICSGCRGHDGFTSSWRSVADTLRQKVEDAVREHPDYRVVFTGHSLGGALATVAGADLRGNGYDIDVFSYGAPRVGNRAFAEFLTVQDGGTLYRITHTNDIVPRLPPREFGYSHSSPEYWIKSGTLVPVTRNDIVKIEGIDATGGNNQPNIPDIPAHLWYFGLIGTCL

SEQ ID NO: 4911 - protein, 269 aa, Thermomyces lanuginosus
EVSQDLFNQFNLFAQYSAAAYCGKNNDAPAGTNITCTGNACPEVEKADATFLYSFEDSGVGDVTGFLALDNTNKLIVLSFRGSRSIENWIGNLNFDLKEINDICSGCRGHDGFTSSWRSVADTLRQKVEAAVREHPDYRVVFTGHSLGGALATVAGADLRGNGYDIDVFSYGAPRVGNRAFAEFLTVQQGGTLYRITHTNDIVPRLPPREFGYSHSSPEYWIKSGTLVPVTRNDIVKIEGIDATGGNNQPNIPDIPAHLWYFGRIGTCL

SEQ ID NO: 4912 - protein, 269 aa, Synthetic construct
EVSQDLFNQFNLFAQYSAAAYCGKNNDAPAGTNITCTGNACPEVERADATFLYSFRDSSVGDVTGFLALDNTNKLIVLSFRGSRSIENWIGNLNFDLKEINDICSGCRGHDGFTSSWRSVADTLRQKVEDAVREHPDYRVVFTGHSLGGALATVAGADLRGNGYDIDVFSYGAPRVGNRAFAEFLTVQTGGTLYRITHTNDIVPRLPPREFGYSHSSPEYWIKSGTLVPVTRNDIVKIEGIDATGGNNQPNIPDIPAHLWYFGLIGTCL

SEQ ID NO: 4913 - protein, 269 aa, Thermomyces lanuginosus
EVSDDLFNQFNLFAQYSAAAYCGKNNSAPAGTNITCTGNACPEVEKADATFLYSFEDSGVGDVTGFLALDNTNKLIVLSFRGSRSIENWIGNLNFDLKEINDICSGCRGHDGFTSSWRSVADTLRQKVEDAVREHPDYRVVFTGHSLGGALATVAGADLRGNGYDIDVFSYGAPRVGNRAFAEFLTVQTGGTLYRITHTNDIVPRLPPREFGYSHSSPEYWIKSGTLVPVTRNDIVKIEGIDATGGNNQPNIPDITAHLWYFGLIGTCL

SEQ ID NO: 4914 - protein, 269 aa, Thermomyces lanuginosus
EVSQDLFNQFNLFAQYSKAAYCGKNNSAPAGTNITCTGNACPEVFKADATFLYSFEDSGVGDVTGFLALDNTNKLIVLSFRGSRSIENWIGNLNFDLKEINDICSGCRGHDGFTSSWRSVADTLRQKVEDAVREHPDYRVVFTGHSLGGALATVAGADLRGNGYDIDVFSYGAPRVGNRAFAEFLTVQTGGTLYRITHTNDIVPRLPPREFGYSHSSPEYWIKSGTLVPVTRNDIVKIEGIDATGGNNQPNIPDIPAHLWYFGLIGTCL

SEQ ID NO: 4915 - protein, 269 aa, Synthetic construct
EVSQDLFNQFNLFAQYSAAAYCGKNNDAPAGTNITCTGNACPEVEKADATFLYSFEDSGVGDVTGFLALDNTNKLIVLSFRGTRSIKNWIGNLNFDLKEINDICSGCRGHDGFTSSWRSVADTLRQKVEDAVREHPDYRVVFTGHSLGGALATVAGADLRGNGYDIDVFSYGAPRVGNRAFAEFLTVQTGGTLYRITHTNDIVPRLPPREFGYSHSSPEYWIKSGTLVPVTRNDIVKIEGIDATGGNNRPNIPDIPAHLWYFGLIGTCL

SEQ ID NO: 4916 - protein, 269 aa, Thermomyces lanuginosus
EVSQDLFNQFNLFAQYSAAAYCQKNNDAPAGTNITCTGNACPEVFKADATFLYSFEDSGVGDVTGFLALDNTNKLIILSFRGSRSIENWIGNLNFDLKEINDICSGCRGHDGFTSSWRSVADTLRQKVEDAVREHPDYRVVFTGHSLGGALATVAGADLRGNGYDIDVFSYGAPRVGNRAFAEFLTVQTGGTLYRITHTNDIVPRLPPREFGYSHSSPEYWIKSGTLVPVTRNDIVKIEGIDATGGNNQPNIPDIPAHLWYFGLIGTCL

SEQ ID NO: 4917 - protein, 269 aa, Synthetic construct
EVSQDLFNQFNLFAQYSAAAYCGKNNDAPAGTNITCTGNACPEVEKADATFLYSFEDSGVGDVTGFLALDNTNKLIVLSFRGSRSIKNWIANLNFALKEINDICSGCRGHDGFTSSWRSVADTLRQKVEDAVREHPDYRVVFTGHSLGGALATVAGADLRGNGYDIDVFSYGAPRVGNRAFAEFLTVQTGGTLYRITHTNDIVPRLPPREFGYSHSSPEYWIKSGTLVPVTRNDIVKIEGIDATGGNNQPNIPDIPAHLWYFGLIGTCL

SEQ ID NO: 4918 - protein, 269 aa, Thermomyces lanuginosus
EVSQDLFNQFNLFAQYSAAAYCGKNNNAPAGTNITCTGNACPEVEKADATFLYSFEDMGVGDVTGFLALDNTNKLIVLSFRGSRSIENWIGNLNFDLKEINDICSGCRGHDGFTSSWRSVADTLRQKVEDAVREHPDYRVVFTGHSLGGALATVAGADLRGNGYDIDVFSYGAPRVGNRAFAEFLTVQTGGTLYRITHTNDIVPRLPPREFGYSHSSPEYWIKSGTLVPVTRNDIVKIEGIDATGGNNQPNIPDITAHLWYFGLIGTCL

SEQ ID NO: 4919 - protein, 269 aa, Thermomyces lanuginosus
EVSQDLFNQFNLFAQYSAAAYCGKNNXAPAGTNITCTGNACPEVEKADATFLYSFEDXGXGDVTGFLALDNTNKLIVLSFRGSRSIENWIGNLNFDLKEINDICSGCRGHDGFTSSWRSVADTLRQKVEDAVREHPDYRVVFTGHSLGGALATVAGADLRGNGYDIDVFSYGAPRVGNRAFAEFLTVQTGGTLYRITHTNDIVPRLPPREFGYSHSSPEYWIKSGTLVPVTRNDIVKIEGIDATGGNNQPNIPDIPAHLWYFGLIGTCL

SEQ ID NO: 4920 - protein, 269 aa, Thermomyces lanuginosus
EVSQDLFNQFNLFAQYSAAAYCGKNNDAPAGTNITCTGNACPEVEKADATFLYSFEDSGVGDVTGFLALDNTNKLIVLSFRGSRSIENWIGNLNFDLKEINDICSGCRGHDGFTSSWRSVADTLRQKVEDAVREHPDYRVVFTGHSLGGALATVAGADLRGNGYDIDVFSYGAPRVGNRAFAEFLTVQTGGTLYRITHTNDIVPRLPPREFGYSHSSPEYWIKSGTLVPVRRRDIVKIEGIDATGGNNQPNIPDSPAHLWYFGLIGTCL

SEQ ID NO: 4921 - protein, 269 aa, Thermomyces lanuginosus
EVSQDLFNQFNLFAQYSAAAYCGKNNDAPAGTNITCTGNACPEVEKADATFLYSFEDSGVGDVTGFLALDNTNKLIVLSFRGSRSIENWIGNLNFDLKEINDICSGCRGHDGFTSSWRSVADTLRQKVEDAVREHPDYRVVFTGHSLGGALATVAGADLRGNGYDIDVFSYGAPRVGNRAFAEFLTVQTGGTLYRITHTNDIVPRLPPREFGYSHSSPEYWIKSGTLVPVRRRDIVKIEGIDATGGNNQPNIPDIPIHLWYFGLIGTCL

SEQ ID NO: 4922 - protein, 269 aa, Thermomyces lanuginosus
EVSQDLFNQFNLFAQYSAAAYCGKNNDAPAGTNITCTGNACPEVEKADATFLYSFEDSGVGDVTGFLALDNTNKQIVLSFRGSRSIENWIGNLRFDLKEINDICSGCRGHDGFTSSWRSVADTLRQKVEDAVREHPDYRVVFTGHSLGGALATIAGADLRGNGYDIDVFSYGAPRVGNRAFAEFLTVQTGGTLYRITHTNDIVPRLPPREFGYSHSSPEYWIKSGTLVPVTRNDIVKIEGIDATGGNNQPNIPDIPAHLWYFGLIGTCL

SEQ ID NO: 4923 - protein, 269 aa, Thermomyces lanuginosus
EVSQDLFNQFNLFAQYSAAAYCGKNNDAPAGTNITCTGNACPEVEKADATFLYSFKDSGVGDVTGFLALDNTNKLIVLSFRGSRSIENWIGNLNFDLKEINDICSGCRGHDGFTSSWRSVADTLRQKVEAAVREHPDYRVVFTGHSLGGALATVAGADLRGNGYDIDVFSYGAPRVGNRAFAEFLTVQQGGTLYRITHTNDIVPRLPPREFGYSHSSPEYWIKSGTLVPVTRNDIVKIEGIDATGGNNQPNIPDIPAHLWYFGLIGTCL

SEQ ID NO: 4924 - protein, 269 aa, Thermomyces lanuginosus
EVSQDLFNQFNLFAQYSAAAYCGKNNDAPAGTNITCTGNACPEVEKADATFLYSFEDSGVGDVTGFLALDNTNKLIVLSFRGSRSIENWIGNLKFDLKEINDICSGCRGHDGFTSSWRSVADTLRQKVEDAVREHPDYRVVFTGHSLGGALATVAGADLRGNGYDIDVFSYGAPRVGNRAFAEFLTVQTGGTLYRITHTNDIVPRLPPXEFGYSHSSPEYWIKSGTLVPVTRNDIVKIEGIDATGGNNRPNIPDIPAHLWYFGLIGTCL

SEQ ID NO: 4925 - protein, 269 aa, Thermomyces lanuginosus
EVSQDLFNQFNLFAQYSAAAYCGKNNDAPAGTNITCTGNACPEVEKADATFLYSFEDSGVGDVTGFLALDNTNKQIVLSFRGSRSIENWIGNLNFDLKEINDICSGCRGHAGFTSSWRSVADTLRQKVEAAVREHPDYRVVFTGHSLGGALATVAGADLRGNGYDIDVFSYGAPRVGNRAFAEFLTVQTGGTLYRITHTNDIVPRLPPREFGYSHSSPEYWIKSGTLVPVTRNDIVKIEGIDATGGNNQPNIPDIPAHLWYFGLIGTCL

SEQ ID NO: 4926 - protein, 269 aa, Thermomyces lanuginosus
EVSQDLFNQFNLFAQYSAAAYCGKNNDAPAGTNITCTGNACPEVEKADATFLYSFEDSGVGDVTGFLALDNTNKLIVLSFRGSRSIENWIGNLNFDLKEINDICSGCRGHDGFTSSWRSVADTLRQKVEDAVREHPDYRVVFTGHSLGGALATVAGADLRGNGYDIDVFSYGAPRVGNRAFAEFLTVQTGGTLYRITHTNDIVPRLPPPEFGYSHSSPEYWIKSGTLVPVRRRDIVKIEGIDATGGNNQPNIPDIPAHLWYFGLIGTCL

SEQ ID NO: 4927 - protein, 269 aa, Thermomyces lanuginosus
EVSQDLFNQFNLFAQYSAAAYCGKNNSAPAGTNITCTGNACPEVEKADATFLYSFEDSGVGDVTGFLALDNTNKQIVLSFRGSRSIENWIQNLNFDLKEINDICSGCRGHDGFTSSWRSVADTLRQKVEDAVREHPDYRVVFTGHSLGGALATVAGADLRGNGYDIDVFSYGAPRVGNRAFAEFLTVQTGGTLYRITHTNDIVPRLPPREFGYSHSSPEYWIKSGTLVPVTRNDIVKIEGIDATGGNNQPNIPDIPAHLWYFGLIGTCL

SEQ ID NO: 4928 - protein, 269 aa, Thermomyces lanuginosus
EVSQDLFNQFNLFAQYSAAAYCKKNNDAPAGTNITCTGNACPEVEKADATFLYSFEDSGVGDVTGFLALDNTNKLIVLSFRGSRSIENWIGNLNFDLKEINDICSGCRGHDGFTSSWRSVADTLRQKVEAAVREHPDYRVVFTGHSLGGALATVAGADLRGNGYDIDVFSYGAPRVGNRAFAEFLTTQTGGTLYRITHTNDIVPRLPPREFGYSHSSPEYWIKSGTLVPVTRNDIVKIEGIDATGGNNQPNIPDIPAHLWYFGLIGTCL

SEQ ID NO: 4929 - protein, 269 aa, Thermomyces lanuginosus
EVSQDLFNQFNLFAQYSAAAYCGKNNDAPAGTNITCTGNACPEVEKADATFLYSFEDSGVGDVTGFLALDNTNKLIVLSFRGSRSIENWIGNLNFDLKEINDICSGCRGHDGFTSSWRSVADTLRQKVEDAVREHPDYRVVFTGHSLGGALATVAGADLRGNGYDIDVFSYGAPRVGNRAFAEFLTVQTGGTLYRITHTNDIVPRLPPREFGYSHSSPEYWIKSGTLVPVRRRDIVKIEGIDATGGNNQPNIPDIWAHLWYFGLIGTCL

SEQ ID NO: 4930 - protein, 269 aa, Thermomyces lanuginosus
EVSQDLFNQFNLFAQYSAAAYCGANNDAPAGTNITCTGNACPEVEKADATFLYSFEDSGVGDVTGFLALDNTNKQIILSFRGSRSIENWIGNLNFDLKEINDICSGCRGHDGFTSSWRSVADTLRQKVEDAVREHPDYRVVFTGHSLGGALATVAGADLRGNGYDIDVFSYGAPRVGNRAFAEFLTVQTGGTLYRITHTNDIVPRLPPREFGYSHSSPEYWIKSGTLVPVTRNDIVKIEGIDATGGNNQPNIPDIPAHLWYFGLIGTCL

SEQ ID NO: 4931 - protein, 269 aa, Thermomyces lanuginosus
EVSQDLFNQFNLFAQYSAAAYCGKNNDAPAGTNITCTGNACPEVEKADATFLYSFEDSGVGDVTGFLALDNTNKRIVLSFRGSRSIENWIGNLNFDLKEINDICSGCRGHDGFTSSWRSVADTLRQKVEAAVREHPDYRVVFTGHSLGGALATVAGADLRGNGYDIDVFSYGAPRVGNRAFAEFLTTQTGGTLYRITHTNDIVPRLPPREFGYSHSSPEYWIKSGTLVPVTRNDIVKIEGIDATGGNNQPNIPDIPAHLWYFGLIGTCL

SEQ ID NO: 4932 - protein, 269 aa, Thermomyces lanuginosus
EVSQDLFNQFNLFAQYSAAAYCGKNNDAPAGTNITCTGNACPEVEKADATFLYSFEDSGVGDVTGFLALDNTNKLIVLSFRGSRSIENWIGNLNFDLKEINDICSGCRGHDGFTSSWRSVADTLRQKVEDAVREHPDYRVVFTGHSLGGALATVAGADLRGNGYDIDVFSYGAPRVGNRAFAEFLTVQTGGTLYRITHTNDIVPRLPPREFGYSHSSPEFWIKSGTLVPVRRRDIVKIEGIDATGGNNQPNIPDIPAHLWYFGLIGTCL

SEQ ID NO: 4933 - protein, 269 aa, Thermomyces lanuginosus
EVSQDLFNQFNLFAQYSAAAYCGKNNDAPAGTNITCTGNACPEVEKADATFLYSFEDSGVGDVTGFLALDNTNKLIVLSFRGSRSIENWIGNLNFDLKEINDICSGCRGHDGFTSSWRSVADTLRQKVEDAVREHPDYRVVFTGHSLGGALATVAGADLRGNGYDIDVFSYGAPRVGNRAFAEFLTVQTGGTLYRITHTNDIVPRLPPREFGYSHSSPEYWIKSGTLVPVRRRDIVKIEGIDATGGNNQPNIPDNPAHLWYFGLIGTCL

SEQ ID NO: 4934 - protein, 269 aa, Thermomyces lanuginosus
EVSQDLFNQFNLFAQYSAAAYCGKNNDAPAGTDITCTGNACPEVFKADATFLYSFEDSGVGDVTGFLALDNTNKDIVLSFRGSRSIENWIGNLNFDLKEINDICSGCRGHDGFTSSWRSVADTLRQKVEDAVREHPDYRVVFTGHSLGGALATVAGADLRGNGYDIDVFSYGAPRVGNRAFAEFLTVQTGGTLYRITHTNDIVPRLPPREFGYSHSSPEYWIKSGTLVPVTRNDIVKIEGIDATGGNNQPNIPDIPAHLWYFGLIGTCL

SEQ ID NO: 4935 - protein, 269 aa, Thermomyces lanuginosus
EVSQDLFNQFNLFAQYSKAAYCGKNNSAPAGTNITCTGNACPEVEKADATFLYSFEDSGVGDVTGFLALDNTNKLIVLSFRGSRSIENWIGNLNFDLKEINDICSGCRGHDGFTSSWRSVADTLRQKVEDAVREHPDYRVVFTGHSLGGALATVAGADLRGNGYDIDVFSYGAPRVGNRAFAEFLTVQDGGTLYRITHTNDIVPRLPPREFGYSHSSPEYWIKSGTLVPVTRNDIVKIEGIDATGGNNQPNIPDIPAHLWYFGLIGTCL

SEQ ID NO: 4936 - protein, 269 aa, Thermomyces lanuginosus
EVSQDLFNQFNLFAQYSAAAYCGKNNDAPAGTNITCTGNACPEVEKADATFLYSFEDSGVGDVTGFLALDNTNKLIVLSFRGSRSIENWIGNLNFDLKEINDICSGCRGHDGFTSSWRSVADTLRQKVEDAVREHPDYRVVFTGHSLGGALATVAGADLRGNGYDIDVFSYGAPRVGNRAFAEFLTVQTGGTLYRITETNDIVPRLPPREFGYSHSSPEYWIKSGTLVPVRRRDIVKIEGIDATGGNNQPNIPDIPAHLWYFGLIGTCL

SEQ ID NO: 4937 - protein, 269 aa, Thermomyces lanuginosus
EVSDDLFNQFNLFAQYSAAAYCGKNNDAPAGTNITCTGNACPEVEKADATFLYSFEDSGVGDVTGFLALDNTNKLIVLSFRGSRSIENWIGNLNFDLKEINDICSGCRGHDGFTSSWRSVADTLRQKVEDAVREHPDYRVVFTGHSLGGALATVAGADLRGNGYDIDVFSYGAPRVGNRAFAEFLTVQTGGTLYRITHTNDIVPRLPPREFGYSHSSPEYWIKSGTLVPVTRQDIVKIEGIDATGGNNQPNIPDITAHLWYFGLIGTCL

SEQ ID NO: 4938 - protein, 269 aa, Synthetic construct
EVSQDLFNQFNLFAQYSAAAYCGKNNDAPAGTNITCTGNACPEVEKADATFLYSFEDSGVGDVTGFLALDNTNKLIVLSFRGSRSIENWIGNLNFDLKEINDICSGCRGHDGFTSSWRSVADTLRQKVEDAVREHPDYRVVFTGHSLGGALATVAGADLRGNGYDIDVFSYGAPRVGNRAFAEFLTVQTGGTLYRITHTNDIVPRLPPREFGYSHSSPEYWIKSGTLVPVTRNDIVKIEGIDATGGNNQPWIPWIPAHLWYFGLIGWCL

SEQ ID NO: 4939 - protein, 269 aa, Thermomyces lanuginosus
EVSQDLFNQFNLFAQYSAAAYCGKNNDAPAGTNITCTGNACPEVEKADATFLYSFEDMGVGDVTGFLALDNTNKLIVLSFRGSRSIENWIGNLNFDLKEINDICSGCRGHDGFTSSWRSVADTLRQKVEDAVREHPDYRVVFTGHSLGGALATVAGADLRGNGYDIDVFSYGAPRVGNRAFAEFLTVQTGGTLYRITHTNDIVPRLPPREFGYSHSSPEYWIKSGTMVPVTRNDIVKIEGIDATGGNNQPNIPDIPAHLWYFGRIGTCL

SEQ ID NO: 4940 - protein, 269 aa, Thermomyces lanuginosus
EVSQDLFNQFNLFAQYSAAAYCGKNNSAPAGTNITCTGNACPEVEKADATFLYSFEDSGVGDVTGFLALDNTRKDIVLSFRGSRSIENWIGNLNFDLKEINDICSGCRGHDGFTSSWRSVADTLRQKVEDAVREHPDYRVVFTGHSLGGALATVAGADLRGNGYDIDVFSYGAPRVGNRAFAEFLTVQTGGTLYRITHTNDIVPRLPPREFGYSHSSPEYWIKSGTLVPVTRNDIVKIEGIDATGGNNQPNIPDIPAHLWYFGLIGTCL

SEQ ID NO: 4941 - protein, 269 aa, Thermomyces lanuginosus
EVSQDLFNQFNLFAQYSAAAYCGKNNDAPAGTNITCTGNACPEVEKADATFLYSFEDSGVGDVTGFLALDNTNKLIVLSFRGSRSIENWIGNLNFDLKEINDICSGCRGHDGFTSSWRSVADTLRQKVEDAVREHPDYRVVFTGHSLGGALATVAGADLRGNGYDIDVFSYGAPRVGNRAFAEFLTVQTGGTLYRITHTNDIVPRLPPREFGYSHSSPEYWIKSGTLVPVRRRDIVKIEGIDATGGNNQPNIPDIPAHFWYFGLIGTCL

SEQ ID NO: 4942 - protein, 269 aa, Thermomyces lanuginosus
EVSQDLFNQFNLFAQYSAAAYCGKNNDAPAGTNITCTGNACPEVEKADATFLYSFEDSGVGDVTGFLALDNTNKLIVLSFRGSRSIENWIGNLNFDLKEINDICSGCRGHDGFTSSWRSVADTLRQKVEDAVREHPDYRVVFTGHSLGGALATVAGADLRGNGYDIDVFSYGAPRVGNRAFAEFLTVQTGGTLYRITHTNDIVPRLPPREFGYSHSSPEYWIKSGTLVPVRRRDIVKIEGIDATGGNNQPNIPDIPHHLWYFGLIGTCL

SEQ ID NO: 4943 - protein, 269 aa, Thermomyces lanuginosus
EVSQDLFNQFNLFAQYSAAAYCGKNNDAPAGTNITCTGNACPEVEKADATFLYSFEDSGVGDVTGFLALDNTNKLIVLSFRGSRSIENWIGNLNFDLKEINDICSGCRGHDGFTSSWRSVADTLRQKVEDAVREHPDYRVVFTGHSLGGALATVAGADLRGNGYDIDVFSYGAPRVGNRAFAEFLTVQTGGTLYRITHTNDIVPRLPPREFGYSHSSPEYWIKSGTLVPVRRRDIVKIEGIDATGGNNQPNIPDIPAHLEYFGLIGTCL

SEQ ID NO: 4944 - protein, 269 aa, Thermomyces lanuginosus
EVSQDLFNQFNLFAQYSAAAYCGKNNDAPAGTNITCTGNACPEVEKADATFLYSFEDSGVGDVTGFLALDNTNKLIVLSFRGSRSIENWIGNLHFDLKEINDICSGCRGHDGFTSSWRSVADTLRQKVEDAVREHPDYRVVFTGHSLGGALATVAGADLRGNGYDIDVFSYGAPRVGNRAFAEFLTVQTGGTLYRITHTNDIVPRLPPXEFGYSHSSPEYWIKSGTLVPVTRNDIVKIEGIDATGGNNHPNIPDIPAHLWYFGLIGTCL

SEQ ID NO: 4945 - protein, 269 aa, Thermomyces lanuginosus
EVSQDLFNQFNLFAQYSAAAYCGKNNDAPAGTNITCTGNACPEVEKADATFLYSFEDSGVGDVTGFLALDNTNKLIVLSFRGSRSIENWIGNLNFDLKEINDICSGCRGHDGFTSSWRSVADTLRQKVEDAVREHPDYRVVFTGHSLGGALATVAGADLRGNGYDIDVFSYGAPRVGNRAFAEFLTVQTGGTLYRITHTNDIVPRLPPREFGYSHSSPEYWIKSGTLVPVRRRDIVKIEGIDATGGNNQPNIPDIPAHLIYFGLIGTCL

SEQ ID NO: 4946 - protein, 269 aa, Thermomyces lanuginosus
EVSQDLFNQFNLFAQYSAAAYCGKNNDAPAGTNITCTGNACPEVEKADATTLYSFEDSGVGDVTGFLALDNTNKLIVLSFRGSRSIENWIGNLNFDLKEINDICSGCRGHDGFTSSWRSVADTLRQKVEDAVREHPDYRVVFTGHSLGGALATVAGADLRGNGYDIDVFSYGAPRVGNRAFAEFLTVQTGGTLYRITHTNDIVPRLPPREFGYSHSSPEYWIKSGTLVPVTRNDIVKIEGIDATGGNNQPNQPDIPAHLWYFGRIGTCL

SEQ ID NO: 4947 - protein, 269 aa, Thermomyces lanuginosus
EVSQDLFNQFNLFAQYSAAAYCGKNNDAPAGTNITCTGNACPEVEKADATFLYSFEDSGEGDVTGFLALDNTNKLIVLSFRGSRSIENWIGNLNFDLKEINDICSGCRGHDGFTSSWRSVADTLRQKVEDAVREHPDYRVVFTGHSLGGALATVAGADLRGNGYDIDVFSYGAPRVGNRAFAEFLTVQTGGTLYRITHTNDIVPRLPPREFGYSHSSPEYWIKSGTLVPVRRRDIVKIEGIDATGGNNQPNIPDIPAHLWYFGLIGTCL

SEQ ID NO: 4948 - protein, 269 aa, Thermomyces lanuginosus
EVSQDLFNQFNLFAQYSAAAYCGKNNDAPAGTNITCTGNACPEVEKADATFLYSFEDSGVGDVTGFLALDNTNKLIVLSFRGSRSIENWIGNLNFDLKKINDICSGCRGHDGFTSSWRSVADTLRQKVEDAVREHPDYRVVFTGHSLGGALATVAGADLRGNGYDIDVFSYGAPRVGNRAFAEFLTVQTGGTLYRITHTNDIVPRLPPXEFGYSHSSPEYWIKSGTLVPVTRNDIVKIEGIDATGGNNKPNIPDIPAHLWYFGLIGTCL

SEQ ID NO: 4949 - protein, 269 aa, Thermomyces lanuginosus
EVSQDLFNQFNLFAQYSAAAYCGKNNDAPAGTNITCTGNACPEVEKADATFLYSFEDSGVGDVTGFLALDNTNKLIVLSFRGSRSIENWIGNLNFDLKEINDICSGCRGHDGFTSSWRSVADTLRQKVEDAVREHPDYRVVFTGHSLGGALATVAGADLRGNGYDIDVFSYGAPRVGNRAFAEFLTVQTGGTLYRITHTNDIVPRLPPREFGYSHSSPEYWIKPGTLVPVRRRDIVKIEGIDATGGNNQPNIPDIPAHLWYFGLIGTCL

SEQ ID NO: 4950 - protein, 269 aa, Thermomyces lanuginosus
EVSQDLFNQFNLFAQYSAAAYCGKNNQAPAGTNITCTGNACPEVEKADATFLYSFEDSGVGDVTGFLALDNTNKLIVLSFRGSRSIENWIGNLNFDLKEINDICSGCRGHDGFTSSWRSVADTLRQKVEDAVREHPDYRVVFTGHSLGGALATVAGADLRGNGYDIDVFSYGAPRVGNRAFAEFLTVQTGGTLYRITHTNDIVPRLPPREFGYSHSSPEYWIKSGTLVPVTRQDIVKIEGIDATGGNNQPNIPDITAHLWYFGLIGTCL

SEQ ID NO: 4951 - protein, 269 aa, Thermomyces lanuginosus
EVSQDLRNQFNLFAQYSAAAYCGKNNDAPAGTNITCTGNACPEVEKADATFLYSFEDSGVGDVTGFLALDNTNKLIVLSFRGSRSIENWIGNLNFDLKEINDICSGCRGHDGFTSSWRSVADTLRQKVEDAVREHPDYRVVFTGHSLGGALATVAGADLRGNGYDIDVFSYGAPRVGNRAFAEFLTVQTGGTLYRITHTNDIVPRLPPREFGYSHSSPEYWIKSGTLVPVRRRDIVKIEGIDATGGNNQPNIPDIPAHLWYFGLIGTCL

SEQ ID NO: 4952 - protein, 269 aa, Thermomyces lanuginosus
EVSQDLFNQFNLFAQYSAAAYCGKNNDAPAGTNITCTGNACPEVEKADATFLYSFEDSGVGDVTGFLALDNTNKLIVLSFRGSRSIENWIGNLNFDLKEINDICSGCRGHDGFTSSWRSVADTLRQKVEDAVREHPDYRVVFTGHSLGGALATVAGADLRGNGYDIDVFSYGAPRVGNRAFAEFLTVQTGGTLYRITHTNDIVPRLPPREFGYSHSSPEYWIKSGTLVPKRRRDIVKIEGIDATGGNNQPNIPDIPAHLWYFGLIGTCL

SEQ ID NO: 4953 - protein, 269 aa, Thermomyces lanuginosus
EVSDDLFNQFNLFAQYSAAAYCGKNNDAPAGTNITCTGNACPEVEKADATFLYSFEDMGVGDVTGFLALDNTNKLIVLSFRGSRSIENWIGNLNFDLKEINDICSGCRGHDGFTSSWRSVADTLRQKVEDAVREHPDYRVVFTGHSLGGALATVAGADLRGNGYDIDVFSYGAPRVGNRAFAEFLTVQTGGTLYRITHTNDIVPRLPPREFGYSHSSPEYWIKSGTLVPVTRQDIVKIEGIDATGGNNQPNIPDIPAHLWYFGLIGTCL

SEQ ID NO: 4954 - protein, 269 aa, Thermomyces lanuginosus
EVSQDLFNQFNLFAQYSKAAYCGKNNDAPAGTNITCTGNACPEVEKADATFLYSFEDSGVGDVTGFLALDNTNKQIVLSFRGSRSIENWIGNLNFDLKEINDICSGCRGHDGFTSSWRSVADTLRQKVEDAVREHPDYRVVFTGHSLGGALATVAWADLRGNGYDIDVFSYGAPRVGNRAFAEFLTVQTGGTLYRITHTNDIVPRLPPREFGYSHSSPEYWIKSGTLVPVTRNDIVKIEGIDATGGNNQPNIPDIPAHLWYFGLIGTCL

SEQ ID NO: 4955 - protein, 269 aa, Thermomyces lanuginosus
EVSQDLFNQFNLFAQYSAAAYCGKNNDAPAGTNITCTGNACPEVEKADATFLYSFEDSGVGDVTGFLALDNTNKLIVLSFRGSRSIENWFGNLNFDLKEINDICSGCRGHDGFTSSWRSVADTLRQKVEDAVREHPDYRVVFTGHSLGGALATVAGADLRGNGYDIDVFSYGAPRVGNRAFAEFLTVQTGGTLYRITHTNDIVPRLPPREFGYSHSSPEYWIKSGTLVPVTRQDIVKIEGIDATGGNNQPNIPDITAHLWYFGLIGTCL

SEQ ID NO: 4956 - protein, 269 aa, Thermomyces lanuginosus
EVSQDLFNQFNLFAQYSAAAYCGKNNSAPAGTNITCTGNACPEVEKADATFLYSFEDSGVGDVTGFLALDNTNKLIVLSFRGSRSIENWIGNLNFDLKEINDICSGCRGHGGFTSSWRSVADTLRQKVEDAVREHPDYRVVFTGHSLGGALATVAGADLRGNGYDIDVFSYGAPRVGNRAFAEFLTVQTGGTLYRITHTNDIVPRLPPREFGYSHPSPEYWIKSGTLVPVTRNDIVKIEGIDATGGNNQPNIPDIPAHLWYFGLIGTCL

SEQ ID NO: 4957 - protein, 269 aa, Thermomyces lanuginosus
EVSQDLFNQFNLFAQYSAAAYCKKNNDAPAGTNITCTGNACPEVEKADATFLYSFEDSGVGDVTGFLALDNTNKLIVLSFRGSRSIENWIGNLNFDLKEINDICSGCRGHDGFTSSWRSVADTLRQKVEDAVREHPDYRVVFTGHSLGGALATVAGADLRGNGYDIDVFSYGAPRVGNRAFAEFLTTQTGGTLYRITHTNDIVPRLPPREFGYSHSSPEYWIKSGTLVPVTRNDIVKIEGIDATGGNNQPNIPDIPAHLWYFGRIGTCL

SEQ ID NO: 4958 - protein, 269 aa, Thermomyces lanuginosus
EVSQDLFNQFNLFAQYSAAAYCGKNNDAPAGTNITCTGNACPEVEKADATFLYSFEDSGVGDVTGFLALDNTNKLIVLSFRGSRSIENWIANLNFDLKEINDICSGCRGHDGFTSSWRSVADTLRQKVEDAVREHPDYRVVFTGHSLGGALATVAGADLRGNGYDIDVFSYGAPRVGNRAFAEFLTVQTGGTLYRITHTNDIVPRLPPREFGYSHSSPEYWIKSGTLVPVRRRDIVKIEGIDATGGNNQPNIPDIPAHLWYFGLIGTCL

SEQ ID NO: 4959 - protein, 269 aa, Thermomyces lanuginosus
EVSQDLFNQFNLFAQYSAAAYCGKNNDAPAGTNITCTGNACPEVEKADATFLYSFEDSGVGDVTGFLALDNTNKQIVLSFRGSRSIENWIGNLNFDLKEINDICSGCRGHDGFTSSWRSVADTLRQKVEDAVREHPDYRVVFTGHSLGGALATVAGADLRGNGYDIDVFSYGAPRVGNRAFAEFLTTQDGGTLYRITHTNDIVPRLPPREFGYSHSSPEYWIKSGTLVPVTRNDIVKIEGIDATGGNNQPNIPDIPAHLWYFGLIGTCL

SEQ ID NO: 4960 - protein, 269 aa, Thermomyces lanuginosus
EVSQDLFNQFNLFAQYSAAAYCGKNNDAPAGTNITCTGNACPEVEKADATFLYSFEDSGVGDVTGFLALDNTNKLIVLSFRGSRSIENWIGNLNFDLKEINDICSGCRGHDGFTSSWRSVADTLRQKVEDAVREHPDYRVVFTGHSLGGALATVAGADLRGNGYDIDVFSYGAPRVGNRAFAEFLTVQTGGTLYRITHTNDIVPRLPPREFGYSHSSPEYWIKSGTRVPVRRRDIVKIEGIDATGGNNQPNIPDIPAHLWYFGLIGTCL

SEQ ID NO: 4961 - protein, 269 aa, Thermomyces lanuginosus
EVSQDLFNQFNLFAQYSKAAYCGKNNDAPAGTNITCTGNACPEVEKADVTFLYSFEDSGVGDVTGFLALDNTNKLIVLSFRGSRSIENWIGNLNFDLKEINDICSGCRGHDGFTSSWRSVADTLRQKVEDAVREHPDYRVVFTGHSLGGALATVAGADLRGNGYDIDVFSYGAPRVGNRAFAEFLTTQTGGTLYRITHTNDIVPRLPPREFGYSHSSPEYWIKSGTLVPVTRNDIVKIEGIDATGGNNQPNIPDIPAHLWYFGLIGTCL

SEQ ID NO: 4962 - protein, 269 aa, Thermomyces lanuginosus
EVSQDLFNQFNLFAQYSAAAYCGKNNDAPAGTNITCTGNACPEVEKADATFLYSFEDSGVGDVTGFLALDNTNKLIVLSFRGSRSIENWIGNLNFDLKEINDICSGCRGHDGFTSSWRSVADTLRQKVEDAVREHPDYRVVFTGHSLGGALATVAGADLRGNGYDIDVFSYGAPRVGNRAFAEFLTVQTGGTLYRITVTNDIVPRLPPREFGYSHSSPEYWIKSGTLVPVRRRDIVKIEGIDATGGNNQPNIPDIPAHLWYFGLIGTCL

SEQ ID NO: 4963 - protein, 269 aa, Thermomyces lanuginosus
EVSQDLFNQFNLFAQYSAAAYCGKNNDAPAGTNITCTGNACPEVEKADATFLYSFEDSGVGDVTGFLALDNTNKLIVLSFRGSRSIENWIGNLNFDLKEINDICSGCRGHDGFTSSWRSVADTLRQKVEDAVREHPDYRVVFTGHSLGGALATVAGADLRGNGYDIDVFSYGAPRVGNRAFAEFLTVQTGGTLYRITHTNDIVPRLPPREFGYSHSSPEYWIKLGTLVPVRRRDIVKIEGIDATGGNNQPNIPDIPAHLWYFGLIGTCL

SEQ ID NO: 4964 - protein, 269 aa, Thermomyces lanuginosus
EVSQDLFNQFNLFAQYSAAAYCGKNNDAPAGTNITCTGNACPEVEKADATFLYSFEDSGVGDVTGFLALDNTNKLIVLSFRGSRSIENWIGNLNFDLKEINDICSGCRGHDGFTSSWRSVADTLRQKVEDAVREHPDYRVVFTGHSLGGALATVAGADLRGNGYDIDVFSYGAPRVGNRAFAEFLTVQTGGTLYRITQTNDIVPRLPPREFGYSHSSPEYWIKSGTLVPVRRRDIVKIEGIDATGGNNQPNIPDIPAHLWYFGLIGTCL

SEQ ID NO: 4965 - protein, 269 aa, Thermomyces lanuginosus
EVSQDLFNQFNLFAQYSAAAYCGKNNDAPAGTNITCTGNACPEVEKADATFLYSFEDSGVGDVTGFLALDNTNKLIVLSFRGSRSIENWIGNLNFDLKEINDICSGCRGHDGFTSSWRSVADTLRQKVEDAVREHPDYRVVFTGHSLGGALATVAGADLRGNGYDIDVFSYGAPRVGNRAFAEFLTVQTGGTLYRITNTNDIVPRLPPREFGYSHSSPEYWIKSGTLVPVRRRDIVKIEGIDATGGNNQPNIPDIPAHLWYFGLIGTCL

SEQ ID NO: 4966 - protein, 269 aa, Thermomyces lanuginosus
EVSQDLFNQFNLFAQYSAAAYCGKNNDAPAGTNITCTGNACPEVEKADATFLYSFEDSGVGDVTGFLALDNTNKLIVLSFRGSRSIENWIGNLKFDLKEINDICSGCRGHDGFTSSWRSVADTLRQKVEDAVREHPDYRVVFTGHSLGGALATVAGADLRGNGYDIDVFSYGAPRVGNRAFAEFLTVQTGGTLYRITHTNDIVPRLPPXEFGYSHSSPEYWIKSGTLVPVTRNDIVKIEGIDATGGNNKPNIPDIPAHLWYFGLIGTCL

SEQ ID NO: 4967 - protein, 269 aa, Thermomyces lanuginosus
EVSQDLFNQFNLFAQYSAAAYCGKNNDAPAGTNITCTGNACPEVEKADATFLYSFEDSGVGDVTGFLALDNTNKLIVLSFRGSRSIENWITNLNFDLKEIRDICRGCRGHDGFTSSWRSVADTLRQKVEDAVREHPDYRVVFTGHSLGGALATVAGADLRGNGYDIDVFSYGAPRVGNRAFAEFLTVQTGGTLYRITHTNDIVPRLPPREFGYSHSSPEYWIKSGTLVPVTRNDIVKIEGIDATGGNNQPNIPDIPAHLWYFGLIGTCL

SEQ ID NO: 4968 - protein, 269 aa, Thermomyces lanuginosus
EVSQDLFNQFNLFAQYSAAAYCGKNNDAPAGTNITCTGNACPEVEKADATFLYSFEDSGVGDVTGFLALDNTNKLIVLSFRGSRSIENWIGNLNFDLKEINDICSGCRGHDGFTSSWRSVADTLRQKVEDAVREHPDYRVVFTGHSLGGALATVAGADLRGNGYDIDVFSYGAPRVGNRAFAEFLTVQTGGTLYRITHTNDIVPRLPPREFGYSHSSPEYWIKSGTLVPVRRRDIVKIEGIDATGGNNQPNIPDIPAHLDYFGLIGTCL

SEQ ID NO: 4969 - protein, 269 aa, Thermomyces lanuginosus
EVSQDLFNQFNLFAQYSAAAYCGKNNNAPAGTNITCTGNACPEVEKADATFLYSFEDSGVGDVTGFLALDNTNKLIVLSFRGSRSIENWIGNLNFDLKEINDICSGCRGHDGFTSSWRSVADTLRQKVEDAVREHPDYRVVFTGHSLGGALATVAGADLRGNGYDIDVFSYGAPRVGNRAFAEFLTVQTGGTLYRITHTNDIVPRLPPREFGYSHSSPEYWIKSGTLVPVTRQDIVKIEGIDATGGNNQPNIPDITAHLWYFGLIGTCL

SEQ ID NO: 4970 - protein, 269 aa, Synthetic construct
EVSQDLFNQFNLFAQYSAAAYCGKNNDAPAGTNITCTGNACPEVEKADATFLYSFEDSGVGDVTGFLALDNTNKLIVLSFRGSRSIENWIGNLNFDLKEINDICSGCRGHDGFTSSWRSVADTLRQKVEDAVREHPDYRVVFTGHSLGGALATVAGADLRGNGYDIGVFSYGAPRVGNRAFAEFLTVQTGGTLYRITHTNDIVPRLPPRVFGYSHSSPEYWIKSGTLVPVTRNDIVKIEGIDATGGNNRPNIPDIPAHLWYFGLIGTCL

SEQ ID NO: 4971 - protein, 269 aa, Thermomyces lanuginosus
EVSQDLFNQFNLFAQYSAAAYCGKNNDAPAGTNITCTGNACPEVEKADATFLYSFEDSGVGDVTGFLALDNTNKLIVLSFRGSRSIENWIGNLNFDLKEINDICSGCRGHDGFTSSWRSVADTLRQKVEDAVREHPDYRVVFTGHSLGGALATVAGADLRGNGYDIDVFSYGAPRVGNRAFAEFLTVQTGGTLYRITHTNDIVPRLPPREFGYSHPSPEYWIKSGTLVPVRRRDIVKIEGIDATGGNNQPNIPDIPAHLWYFGLIGTCL

SEQ ID NO: 4972 - protein, 269 aa, Thermomyces lanuginosus
EVSQDLFNQFNLFAQYSKAAYCGKNNDAEAGTNITCTGNACPEVEKADATFLYSFEDSGVGDVTGFLALDNTNKLIVLSFRGSRSIENWIGNLNFDLKEINDICSGCRGHDGFTSSWRSVADTLRQKVEDAVREHPDYRVVFTGHSLGGALATVAGADLRGNGYDIDVFSYGAPRVGNRAFAEFLTVQDGGTLYRITHTNDIVPRLPPREFGYSHSSPEYWIKSGTLVPVTRNDIVKIEGIDATGGNNQPNIPDIPAHLWYFGLIGTCL

SEQ ID NO: 4973 - protein, 269 aa, Thermomyces lanuginosus
EVSQDLFNQFNLFAQYSAAAYCQANNDAPAGTNITCTGNACPEVEKADATFLYSFEDSGVGDVTGFLALDNTNKLIVLSFRGSRSIENWIGNLNFDLKEINDICSGCRGHDGFTSSWRSVADTLRQKVEDAVREHPDYRVVFTGHSLGGALATVAWADLRGNGYDIDVFSYGAPRVGNRAFAEFLTVQTGGTLYRITHTNDIVPRLPPREFGYSHSSPEYWIKSGTLVPVTRNDIVKIEGIDATGGNNQPNIPDIPAHLWYFGLIGTCL

SEQ ID NO: 4974 - protein, 270 aa, Thermomyces lanuginosus
EVSQDLFNQFNLFAQYSAAAYCGKNNDAPAGTNITCTGNACPEVEKADATFLYSFEDSGVGDVTGFLALDNTNKLIVLSFRGSRSIENWIGNLNFDLKEINDICSGCRGHDGFTSSWRSVADTLRQKVEDAVREHPDYRVVFTGHSLGGALATVAGADLRGNGYDIDVFSYGAPRVGNRAFAEFLTVQTGGTLYRITHTNDIVPRLPPREFGYSHSSPEYWIKSGTLVPVTRNDIVKIEGIDATGGNNQPNIPDIPAHLWYFGINTGLCL

SEQ ID NO: 4975 - protein, 269 aa, Thermomyces lanuginosus
EVSQDLFNQFNLFAQYSAAAYCGKNNDAPAGTNITCTGNACPEVEKADATFLYSFEDSGVGDVTGFLALDNTNKLIVLSFRGSRSIENWIGNLNFDLKEINDICSGCRGHDGFTSSWRSVADTLRQKVEDAVREHPDYRVVFTGHSLGGALATVAGADLRGNGYDIDVFSYGAPRVGNRAFAEFLTVQTGGTLYRITHTNDIVPRLPPREFGYSHSSPEYWIKSGTLVPVRRRDIVKIEGIDATGGNNRPNIPDIPAHLWYFGLIGTCL

SEQ ID NO: 4976 - protein, 268 aa, Thermomyces lanuginosus
EVSQDLFNQFNLFAQYSAAAYCGKNNDAPAGTNITCTGNACPEVEKADATFLYSFEDSGVGDVTGFLALDNTNKLIVLSFRGSRSIENWIGNLNFDLKEINDICSGCRGHDGFTSSWRSVADTLRQKVEDAVREHPDYRVVFTGHSLGGALATVAGADLRGNGYDIDVFSYGAPRVGNRAFAEFLTVQTGGTLYRITHTNDIVPRLPPREFGYSHSSPEYWIKRRTRPVTRNDIVKIEGIDATGGNNQPNIPDIPAHLWYFGLIGTCL

SEQ ID NO: 4977 - protein, 268 aa, Thermomyces lanuginosus
VSQDLFNQFNLFAQYSAAAYCGKNNDAPAGTQITCTGNACPEVEKADATFLYSFEDSGVGDVTGFLALDNTNKLIVLSFRGSRSIENWIGNLNFDLKEINDICSGCRGHDGFTSSWRSVADTLRQKVEDAVREHPDYRVVFTGHSLGGALATVAGADLRGNGYDIDVFSYGAPRVGNRAFAEFLTVQTGGTLYRITHTNDIVPRLPPREFGYSHSSPEYWIKSGTLVPVRRRDIVKIEGIDATGGNNQPNIPDIPAHLWYFGLIGTCL

SEQ ID NO: 4978 - protein, 268 aa, Thermomyces lanuginosus
VSQDLFNQFNLFAQYSAAAYCGKNNDAPAGTNITCTGNACPEVEKADATFLYSFEDSGVGDVTGFLALDNTNKLIVLSFRGSRSIENWIGNLNFFLKEINDICSGCRGHDGFTSSWRSVADTLRQKVEDAVREHPDYRVVFTGHSLGGALATVAGADLRGNGYDIDVFSYGAPRVGNRAFAEFLTVQTGGTLYRITHTNDIVPRLPPREFGYSHSSPEYWIKSRTLVPVTRNDIVKIEGIDATGGNNQPNIPDIPAHLWYFGLISTCL

SEQ ID NO: 4979 - protein, 268 aa, Thermomyces lanuginosus
VSQDLFNQFNLFAQYSAAAYCGKNNDAPAGTNITCTGNACPEVEKADATFLYSFEDSGVGDVTGFLALDNTNKLIVLSFRGSRSIENWIGNLNFDLKEINDICSGCRGHDGFTSSWRSVADTLRQKVEDAVREHPDYRVVFTGHSSGGALATVAGADLRGNGYDIDVFSYGAPRVGNRAFAEFLTVQTGGTLYRITHTNDIVPRLPPREFGYSHSSPEYWIKSGTLVPVTRCDIVKIEGIDATGGNNQPNIPSIPAHLWYFGLIGTCL

SEQ ID NO: 4980 - protein, 268 aa, Thermomyces lanuginosus
VSQDLFNQFNLFAQYSAAAYCGKNNDAPAGTNITCTGNACPEVEKADATFLYSFEDSGVGDVTGFLALDNTNKLIVLSFRGSRSIENWIGNLNFCLKEINDICSGCRGHDGFTSSWRSVADTLRQKVEDAVREHPDYRVVFTGHSLGGALATVAGADLRGNGYDIDVFSYGAPRVGNRAFAEFLTVQTGGTLYRITHTNDIVPRLPPREFGYSHSSPEYWIKSRTLVPVTRNDIVKIEGIDATGGNNQPNIPDIPAHLWYFGLITTCL

SEQ ID NO: 4981 - protein, 268 aa, Thermomyces lanuginosus
VSQDLFNQFNLFAQYSAAAYCGKNNDAPAGTNITCTGNACPEVEKADATFLYSFEDSGVGDVTGFLALDNTNKLIVLSFRGSRSIENWIGNLNFDLKEINDICSGCRGHDGFTSSWRSVADTLRQKVEDAVREHPDYRVVFTGHSLGGALATVAGADLRGNGYDIDVFSYGAPRVGNRAFAEFLTVQTGGTLYRITHTNDIVPRLPPREFGYSHSSPEYWIKSRTLVPVTRNDIVKIEGIDATGGNNQPNIPDIPAHLWYFALIGACL

SEQ ID NO: 4982 - protein, 268 aa, Thermomyces lanuginosus
VSQDLFNQFNLFAQYSAAAYCGKNNRAPAGTNITCTGNACPEVEKADATYLYSFEDSGVGDVTGFLALDNTNKLIVLSFRGSRSIENWIGNLNFDLKEINDICSGCRGHDGFTSSWRSVADTLRQKVEDAVREHPDYRVVFTGHSLGGALATVAGADLRGNGYDIDVFSYGAPRVGNRAFAEFLTVQTGGTLYRITHTNDIVPRLPPREFGYSHSSPEYWIKSGTLVPVTRCDIVKIEGIDATGGNNQPNIPDIPAHLWYFGLIGTCL

SEQ ID NO: 4983 - protein, 268 aa, Thermomyces lanuginosus
SPIRREVSQDLFNQFNLFAQYSAAAYTGKNNDAPAGTNITCTGNACPEVEKADATFLYSFEDSGVGDVTGFLALDNTNKLIVLSFRGSRSIENWIGNLNFDLKEINDICSGCRGHDGFTSSWRSVADTLRQKVEDAVREHPDYRVVFTGHSLGGALATVAGADLRGNGYDIDVFSYGAPRVGNRAFAEFLTVQTGGTLYRITHTNDIVPRLPPREFGYSHSSPEYWIKSGTLVPVTRNDIVKIEGIDATGGNNQPNIPDIPAHLWYFG

SEQ ID NO: 4984 - protein, 266 aa, Synthetic construct
QDLFNQFNLFAQYSAAAYCGKNNDAPAGTNITCTGNACPEVEKADATFLYSFEDSGVGDVTGFLALDNTNKLIVLSFRGSRSIENWIGNLKFLLKEINDICSGCRGHDGFTSSWRSVADTLRQKVEDAVREHPDYRVVFTGHSLGGALATVAGADLRGNGYDIDVFSYGAPRVGNRAFAEFLTVQTGGTLYRITHTNDIVPRLPPREFGYSHSSPEYWIKSGTLVPVTRNDIVKIEGIDATGGNNRPNIPDIPAHLWYFGLIGTCL

SEQ ID NO: 4985 - protein, 291 aa, Thermomyces lanuginosus
MRSSLVLFFVSAWTALASPIRREVSQDLFNQFNLFAQYSAAAYCGKNNDAPAGTNITCTGNACPEVEKADATFLYSFEDSGVGDVTGFLALDNTNKLIVLSFRGSRSIENWILNLNFDLKEINDICSGCRGHDGFTSSWRSVADTLRQKVEDAVREHPDYRVVFTGHSLGGALATVAGADLRGNGYDIDVFSYGAPRVGNRAFAEFLTVQTGGTLYRITHTNDIVPRLPPRQFGYSHSSPEYWIKSGTLVPVRRRDIVKIEGIDATGGNNQPNIPDIPAHLWYFGLIGTCL

SEQ ID NO: 4986 - protein, 291 aa, Thermomyces lanuginosus
MRSSLVLFFVSAWTALASPIRREVSQDLFNQFNLFAQYSAAAYCGKNNRAPAGTNITCTGNACPEVEKADATFLYSFEDSGVGDVTGFLALDNTNKLIVLSFRGSRSIENWIGNLNFDLKEINDICSGCRGHDGFTSSWRSVADTLRQKVEDAVREHPDYRVVFTGHSLGGALATVAGADLRGNGYDIDVFSYGAPRVGNRAFAEFLTVQTGGTLYRITHTNDIVPRLPPREFGYSHSSPEYWIKSGTGVPVRRRDIVKIEGIDATGGNNQPNIPDIPAHLWYFGLIGTCL

SEQ ID NO: 4987 - protein, 291 aa, Thermomyces lanuginosus
MRSSLVLFFVSAWTALASPIRREVSQDLFNQFNLFAQYSAAAYCGKNNDAPAGTQITCTGNACPEVEKADATFLYSFEDSGVGDVTGFLALDNTNKLIVLSFRGSRSIENWIGNLNFDLKEINDICSGCRGHDGFTSSWRSVADTLRQKVEDAVREHPDYRVVFTGHSLGGALATVAGADLRGNGYDIDVFSYGAPRVGNRAFAEFLTVQTGGTLYRITHTNDIVPRLPPREFGYSHSSPEYWIKSGTLVPVRRRDIVKIEGIDATGGNNQPNIPYIPAHLWYFGLIGTCL

SEQ ID NO: 4988 - protein, 291 aa, Thermomyces lanuginosus
MRSSLVLFFVSAWTALASPIRREVSQDLFNQFNLFAQYSAAAYCGKNNDAPAGTNITCTGNACPEVEKADATFLYSFEDSGVGDVTGFLALDNTNKLIVLSFRGSRSIENWIANLNFGLKEINDICSGCRGHDGFTSSWRSVADTLRQKVEDAVREHPDYRVVFTGHSLGGALATVAGADLRGNGYDIDVFSYGAPRVGNRAFAEFLTVQTGGTLYRITHTNDIVPRLPPREFGYSHSSPEYWIKSGTLVPVRRRDIVKIEGIDATGGNNQPNIPDIPAHLWYFGLIGTCL

SEQ ID NO: 4989 - protein, 291 aa, Thermomyces lanuginosus
MRSSLVLFFVSAWTALASPIRREVSQDLFNQFNLFAQYSAAAYCGKNNDAPAGTNITCTGNACPEVEKADATFLYSFEDHGLGDVTGFLALDNTNKLIVLSFRGSRSIENWIGNLNFDLKEINDICSGCRGHDGFTSSWRSVADTLRQKVEDAVREHPDYRVVFTGHSLGGALATVAGADLRGNGYDIDVFSYGAPRVGNRAFAEFLTVQTGGTLYRITHTNDIVPRLPPRVFGYSHSSPEYWIKSGTLVPVTRNDIVKIEGIDATGGNNRPNIPDIPAHLWYFGLIGTCL

SEQ ID NO: 4990 - protein, 291 aa, Thermomyces lanuginosus
MRSSLVLFFVSAWTALASPIRREVSQDLFNQFNLFAQYSAAAYCGKNNDAPAGTNITCTGNACPEVEKADATFLYSFEDXGVGDVTGFLALDNTNKLIVLSFRGSRSIENWIGNLNFDLKEINDICSGCRGRDGFTSSWRSVADTLRQKVEDAVREHPDYRVVFTGXSLGGALATVAGADLRGNGYDIDVFSYGAPRVGNRAFAEFLTVQTGGTLYRITXTNDIVPRLPPREFGYSHSSPEYWIKSGTLVPVTRNDIVKIEGIDATGGNNQPNIPDIPAHLWYFGLIGTCL

SEQ ID NO: 4991 - protein, 291 aa, Thermomyces lanuginosus
MRSSLVLFFVSAWTALASPIRREVSQDLFNQFNLFAQYSAAAYCGKNNDAPAGTNITCTGNACPEVEKADATFLYSFEDKGLGDVTGFLALDNTNKLIVLSFRGSRSIENWIGNLNFDLKEINDICSGCRGHDGFTSSWRSVADTLRQKVEDAVREHPDYRVVFTGHSLGGALATVAGADLRGNGYDIDVFSYGAPRVGNRAFAEFLTVQTGGTLYRITHTNDIVPRLPPRVFGYSHSSPEYWIKSGTLVPVTRNDIVKIEGIDATGGNNRPNIPDIPAHLWYFGLIGTCL

SEQ ID NO: 4992 - protein, 291 aa, Thermomyces lanuginosus
MRSSLVLFFVSAWTALASPIRREVSQDLFNQFNLFAQYSAAAYCGKNNDAPAGTQITCTGNACPEVEKADATFLYSFEDSGVGDVTGFLALDNTNKLIVLSFRGSRSIENWIGNLNFDLKEINDICSGCRGHDGFTSSWRSVADTLRQKVEDAVREHPDYRVVFTGHSLGGALATVAGADLRGNGYDIDVFSYGAPRVGNRAFAEFLTVQTGGTLYRITHTNDIVPRLPPREFGYSHSSPEYWIKSGTLVPVRRRDIVKIEGIDATGGNNQPNIPNIPAHLWYFGLIGTCL

SEQ ID NO: 4993 - protein, 291 aa, Thermomyces lanuginosus
MRSSLVLFFVSAWTALASPIRREVSQDLFNQFNLFAQYSAAAYCGKNNDAPAGTNITCTGNACPEVEKADATFLYSFEDSGVGDVTGFLALDNTNKLIVLSFRGSRSIENWIGNLNFDLKEINDICSGCRGHDGFTSSWRSVADTLRQKVEDAVREHPDYRVVFTGHSLGGALATVAGADLRGNGYDIDVFSYGAPRVGNRAFAEFLTVQTGGTLYRITHTNDLVPRLPPREFGYSHSSPEYWIKSGTLVPVRRRDIVKIEGIDATGGNNQPNIPDAPAHLWYFGLIGTCL

SEQ ID NO: 4994 - protein, 291 aa, Thermomyces lanuginosus
MRSSLVLFFVSAWTALASPIRREVSQDLFNQFNLFAQYSAAAYCGKNNDAPAGTNITCTGNACPEVEKADATFLYSFEDSGVGDVTGFLALDNTNKLIVLSFRGSRSIENWIGNLNFDLKEINDICSGCRGHDGFTSSWRSVADTLRQKVEDAVREHPDYRVVFTGHSLGGALATVAGADLRGNGYDIDVFSYGAPRVGNRAFAEFLTVQTGGTLYRITHTNDIVPRLPPREFGYSHSSPEYWIKSGTGVPVRRRDIVKIEGIDATGGNNQPNIPDIKAHLWYFGLIGTCL

SEQ ID NO: 4995 - protein, 291 aa, Thermomyces lanuginosus
MRSSLVLFFVSAWTALASPIRREVSQDLFNQFNLFAQYSAAAYCGKNNDAPAGTNITCTGNACPEVEKADATFLYSFEDSGLGDVTGFLALDNTNKLIVLSFRGSRSIENWIMNLNFDLKEINDICSGCRGHDGFTSSWRSVADTLRQKVEDAVREHPDYRVVFTGHSLGGALATVAGADLRGNGYDIDVFSYGAPRVGNRAFAEFLTVQTGGTLYRITHTNDIVPRLPPREFGYSHSSPEYWIKSGTLVPVWRNDIVKIEGIDATGGNNLPNIPDIPAHLWYFGLIGTCL

SEQ ID NO: 4996 - protein, 291 aa, Thermomyces lanuginosus
MRSSLVLFFVSAWTALASPIRREVSQDLFNQFNLFAQYSAAAYCGKNNDAPAGTNITCTGNACPEVEKADATFLYSFEDSGKGDVTGFLALDNTNKLIVLSFRGSRSIENWIGNLNFDLKEINDICSGCRGHDGFTSSWRSVADTLRQKVEDAVREHPDYRVVFTGHSLGGGLATVAGADLRGNGYDIDVFSYGAPRVGNRAFAEFLTVQTGGTLYRITHTNDIVPRLPPREFGYSHSSPEYWIKSGTLVPVRRRDIVKIEGIDATGGNNQPNIPDIPAHLWYFGLIGTCL

SEQ ID NO: 4997 - protein, 291 aa, Thermomyces lanuginosus
MRSSLVLFFVSAWTALASPIRREVSQDLFNQFNLFAQYSAAAYCGKNNDAPAGTQITCTGNACPEVEKADATFLYSFEDSGVGDVTGFLALDNTNKLIVLSFRGSRSIENWIGNLNFDLKEINDICSGCRGHDGFTSSWRSVADTLRQKVEDAVREHPDYRVVFTGHSLGGALATVAGADLRGNGYDIDVFSYGAPRVGNRAFAEFLTVQTGGTLYRITHTNDIVPRLPPREFGYSHSSPEYWIKSGTLVPVRRRDIVKIEGIDATGGNNQPNIPSIPAHLWYFGLIGTCL

SEQ ID NO: 4998 - protein, 291 aa, Synthetic construct
MRSSLVLFFVSAWTALASPIRREVSQDLFNQFNLFAQYSAAAYCGKNNDAPAGTNITCTGNACPEVEKADATFLYSFEGSGVGDVTGFLALDNTNKLIVLSFRGSRSIENWIGNLKFLLKEINDICSGCRGHDGFTSSWRSVADTLRQKVEDAVREHPDYRVVFTGHSLGGALATVAGADLRGNGYDIDVFSYGAPRVGNRAFAEFLTVQTGGTLYRITHTNDIVPRLPPREFGYSHSSPEYWIKSGTLVPVTRNDIVKIEGIDATGGNNQPNIPDITAHLWYFGLIGTCL

SEQ ID NO: 4999 - protein, 291 aa, Thermomyces lanuginosus
MRSSLVLFFVSAWTALASPIRREVSQDLFNQFNLFAQYSAAAYCGKNNDAPAGTNITCTGNACPEVEKADATFLYSFEDSGVGDVTGFLALDNTNKLIVLSFRGSRSIQNWIGNLNFDLKEINDICSGCRGHDGFTSSWRSVADTLRQKVEDAVREHPDYRVVFTGHSLGGALATVAGADLRGNGYDIDVFSYGAPRVGNRAFAEFLTVQTGGTLYRITHTNDIVPRLPPRQFGYSHSSPEYWIKSGTLVPVTRNDIVKIEGINATGGNNQPNIPNIPAHLWYFGLIGTCL

SEQ ID NO: 5000 - protein, 291 aa, Thermomyces lanuginosus
MRSSLVLFFVSAWTALASPIRREVSQDLFNQFNLFAQYSAAAYCGKNNDAPAGTNITCTGNACPEVEKADATFLYSFEDSGVGDVTGFLALDNTNKLIVLSFRGSRSIENWVGNLNFDLKEINDICSGCRGHDGFTSSWRSVADTLRQKVEDAVREHPDYRVVFTGHSLGGALATVAGADLRGNGYDIDVFSYGAPRVGNRAFAEFLTVQTGGTLYRITHTNDIVPRLPPREFGYSHSSPEYWIKSGTLVPVRRRDIVKIEGIDATGGNNQPNIPDVPAHLWYFGLIGTCL

SEQ ID NO: 5001 - protein, 291 aa, Thermomyces lanuginosus
MRSSLVLFFVSAWTALASPIRREVSQDLFNQFNLFAQYSAAAYCGKNNDAPAGTNITCTGNACPEVEKADATFLYSFEDSGVGDVTGFLALDNTNKLIVLSFRGSRSIENWIGNLNFDLKEINDICSGCRGHDGFTSSWRSVADTLRQKVEDAVREHPDYRVVFTGHSLGGALATVAGADLRGNGYDIDVFSYGAPRVGNRALAEFLTVQTGGTLYRITHTNDIVPRLPPRVFGYSHSSPEYWIKSGTLVPVRRRDIVKIEGIDATGGNNQPNIPDIPAHLWYFGLIGTCL

SEQ ID NO: 5002 - protein, 291 aa, Thermomyces lanuginosus
MRSSLVLFFVSAWTALASPIRREVSQDLFNQFNLFAQYSAAAYCGKNNNAPAGTNITCTGNACPEVEKADATFLYSFEDSGVGDVTGFLALDNTNKLIVLSFRGSRSIENWIGNLNFGLKEINDICSGCRGHDGFTSSWRSVADTLRQKVEDAVREHPDYRVVFTGHSLGGALATVAGADLRGNGYDIDVFSYGAPRVGNRAFAEFLTVQTGGTLYRITHTNDIVPRLPPREFGYSHSSPEYWIKSGTLVPVRRRDIVKIEGIDATGGNNQPNIPDIPAHLWYFGLIGTCL

SEQ ID NO: 5003 - protein, 291 aa, Thermomyces lanuginosus
MRSSLVLFFVSAWTALASPIRREVSQDLFNQFNLFAQYSAAAYCGKNNDAPAGTQITCTGNACPEVEKADATFLYSFEDSGVGDVTGFLALDNTNKLIVLSFRGSRSIENWIGNLNFDLKEINDICSGCRGHDGFTSSWRSVADTLRQKVEDAVREHPDYRVVFTGHSLGGALATVAGADLRGNGYDIDVFSYGAPRVGNRAFAEFLTVQTGGTLYRITHTNDIVPRLPPREFGYSHSSPEYWIKSGTLVPVRRRDIVKIEGIDATGGNNQPNIPTIPAHLWYFGLIGTCL

SEQ ID NO: 5004 - protein, 291 aa, Thermomyces lanuginosus
MRSSLVLFFVSAWTALASPIRREVSQDLFNQFNLFAQYSAAAYCGKNNDAPAGTNITCTGNACPEVEKADATFLYSFEDSGVGDVTGFLALDNTNKLIVLSFRGSRSIENWIGNLNFDLKEINDICSGCRGHDGFTSSWRSVADTLRQKVEDAVREHPDYRVVFTGHSLGGALATVAGADLRGNGYDIDVFSYGAPRVGNRAFAEFLTVQTGGTLYRITHTNDIVPRLPPRVFGYSHSSPEYWIKSGTLVPVRRRDIVKIEGIDATGGNNRPNIPDIPAHLWYFGLIGTCL

SEQ ID NO: 5005 - protein, 291 aa, Thermomyces lanuginosus
MRSSLVLFFVSAWTALASPIRREVSQDLFNQFNLFAQYSAAAYCGKNNDAPAGTQITCTGNACPEVEKADATFLYSFEDSGVGDVTGFLALDNTNKLIVLSFRGSRSIENWIGNLNFDLKEINDICSGCRGHDGFTSSWRSVADTLRQKVEDAVREHPDYRVVFTGHSLGGALATVAGADLRGNGYDIDVFSYGAPRVGNRAFAEFLTVQTGGTLYRITHTNDIVPRLPPREFGYSHSSPEYWIKSGTLVPVRRRDIVKIEGIDATGGNNQPNIPLIPAHLWYFGLIGTCL

SEQ ID NO: 5006 - protein, 291 aa, Thermomyces lanuginosus
MRSSLVLFFVSAWTALASPIRREVSQDLFNQFNLFAQYSAAAYCGKNNDAPAGTQITCTGNACPEVEKADATFLYSFEDSGVGDVTGFLALDNTNKLIVLSFRGSRSIENWIGNLNFDLKEINDICSGCRGHDGFTSSWRSVADTLRQKVEDAVREHPDYRVVFTGHSLGGALATVAGADLRGNGYDIDVFSYGAPRVGNRAFAEFLTVQTGGTLYRITHTNDIVPRLPPREFGYSHSSPEYWIKSGTLVPVRRRDIVKIEGIDATGGNNQPNIPQIPAHLWYFGLIGTCL

SEQ ID NO: 5007 - protein, 291 aa, Thermomyces lanuginosus
MRSSLVLFFVSAWTALASPIRREVSQDLFNQFNLFAQYSAAAYCGKNNDAPAGTQITCTGNACPEVEKADATFLYSFEDSGVGDVTGFLALDNTNKLIVLSFRGSRSIENWIGNLNFDLKEINDICSGCRGHDGFTSSWRSVADTLRQKVEDAVREHPDYRVVFTGHSLGGALATVAGADLRGNGYDIDVFSYGAPRVGNRAFAEFLTVQTGGTLYRITHTNDIVPRLPPREFGYSHSSPEYWIKSGTLVPVRRRDIVKIEGIDATGGNNQPNIPHIPAHLWYFGLIGTCL

SEQ ID NO: 5008 - protein, 291 aa, Thermomyces lanuginosus
MRSSLVLFFVSAWTALASPIRREVSQDLFNQFNLFAQYSAAAYCGKNNDAPAGTNITCTGNACPEVEKADATFLYSFEDGGGGDVTGFLALDNTNKLIVLSFRGSRSIENWIGNLNFDLKEINDICSGCRGHDGFTSSWRSVADTLRQKVEDAVREHPDYRVVFTGHSLGGALATVAGADLRGNGYDIDVFSYGAPRVGNRAFAEFLTVQTGGTLYRITHTNDIVPRLPPREFGYSHSSPEYWIKSGTLVPVRRRDIVKIEGIDATGGNNQPNIPDIPAHLWYFGLIGTCL

SEQ ID NO: 5009 - protein, 291 aa, Thermomyces lanuginosus
MRSSLVLFFVSAWTALASPIRREVSQDLFNQFNLFAQYSAAAYCGKNNDAPAGTNITCTGNACPEVEKADATFLYSFEDSGVGDVTGFLALDNTNKLIVLSFRGSRSIENWIGNLNFDLKEINDICSGCRGHDGFTSSWRSVADTLRQKVEDAVREHPDYRVVFTGHSLGGALATVAGADLRGNGYDIDVFSYGAPRVGNRAFAEFLTVQTGGTLYRITHTNDXVPRXPPREXGYSHSSPEYWIKSGTLVPVTRNDIVKIEGIDATGGNNQPNIPDXPAHLWYFGLIGTCL

SEQ ID NO: 5010 - protein, 291 aa, Thermomyces lanuginosus
MRSSLVLFFVSAWTALASPIRREVSQDLFNQFNLFAQYSAAAYCGKNNDAPAGTNITCTGNACPEVEKADATFLYSFEDNGVGGVTGFLALDNTNKLIVLSFRGSRSIENWIGNLNFDLKEINDICSGCRGHDGFTSSWRSVADTLRQKVEDAVREHPDYRVVFTGHSLGGALATVAGADLRGNGYDIDVFSYGAPRVGNRAFAEFLTVQTGGTLYRITHTNDIVPRLPPREFGYSHSSPEYWIKSGTLVPVRRRDIVKIEGIDATGGNNQPNIPDIPAHLWYFGLIGTCL

SEQ ID NO: 5011 - protein, 291 aa, Thermomyces lanuginosus
MRSSLVLFFVSAWTALASPIRREVSQDLFNQFNLFAQYSAAAYCGKNNDAPAGTNITCTGNACPEVEKADATFLYSFEDSGKGDVTGFLALDNTNKLIVLSFRGTRSIENWIGNLNFDLKEINDICSGCRGHDGFTSSWRSVADTLRQKVEDAVREHPDYRVVFTGHSLGGALATVAGADLRGNGYDIDVFSYGAPRVGNRAFAEFLTVQTGGTLYRITHTNDIVPRLPPREFGYSHSSPEYWIKSGTLVPVRRRDIVKIEGIDATGGNNQPNIPDIPAHLWYFGLIGTCL

SEQ ID NO: 5012 - protein, 291 aa, Thermomyces lanuginosus
MRSSLVLFFVSAWTALASPIRREVSQDLFNQFNLFAQYSAAAYCGKNNDAPAGTNITCTGNACPEVEKADATFLYSFEDAGSGDVTGFLALDNTNKLIVLSFRGSRSIENWIGNLNFDLKEINDICSGCRGHDGFTSSWRSVADTLRQKVEDAVREHPDYRVVFTGHSLGGGLATVAGADLRGNGYDIDVFSYGAPRVGNRAFAEFLTVQTGGTLYRITHTNDIVPRLPPREFGYSHSSPEYWIKSGTGVPVTRNDIVKIEGIDATGGNNQPNIPDIPAHLWYFGLIGTCL

SEQ ID NO: 5013 - protein, 276 aa, Thermus thermophilus
LGTPIAVEVSQDLFNQFNLFAQYSAAAYCGKNNDAPAGTNITCTGNACPEVEKADATFLYSFEDSGVGDVTGFLALDNTNKLIVLSFRGSRSIENWIGNLNFDLKEINDICSGCRGHDGFTSSWRSVADTLRQKVEDAVREHPDYRVVFTGHSLGGALATVAGADLRGNGYDIDVFSYGAPRVGNRAFAEFLTVQTGGTLYRITHTNDIVPRLPPREFGYSHSSPEYWIKSGTLVPVTRNDIVKIEGIDATGGNNQPNIPDIPAHLWYFGLIGTCL

SEQ ID NO: 5014 - protein, 275 aa, Synthetic construct
AQPAMAEVSQDLFNQFNLFAQYSAAAYCGKNNDAPAGTNITCTGNACPEVEKADATFLYSFEDSGVGDVTGFLALDNTNKLIVLSFRGSRSIENWIGNLNFDLKEINDICSGCRGHDGFTSSWRSVADTLRQKVEDAVREHPDYRVVFTGHSLGGALATVAGADLRGNGYDIDVFSYGAPRVGNRAFAEFLTVQTGGTLYRITHTNDIVPRLPPREFGYSHSSPEYWIKSGTLVPVTRNDIVKIEGIDATGGNNQPNIPDIPAHLWYFGLIGTCL

SEQ ID NO: 5015 - protein, 274 aa, Synthetic construct
SPIRREVSQDLFNQFNLFAQYSAAAYCGKNNDAPAGTNITCTGNACPEVEKADATFLYSFEDSGVGDVTGFLALDNTNKLIVLSFRGSRSIENWIGNLNFWLKEINDICSGCRGHDGFTSSWRSVADTLRQKVEDAVREHPDYRVVFTGHSLGGALATVAGADLRGNGYDIDVFSYGAPRVGNRAFAEFLTVQTGGTLYRITHTNDIVPRLPPRNFGYSHSSPEYWIKSGTLVPVTRNDIVKIEGIDATGGNNQPNIPDIPAHLWYFGLIGTCL

SEQ ID NO: 5016 - protein, 274 aa, Thermomyces lanuginosus
SPIRREVSQDLFNQFNLFAQYSAAAYCGKNNDAPAGTNITCTGNACPEVEKADATFLYSFEDSGVGDVTGFLALDNTNKLIVLSFRGSRSIENWIQNLNFDLKEINDICSGCRGHDGFTSSWRSVADTLRQKVEDAVREHPDYRVVFTGHSLGGGLATVAGADLRGNGYDIDVFSYGAPRVGNRAFAEFLTVQTGGTLYRITHTNDIVPRLPPRQFGYSHSSPEYWIKSGTLVPVRRRDIVKIEGIDATGGNNQRNIPDIPAHLWYFGLIGTCL

SEQ ID NO: 5017 - protein, 274 aa, Thermomyces lanuginosus
SPIRREVSQDLFNQFNLFAQYSAAAYCGKNNDAPAGTNITCTGNACPEVEKADATFLYSFEDSGVGDVTGFLALDNTNKLIVLSFRGSRSIENWIADLNFDLKEINDICSGCRGHDGFTSSWRSVADTLRQKVEDAVREHPDYRVVFTGHSLGGALATVAGADLRGNGYDIDVFSYGAPRVGNRAFAEFLTVQTGGTLYRITHTNDIVPRLPPREFGYSHSSPEYWIKSGTLVPVTRNDIVKIEGIDATGGNNQPNIPDIPAHLWYFGLIGTCL

SEQ ID NO: 5018 - protein, 274 aa, Thermomyces lanuginosus
SPIRREVSQDLFNQFNLFAQYSAAAYCGKNNDAPAGTNITCTGNACPEVEKADATFLYSFEDSGVGDVTGFLALDNTNKLIVLSFRGSRSIENWIGNLNFDLKEINDICSGCRGHDGFTSSWRSVADTLRQKVEDAVREHPDYRVVFTGHSLGGALATVAGADLRGNGYDIDVFSYGAPRVGNRAFAEFLTVQTGGTLYRITHTNDIVPRLPPRELGYSHSSPEYWIKSGTGVPVRRRDIVKIEGIDATGGNNQPNIPDLKAHLWYFGLIGTCL

SEQ ID NO: 5019 - protein, 274 aa, Thermomyces lanuginosus
SPIRREVSQDLFNQFNLFAQYSAAAYCGKNNDAPAGTNITCTGNACPEVEKADATFLYSFEDSGVGDVTGFLALDNTNKLIVLSFRGSRSIENWIGNLNFDLKEINDICSGCRGHDGFTSSWRSVADTLRQKVEDAVREHPDYRVVFTGHSLGGALATVAGADLRGNGYDIDVFSYGAPRVGNRAFAEFLTVQTGGTLYRITHTNDIVPRLPPAAFGYSHSSPEYWIKSGTLVPVTRNDIVKIEGIDATGGNNQPNIPDIPAHLWYFGLIGTCL

SEQ ID NO: 5020 - protein, 274 aa, Aspergillus niger
SPIRREVSQDLFNQFNLFAQYSAAAYCGKNNDAPAGTNITCTGNACPEVEKADATFLYSFRDSGVGDVTGFLALDNTNKLIVLSFRGSRSIENWIGNLNFDLKEINDICSGCRGHDGFTSSWRSVADTLRQKVEDAVREHPDYRVVFTGHSLGGALATVAGADLRGNGYRIDVFSYGAPRVGNRAFAEFLTVQTGGTLYRITHTNDIVPRLPPREFGYSHSSPEYWIKSGTLVPVTRNDIVKIEGIDATGGNNQPNIPDIPAHLWYFGLIGTCL

SEQ ID NO: 5021 - protein, 274 aa, Synthetic construct
SPIRREVSQDLFNQFNLFAQYSAAAYCGKNNDAPAGTNITCTGNACPEVEKADATFLYSFEDSGVGDVTGFLALDNTNKLIVLSFRGSRSIENWIGNLNFLLKEINDICSGCRGHDGFTSSWRSVADTLRQKVEDAVREHPDYRVVFTGHSLGGALATVAGADLRGNGYDIDVFSYGAPRVGNRAFAEFLTVQTGGTLYRITHTNDIVPRVPPREFGYSHSSPEYWIKSGTLVPVTRNDIVKIEGIDATGGNNQPNIPDIPAHLWYFGLIGTCL

SEQ ID NO: 5022 - protein, 274 aa, Thermomyces lanuginosus
SPIRREVSQDLFNQFNLFAQYSAAAYCGKNNDAPAGTNITCTGNACPEVEKADATFLYSFEDSGVGDVTGFLALDNTNKLIVLSFRGSRSIENWIGNLNFDLKEINDICSGCRGHDGFTSSWRSVADTLRQKVEDAVREHPDYRVVFTGHSLGGALATVAGADLRGNGYDIDVFSYGAPRVGNRAFAEFLTVQTGGTLYRITHTNDIVPRLPPREFGYSHPPPEYWIKSGTLVPVTRNDIVKIEGIDATGGNNQPNIPDIPAHLWYFGLIGTCL

SEQ ID NO: 5023 - protein, 274 aa, Thermomyces lanuginosus
SPIRREVSQDLFNQFNLFAQYSAAAYCGKNNDAPAGTQITCTGNACPEVEKADATFLYSFEDSGVGDVTGFLALDNTNKLIVLSFRGSRSIENWIGNLNFDLKEINDICSGCRGHDGFTSSWRSVADTLRQKVEDAVREHPDYRVVFTGHSLGGALATVAGADLRGNGYDIDVFSYGAPRVGNRAFAEFLTVQTGGTLYRITHTNDIVPRLPPREFGYSHSSPEYWIKSGTLVPVTRNDIVKIEGIDATGGNNQPNIPTIPAHLWYFGLIGTCL

SEQ ID NO: 5024 - protein, 274 aa, Thermomyces lanuginosus
SPIRREVSQDLFNQFNLFAQYSAAAYCGKNNDAPAGTQITCTGNACPEVEKADATFLYSFEDSGVGDVTGFLALDNTNKLIVLSFRGSRSIENWIGNLNFDLKEINDICSGCRGHDGFTSSWRSVADTLRQKVEDAVREHPDYRVVFTGHSLGGALATVAGADLRGNGYDIDVFSYGAPRVGNRAFAEFLTVQTGGTLYRITHTNDIVPRLPPREFGYSHSSPEYWIKSGTLVPVTRNDIVKIEGIDATGGNNQPNIPHIPAHLWYFGLIGTCL

SEQ ID NO: 5025 - protein, 274 aa, Thermomyces lanuginosus
SPIRREVSQDLFNQFNLFAQYSAAAYCGKNNDAPAGTQITCTGNACPEVEKADATFLYSFEDSGVGDVTGFLALDNTNKLIVLSFRGSRSIENWIGNLNFDLKEINDICSGCRGHDGFTSSWRSVADTLRQKVEDAVREHPDYRVVFTGHSLGGALATVAGADLRGNGYDIDVFSYGAPRVGNRAFAEFLTVQTGGTLYRITHTNDIVPRLPPREFGYSHSSPEYWIKSGTLVPVTRNDIVKIEGIDATGGNNQPNIPQIPAHLWYFGLIGTCL

SEQ ID NO: 5026 - protein, 274 aa, Thermomyces lanuginosus
SPIRREVSQDLFNQFNLFAQYSAAAYCGKNNDAPAGTNITCTGNACPEVEKADATFLYSFEDAGVGDVTGFLALDNTNKLIVLSFRGDRSIENWIGNLNFDLKEINDICSGCRGHDGFTSSWRSVADTLRQKVEDAVREHPDYRVVFTGHSLGGALATVAGADLRGNGYDIDVFSYGAPRVGNRAFAEFLTVQTGGTLYRITHTNDIVPRLPPREFGYSHSSPEYWIKSGTLVPVTRNDIVKIEGIDATGGNNQPNIPDIPAHLWYFGLIGTCL

SEQ ID NO: 5027 - protein, 274 aa, Thermomyces lanuginosus
SPIRREVSVDLFNQFNLFAQYSAAAYCGKNNDAPAGTNITCTGNACPEVEKADATFLYSVEDSGVGDVTGFLALDNTNKLIVLSFRGSRSVENWIGNLNFDLKEINDICSGCRGHDGFTSSWRSVADTLRQKVEDAVREHPDYRVVFTGHSLGGALATVAGADLRGNGYDIDVFSYGAPRVGNRAFAEFLTVQTGGTLYRITHTNDIVPRLPPREFGYSHSSPEYWIKSGTLVPVRRRDIVKIEGIDATGGNNQPNIPDVPAHLWYFGLIGTCL

SEQ ID NO: 5028 - protein, 274 aa, Thermomyces lanuginosus
SPIRREVSQDLFNQFNLFAQYSAAAYCGKNNDAPAGTNITCRGRACPEVEKADATFLYSFEDSGVGDVTGFLALDNTNKLIVLSFRGSRSIENWIANLNFGLKEINDICSGCRGHDGFTSSWRSVADTLRQKVEDAVREHPDYRVVFTGHSLGGALATVAGADLRGNGYDIDVFSYGAPRVGNRAFAEFLTVQTGGTLYRITHTNDIVPRLPPREFGYSHSSPEYWIKSGTLVPVRRRDIVKIEGIDATGGNNQPNIPDIPAHLWYFGLIGTCL

SEQ ID NO: 5029 - protein, 274 aa, Thermomyces lanuginosus
SPIRREVSQDLFNQFNLFAQYSAAAYCGKNNHAPAGTNITCTGNACPEVEKADATFLYSFEDSGVGDVTGFLALDNTNKLIVLSFRGSRSIQNWIGNLNFNLKEINDICSGCRGHDGFTSSWRSVADTLRQKVEDAVREHPDYRVVFTGHSLGGALATVAGADLRGNGYDIDVFSYGAPRVGNRAFAEFLTVQTGGTLYRITHTNDIVPRLPPREFGYSHSSPEYWIKSGTLVPVRRRDIVKIEGIDATGGNNQPNIPVIPAHLWYFGLIGTCL

SEQ ID NO: 5030 - protein, 274 aa, Thermomyces lanuginosus
SPIRREVSQDLFNQFNLFAQYSAAAYCGKNNDAPAGTQITCTGNACPEVEKADATFLYSFEDSGVGDVTGFLALDNTNKLIVLSFRGSRSIENWIGNLNFDLKEINDICSGCRGHDGFTSSWRSVADTLRQKVEDAVREHPDYRVVFTGHSLGGALATVAGADLRGNGYDIDVFSYGAPRVGNRAFAEFLTVQTGGTLYRITHTNDIVPRLPPREFGYSHSSPEYWIKSGTLVPVTRNDIVKIEGIDATGGNNQPNIPNIPAHLWYFGLIGTCL

SEQ ID NO: 5031 - protein, 274 aa, Synthetic construct
SPIRREVSQDLFNQFNLFAQYSAAAYCGKNNDAPAGTNITCTGNACPEVEKADATFLYSFEDSGVGDVTGFLALDNTNKLIVLSFRGSRSIENWIGNLNFWLKEINNICSGCRGHDGFTSSWRSVADTLRQKVEDAVREHPDYRVVFTGHSLGGALATVAGADLRGNGYDIDVFSYGAPRVGNRAFAEFLTVQTGGTLYRITHTNDIVPRLPPREFGYSHSSPEYWIKSGTLVPVTRNDIVKIEGIDATGGNNQPNIPDIPAHLWYFGLIGTCL

SEQ ID NO: 5032 - protein, 274 aa, Synthetic construct
SPIRREVSQDLFNQFNLFAQYSAAAYCGKNNDAPAGTNITCTGNACPEVEKADATFLYSFEDSGVGDVTGFLALDNTNKLIVLSFRGSRSIENWIGNLNFLLKEINDICSGCRGHDGFTSSWRSVADTLRQKVEDAVREHPDYRVVFTGHSLGGALATVAGADLRGNGYDIDVFSYGAPRVGNRAFAEFLTVQTGGTLYRITHTNDIVPRSPPREFGYSHSSPEYWIKSGTLVPVTRNDIVKIEGIDATGGNNQPNIPDIPAHLWYFGLIGTCL

SEQ ID NO: 5033 - protein, 274 aa, Thermomyces lanuginosus
SPIRREVSQDLFNQFNLFAQYSAAAYCGKNNDAPAGTNITCTGNACPEVEKADATFLYSFEDNGSGDVTGFLALDNTNKLIVLSFRGSRSPENWIGNLNFDLKEINDICSGCRGHDGFTSSWRSVADTLRQKVEDAVREHPDYRVVFTGHSLGGALATVAGADLRGNGYDIDVFSYGAPRVGNRAFAEFLTVQTGGTLYRITHTNDIVPRLPPREFGYSHSSPEYWIKSGTLVPVRRRDIVKIEGIDATGGNNQPNIPDISAHLWYFGLIGTCL

SEQ ID NO: 5034 - protein, 274 aa, Thermomyces lanuginosus
SPIRREVSVDLFNQFNLFAQYSAAAYCGKNNDAPAGTNITCTGNACPEVEKADATFLYSFEDSGKGDVTGFLALDNTNKLIVLSFRGSRSIENWRGNLNFDLKEINDICSGCRGHDGFTSSWRSVADTLRQKVEDAVREHPDYRVVFTGHSLGGALATVAGADLRGNGYDIDVFSYGAPRVGNRAFAEFLTVQTGGTLYRITHTNDIVPRLPPREFGYSHSSPEYWIKSGTLVPVRRRDIVKIEGIDATGGNNQPNIPDVPAHLWYFGLIGTCL

SEQ ID NO: 5035 - protein, 274 aa, Thermomyces lanuginosus
SPIRREVSQDLFNQFNLFAQYSAAAYCGKNNDAPAGTNITCTGNACPEVEKADATFLYSFEDNGSGDVTGFLALDNTNKLIVLSFRGSRSIENWIGNLNFDLKEINDICSGCRGHDGFTSSWRSVADTLRQKVEDAVREHPDYRVVFTGHSLGGALATVAGADLRGNGYDIDVFSYGAPRVGNRAFAEFLTVQTGGTLYRITHTNDIVPRLPPRVFGYSHSSPEYWIKSGTLVPVRRRDIVKIEGIDATGGNNRPNIPDIPAHLWYFGLIGTCL

SEQ ID NO: 5036 - protein, 274 aa, Thermomyces lanuginosus
SPIRREVSQDLFNQFNLFAQYSAAAYCGKNNDAPAGTQITCTGNACPEVEKADATFLYSFEDSGVGDVTGFLALDNTNKLIVLSFRGSRSIENWIGNLNFDLKEINDICSGCRGHDGFTSSWRSVADTLRQKVEDAVREHPDYRVVFTGHSLGGALATVAGADLRGNGYDIDVFSYGAPRVGNRAFAEFLTVQTGGTLYRITHTNDIVPRLPPREFGYSHSSPEYWIKSGTLVPVTRNDIVKIEGIDATGGNNQPNIPLIPAHLWYFGLIGTCL

SEQ ID NO: 5037 - protein, 274 aa, Thermomyces lanuginosus
SPIRREVSQDLFNQFNLFAQYSAAAYCGKNNDAPAGTQITCTGNACPEVEKADATFLYSFEDSGVGDVTGFLALDNTNKLIVLSFRGSRSIENWIGNLNFDLKEINDICSGCRGHDGFTSSWRSVADTLRQKVEDAVREHPDYRVVFTGHSLGGALATVAGADLRGNGYDIDVFSYGAPRVGNRAFAEFLTVQTGGTLYRITHTNDIVPRLPPREFGYSHSSPEYWIKSGTLVPVTRNDIVKIEGIDATGGNNQPNIPYIPAHLWYFGLIGTCL

SEQ ID NO: 5038 - protein, 274 aa, Thermomyces lanuginosus
SPIRREVSQDLFNQFNLFAQYSAAAYCGKNNDAPAGTNITCTGNACPEVEKADATFLYSFEDAGAGDVTGFLALDNTNKLIVLSFRGSRSVENWIGNLNFDLKEINDICSGCRGHDGFTSSWRSVADTLRQKVEDAVREHPDYRVVFTGHSLGGGLATVAGADLRGNGYDIDVFSYGAPRVGNRAFAEFLTVQTGGTLYRITHTNDIVPRLPPREFGYSHSSPEYWIKSGTLVPVRRRDIVKIEGIDATGGNNQPNIPDIPAHLWYFGLIGTCL

SEQ ID NO: 5039 - protein, 274 aa, Synthetic construct
SPIRREVSQDLFNQFNLFAQYSAAAYCGKNNDAPAGTNITCTGNACPEVEKADATFLYSFEDSGVGDVTGFLALDNTNKLIVLSFRGSRSIENWIGNLNFDLKEINDICSGCRGHDGFTSSWRSVADTLRQKVEDAVREHPDYRVVFTGHSLGGALATVAGADLRGNGYDIDVFSYGAPRVGNRAFAEFLTVQTGGTLYRITHTNDIVPRLPPREFGYSHSSPEYWIKSGTLVPVTRNDIVKIEGIDATGGNNQPNIPKIPAHIWYFGLIGTCL

SEQ ID NO: 5040 - protein, 274 aa, Thermomyces lanuginosus
SPIRREVSQDLFNQFNLFAQYSAAAYCGKNNDAPAGTNITCTGNACPEVEKADATFLASFEDNGSGDVTGFLALDNTNKLIVLSFRGSRSIENWIGNLNFDLKEINDICSGCRGHDGFTSSWRSVADTLRQKVEDAVREHPDYRVVFTGHSLGGALATVAGADLRGNGYDIDVFSYGAPRVGNRAFAEFLTVQTGGTLYRITHTNDIVPRLPPREFGYSHSSPEYWIKSGTLVPVRRRDIVKIEGIDATGGNNQPNIPDILAHLWYFGLIGTCL

SEQ ID NO: 5041 - protein, 274 aa, Thermomyces lanuginosus
SPIRREVSQDLFNQFNLFAQYSAAAYCGKNNDAPAGTNITCTGNACPEVEKADATFLYSFEDSGVGDVTGFLALDNTNKLIVLSFRGSRSIENWIQNLNFDLKEINDICSGCRGHDGFTSSWRSVADTLRQKVEDAVREHPDYRVVFAGHSLGGALATVAGADLRGNGYDIDVFSYGAPRVGNRAFAEFLTVQTGGTLYRITHTNDIVPRLPPRQFGYSHSSPEYWIKSGTLVPVRRRDIVKIEGIDATGGNNQRNIPDIPAHLWYFGLIGTCL

SEQ ID NO: 5042 - protein, 274 aa, Thermomyces lanuginosus
SPIRREVSQDLFNQFNLFAQYSAAAYCGKNNDAPAGTQITCTGNACPEVEKADATFLYSFEDSGVGDVTGFLALDNTNKLIVLSFRGSRSIENWIGNLNFDLKEINDICSGCRGHDGFTSSWRSVADTLRQKVEDAVREHPDYRVVFTGHSLGGALATVAGADLRGNGYDIDVFSYGAPRVGNRAFAEFLTVQTGGTLYRITHTNDIVPRLPPREFGYSHSSPEYWIKSGTLVPVTRNDIVKIEGIDATGGNNQPNIPSIPAHLWYFGLIGTCL

SEQ ID NO: 5043 - protein, 274 aa, Synthetic construct
SPIRREVSQDLFNQFNLFAQYSAAAYCGKNNDAPAGTNITCTGNACPEVEKADATFLYSFEDSGVGDVTGFLALDNTNKLIVLSFRGSRSIENWIVNLNFDLKEINDICSGCRGHDGFWSSWRSVADTLRQKVEDAVREHPDYRVVFTGHSLGGALATVAGADLRGNGYDIDVFSYGAPRVGNRAFAEFLTVQTGGTLYRITHTNDIVPRLPPREFGYSHSSPEYWIKSGTLVPVTRNDIVKIEGIDATGGNNQPNIPDIPAHLWYFGLIGTCL

SEQ ID NO: 5044 - protein, 275 aa, Thermomyces lanuginosus
SPIRPRPVSQDLFNQFNLFAQYSAAAYCGKNNDAPAGTNITCTGNACPEVEKADATFLYSFEDSGVGAVTGFLALDNTNKLIVLSFRGSRSIENWIGNLNFDLKKINDICSGCRGHDGFTSSWRSVADTLRQKVEDAVREHPDYRVVFTGHSLGGALATVAGADLRGNGYDIDVFSYGAPRVGNRAFAEFLTVQTGGTLYRITHTNDIVPRLPPREFGYSHSSPEYWIKSGTLVPVTRNDIVKIEGIDATGGNNRPNIPDIPAHLWYFGLIGTCL

SEQ ID NO: 5045 - protein, 275 aa, Thermomyces lanuginosus
SPIRPRPVSQDLFNQFNLFAQYSAAAYCGKNNDAPAGTNITCTGNACPEVEKADATFLYSFEDSGVGDVTGFLALDNTNKLIVLSFRGSWSIENWIGNLNFDLKKINDICSGCRGHDGFTSSWRSVADTLRQKVEDAVREHPDYRVVFTGHSLGGALATVAGADLRGNGYDIDVFSYGAPRVGNRAFAEFLTVQTGGTLYRITHTNDIVPRLPPREFGYSHSSPEYWIKSGTLVPVTRNDIVKIEGIDATGGNNRPNIPDIPAHLWYFGLIGTCL

SEQ ID NO: 5046 - protein, 275 aa, Thermomyces lanuginosus
SPIRPRPVSQDLFNQFNLFAQYSAAAYCGKNNDAPAGTNITCTGNACPEVEKADATFLYSFEDSGVGDVTGFLALDNTNKLIVLSFRGSKSIENWIGNLNFDLKKINDICSGCRGHDGFTSSWRSVADTLRQKVEDAVREHPDYRVVFTGHSLGGALATVAGADLRGNGYDIDVFSYGAPRVGNRAFAEFLTVQTGGTLYRITHTNDIVPRLPPREFGYSHSSPEYWIKSGTLVPVTRNDIVKIEGIDATGGNNRPNIPDIPAHLWYFGLIGTCL

SEQ ID NO: 5047 - protein, 275 aa, Thermomyces lanuginosus
SPIRPRPVSQDLFNQFNLFAQYSAAAYCGKNNDAPAGTNITCTGNACPEVEKADATFLYSFEDSGVGDVTGFLALDNTNKLIVLSFRGSRSIENWIGNLNFDLDKINDICSGCRGHDGFTSSWRSVADTLRQKVEDAVREHPDYRVVFTGHSLGGALATVAGADLRGNGYDIDVFSYGAPRVGNRAFAEFLTVQTGGTLYRITHTNDIVPRLPPREFGYSHSSPEYWIKSGTLVPVTRNDIVKIEGIDATGGNNRPNIPDIPAHLWYFGLIGTCL

SEQ ID NO: 5048 - protein, 275 aa, Thermomyces lanuginosus
SPIRPRPVSQDLFNQFNLFAQYSAAAYCGKNNDAPAGTNITCTGNACPEVEKADATFLYSFEDSGVGGVTGFLALDNTNKLIVLSFRGSRSIENWIGNLNFDLKKINDICSGCRGHDGFTSSWRSVADTLRQKVEDAVREHPDYRVVFTGHSLGGALATVAGADLRGNGYDIDVFSYGAPRVGNRAFAEFLTVQTGGTLYRITHTNDIVPRLPPREFGYSHSSPEYWIKSGTLVPVTRNDIVKIEGIDATGGNNRPNIPDIPAHLWYFGLIGTCL

SEQ ID NO: 5049 - protein, 275 aa, Thermomyces lanuginosus
SPIRPRPVSQDLFNQFNLFAQYSAAAYCGKNNDAPAGTNITCTGNACPEVEKADATFLYSFEDSGVGVVTGFLALDNTNKLIVLSFRGSRSIENWIGNLNFDLKKINDICSGCRGHDGFTSSWRSVADTLRQKVEDAVREHPDYRVVFTGHSLGGALATVAGADLRGNGYDIDVFSYGAPRVGNRAFAEFLTVQTGGTLYRITHTNDIVPRLPPREFGYSHSSPEYWIKSGTLVPVTRNDIVKIEGIDATGGNNRPNIPDIPAHLWYFGLIGTCL

SEQ ID NO: 5050 - protein, 280 aa, Thermomyces lanuginosus
SPIRRKREAEAEVSQDLFNQFNLFAQYSAAAYCGKNNDAPAGTNITCTGNACPEVEKADATFLYSFEDSGVGDVTGFLALDNTNKLIVLSFRGSRSIENWIGNLNFDLKEINDICSGCRGHDGFTSSWRSVADTLRQKVEDAVREHPDYRVVFTGHSLGGALATVAGADLRGNGYDIDVFSYGAPRVGNRAFAEFLTVXTGGTLYRITHTNDIVFRLPPREFGYSHSSPEYWIKSGTLVPVTRNDIVKIEGIDATGGNNQFNIPDIFAHLWYFGLIGTCL

SEQ ID NO: 5051 - protein, 271 aa, Thermomyces lanuginosus
RRPVSQDLFNQFNLFAQYSAAAYCGKNNDAPAGTNITCTGNACPEVEKADATFLYSFEDSGVGDVTGFLALDNTNKLIVLSFRGSRSIENWIGNLNFDLKEINDICSGCRGHDGFTSSWRSVADTLRQKVEDAVREHPDYRVVFTGHSLGGALATVAGADLRGNGYDIDVFSYGAPRVGNRAFAEFLTVQTGGTLYRITHTNDIVPRLPPREFGYSHSSPEYWIKSGTLVPVTRNDIVKICGIDATGGNNRPNIPDIPAHLWYFGLIATCL

SEQ ID NO: 5052 - protein, 271 aa, Thermomyces lanuginosus
RRPVSQDLFNQFNLFAQYSAAAYCGKNNDAPAGTNITCTGNACPEVEKADATFLYSFEDSGVGDVTGFLALDNTNKLIVLSFRGSRSIENWIGNLNFDLKEINDICSGCRGHDGFTSSWRSVADTLRQKVEDAVREHPDYRVVFTGHSLGGALATVAGADLRGNGYDIDVFSYGAPRVGNRAFAEFLTVQTGGTLYRITHTNDIVPRLPPREFGYSHSSPEYWIKSGTLVPVTRNDIVKICGIDATGGNNRPNIPDIPAHLWYFGLISTCL

SEQ ID NO: 5053 - protein, 271 aa, Thermomyces lanuginosus
RRPVSQDLFNQFNLFAQYSAAAYCGKNNDAPAGTNITCTGNACPEVEKADATFLYSFEDSGVGDVTGFLALDNTNKLIVLSFRGSRSIENWIGNLNFDLKEINDICSGCRGHDGFTSSWRSVADTLRQKVEDAVREHPDYRVVFTGHSLGGALATVAGADLRGNGYDIDVFSYGAPRVGNRAFAEFLTVQTGGTLYRITHTNDIVPRLPPREFGYSHSSPEYWIKSGTLVPVTRNDIVKICGIDATGGNNRPNIPDIPAHLWYFGLIDTCL

SEQ ID NO: 5054 - protein, 271 aa, Thermomyces lanuginosus
RRPVSQDLFNQFNLFAQYSAAAYCGKNNDAPAGTNITCTGNACPEVEKADATFLYSFEDSGVGDVTGFLALDNTNKLIVLSFRGSRSIENWIGNLNFDLKKINDICSGCRGHDGFTSSWRSVADTLRQKVEDAVREHPDYRVVFTGHSLGGALATVAGADLRGNGYDIDVFSYGAPRVGNRAFAEFLTVQTGGTLYRITHTNDIVPRLPPREFGYSHSSPEYWIKSGTLVPVTRNDIVKICGIDATGGNNRPNIPDIPAHLWYFGLIGTCL

SEQ ID NO: 5055 - protein, 271 aa, Synthetic construct
RRPVSQDLFNQFNLFAQYSAAAYCGKNNDAPAGTNITCTGNACPEVEKADATFLYSFEDSGVGDVTGFLALDNTNKLIVLSFRGSRSIENWIGNLKFLLKEINDICSGCRGHDGFTSSWRSVADTLRQKVEDAVREHPDYRVVFTGHSLGGALATVAGADLRGNGYDIDVFSYGAPRVGNRAFAEFLTVQTGGTLYRITHTNDIVPRLPPREFGYSHSSPEYWIKSGTLVPVTRNDIVKIEGIDATGGNNRPNIPDIPAHLWYFGLIGTCL

SEQ ID NO: 5056 - protein, 271 aa, Thermomyces lanuginosus
RRPVSQDLFNQFNLFAQYSAAAYCGKNNDAPAGTNITCTGNACPEVEKADATFLYSFEDSGVGDVTGFLALDNTNKLIVLSFRGSRSIENWIGNLNFDLKNINDICSGCRGHDGFTSSWRSVADTLRQKVEDAVREHPDYRVVFTGHSLGGALATVAGADLRGNGYDIDVFSYGAPRVGNRAFAEFLTVQTGGTLYRITHTNDIVPRLPPREFGYSHSSPEYWIKSGTLVPVTRNDIVKICGIDATGGNNRPNIPDIPAHLWYFGLIGTCL

SEQ ID NO: 5057 - protein, 269 aa, Thermomyces lanuginosus
EVSQDLFNQFNLFAQYSAAAYCGKNNDAPAGTNITCTGNACPEVEKADATFLYSFSDSGVGDVTGFLALDNTNKLIVLSFRGSRSIKNWIGNLNFDLKEINDICSGCRGHDGFTSSWRSVADTLRQKVEDAVREHPDYRVVFTGHSLGGALATVAGADLRGNGYDIDVFSYGAPRVGNRAFAEFLTVQTGGTLYRITHTNDIVPRLPPREFGYSHSSPEYWIKSGTLVPVRRRDIVKIEGIDATGGNNQPNIPDIPAHLWYFGLIGTCL

SEQ ID NO: 5058 - protein, 269 aa, Thermomyces lanuginosus
EVSQDLFNQFNLFAQYSAAAYCGKNNDAPAGTNITCTGNACPEVEKADATFLYSFEDSGVGDVTGFLALDNTNKLIVLSFRGSRSIENWIGNLNFDLKEINDICSGCRGHDGFTSSWRSVADTLRQKVEDAVREHPDYRVVFTGHSLGGALATVAGADLRGNGYDIDVFSYGAPRVGNRAFAEFLTVQTGGTLYRITNTNDIVPRLPPREFGYSHSSPEYWIKSGTLVPVRRRDIVKIEGIDATGGNNQPNIPDISAHLWYFGLIGTCL

SEQ ID NO: 5059 - protein, 269 aa, Thermomyces lanuginosus
EVSQDLFNQFNLFAQYSAAAYCGKNNDAPAGTNITCTGNACPEVEKADATFLYSFEDMGVGDVTGFLALDNTNKLIVLSFRGSRSIENWIGNLNFDLKEINDICSGCRGHDGFTSSWRSVADTLRQKVEDAVREHPDYRVVFTGHSLGGALATVAGADLRGNPYDIDVFSYGAPRVGNRAFAEFLTVQTGGTLYRITHTNDIVPRLPPREFGYSHSSPEYWIKSGTMVPVTRNDIVKIEGIDATGGNNQPNIPDIPAHLWYFGRIGTCL

SEQ ID NO: 5060 - protein, 269 aa, Thermomyces lanuginosus
EVSQDLFNQFNLFAQYSAAAYCGKNNRAPAGTNITCTGNACPEVEKADATFLYSFEDSGVGDVTGFLALDNTNKLIVLSFRGSRSIENWIGNLNFDLKEINDICSGCRGHDGFTSSWRSVADTLRQKVEDAVREHPDYRVVFTGHSLGGALATVAGADLRGNGYDIDVFSYGAPRVGNRAFAEFLTVQTGGTLYRITHTNDIVPRLPPREFGYSHSSPEYWIKSGTGVPVRRRDIVKIEGIDATGGNNQPNIPDIPAHLWYFGLIGTCL

SEQ ID NO: 5061 - protein, 269 aa, Thermomyces lanuginosus
EVSQDLFNQFNLFAQYSAAAYCGKNNDAPAGTQITCTGNACPEVEKADATFLYSFEDSGVGDVTGFLALDNTNKLIVLSFRGSRSIENWIGNLNFDLKEINDICSGCRGHDGFTSSDRSVADTLRQKVEDAVREHPDYRVVFTGHSLGGALATVAGADLRGNGYDIDVFSYGAPRVGNRAFAEFLTVQTGGTLYRITHTNDIVPRLPPREFGYSHSSPEYWIKSGTLVPVRRRDIVKIEGIDATGGNNQPNIPDIPAHLWYFGLIGTCL

SEQ ID NO: 5062 - protein, 269 aa, Thermomyces lanuginosus
EVSQDLFNQFNLFAQYSAAAYCGKNNDAPAGTQITCTGNACPEVEKADATFLYSFEDSGVGDVTGFLALDNTNKLIVLSFRGSRSIENWIGNLNFDLKEINDICSGCRGHDGFTSSWRSVADTLRQKVEDAVREHPDYRVVFTGHSLGGALATVAGADLRGNGYDIDVFSYGAPRVGNRAFAEFLTVQTGGTLYRITHTNDIVPRLPPREFGYSHSSPEYWIKSGTLVPVRRRDIVKIEGIDATGGNNQPNIPDIYAHLWYFGLIGTCL

SEQ ID NO: 5063 - protein, 269 aa, Thermomyces lanuginosus
EVSQDLFNQFNLFAQYSAAAYCGKNNDAPAGTNITCTGNACPEVEKADATFLYSFEDSGVGDVTGFLALDNTNKLIVLSFRGSGSIENWIGNLNFDLKEINDICSGCRGHDGYTSSWRSVADTLRQKVEDAVREHPDYRVVFTGHSLGGALATVAGADLRGNGYDIDVFSYGAPRVGNRAFAEFLTVQTGGTLYRITHTNDIVPRLPPREEGYSHSSPEYWIKSGTLVPVTRNDIVKIEGIDATGGNNQPNIPDNPAHLWYFGLIGTCL

SEQ ID NO: 5064 - protein, 269 aa, Thermomyces lanuginosus
EVSQDLFNQFNLFAQYSAAAYCGKNNDAPAGTQITCTGNACPEVEKADATFLYSFEDSGVGDVTGFLALDNTNKLIVLSFRGSRSIENWIGNLRFDLKEINDICSGCRGHDGFTSSWRSVADTLRQKVEDAVREHPDYRVVFTGHSLGGALATVAGADLRGNGYDIDVFSYGAPRVGNRAFAEFLTVQTGGTLYRITHTNDIVPRLPPREFGYSHSSPEYWIKSGTLVPVRRRDIVKIEGIDATGGNNQPNIPDIPAHLWYFGLIGTCL

SEQ ID NO: 5065 - protein, 269 aa, Thermomyces lanuginosus
EVSQDLFNQFNLFAQYSKAAYCGKNNDAPAGTNITCTGNACPEVFKADATFLYSFEDSGVGDVTGFLALDNTNKQIVLSFRGSRSIENWIGNLNFDLKEINDICSGCRGHDGFTSSWRSVADTLRQKVEDAVREHPDYRVVFTGHSLGGALATVAGADLRGNGYDIDVFSYGAPRVGNRAFAEFLTVQDGGTLYRITHTNDIVPRLPPREFGYSHSSPEYWIKSGTLVPVTRNDIVKIEGIDATGGNNQPNIPDIPAHLWYFGLIGTCL

SEQ ID NO: 5066 - protein, 269 aa, Thermomyces lanuginosus
EVSQDLFNQFSLFAQYSAAAYCGKNNDAPAGTQITCTGNACPEVEKADATFLYSFEDSGVGDVTGFLALDNTNKLIVLSFRGSRSIENWIGNLNFDLKEINDICSGCRGHDGFTSSWRSVADTLRQKVEDAVREHPDYRVVFTGHSLGGALATVAGADLRGNGYDIDVFSYGAPRVGNRAFAEFLTVQTGGTLYRITHTNDIVPRLPPREFGYSHSSPEYWIKSGTLVPVRRRDIVKIEGIDATGGNNQPNIPDIPAHLWYFGLIGTCL

SEQ ID NO: 5067 - protein, 269 aa, Thermomyces lanuginosus
EVSQDLFNQFNLFAQYSAAAYCGKNNDAPAGTNITCTGNACPEVEKAQATFLYSFEDSGVGDVTGFLALDNTNKLIVLSFRGSRSIENWIGNLNFDLKEINDICSGCRGHDGFTSSWRSVADTLRQKVEAAVREHPDYRVVFTGHSLGGALATVAGADLRGNPYDIDVFSYGAPRVGNRAFAEFLTVQTGGTLYRITHTNDIVPRLPPREFGYSHSSPEYWIKSGTLVPVTRNDIVKIEGIDATGGNNQPNIPDIPAHLWYFGRIGTCL

SEQ ID NO: 5068 - protein, 269 aa, Thermomyces lanuginosus
EVSQDLFNQFNLFAQYSKAAYCQKNNDAPAGTNITCTGNACPEVFKADATFLYSFEDSGVGDVTGFLALDNTNKLIVLSFRGSRSIENWIGNLNFDLKEINDICSGCRGHDGFTSSWRSVADTLRQKVEDAVREHPDYRVVFTGHSLGGALATVAGADLRGNGYDIDVFSYGAPRVGNRAFAEFLTTQTGGTLYRITHTNDIVPRLPPREFGYSHSSPEYWIKSGTLVPVTRNDIVKIEGIDATGGNNQPNIPDIPAHLWYFGLIGTCL

SEQ ID NO: 5069 - protein, 269 aa, Thermomyces lanuginosus
EVSQDLFNQFNLFAQYSAAAYCGKNNDAPAGTNITCTGNACPEVEKADATFLYSFEDHGLGDVTGFLALDNTNKLIVLSFRGSRSIENWIGNLNFDLKEINDICSGCRGHDGFTSSWRSVADTLRQKVEDAVREHPDYRVVFTGHSLGGALATVAGADLRGNGYDIDVFSYGAPRVGNRAFAEFLTVQTGGTLYRITHTNDIVPRLPPRVFGYSHSSPEYWIKSGTLVPVTRNDIVKIEGIDATGGNNRPNIPDIPAHLWYFGLIGTCL

SEQ ID NO: 5070 - protein, 269 aa, Thermomyces lanuginosus
EVSQDLFNQFNLFAQYSAAAYCGKNNDAPAGTNITCTGNACPEVEKADATFLYSFEDSGVGDVTGFLALDNTNKQIVLSFRGSRSIENWIGNLNFDLKEINDICSGCRGHDGFTSSWRSVADTLRQKVEDAVREHPDYRVVFTGHSLGGALATVAWADLRGNGYDIDVFSYGAPRVGNRAFAEFLTTQTGGTLYRITHTNDIVPRLPPREFGYSHSSPEYWIKSGTLVPVTRNDIVKIEGIDATGGNNQPNIPDIPAHLWYFGRIGTCL

SEQ ID NO: 5071 - protein, 269 aa, Thermomyces lanuginosus
EVSQDLFNQFNLFAQYSAAAYCGKNNDAPAGTQITCTGNACPEVEKADATFLYSFEDSGVGDVTGFLALDNTNKLIVLSFRGSRSIENWIGNLNFDLKEINDICSGCRGHDGFTSSWRSVADTLRQKVEDAVREHPDYRVVFTGHSLGGALATVAGADLRGNGYDIDVFSYGAPRVGNRAFAEFLTVQTGGTLYRITHTNDIVPRLPPREFGYSHSSPEYWIKSGTLVPVRRRDIVKIEGIDATGGNNQPNIPRIPAHLWYFGLIGTCL

SEQ ID NO: 5072 - protein, 269 aa, Thermomyces lanuginosus
EVSQDLFNQFNLFAQYSAAAYCGKNNDAPAGTNITCTGNACPEVEKADATFLYSFEDSGVGDVTGFLALDNTNKLIVLSFRGSRSIENWIANLNFGLKEINDICSGCRGHDGFTSSWRSVADTLRQKVEDAVREHPDYRVVFTGHSLGGALATVAGADLRGNGYDIDVFSYGAPRVGNRAFAEFLTVQTGGTLYRITHTNDIVPRLPPREFGYSHSSPEYWIKSGTLVPVRRRDIVKIEGIDATGGNNQPNIPDIPAHLWYFGLIGTCL

SEQ ID NO: 5073 - protein, 269 aa, Thermomyces lanuginosus
EVSQDLFNQFNLFAQYSAAAYCGKNNDAPAGTQITCTGNACPEVEKADATFLYSFEDSGVGDVTGFLALDNTNKLIVLSFRGSRSIENWIGNLNFDLKEINDICSGCRGHDGFTSSWRSVADTLRQKVEDAVREHPDYRVVFTGHSLGGALATVAGADLRGNGYDIDVFSYGAPRVGNRAFAEFLTVQTGGTLYRITHTNDIVPRLPPREFGYSHSSPEYWIKSGTLVPVRRRDIVKIEGIDATGGNNQPQIPDIPAHLWYFGLIGTCL

SEQ ID NO: 5074 - protein, 269 aa, Thermomyces lanuginosus
EVSQDLFNQFNLFAQYSAAAYCGKNNDAPAGTQITCTGNACPEVEKADATFLYSFEDSGVGDVTGFLALDNTNKLIVLSFRGSRSIENWIGNLNFDLKEINDICSGCRGHDGFTSSWRSVADTLRQKVEDAVREHPDYRVVFTGHSLGGALATVAGADLRGNGYDIDVFSYGAPRVGNRAFAEFLTVQTGGTLYRITHTNDIVPRLPPREFGYSHSSPEYWIKSGTLVPVRRRDIVKIEGIDATGGNNQPNIPGIPAHLWYFGLIGTCL

SEQ ID NO: 5075 - protein, 269 aa, Thermomyces lanuginosus
EVSQDLFNQFNLFAQYSAAAYCGKNNDAPTGTQITCTGNACPEVEKADATFLYSFEDSGVGDVTGFLALDNTNKLIVLSFRGSRSIENWIGNLNFDLKEINDICSGCRGHDGFTSSWRSVADTLRQKVEDAVREHPDYRVVFTGHSLGGALATVAGADLRGNGYDIDVFSYGAPRVGNRAFAEFLTVQTGGTLYRITHTNDIVPRLPPREFGYSHSSPEYWIKSGTLVPVRRRDIVKIEGIDATGGNNQPNIPDIPAHLWYFGLIGTCL

SEQ ID NO: 5076 - protein, 269 aa, Thermomyces lanuginosus
EVSQDLFNQFNLFAQYSAAAYCGKNNEAPAGTNITCTGNACPEVEKADATFLYSFEDSGVGDVTGFLALDNTNKLIVLSFRGSRSIENWIGNLNFDLKEINDICSGCRGHDGFTSSWRSVADTLRQKVEAAVREHPDYRVVFTGHSLGGALATVAGADLRGNGYDIDVFSYGAPRVGNRAFAEFLTVQTGGTLYRITHTNDIVPRLPPREFGYSHSSPEYWIKSGTLVPVTRQDIVKIEGIDATGGNNQPNIPDIPAHLWYFGRIGTCL

SEQ ID NO: 5077 - protein, 269 aa, Thermomyces lanuginosus
EVSRDLFNQFNLFAQYSAAAYCGKNNDAPAGTNITCTGNACPEVEKADATFLYSFEDSGVGDVTGFLALDNTNKLIVLSFRGSRSIENWIGNLNFDLKEINDICSGCRGHDGFTSSWRSVADTLRQKVEDAVREHPDYRVVFTGHSLGGALATVAGADLRGNGYDIDVFSYGAPRVGNRAFAEFLTVQTGGTLYRITHTNDIVPRLPPREFGYSHSSPEYWIKSGTLVPVRRRDIVKIEGIDATGGNNQPNIPDITAHLWYFGLIGTCL

SEQ ID NO: 5078 - protein, 269 aa, Thermomyces lanuginosus
EVSQDLFNQFNLFAQYSAAAYCGKNNDAPAGTQITCTGNACPEVEKADATFLYSFEDSGVGDVTGFLALDNTNKLIVLSFRGSRSIENWIGNLNFDLKEINDICSGCRGHDGFTSSWRSVADTLRQKVEDAVREHPDYRVVFTGHSLGGALATVAGADLRGNGYDIDVFSYGAPRVGNRAFAEFLTVQTGGTLYRITHTNDIVPRLPPRVFGYSHSSPEYWIKSGTLVPVRRRDIVKIEGIDATGGNNQPNIPDIPAHLWYFGLIGTCL

SEQ ID NO: 5079 - protein, 269 aa, Thermomyces lanuginosus
EVSQDLFNQFNLFAQYSAAAYCGKNNDAPAGTQITCTKNACPEVEKADATFLYSFEDSGVGDVTGFLALDNTNKLIVLSFRGSRSIENWIGNLNFDLKEINDICSGCRGHDGFTSSWRSVADTLRQKVEDAVREHPDYRVVFTGHSLGGALATVAGADLRGNGYDIDVFSYGAPRVGNRAFAEFLTVQTGGTLYRITHTNDIVPRLPPREFGYSHSSPEYWIKSGTLVPVRRRDIVKIEGIDATGGNNQPNIPDIPAHLWYFGLIGTCL

SEQ ID NO: 5080 - protein, 269 aa, Thermomyces lanuginosus
EVSQDLFNQFNLFAQYSAAAYCGKNNSAPAGTNITCTGNACPEVEKADATFLYSFKDSGVGDVTGFLALDNTNKLIVLSFRGSRSIENWFGNLNFDLKEINDICSGCRGHDGFTSSWRSVADTLRQKVEDAVREHPDYRVVFTGHSLGGALATVAGADLRGNGYDIDVFSYGAPRVGNRAFAEFLTVQTGGTLYRITHTNDIVPRLPPREFGYSHSSPEYWIKSGTLVPVTRNDIVKIEGIDATGGNNQPNIPDITAHLWYFGLIGTCL

SEQ ID NO: 5081 - protein, 269 aa, Thermomyces lanuginosus
EVSQDLFNQFNLFAQYSAAAYCGKNNDAPAGTQITCTGNACPEVEKADATFLYSFEDSGVGDVTGFLALDNTNKLIVLSFRGSRSIENWIGNLNFDLKEINDICSGCRGHDGFTSSWRSVADTLRQKVEDAVREHPDYRVVFTGHSLGGALATVAGADLRGNGYDIDVFSYGAPRIGNRAFAEFLTVQTGGTLYRITHTNDIVPRLPPREFGYSHSSPEYWIKSGTLVPVRRRDIVKIEGIDATGGNNQPNIPDIPAHLWYFGLIGTCL

SEQ ID NO: 5082 - protein, 269 aa, Thermomyces lanuginosus
EVSQDLFNQFNLFAQYSAAAYCGKNNDAPAGTQITCTGNACPEVEKADATFLYSFEDSGVGDVTGFLALDNTNKLIVLSFRGSRSIENWIGNLNFDLKEINDICSGCRGHDGFTSSPRSVADTLRQKVEDAVREHPDYRVVFTGHSLGGALATVAGADLRGNGYDIDVFSYGAPRVGNRAFAEFLTVQTGGTLYRITHTNDIVPRLPPREFGYSHSSPEYWIKSGTLVPVRRRDIVKIEGIDATGGNNQPNIPDIPAHLWYFGLIGTCL

SEQ ID NO: 5083 - protein, 269 aa, Thermomyces lanuginosus
EVSQDLFNQFNLFAQYSAAAYCGKNNSAPAGTDITCTGNACPEVEKADATFLYSFEDSGVGDVTGFLALDNTNKDIVLSFRGSRSIENWIGNLNFDLKEINDICSGCRGHDGFTSSWRSVADTLRQKVEDAVREHPDYRVVFTGHSLGGALATVAGADLRGNGYDIDVFSYGAPRVGNRAFAEFLTVQDGGTLYRITHTNDIVPRLPPREFGYSHSSPEYWIKSGTLVPVTRNDIVKIEGIDATGGNNQPNIPDIPAHLWYFGLIGTCL

SEQ ID NO: 5084 - protein, 269 aa, Thermomyces lanuginosus
EVSQDLFNQFNLFAQYSAAAYCGKNNDAPAGTNITCTGNACPEVEKADATFLYSFEDSGKGDVTGFLALDNTNKLIVLSFRGSRSIENWIGNLNFDLKEINDICSGCRGHDGFTSSWRSVADTLRQKVEDAVREHPDYRVVFTGHSLGGGLATVAGADLRGNGYDIDVFSYGAPRVGNRAFAEFLTVQTGGTLYRITHTNDIVPRLPPREFGYSHSSPEYWIKSGTLVPVRRRDIVKIEGIDATGGNNQPNIPDIPAHLWYFGLIGTCL

SEQ ID NO: 5085 - protein, 269 aa, Synthetic construct
EVSQDLFNQFNLFAQYSAAAYCGKNNDAPAGTNITCTGNACPEVEKADATFLYSFEGSGVGDVTGFLALDNTNKLIVLSFRGSRSIENWIGNLKFLLKEINDICSGCRGHDGFTSSWRSVADTLRQKVEDAVREHPDYRVVFTGHSLGGALATVAGADLRGNGYDIDVFSYGAPRVGNRAFAEFLTVQTGGTLYRITHTNDIVPRLPPREFGYSHSSPEYWIKSGTLVPVTRNDIVKIEGIDATGGNNRPNIPDIPAHLWYFGLIGTCL

SEQ ID NO: 5086 - protein, 269 aa, Thermomyces lanuginosus
EVSQDLFNQFNLFAQYSAAAYCGKNNDAPAGTQITCTGNACPEVEKADATFLYSFEDSGVGDVTGFLALDNTNKLIVLSFRGSRSIENWIGNLNFDLKEINDICSGCRGHDGFTSSWRSVADTLRQKVEDAVREHPDYRVVFTGHSLGGALATVAGADLRGNRYDIDVFSYGAPRVGNRAFAEFLTVQTGGTLYRITHTNDIVPRLPPREFGYSHSSPEYWIKSGTLVPVRRRDIVKIEGIDATGGNNQPNIPDIPAHLWYFGLIGTCL

SEQ ID NO: 5087 - protein, 269 aa, Thermomyces lanuginosus
EVSQDLFNQFNLFAQYSAAAYCKKNNDAPAGTNITCTGNACPEVEKADATFLYSFEDSGVGDVTGFLALDNTNKRIVLSFRGSRSIENWIGNLNFDLKEINDICSGCRGHDGFTSSWRSVADTLRQKVEAAVREHPDYRVVFTGHSLGGALATVAGADLRGNGYDIDVFSYGAPRVGNRAFAEFLTVQTGGTLYRITHTNDIVPRLPPREFGYSHSSPEYWIKSGTLVPVTRNDIVKIEGIDATGGNNQPNIPDIPAHLWYFGRIGTCL

SEQ ID NO: 5088 - protein, 269 aa, Thermomyces lanuginosus
EVSQDLFNQFKLFAQYSAAAYCGKNNNAPAGTNITCTGNACPEVEKADATFLYSFEDMGVGDVTGFLALDNTNKLIVLSFRGSRSIENWIGNLNFDLKEINDICSGCRGHDGFTSSWRSVADTLRQKVEDAVREHPDYRVVFTGHSLGGALATVAGADLRGNGYDIDVFSYGAPRVGNRAFAEFLTVQTGGTLYRITHTNDIVPRLPPREFGYSHSSPEYWIKSGTLVPVTRNDIVKIEGIDATGGNNQPNIPDITAHLWYFGLIGTCL

SEQ ID NO: 5089 - protein, 269 aa, Thermomyces lanuginosus
EVSQDLFNQFNLFAQYSAAAYCGKNNSAPAGTNITCTGNACPEVFKADATFLYSFEDSGVGDVTGFLALDNTRKDIVLSFRGSRSIENWIGNLNFDLKEINDICSGCRGHDGFTSSWRSVADTLRQKVEDAVREHPDYRVVFTGHSLGGALATVAGADLRGNGYDIDVFSYGAPRVGNRAFAEFLTVQTGGTLYRITHTNDIVPRLPPREFGYSHSSPEYWIKSGTLVPVTRNDIVKIEGIDATGGNNQPNIPDIPAHLWYFGLIGTCL

SEQ ID NO: 5090 - protein, 269 aa, Thermomyces lanuginosus
EVSQDLFNQFNLFAQYSAAAYCGKNNSAEAGTNITCTGNACPEVFKADATFLYSFEDSGVGDVTGFLALDNTNKDIVLSFRGSRSIENWIGNLNFDLKEINDICSGCRGHDGFTSSWRSVADTLRQKVEDAVREHPDYRVVFTGHSLGGALATVAGADLRGNGYDIDVFSYGAPRVGNRAFAEFLTVQTGGTLYRITHTNDIVPRLPPREFGYSHSSPEYWIKSGTLVPVTRNDIVKIEGIDATGGNNQPNIPDIPAHLWYFGLIGTCL

SEQ ID NO: 5091 - protein, 269 aa, Thermomyces lanuginosus
EVSQDLFNQFNLFAQYSAAAYCGKNNDAPAGTNITCTGNACPEVEKADATILYSFEDSGVGDVTGFLALDNTNKLIVLSFRGSRSIENWIGNLNFDLKEINDICSGCRGHDGFTSSWRSVADTLRQKVEDAVREHPDYRVVFTGHSLGGALATVAGADLRGNGYDIDVFSYGAPRVGNRAFAEFLTVQTGGTLYRITHTNDIVPRLPPREFGYSHSSPEYWIKSGTLVPVRRRDIVKIEGIDATGGNNQPNIPDITAHLWYFGLIGTCL

SEQ ID NO: 5092 - protein, 269 aa, Thermomyces lanuginosus
EVSQDLFNQFNLFAQYSAAAYCGKNNDAPAGTNITCTGNACPEVEKADATFLYSFEDSGVGDVTGFLALDNTNKLIVLSFRGSRSIKNWIGNLNFDLKEINDICSGCRGHSGFTSSWRSVADTLRQKVEDAVREHPDYRVVFTGHSLGGALATVAGADLRGNGYDIDVFSYGAPRVGNRAFAEFLTVQTGGTLYRITHTNDIVPRLPPREFGYSHSSPEYWIKSGTLVPVRRRDIVKIEGIDATGGNNQPNIPDIPAHLWYFGLIGTCL

SEQ ID NO: 5093 - protein, 269 aa, Thermomyces lanuginosus
EVSQDLFNQFNLFAQYSAAAYCGKNNDAPAGTNITCTGNACPEVEKADATFLYSFEDSGVGDVTGFLALDNTNKLIVLSFRGSRSIENWIGNLNFDLKEIRDICSGCRGHDGFTSSWRSVADTLRQKVEDAVREHPDYRVVFTGHSLGGALATVAGADLRGNGYDIDVFSYGAPRVGNRAFAEFLTVQTGGTLYQITHTNDIVPRLPPEEFGYSHSSPEYWIKSGTLVPVTRNDIVKIEGIDATGGNNQPNIPDIPAHSWYFGLIGTCL

SEQ ID NO: 5094 - protein, 269 aa, Thermomyces lanuginosus
EVSQDLFNQFNLFAQYSAAAYCGKNNDAPAGTQITCTGNACPEVEKADATFLYSFEDSGVGDVTGFLALDNTNKLIVLSFRGSRSIENWIGNLNFDLKEINDICSGCRGHDGFTSSWRSVADTLRQKVEDAVREHPDYRVVFTGHSLGGALATVAGADLRGNGYDIDVFSYGAPRVGNRAFAEFLTVQTGGTLYRITHTNDIVPRLPPREFGYSHSSPEYWIKSGTLVPVRRRDIVKIEGIDATGGNNQPNIPLIPAHLWYFGLIGTCL

SEQ ID NO: 5095 - protein, 269 aa, Thermomyces lanuginosus
EVSQDLFNQFNLFAQYSAAAYCGKNNDAPAGTQITCTGNACPEVEKADATFLYSFQDSGVGDVTGFLALDNTNKLIVLSFRGSRSIENWIGNLNFDLKEINDICSGCRGHDGFTSSWRSVADTLRQKVEDAVREHPDYRVVFTGHSLGGALATVAGADLRGNGYDIDVFSYGAPRVGNRAFAEFLTVQTGGTLYRITHTNDIVPRLPPREFGYSHSSPEYWIKSGTLVPVRRRDIVKIEGIDATGGNNQPNIPDIPAHLWYFGLIGTCL

SEQ ID NO: 5096 - protein, 269 aa, Thermomyces lanuginosus
EVSQDLFNQFNLFAQYSAAAYCGKNNDAPAGTQITCTPNACPEVEKADATFLYSFEDSGVGDVTGFLALDNTNKLIVLSFRGSRSIENWIGNLNFDLKEINDICSGCRGHDGFTSSWRSVADTLRQKVEDAVREHPDYRVVFTGHSLGGALATVAGADLRGNGYDIDVFSYGAPRVGNRAFAEFLTVQTGGTLYRITHTNDIVPRLPPREFGYSHSSPEYWIKSGTLVPVRRRDIVKIEGIDATGGNNQPNIPDIPAHLWYFGLIGTCL

SEQ ID NO: 5097 - protein, 269 aa, Thermomyces lanuginosus
EVSQDLFNQFNLFAQYSAAAYCGKNNDAPAGTQITCTGNACPEVEKADATFLYSFEDSGVGDVTGFLALDNTNKLIVLSFRGSRSIENWIGNLNFDLKEINDICSGCRGHDGFTSSWRSVADTLRQKVEDAVREHPDYRVVFTGHSLGGALATVAGADLRANGYDIDVFSYGAPRVGNRAFAEFLTVQTGGTLYRITHTNDIVPRLPPREFGYSHSSPEYWIKSGTLVPVRRRDIVKIEGIDATGGNNQPNIPDIPAHLWYFGLIGTCL

SEQ ID NO: 5098 - protein, 269 aa, Thermomyces lanuginosus
EVSQDLFNQFNLFAQYSAAAYCGKNNDAPAGTQITCTGNACPEVEKADATFLYSFEDSGVGDVTGFLALDNTNKLIVLSFRGSRSIENWIGNLNFDLKEINDICSGCRGHDGFTSSWRSVADTLRQKVEDAVREHPDYRVVFTGHSLGGALATVAGADLRGNIYDIDVFSYGAPRVGNRAFAEFLTVQTGGTLYRITHTNDIVPRLPPREFGYSHSSPEYWIKSGTLVPVRRRDIVKIEGIDATGGNNQPNIPDIPAHLWYFGLIGTCL

SEQ ID NO: 5099 - protein, 269 aa, Thermomyces lanuginosus
EVSQDLFNQFNLFAQYSAAAYCGKNNDAPAGTNITCTGNACPEVEKADATFLYSFEDKGLGDVTGFLALDNTNKLIVLSFRGSRSIENWIGNLNFDLKEINDICSGCRGHDGFTSSWRSVADTLRQKVEDAVREHPDYRVVFTGHSLGGALATVAGADLRGNGYDIDVFSYGAPRVGNRAFAEFLTVQTGGTLYRITHTNDIVPRLPPRVFGYSHSSPEYWIKSGTLVPVTRNDIVKIEGIDATGGNNRPNIPDIPAHLWYFGLIGTCL

SEQ ID NO: 5100 - protein, 269 aa, Thermomyces lanuginosus
EVSQDLFNQFNLFAQYSAAAYCGKNNDAPAGTNITCTGNACPEVEKADATFLYSFEDSGVGDVTGFLALDNTNKQIILSFRGSRSIENWIGNLRFDLKEINDICSGCRGHDGFTSSWRSVADTLRQKVEDAVREHPDYRVVFTGHSLGGALATVAWADLRGNGYDIDVFSYGAPRVGNRAFAEFLTVQTGGTLYRITHTNDIVPRLPPREFGYSHSSPEYWIKSGTLVPVTRNDIVKIEGIDATGGNNQPNIPDIPAHLWYFGLIGTCL

SEQ ID NO: 5101 - protein, 269 aa, Thermomyces lanuginosus
EVSQDLFNQFNLFAQYSAAAYCGKNNDAPAGTNITCTGNACPEVEKADATFLYSFEDSGVGDVTGFLALDNTNKLIVLSFRGSRSIENWIGNLNFDLKEINDICSGCRGHDGFTSSWRSVADTLRQKVEDAVREHPDYRVVFTGHSLGGALATVAGADLRGNGYDIDVFSYGAPRVGNRAFAEFLTVQTGGTLYRITHTNDLVPRLPPREFGYSHSSPEYWIKSGTLVPVRRRDIVKIEGIDATGGNNQPNIPDAPAHLWYFGLIGTCL

SEQ ID NO: 5102 - protein, 269 aa, Thermomyces lanuginosus
EVSQDLFNQFNLFAQYSKAAYCGKNNDAPAGTNITCTGNACPEVEKADATFLYSFEDSGVGDVTGFLALDNTNKQIVLSFRGSRSIENWIGNLNFDLKEINDICSGCRGHDGFTSSWRSVADTLRQKVEDAVREHPDYRVVFTGHSLGGALATVAWADLRGNGYDIDVFSYGAPRVGNRAFAEFLTVQDGGTLYRITHTNDIVPRLPPREFGYSHSSPEYWIKSGTLVPVTRNDIVKIEGIDATGGNNQPNIPDIPAHLWYFGLIGTCL

SEQ ID NO: 5103 - protein, 269 aa, Thermomyces lanuginosus
EVSQDLFNQFNLFAQYSAAAYCGANNDAPAGTNITCTGNACPEVEKADATFLYSFEDSGVGDVTGFLALDNTNKLIVLSFRGSRSIENWIGNLNFDLKEINDICSGCRGHDGFTSSWRSVADTLRQKVEAAVREHPDYRVVFTGHSLGGALATIAGADLRGNGYDIDVFSYGAPRVGNRAFAEFLTTQTGGTLYRITHTNDIVPRLPPREFGYSHSSPEYWIKSGTLVPVTRNDIVKIEGIDATGGNNQPNIPDIPAHLWYFGLIGTCL

SEQ ID NO: 5104 - protein, 269 aa, Thermomyces lanuginosus
EVSQDLFNQFKLFAQYSAAAYCGKNNNAPAGTNITCTGNACPEVEKADATFLYSFKDMGVGDVTGFLALDNTNKLIVLSFRGSRSIENWIGNLNFDLKEINDICSGCRGHDGFTSSWRSVADTLRQKVEDAVREHPDYRVVFTGHSLGGALATVAGADLRGNGYDIDVFSYGAPRVGNRAFAEFLTVQTGGTLYRITHTNDIVPRLPPREFGYSHSSPEYWIKSGTLVPVTRNDIVKIEGIDATGGNNQPNIPDIPAHLWYFGLIGTCL

SEQ ID NO: 5105 - protein, 269 aa, Thermomyces lanuginosus
EVSQDLFNQFNLFAQYSKAAYCGKNNDAPAGTNITCTGNACPEVEKADATFLYSFEDSGVGDVTGFLALDNTRKDIVLSFRGSRSIENWIGNLNFDLKEINDICSGCRGHDGFTSSWRSVADTLRQKVEDAVREHPDYRVVFTGHSLGGALATVAGADLRGNGYDIDVFSYGAPRVGNRAFAEFLTVQDGGTLYRITHTNDIVPRLPPREFGYSHSSPEYWIKSGTLVPVTRNDIVKIEGIDATGGNNQPNIPDIPAHLWYFGLIGTCL

SEQ ID NO: 5106 - protein, 269 aa, Thermomyces lanuginosus
EVSVDLFNQFNLFAQYSAAAYCGKNNDAPAGTNITCTGNACPEVEKADATFLYSFEDXGVGDVTGFLALDNTNKLIVLSFRGSRSIENWRGNLNFDLKEINDICSGCRGHDGFTSSWRSVADTLRQKVEDAVREHPDYRVVFTGHSLGGALATVAGADLRGNGYDIDVFSYGAPRVGNRAFAEFLTVQTGGTLYRITHTNDIVPRLPPREFGYSHSSPEYWIKSGTLVPVTRNDIVKIEGIDATGGNNXPNIPDIPAHLWYFGLIGTCL

SEQ ID NO: 5107 - protein, 269 aa, Thermomyces lanuginosus
EVSQDLFNQFNLFAQYSAAAYCGKNNSAPAGTDITCTGNACPEVEKADATFLYSFEDSGVGDVTGFLALDNTRKLIVLSFRGSRSIENWIGNLNFDLKEINDICSGCRGHDGFTSSWRSVADTLRQKVEDAVREHPDYRVVFTGHSLGGALATVAGADLRGNGYDIDVFSYGAPRVGNRAFAEFLTVQDGGTLYRITHTNDIVPRLPPREFGYSHSSPEYWIKSGTLVPVTRNDIVKIEGIDATGGNNQPNIPDIPAHLWYFGLIGTCL

SEQ ID NO: 5108 - protein, 269 aa, Thermomyces lanuginosus
EVSQDLFNQFNLFAQYSAAAYCGKNNDAPAGTQITCTGNACPEVEKADATFLYSFEDSGVGDVTGFLALDNTNKLIVLSFRGSRSIENWIGNLNFDLKEINDICSGCRGHDGFTSSWRSVADTLRQKVEDAVREHPDYRVVFTGHSLGGALATVAGADLRGNGYDIDVFSYGAPRVGNRAFAEFLTVQTGGTLYRITHTNDIVPRLPPREFGYSHSSPEYWIKSGTLVPVRRRDIVKIEGIDATGGNNRPNIPDIPAHLWYFGLIGTCL

SEQ ID NO: 5109 - protein, 269 aa, Thermomyces lanuginosus
EVSQDLFNQFNLFAQYSAAAYCGKNNDAPAGTNITCTGNACPEVEKADATFLYSFEDNGVGDVTGFLALDNTNKLIVLSFRGSRSIENWRGNLNFDLKEINDICSGCRGHDGFTSSWRSVADTLRQKVEDAVREHPDYRVVFTGHSLGGALATVAGADLRGNGYDIDVFSYGAPRVGNRAFAEFLTVQTGGTLYRITHTNDIVPRLPPREFGYSHSSPEYWIKSGTLVPVRRRDIVKIEGIDATGGNNQPNIPDIPAHLWYFGLIGTCL

SEQ ID NO: 5110 - protein, 269 aa, Thermomyces lanuginosus
EVSQDLFNQFNLFAQYSAAAYCGKNNDALAGTNITCTGNACPEVEKADATFLYSFEDSGVGDVTGFLALDNTNKLIVLSFRGSRSIENWIGNLNFDLKEINDICSGCRGHDGFTSSWRSVADTLRQKVEDAVREHPDYRVVFTGHSLGGALATVAGADLRGNGYDIDVFSYGAPRVGNRAFAEFLTVQTGGTLYRITHTNDIVPRLPPREFGYSHSSPEYWIKSGTLVLVRRRDIVKIEGIDATGGNNQPNIPDIPAHLWYFGLIGTCL

SEQ ID NO: 5111 - protein, 269 aa, Thermomyces lanuginosus
EVSQDLFNQFNLFAQYSAAAYCGKNNDAPAGTQITCTGNACPEVEKADATFLYSFEDSGVGDVTGFLALDNTNKLIVLSFRGSRSIENWIGNLNFDLKEINDICSGCRGHDGFTSSWRSVADTLRQKVEDAVREHPDYRVVFTGHSLGGALATVAGADLRGGGYDIDVFSYGAPRVGNRAFAEFLTVQTGGTLYRITHTNDIVPRLPPREFGYSHSSPEYWIKSGTLVPVRRRDIVKIEGIDATGGNNQPNIPDIPAHLWYFGLIGTCL

SEQ ID NO: 5112 - protein, 269 aa, Thermomyces lanuginosus
EVSQDLFNQFNLFAQYSKAAYCGKNNDAPAGTNITCTGNACPEVEKADATFLYSFEDSGVGDVTGFLALDNTNKQIVLSFRGSRSIENWIGNLRFDLKEINDICSGCRGHDGFTSSWRSVADTLRQKVEDAVREHPDYRVVFTGHSLGGALATVAGADLRGNGYDIDVFSYGAPRVGNRAFAEFLTQQTGGTLYRITHTNDIVPRLPPREFGYSHSSPEYWIKSGTLVPVTRNDIVKIEGIDATGGNNQPNIPDIPAHLWYFGLIGTCL

SEQ ID NO: 5113 - protein, 269 aa, Thermomyces lanuginosus
EVSQDLFNQFNLFAQYSAAAYCGKNNDAPAGTNITCTGNACPEVEKADATFLYSFEDSGVGDVTGFLALDNTNKLIVLSFRGSRSIENWIGNLNFDLKEINDICSGCRGHDGFTSSWRSVADTLRQKVEDAVREHPDYRVVFTGHSLGGALATVAGADLRGNGYDIDVFSYGAPRVGNRAFAEFLTVQTGGTLYRITHTNDIVPRLPPREFGYSHSSPEYWIKSGTLVPVTRNDIVKIEGIDATGGNNQPNIPDIPAHLWYFFAISECL

SEQ ID NO: 5114 - protein, 269 aa, Thermomyces lanuginosus
EVSQDLFNQFNLFAQYSAAAYCGKNNDAPAGTQITCTGNACPEVEKADATFLYSFEDSGVGDVTGFLALDNTNKLIVLSFRGSRSIENWIANLNFDLKEINDICSGCRGHDGFTSSWRSVADTLRQKVEDAVREHPDYRVVFTGHSLGGALATVAGADLRGNGYDIDVFSYGAPRVGNRAFAEFLTVQTGGTLYRITHTNDIVPRLPPREFGYSHSSPEYWIKSGTLVPVRRRDIVKIEGIDATGGNNQPNIPDIPAHLWYFGLIGTCL

SEQ ID NO: 5115 - protein, 269 aa, Thermomyces lanuginosus
EVSQDLFNQFNLFAQYSAAAYCGKNNDAPAGTQITCTGNACPEVEKADATFLYSFEDSGVGDVTGFLALDNTNKLIVLSFRGSRSIENWIGNLNFDLKEINDICSGCRGHDGFTSSWRSVADTLRQKVEDAVREHPDYRVVFTGHSLGGALATVAGADLRGNWYDIDVFSYGAPRVGNRAFAEFLTVQTGGTLYRITHTNDIVPRLPPREFGYSHSSPEYWIKSGTLVPVRRRDIVKIEGIDATGGNNQPNIPDIPAHLWYFGLIGTCL

SEQ ID NO: 5116 - protein, 269 aa, Thermomyces lanuginosus
EVSQDLFNQFNLFAQYSAAAYCGKNNDAPAGTQITCTGNACPEVEKADATFLYSFEDSGVGDVTGFLALDNTNKLIVLSFRGSRSIENWIGNLNFGLKEINDICSGCRGHDGFTSSWRSVADTLRQKVEDAVREHPDYRVVFTGHSLGGALATVAGADLRGNGYDIDVFSYGAPRVGNRAFAEFLTVQTGGTLYRITHTNDIVPRLPPREFGYSHSSPEYWIKSGTLVPVRRRDIVKIEGIDATGGNNQPNIPDIPAHLWYFGLIGTCL

SEQ ID NO: 5117 - protein, 269 aa, Thermomyces lanuginosus
EVSQDLFNQFNLFAQYSAAAYCGKNNDAPAGTQITCTGNACPEVEKADATFLYSFEDSGVGDVTGFLALDNTNKLIVLSFRGSRSIENWIGNLKFDLKEINDICSGCRGHDGFTSSWRSVADTLRQKVEDAVREHPDYRVVFTGHSLGGALATVAGADLRGNGYDIDVFSYGAPRVGNRAFAEFLTVQTGGTLYRITHTNDIVPRLPPREFGYSHSSPEYWIKSGTLVPVRRRDIVKIEGIDATGGNNQPNIPDIPAHLWYFGLIGTCL

SEQ ID NO: 5118 - protein, 269 aa, Thermomyces lanuginosus
EVSQDLFNQFNLFAQYSAAAYCGKNNEAPAGTNITCTGNACPEVEKADATFLYSFEDSGVGDVTGFLALDNTNKLIVLSFRGSRSIENWIGNLNFDLKEINDICSGCRGHDGFTSSWRSVADTLRQKVEDAVREHPQYRVVFTGHSLGGALATVAGADLRGNPYDIDVFSYGAPRVGNRAFAEFLTVQTGGTLYRITHTNDIVPRLPPREFGYSHSSPEYWIKSGTMVPVTRNDIVKIEGIDATGGNNQPNIPDIPAHLWYFGLIGTCL

SEQ ID NO: 5119 - protein, 269 aa, Thermomyces lanuginosus
EVSQDLFNQFNLFAQYSAAAYCGKNNDAPAGTNITCTGNACPEVEKADATFLYSFEDSGVGDVTGFLALDNTNKLIVLSFRGSRSIENWIGNLNFDLKEINGICSGCRGHDGFTSSWRSVADTLRQKVEDAVREHPDYRVVFTGHSLGGALATVAGADLRGNGYDIDVFSYGAPRVGNRAFAEFLTVQTGGTLYRITHTNDIVPRLPPREFGYSHSSPEYWIKSGTLVPVRRRDIVKIEGIDATGGNNRPNIPDIPAHLWYFGLIGTCL

SEQ ID NO: 5120 - protein, 269 aa, Thermomyces lanuginosus
EVSQDLFNQFNLFAQYSAAAYCGKNNDAPAGTNITCTGNACPEVEKADATFLYSFKDSGVGDVTGFLALDNTNKLIVLSFRGSRSIENWIGNLNFDLKEINDICSGCRGHDGFTSSWRSVADTLRQKVEAAVREHPDYRVVFTGHSLGGALATVAGADLRGNGYDIDVFSYGAPRVGNRAFAEFLTTQTGGTLYRITHTNDIVPRLPPREFGYSHSSPEYWIKSGTLVPVTRNDIVKIEGIDATGGNNQPNIPDIPAHLWYFGRIGTCL

SEQ ID NO: 5121 - protein, 269 aa, Thermomyces lanuginosus
EVSQDLFNQFNLFAQYSAAAYCGKNNDAPAGTNITCTGNACPEVEKADATFLYSFEDSGVGDVTGFLALDNTNKLIVLSFRGSRSIENWIGNLNFDLIEINDICSGCRGHDGFTSSWRSVADTLRQKVEDAVREHPDYRVVFTGHSLGGALATVAGADLRGNGYDIDVFSYGAPRVGNRAFAEFLTVQTGGTLYRITHTNDIVPRLPPREFGYSHSSPEYWIKSGTLVPVRRRDIVKIEGIDATGGNNQPSIPDIPAHLWYFGLIGTCL

SEQ ID NO: 5122 - protein, 269 aa, Thermomyces lanuginosus
EVSQDLFNQFNLFAQYSAAAYCGKNNDAPAGTQITCTGNACPEVEKADATFLYSFEDSGVGDVTGFLALDNTQKLIVLSFRGSRSIENWIGNLNFDLKEINDICSGCRGHDGFTSSWRSVADTLRQKVEDAVREHPDYRVVFTGHSLGGALATVAGADLRGNGYDIDVFSYGAPRVGNRAFAEFLTVQTGGTLYRITHTNDIVPRLPPREFGYSHSSPEYWIKSGTLVPVRRRDIVKIEGIDATGGNNQPNIPDIPAHLWYFGLIGTCL

SEQ ID NO: 5123 - protein, 269 aa, Thermomyces lanuginosus
EVSQDLFNQFNLFAQYSAAAYCGKNNDAPAGTNITCTGNACPEVEKADATFLYSFEDSGVGDVTGFLALDNTNKRIVLSFRGSRSIENWIGNLNFDLKEINDICSGCRGHDGFTSSWRSVADTLRQKVEAAVREHPDYRVVFTGHSLGGALATIAGADLRGNGYDIDVFSYGAPRVGNRAFAEFLTVQTGGTLYRITHTNDIVPRLPPREFGYSHSSPEYWIKSGTLVPVTRNDIVKIEGIDATGGNNQPNIPDIPAHLWYFGRIGTCL

SEQ ID NO: 5124 - protein, 269 aa, Thermomyces lanuginosus
EVSQDLFNQFNLFAQYSAAAYCGKNNDAPAGTNITCTGNACPEVEKADATVLYSFEDSGVGDVTGFLALDNTNKLIVLSFRGSRSIENWIGNLNFELKEINDICSGCRGHDGFTSSWRSVADTLRQKVEDAVREHPDYRVVFTGHSLGGALATVAGADLRGNGYDIDVFSYGAPRVGNRAFAEFLTVQTGGTLYRITHTNDIVPRLPPREFGYSHSSPEYWIKSGTLVPVRRRDIVKIEGIDATGGNNQPNIPDIPAHLWYFGLIGTCL

SEQ ID NO: 5125 - protein, 269 aa, Thermomyces lanuginosus
EVSQDLFNQFNLFAQYSAAAYCGKNNDAPAGTQITCTGNACPEVEKADATFLYSFKDSGVGDVTGFLALDNTNKLIVLSFRGSRSIENWIGNLNFDLKEINDICSGCRGHDGFTSSWRSVADTLRQKVEDAVREHPDYRVVFTGHSLGGALATVAGADLRGNGYDIDVFSYGAPRVGNRAFAEFLTVQTGGTLYRITHTNDIVPRLPPREFGYSHSSPEYWIKSGTLVPVRRRDIVKIEGIDATGGNNQPNIPDIPAHLWYFGLIGTCL

SEQ ID NO: 5126 - protein, 269 aa, Thermomyces lanuginosus
EVSQDLFNQFNLFAQYSAAAYCGKNNDAPAGTNITCTGNACPEVEKADATFLYSFEDSGVGDVTGFLALDNTNKLIVLSFRGSRSIENWIQNLNFDLKEINDICSGCRGHDGFTSSWRSVADTLRQKVEDAVREHPDYRVVFTGHSLGGALATVAGADLRGNGYDIDVFSYGAPRVGNRAFAEFLTVQTGGTLYRITHTNDIVPRLPPRQFGYSHSSPEYWIKSGTLVPVRRNDIVKIEGIDATGGNNQRNIPDIPAHLWYFGLIGTCL

SEQ ID NO: 5127 - protein, 269 aa, Thermomyces lanuginosus
EVSQDLFNQFNLFAQYSKAAYCGKNNDAEAGTDITCTGNACPEVEKADATFLYSFEDSGVGDVTGFLALDNTNKDIVLSFRGSRSIENWIGNLNFDLKEINDICSGCRGHDGFTSSWRSVADTLRQKVEDAVREHPDYRVVFTGHSLGGALATVAGADLRGNGYDIDVFSYGAPRVGNRAFAEFLTVQTGGTLYRITHTNDIVPRLPPREFGYSHSSPEYWIKSGTLVPVTRNDIVKIEGIDATGGNNQPNIPDIPAHLWYFGLIGTCL

SEQ ID NO: 5128 - protein, 269 aa, Synthetic construct
EVSQDLFNQFNLFAQYSAAAYCGKNNDAPAGTNITCTGNACPEVEKADATFLYSFEDSGVGDVTGFLALDNTNKLIVLSFRGSRSIENWIGNLNFDLKEINDICSGCRGHDGFTSSWRSVADTLRQKVEDAVREHPDYRVVFTGHSLGGALATVAGADLRGNGYDIGVFSYGAPRVGNRAFAEFLTVQTGGTLYRITHTNDIVPRLPPRVFGYSHSSPEYLIKSGTLVPVTRNDIVKIEGIDATGGNNRPNIPDIPAHLWYFGLIGTCL

SEQ ID NO: 5129 - protein, 269 aa, Thermomyces lanuginosus
EVSQDLFNQFNLFAQYSAAAYCGKNNDAPAGTNITCTGNACPEVEKADATFLYSFEDSGVGDVTGFLALDNTNKLIVLSFRGSRSIENWIGNLNFDLKEINDICSGCRGHDGFTSSWRSVADTLRQKVEDAVREHPDYRVVFTGHSLGGALATVAGADLRGDGYDIDVFSYGAPRVGNRAFAEFLTVQTGGTLYRITHTNDIVPRLPPREFGYSHSSPEYWIKSGTLRPVRRRDIVKIEGIDATGGNNQPNIPDIPAHLWYFGLIGTCL

SEQ ID NO: 5130 - protein, 269 aa, Thermomyces lanuginosus
EVSQDLFNQFNLFAQYSKAAYCGKNNSAPAGTNITCTGNACPEVFKADATFLYSFEDSGVGDVTGFLALDNTRKLIVLSFRGSRSIENWIGNLNFDLKEINDICSGCRGHDGFTSSWRSVADTLRQKVEDAVREHPDYRVVFTGHSLGGALATVAGADLRGNGYDIDVFSYGAPRVGNRAFAEFLTVQTGGTLYRITHTNDIVPRLPPREFGYSHSSPEYWIKSGTLVPVTRNDIVKIEGIDATGGNNQPNIPDIPAHLWYFGLIGTCL

SEQ ID NO: 5131 - protein, 269 aa, Thermomyces lanuginosus
EVSQDLFNQFNLFAQYSKAAYCGKNNDAPAGTNITCTGNACPEVEKADATFLYSFEDSGVGDVTGFLALDNTNKLIVLSFRGSRSIENWIGNLNFDLKEINDICSGCRGHDGFTSSWRSVADTLRQKVEAAVREHPDYRVVFTGHSLGGALATVAWADLRGNGYDIDVFSYGAPRVGNRAFAEFLTTQTGGTLYRITHTNDIVPRLPPREFGYSHSSPEYWIKSGTLVPVTRNDIVKIEGIDATGGNNQPNIPDIPAHLWYFGLIGTCL

SEQ ID NO: 5132 - protein, 269 aa, Thermomyces lanuginosus
EVSQDLFNQFNLFAQYSAAAYCGKNNDAPAGTNITCTGNACPEVEKADATFLYSFEDSGVGDVTGFLALDNTNKLIVLSFRGSRSIENWIGNLNFDLKEINDICSGCRGHDGFTSSWRSVADTLRQKVEDAVREHPDYRVVFAGHSLGGALATVAGADLRGDGYDIDVFSYGAPRVGNRAFAEFLTVQTGGTLYRITHTNDIVPRLPPREFGYSHSSPEYWIKSGTLVPVRRRDIVKIEGIDATGGNNQPNIPDIPAHLWYFGLIGTCL

SEQ ID NO: 5133 - protein, 269 aa, Thermomyces lanuginosus
EVSRDLFNQFNLFAQYSAAAYCGKNNDAPAGTNITCTGNACPEVEKADATFLYSFEDSGVGDVTGFLALDNTNKLIVLSFRGSRSIENWIGNLNFDLKEINDICSGCRGHDGFTSSWRSVADTLRQKVEDAVREHPDYRVVFAGHSLGGALATVAGADLRGNGYDIDVFSYGAPRVGNRAFAEFLTVQTGGTLYRITHTNDIVPRLPPREFGYSHSSPEYWIKSGTLVPVRRRDIVKIEGIDATGGNNQPNIPDIPAHLWYFGLIGTCL

SEQ ID NO: 5134 - protein, 269 aa, Thermomyces lanuginosus
EVSQDLFNQFNLFAQYSAAAYCGKNNDAPAGTQITCTGNACPEVEKADATFLYSFEDSGVGDVTGFLALDNTNKLIVLSFRGSRSIENWIGNLNFDLKEINDICSGCRGHDGFTSSWRSVANTLRQKVEDAVREHPDYRVVFTGHSLGGALATVAGADLRGNGYDIDVFSYGAPRVGNRAFAEFLTVQTGGTLYRITHTNDIVPRLPPREFGYSHSSPEYWIKSGTLVPVRRRDIVKIEGIDATGGNNQPNIPDIPAHLWYFGLIGTCL

SEQ ID NO: 5135 - protein, 269 aa, Thermomyces lanuginosus
EVSQDLFNQFNLFAQYSAAAYCGKNNDAPAGTNITCTGNACPEVEKADATTLYSFEDSGVGDVTGFLALDNTNKLIVLSFRGSRSIENWIGNLNFDLKEINDICSGCRGHDGFTSSWRSVADTLRQKVEAAVREHPDYRVVFTGHSLGGALATVAGADLRGNGYDIDVFSYGAPRVGNRAFAEFLTVQTGGTLYRITHTNDIVPRLPPREFGYSHSSPEYWIKSGTLVPVTRNDIVKIEGIDATGGNNQPNQPDIPAHLWYFGRIGTCL

SEQ ID NO: 5136 - protein, 269 aa, Synthetic construct
EVSQDLFNQFNLFAQYSAPAYCGKNNDAPAGTNITCTGNACPEVEKADATFLYSFEDSGVGDVTGFLALDNTNKLIVLSFRGSRSIENWIGNLNFDLKEINDICSGCRGHDGFTSSWRSVADTLRQKVEDAVREHPDYRVVFTGHSLGGALATVAGADLRGNGYDIGVFSYGAPRVGNRAFAEFLTVQTGGTLYRITHTNDIVPRLPPRVFGYSHSSPEYLIKSGTLVPVTRNDIVKIEGIDATGGNNQPNIPDIPAHLWYFGLIGTCL

SEQ ID NO: 5137 - protein, 269 aa, Thermomyces lanuginosus
EVSQDLFNQFNLFAQYSAAAYCGKNNDAPAGTQITCTGNACPEVEKADATFLYSFEDSGVGDVTGFLALDNTNKLIVLSFRGSRSIENWIGNLNFDLKEINDICSGCRGHDGFTSSWRSVADTLRQKVEDAVREHPDYRVVFTGHSLGGALATVAGADLRGNGYDIDVFSYGAPRVGNRAFAEFLTVQTGGTLYRITHTNDIVPRLPPRDFGYSHSSPEYWIKSGTLVPVRRRDIVKIEGIDATGGNNQPNIPDIPAHLWYFGLIGTCL

SEQ ID NO: 5138 - protein, 269 aa, Thermomyces lanuginosus
EVSQDLFNQFNLFAQYSKAAYCQKNNDAPAGTNITCTGNACPEVEKADVTFLYSFEDSGVGDVTGFLALDNTNKLIVLSFRGSRSIENWIGNLNFDLKEINDICSGCRGHDGFTSSWRSVADTLRQKVEDAVREHPDYRVVFTGHSLGGALATVAGADLRGNGYDIDVFSYGAPRVGNRAFAEFLTTQTGGTLYRITHTNDIVPRLPPREFGYSHSSPEYWIKSGTLVPVTRNDIVKIEGIDATGGNNQPNIPDIPAHLWYFGLIGTCL

SEQ ID NO: 5139 - protein, 269 aa, Thermomyces lanuginosus
EVSQDLFNQFNLFAQYSAAAYCGKNNDAPAGTNITCTGNACPEVEKADATFLYSFEDNGVGGVTGFLALDNTNKLIVLSFRGSRSIENWIGNLNFDLKEINDICSGCRGHDGFTSSWRSVADTLRQKVEDAVREHPDYRVVFTGHSLGGALATVAGADLRGNGYDIDVFSYGAPRVGNRAFAEFLTVQTGGTLYRITHTNDIVPRLPPREFGYSHSSPEYWIKSGTLVPVRRRDIVKIEGIDATGGNNQPNIPDIPAHLWYFGLIGTCL

SEQ ID NO: 5140 - protein, 269 aa, Thermomyces lanuginosus
EVSQDLFNQFNLFAQYSAAAYCGKNNDAPAGTQITCTGNACPEVEKADATFLYSFEDSGVGDVTGFLALDNTNKLIVLSFRGSRSIENWIGNLNFDLKEINDICSGCRGHDGFTSSWRSVADTLRQKVEDAVREHPDYRVVFTGHSLGGALATVAGADLRGNPYDIDVFSYGAPRVGNRAFAEFLTVQTGGTLYRITHTNDIVPRLPPREFGYSHSSPEYWIKSGTLVPVRRRDIVKIEGIDATGGNNQPNIPDIPAHLWYFGLIGTCL

SEQ ID NO: 5141 - protein, 269 aa, Thermomyces lanuginosus
EVSQDLFNQFNLFAQYSAAAYCGANNDAPAGTNITCTGNACPEVEKADATFLYSFEDSGVGDVTGFLALDNTNKQIVLSFRGSRSIENWIGNLNFDLKEINDICSGCRGHDGFTSSWRSVADTLRQKVEAAVREHPDYRVVFTGHSLGGALATVAWADLRGNGYDIDVFSYGAPRVGNRAFAEFLTVQTGGTLYRITHTNDIVPRLPPREFGYSHSSPEYWIKSGTLVPVTRNDIVKIEGIDATGGNNQPNIPDIPAHLWYFGLIGTCL

SEQ ID NO: 5142 - protein, 269 aa, Thermomyces lanuginosus
EVSQDLFNQFNLFAQYSAAAYCGKNNDAPAGTQITCTGNACPEVEKADATFLYSFEDSGVGDVTGFLALDNTNKLIVLSFRGSRSIENWIYNLNFDLKEINDICSGCRGHDGFTSSWRSVADTLRQKVEDAVREHPDYRVVFTGHSLGGALATVAGADLRGNGYDIDVFSYGAPRVGNRAFAEFLTVQTGGTLYRITHTNDIVPRLPPREFGYSHSSPEYWIKSGTLVPVRRRDIVKIEGIDATGGNNQPNIPDIPAHLWYFGLIGTCL

SEQ ID NO: 5143 - protein, 269 aa, Thermomyces lanuginosus
EVSQDLFNQFNLFAQYSAAAYCGKNNDAPAGTNITCTGNACPEVEKADATFLYSFEDSGVGDVTGFLALDNTNKLIVLSFRGSRSIENWIGNLNFDLKEINDICSGCRGHDGFTSSWRSVADTLRQKVEDAVREHPDYRVVFTGHSLGGALATVAGADLRGNGYDIDVFSYGAPRVGNRAFAEFLTVQTGGTLYRITHTNDIVPRLPPRVFGYSHSSPEYWIKSGTLVPVRRRDIVKIEGIDATGGNNRPNIPDIPAHLWYFGLIGTCL

SEQ ID NO: 5144 - protein, 269 aa, Thermomyces lanuginosus
EVSQDLFNQFNLFAQYSAAAYCGKNADAPAGTQITCTGNACPEVEKADATFLYSFEDSGVGDVTGFLALDNTNKLIVLSFRGSRSIENWIGNLNFDLKEINDICSGCRGHDGFTSSWRSVADTLRQKVEDAVREHPDYRVVFTGHSLGGALATVAGADLRGNGYDIDVFSYGAPRVGNRAFAEFLTVQTGGTLYRITHTNDIVPRLPPREFGYSHSSPEYWIKSGTLVPVRRRDIVKIEGIDATGGNNQPNIPDIPAHLWYFGLIGTCL

SEQ ID NO: 5145 - protein, 269 aa, Thermomyces lanuginosus
EVSQDLFNQFNLFAQYSAAAYCGKNNDAPAGTQITCTGNACPEVEKADATFLYSFEDSGVGDVTGFLALDNTNKLIVLSFRGSRSIENWIGNLNFDLKEINDICSGCRGHDGFTSSWRSVADTLRQKVEDAVREHPDYRVVFTGHSLGGALATVAGADLRGNTYDIDVFSYGAPRVGNRAFAEFLTVQTGGTLYRITHTNDIVPRLPPREFGYSHSSPEYWIKSGTLVPVRRRDIVKIEGIDATGGNNQPNIPDIPAHLWYFGLIGTCL

SEQ ID NO: 5146 - protein, 269 aa, Thermomyces lanuginosus
EVSQDLFNQFNLFAQYSAAAYCGKNNDAPAGTNITCTGNACPEVEKADATILYSFEDSGVGDVTGFLALDNTNKLIVLSFRGSRSIENWIGNLNFDLKEINDICSGCRGHDGFTSSWRSVADTLRQKVEDAVREHPDYRVVFAGHSLGGALATVAGADLRGNGYDIDVFSYGAPRVGNRAFAEFLTVQTGGTLYRITHTNDIVPRLPPREFGYSHSSPEYWIKSGTLVPVRRRDIVKIEGIDATGGNNQPNIPDIPAHLWYFGLIGTCL

SEQ ID NO: 5147 - protein, 269 aa, Thermomyces lanuginosus
EVSQDLFNQFNLFAQYSAAAYCGKNNDAPAGTQITCTGNACPEVEKADATFLYSFEDSGVGDVTGFLALDNTNKLIVLSFRGSRSIENWIGNLNFDLKEINDICSGCRGHDGFTSSWRSVADTLRQKVEDAVREHPDYRVVFTGHSLGGALATVAGADLRGNQYDIDVFSYGAPRVGNRAFAEFLTVQTGGTLYRITHTNDIVPRLPPREFGYSHSSPEYWIKSGTLVPVRRRDIVKIEGIDATGGNNQPNIPDIPAHLWYFGLIGTCL

SEQ ID NO: 5148 - protein, 269 aa, Thermomyces lanuginosus
EVSQDLFNQFNLFAQYSKAAYCQKNNDAPAGTNITCTGNACPEVEKADATFLYSFEDSGVGDVTGFLALDNTNKQIILSFRGSRSIENWIGNLNFDLKEINDICSGCRGHDGFTSSWRSVADTLRQKVEDAVREHPDYRVVFTGHSLGGALATVAGADLRGNGYDIDVFSYGAPRVGNRAFAEFLTVQTGGTLYRITHTNDIVPRLPPREFGYSHSSPEYWIKSGTLVPVTRNDIVKIEGIDATGGNNQPNIPDIPAHLWYFGLIGTCL

SEQ ID NO: 5149 - protein, 269 aa, Thermomyces lanuginosus
EVSQDLFNQFNLFAQYSAAAYCGKNNDAPAGTNITCTGNACPEVEKADATFLYSFEDSGVGDVTGFLALDNTNKLIVLSFRGSRSIENWIGNLNFDLKEINDICSGCRGHDGFTSSWRSVADTLRQKVEDAVREHPDYRVVFTGHSLGGALATVAGADLRGNGYDIDVFSYGAPRVGNRAFAEFLTVQTGGTLYRITHTNDIVPRLPPREFGYSHSSPEYWIKSGTGVPVRRRDIVKIEGIDATGGNNQPNIPDIKAHLWYFGLIGTCL

SEQ ID NO: 5150 - protein, 269 aa, Thermomyces lanuginosus
EVSQDLFNQFNLFAQYSAAAYCGKNNDAPAGTDITCTGNACPEVFKADATFLYSFEDSGVGDVTGFLALDNTRKLIVLSFRGSRSIENWIGNLNFDLKEINDICSGCRGHDGFTSSWRSVADTLRQKVEDAVREHPDYRVVFTGHSLGGALATVAGADLRGNGYDIDVFSYGAPRVGNRAFAEFLTVQQGGTLYRITHTNDIVPRLPPREFGYSHSSPEYWIKSGTLVPVTRNDIVKIEGIDATGGNNQPNIPDIPAHLWYFGLIGTCL

SEQ ID NO: 5151 - protein, 269 aa, Thermomyces lanuginosus
EVSQDLFNQFNLFAQYSAAAYCGKNNDAPAGTNITCTGNACPEVEKADATFLYSFEDSGVGDVTGFLALDNTNKLIVLSFRGSRSIENWIGNLNFDLKEINDICSGCRGHDGFTSSWRSVADTLRQKVEDAVREHPDYRVVFTGHSLGGALATVAGADLRGNGYDIDVFSYGAPRVGNRAFAEFLTVQTGGTLYRITHTNDCVPRLPPREFGYSHSSPEYWIKSGTLVPVRRRDIVKIEGIDATGGNNQPNICDIPAHLWYFGLIGTCL

SEQ ID NO: 5152 - protein, 269 aa, Thermomyces lanuginosus
EVSQDLFNQFNLFAQYSAAAYCGKNNDAPAGTNITCTGNACPEVEKADATFLYSFEDAGSGDVTGFLALDNTNKLIVLSFRGSRSIENWIGNLNFDLKEINDICSGCRGHDGFTSSWRSVADTLRQKVEDAVREHPDYRVVFTGHSLGGGLATVAGADLRGNGYDIDVFSYGAPRVGNRAFAEFLTVQTGGTLYRITHTNDIVPRLPPREFGYSHSSPEYWIKSGTGVPVTRNDIVKIEGIDATGGNNQPNIPDIPAHLWYFGLIGTCL

SEQ ID NO: 5153 - protein, 269 aa, Thermomyces lanuginosus
EVSQDLFNQFNLFAQYSKAAYCGKNNDAPAGTNITCTGNACPEVEKADATFLYSFEDSGVGDVTGFLALDNTNKQIVLSFRGSRSIENWIGNLRFDLKEINDICSGCRGHDGFTSSWRSVADTLRQKVEDAVREHPDYRVVFTGHSLGGALATVAWADLRGNGYDIDVFSYGAPRVGNRAFAEFLTVQTGGTLYRITHTNDIVPRLPPREFGYSHSSPEYWIKSGTLVPVTRNDIVKIEGIDATGGNNQPNIPDIPAHLWYFGLIGTCL

SEQ ID NO: 5154 - protein, 269 aa, Thermomyces lanuginosus
EVSQDLFNQFNLFAQYSAAAYCGKNNDAPAGTQITCTGNACPEVEKADATFLYSFEDSGVGDVTGFLALDNTNKLIVLSFRGSRSIENWIGNLNFDLKEINDICSGCRGHDGFTSSWRSVADTLRQKVEDAVREHPDYRVVFTGHSLGGALATVAGADLRGNGYDIDVFSYGAPRVGNRAFAEFLTVQTGGTLYRITHTNDIVPRLPPREFGYSHSSPEYWIKSGTLVPVRRRDIVKIEGIDATGGNNQPNIPSIPAHLWYFGLIGTCL

SEQ ID NO: 5155 - protein, 269 aa, Thermomyces lanuginosus
EVSQDLFQQFNLFAQYSAAAYCGKNNDAPAGTQITCTGNACPEVEKADATFLYSFEDSGVGDVTGFLALDNTNKLIVLSFRGSRSIENWIGNLNFDLKEINDICSGCRGHDGFTSSWRSVADTLRQKVEDAVREHPDYRVVFTGHSLGGALATVAGADLRGNGYDIDVFSYGAPRVGNRAFAEFLTVQTGGTLYRITHTNDIVPRLPPREFGYSHSSPEYWIKSGTLVPVRRRDIVKIEGIDATGGNNQPNIPDIPAHLWYFGLIGTCL

SEQ ID NO: 5156 - protein, 269 aa, Thermomyces lanuginosus
EVSQDLFNQFNLFAQYSAAAYCGKNNDAPAGTNITCTGNACPEVEKADATFLYSFEDSGVGDVTGFLALDNTNKLIVLSFRGSRSVENWIGNLNFDLKEINDICSGCRGHDGFTSSWRSVADTLRQKVEDAVREHPDYRVVFTGHSLGGALATVAGADLRGNGYDIDVFSYGAPRVGNRAFAEFLTVQTGGTLYRITHTNDIVPRLPPREFGYSHSSPEYWIKSGTGVPVRRNDIVKIEGIDATGGNNQPNIPDIKAHLWYFGLIGTCL

SEQ ID NO: 5157 - protein, 269 aa, Thermomyces lanuginosus
EVSQDLFNQFNLFAQYSAAAYCGKNNDAPAGTNITCTGNACPVVEKADATFLYSFEDSGVGDVTGFLALDNTNKLIVLSFRGSRSIENWIRNLNFDLKEINDICSGCRGHDGFTSSWRSVADTLRQKVEDAVREHPDYRVVFTGHSLGGALATVAGADLRGNGYDIDVFSYGAPRVGNRAFAEFLTVQTGGTLYRITHTNDIVPRLPPREFGYSHSSPEYWIKSGTLVPVRRRDIVKIEGIDATGGNNQPNIPDIPAHLWYFGLIGTCL

SEQ ID NO: 5158 - protein, 269 aa, Thermomyces lanuginosus
EVSQDLFNQFNLFAQYSAAAYCGKNNDAPAGTQITCTGNACPEVEKADATFLYSFEDSGVGDVTGFLALDNTNKLIVLSFRGSRSIENWIMNLNFDLKEINDICSGCRGHDGFTSSWRSVADTLRQKVEDAVREHPDYRVVFTGHSLGGALATVAGADLRGNGYDIDVFSYGAPRVGNRAFAEFLTVQTGGTLYRITHTNDIVPRLPPREFGYSHSSPEYWIKSGTLVPVRRRDIVKIEGIDATGGNNQPNIPDIPAHLWYFGLIGTCL

SEQ ID NO: 5159 - protein, 269 aa, Thermomyces lanuginosus
EVSQDLFNQFNLFAQYSAAAYCGKNNDAPAGTQITCTGNACPEVEKADATFLYSFEDSGVGDVTGFLALDNTNKLIVLSFRGSRSIENWIGNLNFDLKEINDICSGCRGHDGFTSSWRSVADTLRQKVEDAVREHPDYRVVFTGHSLGGALATVAGADLRGNAYDIDVFSYGAPRVGNRAFAEFLTVQTGGTLYRITHTNDIVPRLPPREFGYSHSSPEYWIKSGTLVPVRRRDIVKIEGIDATGGNNQPNIPDIPAHLWYFGLIGTCL

SEQ ID NO: 5160 - protein, 269 aa, Thermomyces lanuginosus
EVSQDLFNQFNLFAQYSAAAYCGKNNDAPAGTNITCTGNACPEVEKADATFLYSFEDSGVGDVTGFLALDNTNKLIVLSFRGSRSIENWIGNLNFDLKEINDICSGCRGHAGFTSSWRSVADTLRQKVEAAVREHPDYRVVFTGHSLGGALATVAGADLRGNGYDIDVFSYGAPRVGNRAFAEFLTTQTGGTLYRITHTNDIVPRLPPREFGYSHSSPEYWIKSGTLVPVTRNDIVKIEGIDATGGNNQPNIPDIPAHLWYFGRIGTCL

SEQ ID NO: 5161 - protein, 269 aa, Thermomyces lanuginosus
EVSQDLFNQFNLFAQYSAAAYCGKNNDAPAGTNITCTGNACPEVEKADATFLYSFEDSGVGDVTGFLALDNTNKLIVLSFRGSRSIKNWIENLNFDLKEINDICSGCRGHDGFTSSWRSVADTLRQKVEDAVREHPDYRVVFTGHSLGGALATVAGADLRGNGYDIDVFSYGAPRVGNRAFAEFLTVQTGGTLYRITHTNDIVPRLPPREFGYSHSSPEYWIKSGTLVPVRRRDIVKIEGIDATGGNNQPNIPDIPAHLWYFGLIGTCL

SEQ ID NO: 5162 - protein, 269 aa, Thermomyces lanuginosus
EVSQDLFNQFNLFAQYSAAAYCGKNNDAPAGTQITCTGNACPEVEKADATFLYSFEDSGVGDVTGFLALDNTNKLIVLSFRGSRSIENWIGNLNFDLKEINDICSGCRGHDGFTSSWRSVADTLRQKVEDAVREHPDYRVVFTGHSLGGALATVAGADLRGNGYDIDVFSYGAPRVGNRAFAEFLTVQTGGTLYRITHTNDIVPRLPPREFGYSHSSPEYWIKSGTLVRVRRRDIVKIEGIDATGGNNQPNIPDIPAHLWYFGLIGTCL

SEQ ID NO: 5163 - protein, 269 aa, Thermomyces lanuginosus
EVSQDLFNQFRLFAQYSAAAYCGKNNDAPAGTQITCTGNACPEVEKADATFLYSFEDSGVGDVTGFLALDNTNKLIVLSFRGSRSIENWIGNLNFDLKEINDICSGCRGHDGFTSSWRSVADTLRQKVEDAVREHPDYRVVFTGHSLGGALATVAGADLRGNGYDIDVFSYGAPRVGNRAFAEFLTVQTGGTLYRITHTNDIVPRLPPREFGYSHSSPEYWIKSGTLVPVRRRDIVKIEGIDATGGNNQPNIPDIPAHLWYFGLIGTCL

SEQ ID NO: 5164 - protein, 269 aa, Thermomyces lanuginosus
EVSQDLFNQFNLFAQYSAAAYCGKNNDAPAGTQITCTGNACPEVEKADATFLYSFEDSGVGDVTGFLALDNTNKLIVLSFRGSRSIENWIGNLNFDLKEINDICSGCRGHDGFTSSWRSVADTLRQKAEDAVREHPDYRVVFTGHSLGGALATVAGADLRGNGYDIDVFSYGAPRVGNRAFAEFLTVQTGGTLYRITHTNDIVPRLPPREFGYSHSSPEYWIKSGTLVPVRRRDIVKIEGIDATGGNNQPNIPDIPAHLWYFGLIGTCL

SEQ ID NO: 5165 - protein, 269 aa, Thermomyces lanuginosus
EVSQDLFNQFNLFAQYSAAAYCGKNNDAPAGTNITCTGNACPEVEKADATFLYSFEDSGVGDVTGFLALDNTNKQIILSFRGSRSIENWIGNLNFDLKEINDICSGCRGHDGFTSSWRSVADTLRQKVEAAVREHPDYRVVFTGHSLGGALATVAGADLRGNGYDIDVFSYGAPRVGNRAFAEFLTQQTGGTLYRITHTNDIVPRLPPREFGYSHSSPEYWIKSGTLVPVTRNDIVKIEGIDATGGNNQPNIPDIPAHLWYFGLIGTCL

SEQ ID NO: 5166 - protein, 269 aa, Thermomyces lanuginosus
EVSQDLFNQFNLFAQYSAAAYCGKNNDAPAGTQITCTGNACPEVEKADATFLYSFEDSGVGDVTGFLALDNTNKLIVLSFRGSRSIENWIGNLNFDLKEINDICSGCRGHNGFTSSWRSVADTLRQKVEDAVREHPDYRVVFTGHSLGGALATVAGADLRGNGYDIDVFSYGAPRVGNRAFAEFLTVQTGGTLYRITHTNDIVPRLPPREFGYSHSSPEYWIKSGTLVPVRRRDIVKIEGIDATGGNNQPNIPDIPAHLWYFGLIGTCL

SEQ ID NO: 5167 - protein, 269 aa, Thermomyces lanuginosus
EVSQDLFNQFNLFAQYSAAAYCKKNNDAPAGTNITCTGNACPEVEKADATFLYSFEDSGVGDVTGFLALDNTNKRIVLSFRGSRSIENWIGNLNFDLKEINDICSGCRGHDGFTSSWRSVADTLRQKVEDAVREHPDYRVVFTGHSLGGALATVAGADLRGNGYDIDVFSYGAPRVGNRAFAEFLTNQTGGTLYRITHTNDIVPRLPPREFGYSHSSPEYWIKSGTLVPVTRNDIVKIEGIDATGGNNQPNIPDIPAHLWYFGRIGTCL

SEQ ID NO: 5168 - protein, 269 aa, Thermomyces lanuginosus
EVSQDLFNQFNLFAQYSAAAYCGKNNDAPAGTNITCTGNACPEVEKADATFLYSFEDSGVGDVTGFLALDNTNKRIVLSFRGSRSIENWIGNLNFDLKEINDICSGCRGHDGFTSSWRSVADTLRQKVEAAVREHPDYRVVFTGHSLGGALATVAGADLRGNGYDIDVFSYGAPRVGNRAFAEFLTTQTGGTLYRITHTNDIVPRLPPREFGYSHSSPEYWIKSGTLVPVTRNDIVKIEGIDATGGNNQPNIPDIPAHLWYFGRIGTCL

SEQ ID NO: 5169 - protein, 269 aa, Thermomyces lanuginosus
EVSQDLFNQFNLFAQYSKAAYCGKNNDAPAGTNITCTGNACPEVEKADVTFLYSFEDSGVGDVTGFLALDNTNKQIVLSFRGSRSIENWIGNLNFDLKEINDICSGCRGHDGFTSSWRSVADTLRQKVEDAVREHPDYRVVFTGHSLGGALATVAGADLRGNGYDIDVFSYGAPRVGNRAFAEFLTTQTGGTLYRITHTNDIVPRLPPREFGYSHSSPEYWIKSGTLVPVTRNDIVKIEGIDATGGNNQPNIPDIPAHLWYFGLIGTCL

SEQ ID NO: 5170 - protein, 269 aa, Thermomyces lanuginosus
EVSQDLFNQFNLFAQYSKAAYCGKNNSAPAGTNITCTGNACPEVFKADATFLYSFEDSGVGDVTGFLALDNTNKLIVLSFRGSRSIENWIGNLNFDLKEINDICSGCRGHDGFTSSWRSVADTLRQKVEDAVREHPDYRVVFTGHSLGGALATVAGADLRGNGYDIDVFSYGAPRVGNRAFAEFLTVQDGGTLYRITHTNDIVPRLPPREFGYSHSSPEYWIKSGTLVPVTRNDIVKIEGIDATGGNNQPNIPDIPAHLWYFGLIGTCL

SEQ ID NO: 5171 - protein, 269 aa, Thermomyces lanuginosus
EVSQDLFNQFNLFAQYSAAAYCGKNNDAPAGTNITCTGNACPEVEKADATFLYSFEDSGVGDVTGFLALDNTNKLIVLSFRGSRSIENWIGNLNFDLKEINDICSGCRGHDGFTSSWFSVADTLRQKVEDAVREHPDYRVVFTGHSLGGALATVAGADLRGNGYDIDVFSYGAPRVGNRAFAEFLTVQTGGTLYRITHTNDIVPRLPPREFGYSHSSPEYWIKSGTLVPVRRRDIVKIEGIDATGGNNQPNIPDITAHLWYFGLIGTCL

SEQ ID NO: 5172 - protein, 269 aa, Thermomyces lanuginosus
EVSQDLFNQFNLFAQYSAAAYCGKNNSAEAGTDITCTGNACPEVEKADATFLYSFEDSGVGDVTGFLALDNTNKDIVLSFRGSRSIENWIGNLNFDLKEINDICSGCRGHDGFTSSWRSVADTLRQKVEDAVREHPDYRVVFTGHSLGGALATVAGADLRGNGYDIDVFSYGAPRVGNRAFAEFLTVQTGGTLYRITHTNDIVPRLPPREFGYSHSSPEYWIKSGTLVPVTRNDIVKIEGIDATGGNNQPNIPDIPAHLWYFGLIGTCL

SEQ ID NO: 5173 - protein, 269 aa, Thermomyces lanuginosus
EVSQDLFNQFNLFAQYSAAAYCGKNNDAPAGTNITCTGNACPEVEKADATFLYSFEDSGVGDVTGFLALDNTNKLIVLSFRGSRSIENWIANLNFDLKKINDICSGCRGHDGFTSSWRSVADTLRQKVEDAVREHPDYRVVFTGHSLGGALATVAGADLRGNGYDIDVFSYGAPRVGNRAFAEFLTVQTGGTLYRITHTNDIVPRLPPREFGYSHSSPEYWIKSGTLVPVRRRDIVKIEGIDATGGNNQPNIPDIPAHLWYFGLIGTCL

SEQ ID NO: 5174 - protein, 269 aa, Thermomyces lanuginosus
EVSQDLFNQFNLFAQYSKAAYCGKNNDAPAGTDITCTGNACPEVEKADATFLYSFEDSGVGDVTGFLALDNTNKDIVLSFRGSRSIENWIGNLNFDLKEINDICSGCRGHDGFTSSWRSVADTLRQKVEDAVREHPDYRVVFTGHSLGGALATVAGADLRGNGYDIDVFSYGAPRVGNRAFAEFLTVQDGGTLYRITHTNDIVPRLPPREFGYSHSSPEYWIKSGTLVPVTRNDIVKIEGIDATGGNNQPNIPDIPAHLWYFGLIGTCL

SEQ ID NO: 5175 - protein, 269 aa, Thermomyces lanuginosus
EVSQDLFNQFNLFAQYSAAAYCGKNNNAPAGTNITCTGNACPEVEKADATFLYSFEDMGVGDVTGFLALDNTNKLIVLSFRGSRSIENWIGNLNFDLKEINDICSGCRGHDGFTSSWRSVADTLRQKVEDAVREHPDYRVVFTGHSLGGALATVAGADLRGNGYDIDVFSYGAPRVGNRAFAEFLTVQTGGTLYRITHTNDIVPRLPPREFGYSHSSPEYWIKSGTLVPVTRQDIVKIEGIDATGGNNQPNIPDITAHLWYFGLIGTCL

SEQ ID NO: 5176 - protein, 269 aa, Thermomyces lanuginosus
EVSQDLFNQFNLFAQYSAAAYCKKNNDAPAGTNITCTGNACPEVEKADATFLYSFKDSGVGDVTGFLALDNTNKQIVLSFRGSRSIENWIGNLNFDLKEINDICSGCRGHDGFTSSWRSVADTLRQKVEDAVREHPDYRVVFTGHSLGGALATVAGADLRGNGYDIDVFSYGAPRVGNRAFAEFLTVQTGGTLYRITHTNDIVPRLPPREFGYSHSSPEYWIKSGTLVPVTRNDIVKIEGIDATGGNNQPNIPDIPAHLWYFGRIGTCL

SEQ ID NO: 5177 - protein, 269 aa, Thermomyces lanuginosus
EVSQDLFNQFNLFAQYSAAAYCGKNNDAEAGTNITCTGNACPEVFKADATFLYSFEDSGVGDVTGFLALDNTNKDIVLSFRGSRSIENWIGNLNFDLKEINDICSGCRGHDGFTSSWRSVADTLRQKVEDAVREHPDYRVVFTGHSLGGALATVAGADLRGNGYDIDVFSYGAPRVGNRAFAEFLTVQDGGTLYRITHTNDIVPRLPPREFGYSHSSPEYWIKSGTLVPVTRNDIVKIEGIDATGGNNQPNIPDIPAHLWYFGLIGTCL

SEQ ID NO: 5178 - protein, 269 aa, Thermomyces lanuginosus
EVSQDLFNQFNLFAQYSAAAYCGKNNDAPAGTNITCTGNACPEVEKADATFLYSFEDSGVGDVTGFLALDNTNKLIVLSFRGSRSIENWIGNLNFDLKEINDICSGCRGHDGFTSSWRSVADTLRQKVEDAVREHPDYRVVFTGHSLGGALATVAGADLRGNGYDIDVFSYGAPRVGNRAFAEFLTVQTGGTLYRITHTNDIVPRLPPRQFGYSHSSPEYWIKSGTLPPVRRRDIVKIEGIDATGGNNQPNIPDIPAHLWYFGLIGTCL

SEQ ID NO: 5179 - protein, 269 aa, Thermomyces lanuginosus
EVSQDLFNQFNLFAQYSAAAYCGKNNDAPAGTQITCTGNACPEVEKADATFLYSFEDSGVGDVTGFLALDNTNKLIVLSFRGSRSIENWIGNLNFYLKEINDICSGCRGHDGFTSSWRSVADTLRQKVEDAVREHPDYRVVFTGHSLGGALATVAGADLRGNGYDIDVFSYGAPRVGNRAFAEFLTVQTGGTLYRITHTNDIVPRLPPREFGYSHSSPEYWIKSGTLVPVRRRDIVKIEGIDATGGNNQPNIPDIPAHLWYFGLIGTCL

SEQ ID NO: 5180 - protein, 269 aa, Thermomyces lanuginosus
EVSQDLFNQFNLFAQYSKAAYCAKNNDAPAGTNITCTGNACPEVEKADVTFLYSFEDSGVGDVTGFLALDNTNKLIVLSFRGSRSIENWIGNLNFDLKEINDICSGCRGHDGFTSSWRSVADTLRQKVEDAVREHPDYRVVFTGHSLGGALATVAGADLRGNGYDIDVFSYGAPRVGNRAFAEFLTVQDGGTLYRITHTNDIVPRLPPREFGYSHSSPEYWIKSGTLVPVTRNDIVKIEGIDATGGNNQPNIPDIPAHLWYFGLIGTCL

SEQ ID NO: 5181 - protein, 269 aa, Thermomyces lanuginosus
EVSQDLFNQFNLFAQYSAAAYCGKNNQAPAGTNITCTGNACPEVEKADATFLYSFKDSGVGDVTGFLALDNTNKLIVLSFRGSRSIENWIGNLNFDLKEINDICSGCRGHDGFTSSWRSVADTLRQKVEDAVREHPDYRVVFTGHSLGGALATVAGADLRGNGYDIDVFSYGAPRVGNRAFAEFLTVQTGGTLYRITHTNDIVPRLPPREFGYSHSSPEYWIKSGTLVPVTRADIVKIEGIDATGGNNQPNIPDITAHLWYFGLIGTCL

SEQ ID NO: 5182 - protein, 269 aa, Thermomyces lanuginosus
EVSQDLFNQFNLFAQYSAAAYCGKNNDAPAGTQITCTGNACPEVEKADATFLYSFEDSGVGDVTGFLALDNTNKLIVLSFRGSRSIENWIGNLNFDLKEINDICSGCRGHDGFTSSFRSVADTLRQKVEDAVREHPDYRVVFTGHSLGGALATVAGADLRGNGYDIDVFSYGAPRVGNRAFAEFLTVQTGGTLYRITHTNDIVPRLPPREFGYSHSSPEYWIKSGTLVPVRRRDIVKIEGIDATGGNNQPNIPDIPAHLWYFGLIGTCL

SEQ ID NO: 5183 - protein, 269 aa, Thermomyces lanuginosus
EVSQDLFNQFNLFAQYSAAAYCQANNDAPAGTNITCTGNACPEVEKADATFLYSFEDSGVGDVTGFLALDNTNKLIILSFRGSRSIENWIGNLNFDLKEINDICSGCRGHDGFTSSWRSVADTLRQKVEDAVREHPDYRVVFTGHSLGGALATVAWADLRGNGYDIDVFSYGAPRVGNRAFAEFLTVQTGGTLYRITHTNDIVPRLPPREFGYSHSSPEYWIKSGTLVPVTRNDIVKIEGIDATGGNNQPNIPDIPAHLWYFGLIGTCL

SEQ ID NO: 5184 - protein, 269 aa, Thermomyces lanuginosus
EVSQDLFNQFNLFAQYSAAAYCGKNNDAPAGTQITCTGNACPEVEKADATFLYSFEDSGVGDVTGFLALDNTNKLIVLSFRGSRSIENWIGNLNFDLKEINDICSGCRGHDGFTSSWRSVADTLRQKVEHAVREHPDYRVVFTGHSLGGALATVAGADLRGNGYDIDVFSYGAPRVGNRAFAEFLTVQTGGTLYRITHTNDIVPRLPPREFGYSHSSPEYWIKSGTLVPVRRRDIVKIEGIDATGGNNQPNIPDIPAHLWYFGLIGTCL

SEQ ID NO: 5185 - protein, 269 aa, Synthetic construct
EVSQDLFNQFNLFAQYSAAAYCGKNNDAPAGTNITCTGNACPEVEKADATFLYSFEGSGVGDVTGFLALDNTNKLIVLSFRGSRSIENWIGNLKFLMKEINDICSGCRGHDGFTSSWRSVADTLRQKVEDAVREHPDYRVVFTGHSLGGALATVAGADLRGNGYDIDVFSYGAPRVGNRAFAEFLTVQTGGTLYRITHTNDIVPRLPPREFGYSHSSPEYWIKSGTLVPVTRNDIVKIEGIDATGGNNQPNIPDIPAHLWYFGLIGTCL

SEQ ID NO: 5186 - protein, 269 aa, Thermomyces lanuginosus
EVSQDLFNQFNLFAQYSAAAYCGKNNDAPAGTQITCTMNACPEVEKADATFLYSFEDSGVGDVTGFLALDNTNKLIVLSFRGSRSIENWIGNLNFDLKEINDICSGCRGHDGFTSSWRSVADTLRQKVEDAVREHPDYRVVFTGHSLGGALATVAGADLRGNGYDIDVFSYGAPRVGNRAFAEFLTVQTGGTLYRITHTNDIVPRLPPREFGYSHSSPEYWIKSGTLVPVRRRDIVKIEGIDATGGNNQPNIPDIPAHLWYFGLIGTCL

SEQ ID NO: 5187 - protein, 269 aa, Thermomyces lanuginosus
EVSQDLFNQFNLFAQYSAAAYCGKNNDAPAGTNITCTGNACPEVEKADATFLYSFEDSGVGDVTGFLALDNTNKLIVLSFRGSRSIENWITNLNFELKEINDICSGCRGHDGFTSSWRSVADTLRQKVEDAVREHPDYRVVFTGHSLGGALATVAGADLRGNGYDIDVFSYGAPRVGNRAFAEFLTVQTGGTLYRITHTNDIVPRLPPREFGYSHSSPEYWIKSGTLVPVRRRDIVKIEGIDATGGNNQPNIPDIPAHLWYFGLIGTCL

SEQ ID NO: 5188 - protein, 269 aa, Thermomyces lanuginosus
EVSQDLFNQFNLFAQYSAAAYCGKNNDAPAGTQITCTGNACPEVEKADATFLYSFEDSGVGDVTGFLALDNTNKLIVLSFRGSRSIENWIGNLNFDLKEINDICSGCRGHAGFTSSWRSVADTLRQKVEDAVREHPDYRVVFTGHSLGGALATVAGADLRGNGYDIDVFSYGAPRVGNRAFAEFLTVQTGGTLYRITHTNDIVPRLPPREFGYSHSSPEYWIKSGTLVPVRRRDIVKIEGIDATGGNNQPNIPDIPAHLWYFGLIGTCL

SEQ ID NO: 5189 - protein, 269 aa, Thermomyces lanuginosus
EVSQDLFNQFNLFAQYSAAAYCGKNNDAPAGTNITCTGNACPEVEKADATILYSFEDSGVGDVTGFLALDNTNKLIVLSFRGSRSIENWIGNLNFDLKEINDICSGCRGHDGFTSSWRSVADTLRQKVEDAVREHPDYRVVFTGHSLGGALATVAGADLRGNGYDIDVFSYGAPRVGNRAFAEFLTVQTGGTLYRITHTNDIVPRLPPREFGYSHSSPEYWIKSGTLVPVRRRDIVKIEGIDATGGNNQPNIPSIPAHLWYFGLIGTCL

SEQ ID NO: 5190 - protein, 269 aa, Thermomyces lanuginosus
EVSQDLFNQFNLFAQYSAAAYCGKNNDAPAGTQITCTGNACPEVEKADATFLYSFEDSGVGDVTGFLALDNTNKLIVLSFRGSRSIENWIGNLNFDLKEINDICSGCRGHDGFTSSHRSVADTLRQKVEDAVREHPDYRVVFTGHSLGGALATVAGADLRGNGYDIDVFSYGAPRVGNRAFAEFLTVQTGGTLYRITHTNDIVPRLPPREFGYSHSSPEYWIKSGTLVPVRRRDIVKIEGIDATGGNNQPNIPDIPAHLWYFGLIGTCL

SEQ ID NO: 5191 - protein, 269 aa, Thermomyces lanuginosus
EVSQDLFNQFKLFAQYSAAAYCGKNNSAPAGTNITCTGNACPEVEKADATFLYSFKDSGVGDVTGFLALDNTNKLIVLSFRGSRSIENWIGNLNFDLKEINDICSGCRGHDGFTSSWRSVADTLRQKVEDAVREHPDYRVVFTGHSLGGALATVAGADLRGNGYDIDVFSYGAPRVGNRAFAEFLTVQTGGTLYRITHTNDIVPRLPPREFGYSHSSPEYWIKSGTLVPVTRNDIVKIEGIDATGGNNQPNIPDITAHLWYFGLIGTCL

SEQ ID NO: 5192 - protein, 269 aa, Thermomyces lanuginosus
EVSQDLFNQFNLFAQYSAAAYCGKNNDAPAGTQITCTGNACPEVEKADATFLYSFEDSGVGDVTGFLALDNTNKLIVLSFRGSRSIENWIGNLNFDLKEIQDICSGCRGHDGFTSSWRSVADTLRQKVEDAVREHPDYRVVFTGHSLGGALATVAGADLRGNGYDIDVFSYGAPRVGNRAFAEFLTVQTGGTLYRITHTNDIVPRLPPREFGYSHSSPEYWIKSGTLVPVRRRDIVKIEGIDATGGNNQPNIPDIPAHLWYFGLIGTCL

SEQ ID NO: 5193 - protein, 269 aa, Thermomyces lanuginosus
EVSQDLFNQFNLFAQYSAAAYCGKNNDAPAGTNITCTGNACPEVEKADATFLYSFEDSGVGDVTGFLALDNTNKLIVLSFRGSRSIENWIGNLNFDLKEINDICSGCRGHDGFTSSWRSVADTLRQKVEDAVREHPDYRVVFTGHSLGGALATVAGADLRGNGYDIDVFSYGAPRVGNRAFAEFLTVQTGGTLYRITHTNDGVPRLPPRELGYSHSSPEYWIKSGTLVPVTRNDIVKIEGIDATGGNNQPNIPDXKAHLWYFGLIGTCL

SEQ ID NO: 5194 - protein, 269 aa, Thermomyces lanuginosus
EVSQDLFNQFNLFAQYSAAAYCGKNNDAPAGTNITCTGNACPEVEKADATFLYSFEDSGVGDVTGFLALDNTNKLIVLSFRGSRSIENWIGNLNFDLKEINDICSGCRGHDGFTSSWRSVADTLRQKVEDAVREHPDYRVVFTGHSLGGALATVAGADLRGNGYDIDVFSYGAPRVGNRAFAEFLTVQTGGTLYRITHTNDIVPRLPPREFGYSHSSPEYWIKSGTLVPVRRRDIVKIEGIDATGGNNQPNIPSITAHLWYFGLIGTCL

SEQ ID NO: 5195 - protein, 269 aa, Synthetic construct
EVSQDLFNQFNLFAQYSAAAYCGKNNDAPAGTNITCTGNACPEVEKADATFLYSFEDSGVGDVTGFLALDNTNKLIVLSFRGSRSIKNWIANLNFRLKEVNDICSGCRGHDGFTSSWRSVADTLRQKVEDAVREHPDYRVVFTGHSLGGALATVAGADLRGNGYDIDVFSYGAPRVGNRAFAEFLTVQTGGTLYRITHTNDIVPRLPPREFGYSHSSPEYWIKSGTLVPVTRNDIVKIEGIDATGGNNQPNIPDIPAHLWYFGLIGTCL

SEQ ID NO: 5196 - protein, 269 aa, Thermomyces lanuginosus
EVSQDLFNQFNLFAQYSAAAYCGKNNDAPAGTQITCTGNACPEVEKADATFLYSFEDSGVGDVTGFLALDNTNKLIVLSFRGSRSIENWIGNLNFDLKEINDICSGCRGHDGFTSSWRSVADTLRQKVEDAVREHPDYRVVFTGHSLGGALATVAGADLRGNGYDIDVFSYGAPRHGNRAFAEFLTVQTGGTLYRITHTNDIVPRLPPREFGYSHSSPEYWIKSGTLVPVRRRDIVKIEGIDATGGNNQPNIPDIPAHLWYFGLIGTCL

SEQ ID NO: 5197 - protein, 269 aa, Thermomyces lanuginosus
EVSQDLFNQFNLFAQYSAAAYCQANNDAPAGTNITCTGNACPEVEKADATFLYSFEDSGVGDVTGFLALDNTNKLIVLSFRGSRSIENWIGNLNFDLKEINDICSGCRGHDGFTSSWRSVADTLRQKVEAAVREHPDYRVVFTGHSLGGALATVAWADLRGNGYDIDVFSYGAPRVGNRAFAEFLTVQTGGTLYRITHTNDIVPRLPPREFGYSHSSPEYWIKSGTLVPVTRNDIVKIEGIDATGGNNQPNIPDIPAHLWYFGLIGTCL

SEQ ID NO: 5198 - protein, 269 aa, Thermomyces lanuginosus
EVSQDLFNQFNLFAQYSAAAYCGKNNEAPAGTNITCTGNACPEVEKAQATFLYSFEDSGVGDVTGFLALDNTNKLIVLSFRGSRSIENWIGNLNFDLKEINDICSGCRGHDGFTSSWRSVADTLRQKVEDAVREHPDYRVVFTGHSLGGALATVAGADLRGNPYDIDVFSYGAPRVGNRAFAEFLTVQTGGTLYRITHTNDIVPRLPPREFGYSHSSPEYWIKSGTLVPVTRNDIVKIEGIDATGGNNQPNIPDIPAHLWYFGRIGTCL

SEQ ID NO: 5199 - protein, 269 aa, Thermomyces lanuginosus
EVSDDLFNQFKLFAQYSAAAYCGKNNNAPAGTNITCTGNACPEVEKADATFLYSFEDSGVGDVTGFLALDNTNKLIVLSFRGSRSIENWIGNLNFDLKEINDICSGCRGHDGFTSSWRSVADTLRQKVEDAVREHPDYRVVFTGHSLGGALATVAGADLRGNGYDIDVFSYGAPRVGNRAFAEFLTVQTGGTLYRITHTNDIVPRLPPREFGYSHSSPEYWIKSGTLVPVTRNDIVKIEGIDATGGNNQPNIPDITAHLWYFGLIGTCL

SEQ ID NO: 5200 - protein, 269 aa, Synthetic construct
EVSQDLFNQFNLFAQYSAAAYCGKNNDAPAGTNITCTGNACPEVEKADATFLYSFEDSGVGDVTGFLALDNTNKLIVLSFRGSRSIENWIGNLNFDLKEINDICSGCRGHDGFTSSWRSVADTLRQKVEDAVREHPGYRVVFTGHSLGGALATVAGADLRGNGYDIGVFSYGAPRVGNRAFAEFLTVQTGGTLYRITHTNDIVPRLPPRVFGYSHSSPEYWIKSGTLVPVTRNDIVKIEGIDATGGNNRPNIPDIPAHLWYFGLIGTCL

SEQ ID NO: 5201 - protein, 269 aa, Thermomyces lanuginosus
EVSQDLFNQFNLFAQYSAAAYCGKNNDAPAGTQITCTGNACPEVEKADATFLYSFEDSGVGDVTGFLALDNTNKLIVLSFRGSRSIENWICNLNFDLKEINDICSGCRGHDGFTSSWRSVADTLRQKVEDAVREHPDYRVVFTGHSLGGALATVAGADLRGNGYDIDVFSYGAPRVGNRAFAEFLTVQTGGTLYRITHTNDIVPRLPPREFGYSHSSPEYWIKSGTLVPVRRRDIVKIEGIDATGGNNQPNIPDIPAHLWYFGLIGTCL

SEQ ID NO: 5202 - protein, 269 aa, Thermomyces lanuginosus
EVSQDLFNQFNLFAQYSAAAYCGKNNDAPAGTQITCTGNACPEVEKADATFLYSFEDSGVGDVTGFLALDNTNKLIVLSFRGSRSIENWIGNLNFDLKEINDICSGCRGHDGFTSSWRSVADTLRQKVEDAVREHPDYRVVFTGHSLGGALATVAGADLRGNGYDIDVFSYGAPRVGNRAFAEFLTVQTGGTLYRITHTNDIVPRLPPREFGYSHSSPEYWIKSGTLVPVRRRDIVKIEGIDATGGNNQPNIPDIWAHLWYFGLIGTCL

SEQ ID NO: 5203 - protein, 269 aa, Thermomyces lanuginosus
EVSQDLFNQFNLFAQYSAAAYCGKNNDAPAGTNITCTGNACPEVEKADATFLYSFEDSGVGDVTGFLALDNTNKLIVLSFRGSRSIENWIGNLNFELKEINDICSGCRGHDGFTSSWRSVADTLRQKVEDAVREHPDYRVVFTGHSLGGALATVAGADLRGNGYDIDVFSYGAPRVGNRAFAEFLTVQTGGTLYRITHTNDIVPRLPPREFGYSHSSPEYWIKSGTLVPVRRRDIVKIEGIDATGGNNQPNIPSIPAHLWYFGLIGTCL

SEQ ID NO: 5204 - protein, 269 aa, Thermomyces lanuginosus
EVSQDLFNQFNLFAQYSAAAYCGKNNDATAGTQITCTGNACPEVEKADATFLYSFEDSGVGDVTGFLALDNTNKLIVLSFRGSRSIENWIGNLNFDLKEINDICSGCRGHDGFTSSWRSVADTLRQKVEDAVREHPDYRVVFTGHSLGGALATVAGADLRGNGYDIDVFSYGAPRVGNRAFAEFLTVQTGGTLYRITHTNDIVPRLPPREFGYSHSSPEYWIKSGTLVPVRRRDIVKIEGIDATGGNNQPNIPDIPAHLWYFGLIGTCL

SEQ ID NO: 5205 - protein, 269 aa, Thermomyces lanuginosus
EVSQDLFNQFNLFAQYSAAAYCGKNNDAPAGTQITCTGNACPEVEKADATFLYSFEDSGVGDVTGFLALDNTNKLIVLSFRGSRSIENWIGNLNFDLKEINDICSGCRGHDGFTSSWRSVADTLRQKVEDAVREHPDYRVVFTGHSLGGALATVAGADLRGNGYDIDVFSYGAPRMGNRAFAEFLTVQTGGTLYRITHTNDIVPRLPPREFGYSHSSPEYWIKSGTLVPVRRRDIVKIEGIDATGGNNQPNIPDIPAHLWYFGLIGTCL

SEQ ID NO: 5206 - protein, 269 aa, Thermomyces lanuginosus
EVSQDLFNQFNLFAQYSAAAYCGKNNDAPAGTNITCTGNACPEVEKADATFLYSFEDSGVGDVTGFLALDNTNKLIVLSFRGSRSIENWIGNLNFELKEINDICSGCRGHDGFTSSWRSVADTLRQKVEDAVREHPDYRVVFTGHSLGGALATVAGADLRGNGYDIDVFSYGAPRVGNRAFAEFLTVQTGGTLYRITHTNDIVPRLPPREFGYSHSSPEYWIKSGTLVPVRRRDIVKIEGIDATGGNNQPNIPDITAHLWYFGLIGTCL

SEQ ID NO: 5207 - protein, 269 aa, Thermomyces lanuginosus
EVSQDLFNQFNLFAQYSAAAYCGKNNDAPAGTQITCTGNACPEVEKADATFLYSFEDSGVGDVTGFLALDNTNKLIVLSFRGSRSIENWIGNLNFDLKEINDICSGCRGHDGFTSSSRSVADTLRQKVEDAVREHPDYRVVFTGHSLGGALATVAGADLRGNGYDIDVFSYGAPRVGNRAFAEFLTVQTGGTLYRITHTNDIVPRLPPREFGYSHSSPEYWIKSGTLVPVRRRDIVKIEGIDATGGNNQPNIPDIPAHLWYFGLIGTCL

SEQ ID NO: 5208 - protein, 269 aa, Thermomyces lanuginosus
EVSQDLFNQFNLFAQYSAAAYCGKNNDAPAGTQITCTFNACPEVEKADATFLYSFEDSGVGDVTGFLALDNTNKLIVLSFRGSRSIENWIGNLNFDLKEINDICSGCRGHDGFTSSWRSVADTLRQKVEDAVREHPDYRVVFTGHSLGGALATVAGADLRGNGYDIDVFSYGAPRVGNRAFAEFLTVQTGGTLYRITHTNDIVPRLPPREFGYSHSSPEYWIKSGTLVPVRRRDIVKIEGIDATGGNNQPNIPDIPAHLWYFGLIGTCL

SEQ ID NO: 5209 - protein, 269 aa, Thermomyces lanuginosus
EVSQDLFNQFNLFAQYSAAAYCGKNNDAPAGTQITCTGNACPEVEKADATFLYSFEDSGVGDVTGFLALDNTNKLIVLSFRGSRSIENWIGNLNFRLKEINDICSGCRGHDGFTSSWRSVADTLRQKVEDAVREHPDYRVVFTGHSLGGALATVAGADLRGNGYDIDVFSYGAPRVGNRAFAEFLTVQTGGTLYRITHTNDIVPRLPPREFGYSHSSPEYWIKSGTLVPVRRRDIVKIEGIDATGGNNQPNIPDIPAHLWYFGLIGTCL

SEQ ID NO: 5210 - protein, 269 aa, Thermomyces lanuginosus
EVSQDLFNQFNLFAQYSKAAYCQKNNDAPAGTNITCTGNACPEVEKADATFLYSFEDSGVGDVTGFLALDNTNKLIVLSFRGSRSIENWIGNLNFDLKEINDICSGCRGHDGFTSSWRSVADTLRQKVEDAVREHPDYRVVFTGHSLGGALATVAWADLRGNGYDIDVFSYGAPRVGNRAFAEFLTTQTGGTLYRITHTNDIVPRLPPREFGYSHSSPEYWIKSGTLVPVTRNDIVKIEGIDATGGNNQPNIPDIPAHLWYFGLIGTCL

SEQ ID NO: 5211 - protein, 269 aa, Thermomyces lanuginosus
EVSQDLFNQFNLFAQYSAAAYCGKNNDAPAGTNITCTGNACPEVEKADATFLYSFEDSGVGDVTGFLALDNTNKLIVLSFRGSRSIENWIGNLNFDLKEINDICSGCRGHDGFTSSWRSVADTLRQKVEAAVREHPDYRVVFTGHSLGGALATVAGADLRGNPYDIDVFSYGAPRVGNRAFAEFLTVQTGGTLYRITHTNDIVPRLPPREFGYSHSSPEYWIKSGTLVPVTRQDIVKIEGIDATGGNNQPNIPDIPAHLWYFGRIGTCL

SEQ ID NO: 5212 - protein, 269 aa, Thermomyces lanuginosus
EVSQDLFNQFNLFAQYSAAAYCGKNNDAPAGTNITCTGNACPEVEKADATFLYSFEDSGVGDVTGFLALDNTNKLIVLSFRGSRSDENLQGNTNFDLKEINDICSGCRGHDGFTSSWRSVADTLRQKVEDAVREHPDYRVVFTGHSLGGALATVAGADLRGNGYDIDVFSYGAPRVGNRAFAEFLTVQTGGTLYRITHTNDIVPRLPPREFGYSHSSPEYWIKSGTLVPVTRNDIVKIEGIDATGGNNQPNIPDIPAHLWYFGLIGTCL

SEQ ID NO: 5213 - protein, 269 aa, Thermomyces lanuginosus
EVSDDLFNQFNLFAQYSAAAYCGKNNSAPAGTNITCTGNACPEVEKADATFLYSFEDSGVGDVTGFLALDNTNKLIVLSFRGSRSIENWFGNLNFDLKEINDICSGCRGHDGFTSSWRSVADTLRQKVEDAVREHPDYRVVFTGHSLGGALATVAGADLRGNGYDIDVFSYGAPRVGNRAFAEFLTVQTGGTLYRITHTNDIVPRLPPREFGYSHSSPEYWIKSGTLVPVTRNDIVKIEGIDATGGNNQPNIPDITAHLWYFGLIGTCL

SEQ ID NO: 5214 - protein, 269 aa, Thermomyces lanuginosus
EVSQDLFNQFNLFAQYSAAAYCKKNNDAPAGTNITCTGNACPEVEKADATFLYSFEDSGVGDVTGFLALDNTNKQIVLSFRGSRSIENWIGNLNFDLKEINDICSGCRGHDGFTSSWRSVADTLRQKVEDAVREHPDYRVVFTGHSLGGALATVAWADLRGNGYDIDVFSYGAPRVGNRAFAEFLTNQTGGTLYRITHTNDIVPRLPPREFGYSHSSPEYWIKSGTLVPVTRNDIVKIEGIDATGGNNQPNIPDIPAHLWYFGLIGTCL

SEQ ID NO: 5215 - protein, 269 aa, Thermomyces lanuginosus
EVSQDLFNQFKLFAQYSAAAYCGKNNQAPAGTNITCTGNACPEVEKADATFLYSFEDMGVGDVTGFLALDNTNKLIVLSFRGSRSIENWIGNLNFDLKEINDICSGCRGHDGFTSSWRSVADTLRQKVEDAVREHPDYRVVFTGHSLGGALATVAGADLRGNGYDIDVFSYGAPRVGNRAFAEFLTVQTGGTLYRITHTNDIVPRLPPREFGYSHSSPEYWIKSGTLVPVTRNDIVKIEGIDATGGNNQPNIPDITAHLWYFGLIGTCL

SEQ ID NO: 5216 - protein, 269 aa, Thermomyces lanuginosus
EVSQDLFNQFNLFAQYSAAAYCGKNNDAPAGTNITCTGNACPEVEKADATFLYSFRDSGVGDVTGFLALDNTNKLIVLSFRGSRSIENWIGNLNFDLKEINDICSGCRGHDGFTSSWFSVADTLRQKVEDAVREHPDYRVVFTGHSLGGALATVAGADLRGNGYDIDVFSYGAPRVGNRAFAEFLTVQTGGTLYRITHTNDIVPRLPPREFGYSHSSPEYWIKSGTLVPVRRRDIVKIEGIDATGGNNQPNIPDIPAHLWYFGLIGTCL

SEQ ID NO: 5217 - protein, 269 aa, Thermomyces lanuginosus
EVSQDLFNQFNLFAQYSKAAYCQKNNDAPAGTNITCTGNACPEVEKADATFLYSFEDSGVGDVTGFLALDNTNKLIILSFRGSRSIENWIGNLNFDLKEINDICSGCRGHDGFTSSWRSVADTLRQKVEDAVREHPDYRVVFTGHSLGGALATVAGADLRGNGYDIDVFSYGAPRVGNRAFAEFLTTQTGGTLYRITHTNDIVPRLPPREFGYSHSSPEYWIKSGTLVPVTRNDIVKIEGIDATGGNNQPNIPDIPAHLWYFGLIGTCL

SEQ ID NO: 5218 - protein, 269 aa, Thermomyces lanuginosus
EVSQDLFNQFNLFAQYSAAAYCGKNNSAPAGTNITCTGNACPEVFKADATFLYSFEDSGVGDVTGFLALDNTNKDIVLSFRGSRSIENWIGNLNFDLKEINDICSGCRGHDGFTSSWRSVADTLRQKVEDAVREHPDYRVVFTGHSLGGALATVAGADLRGNGYDIDVFSYGAPRVGNRAFAEFLTVQDGGTLYRITHTNDIVPRLPPREFGYSHSSPEYWIKSGTLVPVTRNDIVKIEGIDATGGNNQPNIPDIPAHLWYFGLIGTCL

SEQ ID NO: 5219 - protein, 269 aa, Thermomyces lanuginosus
EVSQDLFNQFNLFAQYSAAAYCKKNNDAPAGTNITCTGNACPEVEKADATFLYSFEDSGVGDVTGFLALDNTNKLIVLSFRGSRSIENWIGNLNFDLKEINDICSGCRGHDGFTSSWRSVADTLRQKVEAAVREHPDYRVVFTGHSLGGALATVAGADLRGNGYDIDVFSYGAPRVGNRAFAEFLTTQQGGTLYRITHTNDIVPRLPPREFGYSHSSPEYWIKSGTLVPVTRNDIVKIEGIDATGGNNQPNIPDIPAHLWYFGLIGTCL

SEQ ID NO: 5220 - protein, 269 aa, Thermomyces lanuginosus
EVSQDLFNQFNLFAQYSKAAYCGKNNDAPAGTNITCTGNACPEVEKADATFLYSFEDSGVGDVTGFLALDNTNKLIVLSFRGSRSIENWIGNLNFDLKEINDICSGCRGHDGFTSSWRSVADTLRQKVEDAVREHPDYRVVFTGHSLGGALATIAWADLRGNGYDIDVFSYGAPRVGNRAFAEFLTTQTGGTLYRITHTNDIVPRLPPREFGYSHSSPEYWIKSGTLVPVTRNDIVKIEGIDATGGNNQPNIPDIPAHLWYFGLIGTCL

SEQ ID NO: 5221 - protein, 269 aa, Thermomyces lanuginosus
EVSQDLFNQFNLFAQYSAAAYCGKNNDAPAGTNITCTGNACPEVEKADATFLYSFEDSGVGDVTGFLALDNTNKLIVLSFRGSRSIENWIGNLNFDLKEINDICSGCRGHDGFTSSWRSVADTLRQKVEDAVREHPDYRVVFTGHSLGGALATVAGADLRGNGYDIDVFSYGAPRVGNRAFAEFLTVQTGGTLYRITSTNDIVPRLPPREFGYSHSSPEYWIKSGTLRPVRRRDIVKIEGIDATGGNNQPNIPDIPAHLWYFGLIGTCL

SEQ ID NO: 5222 - protein, 269 aa, Thermomyces lanuginosus
EVSQDLFNQFNLFAQYSAAAYCGKNNQAPAGTNITCTGNACPEVEKADATFLYSFEDMGVGDVTGFLALDNTNKLIVLSFRGSRSIENWFGNLNFDLKEINDICSGCRGHDGFTSSWRSVADTLRQKVEDAVREHPDYRVVFTGHSLGGALATVAGADLRGNGYDIDVFSYGAPRVGNRAFAEFLTVQTGGTLYRITHTNDIVPRLPPREFGYSHSSPEYWIKSGTLVPVTRNDIVKIEGIDATGGNNQPNIPDITAHLWYFGLIGTCL

SEQ ID NO: 5223 - protein, 269 aa, Thermomyces lanuginosus
EVSQDLFNQFNLFAQYSAAAYCGKNNDAPAGTNITCTGNACPEVEKADATFLYSFEDSGVGDVTGFLALDNTNKQIILSFRGSRSIENWIGNLNFDLKEINDICSGCRGHDGFTSSWRSVADTLRQKVEDAVREHPDYRVVFTGHSLGGALATVAGADLRGNGYDIDVFSYGAPRVGNRAFAEFLTTQDGGTLYRITHTNDIVPRLPPREFGYSHSSPEYWIKSGTLVPVTRNDIVKIEGIDATGGNNQPNIPDIPAHLWYFGLIGTCL

SEQ ID NO: 5224 - protein, 269 aa, Thermomyces lanuginosus
EVSQDLFNQFNLFAQYSKAAYCGKNNDAEAGTNITCTGNACPEVEKADATFLYSFEDSGVGDVTGFLALDNTRKDIVLSFRGSRSIENWIGNLNFDLKEINDICSGCRGHDGFTSSWRSVADTLRQKVEDAVREHPDYRVVFTGHSLGGALATVAGADLRGNGYDIDVFSYGAPRVGNRAFAEFLTVQTGGTLYRITHTNDIVPRLPPREFGYSHSSPEYWIKSGTLVPVTRNDIVKIEGIDATGGNNQPNIPDIPAHLWYFGLIGTCL

SEQ ID NO: 5225 - protein, 269 aa, Thermomyces lanuginosus
EVSQDLFNQFNLFAQYSAAAYCKKNNDAPAGTNITCTGNACPEVEKADATFLYSFKDSGVGDVTGFLALDNTNKRIVLSFRGSRSIENWIGNLNFDLKEINDICSGCRGHDGFTSSWRSVADTLRQKVEDAVREHPDYRVVFTGHSLGGALATVAGADLRGNGYDIDVFSYGAPRVGNRAFAEFLTVQTGGTLYRITHTNDIVPRLPPREFGYSHSSPEYWIKSGTLVPVTRNDIVKIEGIDATGGNNQPNIPDIPAHLWYFGRIGTCL

SEQ ID NO: 5226 - protein, 269 aa, Thermomyces lanuginosus
EVSQDLFNQFNLFAQYSAAAYCGKNIDAPAGTQITCTGNACPEVEKADATFLYSFEDSGVGDVTGFLALDNTNKLIVLSFRGSRSIENWIGNLNFDLKEINDICSGCRGHDGFTSSWRSVADTLRQKVEDAVREHPDYRVVFTGHSLGGALATVAGADLRGNGYDIDVFSYGAPRVGNRAFAEFLTVQTGGTLYRITHTNDIVPRLPPREFGYSHSSPEYWIKSGTLVPVRRRDIVKIEGIDATGGNNQPNIPDIPAHLWYFGLIGTCL

SEQ ID NO: 5227 - protein, 269 aa, Thermomyces lanuginosus
EVSRDLFNQFNLFAQYSAAAYCGKNNDAPAGTNITCTGNACPEVEKADATFLYSFEDSGVGDVTGFLALDNTNKLIVLSFRGSRSIENWIGNLNFDLKEINDICSGCRGHDGFTSSWRSVADTLRQKVEDAVREHPDYRVVFTGHSLGGALATVAGADLRGNGYDIDVFSYGAPRVGNRAFAEFLTVQTGGTLYRITHTNDIVPRLPPREFGYSHSSPEYWIKSGTLRPVRRRDIVKIEGIDATGGNNQPNIPDIPAHLWYFGLIGTCL

SEQ ID NO: 5228 - protein, 269 aa, unidentified
EVSQDLFNQFNLFAQYSAAAYCGKNNDAPAGTNITCTGNACPEVEKADATFLYSFEDSGVGDVTGFLALDNTNKLIVLSFRGSRSIENWITNLNFDLKEINDICSGCRGHDGFTSSWRSVADTLRQKVEDAVREHPDYRVVFTGHSLGGALATVAGADLRGNGYDIDVFSYGAPRVGNRAFAEFLTVQTGGTLYRITHTNDIVPRLPPREFGYSHSSPEYWIKSGTLVPVRRRDIVKIEGIDATGGNNQPNIPSIPAHLWYFGLIGTCL

SEQ ID NO: 5229 - protein, 269 aa, Thermomyces lanuginosus
EVSQDLFNQFNLFAQYSAAAYCGKNNDAPAGTQITCTGNACPEVEKADATFLYSFEDSGVGDVTGFLALDNTNKLIVLSFRGSRSIENWIGNLNFDLKEINDICSGCRGHDGFTSSWRSVADTLRQKVEDAVREHPDYRVVFTGHSLGGALATVAGADLRGNGYDIDVFSYGAPRVGNRAFAEFLTVQTGGTLYRITHTNDIVPRLPPREFGYSHSSPEYWIKSGTLVPVRRRDIVKIEGIDATGGNNQPNIPQIPAHLWYFGLIGTCL

SEQ ID NO: 5230 - protein, 269 aa, Thermomyces lanuginosus
EVSQDLFNQFNLFAQYSAAAYCKKNNSAPAGTNITCTGNACPEVEKADATFLYSFEDSGVGDVTGFLALDNTNKQIVLSFRGSRSIENWIGNLNFDLKEINDICSGCRGHDGFTSSWRSVADTLRQKVEDAVREHPDYRVVFTGHSLGGALATVAGADLRGNGYDIDVFSYGAPRVGNRAFAEFLTVQTGGTLYRITHTNDIVPRLPPREFGYSHSSPEYWIKSGTLVPVTRNDIVKIEGIDATGGNNQPNIPDIPAHLWYFGRIGTCL

SEQ ID NO: 5231 - protein, 269 aa, Thermomyces lanuginosus
EVSQDLFNQFNLFAQYSAAAYCGKNNDAPAGTNITCTGNACPEVEKADATFLYSFEDSGVGDVTGFLALDNTNKLIVLSFRGSRSIENWIGNLNFDLKEINDICSGCRGHDGFTSSWRSVADTLRQKVEDAVREHPDYRVVFTGHSLGGALATVAGADLRGNKYDIDVFSYGAPRVGNRAFAEFLTVQTGGTLYRITHTNDIVPRLPPREFGYSHSSPEYWIKSGTLVPVRRRDIVKIEGIDATGGNNQPNIPSIPAHLWYFGLIGTCL

SEQ ID NO: 5232 - protein, 269 aa, Thermomyces lanuginosus
EVSQDLFNQFNLFAQYSAAAYCGKNNDAPAGTNITCTGNACPEVEKADATFLYSFEDSGVGDVTGFLALDNTNKQIVLSFRGSRSIENWIGNLNFDLKEINDICSGCRGHDGFTSSWRSVADTLRQKVEAAVREHPDYRVVFTGHSLGGALATVAWADLRGNGYDIDVFSYGAPRVGNRAFAEFLTNQTGGTLYRITHTNDIVPRLPPREFGYSHSSPEYWIKSGTLVPVTRNDIVKIEGIDATGGNNQPNIPDIPAHLWYFGLIGTCL

SEQ ID NO: 5233 - protein, 269 aa, Thermomyces lanuginosus
EVSQDLFNQFNLFAQYSKAAYCGKNNDAPAGTNITCTGNACPEVFKADATFLYSFEDSGVGDVTGFLALDNTNKDIVLSFRGSRSIENWIGNLNFDLKEINDICSGCRGHDGFTSSWRSVADTLRQKVEDAVREHPDYRVVFTGHSLGGALATVAGADLRGNGYDIDVFSYGAPRVGNRAFAEFLTVQDGGTLYRITHTNDIVPRLPPREFGYSHSSPEYWIKSGTLVPVTRNDIVKIEGIDATGGNNQPNIPDIPAHLWYFGLIGTCL

SEQ ID NO: 5234 - protein, 269 aa, Thermomyces lanuginosus
EVSQDLFNQFNLFAQYSKAAYCGKNNSAPAGTDITCTGNACPEVEKADATFLYSFEDSGVGDVTGFLALDNTNKDIVLSFRGSRSIENWIGNLNFDLKEINDICSGCRGHDGFTSSWRSVADTLRQKVEDAVREHPDYRVVFTGHSLGGALATVAGADLRGNGYDIDVFSYGAPRVGNRAFAEFLTVQTGGTLYRITHTNDIVPRLPPREFGYSHSSPEYWIKSGTLVPVTRNDIVKIEGIDATGGNNQPNIPDIPAHLWYFGLIGTCL

SEQ ID NO: 5235 - protein, 269 aa, Synthetic construct
EVSQDLFNQFNLFAQYSAAAYCGKNNDAPAGTNITCTGNACPEVEKADATFLYSFEGSGVGDVTGFLALDNTNKLIVLSFRGSRSIENWIGNLKFLLKEINDICSGCRGHDGFTSSWRSVADTLRQKVEDAVREHPDYRVVFTGHSLGGALATVAGADLRGNGYDIDVFSYGAPRVGNRAFAEFLTVQTGGTLYRITHTNDIVPRLPPRKFGYSHSSPEYWIKSGTLVPVTRNDIVKIEGIDATGGNNQPNIPDIPAHLWYFGLIGTCL

SEQ ID NO: 5236 - protein, 269 aa, Thermomyces lanuginosus
EVSQDLFNQFNLFAQYSAAAYCGKNNSAPAGTNITCTGNACPEVEKADATFLYSFKDSGVGDVTGFLALDNTNKLIVLSFRGSRSIENWIGNLNFDLKEINDICSGCRGHAGFTSSWRSVADTLRQKVEDAVREHPDYRVVFTGHSLGGALATIAGADLRGNGYDIDVFSYGAPRVGNRAFAEFLTVQTGGTLYRITHTNDIVPRLPPREFGYSHSSPEYWIKSGTLVPVTRNDIVKIEGIDATGGNNQPNIPDIPAHLWYFGLIGTCL

SEQ ID NO: 5237 - protein, 269 aa, Thermomyces lanuginosus
EVSQDLFNQFNLFAQYSAAAYCGKNNSAPAGTDITCTGNACPEVFKADATFLYSFEDSGVGDVTGFLALDNTRKLIVLSFRGSRSIENWIGNLNFDLKEINDICSGCRGHDGFTSSWRSVADTLRQKVEDAVREHPDYRVVFTGHSLGGALATVAGADLRGNGYDIDVFSYGAPRVGNRAFAEFLTVQTGGTLYRITHTNDIVPRLPPREFGYSHSSPEYWIKSGTLVPVTRNDIVKIEGIDATGGNNQPNIPDIPAHLWYFGLIGTCL

SEQ ID NO: 5238 - protein, 269 aa, Thermomyces lanuginosus
EVSQDLFNQFNLFAQYSAAAYCGKNNSAPAGTNITCTGNACPEVEKADATFLYSFEDSGVGDVTGFLALDNTNKLIVLSFRGSRSIENWIGNLNFDLKEINDICSGCRGHDGFTSSWRSVADTLRQKVEAAVREHPDYRVVFTGHSLGGALATVAGADLRGNGYDIDVFSYGAPRVGNRAFAEFLTVQTGGTLYRITHTNDIVPRLPPREFGYSHSSPEYWIKSGTLVPVTRNDIVKIEGIDATGGNNQPNQPDIPAHLWYFGRIGTCL

SEQ ID NO: 5239 - protein, 269 aa, Thermomyces lanuginosus
EVSQDLFNQFNLFAQYSAAAYCGKNNDAPAGTNITCTGNACPEVEKADATFLYSFKDSGVGDVTGFLALDNTNKQIVLSFRGSRSIENWIGNLNFDLKEINDICSGCRGHDGFTSSWRSVADTLRQKVEDAVREHPDYRVVFTGHSLGGALATVAGADLRGNGYDIDVFSYGAPRVGNRAFAEFLTNQTGGTLYRITHTNDIVPRLPPREFGYSHSSPEYWIKSGTLVPVTRNDIVKIEGIDATGGNNQPNIPDIPAHLWYFGRIGTCL

SEQ ID NO: 5240 - protein, 269 aa, Thermomyces lanuginosus
EVSQDLFNQFNLFAQYSAAAYCGKNNDAPAGTNITCTGNACPEVEKADATFLYSFEDSGVGDVTGFLALDNTNKLIVLSFRGSRSIENWAGNLNFDLKEINDICSGCRGHDGFTSSWRSVADTLRQKVEDAVREHPDYRVVFTGHSLGGALATVAGADLRGNGYDIDVFSYGAPRVGNRAFAEFLTVQTGGTLYRITHTNDIVPRLPPREFGYSHSSPEYWIKSGTLVPVRRRDIVKIEGIDATGGNNQPNIPDVPAHLWYFGLIGTCL

SEQ ID NO: 5241 - protein, 269 aa, Thermomyces lanuginosus
EVSQDLFNQFNLFAQYSAAAYCGKNNDAPAGTNITCTGNACPEVEKADATFLYSFEDSGVGDVTGFLALDNTNKLIVLSFRGSRSIENWIGNLNFDLKEINDICSGCRGHDGFTSSWRSVADTLRQKVEDAVREHPDYRVVFTGHSLGGALATVAGADLRGNGYDIDVFSYGAPRVGNRAFAEFLTVQTGGTLYRITHTNDIVPRLPPREFGYSHSSPEYWIKSGTLVPVRRRDIVKIEGIDATGGNNQPNIPDAKAHLWYFGLIGTCL

SEQ ID NO: 5242 - protein, 269 aa, Thermomyces lanuginosus
EVSQDLFNQFNLFAQYSAAAYCGKNNDAPAGTNITCTGNACPEVEKADATFLYSFEDSGVGDVTGFLALDNTNKLIVLSFRGSRSIENWIGNLNFELKEINDICSGCRGHAGFTSSWRSVADTLRQKVEDAVREHPDYRVVFTGHSLGGALATVAGADLRGNGYDIDVFSYGAPRVGNRAFAEFLTVQTGGTLYRITHTNDIVPRLPPREFGYSHSSPEYWIKSGTLVPVRRRDIVKIEGIDATGGNNQPNIPDIPAHLWYFGLIGTCL

SEQ ID NO: 5243 - protein, 269 aa, Thermomyces lanuginosus
EVSQDLFNQFNLFAQYSAAAYCGKNNDAPAGTRITCRGRACPEVEKADATFLYSFEDSGVGDVTGFLALDNTNKLIVLSFRGSRSIENWIGNLNFDLKEINDICSGCRGHDGFTSSWRSVADTLRQKVEDTVREHPDYRVVFTGHSLGGALATVAGADLRGNGYDIDVFSYGAPRVGNRAFAEFLTVQTGGTLYRITHTNDIVPRLPPREFGYSHSSPEYWIKSGTLVPVTRNDIVKIEGIDATGGNNQPNIPDIPAHLWYFGLIGTCL

SEQ ID NO: 5244 - protein, 269 aa, Thermomyces lanuginosus
EVSQDLFNQFNLFAQYSAAAYCGKNNDAPAGTNITCTGNACPEVEKADATFLYSFEDSGVGDVTGFLALDNTNKLIVLSFRGSRSIKNWIGNLNFDLKPINDICSGCRGHDGFTSSWRSVADTLRQKVEDAVREHPDYRVVFTGHSLGGALATVAGADLRGNGYDIDVFSYGAPRVGNRAFAEFLTVQTGGTLYRITHTNDIVPRLPPREFGYSHSSPEYWIKSGTLVPVRRRDIVKIEGIDATGGNNQPNIPDIPAHLWYFGLIGTCL

SEQ ID NO: 5245 - protein, 269 aa, Thermomyces lanuginosus
EVSQDLFNQFNLFAQYSAAAYCQKNNDAPAGTNITCTGNACPEVFKADATFLYSFEDSGVGDVTGFLALDNTNKQIVLSFRGSRSIENWIGNLNFDLKEINDICSGCRGHDGFTSSWRSVADTLRQKVEDAVREHPDYRVVFTGHSLGGALATVAGADLRGNGYDIDVFSYGAPRVGNRAFAEFLTTQTGGTLYRITHTNDIVPRLPPREFGYSHSSPEYWIKSGTLVPVTRNDIVKIEGIDATGGNNQPNIPDIPAHLWYFGLIGTCL

SEQ ID NO: 5246 - protein, 269 aa, Thermomyces lanuginosus
EVSQDLFNQFNLFAQYSAAAYCQANNDAPAGTNITCTGNACPEVEKADATFLYSFEDSGVGDVTGFLALDNTNKRIVLSFRGSRSIENWIGNLNFDLKEINDICSGCRGHDGFTSSWRSVADTLRQKVEDAVREHPDYRVVFTGHSLGGALATIAGADLRGNGYDIDVFSYGAPRVGNRAFAEFLTVQTGGTLYRITHTNDIVPRLPPREFGYSHSSPEYWIKSGTLVPVTRNDIVKIEGIDATGGNNQPNIPDIPAHLWYFGLIGTCL

SEQ ID NO: 5247 - protein, 269 aa, Thermomyces lanuginosus
EVSQDLFNQFNLFAQYSAAAYCGKNNDAPAGTNITCTGNACPEVEKADATFLYSFEDSGVGDVTGFLALDNTNKLIVLSFRGSRSIENWIGNLNFDLKEINDICSGCRGHDGFTSSWRSVADTLRQKVEDAVREHPDYRVVFAGHSLGGALATVAGADLRGNGYDIDVFSYGAPRVGNRAFAEFLTVQTGGTLYRITHTNDIVPRLPPREFGYSHSSPEYWIKSGTLPPVRRRDIVKIEGIDATGGNNQPNIPDIPAHLWYFGLIGTCL

SEQ ID NO: 5248 - protein, 269 aa, Thermomyces lanuginosus
EVSQDLFNQFNLFAQYSAAAYCGKNNDAPAGTNITCTGNACPEVEKADATFLYSFEDSGVGDVTGFLALDNTNKLIVLSFRGSRSIENWIGNLNFDLKEINDICSGCRGHDGFTSSWRSVADTLRQKVEDAVREHPDYRVVFTGHSLGGALATVAGADLRGNGYDIDVFSYGAPRVGNRAFAEFLTVQTGGTLYRITNTNDIVPRLPPREFGYSHSSPEYWIKSGTLPPVRRRDIVKIEGIDATGGNNQPNIPDIPAHLWYFGLIGTCL

SEQ ID NO: 5249 - protein, 269 aa, Thermomyces lanuginosus
EVSQDLFNQFNLFAQYSAAAYCGKNNDAPAGTNITCTGNACPEVEKADATILYSFEDSGVGDVTGFLALDNTNKLIVLSFRGSRSIENWIGNLNFDLKEINDICSGCRGHDGFTSSWRSVADTLRQKVEDAVREHPDYRVVFTGHSLGGALATVAGADLRGNGYDIDVFSYGAPRVGNRAFAEFLTVQTGGTLYRITSTNDIVPRLPPREFGYSHSSPEYWIKSGTLVPVRRRDIVKIEGIDATGGNNQPNIPDIPAHLWYFGLIGTCL

SEQ ID NO: 5250 - protein, 269 aa, Thermomyces lanuginosus
EVSQDLFNQFNLFAQYSAAAYCQKNNDAPAGTNITCTGNACPEVFKADVTFLYSFEDSGVGDVTGFLALDNTNKLIVLSFRGSRSIENWIGNLNFDLKEINDICSGCRGHDGFTSSWRSVADTLRQKVEDAVREHPDYRVVFTGHSLGGALATVAGADLRGNGYDIDVFSYGAPRVGNRAFAEFLTVQDGGTLYRITHTNDIVPRLPPREFGYSHSSPEYWIKSGTLVPVTRNDIVKIEGIDATGGNNQPNIPDIPAHLWYFGLIGTCL

SEQ ID NO: 5251 - protein, 269 aa, Thermomyces lanuginosus
EVSQDLFNQFNLFAQYSAAAYCGKNNDAPAGTQITCTGNACPEVEKADATFLYSFEDSGVGDVTGFLALDNTNKLIVLSFRGSRSIENWIGNLNFELKEINDICSGCRGHDGFTSSWRSVADTLRQKVEDAVREHPDYRVVFTGHSLGGALATVAGADLRGNGYDIDVFSYGAPRVGNRAFAEFLTVQTGGTLYRITHTNDIVPRLPPREFGYSHSSPEYWIKSGTLVPVRRRDIVKIEGIDATGGNNQPNIPDIPAHLWYFGLIGTCL

SEQ ID NO: 5252 - protein, 269 aa, Thermomyces lanuginosus
EVSQDLFNQFNLFAQYSAAAYCGKNNDAPAGTQITCTLNACPEVEKADATFLYSFEDSGVGDVTGFLALDNTNKLIVLSFRGSRSIENWIGNLNFDLKEINDICSGCRGHDGFTSSWRSVADTLRQKVEDAVREHPDYRVVFTGHSLGGALATVAGADLRGNGYDIDVFSYGAPRVGNRAFAEFLTVQTGGTLYRITHTNDIVPRLPPREFGYSHSSPEYWIKSGTLVPVRRRDIVKIEGIDATGGNNQPNIPDIPAHLWYFGLIGTCL

SEQ ID NO: 5253 - protein, 269 aa, Thermomyces lanuginosus
EVSQDLFNQFNLFAQYSAAAYCGKNNDAPAGTQITCTGNACPEVEKADATFLYSFEDSGVGDVTGFLALDNTNKLIVLSFRGSRSIENWIGNLNFDLKEINDICSGCRGHDGFTSSWRSVADTLRQKVEDAVREHPDYRVVFTGHSLGGALATVAGADLRGNVYDIDVFSYGAPRVGNRAFAEFLTVQTGGTLYRITHTNDIVPRLPPREFGYSHSSPEYWIKSGTLVPVRRRDIVKIEGIDATGGNNQPNIPDIPAHLWYFGLIGTCL

SEQ ID NO: 5254 - protein, 269 aa, Thermomyces lanuginosus
EVSQDLFNQFNLFAQYSAAAYCGKNNEAPAGTNITCTGNACPEVEKADATFLYSFEDSGVGDVTGFLALDNTNKLIVLSFRGSRSIENWIGNLNFDLKEINDICSGCRGHDGFTSSWRSVADTLRQKVEDAVREHPDYRVVFTGHSLGGALATVAGADLRGNGYDIDVFSYGAPRVGNRAFAEFLTVQTGGTLYRITHTNDIVPRLPPREFGYSHSSPEYWIKSGTMVPVTRQDIVKIEGIDATGGNNQPNIPDIPAHLWYFGRIGTCL

SEQ ID NO: 5255 - protein, 269 aa, Thermomyces lanuginosus
EVSQDLFNQFNLFAQYSAAAYCGANNDAPAGTNITCTGNACPEVEKADATFLYSFEDSGVGDVTGFLALDNTNKQIVLSFRGSRSIENWIGNLNFDLKEINDICSGCRGHDGFTSSWRSVADTLRQKVEAAVREHPDYRVVFTGHSLGGALATIAGADLRGNGYDIDVFSYGAPRVGNRAFAEFLTVQTGGTLYRITHTNDIVPRLPPREFGYSHSSPEYWIKSGTLVPVTRNDIVKIEGIDATGGNNQPNIPDIPAHLWYFGLIGTCL

SEQ ID NO: 5256 - protein, 269 aa, Thermomyces lanuginosus
EVSQDLFNQFNLFAQYSAAAYCGKNNDAPAGTQITCTGNACPEVEKADATFLYSFEDSGVGDVTGFLALDNTNKLIVLSFRGSRSIENWILNLNFDLKEINDICSGCRGHDGFTSSWRSVADTLRQKVEDAVREHPDYRVVFTGHSLGGALATVAGADLRGNGYDIDVFSYGAPRVGNRAFAEFLTVQTGGTLYRITHTNDIVPRLPPREFGYSHSSPEYWIKSGTLVPVRRRDIVKIEGIDATGGNNQPNIPDIPAHLWYFGLIGTCL

SEQ ID NO: 5257 - protein, 269 aa, Thermomyces lanuginosus
EVSQDLFNQFNLFAQYSAAAYCGKNNDAPAGTQITCTGNACPEVEKADATFLYSFEDSGVGDVTGFLALDNTNKLIVLSFRGSRSIENWIGNLNFDLKEINDICSGCRGHDGFTSSWRSVADTLRQKVEDAVREHPDYRVVFTGHSLGGALATVAGADLRGNGYDIDVFSYGAPRVGNRAFAEFLTVQTGGTLYRITHTNDIVPRLPPREFGYSHSSPEYWIKSGTLVPVRRRDIVKIEGIDATGGNNQPNIPDISAHLWYFGLIGTCL

SEQ ID NO: 5258 - protein, 269 aa, Thermomyces lanuginosus
EVSQDLFNQFNLFAQYSAAAYCGKNNDAPAGTNITCTGNACPEVEKADATFLYSFEDSGVGDVTGFLALDNTNKGIVLSFRGSRSIENWIGNLNFDLKEINDICSGCRGHDGFTSSWRSVADTLRQKVEAAVREHPDYRVVFTGHSLGGALATVAGADLRGNGYDIDVFSYGAPRVGNRAFAEFLTTQTGGTLYRITHTNDIVPRLPPREFGYSHSSPEYWIKSGTLVPVTRNDIVKIEGIDATGGNNQPNQPDIPAHLWYFGLIGTCL

SEQ ID NO: 5259 - protein, 269 aa, Thermomyces lanuginosus
EVSQDLFNQFNLFAQYSAAAYCGKNNDAPAGTQITCTGNACPEVEKADATFLYSFEDSGVGDVTGFLALDNTNKLIVLSFRGSRSIENWIGNLNFDLKEINDICSGCRGHDGFTSSWRSVADTLRQKVEDAVREHPDYRVVFTGHSLGGALATVAGADLRGNGYDIDVFSYGAPRVGNRAFAEFLTVQTGGTLYRITHTNDIVPRLPPREFGYSHSSPEYWIKSPTLVPVRRRDIVKIEGIDATGGNNQPNIPDIPAHLWYFGLIGTCL

SEQ ID NO: 5260 - protein, 269 aa, Thermomyces lanuginosus
EVSQDLFNQFNLFAQYSAAAYCGKNNDAPAGTQITCTGNACPEVEKADATFLYSFEDSGVGDVTGFLALDNTNKLIVLSFRGSRSIENWIGNLNFDLKEINDICSGCRGHDGFTSSWRSVADTLRQKVEDAVREHPDYRVVFTGHSLGGALATVAGADLRGNGYDIDVFSYGAPRVGNRAFAEFLTVQTGGTLYRITHTNDIVPRLPPREFGYSHSSPEYWIKSGTLVPVRRRDIVKIEGIDATGGNNQPNIPNIPAHLWYFGLIGTCL

SEQ ID NO: 5261 - protein, 269 aa, Thermomyces lanuginosus
EVSQDLFNQFNLFAQYSAAAYCGKNNDAPAGTQITCTGNACPEVEKADATFLYSFEDSGVGDVTGFLALDNTNKLIVLSFRGSRSIENWIGNLNFDLKEINDICSGCRGHDGFTSSIRSVADTLRQKVEDAVREHPDYRVVFTGHSLGGALATVAGADLRGNGYDIDVFSYGAPRVGNRAFAEFLTVQTGGTLYRITHTNDIVPRLPPREFGYSHSSPEYWIKSGTLVPVRRRDIVKIEGIDATGGNNQPNIPDIPAHLWYFGLIGTCL

SEQ ID NO: 5262 - protein, 269 aa, Thermomyces lanuginosus
EVSQDLFNQFNLFAQYSAAAYCGKNNNAPAGTNITCTGNACPEVEKADATFLYSFEDSGVGDVTGFLALDNTNKLIVLSFRGSRSIENWIGNLNFGLKEINDICSGCRGHDGFTSSWRSVADTLRQKVEDAVREHPDYRVVFTGHSLGGALATVAGADLRGNGYDIDVFSYGAPRVGNRAFAEFLTVQTGGTLYRITHTNDIVPRLPPREFGYSHSSPEYWIKSGTLVPVRRRDIVKIEGIDATGGNNQPNIPDIPAHLWYFGLIGTCL

SEQ ID NO: 5263 - protein, 269 aa, Thermomyces lanuginosus
EVSQDLFNQFNLFAQYSAAAYCGKNNDAPAGTNITCTGNACPEVEKADATFLYSFEDGGGGDVTGFLALDNTNKLIVLSFRGSRSIENWIGNLNFDLKEINDICSGCRGHDGFTSSWRSVADTLRQKVEDAVREHPDYRVVFTGHSLGGALATVAGADLRGNGYDIDVFSYGAPRVGNRAFAEFLTVQTGGTLYRITHTNDIVPRLPPREFGYSHSSPEYWIKSGTLVPVRRRDIVKIEGIDATGGNNQPNIPDIPAHLWYFGLIGTCL

SEQ ID NO: 5264 - protein, 269 aa, Thermomyces lanuginosus
EVSQDLFNQFQLFAQYSAAAYCGKNNDAPAGTQITCTGNACPEVEKADATFLYSFEDSGVGDVTGFLALDNTNKLIVLSFRGSRSIENWIGNLNFDLKEINDICSGCRGHDGFTSSWRSVADTLRQKVEDAVREHPDYRVVFTGHSLGGALATVAGADLRGNGYDIDVFSYGAPRVGNRAFAEFLTVQTGGTLYRITHTNDIVPRLPPREFGYSHSSPEYWIKSGTLVPVRRRDIVKIEGIDATGGNNQPNIPDIPAHLWYFGLIGTCL

SEQ ID NO: 5265 - protein, 269 aa, Thermomyces lanuginosus
EVSQDLFNQFNLFAQYSAAAYCGKNNDAPAGTNITCTGNACPEVEKADATFLYSFEDSGVGDVTGFLALDNTNKLIVLSFRGSRSIENWIGNLNFDLKEINDICSGCRGHDGFTSSWRSVADTLRQKVEDAVREHPDYRVVFTGHSLGGALATVAGADLRGNGYDIDVFSYGAPRVGNRALAEFLTVQTGGTLYRITHTNDIVPRLPPRVFGYSHSSPEYWIKSGTLVPVRRRDIVKIEGIDATGGNNQPNIPDIPAHLWYFGLIGTCL

SEQ ID NO: 5266 - protein, 269 aa, Thermomyces lanuginosus
EVSQDLFNQFNLFAQYSAAAYCGKNNDAPAGTNITCTGNACPEVEKAQATFLYSFEDSGVGDVTGFLALDNTNKLIVLSFRGSRSIENWIGNLNFDLKEINDICSGCRGHDGFTSSWRSVADTLRQKVEDAVREHPDYRVVFTGHSLGGALATVAGADLRGNPYDIDVFSYGAPRVGNRAFAEFLTVQTGGTLYRITHTNDIVPRLPPREFGYSHSSPEYWIKSGTLVPVTRQDIVKIEGIDATGGNNQPNIPDIPAHLWYFGRIGTCL

SEQ ID NO: 5267 - protein, 269 aa, Thermomyces lanuginosus
EVSQDLFNQFNLFAQYSAAAYCGKNNDAPAGTNITCTGNACPEVEKADATLLYSFEDSGVGDVTGFLALDNTNKLIVLSFRGSRSIENWIGNLNFELKEINDICSGCRGHDGFTSSWRSVADTLRQKVEDAVREHPDYRVVFTGHSLGGALATVAGADLRGNGYDIDVFSYGAPRVGNRAFAEFLTVQTGGTLYRITHTNDIVPRLPPREFGYSHSSPEYWIKSGTLVPVRRRDIVKIEGIDATGGNNQPNIPDIPAHLWYFGLIGTCL

SEQ ID NO: 5268 - protein, 269 aa, Thermomyces lanuginosus
EVSQDLFNQFNLFAQYSAAAYCGKNNDAPAGTNITCTGNACPEVEKADATFLYSFEDSGVGDVTGFLALDNTNKLIVLSFRGSRSIENWIGNLNFDLKEINDICSGCRGHDGFTSSWRSVADTLRQKVEDAVREHPDYRVVFTGHSLGGALATVAGADLRGNGYDIDVFSYGAPRVGNRAFAEFLTVQTGGTLYRITHTNDIVPRLPPREFGYSHSSPEYWIKSGTLVPVRRRDIVKIEGIDATGGNNQPNIPDTPVHLWYFGLIGTCL

SEQ ID NO: 5269 - protein, 269 aa, Thermomyces lanuginosus
EVSQDLFNQFNLFAQYSAAAYCKKNNDAPAGTNITCTGNACPEVEKADATFLYSFKDSGVGDVTGFLALDNTNKLIVLSFRGSRSIENWIGNLNFDLKEINDICSGCRGHDGFTSSWRSVADTLRQKVEAAVREHPDYRVVFTGHSLGGALATVAGADLRGNGYDIDVFSYGAPRVGNRAFAEFLTNQTGGTLYRITHTNDIVPRLPPREFGYSHSSPEYWIKSGTLVPVTRNDIVKIEGIDATGGNNQPNIPDIPAHLWYFGLIGTCL

SEQ ID NO: 5270 - protein, 269 aa, Thermomyces lanuginosus
EVSQDLFNQFNLFAQYSAAAYCQKNNDAPAGTNITCTGNACPEVEKADVTFLYSFEDSGVGDVTGFLALDNTNKQIVLSFRGSRSIENWIGNLNFDLKEINDICSGCRGHDGFTSSWRSVADTLRQKVEDAVREHPDYRVVFTGHSLGGALATVAGADLRGNGYDIDVFSYGAPRVGNRAFAEFLTVQDGGTLYRITHTNDIVPRLPPREFGYSHSSPEYWIKSGTLVPVTRNDIVKIEGIDATGGNNQPNIPDIPAHLWYFGLIGTCL

SEQ ID NO: 5271 - protein, 269 aa, Thermomyces lanuginosus
EVSQDLFNQFNLFAQYSAAAYCGKNNDAPAGTNITCTGNACPEVEKADATILYSFEDSGVGDVTGFLALDNTNKLIVLSFRGSRSIENWIGNLNFDLKEINDICSGCRGHDGFTSSWRSVADTLRQKVEDAVREHPDYRVVFTGHSLGGALATVAGADLRGDGYDIDVFSYGAPRVGNRAFAEFLTVQTGGTLYRITHTNDIVPRLPPREFGYSHSSPEYWIKSGTLVPVRRRDIVKIEGIDATGGNNQPNIPDIPAHLWYFGLIGTCL

SEQ ID NO: 5272 - protein, 269 aa, Synthetic construct
EVSQDLFNQFNLFAQYSAAAYCGKNNDAPAGTNITCTGNACPEVEKADATFLYSFEGSGVGDVTGFLALDNTNKLIVLSFRGSRSIENWIGNLKFDMLEINDICSGCRGHDGFTSSWRSVADTLRQKVEDAVREHPDYRVVFTGHSLGGALATVAGADLRGNGYDIDVFSYGAPRVGNRAFAEFLTVQTGGTLYRITHTNDIVPRLPPREFGYSHSSPEYWIKSGTLVPVTRNDIVKIEGIDATGGNNQPNIPDIPAHLWYFGLIGTCL

SEQ ID NO: 5273 - protein, 269 aa, Thermomyces lanuginosus
EVSQDLFNQFNLFAQYSKAAYCGKNNDAPAGTNITCTGNACPEVFKADATFLYSFEDSGVGDVTGFLALDNTNKQIVLSFRGSRSIENWIGNLNFDLKEINDICSGCRGHDGFTSSWRSVADTLRQKVEDAVREHPDYRVVFTGHSLGGALATVAGADLRGNGYDIDVFSYGAPRVGNRAFAEFLTTQTGGTLYRITHTNDIVPRLPPREFGYSHSSPEYWIKSGTLVPVTRNDIVKIEGIDATGGNNQPNIPDIPAHLWYFGLIGTCL

SEQ ID NO: 5274 - protein, 269 aa, Thermomyces lanuginosus
EVSQDLFNQFNLFAQYSAAAYCGKNNDAPAGTQITCTGNACPEVEKADATFLYSFEDSGVGDVTGFLALDNTNKLIVLSFRGSRSIENWIGNLNFDLKEINDICSGCRGHDGFTSSWRSVADTLRQKVEDAVREHPDYRVVFTGHSLGGALATVAGADLRGNGYDIDVFSYGAPRVGNRAFAEFLTVQTGGTLYRITHTNDIVPRLPPREFGYSHSSPEYWIKSGTLVPVRRRDIVKIEGIDATGGNNQPNIPDINAHLWYFGLIGTCL

SEQ ID NO: 5275 - protein, 269 aa, Thermomyces lanuginosus
EVSQDLFNQFNLFAQYSAAAYCGKNNDAEAGTNITCTGNACPEVFKADATFLYSFEDSGVGDVTGFLALDNTRKDIVLSFRGSRSIENWIGNLNFDLKEINDICSGCRGHDGFTSSWRSVADTLRQKVEDAVREHPDYRVVFTGHSLGGALATVAGADLRGNGYDIDVFSYGAPRVGNRAFAEFLTVQTGGTLYRITHTNDIVPRLPPREFGYSHSSPEYWIKSGTLVPVTRNDIVKIEGIDATGGNNQPNIPDIPAHLWYFGLIGTCL

SEQ ID NO: 5276 - protein, 269 aa, Thermomyces lanuginosus
EVSQDLFNQFNLFAQYSAAAYCGKNNDAPAGTNITCTGNACPEVEKADATFLYSFEDSGVGDVTGFLALDNTNKLIVLSFRGSRSIENWVGNLNFDLKEINDICSGCRGHDGFTSSWRSVADTLRQKVEDAVREHPDYRVVFTGHSLGGALATVAGADLRGNGYDIDVFSYGAPRVGNRAFAEFLTVQTGGTLYRITHTNDIVPRLPPREFGYSHSSPEYWIKSGTLVPVRRRDIVKIEGIDATGGNNQPNIPDVPAHLWYFGLIGTCL

SEQ ID NO: 5277 - protein, 269 aa, Thermomyces lanuginosus
EVSRDLFNQFNLFAQYSAAAYCGKNNDAPAGTNITCTGNACPEVEKADATFLYSFEDSGVGDVTGFLALDNTNKLIVLSFRGSRSIENWIGNLNFDLKEINDICSGCRGHDGFTSSWRSVADTLRQKVEDAVREHPDYRVVFTGHSLGGALATVAGADLRGNGYDIDVFSYGAPRVGNRAFAEFLTVQTGGTLYRITHTNDIVPRLPPREFGYSHSSPEYWIKSGTLPPVRRRDIVKIEGIDATGGNNQPNIPDIPAHLWYFGLIGTCL

SEQ ID NO: 5278 - protein, 269 aa, Thermomyces lanuginosus
EVSQDLFNQFNLFAQYSAAAYCGKNNDAPAGTNITCTGNICPEVEKADATFLYSFEDSGVGDVTGFLALDNTNKLIVLSFRGSRSIENWIGNLNFDLKEINDICSGCRGHDGFTSSWFSVADTLRQKVEDAVREHPDYRVVFTGHSLGGALATVAGADLRGNGYDIDVFSYGAPRVGNRAFAEFLTVQTGGTLYRITHTNDIVPRLPPREFGYSHSSPEYWIKSGTLVPVRRRDIVKIEGIDATGGNNQPNIPDIPAHLWYFGLIGTCL

SEQ ID NO: 5279 - protein, 269 aa, Thermomyces lanuginosus
EVSQDLFNQFNLFAQYSAAAYCKKNNQAPAGTNITCTGNACPEVEKADATTLYSFEDSGVGDVTGFLALDNTNKQIVLSFRGSRSIENWIGNLNFDLKEINDICSGCRGHDGFTSSWRSVADTLRQKVEDAVREHPDYRVVFTGHSLGGALATVAGADLRGNGYDIDVFSYGAPRVGNRAFAEFLTVQTGGTLYRITHTNDIVPRLPPREFGYSHSSPEYWIKSGTLVPVTRNDIVKIEGIDATGGNNQPNIPDIPAHLWYFGLIGTCL

SEQ ID NO: 5280 - protein, 269 aa, Synthetic construct
EVSQDLFNQFNLFAQYSAAAYCGKNNDAPAGTNITCTGNACPEVEKADATFLYSFRDSGVGDVTGFLALDNTNKLIVLSFRGSRSIENWFGNLNFLLKKINDICSGCRGHDGFTSSWRSVADTLRQKVEDAVREHPDYRVVFTGHSLGGALATVAGADLRGNGYDIDVFSYGAPRVGNRAFAEFLTVQTGGTLYRITHTNDIVPRLPPREFGYSHSSPEYWIKSGTLVPVTRNDIVKIEGIDATGGNNQPNIPDIPAHLWYFGLIGTCL

SEQ ID NO: 5281 - protein, 269 aa, Thermomyces lanuginosus
EVSQDLFNQFNLFAQYSAAAYCGKNNDAPAGTNITCTGNACPEVEKADATFLYSFEDSGKGDVTGFLALDNTNKLIVLSFRGTRSIENWIGNLNFDLKEINDICSGCRGHDGFTSSWRSVADTLRQKVEDAVREHPDYRVVFTGHSLGGALATVAGADLRGNGYDIDVFSYGAPRVGNRAFAEFLTVQTGGTLYRITHTNDIVPRLPPREFGYSHSSPEYWIKSGTLVPVRRRDIVKIEGIDATGGNNQPNIPDIPAHLWYFGLIGTCL

SEQ ID NO: 5282 - protein, 269 aa, Thermomyces lanuginosus
EVSQDLFNQFNLFAQYSAAAYCGKNNDAPAGTQITCTGNACPEVEKADATFLYSFEDSGVGDVTGFLALDNTNKLIVLSFRGSRSIENWITNLNFDLKEINDICSGCRGHDGFTSSWRSVADTLRQKVEDAVREHPDYRVVFTGHSLGGALATVAGADLRGNGYDIDVFSYGAPRVGNRAFAEFLTVQTGGTLYRITHTNDIVPRLPPREFGYSHSSPEYWIKSGTLVPVRRRDIVKIEGIDATGGNNQPNIPDIPAHLWYFGLIGTCL

SEQ ID NO: 5283 - protein, 269 aa, Thermomyces lanuginosus
EVSQDLFNQFNLFAQYSAAAYCGKNNDAPAGTQITCTGNACPEVEKADATFLYSFEDSGVGDVTGFLALDNTNKLIVLSFRGSRSIENWIGNLNFDLKEINDICSGCRGHDGFTSSWRSVADTLRQKVEDAVREHPDYRVVFTGHSLGGALATVAGADLRGNGYDIDVFSYGAPRDGNRAFAEFLTVQTGGTLYRITHTNDIVPRLPPREFGYSHSSPEYWIKSGTLVPVRRRDIVKIEGIDATGGNNQPNIPDIPAHLWYFGLIGTCL

SEQ ID NO: 5284 - protein, 269 aa, Thermomyces lanuginosus
EVSQDLFNQFNLFAQYSAAAYCGKNNDAPAGTNITCTGNACPEVEKADATFLYSFEDSGVGDVTGFLALDNTNKLIVLSFRGSRSIENWIGNLNFDLKEINDICSGCRGHDGFTSSWRSVADTLRQKVEDAVREHPDYRVVFTGHSLGGALATVAGADLRGDGYDIDVFSYGAPRVGNRAFAEFLTVQTGGTLYRITHTNDIVPRLPPREFGYSHSSPEYWIKSGTLPPVRRRDIVKIEGIDATGGNNQPNIPDIPAHLWYFGLIGTCL

SEQ ID NO: 5285 - protein, 269 aa, Thermomyces lanuginosus
EVSQDLFNQFNLFAQYSAAAYCQKNNDAPAGTNITCTGNACPEVEKADATTLYSFEDSGVGDVTGFLALDNTNKLIVLSFRGSRSIENWIGNLNFDLKEINDICSGCRGHDGFTSSWRSVADTLRQKVEDAVREHPDYRVVFTGHSLGGALATVAGADLRGNGYDIDVFSYGAPRVGNRAFAEFLTVQTGGTLYRITHTNDIVPRLPPREFGYSHSSPEYWIKSGTLVPVTRNDIVKIEGIDATGGNNQPNQPDIPAHLWYFGRIGTCL

SEQ ID NO: 5286 - protein, 269 aa, Thermomyces lanuginosus
EVSQDLFNQFNLFAQYSAAAYCGKNNDAPAGTQITCTGNACPEVEKADATFLYSFEDSGVGDVTGFLALDNTNKLIVLSFRGSRSIENWIGNLNFDLKEINDICSGCRGHDGFTSSWRSVADTLRQKVEDAVREHPDYRVVFTGHSLGGALATVAGADLRGNGYDIDVFSYGAPRNGNRAFAEFLTVQTGGTLYRITHTNDIVPRLPPREFGYSHSSPEYWIKSGTLVPVRRRDIVKIEGIDATGGNNQPNIPDIPAHLWYFGLIGTCL

SEQ ID NO: 5287 - protein, 269 aa, Thermomyces lanuginosus
EVSQDLFNQFNLFAQYSAAAYCGKNNDAPAGTNITCTGNACPEVEKADATFLYSFEDSGVGDVTGFLALDNTNKLIVLSFRGSRSIENWIGNLNFDLKEINDICSGCRGHDGFTSSWRSVADTLRQKVEDAVREHPDYRVVFTGHSLGGALATVAGADLRGNGYDIDVFSYGAPRVGNRAFAEFLTVQTGGTLYRITSTNDIVPRLPPREFGYSHSSPEYWIKSGTLPPVRRRDIVKIEGIDATGGNNQPNIPDIPAHLWYFGLIGTCL

SEQ ID NO: 5288 - protein, 269 aa, Thermomyces lanuginosus
EVSQDLFNQFNLFAQYSKAAYCGKNNDAPAGTNITCTGNACPEVEKADVTFLYSFEDSGVGDVTGFLALDNTNKQIVLSFRGSRSIENWIGNLNFDLKEINDICSGCRGHDGFTSSWRSVADTLRQKVEDAVREHPDYRVVFTGHSLGGALATVAGADLRGNGYDIDVFSYGAPRVGNRAFAEFLTVQDGGTLYRITHTNDIVPRLPPREFGYSHSSPEYWIKSGTLVPVTRNDIVKIEGIDATGGNNQPNIPDIPAHLWYFGLIGTCL

SEQ ID NO: 5289 - protein, 269 aa, Thermomyces lanuginosus
EVSQDLFNQFNLFAQYSAAAYCGKNNDAPAGTNITCTGNACPEVEKADATFLYSFEDSGVGDVTGFLALDNTNKLIVLSFRGSRSIENWIGNLNFDLKEINDICSGCRGHDGFTSSWRSVADTLRQKVEDAVREHPDYRVVFTGHSLGGALATVAGADLRGNGYDIDVFSYGAPRVGNRAFAEFLTVQTGGTLYRITHTNDIVPRLPPRQFGYSHSSPEYWIKSGTLVPVRRRDIVKIEGIDATGGNNQPNIPDAPAHLWYFGLIGTCL

SEQ ID NO: 5290 - protein, 269 aa, Thermomyces lanuginosus
EVSQDLFNQFNLFAQYSAAAYCGKNNDAPAGTQITCTGNACPEVEKADATFLYSFEDSGVGDVTGFLALDNTNKLIVLSFRGSRSIENWIGNLNFDLKEINDICSGCRGHDGFTSSWRSVADTLRQKVEDAVREHPDYRVVFTGHSLGGALATVAGADLRGNGYDIDVFSYGAPRVGNRAFAEFLTVQTGGTLYRITHTNDIVPRLPPREFGYSHSSPEYWIKSGTLVPVRRRDIVKIEGIDATGGNNQPNIPDITAHLWYFGLIGTCL

SEQ ID NO: 5291 - protein, 269 aa, Thermomyces lanuginosus
EVSQDLFNQFNLFAQYSAAAYCGKNNDAPAGTNITCTGNACPEVEKADATFLYSFEDSGLGDVTGFLALDNTNKLIVLSFRGSRSIENWIMNLNFDLKEINDICSGCRGHDGFTSSWRSVADTLRQKVEDAVREHPDYRVVFTGHSLGGALATVAGADLRGNGYDIDVFSYGAPRVGNRAFAEFLTVQTGGTLYRITHTNDIVPRLPPREFGYSHSSPEYWIKSGTLVPVWRNDIVKIEGIDATGGNNLPNIPDIPAHLWYFGLIGTCL

SEQ ID NO: 5292 - protein, 269 aa, Thermomyces lanuginosus
EVSDDLFNQFNLFAQYSAAAYCGKNNQAPAGTNITCTGNACPEVEKADATFLYSFEDSGVGDVTGFLALDNTNKLIVLSFRGSRSIENWIGNLNFDLKEINDICSGCRGHDGFTSSWRSVADTLRQKVEDAVREHPDYRVVFTGHSLGGALATVAGADLRGNGYDIDVFSYGAPRVGNRAFAEFLTVQTGGTLYRITHTNDIVPRLPPREFGYSHSSPEYWIKSGTLVPVTRQDIVKIEGIDATGGNNQPNIPDITAHLWYFGLIGTCL

SEQ ID NO: 5293 - protein, 269 aa, Thermomyces lanuginosus
EVSRDLFNQFNLFAQYSAAAYCGKNNDAPAGTNITCTGNACPEVEKADATFLYSFEDSGVGDVTGFLALDNTNKLIVLSFRGSRSIENWIGNLNFDLKEINDICSGCRGHDGFTSSWRSVADTLRQKVEDAVREHPDYRVVFTGHSLGGALATVAGADLRGDGYDIDVFSYGAPRVGNRAFAEFLTVQTGGTLYRITHTNDIVPRLPPREFGYSHSSPEYWIKSGTLVPVRRRDIVKIEGIDATGGNNQPNIPDIPAHLWYFGLIGTCL

SEQ ID NO: 5294 - protein, 269 aa, Thermomyces lanuginosus
EVSQDLFNQFNLFAQYSAAAYCGKNNDAPAGTQITCTGNACPEVEKADATFLYSFEDSGVGDVTGFLALDNTNKLIVLSFRGSRSIENWIGNLNFDLKEINDICSGCRGHDGFTSSWRSVADTLRQKVEDAVREHPDYRVVFTGHSLGGALATVAGADLRGNGYDIDVFSYGAPRVGNRAFAEFLTVQTGGTLYRITHTNDIVPRLPPREFGYSHSSPEYWIKSGTLVPVRRRDIVKIEGIDATGGNNQPNIPKIPAHLWYFGLIGTCL

SEQ ID NO: 5295 - protein, 269 aa, Thermomyces lanuginosus
EVSQDLFNQFNLFAQYSAAAYCGKNNDAPAGTNITCTGNACPEVEKADATFLYSFEDSGVGDVTGFLALDNTNKGIVLSFRGSRSIENWIGNLNFDLKEINDICSGCRGHDGFTSSWRSVADTLRQKVEDAVREHPDYRVVFTGHSLGGALATVAGADLRGNGYDIDVFSYGAPRVGNRAFAEFLTHQTGGTLYRITHTNDIVPRLPPREFGYSHSSPEYWIKSGTLVPVTRNDIVKIEGIDATGGNNQPNQPDIPAHLWYFGRIGTCL

SEQ ID NO: 5296 - protein, 269 aa, Thermomyces lanuginosus
EVSQDLFNQFNLFAQYSAAAYCGKNNDAPAGTQITCTQNACPEVEKADATFLYSFEDSGVGDVTGFLALDNTNKLIVLSFRGSRSIENWIGNLNFDLKEINDICSGCRGHDGFTSSWRSVADTLRQKVEDAVREHPDYRVVFTGHSLGGALATVAGADLRGNGYDIDVFSYGAPRVGNRAFAEFLTVQTGGTLYRITHTNDIVPRLPPREFGYSHSSPEYWIKSGTLVPVRRRDIVKIEGIDATGGNNQPNIPDIPAHLWYFGLIGTCL

SEQ ID NO: 5297 - protein, 269 aa, Thermomyces lanuginosus
EVSQDLFNQFNLFAQYSAAAYCGKNNDAPAGTQITCTGNACPEVEKADATFLYSFEDSGVGDVTGFLALDNTNKLIVLSFRGSRSIENWIGNLNFDLKEINDICSGCRGHDGFTSSWRSVADTLRQKVEDAVREHPDYRVVFTGHSLGGALATVAGADLRGNGYDIDVFSYGAPRVGNRAFAEFLTVQTGGTLYRITHTNDIVPRLPPREFGYSHSSPEYWIKSGTLVPVRRRDIVKIEGIDATGGNNQPNIPMIPAHLWYFGLIGTCL

SEQ ID NO: 5298 - protein, 269 aa, Thermomyces lanuginosus
EVSQDLFNQFNLFAQYSAAAYCGKNNDAPAGTQITCTHNACPEVEKADATFLYSFEDSGVGDVTGFLALDNTNKLIVLSFRGSRSIENWIGNLNFDLKEINDICSGCRGHDGFTSSWRSVADTLRQKVEDAVREHPDYRVVFTGHSLGGALATVAGADLRGNGYDIDVFSYGAPRVGNRAFAEFLTVQTGGTLYRITHTNDIVPRLPPREFGYSHSSPEYWIKSGTLVPVRRRDIVKIEGIDATGGNNQPNIPDIPAHLWYFGLIGTCL

SEQ ID NO: 5299 - protein, 269 aa, Thermomyces lanuginosus
EVSQDLFNQFNLFAQYSAAAYCGKNNDAPAGTQITCTGNACPEVEKADATFLYSFEDSGVGDVTGFLALDNTNKLIVLSFRGSRSIENWIGNLNFDLIEINDICSGCRGHDGFTSSWRSVADTLRQKVEDAVREHPDYRVVFTGHSLGGALATVAGADLRGNGYDIDVFSYGAPRVGNRAFAEFLTVQTGGTLYRITHTNDIVPRLPPREFGYSHSSPEYWIKSGTLVPVRRRDIVKIEGIDATGGNNQPNIPDIPAHLWYFGLIGTCL

SEQ ID NO: 5300 - protein, 269 aa, Thermomyces lanuginosus
EVSDDLFNQFKLFAQYSAAAYCGKNNQAPAGTNITCTGNACPEVEKADATFLYSFEDSGVGDVTGFLALDNTNKLIVLSFRGSRSIENWIGNLNFDLKEINDICSGCRGHDGFTSSWRSVADTLRQKVEDAVREHPDYRVVFTGHSLGGALATVAGADLRGNGYDIDVFSYGAPRVGNRAFAEFLTVQTGGTLYRITHTNDIVPRLPPREFGYSHSSPEYWIKSGTLVPVTRQDIVKIEGIDATGGNNQPNIPDIPAHLWYFGLIGTCL

SEQ ID NO: 5301 - protein, 269 aa, Thermomyces lanuginosus
EVSQDLFNQFNLFAQYSAAAYCGKNNDAPAGTNITCTGNACPEVEKADATTLYSFEDSGVGDVTGFLALDNTNKQIVLSFRGSRSIENWIGNLNFDLKEINDICSGCRGHDGFTSSWRSVADTLRQKVEDAVREHPDYRVVFTGHSLGGALATVAGADLRGNGYDIDVFSYGAPRVGNRAFAEFLTVQTGGTLYRITHTNDIVPRLPPREFGYSHSSPEYWIKSGTLVPVTRNDIVKIEGIDATGGNNQPNQPDIPAHLWYFGRIGTCL

SEQ ID NO: 5302 - protein, 269 aa, Thermomyces lanuginosus
EVSQDLFNQFNLFAQYSAAAYCQKNNDAPAGTNITCTGNACPEVEKADVTFLYSFEDSGVGDVTGFLALDNTNKLIILSFRGSRSIENWIGNLNFDLKEINDICSGCRGHDGFTSSWRSVADTLRQKVEDAVREHPDYRVVFTGHSLGGALATVAWADLRGNGYDIDVFSYGAPRVGNRAFAEFLTVQTGGTLYRITHTNDIVPRLPPREFGYSHSSPEYWIKSGTLVPVTRNDIVKIEGIDATGGNNQPNIPDIPAHLWYFGLIGTCL

SEQ ID NO: 5303 - protein, 269 aa, Thermomyces lanuginosus
EVSQDLFNQFNLFAQYSKAAYCQKNNDAPAGTNITCTGNACPEVEKADVTFLYSFEDSGVGDVTGFLALDNTNKLIVLSFRGSRSIENWIGNLNFDLKEINDICSGCRGHDGFTSSWRSVADTLRQKVEDAVREHPDYRVVFTGHSLGGALATVAGADLRGNGYDIDVFSYGAPRVGNRAFAEFLTVQDGGTLYRITHTNDIVPRLPPREFGYSHSSPEYWIKSGTLVPVTRNDIVKIEGIDATGGNNQPNIPDIPAHLWYFGLIGTCL

SEQ ID NO: 5304 - protein, 269 aa, Thermomyces lanuginosus
EVSQDLFNQFNLFAQYSAAAYCGKNNDAPAGTQITCTGNACPEVEKADATFLYSFEDSGVGDVTGFLALDNTNKLIVLSFRGSRSIENWIGNLNFDLKEINDICSGCRGHDGFTSSWRSVADTLRQKVEDAVREHPDYRVVFTGHSLGGALATVAGADLRGNGYDIDVFSYGAPRVGNRAFAEFLTVQTGGTLYRITHTNDIVPRLPPREFGYSHSSPEYWIKSGTLVPVRRRDIVKIEGIDATGGNNQPNIPAIPAHLWYFGLIGTCL

SEQ ID NO: 5305 - protein, 269 aa, Thermomyces lanuginosus
EVSQDLFNQFNLFAQYSAAAYCGKNNDAPAGTQITCTGNACPEVEKADATFLYSFEDSGVGDVTGFLALDNTNKLIVLSFRGSESIENWIGNLNFDLKEINDICSGCRGHDGFTSSWRSVADTLRQKVEDAVREHPDYRVVFTGHSLGGALATVAGADLRGNGYDIDVFSYGAPRVGNRAFAEFLTVQTGGTLYRITHTNDIVPRLPPREFGYSHSSPEYWIKSGTLVPVRRRDIVKIEGIDATGGNNQPNIPDIPAHLWYFGLIGTCL

SEQ ID NO: 5306 - protein, 269 aa, Thermomyces lanuginosus
EVSQDLFNQFNLFAQYSAAAYCGKNNDAPAGTQITCTGNACPEVEKADATFLYSFEDSGVGDVTGFLALDNTNKLIVLSFRGSRSIENWIVNLNFDLKEINDICSGCRGHDGFTSSWRSVADTLRQKVEDAVREHPDYRVVFTGHSLGGALATVAGADLRGNGYDIDVFSYGAPRVGNRAFAEFLTVQTGGTLYRITHTNDIVPRLPPREFGYSHSSPEYWIKSGTLVPVRRRDIVKIEGIDATGGNNQPNIPDIPAHLWYFGLIGTCL

SEQ ID NO: 5307 - protein, 269 aa, Thermomyces lanuginosus
EVSQDLFNQFNLFAQYSAAAYCGKNNDAPAGTQITCTGNACPEVEKADATFLYSFEDSGVGDVTGFLALDNTNKLIVLSFRGSRSIENWIGNLNFDLKEINDICSGCRGHDGFTSSWRSVADTLRQKVEDAVREHPDYRVVFTGHSLGGALATVAGADLRGNGYDIDVFSYGAPRVGNRAFAEFLTVQTGGTLYRITHTNDIVPRLPPREFGYSHSSPEYWIKSGTLVPVRRRDIVKIELIDATGGNNQPNIPDIPAHLWYFGLIGTCL

SEQ ID NO: 5308 - protein, 269 aa, Thermomyces lanuginosus
EVSQDLFNQFNLFAQYSAAAYCGKNNDAPAGTQITCTGNACPEVEKADATFLYSFEDSGVGDVTGFLALDNTNKLIVLSFRGSRSLENWIGNLNFDLKEINDICSGCRGHDGFTSSWRSVADTLRQKVEDAVREHPDYRVVFTGHSLGGALATVAGADLRGNGYDIDVFSYGAPRVGNRAFAEFLTVQTGGTLYRITHTNDIVPRLPPREFGYSHSSPEYWIKSGTLVPVRRRDIVKIEGIDATGGNNQPNIPDIPAHLWYFGLIGTCL

SEQ ID NO: 5309 - protein, 269 aa, Thermomyces lanuginosus
EVSQDLFNQFNLFAQYSAAAYCGKNNDAPAGTNITCTGNACPEVEKADATFLYSFEDSGVGDVTGFLALDNTNKLIVLSFRGSRSIKNWIGNLNFDLKEINDICSGCRGHDGFTSSWRSVADTLRQKVEDAVREHPDYRVVFTGHSSGGALATVAGADLRGNGYDIDVFSYGAPRVGNRAFAEFLTVQTGGTLYRITHTNDIVPRLPPREFGYSHSSPEYWIKSGTLVPVRRRDIVKIEGIDATGGNNQPNIPDIPAHLWYFGLIGTCL

SEQ ID NO: 5310 - protein, 269 aa, Thermomyces lanuginosus
EVSQDLFNQFNLFAQYSAAAYCKKNNDAPAGTNITCTGNACPEVEKADATFLYSFEDSGVGDVTGFLALDNTNKQIVLSFRGSRSIENWIGNLNFDLKEINDICSGCRGHDGFTSSWRSVADTLRQKVEAAVREHPDYRVVFTGHSLGGALATVAGADLRGNGYDIDVFSYGAPRVGNRAFAEFLTNQTGGTLYRITHTNDIVPRLPPREFGYSHSSPEYWIKSGTLVPVTRNDIVKIEGIDATGGNNQPNIPDIPAHLWYFGLIGTCL

SEQ ID NO: 5311 - protein, 269 aa, Thermomyces lanuginosus
EVSQDLFNQFNLFAQYSAAAYCGKNNDAPAGTQITCTGNACPEVEKADATFLYSFEDSGVGDVTGFLALDNTNKLIVLSFRGSRSIENWIGNLNFDLKEINDICSGCRGHDGFTSSWRSVADTLRQKVEDAVREHPDYRVVFTGHSLGGALATVAGADLRGNGYDIDVFSYGAPRVGNRAFAEFLTVQTGGTLYRITHTNDIVPRLPPREFGYSHSSPEYWIKSGTLVPVRRRDIVKIDGIDATGGNNQPNIPDIPAHLWYFGLIGTCL

SEQ ID NO: 5312 - protein, 269 aa, Thermomyces lanuginosus
EVSQDLFNQFNLFAQYSAAAYCGKNNDAPAGTQITCTGNACPEVEKADATFLYSFEDSGVGDVTGFLALDNTNKLIVLSFRGSRSIENWIKNLNFDLKEINDICSGCRGHDGFTSSWRSVADTLRQKVEDAVREHPDYRVVFTGHSLGGALATVAGADLRGNGYDIDVFSYGAPRVGNRAFAEFLTVQTGGTLYRITHTNDIVPRLPPREFGYSHSSPEYWIKSGTLVPVRRRDIVKIEGIDATGGNNQPNIPDIPAHLWYFGLIGTCL

SEQ ID NO: 5313 - protein, 269 aa, Thermomyces lanuginosus
EVSQDLFNQFNLFAQYSAAAYCGANNDAPAGTNITCTGNACPEVEKADATFLYSFEDSGVGDVTGFLALDNTNKRIVLSFRGSRSIENWIGNLNFDLKEINDICSGCRGHDGFTSSWRSVADTLRQKVEDAVREHPDYRVVFTGHSLGGALATVAWADLRGNGYDIDVFSYGAPRVGNRAFAEFLTNQTGGTLYRITHTNDIVPRLPPREFGYSHSSPEYWIKSGTLVPVTRNDIVKIEGIDATGGNNQPNIPDIPAHLWYFGLIGTCL

SEQ ID NO: 5314 - protein, 269 aa, Thermomyces lanuginosus
EVSQDLFNQFNLFAQYSAAAYCKKNNDAPAGTNITCTGNACPEVEKADATFLYSFEDSGVGDVTGFLALDNTNKLIVLSFRGSRSIENWIGNLNFDLKEINDICSGCRGHAGFTSSWRSVADTLRQKVEAAVREHPDYRVVFTGHSLGGALATVAGADLRGNGYDIDVFSYGAPRVGNRAFAEFLTVQTGGTLYRITHTNDIVPRLPPREFGYSHSSPEYWIKSGTLVPVTRNDIVKIEGIDATGGNNQPNIPDIPAHLWYFGRIGTCL

SEQ ID NO: 5315 - protein, 269 aa, Thermomyces lanuginosus
EVSQDLFNQFNLFAQYSAAAYCGKNNDAPAGTNITCTGNACPEVEKADATFLYSFEDSGVGAVTGFLALDNTNKLIVLSFRGTRSIENWIGNLNFWLKEINDICSGCRGHDGFTSSWRSVADTLRQKVEDAVREHPDYRVVFTGHSLGGALATVAGADLRGNGYDIDVFSYGAPRVGNRAFAEFLTVQTGGTLYRITHTNDIVPRLPPREFGYSHSSPEYWIKSGTLVPVTRNDIVKIEGIDATGGNNQPNIPDIPAHLWYFGLISTCL

SEQ ID NO: 5316 - protein, 269 aa, Thermomyces lanuginosus
EVSQDLFNQFNLFAQYSAAAYCGKNNDAPAGTQITCTGNACPEVEKADATFLYSFEDSGVGDVTGFLALDNTNKLIVLSFRGSRSIENWIGNLNFDLKEINDICSGCRGHDGFTSSWRSVADTLRQKVEDAVREHPDYRVVFTGHSLGGALATVAGADLRGNGYDIDVFSYGAPRVGNRAFAEFLTVQTGGTLYRITHTNDIVPRLPPREFGYSHSSPEYWIKSGTLVPVRRRDIVKIEGIEATGGNNQPNIPDIPAHLWYFGLIGTCL

SEQ ID NO: 5317 - protein, 269 aa, Thermomyces lanuginosus
EVSQDLFNQFNLFAQYSAAAYCGKNNDAEAGTDITCTGNACPEVEKADATFLYSFEDSGVGDVTGFLALDNTNKDIVLSFRGSRSIENWIGNLNFDLKEINDICSGCRGHDGFTSSWRSVADTLRQKVEDAVREHPDYRVVFTGHSLGGALATVAGADLRGNGYDIDVFSYGAPRVGNRAFAEFLTVQDGGTLYRITHTNDIVPRLPPREFGYSHSSPEYWIKSGTLVPVTRNDIVKIEGIDATGGNNQPNIPDIPAHLWYFGLIGTCL

SEQ ID NO: 5318 - protein, 269 aa, Thermomyces lanuginosus
EVSQDLFNQFNLFAQYSAAAYCGKNNDAPAGTQITCTGNACPEVEKADATFLYSFEDSGVGDVTGFLALDNTNKLIVLSFRGSRSIKNWIGNLNFDLKEINDICSGCRGHDGFTSSWRSVADTLRQKVEDAVREHPDYRVVFTGHSLGGALATVAGADLRGNGYDIDVFSYGAPRVGNRAFAEFLTVQTGGTLYRITHTNDIVPRLPPREFGYSHSSPEYWIKSGTLVPVRRRDIVKIEGIDATGGNNQPNIPDIPAHLWYFGLIGTCL

SEQ ID NO: 5319 - protein, 269 aa, Synthetic construct
EVSQDLFNQFNLFAQYSAAAYCGKNNDAPAGTNITCTGNACPEVEKADATFLYSFEDSGVGDVTGFLALDNTNKLIVLSFRGSRSIENWIGNLKFLLKKINDICSGCRGHDGFTSSWRSVADTLRQKVEDAVREHPDYRVVFTGHSLGGALATVAGADLRGNGYDIDVFSYGAPRVGNRAFAEFLTVQTGGTLYRITHTNDIVPRLPPREFGYSHSSPEYWIRSGTLVPVTRNDIVKIEGIDATGGNNQPNIPDIPAHLWYFGLIGTCL

SEQ ID NO: 5320 - protein, 269 aa, Thermomyces lanuginosus
EVSQDLFNQFNLFAQYSAAAYCGKNNDAPAGTQITCTGNACPEVEKADATFLYSFEDSGVGDVTGFLALDNTNKLIVLSFRGSRSIENWIGNLNFDLKEINDICSGCRGHDGFTSSWRSVADTLRQKVEDAVREHPDYRVVFTGHSLGGALATVAGADLRGNGYDIDVFSYGAPRVGNRAFAEFLTVQTGGTLYRITHTSDIVPRLPPREFGYSHSSPEYWIKSGTLVPVRRRDIVKIEGIDATGGNNQPNIPDIPAHLWYFGLIGTCL

SEQ ID NO: 5321 - protein, 269 aa, Synthetic construct
EVSQDLFNQFNLFAQYSAAAYCGKNNDAPAGTNITCTGNACPEVEKADATFLYSFEDSGVGDVTGFLALDNTNKLIVLSFRGSRSIENWIGNLKFLLKEINDICSGCRGHDGFTSSWRSVADTLRQKVEDAVREHPDYRVVFTGHSLGGALATVAGADLRGNGYDIDVFSYGAPRVGNRAFAEFLTVQTGGTLYRITHTNDIVPRLPPREFGYSHSSPEYWIRSGTLVPVTRNDIVKIEGIDATGGNNRPNIPDIPAHLWYFGLIGTCL

SEQ ID NO: 5322 - protein, 269 aa, Thermomyces lanuginosus
EVSQDLFNQFNLFAQYSAAAYCGKNNDAPAGTNITCTGNACPEVEKADATVLYSFEDSGVGDVTGFLALDNTNKLIVLSFRGSRSIENWIGNLNFDLKEINDICSGCRGHDGFTSSWRSVADTLRQKVEDAVREHPDYRVVFTGHSLGGALATVAGADLRGNGYDIDVFSYGAPRVGNRAFAEFLTVQTGGTLYRITHTNDIVPRLPPREFGYSHSSPEYWIKSGTLVPVRRRDIVKIEGIDATGGNNQPNIPSIPAHLWYFGLIGTCL

SEQ ID NO: 5323 - protein, 269 aa, Thermomyces lanuginosus
EVSQDLFNQFNLFAQYSAAAYCGKNNDAPAGTNITCTGNACPEVEKADATFLYSFEDSGVGDVTGFLALDNTNKQIVLSFRGSRSIENWIGNLNFDLKEINDICSGCRGHDGFTSSWRSVADTLRQKVEAAVREHPDYRVVFTGHSLGGALATIAWADLRGNGYDIDVFSYGAPRVGNRAFAEFLTVQTGGTLYRITHTNDIVPRLPPREFGYSHSSPEYWIKSGTLVPVTRNDIVKIEGIDATGGNNQPNIPDIPAHLWYFGLIGTCL

SEQ ID NO: 5324 - protein, 269 aa, Synthetic construct
EVSQDLFNQFNLFAQYSAAAYCGKNNDAPAGTNITCTGNACPEVEKADATFLYSFEDSGVGDVTGFLALDNTNKLIVLSFRGSRSIENWIGNLNFDLKEINDICSGCRGHDGFTSSWRSVADTLRQKVEDAVREHPGYRVVFTGHSLGGALATVAGADLRGNGYDIGVFSYGAPRVGNRAFAEFLTVQTGGTLYRITHTNDIVPRLPPRVFGYSHSSPEYLIKSGTLVPVTRNDIVKIEGIDATGGNNQPNIPDIPAHLWYFGLIGTCL

SEQ ID NO: 5325 - protein, 269 aa, Thermomyces lanuginosus
EVSQDLFNQFNLFAQYSAAAYCQKNNDAPAGTNITCTGNACPEVEKADATFLYSFEDSGVGDVTGFLALDNTNKQIVLSFRGSRSIENWIGNLNFDLKEINDICSGCRGHDGFTSSWRSVADTLRQKVEDAVREHPDYRVVFTGHSLGGALATVAWADLRGNGYDIDVFSYGAPRVGNRAFAEFLTTQTGGTLYRITHTNDIVPRLPPREFGYSHSSPEYWIKSGTLVPVTRNDIVKIEGIDATGGNNQPNIPDIPAHLWYFGLIGTCL

SEQ ID NO: 5326 - protein, 269 aa, Thermomyces lanuginosus
EVSQDLFNQFNLFAQYSAAAYCGKNNDAPAGTQITCTGNACPEVEKADATFLYSFEDSGVGDVTGFLALDNTNKLIVLSFRGSRSIENWIGNLNFDLKEINDICSGCRGHDGFTSSYRSVADTLRQKVEDAVREHPDYRVVFTGHSLGGALATVAGADLRGNGYDIDVFSYGAPRVGNRAFAEFLTVQTGGTLYRITHTNDIVPRLPPREFGYSHSSPEYWIKSGTLVPVRRRDIVKIEGIDATGGNNQPNIPDIPAHLWYFGLIGTCL

SEQ ID NO: 5327 - protein, 269 aa, Thermomyces lanuginosus
EVSQDLFNQFNLFAQYSKAAYCGKNNDAPAGTNITCTGNACPEVFKADVTFLYSFEDSGVGDVTGFLALDNTNKLIVLSFRGSRSIENWIGNLNFDLKEINDICSGCRGHDGFTSSWRSVADTLRQKVEDAVREHPDYRVVFTGHSLGGALATVAGADLRGNGYDIDVFSYGAPRVGNRAFAEFLTTQTGGTLYRITHTNDIVPRLPPREFGYSHSSPEYWIKSGTLVPVTRNDIVKIEGIDATGGNNQPNIPDIPAHLWYFGLIGTCL

SEQ ID NO: 5328 - protein, 269 aa, Thermomyces lanuginosus
EVSQDLFNQFNLFAQYSAAAYCGKNNDAPAGTNITCTGNACPEVEKADATFLYSFEDSGVGDVTGFLALDNTNKRIVLSFRGSRSIENWIGNLNFDLKEINDICSGCRGHAGFTSSWRSVADTLRQKVEDAVREHPDYRVVFTGHSLGGALATIAWADLRGNGYDIDVFSYGAPRVGNRAFAEFLTVQTGGTLYRITHTNDIVPRLPPREFGYSHSSPEYWIKSGTLVPVTRNDIVKIEGIDATGGNNQPNIPDIPAHLWYFGLIGTCL

SEQ ID NO: 5329 - protein, 269 aa, Thermomyces lanuginosus
EVSQDLFNQFNLFAQYSAAAYCGKNNDAPAGTNITCTGNACPEVEKADATFLYSFEGSGVGDVTGFLALDNTNKLIVLSFRGSRSIENWIGNFNFDLKEINDICSGCRGHDGFTSSWRSVADTLRQKVEDAVREHPDYRVVFTGHSLGGALATVAGADLRGNGYDIDVFSYGAPRVGNRAFAEFLTVQTGGTLYRITHTNDIVPRLPPREFGYSHSSPEYWIKSGTLVPVRRRDIVKIEGIDATGGNNQPNIPDIPAHLWYFGLIGTCL

SEQ ID NO: 5330 - protein, 269 aa, Thermomyces lanuginosus
EVSQDLFNQFNLFAQYSKAAYCQKNNDAPAGTNITCTGNACPEVEKADATFLYSFEDSGVGDVTGFLALDNTNKQIVLSFRGSRSIENWIGNLNFDLKEINDICSGCRGHDGFTSSWRSVADTLRQKVEDAVREHPDYRVVFTGHSLGGALATVAGADLRGNGYDIDVFSYGAPRVGNRAFAEFLTVQDGGTLYRITHTNDIVPRLPPREFGYSHSSPEYWIKSGTLVPVTRNDIVKIEGIDATGGNNQPNIPDIPAHLWYFGLIGTCL

SEQ ID NO: 5331 - protein, 269 aa, Thermomyces lanuginosus
EVSQDLFNQFNLFAQYSAAAYCQKNNDAPAGTNITCTGNACPEVEKADATFLYSFEDSGVGDVTGFLALDNTNKQIVLSFRGSRSITNWIGNLNFDLKEINDICSGCRGHDGFTSSWRSVADTLRQKVEDAVREHPDYRVVFTGHSLGGALATVAGADLRGNGYDIDVFSYGAPRVGNRAFAEFLTVQTGGTLYRITHTNDIVPRLPPREFGYSHSSPEYWIKSGTLVPVTRNDIVKIEGIDATGGNNQPNIPDIPAHLWYFGRIGTCL

SEQ ID NO: 5332 - protein, 269 aa, Thermomyces lanuginosus
EVSQDLFNQFNLFAQYSAAAYCGKNNDAPAGTQITCTGNACPEVEKADATFLYSFEDSGVGDVTGFLALDNTNKLIVLSFRGSRSIENWIGNLNFDLKEINDICSGCRGHDGFTSSWRSVADTLRQKVEDAVREHPDYRVVFTGHSLGGALATVAGADLRGTGYDIDVFSYGAPRVGNRAFAEFLTVQTGGTLYRITHTNDIVPRLPPREFGYSHSSPEYWIKSGTLVPVRRRDIVKIEGIDATGGNNQPNIPDIPAHLWYFGLIGTCL

SEQ ID NO: 5333 - protein, 269 aa, Thermomyces lanuginosus
EVSQDLFNQFNLFAQYSKAAYCGKNNSAEAGTNITCTGNACPEVEKADATFLYSFEDSGVGDVTGFLALDNTNKLIVLSFRGSRSIENWIGNLNFDLKEINDICSGCRGHDGFTSSWRSVADTLRQKVEDAVREHPDYRVVFTGHSLGGALATVAGADLRGNGYDIDVFSYGAPRVGNRAFAEFLTVQDGGTLYRITHTNDIVPRLPPREFGYSHSSPEYWIKSGTLVPVTRNDIVKIEGIDATGGNNQPNIPDIPAHLWYFGLIGTCL

SEQ ID NO: 5334 - protein, 269 aa, Thermomyces lanuginosus
EVSQDLFNQFNLFAQYSAAAYCGKNNDAPAGTNITCTGNACPEVEKADATFLYSFEDMGVGDVTGFLALDNTNKLIVLSFRGSRSIENWIGNLNFDLKEINDICSGCRGHDGFTSSWRSVADTLRQKVEDAVREHPDYRVVFTGHSLGGALATVAGADLRGNPYDIDVFSYGAPRVGNRAFAEFLTVQTGGTLYRITHTNDIVPRLPPREFGYSHSSPEYWIKSGTLVPVTRQDIVKIEGIDATGGNNQPNIPDIPAHLWYFGRIGTCL

SEQ ID NO: 5335 - protein, 269 aa, Thermomyces lanuginosus
EVSQDLFNQFKLFAQYSAAAYCGKNNSAPAGTNITCTGNACPEVEKADATFLYSFEDMGVGDVTGFLALDNTNKLIVLSFRGSRSIENWIGNLNFDLKEINDICSGCRGHDGFTSSWRSVADTLRQKVEDAVREHPDYRVVFTGHSLGGALATVAGADLRGNGYDIDVFSYGAPRVGNRAFAEFLTVQTGGTLYRITHTNDIVPRLPPREFGYSHSSPEYWIKSGTLVPVTRNDIVKIEGIDATGGNNQPNIPDITAHLWYFGLIGTCL

SEQ ID NO: 5336 - protein, 269 aa, Thermomyces lanuginosus
EVSQDLFNQFNLFAQYSAAAYCGKNNSAEAGTNITCTGNACPEVEKADATFLYSFEDSGVGDVTGFLALDNTNKDIVLSFRGSRSIENWIGNLNFDLKEINDICSGCRGHDGFTSSWRSVADTLRQKVEDAVREHPDYRVVFTGHSLGGALATVAGADLRGNGYDIDVFSYGAPRVGNRAFAEFLTVQDGGTLYRITHTNDIVPRLPPREFGYSHSSPEYWIKSGTLVPVTRNDIVKIEGIDATGGNNQPNIPDIPAHLWYFGLIGTCL

SEQ ID NO: 5337 - protein, 269 aa, Thermomyces lanuginosus
EVSQDLFNQFNLFAQYSAAAYCGKNNDAPAGTQITCTGNACPEVEKADATFLYSFEDSGVGDVTGFLALDNTNKLIVLSFRGSRSIENWIGNLNFDLKEINDICSGCRGHDGFTSSTRSVADTLRQKVEDAVREHPDYRVVFTGHSLGGALATVAGADLRGNGYDIDVFSYGAPRVGNRAFAEFLTVQTGGTLYRITHTNDIVPRLPPREFGYSHSSPEYWIKSGTLVPVRRRDIVKIEGIDATGGNNQPNIPDIPAHLWYFGLIGTCL

SEQ ID NO: 5338 - protein, 269 aa, Thermomyces lanuginosus
EVSQDLFNQFNLFAQYSAAAYCQKNNDAPAGTNITCTGNACPEVEKADATFLYSFEDSGVGDVTGFLALDNTNKLIVLSFRGSRSIENWIGNLNFDLKEINDICSGCRGHDGFTSSWRSVADTLRQKVEDAVREHPDYRVVFTGHSLGGALATIAWADLRGNGYDIDVFSYGAPRVGNRAFAEFLTNQTGGTLYRITHTNDIVPRLPPREFGYSHSSPEYWIKSGTLVPVTRNDIVKIEGIDATGGNNQPNIPDIPAHLWYFGLIGTCL

SEQ ID NO: 5339 - protein, 269 aa, Thermomyces lanuginosus
EVSQDLFNQFNLFAQYSAAAYCGKNNDAPAGTQITCTTNACPEVEKADATFLYSFEDSGVGDVTGFLALDNTNKLIVLSFRGSRSIENWIGNLNFDLKEINDICSGCRGHDGFTSSWRSVADTLRQKVEDAVREHPDYRVVFTGHSLGGALATVAGADLRGNGYDIDVFSYGAPRVGNRAFAEFLTVQTGGTLYRITHTNDIVPRLPPREFGYSHSSPEYWIKSGTLVPVRRRDIVKIEGIDATGGNNQPNIPDIPAHLWYFGLIGTCL

SEQ ID NO: 5340 - protein, 269 aa, Thermomyces lanuginosus
EVSQDLFNQFNLFAQYSAAAYCGKNNDAPAGTQITCTGNACPEVEKADATFLYSFEDSGVGDVTGFLALDNTNKLIVLSFRGSRSIENWIGNLNFDLKEINDICSGCRGHDGFTSSWRSVADTLRQKVEDAVREHPDYRVVFTGHSLGGALATVAGADLRGNGYDIDVFSYGAPRAGNRAFAEFLTVQTGGTLYRITHTNDIVPRLPPREFGYSHSSPEYWIKSGTLVPVRRRDIVKIEGIDATGGNNQPNIPDIPAHLWYFGLIGTCL

SEQ ID NO: 5341 - protein, 269 aa, Synthetic construct
EVSQDLFNQFNLFAQYSAAAYCGKNNDAPAGTNITCTGNACPEVEKADATFLYSFEDSGVGDVTGFLALDNTNKLIVLSFRGSRSIENWIGNLNFLLKKINDICSGCRGHDGFTSSWRSVADTLRQKVEDAVREHPDYRVVFTGHSLGGALATVAGADLRGNGYDIDVFSYGAPRVGNRAFAEFLTAQTGGTLYRITHTNDIVPRLPPREFGYSHSSPEYWIKSGTLVPVTRNDIVKIEGIDATGGNNRPNIPDIPAHLWYFGLIGTCL

SEQ ID NO: 5342 - protein, 269 aa, Thermomyces lanuginosus
EVSQDLFNQFNLFAQYSAAAYCGKNNDAPAGTQITCTGNACPEVEKADATFLYSFEDSGVGDVTGFLALDNTNKLIVLSFRGSRSIENWIGNLNFDLKEINDICSGCRGHEGFTSSWRSVADTLRQKVEDAVREHPDYRVVFTGHSLGGALATVAGADLRGNGYDIDVFSYGAPRVGNRAFAEFLTVQTGGTLYRITHTNDIVPRLPPREFGYSHSSPEYWIKSGTLVPVRRRDIVKIEGIDATGGNNQPNIPDIPAHLWYFGLIGTCL

SEQ ID NO: 5343 - protein, 269 aa, Thermomyces lanuginosus
EVSQDLFNQFNLFAQYSAAAYCGKNNRAPAGTNITCTGNACPEVEKADATFLYSFEDSGVGDVTGFLALDNTNKLIVLSFRGSRSIENWIGNLNFDLKEINDICSGCRGHGGFTSSWRSVADTLRQKVEDAVREHPDYRVVFTGHSLGGALATVAGADLRGNGYDIDVFSYGAPRVGNRAFAEFLTVQTGGTLYRITHTNDIVPRLPPREFGYSHPSPEYWIKSGTXVPVTRNDIVKIEGIDATGGNNQPNIPDIPAHLWYFGLIGTCL

SEQ ID NO: 5344 - protein, 269 aa, Thermomyces lanuginosus
EVSQDLFNQFNLFAQYSKAAYCGKNNDAEAGTDITCTGNACPEVEKADATFLYSFEDSGVGDVTGFLALDNTNKLIVLSFRGSRSIENWIGNLNFDLKEINDICSGCRGHDGFTSSWRSVADTLRQKVEDAVREHPDYRVVFTGHSLGGALATVAGADLRGNGYDIDVFSYGAPRVGNRAFAEFLTVQDGGTLYRITHTNDIVPRLPPREFGYSHSSPEYWIKSGTLVPVTRNDIVKIEGIDATGGNNQPNIPDIPAHLWYFGLIGTCL

SEQ ID NO: 5345 - protein, 269 aa, Thermomyces lanuginosus
EVSQDLFNQFNLFAQYSAAAYCGKNNDAPAGINITCTGNACPEVEKADATFLYSFEDSGVGDVTGFLALDNTNKLIVLSFRGSRSIENWIVNLNFDLKEINDICSGCRGHDGFTSSWRSVADTLRQKVEDAVREHPDYRVVFTGHSLGGALATVAGADLRGNGYDIDVFSYGAPRVGNRAFAEFLTVQTGGTLYRITHTNDIVPRLPPREFGYSHSSPEYWIKSGTLVPVRRRDIVKIEGIDATGGNNQPNIPDIPAHLWYFGLIGTCL

SEQ ID NO: 5346 - protein, 269 aa, Thermomyces lanuginosus
EVSQDLFNQFNLFAQYSAAAYCGKNNDAPAGTNITCTGNACPEVEKADATFLYSFEDSGVGDVTGFLALDNTNKLIVLSFRGSRSIENWIGNLNFDLKEINDICSGCRGHDGFTSSWRSVADTLRQKVEDAVREHPDYRVVFTGHSLGGALATVAGADLRGDGYDIDVFSYGAPRVGNRAFAEFLTVQTGGTLYRITSTNDIVPRLPPREFGYSHSSPEYWIKSGTLVPVRRRDIVKIEGIDATGGNNQPNIPDIPAHLWYFGLIGTCL

SEQ ID NO: 5347 - protein, 269 aa, Thermomyces lanuginosus
EVSQDLFNQFNLFAQYSAAAYCGKNNEAPAGTNITCTGNACPEVEKADATFLYSFEDMGVGDVTGFLALDNTNKLIVLSFRGSRSIENWIGNLNFDLKEINDICSGCRGHDGFTSSWRSVADTLRQKVEDAVREHPDYRVVFTGHSLGGALATVAGADLRGNPYDIDVFSYGAPRVGNRAFAEFLTVQTGGTLYRITHTNDIVPRLPPREFGYSHSSPEYWIKSGTLVPVTRNDIVKIEGIDATGGNNQPNIPDIPAHLWYFGRIGTCL

SEQ ID NO: 5348 - protein, 269 aa, Thermomyces lanuginosus
EVSDDLFNQFNLFAQYSAAAYCGKNNQAPAGTNITCTGNACPEVEKADATFLYSFEDMGVGDVTGFLALDNTNKLIVLSFRGSRSIENWIGNLNFDLKEINDICSGCRGHDGFTSSWRSVADTLRQKVEDAVREHPDYRVVFTGHSLGGALATVAGADLRGNGYDIDVFSYGAPRVGNRAFAEFLTVQTGGTLYRITHTNDIVPRLPPREFGYSHSSPEYWIKSGTLVPVTRNDIVKIEGIDATGGNNQPNIPDITAHLWYFGLIGTCL

SEQ ID NO: 5349 - protein, 269 aa, Thermomyces lanuginosus
EVSQDLFNQFNLFAQYSAAAYCGKNNSAEAGTDITCTGNACPEVEKADATFLYSFEDSGVGDVTGFLALDNTRKLIVLSFRGSRSIENWIGNLNFDLKEINDICSGCRGHDGFTSSWRSVADTLRQKVEDAVREHPDYRVVFTGHSLGGALATVAGADLRGNGYDIDVFSYGAPRVGNRAFAEFLTVQTGGTLYRITHTNDIVPRLPPREFGYSHSSPEYWIKSGTLVPVTRNDIVKIEGIDATGGNNQPNIPDIPAHLWYFGLIGTCL

SEQ ID NO: 5350 - protein, 269 aa, Thermomyces lanuginosus
EVSQDLFNQFNLFAQYSAAAYCGKNNSAEAGTNITCTGNACPEVFKADATFLYSFEDSGVGDVTGFLALDNTNKLIVLSFRGSRSIENWIGNLNFDLKEINDICSGCRGHDGFTSSWRSVADTLRQKVEDAVREHPDYRVVFTGHSLGGALATVAGADLRGNGYDIDVFSYGAPRVGNRAFAEFLTVQDGGTLYRITHTNDIVPRLPPREFGYSHSSPEYWIKSGTLVPVTRNDIVKIEGIDATGGNNQPNIPDIPAHLWYFGLIGTCL

SEQ ID NO: 5351 - protein, 269 aa, Thermomyces lanuginosus
EVSQDLFNQFNLFAQYSAAAYCQKNNDAPAGTNITCTGNACPEVEKADATFLYSFEDSGVGDVTGFLALDNTNKQIVLSFRGSRSIENWIGNLNFDLKEINDICSGCRGHDGFTSSWRSVADTLRQKVEAAVREHPDYRVVFTGHSLGGALATVAGADLRGNGYDIDVFSYGAPRVGNRAFAEFLTVQTGGTLYRITHTNDIVPRLPPREFGYSHSSPEYWIKSGTLVPVTRNDIVKIEGIDATGGNNQPNIPDIPAHLWYFGRIGTCL

SEQ ID NO: 5352 - protein, 269 aa, Thermomyces lanuginosus
EVSQDLFNQFNLFAQYSAAAYCGKNNNAPAGTNITCTGNACPEVEKADATFLYSFKDSGVGDVTGFLALDNTNKLIVLSFRGSRSIENWIGNLNFDLKEINDICSGCRGHDGFTSSWRSVADTLRQKVEDAVREHPDYRVVFTGHSLGGALATVAGADLRGNGYDIDVFSYGAPRVGNRAFAEFLTVQTGGTLYRITHTNDIVPRLPPREFGYSHSSPEYWIKSGTLVPVTRQDIVKIEGIDATGGNNQPNIPDITAHLWYFGLIGTCL

SEQ ID NO: 5353 - protein, 269 aa, Thermomyces lanuginosus
EVSQDLFNQFNLFAQYSAAAYCGKNNDAEAGTNITCTGNACPEVEKADATFLYSFEDSGVGDVTGFLALDNTRKDIVLSFRGSRSIENWIGNLNFDLKEINDICSGCRGHDGFTSSWRSVADTLRQKVEDAVREHPDYRVVFTGHSLGGALATVAGADLRGNGYDIDVFSYGAPRVGNRAFAEFLTVQDGGTLYRITHTNDIVPRLPPREFGYSHSSPEYWIKSGTLVPVTRNDIVKIEGIDATGGNNQPNIPDIPAHLWYFGLIGTCL

SEQ ID NO: 5354 - protein, 269 aa, Thermomyces lanuginosus
EVSQDLFNQFNLFAQYSAAAYCGKNNDAEAGTDITCTGNACPEVFKADATFLYSFEDSGVGDVTGFLALDNTNKDIVLSFRGSRSIENWIGNLNFDLKEINDICSGCRGHDGFTSSWRSVADTLRQKVEDAVREHPDYRVVFTGHSLGGALATVAGADLRGNGYDIDVFSYGAPRVGNRAFAEFLTVQTGGTLYRITHTNDIVPRLPPREFGYSHSSPEYWIKSGTLVPVTRNDIVKIEGIDATGGNNQPNIPDIPAHLWYFGLIGTCL

SEQ ID NO: 5355 - protein, 269 aa, Thermomyces lanuginosus
EVSQDLFNQFNLFAQYSAAAYCGKNNDAPAGTNITCTGNACPEVEKADATLLYSFEDSGVGDVTGFLALDNTNKLIVLSFRGSRSIENWIGNLNFDLKEINDICSGCRGHDGFTSSWRSVADTLRQKVEDAVREHPDYRVVFTGHSLGGALATVAGADLRGNGYDIDVFSYGAPRVGNRAFAEFLTVQTGGTLYRITHTNDIVPRLPPREFGYSHSSPEYWIKSGTLVPVRRRDIVKIEGIDATGGNNQPNIPSIPAHLWYFGLIGTCL

SEQ ID NO: 5356 - protein, 269 aa, Thermomyces lanuginosus
EVSQDLFNQFNLFAQYSAAAYCGKNNDAPAGTNITCTGNACPEVEKADATFLYSFEDSGVGDVTGFLALDNTNKLIVLSFRGSRSIENWIGNLNFDLKEINDICSGCRGHDGFTSSWRSVADTLRQKVEDAVREHPDYRVVFTGHSLGGALATVAGADLRGNGYDIDVFSYGAPRVGNRAFAEFLTVQTGGTLYRITHTNDIVPRLPPREFGYSHSSPEYWIKSGTLVPVRRRDIVKIEGIDATGGNNQPNIPDIPAHFHYFGLIGTCL

SEQ ID NO: 5357 - protein, 269 aa, Thermomyces lanuginosus
EVSQDLFNQFNLFAQYSAAAYCGKNNDAPAGTNITCTGNACPEVEKADATFLYSFEDSGVGDVTGFLALDNTNKLIVLSFRGSRSIENWIGNLNFDLKEINDICSGCRGHDGFTSSWRSVADTLRQKVEDAVREHPDYRVVFAGHSLGGALATVAGADLRGNGYDIDVFSYGAPRVGNRAFAEFLTVQTGGTLYRITNTNDIVPRLPPREFGYSHSSPEYWIKSGTLVPVRRRDIVKIEGIDATGGNNQPNIPDIPAHLWYFGLIGTCL

SEQ ID NO: 5358 - protein, 269 aa, Thermomyces lanuginosus
EVSQDLFNQFNLFAQYSAAAYCQKNNDAPAGTNITCTGNACPEVEKADATFLYSFEDSGVGDVTGFLALDNTNKLIVLSFRGSRSIENWIQNLNFDLKEINDICSGCRGHDGFTSSWRSVADTLRQKVEDAVREHPDYRVVFTGHSLGGALATVAGADLRGNGYDIDVFSYGAPRVGNRAFAEFLTVQTGGTLYRITHTNDIVPRLPPREFGYSHSSPEYWIKSGTLVPVTRNDIVKIEGIDATGGNNQPNQPDIPAHLWYFGRIGTCL

SEQ ID NO: 5359 - protein, 269 aa, Thermomyces lanuginosus
EVSQDLFNQFNLFAQYSAAAYCGKNNDAPAGTQITCTGNACPEVEKADATFLYSFEDSGVGDVTGFLALDNTNKLIVLSFRGSRSIRNWIGNLNFDLKEINDICSGCRGHDGFTSSWRSVADTLRQKVEDAVREHPDYRVVFTGHSLGGALATVAGADLRGNGYDIDVFSYGAPRVGNRAFAEFLTVQTGGTLYRITHTNDIVPRLPPREFGYSHSSPEYWIKSGTLVPVRRRDIVKIEGIDATGGNNQPNIPDIPAHLWYFGLIGTCL

SEQ ID NO: 5360 - protein, 269 aa, Thermomyces lanuginosus
EVSQDLFNQFNLFAQYSAAAYCQKNNDAPAGTNITCTGNACPEVFKADATFLYSFEDSGVGDVTGFLALDNTNKQIVLSFRGSRSIENWIGNLNFDLKEINDICSGCRGHDGFTSSWRSVADTLRQKVEDAVREHPDYRVVFTGHSLGGALATVAWADLRGNGYDIDVFSYGAPRVGNRAFAEFLTVQTGGTLYRITHTNDIVPRLPPREFGYSHSSPEYWIKSGTLVPVTRNDIVKIEGIDATGGNNQPNIPDIPAHLWYFGLIGTCL

SEQ ID NO: 5361 - protein, 269 aa, Thermomyces lanuginosus
EVSQDLFNQFNLFAQYSAAAYCGKNNDAPAGTNITCTGNACPEVEKADATFLYSFEDSGVGDVTGFLALDNTNKQIILSFRGSRSIENWIGNLNFDLKEINDICSGCRGHDGFTSSWRSVADTLRQKVEDAVREHPDYRVVFTGHSLGGALATIAGADLRGNGYDIDVFSYGAPRVGNRAFAEFLTQQTGGTLYRITHTNDIVPRLPPREFGYSHSSPEYWIKSGTLVPVTRNDIVKIEGIDATGGNNQPNIPDIPAHLWYFGLIGTCL

SEQ ID NO: 5362 - protein, 269 aa, Thermomyces lanuginosus
EVSQDLFNQFNLFAQYSKAAYCGKNNDAPAGTNITCTGNACPEVEKADATFLYSFEDSGVGDVTGFLALDNTNKQIVLSFRGSRSIENWIGNLNFDLKEINDICSGCRGHDGFTSSWRSVADTLRQKVEDAVREHPDYRVVFTGHSLGGALATVAWADLRGNGYDIDVFSYGAPRVGNRAFAEFLTTQTGGTLYRITHTNDIVPRLPPREFGYSHSSPEYWIKSGTLVPVTRNDIVKIEGIDATGGNNQPNIPDIPAHLWYFGLIGTCL

SEQ ID NO: 5363 - protein, 269 aa, Thermomyces lanuginosus
EVSRDLFNQFNLFAQYSAAAYCGKNNDAPAGTNITCTGNACPEVEKADATILYSFEDSGVGDVTGFLALDNTNKLIVLSFRGSRSIENWIGNLNFDLKEINDICSGCRGHDGFTSSWRSVADTLRQKVEDAVREHPDYRVVFTGHSLGGALATVAGADLRGNGYDIDVFSYGAPRVGNRAFAEFLTVQTGGTLYRITHTNDIVPRLPPREFGYSHSSPEYWIKSGTLVPVRRRDIVKIEGIDATGGNNQPNIPDIPAHLWYFGLIGTCL

SEQ ID NO: 5364 - protein, 269 aa, Thermomyces lanuginosus
EVSQDLFNQFNLFAQYSAAAYCGKNNDAPAGTQITCTGNACPEVEKADATFLYSFEDSGVGDVTGFLALDNTNKLIVLSFRGSRSIENWIGNLNFDLKEINDICSGCRGHDGFTSSCRSVADTLRQKVEDAVREHPDYRVVFTGHSLGGALATVAGADLRGNGYDIDVFSYGAPRVGNRAFAEFLTVQTGGTLYRITHTNDIVPRLPPREFGYSHSSPEYWIKSGTLVPVRRRDIVKIEGIDATGGNNQPNIPDIPAHLWYFGLIGTCL

SEQ ID NO: 5365 - protein, 269 aa, Thermomyces lanuginosus
EVSQDLFNQFNLFAQYSAAAYCGKNNDAPAGTNITCTGNACPEVEKADATFLYSFEDMGVGDVTGFLALDNTNKQIVLSFRGSRSIENWIGNLNFDLKEINDICSGCRGHDGFTSSWRSVADTLRQKVEDAVREHPDYRVVFTGHSLGGALATVAGADLRGNGYDIDVFSYGAPRVGNRAFAEFLTVQTGGTLYRITHTNDIVPRLPPREFGYSHSSPEYWIKSGTLVPVTRNDIVKIEGIDATGGNNQPNQPDIPAHLWYFGRIGTCL

SEQ ID NO: 5366 - protein, 269 aa, Synthetic construct
EVSQDLFNQFNLFAQYSAAAYCGKNNDAPAGTNITCTGNACPEVEKADATFLYSFEDSGVGDVTGFLALDNTNKLIVLSFRGSRSIENWIGNLKFLMKEINDICSGCRGHDGFTSSWRSVADTLRQKVEDAVREHPDYRVVFTGHSLGGALATVAGADLRGNGYDIDVFSYGAPRVGNRAFAEFLTVQTGGTLYRITHTNDIVPRLPPREFGYSHSSPEYWIKSGTLVPVTRNDIVKIEGIDATGGNNRPNIPDIPAHLWYFGLIGTCL

SEQ ID NO: 5367 - protein, 269 aa, Thermomyces lanuginosus
EVSQDLFNQFNLFAQYSAAAYCGKNNDAPAGTNITCTGNACPEVEKAQATFLYSFEDSGVGDVTGFLALDNTNKLIVLSFRGSRSIENWIGNLNFDLKEINDICSGCRGHDGFTSSWRSVADTLRQKVEDAVREHPQYRVVFTGHSLGGALATVAGADLRGNPYDIDVFSYGAPRVGNRAFAEFLTVQTGGTLYRITHTNDIVPRLPPREFGYSHSSPEYWIKSGTMVPVTRNDIVKIEGIDATGGNNQPNIPDIPAHLWYFGLIGTCL

SEQ ID NO: 5368 - protein, 269 aa, Thermomyces lanuginosus
EVSQDLFNQFNLFAQYSKAAYCQKNNDAPAGTNITCTGNACPEVEKADATFLYSFEDSGVGDVTGFLALDNTNKRIVLSFRGSRSIENWIGNLNFDLKEINDICSGCRGHDGFTSSWRSVADTLRQKVEAAVREHPDYRVVFTGHSLGGALATVAGADLRGNGYDIDVFSYGAPRVGNRAFAEFLTVQTGGTLYRITHTNDIVPRLPPREFGYSHSSPEYWIKSGTLVPVTRNDIVKIEGIDATGGNNQPNIPDIPAHLWYFGLIGTCL

SEQ ID NO: 5369 - protein, 269 aa, Thermomyces lanuginosus
EVSQDLFNQFHLFAQYSAAAYCGKNNDAPAGTQITCTGNACPEVEKADATFLYSFEDSGVGDVTGFLALDNTNKLIVLSFRGSRSIENWIGNLNFDLKEINDICSGCRGHDGFTSSWRSVADTLRQKVEDAVREHPDYRVVFTGHSLGGALATVAGADLRGNGYDIDVFSYGAPRVGNRAFAEFLTVQTGGTLYRITHTNDIVPRLPPREFGYSHSSPEYWIKSGTLVPVRRRDIVKIEGIDATGGNNQPNIPDIPAHLWYFGLIGTCL

SEQ ID NO: 5370 - protein, 269 aa, Thermomyces lanuginosus
EVSQDLFNQFNLFAQYSAAAYCQKNNSAPAGTNITCTGNACPEVEKADATFLYSFEDSGVGDVTGFLALDNTNKLIVLSFRGSRSIENWIGNLNFDLKEINDICSGCRGHAGFTSSWRSVADTLRQKVEDAVREHPDYRVVFTGHSLGGALATVAWADLRGNGYDIDVFSYGAPRVGNRAFAEFLTVQTGGTLYRITHTNDIVPRLPPREFGYSHSSPEYWIKSGTLVPVTRNDIVKIEGIDATGGNNQPNIPDIPAHLWYFGLIGTCL

SEQ ID NO: 5371 - protein, 269 aa, Thermomyces lanuginosus
EVSQDLFNQFNLFAQYSAAAYCGKNNDAPAGTQITCTGNACPEVEKADATFLYSFEDSGVGDVTGFLALDNTNKLIVLSFRGSRSIENWIGNLNFDLKEINDICSGCRGHDGFTSSWRSVADTLRQKVEDAVREHPDYRVVFTGHSLGGALATVAGADLRGNEYDIDVFSYGAPRVGNRAFAEFLTVQTGGTLYRITHTNDIVPRLPPREFGYSHSSPEYWIKSGTLVPVRRRDIVKIEGIDATGGNNQPNIPDIPAHLWYFGLIGTCL

SEQ ID NO: 5372 - protein, 269 aa, Thermomyces lanuginosus
EVSQDLFNQFNLFAQYSKAAYCGKNNDAPAGTNITCTGNACPEVEKADATFLYSFEDSGVGDVTGFLALDNTNKLIVLSFRGSRSIENWIGNLNFDLKEINDICSGCRGHAGFTSSWRSVADTLRQKVEDAVREHPDYRVVFTGHSLGGALATVAWADLRGNGYDIDVFSYGAPRVGNRAFAEFLTVQQGGTLYRITHTNDIVPRLPPREFGYSHSSPEYWIKSGTLVPVTRNDIVKIEGIDATGGNNQPNIPDIPAHLWYFGLIGTCL

SEQ ID NO: 5373 - protein, 269 aa, Thermomyces lanuginosus
EVSQDLFNQFNLFAQYSKAAYCGKNNDAPAGTNITCTGNACPEVFKADVTFLYSFEDSGVGDVTGFLALDNTNKLIVLSFRGSRSIENWIGNLNFDLKEINDICSGCRGHDGFTSSWRSVADTLRQKVEDAVREHPDYRVVFTGHSLGGALATVAWADLRGNGYDIDVFSYGAPRVGNRAFAEFLTVQTGGTLYRITHTNDIVPRLPPREFGYSHSSPEYWIKSGTLVPVTRNDIVKIEGIDATGGNNQPNIPDIPAHLWYFGLIGTCL

SEQ ID NO: 5374 - protein, 269 aa, Thermomyces lanuginosus
EVSQDLFNQFNLFAQYSAAAYCGKNNDAPAGTNITCTGNACPEVFKADVTFLYSFEDSGVGDVTGFLALDNTNKLIVLSFRGSRSIENWIGNLNFDLKEINDICSGCRGHDGFTSSWRSVADTLRQKVEDAVREHPDYRVVFTGHSLGGALATVAWADLRGNGYDIDVFSYGAPRVGNRAFAEFLTTQTGGTLYRITHTNDIVPRLPPREFGYSHSSPEYWIKSGTLVPVTRNDIVKIEGIDATGGNNQPNIPDIPAHLWYFGLIGTCL

SEQ ID NO: 5375 - protein, 269 aa, Thermomyces lanuginosus
EVSQDLFNQFNLFAQYSAAAYCGKNNDAPAGTQITCTGNACPEVEKADATFLYSFEDSGVGDVTGFLALDNTNKLIVLSFRGSRSIHNWIGNLNFDLKEINDICSGCRGHDGFTSSWRSVADTLRQKVEDAVREHPDYRVVFTGHSLGGALATVAGADLRGNGYDIDVFSYGAPRVGNRAFAEFLTVQTGGTLYRITHTNDIVPRLPPREFGYSHSSPEYWIKSGTLVPVRRRDIVKIEGIDATGGNNQPNIPDIPAHLWYFGLIGTCL

SEQ ID NO: 5376 - protein, 269 aa, Thermomyces lanuginosus
EVSQDLFNQFNLFAQYSAAAYCQKNNDAPAGTNITCTGNACPEVFKADVTFLYSFEDSGVGDVTGFLALDNTNKLIVLSFRGSRSIENWIGNLNFDLKEINDICSGCRGHDGFTSSWRSVADTLRQKVEDAVREHPDYRVVFTGHSLGGALATVAGADLRGNGYDIDVFSYGAPRVGNRAFAEFLTTQTGGTLYRITHTNDIVPRLPPREFGYSHSSPEYWIKSGTLVPVTRNDIVKIEGIDATGGNNQPNIPDIPAHLWYFGLIGTCL

SEQ ID NO: 5377 - protein, 269 aa, Thermomyces lanuginosus
EVSQDLFNQFNLFAQYSAAAYCGKNNDAPAGTNITCTGNACPEVFKADATFLYSFEDSGVGDVTGFLALDNTNKQIVLSFRGSRSIENWIGNLNFDLKEINDICSGCRGHDGFTSSWRSVADTLRQKVEDAVREHPDYRVVFTGHSLGGALATVAWADLRGNGYDIDVFSYGAPRVGNRAFAEFLTTQTGGTLYRITHTNDIVPRLPPREFGYSHSSPEYWIKSGTLVPVTRNDIVKIEGIDATGGNNQPNIPDIPAHLWYFGLIGTCL

SEQ ID NO: 5378 - protein, 269 aa, Thermomyces lanuginosus
EVSQDLFNQFKLFAQYSAAAYCGKNNDAPAGTNITCTGNACPEVEKADATFLYSFKDMGVGDVTGFLALDNTNKLIVLSFRGSRSIENWIGNLNFDLKEINDICSGCRGHDGFTSSWRSVADTLRQKVEDAVREHPDYRVVFTGHSLGGALATVAGADLRGNGYDIDVFSYGAPRVGNRAFAEFLTVQTGGTLYRITHTNDIVPRLPPREFGYSHSSPEYWIKSGTLVPVTRNDIVKIEGIDATGGNNQPNIPDITAHLWYFGLIGTCL

SEQ ID NO: 5379 - protein, 269 aa, Thermomyces lanuginosus
EVSQDLFNQFNLFAQYSAAAYCGKNNSAEAGTNITCTGNACPEVFKADATFLYSFEDSGVGDVTGFLALDNTRKLIVLSFRGSRSIENWIGNLNFDLKEINDICSGCRGHDGFTSSWRSVADTLRQKVEDAVREHPDYRVVFTGHSLGGALATVAGADLRGNGYDIDVFSYGAPRVGNRAFAEFLTVQTGGTLYRITHTNDIVPRLPPREFGYSHSSPEYWIKSGTLVPVTRNDIVKIEGIDATGGNNQPNIPDIPAHLWYFGLIGTCL

SEQ ID NO: 5380 - protein, 269 aa, Thermomyces lanuginosus
EVSQDLFNQFNLFAQYSAAAYCGKNNNAPAGTNITCTGNACPEVEKADATFLYSFKDMGVGDVTGFLALDNTNKLIVLSFRGSRSIENWIGNLNFDLKEINDICSGCRGHDGFTSSWRSVADTLRQKVEDAVREHPDYRVVFTGHSLGGALATVAGADLRGNGYDIDVFSYGAPRVGNRAFAEFLTVQTGGTLYRITHTNDIVPRLPPREFGYSHSSPEYWIKSGTLVPVTRNDIVKIEGIDATGGNNQPNIPDITAHLWYFGLIGTCL

SEQ ID NO: 5381 - protein, 269 aa, Thermomyces lanuginosus
EVSQDLFNQFNLFAQYSAAAYCGKNNDAPAGTNITCTGNACPEVEKADATFLYSFEDSGVGDVTGFLALDNTNKLIVLSFRGSRSIENWITNLNFDLKEINDICSGCRGHDGFTSSWRSVADTLRQKVEDAVREHPDYRVVFTGHSLGGALATVAGADLRGNGYDIDVFSYGAPRVGNRAFAEFLTVQTGGTLYRITHTNDIVPRLPPREFGYSHSSPEYWIKSGTLVPVRRRDIVKIEGIDATGGNNQPNIPDITAHLWYFGLIGTCL

SEQ ID NO: 5382 - protein, 269 aa, Thermomyces lanuginosus
EVSQDLFNQFNLFAQYSAAAYCGKNNDAPAGTNITCTGNACPEVEKADATFLYSFEDSGVGDVTGFLALDNTNKLIVLSFRGSRSIENWIGNLNFDLKEINDICSGCRGHEGFTSSWRSVADTLRQKVEDAVREHPDYRVVFTGHSLGGALATVAGADLRGNGYDIDVFSYGAPRVGNRAFAEFLTVQTGGTLYRITHTNDIVPRLPPREFGYSHSSPEYWIKSGTLVPVRRRDIVKIEGIDATGGNNQPNIPSIPAHLWYFGLIGTCL

SEQ ID NO: 5383 - protein, 269 aa, Thermomyces lanuginosus
EVSQDLFNQFNLFAQYSAAAYCGKNNEAPAGTNITCTGNACPEVEKADATFLYSFEDSGVGDVTGFLALDNTNKLIVLSFRGSRSIENWIGNLNFDLKEINDICSGCRGHDGFTSSWRSVADTLRQKVEDAVREHPDYRVVFTGHSLGGALATVAGADLRGNPYDIDVFSYGAPRVGNRAFAEFLTVQTGGTLYRITHTNDIVPRLPPREFGYSHSSPEYWIKSGTMVPVTRNDIVKIEGIDATGGNNQPNIPDIPAHLWYFGRIGTCL

SEQ ID NO: 5384 - protein, 269 aa, Thermomyces lanuginosus
EVSQDLFNQFNLFAQYSAAAYCGKNNDAPAGTNITCTGNACPEVEKADATFLYSFEDSGVGDVTGFLALDNTNKGIVLSFRGSRSIENWIQNLNFDLKEINDICSGCRGHDGFTSSWRSVADTLRQKVEDAVREHPDYRVVFTGHSLGGALATVAGADLRGNGYDIDVFSYGAPRVGNRAFAEFLTNQTGGTLYRITHTNDIVPRLPPREFGYSHSSPEYWIKSGTLVPVTRNDIVKIEGIDATGGNNQPNIPDIPAHLWYFGRIGTCL

SEQ ID NO: 5385 - protein, 269 aa, Thermomyces lanuginosus
EVSQDLFNQFNLFAQYSKAAYCGANNDAPAGTNITCTGNACPEVEKADATFLYSFEDSGVGDVTGFLALDNTNKLIVLSFRGSRSIENWIGNLNFDLKEINDICSGCRGHDGFTSSWRSVADTLRQKVEAAVREHPDYRVVFTGHSLGGALATVAWADLRGNGYDIDVFSYGAPRVGNRAFAEFLTVQTGGTLYRITHTNDIVPRLPPREFGYSHSSPEYWIKSGTLVPVTRNDIVKIEGIDATGGNNQPNIPDIPAHLWYFGLIGTCL

SEQ ID NO: 5386 - protein, 269 aa, Thermomyces lanuginosus
EVSQDLFNQFNLFAQYSAAAYCGKNNDAPAGTQITCTGNACPEVEKADATFLYSFEDSGVGDVTGFLALDNTNKLIVLSFRGSRSIENWIGNLNFDLKEINDICSGCRGHDGFTSSGRSVADTLRQKVEDAVREHPDYRVVFTGHSLGGALATVAGADLRGNGYDIDVFSYGAPRVGNRAFAEFLTVQTGGTLYRITHTNDIVPRLPPREFGYSHSSPEYWIKSGTLVPVRRRDIVKIEGIDATGGNNQPNIPDIPAHLWYFGLIGTCL

SEQ ID NO: 5387 - protein, 269 aa, Thermomyces lanuginosus
EVSQDLFNQFNLFAQYSAAAYCGKNNDAPAGTQITCTGNACPEVEKADATFLYSFEDSGVGDVTGFLALDNTNKLIVLSFRGSRSIENWIGNLNFDLKEINDICSGCRGHDGFTSSWRSVADTLRQKVEDAVREHPDYRVVFTGHSLGGALATVAGADLRGNGYDIDVFSYGAPRVGNRAFAEFLTVQTGGTLYRITHTNDIVPRLPPREFGYSHSSPDYWIKSGTLVPVRRRDIVKIEGIDATGGNNQPNIPDIPAHLWYFGLIGTCL

SEQ ID NO: 5388 - protein, 269 aa, Thermomyces lanuginosus
EVSQDLFNQFNLFAQYSKAAYCGKNNDAPAGTNITCTGNACPEVEKADATFLYSFEDSGVGDVTGFLALDNTNKQIVLSFRGSRSIENWIGNLNFDLKEINDICSGCRGHDGFTSSWRSVADTLRQKVEDAVREHPDYRVVFTGHSLGGALATVAGADLRGNGYDIDVFSYGAPRVGNRAFAEFLTTQDGGTLYRITHTNDIVPRLPPREFGYSHSSPEYWIKSGTLVPVTRNDIVKIEGIDATGGNNQPNIPDIPAHLWYFGLIGTCL

SEQ ID NO: 5389 - protein, 269 aa, Thermomyces lanuginosus
EVSQDLFNQFNLFAQYSAAAYCGKNNDAPAGTQITCTGNACPEVEKADATFLYSFEDSGVGDVTGFLALDNTNKLIVLSFRGSRSIENWIGNLNFDLKEINDICSGCRGHDGFTSSVRSVADTLRQKVEDAVREHPDYRVVFTGHSLGGALATVAGADLRGNGYDIDVFSYGAPRVGNRAFAEFLTVQTGGTLYRITHTNDIVPRLPPREFGYSHSSPEYWIKSGTLVPVRRRDIVKIEGIDATGGNNQPNIPDIPAHLWYFGLIGTCL

SEQ ID NO: 5390 - protein, 269 aa, Thermomyces lanuginosus
EVSQDLFNQFNLFAQYSAAAYCKKNNDAPAGTNITCTGNACPEVEKADATFLYSFEDSGVGDVTGFLALDNTNKLIVLSFRGSRSIENWIGNLNFDLKEINDICSGCRGHDGFTSSWRSVADTLRQKVEAAVREHPDYRVVFTGHSLGGALATVAGADLRGNGYDIDVFSYGAPRVGNRAFAEFLTTQTGGTLYRITHTNDIVPRLPPREFGYSHSSPEYWIKSGTLVPVTRNDIVKIEGIDATGGNNQPNIPDIPAHLWYFGRIGTCL

SEQ ID NO: 5391 - protein, 269 aa, Thermomyces lanuginosus
EVSQDLFNQFNLFAQYSAAAYCGKNNDAPAGTNITCTGNACPEVEKADVTFLYSFEDSGVGDVTGFLALDNTNKQIVLSFRGSRSIENWIGNLNFDLKEINDICSGCRGHDGFTSSWRSVADTLRQKVEDAVREHPDYRVVFTGHSLGGALATVAGADLRGNGYDIDVFSYGAPRVGNRAFAEFLTTQDGGTLYRITHTNDIVPRLPPREFGYSHSSPEYWIKSGTLVPVTRNDIVKIEGIDATGGNNQPNIPDIPAHLWYFGLIGTCL

SEQ ID NO: 5392 - protein, 269 aa, Thermomyces lanuginosus
EVSQDLFNQFNLFAQYSAAAYCGKNNDAPAGTQITCTGNACPEVEKADATFLYSFEDSGVGDVTGFLALDNTNKLIVLSFRGSRSIENWIGNLNFDLKEINDICSGCRGHDGFTSSWRSVADTLRQKVEDAVREHPDYRVVFTGHSLGGALATVAGADLRGNGYDIEVFSYGAPRVGNRAFAEFLTVQTGGTLYRITHTNDIVPRLPPREFGYSHSSPEYWIKSGTLVPVRRRDIVKIEGIDATGGNNQPNIPDIPAHLWYFGLIGTCL

SEQ ID NO: 5393 - protein, 269 aa, Thermomyces lanuginosus
EVSQDLFNQFNLFAQYSAAAYCGKNNDAPAGTNITCTGNACPEVEKADATFLYSFEDSGVGDVTGFLALDNTNKLIVLSFRGSRSIENWIGNLNFDLKEINDICSGCRGHDGFTSSWRSVADTLRQKVEAAVREHPDYRVVFTGHSLGGALATVAGADLRGNPYDIDVFSYGAPRVGNRAFAEFLTVQTGGTLYRITHTNDIVPRLPPREFGYSHSSPEYWIKSGTMVPVTRNDIVKIEGIDATGGNNQPNIPDIPAHLWYFGRIGTCL

SEQ ID NO: 5394 - protein, 269 aa, Synthetic construct
EVSQDLFNQFNLFAQYSAAAYCGKNNDAPAGTNITCTGNACPEVEKADATFLYSFEDSGVGDVTGFLALDNTNKLIVLSFRGSRSIENWIGNLKFLLKKINDICSGCRGHDGFTSSWRSVADTLRQKVEDAVREHPDYRVVFTGHSLGGALATVAGADLRGNGYDIDVFSYGAPRVGNRAFAEFLTVQTGGTLYRITHTNDIVPRLPPREFGYSHSSPEYWIKSGTLVPVTRNDIVKIEGIDATGGNNRPNIPDIPAHLWYFGLIGTCL

SEQ ID NO: 5395 - protein, 269 aa, Thermomyces lanuginosus
EVSQDLFNQFNLFAQYSAAAYCGKNNDAPAGTNITCTGNACPEVEKADATTLYSFEDSGVGDVTGFLALDNTNKGIVLSFRGSRSIENWIGNLNFDLKEINDICSGCRGHDGFTSSWRSVADTLRQKVEDAVREHPDYRVVFTGHSLGGALATVAGADLRGNGYDIDVFSYGAPRVGNRAFAEFLTVQTGGTLYRITHTNDIVPRLPPREFGYSHSSPEYWIKSGTLVPVTRNDIVKIEGIDATGGNNQPNQPDIPAHLWYFGRIGTCL

SEQ ID NO: 5396 - protein, 269 aa, Thermomyces lanuginosus
EVSRDLFNQFNLFAQYSAAAYCGKNNDAPAGTNITCTGNACPEVEKADATFLYSFEDSGVGDVTGFLALDNTNKLIVLSFRGSRSIENWIGNLNFDLKEINDICSGCRGHDGFTSSWRSVADTLRQKVEDAVREHPDYRVVFTGHSLGGALATVAGADLRGNGYDIDVFSYGAPRVGNRAFAEFLTVQTGGTLYRITSTNDIVPRLPPREFGYSHSSPEYWIKSGTLVPVRRRDIVKIEGIDATGGNNQPNIPDIPAHLWYFGLIGTCL

SEQ ID NO: 5397 - protein, 269 aa, Thermomyces lanuginosus
EVSQDLFNQFNLFAQYSAAAYCGKNNDAPAGTQITCTGNACPEVEKADATFLYSFEDSGVGDVTGFLALDNTNKLIVLSFRGSRSIENWIGNLNFDLKEINDICSGCRGHDGFTSSWRSVADTLRQKVEDAVREHPDYRVVFTGHSLGGALATVAGADLRGNMYDIDVFSYGAPRVGNRAFAEFLTVQTGGTLYRITHTNDIVPRLPPREFGYSHSSPEYWIKSGTLVPVRRRDIVKIEGIDATGGNNQPNIPDIPAHLWYFGLIGTCL

SEQ ID NO: 5398 - protein, 269 aa, Thermomyces lanuginosus
EVSQDLFNQFNLFAQYSAAAYCGKNNSAPAGTDITCTGNACPEVEKADATFLYSFEDSGVGDVTGFLALDNTRKDIVLSFRGSRSIENWIGNLNFDLKEINDICSGCRGHDGFTSSWRSVADTLRQKVEDAVREHPDYRVVFTGHSLGGALATVAGADLRGNGYDIDVFSYGAPRVGNRAFAEFLTVQTGGTLYRITHTNDIVPRLPPREFGYSHSSPEYWIKSGTLVPVTRNDIVKIEGIDATGGNNQPNIPDIPAHLWYFGLIGTCL

SEQ ID NO: 5399 - protein, 269 aa, Thermomyces lanuginosus
EVSQDLFNQFNLFAQYSAAAYCGKNNDAPAGTQITCTGNACPEVEKADATFLYSFEDSGVGDVTGFLALDNTNKLIVLSFRGSRSIENWIGNLNFDLKEINDICSGCRGHDGFTSSWRSVAETLRQKVEDAVREHPDYRVVFTGHSLGGALATVAGADLRGNGYDIDVFSYGAPRVGNRAFAEFLTVQTGGTLYRITHTNDIVPRLPPREFGYSHSSPEYWIKSGTLVPVRRRDIVKIEGIDATGGNNQPNIPDIPAHLWYFGLIGTCL

SEQ ID NO: 5400 - protein, 269 aa, Thermomyces lanuginosus
EVSQDLFNQFNLFAQYSAAAYCGKNNDAPAGTNITCTGNACPEVEKADATFLYSFEDSGVGDVTGFLALDNTNKLIVLSFRGSRSIENWIGNLNFVLKEINDICSGCRGHAGFTSSWRSVADTLRQKVEDAVREHPDYRVVFTGHSLGGALATVAGADLRGNGYDIDVFSYGAPRVGNRAFAEFLTVQTGGTLYRITHTNDIVPRLPPREFGYSHSSPEYWIKSGTLVPVRRRDIVKIEGIDATGGNNQPNIPDIPAHLWYFGLIGTCL

SEQ ID NO: 5401 - protein, 269 aa, Thermomyces lanuginosus
EVSQDLFNQFNLFAQYSAAAYCGKNNDAPAGTNITCTGNACPEVEKADATFLYSFEDSGVGDVTGFLALDNTNKLIVLSFRGSRSIENWIGNLNFDLKEINDICSGCRGHDGFTSSWRSVADTLRQKVEDAVREHPDYRVVFTGHSLGGALATVAGADLRGNGYDIDVFSYGAPRVGNRAFAEFLTVQTGGTLYRITHTNDIVPRLPPRQFGYSHSSPEYWIKSGTLVPVRRRDIVKIEGIDATGGNNQPNIPDISAHLWYFGLIGTCL

SEQ ID NO: 5402 - protein, 269 aa, Thermomyces lanuginosus
EVSQDLFNQFNLFAQYSKAAYCGKNNDAPAGTNITCTGNACPEVEKADATFLYSFEDSGVGDVTGFLALDNTNKQIVLSFRGSRSIENWIGNLRFDLKEINDICSGCRGHDGFTSSWRSVADTLRQKVEAAVREHPDYRVVFTGHSLGGALATVAGADLRGNGYDIDVFSYGAPRVGNRAFAEFLTVQTGGTLYRITHTNDIVPRLPPREFGYSHSSPEYWIKSGTLVPVTRNDIVKIEGIDATGGNNQPNIPDIPAHLWYFGLIGTCL

SEQ ID NO: 5403 - protein, 269 aa, Thermomyces lanuginosus
EVSQDLFNQFNLFAQYSAAAYCQKNNDAPAGTNITCTGNACPEVEKADATFLYSFEDSGVGDVTGFLALDNTNKQIVLSFRGSRSIENWIGNLNFDLKEINDICSGCRGHDGFTSSWRSVADTLRQKVEDAVREHPDYRVVFTGHSLGGALATVAGADLRGNGYDIDVFSYGAPRVGNRAFAEFLTTQTGGTLYRITHTNDIVPRLPPREFGYSHSSPEYWIKSGTLVPVTRNDIVKIEGIDATGGNNQPNIPDIPAHLWYFGRIGTCL

SEQ ID NO: 5404 - protein, 269 aa, Thermomyces lanuginosus
EVSQDLFNQFNLFAQYSAAAYCGKNNDAPAGTQITCTGNACPEVEKADATFLYSFEDSGVGDVTGFLALDNTNKLIVLSFRGSRSIENWIGNLNFDLKEINDICSGCRGHDGFTSSWRSVADTLRQKVEDAVREHPDYRVVFTGHSLGGALATVAGADLRGNGYDIDVFSYGAPRVGNRAFAEFLTVQTGGTLYRITHTNDIVPRLPPREFGYSHSSPEYWIKSGTLVPVRRRDIVKIEGIDATGANNQPNIPDIPAHLWYFGLIGTCL

SEQ ID NO: 5405 - protein, 269 aa, Thermomyces lanuginosus
EVSQDLFNQFNLFAQYSAAAYCGKNNSAPAGTDITCTGNACPEVFKADATFLYSFEDSGVGDVTGFLALDNTNKLIVLSFRGSRSIENWIGNLNFDLKEINDICSGCRGHDGFTSSWRSVADTLRQKVEDAVREHPDYRVVFTGHSLGGALATVAGADLRGNGYDIDVFSYGAPRVGNRAFAEFLTVQDGGTLYRITHTNDIVPRLPPREFGYSHSSPEYWIKSGTLVPVTRNDIVKIEGIDATGGNNQPNIPDIPAHLWYFGLIGTCL

SEQ ID NO: 5406 - protein, 269 aa, Thermomyces lanuginosus
EVSQDLFNQFNLFAQYSAAAYCGKNNDAPAGTQITCTGNACPEVEKADATFLYSFEDSGVGDVTGFLALDNTNKLIVLSFRGSRSIENWIGNLNFDLKEINDICSGCRGHDGFTSSWRSVADTLRQKVEDAVREHPDYRVVFTGHSLGGALATVAGADLRGNGYDIDVFSYGAPRVGNRAFAEFLTVQTGGTLYRITHTNDIVPRLPPREFGYSHSSPEYWIKSGTLVPVRRRDIVKIEGIDATGGNNQPNIPDIMAHLWYFGLIGTCL

SEQ ID NO: 5407 - protein, 269 aa, Thermomyces lanuginosus
EVSQDLFNQFNLFAQYSAAAYCGKNNDAPAGTNITCTGNACPEVEKADATFLYSFEDSGLGDVTGFLALDNTNKLIVLSFRGSRSIENWIVNLNFDLKEINDICSGCRGHDGFTSSWRSVADTLRQKVEDAVREHPDYRVVFTGHSLGGALATVAGADLRGNGYDIDVFSYGAPRVGNRAFAEFLTVQTGGTLYRITHTNDIVPRLPPREFGYSHSSPEYWIKSGTLVPVRRRDIVKIEGIDATGGNNQPNIPDIPAHLWYFGLIGTCL

SEQ ID NO: 5408 - protein, 269 aa, Thermomyces lanuginosus
EVSQDLFNQFNLFAQYSAAAYCGKNNDAPAGTQITCTGNACPEVEKADATFLYSFEDSGVGDVTGFLALDNTNKLIVLSFRGSRSIENWIGNLNFDLKEINDICSGCRGHDGFTSSWRSVADTLRQKVEDAVREHPDYRVVFTGHSLGGALATVAGADLRGNGYDIDVFSYGAPRVGNRAFAEFLTVQTGGTLYRITHTNDIVPRLPPREFGYSHSSPEYWIKSGTLVPVRRRDIVKIEGIDATGGNNQPNIPDIGAHLWYFGLIGTCL

SEQ ID NO: 5409 - protein, 269 aa, Thermomyces lanuginosus
EVSQDLFNQFNLFAQYSAAAYCQKNNDAPAGTNITCTGNACPEVEKADVTFLYSFEDSGVGDVTGFLALDNTNKQIILSFRGSRSIENWIGNLNFDLKEINDICSGCRGHDGFTSSWRSVADTLRQKVEDAVREHPDYRVVFTGHSLGGALATVAGADLRGNGYDIDVFSYGAPRVGNRAFAEFLTVQTGGTLYRITHTNDIVPRLPPREFGYSHSSPEYWIKSGTLVPVTRNDIVKIEGIDATGGNNQPNIPDIPAHLWYFGLIGTCL

SEQ ID NO: 5410 - protein, 269 aa, Thermomyces lanuginosus
EVSQDLFNQFNLFAQYSAAAYCGKNNDAPAGTQITCTGNACPEVEKADATFLYSFEDSGVGDVTGFLALDNTNKLIVLSFRGSRSIENWIGNLNFDLKEINDICSGCRGHDGFTSSWRSVADTLRQKVEDAVREHPDYRVVFTGHSLGGALATVAGADLRGNGYDIDVFSYGAPRVGNRAFAEFLTVQTGGTLYRITHTNDIVPRLPPREFGYSHSSPEYWIKSGTLVPVRRRDIVKIEGIDATGGNNQPNIPDIAAHLWYFGLIGTCL

SEQ ID NO: 5411 - protein, 269 aa, Thermomyces lanuginosus
EVSQDLFNQFNLFAQYSAAAYCGKNNDAPAGTNITCTGNACPEVEKADATFLYSFEDSGVGDVTGFLALDNTNKLIVLSFRGSRSIENWIGNLNFDLKEINDICSGCRGHDGFTSSWRSVADTLRQKVEDAVREHPDYRVVFAGHSLGGALATVAGADLRGNGYDIDVFSYGAPRVGNRAFAEFLTVQTGGTLYRITHTNDIVPRLPPREFGYSHSSPEYWIKSGTLRPVRRRDIVKIEGIDATGGNNQPNIPDIPAHLWYFGLIGTCL

SEQ ID NO: 5412 - protein, 269 aa, Thermomyces lanuginosus
EVSDDLFNQFNLFAQYSAAAYCGKNNNAPAGTNITCTGNACPEVEKADATFLYSFEDMGVGDVTGFLALDNTNKLIVLSFRGSRSIENWIGNLNFDLKEINDICSGCRGHDGFTSSWRSVADTLRQKVEDAVREHPDYRVVFTGHSLGGALATVAGADLRGNGYDIDVFSYGAPRVGNRAFAEFLTVQTGGTLYRITHTNDIVPRLPPREFGYSHSSPEYWIKSGTLVPVTRNDIVKIEGIDATGGNNQPNIPDITAHLWYFGLIGTCL

SEQ ID NO: 5413 - protein, 269 aa, Thermomyces lanuginosus
EVSQDLFNQFNLFAQYSAAAYCGKNNDAPAGTQITCTGNACPEVEKADATFLYSFEDSGVGDVTGFLALDNTNKLIVLSFRGSRSIENWIGNLNFDLKEINDICSGCRGHDGFTSSWRSVADTLRQKVEDAVREHPDYRVVFTGHSLGGALATVAGADLRGNGYDIDVFSYGAPRVANRAFAEFLTVQTGGTLYRITHTNDIVPRLPPREFGYSHSSPEYWIKSGTLVPVRRRDIVKIEGIDATGGNNQPNIPDIPAHLWYFGLIGTCL

SEQ ID NO: 5414 - protein, 269 aa, Synthetic construct
EVSQDLFNQFNLFAQYSAAAYCGKNNDAPAGTNITCTGNACPEVEKADATFLYSFEDSGVGDVTGFLALDNTNKLIVLSFRGSRSIENWFGNLNFLLKKINDICSGCRGHDGFTSSWRSVADTLRQKVEDAVREHPDYRVVFTGHSLGGALATVAGADLRGNGYDIDVFSYGAPRVGNRAFAEFLTAQTGGTLYRITHTNDIVPRLPPREFGYSHSSPEYWIKSGTLVPVTRNDIVKIEGIDATGGNNQPNIPDIPAHLWYFGLIGTCL

SEQ ID NO: 5415 - protein, 269 aa, Thermomyces lanuginosus
EVSQDLFNQFNLFAQYSAAAYCGKNNDAPAGTNITCTGNACPEVEKADATFLYSFCDSGVGDVTGFLALDNTNKLIVLSFRGSRSIKNWIGNLNFDLKEINDICSGCRGHDGFTSSWRSVADTLRQKVEDAVREHPDYRVVFTGHSLGGALATVAGADLRGNGYDIDVFSYGAPRVGNRAFAEFLTVQTGGTLYRITHTNDIVPRLPPREFGYSHSSPEYWIKSGTLVPVRRRDIVKIEGIDATGGNNQPNIPDIPAHLWYFGLIGTCL

SEQ ID NO: 5416 - protein, 269 aa, Thermomyces lanuginosus
EVSQDLFNQFNLFAQYSKAAYCQKNNDAPAGTNITCTGNACPEVEKADATFLYSFEDSGVGDVTGFLALDNTNKQIVLSFRGSRSIENWIGNLNFDLKEINDICSGCRGHDGFTSSWRSVADTLRQKVEDAVREHPDYRVVFTGHSLGGALATVAGADLRGNGYDIDVFSYGAPRVGNRAFAEFLTTQTGGTLYRITHTNDIVPRLPPREFGYSHSSPEYWIKSGTLVPVTRNDIVKIEGIDATGGNNQPNIPDIPAHLWYFGLIGTCL

SEQ ID NO: 5417 - protein, 269 aa, Thermomyces lanuginosus
EVSQDLFNQFNLFAQYSAAAYCGKNNDAPAGTNITCTGNACPEVEKADATFLYSFEDSGVGDVTGFLALDNTNKQIILSFRGSRSIENWIGNLNFDLKEINDICSGCRGHDGFTSSWRSVADTLRQKVEDAVREHPDYRVVFTGHSLGGALATVAWADLRGNGYDIDVFSYGAPRVGNRAFAEFLTNQTGGTLYRITHTNDIVPRLPPREFGYSHSSPEYWIKSGTLVPVTRNDIVKIEGIDATGGNNQPNIPDIPAHLWYFGLIGTCL

SEQ ID NO: 5418 - protein, 269 aa, Thermomyces lanuginosus
EVSQDLFNQFNLFAQYSAAAYCGKNNDAPAGTQITCTGNACPEVEKADATFLYSFEDSGVGDVTGFLALDNTNKLIVLSFRGSRSIENWIGNLNFDLKEINDICSGCRGHDGFTSSWRSVADTLRQKVEDAVREHPDYRVVFTGHSLGGALATVAGADLRGNGYDIDVFSYGAPRVGNRAFAEFLTVQTGGTLYRITHTNDIVPRLPPREFGYSHSSPEYWIKSGTLVPVRRRDIVKIEGIDATGGNNQPNIPDIHAHLWYFGLIGTCL

SEQ ID NO: 5419 - protein, 269 aa, Thermomyces lanuginosus
EVSRDLFNQFNLFAQYSAAAYCGKNNDAPAGTQITCTGNACPEVEKADATFLYSFEDSGVGDVTGFLALDNTNKLIVLSFRGSRSIENWIGNLNFDLKEINDICSGCRGHDGFTSSWRSVADTLRQKVEDAVREHPDYRVVFTGHSLGGALATVAGADLRGNGYDIDVFSYGAPRVGNRAFAEFLTVQTGGTLYRITHTNDIVPRLPPREFGYSHSSPEYWIKSGTLVPVRRRDIVKIEGIDATGGNNQPNIPDIPAHLWYFGLIGTCL

SEQ ID NO: 5420 - protein, 269 aa, Synthetic construct
EPSQDLFNQFNLFAQYSAAAYCGKNNDAPAGTNITCTGNACPEVEKADATFLYSFEDSGVGDVTGFLALDNTNKLIVLSFRGSRSIENWIGNLKFLLKEINDICSGCRGHDGFTSSWRSVADTLRQKVEDAVREHPDYRVVFTGHSLGGALATVAGADLRGNGYDIDVFSYGAPRVGNRAFAEFLTVQTGGTLYRITHTNDIVPRLPPREFGYSHSSPEYWIKSGTLVPVTRNDIVKIEGIDATGGNNRPNIPDIPAHLWYFGLIGTCL

SEQ ID NO: 5421 - protein, 269 aa, Thermomyces lanuginosus
EVSQDLFNQFNLFAQYSKAAYCQKNNDAPAGTNITCTGNACPEVTKADATFLYSFEDSGVGDVTGFLALDNTNKLIVLSFRGSRSIENWIGNLNFDLKEINDICSGCRGHDGFTSSWRSVADTLRQKVEDAVREHPDYRVVFTGHSLGGALATVAGADLRGNGYDIDVFSYGAPRVGNRAFAEFLTVQDGGTLYRITHTNDIVPRLPPREFGYSHSSPEYWIKSGTLVPVTRNDIVKIEGIDATGGNNQPNIPDIPAHLWYFGLIGTCL

SEQ ID NO: 5422 - protein, 269 aa, Thermomyces lanuginosus
EVSQDLFNQFNLFAQYSAAAYCGKNNDAPAGTNITCTGNACPEVEKADATILYSFEDSGVGDVTGFLALDNTNKLIVLSFRGSRSIENWIGNLNFDLKEINDICSGCRGHDGFTSSWRSVADTLRQKVEDAVREHPDYRVVFTGHSLGGALATVAGADLRGNGYDIDVFSYGAPRVGNRAFAEFLTVQTGGTLYRITNTNDIVPRLPPREFGYSHSSPEYWIKSGTLVPVRRRDIVKIEGIDATGGNNQPNIPDIPAHLWYFGLIGTCL

SEQ ID NO: 5423 - protein, 269 aa, Thermomyces lanuginosus
EVSQDLFNQFNLFAQYSAAAYCGKNNDAPAGTQITCTGNACPEVEKADATFLYSFEDSGVGDVTGFLALDNTNKLIVLSFRGSRSIENWIGNLNFDLKEINDICSGCRGHDGFTSSWRSVADTLRQKVEDAVREHPDYRVVFTGHSLGGALATVAGADLRGNGYDIDVFSYGAPRVGNRAFAEFLTVQTGGTLYRITHTNDIVPRLPPREFGYSHSSPEYWIKSGTLVPVRRRDIVKIEGIDATGGNNQPNIPDILAHLWYFGLIGTCL

SEQ ID NO: 5424 - protein, 269 aa, Thermomyces lanuginosus
EVSDDLFNQFNLFAQYSAAAYCGKNNNAPAGTNITCTGNACPEVEKADATFLYSFKDSGVGDVTGFLALDNTNKLIVLSFRGSRSIENWIGNLNFDLKEINDICSGCRGHDGFTSSWRSVADTLRQKVEDAVREHPDYRVVFTGHSLGGALATVAGADLRGNGYDIDVFSYGAPRVGNRAFAEFLTVQTGGTLYRITHTNDIVPRLPPREFGYSHSSPEYWIKSGTLVPVTRNDIVKIEGIDATGGNNQPNIPDITAHLWYFGLIGTCL

SEQ ID NO: 5425 - protein, 269 aa, Thermomyces lanuginosus
EVSQDLFNQFNLFAQYSAAAYCGKNNDAPAGTNITCTGNACPEVEKADATFLYSFEDSGVGDVTGFLALDNTNKLIVLSFXGSRSIENWIGNLNFDLKEINDICSGCRGHDGFTSSWRSVADTLRQKVEDAVREHPDYRVVFTGHSXGGXLATVAGADLRGNGYDIDVFSYGAPRVGNRAFAEFLTVQTGGTLYRITHTNDIVPRLPPREFGYSHSSPEYWIKSGTLVPVTRNDIVKIEGIDATGGNNXPNIPDIPAHLWYFGLIGTCL

SEQ ID NO: 5426 - protein, 269 aa, Thermomyces lanuginosus
EVSQDLFNQFNLFAQYSAAAYCGKNNDAPAGTQITCTGNACPEVEKADATFLYSFEDSGVGDVTGFLALDNTNKLIVLSFRGSRSIENWIGNLQFDLKEINDICSGCRGHDGFTSSWRSVADTLRQKVEDAVREHPDYRVVFTGHSLGGALATVAGADLRGNGYDIDVFSYGAPRVGNRAFAEFLTVQTGGTLYRITHTNDIVPRLPPREFGYSHSSPEYWIKSGTLVPVRRRDIVKIEGIDATGGNNQPNIPDIPAHLWYFGLIGTCL

SEQ ID NO: 5427 - protein, 269 aa, Thermomyces lanuginosus
EVSQDLFNQFNLFAQYSAAAYCGKNNDAPAGTQITCTGNACPEVEKADATFLYSFEDSGVGDVTGFLALDNTNKLIVLSFRGSRSIENWIGNLNFDLKEINDICSGCRGHDGFTSSWRSVADTLRQKVEDAVREHPDYRVVFTGHSLGGALATVAGADLRGNDYDIDVFSYGAPRVGNRAFAEFLTVQTGGTLYRITHTNDIVPRLPPREFGYSHSSPEYWIKSGTLVPVRRRDIVKIEGIDATGGNNQPNIPDIPAHLWYFGLIGTCL

SEQ ID NO: 5428 - protein, 269 aa, Thermomyces lanuginosus
EVSQDLFNQFNLFAQYSAAAYCGKNNDAPAGTQITCTGNACPEVEKADATFLYSFEDSGVGDVTGFLALDNTNKLIVLSFRGSRSIENWIGNLNFDLKEINDICSGCRGHDGFTSSWRSVADTLRQKVEDAVREHPDYRVVFTGHSLGGALATVAGADLRGNGYDIDVFSYGAPRVGNRAFAEFLTVQTGGTLYRITHTQDIVPRLPPREFGYSHSSPEYWIKSGTLVPVRRRDIVKIEGIDATGGNNQPNIPDIPAHLWYFGLIGTCL

SEQ ID NO: 5429 - protein, 269 aa, Thermomyces lanuginosus
EVSQDLFNQFNLFAQYSAAAYCGKNNQAPAGTQITCTGNACPEVEKADATFLYSFEDSGVGDVTGFLALDNTNKLIVLSFRGSRSIENWIGNLNFDLKEINDICSGCRGHDGFTSSWRSVADTLRQKVEDAVREHPDYRVVFTGHSLGGALATVAGADLRGNGYDIDVFSYGAPRVGNRAFAEFLTVQTGGTLYRITHTNDIVPRLPPREFGYSHSSPEYWIKSGTLVPVRRRDIVKIEGIDATGGNNQPNIPDIPAHLWYFGLIGTCL

SEQ ID NO: 5430 - protein, 269 aa, Thermomyces lanuginosus
EVSQDLFNQFNLFAQYSAAAYCKKNNQAPAGTNITCTGNACPEVEKADATTLYSFEDSGVGDVTGFLALDNTNKGIVLSFRGSRSIENWIGNLNFDLKEINDICSGCRGHDGFTSSWRSVADTLRQKVEDAVREHPDYRVVFTGHSLGGALATVAGADLRGNGYDIDVFSYGAPRVGNRAFAEFLTVQTGGTLYRITHTNDIVPRLPPREFGYSHSSPEYWIKSGTLVPVTRNDIVKIEGIDATGGNNQPNIPDIPAHLWYFGLIGTCL

SEQ ID NO: 5431 - protein, 269 aa, Thermomyces lanuginosus
EVSDDLFNQFKLFAQYSAAAYCGKNNDAPAGTNITCTGNACPEVEKADATFLYSFKDMGVGDVTGFLALDNTNKLIVLSFRGSRSIENWIGNLNFDLKEINDICSGCRGHDGFTSSWRSVADTLRQKVEDAVREHPDYRVVFTGHSLGGALATVAGADLRGNGYDIDVFSYGAPRVGNRAFAEFLTVQTGGTLYRITHTNDIVPRLPPREFGYSHSSPEYWIKSGTLVPVTRNDIVKIEGIDATGGNNQPNIPDIPAHLWYFGLIGTCL

SEQ ID NO: 5432 - protein, 269 aa, Thermomyces lanuginosus
EVSQDLFNQFNLFAQYSAAAYCGKNNDAPAGTNITCTGNACPEVEKADATFLYSFEDSGVGDVTGFLALDNTNKQIVLSFRGSRSIENWIGNLNFDLKEINDICSGCRGHDGFTSSWRSVADTLRQKVEDAVREHPDYRVVFTGHSLGGALATVAGADLRGNGYDIDVFSYGAPRVGNRAFAEFLTNQQGGTLYRITHTNDIVPRLPPREFGYSHSSPEYWIKSGTLVPVTRNDIVKIEGIDATGGNNQPNIPDIPAHLWYFGRIGTCL

SEQ ID NO: 5433 - protein, 269 aa, Thermomyces lanuginosus
EVSQDLFNQFNLFAQYSAAAYCGKNNDAPAGTQITCTGNACPEVEKADATFLYSFEDSGVGDVTGFLALDNTNKLIVLSFRGSRSIENWIGNLNFDLKEINDICSGCRGHDGFTSSWRSVADTLRQKVEDAVREHPDYRVVFTGHSLGGALATVAGADLRGNGYDIDVFSYGAPRVGNRAFAEFLTVQTGGTLYRITHTNDIVPRLPPREFGYSHSSPEYWIKSGTLVPVRRRDIVKIEGIDATGGNNQPNIPDIVAHLWYFGLIGTCL

SEQ ID NO: 5434 - protein, 269 aa, Thermomyces lanuginosus
EVSDDLFNQFKLFAQYSAAAYCGKNNSAPAGTNITCTGNACPEVEKADATFLYSFEDSGVGDVTGFLALDNTNKLIVLSFRGSRSIENWIGNLNFDLKEINDICSGCRGHDGFTSSWRSVADTLRQKVEDAVREHPDYRVVFTGHSLGGALATVAGADLRGNGYDIDVFSYGAPRVGNRAFAEFLTVQTGGTLYRITHTNDIVPRLPPREFGYSHSSPEYWIKSGTLVPVTRNDIVKIEGIDATGGNNQPNIPDITAHLWYFGLIGTCL

SEQ ID NO: 5435 - protein, 269 aa, Thermomyces lanuginosus
EVSQDLFNQFNLFAQYSAAAYCGKNNDAPAGTQITCTGSACPEVEKADATFLYSFEDSGVGDVTGFLALDNTNKLIVLSFRGSRSIENWIGNLNFDLKEINDICSGCRGHDGFTSSWRSVADTLRQKVEDAVREHPDYRVVFTGHSLGGALATVAGADLRGNGYDIDVFSYGAPRVGNRAFAEFLTVQTGGTLYRITHTNDIVPRLPPREFGYSHSSPEYWIKSGTLVPVRRRDIVKIEGIDATGGNNQPNIPDIPAHLWYFGLIGTCL

SEQ ID NO: 5436 - protein, 269 aa, Thermomyces lanuginosus
EVSQDLFNQFNLFAQYSAAAYCGKNNSAPAGTNITCTGNACPEVFKADATFLYSFEDSGVGDVTGFLALDNTRKLIVLSFRGSRSIENWIGNLNFDLKEINDICSGCRGHDGFTSSWRSVADTLRQKVEDAVREHPDYRVVFTGHSLGGALATVAGADLRGNGYDIDVFSYGAPRVGNRAFAEFLTVQDGGTLYRITHTNDIVPRLPPREFGYSHSSPEYWIKSGTLVPVTRNDIVKIEGIDATGGNNQPNIPDIPAHLWYFGLIGTCL

SEQ ID NO: 5437 - protein, 269 aa, Thermomyces lanuginosus
EVSQDLFNQFNLFAQYSAAAYCGQNNDAPAGTNITCTGNACPEVEKADATFLYSFEDSGVGDVTGFLALDNTNKLIVLSFRGSRSIENWIGNLNFDLKEINDICSGCRGHDGFTSSWRSVADTLRQKVEAAVREHPDYRVVFTGHSLGGALATIAGADLRGNGYDIDVFSYGAPRVGNRAFAEFLTTQTGGTLYRITHTNDIVPRLPPREFGYSHSSPEYWIKSGTLVPVTRNDIVKIEGIDATGGNNQPNIPDIPAHLWYFGLIGTCL

SEQ ID NO: 5438 - protein, 269 aa, Thermomyces lanuginosus
EVSQDLFNQFNLFAQYSAAAYCGKNNRAPAGTNITCTGNACPEVEKADATFLYSFEDSGVGDVTGFLALDNTNKLIVLSFRGSRSIENWIGNLNFDLKEINDICSGCRGHGGFTSSWRSVADTLRQKVEDAVREHPDYRVVFTGHSLGGALATVAGADLRGNGYDIDVFSYGAPRVGNRAFAEFLTVQTGGTLYRITHTNDIVPRLPPREFGYSHPSPEYWIKSGTGVPVTRNDIVKIEGIDATGGNNQPNIPDIPAHLWYFGLIGTCL

SEQ ID NO: 5439 - protein, 269 aa, Thermomyces lanuginosus
EVSQDLFNQFNLFAQYSAAAYCQANNDAPAGTNITCTGNACPEVEKADATFLYSFEDSGVGDVTGFLALDNTNKRIVLSFRGSRSIENWIGNLNFDLKEINDICSGCRGHDGFTSSWRSVADTLRQKVEDAVREHPDYRVVFTGHSLGGALATVAWADLRGNGYDIDVFSYGAPRVGNRAFAEFLTVQTGGTLYRITHTNDIVPRLPPREFGYSHSSPEYWIKSGTLVPVTRNDIVKIEGIDATGGNNQPNIPDIPAHLWYFGLIGTCL

SEQ ID NO: 5440 - protein, 269 aa, Thermomyces lanuginosus
EVSQDLFNQFNLFAQYSAAAYCGKNNDAPAGTNITCTGNACPEVEKADATFLYSFEDSGVGDVTGFLALDNTNKLIVLSFRGSRSIENWILNLNFDLKEINDICSGCRGHDGFTSSWRSVADTLRQKVEDAVREHPDYRVVFTGHSLGGALATVAGADLRGNGYDIDVFSYGAPRVGNRAFAEFLTVQTGGTLYRITHTNDIVPRLPPRQFGYSHSSPEYWIKSGTLVPVRRRDIVKIEGIDATGGNNQPNIPDIPAHLWYFGLIGTCL

SEQ ID NO: 5441 - protein, 269 aa, Thermomyces lanuginosus
EVSQDLFNQFNLFAQYSAAAYCKKNNDAPAGTNITCTGNACPEVEKADATFLYSFKDSGVGDVTGFLALDNTNKLIVLSFRGSRSIENWIGNLNFDLKEINDICSGCRGHDGFTSSWRSVADTLRQKVEAAVREHPDYRVVFTGHSLGGALATVAGADLRGNGYDIDVFSYGAPRVGNRAFAEFLTVQTGGTLYRITHTNDIVPRLPPREFGYSHSSPEYWIKSGTLVPVTRNDIVKIEGIDATGGNNQPNIPDIPAHLWYFGRIGTCL

SEQ ID NO: 5442 - protein, 269 aa, Thermomyces lanuginosus
EVSQDLFNQFKLFAQYSAAAYCKKNNDAPAGTNITCTGNACPEVEKADATFLYSFEDSGVGDVTGFLALDNTNKQIVLSFRGSRSIENWIGNLNFDLKEINDICSGCRGHAGFTSSWRSVADTLRQKVEDAVREHPDYRVVFTGHSLGGALATVAGADLRGNGYDIDVFSYGAPRVGNRAFAEFLTVQTGGTLYRITHTNDIVPRLPPREFGYSHSSPEYWIKSGTLVPVTRNDIVKIEGIDATGGNNQPNIPDIPAHLWYFGLIGTCL

SEQ ID NO: 5443 - protein, 269 aa, Thermomyces lanuginosus
EVSQDLFNQFNLFAQYSAAAYCGKNNDAPAGTNITCTGNACPEVEKADATILYSFEDSGVGDVTGFLALDNTNKLIVLSFRGSRSIENWIGNLNFDLKEINDICSGCRGHDGFTSSWRSVADTLRQKVEDAVREHPDYRVVFTGHSLGGALATVAGADLRGNGYDIDVFSYGAPRVGNRAFAEFLTVQTGGTLYRITHTNDIVPRLPPREFGYSHSSPEYWIKSGTLPPVRRRDIVKIEGIDATGGNNQPNIPDIPAHLWYFGLIGTCL

SEQ ID NO: 5444 - protein, 269 aa, Thermomyces lanuginosus
EVSQDLFNQFNLFAQYSAAAYCGKNNDAPAGTQITCTGHACPEVEKADATFLYSFEDSGVGDVTGFLALDNTNKLIVLSFRGSRSIENWIGNLNFDLKEINDICSGCRGHDGFTSSWRSVADTLRQKVEDAVREHPDYRVVFTGHSLGGALATVAGADLRGNGYDIDVFSYGAPRVGNRAFAEFLTVQTGGTLYRITHTNDIVPRLPPREFGYSHSSPEYWIKSGTLVPVRRRDIVKIEGIDATGGNNQPNIPDIPAHLWYFGLIGTCL

SEQ ID NO: 5445 - protein, 269 aa, Thermomyces lanuginosus
EVSQDLFNQFNLFAQYSAAAYCGKNNDAPAGTQITCTGNACPEVEKADATFLYSFEDSGVGDVTGFLALDNTNKLIVLSFRGSRSIENWIGNLNFDLKEINDICSGCRGHDGFTSSWRSVADTLRQKVEDAVREHPDYRVVFTGHSLGGALATVAGADLRGNCYDIDVFSYGAPRVGNRAFAEFLTVQTGGTLYRITHTNDIVPRLPPREFGYSHSSPEYWIKSGTLVPVRRRDIVKIEGIDATGGNNQPNIPDIPAHLWYFGLIGTCL

SEQ ID NO: 5446 - protein, 269 aa, Thermomyces lanuginosus
EVSQDLFNQFNLFAQYSAAAYCKKNNDAPAGTNITCTGNACPEVEKADATFLYSFKDSGVGDVTGFLALDNTNKLIVLSFRGSRSIENWIGNLNFDLKEINDICSGCRGHDGFTSSWRSVADTLRQKVEDAVREHPDYRVVFTGHSLGGALATVAGADLRGNGYDIDVFSYGAPRVGNRAFAEFLTTQTGGTLYRITHTNDIVPRLPPREFGYSHSSPEYWIKSGTLVPVTRNDIVKIEGIDATGGNNQPNIPDIPAHLWYFGRIGTCL

SEQ ID NO: 5447 - protein, 269 aa, Thermomyces lanuginosus
EVSQDLFNQFNLFAQYSAAAYCGKNNQAPAGTNITCTGNACPEVEKADATFLYSFKDSGVGDVTGFLALDNTNKLIVLSFRGSRSIENWIGNLNFDLKEINDICSGCRGHDGFTSSWRSVADTLRQKVEDAVREHPDYRVVFTGHSLGGALATVAGADLRGNGYDIDVFSYGAPRVGNRAFAEFLTVQTGGTLYRITHTNDIVPRLPPREFGYSHSSPEYWIKSGTLVPVTRQDIVKIEGIDATGGNNQPNIPDITAHLWYFGLIGTCL

SEQ ID NO: 5448 - protein, 269 aa, Thermomyces lanuginosus
EVSQDLFNQFNLFAQYSAAAYCGKNNDAPAGTNITCTGNACPEVEKADATFLYSFEDSGKGDVTGFLALDNTNKLIVLSFRGSRSIENWIGNLNFDLKEINDICSGCRGHDGFTSSWRSVADTLRQKVEDAVREHPDYRGVFTGHSLGGALATVAGADLRGNGYDIDVFSYGAPRVGNRAFAEFLTVQTGGTLYRITHTNDIVPRLPPREFGYSHSSPEYWIKSGTLVPVRRRDIVKIEGIDATGGNNQPNIPDIPAHLWYFGLIGTCL

SEQ ID NO: 5449 - protein, 269 aa, Thermomyces lanuginosus
EVSQDLFNQFNLFAQYSKAAYCQKNNDAPAGTNITCTGNACPEVEKADATFLYSFEDSGVGDVTGFLALDNTNKLIILSFRGSRSIENWIGNLNFDLKEINDICSGCRGHDGFTSSWRSVADTLRQKVEDAVREHPDYRVVFTGHSLGGALATVAWADLRGNGYDIDVFSYGAPRVGNRAFAEFLTVQTGGTLYRITHTNDIVPRLPPREFGYSHSSPEYWIKSGTLVPVTRNDIVKIEGIDATGGNNQPNIPDIPAHLWYFGLIGTCL

SEQ ID NO: 5450 - protein, 269 aa, Thermomyces lanuginosus
EVSQDLFNQFNLFAQYSAAAYCKKNNDAPAGTNITCTGNACPEVEKADATFLYSFEDSGVGDVTGFLALDNTNKLIVLSFRGSRSIENWIGNLNFDLKEINDICSGCRGHDGFTSSWRSVADTLRQKVEAAVREHPDYRVVFTGHSLGGALATVAWADLRGNGYDIDVFSYGAPRVGNRAFAEFLTVQQGGTLYRITHTNDIVPRLPPREFGYSHSSPEYWIKSGTLVPVTRNDIVKIEGIDATGGNNQPNIPDIPAHLWYFGLIGTCL

SEQ ID NO: 5451 - protein, 269 aa, Thermomyces lanuginosus
EVSQDLFNQFNLFAQYSAAAYCGKNNDAPAGTNITCTGNACPEVEKADATFLYSFEDSGVGDVTGFLALDNTNKLIVLSFRGSRSIENWIGNLNFDLKEINDICSGCRGHDGFTSSWRSVADTLRQKVEDAVREHPDYRVVFTGHSLGGALATVAGADLRGNGYDIDVFSYGAPRVGNRAFAEFLTVQTGGTLYRITNTNDIVPRLPPREFGYSHSSPEYWIKSGTLRPVRRRDIVKIEGIDATGGNNQPNIPDIPAHLWYFGLIGTCL

SEQ ID NO: 5452 - protein, 269 aa, Thermomyces lanuginosus
EVSQDLFNQFNLFAQYSAAAYCGKNNDAPAGTQITCTGNACPEVEKADATFLYSFEDSGVGDVTGFLALDNTNKLIVLSFRGSRSIENWIGNLNFDLKEINDICSGCRGHDGFTSSWRSVADTLRQKVEDAVREHPDYRVVFTGHSLGGALATVAGADLRGNGYDIDVFSYGAPRVGNRAFAEFLTVQTGGTLYRITHTNDIVPRLPPRRFGYSHSSPEYWIKSGTLVPVRRRDIVKIEGIDATGGNNQPNIPDIPAHLWYFGLIGTCL

SEQ ID NO: 5453 - protein, 269 aa, Thermomyces lanuginosus
EVSQDLFNQFNLFAQYSAAAYCGKNNDAPAGTQITCTINACPEVEKADATFLYSFEDSGVGDVTGFLALDNTNKLIVLSFRGSRSIENWIGNLNFDLKEINDICSGCRGHDGFTSSWRSVADTLRQKVEDAVREHPDYRVVFTGHSLGGALATVAGADLRGNGYDIDVFSYGAPRVGNRAFAEFLTVQTGGTLYRITHTNDIVPRLPPREFGYSHSSPEYWIKSGTLVPVRRRDIVKIEGIDATGGNNQPNIPDIPAHLWYFGLIGTCL

SEQ ID NO: 5454 - protein, 269 aa, Thermomyces lanuginosus
EVSQDLFNQFNLFAQYSAAAYCGKNNDAPAGTNITCTGNACPEVEKADVTFLYSFEDSGVGDVTGFLALDNTNKQIILSFRGSRSIENWIGNLNFDLKEINDICSGCRGHDGFTSSWRSVADTLRQKVEDAVREHPDYRVVFTGHSLGGALATVAGADLRGNGYDIDVFSYGAPRVGNRAFAEFLTVQDGGTLYRITHTNDIVPRLPPREFGYSHSSPEYWIKSGTLVPVTRNDIVKIEGIDATGGNNQPNIPDIPAHLWYFGLIGTCL

SEQ ID NO: 5455 - protein, 269 aa, Thermomyces lanuginosus
EVSQDLFNQFNLFAQYSAAAYCGKNNDAPAGTQITCTGNACPEVEKADATFLYSFEDSGVGDVTGFLALDNTNKLIVLSFRGSRSIENWINNLNFDLKEINDICSGCRGHDGFTSSWRSVADTLRQKVEDAVREHPDYRVVFTGHSLGGALATVAGADLRGNGYDIDVFSYGAPRVGNRAFAEFLTVQTGGTLYRITHTNDIVPRLPPREFGYSHSSPEYWIKSGTLVPVRRRDIVKIEGIDATGGNNQPNIPDIPAHLWYFGLIGTCL

SEQ ID NO: 5456 - protein, 269 aa, Thermomyces lanuginosus
EVSQDLFNQFNLFAQYSAAAYCGKNNPAPAGTNITCTGNACPEVEKADATFLYSFEDSGVGDVTGFLALDNTNKLIVLSFRGSRSIENWIGNLNFDLKEINDICSGCRGHGGFTSSWRSVADTLRQKVEDAVREHPDYRVVFTGHSLGGALATVAGADLRGNGYDIDVFSYGAPRVGNRAFAEFLTVQTGGTLYRITHTNDIVPRLPPREFGYSHPSPEYWIKSGTXVPVTRNDIVKIEGIDATGGNNQPNIPDIPAHLWYFGLIGTCL

SEQ ID NO: 5457 - protein, 269 aa, Thermomyces lanuginosus
EVSRDLFNQFNLFAQYSAAAYCGKNNDAPAGTNITCTGNACPEVEKADATFLYSFEDSGVGDVTGFLALDNTNKLIVLSFRGSRSIENWIGNLNFDLKEINDICSGCRGHDGFTSSWRSVADTLRQKVEDAVREHPDYRVVFTGHSLGGALATVAGADLRGNGYDIDVFSYGAPRVGNRAFAEFLTVQTGGTLYRITNTNDIVPRLPPREFGYSHSSPEYWIKSGTLVPVRRRDIVKIEGIDATGGNNQPNIPDIPAHLWYFGLIGTCL

SEQ ID NO: 5458 - protein, 269 aa, Thermomyces lanuginosus
EVSQDLFNQFNLFAQYSKAAYCGKNNSAPAGTNITCTGNACPEVEKADATFLYSFEDSGVGDVTGFLALDNTNKDIVLSFRGSRSIENWIGNLNFDLKEINDICSGCRGHDGFTSSWRSVADTLRQKVEDAVREHPDYRVVFTGHSLGGALATVAGADLRGNGYDIDVFSYGAPRVGNRAFAEFLTVQDGGTLYRITHTNDIVPRLPPREFGYSHSSPEYWIKSGTLVPVTRNDIVKIEGIDATGGNNQPNIPDIPAHLWYFGLIGTCL

SEQ ID NO: 5459 - protein, 269 aa, Thermomyces lanuginosus
EVSQDLFNQFNLFAQYSAAAYCGKNNDAPAGTQITCTGNACPEVEKADATFLYSFEDSGVGDVTGFLALDNTNKLIVLSFRGSRSIENWIGNLNFDLKEINDICSGCRGHDGFTSSWRSVADTLRQKVEDAVREHPDYRVVFTGHSLGGALATVAGADLRGNKYDIDVFSYGAPRVGNRAFAEFLTVQTGGTLYRITHTNDIVPRLPPREFGYSHSSPEYWIKSGTLVPVRRRDIVKIEGIDATGGNNQPNIPDIPAHLWYFGLIGTCL

SEQ ID NO: 5460 - protein, 269 aa, Thermomyces lanuginosus
EVSQDLFNQFKLFAQYSAAAYCGKNNDAPAGTNITCTGNACPEVEKADATFLYSFKDSGVGDVTGFLALDNTNKLIVLSFRGSRSIENWIGNLNFDLKEINDICSGCRGHDGFTSSWRSVADTLRQKVEDAVREHPDYRVVFTGHSLGGALATVAGADLRGNGYDIDVFSYGAPRVGNRAFAEFLTVQTGGTLYRITHTNDIVPRLPPREFGYSHSSPEYWIKSGTLVPVTRQDIVKIEGIDATGGNNQPNIPDITAHLWYFGLIGTCL

SEQ ID NO: 5461 - protein, 269 aa, Thermomyces lanuginosus
EVSQDLFNQFNLFAQYSKAAYCGKNNDAPAGTNITCTGNACPEVEKADATFLYSFEDSGVGDVTGFLALDNTNKQIILSFRGSRSIENWIGNLRFDLKEINDICSGCRGHDGFTSSWRSVADTLRQKVEDAVREHPDYRVVFTGHSLGGALATVAGADLRGNGYDIDVFSYGAPRVGNRAFAEFLTVQTGGTLYRITHTNDIVPRLPPREFGYSHSSPEYWIKSGTLVPVTRNDIVKIEGIDATGGNNQPNIPDIPAHLWYFGLIGTCL

SEQ ID NO: 5462 - protein, 269 aa, Thermomyces lanuginosus
EVSQDLFNQFNLFAQYSAAAYCKKNNDAPAGTNITCTGNACPEVEKADATFLYSFEDSGVGDVTGFLALDNTNKRIVLSFRGSRSIENWIGNLNFDLKEINDICSGCRGHDGFTSSWRSVADTLRQKVEDAVREHPDYRVVFTGHSLGGALATVAGADLRGNGYDIDVFSYGAPRVGNRAFAEFLTTQTGGTLYRITHTNDIVPRLPPREFGYSHSSPEYWIKSGTLVPVTRNDIVKIEGIDATGGNNQPNIPDIPAHLWYFGRIGTCL

SEQ ID NO: 5463 - protein, 269 aa, Thermomyces lanuginosus
EVSQDLFNQFNLFAQYSAAAYCGKNNSAEAGTDITCTGNACPEVEKADATFLYSFEDSGVGDVTGFLALDNTNKLIVLSFRGSRSIENWIGNLNFDLKEINDICSGCRGHDGFTSSWRSVADTLRQKVEDAVREHPDYRVVFTGHSLGGALATVAGADLRGNGYDIDVFSYGAPRVGNRAFAEFLTVQDGGTLYRITHTNDIVPRLPPREFGYSHSSPEYWIKSGTLVPVTRNDIVKIEGIDATGGNNQPNIPDIPAHLWYFGLIGTCL

SEQ ID NO: 5464 - protein, 269 aa, Thermomyces lanuginosus
EVSQDLFNQFNLFAQYSAAAYCGKNNDAPAGTNITCTGNACPEVEKADATFLYSFEDSGVGDVTGFLALDNTNKLIVLSFRGSRSIENWIGNLNFDLKEINDICSGCRGHDGFTSSWRSVADTLRQKVEDAVREHPDYRVVFTGHSLGGALATVAGADLRGNGYDIDVFSYGAPRVGNRAFAEFLTVQTGGTLYRITHTNDIVPRLPPREFGYSHSSPEYWIKSGTLPPVRRRDIVKIEGIDATGGNNQPNIPDITAHLWYFGLIGTCL

SEQ ID NO: 5465 - protein, 269 aa, Thermomyces lanuginosus
EVSQDLFNQFKLFAQYSAAAYCGKNNSAPAGTNITCTGNACPEVEKADATFLYSFEDMGVGDVTGFLALDNTNKLIVLSFRGSRSIENWIGNLNFDLKEINDICSGCRGHDGFTSSWRSVADTLRQKVEDAVREHPDYRVVFTGHSLGGALATVAGADLRGNGYDIDVFSYGAPRVGNRAFAEFLTVQTGGTLYRITHTNDIVPRLPPREFGYSHSSPEYWIKSGTLVPVTRQDIVKIEGIDATGGNNQPNIPDIPAHLWYFGLIGTCL

SEQ ID NO: 5466 - protein, 269 aa, Thermomyces lanuginosus
EVSQDLFNQFNLFAQYSAAAYCGKNNDAPAGTQITCTGNACPEVEKADATFLYSFEDSGVGDVTGFLALDNTNKLIVLSFRGSRSIANWIGNLNFDLKEINDICSGCRGHDGFTSSWRSVADTLRQKVEDAVREHPDYRVVFTGHSLGGALATVAGADLRGNGYDIDVFSYGAPRVGNRAFAEFLTVQTGGTLYRITHTNDIVPRLPPREFGYSHSSPEYWIKSGTLVPVRRRDIVKIEGIDATGGNNQPNIPDIPAHLWYFGLIGTCL

SEQ ID NO: 5467 - protein, 269 aa, Thermomyces lanuginosus
EVSQDLFNQFNLFAQYSAAAYCGKNNSAEAGTDITCTGNACPEVFKADATFLYSFEDSGVGDVTGFLALDNTNKLIVLSFRGSRSIENWIGNLNFDLKEINDICSGCRGHDGFTSSWRSVADTLRQKVEDAVREHPDYRVVFTGHSLGGALATVAGADLRGNGYDIDVFSYGAPRVGNRAFAEFLTVQTGGTLYRITHTNDIVPRLPPREFGYSHSSPEYWIKSGTLVPVTRNDIVKIEGIDATGGNNQPNIPDIPAHLWYFGLIGTCL

SEQ ID NO: 5468 - protein, 269 aa, Thermomyces lanuginosus
EVSQDLFNQFNLFAQYSAAAYCKANNDAPAGTNITCTGNACPEVEKADATFLYSFEDSGVGDVTGFLALDNTNKLIVLSFRGSRSIENWIGNLNFDLKEINDICSGCRGHDGFTSSWRSVADTLRQKVEDAVREHPDYRVVFTGHSLGGALATIAGADLRGNGYDIDVFSYGAPRVGNRAFAEFLTNQTGGTLYRITHTNDIVPRLPPREFGYSHSSPEYWIKSGTLVPVTRNDIVKIEGIDATGGNNQPNIPDIPAHLWYFGLIGTCL

SEQ ID NO: 5469 - protein, 269 aa, Thermomyces lanuginosus
EVSQDLFNQFKLFAQYSAAAYCGKNNDAPAGTNITCTGNACPEVEKADATFLYSFEDMGVGDVTGFLALDNTNKLIVLSFRGSRSIENWIGNLNFDLKEINDICSGCRGHDGFTSSWRSVADTLRQKVEDAVREHPDYRVVFTGHSLGGALATVAGADLRGNGYDIDVFSYGAPRVGNRAFAEFLTVQTGGTLYRITHTNDIVPRLPPREFGYSHSSPEYWIKSGTLVPVTRQDIVKIEGIDATGGNNQPNIPDITAHLWYFGLIGTCL

SEQ ID NO: 5470 - protein, 269 aa, Thermomyces lanuginosus
EVSQDLFNQFNLFAQYSAAAYCGKNNDAPAGTQITCTGNACPEVEKADATFLYSFEDSGVGDVTGFLALDNTNKLIVLSFRGSRSIENWIGNLNFDLKEINDICSGCRGHDGFTSSWRSVADTLRQKVEDAVREHPDYRVVFTGHSLGGALATVAGADLRGNYYDIDVFSYGAPRVGNRAFAEFLTVQTGGTLYRITHTNDIVPRLPPREFGYSHSSPEYWIKSGTLVPVRRRDIVKIEGIDATGGNNQPNIPDIPAHLWYFGLIGTCL

SEQ ID NO: 5471 - protein, 269 aa, Thermomyces lanuginosus
EVSQDLFNQFNLFAQYSAAAYCGKNNDAPAGTNITCTGNACPEVEKADATILYSFEDSGVGDVTGFLALDNTNKLIVLSFRGSRSIENWIGNLNFDLKEINDICSGCRGHDGFTSSWRSVADTLRQKVEDAVREHPDYRVVFTGHSLGGALATVAGADLRGNGYDIDVFSYGAPRVGNRAFAEFLTVQTGGTLYRITHTNDIVPRLPPREFGYSHSSPEYWIKSGTLRPVRRRDIVKIEGIDATGGNNQPNIPDIPAHLWYFGLIGTCL

SEQ ID NO: 5472 - protein, 269 aa, Thermomyces lanuginosus
EVSQDLFNQFNLFAQYSAAAYCGKNNDAPAGTNITCTGNACPEVEKADATFLYSFEDSGVGDVTGFLALDNTNKLIVLSFRGSRSIENWIGNLNFDLKEINDICSGCRGHAGFTSSWRSVADTLRQKVEAAVREHPDYRVVFTGHSLGGALATIAWADLRGNGYDIDVFSYGAPRVGNRAFAEFLTVQTGGTLYRITHTNDIVPRLPPREFGYSHSSPEYWIKSGTLVPVTRNDIVKIEGIDATGGNNQPNIPDIPAHLWYFGLIGTCL

SEQ ID NO: 5473 - protein, 269 aa, Thermomyces lanuginosus
EVSQDLFNQFNLFAQYSAAAYCGKNNDAPAGTQITCTGNACPEVEKADATFLYSFEDSGVGDVTGFLALDNTNKLIVLSFRGSRSIENWIGNLNFDLKEINDICSGCRGHDGFTLSWRSVADTLRQKVEDAVREHPDYRVVFTGHSLGGALATVAGADLRGNGYDIDVFSYGAPRVGNRAFAEFLTVQTGGTLYRITHTNDIVPRLPPREFGYSHSSPEYWIKSGTLVPVRRRDIVKIEGIDATGGNNQPNIPDIPAHLWYFGLIGTCL

SEQ ID NO: 5474 - protein, 269 aa, Thermomyces lanuginosus
EVSQDLFNQFNLFAQYSAAAYCGKNNDAPAGTQITCTGNACPEVEKADATFLYSFEDSGVGDVTGFLALDNTNKLIVLSFRGSRSIENWIGNLNFDLKEINDICSGCRGHDGFTSSWRSVADTLRQKVEDAVREHPDYRVVFTGHSLGGALATVAGADLRGNGYDIDVFSYGAPRVGNRAFAEFLTVQTGGTLYRITHTNDIVPRLPPREFGYSHSSPEYWIKSGTLVPVRRRDIVKIEGIDATGGNNQPNIPDIFAHLWYFGLIGTCL

SEQ ID NO: 5475 - protein, 269 aa, Thermomyces lanuginosus
EVSQDLFNQFNLFAQYSAAAYCGKNNNAPAGTQITCTGNACPEVEKADATFLYSFEDSGVGDVTGFLALDNTNKLIVLSFRGSRSIENWIGNLNFDLKEINDICSGCRGHDGFTSSWRSVADTLRQKVEDAVREHPDYRVVFTGHSLGGALATVAGADLRGNGYDIDVFSYGAPRVGNRAFAEFLTVQTGGTLYRITHTNDIVPRLPPREFGYSHSSPEYWIKSGTLVPVRRRDIVKIEGIDATGGNNQPNIPDIPAHLWYFGLIGTCL

SEQ ID NO: 5476 - protein, 269 aa, Thermomyces lanuginosus
EVSQDLFNQFNLFAQYSAAAYCGKNNDAPAGTNITCTGNACPEVEKADATFLYSFEDSGVGDVTGFLALDNTNKLIVLSFXGSRSIENWIGNLNFDLKEINDICSGCRGHDGFTSSWRSVADTLRQKVEDAVREHPDYRVVFTGHSXGGGLATVAGADLRGNGYDIDVFSYGAPRVGNRAFAEFLTVQTGGTLYRITHTNDIVPRLPPREFGYSHSSPEYWIKSGTLVPVTRNDIVKIEGIDATGGNNXPNIPDIPAHLWYFGLIGTCL

SEQ ID NO: 5477 - protein, 269 aa, Thermomyces lanuginosus
EVSQDLFNQFNLFAQYSAAAYCGKNNDAPAGTQITCTGNACPEVEKADATFLYSFEDSGVGDVTGFLALDNTNKLIVLSFRGSRSIENWIGNLNFSLKEINDICSGCRGHDGFTSSWRSVADTLRQKVEDAVREHPDYRVVFTGHSLGGALATVAGADLRGNGYDIDVFSYGAPRVGNRAFAEFLTVQTGGTLYRITHTNDIVPRLPPREFGYSHSSPEYWIKSGTLVPVRRRDIVKIEGIDATGGNNQPNIPDIPAHLWYFGLIGTCL

SEQ ID NO: 5478 - protein, 269 aa, Thermomyces lanuginosus
EVSQDLFNQFNLFAQYSAAAYCGKNNDAPAGTQITCTGNACPEVEKADATFLYSFEDSGVGDVTGFLALDNTNKLIVLSFRGSRSIENWIGNLNFDLKEINDICSGCRGHDGFTSSLRSVADTLRQKVEDAVREHPDYRVVFTGHSLGGALATVAGADLRGNGYDIDVFSYGAPRVGNRAFAEFLTVQTGGTLYRITHTNDIVPRLPPREFGYSHSSPEYWIKSGTLVPVRRRDIVKIEGIDATGGNNQPNIPDIPAHLWYFGLIGTCL

SEQ ID NO: 5479 - protein, 269 aa, Thermomyces lanuginosus
EVSQDLFNQFNLFAQYSKAAYCKKNNDAPAGTNITCTGNACPEVEKADATFLYSFEDSGVGDVTGFLALDNTNKLIVLSFRGSRSIENWIGNLNFDLKEINDICSGCRGHAGFTSSWRSVADTLRQKVEDAVREHPDYRVVFTGHSLGGALATVAGADLRGNGYDIDVFSYGAPRVGNRAFAEFLTVQQGGTLYRITHTNDIVPRLPPREFGYSHSSPEYWIKSGTLVPVTRNDIVKIEGIDATGGNNQPNIPDIPAHLWYFGLIGTCL

SEQ ID NO: 5480 - protein, 269 aa, Thermomyces lanuginosus
EVSQDLFNQFNLFAQYSKAAYCQKNNDAPAGTNITCTGNACPEVEKADATFLYSFEDSGVGDVTGFLALDNTNKLIVLSFRGSRSIENWIGNLNFDLKEINDICSGCRGHDGFTSSWRSVADTLRQKVEDAVREHPDYRVVFTGHSLGGALATVAGADLRGNGYDIDVFSYGAPRVGNRAFAEFLTTQDGGTLYRITHTNDIVPRLPPREFGYSHSSPEYWIKSGTLVPVTRNDIVKIEGIDATGGNNQPNIPDIPAHLWYFGLIGTCL

SEQ ID NO: 5481 - protein, 269 aa, Thermomyces lanuginosus
EVSQDLFNQFNLFAQYSAAAYCGKNNDAPAGTQITCTGNACPEVEKADATFLYSFEDSGVGDVTGFLALDNTNKLIVLSFRGSRSIENWIGNLNFWLKEINDICSGCRGHDGFTSSWRSVADTLRQKVEDAVREHPDYRVVFTGHSLGGALATVAGADLRGNGYDIDVFSYGAPRVGNRAFAEFLTVQTGGTLYRITHTNDIVPRLPPREFGYSHSSPEYWIKSGTLVPVRRRDIVKIEGIDATGGNNQPNIPDIPAHLWYFGLIGTCL

SEQ ID NO: 5482 - protein, 269 aa, Thermomyces lanuginosus
EVSQDLFNQFNLFAQYSAAAYCGKNNDAPAGTNITCTGNACPEVEKADATFLYSFEDMGVGDVTGFLALDNTNKLIVLSFRGSRSIENWIGNLNFDLKEINDICSGCRGHDGFTSSWRSVADTLRQKVEDAVREHPQYRVVFTGHSLGGALATVAGADLRGNPYDIDVFSYGAPRVGNRAFAEFLTVQTGGTLYRITHTNDIVPRLPPREFGYSHSSPEYWIKSGTLVPVTRQDIVKIEGIDATGGNNQPNIPDIPAHLWYFGLIGTCL

SEQ ID NO: 5483 - protein, 269 aa, Thermomyces lanuginosus
EVSQDLFNQFNLFAQYSKAAYCQKNNDAPAGTNITCTGNACPEVFKADATFLYSFEDSGVGDVTGFLALDNTNKLIVLSFRGSRSIENWIGNLNFDLKEINDICSGCRGHDGFTSSWRSVADTLRQKVEDAVREHPDYRVVFTGHSLGGALATVAGADLRGNGYDIDVFSYGAPRVGNRAFAEFLTVQDGGTLYRITHTNDIVPRLPPREFGYSHSSPEYWIKSGTLVPVTRNDIVKIEGIDATGGNNQPNIPDIPAHLWYFGLIGTCL

SEQ ID NO: 5484 - protein, 269 aa, Thermomyces lanuginosus
EVSQDLFNQFKLFAQYSAAAYCGKNNSAPAGTNITCTGNACPEVEKADATFLYSFEDSGVGDVTGFLALDNTNKLIVLSFRGSRSIENWIGNLNFDLKEINDICSGCRGHDGFTSSWRSVADTLRQKVEDAVREHPDYRVVFTGHSLGGALATVAGADLRGNGYDIDVFSYGAPRVGNRAFAEFLTVQTGGTLYRITHTNDIVPRLPPREFGYSHSSPEYWIKSGTLVPVTRQDIVKIEGIDATGGNNQPNIPDITAHLWYFGLIGTCL

SEQ ID NO: 5485 - protein, 269 aa, Thermomyces lanuginosus
EVSQDLFNQFNLFAQYSAAAYCGKNNDAPAGTDITCTGNACPEVFKADATFLYSFEDSGVGDVTGFLALDNTRKLIVLSFRGSRSIENWIGNLNFDLKEINDICSGCRGHDGFTSSWRSVADTLRQKVEDAVREHPDYRVVFTGHSLGGALATVAGADLRGNGYDIDVFSYGAPRVGNRAFAEFLTVQAGGTLYRITHTNDIVPRLPPREFGYSHSSPEYWIKSGTLVPVTRNDIVKIEGIDATGGNNQPNIPDIPAHLWYFGLIGTCL

SEQ ID NO: 5486 - protein, 269 aa, Thermomyces lanuginosus
EVSQDLFNQFNLFAQYSAAAYCGKNNDAPAGTQITCTGNACPEVEKADATFLYSFEDSGVGDVTGFLALDNTNKLIVLSFRGSRSIENWIGNLNFDLKEINDICSGCRGHDGFTSSWRSVADTLRQKVEDAVREHPDYRVVFTGHSLGGALATVAGADLRGNHYDIDVFSYGAPRVGNRAFAEFLTVQTGGTLYRITHTNDIVPRLPPREFGYSHSSPEYWIKSGTLVPVRRRDIVKIEGIDATGGNNQPNIPDIPAHLWYFGLIGTCL

SEQ ID NO: 5487 - protein, 269 aa, Thermomyces lanuginosus
EVSQDLFNQFNLFAQYSAAAYCGKNNDAPAGTQITCTGNACPEVEKADATFLYSFEDSGVGDVTGFLALDNTNKLIVLSFRGSRSIENWISNLNFDLKEINDICSGCRGHDGFTSSWRSVADTLRQKVEDAVREHPDYRVVFTGHSLGGALATVAGADLRGNGYDIDVFSYGAPRVGNRAFAEFLTVQTGGTLYRITHTNDIVPRLPPREFGYSHSSPEYWIKSGTLVPVRRRDIVKIEGIDATGGNNQPNIPDIPAHLWYFGLIGTCL

SEQ ID NO: 5488 - protein, 269 aa, Thermomyces lanuginosus
EVSQDLFNQFNLFAQYSAAAYCGKNNDAPAGTQITCTANACPEVEKADATFLYSFEDSGVGDVTGFLALDNTNKLIVLSFRGSRSIENWIGNLNFDLKEINDICSGCRGHDGFTSSWRSVADTLRQKVEDAVREHPDYRVVFTGHSLGGALATVAGADLRGNGYDIDVFSYGAPRVGNRAFAEFLTVQTGGTLYRITHTNDIVPRLPPREFGYSHSSPEYWIKSGTLVPVRRRDIVKIEGIDATGGNNQPNIPDIPAHLWYFGLIGTCL

SEQ ID NO: 5489 - protein, 269 aa, Thermomyces lanuginosus
EVSQDLFNQFNLFAQYSAAAYCGKNNDAPAGTQITCTGNACPEVEKADATFLYSFEDSGVGDVTGFLALDNTNKLIVLSFRGSRSIENWIWNLNFDLKEINDICSGCRGHDGFTSSWRSVADTLRQKVEDAVREHPDYRVVFTGHSLGGALATVAGADLRGNGYDIDVFSYGAPRVGNRAFAEFLTVQTGGTLYRITHTNDIVPRLPPREFGYSHSSPEYWIKSGTLVPVRRRDIVKIEGIDATGGNNQPNIPDIPAHLWYFGLIGTCL

SEQ ID NO: 5490 - protein, 269 aa, Thermomyces lanuginosus
EVSQDLFNQFNLFAQYSAAAYCGKNNDAPAGTQITCTGNACPEVEKADATFLYSFRDSGVGDVTGFLALDNTNKLIVLSFRGSRSIENWIGNLNFDLKEINDICSGCRGHDGFTSSWRSVADTLRQKVEDAVREHPDYRVVFTGHSLGGALATVAGADLRGNGYDIDVFSYGAPRVGNRAFAEFLTVQTGGTLYRITHTNDIVPRLPPREFGYSHSSPEYWIKSGTLVPVRRRDIVKIEGIDATGGNNQPNIPDIPAHLWYFGLIGTCL

SEQ ID NO: 5491 - protein, 269 aa, Thermomyces lanuginosus
EVSQDLFNQFNLFAQYSAAAYCKKNNDAPAGTNITCTGNACPEVEKADATFLYSFEDSGVGDVTGFLALDNTNKQIVLSFRGSRSIENWIGNLNFDLKEINDICSGCRGHDGFTSSWRSVADTLRQKVEDAVREHPDYRVVFTGHSLGGALATVAWADLRGNGYDIDVFSYGAPRVGNRAFAEFLTVQTGGTLYRITHTNDIVPRLPPREFGYSHSSPEYWIKSGTLVPVTRNDIVKIEGIDATGGNNQPNIPDIPAHLWYFGRIGTCL

SEQ ID NO: 5492 - protein, 269 aa, Thermomyces lanuginosus
EVSQDLFNQFNLFAQYSAAAYCGKNNDAPAGTQITCTYNACPEVEKADATFLYSFEDSGVGDVTGFLALDNTNKLIVLSFRGSRSIENWIGNLNFDLKEINDICSGCRGHDGFTSSWRSVADTLRQKVEDAVREHPDYRVVFTGHSLGGALATVAGADLRGNGYDIDVFSYGAPRVGNRAFAEFLTVQTGGTLYRITHTNDIVPRLPPREFGYSHSSPEYWIKSGTLVPVRRRDIVKIEGIDATGGNNQPNIPDIPAHLWYFGLIGTCL

SEQ ID NO: 5493 - protein, 269 aa, Thermomyces lanuginosus
EVSQDLFNQFNLFAQYSAAAYCGKNNSAPAGTNITCTGNACPEVFKADATFLYSFEDSGVGDVTGFLALDNTRKLIVLSFRGSRSIENWIGNLNFDLKEINDICSGCRGHDGFTSSWRSVADTLRQKVEDAVREHPDYRVVFTGHSLGGALATVAGADLRGNGYDIDVFSYGAPRVGNRAFAEFLTVQQGGTLYRITHTNDIVPRLPPREFGYSHSSPEYWIKSGTLVPVTRNDIVKIEGIDATGGNNQPNIPDIPAHLWYFGLIGTCL

SEQ ID NO: 5494 - protein, 269 aa, Thermomyces lanuginosus
EVSQDLFNQFNLFAQYSAAAYCGKNNYAPAGTNITCTGNACPEVEKADATFLYSFEDSGVGDVTGFLALDNTNKLIVLSFRGSRSIKNWIGNLNFDLKEINDICSGCRGHDGFTSSWRSVADTLRQKVEDAVREHPDYRVVFTGHSLGGALATVAGADLRGNGYDIDVFSYGAPRVGNRAFAEFLTVQTGGTLYRITHTNDIVPRLPPREFGYSHSSPEYWIKSGTLVPVRRRDIVKIEGIDATGGNNQPNIPDIPAHLWYFGLIGTCL

SEQ ID NO: 5495 - protein, 269 aa, Thermomyces lanuginosus
EVSQDLFNQFNLFAQYSAAAYCGANNDAPAGTNITCTGNACPEVEKADATFLYSFEDSGVGDVTGFLALDNTNKQIVLSFRGSRSIENWIGNLNFDLKEINDICSGCRGHDGFTSSWRSVADTLRQKVEDAVREHPDYRVVFTGHSLGGALATVAGADLRGNGYDIDVFSYGAPRVGNRAFAEFLTTQQGGTLYRITHTNDIVPRLPPREFGYSHSSPEYWIKSGTLVPVTRNDIVKIEGIDATGGNNQPNIPDIPAHLWYFGLIGTCL

SEQ ID NO: 5496 - protein, 269 aa, Thermomyces lanuginosus
EVSQDLFNQFNLFAQYSAAAYCGKNNDAEAGTNITCTGNACPEVFKADATFLYSFEDSGVGDVTGFLALDNTRKLIVLSFRGSRSIENWIGNLNFDLKEINDICSGCRGHDGFTSSWRSVADTLRQKVEDAVREHPDYRVVFTGHSLGGALATVAGADLRGNGYDIDVFSYGAPRVGNRAFAEFLTVQDGGTLYRITHTNDIVPRLPPREFGYSHSSPEYWIKSGTLVPVTRNDIVKIEGIDATGGNNQPNIPDIPAHLWYFGLIGTCL

SEQ ID NO: 5497 - protein, 269 aa, Thermomyces lanuginosus
EVSQDLFNQFNLFAQYSAAAYCGKNNDAPAGTNITCTGNACPEVEKADATFLYSFEDSGVGDVTGFLALDNTNKLIVLSFRGSRSIENWIGNLNFDLKEINDICSGCRGHAGFTSSWRSVADTLRQKVEAAVREHPDYRVVFTGHSLGGALATIAGADLRGNGYDIDVFSYGAPRVGNRAFAEFLTVQTGGTLYRITHTNDIVPRLPPREFGYSHSSPEYWIKSGTLVPVTRNDIVKIEGIDATGGNNQPNIPDIPAHLWYFGRIGTCL

SEQ ID NO: 5498 - protein, 269 aa, Thermomyces lanuginosus
EVSQDLFNQFNLFAQYSAAAYCGKNNDAPAGTQITCTGNACPEVEKADATFLYSFEDSGVGDVTGFLALDNTNKLIVLSFRGSRSIENWIGNLNFDLKEINDICSGCRGHDGFTSSWRSVADTLRQKVEDAVREHPDYRVVFTGHSLGGALATVAGADLRGNNYDIDVFSYGAPRVGNRAFAEFLTVQTGGTLYRITHTNDIVPRLPPREFGYSHSSPEYWIKSGTLVPVRRRDIVKIEGIDATGGNNQPNIPDIPAHLWYFGLIGTCL

SEQ ID NO: 5499 - protein, 269 aa, Thermomyces lanuginosus
EVSQDLFNQFNLFAQYSAAAYCGKNNDAPAGTQITCTGNACPEVEKADATFLYSFEDSGVGDVTGFLALDNTNKLIVLSFRGSRSIENWIGNLNFDLKEINDICSGCRGHDGFTSSKRSVADTLRQKVEDAVREHPDYRVVFTGHSLGGALATVAGADLRGNGYDIDVFSYGAPRVGNRAFAEFLTVQTGGTLYRITHTNDIVPRLPPREFGYSHSSPEYWIKSGTLVPVRRRDIVKIEGIDATGGNNQPNIPDIPAHLWYFGLIGTCL

SEQ ID NO: 5500 - protein, 269 aa, Thermomyces lanuginosus
EVSQDLFNQFNLFAQYSAAAYCGKNNDAPAGTNITCTGNACPEVEKADATFLYSFEDSGVGDVTGFLALDNTNKGIVLSFRGSRSIENWIANLNFDLKEINDICSGCRGHDGFTSSWRSVADTLRQKVEDAVREHPDYRVVFTGHSLGGALATVAGADLRGNGYDIDVFSYGAPRVGNRAFAEFLTNQTGGTLYRITHTNDIVPRLPPREFGYSHSSPEYWIKSGTLVPVTRNDIVKIEGIDATGGNNQPNIPDIPAHLWYFGRIGTCL

SEQ ID NO: 5501 - protein, 269 aa, Thermomyces lanuginosus
EVSQDLFNQFNLFAQYSAAAYCKKNNDAPAGTNITCTGNACPEVEKADATFLYSFEDSGVGDVTGFLALDNTNKLIVLSFRGSRSIENWIGNLNFDLKEINDICSGCRGHDGFTSSWRSVADTLRQKVEAAVREHPDYRVVFTGHSLGGALATVAGADLRGNGYDIDVFSYGAPRVGNRAFAEFLTNQTGGTLYRITHTNDIVPRLPPREFGYSHSSPEYWIKSGTLVPVTRNDIVKIEGIDATGGNNQPNIPDIPAHLWYFGRIGTCL

SEQ ID NO: 5502 - protein, 269 aa, Thermomyces lanuginosus
EVSQDLFNQFNLFAQYSAAAYCGKNNDAPAGTNITCTGNACPEVEKADATFLYSFEDMGVGDVTGFLALDNTNKQIVLSFRGSRSIENWIQNLNFDLKEINDICSGCRGHDGFTSSWRSVADTLRQKVEDAVREHPDYRVVFTGHSLGGALATVAGADLRGNGYDIDVFSYGAPRVGNRAFAEFLTVQTGGTLYRITHTNDIVPRLPPREFGYSHSSPEYWIKSGTLVPVTRNDIVKIEGIDATGGNNQPNQPDIPAHLWYFGLIGTCL

SEQ ID NO: 5503 - protein, 269 aa, Thermomyces lanuginosus
EVSQDLFNQFNLFAQYSAAAYCGKNNDAPAGTQITCTGNACPEVEKADATFLYSFEDSGVGDVTGFLALDNTNKLIVLSFRGSRSIENWIGNLNFDLKEINDICSGCRGHDGFTSSWRSVADTLRQKVEDAVREHPDYRVVFTGHSLGGALATVAGADLRGNGYDIDVFSYGAPRVGNRAFAEFLTVQTGGTLYRITHTNDIVPRLPPREFGYSHSSPEYWIKSGTLVPVRRRDIVKIEGIDATGGNNQPNIPIIPAHLWYFGLIGTCL

SEQ ID NO: 5504 - protein, 269 aa, Thermomyces lanuginosus
EVSQDLFNQFNLFAQYSAAAYCGKNNDAPAGTQITCTGNACPEVEKADATFLYSFEDSGVGDVTGFLALDNTNKLIVLSFRGSRSIENWIENLNFDLKEINDICSGCRGHDGFTSSWRSVADTLRQKVEDAVREHPDYRVVFTGHSLGGALATVAGADLRGNGYDIDVFSYGAPRVGNRAFAEFLTVQTGGTLYRITHTNDIVPRLPPREFGYSHSSPEYWIKSGTLVPVRRRDIVKIEGIDATGGNNQPNIPDIPAHLWYFGLIGTCL

SEQ ID NO: 5505 - protein, 269 aa, Thermomyces lanuginosus
EVSQDLFNQFNLFAQYSAAAYCQKNNDAPAGTNITCTGNACPEVEKADATFLYSFEDSGVGDVTGFLALDNTNKQIVLSFRGSRSIENWIGNLNFDLKEINDICSGCRGHDGFTSSWRSVADTLRQKVEDAVREHPDYRVVFTGHSLGGALATVAWADLRGNGYDIDVFSYGAPRVGNRAFAEFLTNQTGGTLYRITHTNDIVPRLPPREFGYSHSSPEYWIKSGTLVPVTRNDIVKIEGIDATGGNNQPNIPDIPAHLWYFGLIGTCL

SEQ ID NO: 5506 - protein, 269 aa, Thermomyces lanuginosus
EVSQDLFNQFNLFAQYSAAAYCGKNNDAPAGTNITCTGNACPEVEKADATFLYSFEDSGVGDVTGFLALDNTNKLIVLSFRGSRSIENWIGNLNFDLKEINDICSGCRGHDGFTSSWRSVADTLRQKVEDAVREHPDYRVVFTGHSLGGALATVAGADLRGDGYDIDVFSYGAPRVGNRAFAEFLTVQTGGTLYRITNTNDIVPRLPPREFGYSHSSPEYWIKSGTLVPVRRRDIVKIEGIDATGGNNQPNIPDIPAHLWYFGLIGTCL

SEQ ID NO: 5507 - protein, 269 aa, Thermomyces lanuginosus
EVSQDLFNQFNLFAQYSAAAYCGKNNDAPAGTNITCTGNACPEVEKADATFLYSFEDSGVGDVTGFLALDNTNKLIVLSFRGSRSIENWIQNLNFDLKEINDICSGCRGHDGFTSSWRSVADTLRQKVEDAVREHPDYRVVFTGHSLGGALATVAGADLRGNGYDIDVFSYGAPRVGNRAFAEFLTTQTGGTLYRITHTNDIVPRLPPREFGYSHSSPEYWIKSGTLVPVTRNDIVKIEGIDATGGNNQPNQPDIPAHLWYFGRIGTCL

SEQ ID NO: 5508 - protein, 269 aa, Thermomyces lanuginosus
EVSQDLFNQFNLFAQYSAAAYCGKNNDAPAGTQITCTGNACPEVEKADATFLYSFEDSGVGDVTGFLALDNTNKLIVLSFRGSRSIENWIQNLNFDLKEINDICSGCRGHDGFTSSWRSVADTLRQKVEDAVREHPDYRVVFTGHSLGGALATVAGADLRGNGYDIDVFSYGAPRVGNRAFAEFLTVQTGGTLYRITHTNDIVPRLPPREFGYSHSSPEYWIKSGTLVPVRRRDIVKIEGIDATGGNNQPNIPDIPAHLWYFGLIGTCL

SEQ ID NO: 5509 - protein, 269 aa, Thermomyces lanuginosus
EVSQDLFNQFNLFAQYSAAAYCQQNNDAPAGTNITCTGNACPEVEKADATFLYSFEDSGVGDVTGFLALDNTNKLIVLSFRGSRSIENWIGNLNFDLKEINDICSGCRGHDGFTSSWRSVADTLRQKVEAAVREHPDYRVVFTGHSLGGALATVAWADLRGNGYDIDVFSYGAPRVGNRAFAEFLTVQTGGTLYRITHTNDIVPRLPPREFGYSHSSPEYWIKSGTLVPVTRNDIVKIEGIDATGGNNQPNIPDIPAHLWYFGLIGTCL

SEQ ID NO: 5510 - protein, 269 aa, Thermomyces lanuginosus
EVSQDLFNQFNLFAQYSAAAYCGKNNDAPAGTNITCTGNACPEVEKADATFLYSFEDSGVGDVTGFLALDNTNKLIVLSFRGSRSIENWIGNLNFDLKEINDICSGCRGHDGFTSSWRSVADTLRQKVEDAVREHPDYRVVFAGHSLGGALATVAGADLRGNGYDIDVFSYGAPRVGNRAFAEFLTVQTGGTLYRITSTNDIVPRLPPREFGYSHSSPEYWIKSGTLVPVRRRDIVKIEGIDATGGNNQPNIPDIPAHLWYFGLIGTCL

SEQ ID NO: 5511 - protein, 269 aa, Thermomyces lanuginosus
EVSQDLFNQFNLFAQYSAAAYCKKNNDAPAGTNITCTGNACPEVEKADATTLYSFEDSGVGDVTGFLALDNTNKLIVLSFRGSRSIENWIGNLNFDLKEINDICSGCRGHDGFTSSWRSVADTLRQKVEDAVREHPDYRVVFTGHSLGGALATVAGADLRGNGYDIDVFSYGAPRVGNRAFAEFLTVQTGGTLYRITHTNDIVPRLPPREFGYSHSSPEYWIKSGTLVPVTRNDIVKIEGIDATGGNNQPNQPDIPAHLWYFGRIGTCL

SEQ ID NO: 5512 - protein, 269 aa, Thermomyces lanuginosus
EVSQDLFNQFNLFAQYSAAAYCGKNNEAPAGTNITCTGNACPEVEKADATFLYSFEDSGVGDVTGFLALDNTNKLIVLSFRGSRSIENWIGNLNFDLKEINDICSGCRGHDGFTSSWRSVADTLRQKVEDAVREHPQYRVVFTGHSLGGALATVAGADLRGNGYDIDVFSYGAPRVGNRAFAEFLTVQTGGTLYRITHTNDIVPRLPPREFGYSHSSPEYWIKSGTMVPVTRNDIVKIEGIDATGGNNQPNIPDIPAHLWYFGRIGTCL

SEQ ID NO: 5513 - protein, 269 aa, Thermomyces lanuginosus
EVSQDLFNQFNLFAQYSKAAYCGKNNDAPAGTNITCTGNACPEVEKADATFLYSFEDSGVGDVTGFLALDNTNKQIVLSFRGSRSIENWIGNLRFDLKEINDICSGCRGHAGFTSSWRSVADTLRQKVEDAVREHPDYRVVFTGHSLGGALATVAGADLRGNGYDIDVFSYGAPRVGNRAFAEFLTVQTGGTLYRITHTNDIVPRLPPREFGYSHSSPEYWIKSGTLVPVTRNDIVKIEGIDATGGNNQPNIPDIPAHLWYFGLIGTCL

SEQ ID NO: 5514 - protein, 269 aa, Thermomyces lanuginosus
EVSQDLFNQFNLFAQYSAAAYCGKNNDAPAGTNITCTGNACPEVEKADATFLYSFKDSGVGDVTGFLALDNTNKLIVLSFRGSRSIENWIGNLNFDLKEINDICSGCRGHDGFTSSWRSVADTLRQKVEAAVREHPDYRVVFTGHSLGGALATVAGADLRGNGYDIDVFSYGAPRVGNRAFAEFLTNQTGGTLYRITHTNDIVPRLPPREFGYSHSSPEYWIKSGTLVPVTRNDIVKIEGIDATGGNNQPNIPDIPAHLWYFGRIGTCL

SEQ ID NO: 5515 - protein, 270 aa, Thermomyces lanuginosus
EVSQDLFNQFNLFAQYSAAAYCGKNNDAPAGTNITCTGNACPEVEKADATFLYSFEDSGVGDVTGFLALDNTNKLIVLSFRGSRSIENWIGNLNFDLKEINDICSGCRGHDGFTSSWRSVADTLRQKVEDAVREHPDYRVVFTGHSLGGALATVAGADLRGNGYDIDVFSYGAPRVGNRAFAEFLTVQTGGTLYRITHTNDIVPRLPPREFGYSHSSPEYWIKSGTLVPVTRNDIVKIEGIDATGGNNQPNIPDIPAHLWYFDINEGSCL

SEQ ID NO: 5516 - protein, 270 aa, Thermomyces lanuginosus
EVSQDLFNQFNLFAQYSAAAYCGKNNDAPAGTNITCTGNACPEVEKADATFLYSFEDSGVGDVTGFLALDNTNKLIVLSFRGSRSIENWIGNLNFDLKEINDICSGCRGHDGFTSSWRSVADTLRQKVEDAVREHPDYRVVFTGHSLGGALATVAGADLRGNGYDIDVFSYGAPRVGNRAFAEFLTVQTGGTLYRITHTNDIVPRLPPREFGYSHSSPEYWIKSGTLVPVTRNDIVKIEGIDATGGNNQPNIPIIPAHLWYFDLNEGSCL

SEQ ID NO: 5517 - protein, 270 aa, Thermomyces lanuginosus
EVSQDLFNQFNLFAQYSAAAYCGKNNDAPAGTNITCTGNACPEVEKADATFLYSFEDSGVGDVTGFLALDNTNKLIVLSFRGSRSIENWIGNLNFDLKEINDICSGCRGHDGFTSSWRSVADTLRQKVEDAVREHPDYRVVFTGHSLGGALATVAGADLRGNGYDIDVFSYGAPRVGNRAFAEFLTVQTGGTLYRITHTNDIVPRLPPREFGYSHSSPEYWIKSGTLVPVTRNDIVKIEGIDATGGNNQPNIPIIPAHLWYFDLNTGLCL

SEQ ID NO: 5518 - protein, 270 aa, Thermomyces lanuginosus
EVSQDLFNQFNLFAQYSAAAYCGKNNDAPAGTNITCTGNACPEVEKADATFLYSFEDSGVGDVTGFLALDNTNKLIVLSFRGSRSIENWIGNLNFDLKEINDICSGCRGHDGFTSSWRSVADTLRQKVEDAVREHPDYRVVFTGHSLGGALATVAGADLRGNGYDIDVFSYGAPRVGNRAFAEFLTVQTGGTLYRITHTNDIVPRLPPREFGYSHSSPGYWIKSGTLVPVTRNDIVKIEGIDATGGNNQPNIPDIPAHLWYFGINTGLCL

SEQ ID NO: 5519 - protein, 269 aa, Thermomyces lanuginosus
EVSQDLFNQFNLFAQYSAAAYCGKNNDAPAGTNITCTGNACPEVEKADATFLYSFEDSGVGDVTGFLALDNTNKLIVLSFRGSRSIENWIGNLNFLLKEINDICSGCRGHDGFTSSWRSVADTLRQKVEDAVREHPDYRVVFTGHSLGGALATVAGADLRGNGYDIDVFSYGAPRVGNRAFAEFLTVQTGGTLYRITHTNDIVPRLPPREFGYSHSSPEYWIKSGTLVPVRRRDIVKIEGIDATGGNNRPNIPDIPAHLWYFGLIGTCL

SEQ ID NO: 5520 - protein, 268 aa, Thermomyces lanuginosus
VSQDLFNQFNLFAQYSAAAYCGKNNDAPAGTNITCTGNACPEVEKADATFLYSFEDSGVGDVTGFLALDNTNKLIVLSFRGSRSIENWIGNLNFQLKEINDICSSCRGHDGFTSSWRSVADTLRQKVEDAVREHPDYRVVFTGHSLGGALATVAGADLRGNGYDIDVFSYGAPRVGNRAFAEFLTVQTGGTLYRITHTNDIVPRLPPREFGYSHSSPEYWIKSRTLVPVTRNDIVKIEGIDATGGNNQPNIPDIPAHLWYFGLISTCL

SEQ ID NO: 5521 - protein, 268 aa, Thermomyces lanuginosus
VSQDLFNQFNLFAQYSAAAYCGKNNDAPAGTNITCTGNACPEVEKADATFLYSFEDSGVGDVTGFLALDNTNKLIVLSFRGSRSIENWIGNLNFDLKEINDICSGCRGHDGFTSSWRSVADTLRQKVEDAVREHPDYRVVFTGHSLGGALATVAGADLRGNGYDIDVFSYGAPRVGNRAFAEFLTVQTGGTLYRITNTNDIVPRLPPREFGYSHSSPEYWIKSGTLPPVRRCDIVKIEGIDATGGNNQPNIPDIPAHLWYFGLIGTCL

SEQ ID NO: 5522 - protein, 268 aa, Thermomyces lanuginosus
VSQDLFNQFNLFAQYSAAAYCGKNNDAPAGTNITCTGNACPEVEKADATFLYSFEDSGVGDVTGFLALDNTNKLIVLSFRGSRSIENWIGNLNFDLKEINDICSGCRGHDGFTSSWRSVADTLRQKVEDAVREHPDYRVVFTGHSLGGALATVAGADLRGNGYDIDVFSYGAPRVGNRAFAEFLTVQTGGTLYRITHTNDIVPRLPPREFGYSHSSPEYWIKSRTLVPVTRNDIVKIEGIDATGGNNQPNIPDIPAHLWYFALVSTCL

SEQ ID NO: 5523 - protein, 268 aa, Thermomyces lanuginosus
VSQDLFNQFNLFAQYSAAAYCGKNNDAPAGTNITCTGNACPEVEKADATFLYSFEDSGVGDVTGFLALDNTNKLIVLSFRGSRSIENWIGNLNFHLKEINDICSSCRGHDGFTSSWRSVADTLRQKVEDAVREHPDYRVVFTGHSLGGALATVAGADLRGNGYDIDVFSYGAPRVGNRAFAEFLTVQTGGTLYRITHTNDIVPRLPPREFGYSHSSPEYWIKSRTLVPVTRNDIVKIEGIDATGGNNQPNIPDIPAHLWYFGLISTCL

SEQ ID NO: 5524 - protein, 268 aa, Thermomyces lanuginosus
VSQDLFNQFNLFAQYSAAAYCGKNNDAPAGTNITCTGNACPEVEKADATILYSFEDSGVGDVTGFLALDNTNKLIVLSFRGSRSIENWIGNLNFDLKEINDICSGCRGHDGFTSSWRSVADTLRQKVEDAVREHPDYRVVFTGHSLGGALATVAGADLRGNGYDIDVFSYGAPRVGNRAFAEFLTVQTGGTLYRITSTNDIVPRLPPREFGYSHSSPEYWIKSGTLVPVRRCDIVKIEGIDATGGNNQPNIPDIPAHLWYFGLIGTCL

SEQ ID NO: 5525 - protein, 268 aa, Thermomyces lanuginosus
VSQDLFNQFNLFAQYSAAAYCGKNNDAPAGTNITCTGNACPEVEKADATFLYSFEDSGVGDVTGFLALDNTNKLIVLSFRGSRSIENWIGNLNFDLKEINDICSGCRGHDGFTSSWRSVADTLRQKVEDAVREHPDYRVVFTGHSLGGALATVAGADLRGNGYDIDVFSYGAPRVGNRAFAEFLTVQTGGTLYRITSTNDIVPRLPPREFGYSHSSPEYWIKSGTLPPVRRCDIVKIEGIDATGGNNQPNIPDIPAHLWYFGLIGTCL

SEQ ID NO: 5526 - protein, 268 aa, Thermomyces lanuginosus
VSQDLFNQFNLFAQYSAAAYCGKNNDAPAGTNITCTGNACPEVEKADATFLYSFEDSGVGDVTGFLALDNTNKLIVLSFRGSRSIENWIGNLNFMLKEINDICSSCRGHDGFTSSWRSVADTLRQKVEDAVREHPDYRVVFTGHSLGGALATVAGADLRGNGYDIDVFSYGAPRVGNRAFAEFLTVQTGGTLYRITHTNDIVPRLPPREFGYSHSSPEYWIKSRTLVPVTRNDIVKIEGIDATGGNNQPNIPDIPAHLWYFGLIDTCL

SEQ ID NO: 5527 - protein, 194 aa, Humicola insolens
QLGAIQNGLESGSPNACPDAILIFARGSTEPGNMGITVGPALANGLKEHIPNIWIQGVGGPYDAALATNFLPRGTSQANIDEGKRLFHLAHQKCPNTPVVAGGYSQGAALIAAAVSELSGAVKEQVKGVALFGYTQNLQNRGGIPNYPRERTKVFCNVGDAVCTGTLIITPAHLSYTIQARGEAARFLVDRIRA

SEQ ID NO: 5528 - protein, 194 aa, Humicola insolens
QLGAIQNDLESGSPDACPDAILIFARGSMEPGNMGITVGPALANGLKEHIPNIWIQGVGGPYDAALATNFLPRGTSQANIDEGKRLFHLAHQKCPNTPVVAGGYSQGAALIAAAVSELSGAVKEQVKGVVLFGYTQNLQNRGGIPNYPRERTKVFCNVGDAVCTGIPIITPAHLSYTIQARGEAARFLVDRIRA

SEQ ID NO: 5529 - protein, 291 aa, Thermomyces lanuginosus
MRSSLVLFFVSAWTALASPIRREVSQDLFNQFNLFAQYSAAAYCGKNNDAPAGTNITCTGNACPEVEKADATFLYSFEDAGAGDVTGFLALDNTNKLIVLSFRGSRSVENWIGNLNFDLKEINDICSGCRGHDGFTSSWRSVADTLRQKVEDAVREHPDYRVVFTGHSLGGALATVAGADLRGNGYDIDVFSYGAPRVGNRAFAEFLTVQTGGTLYRITHTNDIVPRLPPREFGYSHSSPEYWIKSGTLVPVRRRDIVKIEGIDATGGNNQPNIPDIPAHLWYFGLIGTCL

SEQ ID NO: 5530 - protein, 291 aa, Thermomyces lanuginosus
MRSSLVLFFVSAWTALASPIRREVSQDLFNQFNLFAQYSAAAYCGKNNDAPAGTNITCTGNACPEVEKADATFLYSFGDSGVGDVTGFLALDNTNKLIVLSFRGSRSIDNWIGNLNFDLKEINDICSGCRGHDGFTSSWRSVADTLRQKVEDAVREHPDYRVVFTGHSLGGALATVAGADLRGNGYDIDVFSYGAPRVGNRAFAEFLTVQTGGTLYRITHTNDIVPRLPPREFGYSHSSPEYWIKSGTLVPVRRRDIVKIEGIDATGGNNQPNIPAIPAHLWYFGLIGTCL

SEQ ID NO: 5531 - protein, 291 aa, Thermomyces lanuginosus
MRSSLVLFFVSAWTALASPIRREVSQDLFNQFNLFAQYSAAAYCGKNNDAPAGTNITCTGNACPEVEKADATFLYSFEDSGVGDVTGFLALDNTNKLIVLSFRGSRSIENWGGNLNFDLKEINDICSGCRGHDGFTSSWRSVADTLRQKVEDAVREHPDYRVVFTGHSLGGALATVAGADLRGNGYDIDVFSYGAPRVGNRAFAEFLTVQTGGTLYRITHTNDLVPRLPPREFGYSHSSPEYWIKSGTLVPVRRRDIVKIEGIDATGGNNQPNIPDSPAHLWYFGLIGTCL

SEQ ID NO: 5532 - protein, 291 aa, Thermomyces lanuginosus
MRSSLVLFFVSAWTALASPIRREVSQDLFNQFNLFAQYSAAAYCGKNNDAPAGTNITCTGNACPEVEKADATFLYSFEDNGSGDVTGFLALDNTNKLIVLSFRGSRSIENWIGNLNFDLKEINDICSGCRGHDGFTSSWRSVADTLRQKVEDAVREHPDYRVVFTGHSLGGALATVAGADLRGNGYDIDVFSYGAPRVGNRAFAEFLTVQTGGTLYRITHTNDIVPRLPPREFGYSHSSPEYWIKSGTLVPVRRRDIVKIEGIDATGGNNLPNIPDIPAHLWYFGLIGTCL

SEQ ID NO: 5533 - protein, 291 aa, Thermomyces lanuginosus
MRSSLVLFFVSAWTALASPIRREVSQDLFNQFNLFAQYSAAAYCGKNNDAPAGTNITCTGNACPEVEKADATFLYSFEDSGVGDVTGFLALDNTNKLIVLSFRGSRSIENWIANLNFGLKEINDICSGCRGHDGFTSSWRSVADTLRQKVEDAVREHPDYRVVFTGHSLGGALATVAGADLRGNGYDIDVFSYGAPRVGNRAFAEFLTVQTGGTLYRITHTNDIVPRLPPREFGYSHSSPEYWIKSRTLVPVRRRDIVKIEGIDATGGNNQPNIPDIPAHLWYFGLIGTCL

SEQ ID NO: 5534 - protein, 291 aa, Thermomyces lanuginosus
MRSSLVLFFVSAWTALASPIRREVSQDLFNQFNLFAQYSAAAYCGKNNDAPAGTNITCTGNACPEVEKADATFLYSFEDSGVGDVTGFLALDNTNKLIVLSFRGSRSIENWVGNLNFDLKEINDICSGCRGHDGFTSSWRSVADTLRQKVEDAVREHPDYRVVFTGHSLGGALATVAGADLRGNGYDIDVFSYGAPRVGNRAFAEFLTVQTGGTLYRITHTNDIVPRLPPREFGYSHSSPEYWIKSGTGVPVRRRDIVKIEGIDATGGNNQPNIPDIKAHLWYFGLIGTCL

SEQ ID NO: 5535 - protein, 291 aa, Thermomyces lanuginosus
MRSSLVLFFVSAWTALASPIRREVSQDLFNQFNLFAQYSAAAYCGKNNDAPAGTNITCTGNACPEVEKADATFLYSFEDSGVGDVTGFLALDNTNKLIVLSFRGSRSIENWIANLNFGLKEINDICSGCRGHDGFTSSWRSVADTLRQKVEDAVREHPDYRVVFTGHSLGGGLATVAGADLRGNGYDIDVFSYGAPRVGNRAFAEFLTVQTGGTLYRITHTNDIVPRLPPREFGYSHSSPEYWIKSGTLVPVRRRDIVKIEGIDATGGNNQPNIPDIPAHLWYFGLIGTCL

SEQ ID NO: 5536 - protein, 291 aa, Thermomyces lanuginosus
MRSSLVLFFVSAWTALASPIRREVSVDLFNQFNLFAQYSAAAYCGKNNNAPAGTNITCTGNACPEVEKADATFLYSFEDSGKGDVTGFLALDNTNKLIVLSFRGSRSIENWIGNLNFDLKEINDICSGCRGHDGFTSSWRSVADTLRQKVEDAVREHPDYRVVFTGHSLGGALATVAGADLRGNGYDIDVFSYGAPRVGNRAFAEFLTVQTGGTLYRITHTNDIVPRLPPREFGYSHSSPEYWIKSGTLVPVRRRDIVKIEGIDATGGNNQPNIPDIPAHLWYFGLIGTCL

SEQ ID NO: 5537 - protein, 291 aa, Thermomyces lanuginosus
MRSSLVLFFVSAWTALASPIRREVSQDLFNQFNLFAQYSAAAYCGKNNDAPAGTNITCTGNACPEVEKADATFLYSFEDSGVGDVTGFLALDNTNKLIVLSFRGSRSIENWFGNLNFDLKEINDICSGCRGHDGFTSSWRSVADTLRQKVEDAVREHPDYRVVFTGHSLGGALATVAGADLRGNGYDIDVFSYGAPRVGNRAFAEFLTVQTGGTLYRITHTNDPVPRLPPREFGYSHSSPEYWIKSGTLVPVRRRDIVKIEGIDATGGNNQPNIPDLPAHLWYFGLIGTCL

SEQ ID NO: 5538 - protein, 291 aa, Thermomyces lanuginosus
MRSSLVLFFVSAWTALASPIRREVSQDLFNQFNLFAQYSAAAYCGKNNDAPAGTNITCTGNACPEVEKADATFLYSFEDSGKGDVTGFLALDNTNKLIVLSFRGSRSIENWIGNLNFDLKEINDICSGCRGHDGFTSSWRSVADTLRQKVEDAVREHPDYRVVFTGHSLGGGLATVAGADLRGNGYDIDVFSYGAPRVGNRAFAEFLTVQTGGTLYRITHTNDIVPRLPPREFGYSHSSPEYWIKSGTLVPVRRRDIVKIEGIDATGGNNQPNIPDVPAHLWYFGLIGTCL

SEQ ID NO: 5539 - protein, 291 aa, Thermomyces lanuginosus
MRSSLVLFFVSAWTALASPIRREVSQDLFNQFNLFAQYSAAAYCGKNNDAPAGTNITCTGNACPEVEKADATFLYSFEDNGSGDVTGFLALDNTNKLIVLSFRGSRSIENWIGNLNFDLKEINDICSGCRGHDGFTSSWRSVADTLRQKVEDAVREHPDYRVVFTGHSLGGALATVAGADLRGNGYDIDVFSYGAPRVGNRAFAEFLTVQTGGTLYRITHTNDIVPRLPPREFGYSHSSPEYWIKSGTLVPVRRRDIVKIEGIDATGGNNIPNIPDIPAHLWYFGLIGTCL

SEQ ID NO: 5540 - protein, 291 aa, Thermomyces lanuginosus
MRSSLVLFFVSAWTALASPIRREVSQDLFNQFNLFAQYSAAAYCGKNNDAPAGTNITCTGNACPEVEKADATFLYSFEDSGVGDVTGFLALDNTNKLIVLSFRGSRSIENWIANLNFDLKKINDICSGCRGHDGFTSSWRSVADTLRQKVEDAVREHPDYRVVFTGHSLGGALATVAGADLRGNGYDIDVFSYGAPRVGNRAFAEFLTVQTGGTLYRITHTNDIVPRLPPREFGYSHSSPEYWIKSGTLVPVRRRDIVKIEGIDATGGNNRPNIPDIPAHLWYFGLIGTCL

SEQ ID NO: 5541 - protein, 291 aa, Thermomyces lanuginosus
MRSSLVLFFVSAWTALASPIRREVSQDLFNQFNLFAQYSAAAYCGKNNDAPAGTNITCAGNACPEVEKADATFLYSFEDSGVGDVTGFLALDNTNKLIVLSFRGSRSIENWIGNLNFALKEINDICSGCRGHDGFTSSWRSVADTLRQKVEDAVREHPDYRVVFTGHSLGGALATVAGADLRGNGYDIDVFSYGAPRVGNRAFAEFLTVQTGGTLYRITHTNDIVPRLPPREFGYSHSSPEYWIKSGTLVPVRRRDIVKIEGIDATGGNNGPNIPDIPAHLWYFGLIGTCL

SEQ ID NO: 5542 - protein, 291 aa, Thermomyces lanuginosus
MRSSLVLFFVSAWTALASPIRREVSQDLFNQFNLFAQYSAAAYCGKNNDAPAGTNITCTGNACPEVEKADATFLYSFEDSGVGDVTGFLALDNTNKLIVLSFRGSRSIENWIGNLNFDLKEINDICSGCRGHDGFTSSWRSVADTLRQKVEDAVREHPDYRVVFTGHSLGGGLATVAGADLRGNGYDIDVFSYGAPRVGNRAFAEFLTVQTGGTLYRITHTNDIVPRLPPREFGYSHSSPEYWIKSGTGVPVRRRDIVKIEGIDATGGNNQPNIPDIKAHLWYFGLIGTCL

SEQ ID NO: 5543 - protein, 291 aa, Thermomyces lanuginosus
MRSSLVLFFVSAWTALASPIRREVSQDLFNQFNLFAQYSAAAYCGKNNDAPAGTNITCTGNACPEVEKADATFLYSFEDSGVGDVTGFLALDNTNKLIVLSFRGSRSIENWIINLNFDLKEINDICSGCRGHDGFTSSWRSVADTLRQKVEDAVREHPDYRVVFTGHSLGGALATVAGADLRGNGYDIDVFSYGAPRVGNRAFAEFLTVQTGGTLYRITHTNDIVPRLPPRQFGYSHSSPEYWIKSGTLVPVRRRDIVKIEGIDATGGNNQRNIPDIPAHLWYFGLIGTCL

SEQ ID NO: 5544 - protein, 291 aa, Thermomyces lanuginosus
MRSSLVLFFVSAWTALASPIRREVSQDLFNQFNLFAQYSAAAYCGKNNDAPAGTNITCTGNACPEVEKADATFLYSFEGSGVGDVTGFLALDNTNKLIVLSFRGSRSIENWIGNLKFLMKEINDICSGCRGHDGFTSSWRSVADTLRQKVEDAVREHPDYRVVFTGHSLGGALATVAGADLRGNGYDIDVFSYGAPRVGNRAFAEFLTVQTGGTLYRITHTNDIVPRLPPREFGYSHSSPEYWIKSGTLVPVTRNDIVKIEGIDATGGNNRPNIPDIPAHLWYFGLIGTCL

SEQ ID NO: 5545 - protein, 291 aa, Thermomyces lanuginosus
MRSSLVLFFVSAWTALASPIRREVSQDLFNQFNLFAQYSAAAYCGKNNDAPAGTNITCTGNACPEVEKADATFLYSFEDSGVGDVTGFLALDNTNKLIVLSFRGSRSIENWIQNLNFDLKEINDICSGCRGHDGFTSSWRSVADTLRQKVEDAVREHPDYRVVFTGHSLGGALATVAGADLRGNGYDIDVFSYGAPRVGNRAFAEFLTVQTGGTLYRITHTNDIVPRLPPRQFGYSHSSPEYWIKSGTLVPVRRRDIVKIEGIDATGGNNQRNIPDIPAHLWYFGLIGTCL

SEQ ID NO: 5546 - protein, 291 aa, Thermomyces lanuginosus
MRSSLVLFFVSAWTALASPIRREVSQDLFNQFNLFAQYSAAAYCGKNNDAPAGTNITCTGNACPEVEKADATFLYSFEDSGVGDVTGFLALDNTNKLIVLSFRGSRSIENWINNLNFDLKEINDICSGCRGHDGFTSSWRSVADTLRQKVEDAVREHPDYRVVFTGHSLGGALATVAGADLRGNGYDIDVFSYGAPRVGNRAFAEFLTVQTGGTLYRITHTNDIVPRLPPRQFGYSHSSPEYWIKSGTLVPVRRRDIVKIEGIDATGGNNQRNIPDIPAHLWYFGLIGTCL

SEQ ID NO: 5547 - protein, 291 aa, Thermomyces lanuginosus
MRSSLVLFFVSAWTALASPIRREVSQDLFNQFNLFAQYSAAAYCGKNNDAPAGTNITCTGNACPEVEKADATFLYSFEDNGSGDVTGFLALDNTNKLIVLSFRGSRSIENWIGNLNFDLKEINDICSGCRGHDGFTKSWRSVADTLRQKVEDAVREHPDYRVVFTGHSLGGALATVAGADLRGNGYDIDVFSYGAPRVGNRAFAEFLTVQTGGTLYRITHTNDIVPRLPPREFGYSHSSPEYWIKSGTLVPVRRRDIVKIEGIDATGGNNQPNIPDIPAHLWYFGLIGTCL

SEQ ID NO: 5548 - protein, 291 aa, Thermomyces lanuginosus
MRSSLVLFFVSAWTALASPIRREVSQDLFNQFNLFAQYSAAAYCGKNNDAPAGTNITCTGNACPEVEKADATFLYSFEDNGSGDVTGFLALDNTNKLIVLSFRGSRSIENWIGNLNFDLKEINDICSGCRGHDGFTSSWRSVADTLRQKVEDAVREHPDYRVVFTGHSLGGALATVAGANLRGNGYDIDVFSYGAPRVGNRAFAEFLTVQTGGTLYRITHTNDIVPRLPPREFGYSHSSPEYWIKSGTLVPVRRRDIVKIEGIDATGGNNQPNIPDIPAHLWYFGLIGTCL

SEQ ID NO: 5549 - protein, 291 aa, Thermomyces lanuginosus
MRSSLVLFFVSAWTALASPIRREVSVDLFNQFNLFAQYSAAAYCGKNNDAPAGTNITCTGNACPEVEKADATFLYSFEDSGKGDVTGFLALDNTNKLIVLSFRGSRSIENWIGNLNFDLKEINDICSGCRGHDGFTSSWRSVADTLRQKVEDAVREHPDYRVVFTGHSLGGGLATVAGADLRGNGYDIDVFSYGAPRVGNRAFAEFLTVQTGGTLYRITHTNDIVPRLPPREFGYSHSSPEYWIKSGTLVPVRRRDIVKIEGIDATGGNNQPNIPDIPAHLWYFGLIGTCL

SEQ ID NO: 5550 - protein, 290 aa, Thermomyces lanuginosus
MRSSLVLFFVSAWTALASPIRREVSQDLFNQFNLFAQYSAAAYCGKNNDAPAGTNITCTGNACPEVEKADATFLYSFEDSGVGDVTGFLALDNTNKLIVLSFRGSRSIENWIGNLNFDLKEINDICSGCRGHDGFTSSWRSVADTLRQKVEDAVREHPDYRVVFTGHSLGGALATVAGADLRGNGYDIDVFSYGAPRVGNRAFAEFLTVQTGGTLYRITHTNDIVPRLPPREFGYSHSSPEYWIKSGTLVPVTRNDIVKIEGIDATGGNNQPNIPDIPAHLWYFQATDAC

SEQ ID NO: 5551 - protein, 274 aa, Synthetic construct
SCIRREVSQDLFNQFNLFAQYSAAAYCGKNNDAPAGTNITCTGNACPEVEKADATFLYSFEDSGVGDVTGFLALDNTNKLIVLSFRGSRSIENWIGNLKFLLKEINDICSGCRGHDGFTSSWRSVADTLRQKVEDAVREHPDYRVVFTGHSLGGALATVAGADLRGNGYDIDVFSYGAPRVGNRAFAEFLTVQTGGTLYRITHTNDIVPRLPPREFGYSHSSPEYWIKSGTLVPVTRNDIVKICGIDATGGNNRPNIPDIPAHLWYFGLIGTCL

SEQ ID NO: 5552 - protein, 274 aa, Thermus thermophilus
TPIAVEVSQDLFNQFNLFAQYSAAAYCGKNNDAPAGTNITCTGNACPEVEKADATFLYSFEDSGVGDVTGFLALDNTNKLIVLSFRGSRSIENWIGNLNFDLKEINDICSGCRGHDGFTSSWRSVADTLRQKVEDAVREHPDYRVVFTGHSLGGALATVAGADLRGNGYDIDVFSYGAPRVGNRAFAEFLTVQTGGTLYRITHTNDIVPRLPPREFGYSHSSPEYWIKSGTLVPVTRNDIVKIEGIDATGGNNQPNIPDIPAHLWYFGLIGTCL

SEQ ID NO: 5553 - protein, 274 aa, Thermomyces lanuginosus
SPIRREVSQDLFNQFNLFAQYSAAAYCGKNNDAPAGTNITCTGNACPEVEKADATFLYSFEDSGVGDVTGFLALDNTNKLIVLSFRGSRSIQNWIGNLNFDLKEINDICSGCRGHDGFTSSWRSVADTLRQKVEDAVREHPDYRVVFTGHSLGGALATVAGADLRGNGYDIDVFSYGAPRVGNRAFAEFLTVQTGGTLYRITHTNDIVPRLPPRQFGYSHSSPEYWIKSGTLVPVTRNDIVKIEGIDATGGNNQPNIPNIPAHLWYFGLIGTCL

SEQ ID NO: 5554 - protein, 274 aa, Thermomyces lanuginosus
SPIRREVSQDLFNQFNLFAQYSAAAYCGKNNDAPAGTNITCTGNACPEVELADATFLYSFEDNGSGDVTGFLALDNTNKLIVLSFRGSRSIENWIGNLNFDLKEINDICSGCRGHDGFTSSWRSVADTLRQKVEDAVREHPDYRVVFTGHSLGGALATVAGADLRGNGYDIDVFSYGAPRVGNRAFAEFLTVQTGGTLYRITHTNDIVPRLPPREFGYSHSSPEYWIKSGTLVPVRRRDIVKIEGIDATGGNNLPNIPIIPAHLWYFGLIGTCL

SEQ ID NO: 5555 - protein, 274 aa, Thermomyces lanuginosus
SPIRREVSQDLFNQFNLFAQYSAAAYCGKNNDAPAGTNITCTGNACPEVEKADATFLYSFEDSGLGDVTGFLALDNTNKLIVLSFRGSRSIENWIMNLNFDLKEINDICSGCRGHDGFTSSWRSVADTLRQKVEDAVREHPDYRVVFTGHSLGGALATVAGADLRGNGYDIDVFSYGAPRVGNRAFAEFLTVQTGGTLYRITHTNDIVPRLPPREFGYSHSSPEYWIKSGTLVPVWRNDIVKIEGIDATGGNNLPNIPDIPAHLWYFGLIGTCL

SEQ ID NO: 5556 - protein, 274 aa, Thermomyces lanuginosus
SPIRREVSQDLFNQFNLFAQYSAAAYCGKNNDAPAGTNITCTGNACPEVELADATFLYSFEDNGSGDVTGFLALDNTNKLIVLSFRGSRSIENWIGNLNFDLKEINDICSGCRGHDGFTSSWRSVADTLRQKVEDAVREHPDYRVVFTGHSLGGALATVAGADLRGNGYDIDVFSYGAPRVGNRAFAEFLTVQTGGTLYRITHTNDIVPRLPPREFGYSHSSPEYWIISGTLVPVRRRDIVKIEGIDATGGNNQPNIPIIPAHLWYFGLIGTCL

SEQ ID NO: 5557 - protein, 274 aa, Synthetic construct
SPIRREVSQDLFNQFNLFAQYSAAAYCGKNNDAPAGTNITCTGNACPEVEKADATFLYSFQDSGVGDVTGFLALDNTNKLIVLSFRGSRSIENWIGNLNFDLKEINDICSGCRGHDGFTSSWRSVADTLRQKVEDAVREHPDYRVVFTGHSLGGALATVAGADLRGNGYDIDVFSYGAPRVGNRAFAEFLTVQTGGTLYRITHTNDIVPRVPPREFGYSHSSPEYWIKSGTLVPVTRNDIVKIEGIDATGGNNQPNIPDIPAHIWYFGLIGTCL

SEQ ID NO: 5558 - protein, 274 aa, Thermomyces lanuginosus
SPIRREVSQDLFNQFNLFAQYSAAAYCGKNNDAPAGTNITCTGNACPEVEKADATFLYSFEDSGKGDVTGFLALDNTNKLIVLSFRGSRSIENWIGNLNFDLKEINDICSGCRGHDGFTSSWRSVADTLRQKVEDAVREHPDYRVVFTGHSLGGALATVAGADLRGNGYDIDVFSYGAPRVGNRAFAEFLTVQTGGTLYRITHTNDVVPRLPPRKFGYSHSSPEYWIKSGTLVPVRRRDIVKIEGIDATGGNNQPNIPDAKAHLWYFGLIGTCL

SEQ ID NO: 5559 - protein, 274 aa, Thermomyces lanuginosus
SPIRREVSQDLFNQFNLFAQYSAAAYCGKNNDAPAGTNITCTGNACPEVEKADATFLYSFEDSGVGDVTGFLALDNTNKLIVLSFRGSRSIENWIGNLNFDLKEINDICSGCRGHDGFTSSWRSVADTLRQKVEDAVREHPDYRVVFTGHSLGGALATVAGADLRGNGYDIDVFSYGAPRVGNRAFAEFLTVQTGGTLYRITHTNDIVPRTPPREFGYSHSSPEYWIKSGTLVPVTRNDIVKIEGIDATGGNNQPNIPDTPAHTWYFGLIGTCL

SEQ ID NO: 5560 - protein, 274 aa, Thermomyces lanuginosus
SPIRREVSQDLFNQFNLFAQYSAAAYCGKNNDAPAGTNITCTGNACPEVEKADATFLYSFEDAGVGDVTGFLALDNTNKLIVLSFRGDRSIENWIGNLNFDLKEINDICSGCRGRDGFTSSWRSVADTLRQKVEDAVREHPDYRVVFTGHSLGGALATVAGADLRGNGYDIDVFSYGAPRVGNRAFAEFLTVQTGGTLYRITHTNDIVPRLPPREFGYSHSSPEYWIKSGTLVPVTRNDIVKIEGIDATGGNNQPNIPDIPAHLWYFGLIGTCL

SEQ ID NO: 5561 - protein, 274 aa, Synthetic construct
SPIRREVSQDLFNQFNLFAQYSAAAYCGKNNDAPAGTNITCTGNACPEVEKADATFLYSFEDSGVGDVTGFLALDNTNKLIVLSFRGSRSIENWIGNLNFLLKEINDICSGCRGHDGFTSSWRSVADTLRQKVEDAVREHPDYRVVFTGHSLGGALATVAGADLRGNGYDIDVFSYGAPRVGNRAFAEFLTVQTGGTLYRITHTNDIVPRVPPREFGYSHSSPEYWIKSGTLVPVTRNDIVKIEGIDATGGNNQPNIPDIPAHIWYFGLIGTCL

SEQ ID NO: 5562 - protein, 274 aa, Thermomyces lanuginosus
SPIRREVSQDLFNQFNLFAQYSAAAYCGKNNDAPAGTNITCTGNACPEVEIADATFLYSFEDNGSGDVTGFLALDNTNKLIVLSFRGSRSIENWIGNLNFDLKEINDICSGCRGHDGFTSSWRSVADTLRQKVEDAVREHPDYRVVFTGHSLGGALATVAGADLRGNGYDIDVFSYGAPRVGNRAFAEFLTVQTGGTLYRITHTNDIVPRLPPREFGYSHSSPEYWIKSGTLVPVRRRDIVKIEGIDATGGNNLPNIPLIPAHLWYFGLIGTCL

SEQ ID NO: 5563 - protein, 274 aa, Thermomyces lanuginosus
SPIRREVSQDLFNQFNLFAQYSAAAYCGKNNDAPAGTNITCTGNACPEVEKADATFLYSFEDSGVGDVTGFLALDNTNKLIVLSFRGSRSIENWISNLNFVLKEINDICSGCRGHDGFTSSWRSVADTLRQKVEDAVREHPDYRVVFTGHSLGGALATVAGADLRGNGYDIDVFSYGAPRVGNRAFAEFLTVQTGGTLYRITHTNDIVPRLPPREFGYSHSSPEYWIKSGTLVPVTRNDIVKIEGIDATGGNNQPNIPRIPAHLWYFGLIGTCL

SEQ ID NO: 5564 - protein, 274 aa, Thermomyces lanuginosus
SPIRREVSQDLFNQFNLFAQYSAAAYCGKNNDAPAGTNITCTGNACPEVEKADATFLYSFEDTGKGDVTGFLALDNTNKLIVLSFRGSRSIENWIGNLNFDLKEINDICSGCRGHDGFTSSWRSVADTLRQKVEDAVREHPDYRVVFTGHSLGGGLATVAGADLRGNGYDIDVFSYGAPRVGNRAFAEFLTVQTGGTLYRITHTNDIVPRLPPREFGYSHSSPEYWIKSGTLVPVRRIGIVKIEGIDATGGNNQPNIPDIPAHLWYFGLIGTCL

SEQ ID NO: 5565 - protein, 274 aa, Thermomyces lanuginosus
SPIRREVSVDLFNQFNLFAQYSAAAYCGKNNDAPAGTNITCTGNACPEVEKADATFLYSFEDNGSGDVTGFLALDNTNKLIVLSFRGSRSVENWIGNLNFDLKEINDICSGCRGHDGFTSSWRSVADTLRQKVEDAVREHPDYRVVFTGHSLGGALATVAGADLRGNGYDIDVFSYGAPRVGNRAFAEFLTVQTGGTLYRITHTNDIVPRLPPREFGYSHSSPEYWIKSGTLVPVRRRDIVKIEGIDATGGNNLPNIPDIPAHLWYFGLIGTCL

SEQ ID NO: 5566 - protein, 274 aa, Thermomyces lanuginosus
SPIRREVSQDLFNQFNLFAQYSAAAYCGKNNDAPAGTNITCTGNACPEVEKADATFLYSFEDSGKGDVTGFLALDNTNKLIVLSFRGSRSVENWIGNLNFDLKEINDICSGCRGHDGFTSSWRSVADTLRQKVEDAVREHPDYRVVFTGHSLGGGLATVAGADLRGNGYDIDVFSYGAPRVGNRAFAEFLTVQTGGTLYRITHTNDIVPRLPPREFGYSHSSPEYWIKSGTGVPVRRRDIVKIEGIDATGGNNQPNIPDIKAHLWYFGLIGTCL

SEQ ID NO: 5567 - protein, 274 aa, Thermomyces lanuginosus
SPIRREVSLDLFNQFNLFAQYSAAAYCGKNNDAPAGTNITCTGNACPEVEKADATFLYSFEDNGSGDVTGFLALDNTNKLIVLSFRGSRSIENWIGNLNFDLKEINDICSGCRGHDGFTSSWRSVADTLRQKVEDAVREHPDYRVVFTGHSLGGALATVAGADLRGNGYDIDVFSYGAPRVGNRAFAEFLTVQTGGTLYRITHTNDIVPRLPPREFGYSHSSPEYWIKSGTLVPVRRRDIVKIEGIDATGGNNLPNIPIIPAHLWYFGLIGTCL

SEQ ID NO: 5568 - protein, 274 aa, Synthetic construct
SPIRREVSQDLFNQFNLFAQYSAAAYCGKNNDAPAGTNITCTGNACPEVEKADATFLYSFEDSGVGDVTGFLALDNTNKLIVLSFRGSRSIENWIVNLNFDLKEINDICSGCRGHDGFWSSWRSVADTLRQKVEDAVREHPDYRVVFTGHSLGGALATVAGADLRGNGYDIDVFSYGAPRVGNRAFAEFLTVQTGGTLYRITHTNDIVPRLPPREFGYSHSSPEYWIKSGTLVPVTRNDIVKIEGIDATGGNNQPNIPDPPAHLWYFGLIGTCL

SEQ ID NO: 5569 - protein, 274 aa, Thermomyces lanuginosus
SPIRREVSQDLFNQFNLFAQYSAAAYCGKNNDAPAGTNITCTGNACPEVEKADATFLYSFEDSGVGDVTGFLALDNTNKLIVLSFRGSRSIQNWIGNLNFNLKEINDICSGCRGHDGFTSSWRSVADTLRQKVEDAVREHPDYRVVFTGHSLGGALATVAGADLRGNGYDIDVFSYGAPRVGNRAFAEFLTVQTGGTLYRITHTNDIVPRLPPREFGYSHSSPEYWIKSGTLVPVTRNDIVKIEGIDATGGNNQPNIPNIPAHLWYFGLIGTCL

SEQ ID NO: 5570 - protein, 274 aa, Thermomyces lanuginosus
SPIRREVSQDLFNQFNLFAQYSAAAYCGKNNDAPAGTNITCTGNACPEVEKADATFLYSFEDNGSGDVTGFLALDNTNKLIVLSFRGSRSIENWIGNLNFDLKEINDICSGCRGHDGFTSSWRSVADTLRQKVEDAVREHPDYRVVFTGHSMGGGLATVAGADLRGNGYDIDVFSYGAPRVGNRAFAEFLTVQTGGTLYRITHTNDIVPRLPPRELGYSHSSPEYWIKSGTLVPVRRRDIVKIEGIDATGGNNQPNIPDIPAHLWYFGLIGTCL

SEQ ID NO: 5571 - protein, 275 aa, Thermomyces lanuginosus
SPIRREVSQDLFNQFNLFAQYSAAAYCGKNNDAPAGTNITCTGNACPEVEKADATFLYSFEDSGVGDVTGFLALDNTNKLIVLSFRGSRSIEETGSGNLNFDLKEINDICSGCRGHDGFTSSWRSVADTLRQKVEDAVREHPDYRVVFTGHSLGGALATVAGADLRGNGYDIDVFSYGAPRVGNRAFAEFLTVQTGGTLYRITHTNDIVPRLPPREFGYSHSSPEYWIKSGTLVPVTRNDIVKIEGIDATGGNNQPNIPDIPAHLWYFGLIGTCL

SEQ ID NO: 5572 - protein, 274 aa, Synthetic construct
SPPRRPVSQDLFNQFNLFAQYSAAAYCGKNNDAPAGTNITCTGNACPEVEKADATFLYSFEDSGVGDVTGFLALDNTNKLIVLSFRGSRSIENWIGNLKFLLKKINDICSGCRGHDGFTSSWRSVADTLRQKVEDAVREHPDYRVVFTGHSLGGALATVAGADLRGNGYDIDVFSYGAPRVGNRAFAEFLTVQTGGTLYRITHTNDIVPRLPPREFGYSHSSPEYWIKSGTLVPVTRNDIVKIEGIDATGGNNQPNIPDIPAHLWYFGLIGTCL

SEQ ID NO: 5573 - protein, 275 aa, Thermomyces lanuginosus
SPCRPRPVSQDLFNQFNLFAQYSAAAYCGKNNDAPAGTNITCTGNACPEVEKADATFLYSFEDSGVGDVTGFLALDNTNKLIVLSFRGSRSIENWIGNLNFDLKEINDICSGCRGHDGFTSSWRSVADTLRQKVEDAVREHPDYRVVFTGHSLGGALATVAGADLRGNGYDIDVFSYGAPRVGNRAFAEFLTVQTGGTLYRITHTNDIVPRLPPREFGYSHSSPEYWIKSGTLVPVTRNDIVKICGIDATGGNNRPNIPDIPAHLWYFGLISTCL

SEQ ID NO: 5574 - protein, 275 aa, Thermomyces lanuginosus
SPIRPRPVSQDLFNQFNLFAQYSAAAYCGKNNDAPAGTNITCTGNACPEVEKADATFLYSFEDSGVGDVTGFLALDNTNKLIVLSFRGSRSIENWIANLNFNLKKINDICSGCRGHDGFTSSWRSVADTLRQKVEDAVREHPDYRVVFTGHSLGGALATVAGADLRGNGYDIDVFSYGAPRVGNRAFAEFLTVQTGGTLYRITHTNDIVPRLPPREFGYSHSSPEYWIKSGTLVPVTRNDIVKIEGIDATGGNNRPNIPDIPAHLWYFGLIGTCL

SEQ ID NO: 5575 - protein, 275 aa, Synthetic construct
SPPRRPEVSQDLFNQFNLFAQYSAAAYCGKNNDAPAGTNITCTGNACPEVEKADATFLYSFEDSGVGDVTGFLALDNTNKLIVLSFRGSRSIENWFGNLNFLLKKINDICSGCRGHDGFTSSWRSVADTLRQKVEDAVREHPDYRVVFTGHSLGGALATVAGADLRGNGYDIDVFSYGAPRVGNRAFAEFLTAQTGGTLYRITHTNDIVPRLPPREFGYSHSSPEYWIKSGTLVPVTRNDIVKIEGIDATGGNNQPNIPDIPAHLWYFGLIGTCL

SEQ ID NO: 5576 - protein, 275 aa, Thermomyces lanuginosus
SPCRPRPVSQDLFNQFNLFAQYSAAAYCGKNNDAPAGTNITCTGNACPEVEKADATFLYSFEDSGVGDVTGFLALDNTNKLIVLSFRGSRSIENWIGNLNFDLKEINDICSGCRGHDGFTSSWRSVADTLRQKVEDAVREHPDYRVVFTGHSLGGALATVAGADLRGNGYDIDVFSYGAPRVGNRAFAEFLTVQTGGTLYRITHTNDIVPRLPPREFGYSHSSPEYWIKSGTLVPVTRNDIVKICGIDATGGNNRPNIPDIPAHLWYFGLIATCL

SEQ ID NO: 5577 - protein, 274 aa, Synthetic construct
SPPRRPVSQDLFNQFNLFAQYSAAAYCGKNNDAPAGTNITCTGNACPEVEKADATFLYSFEDSGVGDVTGFLALDNTNKLIVLSFRGSRSIENWIGNLKFLLKEINDICSGCRGHDGFTSSWRSVADTLRQKVEDAVREHPDYRVVFTGHSLGGALATVAGADLRGNGYDIDVFSYGAPRVGNRAFAEFLTVQTGGTLYRITHTNDIVPRLPPREFGYSHSSPEYWIKSGTLVPVTRNDIVKIEGIDATGGNNRPNIPDIPAHLWYFGLIGTCL

SEQ ID NO: 5578 - protein, 275 aa, Synthetic construct
SPIRPRPVSQDLFNQFNLFAQYSAAAYCGKNNDAPAGTNITCTGNACPEVEKADATFLYSFEDSGVGDVTGFLALDNTNKLIVLSFRGSRSIENWFGNLNFLLKKINDICSGCRGHDGFTSSWRSVADTLRQKVEDAVREHPDYRVVFTGHSLGGALATVAGADLRGNGYDIDVFSYGAPRVGNRAFAEFLTAQTGGTLYRITHTNDIVPRLPPREFGYSHSSPEYWIKSGTLVPVTRNDIVKIEGIDATGGNNQPNIPDIPAHLWYFGLIGTCL

SEQ ID NO: 5579 - protein, 276 aa, Synthetic construct
SPIRPRPEVSQDLFNQFNLFAQYSAAAYCGKNNDAPAGTNITCTGNACPEVEKADATFLYSFEDSGVGDVTGFLALDNTNKLIVLSFRGSRSIENWIGNLNFDLKEINDICSGCRGHDGFTSSWRSVADTLRQKVEDAVREHPGYRVVFTGHSLGGALATVAGADLRGNGYDIGVFSYGAPRVGNRAFAEFLTVQTGGTLYRITHTNDIVPRLPPREFGYSHSSPVYLIKSGTLVPVTRNDIVKIEGIDATGGNNQPNIPDIPAHLWYFGLIGTCL

SEQ ID NO: 5580 - protein, 276 aa, Synthetic construct
SPIRPRPEVSQDLFNQFNLFAQYSAAAYCGKNNDAPAGTNITCTGNACPEVEKADATFLYSFEDSGVGDVTGFLALDNTNKLIVLSFRGSRSIENWIGNLKFLMKEINDICSGCRGHDGFTSSWRSVADTLRQKVEDAVREHPDYRVVFTGHSLGGALATVAGADLRGNGYDIDVFSYGAPRVGNRAFAEFLTVQTGGTLYRITHTNDIVPRLPPREFGYSHSSPEYWIKSGTLVPVTRNDIVKIEGIDATGGNNRPNIPDIPAHLWYFGLIGTCL

SEQ ID NO: 5581 - protein, 276 aa, Synthetic construct
SPIRPRPEVSQDLFNQFNLFAQYSAAAYCGKNNDAPAGTNITCTGNACPEVEKADATFLYSFEGSGVGDVTGFLALDNTNKLIVLSFRGSRSIENWIGNLKFLLKEINDICSGCRGHDGFTSSWRSVADTLRQKVEDAVREHPDYRVVFTGHSLGGALATVAGADLRGNGYDIDVFSYGAPRVGNRAFAEFLTVQTGGTLYRITHTNDIVPRLPPREFGYSHSSPEYWIKSGTLVPVTRNDIVKIEGIDATGGNNRPNIPDIPAHLWYFGLIGTCL

SEQ ID NO: 5582 - protein, 273 aa, Synthetic construct
PAMAEVSQDLFNQFNLFAQYSAAAYCGKNNDAPAGTNITCTGNACPEVEKADATFLYSFEDSGVGDVTGFLALDNTNKLIVLSFRGSRSIENWIGNLNFDLKEINDICSGCRGHDGFTSSWRSVADTLRQKVEDAVREHPDYRVVFTGHSLGGALATVAGADLRGNGYDIDVFSYGAPRVGNRAFAEFLTVQTGGTLYRITHTNDIVPRLPPREFGYSHSSPEYWIKSGTLVPVTRNDIVKIEGIDATGGNNQPNIPDIPAHLWYFGLIGTCL

SEQ ID NO: 5583 - protein, 275 aa, Synthetic construct
PCRRRPEVSQDLFNQFNLFAQYSAAAYCGKNNDAPAGTNITCTGNACPEVEKADATFLYSFEDSGVGDVTGFLALDNTNKLIVLSFRGSRSIENWIGNLKFLLKEINDICSGCRGHDGFTSSWRSVADTLRQKVEDAVREHPDYRVVFTGHSLGGALATVAGADLRGNGYDIDVFSYGAPRVGNRAFAEFLTVQTGGTLYRITHTNDIVPRLPPREFGYSHSSPEYWIKSGTLVPVTRNDIVKICGIDATGGNNRPNIPDIPAHLWYFGLIGTCL

SEQ ID NO: 5584 - protein, 271 aa, Thermomyces lanuginosus
RRPVSQDLFNQFNLFAQYSAAAYCGKNNDAPAGTNITCTGNACPEVEKADATFLYSFEDSGVGDVTGFLALDNTNKLIVLSFRGSRSIENWIGNLNFSLKEINDICSGCRGHDGFTSSWRSVADTLRQKVEDAVREHPDYRVVFTGHSLGGALATVAGADLRGNGYDIDVFSYGAPRVGNRAFAEFLTVQTGGTLYRITHTNDIVPRLPPREFGYSHSSPEYWIKSGTLVPVTRNDIVKICGIDATGGNNRPNIPDIPAHLWYFGLICTCL

SEQ ID NO: 5585 - protein, 271 aa, Thermomyces lanuginosus
RRPVSQDLFNQFNLFAQYSAAAYCGKNNDAPAGTNITCTGNACPEVEKADATFLYSFEDSGVGDVTGFLALDNTNKLIVLSFRGSRSIENWIGNLNFSLKEINDICSGCRGHDGFTSSWRSVADTLRQKVEDAVREHPDYRVVFTGHSLGGALATVAGADLRGNGYDIDVFSYGAPRVGNRAFAEFLTVQTGGTLYRITHTNDIVPRLPPREFGYSHSSPEYWIKSGTLVPVTRNDIVKICGIDATGGNNRPNIPDIPAHLWYFGLISTCL

SEQ ID NO: 5586 - protein, 271 aa, Thermomyces lanuginosus
RRPVSQDLFNQFNLFAQYSAAAYCGKNNDAPAGTNITCTGNACPEVEKADATFLYSFEDSGVGDVTGFLALDNTNKLIVLSFRGSRSIENWIGNLNFDLDNINDICSGCRGHDGFTSSWRSVADTLRQKVEDAVREHPDYRVVFTGHSLGGALATVAGADLRGNGYDIDVFSYGAPRVGNRAFAEFLTVQTGGTLYRITHTNDIVPRLPPREFGYSHSSPEYWIKSGTLVPVTRNDIVKICGIDATGGNNRPNIPDIPAHLWYFGLIGTCL

SEQ ID NO: 5587 - protein, 271 aa, Thermomyces lanuginosus
RRPVSQDLFNQFNLFAQYSAAAYCGKNNDAPAGTNITCTGNACPEVEKADATFLYSFEDSGVGDVTGFLALDNTNKLIVLSFRGSRSIENWIGNLNFDLKNINDICSGCRGHDGFTSSWRSVADTLRQKVEDAVREHPDYRVVFTGHSLGGALATVAGADLRGNGYDIDVFSYGAPRVGNRAFAEFLTVQTGGTLYRITHTNDIVPRLPPREFGYSHSSPEYWIKSGTLVPVTRNDIVKICGIDATGGNNRPNIPDIPAHLWYFGLIATCL

SEQ ID NO: 5588 - protein, 271 aa, Thermomyces lanuginosus
RRPVSQDLFNQFNLFAQYSAAAYCGKNNDAPAGTNITCTGNACPEVEKADATFLYSFEDSGVGDVTGFLALDNTNKLIVLSFRGSRSIENWIGNLNFDLKKINDICSGCRGHDGFTSSWRSVADTLRQKVEDAVREHPDYRVVFTGHSLGGALATVAGADLRGNGYDIDVFSYGAPRVGNRAFAEFLTVQTGGTLYRITHTNDIVPRLPPREFGYSHSSPEYWIKSGTLVPVTRNDIVKICGIDATGGNNRPNIPDIPAHLWYFGLIDTCL

SEQ ID NO: 5589 - protein, 271 aa, Thermomyces lanuginosus
RRPVSQDLFNQFNLFAQYSAAAYCGKNNDAPAGTNITCTGNACPEVEKADATFLYSFEDSGVGDVTGFLALDNTNKLIVLSFRGSRSIENWIGNLNFDLKNINDICSGCRGHDGFTSSWRSVADTLRQKVEDAVREHPDYRVVFTGHSLGGALATVAGADLRGNGYDIDVFSYGAPRVGNRAFAEFLTVQTGGTLYRITHTNDIVPRLPPREFGYSHSSPEYWIKSGTLVPVTRNDIVKICGIDATGGNNRPNIPDIPAHLWYFGLIDTCL

SEQ ID NO: 5590 - protein, 271 aa, Thermomyces lanuginosus
RRPVSQDLFNQFNLFAQYSAAAYCGKNNDAPAGTNITCTGNACPEVEKADATFLYSFEDSGVGDVTGFLALDNTNKLIVLSFRGSRSIENWIGNLNFSLKEINDICSGCRGHDGFTSSWRSVADTLRQKVEDAVREHPDYRVVFTGHSLGGALATVAGADLRGNGYDIDVFSYGAPRVGNRAFAEFLTVQTGGTLYRITHTNDIVPRLPPREFGYSHSSPEYWIKSGTLVPVTRNDIVKICGIDATGGNNRPNIPDIPAHLWYFGLIATCL

SEQ ID NO: 5591 - protein, 271 aa, Thermomyces lanuginosus
RRPVSQDLFNQFNLFAQYSAAAYCGKNNDAPAGTNITCTGNACPEVEKADATFLYSFEDSGVGDVTGFLALDNTNKLIVLSFRGSRSIENWIGNLNFSLKEINDICSGCRGHDGFTSSWRSVADTLRQKVEDAVREHPDYRVVFTGHSLGGALATVAGADLRGNGYDIDVFSYGAPRVGNRAFAEFLTVQTGGTLYRITHTNDIVPRLPPREFGYSHSSPEYWIKSGTLVPVTRNDIVKICGIDATGGNNRPNIPDIPAHLWYFGLIDTCL

SEQ ID NO: 5592 - protein, 271 aa, Synthetic construct
RPEVSQDLFNQFNLFAQYSAAAYCGKNNDAPAGTNITCTGNACPEVEKADATFLYSFEDSGVGDVTGFLALDNTNKLIVLSFRGSRSIENWIGNLKFLMKEINDICSGCRGHDGFTSSWRSVADTLRQKVEDAVREHPDYRVVFTGHSLGGALATVAGADLRGNGYDIDVFSYGAPRVGNRAFAEFLTVQTGGTLYRITHTNDIVPRLPPREFGYSHSSPEYWIKSGTLVPVTRNDIVKIEGIDATGGNNRPNIPDIPAHLWYFGLIGTCL

SEQ ID NO: 5593 - protein, 269 aa, Thermomyces lanuginosus
EVSQDLFNQFNLFAQYSAAAYCGKNNRAPAGTNITCTGNACPEVEKADATFLYSFEDSGVGDVTGFLALDNTNKLIVLSFRGSRSIENWIGNLNFELKEINDICSGCRGHAGFTSSWRSVADTLRQKVEDAVREHPDYRVVFTGHSLGGALATVAGADLRGNGYDIDVFSYGAPRVGNRAFAEFLTVQTGGTLYRITHTNDIVPRLPPREFGYSHSSPEYWIKSGTLVPVRRRDIVKIEGIDATGGNNQPNIPDIPAHLWYFGLIGTCL

SEQ ID NO: 5594 - protein, 269 aa, Thermomyces lanuginosus
EVSQDLFNQFNLFAQYSAAAYCGKNNDAPAGTNITCTGNACPEVFKADVTFLYSFEDSGVGDVTGFLALDNTNKQIVLSFRGSRSIENWIGNLNFDLKEINDICSGCRGHDGFTSSWRSVADTLRQKVEDAVREHPDYRVVFTGHSLGGALATVAGADLRGNGYDIDVFSYGAPRVGNRAFAEFLTTQDGGTLYRITHTNDIVPRLPPREFGYSHSSPEYWIKSGTLVPVTRNDIVKIEGIDATGGNNQPNIPDIPAHLWYFGLIGTCL

SEQ ID NO: 5595 - protein, 269 aa, Thermomyces lanuginosus
EVSQDLFNQFNLFAQYSAAAYCGKNNDAPAGTNITCTGNACPEVEKADATILYSFEDSGVGDVTGFLALDNTNKLIVLSFRGSRSIENWIGNLNFDLKEINDICSGCRGHDGFTSSWRSVADTLRQKVEDAVREHPDYRVVFTGHSLGGALATVAGADLRGDGYDIDVFSYGAPRVGNRAFAEFLTVQTGGTLYRITNTNDIVPRLPPREFGYSHSSPEYWIKSGTLVPVRRRDIVKIEGIDATGGNNQPNIPDIPAHLWYFGLIGTCL

SEQ ID NO: 5596 - protein, 269 aa, Thermomyces lanuginosus
EVSQDLFNQFNLFAQYSAAAYCGKNNDAPAGTNITCTGNACPEVEKAQATFLYSFEDMGVGDVTGFLALDNTNKLIVLSFRGSRSIENWIGNLNFDLKEINDICSGCRGHDGFTSSWRSVADTLRQKVEDAVREHPDYRVVFTGHSLGGALATVAGADLRGNPYDIDVFSYGAPRVGNRAFAEFLTVQTGGTLYRITHTNDIVPRLPPREFGYSHSSPEYWIKSGTLVPVTRQDIVKIEGIDATGGNNQPNIPDIPAHLWYFGRIGTCL

SEQ ID NO: 5597 - protein, 269 aa, Thermomyces lanuginosus
EVSQDLFNQFNLFAQYSAAAYCGKNNDAPAGTNITCTGNACPEVEKADATFLYSFEDSGVGDVTGFLALDNTNKLIVLSFRGSRSIENWIGNLNFDLKEINDICSGCRGHDGFTSSWRSVADTLRQKVEAAVREHPDYRVVFTGHSLGGALATIAWADLRGNGYDIDVFSYGAPRVGNRAFAEFLTNQQGGTLYRITHTNDIVPRLPPREFGYSHSSPEYWIKSGTLVPVTRNDIVKIEGIDATGGNNQPNIPDIPAHLWYFGLIGTCL

SEQ ID NO: 5598 - protein, 269 aa, Thermomyces lanuginosus
EVSQDLFNQFNLFAQYSKAAYCQANNDAPAGTNITCTGNACPEVEKADATFLYSFEDSGVGDVTGFLALDNTNKQIVLSFRGSRSIENWIGNLNFDLKEINDICSGCRGHDGFTSSWRSVADTLRQKVEDAVREHPDYRVVFTGHSLGGALATVAWADLRGNGYDIDVFSYGAPRVGNRAFAEFLTVQTGGTLYRITHTNDIVPRLPPREFGYSHSSPEYWIKSGTLVPVTRNDIVKIEGIDATGGNNQPNIPDIPAHLWYFGLIGTCL

SEQ ID NO: 5599 - protein, 269 aa, Thermomyces lanuginosus
EVSQDLFNQFKLFAQYSAAAYCQKNNDAPAGTNITCTGNACPEVEKADATFLYSFEDSGVGDVTGFLALDNTNKQIVLSFRGSRSIENWIGNLNFDLKEINDICSGCRGHDGFTSSWRSVADTLRQKVEDAVREHPDYRVVFTGHSLGGALATVAGADLRGNGYDIDVFSYGAPRVGNRAFAEFLTNQQGGTLYRITHTNDIVPRLPPREFGYSHSSPEYWIKSGTLVPVTRNDIVKIEGIDATGGNNQPNIPDIPAHLWYFGLIGTCL

SEQ ID NO: 5600 - protein, 269 aa, Thermomyces lanuginosus
EVSQDLFNQFNLFAQYSKAAYCGKNNDAPAGTNITCTGNACPEVFKADVTFLYSFEDSGVGDVTGFLALDNTNKQIVLSFRGSRSIENWIGNLNFDLKEINDICSGCRGHDGFTSSWRSVADTLRQKVEDAVREHPDYRVVFTGHSLGGALATVAGADLRGNGYDIDVFSYGAPRVGNRAFAEFLTVQDGGTLYRITHTNDIVPRLPPREFGYSHSSPEYWIKSGTLVPVTRNDIVKIEGIDATGGNNQPNIPDIPAHLWYFGLIGTCL

SEQ ID NO: 5601 - protein, 269 aa, Thermomyces lanuginosus
EVSQDLFNQFNLFAQYSKAAYCGKNNDAPAGTNITCTGNACPEVEKADATFLYSFEDSGVGDVTGFLALDNTNKQIILSFRGSRSIENWIGNLRFDLKEINDICSGCRGHDGFTSSWRSVADTLRQKVEDAVREHPDYRVVFTGHSLGGALATVAWADLRGNGYDIDVFSYGAPRVGNRAFAEFLTVQTGGTLYRITHTNDIVPRLPPREFGYSHSSPEYWIKSGTLVPVTRNDIVKIEGIDATGGNNQPNIPDIPAHLWYFGLIGTCL

SEQ ID NO: 5602 - protein, 269 aa, Thermomyces lanuginosus
EVSQDLFNQFNLFAQYSAAAYCGKNNDAPAGTNITCTGNACPEVEKADATFLYSFEDSGVGDVTGFLALDNTNKLIVLSFRGSRSIENWIGNLNFDLKEINDICSGCRGHDGFTSSWRSVADTLRQKVEDAVREHPDYRVVFAGHSLGGALATVAGADLRGNGYDIDVFSYGAPRVGNRAFAEFLTVQTGGTLYRITNTNDIVPRLPPREFGYSHSSPEYWIKSGTLPPVRRRDIVKIEGIDATGGNNQPNIPDIPAHLWYFGLIGTCL

SEQ ID NO: 5603 - protein, 269 aa, Thermomyces lanuginosus
EVSQDLFNQFNLFAQYSAAAYCGKNNDAPAGTQITCTGNACPEVEKADATFLYSFEDSGVGDVTGFLALDNTNKLIVLSFRGSRSIENWIGNLKFLLKEINDICSGCRGHDGFTSSWRSVADTLRQKVEDAVREHPDYRVVFTGHSLGGALATVAGADLRGNGYDIDVFSYGAPRVGNRAFAEFLTVQTGGTLYRITHTNDIVPRLPPREFGYSHSSPEYWIKSGTLVPVRRRDIVKIEGIDATGGNNQPNIPDIPAHLWYFGLIGTCL

SEQ ID NO: 5604 - protein, 269 aa, Thermomyces lanuginosus
EVSQDLFNQFNLFAQYSAAAYCGKNNDAPAGTNITCTGNACPEVEKADATFLYSFEDSGVGDVTGFLALDNTNKLIVLSFRGSRSIENWIGNLNFDLKEINDICSGCRGHAGFTSSWRSVADTLRQKVEDAVREHPDYRVVFTGHSLGGALATVAGADLRGNKYDIDVFSYGAPRVGNRAFAEFLTVQTGGTLYRITHTNDIVPRLPPREFGYSHSSPEYWIKSGTLVPVRRRDIVKIEGIDATGGNNQPNIPSIPAHLWYFGLIGTCL

SEQ ID NO: 5605 - protein, 269 aa, Thermomyces lanuginosus
EVSQDLFNQFKLFAQYSAAAYCGKNNQAPAGTNITCTGNACPEVEKADATFLYSFKDMGVGDVTGFLALDNTNKLIVLSFRGSRSIENWIGNLNFDLKEINDICSGCRGHDGFTSSWRSVADTLRQKVEDAVREHPDYRVVFTGHSLGGALATVAGADLRGNGYDIDVFSYGAPRVGNRAFAEFLTVQTGGTLYRITHTNDIVPRLPPREFGYSHSSPEYWIKSGTLVPVTRQDIVKIEGIDATGGNNQPNIPDIPAHLWYFGLIGTCL

SEQ ID NO: 5606 - protein, 269 aa, Thermomyces lanuginosus
EVSQDLFNQFNLFAQYSKAAYCQANNDAPAGTNITCTGNACPEVEKADATFLYSFEDSGVGDVTGFLALDNTNKLIVLSFRGSRSIENWIGNLNFDLKEINDICSGCRGHDGFTSSWRSVADTLRQKVEAAVREHPDYRVVFTGHSLGGALATVAGADLRGNGYDIDVFSYGAPRVGNRAFAEFLTQQTGGTLYRITHTNDIVPRLPPREFGYSHSSPEYWIKSGTLVPVTRNDIVKIEGIDATGGNNQPNIPDIPAHLWYFGLIGTCL

SEQ ID NO: 5607 - protein, 269 aa, Thermomyces lanuginosus
EVSQDLFNQFNLFAQYSAAAYCGKNNDAPAGTQITCTGNACPEVEKADATFLYSFEDSGVGDVTGFLALDNTNKLIVLSFRGSRSIENWIGNLNFDLKEINDICSGCRGHDGFTSSLRSVADTLRQKVEDAVREHPDYRVVFTGHSLGGALATVAGADLRGNGYDIDVFSYGAPRVGNRAFAEFLTVQTGGTLYRITHTNDIVPRLPPREFGYSHSSPEYWIKSGTLVPVRRRDIVKIEGIDATGGNNQPNIPSIPAHLWYFGLIGTCL

SEQ ID NO: 5608 - protein, 269 aa, Thermomyces lanuginosus
EVSQDLFNQFNLFAQYSAAAYCGKNNDAPAGTNITCTGNACPEVEKADATFLYSFEDSGVGDVTGFLALDNTNKLIVLSFRGSRSIENWIGNLNFDLKEINDICSGCRGHDGFTSSWRSVADTLRQKVEAAVREHPDYRVVFTGHSLGGALATVAGADLRGNPYDIDVFSYGAPRVGNRAFAEFLTVQTGGTLYRITHTNDIVPRLPPREFGYSHSSPEYWIKSGTMVPVTRQDIVKIEGIDATGGNNQPNIPDIPAHLWYFGRIGTCL

SEQ ID NO: 5609 - protein, 269 aa, Thermomyces lanuginosus
EVSQDLFNQFNLFAQYSAAAYCGANNDAPAGTNITCTGNACPEVEKADATFLYSFEDSGVGDVTGFLALDNTNKRIVLSFRGSRSIENWIGNLNFDLKEINDICSGCRGHDGFTSSWRSVADTLRQKVEDAVREHPDYRVVFTGHSLGGALATIAWADLRGNGYDIDVFSYGAPRVGNRAFAEFLTQQTGGTLYRITHTNDIVPRLPPREFGYSHSSPEYWIKSGTLVPVTRNDIVKIEGIDATGGNNQPNIPDIPAHLWYFGLIGTCL

SEQ ID NO: 5610 - protein, 269 aa, Thermomyces lanuginosus
EVSQDLFNQFNLFAQYSAAAYCGKNNDAPAGTNITCTGNACPEVEKADATFLYSFEDSGVGDVTGFLALDNTNKRIVLSFRGSRSIENWIGNLNFDLKEINDICSGCRGHDGFTSSWRSVADTLRQKVEAAVREHPDYRVVFTGHSLGGALATVAGADLRGNGYDIDVFSYGAPRVGNRAFAEFLTTQQGGTLYRITHTNDIVPRLPPREFGYSHSSPEYWIKSGTLVPVTRNDIVKIEGIDATGGNNQPNIPDIPAHLWYFGRIGTCL

SEQ ID NO: 5611 - protein, 269 aa, Thermomyces lanuginosus
EVSQDLFNQFNLFAQYSAAAYCGKNNDAPAGTNITCTGNACPEVEKADATFLYSFEDSGVGDVTGFLALDNTNKQIILSFRGSRSIENWIGNLNFDLKEINDICSGCRGHDGFTSSWRSVADTLRQKVEAAVREHPDYRVVFTGHSLGGALATVAWADLRGNGYDIDVFSYGAPRVGNRAFAEFLTNQTGGTLYRITHTNDIVPRLPPREFGYSHSSPEYWIKSGTLVPVTRNDIVKIEGIDATGGNNQPNIPDIPAHLWYFGLIGTCL

SEQ ID NO: 5612 - protein, 269 aa, Thermomyces lanuginosus
EVSQDLFNQFNLFAQYSAAAYCGKNNDAPAGTNITCTGNACPEVEKADATFLYSFEDSGVGDVTGFLALDNTNKLIILSFRGSRSIENWIGNLNFDLKEINDICSGCRGHDGFTSSWRSVADTLRQKVEAAVREHPDYRVVFTGHSLGGALATIAWADLRGNGYDIDVFSYGAPRVGNRAFAEFLTNQTGGTLYRITHTNDIVPRLPPREFGYSHSSPEYWIKSGTLVPVTRNDIVKIEGIDATGGNNQPNIPDIPAHLWYFGLIGTCL

SEQ ID NO: 5613 - protein, 269 aa, Thermomyces lanuginosus
EVSQDLFNQFNLFAQYSAAAYCQANNDAPAGTNITCTGNACPEVEKADATFLYSFEDSGVGDVTGFLALDNTNKQIVLSFRGSRSIENWIGNLNFDLKEINDICSGCRGHDGFTSSWRSVADTLRQKVEAAVREHPDYRVVFTGHSLGGALATVAWADLRGNGYDIDVFSYGAPRVGNRAFAEFLTVQTGGTLYRITHTNDIVPRLPPREFGYSHSSPEYWIKSGTLVPVTRNDIVKIEGIDATGGNNQPNIPDIPAHLWYFGLIGTCL

SEQ ID NO: 5614 - protein, 269 aa, Thermomyces lanuginosus
EVSQDLFNQFNLFAQYSAAAYCGKNNSAPAGTNITCTGNACPEVEKADATFLYSFKDSGVGDVTGFLALDNTNKLIVLSFRGSRSIENWIGNLNFDLKEINDICSGCRGHAGFTSSWRSVADTLRQKVEDAVREHPDYRVVFTGHSLGGALATVAGADLRGNGYDIDVFSYGAPRVGNRAFAEFLTNQTGGTLYRITHTNDIVPRLPPREFGYSHSSPEYWIKSGTLVPVTRNDIVKIEGIDATGGNNQPNIPDIPAHLWYFGRIGTCL

SEQ ID NO: 5615 - protein, 269 aa, Synthetic construct
EVSQDLFNQFNLFAQYSAAAYCGKNNDAPAGTNITCTGNACPEVEKADATFLYSFEGSGVGDVTGFLALDNTNKLIVLSFRGSRSIENWIGNLKFLMKEINDICSGCRGHDGFTSSWRSVADTLRQKVEDAVREHPDYRVVFTGHSLGGALATVAGADLRGNGYDIDVFSYGAPRVGNRAFAEFLTVQTGGTLYRITHTNDIVPRLPPREFGYSHSSPEYWIKSGTLVPVTRNDIVKIEGIDATGGNNRPNIPDIPAHLWYFGLIGTCL

SEQ ID NO: 5616 - protein, 269 aa, Thermomyces lanuginosus
EVSQDLFNQFNLFAQYSAAAYCKKNNDAPAGTNITCTGNACPEVEKADATFLYSFEDSGVGDVTGFLALDNTNKRIVLSFRGSRSIENWIGNLNFDLKEINDICSGCRGHDGFTSSWRSVADTLRQKVEAAVREHPDYRVVFTGHSLGGALATVAGADLRGNGYDIDVFSYGAPRVGNRAFAEFLTTQTGGTLYRITHTNDIVPRLPPREFGYSHSSPEYWIKSGTLVPVTRNDIVKIEGIDATGGNNQPNIPDIPAHLWYFGRIGTCL

SEQ ID NO: 5617 - protein, 269 aa, Thermomyces lanuginosus
EVSQDLFNQFNLFAQYSAAAYCGKNNDAPAGTNITCTGNACPEVEKADATILYSFRDSGVGDVTGFLALDNTNKLIVLSFRGSRSIENWIGNLNFDLKEINDICSGCRGHDGFTSSWFSVADTLRQKVEDAVREHPDYRVVFTGHSLGGALATVAGADLRGNGYDIDVFSYGAPRVGNRAFAEFLTVQTGGTLYRITHTNDIVPRLPPREFGYSHSSPEYWIKSGTLVPVRRRDIVKIEGIDATGGNNQPNIPDIPAHLWYFGLIGTCL

SEQ ID NO: 5618 - protein, 269 aa, Thermomyces lanuginosus
EVSQDLFNQFNLFAQYSAAAYCGKNNDAPAGTNITCTGNACPEVEKADATFLYSFEDMGVGDVTGFLALDNTNKLIVLSFRGSRSIENWIGNLNFDLKEINDICSGCRGHDGFTSSWRSVADTLRQKVEDAVREHPQYRVVFTGHSLGGALATVAGADLRGNPYDIDVFSYGAPRVGNRAFAEFLTVQTGGTLYRITHTNDIVPRLPPREFGYSHSSPEYWIKSGTMVPVTRQDIVKIEGIDATGGNNQPNIPDIPAHLWYFGLIGTCL

SEQ ID NO: 5619 - protein, 269 aa, Thermomyces lanuginosus
EVSQDLFNQFNLFAQYSAAAYCQKNNDAPAGTNITCTGNACPEVEKADATFLYSFEDSGVGDVTGFLALDNTNKQIVLSFRGSRSIENWIQNLNFDLKEINDICSGCRGHDGFTSSWRSVADTLRQKVEDAVREHPDYRVVFTGHSLGGALATVAGADLRGNGYDIDVFSYGAPRVGNRAFAEFLTVQTGGTLYRITHTNDIVPRLPPREFGYSHSSPEYWIKSGTLVPVTRNDIVKIEGIDATGGNNQPNQPDIPAHLWYFGRIGTCL

SEQ ID NO: 5620 - protein, 269 aa, Thermomyces lanuginosus
EVSQDLFNQFNLFAQYSAAAYCGKNNDAPAGTNITCTGNACPEVEKADATFLYSFEDSGVGDVTGFLALDNTNKLIVLSFRGSRSIENWIGNLNFELKEINDICSGCRGHDGFTSSWRSVADTLRQKVEDAVREHPDYRVVFTGHSLGGALATVAGADLRGNKYDIDVFSYGAPRVGNRAFAEFLTVQTGGTLYRITHTNDIVPRLPPREFGYSHSSPEYWIKSGTLVPVRRRDIVKIEGIDATGGNNQPNIPSIPAHLWYFGLIGTCL

SEQ ID NO: 5621 - protein, 269 aa, Thermomyces lanuginosus
EVSQDLFNQFNLFAQYSAAAYCGKNNDAPAGTNITCTGNACPEVEKADATFLYSFEKSGVGDVTGFLALDNTNKRIVLSFRGSRSIENWIGNLNFDLKEINDICSGCRGHDGFTSSWRSVADTLRQKVEAAVREHPDYRVVFTGHSLGGALATVAGADLRGNGYDIDVFSYGAPRVGNRAFAEFLTTQTGGTLYRITHTNDIVPRLPPREFGYSHSSPEYWIKSGTLVPVTRNDIVKIEGIDATGGNNQPNIPDIPAHLWYFGRIGTCL

SEQ ID NO: 5622 - protein, 269 aa, Thermomyces lanuginosus
EVSQDLFNQFNLFAQYSKAAYCGANNDAPAGTNITCTGNACPEVEKADATFLYSFEDSGVGDVTGFLALDNTNKQIVLSFRGSRSIENWIGNLNFDLKEINDICSGCRGHDGFTSSWRSVADTLRQKVEDAVREHPDYRVVFTGHSLGGALATIAGADLRGNGYDIDVFSYGAPRVGNRAFAEFLTVQDGGTLYRITHTNDIVPRLPPREFGYSHSSPEYWIKSGTLVPVTRNDIVKIEGIDATGGNNQPNIPDIPAHLWYFGLIGTCL

SEQ ID NO: 5623 - protein, 269 aa, Thermomyces lanuginosus
EVSQDLFNQFNLFAQYSAAAYCGKNNDAPAGTQITCTGNACPEVEKADATFLYSFEDSGVGDVTGFLALDNTNKLIVLSFRGSRSIENWIGNLNFDLKEINDICSGCRGHAGFTSSWRSVADTLRQKVEDAVREHPDYRVVFTGHSLGGALATVAGADLRGNGYDIDVFSYGAPRVGNRAFAEFLTVQTGGTLYRITHTNDIVPRLPPREFGYSHSSPEYWIKSGTLVPVRRRDIVKIEGIDATGGNNQPNIPGIPAHLWYFGLIGTCL

SEQ ID NO: 5624 - protein, 269 aa, Thermomyces lanuginosus
EVSQDLFNQFNLFAQYSAAAYCGKNNDAPAGTQITCTGNACPEVEKADATFLYSFEDSGVGDVTGFLALDNTNKLIVLSFRGSRSIENWIGNLNFDLKEINDICSGCRGHDGFTSSWRSVADTLRQKVEDAVREHPDYRVVFTGHSLGGALATVAGADLRGNGYDIDVFSYGAPRVGNRAFAEFLTVQTGGTLYRITHTNDIVPRLPPREFGYSHSSPEYWIKSGTFVPVRRRDIVKIEGIDATGGNNQPNIPSIPAHLWYFGLIGTCL

SEQ ID NO: 5625 - protein, 269 aa, Thermomyces lanuginosus
EVSQDLFNQFNLFAQYSAAAYCGKNNDAPAGTNITCTGNACPEVEKADATFLYSFEDSGVGDVTGFLALDNTNKLIVLSFRGSRSIENWIGNLNFDLKTINDICSGCRGHDGFISSWRSVADTLRQKVEDAVREHPDYRVVFTGHSLGGALATVAGADLRGNGYDIDVFSYGAPRVGNRAFAEFLTVQTGGTLYRITHTNDIVPRLPPREFGYSHSSPEYWIKSGTLVPVRRRDIVKIEGIDATGGNNQPNIPNIPAHLWYFGLIGTCL

SEQ ID NO: 5626 - protein, 269 aa, Thermomyces lanuginosus
EVSQDLFNQFNLFAQYSAAAYCWKNNDAPAGTNITCTGNACPEVFKADVTFLYSFEDSGVGDVTGFLALDNTNKLIVLSFRGSRSIENWIGNLNFDLKEINDICSGCRGHDGFTSSWRSVADTLRQKVEDAVREHPDYRVVFTGHSLGGALATVAWADLRGNGYDIDVFSYGAPRVGNRAFAEFLTVQDGGTLYRITHTNDIVPRLPPREFGYSHSSPEYWIKSGTLVPVTRNDIVKIEGIDATGGNNQPNIPDIPAHLWYFGLIGTCL

SEQ ID NO: 5627 - protein, 269 aa, Thermomyces lanuginosus
EVSQDLFNQFNLFAQYSAAAYCQKNNSAPAGTNITCTGNACPEVEKADATFLYSFEDSGVGDVTGFLALDNTNKLIVLSFRGSRSIENWIGNLNFDLKEINDICSGCRGHAGFTSSWRSVADTLRQKVEDAVREHPDYRVVFTGHSLGGALATVAGADLRGNGYDIDVFSYGAPRVGNRAFAEFLTVQQGGTLYRITHTNDIVPRLPPREFGYSHSSPEYWIKSGTLVPVTRNDIVKIEGIDATGGNNQPNIPDIPAHLWYFGRIGTCL

SEQ ID NO: 5628 - protein, 269 aa, Thermomyces lanuginosus
EVSQDLFNQFNLFAQYSAAAYCGKNNDAPAGTNITCTGNACPEVEKAQATFLYSFEDMGVGDVTGFLALDNTNKLIVLSFRGSRSIENWIGNLNFDLKEINDICSGCRGHDGFTSSWRSVADTLRQKVEDAVREHPQYRVVFTGHSLGGALATVAGADLRGNGYDIDVFSYGAPRVGNRAFAEFLTVQTGGTLYRITHTNDIVPRLPPREFGYSHSSPEYWIKSGTLVPVTRQDIVKIEGIDATGGNNQPNIPDIPAHLWYFGRIGTCL

SEQ ID NO: 5629 - protein, 269 aa, Thermomyces lanuginosus
EVSQDLFNQFNLFAQYSAAAYCGKNNDAPVGTQITCTGNACPEVEKADATFLYSFEDSGVGDVTGFLALDNTNKLIVLSFRGSRSIENWIGNLNFDLIEINDICSGCRGHDGFTSSWRSVADTLRQKVEDAVREHPDYRVVFTGHSLGGALATVAGADLRGNGYDIDVFSYGAPRVGNRAFAEFLTVQTGGTLYRITHTNDIVPRLPPREFGYSHSSPEYWIKSGTLVPVRRRDIVKIEGIDATGGNNQPNIPDIPAHLWYFGLIGTCL

SEQ ID NO: 5630 - protein, 269 aa, Thermomyces lanuginosus
EVSQDLFNQFNLFAQYSKAAYCGKNNSAPAGTNITCTGNACPEVFKADATFLYSFEDSGVGDVTGFLALDNTNKDIVLSFRGSRSIENWIGNLNFDLKEINDICSGCRGHDGFTSSWRSVADTLRQKVEDAVREHPDYRVVFTGHSLGGALATVAGADLRGNGYDIDVFSYGAPRVGNRAFAEFLTVQDGGTLYRITHTNDIVPRLPPREFGYSHSSPEYWIKSGTLVPVTRNDIVKIEGIDATGGNNQPNIPDIPAHLWYFGLIGTCL

SEQ ID NO: 5631 - protein, 269 aa, Thermomyces lanuginosus
EVSQDLFNQFNLFAQYSAAAYCGKNNRAPAGTNITCTGNACPEVEKADATFLYSFEDSGVGDVTGFLALDNTNKLIVLSFRGSRSIENWIGNLNFELKEINDICSGCRGHDGFTSSWRSVADTLRQKVEDAVREHPDYRVVFTGHSLGGALATVAGADLRGNKYDIDVFSYGAPRVGNRAFAEFLTVQTGGTLYRITHTNDIVPRLPPREFGYSHSSPEYWIKSGTLVPVRRRDIVKIEGIDATGGNNQPNIPDIPAHLWYFGLIGTCL

SEQ ID NO: 5632 - protein, 269 aa, Thermomyces lanuginosus
EVSQDLFNQFKLFAQYSAAAYCGKNNNAPAGTNITCTGNACPEVEKADATFLYSFEDMGVGDVTGFLALDNTNKLIVLSFRGSRSIENWIGNLNFDLKEINDICSGCRGHDGFTSSWRSVADTLRQKVEDAVREHPDYRVVFTGHSLGGALATVAGADLRGNGYDIDVFSYGAPRVGNRAFAEFLTVQTGGTLYRITHTNDIVPRLPPREFGYSHSSPEYWIKSGTLVPVTRQDIVKIEGIDATGGNNQPNIPDITAHLWYFGLIGTCL

SEQ ID NO: 5633 - protein, 269 aa, Thermomyces lanuginosus
EVSQDLFNQFNLFAQYSKAAYCGKNNDAPAGTDITCTGNACPEVFKADATFLYSFEDSGVGDVTGFLALDNTNKDIVLSFRGSRSIENWIGNLNFDLKEINDICSGCRGHDGFTSSWRSVADTLRQKVEDAVREHPDYRVVFTGHSLGGALATVAGADLRGNGYDIDVFSYGAPRVGNRAFAEFLTVQDGGTLYRITHTNDIVPRLPPREFGYSHSSPEYWIKSGTLVPVTRNDIVKIEGIDATGGNNQPNIPDIPAHLWYFGLIGTCL

SEQ ID NO: 5634 - protein, 269 aa, Thermomyces lanuginosus
EVSQDLFNQFNLFAQYSAAAYCGKNNDAPAGTNITCTGNACLEVEKADATFLYSFENSGVGDVTGFLALDNTNKLIVLSFRGSRSIENWIENLNFDLKEINDICSGCRGHDGFTSSWRSVADTLRQKVEDAVREHPDYRVVFTGHSLGGALATVAGADLRGNGYDIDVFSYGAPRVGNRAFAEFLTVQTGGTLYRITHTNDIVPRLPPREFGYSHSSPEYWIKSGTLVPVRRRDIVKIEGIDATGGNNQPNIPDIPAHLWYFGLIGTCL

SEQ ID NO: 5635 - protein, 269 aa, Thermomyces lanuginosus
EVSQDLFNQFNLFAQYSKAAYCGKNNDAEAGTDITCTGNACPEVEKADATFLYSFEDSGVGDVTGFLALDNTRKDIVLSFRGSRSIENWIGNLNFDLKEINDICSGCRGHDGFTSSWRSVADTLRQKVEDAVREHPDYRVVFTGHSLGGALATVAGADLRGNGYDIDVFSYGAPRVGNRAFAEFLTVQTGGTLYRITHTNDIVPRLPPREFGYSHSSPEYWIKSGTLVPVTRNDIVKIEGIDATGGNNQPNIPDIPAHLWYFGLIGTCL

SEQ ID NO: 5636 - protein, 269 aa, Thermomyces lanuginosus
EVSQDLFNQFNLFAQYSAAAYCGKNNDAPAGTQITCTGNACPEVEKADATFLYSFEDSGVGDVTGFLALDNTNKLIVLSFRGSRSIENWIGNLNFDLKEINDICSGCRGHDGFTSSERSVADTLRQKVEDAVREHPDYRVVFTGHSLGGALATVAGADLRGNGYDIDVFSYGAPRKGNRAFAEFLTVQTGGTLYRITHTNDIVPRLPPREFGYSHSSPEYWIKSGTLVPVRRRDIVKIEGIDATGGNNQPNIPDIPAHLWYFGLIGTCL

SEQ ID NO: 5637 - protein, 269 aa, Synthetic construct
EWRQDLFNQFNLFAQYSAAAYCGKNNDAPAGTNITCTGNACPEVEKADATFLYSFEDSGVGDVTGFLALDNTNKLIVLSFRGSRSIENWIGNLKFLLKEINDICSGCRGHDGFTSSWRSVADTLRQKVEDAVREHPDYRVVFTGHSLGGALATVAGADLRGNGYDIDVFSYGAPRVGNRAFAEFLTVQTGGTLYRITHTNDIVPRLPPREFGYSHSSPEYWIKSGTLVPVTRNDIVKIEGIDATGGNNRPNIPDIPAHLWYFGLIGTCL

SEQ ID NO: 5638 - protein, 269 aa, Thermomyces lanuginosus
EVSQDLFNQFNLFAQYSAAAYCGKNNDAPAGTQITCTGNACPEVEKADATFLYSFEDSGVGDVTGFLALDNTNKLIVLSFRGSRSIENWIGNLNFNLKEINDICSGCRGHDGFTSSWRSVADTLRQKVEDAVREHPDYRVVFTGHSLGGALATVAGADLRGNGYDIDVFSYGAPRVGNRAFAEFLTVQTGGTLYRITHTNDIVPRLPPREFGYSHSSPEYWIKSGTLVPVRRRDIVKIEGIDATGGNNQPNIPSIPAHLWYFGLIGTCL

SEQ ID NO: 5639 - protein, 269 aa, Thermomyces lanuginosus
EVSQDLFNQFNLFAQYSAAAYCGKNNDAPAGTNITCTGNACPEVEKADATFLYSFEDSGVGDVTGFLALDNTNKLIVLSFRGSRSIENWITNLNFELKEINDICSGCRGHAGFTSSWRSVADTLRQKVEDAVREHPDYRVVFTGHSLGGALATVAGADLRGNGYDIDVFSYGAPRVGNRAFAEFLTVQTGGTLYRITHTNDIVPRLPPREFGYSHSSPEYWIKSGTLVPVRRRDIVKIEGIDATGGNNQPNIPDIPAHLWYFGLIGTCL

SEQ ID NO: 5640 - protein, 269 aa, Thermomyces lanuginosus
EVSRDLFNQFNLFAQYSAAAYCGKNNDAPAGTNITCTGNACPEVEKADATILYSFEDSGVGDVTGFLALDNTNKLIVLSFRGSRSIENWIGNLNFDLKEINDICSGCRGHDGFTSSWRSVADTLRQKVEDAVREHPDYRVVFTGHSLGGALATVAGADLRGNGYDIDVFSYGAPRVGNRAFAEFLTVQTGGTLYRITHTNDIVPRLPPREFGYSHSSPEYWIKSGTLVPVRRRDIVKIEGIDATGGNNQPNIPDITAHLWYFGLIGTCL

SEQ ID NO: 5641 - protein, 269 aa, Thermomyces lanuginosus
EVSQDLFNQFNLFAQYSAAAYCGKNNDAPAGTNITCTGNACPEVEKADATFLYSFEDMGVGDVTGFLALDNTNKLIVLSFRGSRSIENWIGNLNFDLKEINDICSGCRGHDGFTSSWRSVADTLRQKVEAAVREHPDYRVVFTGHSLGGALATVAGADLRGNPYDIDVFSYGAPRVGNRAFAEFLTVQTGGTLYRITHTNDIVPRLPPREFGYSHSSPEYWIKSGTMVPVTRNDIVKIEGIDATGGNNQPNIPDIPAHLWYFGRIGTCL

SEQ ID NO: 5642 - protein, 269 aa, Thermomyces lanuginosus
EVSQDLFNQFNLFAQYSAAAYCGKNNDAPAGTNITCTGNACPEVEKADATFLYSFEDSGVGDVTGFLALDNTNKLIVLSFRGSRSIENWGGNLNFDLKEINDICSGCRGHDGFTSSWRSVADTLRQKVEDAVREHPDYRVVFTGHSLGGALATVAGADLRGNGYDIDVFSYGAPRVGNRAFAEFLTVQTGGTLYRITHTNDLVPRLPPREFGYSHSSPEYWIKSGTLVPVRRRDIVKIEGIDATGGNNQPNIPDSPAHLWYFGLIGTCL

SEQ ID NO: 5643 - protein, 269 aa, Thermomyces lanuginosus
EVSVDLFNQFNLFAQYSAAAYCGKNNDAPAGTNITCTGNACPEVEKADATFLYSFEDSGKGDVTGFLALDNTNKLIVLSFRGSRSIENWIGNLNFDLKEINDICSGCRGHDGFTSSWRSVADTLRQKVEDAVREHPDYRVVFTGHSLGGGLATVAGADLRGNGYDIDVFSYGAPRVGNRAFAEFLTVQTGGTLYRITHTNDIVPRLPPREFGYSHSSPEYWIKSGTLVPVRRRDIVKIEGIDATGGNNQPNIPDIPAHLWYFGLIGTCL

SEQ ID NO: 5644 - protein, 269 aa, Thermomyces lanuginosus
EVSQDLFNQFNLFAQYSAAAYCGKNNDAPAGTNITCTGNACPEVEKADATFLYSFEDSGVGDVTGFLALDNTNKLIVLSFRGSRSIENWIGNLNFELKEINDICSGCRGHAGFTSSWRSVADTLRQKVEDAVREHPDYRVVFTGHSLGGALATVAGADLRGNGYDIDVFSYGAPRVGNRAFAEFLTVQTGGTLYRITHTNDIVPRLPPREFGYSHSSPEYWIKSGTLVPVRRRDIVKIEGIDATGGNNQPNIPDITAHLWYFGLIGTCL

SEQ ID NO: 5645 - protein, 269 aa, Thermomyces lanuginosus
EVSQDLFNQFNLFAQYSAAAYCGKNNDAPAGTQITCTSNACPEVEKADATFLYSFEDSGVGDVTGFLALDNTNKLIVLSFRGSRSIENWIGNLNFDLKEINDICSGCRGHDGFTSSWRSVADTLRQKVEDAVREHPDYRVVFTGHSLGGALATVAGADLRGNKYDIDVFSYGAPRVGNRAFAEFLTVQTGGTLYRITHTNDIVPRLPPREFGYSHSSPEYWIKSGTLVPVRRRDIVKIEGIDATGGNNQPNIPDIPAHLWYFGLIGTCL

SEQ ID NO: 5646 - protein, 269 aa, Thermomyces lanuginosus
EVSQDLFNQFNLFAQYSAAAYCGKNNDAPAGTNITCTGNACPEVEKADATFLYSFEDSGKGDVTGFLALDNTNKLIVLSFRGSRSIENWIGNLNFDLKEINDICSGCRGHDGFTSSWRSVADTLRQKVEDAVREHPDYRVVFTGHSLGGGLATVAGADLRGNGYDIDVFSYGAPRVGNRAFAEFLTVQTGGTLYRITHTNDIVPRLPPREFGYSHSSPEYWIKSGTLVPVRRRDIVKIEGIDATGGNNQPNIPDVPAHLWYFGLIGTCL

SEQ ID NO: 5647 - protein, 269 aa, Thermomyces lanuginosus
EVSQDLFNQFNLFAQYSAAAYCGKNNDAPAGTQITCTGNACPEVEKADATFLYSFEDSGVGDVTGFLALDNTNKLIVLSFRGSRSIENWIGNLNFDLKEINDICSGCRGHDGFTSSWRSVADTLRQKVEDAVREHPDYRVVFTGHSLGGALATVAGADLRGNVYDIDVFSYGAPRVGNRAFAEFMTVQTGGTLYRITHTNDIVPRLPPREFGYSHSSPEYWIKSGTLVPVRRRDIVKIEGIDATGGNNQPNIPDIPAHLWYFGLIGTCL

SEQ ID NO: 5648 - protein, 269 aa, Thermomyces lanuginosus
EVSQDLFNQFNLFAQYSAAAYCGKNNDAPAGTQITCTINACPEVEKADATFLYSFEDSGVGDVTGFLALDNTNKLIVLSFRGSRSIENWIGNLNFDLKEINDICSGCRGHDGFTSSWRSVADTLRQKVEDAVREHPDYRVVFTGHSLGGALATVAGADLRGNGYDIDVFSYGAPRVANRAFAEFLTVQTGGTLYRITHTNDIVPRLPPREFGYSHSSPEYWIKSGTLVPVRRRDIVKIEGIDATGGNNQPNIPDIPAHLWYFGLIGTCL

SEQ ID NO: 5649 - protein, 269 aa, Thermomyces lanuginosus
EVSQDLFNQFNLFAQYSAAAYCKKNNDAPAGTNITCTGNACPEVEKADATFLYSFEDSGVGDVTGFLALDNTNKLIVLSFRGSRSIENWIGNLRFDLKEINDICSGCRGHDGFTSSWRSVADTLRQKVEDAVREHPDYRVVFTGHSLGGALATVAWADLRGNGYDIDVFSYGAPRVGNRAFAEFLTNQQGGTLYRITHTNDIVPRLPPREFGYSHSSPEYWIKSGTLVPVTRNDIVKIEGIDATGGNNQPNIPDIPAHLWYFGLIGTCL

SEQ ID NO: 5650 - protein, 269 aa, Thermomyces lanuginosus
EVSQDLFNQFNLFAQYSKAAYCGKNNDAPAGTNITCTGNACPEVEKADATFLYSFEDSGVGDVTGFLALDNTNKQIVLSFRGSRSIENWIGNLNFDLKEINDICSGCRGHDGFTSSWRSVADTLRQKVEDAVREHPDYRVVFTGHSLGGALATVAWADLRGNGYDIDVFSYGAPRVGNRAFAEFLTIQDGGTLYRITHTNDIVPRLPPREFGYSHSSPEYWIKSGTLVPVTRNDIVKIEGIDATGGNNQPNIPDIPAHLWYFGLIGTCL

SEQ ID NO: 5651 - protein, 269 aa, Thermomyces lanuginosus
EVSQDLFNQFNLFAQYSAAAYCGKNNSAPAGTNITCTGNACPEVEKADATFLYSFEDSGVGDVTGFLALDNTNKRIVLSFRGSRSIENWIGNLNFDLKEINDICSGCRGHDGFTSSWRSVADTLRQKVEDAVREHPDYRVVFTGHSLGGALATIAGADLRGNGYDIDVFSYGAPRVGNRAFAEFLTVQQGGTLYRITHTNDIVPRLPPREFGYSHSSPEYWIKSGTLVPVTRNDIVKIEGIDATGGNNQPNIPDIPAHLWYFGRIGTCL

SEQ ID NO: 5652 - protein, 269 aa, Thermomyces lanuginosus
EVSQDLFNQFNLFAQYSAAAYCGKNNQAPAGTNITCTGNACPEVEKADATTLYSFEDSGVGDVTGFLALDNTNKQIVLSFRGSRSIENWIGNLNFDLKEINDICSGCRGHDGFTSSWRSVADTLRQKVEAAVREHPDYRVVFTGHSLGGALATVAGADLRGNGYDIDVFSYGAPRVGNRAFAEFLTVQTGGTLYRITHTNDIVPRLPPREFGYSHSSPEYWIKSGTLVPVTRNDIVKIEGIDATGGNNQPNIPDIPAHLWYFGRIGTCL

SEQ ID NO: 5653 - protein, 269 aa, Thermomyces lanuginosus
EVSQDLFNQFNLFAQYSAAAYCGKNNDAPAGTNITCTGNACPEVEKADATFLYSFEDSGVGDVTGFLALDNTNKLIVLSFRGSRSIENWIGNLNFDLKEINDICSGCRGHDGFTSSWRSVADTLRQKVEDAVREHPDYRVVFTGHSLGGGLATVAGADLRGNGYDIDVFSYGAPRVGNRAFAEFLTVQTGGTLYRITHTNDIVPRLPPREFGYSHSSPEYWIKSGTGVPVRRRDIVKIEGIDATGGNNQPNIPDIKAHLWYFGLIGTCL

SEQ ID NO: 5654 - protein, 269 aa, Thermomyces lanuginosus
EVSQDLFNQFNLFAQYSKAAYCQKNNDAPAGTNITCTGNACPEVEKADATFLYSFEDSGVGDVTGFLALDNTNKQIVLSFRGSRSIENWIGNLNFDLKEINDICSGCRGHDGFTSSWRSVADTLRQKVEDAVREHPDYRVVFTGHSLGGALATVAWADLRGNGYDIDVFSYGAPRVGNRAFAEFLTTQTGGTLYRITHTNDIVPRLPPREFGYSHSSPEYWIKSGTLVPVTRNDIVKIEGIDATGGNNQPNIPDIPAHLWYFGLIGTCL

SEQ ID NO: 5655 - protein, 269 aa, Thermomyces lanuginosus
EVSQDLFNQFNLFAQYSKAAYCGKNNDAPAGTNITCTGNACPEVEKADATFLYSFEDSGVGDVTGFLALDNTNKQIVLSFRGSRSIENWIGNLRFDLKEINDICSGCRGHDGFTSSWRSVADTLRQKVEDAVREHPDYRVVFTGHSLGGALATVAWADLRGNGYDIDVFSYGAPRVGNRAFAEFLTNQTGGTLYRITHTNDIVPRLPPREFGYSHSSPEYWIKSGTLVPVTRNDIVKIEGIDATGGNNQPNIPDIPAHLWYFGLIGTCL

SEQ ID NO: 5656 - protein, 269 aa, Thermomyces lanuginosus
EVSQDLFNQFNLFAQYSAAAYCGKNNDAPAGTNITCTGNACPEVEKAQATFLYSFEDMGVGDVTGFLALDNTNKLIVLSFRGSRSIENWIGNLNFDLKEINDICSGCRGHDGFTSSWRSVADTLRQKVEDAVREHPQYRVVFTGHSLGGALATVAGADLRGNPYDIDVFSYGAPRVGNRAFAEFLTVQTGGTLYRITHTNDIVPRLPPREFGYSHSSPEYWIKSGTLVPVTREDIVKIEGIDATGGNNQPNIPDIPAHLWYFGLIGTCL

SEQ ID NO: 5657 - protein, 269 aa, Thermomyces lanuginosus
EVSQDLFNQFNLFAQYSAAAYCGKNNDAPAGTNITCTGNACPEVEKADATFLYSFEDSGVGDVTGFLALDNTNKLIVLSFRGSRSIENWIGNLNFDLKEINDICSGCRGHDGFTSSWRSVADTLRQKVEDAVREHPDYRVVFAGHSLGGALATVAGADLRGNGYDIDVFSYGAPRVGNRAFAEFLTVQTGGTLYRITHTNDIVPRLPPRQFGYSHSSPEYWIKSGTLVPVRRRDIVKIEGIDATGGNNQPNIPDAPAHLWYFGLIGTCL

SEQ ID NO: 5658 - protein, 269 aa, Thermomyces lanuginosus
EVSQDLFNQFNLFAQYSAAAYCKKNNDAPAGTNITCTGNACPEVEKADATFLYSFEDSGVGDVTGFLALDNTNKQIVLSFRGSRSIENWIGNLNFDLKEINDICSGCRGHDGFTSSWRSVADTLRQKVEAAVREHPDYRVVFTGHSLGGALATIAGADLRGNGYDIDVFSYGAPRVGNRAFAEFLTVQQGGTLYRITHTNDIVPRLPPREFGYSHSSPEYWIKSGTLVPVTRNDIVKIEGIDATGGNNQPNIPDIPAHLWYFGLIGTCL

SEQ ID NO: 5659 - protein, 269 aa, Thermomyces lanuginosus
EVSQDLFNQFNLFAQYSAAAYCGKNNDAPAGTKITCTTNACPEVEKADATFLYSFEDSGVGDVTGFLALDNTNKLIVLSFRGSRSIENWIGNLNFDLKEINDICSGCRGHLGFTSSWRSVADTLRQKVEDAVREHPDYRVVFTGHSLGGALATVAGADLRGNGYDIDVFSYGAPRVGNRAFAEFLTVQTGGTLYRITHTNDIVPRLPPREFGYSHSSPEYWIKSGTLVPVTRSDIVKIEGIDATGGNNQPNIPDIPAHVWYFGLIGTCL

SEQ ID NO: 5660 - protein, 269 aa, Thermomyces lanuginosus
EVSQDLFNQFNLFAQYSAAAYCGKNNRAPAGTQITCTGNACPEVEKADATFLYSFEDSGVGDVTGFLALDNTNKLIVLSFRGSRSIENWIGNLNFDLKEINDICSGCRGHDGFTSSWRSVADTLRQKVEDAVREHPDYRVVFTGHSLGGALATVAGADLRGNGYDIDVFSYGAPRVGNRAFAEFLTVQTGGTLYRITHTNDIVPRLPPREFGYSHSSPEYWIKSGTGVPVRRRDIVKIEGIDATGGNNQPNIPDIPAHLWYFGLIGTCL

SEQ ID NO: 5661 - protein, 269 aa, Thermomyces lanuginosus
EVSQDLFNQFNLFAQYSAAAYCGKNNDAPAGTNITCTGNACPEVEKADATFLYSFKDSGVGDVTGFLALDNTNKVIVLSFRGSRSIENWIGNLNFDLKEINDICSGCRGHDGFTSSWRSVADTLRQKVEDAVREHPDYRVVFTGHSLGGALATVAGADLRGNGYDIDVFSYGAPRVGNRAFAEFLTNQTGGTLYRITHTNDIVPRLPPREFGYSHSSPEYWIKSGTLVPVTRNDIVKIEGIDATGGNNQPNQPDIPAHLWYFGRIGTCL

SEQ ID NO: 5662 - protein, 269 aa, Thermomyces lanuginosus
EVSQDLFNQFNLFAQYSAAAYCGKNNDAPAGTQITCTGNACPEVEKADATFLYSFEDSGVGDVTGFLALDNTNKLIVLSFRGSRSIENWIGNLNFDLKEINDICSGCRGHDGFTSSWRSVADTLRQKVEDAVREHPDYRVVFTGHSLGGALATVAGADLRGNGYDIDVFSYGAPRVGNRAFAEFLTVQTGGTLYRITHTNDIVPRLPPRVFGYSHSSPEYWIKSGTLVPVRRRDIVKIEGIDATGGNNQPNIPSIPAHLWYFGLIGTCL

SEQ ID NO: 5663 - protein, 269 aa, Thermomyces lanuginosus
EVSQDLFNQFNLFAQYSAAAYCGKNNSAEAGTDITCTGNACPEVFKADATFLYSFEDSGVGDVTGFLALDNTRKLIVLSFRGSRSIENWIGNLNFDLKEINDICSGCRGHDGFTSSWRSVADTLRQKVEDAVREHPDYRVVFTGHSLGGALATVAGADLRGNGYDIDVFSYGAPRVGNRAFAEFLTVQTGGTLYRITHTNDIVPRLPPREFGYSHSSPEYWIKSGTLVPVTRNDIVKIEGIDATGGNNQPNIPDIPAHLWYFGLIGTCL

SEQ ID NO: 5664 - protein, 269 aa, Thermomyces lanuginosus
EVSQDLFNQFNLFAQYSAAAYCGKNNSAEAGTDITCTGNACPEVEKADATFLYSFEDSGVGDVTGFLALDNTRKDIVLSFRGSRSIENWIGNLNFDLKEINDICSGCRGHDGFTSSWRSVADTLRQKVEDAVREHPDYRVVFTGHSLGGALATVAGADLRGNGYDIDVFSYGAPRVGNRAFAEFLTVQTGGTLYRITHTNDIVPRLPPREFGYSHSSPEYWIKSGTLVPVTRNDIVKIEGIDATGGNNQPNIPDIPAHLWYFGLIGTCL

SEQ ID NO: 5665 - protein, 269 aa, Thermomyces lanuginosus
EVSQDLFNQFNLFAQYSAAAYCKKNNDAPAGTNITCTGNACPEVEKADATFLYSFKDSGVGDVTGFLALDNTNKLIVLSFRGSRSIENWIGNLNFDLKEINDICSGCRGHDGFTSSWRSVADTLRQKVEDAVREHPDYRVVFTGHSLGGALATVAGADLRGNGYDIDVFSYGAPRVGNRAFAEFLTNQTGGTLYRITHTNDIVPRLPPREFGYSHSSPEYWIKSGTLVPVTRNDIVKIEGIDATGGNNQPNQPDIPAHLWYFGRIGTCL

SEQ ID NO: 5666 - protein, 269 aa, Thermomyces lanuginosus
EVSQDLFNQFNLFAQYSKAAYCGKNNDAPAGTNITCTGNACPEVEKADATFLYSFEDSGVGDVTGFLALDNTNKLIILSFRGSRSIENWIGNLNFDLKEINDICSGCRGHDGFTSSWRSVADTLRQKVEDAVREHPDYRVVFTGHSLGGALATVAWADLRGNGYDIDVFSYGAPRVGNRAFAEFLTTQDGGTLYRITHTNDIVPRLPPREFGYSHSSPEYWIKSGTLVPVTRNDIVKIEGIDATGGNNQPNIPDIPAHLWYFGLIGTCL

SEQ ID NO: 5667 - protein, 269 aa, Thermomyces lanuginosus
EVSQDLFNQFNLFAQYSAAAYCGKNNDAEAGTDITCTGNACPEVEKADATFLYSFEDSGVGDVTGFLALDNTNSDIVLSFRGSRSIENWIGNLNFDLKEINDICSGCRGHDGFTSSWRSVADTLRQKVEDAVREHPDYRVVFTGHSLGGALATVAGADLRGNGYDIDVFSYGAPRVGNRAFAEFLTVQDGGTLYRITHTNDIVPRLPPREFGYSHSSPEYWIKSGTLVPVTRNDIVKIEGIDATGGNNQPNIPDIPAHLWYFGLIGTCL

SEQ ID NO: 5668 - protein, 269 aa, Synthetic construct
EVSQDLFNQFNLFAQYSAAAYCGKNNDAPAGTNITCTGNACPEVEKADATFLYSFEGSGVGDVTGFLALDNTNKLIVLSFRGSRSIENWIGNLKFLLKEINDICSGCRGHDGFTSPWRSVADTLRQKVEDAVREHPDYRVVFTGHSLGGALATVAGADLRGNGYDIDVFSYGAPRVGNRAFAEFLTVQTGGTLYRITHTNDIVPRLPPREFGYSHSSPEYWIKSGTLVPVTRNDIVKIEGIDATGGNNRPNIPDIPAHLWYFGLIGTCL

SEQ ID NO: 5669 - protein, 269 aa, Thermomyces lanuginosus
EVSQDLFNQFNLFAQYSAAAYCQKNNDAPAGTNITCTGNACPEVFKADVTFLYSFEDSGVGDVTGFLALDNTNKLIVLSFRGSRSIENWIGNLNFDLKEINDICSGCRGHDGFTSSWRSVADTLRQKVEDAVREHPDYRVVFTGHSLGGALATVAWADLRGNGYDIDVFSYGAPRVGNRAFAEFLTVQDGGTLYRITHTNDIVPRLPPREFGYSHSSPEYWIKSGTLVPVTRNDIVKIEGIDATGGNNQPNIPDIPAHLWYFGLIGTCL

SEQ ID NO: 5670 - protein, 269 aa, Thermomyces lanuginosus
EVSQDLFNQFNLFAQYSAAAYCKKNNDAPAGTNITCTGNACPEVEKADATFLYSFKDSGVGDVTGFLALDNTNKLIVLSFRGSRSIENWIGNLNFDLKEINDICSGCRGHDGFTSSWRSVADTLRQKVEAAVREHPDYRVVFTGHSLGGALATVAGADLRGNGYDIDVFSYGAPRVGNRAFAEFLTTQTGGTLYRITHTNDIVPRLPPREFGYSHSSPEYWIKSGTLVPVTRNDIVKIEGIDATGGNNQPNIPDIPAHLWYFGRIGTCL

SEQ ID NO: 5671 - protein, 269 aa, Thermomyces lanuginosus
EVSQDLFNQFNLFAQYSAAAYCGKNNDAPAGTNITCTGNACPEVEKADATFLYSFEDSGVGDVTGFLALDNTNKGIVLSFRGSRSIENWIGNLNFDLKEINDICSGCRGHDGFTSSWRSVADTLRQKVEAAVREHPDYRVVFTGHSLGGALATVAGADLRGNGYDIDVFSYGAPRVGNRAFAEFLTTQTGGTLYRITHTNDIVPRLPPREFGYSHSSPEYWIKSGTLVPVTRNDIVKIEGIDATGGNNQPNQPDIPAHLWYFGRIGTCL

SEQ ID NO: 5672 - protein, 269 aa, Thermomyces lanuginosus
EVSRDLFNQFNLFAQYSAAAYCGKNNDAPAGTNITCTGNACPEVEKADATFLYSFEDSGVGDVTGFLALDNTNKLIVLSFRGSRSIENWIGNLNFDLKEINDICSGCRGHDGFTSSWRSVADTLRQKVEDAVREHPDYRVVFTGHSLGGALATVAGADLRGDGYDIDVFSYGAPRVGNRAFAEFLTVQTGGTLYRITSTNDIVPRLPPREFGYSHSSPEYWIKSGTLVPVRRRDIVKIEGIDATGGNNQPNIPDIPAHLWYFGLIGTCL

SEQ ID NO: 5673 - protein, 269 aa, Thermomyces lanuginosus
EVSQDLFNQFNLFAQYSAAAYCGKNNDAPAGTNITCTGNACPEVEKADATFLYSFEDSGVGDVTGFLALDNTNKQIVLSFRGSRSIENWIGNLNFDLKEINDICSGCRGHDGFTSSWRSVADTLRQKVEDAVREHPDYRVVFTGHSLGGALATIAGADLRGNGYDIDVFSYGAPRVGNRAFAEFLTNQQGGTLYRITHTNDIVPRLPPREFGYSHSSPEYWIKSGTLVPVTRNDIVKIEGIDATGGNNQPNIPDIPAHLWYFGRIGTCL

SEQ ID NO: 5674 - protein, 269 aa, Thermomyces lanuginosus
EVSQDLFNQFNLFAQYSAAAYCKKNNDAPAGTNITCTGNACPEVEKADATFLYSFKDSGVGDVTGFLALDNTNKRIVLSFRGSRSIENWIGNLNFDLKEINDICSGCRGHDGFTSSWRSVADTLRQKVEDAVREHPDYRVVFTGHSLGGALATVAGADLRGNGYDIDVFSYGAPRVGNRAFAEFLTNQTGGTLYRITHTNDIVPRLPPREFGYSHSSPEYWIKSGTLVPVTRNDIVKIEGIDATGGNNQPNIPDIPAHLWYFGRIGTCL

SEQ ID NO: 5675 - protein, 269 aa, Thermomyces lanuginosus
EVSQDLFNQFNLFAQYSAAAYCKKNNDAPAGTNITCTGNACPEVEKADATFLYSFEDSGVGDVTGFLALDNTNKQIILSFRGSRSIENWIGNLNFDLKEINDICSGCRGHDGFTSSWRSVADTLRQKVEAAVREHPDYRVVFTGHSLGGALATVAWADLRGNGYDIDVFSYGAPRVGNRAFAEFLTVQTGGTLYRITHTNDIVPRLPPREFGYSHSSPEYWIKSGTLVPVTRNDIVKIEGIDATGGNNQPNIPDIPAHLWYFGLIGTCL

SEQ ID NO: 5676 - protein, 269 aa, Thermomyces lanuginosus
EVSQDLFNQFNLFAQYSAAAYCQKNNDAPAGTNITCTGNACPEVEKADATFLYSFEDSGVGDVTGFLALDNTNKQIILSFRGSRSIENWIGNLNFDLKEINDICSGCRGHDGFTSSWRSVADTLRQKVEDAVREHPDYRVVFTGHSLGGALATVAWADLRGNGYDIDVFSYGAPRVGNRAFAEFLTNQTGGTLYRITHTNDIVPRLPPREFGYSHSSPEYWIKSGTLVPVTRNDIVKIEGIDATGGNNQPNIPDIPAHLWYFGLIGTCL

SEQ ID NO: 5677 - protein, 269 aa, Thermomyces lanuginosus
EVSQDLFNQFNLFAQYSAAAYCQKNNDAPAGTNITCTGNACPEVEKADVTFLYSFEDSGVGDVTGFLALDNTNKQIVLSFRGSRSIENWIGNLNFDLKEINDICSGCRGHDGFTSSWRSVADTLRQKVEDAVREHPDYRVVFTGHSLGGALATVAWADLRGNGYDIDVFSYGAPRVGNRAFAEFLTTQTGGTLYRITHTNDIVPRLPPREFGYSHSSPEYWIKSGTLVPVTRNDIVKIEGIDATGGNNQPNIPDIPAHLWYFGLIGTCL

SEQ ID NO: 5678 - protein, 269 aa, Thermomyces lanuginosus
EVSQDLFNQFNLFAQYSAAAYCGANNDAPAGTNITCTGNACPEVEKADATFLYSFEDSGVGDVTGFLALDNTNKRIVLSFRGSRSIENWIGNLNFDLKEINDICSGCRGHDGFTSSWRSVADTLRQKVEDAVREHPDYRVVFTGHSLGGALATVAWADLRGNGYDIDVFSYGAPRVGNRAFAEFLTNQQGGTLYRITHTNDIVPRLPPREFGYSHSSPEYWIKSGTLVPVTRNDIVKIEGIDATGGNNQPNIPDIPAHLWYFGLIGTCL

SEQ ID NO: 5679 - protein, 269 aa, Thermomyces lanuginosus
EVSQDLFNQFNLFAQYSAAAYCGKNNSAPAGTNITCTGNACPEVEKADATFLYSFEDSGVGDVTGFLALDNTNKRIVLSFRGSRSIENWIGNLNFDLKEINDICSGCRGHDGFTSSWRSVADTLRQKVEDAVREHPDYRVVFTGHSLGGALATTAGADLRGNGYDIDVFSYGAPRVGNRAFAEFLTVQQGGTLYRITHTNDIVPRLPPREFGYSHSSPEYWIKSGTLVPVTRNDIVKIEGIDATGGNNQPNIPDIPAHLWYFGRIGTCL

SEQ ID NO: 5680 - protein, 269 aa, Thermomyces lanuginosus
EVSQDLFNQFNLFAQYSKAAYCGKNNDAPAGTNITCTGNACPEVFKADATFLYSFEDSGVGDVTGFLALDNTRKDIVLSFRGSRSIENWIGNLNFDLKEINDICSGCRGHDGFTSSWRSVADTLRQKVEDAVREHPDYRVVFTGHSLGGALATVAGADLRGNGYDIDVFSYGAPRVGNRAFAEFLTVQDGGTLYRITHTNDIVPRLPPREFGYSHSSPEYWIKSGTLVPVTRNDIVKIEGIDATGGNNQPNIPDIPAHLWYFGLIGTCL

SEQ ID NO: 5681 - protein, 269 aa, Thermomyces lanuginosus
EVSQDLFNQFNLFAQYSAAAYCGKNNDAPAGTNITCAGNACPEVEKADATFLYSFEDSGVGDVTGFLALDNTNKLIVLSFRGSRSIENWIGNLNFALKEINDICSGCRGHDGFTSSWRSVADTLRQKVEDAVREHPDYRVVFTGHSLGGALATVAGADLRGNGYDIDVFSYGAPRVGNRAFAEFLTVQTGGTLYRITHTNDIVPRLPPREFGYSHSSPEYWIKSGTLVPVRRRDIVKIEGIDATGGNNGPNIPDIPAHLWYFGLIGTCL

SEQ ID NO: 5682 - protein, 269 aa, Thermomyces lanuginosus
EVSRDLFNQFNLFAQYSAAAYCGKNNDAPAGTNITCTGNACPEVEKADATFLYSFEDSGVGDVTGFLALDNTNKLIVLSFRGSRSIENWIGNLNFDLKEINDICSGCRGHDGFTSSWRSVADTLRQKVEDAVREHPDYRVVFAGHSLGGALATVAGADLRGNGYDIDVFSYGAPRVGNRAFAEFLTVQTGGTLYRITSTNDIVPRLPPREFGYSHSSPEYWIKSGTLVPVRRRDIVKIEGIDATGGNNQPNIPDIPAHLWYFGLIGTCL

SEQ ID NO: 5683 - protein, 269 aa, Synthetic construct
EVSQDLFNQFNLFAQYSAAAYCGKNNDAPAGTNITCTGNACPEVEKADATFLYSFEDSGVGDVTGFLALDNTNKLIVLSFRGSRSIENWFGNLNFLLKKINDICSGCRGHDGFTSSWRSVADTLRQKVEDAVREHPDYRVVFTGHSLGGALATVAGADLRGNGYDIDVFSYGAPRVGNRAFAEFLTAQTGGTLYRITHTNDIVPRLPPREFGYSHSSPEYWIKSGTLVPVTRNDIVKIEGIDATGGNNQPNIRDIPAHLWYFGLIGTCL

SEQ ID NO: 5684 - protein, 269 aa, Thermomyces lanuginosus
EVSQDLFNQFNLFAQYSKAAYCGKNNSAPAGTNITCTGNACPEVFKADATFLYSFEDSGVGDVTGFLALDNTRKLIVLSFRGSRSIENWIGNLNFDLKEINDICSGCRGHDGFTSSWRSVADTLRQKVEDAVREHPVYRVVFTGHSLGGALATVAGADLRGNGYDIDVFSYGAPRVGNRAFAEFLTVQTGGTLYRITHTNDIVPRLPPREFGYSHSSPEYWIKSGTLVPVTRNDIVKIEGIDATGGNNQPNIPDIPAHLWYFGLIGTCL

SEQ ID NO: 5685 - protein, 269 aa, Synthetic construct
EVSQDLFNQFNLFAQYSAAAYCGKNNDAPAGTNITCTGNACPEVEKADATFLYSFEGSVVGDVTGFLALDNTNKLIVLSFRGSRSIENWIGNLKFLLKEINDICSGCRGHDGFTSSWRSVADTLRQKVEDAVREHPDYRVVFTGHSLGGALATVAGADLRGNGYDIDVFSYGAPRVGNRAFAEFLTVQTGGTLYRITHTNDIVPRLPPREFGYSHSSPEYWIKSGTLVPVTRNDIVKIEGIDATGGNNRPNIPDIPAHLWYFGLIGTCL

SEQ ID NO: 5686 - protein, 269 aa, Thermomyces lanuginosus
EVSQDLFNQFNLFAQYSAAAYCGKNNDAPAGTNITCTGNACPEVEKADATILYSFEDSGVGDVTGFLALDNTNKLIVLSFRGSRSIENWIGNLNFDLKEINDICSGCRGHDGFTSSWRSVADTLRQKVEDAVREHPDYRVVFTGHSLGGALATVAGADLRGDGYDIDVFSYGAPRVGNRAFAEFLTVQTGGTLYRITHTNDIVPRLPPREFGYSHSSPEYWIKSGTLPPVRRRDIVKIEGIDATGGNNQPNIPDIPAHLWYFGLIGTCL

SEQ ID NO: 5687 - protein, 269 aa, Thermomyces lanuginosus
EVSQDLFNQFNLFAQYSKAAYCGANNDAPAGTNITCTGNACPEVEKADATFLYSFEDSGVGDVTGFLALDNTNKLIVLSFRGSRSIENWIGNLRFDLKEINDICSGCRGHDGFTSSWRSVADTLRQKVEDAVREHPDYRVVFTGHSLGGALATVAWADLRGNGYDIDVFSYGAPRVGNRAFAEFLTTQTGGTLYRITHTNDIVPRLPPREFGYSHSSPEYWIKSGTLVPVTRNDIVKIEGIDATGGNNQPNIPDIPAHLWYFGLIGTCL

SEQ ID NO: 5688 - protein, 269 aa, Thermomyces lanuginosus
EVSQDLFNQFNLFAQYSAAAYCGKNNDAPAGTNITCTGNACPEVEKADATFLYSFEDSGVGDVTGFLALDNTNKLIVLSFRGSRSIENWIGNLNFDLKEINDICSGCRGHDGFTSSWRSVADTLRQKVEDAVREHPDYRVVFAGHSLGGALATVAGADLRGNGYDIDVFSYGAPRVGNRAFAEFLTVQTGGTLYRITSTNDIVPRLPPREFGYSHSSPEYWIKSGTLRPVRRRDIVKIEGIDATGGNNQPNIPDIPAHLWYFGLIGTCL

SEQ ID NO: 5689 - protein, 269 aa, Synthetic construct
EVRQDLFNQFNLFAQYSAAAYCGKNNDAPAGTNITCTGNACPEVEKADATFLYSFEDSGVGDVTGFLALDNTNKLIVLSFRGSRSIENWIGNLNFDLKEINDICSGCRGHDGFTSSWRSVADTLRQKVEDAVREHPGYRVVFTGHSLGGALATVAGADLRGNGYDIGVFSYGAPRVGNRAFAEFLTVQTGGTLYRITHTNDIVPRLPPRVFGYSHSSPEYLIKSGTLVPVTRNDIVKIEGIDATGGNNQPNIPDIPAHLWYFGLIGTCL

SEQ ID NO: 5690 - protein, 269 aa, Thermomyces lanuginosus
EVSQDLFNQFNLFAQYSAAAYCGKNNDAPAGTNITCTGNACPEVEKADATFLYSFEDSGVGDVTGFLALDNTNKLIVLSFRGSRSIENWIGNLNFDLKEINDICSGCRGHDGFTSSWRSVADTLRQKVEDAVREHPDYRVVFTGHSLGGALATVAGADLRGNGYDIDVFSYGAPRVGNRAFAEFLTVQTGGTLYRITHTNDIVPRLPPREFGYSHSSPEYWIKSGTLVPVTRNDIVKIEGIDATGGNNQPNIPDIPAHLWYFQATDACL

SEQ ID NO: 5691 - protein, 269 aa, Thermomyces lanuginosus
EVSQDLFNQFNLFAQYSAAAYCGKNNDAPAGTNITCTGNACPEVEKADATFLYSFEDMGVGDVTGFLALDNTNKLIVLSFRGSRSIENWIGNLNFDLKEINDICSGCRGHDGFTSSWRSVADTLRQKVEDAVREHPQYRVVFTGHSLGGALATVAGADLRGNPYDIDVFSYGAPRVGNRAFAEFLTVQTGGTLYRITHTNDIVPRLPPREFGYSHSSPEYWIKSGTMVPVTRNDIVKIEGIDATGGNNQPNIPDIPAHLWYFGRIGTCL

SEQ ID NO: 5692 - protein, 269 aa, Thermomyces lanuginosus
EVSQDLFNQFNLFAQYSKAAYCQKNNDAPAGTNITCTGNACPEVFKADVTFLYSFEDSGVGDVTGFLALDNTNKQIVLSFRGSRSIENWIGNLNFDLKEINDICSGCRGHDGFTSSWRSVADTLRQKVEDAVREHPDYRVVFTGHSLGGALATVAGADLRGNGYDIDVFSYGAPRVGNRAFAEFLTVQTGGTLYRITHTNDIVPRLPPREFGYSHSSPEYWIKSGTLVPVTRNDIVKIEGIDATGGNNQPNIPDIPAHLWYFGLIGTCL

SEQ ID NO: 5693 - protein, 269 aa, Thermomyces lanuginosus
EVSQDLFNQFNLFAQYSAAAYCGKNNRAPAGTNITCTGNACPEVEKADATFLYSFEDSGVGDVTGFLALDNTNKLIVLSFRGSRSIENWIGNLNFDLKEINDICSGCRGHAGFTSSWRSVADTLRQKVEDAVREHPDYRVVFTGHSLGGALATVAGADLRGNGYDIDVFSYGAPRVGNRAFAEFLTVQTGGTLYRITHTNDIVPRLPPREFGYSHPSPEYWIKSGTGVPVTRNDIVKIEGIDATGGNNQPNIPDITAHLWYFGLIGTCL

SEQ ID NO: 5694 - protein, 269 aa, Thermomyces lanuginosus
EVSQDLFNQFNLFAQYSKAAYCGKNNSAEAGTNITCTGNACPEVFKADATFLYSFEDSGVGDVTGFLALDNTNKLIVLSFRGSRSIENWIGNLNFDLKEINDICSGCRGHDGFTSSWRSVADTLRQKVEDAVREHPDYRVVFTGHSLGGALATVAGADLRGNGYDIDVFSYGAPRVGNRAFAEFLTVQDGGTLYRITHTNDIVPRLPPREFGYSHSSPEYWIKSGTLVPVTRNDIVKIEGIDATGGNNQPNIPDIPAHLWYFGLIGTCL

SEQ ID NO: 5695 - protein, 269 aa, Thermomyces lanuginosus
EVSQDLFNQFNLFAQYSAAAYCGKNNDAPAGTQITCTGNACPEVEKADATFLYSFEDSGVGDVTGFLALDNTNKLIVLSFRGSRSIENWITNLNFDLKEINDICSGCRGHDGFTSSWRSVADTLRQKVEDAVREHPDYRVVFTGHSLGGALATVAGADLRGNKYDIDVFSYGAPRVGNRAFAEFLTVQTGGTLYRITHTNDIVPRLPPREFGYSHSSPEYWIKSGTLVPVRRRDIVKIEGIDATGGNNQPNIPDIPAHLWYFGLIGTCL

SEQ ID NO: 5696 - protein, 269 aa, Thermomyces lanuginosus
EVSQDLFNQFNLFAQYSAAAYCGKNNDAPAGTQITCTGNACPEVEKADATFLYSFEDSGVGDVTGFLALDNTNKLIVLSFRGSRSIENWIGNLNFSLKEINDICSGCRGHDGFTSSWRSVADTLRQKVEDAVREHPDYRVVFTGHSLGGALATVAGADLRGNGYDIDVFSYGAPRVGNRAFAEFLTVQTGGTLYRITHTNDIVPRLPPREFGYSHSSPEYWIKSGTLVPVRRRDIVKIEGIDATGGNNRPNIPDIPAHLWYFGLIGTCL

SEQ ID NO: 5697 - protein, 269 aa, Thermomyces lanuginosus
EVSQDLFNQFNLFAQYSAAAYCGKNNDAPAGTNITCTGNACPEVEKADATILYSFEDSGVGDVTGFLALDNTNKLIVLSFRGSRSIENWIGNLNFDLKEINDICSGCRGHDGFTSSWRSVADTLRQKVEDAVREHPDYRVVFAGHSLGGALATVAGADLRGNGYDIDVFSYGAPRVGNRAFAEFLTVQTGGTLYRITNTNDIVPRLPPREFGYSHSSPEYWIKSGTLVPVRRRDIVKIEGIDATGGNNQPNIPDIPAHLWYFGLIGTCL

SEQ ID NO: 5698 - protein, 269 aa, Thermomyces lanuginosus
EVSQDLFNQFNLFAQYSAAAYCGKNNDAPAGTNITCTGNACPEVEKADATFLYSFEDSGVGDVTGFLALDNTNKQIVLSFRGSRSIENWIGNLNFDLKEINDICSGCRGHAGFTSSWRSVADTLRQKVEAAVREHPDYRVVFTGHSLGGALATVAGADLRGNGYDIDVFSYGAPRVGNRAFAEFLTTQQGGTLYRITHTNDIVPRLPPREFGYSHSSPEYWIKSGTLVPVTRNDIVKIEGIDATGGNNQPNIPDIPAHLWYFGLIGTCL

SEQ ID NO: 5699 - protein, 269 aa, Thermomyces lanuginosus
EVSQDLFNQFNLFAQYSAAAYCGKNNDAPAGTNITCTGNACPEVEKADATFLYSFEDSGVGDVTGFLALDNTNKQIVLSFRGSRSIENWIGNLNFDLKEINDICSGCRGHAGFTSSWRSVADTLRQKVEDAVREHPDYRVVFTGHSLGGALATVAGADLRGNGYDIDVFSYGAPRVGNRAFAEFLTNQQGGTLYRITHTNDIVPRLPPREFGYSHSSPEYWIKSGTLVPVTRNDIVKIEGIDATGGNNQPNIPDIPAHLWYFGRIGTCL

SEQ ID NO: 5700 - protein, 269 aa, Thermomyces lanuginosus
EVSQDLFNQFNLFAQYSAAAYCGKNNDAPAGTQITCTGNACPEVEKADATFLYSFEDSGVGDVTGFLALDNTNKLIVLSFRGSRSIENWITNLNFDLKEINDICSGCRGHDGFTSSWRSVADTLRQKVEDAVREHPDYRVVFTGHSLGGALATVAGADLRGNAYDIDVFSYGAPRVGNRAFAEFLTVQTGGTLYRITHTNDIVPRLPPREFGYSHSSPEYWIKSGTLVPVRRRDIVKIEGIDATGGNNQPNIPDIPAHLWYFGLIGTCL

SEQ ID NO: 5701 - protein, 269 aa, Thermomyces lanuginosus
EVSQDLFNQFNLFAQYSAAAYCGKNNDAPAGTNITCTGNACPEVEKADATFLYSFEDSGVGDVTGFLALDNTNKLIVLSFRGSRSIENWIQNLNFDLKEINDICSGCRGHDGFTSSWRSVADTLRQKVEDAVREHPDYRVVFTGHSLGGALATVAGADLRGNGYDIDVFSYGAPRVGNRAFAEFLTVQTGGTLYRITHTNDIVPRLPPRQFGYSHSSPEYWIKSGTLVPVRRRDIVKIEGIDATGGNNQPNIPDAPAHLWYFGLIGTCL

SEQ ID NO: 5702 - protein, 269 aa, Thermomyces lanuginosus
EVSQDLFNQFNLFAQYSAAAYCGKNNDAPAGTNITCTGNACPEVEKADATFLYSFEDSGVGDVTGFLALDNTNKRIVLSFRGSRSIENWIGNLNFDLKEINDICSGCRGHDGFTSSWRSVADTLRQKVEAAVREHPDYRVVFTGHSLGGALATIAGADLRGNGYDIDVFSYGAPRVGNRAFAEFLTVQQGGTLYRITHTNDIVPRLPPREFGYSHSSPEYWIKSGTLVPVTRNDIVKIEGIDATGGNNQPNIPDIPAHLWYFGRIGTCL

SEQ ID NO: 5703 - protein, 269 aa, Thermomyces lanuginosus
EVSQDLFNQFNLFAQYSAAAYCGANNDAPAGTNITCTGNACPEVEKADATFLYSFEDSGVGDVTGFLALDNTNKRIVLSFRGSRSIENWIGNLNFDLKEINDICSGCRGHAGFTSSWRSVADTLRQKVEDAVREHPDYRVVFTGHSLGGALATIAGADLRGNGYDIDVFSYGAPRVGNRAFAEFLTTQTGGTLYRITHTNDIVPRLPPREFGYSHSSPEYWIKSGTLVPVTRNDIVKIEGIDATGGNNQPNIPDIPAHLWYFGLIGTCL

SEQ ID NO: 5704 - protein, 269 aa, Thermomyces lanuginosus
EVSQDLFNQFNLFAQYSAAAYCGKNNDAPAGTNITCTGNACPEVEKADATFLYSFEDSGVGDVTGFLALDNTNKLIVLSFRGSRSIENWIGNLNFELKEINDICSGCRGHDGFTSSWRSVADTLRQKVEDAVREHPDYRVVFTGHSLGGALATVAGADLRGNGYDIDVFSYGAPRVGNRAFAEFLTVQTGGTLYRITHTNDIVPRLPPREFGYSHSSPEYWIKSGTLVPVRRRDIVKIEGIDATGGNNQPNIPSITAHLWYFGLIGTCL

SEQ ID NO: 5705 - protein, 269 aa, Thermomyces lanuginosus
EVSQDLFNQFNLFAQYSAAAYCGKNNSAPAGTNITCTGNACPEVEKADATTLYSFEDSGVGDVTGFLALDNTNKLIVLSFRGSRSIENWIGNLNFDLKEINDICSGCRGHDGFTSSWRSVADTLRQKVEDAVREHPDYRVVFTGHSLGGALATVAGADLRGNGYDIDVFSYGAPRVGNRAFAEFLTNQTGGTLYRITHTNDIVPRLPPREFGYSHSSPEYWIKSGTLVPVTRNDIVKIEGIDATGGNNQPNQPDIPAHLWYFGRIGTCL

SEQ ID NO: 5706 - protein, 269 aa, Thermomyces lanuginosus
EVSQDLFNQFNLFAQYSAAAYCGKNNSAPAGTNITCTGNACPEVEKADATFLYSFEDSGVGDVTGFLALDNTNKQIVLSFRGSRSIENWIGNLNFDLKEINDICSGCRGHAGFTSSWRSVADTLRQKVEAAVREHPDYRVVFTGHSLGGALATVAGADLRGNGYDIDVFSYGAPRVGNRAFAEFLTNQTGGTLYRITHTNDIVPRLPPREFGYSHSSPEYWIKSGTLVPVTRNDIVKIEGIDATGGNNQPNIPDIPAHLWYFGLIGTCL

SEQ ID NO: 5707 - protein, 269 aa, Thermomyces lanuginosus
EVSQDLFNQFNLFAQYSKAAYCGKNNDAPAGTNITCTGNACPEVEKADATFLYSFEDSGVGDVTGFLALDNTNKQIVLSFRGSRSIENWIGNLNFDLKEINDICSGCRGHAGFTSSWRSVADTLRQKVEAAVREHPDYRVVFTGHSLGGALATVAGADLRGNGYDIDVFSYGAPRVGNRAFAEFLTTQTGGTLYRITHTNDIVPRLPPREFGYSHSSPEYWIKSGTLVPVTRNDIVKIEGIDATGGNNQPNIPDIPAHLWYFGLIGTCL

SEQ ID NO: 5708 - protein, 269 aa, Thermomyces lanuginosus
EVSQDLFNQFKLFAQYSAAAYCGKNNQAPAGTNITCTGNACPEVEKADATFLYSFEDSGVGDVTGFLALDNTNKLIVLSFRGSRSIENWFGNLNFDLKEINDICSGCRGHDGFTSSWRSVADTLRQKVEDAVREHPDYRVVFTGHSLGGALATVAGADLRGNGYDIDVFSYGAPRVGNRAFAEFLTVQTGGTLYRITHTNDIVPRLPPREFGYSHSSPEYWIKSGTLVPVTRQDIVKIEGIDATGGNNQPNIPDITAHLWYFGLIGTCL

SEQ ID NO: 5709 - protein, 269 aa, Thermomyces lanuginosus
EVSQDLFNQFNLFAQYSKAAYCQKNNDAPAGTNITCTGNACPEVEKADVTFLYSFEDSGVGDVTGFLALDNTNKLIILSFRGSRSIENWIGNLNFDLKEINDICSGCRGHDGFTSSWRSVADTLRQKVEDAVREHPDYRVVFTGHSLGGALATVAGADLRGNGYDIDVFSYGAPRVGNRAFAEFLTTQTGGTLYRITHTNDIVPRLPPREFGYSHSSPEYWIKSGTLVPVTRNDIVKIEGIDATGGNNQPNIPDIPAHLWYFGLIGTCL

SEQ ID NO: 5710 - protein, 269 aa, Thermomyces lanuginosus
EVSDDLFNQFNLFAQYSAAAYCGKNNNAPAGTNITCTGNACPEVEKADATFLYSFEDSGVGDVTGFLALDNTNKLIVLSFRGSRSIENWFGNLNFDLKEINDICSGCRGHDGFTSSWRSVADTLRQKVEDAVREHPDYRVVFTGHSLGGALATVAGADLRGNGYDIDVFSYGAPRVGNRAFAEFLTVQTGGTLYRITHTNDIVPRLPPREFGYSHSSPEYWIKSGTLVPVTRQDIVKIEGIDATGGNNQPNIPDITAHLWYFGLIGTCL

SEQ ID NO: 5711 - protein, 269 aa, Thermomyces lanuginosus
EVSQDLFNQFNLFAQYSAAAYCGKNNSAPAGTNITCTGNACPEVEKADATFLYSFKDMGVGDVTGFLALDNTNKLIVLSFRGSRSIENWIGNLNFDLKEINDICSGCRGHDGFTSSWRSVADTLRQKVEDAVREHPDYRVVFTGHSLGGALATVAGADLRGNGYDIDVFSYGAPRVGNRAFAEFLTVQTGGTLYRITHTNDIVPRLPPREFGYSHSSPEYWIKSGTLVPVTRQDIVKIEGIDATGGNNQPNIPDITAHLWYFGLIGTCL

SEQ ID NO: 5712 - protein, 269 aa, Thermomyces lanuginosus
EVSQDLFNQFNLFAQYSAAAYCGKNNDAPAGTNITCTGNACPEVEKADATTLYSFEDSGVGDVTGFLALDNTNKQIVLSFRGSRSIENWIQNLNFDLKEINDICSGCRGHDGFTSSWRSVADTLRQKVEAAVREHPDYRVVFTGHSLGGALATVAGADLRGNGYDIDVFSYGAPRVGNRAFAEFLTVQTGGTLYRITHTNDIVPRLPPREFGYSHSSPEYWIKSGTLVPVTRNDIVKIEGIDATGGNNQPNIPDIPAHLWYFGRIGTCL

SEQ ID NO: 5713 - protein, 269 aa, Thermomyces lanuginosus
EVSQDLFNQFNLFAQYSAAAYCGKNNDAPAGTNITCTGNACPEVEKADATFLYSFEDSGVGDVTGFLALDNTNKLIVLSFRGSRSIENWIGNLNFELKEINDICSGCRGHAGFTSSWRSVADTLRQKVEDAVREHPDYRVVFTGHSLGGALATVAGADLRGNKYDIDVFSYGAPRVGNRAFAEFLTVQTGGTLYRITHTNDIVPRLPPREFGYSHSSPEYWIKSGTLVPVRRRDIVKIEGIDATGGNNQPNIPDIPAHLWYFGLIGTCL

SEQ ID NO: 5714 - protein, 269 aa, Thermomyces lanuginosus
EVSQDLFNQFNLFAQYSAAAYCGKNNRAPAGTNITCTGNACPEVEKADATFLYSFEDSGVGDVTGFLALDNTNKLIVLSFRGSRSIENWIGNLNFDLKEINDICSGCRGHDGFTSSWRSVADTLRQKVEDAVREHPDYRVVFTGHSLGGALATVAGADLRGNGYDIDVFSYGAPRVGNRAFAEFLTVQTGGTLYRITHTNDIVPRLPPREFGYSHSSPEYWIKSGTLVPVRRRDIVKIEGIDATGGNNQPNIPSITAHLWYFGLIGTCL

SEQ ID NO: 5715 - protein, 269 aa, Thermomyces lanuginosus
EVSQDLFNQFNLFAQYSAAAYCKANNDAPAGTNITCTGNACPEVEKADATFLYSFEDSGVGDVTGFLALDNTNKLIVLSFRGSRSIENWIGNLNFDLKEINDICSGCRGHAGFTSSWRSVADTLRQKVEAAVREHPDYRVVFTGHSLGGALATVAGADLRGNGYDIDVFSYGAPRVGNRAFAEFLTTQTGGTLYRITHTNDIVPRLPPREFGYSHSSPEYWIKSGTLVPVTRNDIVKIEGIDATGGNNQPNIPDIPAHLWYFGLIGTCL

SEQ ID NO: 5716 - protein, 269 aa, Thermomyces lanuginosus
EVSQDLFNQFNLFAQYSAAAYCGKNNDAEAGTDITCTGNACPEVEKADATFLYSFEDSGVGDVTGFLALDNTRKDIVLSFRGSRSIENWIGNLNFDLKEINDICSGCRGHDGFTSSWRSVADTLRQKVEDAVREHPDYRVVFTGHSLGGALATVAGADLRGNGYDIDVFSYGAPRVGNRAFAEFLTVQDGGTLYRITHTNDIVPRLPPREFGYSHSSPEYWIKSGTLVPVTRNDIVKIEGIDATGGNNQPNIPDIPAHLWYFGLIGTCL

SEQ ID NO: 5717 - protein, 269 aa, Thermomyces lanuginosus
EVSQDLFNQFNLFAQYSKAAYCGKNNSAEAGTDITCTGNACPEVEKADATFLYSFEDSGVGDVTGFLALDNTNKDIVLSFRGSRSIENWIGNLNFDLKEINDICSGCRGHDGFTSSWRSVADTLRQKVEDAVREHPDYRVVFTGHSLGGALATVAGADLRGNGYDIDVFSYGAPRVGNRAFAEFLTVQTGGTLYRITHTNDIVPRLPPREFGYSHSSPEYWIKSGTLVPVTRNDIVKIEGIDATGGNNQPNIPDIPAHLWYFGLIGTCL

SEQ ID NO: 5718 - protein, 269 aa, Thermomyces lanuginosus
EVSQDLFNQFNLFAQYSAAAYCQANNDAPAGTNITCTGNACPEVEKADATFLYSFEDSGVGDVTGFLALDNTNKQIVLSFRGSRSIENWIGNLNFDLKEINDICSGCRGHDGFTSSWRSVADTLRQKVEDAVREHPDYRVVFTGHSLGGALATVAWADLRGNGYDIDVFSYGAPRVGNRAFAEFLTNQTGGTLYRITHTNDIVPRLPPREFGYSHSSPEYWIKSGTLVPVTRNDIVKIEGIDATGGNNQPNIPDIPAHLWYFGLIGTCL

SEQ ID NO: 5719 - protein, 269 aa, Thermomyces lanuginosus
EVSRDLFNQFNLFAQYSAAAYCGKNNDAPAGTNITCTGNACPEVEKADATFLYSFEDSGVGDVTGFLALDNTNKLIVLSFRGSRSIENWIGNLNFDLKEINDICSGCRGHDGFTSSWRSVADTLRQKVEDAVREHPDYRVVFTGHSLGGALATVAGADLRGNGYDIDVFSYGAPRVGNRAFAEFLTVQTGGTLYRITSTNDIVPRLPPREFGYSHSSPEYWIKSGTLPPVRRRDIVKIEGIDATGGNNQPNIPDIPAHLWYFGLIGTCL

SEQ ID NO: 5720 - protein, 269 aa, Thermomyces lanuginosus
EVSQDLFNQFNLFAQYSAAAYCGKNNDAPAGTNITCTGNACPEVEKADATFLYSFEDSGVGDVTGFLALDNTNKLIVLSFRGSRSIENWIGNLNFDLKEINDICSGCRGHDGFTSSWRSVADTLRQKVEDAVREHPDYRVVFTGHSLGGALATVAGADLRGDGYDIDVFSYGAPRVGNRAFAEFLTVQTGGTLYRITSTNDIVPRLPPREFGYSHSSPEYWIKSGTLRPVRRRDIVKIEGIDATGGNNQPNIPDIPAHLWYFGLIGTCL

SEQ ID NO: 5721 - protein, 269 aa, Thermomyces lanuginosus
EVSQDLFNQFNLFAQYSKAAYCQKNNDAPAGTNITCTGNACPEVEKADVTFLYSFEDSGVGDVTGFLALDNTNKQIVLSFRGSRSIENWIGNLNFDLKEINDICSGCRGHDGFTSSWRSVADTLRQKVEDAVREHPDYRVVFTGHSLGGALATVAGADLRGNGYDIDVFSYGAPRVGNRAFAEFLTTQTGGTLYRITHTNDIVPRLPPREFGYSHSSPEYWIKSGTLVPVTRNDIVKIEGIDATGGNNQPNIPDIPAHLWYFGLIGTCL

SEQ ID NO: 5722 - protein, 269 aa, Thermomyces lanuginosus
EVSQDLFNQFNLFAQYSAAAYCGKNNDAPAGTNITCTGNACPEVEKADATFLYSFEDSGVGDVTGFLALDNTNKLIVLSFRGSRSIENWIGNLNFDLKEINDICSGCRGHDGFTSSWRSVADTLRQKVEDAVREHPDYRVVFTGHSLGGALATVAGADLRGNGYDIDVFSYGAPRVGNRAFAEFLTVQTGGTLYRITHTNDIVPRLPPREFGYSHSSPEYWIKIWNPCPVTRNDIVKIEGIDATGGNNQPNIPDIPAHLWYFGLIGTCL

SEQ ID NO: 5723 - protein, 269 aa, Thermomyces lanuginosus
EVSQDLFNQFNLFAQYSAAAYCGKNNDAPAGTNITCTGNACPEVEKAQATFLYSFEDSGVGDVTGFLALDNTNKLIVLSFRGSRSIENWIGNLNFDLKEINDICSGCRGHDGFTSSWRSVADTLRQKVEAAVREHPDYRVVFTGHSLGGALATVAGADLRGNPYDIDVFSYGAPRVGNRAFAEFLTVQTGGTLYRITHTNDIVPRLPPREFGYSHSSPEYWIKSGTMVPVTRNDIVKIEGIDATGGNNQPNIPDIPAHLWYFGRIGTCL

SEQ ID NO: 5724 - protein, 269 aa, Thermomyces lanuginosus
EVSRDLFNQFNLFAQYSAAAYCGKNNDAPAGTNITCTGNACPEVEKADATFLYSFEDSGVGDVTGFLALDNTNKLIVLSFRGSRSIENWIGNLNFDLKEINDICSGCRGHDGFTSSWRSVADTLRQKVEDAVREHPDYRVVFTGHSLGGALATVAGADLRGDGYDIDVFSYGAPRVGNRAFAEFLTVQTGGTLYRITHTNDIVPRLPPREFGYSHSSPEYWIKSGTLRPVRRRDIVKIEGIDATGGNNQPNIPDIPAHLWYFGLIGTCL

SEQ ID NO: 5725 - protein, 269 aa, Thermomyces lanuginosus
EVSQDLFNQFRLFAQYSAAAYCGKNNDAPAGTQITCTGNACPEVEKADATFLYSFEDSGVGDVTGFLALDNTNKLIVLSFRGSRSIENWIGNLNFDLKEINDICSGCRGHDGFTSSWRSVADTLRQKVEDAVREHPDYRVVFTGHSLGGALATVAGADLRGNGYDIDVFSYGAPRVGNRAFAEFLTVQTGGTLYRITHTNDIVPRLPPREFGYSHSSPEYWIKSGTLVPVRRRDIVKIEGIDASGGNNQPNIPDIPAHLWYFGLIGTCL

SEQ ID NO: 5726 - protein, 269 aa, Thermomyces lanuginosus
EVSQDLFNQFNLFAQYSAAAYCGKNNDAPAGTQITCTANACPEVEKADATFLYSFEDSGVGDVTGFLALDNTNKLIVLSFRGSRSIENWIGNLNFDLKEINDICSGCRGHDGFTSSWRSVADTLRQKVEDAVREHPDYRVVFTGHSLGGALATVAGADLRGNAYDIDVFSYGAPRVGNRAFAEFLTVQTGGTLYRITHTNDIVPRLPPREFGYSHSSPEYWIKSGTLVPVRRRDIVKIEGIDATGGNNQPNIPDIPAHLWYFGLIGTCL

SEQ ID NO: 5727 - protein, 269 aa, Thermomyces lanuginosus
EVSQDLFNQFNLFAQYSAAAYCGKNNEAPAGTNITCTGNACPEVEKADATFLYSFEDSGVGDVTGFLALDNTNKLIVLSFRGSRSIENWIGNLNFDLKEINDICSGCRGHDGFTSSWRSVADTLRQKVEDAVREHPQYRVVFTGHSLGGALATVAGADLRGNPYDIDVFSYGAPRVGNRAFAEFLTVQTGGTLYRITHTNDIVPRLPPREFGYSHSSPEYWIKSGTLVPVTRQDIVKIEGIDATGGNNQPNIPDIPAHLWYFGRIGTCL

SEQ ID NO: 5728 - protein, 269 aa, Thermomyces lanuginosus
EVSQDLFNQFNLFAQYSAAAYCGKNNDAPAGTQITCTGNACPEVEKADATFLYSFEDSGVGDVTGFLALDNTNKLIVLSFRGSRSIENWIGNLNFDLKEINDICSGCRGHDGFTSSWRSVADTLRQKVEDAVREHPDYRVVFTGHSLGGALATVAGADLRGNGYDIDVFSYGAPRVANRAFAEFLTVQTGGTLYRITHTNDIVPRLPPREFGYSHSSPEYWIKSGTLVPVRRRDIVKIEGIDATGANNQPNIPDIPAHLWYFGLIGTCL

SEQ ID NO: 5729 - protein, 269 aa, Synthetic construct
EVSQDLFNQFNLFAQYSAAAYCGKNNDAPAGTNITCTGNACPEVEKADATFLYSFEDSGVGDVTGFLALDNTNKLIVLSFRGSRSIENWFGNLNFLLKKINDICSGCRGHDGFTSSWRSVADTLRQKVEDAVREHPDYRVVFTGHSLGGALATVAGADLRGNGYDIDVFSYGAPRVGNRAFAEFLTAQTGGTLYRITHTNDIVPRLPPREFGYSHSSPEYWIKSGTLVPVTRNYIVKIEGIDATGGNNQPNIPDIPAHLWYFGLIGTCL

SEQ ID NO: 5730 - protein, 269 aa, Thermomyces lanuginosus
EVSQDLFNQFNLFAQYSAAAYCGKNNDAPAGTNITCTANACPEVEKADATFLYSFEDSGVGDVTGFLALDNTNKLIVLSFRGSRSIENWIGNLNFELKEINDICSGCRGHAGFTSSWRSVADTLRQKVEDAVREHPDYRVVFTGHSLGGALATVAGADLRGNGYDIDVFSYGAPRVGNRAFAEFLTVQTGGTLYRITHTNDIVPRLPPREFGYSHSSPEYWIKSGTLVPVRRRDIVKIEGIDATGGNNQPNIPDIPAHLWYFGLIGTCL

SEQ ID NO: 5731 - protein, 269 aa, Thermomyces lanuginosus
EVSQDLFNQFNLFAQYSAAAYCGKNNDAPAGTNITCTGNACPEVEKADATFLYSFEDSGVGDVTGFLALDNTNKLIVLSFRGSRSIENWIGNLNFDLKEINDICSGCRGHAGFTSSWRSVADTLRQKVEDAVREHPDYRVVFTGHSLGGALATVAGADLRGNGYDIDVFSYGAPRVGNRAFAEFLTVQTGGTLYRITHTNDIVPRLPPREFGYSHSSPEYWIKSGTLVPVRRRDIVKIEGIDATGGNNQPNIPSITAHLWYFGLIGTCL

SEQ ID NO: 5732 - protein, 269 aa, Thermomyces lanuginosus
EVSVDLFNQFNLFAQYSAAAYCGKNNDAPAGTNITCTGNACPEVEKADATFLYSFEDNGSGDVTGFLALDNTNKLIVLSFRGSRSIENWIGNLNFDLKEINDICSGCRGHDGFTSSWRSVADTLRQKVEDAVREHPDYRVVFTGHSLGGALATVAGADLRGNGYDIDVFSYGAPRVGNRAFAEFLTVQTGGTLYRITHTNDIVPRLPPREFGYSHSSPEYWIKSGTLVPVRRRDIVKIEGIDATGGNNQPNIPDIPAHLWYFGLIGTCL

SEQ ID NO: 5733 - protein, 269 aa, Thermomyces lanuginosus
EVSQDLFNQFNLFAQYSAAAYCGKNNEAPAGTNITCTGNACPEVEKADATFLYSFEDSGVGDVTGFLALDNTNKLIVLSFRGSRSIENWIGNLNFDLKEINDICSGCRGHDGFTSSWRSVADTLRQKVEDAVREHPDYRVVFTGHSLGGALATVAGADLRGNPYDIDVFSYGAPRVGNRAFAEFLTVQTGGTLYRITHTNDIVPRLPPREFGYSHSSPEYWIKSGTMVPVTRQDIVKIEGIDATGGNNQPNIPDIPAHLWYFGRIGTCL

SEQ ID NO: 5734 - protein, 269 aa, Thermomyces lanuginosus
EVSQDLFNQFNLFAQYSAAAYCGKNNDAPAGTNITCTGNACPEVEKADATFLYSFGDSGVGDVTGFLALDNTNKLIVLSFRGSRSIDNWIGNLNFDLKEINDICSGCRGHDGFTSSWRSVADTLRQKVEDAVREHPDYRVVFTGHSLGGALATVAGADLRGNGYDIDVFSYGAPRVGNRAFAEFLTVQTGGTLYRITHTNDIVPRLPPREFGYSHSSPEYWIKSGTLVPVRRRDIVKIEGIDATGGNNQPNIPAIPAHLWYFGLIGTCL

SEQ ID NO: 5735 - protein, 269 aa, Thermomyces lanuginosus
EVSQDLFNQFNLFAQYSAAAYCGKNNDAPAGTQITCTGNACPEVEKADATFLYSFEDSGVGDVTGFLALDNTNKLIVLSFRGSRSIENWIGNLNFDLKEINDICSGCRGHNGFTSSWRSVADTLRQKVEDAVREHPDYRVVFTGHSLGGALATVAGADLRGNGYDIDVFSYGAPRVGNRAFAEFLTVQTGGTLYRITHTNDIVPRLPPREFGYSHPSPEYWIKSGTLVPVRRRDIVKIEGIDATGGNNQPNIPDIPAHLWYFGLIGTCL

SEQ ID NO: 5736 - protein, 269 aa, Thermomyces lanuginosus
EVSQDLFNQFNLFAQYSAAAYCGKNNDAPAGTNITCTGNACPEVEKADATFLYSFEDSGVGDVTGFLALDNTNKLIVLSFRGSRSIENWIGNLNFDLKEINDICSGCRGHDGFTSSWRSVADTLRQKVEDAVREHPDYRVVFAGHSLGGALATVAGADLRGNGYDIDVFSYGAPRVGNRAFAEFLTVQTGGTLYRITNTNDIVPRLPPREFGYSHSSPEYWIKSGTLRPVRRRDIVKIEGIDATGGNNQPNIPDIPAHLWYFGLIGTCL

SEQ ID NO: 5737 - protein, 269 aa, Thermomyces lanuginosus
EVSQDLFNQFNLFAQYSAAAYCGKNNDAPAGTNITCTGNACPEVEKADATFLYSFEDSGVGDVTGFLALDNTNKLIVLSFRGSRSIENWIGNLNFDLKEINDICSGCRGHDGFTSSWRSVADTLRQKVEDAVREHPDYRVVFTGHSLGGGLATVAGADLRGNGYDIDVFSYGAPRVGNRAFAEFLTVQTGGTLYRITHTNDIVPRLPPRQFGYSHSSPEYWIKSGTLVPVRRRDIVKIEGIDATGGNNQPNIPDAPAHLWYFGLIGTCL

SEQ ID NO: 5738 - protein, 269 aa, Thermomyces lanuginosus
EVSQDLFNQFNLFAQYSAAAYCGKNNEAPAGTNITCTGNACPEVEKADATFLYSFEDSGVGDVTGFLALDNTNKLIVLSFRGSRSIENWIGNLNFDLKEINDICSGCRGHDGFTSSWRSVADTLRQKVEAAVREHPDYRVVFTGHSLGGALATVAGADLRGNPYDIDVFSYGAPRVGNRAFAEFLTVQTGGTLYRITHTNDIVPRLPPREFGYSHSSPEYWIKSGTLVPVTRQDIVKIEGIDATGGNNQPNIPDIPAHLWYFGRIGTCL

SEQ ID NO: 5739 - protein, 269 aa, Thermomyces lanuginosus
EVSRDLFNQFNLFAQYSAAAYCGKNNDAPAGTNITCTGNACPEVEKADATILYSFEDSGVGDVTGFLALDNTNKLIVLSFRGSRSIENWIGNLNFDLKEINDICSGCRGHDGFTSSWRSVADTLRQKVEDAVREHPDYRVVFTGHSLGGALATVAGADLRGNGYDIDVFSYGAPRVGNRAFAEFLTVQTGGTLYRITHTNDIVPRLPPREFGYSHSSPEYWIKSGTLRPVRRRDIVKIEGIDATGGNNQPNIPDIPAHLWYFGLIGTCL

SEQ ID NO: 5740 - protein, 269 aa, Thermomyces lanuginosus
EVSRDLFNQFNLFAQYSAAAYCGKNNDAPAGTNITCTGNACPEVEKADATILYSFEDSGVGDVTGFLALDNTNKLIVLSFRGSRSIENWIGNLNFDLKEINDICSGCRGHDGFTSSWRSVADTLRQKVEDAVREHPDYRVVFTGHSLGGALATVAGADLRGNGYDIDVFSYGAPRVGNRAFAEFLTVQTGGTLYRITNTNDIVPRLPPREFGYSHSSPEYWIKSGTLVPVRRRDIVKIEGIDATGGNNQPNIPDIPAHLWYFGLIGTCL

SEQ ID NO: 5741 - protein, 269 aa, Thermomyces lanuginosus
EVSQDLFNQFNLFAQYSKAAYCKANNDAPAGTNITCTGNACPEVEKADATFLYSFEDSGVGDVTGFLALDNTNKRIVLSFRGSRSIENWIGNLRFDLKEINDICSGCRGHDGFTSSWRSVADTLRQKVEDAVREHPDYRVVFTGHSLGGALATVAGADLRGNGYDIDVFSYGAPRVGNRAFAEFLTVQTGGTLYRITHTNDIVPRLPPREFGYSHSSPEYWIKSGTLVPVTRNDIVKIEGIDATGGNNQPNIPDIPAHLWYFGLIGTCL

SEQ ID NO: 5742 - protein, 269 aa, Thermomyces lanuginosus
EVSQDLFNQFNLFAQYSAAAYCGKNNDAPAGTNITCTGNACPEVEKADATILYSFEDSGVGDVTGFLALDNTNKLIVLSFRGSRSIENWIGNLNFELKEINDICSGCRGHDGFTSSWRSVADTLRQKVEDAVREHPDYRVVFTGHSLGGALATVAGADLRGNGYDIDVFSYGAPRVGNRAFAEFLTVQTGGTLYRITHTNDIVPRLPPREFGYSHSSPEYWIKSGTLVPVRRRDIVKIEGIDATGGNNQPNIPSIPAHLWYFGLIGTCL

SEQ ID NO: 5743 - protein, 269 aa, Thermomyces lanuginosus
EVSQDLFNQFNLFAQYSAAAYCQANNDAPAGTNITCTGNACPEVEKADATFLYSFEDSGVGDVTGFLALDNTNKQIILSFRGSRSIENWIGNLNFDLKEINDICSGCRGHDGFTSSWRSVADTLRQKVEDAVREHPDYRVVFTGHSLGGALATVAGADLRGNGYDIDVFSYGAPRVGNRAFAEFLTQQTGGTLYRITHTNDIVPRLPPREFGYSHSSPEYWIKSGTLVPVTRNDIVKIEGIDATGGNNQPNIPDIPAHLWYFGLIGTCL

SEQ ID NO: 5744 - protein, 269 aa, Thermomyces lanuginosus
EVSQDLFNQFNLFAQYSAAAYCGKNNDAPAGTNITCTGNACPEVEKADATTLYSFEDSGVGDVTGFLALDNTNKQIVLSFRGSRSIENWIGNLNFDLKEINDICSGCRGHDGFTSSWRSVADTLRQKVEDAVREHPDYRVVFTGHSLGGALATVAGADLRGNGYDIDVFSYGAPRVGNRAFAEFLTNQTGGTLYRITHTNDIVPRLPPREFGYSHSSPEYWIKSGTLVPVTRNDIVKIEGIDATGGNNQPNQPDIPAHLWYFGRIGTCL

SEQ ID NO: 5745 - protein, 269 aa, Thermomyces lanuginosus
EVSQDLFNQFNLFAQYSAAAYCGKNNDAPAGTNITCTGNACPEVEKADATFLYSFEDSGVGDVTGFLALDNTNKQIVLSFRGSRSIENWIGNLRFDLKEINDICSGCRGHDGFTSSWRSVADTLRQKVEAAVREHPDYRVVFTGHSLGGALATVAWADLRGNGYDIDVFSYGAPRVGNRAFAEFLTTQTGGTLYRITHTNDIVPRLPPREFGYSHSSPEYWIKSGTLVPVTRNDIVKIEGIDATGGNNQPNIPDIPAHLWYFGLIGTCL

SEQ ID NO: 5746 - protein, 269 aa, Thermomyces lanuginosus
EVSQDLFNQFNLFAQYSKAAYCGKNNDAPAGTNITCTGNACPEVFKADVTFLYSFEDSGVGDVTGFLALDNTNKQIVLSFRGSRSIENWIGNLNFDLKEINDICSGCRGHDGFTSSWRSVADTLRQKVEDAVREHPDYRVVFTGHSLGGALATVAWADLRGNGYDIDVFSYGAPRVGNRAFAEFLTVQTGGTLYRITHTNDIVPRLPPREFGYSHSSPEYWIKSGTLVPVTRNDIVKIEGIDATGGNNQPNIPDIPAHLWYFGLIGTCL

SEQ ID NO: 5747 - protein, 269 aa, Thermomyces lanuginosus
EVSQDLFNQFNLFAQYSAAAYCGKNNDAPAGTNITCTGNACPEVEKADATVLYSFEDSGVGDVTGFLALDNTNKLIVLSFRGSRSIENWIGNLNFELKEINDICSGCRGHDGFTSSWRSVADTLRQKVEDAVREHPDYRVVFTGHSLGGALATVAGADLRGNGYDIDVFSYGAPRVGNRAFAEFLTVQTGGTLYRITHTNDIVPRLPPREFGYSHSSPEYWIKSGTLVPVRRRDIVKIEGIDATGGNNQPNIPSIPAHLWYFGLIGTCL

SEQ ID NO: 5748 - protein, 269 aa, Synthetic construct
EVSQDLFNQFNLFAQYSAAAYCGKNNDAPAGTNITCTGNACPEVEKADATFLYSFEGSGVGDVTGFLALDNTNKLIVLSFRGSRSIENWIGNLKLXLKEINDICSGCRGHDGFTSSWRSVADTLRQKVEDAVREHPDYRVVFTGHSLGGALATVAGADLRGNGYDIDVFSYGAPRVGNRAFAEFLTVQTGGTLYRITHTNDIVPRLPPREFGYSHSSPEYWIKSGTLVPVTRNDIVKIEGIDATGGNNRPNIPDIPAHLWYFGLIGTCL

SEQ ID NO: 5749 - protein, 269 aa, Thermomyces lanuginosus
EVSQDLFNQFNLFAQYSAAAYCGKNNDAPAGTQITCTGNACPEVEKADATFLYSFEDSGVGDVTGFLALDNTNKLIVLSFRGSRSIENWIMNLNFDLKEINDICSGCRGHDGFTSSWRSVADTLRQKVEDAVREHPDYRVVFTGHSLGGALATVAGADLRGNPYDIDVFSYGAPRVGNRAFAEFLTVQTGGTLYRITHTNDIVPRLPPREFGYSHSSPEYWIKSGTLVPVRRRDIVKIEGIDATGGNNQPNIPDIPAHLWYFGLIGTCL

SEQ ID NO: 5750 - protein, 269 aa, Thermomyces lanuginosus
EVSQDLFNQFNLFAQYSAAAYCGKNNDAPAGTQITCTGNACPEVEKADATFLYSFEDSGVGDVTGFLALDNTNKLIVLSFRGSRSIENWIGNFNFDLKEINYICSGCRGHDGFTSSWRSVADTLRQKVEDAVREHPDYRVVFTGHSLGGALATVAGADLRGNGYDIDVFSYGAPRVGNRAFAEFLTVQTGGTLYRITHTNDIVPRLPPREFGYSHSSPEYWIKSGTLVPVRRRDIVKIEGIDATGGNNQPNIPDIPAHLWYFGLIGTCL

SEQ ID NO: 5751 - protein, 269 aa, unidentified
EVSQDLFNQFNLFAQYSAAAYCGKNNDAPAGTNITCTGNACPEVEKADATFLYSFEDSGVGDVTGFLALDNTNKLIVLSFRGSRSIENWIGNLNFELKEINDICSGCRGHAGFTSSWRSVADTLRQKVEDAVREHPDYRVVFTGHSLGGALATVAGADLRGNGYDIDVFSYGAPRVGNRAFAEFLTVQTGGTLYRITHTNDIVPRLPPREFGYSHSSPEYWIKSGTLVPVRRRDIVKIEGIDATGGNNQPNIPSIPAHLWYFGLIGTCL

SEQ ID NO: 5752 - protein, 269 aa, Thermomyces lanuginosus
EVSQDLFNQFNLFAQYSAAAYCGKNNDAPAGTKITCTGNACPEVEKADATVLYSFEDSGVGDVTGFLALDNTNKLIVLSFRGSRSIENWIGNLNFDLEEINDICSGCRGHDGFTSSWRSVADTLRQKVEDAVREHPDYRVVFTGHSLGGALATVAGADLRGNGYDIDVFSYGAPRVGNRAFAEFLTVQTGGTLYRITHTNDIVPRLPPREFGYSHSSPEYWIKSGTLVPVRRRDIVKIEGIDATGGNNQPNIPDIPAHLWYFGLIGTCL

SEQ ID NO: 5753 - protein, 269 aa, Thermomyces lanuginosus
EVSQDLFNQFNLFAQYSAAAYCGKNNDAPAGTNITCTGNACPEVEKADATFLYSFEDSGVGDVTGFLALDNTNKLIVLSFRGSRSIENWIGNLNFDLKEINDICSGCRGHDGFTSSWRSVADTLRQKVEDAVREHPDYRVVFAGHSLGGALATVAGADLRGNGYDIDVFSYGAPRVGNRAFAEFLTVQTGGTLYRITSTNDIVPRLPPREFGYSHSSPEYWIKSGTLPPVRRRDIVKIEGIDATGGNNQPNIPDIPAHLWYFGLIGTCL

SEQ ID NO: 5754 - protein, 269 aa, Thermomyces lanuginosus
EVSQDLFNQFNLFAQYSAAAYCGKNNDAPAGTQITCTGNACPEVEKADATFLYSFEDSGVGDVTGFLALDNTNKLIVLSFRGSRSIENWIMNLNFDLKEINDICSGCRGHDGFTSSWRSVADTLRQKVEDAVREHPDYRVVFTGHSLGGALATVAGADLRENGYDIDVFSYGAPRVGNRAFAEFLTVQTGGTLYRITHTNDIVPRLPPREFGYSHSSPEYWIKSGTLVPVRRRDIVKIEGIDATGGNNQPNIPDIPAHLWYFGLIGTCL

SEQ ID NO: 5755 - protein, 269 aa, Thermomyces lanuginosus
EVSQDLFNQFNLFAQYSAAAYCQANNDAPAGTNITCTGNACPEVEKADATFLYSFEDSGVGDVTGFLALDNTNKRIVLSFRGSRSIENWIGNLNFDLKEINDICSGCRGHDGFTSSWRSVADTLRQKVEDAVREHPDYRVVFTGHSLGGALATVAWADLRGNGYDIDVFSYGAPRVGNRAFAEFLTQQTGGTLYRITHTNDIVPRLPPREFGYSHSSPEYWIKSGTLVPVTRNDIVKIEGIDATGGNNQPNIPDIPAHLWYFGLIGTCL

SEQ ID NO: 5756 - protein, 269 aa, Thermomyces lanuginosus
EVSRDLFNQFNLFAQYSAAAYCGKNNDAPAGTNITCTGNACPEVEKADATFLYSFEDSGVGDVTGFLALDNTNKLIVLSFRGSRSIENWIGNLNFDLKEINDICSGCRGHDGFTSSWRSVADTLRQKVEDAVREHPDYRVVFTGHSLGGALATVAGADLRGNGYDIDVFSYGAPRVGNRAFAEFLTVQTGGTLYRITNTNDIVPRLPPREFGYSHSSPEYWIKSGTLRPVRRRDIVKIEGIDATGGNNQPNIPDIPAHLWYFGLIGTCL

SEQ ID NO: 5757 - protein, 269 aa, Synthetic construct
EVSQDLFNQFNLFAQYSAAAYCGKNNDAPAGTNITCTGNACPEVEKADATFLYSFEDSGVGDVTGFLALDNTDKLIVLSFRGSRSIKNWIANLIFGLKEINDICSGCRGHDGFTSSWRSVADTLRQKVEDAVREHPDYRVVFTGHSLGGALATVAGADLRGNGYDIDVFSYGAPRVGNRAFAEFLTVQTGGTLYRITHTNDIVPRLPPREFGYSHSSPEYWIKSGTLVPVTRNDIVKIEGIDATGGNNQPNIPDIPAHLWYFGLIGTCL

SEQ ID NO: 5758 - protein, 269 aa, Thermomyces lanuginosus
EVSQDLFNQFNLFAQYSAAAYCGKNNDAPAGTNITCTGNACPEVEKADATFLYSFEDSGVGDVTGFLALDNTNKLIVLSFRGSRSIENWIGNLNFDLKNISDICSGCRGHDGFTSSWRSVADTLRQKVEDAVREHPDYRVVFTGHSLGGALATVAGADLRGNGYDIDVFSYGAPRVGNRAFAEFLTVQTGGTLYRITHTNDIVPRLPPREFGYSHSSPEYWIKSGTLVPVRRRDIVKIEGIDATGGNNRPNIPDIPAHLWYFGLIGTCL

SEQ ID NO: 5759 - protein, 269 aa, Thermomyces lanuginosus
EVSQDLFNQFNLFAQYSAAAYCGKNNDAPAGTNITCTGNACPEVEKADATFLYSFEDSGVGDVTGFLALDNTNKLIVLSFRGSRSIENWITNLNFDLKEINDICSGCRGHDGFTSSWRSVADTLRQKVEDAVREHPDYRVVFTGHSLGGALATVAGADLRGNGYDIDVFSYGAPRVGNRAFAEFLTVQTGGTLYRITHTNDIVPRLPPREFGYSHSSPEYWIKSGTLVPVRRRDIVKIEGIDATGGNNQPNIPSITAHLWYFGLIGTCL

SEQ ID NO: 5760 - protein, 269 aa, Thermomyces lanuginosus
EVSQDLFNQFNLFAQYSKAAYCGKNNDAPAGTNITCTGNACPEVEKADATFLYSFEDSGVGDVTGFLALDNTNKLIVLSFRGSRSIENWIGNLNFDLKEINDICSGCRGHDGFTSSWRSVADTLRQKVEAAVREHPDYRVVFTGHSLGGALATVAWADLRGNGYDIDVFSYGAPRVGNRAFAEFLTTQTGGTLYRITHTNDIVPRLPPREFGYSHSSPEYWIKSGTLVPVTRNDIVKIEGIDATGGNNQPNIPDIPAHLWYFGRIGTCL

SEQ ID NO: 5761 - protein, 269 aa, Thermomyces lanuginosus
EVSQDLFNQFNLFAQYSAAAYCGKNNDAPAGTNITCTGNACPEVEKADATFLYSFEDSGVGDVTGFLALDNTNKLIVLSFRGSRSIENWIANLNFGLKEINDICSGCRGHDGFTSSWRSVADTLRQKVEDAVREHPDYRVVFTGHSLGGALATVAGADLRGNGYDIDVFSYGAPRVGNRAFAEFLTVQTGGTLYRITHTNDIVPRLPPREFGYSHSSPEYWIKSRTLVPVRRRDIVKIEGIDATGGNNQPNIPDIPAHLWYFGLIGTCL

SEQ ID NO: 5762 - protein, 269 aa, Thermomyces lanuginosus
EVSQDLFNQFNLFAQYSAAAYCGKNNDAPAGTNITCTGNACPEVEKADATFLYSFEDSGVGDVTGFLALDNTNKRIVLSFRGSRSIENWIGNLNFDLKEINDICSGCRGHAGFTSSWRSVADTLRQKVEAAVREHPDYRVVFTGHSLGGALATVAGADLRGNGYDIDVFSYGAPRVGNRAFAEFLTNQQGGTLYRITHTNDIVPRLPPREFGYSHSSPEYWIKSGTLVPVTRNDIVKIEGIDATGGNNQPNIPDIPAHLWYFGLIGTCL

SEQ ID NO: 5763 - protein, 269 aa, Synthetic construct
EVSQDLFNQFNLFAQYSAAAYCGKNNDAPAGTNITCTGNACPEVEKADATFLYSFEDSGVGRVTGFLALDNTNKLIVLSFRGSRSIENWFGNLNFLLKKINDICSGCRGHDGFTSSWRSVADTLRQKVEDAVREHPDYRVVFTGHSLGGALATVAGADLRGNGYDIDVFSYGAPRVGNRAFAEFLTAQTGGTLYRITHTNDIVPRLPPREFGYSHSSPEYWIKSGTLVPVTRNDIVKIEGIDATGGNNQPNIPDIPAHLWYFGLIGTCL

SEQ ID NO: 5764 - protein, 269 aa, Thermomyces lanuginosus
EVSQDLFNQFNLFAQYSAAAYCGKNNRAPAGTNITCTGNACPEVEKADATFLYSFEDSGVGDVTGFLALDNTNKLIVLSFRGSRSIENWIGNLNFDLKEINDICSGCRGHGGFTSSWRSVADTLRQKVEDAVREHPDYRVVFTGHSLGGALATVAGADLRGNGYDIDVFSYGAPRVGNRAFAEFLTVQTGGTLYRITHTNDIVPRLPPREFGYSHPSPEYWIKSGTGVPVTRNDIVKIEGIDATGGNNQPNIPDITAHLWYFGLIGTCL

SEQ ID NO: 5765 - protein, 269 aa, Thermomyces lanuginosus
EVSQDLFNQFNLFAQYSAAAYCGKNNDAPAGTNITCTGNACPEVEKADATILYSFEDSGVGDVTGFLALDNTNKLIVLSFRGSRSIENWIGNLNFDLKEINDICSGCRGHDGFTSSWRSVADTLRQKVEDAVREHPDYRVVFAGHSLGGALATVAGADLRGNGYDIDVFSYGAPRVGNRAFAEFLTVQTGGTLYRITHTNDIVPRLPPREFGYSHSSPEYWIKSGTLPPVRRRDIVKIEGIDATGGNNQPNIPDIPAHLWYFGLIGTCL

SEQ ID NO: 5766 - protein, 269 aa, Thermomyces lanuginosus
EVSQDLFNQFNLFAQYSAAAYCGKNNEAPAGTNITCTGNACPEVEKAQATFLYSFEDSGVGDVTGFLALDNTNKLIVLSFRGSRSIENWIGNLNFDLKEINDICSGCRGHDGFTSSWRSVADTLRQKVEDAVREHPDYRVVFTGHSLGGALATVAGADLRGNPYDIDVFSYGAPRVGNRAFAEFLTVQTGGTLYRITHTNDIVPRLPPREFGYSHSSPEYWIKSGTLVPVTRQDIVKIEGIDATGGNNQPNIPDIPAHLWYFGRIGTCL

SEQ ID NO: 5767 - protein, 269 aa, Thermomyces lanuginosus
EVSQDLFNQFNLFAQYSAAAYCGKNNEAPAGTNITCTGNACPEVEKADATFLYSFEDSGVGDVTGFLALDNTNKLIVLSFRGSRSIENWIGNLNFDLKEINDICSGCRGHDGFTSSWRSVADTLRQKVEDAVREHPQYRVVFTGHSLGGALATVAGADLRGNPYDIDVFSYGAPRVGNRAFAEFLTVQTGGTLYRITHTNDIVPRLPPREFGYSHSSPEYWIKSGTMVPVTRNDIVKIEGIDATGGNNQPNIPDIPAHLWYFGRIGTCL

SEQ ID NO: 5768 - protein, 269 aa, Thermomyces lanuginosus
EVSQDLFNQFNLFAQYSAAAYCGKNNDAPAGTNITCTGNACPEVEKADATFLYSFEDSGVGDVTGFLALDNTNKQIVLSFRGSRSIENWIGNLNFDLKEINDICSGCRGHAGFTSSWRSVADTLRQKVEAAVREHPDYRVVFTGHSLGGALATVAGADLRGNGYDIDVFSYGAPRVGNRAFAEFLTNQQGGTLYRITHTNDIVPRLPPREFGYSHSSPEYWIKSGTLVPVTRNDIVKIEGIDATGGNNQPNIPDIPAHLWYFGLIGTCL

SEQ ID NO: 5769 - protein, 269 aa, Thermomyces lanuginosus
EVSQDLFNQFNLFAQYSAAAYCGKNNSAEAGTNITCTGNACPEVEKADATFLYSFEDSGVGDVTGFLALDNTRKDIVLSFRGSRSIENWIGNLNFDLKEINDICSGCRGHDGFTSSWRSVADTLRQKVEDAVREHPDYRVVFTGHSLGGALATVAGADLRGNGYDIDVFSYGAPRVGNRAFAEFLTVQDGGTLYRITHTNDIVPRLPPREFGYSHSSPEYWIKSGTLVPVTRNDIVKIEGIDATGGNNQPNIPDIPAHLWYFGLIGTCL

SEQ ID NO: 5770 - protein, 269 aa, Thermomyces lanuginosus
EVSQDLFNQFNLFAQYSAAAYCGKNNDAPAGTNITCTGNACPEVEKADATFLYSFKDSGVGDVTGFLALDNTNKLIVLSFRGSRSIKNWIGNLNFDLKEINDICSGCRGHAGFTSSWRSVADTLRQKVEDAVREHPDYRVVFTGHSLGGALATVAGADLRGNGYDIDVFSYGAPRVGNRAFAEFLTVQTGGTLYRITHTNDIVPRLPPREFGYSHSSPEYWIKSGTLVPVRRRDIVKIEGIDATGGNNQPNIPDIPAHLWYFGLIGTCL

SEQ ID NO: 5771 - protein, 269 aa, Thermomyces lanuginosus
EVSQDLFNQFNLFAQYSAAAYCGKNNDAPAGTNITCTGNACPEVEKADATFLYSFEDAGAGDVTGFLALDNTNKLIVLSFRGSRSVENWIGNLNFDLKEINDICSGCRGHDGFTSSWRSVADTLRQKVEDAVREHPDYRVVFTGHSLGGALATVAGADLRGNGYDIDVFSYGAPRVGNRAFAEFLTVQTGGTLYRITHTNDIVPRLPPREFGYSHSSPEYWIKSGTLVPVRRRDIVKIEGIDATGGNNQPNIPDIPAHLWYFGLIGTCL

SEQ ID NO: 5772 - protein, 269 aa, Thermomyces lanuginosus
EVSQDLFNQFNLFAQYSAAAYCGKNNDAPAGTNITCTGNACPEVEKADATFLYSFEDSGVGDVTGFLALDNTNKLIVLSFRGSRSIENWIGNLNFDLKEINDICSGCRGHDGFTSSWRSVADTLRQKVEDAVREHPDYRVVFAGHSLGGALATVAGADLRGDGYDIDVFSYGAPRVGNRAFAEFLTVQTGGTLYRITHTNDIVPRLPPREFGYSHSSPEYWIKSGTLPPVRRRDIVKIEGIDATGGNNQPNIPDIPAHLWYFGLIGTCL

SEQ ID NO: 5773 - protein, 269 aa, Thermomyces lanuginosus
EVSQDLFNQFNLFAQYSAAAYCQKNNSAPAGTNITCTGNACPEVEKADATFLYSFEDSGVGDVTGFLALDNTNKLIVLSFRGSRSIENWIGNLNFDLKEINDICSGCRGHDGFTSSWRSVADTLRQKVEDAVREHPDYRVVFTGHSLGGALATIAGADLRGNGYDIDVFSYGAPRVGNRAFAEFLTNQTGGTLYRITHTNDIVPRLPPREFGYSHSSPEYWIKSGTLVPVTRNDIVKIEGIDATGGNNQPNIPDIPAHLWYFGRIGTCL

SEQ ID NO: 5774 - protein, 269 aa, Thermomyces lanuginosus
EVSQDLFNQFNLFAQYSAAAYCGKNNDAPAGTNITCTGNACPEVEKADATFLYSFEDNGSGDVTGFLALDNTNKLIVLSFRGSRSIENWRGNLNFDLKEINDICSGCRGHDGFTSSWRSVADTLRQKVEDAVREHPDYRVVFTGHSLGGALATVAGADLRGNGYDIDVFSYGAPRVGNRAFAEFLTVQTGGTLYRITHTNDIVPRLPPREFGYSHSSPEYWIKSGTLVPVRRRDIVKIEGIDATGGNNQPNIPDIPAHLWYFGLIGTCL

SEQ ID NO: 5775 - protein, 269 aa, Thermomyces lanuginosus
EVSQDLFNQFNLFAQYSAAAYCGKNNEAPAGTNITCTGNACPEVEKADATFLYSFKDMGVGDVTGFLALDNTNKLIVLSFRGSRSIENWIGNLNFDLKEINDICSGCRGHDGFTSSWRSVADTLRQKVEDAVREHPDYRVVFTGHSLGGALATVAGADLRGNGYDIDVFSYGAPRVGNRAFAEFLTVQTGGTLYRITHTNDIVPRLPPREFGYSHSSPEYWIKSGTLVPVTRQDIVKIEGIDATGGNNQPNIPDITAHLWYFGLIGTCL

SEQ ID NO: 5776 - protein, 269 aa, Thermomyces lanuginosus
EVSDDLFNQFNLFAQYSAAAYCGKNNSAPAGTNITCTGNACPEVEKADATFLYSFKDSGVGDVTGFLALDNTNKLIVLSFRGSRSIENWIGNLNFDLKEINDICSGCRGHDGFTSSWRSVADTLRQKVEDAVREHPDYRVVFTGHSLGGALATVAGADLRGNGYDIDVFSYGAPRVGNRAFAEFLTVQTGGTLYRITHTNDIVPRLPPREFGYSHSSPEYWIKSGTLVPVTRQDIVKIEGIDATGGNNQPNIPDITAHLWYFGLIGTCL

SEQ ID NO: 5777 - protein, 269 aa, Thermomyces lanuginosus
EVSQDLFNQFNLFAQYSAAAYCGKNNDAPAGTNITCTGNACPEVEKADATFLYSFEDSGVGDVTGFLALDNTNKRIVLSFRGSRSIENWIGNLNFDLKEINDICSGCRGHDGFTSSWRSVADTLRQKVEDAVREHPDYRVVFTGHSLGGALATVAWADLRGNGYDIDVFSYGAPRVGNRAFAEFLTTQQGGTLYRITHTNDIVPRLPPREFGYSHSSPEYWIKSGTLVPVTRNDIVKIEGIDATGGNNQPNIPDIPAHLWYFGRIGTCL

SEQ ID NO: 5778 - protein, 269 aa, Thermomyces lanuginosus
EVSQDLFNQFNLFAQYSAAAYCKKNNDAPAGTNITCTGNACPEVEKADATFLYSFEDSGVGDVTGFLALDNTNKLIVLSFRGSRSIENWIGNLNFDLKEINDICSGCRGHAGFTSSWRSVADTLRQKVEDAVREHPDYRVVFTGHSLGGALATIAGADLRGNGYDIDVFSYGAPRVGNRAFAEFLTTQTGGTLYRITHTNDIVPRLPPREFGYSHSSPEYWIKSGTLVPVTRNDIVKIEGIDATGGNNQPNIPDIPAHLWYFGRIGTCL

SEQ ID NO: 5779 - protein, 269 aa, Thermomyces lanuginosus
EVSRDLFNQFNLFAQYSAAAYCGKNNDAPAGTNITCTGNACPEVEKADATFLYSFEDSGVGDVTGFLALDNTNKLIVLSFRGSRSIENWIGNLNFDLKEINDICSGCRGHDGFTSSWRSVADTLRQKVEDAVREHPDYRVVFAGHSLGGALATVAGADLRGNGYDIDVFSYGAPRVGNRAFAEFLTVQTGGTLYRITNTNDIVPRLPPREFGYSHSSPEYWIKSGTLVPVRRRDIVKIEGIDATGGNNQPNIPDIPAHLWYFGLIGTCL

SEQ ID NO: 5780 - protein, 269 aa, Thermomyces lanuginosus
EVSQDLFNQFNLFAQYSKAAYCGANNDAPAGTNITCTGNACPEVEKADATFLYSFEDSGVGDVTGFLALDNTNKLIVLSFRGSRSIENWIGNLRFDLKEINDICSGCRGHDGFTSSWRSVADTLRQKVEAAVREHPDYRVVFTGHSLGGALATVAGADLRGNGYDIDVFSYGAPRVGNRAFAEFLTNQTGGTLYRITHTNDIVPRLPPREFGYSHSSPEYWIKSGTLVPVTRNDIVKIEGIDATGGNNQPNIPDIPAHLWYFGLIGTCL

SEQ ID NO: 5781 - protein, 269 aa, Thermomyces lanuginosus
EVSDDLFNQFKLFAQYSAAAYCGKNNNAPAGTNITCTGNACPEVEKADATFLYSFEDSGVGDVTGFLALDNTNKLIVLSFRGSRSIENWIGNLNFDLKEINDICSGCRGHDGFTSSWRSVADTLRQKVEDAVREHPDYRVVFTGHSLGGALATVAGADLRGNGYDIDVFSYGAPRVGNRAFAEFLTVQTGGTLYRITHTNDIVPRLPPREFGYSHSSPEYWIKSGTLVPVTRQDIVKIEGIDATGGNNQPNIPDITAHLWYFGLIGTCL

SEQ ID NO: 5782 - protein, 269 aa, Thermomyces lanuginosus
EVSQDLFNQFNLFAQYSKAAYCGKNNSAPAGTDITCTGNACPEVEKADATFLYSFEDSGVGDVTGFLALDNTRKLIVLSFRGSRSIENWIGNLNFDLKEINDICSGCRGHDGFTSSWRSVADTLRQKVEDAVREHPDYRVVFTGHSLGGALATVAGADLRGNGYDIDVFSYGAPRVGNRAFAEFLTVQDGGTLYRITHTNDIVPRLPPREFGYSHSSPEYWIKSGTLVPVTRNDIVKIEGIDATGGNNQPNIPDIPAHLWYFGLIGTCL

SEQ ID NO: 5783 - protein, 269 aa, Thermomyces lanuginosus
EVSQDLFNQFNLFAQYSAAAYCGKNNDAPAGTNITCTGNACPEVEKADATTLYSFEDSGVGDVTGFLALDNTNKGIVLSFRGSRSIENWIQNLNFDLKEINDICSGCRGHDGFTSSWRSVADTLRQKVEAAVREHPDYRVVFTGHSLGGALATVAGADLRGNGYDIDVFSYGAPRVGNRAFAEFLTVQTGGTLYRITHTNDIVPRLPPREFGYSHSSPEYWIKSGTLVPVTRNDIVKIEGIDATGGNNQPNIPDIPAHLWYFGRIGTCL

SEQ ID NO: 5784 - protein, 269 aa, Thermomyces lanuginosus
EVSQDLFNQFNLFAQYSKAAYCQANNDAPAGTNITCTGNACPEVEKADATFLYSFEDSGVGDVTGFLALDNTNKLIVLSFRGSRSIENWIGNLNFDLKEINDICSGCRGHDGFTSSWRSVADTLRQKVEAAVREHPDYRVVFTGHSLGGALATIAGADLRGNGYDIDVFSYGAPRVGNRAFAEFLTVQTGGTLYRITHTNDIVPRLPPREFGYSHSSPEYWIKSGTLVPVTRNDIVKIEGIDATGGNNQPNIPDIPAHLWYFGLIGTCL

SEQ ID NO: 5785 - protein, 269 aa, Thermomyces lanuginosus
EVSQDLFNQFNLFAQYSAAAYCGKNNDAPAGTNITCTGNACPEVEKADATTLYSFEDSGVGDVTGFLALDNTNKGIVLSFRGSRSIENWIGNLNFDLKEINDICSGCRGHDGFTSSWRSVADTLRQKVEDAVREHPDYRVVFTGHSLGGALATVAGADLRGNGYDIDVFSYGAPRVGNRAFAEFLTNQTGGTLYRITHTNDIVPRLPPREFGYSHSSPEYWIKSGTLVPVTRNDIVKIEGIDATGGNNQPNQPDIPAHLWYFGRIGTCL

SEQ ID NO: 5786 - protein, 269 aa, Thermomyces lanuginosus
EVSQDLFNQFNLFAQYSAAAYCGKNNDAPAGTNITCTGNACPEVEKADATTLYSFEDSGVGDVTGFLALDNTNKGIVLSFRGSRSIENWIGNLNFDLKEINDICSGCRGHDGFTSSWRSVADTLRQKVEAAVREHPDYRVVFTGHSLGGALATVAGADLRGNGYDIDVFSYGAPRVGNRAFAEFLTVQTGGTLYRITHTNDIVPRLPPREFGYSHSSPEYWIKSGTLVPVTRNDIVKIEGIDATGGNNQPNQPDIPAHLWYFGRIGTCL

SEQ ID NO: 5787 - protein, 269 aa, Thermomyces lanuginosus
EVSQDLFNQFNLFAQYSAAAYCGKNNDAPAGTNITCTGNACPEVEKADATFLYSFRDSGVGDVTGFLALDNTNKLIVLSFRGSRSIENWIGNLNFDLKEINDICSGCRGHDGFTSSWFSVADTLRQKVEDAVREHPDYRVVFTGHSLGGALATVAGADLRGNGYDIDVFSYGAPRVGNRAFAEFLTVQTGGTLYRITHTNDIVPRLPPREFGYSHSSPEYWIKSGTLVPVRRRDIVKIEGIDAEGGNNQPNIPDIPAHLWYFGLIGTCL

SEQ ID NO: 5788 - protein, 269 aa, Thermomyces lanuginosus
EVSQDLFNQFNLFAQYSAAAYCGKNNDAPAGTQITCTGHACPEVEKADATFLYSFEDSGVGDVTGFLALDNTNKLIVLSFRGSRSIENWIGNLNFDLKEINDICSGCRGHDGFTSSWRSVADTLRQKVEDAVREHPDYRVVFTGHSLGGALATVAGADLRGNGYDIDVFSYGAPRVGNRAFAEFLTVQTGGTLYRITHTNDIVPRLPPREFGYSHSSPEYWIKSGTLVPVRRRDIVKIEGIDATGGNNQPNIPRIPAHLWYFGLIGTCL

SEQ ID NO: 5789 - protein, 269 aa, Thermomyces lanuginosus
EVSQDLFNQFNLFAQYSAAAYCGKNNDAPAGTNITCTGNACPEVEKADATFLYSFEDMGVGDVTGFLALDNTNKLIVLSFRGSRSIENWIGNLNFDLKEINDICSGCRGHDGFTSSWRSVADTLRQKVEDAVREHPDYRVVFTGHSLGGALATVAGADLRGNPYDIDVFSYGAPRVGNRAFAEFLTVQTGGTLYRITHTNDIVPRLPPREFGYSHSSPEYWIKSGTMVPVTRQDIVKIEGIDATGGNNQPNIPDIPAHLWYFGRIGTCL

SEQ ID NO: 5790 - protein, 269 aa, Thermomyces lanuginosus
EVSQDLFNQFNLFAQYSAAAYCGKNNDAPAGTNITCTGNACPEVEKADATFLYSFEDNGSGDVTGFLALDNTNKLIVLSFRGSRSIENWIGNLNFDLKEINDICSGCRGHDGFTSSWRSVADTLRQKVEDAVREHPDYRVVFTGHSLGGALATVAGADLRGNGYDIDVFSYGAPRVGNRAFAEFLTVQTGGTLYRITHTNDIVPRLPPREFGYSHSSPEYWIKSGTLVPVRRRDIVKIEGIDATGGNNLPNIPDIPAHLWYFGLIGTCL

SEQ ID NO: 5791 - protein, 269 aa, Thermomyces lanuginosus
EVSQDLFNQFNLFAQYSKAAYCGKNNDAPAGTNITCTGNACPEVEKADATFLYSFEDSGVGDVTGFLALDNTNKLIVLSFRGSRSIENWIGNLNFDLKEINDICSGCRGHDGFTSSWRSVADTLRQKVEAAVREHPDYRVVFTGHSLGGALATVAWADLRGNGYDIDVFSYGAPRVGNRAFAEFLTNQTGGTLYRITHTNDIVPRLPPREFGYSHSSPEYWIKSGTLVPVTRNDIVKIEGIDATGGNNQPNIPDIPAHLWYFGRIGTCL

SEQ ID NO: 5792 - protein, 269 aa, Thermomyces lanuginosus
EVSQDLFNQFNLFAQYSAAAYCGKNNDAPAGTQITCTNNACPEVEKADATFLYSFEDSGVGDVTGFLALDNTQKLIVLSFRGSRSIENWIGNLNFDLKEINDICSGCRGHDGFTSSWRSVADTLRQKVEDAVREHPDYRVVFTGHSLGGALATVAGADLRGNGYDIDVFSYGAPRVGNRAFAEFLTVQTGGTLYRITHTNDIVPRLPPREFGYSHSSPEYWIKSGTLVPVRRRDIVKIEGIDATGGNNQPNIPDIPAHLWYFGLIGTCL

SEQ ID NO: 5793 - protein, 269 aa, Thermomyces lanuginosus
EVSQDLFNQFNLFAQYSAAAYCGKNNDAPAGTNITCTGNACPEVEKADATFLYSFEDSGVGDVTGFLALDNTNKLIVLSFRGSRSIENWIGNLNFDLKEINDICSGCRGHDGFTSSWRSVADTLRQKVEDAVREHPDYRVVFAGHSLGGALATVAGADLRGDGYDIDVFSYGAPRVGNRAFAEFLTVQTGGTLYRITNTNDIVPRLPPREFGYSHSSPEYWIKSGTLVPVRRRDIVKIEGIDATGGNNQPNIPDIPAHLWYFGLIGTCL

SEQ ID NO: 5794 - protein, 269 aa, Thermomyces lanuginosus
EVSVDLFNQFNLFAQYSAAAYCGKNNNAPAGTNITCTGNACPEVEKADATFLYSFEDSGKGDVTGFLALDNTNKLIVLSFRGSRSIENWIGNLNFDLKEINDICSGCRGHDGFTSSWRSVADTLRQKVEDAVREHPDYRVVFTGHSLGGALATVAGADLRGNGYDIDVFSYGAPRVGNRAFAEFLTVQTGGTLYRITHTNDIVPRLPPREFGYSHSSPEYWIKSGTLVPVRRRDIVKIEGIDATGGNNQPNIPDIPAHLWYFGLIGTCL

SEQ ID NO: 5795 - protein, 269 aa, Thermomyces lanuginosus
EVSQDLFNQFNLFAQYSAAAYCGKNNDAPAGTQITCTGNACPEVEKADATFLYSFEDSGVGDVTGFLALDNTNKLIVLSFRGSRSIENWIGNLNFDLKEINDICSGCRGHDGFTSSWRSVADTLRQKVEDAVREHPDYRVVFTGHSLGGVLATVAGADLRGGGYDIDVFSYGAPRVGNRAFAEFLTVQTGGTLYRITHTNDIVPRLPPREFGYSHSSPEYWIKSGTLVPVRRRDIVKIEGIDATGGNNQPNIPDIPAHLWYFGLIGTCL

SEQ ID NO: 5796 - protein, 269 aa, Synthetic construct
EVSQDLFNQFNLFAQYSAAAYCGKNNDAPAGTNITCTGNACPEVEKADATFLYSFEDSGVGDVTGFLALDNTNKLIVLSFRGSRSIENWFGNLNFLLKKINDICSGCRGHDGFTSSWRSVADTLRQKVEDAVREHPGYRVVFTGHSLGGALATVAGADLRGNGYDIDVFSYGAPRVGNRAFAEFLTAQTGGTLYRITHTNDIVPRLPPREFGYSHSSPEYWIKSGTLVPVTRNDIVKIEGIDATGGNNQPNIPDIPAHLWYFGLIGTCL

SEQ ID NO: 5797 - protein, 269 aa, Thermomyces lanuginosus
EVSQDLFNQFNLFAQYSAAAYCGKNNRAPAGTNITCTGNACPEVEKADATFLYSFEDSGVGDVTGFLALDNTNKLIVLSFRGSRSIENWIGNLNFDLKEINDICSGCRGHDGFTSSWRSVADTLRQKVEDAVREHPDYRVVFTGHSLGGALATVAGADLRGNKYDIDVFSYGAPRVGNRAFAEFLTVQTGGTLYRITHTNDIVPRLPPREFGYSHSSPEYWIKSGTLVPVRRRDIVKIEGIDATGGNNQPNIPSIPAHLWYFGLIGTCL

SEQ ID NO: 5798 - protein, 269 aa, Thermomyces lanuginosus
EVSQDLFNQFNLFAQYSAAAYCGKNNDAPAGTNITCTGNACPEVEKADATILYSFEDSGVGDVTGFLALDNTNKLIVLSFRGSRSIENWIGNLNFDLKEINDICSGCRGHDGFTSSWRSVADTLRQKVEDAVREHPDYRVVFTGHSLGGALATVAGADLRGDGYDIDVFSYGAPRVGNRAFAEFLTVQTGGTLYRITHTNDIVPRLPPREFGYSHSSPEYWIKSGTLRPVRRRDIVKIEGIDATGGNNQPNIPDIPAHLWYFGLIGTCL

SEQ ID NO: 5799 - protein, 269 aa, Thermomyces lanuginosus
EVSQDLFNQFNLFAQYSAAAYCKKNNDAPAGTNITCTGNACPEVEKADATFLYSFEDSGVGDVTGFLALDNTNKRIVLSFRGSRSIENWIGNLNFDLKEINDICSGCRGHDGFTSSWRSVADTLRQKVEAAVREHPDYRVVFTGHSLGGALATVAGADLRGNGYDIDVFSYGAPRVGNRAFAEFLTNQTGGTLYRITHTNDIVPRLPPREFGYSHSSPEYWIKSGTLVPVTRNDIVKIEGIDATGGNNQPNIPDIPAHLWYFGRIGTCL

SEQ ID NO: 5800 - protein, 269 aa, Thermomyces lanuginosus
EVSQDLFNQFNLFAQYSAAAYCGKNNDAPAGTNITCTGNACPEVEKADATFLYSFEDSGVGDVTGFLALDNTNKLIVLSFRGSRSIENWIGNLNFDLKEINDICSGCRGHDGFTSSWRSVADTLRQKVEAAVREHPQYRVVFTGHSLGGALATVAGADLRGNPYDIDVFSYGAPRVGNRAFAEFLTVQTGGTLYRITHTNDIVPRLPPREFGYSHSSPEYWIKSGTLVPVTRQDIVKIEGIDATGGNNQPNIPDIPAHLWYFGRIGTCL

SEQ ID NO: 5801 - protein, 269 aa, Thermomyces lanuginosus
EVSQDLFNQFNLFAQYSAAAYCGKNNEAPAGTNITCTGNACPEVEKAQATFLYSFEDSGVGDVTGFLALDNTNKLIVLSFRGSRSIENWIGNLNFDLKEINDICSGCRGHDGFTSSWRSVADTLRQKVEDAVREHPQYRVVFTGHSLGGALATVAGADLRGNGYDIDVFSYGAPRVGNRAFAEFLTVQTGGTLYRITHTNDIVPRLPPREFGYSHSSPEYWIKSGTMVPVTRNDIVKIEGIDATGGNNQPNIPDIPAHLWYFGRIGTCL

SEQ ID NO: 5802 - protein, 269 aa, Thermomyces lanuginosus
EVSQDLFNQFNLFAQYSAAAYCGKNNDAPAGTNITCTGNACPEVEKADATFLYSFEDSGVGDVTGFLALDNTNKLIVLSFRGSRSIENWIGNLNFDLKEINDICSGCRGHDGFTSSWRSVADTLRQKVEDAVREHPDYRVVFTGHSLGGALATVAGADLRGNGYDIDVFSYGAPRVGNRAFAEFLTVQTGGTLYRITHTNDXVPRLPPRXXGYSHSSPEYWIKSGTLVPVTRNDIVKIEGIDATGGNNQPNIPDXXAHLWYFGLIGTCL

SEQ ID NO: 5803 - protein, 269 aa, Synthetic construct
EVSQDLFNQFNLFAQYSAAAYCGKNNDAPAGTNITCTGNACPEVEKADATFLYSFEDSGVGDVTGFLALDNTNKLIVLSFRGSRSIENWFGNLNFLLKKINDICSGCRGHDGFTSSWRSVADTLRQKVEDAVREHPDYRVVFTGHSLGGALATVAGADLRGNGYDIDVFSYGAPRVGNRAFAEFLTAQTGGTLYRITHTNDIVPRLPPREFGYSHSSPEYWIKSGTLVPVRRNDIVKIEGIDATGGNNQPNIPDIPAHLWYFGLIGTCL

SEQ ID NO: 5804 - protein, 269 aa, Thermomyces lanuginosus
EVSQDLFNQFNLFAQYSAAAYCGKNNDAPAGTNITCTGNACPEVEKADATILYSFEDSGVGDVTGFLALDNTNKLIVLSFRGSRSIENWIGNLNFDLKEINDICSGCRGHDGFTSSWRSVADTLRQKVEDAVREHPDYRVVFTGHSLGGALATVAGADLRGNGYDIDVFSYGAPRVGNRAFAEFLTVQTGGTLYRITSTNDIVPRLPPREFGYSHSSPEYWIKSGTLPPVRRRDIVKIEGIDATGGNNQPNIPDIPAHLWYFGLIGTCL

SEQ ID NO: 5805 - protein, 269 aa, Thermomyces lanuginosus
EVSQDLFNQFNLFAQYSAAAYCGKNNDAPAGTQITCTGNACPEVEKADATFLYSFEDSGVGDVTGFLALDNTNKLIVLSFRGSRSIENWIKNLNFDLKEINDICSGCRGHDGFTSSWRSVADTLRQKVEDAVREHPDYRVVFTGHSLGGALATVAGADLRGNWYDIDVFSYGAPRVGNRAFAEFLTVQTGGTLYRITHTNDIVPRLPPREFGYSHSSPEYWIKSGTLVPVRRRDIVKIEGIDATGGNNQPNIPDIPAHLWYFGLIGTCL

SEQ ID NO: 5806 - protein, 269 aa, Thermomyces lanuginosus
EVSQDLFNQFNLFAQYSAAAYCGKNNDAPAGTNITCTGNACPEVEKADATFLYSFEDNGSGDVTGFLALDNTNKLIVLSFRGSRSIENWIGNLNFDLKEINDICSGCRGHDGFTSSWRSVADTLRQKVEDAVREHPDYRVVFTGHSLGGALATVAGADLRGNGYDIDVFSYGAPRVGNRAFAEFLTVQTGGTLYRITHTNDIVPRLPPREFGYSHSSPEYWIKSGTLVPVRRRDIVKIEGIDATGGNNIPNIPDIPAHLWYFGLIGTCL

SEQ ID NO: 5807 - protein, 269 aa, Thermomyces lanuginosus
EVSRDLFNQFNLFAQYSAAAYCGKNNDAPAGTNITCTGNACPEVEKADATILYSFEDSGVGDVTGFLALDNTNKLIVLSFRGSRSIENWIGNLNFDLKEINDICSGCRGHDGFTSSWRSVADTLRQKVEDAVREHPDYRVVFAGHSLGGALATVAGADLRGNGYDIDVFSYGAPRVGNRAFAEFLTVQTGGTLYRITHTNDIVPRLPPREFGYSHSSPEYWIKSGTLVPVRRRDIVKIEGIDATGGNNQPNIPDIPAHLWYFGLIGTCL

SEQ ID NO: 5808 - protein, 269 aa, Thermomyces lanuginosus
EVSQDLFNQFNLFAQYSAAAYCGKNNDAPAGTNITCTGNACPEVEKADATFLYSFEDSGVGDVTGFLALDNTNKLIVLSFRGSRSVENWIGNLNFDLKEINDICSGCRGHDGFTSSWRSVADTLRQKVEDAVREHPDYRVVFTGHSLGGALATVAGADLRGNGYDIDVFSYGAPRVGNRAFAEFLTVQTGGTLYRITHTNDIVPRLPPREFGYSHSSPEYWIKSGTGVPVRRRDIVKIEGIDATGGNNQPNIPDIKAHLWYFGLIGTCL

SEQ ID NO: 5809 - protein, 269 aa, Thermomyces lanuginosus
EVSQDLFNQFNLFAQYSAAAYCGKNNDAPAGTNITCTGNACPEVEKADATFLYSFEDSGVGDVTGFLALDNTNKLIVLSFRGSRSIENWIGNLNFDLKEINDICSGCRGHDGFTSSWRSVADTLRQKVEDAVREHPDYRVVFAGHSLGGALATVAGADLRGDGYDIDVFSYGAPRVGNRAFAEFLTVQTGGTLYRITHTNDIVPRLPPREFGYSHSSPEYWIKSGTLRPVRRRDIVKIEGIDATGGNNQPNIPDIPAHLWYFGLIGTCL

SEQ ID NO: 5810 - protein, 269 aa, Thermomyces lanuginosus
EVSQDLFNQFNLFAQYSAAAYCGKNNQAPAGTNITCTGNACPEVEKADATFLYSFKDMGVGDVTGFLALDNTNKLIVLSFRGSRSIENWIGNLNFDLKEINDICSGCRGHDGFTSSWRSVADTLRQKVEDAVREHPDYRVVFTGHSLGGALATVAGADLRGNGYDIDVFSYGAPRVGNRAFAEFLTVQTGGTLYRITHTNDIVPRLPPREFGYSHSSPEYWIKSGTLVPVTRQDIVKIEGIDATGGNNQPNIPDITAHLWYFGLIGTCL

SEQ ID NO: 5811 - protein, 269 aa, Thermomyces lanuginosus
EVSQDLFNQFNLFAQYSAAAYCQKNNDAPAGTNITCTGNACPEVEKADATFLYSFEDSGVGDVTGFLALDNTNKGIVLSFRGSRSIENWIQNLNFDLKEINDICSGCRGHDGFTSSWRSVADTLRQKVEDAVREHPDYRVVFTGHSLGGALATVAGADLRGNGYDIDVFSYGAPRVGNRAFAEFLTVQTGGTLYRITHTNDIVPRLPPREFGYSHSSPEYWIKSGTLVPVTRNDIVKIEGIDATGGNNQPNQPDIPAHLWYFGRIGTCL

SEQ ID NO: 5812 - protein, 269 aa, Thermomyces lanuginosus
EVSQDLFNQFNLFAQYSAAAYCGKNNDAPAGTNITCTGNACPEVEKADATFLYSFRNSGVGDVTGFLALDNTNKLIVLSFRGSRSIENWIGNLNFDLKEINDICSGCRGHDGFTSSWFSVADTLRQKVEDAVREHPDYRVVFTGHSLGGALATVAGADLRGNGYDIDVFSYGAPRVGNRAFAEFLTVQTGGTLYRITHTNDIVPRLPPREFGYSHSSPEYWIKSGTLVPVRRRDIVKIEGIDATGGNNQPNIPDIPAHLWYFGLIGTCL

SEQ ID NO: 5813 - protein, 269 aa, Thermomyces lanuginosus
EVSQDLFNQFNLFAQYSAAAYCGKNNDAPAGTNITCTGNACPEVEKADATLLYSFRDSGVGDVTGFLALDNTNKLIVLSFRGSRSIENWIGNLNFDLKEINDICSGCRGHDGFTSSWFSVADTLRQKVEDAVREHPDYRVVFTGHSLGGALATVAGADLRGNGYDIDVFSYGAPRVGNRAFAEFLTVQTGGTLYRITHTNDIVPRLPPREFGYSHSSPEYWIKSGTLVPVRRRDIVKIEGIDATGGNNQPNIPDIPAHLWYFGLIGTCL

SEQ ID NO: 5814 - protein, 269 aa, Thermomyces lanuginosus
EVSQDLFNQFNLFAQYSAAAYCQKNNDAPAGTNITCTGNACPEVFKADVTFLYSFEDSGVGDVTGFLALDNTNKQIILSFRGSRSIENWIGNLNFDLKEINDICSGCRGHDGFTSSWRSVADTLRQKVEDAVREHPDYRVVFTGHSLGGALATVAGADLRGNGYDIDVFSYGAPRVGNRAFAEFLTVQTGGTLYRITHTNDIVPRLPPREFGYSHSSPEYWIKSGTLVPVTRNDIVKIEGIDATGGNNQPNIPDIPAHLWYFGLIGTCL

SEQ ID NO: 5815 - protein, 269 aa, Thermomyces lanuginosus
EVSQDLFNQFNLFAQYSAAAYCQANNDAPAGTNITCTGNACPEVEKADATFLYSFEDSGVGDVTGFLALDNTNKQIVLSFRGSRSIENWIGNLNFDLKEINDICSGCRGHDGFTSSWRSVADTLRQKVEDAVREHPDYRVVFTGHSLGGALATVAWADLRGNGYDIDVFSYGAPRVGNRAFAEFLTQQTGGTLYRITHTNDIVPRLPPREFGYSHSSPEYWIKSGTLVPVTRNDIVKIEGIDATGGNNQPNIPDIPAHLWYFGLIGTCL

SEQ ID NO: 5816 - protein, 269 aa, Thermomyces lanuginosus
EVSDDLFNQFNLFAQYSAAAYCGKNNNAPAGTNITCTGNACPEVEKADATFLYSFKDMGVGDVTGFLALDNTNKLIVLSFRGSRSIENWIGNLNFDLKEINDICSGCRGHDGFTSSWRSVADTLRQKVEDAVREHPDYRVVFTGHSLGGALATVAGADLRGNGYDIDVFSYGAPRVGNRAFAEFLTVQTGGTLYRITHTNDIVPRLPPREFGYSHSSPEYWIKSGTLVPVTRNDIVKIEGIDATGGNNQPNIPDITAHLWYFGLIGTCL

SEQ ID NO: 5817 - protein, 269 aa, Thermomyces lanuginosus
EVSQDLFNQFNLFAQYSAAAYCGKNNDAPAGTNITCTGNACPEVEKAQATFLYSFEDMGVGDVTGFLALDNTNKLIVLSFRGSRSIENWIGNLNFDLKEINDICSGCRGHDGFTSSWRSVADTLRQKVEAAVREHPDYRVVFTGHSLGGALATVAGADLRGNGYDIDVFSYGAPRVGNRAFAEFLTVQTGGTLYRITHTNDIVPRLPPREFGYSHSSPEYWIKSGTLVPVTRQDIVKIEGIDATGGNNQPNIPDIPAHLWYFGRIGTCL

SEQ ID NO: 5818 - protein, 269 aa, Synthetic construct
EVSQDLFNQFNLFAQYSAAAYCGKNNDAPAGTNITCTGNACPEVEKADATFLYSFEDSGVGDVTGFLALDNTNKLIVLSFRGSRSIENWFGNLNFLLKKINDICSGCRGHDGFTSSWRSVADTLRQKVEDAVREHPDYRVVFTGHSLGGALATVAGADLRGNGYDIDVFSYGAPRVGNRAFAEFLTAQTGGTLYRITHTNDIVPRLPPREFGYSHSSPEYWIKSGTLVPVTRNDIVKIEGIDATGGNNRPNIPDIPAHLWYFGLIGTCL

SEQ ID NO: 5819 - protein, 269 aa, Thermomyces lanuginosus
EVSQDLFNQFNLFAQYSAAAYCGKNNDAPAGTNITCTGNACPEVEKADATFLYSFEDSGGGAVTGFLALDNTNKLIVLSFRGTRSIENWIGNLNFWLKEINDICSGCRGHDGFTSSWRSVADTLRQKVEDAVREHPDYRVVFTGHSLGGALATVAGADLRGNGYDIDVFSYGAPRVGNRAFAEFLTVQTGGTLYRITHTNDIVPRLPPREFGYSHSSPEYWIKSGTLVPVTRNDIVKIEGIDATGGNNQPNIPDIPAHLWYFGLIDTCL

SEQ ID NO: 5820 - protein, 269 aa, Thermomyces lanuginosus
EVSQDLFNQFNLFAQYSAAAYCGKNNNAPAGTNITCTGNACPEVEKADATFLYSFEDMGVGDVTGFLALDNTNKLIVLSFRGSRSIENWFGNLNFDLKEINDICSGCRGHDGFTSSWRSVADTLRQKVEDAVREHPDYRVVFTGHSLGGALATVAGADLRGNGYDIDVFSYGAPRVGNRAFAEFLTVQTGGTLYRITHTNDIVPRLPPREFGYSHSSPEYWIKSGTLVPVTRQDIVKIEGIDATGGNNQPNIPDITAHLWYFGLIGTCL

SEQ ID NO: 5821 - protein, 269 aa, Thermomyces lanuginosus
EVSQDLFNQFKLFAQYSAAAYCGKNNNAPAGTNITCTGNACPEVEKADATFLYSFKDSGVGDVTGFLALDNTNKLIVLSFRGSRSIENWIGNLNFDLKEINDICSGCRGHDGFTSSWRSVADTLRQKVEDAVREHPDYRVVFTGHSLGGALATVAGADLRGNGYDIDVFSYGAPRVGNRAFAEFLTVQTGGTLYRITHTNDIVPRLPPREFGYSHSSPEYWIKSGTLVPVTRQDIVKIEGIDATGGNNQPNIPDITAHLWYFGLIGTCL

SEQ ID NO: 5822 - protein, 269 aa, Thermomyces lanuginosus
EVSQDLFNQFNLFAQYSAAAYCGKNNDAPAGTNITCTGNACPEVEKADATILYSFEDSGVGDVTGFLALDNTNKLIVLSFRGSRSIENWIGNLNFDLKEINDICSGCRGHDGFTSSWRSVADTLRQKVEDAVREHPDYRVVFTGHSLGGALATVAGADLRGDGYDIDVFSYGAPRVGNRAFAEFLTVQTGGTLYRITSTNDIVPRLPPREFGYSHSSPEYWIKSGTLVPVRRRDIVKIEGIDATGGNNQPNIPDIPAHLWYFGLIGTCL

SEQ ID NO: 5823 - protein, 269 aa, Thermomyces lanuginosus
EVSRDLFNQFNLFAQYSAAAYCGKNNDAPAGTNITCTGNACPEVEKADATILYSFEDSGVGDVTGFLALDNTNKLIVLSFRGSRSIENWIGNLNFDLKEINDICSGCRGHDGFTSSWRSVADTLRQKVEDAVREHPDYRVVFTGHSLGGALATVAGADLRGNGYDIDVFSYGAPRVGNRAFAEFLTVQTGGTLYRITHTNDIVPRLPPREFGYSHSSPEYWIKSGTLPPVRRRDIVKIEGIDATGGNNQPNIPDIPAHLWYFGLIGTCL

SEQ ID NO: 5824 - protein, 269 aa, Thermomyces lanuginosus
EVSRDLFNQFNLFAQYSAAAYCGKNNDAPAGTNITCTGNACPEVEKADATFLYSFEDSGVGDVTGFLALDNTNKLIVLSFRGSRSIENWIGNLNFDLKEINDICSGCRGHDGFTSSWRSVADTLRQKVEDAVREHPDYRVVFAGHSLGGALATVAGADLRGDGYDIDVFSYGAPRVGNRAFAEFLTVQTGGTLYRITHTNDIVPRLPPREFGYSHSSPEYWIKSGTLVPVRRRDIVKIEGIDATGGNNQPNIPDIPAHLWYFGLIGTCL

SEQ ID NO: 5825 - protein, 269 aa, Thermomyces lanuginosus
EVSQDLFNQFNLFAQYSAAAYCGKNNEAPAGTNITCTGNACPEVEKADATFLYSFEDMGVGDVTGFLALDNTNKLIVLSFRGSRSIENWIGNLNFDLKEINDICSGCRGHDGFTSSWRSVADTLRQKVEAAVREHPDYRVVFTGHSLGGALATVAGADLRGNPYDIDVFSYGAPRVGNRAFAEFLTVQTGGTLYRITHTNDIVPRLPPREFGYSHSSPEYWIKSGTLVPVTRNDIVKIEGIDATGGNNQPNIPDIPAHLWYFGRIGTCL

SEQ ID NO: 5826 - protein, 269 aa, Thermomyces lanuginosus
EVSQDLFNQFNLFAQYSAAAYCQKNNDAPAGTNITCTGNACPEVEKADATFLYSFEDSGVGDVTGFLALDNTNKQIVLSFRGSRSIENWIGNLNFDLKEINDICSGCRGHDGFTSSWRSVADTLRQKVEAAVREHPDYRVVFTGHSLGGALATVAGADLRGNGYDIDVFSYGAPRVGNRAFAEFLTVQTGGTLYRITHTNDIVPRLPPREFGYSHSSPEYWIKSGTLVPVTRNDIVKIEGIDATGGNNQPNQPDIPAHLWYFGRIGTCL

SEQ ID NO: 5827 - protein, 269 aa, Thermomyces lanuginosus
EVSQDLFNQFNLFAQYSAAAYCGKNNDAPAGTQITCTGNACPEVEKADATFLYSFEDSGVGDVTGFLALDNTNKLIVLSFRGSRSIENWIGNLNFDLKEINDICSGCRGHDGFTSSYRSVADTLRQKVEDAVREHPDYRVVFTGHSLGGALATVAGADLRGNGYDIDVFSYGAPRTGNRAFAEFLTVQTGGTLYRITHTNDIVPRLPPREFGYSHSSPEYWIKSGTLVPVRRRDIVKIEGIDATGGNNQPNIPDIPAHLWYFGLIGTCL

SEQ ID NO: 5828 - protein, 269 aa, Synthetic construct
EVSQDLFNQFNLFAQYSAAAYCGKNNDAPAGTNITCTGNACPEVEKADATFLYSFEGSGVGDVTGFLALDNTNKLIVLSFRGSRSIENWIGNLKFLLKEINDICSGCRGHDGFTSSWRSVADTLRQKVEDAVREHPDYRVVFTGHSLGGALATVAGADLRGNGYDIDVFPYGAPRVGNRAFAEFLTVQTGGTLYRITHTNDIVPRLPPREFGYSHSSPEYWIKSGTLVPVTRNDIVKIEGIDATGGNNRPNIPDIPAHLWYFGLIGTCL

SEQ ID NO: 5829 - protein, 269 aa, Thermomyces lanuginosus
EVSQDLFNQFNLFAQYSKAAYCGANNDAPAGTNITCTGNACPEVEKADATFLYSFEDSGVGDVTGFLALDNTNKRIVLSFRGSRSIENWIGNLRFDLKEINDICSGCRGHDGFTSSWRSVADTLRQKVEAAVREHPDYRVVFTGHSLGGALATVAGADLRGNGYDIDVFSYGAPRVGNRAFAEFLTVQTGGTLYRITHTNDIVPRLPPREFGYSHSSPEYWIKSGTLVPVTRNDIVKIEGIDATGGNNQPNIPDIPAHLWYFGLIGTCL

SEQ ID NO: 5830 - protein, 269 aa, Thermomyces lanuginosus
EVSQDLFNQFNLFAQYSAAAYCGKNNDAPAGTQITCTGNACPEVEKADATFLYSFEDSGVGDVTGFLALDNTNKLIVLSFRGSRSIENWIGNLNFDLKEINDICSGCRGHNGFTSSWRSVADTLRQKVEDAVREHPDYRVVFTGHSLGGALATVAGADLRGNGYDIDVFSYGAPRVGNRAFAEFLTVQTGGTLYRITHTNDIVPRLPPREFGYSHSSPEYWIKSPTLVPVRRRDIVKIEGIDATGGNNQPNIPDIPAHLWYFGLIGTCL

SEQ ID NO: 5831 - protein, 269 aa, Thermomyces lanuginosus
EVSQDLFNQFNLFAQYSAAAYCGKNNDAPAGTNITCTGNACPEVEKADATILYSFEDSGVGDVTGFLALDNTNKLIVLSFRGSRSIENWIGNLNFDLKEINDICSGCRGHDGFTSSWRSVADTLRQKVEDAVREHPDYRVVFAGHSLGGALATVAGADLRGNGYDIDVFSYGAPRVGNRAFAEFLTVQTGGTLYRITSTNDIVPRLPPREFGYSHSSPEYWIKSGTLVPVRRRDIVKIEGIDATGGNNQPNIPDIPAHLWYFGLIGTCL

SEQ ID NO: 5832 - protein, 269 aa, Thermomyces lanuginosus
EVSQDLFNQFNLFAQYSAAAYCKKNNDAPAGTNITCTGNACPEVEKADATFLYSFEDSGVGDVTGFLALDNTNKQIVLSFRGSRSIENWIGNLNFDLKEINDICSGCRGHDGFTSSWRSVADTLRQKVEAAVREHPDYRVVFTGHSLGGALATVAWADLRGNGYDIDVFSYGAPRVGNRAFAEFLTVQTGGTLYRITHTNDIVPRLPPREFGYSHSSPEYWIKSGTLVPVTRNDIVKIEGIDATGGNNQPNIPDIPAHLWYFGRIGTCL

SEQ ID NO: 5833 - protein, 269 aa, Thermomyces lanuginosus
EVSQDLFNQFNLFAQYSAAAYCGKNNDAPAGTNITCTGNACPEVEKADATILYSFEDSGVGDVTGFLALDNTNKLIVLSFRGSRSIENWIGNLNFDLKEINDICSGCRGHDGFTSSWRSVADTLRQKVEDAVREHPDYRVVFAGHSLGGALATVAGADLRGNGYDIDVFSYGAPRVGNRAFAEFLTVQTGGTLYRITHTNDIVPRLPPREFGYSHSSPEYWIKSGTLRPVRRRDIVKIEGIDATGGNNQPNIPDIPAHLWYFGLIGTCL

SEQ ID NO: 5834 - protein, 269 aa, Thermomyces lanuginosus
EVSQDLFNQFNLFAQYSAAAYCGKNNDAPAGTQITCTGNACPEVEKADATFLYSFEDSGVGDVTGFLALDNTNKLIVLSFRGSRSIKNWIGNLNFELKEINDICSGCRGHDGFTSSWRSVADTLRQKVEDAVREHPDYRVVFTGHSLGGALATVAGADLRGNGYDIDVFSYGAPRVGNRAFAEFLTVQTGGTLYRITHTNDIVPRLPPREFGYSHSSPEYWIKSGTLVPVRRRDIVKIEGIDATGGNNQPNIPDIPAHLWYFGLIGTCL

SEQ ID NO: 5835 - protein, 269 aa, Thermomyces lanuginosus
EVSQDLFNQFNLFAQYSAAAYCGKNNDAPAGTNITCTGNACPEVEKADATFLYSFEDSGVGDVTGFLALDNTNKRIILSFRGSRSIENWIGNLRFDLKEINDICSGCRGHDGFTSSWRSVADTLRQKVEDAVREHPDYRVVFTGHSLGGALATIAWADLRGNGYDIDVFSYGAPRVGNRAFAEFLTVQTGGTLYRITHTNDIVPRLPPREFGYSHSSPEYWIKSGTLVPVTRNDIVKIEGIDATGGNNQPNIPDIPAHLWYFGLIGTCL

SEQ ID NO: 5836 - protein, 269 aa, Thermomyces lanuginosus
EVSQDLFNQFNLFAQYSKAAYCQKNNDAPAGTNITCTGNACPEVEKADVTFLYSFEDSGVGDVTGFLALDNTNKQIVLSFRGSRSIENWIGNLNFDLKEINDICSGCRGHDGFTSSWRSVADTLRQKVEDAVREHPDYRVVFTGHSLGGALATVAWADLRGNGYDIDVFSYGAPRVGNRAFAEFLTVQTGGTLYRITHTNDIVPRLPPREFGYSHSSPEYWIKSGTLVPVTRNDIVKIEGIDATGGNNQPNIPDIPAHLWYFGLIGTCL

SEQ ID NO: 5837 - protein, 269 aa, Thermomyces lanuginosus
EVSQDLFNQFNLFAQYSAAAYCGKNNDAPAGTNITCTGNACPEVEKADATFLYSFAASGVGDVTGFLALDNTNKLIVLSFRGSRSIENWIGNLNFDLKEINDICSGCRGHDGFISSWRSVADTLRQKVEDAVREHPDYRVVFTGHSLGGALATVAGADLRGNGYDIDVFSYGAPRVGNRAFAEFLTVQTGGTLYRITHTNDIVPRLPPREFGYSHSSPEYWIKSGTLVPVRRRDIVKIEGIDATGGNNQPNIPDIPAHLWYFGLIGTCL

SEQ ID NO: 5838 - protein, 269 aa, Thermomyces lanuginosus
EVSQDLFNQFNLFAQYSAAAYCGKNNDAPAGTNITCTGNACPEVEKADATLLYSFEDSGVGDVTGFLALDNTNKLIVLSFRGSRSIENWIGNLNFELKEINDICSGCRGHDGFTSSWRSVADTLRQKVEDAVREHPDYRVVFTGHSLGGALATVAGADLRGNGYDIDVFSYGAPRVGNRAFAEFLTVQTGGTLYRITHTNDIVPRLPPREFGYSHSSPEYWIKSGTLVPVRRRDIVKIEGIDATGGNNQPNIPSIPAHLWYFGLIGTCL

SEQ ID NO: 5839 - protein, 269 aa, Thermomyces lanuginosus
EVSQDLFNQFNLFAQYSAAAYCQKNNDAPAGTNITCTGNACPEVEKADVTFLYSFEDSGVGDVTGFLALDNTNKQIVLSFRGSRSIENWIGNLNFDLKEINDICSGCRGHDGFTSSWRSVADTLRQKVEDAVREHPDYRVVFTGHSLGGALATVAGADLRGNGYDIDVFSYGAPRVGNRAFAEFLTTQDGGTLYRITHTNDIVPRLPPREFGYSHSSPEYWIKSGTLVPVTRNDIVKIEGIDATGGNNQPNIPDIPAHLWYFGLIGTCL

SEQ ID NO: 5840 - protein, 269 aa, Thermomyces lanuginosus
EVSQDLFNQFNLFAQYSAAAYCGKNNDAPAGTNITCTGNACPEVEKADATFLYSFEDNGSGDVTGFLALDNTNKLIVLSFRGSRSIENWIGNLNFDLKEINDICSGCRGHDGFTKSWRSVADTLRQKVEDAVREHPDYRVVFTGHSLGGALATVAGADLRGNGYDIDVFSYGAPRVGNRAFAEFLTVQTGGTLYRITHTNDIVPRLPPREFGYSHSSPEYWIKSGTLVPVRRRDIVKIEGIDATGGNNQPNIPDIPAHLWYFGLIGTCL

SEQ ID NO: 5841 - protein, 269 aa, Thermomyces lanuginosus
EVSQDLFNQFNLFAQYSKAAYCKKNNDAPAGTNITCTGNACPEVEKADATFLYSFEDSGVGDVTGFLALDNTNKLIILSFRGSRSIENWIGNLNFDLKEINDICSGCRGHDGFTSSWRSVADTLRQKVEAAVREHPDYRVVFTGHSLGGALATVAGADLRGNGYDIDVFSYGAPRVGNRAFAEFLTNQTGGTLYRITHTNDIVPRLPPREFGYSHSSPEYWIKSGTLVPVTRNDIVKIEGIDATGGNNQPNIPDIPAHLWYFGLIGTCL

SEQ ID NO: 5842 - protein, 269 aa, Thermomyces lanuginosus
EVSQDLFNQFNLFAQYSAAAYCGKNNDAPAGTQITCTGNACPEVEKADATFLYSFEDSGVGDVTGFLALDNTNKLIVLSFRGSRSIENWIGNLNFDLKEINDICSGCRGHAGFTSSWRSVADTLRQKVEDAVREHPDYRVVFTGHSLGGALATVAGADLRGNGYDIDVFSYGAPRVGNRAFAEFLTVQTGGTLYRITHTNDIVPRLPPREFGYSHSSPEYWIKSGTLVPVRRRDIVKIEGIDATGGNNQPNIPSIPAHLWYFGLIGTCL

SEQ ID NO: 5843 - protein, 269 aa, Synthetic construct
EVSQDLFNQFNLFAQYSAAAYCGKNNDAPAGTNITCTGNACPEVEKADATFLYSFEDSGVGDVTGFLALDNTNKLIVLSFRGSRSIENWIGNLNFDLKEINDICSGCRGHDGFTSSWRSVADTLRQKVEDAVREHPGYRVVFTGHSLGGALATVAGADLRGNGYDIGVFSYGAPRVGNRAFAEFLTVQTGGTLYRITHTNDIVPRLPPRVFGYSHSSPEYLIKSGTLVPVTRRDIVKIEGIDATGGNNQPNIPDIPAHLWYFGLIGTCL

SEQ ID NO: 5844 - protein, 269 aa, Thermomyces lanuginosus
EVSDDLFNQFKLFAQYSAAAYCGKNNDAPAGTNITCTGNACPEVEKADATFLYSFEDSGVGDVTGFLALDNTNKLIVLSFRGSRSIENWFGNLNFDLKEINDICSGCRGHDGFTSSWRSVADTLRQKVEDAVREHPDYRVVFTGHSLGGALATVAGADLRGNGYDIDVFSYGAPRVGNRAFAEFLTVQTGGTLYRITHTNDIVPRLPPREFGYSHSSPEYWIKSGTLVPVTRQDIVKIEGIDATGGNNQPNIPDITAHLWYFGLIGTCL

SEQ ID NO: 5845 - protein, 269 aa, Thermomyces lanuginosus
EVSQDLFNQFNLFAQYSAAAYCGKNNDAPAGTNITCTGNACPEVEKADATTLYSFEDSGVGDVTGFLALDNTNKLIVLSFRGSRSIENWIGNLNFDLKEINDICSGCRGHDGFTSSWRSVADTLRQKVEAAVREHPDYRVVFTGHSLGGALATVAGADLRGNGYDIDVFSYGAPRVGNRAFAEFLTTQTGGTLYRITHTNDIVPRLPPREFGYSHSSPEYWIKSGTLVPVTRNDIVKIEGIDATGGNNQPNQPDIPAHLWYFGRIGTCL

SEQ ID NO: 5846 - protein, 269 aa, Thermomyces lanuginosus
EVSQDLFNQFNLFAQYSAAAYCGKNNDAPAGTKITCTCNACPEVEKADATFLYSFEDSGVGDVTGFLALDNTNKLIVLSFRGSRSIENWIGNLNFDLKEINDICSGCRGHAGFTSSWRSVADTLRQKVEDAVREHPDYRVVFTGHSLGGALATVAGADLRGNGYDIDVFSYGAPRVGNRAFAEFLTVQTGGTLYRITHTNDIVPRLPPREFGYSHSSPEYWIKSGTLVPVERRDIVKIEGIDATGGNNQPNIPDIPAHLWYFGLIGTCL

SEQ ID NO: 5847 - protein, 269 aa, Thermomyces lanuginosus
EVSQDLFNQFNLFAQYSAAAYCGKNNEAPAGTNITCTGNACPEVEKADATFLYSFEDMGVGDVTGFLALDNTNKLIVLSFRGSRSIENWIGNLNFDLKEINDICSGCRGHDGFTSSWRSVADTLRQKVEDAVREHPQYRVVFTGHSLGGALATVAGADLRGNPYDIDVFSYGAPRVGNRAFAEFLTVQTGGTLYRITHTNDIVPRLPPREFGYSHSSPEYWIKSGTLVPVTRQDIVKIEGIDATGGNNQPNIPDIPAHLWYFGLIGTCL

SEQ ID NO: 5848 - protein, 269 aa, Thermomyces lanuginosus
EVSQDLFNQFNLFAQYSAAAYCQANNDAPAGTNITCTGNACPEVEKADATFLYSFEDSGVGDVTGFLALDNTNKRIVLSFRGSRSIENWIGNLNFDLKEINDICSGCRGHDGFTSSWRSVADTLRQKVEAAVREHPDYRVVFTGHSLGGALATIAGADLRGNGYDIDVFSYGAPRVGNRAFAEFLTVQTGGTLYRITHTNDIVPRLPPREFGYSHSSPEYWIKSGTLVPVTRNDIVKIEGIDATGGNNQPNIPDIPAHLWYFGLIGTCL

SEQ ID NO: 5849 - protein, 269 aa, Thermomyces lanuginosus
EVSQDLFNQFNLFAQYSAAAYCKKNNDAPAGTNITCTGNACPEVEKADATFLYSFKDSGVGDVTGFLALDNTNKLIVLSFRGSRSIENWIGNLNFDLKEINDICSGCRGHDGFTSSWRSVADTLRQKVEAAVREHPDYRVVFTGHSLGGALATVAGADLRGNGYDIDVFSYGAPRVGNRAFAEFLTNQTGGTLYRITHTNDIVPRLPPREFGYSHSSPEYWIKSGTLVPVTRNDIVKIEGIDATGGNNQPNIPDIPAHLWYFGRIGTCL

SEQ ID NO: 5850 - protein, 269 aa, Thermomyces lanuginosus
EVSRDLFNQFNLFAQYSAAAYCGKNNDAPAGTNITCTGNACPEVEKADATFLYSFEDSGVGDVTGFLALDNTNKLIVLSFRGSRSIENWIGNLNFDLKEINDICSGCRGHDGFTSSWRSVADTLRQKVEDAVREHPDYRVVFTGHSLGGALATVAGADLRGDGYDIDVFSYGAPRVGNRAFAEFLTVQTGGTLYRITHTNDIVPRLPPREFGYSHSSPEYWIKSGTLPPVRRRDIVKIEGIDATGGNNQPNIPDIPAHLWYFGLIGTCL

SEQ ID NO: 5851 - protein, 269 aa, Thermomyces lanuginosus
EVSQDLFNQFNLFAQYSAAAYCKANNDAPAGTNITCTGNACPEVEKADATFLYSFEDSGVGDVTGFLALDNTNKRIVLSFRGSRSIENWIGNLNFDLKEINDICSGCRGHDGFTSSWRSVADTLRQKVEAAVREHPDYRVVFTGHSLGGALATVAWADLRGNGYDIDVFSYGAPRVGNRAFAEFLTVQTGGTLYRITHTNDIVPRLPPREFGYSHSSPEYWIKSGTLVPVTRNDIVKIEGIDATGGNNQPNIPDIPAHLWYFGLIGTCL

SEQ ID NO: 5852 - protein, 269 aa, Thermomyces lanuginosus
EVSQDLFNQFNLFAQYSAAAYCGKNNDAPAGTNITCTGNACPEVEKADATFLYSFEDSGVGDVTGFLALDNTNKLIVLSFRGSRSIENWIGNLNFDLKEINDICSGCRGHDGFTSSWRSVADTLRQKVEDAVREHPDYRVVFTGHSLGGALATVAGADLRGNGYDIDVFSYGAPRVGNRAFAEFLTVQTGGTLYRITHTNDIVPRLPPREFGYSHSSPEYWIKSGTLVPLRRRDIVKIEGIDATGGNNQPNIPDIPAHFHYFGLIGTCL

SEQ ID NO: 5853 - protein, 269 aa, Thermomyces lanuginosus
EVSQDLFNQFNLFAQYSAAAYCGKNNDAPAGTNITCTGNACPEVEKADATFLYSFKDSGVGDVTGFLALDNTNKLIVLSFRGSRSIENWIGNLNFDLKEINDICSGCRGHDGFTSSWRSVADTLRQKVEAAVREHPDYRVVFTGHSLGGALATVAGADLRGNGYDIDVFSYGAPRVGNRAFAEFLTHQTGGTLYRITHTNDIVPRLPPREFGYSHSSPEYWIKSGTLVPVTRNDIVKIEGIDATGGNNQPNQPDIPAHLWYFGRIGTCL

SEQ ID NO: 5854 - protein, 269 aa, Thermomyces lanuginosus
EVSQDLFNQFNLFAQYSAAAYCQKNNDAPAGTNITCTGNACPEVEKADATFLYSFKDSGVGDVTGFLALDNTNKLIVLSFRGSRSIENWIGNLNFDLKEINDICSGCRGHDGFTSSWRSVADTLRQKVEDAVREHPDYRVVFTGHSLGGALATVAGADLRGNGYDIDVFSYGAPRVGNRAFAEFLTNQTGGTLYRITHTNDIVPRLPPREFGYSHSSPEYWIKSGTLVPVTRNDIVKIEGIDATGGNNQPNQPDIPAHLWYFGRIGTCL

SEQ ID NO: 5855 - protein, 269 aa, Thermomyces lanuginosus
EVSQDLFNQFNLFAQYSAAAYCGKNNDAPAGTNITCTGNACPEVEKADATFLYSFEDNGSGDVTGFLALDNTNKLIVLSFRGSRSIENWIGNLNFDLKEINDICSGCRGHDGFTSSWRSVADTLRQKVEDAVREHPDYRVVFTGHSLGGALATVAGANLRGNGYDIDVFSYGAPRVGNRAFAEFLTVQTGGTLYRITHTNDIVPRLPPREFGYSHSSPEYWIKSGTLVPVRRRDIVKIEGIDATGGNNQPNIPDIPAHLWYFGLIGTCL

SEQ ID NO: 5856 - protein, 269 aa, Thermomyces lanuginosus
EVSQDLFNQFNLFAQYSKAAYCQKNNDAPAGTNITCTGNACPEVFKADATFLYSFEDSGVGDVTGFLALDNTNKLIILSFRGSRSIENWIGNLNFDLKEINDICSGCRGHDGFTSSWRSVADTLRQKVEDAVREHPDYRVVFTGHSLGGALATVAGADLRGNGYDIDVFSYGAPRVGNRAFAEFLTVQDGGTLYRITHTNDIVPRLPPREFGYSHSSPEYWIKSGTLVPVTRNDIVKIEGIDATGGNNQPNIPDIPAHLWYFGLIGTCL

SEQ ID NO: 5857 - protein, 269 aa, Synthetic construct
ERRQDLFNQFNLFAQYSAAAYCGKNNDAPAGTNITCTGNACPEVEKADATFLYSFEDSGVGDVTGFLALDNTNKLIVLSFRGSRSIENWIGNLKFLLKEINDICSGCRGHDGFTSSWRSVADTLRQKVEDAVREHPDYRVVFTGHSLGGALATVAGADLRGNGYDIDVFSYGAPRVGNRAFAEFLTVQTGGTLYRITHTNDIVPRLPPREFGYSHSSPEYWIKSGTLVPVTRNDIVKIEGIDATGGNNRPNIPDIPAHLWYFGLIGTCL

SEQ ID NO: 5858 - protein, 269 aa, Thermomyces lanuginosus
EVSDDLFNQFKLFAQYSAAAYCGKNNSAPAGTNITCTGNACPEVEKADATFLYSFEDSGVGDVTGFLALDNTNKLIVLSFRGSRSIENWIGNLNFDLKEINDICSGCRGHDGFTSSWRSVADTLRQKVEDAVREHPDYRVVFTGHSLGGALATVAGADLRGNGYDIDVFSYGAPRVGNRAFAEFLTVQTGGTLYRITHTNDIVPRLPPREFGYSHSSPEYWIKSGTLVPVTRQDIVKIEGIDATGGNNQPNIPDITAHLWYFGLIGTCL

SEQ ID NO: 5859 - protein, 269 aa, Thermomyces lanuginosus
EVSQDLFNQFNLFAQYSAAAYCGKNNDAPAGTQITCTGNACPEVEKADATFLYSFEDSGVGDVTGFLALDNTNKLIVLSFRGSRSIENWIMNLNFDLKEINDICSGCRGHDGFTSSWRSVADTLRQKVEDAVREHPDYRVVFTGHSLGGALATVAGADLRGNWYDIDVFSYGAPRVGNRAFAEFLTVQTGGTLYRITHTNDIVPRLPPREFGYSHSSPEYWIKSGTLVPVRRRDIVKIEGIDATGGNNQPNIPDIPAHLWYFGLIGTCL

SEQ ID NO: 5860 - protein, 269 aa, Thermomyces lanuginosus
EVSQDLFNQFNLFAQYSAAAYCGKNNDAPAGTNITCTGNACPKVEKADATFLYSFSDSGVGDVTGFLALDNTNKLIVLSFRGSRSIKNWIGNLNFDLKEINDICSGCRGHDGFTSSWRSVADTLRQKVEDAVREHPDYRVVFTGHSLGGALATVAGADLRGNGYDIDVFSYGAPRVGNRAFAEFLTVQTGGTLYRITHTNDIVPRLPPREFGYSHSSPEYWIKSGTLVPVRRRDIVKIEGIDATGGNNQPNIPDIPAHLWYFGLIGTCL

SEQ ID NO: 5861 - protein, 269 aa, Thermomyces lanuginosus
EVSQDLFNQFNLFAQYSAAAYCKKNNSAPAGTNITCTGNACPEVEKADATFLYSFKDSGVGDVTGFLALDNTNKLIVLSFRGSRSIENWIGNLNFDLKEINDICSGCRGHDGFTSSWRSVADTLRQKVEDAVREHPDYRVVFTGHSLGGALATVAGADLRGNGYDIDVFSYGAPRVGNRAFAEFLTTQTGGTLYRITHTNDIVPRLPPREFGYSHSSPEYWIKSGTLVPVTRNDIVKIEGIDATGGNNQPNIPDIPAHLWYFGRIGTCL

SEQ ID NO: 5862 - protein, 269 aa, Thermomyces lanuginosus
EVSQDLFNQFNLFAQYSKAAYCGANNDAPAGTNITCTGNACPEVEKADATFLYSFEDSGVGDVTGFLALDNTNKQIVLSFRGSRSIENWIGNLNFDLKEINDICSGCRGHDGFTSSWRSVADTLRQKVEDAVREHPDYRVVFTGHSLGGALATIAWADLRGNGYDIDVFSYGAPRVGNRAFAEFLTVQTGGTLYRITHTNDIVPRLPPREFGYSHSSPEYWIKSGTLVPVTRNDIVKIEGIDATGGNNQPNIPDIPAHLWYFGLIGTCL

SEQ ID NO: 5863 - protein, 269 aa, Thermomyces lanuginosus
EVSQDLFNQFNLFAQYSKAAYCQKNNDAPAGTNITCTGNACPEVEKADVTFLYSFEDSGVGDVTGFLALDNTNKQIILSFRGSRSIENWIGNLNFDLKEINDICSGCRGHDGFTSSWRSVADTLRQKVEDAVREHPDYRVVFTGHSLGGALATVAGADLRGNGYDIDVFSYGAPRVGNRAFAEFLTVQTGGTLYRITHTNDIVPRLPPREFGYSHSSPEYWIKSGTLVPVTRNDIVKIEGIDATGGNNQPNIPDIPAHLWYFGLIGTCL

SEQ ID NO: 5864 - protein, 269 aa, Thermomyces lanuginosus
EVSQDLFNQFNLFAQYSAAAYCGANNDAPAGTNITCTGNACPEVEKADATFLYSFEDSGVGDVTGFLALDNTNKQIILSFRGSRSIENWIGNLNFDLKEINDICSGCRGHDGFTSSWRSVADTLRQKVEDAVREHPDYRVVFTGHSLGGALATIAGADLRGNGYDIDVFSYGAPRVGNRAFAEFLTNQTGGTLYRITHTNDIVPRLPPREFGYSHSSPEYWIKSGTLVPVTRNDIVKIEGIDATGGNNQPNIPDIPAHLWYFGLIGTCL

SEQ ID NO: 5865 - protein, 269 aa, Thermomyces lanuginosus
EVSQDLFNQFNLFAQYSAAAYCQQNNDAPAGTNITCTGNACPEVEKADATFLYSFEDSGVGDVTGFLALDNTNKQIVLSFRGSRSIENWIGNLNFDLKEINDICSGCRGHDGFTSSWRSVADTLRQKVEDAVREHPDYRVVFTGHSLGGALATVAWADLRGNGYDIDVFSYGAPRVGNRAFAEFLTQQTGGTLYRITHTNDIVPRLPPREFGYSHSSPEYWIKSGTLVPVTRNDIVKIEGIDATGGNNQPNIPDIPAHLWYFGLIGTCL

SEQ ID NO: 5866 - protein, 269 aa, Thermomyces lanuginosus
EVSQDLFNQFNLFAQYSKAAYCQKNNDAPAGTNITCTGNACPEVEKADATFLYSFEDSGVGDVTGFLALDNTNKLIILSFRGSRSIENWIGNLNFDLKEINDICSGCRGHDGFTSSWRSVADTLRQKVEDAVREHPDYRVVFTGHSLGGALATVAGADLRGNGYDIDVFSYGAPRVGNRAFAEFLTTQDGGTLYRITHTNDIVPRLPPREFGYSHSSPEYWIKSGTLVPVTRNDIVKIEGIDATGGNNQPNIPDIPAHLWYFGLIGTCL

SEQ ID NO: 5867 - protein, 269 aa, Thermomyces lanuginosus
EVSDDLFNQFNLFAQYSAAAYCGKNNSAPAGTNITCTGNACPEVEKADATFLYSFKDMGVGDVTGFLALDNTNKLIVLSFRGSRSIENWIGNLNFDLKEINDICSGCRGHDGFTSSWRSVADTLRQKVEDAVREHPDYRVVFTGHSLGGALATVAGADLRGNGYDIDVFSYGAPRVGNRAFAEFLTVQTGGTLYRITHTNDIVPRLPPREFGYSHSSPEYWIKSGTLVPVTRNDIVKIEGIDATGGNNQPNIPDITAHLWYFGLIGTCL

SEQ ID NO: 5868 - protein, 269 aa, Thermomyces lanuginosus
EVSQDLFNQFNLFAQYSKAAYCGKNNDAPAGTNITCTGNACPEVEKADATFLYSFEDSGVGDVTGFLALDNTNKQIVLSFRGSRSIENWIGNLNFDLKEINDICSGCRGHDGFTSSWRSVADTLRQKVEDAVREHPDYRVVFTGHSLGGALATVAWADLRGNGYDIDVFSYGAPRVGNRAFAEFLTTQDGGTLYRITHTNDIVPRLPPREFGYSHSSPEYWIKSGTLVPVTRNDIVKIEGIDATGGNNQPNIPDIPAHLWYFGLIGTCL

SEQ ID NO: 5869 - protein, 269 aa, Thermomyces lanuginosus
EVSQDLFNQFKLFAQYSAAAYCGKNNQAPAGTNITCTGNACPEVEKADATFLYSFMDSGVGDVTGFLALDNTNKLIVLSFRGSRSIENWIGNLNFDLKEINDICSGCRGHDGFTSSWRSVADTLRQKVEDAVREHPDYRVVFTGHSLGGALATVAGADLRGNGYDIDVFSYGAPRVGNRAFAEFLTVQTGGTLYRITHTNDIVPRLPPREFGYSHSSPEYWIKSGTLVPVTRQDIVKIEGIDATGGNNQPNIPDITAHLWYFGLIGTCL

SEQ ID NO: 5870 - protein, 269 aa, Thermomyces lanuginosus
EVSQDLFNQFNLFAQYSAAAYCKKNNDAPAGTNITCTGNACPEVEKADATFLYSFEDSGVGDVTGFLALDNTNKQIVLSFRGSRSIENWIGNLNFDLKEINDICSGCRGHAGFTSSWRSVADTLRQKVEAAVREHPDYRVVFTGHSLGGALATVAGADLRGNGYDIDVFSYGAPRVGNRAFAEFLTTQTGGTLYRITHTNDIVPRLPPREFGYSHSSPEYWIKSGTLVPVTRNDIVKIEGIDATGGNNQPNIPDIPAHLWYFGLIGTCL

SEQ ID NO: 5871 - protein, 269 aa, Thermomyces lanuginosus
EVSQDLFNQFNLFAQYSAAAYCDKNNDAPAGTNITCTGNACPEVEKADATFLYSFEDSGVGDVTGFLALDNTNKLIVLSFRGSRSIENWIGNLNFDLKEINDICSGCRGHAGFTSSWRSVADTLRQKVEDAVREHPDYRVVFTGHSLGGALATIAGADLRGNGYDIDVFSYGAPRVGNRAFAEFLTTQTGGTLYRITHTNDIVPRLPPREFGYSHSSPEYWIKSGTLVPVTRNDIVKIEGIDATGGNNQPNIPDIPAHLWYFGRIGTCL

SEQ ID NO: 5872 - protein, 269 aa, Thermomyces lanuginosus
EVSQDLFNQFNLFAQYSAAAYCGKNNDAPAGTQITCTGNACPEVEKADATFLYSFEDSGVGDVTGFLALDNTNKLIVLSFRGSRSIENWIGNLNFDLKEINDICSGCRGHAGFTSSWRSVADTLRQKVEDAVREHPDYRVVFTGHSLGGALATVAGADLRGNGYDIDVFSYGAPRVGNRAFAEFLTVQTGGTLYRITHTNDIVPRLPPREFGYSHSSPEYWIKSGTLVPVRRRDIVKIEGIDATGGNNRPNIPDIPAHLWYFGLIGTCL

SEQ ID NO: 5873 - protein, 269 aa, Thermomyces lanuginosus
EVSQDLFNQFNLFAQYSAAAYCQKNNDAPAGTNITCTGNACPEVPKADATFLYSFEDSGVGDVTGFLALDNTNKQIILSFRGSRSIENWIGNLNFDLKEINDICSGCRGHDGFTSSWRSVADTLRQKVEDAVREHPDYRVVFTGHSLGGALATVAGADLRGNGYDIDVFSYGAPRVGNRAFAEFLTTQTGGTLYRITHTNDIVPRLPPREFGYSHSSPEYWIKSGTLVPVTRNDIVKIEGIDATGGNNQPNIPDIPAHLWYFGLIGTCL

SEQ ID NO: 5874 - protein, 269 aa, Thermomyces lanuginosus
EVSQDLFNQFNLFAQYSAAAYCGKNNDAPAGTQITCTGNACPEVEKADATFLYSFEDSGVGDVTGFLALDNTNKLIVLSFRGSRSIENWIGNLNFDLKEINDICSGCRGHDGFTSSIRSVADTLRQKVEDAVREHPDYRVVFTGHSLGGALATVAGADLRGNGYDIDVFSYGAPRQGNRAFAEFLTVQTGGTLYRITHTNDIVPRLPPREFGYSHSSPEYWIKSGTLVPVRRRDIVKIEGIDATGGNNQPNIPDIPAHLWYFGLIGTCL

SEQ ID NO: 5875 - protein, 269 aa, Thermomyces lanuginosus
EVSQDLFNQFNLFAQYSAAAYCQKNNSAPAGTNITCTGNACPEVEKADATFLYSFEDSGVGDVTGFLALDNTNKGIVLSFRGSRSIENWIGNLNFDLKEINDICSGCRGHDGFTSSWRSVADTLRQKVEDAVREHPDYRVVFTGHSLGGALATVAGADLRGNGYDIDVFSYGAPRVGNRAFAEFLTVQTGGTLYRITHTNDIVPRLPPREFGYSHSSPEYWIKSGTLVPVTRNDIVKIEGIDATGGNNQPNQPDIPAHLWYFGRIGTCL

SEQ ID NO: 5876 - protein, 269 aa, Thermomyces lanuginosus
EVSQDLFNQFKLFAQYSAAAYCGKNNNAPAGTNITCTGNACPEVEKADATFLYSFEDSGVGDVTGFLALDNTNKLIVLSFRGSRSIENWFGNLNFDLKEINDICSGCRGHDGFTSSWRSVADTLRQKVEDAVREHPDYRVVFTGHSLGGALATVAGADLRGNGYDIDVFSYGAPRVGNRAFAEFLTVQTGGTLYRITHTNDIVPRLPPREFGYSHSSPEYWIKSGTLVPVTRQDIVKIEGIDATGGNNQPNIPDITAHLWYFGLIGTCL

SEQ ID NO: 5877 - protein, 269 aa, Synthetic construct
EVSQDLFNQFNLFAQYSAAAYCGKNNDAPAGTNITCTGNACPEVEKADATFLYSFEDSGVGDVTGFLALDNTNKLIVLSFRGSRSIENWIGNLKFLLKKINDICSGCRGHDGFTSSWRSVADTLRQKVEDAVREHPDYRVVFTGHSLGGALATVAGADLRGNGYDIDVFSYGAPRVGNRAFAEFLTVQTGGTLYRITHTNDIVPRLPPREFGYSHSSPEYWIRSGTLVPVTRNDIVKIEGIDATGGNNRPNIPDIPAHLWYFGLIGTCL

SEQ ID NO: 5878 - protein, 269 aa, Thermomyces lanuginosus
EVSQDLFNQFNLFAQYSAAAYCGKNNQAPAGTNITCTGNACPEVEKADATFLYSFKDSGVGDVTGFLALDNTNKLIVLSFRGSRSIENWFGNLNFDLKEINDICSGCRGHDGFTSSWRSVADTLRQKVEDAVREHPDYRVVFTGHSLGGALATVAGADLRGNGYDIDVFSYGAPRVGNRAFAEFLTVQTGGTLYRITHTNDIVPRLPPREFGYSHSSPEYWIKSGTLVPVTRQDIVKIEGIDATGGNNQPNIPDITAHLWYFGLIGTCL

SEQ ID NO: 5879 - protein, 269 aa, Thermomyces lanuginosus
EVSQDLFNQFNLFAQYSAAAYCGKNNDAPAGTNITCTGNACPEVEKADATILYSFEDSGVGDVTGFLALDNTNKLIVLSFRGSRSIENWIGNLNFDLKEINDICSGCRGHDGFTSSWRSVADTLRQKVEDAVREHPDYRVVFTGHSLGGALATVAGADLRGNGYDIDVFSYGAPRVGNRAFAEFLTVQTGGTLYRITNTNDIVPRLPPREFGYSHSSPEYWIKSGTLPPVRRRDIVKIEGIDATGGNNQPNIPDIPAHLWYFGLIGTCL

SEQ ID NO: 5880 - protein, 269 aa, Thermomyces lanuginosus
EVSQDLFNQFNLFAQYSAAAYCGKNNDAPAGTNITCTGNACPEVEKADATVLYSFEDSGVGDVTGFLALDNTNKLIVLSFRGSRSIENWIGNLNFDLKEINDICSGCRGHEGFTSSWRSVADTLRQKVEDAVREHPDYRVVFTGHSLGGALATVAGADLRGNGYDIDVFSYGAPRVGNRAFAEFLTVQTGGTLYRITHTNDIVPRLPPREFGYSHSSPEYWIKSGTLVPVRRRDIVKIEGIDATGGNNQPNIPSIPAHLWYFGLIGTCL

SEQ ID NO: 5881 - protein, 269 aa, Thermomyces lanuginosus
EVSQDLFNQFNLFAQYSAAAYCGKNNDAPAGTYITCTGNACPEVEKADATFLYSFEDSGVGDVTGFLALDNTNKLIVLSFRGSRSIENWIWNLKFDLKEINDICSGCRGHDGFTSSWRSVADTLRQKVEDAVREHPDYRVVFTGHSLGGALATVAGADLRGNGYDIDVFSYGAPRVGNRAFAEFLTVQTGGTLYRITHTNDIVPRLPPREFGYSHSSPEYWIKSGTLVPVRRRDIVKIEGIDATGGNNQPNIPDIPAHLWYFGLIGTCL

SEQ ID NO: 5882 - protein, 269 aa, Thermomyces lanuginosus
EVSQDLFNQFNLFAQYSAAAYCGKNNDAPAGTNITCTGNACPEVEKADATFLYSFEDSGVGDVTGFLALDNTNKLIVLSFRGSRSIENWIGNLNFDLKEINDICSGCRGHDGFTSSWRSVADTLRQKVEDAVREHPDYRVVFAGHSLGGALATVAGADLRGNGYDIDVFSYGAPRVGNRAFAEFLTVQTGGTLYRITHTNDIVPRLPPREFGYSHSSPEYWIKSGTLPPVRRRDIVKIEGIDATGGNNQPNIPDISAHLWYFGLIGTCL

SEQ ID NO: 5883 - protein, 269 aa, Thermomyces lanuginosus
EVSQDLFNQFNLFAQYSAAAYCGKNNEAPAGTNITCTGNACPEVEKADATFLYSFEDMGVGDVTGFLALDNTNKLIVLSFRGSRSIENWIGNLNFDLKEINDICSGCRGHDGFTSSWRSVADTLRQKVEDAVREHPDYRVVFTGHSLGGALATVAGADLRGNPYDIDVFSYGAPRVGNRAFAEFLTVQTGGTLYRITHTNDIVPRLPPREFGYSHSSPEYWIKSGTMVPVTRNDIVKIEGIDATGGNNQPNIPDIPAHLWYFGRIGTCL

SEQ ID NO: 5884 - protein, 269 aa, Thermomyces lanuginosus
EVSQDLFNQFKLFAQYSAAAYCGKNNQAPAGTNITCTGNACPEVEKADATFLYSFEDMGVGDVTGFLALDNTNKLIVLSFRGSRSIENWIGNLNFDLKEINDICSGCRGHDGFTSSWRSVADTLRQKVEDAVREHPDYRVVFTGHSLGGALATVAGADLRGNGYDIDVFSYGAPRVGNRAFAEFLTVQTGGTLYRITHTNDIVPRLPPREFGYSHSSPEYWIKSGTLVPVTRQDIVKIEGIDATGGNNQPNIPDITAHLWYFGLIGTCL

SEQ ID NO: 5885 - protein, 269 aa, Thermomyces lanuginosus
EVSQDLFNQFNLFAQYSKAAYCGKNNDAPAGTNITCTGNACPEVEKADATFLYSFEDSGVGDVTGFLALDNTNKQIVLSFRGSRSIENWIGNLNFDLKEINDICSGCRGHDGFTSSWRSVADTLRQKVEDAVREHPDYRVVFTGHSLGGALATVAGADLRGNGYDIDVFSYGAPRVGNRAFAEFLTTQQGGTLYRITHTNDIVPRLPPREFGYSHSSPEYWIKSGTLVPVTRNDIVKIEGIDATGGNNQPNIPDIPAHLWYFGRIGTCL

SEQ ID NO: 5886 - protein, 269 aa, Thermomyces lanuginosus
EVSQDLFNQFNLFAQYSAAAYCGKNNDAPAGTNITCTGNACPEVEKAQATFLYSFEDMGVGDVTGFLALDNTNKLIVLSFRGSRSIENWIGNLNFDLKEINDICSGCRGHDGFTSSWRSVADTLRQKVEDAVREHPQYRVVFTGHSLGGALATVAGADLRGNPYDIDVFSYGAPRVGNRAFAEFLTVQTGGTLYRITHTNDIVPRLPPREFGYSHSSPEYWIKSGTLVPVTRNDIVKIEGIDATGGNNQPNIPDIPAHLWYFGRIGTCL

SEQ ID NO: 5887 - protein, 269 aa, Thermomyces lanuginosus
EVSQDLFNQFNLFAQYSAAAYCGKNNNAPAGTNITCTGNACPEVEKADATFLYSFKDMGVGDVTGFLALDNTNKLIVLSFRGSRSIENWIGNLNFDLKEINDICSGCRGHDGFTSSWRSVADTLRQKVEDAVREHPDYRVVFTGHSLGGALATVAGADLRGNGYDIDVFSYGAPRVGNRAFAEFLTVQTGGTLYRITHTNDIVPRLPPREFGYSHSSPEYWIKSGTLVPVTRQDIVKIEGIDATGGNNQPNIPDITAHLWYFGLIGTCL

SEQ ID NO: 5888 - protein, 269 aa, Thermomyces lanuginosus
EVSQDLFNQFNLFAQYSAAAYCGKNNDAPAGTNITCTGNACPEVEKADATILYSFEDSGVGDVTGFLALDNTNKLIVLSFRGSRSIENWIGNLNFDLKEINDICSGCRGHEGFTSSWRSVADTLRQKVEDAVREHPDYRVVFTGHSLGGALATVAGADLRGNGYDIDVFSYGAPRVGNRAFAEFLTVQTGGTLYRITHTNDIVPRLPPREFGYSHSSPEYWIKSGTLVPVRRRDIVKIEGIDATGGNNQPNIPSIPAHLWYFGLIGTCL

SEQ ID NO: 5889 - protein, 269 aa, Thermomyces lanuginosus
EVSQDLFNQFNLFAQYSAAAYCGKNNSAPAGTNITCTGNACPEVEKADATFLYSFEDSGVGDVTGFLALDNTNKQIVLSFRGSRSIENWIQNLNFDLKEINDICSGCRGHDGFTSSWRSVADTLRQKVEAAVREHPDYRVVFTGHSLGGALATVAGADLRGNGYDIDVFSYGAPRVGNRAFAEFLTTQTGGTLYRITHTNDIVPRLPPREFGYSHSSPEYWIKSGTLVPVTRNDIVKIEGIDATGGNNQPNIPDIPAHLWYFGLIGTCL

SEQ ID NO: 5890 - protein, 269 aa, Thermomyces lanuginosus
EVSQDLFNQFNLFAQYSAAAYCGKNNDAPAGTQITCTGNACPEVEKADATFLYSFEDSGVGDVTGFLALDNTNKLIVLSFRGSRSIENWITNLNFDLKEINDICSGCRGHDGFTSSWRSVADTLRQKVEDAVREHPDYRVVFTGHSLGGALATVAGADLRGNWYDIDVFSYGAPRVGNRAFAEFLTVQTGGTLYRITHTNDIVPRLPPREFGYSHSSPEYWIKSGTLVPVRRRDIVKIEGIDATGGNNQPNIPDIPAHLWYFGLIGTCL

SEQ ID NO: 5891 - protein, 269 aa, Thermomyces lanuginosus
EVSQDLFNQFNLFAQYSAAAYCQKNNDAPAGTNITCTGNACPEVEKADATFLYSFEDSGVGDVTGFLALDNTNKGIVLSFRGSRSIENWIANLNFDLKEINDICSGCRGHDGFTSSWRSVADTLRQKVEDAVREHPDYRVVFTGHSLGGALATVAGADLRGNGYDIDVFSYGAPRVGNRAFAEFLTVQTGGTLYRITHTNDIVPRLPPREFGYSHSSPEYWIKSGTLVPVTRNDIVKIEGIDATGGNNQPNQPDIPAHLWYFGRIGTCL

SEQ ID NO: 5892 - protein, 269 aa, Thermomyces lanuginosus
EVSQDLFNQFNLFAQYSKAAYCGKNNSAEAGTNITCTGNACPEVEKADATFLYSFEDSGVGDVTGFLALDNTRKDIVLSFRGSRSIENWIGNLNFDLKEINDICSGCRGHDGFTSSWRSVADTLRQKVEDAVREHPDYRVVFTGHSLGGALATVAGADLRGNGYDIDVFSYGAPRVGNRAFAEFLTVQTGGTLYRITHTNDIVPRLPPREFGYSHSSPEYWIKSGTLVPVTRNDIVKIEGIDATGGNNQPNIPDIPAHLWYFGLIGTCL

SEQ ID NO: 5893 - protein, 269 aa, Thermomyces lanuginosus
EVSQDLFNQFNLFAQYSAAAYCGKNNEAPAGTNITCTGNACPEVEKAQATFLYSFEDSGVGDVTGFLALDNTNKLIVLSFRGSRSIENWIGNLNFDLKEINDICSGCRGHDGFTSSWRSVADTLRQKVEDAVREHPDYRVVFTGHSLGGALATVAGADLRGNGYDIDVFSYGAPRVGNRAFAEFLTVQTGGTLYRITHTNDIVPRLPPREFGYSHSSPEYWIKSGTMVPVTRQDIVKIEGIDATGGNNQPNIPDIPAHLWYFGRIGTCL

SEQ ID NO: 5894 - protein, 269 aa, Thermomyces lanuginosus
EVSDDLFNQFNLFAQYSAAAYCGKNNQAPAGTNITCTGNACPEVEKADATFLYSFKDSGVGDVTGFLALDNTNKLIVLSFRGSRSIENWIGNLNFDLKEINDICSGCRGHDGFTSSWRSVADTLRQKVEDAVREHPDYRVVFTGHSLGGALATVAGADLRGNGYDIDVFSYGAPRVGNRAFAEFLTVQTGGTLYRITHTNDIVPRLPPREFGYSHSSPEYWIKSGTLVPVTRQDIVKIEGIDATGGNNQPNIPDITAHLWYFGLIGTCL

SEQ ID NO: 5895 - protein, 269 aa, Thermomyces lanuginosus
EVSQDLFNQFNLFAQYSKAAYCGANNDAPAGTNITCTGNACPEVEKADATFLYSFEDSGVGDVTGFLALDNTNKQIVLSFRGSRSIENWIGNLNFDLKEINDICSGCRGHDGFTSSWRSVADTLRQKVEAAVREHPDYRVVFTGHSLGGALATVAGADLRGNGYDIDVFSYGAPRVGNRAFAEFLTVQTGGTLYRITHTNDIVPRLPPREFGYSHSSPEYWIKSGTLVPVTRNDIVKIEGIDATGGNNQPNIPDIPAHLWYFGRIGTCL

SEQ ID NO: 5896 - protein, 269 aa, Thermomyces lanuginosus
EVSQDLFNQFNLFAQYSAAAYCGKNNSAEAGTNITCTGNACPEVFKADATFLYSFEDSGVGDVTGFLALDNTRKLIVLSFRGSRSIENWIGNLNFDLKEINDICSGCRGHDGFTSSWRSVADTLRQKVEDAVREHPDYRVVFTGHSLGGALATVAGADLRGNGYDIDVFSYGAPRVGNRAFAEFLTVQDGGTLYRITHTNDIVPRLPPREFGYSHSSPEYWIKSGTLVPVTRNDIVKIEGIDATGGNNQPNIPDIPAHLWYFGLIGTCL

SEQ ID NO: 5897 - protein, 269 aa, Synthetic construct
EVSQDLFNQFNLFAQYSAAAYCGKNNDAPAGTNITCTGNACPEVEKADATFLYSFEDSGVGDVTGFLALDNTNKLIVLSFRGSRSIENWFGNLNFLLKKINDICSGCRGHDGFTSSWRSVADTLRQKVEDAVREHPDYRVVFTGHSLGGALATVAGADLRGNGYDIDVFSYGAPRVGNRAFAEFLTAQTGGTLYRITHTNDIVPRLPPREFGYSHSSPEYWIKSGTLVPVTRRDIVKIEGIDATGGNNQPNIPDIPAHLWYFGLIGTCL

SEQ ID NO: 5898 - protein, 269 aa, Thermomyces lanuginosus
EVSQDLFNQFNLFAQYSAAAYCQKNNDAPAGTNITCTGNACPEVEKADATFLYSFEDSGVGDVTGFLALDNTNKQIILSFRGSRSIENWIGNLNFDLKEINDICSGCRGHDGFTSSWRSVADTLRQKVEAAVREHPDYRVVFTGHSLGGALATVAWADLRGNGYDIDVFSYGAPRVGNRAFAEFLTVQTGGTLYRITHTNDIVPRLPPREFGYSHSSPEYWIKSGTLVPVTRNDIVKIEGIDATGGNNQPNIPDIPAHLWYFGLIGTCL

SEQ ID NO: 5899 - protein, 269 aa, Thermomyces lanuginosus
EVSQDLFNQFNLFAQYSAAAYCKKNNDAPAGTNITCTGNACPEVEKADATFLYSFEDSGVGDVTGFLALDNTNKQIVLSFRGSRSIENWIGNLNFDLKEINDICSGCRGHDGFTSSWRSVADTLRQKVEDAVREHPDYRVVFTGHSLGGALATVAGADLRGNGYDIDVFSYGAPRVGNRAFAEFLTHQTGGTLYRITHTNDIVPRLPPREFGYSHSSPEYWIKSGTLVPVTRNDIVKIEGIDATGGNNQPNQPDIPAHLWYFGRIGTCL

SEQ ID NO: 5900 - protein, 269 aa, Thermomyces lanuginosus
EVSQDLFNQFNLFAQYSAAAYCGKNNDAPAGTNITCTGNACPEVEKADATILYSFEDSGVGDVTGFLALDNTNKLIVLSFRGSRSIENWIGNLNFDLKEINDICSGCRGHDGFTSSWRSVADTLRQKVEDAVREHPDYRVVFTGHSLGGALATVAGADLRGNGYDIDVFSYGAPRVGNRAFAEFLTVQTGGTLYRITNTNDIVPRLPPREFGYSHSSPEYWIKSGTLRPVRRRDIVKIEGIDATGGNNQPNIPDIPAHLWYFGLIGTCL

SEQ ID NO: 5901 - protein, 269 aa, Thermomyces lanuginosus
EVSQDLFNQFNLFAQYSAAAYCGKNNDAPAGTNITCTGNACPEVEKADATFLYSFEDSGVGDVTGFLALDNTNKLIVLSFRGSRSIENWIGNLNFDLKEINDICSGCRGHDGFTSSWRSVADTLRQKVEDAVREHPDYRVVFTGHSLGGALATVAGADLRGDGYDIDVFSYGAPRVGNRAFAEFLTVQTGGTLYRITNTNDIVPRLPPREFGYSHSSPEYWIKSGTLRPVRRRDIVKIEGIDATGGNNQPNIPDIPAHLWYFGLIGTCL

SEQ ID NO: 5902 - protein, 269 aa, Thermomyces lanuginosus
EVSQDLFNQFNLFAQYSAAAYCGKNNDAPAGTNITCTGNACPEVEKADATFLYSFKDSGVGDVTGFLALDNTNKRIVLSFRGSRSIENWIGNLNFDLKEINDICSGCRGHDGFTSSWRSVADTLRQKVEAAVREHPDYRVVFTGHSLGGALATVAGADLRGNGYDIDVFSYGAPRVGNRAFAEFLTNQTGGTLYRITHTNDIVPRLPPREFGYSHSSPEYWIKSGTLVPVTRNDIVKIEGIDATGGNNQPNIPDIPAHLWYFGRIGTCL

SEQ ID NO: 5903 - protein, 269 aa, Thermomyces lanuginosus
EVSQDLFNQFNLFAQYSAAAYCGKNNDAPAGTNITCTGNACPEVEKADATFLYSFRDSGVGDVTGFLALDNTNKLIVLSFRGSRSIENWIGNLNFDLKEINDICSGCRGHDGFTSSWFSVADTLRQKVEDAVREHPDYRVVFTGHSLGGALATVAGADLRGNGYDIDVFSYGAPRVGNRAFAEFLTVQTGGTLYRITHTNDIVPRLPPREFGYSHSSPEYWIKSGTLVPVRRRDIVKIEGIDATGGNNQPNIPDITAHLWYFGLIGTCL

SEQ ID NO: 5904 - protein, 269 aa, Thermomyces lanuginosus
EVSQDLFNQFNLFAQYSAAAYCGKNNDAPAGTNITCTGNACPEVEKADATFLYSFKDSGVGDVTGFLALDNTNKLIVLSFRGSRSIENWIGNLRFDLKEINDICSGCRGHDGFTSSWRSVADTLRQKVEDAVREHPDYRVVFTGHSLGGALATVAWADLRGNGYDIDVFSYGAPRVGNRAFAEFLTNQTGGTLYRITHTNDIVPRLPPREFGYSHSSPEYWIKSGTLVPVTRNDIVKIEGIDATGGNNQPNIPDIPAHLWYFGRIGTCL

SEQ ID NO: 5905 - protein, 269 aa, Synthetic construct
EVSQDLFNQFNLFAQYSAAAYCGKNNDAPAGTNITCTGNACPEVEKADATFLYSFEDSGVGDVTGFLALDNTNKLIVLSFRGSRSIENWIGNLKFLLKKINDICSGCRGHDGFTSSWRSVADTLRQKVEDAVREHPDYRVVFTGHSLGGALATVAGADLRGNGYDIDVFSYGAPRVGNRAFAEFLTVQTGGTLYRITHTNDIVPRLPPREFGYSHSSPEYWIKSGTLVPVTRNRIVKIEGIDATGGNNRPNIPDIPAHLWYFGLIGTCL

SEQ ID NO: 5906 - protein, 269 aa, Thermomyces lanuginosus
EVSQDLFNQFNLFAQYSAAAYCGKNNDAPAGTNITCTGNACPEVEKADATFLYSFKDSGVGDVTGFLALDNTNKRIVLSFRGSRSIENWIGNLNFDLKEINDICSGCRGHDGFTSSWRSVADTLRQKVEAAVREHPDYRVVFTGHSLGGALATVAGADLRGNGYDIDVFSYGAPRVGNRAFAEFLTTQTGGTLYRITHTNDIVPRLPPREFGYSHSSPEYWIKSGTLVPVTRNDIVKIEGIDATGGNNQPNIPDIPAHLWYFGRIGTCL

SEQ ID NO: 5907 - protein, 269 aa, Thermomyces lanuginosus
EVSQDLFNQFKLFAQYSAAAYCKKNNDAPAGTNITCTGNACPEVEKADATFLYSFKDSGVGDVTGFLALDNTNKQIVLSFRGSRSIENWIGNLNFDLKEINDICSGCRGHDGFTSSWRSVADTLRQKVEDAVREHPDYRVVFTGHSLGGALATVAGADLRGNGYDIDVFSYGAPRVGNRAFAEFLTVQQGGTLYRITHTNDIVPRLPPREFGYSHSSPEYWIKSGTLVPVTRNDIVKIEGIDATGGNNQPNIPDIPAHLWYFGLIGTCL

SEQ ID NO: 5908 - protein, 269 aa, Thermomyces lanuginosus
EVSQDLFNQFNLFAQYSAAAYCGKNNDAPAGTNITCTGNACPEVEKADATTLYSFEDSGVGDVTGFLALDNTNKQINLSFRGSRSIENWIGNLNFDLKEINDICSGCRGHDGFTSSWRSVADTLRQKVEDAVREHPDYRVVFTGHSLGGALATVAGADLRGNGYDIDVFSYGAPRVGNRAFAEFLTVQTGGTLYRITHTNDIVPRLPPREFGYSHSSPEYWIKSGTLVPVTRNDIVKIEGIDATGGNNQPNQPDIPAHLWYFGRIGTCL

SEQ ID NO: 5909 - protein, 269 aa, Thermomyces lanuginosus
EVSDDLFNQFKLFAQYSAAAYCGKNNQAPAGTNITCTGNACPEVEKADATFLYSFKDSGVGDVTGFLALDNTNKLIVLSFRGSRSIENWIGNLNFDLKEINDICSGCRGHDGFTSSWRSVADTLRQKVEDAVREHPDYRVVFTGHSLGGALATVAGADLRGNGYDIDVFSYGAPRVGNRAFAEFLTVQTGGTLYRITHTNDIVPRLPPREFGYSHSSPEYWIKSGTLVPVTRQDIVKIEGIDATGGNNQPNIPDIPAHLWYFGLIGTCL

SEQ ID NO: 5910 - protein, 269 aa, Synthetic construct
EVSQDLFNQFNLFAQYSAAAYCGKNNDAPAGTNITCTGNACPEVEKADATFLYSFEDSGVGDVTGFLALDNTNKLIVLSFRGSRSIKNWIANIKFALKEINDICSGCRGHDGFTSSWRSVADTLRQKVEDAVREHPDYRVVFTGHSLGGALATVAGADLRGNGYDIDVFSYGAPRVGNRAFAEFLTVQTGGTLYRITHTNDIVPRLPPREFGYSHSSPEYWIKSGTLVPVTRNDIVKIEGIDATGGNNQPNIPDIPAHLWYFGLIGTCL

SEQ ID NO: 5911 - protein, 269 aa, Thermomyces lanuginosus
EVSQDLFNQFNLFAQYSAAAYCQKNNDAPAGTNITCTGNACPEVFKADATFLYSFEDSGVGDVTGFLALDNTNKQIILSFRGSRSIENWIGNLNFDLKEINDICSGCRGHDGFTSSWRSVADTLRQKVEDAVREHPDYRVVFTGHSLGGALATVAGADLRGNGYDIDVFSYGAPRVGNRAFAEFLTTQTGGTLYRITHTNDIVPRLPPREFGYSHSSPEYWIKSGTLVPVTRNDIVKIEGIDATGGNNQPNIPDIPAHLWYFGLIGTCL

SEQ ID NO: 5912 - protein, 269 aa, Thermomyces lanuginosus
EVSRDLFNQFNLFAQYSAAAYCGKNNDAPAGTNITCTGNACPEVEKADATFLYSFEDSGVGDVTGFLALDNTNKLIVLSFRGSRSIENWIGNLNFDLKEINDICSGCRGHDGFTSSWRSVADTLRQKVEDAVREHPDYRVVFTGHSLGGALATVAGADLRGNGYDIDVFSYGAPRVGNRAFAEFLTVQTGGTLYRITSTNDIVPRLPPREFGYSHSSPEYWIKSGTLRPVRRRDIVKIEGIDATGGNNQPNIPDIPAHLWYFGLIGTCL

SEQ ID NO: 5913 - protein, 269 aa, Thermomyces lanuginosus
EVSQDLFNQFNLFAQYSAAAYCGKNNSAPAGTNITCTGNACPEVEKADATFLYSFEDSGVGDVTGFLALDNTNKGIVLSFRGSRSIENWIQNLNFDLKEINDICSGCRGHDGFTSSWRSVADTLRQKVEDAVREHPDYRVVFTGHSLGGALATVAGADLRGNGYDIDVFSYGAPRVGNRAFAEFLTVQTGGTLYRITHTNDIVPRLPPREFGYSHSSPEYWIKSGTLVPVTRNDIVKIEGIDATGGNNQPNQPDIPAHLWYFGRIGTCL

SEQ ID NO: 5914 - protein, 269 aa, Thermomyces lanuginosus
EVSQDLFNQFNLFAQYSAAAYCGKNNDAPAGTNITCTGNACPEVEKADATFLYSFEDSGVGDVTGFLALDNTNKLIVLSFRGSRSIENWIINLNFDLKEINDICSGCRGHDGFTSSWRSVADTLRQKVEDAVREHPDYRVVFTGHSLGGALATVAGADLRGNGYDIDVFSYGAPRVGNRAFAEFLTVQTGGTLYRITHTNDIVPRLPPRQFGYSHSSPEYWIKSGTLVPVRRRDIVKIEGIDATGGNNQRNIPDIPAHLWYFGLIGTCL

SEQ ID NO: 5915 - protein, 269 aa, Thermomyces lanuginosus
EVSQDLFNQFNLFAQYSAAAYCGKNNDAPAGTNITCTGNACPEVEKADATILYSFEDSGVGDVTGFLALDNTNKLIVLSFRGSRSIENWIGNLNFDLKEINDICSGCRGHDGFTSSWRSVADTLRQKVEDAVREHPDYRVVFTGHSLGGALATVAGADLRGNGYDIDVFSYGAPRVGNRAFAEFLTVQTGGTLYRITSTNDIVPRLPPREFGYSHSSPEYWIKSGTLRPVRRRDIVKIEGIDATGGNNQPNIPDIPAHLWYFGLIGTCL

SEQ ID NO: 5916 - protein, 269 aa, Thermomyces lanuginosus
EVSQDLFNQFNLFAQYSKAAYCGKNNSAPAGTDITCTGNACPEVFKADATFLYSFEDSGVGDVTGFLALDNTNKLIVLSFRGSRSIENWIGNLNFDLKEINDICSGCRGHDGFTSSWRSVADTLRQKVEDAVREHPDYRVVFTGHSLGGALATVAGADLRGNGYDIDVFSYGAPRVGNRAFAEFLTVQDGGTLYRITHTNDIVPRLPPREFGYSHSSPEYWIKSGTLVPVTRNDIVKIEGIDATGGNNQPNIPDIPAHLWYFGLIGTCL

SEQ ID NO: 5917 - protein, 269 aa, Thermomyces lanuginosus
EVSQDLFNQFNLFAQYSAAAYCGKNNDAPAGTNITCTGNACPEVEKADATFLYSFEDSGVGDVTGFLALDNTNKLIVLSFRGSRSIENWVGNLNFDLKEINDICSGCRGHDGFTSSWRSVADTLRQKVEDAVREHPDYRVVFTGHSLGGALATVAGADLRGNGYDIDVFSYGAPRVGNRAFAEFLTVQTGGTLYRITHTNDIVPRLPPREFGYSHSSPEYWIKSGTGVPVRRRDIVKIEGIDATGGNNQPNIPDIKAHLWYFGLIGTCL

SEQ ID NO: 5918 - protein, 269 aa, Thermomyces lanuginosus
EVSQDLFNQFNLFAQYSAAAYCGKNNNAPAGTQITCTGNACPEVEKADATFLYSFRDSGVGDVTGFLALDNTNKLIVLSFRGSRSIENWIGNLNFDLKEINDICSGCRGHDGFTSSWRSVADTLRQKVEDAVREHPDYRVVFTGHSLGGALATVAGADLRGNGYDIDVFSYGAPRVGNRAFAEFLTVQTGGTLYRITHTNDIVPRLPPREFGYSHSSPEYWIKSGTLVPVRRRDIVKIEGIDATGGNNQPNIPDIPAHLWYFGLIGTCL

SEQ ID NO: 5919 - protein, 269 aa, Thermomyces lanuginosus
EVSQDLFNQFNLFAQYSAAAYCGKNNRAPAGTNITCTGNACPEVEKADATFLYSFEDSGVGDVTGFLALDNTNKLIVLSFRGSRSIENWIGNLNFDLKEINDICSGCRGHGGFTSSWRSVADTLRQKVEDAVREHPDYRVVFTGHSLGGALATVAGADLRGNGYDIDVFSYGAPRVGNRAFAEFLTVQTGGTLYRITHTNDIVPRLPPREFGYSHPSPEYWIKSGTFVPVTRNDIVKIEGIDATGGNNQPNIPDITAHLWYFGLIGTCL

SEQ ID NO: 5920 - protein, 269 aa, Thermomyces lanuginosus
EVSQDLFNQFNLFAQYSAAAYCKANNDAPAGTNITCTGNACPEVEKADATFLYSFEDSGVGDVTGFLALDNTNKLIVLSFRGSRSIENWIGNLNFDLKEINDICSGCRGHAGFTSSWRSVADTLRQKVEDAVREHPDYRVVFTGHSLGGALATVAWADLRGNGYDIDVFSYGAPRVGNRAFAEFLTVQQGGTLYRITHTNDIVPRLPPREFGYSHSSPEYWIKSGTLVPVTRNDIVKIEGIDATGGNNQPNIPDIPAHLWYFGLIGTCL

SEQ ID NO: 5921 - protein, 269 aa, Thermomyces lanuginosus
EVSQDLFNQFNLFAQYSAAAYCKKNNDAPAGTNITCTGNACPEVEKADATFLYSFKDSGVGDVTGFLALDNTNKRIVLSFRGSRSIENWIGNLNFDLKEINDICSGCRGHDGFTSSWRSVADTLRQKVEDAVREHPDYRVVFTGHSLGGALATVAGADLRGNGYDIDVFSYGAPRVGNRAFAEFLTTQTGGTLYRITHTNDIVPRLPPREFGYSHSSPEYWIKSGTLVPVTRNDIVKIEGIDATGGNNQPNIPDIPAHLWYFGRIGTCL

SEQ ID NO: 5922 - protein, 269 aa, Thermomyces lanuginosus
EVSQDLFNQFNLFAQYSAAAYCGKNNDAPAGTNITCTGNACPEVEKADATFLYSFEDSGVGDVTGFLALDNTNKLIVLSFRGSRSIENWIGNLNFDLKEINDICSGCRGHDGFTSSWRSVADTLRQKVEDAVREHPDYRVVFTGHSLGGALATVAGADLRGDGYDIDVFSYGAPRVGNRAFAEFLTVQTGGTLYRITSTNDIVPRLPPREFGYSHSSPEYWIKSGTLPPVRRRDIVKIEGIDATGGNNQPNIPDIPAHLWYFGLIGTCL

SEQ ID NO: 5923 - protein, 269 aa, Thermomyces lanuginosus
EVSQDLFNQFNLFAQYSAAAYCGKNNRAPAGTQITCTANACPEVEKADATFLYSFEDSGVGDVTGFLALDNTNKLIVLSFRGSRSIENWITNLNFELKEINDICSGCRGHDGFTSSWRSVADTLRQKVEDAVREHPDYRVVFTGHSLGGALATVAGADLRGNGYDIDVFSYGAPRVGNRAFAEFLTVQTGGTLYRITHTNDIVPRLPPREFGYSHSSPEYWIKSGTLVPVTRNDIVKIEGIDATGGNNQPNIPDIPAHLWYFGLIGTCL

SEQ ID NO: 5924 - protein, 269 aa, Thermomyces lanuginosus
EVSQDLFNQFNLFAQYSAAAYCGKNNNAPAGTNITCTGNACPEVEKADATFLYSFRDSGVGDVTGFLALDNTNKLIVLSFRGSRSIENWIGNLNFDLKEINDICSGCRGHDGFTSSWFSVADTLRQKVEDAVREHPDYRVVFTGHSLGGALATVAGADLRGNGYDIDVFSYGAPRVGNRAFAEFLTVQTGGTLYRITHTNDIVPRLPPREFGYSHSSPEYWIKSGTLVPVRRRDIVKIEGIDATGGNNQPNIPDIPAHLWYFGLIGTCL

SEQ ID NO: 5925 - protein, 269 aa, Thermomyces lanuginosus
EVSQDLFNQFNLFAQYSAAAYCGKNNDAPAGTNITCTGNACPEVEKADATFLYSFEDSGGGAVTGFLALDNTNKLIVLSFRGTRSIENWIGNLNFWLKEINDICSGCRGHDGFTSSWRSVADTLRQKVEDAVREHPDYRVVFTGHSLGGALATVAGADLRGNGYDIDVFSYGAPRVGNRAFAEFLTVQTGGTLYRITHTNDIVPRLPPREFGYSHSSPEYWIKSGTLVPVTRNDIVKIEGIDATGGNNQPNIPDIPAHLWYFGLIWTCL

SEQ ID NO: 5926 - protein, 269 aa, Thermomyces lanuginosus
EVSQDLFNQFNLFAQYSAAAYCGKNNDAPAGTNITCTGNACPEVEKAQATFLYSFEDSGVGDVTGFLALDNTNKLIVLSFRGSRSIENWIGNLNFDLKEINDICSGCRGHDGFTSSWRSVADTLRQKVEDAVREHPQYRVVFTGHSLGGALATVAGADLRGNPYDIDVFSYGAPRVGNRAFAEFLTVQTGGTLYRITHTNDIVPRLPPREFGYSHSSPEYWIKSGTLVPVTRQDIVKIEGIDATGGNNQPNIPDIPAHLWYFGRIGTCL

SEQ ID NO: 5927 - protein, 269 aa, Thermomyces lanuginosus
EVSQDLFNQFNLFAQYSAAAYCGKNNDAPAGTNITCTGNACPEVEKADATFLYSFRDSGVGDVTGFLALDNTNKLIVLSFRGSRSIENWIGNLNFDLKEINDICSGCRGHDGFTSSWFSVADTLRQKVEDAVREHPDYRVVFTGHSLGGALATVAGADLRGNSYDIDVFSYGAPRVGNRAFAEFLTVQTGGTLYRITHTNDIVPRLPPREFGYSHSSPEYWIKSGTLVPVRRRDIVKIEGIDATGGNNQPNIPDIPAHLWYFGLIGTCL

SEQ ID NO: 5928 - protein, 269 aa, Thermomyces lanuginosus
EVSQDLFNQFNLFAQYSAAAYCGKNNDAPAGTNITCTGNACPEVEKADATILYSFEDSGVGDVTGFLALDNTNKLIVLSFRGSRSIENWIGNLNFDLKEINDICSGCRGHDGFTSSWRSVADTLRQKVEDAVREHPDYRVVFAGHSLGGALATVAGADLRGDGYDIDVFSYGAPRVGNRAFAEFLTVQTGGTLYRITHTNDIVPRLPPREFGYSHSSPEYWIKSGTLVPVRRRDIVKIEGIDATGGNNQPNIPDIPAHLWYFGLIGTCL

SEQ ID NO: 5929 - protein, 269 aa, Thermomyces lanuginosus
EVSRDLFNQFNLFAQYSAAAYCGKNNDAPAGTNITCTGNACPEVEKADATFLYSFEDSGVGDVTGFLALDNTNKLIVLSFRGSRSIENWIGNLNFDLKEINDICSGCRGHDGFTSSWRSVADTLRQKVEDAVREHPDYRVVFTGHSLGGALATVAGADLRGDGYDIDVFSYGAPRVGNRAFAEFLTVQTGGTLYRITNTNDIVPRLPPREFGYSHSSPEYWIKSGTLVPVRRRDIVKIEGIDATGGNNQPNIPDIPAHLWYFGLIGTCL

SEQ ID NO: 5930 - protein, 269 aa, Thermomyces lanuginosus
EVSQDLFNQFNLFAQYSAAAYCGKNNDAPAGTNITCTGNACPEVEKADATFLYSFEDSGVGDVTGFLALDNTNKLIVLSFRGSRSIENWIGNLNFDLKEINDICSGCRGHDGFTSSWRSVADTLRQKVEAAVREHPQYRVVFTGHSLGGALATVAGADLRGNPYDIDVFSYGAPRVGNRAFAEFLTVQTGGTLYRITHTNDIVPRLPPREFGYSHSSPEYWIKSGTMVPVTRNDIVKIEGIDATGGNNQPNIPDIPAHLWYFGRIGTCL

SEQ ID NO: 5931 - protein, 269 aa, Thermomyces lanuginosus
EVSQDLFNQFNLFAQYSAAAYCGKNNDAPAGTNITCTGNICPEVEKADATFLYSFRDSGVGDVTGFLALDNTNKLIVLSFRGSRSIENWIGNLNFDLKEINDICSGCRGHDGFTSSWFSVADTLRQKVEDAVREHPDYRVVFTGHSLGGALATVAGADLRGNGYDIDVFSYGAPRVGNRAFAEFLTVQTGGTLYRITHTNDIVPRLPPREFGYSHSSPEYWIKSGTLVPVRRRDIVKIEGIDATGGNNQPNIPDIPAHLWYFGLIGTCL

SEQ ID NO: 5932 - protein, 269 aa, Thermomyces lanuginosus
EVSQDLFNQFNLFAQYSAAAYCGKNNDAPAGTQITCTGNACPEVEKADATFLYSFEDSGVGDVTGFLALDNTNKLIVLSFRGSRSIENWIGNLNFDLIEINDICSGCRGHDGFTSSWRSVADTLRQKVEDAVREHPDYRVVFTGHSLGGALATVAGADLRGNKYDIDVFSYGAPRVGNRAFAEFLTVQTGGTLYRITHTNDIVPRLPPREFGYSHSSPEYWIKSGTLVPVRRRDIVKIEGIDATGGNNQPNIPDIPAHLWYFGLIGTCL

SEQ ID NO: 5933 - protein, 269 aa, Thermomyces lanuginosus
EVSQDLFNQFNLFAQYSKAAYCQKNNDAPAGTNITCTGNACPEVEKADATFLYSFEDSGVGDVTGFLALDNTNKQIVLSFRGSRSIENWIGNLNFDLKEINDICSGCRGHDGFTSSWRSVADTLRQKVEDAVREHPDYRVVFTGHSLGGALATVAGADLRGNGYDIDVFSYGAPRVGNRAFAEFLTTQDGGTLYRITHTNDIVPRLPPREFGYSHSSPEYWIKSGTLVPVTRNDIVKIEGIDATGGNNQPNIPDIPAHLWYFGLIGTCL

SEQ ID NO: 5934 - protein, 269 aa, Thermomyces lanuginosus
EVSQDLFNQFNLFAQYSAAAYCGKNNDAPAGTQITCTGNACPEVEKADATFLYSFEDSGVGDVTGFLALDNTNKLIVLSFRGSRSIENWIVNLNFDMKEINDICSGCRGHDGFTSSWRSVADTLRQKVEDAVREHPDYRVVFTGHSLGGALATVAGADLRGNGYDIDVFSYGAPRVGNRAFAEFLTVQTGGTLYRITHTNDIVPRLPPREFGYSHSSPEYWIKSGTLVPVRRRDIVKIEGIDATGGNNQPNIPDIPAHLWYFGLIGTCL

SEQ ID NO: 5935 - protein, 269 aa, Thermomyces lanuginosus
EVSQDLFNQFNLFAQYSAAAYCKKNNDAPAGTNITCTGNACPEVEKADATFLYSFKDSGVGDVTGFLALDNTNKRIVLSFRGSRSIENWIGNLNFDLKEINDICSGCRGHDGFTSSWRSVADTLRQKVEAAVREHPDYRVVFTGHSLGGALATVAGADLRGNGYDIDVFSYGAPRVGNRAFAEFLTTQTGGTLYRITHTNDIVPRLPPREFGYSHSSPEYWIKSGTLVPVTRNDIVKIEGIDATGGNNQPNIPDIPAHLWYFGLIGTCL

SEQ ID NO: 5936 - protein, 269 aa, Thermomyces lanuginosus
EVSQDLFNQFNLFAQYSAAAYCQKNNDAPAGTNITCTGNACPEVFKADATFLYSFEDSGVGDVTGFLALDNTNKQIVLSFRGSRSIENWIGNLNFDLKEINDICSGCRGHDGFTSSWRSVADTLRQKVEDAVREHPDYRVVFTGHSLGGALATVAWADLRGNGYDIDVFSYGAPRVGNRAFAEFLTVQDGGTLYRITHTNDIVPRLPPREFGYSHSSPEYWIKSGTLVPVTRNDIVKIEGIDATGGNNQPNIPDIPAHLWYFGLIGTCL

SEQ ID NO: 5937 - protein, 269 aa, Thermomyces lanuginosus
EVSQDLFNQFNLFAQYSKAAYCGKNNDAPAGTNITCTGNACPEVEKADATFLYSFEDSGVGDVTGFLALDNTNKQIVLSFRGSRSIENWIGNLRFDLKEINDICSGCRGHDGFTSSWRSVADTLRQKVEAAVREHPDYRVVFTGHSLGGALATVAGADLRGNGYDIDVFSYGAPRVGNRAFAEFLTNQTGGTLYRITHTNDIVPRLPPREFGYSHSSPEYWIKSGTLVPVTRNDIVKIEGIDATGGNNQPNIPDIPAHLWYFGLIGTCL

SEQ ID NO: 5938 - protein, 269 aa, Thermomyces lanuginosus
EVSQDLFNQFNLFAQYSAAAYCGKNNSAEAGTNITCTGNACPEVFKADATFLYSFEDSGVGDVTGFLALDNTRKDIVLSFRGSRSIENWIGNLNFDLKEINDICSGCRGHDGFTSSWRSVADTLRQKVEDAVREHPDYRVVFTGHSLGGALATVAGADLRGNGYDIDVFSYGAPRVGNRAFAEFLTVQTGGTLYRITHTNDIVPRLPPREFGYSHSSPEYWIKSGTLVPVTRNDIVKIEGIDATGGNNQPNIPDIPAHLWYFGLIGTCL

SEQ ID NO: 5939 - protein, 269 aa, Thermomyces lanuginosus
EVSQDLFNQFNLFAQYSAAAYCGKNNDAPAGTNITCTGNACPEVEKADATFLYSFEDSGVGDVTGFLALDNTNKLIVLSFRGSRSIENWIGNLNFDLKEINDICSGCRGHDGFTSSWRSVADTLRQKVEDAVREHPDYRVVFTGHSLGGALATVAGADLRGDGYDIDVFSYGAPRVGNRAFAEFLTVQTGGTLYRITHTNDIVPRLPPREFGYSHSSPEYWIKSGTLPPVRRRDIVKIEGIDATGGNNQPNIPDITAHLWYFGLIGTCL

SEQ ID NO: 5940 - protein, 269 aa, Thermomyces lanuginosus
EVSQDLFNQFNLFAQYSAAAYCGKNNDAPAGTNITCTGNACPEVEKAQATFLYSFEDSGVGDVTGFLALDNTNKLIVLSFRGSRSIENWIGNLNFDLKEINDICSGCRGHDGFTSSWRSVADTLRQKVEAAVREHPQYRVVFTGHSLGGALATVAGADLRGNPYDIDVFSYGAPRVGNRAFAEFLTVQTGGTLYRITHTNDIVPRLPPREFGYSHSSPEYWIKSGTLVPVTRNDIVKIEGIDATGGNNQPNIPDIPAHLWYFGRIGTCL

SEQ ID NO: 5941 - protein, 269 aa, Thermomyces lanuginosus
EVSQDLFNQFNLFAQYSAAAYCGKNNDAPAGTQITCTGNACPEVEKADATFLYSFEDSGVGDVTGFLALDNTNKLIVLSFRGSRSIENWITNLRFDLKEINDICSGCRGHDGFTSSWRSVADTLRQKVEDAVREHPDYRVVFTGHSLGGALATVAGADLRGNGYDIDVFSYGAPRVGNRAFAEFLTVQTGGTLYRITHTNDIVPRLPPREFGYSHSSPEYWIKSGTLVPVRRRDIVKIEGIDATGGNNQPNIPDIPAHLWYFGLIGTCL

SEQ ID NO: 5942 - protein, 269 aa, Thermomyces lanuginosus
EVSQDLFNQFNLFAQYSKAAYCGKNNDAPAGTNITCTGNACPEVEKADVTFLYSFEDSGVGDVTGFLALDNTNKQIVLSFRGSRSIENWIGNLNFDLKEINDICSGCRGHDGFTSSWRSVADTLRQKVEDAVREHPDYRVVFTGHSLGGALATVAGADLRGNGYDIDVFSYGAPRVGNRAFAEFLTTQDGGTLYRITHTNDIVPRLPPREFGYSHSSPEYWIKSGTLVPVTRNDIVKIEGIDATGGNNQPNIPDIPAHLWYFGLIGTCL

SEQ ID NO: 5943 - protein, 269 aa, Thermomyces lanuginosus
EVSQDLFNQFNLFAQYSAAAYCQANNDAPAGTNITCTGNACPEVEKADATFLYSFEDSGVGDVTGFLALDNTNKRIILSFRGSRSIENWIGNLNFDLKEINDICSGCRGHDGFTSSWRSVADTLRQKVEAAVREHPDYRVVFTGHSLGGALATVAGADLRGNGYDIDVFSYGAPRVGNRAFAEFLTVQTGGTLYRITHTNDIVPRLPPREFGYSHSSPEYWIKSGTLVPVTRNDIVKIEGIDATGGNNQPNIPDIPAHLWYFGLIGTCL

SEQ ID NO: 5944 - protein, 269 aa, Thermomyces lanuginosus
EVSQDLFNQFNLFAQYSAAAYCGKNNDAPAGTNITCTGNACPEVEKADATTLYSFEDMGVGDVTGFLALDNTNKQIVLSFRGSRSIENWIQNLNFDLKEINDICSGCRGHDGFTSSWRSVADTLRQKVEDAVREHPDYRVVFTGHSLGGALATVAGADLRGNGYDIDVFSYGAPRVGNRAFAEFLTVQTGGTLYRITHTNDIVPRLPPREFGYSHSSPEYWIKSGTLVPVTRNDIVKIEGIDATGGNNQPNQPDIPAHLWYFGLIGTCL

SEQ ID NO: 5945 - protein, 269 aa, Thermomyces lanuginosus
EVSQDLFNQFNLFAQYSAAAYCGKNNDAPAGTNITCTGNACPEVEKADATFLYSFRDSGKGDVTGFLALDNTNKLIVLSFRGSRSIENWIGNLNFDLKEINDICSGCRGHDGFTSSWFSVADTLRQKVEDAVREHPDYRVVFTGHSLGGALATVAGADLRGNGYDIDVFSYGAPRVGNRAFAEFLTVQTGGTLYRITHTNDIVPRLPPREFGYSHSSPEYWIKSGTLVPVRRRDIVKIEGIDATGGNNQPNIPDIPAHLWYFGLIGTCL

SEQ ID NO: 5946 - protein, 269 aa, Thermomyces lanuginosus
EVSQDLFNQFNLFAQYSAAAYCGKNNDAPAGTNITCTGNACPEVEKAQATFLYSFEDMGVGDVTGFLALDNTNKLIVLSFRGSRSIENWIGNLNFDLKEINDICSGCRGHDGFTSSWRSVADTLRQKVEDAVREHPDYRVVFTGHSLGGALATVAGADLRGNPYDIDVFSYGAPRVGNRAFAEFLTVQTGGTLYRITHTNDIVPRLPPREFGYSHSSPEYWIKSGTMVPVTRNDIVKIEGIDATGGNNQPNIPDIPAHLWYFGRIGTCL

SEQ ID NO: 5947 - protein, 269 aa, Thermomyces lanuginosus
EVSDDLFNQFNLFAQYSAAAYCGKNNSAPAGTNITCTGNACPEVEKADATFLYSFEDMGVGDVTGFLALDNTNKLIVLSFRGSRSIENWIGNLNFDLKEINDICSGCRGHDGFTSSWRSVADTLRQKVEDAVREHPDYRVVFTGHSLGGALATVAGADLRGNGYDIDVFSYGAPRVGNRAFAEFLTVQTGGTLYRITHTNDIVPRLPPREFGYSHSSPEYWIKSGTLVPVTRQDIVKIEGIDATGGNNQPNIPDITAHLWYFGLIGTCL

SEQ ID NO: 5948 - protein, 269 aa, Thermomyces lanuginosus
EVSQDLFNQFNLFAQYSAAAYCGKNNDAPAGTQITCTGNACPEVEKADATFLYSFEDSGVGDVTGFLALDNTNKLIVLSFRGSRSIENWITNLNFDLKEINDICSGCRGHDGFTSSWRSVADTLRQKVEDAVREHPDYRVVFTGHSLGGALATVAGADLRGNGYDIDVFSYGAPRVGNRAFAEFLTVQTGGTLYRITHTNDIVPRLPPREFGYSHSSPEYWIKSGTLVPVRRRDIVKIEGIDATGGNNQPNIPDITAHLWYFGLIGTCL

SEQ ID NO: 5949 - protein, 269 aa, Thermomyces lanuginosus
EVSQDLFNQFNLFAQYSAAAYCGKNNDAPAGTNITCTGNACPEVEKADATFLYSFEDSGVGDVTGFLALDNTNKLIVLSFRGSRSIKNWIGNLNFLLKPINDICSGCRGHDGFTSSWRSVADTLRQKVEDAVREHPDYRVVFTGHSLGGALATVAGADLRGNGYDIDVFSYGAPRVGNRAFAEFLTVQTGGTLYRITHTNDIVPRLPPREFGYSHSSPEYWIKSGTLVPVRRRDIVKIEGIDATGGNNQPNIPDIPAHLWYFGLIGTCL

SEQ ID NO: 5950 - protein, 269 aa, Thermomyces lanuginosus
EVSQDLFNQFNLFAQYSAAAYCGKNNDAPAGTNITCTGNACPEVEKADATFLYSFKDSGVGDVTGFLALDNTNKQIVLSFRGSRSIENWIGNLNFDLKEINDICSGCRGHDGFTSSWRSVADTLRQKVEDAVREHPDYRVVFTGHSLGGALATVAWADLRGNGYDIDVFSYGAPRVGNRAFAEFLTVQQGGTLYRITHTNDIVPRLPPREFGYSHSSPEYWIKSGTLVPVTRNDIVKIEGIDATGGNNQPNIPDIPAHLWYFGRIGTCL

SEQ ID NO: 5951 - protein, 269 aa, Thermomyces lanuginosus
EVSQDLFNQFNLFAQYSAAAYCGKNNEAPAGTNITCTGNACPEVEKADATFLYSFEDSGVGDVTGFLALDNTNKLIVLSFRGSRSIENWIGNLNFDLKEINDICSGCRGHDGFTSSWRSVADTLRQKVEAAVREHPQYRVVFTGHSLGGALATVAGADLRGNPYDIDVFSYGAPRVGNRAFAEFLTVQTGGTLYRITHTNDIVPRLPPREFGYSHSSPEYWIKSGTLVPVTRNDIVKIEGIDATGGNNQPNIPDIPAHLWYFGRIGTCL

SEQ ID NO: 5952 - protein, 269 aa, Thermomyces lanuginosus
EVSDDLFNQFKLFAQYSAAAYCGKNNQAPAGTNITCTGNACPEVEKADATFLYSFEDMGVGDVTGFLALDNTNKLIVLSFRGSRSIENWIGNLNFDLKEINDICSGCRGHDGFTSSWRSVADTLRQKVEDAVREHPDYRVVFTGHSLGGALATVAGADLRGNGYDIDVFSYGAPRVGNRAFAEFLTVQTGGTLYRITHTNDIVPRLPPREFGYSHSSPEYWIKSGTLVPVTRQDIVKIEGIDATGGNNQPNIPDIPAHLWYFGLIGTCL

SEQ ID NO: 5953 - protein, 269 aa, Thermomyces lanuginosus
EVSQDLFNQFNLFAQYSAAAYCGKNNDAPAGTNITCTGNACPEVEKADATFLYSFEDSGVGDVTGFLALDNTNKLIVLSFRGSRSIENWINNLNFDLKEINDICSGCRGHDGFTSSWRSVADTLRQKVEDAVREHPDYRVVFTGHSLGGALATVAGADLRGNGYDIDVFSYGAPRVGNRAFAEFLTVQTGGTLYRITHTNDIVPRLPPRQFGYSHSSPEYWIKSGTLVPVRRRDIVKIEGIDATGGNNQRNIPDIPAHLWYFGLIGTCL

SEQ ID NO: 5954 - protein, 269 aa, Thermomyces lanuginosus
EVSQDLFNQFNLFAQYSAAAYCGKNNRAPAGTNITCTGNACPEVEKADATFLYSFEDSGVGDVTGFLALDNTNKLIVLSFRGSRSIENWIGNLNFDLKEINDICSGCRGHGGFTSSWRSVADTLRQKVEDAVREHPDYRVVFTGHSLGGALATVAGADLRGNGYDIDVFSYGAPRVGNRAFAEFLTVQTGGTLYRITHTNDIVPRLPPREFGYSHPSPEYWIKSGTPVPVTRNDIVKIEGIDATGGNNQPNIPDITAHLWYFGLIGTCL

SEQ ID NO: 5955 - protein, 269 aa, Thermomyces lanuginosus
EVSRDLFNQFNLFAQYSAAAYCGKNNDAPAGTNITCTGNACPEVEKADATILYSFEDSGVGDVTGFLALDNTNKLIVLSFRGSRSIENWIGNLNFDLKEINDICSGCRGHDGFTSSWRSVADTLRQKVEDAVREHPDYRVVFTGHSLGGALATVAGADLRGNGYDIDVFSYGAPRVGNRAFAEFLTVQTGGTLYRITSTNDIVPRLPPREFGYSHSSPEYWIKSGTLVPVRRRDIVKIEGIDATGGNNQPNIPDIPAHLWYFGLIGTCL

SEQ ID NO: 5956 - protein, 269 aa, Thermomyces lanuginosus
EVSQDLFNQFNLFAQYSAAAYCGANNDAPAGTNITCTGNACPEVEKADATFLYSFEDSGVGDVTGFLALDNTNKQIILSFRGSRSIENWIGNLNFDLKEINDICSGCRGHDGFTSSWRSVADTLRQKVEDAVREHPDYRVVFTGHSLGGALATVAWADLRGNGYDIDVFSYGAPRVGNRAFAEFLTNQTGGTLYRITHTNDIVPRLPPREFGYSHSSPEYWIKSGTLVPVTRNDIVKIEGIDATGGNNQPNIPDIPAHLWYFGLIGTCL

SEQ ID NO: 5957 - protein, 269 aa, Thermomyces lanuginosus
EVSQDLFNQFNLFAQYSAAAYCQANNDAPAGTNITCTGNACPEVEKADATFLYSFEDSGVGDVTGFLALDNTNKLIILSFRGSRSIENWIGNLNFDLKEINDICSGCRGHDGFTSSWRSVADTLRQKVEAAVREHPDYRVVFTGHSLGGALATIAGADLRGNGYDIDVFSYGAPRVGNRAFAEFLTVQTGGTLYRITHTNDIVPRLPPREFGYSHSSPEYWIKSGTLVPVTRNDIVKIEGIDATGGNNQPNIPDIPAHLWYFGLIGTCL

SEQ ID NO: 5958 - protein, 269 aa, Thermomyces lanuginosus
EVSQDLFNQFNLFAQYSAAAYCGKNNDAPAGTNITCTGNACPEVEKADATFLYSFEDSGVGDVTGFLALDNTNKQIVLSFRGSRSIENWIGNLNFDLKEINDICSGCRGHDGFTSSWRSVADTLRQKVEAAVREHPDYRVVFTGHSLGGALATVAGADLRGNGYDIDVFSYGAPRVGNRAFAEFLTTQQGGTLYRITHTNDIVPRLPPREFGYSHSSPEYWIKSGTLVPVTRNDIVKIEGIDATGGNNQPNIPDIPAHLWYFGRIGTCL

SEQ ID NO: 5959 - protein, 269 aa, Thermomyces lanuginosus
EVSQDLFNQFNLFAQYSAAAYCGKNNSAPAGTDITCTGNACPEVFKADATFLYSFEDSGVGDVTGFLALDNTRKDIVLSFRGSRSIENWIGNLNFDLKEINDICSGCRGHDGFTSSWRSVADTLRQKVEDAVREHPDYRVVFTGHSLGGALATVAGADLRGNGYDIDVFSYGAPRVGNRAFAEFLTVQTGGTLYRITHTNDIVPRLPPREFGYSHSSPEYWIKSGTLVPVTRNDIVKIEGIDATGGNNQPNIPDIPAHLWYFGLIGTCL

SEQ ID NO: 5960 - protein, 269 aa, Thermomyces lanuginosus
EVSQDLFNQFNLFAQYSAAAYCGKNNDAPAGTNITCTGNACPEVEKADATFLYSFEDSGVGDVTGFLALDNTNKLIVLSFRGSRSIENWIGNLNFDLKEINDICSGCRGHDGFTSSWRSVADTLRQKVEDAVREHPDYRVVFAGHSLGGALATVAGADLRGDGYDIDVFSYGAPRVGNRAFAEFLTVQTGGTLYRITSTNDIVPRLPPREFGYSHSSPEYWIKSGTLVPVRRRDIVKIEGIDATGGNNQPNIPDIPAHLWYFGLIGTCL

SEQ ID NO: 5961 - protein, 269 aa, Thermomyces lanuginosus
EVSQDLFNQFNLFAQYSAAAYCGKNNDAPAGTQITCTGNACPEVEKADATFLYSFEDSGVGDVTGFLALDNTNKLIVLSFRGSRSIENWIMNLNFDLKEINDICSGCRGHDGFTSSWRSVADTLRQKVEDAVREHPDYRVVFTGHSLGGALATVAGADLRGNTYDIDVFSYGAPRVGNRAFAEFLTVQTGGTLYRITHTNDIVPRLPPREFGYSHSSPEYWIKSGTLVPVRRRDIVKIEGIDATGGNNQPNIPDIPAHLWYFGLIGTCL

SEQ ID NO: 5962 - protein, 269 aa, Thermomyces lanuginosus
EVSQDLFNQFNLFAQYSKAAYCQKNNDAPAGTNITCTGNACPEVFKADATFLYSFEDSGVGDVTGFLALDNTNKQIVLSFRGSRSIENWIGNLNFDLKEINDICSGCRGHDGFTSSWRSVADTLRQKVEDAVREHPDYRVVFTGHSLGGALATVAGADLRGNGYDIDVFSYGAPRVGNRAFAEFLTTQTGGTLYRITHTNDIVPRLPPREFGYSHSSPEYWIKSGTLVPVTRNDIVKIEGIDATGGNNQPNIPDIPAHLWYFGLIGTCL

SEQ ID NO: 5963 - protein, 269 aa, Thermomyces lanuginosus
EVSQDLFNQFNLFAQYSAAAYCGKNNDAPAGTQITCTGNACPEVEKADATFLYSFEDSGVGDVTGFLALDNTNKLIVLSFRGSRSIENWLGNLNFDLKEINDICSGCRGHDGFTSSWRSVADTLRQKVEDAVREHPDYRVVFTGHSLGGALATVAGADLRGNLYDIDVFSYGAPRVGNRAFAEFLTVQTGGTLYRITHTNDIVPRLPPREFGYSHSSPEYWIKSGTLVPVRRRDIVKIEGIDATGGNNQPNIPDIPAHLWYFGLIGTCL

SEQ ID NO: 5964 - protein, 269 aa, Thermomyces lanuginosus
EVSQDLFNQFNLFAQYSAAAYCGKNNDAPAGTNITCTGNACPEVEKADATFLYSFEDSGVGDVTGFLALDNTNKLIVLSFRGSRSIENWIGNLNFDLKEIRDICSGCRGHDGFTSSWRSVADTLRQKVEDAVREHPDYRVVFTGHSLGGALATVAGADLRGNGYDIDVFSYGAPRVGNRAFAEFLTVQTGGTLYQITHTNDIVPRLPPEEFGYSHSSPEYWIKSGTLVPVTRNDIVKIEGIDATGGNNQPNIPDIPAHSWDFGLIGTCL

SEQ ID NO: 5965 - protein, 269 aa, Thermomyces lanuginosus
EVSQDLFNQFNLFAQYSAAAYCGKNNDAPAGTQITCTGNACPEVEKADATFLYSFEDSGVGDVTGFLALDNTYKLIVLSFRGSRSIENWIGNLNFDLKEINDICSGCRGHDGFTSSWRSVADTLRQKVEDAVREHPDYRVVFTGHSLGGALATVAGADLRGNGYDIDVFSYGAPRVGNRAFAEFLTVQTGGTLYRITHTNDIVPRLPPREFGYSHSSPEYWIKSPTLVPVRRRDIVKIEGIDATGGNNQPNIPDIPAHLWYFGLIGTCL

SEQ ID NO: 5966 - protein, 269 aa, Thermomyces lanuginosus
EVSQDLFNQFNLFAQYSKAAYCGKNNSAPAGTDITCTGNACPEVEKADATFLYSFEDSGVGDVTGFLALDNTNKDIVLSFRGSRSIENWIGNLNFDLKEINDICSGCRGHDGFTSSWRSVADTLRQKVEDAVREHPDYRVVFTGHSLGGALATVAGADLRGNGYDIDVFSYGAPRVGNRAFAEFLTVQDGGTLYRITHTNDIVPRLPPREFGYSHSSPEYWIKSGTLVPVTRNDIVKIEGIDATGGNNQPNIPDIPAHLWYFGLIGTCL

SEQ ID NO: 5967 - protein, 269 aa, Thermomyces lanuginosus
EVSQDLFNQFNLFAQYSAAAYCGKNNDAPAGTNITCTGNACPEVEKADATFLYSFEDSGVGDVTGFLALDNTNKLIVLSFRGSRSIENWIQNLNFDLKEINDICSGCRGHDGFTSSWRSVADTLRQKVEAAVREHPDYRVVFTGHSLGGALATVAGADLRGNGYDIDVFSYGAPRVGNRAFAEFLTHQTGGTLYRITHTNDIVPRLPPREFGYSHSSPEYWIKSGTLVPVTRNDIVKIEGIDATGGNNQPNQPDIPAHLWYFGRIGTCL

SEQ ID NO: 5968 - protein, 269 aa, Synthetic construct
EVSQDLFNQFNLFAQYSAAAYCGKNNDAPAGTNITCTGNACPEVEKADATFLYSFEGSGVGRVTGFLALDNTNKLIVLSFRGSRSIENWIGNLKFLLKEINDICSGCRGHDGFTSSWRSVADTLRQKVEDAVREHPDYRVVFTGHSLGGALATVAGADLRGNGYDIDVFSYGAPRVGNRAFAEFLTVQTGGTLYRITHTNDIVPRLPPREFGYSHSSPEYWIKSGTLVPVTRNDIVKIEGIDATGGNNRPNIPDIPAHLWYFGLIGTCL

SEQ ID NO: 5969 - protein, 269 aa, Thermomyces lanuginosus
EVSQDLFNQFNLFAQYSAAAYCGKNNDAPAGTNITCTGNACPEVEKADATFLYSFEDSGVGDVTGFLALDNTNKLIVLSFRGSRSIENWIGNLNFDLKEINDICSGCRGHDGFTSSWRSVADTLRQKVEDAVREHPDYRVVFTGHSLGGALATVAGADLRGNGYDIDVFSYGAPRVGNRAFAEFLTVQTGGTLYRITHTNDIVPRLPPREFGYSHSSPEYWIKYWNPCPVTRNDIVKIEGIDATGGNNQPNIPDIPAHLWYFGLIGTCL

SEQ ID NO: 5970 - protein, 269 aa, Thermomyces lanuginosus
EVSQDLFNQFNLFAQYSKAAYCGANNDAPAGTNITCTGNACPEVEKADATFLYSFEDSGVGDVTGFLALDNTNKRIVLSFRGSRSIENWIGNLNFDLKEINDICSGCRGHDGFTSSWRSVADTLRQKVEAAVREHPDYRVVFTGHSLGGALATIAGADLRGNGYDIDVFSYGAPRVGNRAFAEFLTVQTGGTLYRITHTNDIVPRLPPREFGYSHSSPEYWIKSGTLVPVTRNDIVKIEGIDATGGNNQPNIPDIPAHLWYFGLIGTCL

SEQ ID NO: 5971 - protein, 269 aa, Thermomyces lanuginosus
EVSQDLFNQFNLFAQYSAAAYCGKNNDAPAGTNITCTGNACPEVEKADATFLYSFEDMGVGDVTGFLALDNTNKLIVLSFRGSRSIENWIGNLNFDLKEINDICSGCRGHDGFTSSWRSVADTLRQKVEAAVREHPQYRVVFTGHSLGGALATVAGADLRGNPYDIDVFSYGAPRVGNRAFAEFLTVQTGGTLYRITHTNDIVPRLPPREFGYSHSSPEYWIKSGTLVPVTRNDIVKIEGIDATGGNNQPNIPDIPAHLWYFGRIGTCL

SEQ ID NO: 5972 - protein, 269 aa, Thermomyces lanuginosus
EVSRDLFNQFNLFAQYSAAAYCGKNNDAPAGTNITCTGNACPEVEKADATFLYSFEDSGVGDVTGFLALDNTNKLIVLSFRGSRSIENWIGNLNFDLKEINDICSGCRGHDGFTSSWRSVADTLRQKVEDAVREHPDYRVVFTGHSLGGALATVAGADLRGNGYDIDVFSYGAPRVGNRAFAEFLTVQTGGTLYRITNTNDIVPRLPPREFGYSHSSPEYWIKSGTLPPVRRRDIVKIEGIDATGGNNQPNIPDIPAHLWYFGLIGTCL

SEQ ID NO: 5973 - protein, 269 aa, Thermomyces lanuginosus
EVSQDLFNQFNLFAQYSAAAYCGKNNDAPAGTNITCTGNACPEVEKADATLLYSFEDSGVGDVTGFLALDNTNKLIVLSFRGSRSIENWIGNLNFDLKEINDICSGCRGHEGFTSSWRSVADTLRQKVEDAVREHPDYRVVFTGHSLGGALATVAGADLRGNGYDIDVFSYGAPRVGNRAFAEFLTVQTGGTLYRITHTNDIVPRLPPREFGYSHSSPEYWIKSGTLVPVRRRDIVKIEGIDATGGNNQPNIPSIPAHLWYFGLIGTCL

SEQ ID NO: 5974 - protein, 269 aa, Thermomyces lanuginosus
EVSQDLFNQFNLFAQYSAAAYCGKNNDAPAGTNITCTGNACPEVEKADATFLYSFKDMGVGDVTGFLALDNTNKLIVLSFRGSRSIENWFGNLNFDLKEINDICSGCRGHDGFTSSWRSVADTLRQKVEDAVREHPDYRVVFTGHSLGGALATVAGADLRGNGYDIDVFSYGAPRVGNRAFAEFLTVQTGGTLYRITHTNDIVPRLPPREFGYSHSSPEYWIKSGTLVPVTRQDIVKIEGIDATGGNNQPNIPDITAHLWYFGLIGTCL

SEQ ID NO: 5975 - protein, 269 aa, Thermomyces lanuginosus
EVSQDLFNQFNLFAQYSKAAYCGKNNDAPAGTNITCTGNACPEVFKADVTFLYSFEDSGVGDVTGFLALDNTNKQIVLSFRGSRSIENWIGNLNFDLKEINDICSGCRGHDGFTSSWRSVADTLRQKVEDAVREHPDYRVVFTGHSLGGALATVAGADLRGNGYDIDVFSYGAPRVGNRAFAEFLTTQTGGTLYRITHTNDIVPRLPPREFGYSHSSPEYWIKSGTLVPVTRNDIVKIEGIDATGGNNQPNIPDIPAHLWYFGLIGTCL

SEQ ID NO: 5976 - protein, 269 aa, Thermomyces lanuginosus
EVSQDLFNQFNLFAQYSAAAYCQKNNDAPAGTNITCTGNACPEVFKADVTFLYSFEDSGVGDVTGFLALDNTNKLIILSFRGSRSIENWIGNLNFDLKEINDICSGCRGHDGFTSSWRSVADTLRQKVEDAVREHPDYRVVFTGHSLGGALATVAGADLRGNGYDIDVFSYGAPRVGNRAFAEFLTVQDGGTLYRITHTNDIVPRLPPREFGYSHSSPEYWIKSGTLVPVTRNDIVKIEGIDATGGNNQPNIPDIPAHLWYFGLIGTCL

SEQ ID NO: 5977 - protein, 269 aa, Synthetic construct
EVSQDLFNQFNLFAQYSAAAYCGKNNDAPAGTNITCTGNACPEVEKADATFLYSFTLSGVGDVTGFLALDNTNKLIVLSFRGSRSIENWFGNLNFLLKKINDICSGCRGHDGFTSSWRSVADTLRQKVEDAVREHPDYRVVFTGHSLGGALATVAGADLRGNGYDIDVFSYGAPRVGNRAFAEFLTVQTGGTLYRITHTNDIVPRLPPREFGYSHSSPEYWIKSGTLVPVTRNDIVKIEGIDATGGNNQPNIPDIPAHLWYFGLIGTCL

SEQ ID NO: 5978 - protein, 269 aa, Thermomyces lanuginosus
EVSQDLFNQFNLFAQYSAAAYCGKNNDAPAGTQITCTGNACPEVEKADATFLYSFEDSGVGDVTGFLAIDNTNKLIVLSFRGSRSIENWIENLNFDLKEINDICSGCRGHDGFTSSWRSVADTLRQKVEDAVREHPDYRVVFTGHSLGGALATVAGADLRGNGYDIDVFSYGAPRVGNRAFAEFLTVQTGGTLYRITHTNDIVPRLPPREFGYSHSSPEYWIKSGTLVPVRRRDIVKIEGIDATGGNNQPNIPDIPAHLWYFGLIGTCL

SEQ ID NO: 5979 - protein, 269 aa, Thermomyces lanuginosus
EVSQDLFNQFNLFAQYSAAAYCGKNNDAPAGTNITCTGNACPEVEKADATFLYSFKDSGVGDVTGFLALDNTNKGIVLSFRGSRSIENWIGNLNFDLKEINDICSGCRGHDGFTSSWRSVADTLRQKVEDAVREHPDYRVVFTGHSLGGALATVAGADLRGNGYDIDVFSYGAPRVGNRAFAEFLTNQTGGTLYRITHTNDIVPRLPPREFGYSHSSPEYWIKSGTLVPVTRNDIVKIEGIDATGGNNQPNQPDIPAHLWYFGRIGTCL

SEQ ID NO: 5980 - protein, 269 aa, Thermomyces lanuginosus
EVSQDLFNQFNLFAQYSAAAYCGKNNDAPAGTNITCTGNACPEVEKADATTLYSFEDSGVGDVTGFLALDNTNKRIVLSFRGSRSIENWIGNLNFDLKEINDICSGCRGHDGFTSSWRSVADTLRQKVEDAVREHPDYRVVFTGHSLGGALATVAGADLRGNGYDIDVFSYGAPRVGNRAFAEFLTNQTGGTLYRITHTNDIVPRLPPREFGYSHSSPEYWIKSGTLVPVTRNDIVKIEGIDATGGNNQPNQPDIPAHLWYFGRIGTCL

SEQ ID NO: 5981 - protein, 269 aa, Thermomyces lanuginosus
EVSQDLFNQFNLFAQYSAAAYCGKNNDAPAGTNITCTGNACPEVEKADATFLYSFEDSGVGDVTGFLALDNTNKLIVLSFRGSRSIENWIGNLNFDLKEINDICSGCRGHDGFTSSWRSVADTLRQKVEDAVREHPDYRVVFTGHSLGGALATVAGADLRGDGYDIDVFSYGAPRVGNRAFAEFLTVQTGGTLYRITNTNDIVPRLPPREFGYSHSSPEYWIKSGTLPPVRRRDIVKIEGIDATGGNNQPNIPDIPAHLWYFGLIGTCL

SEQ ID NO: 5982 - protein, 269 aa, Synthetic construct
EVSQDLFNQFNLFAQYSAAAYCGKNNDAPAGTNITCTGNACPEVEKADATFLYSFEDSGVGDVTGFLALDNTNKLIVLSFRGSRSIENWFGNLNFLLKKINDICSGCRGHDGFTSSWRSVADTLRQKVEDAVREHPDYRVVFTGHSLGGALATVAGADLRGNGYDIDVFSYGAPRVGNRAFAEFLTAQTGGTLYRITHRNDIVPRLPPREFGYSHSSPEYWIKSGTLVPVTRNDIVKIEGIDATGGNNQPNIPDIPAHLWYFGLIGTCL

SEQ ID NO: 5983 - protein, 269 aa, Thermomyces lanuginosus
EVSQDLFNQFNLFAQYSKAAYCQKNNDAPAGTNITCTGNACPEVEKADATFLYSFEDSGVGDVTGFLALDNTNKLIILSFRGSRSIENWIGNLNFDLKEINDICSGCRGHDGFTSSWRSVADTLRQKVEAAVREHPDYRVVFTGHSLGGALATVAWADLRGNGYDIDVFSYGAPRVGNRAFAEFLTVQTGGTLYRITHTNDIVPRLPPREFGYSHSSPEYWIKSGTLVPVTRNDIVKIEGIDATGGNNQPNIPDIPAHLWYFGLIGTCL

SEQ ID NO: 5984 - protein, 269 aa, Thermomyces lanuginosus
EVSQDLFNQFNLFAQYSKAAYCQKNNDAPAGTNITCTGNACPEVFKADVTFLYSFEDSGVGDVTGFLALDNTNKLIVLSFRGSRSIENWIGNLNFDLKEINDICSGCRGHDGFTSSWRSVADTLRQKVEDAVREHPDYRVVFTGHSLGGALATVAGADLRGNGYDIDVFSYGAPRVGNRAFAEFLTTQTGGTLYRITHTNDIVPRLPPREFGYSHSSPEYWIKSGTLVPVTRNDIVKIEGIDATGGNNQPNIPDIPAHLWYFGLIGTCL

SEQ ID NO: 5985 - protein, 269 aa, Thermomyces lanuginosus
EVSQDLFNQFNLFAQYSAAAYCGKNNSAPAGTDITCTGNACPEVEKADATFLYSFEDSGVGDVTGFLALDNTRKDIVLSFRGSRSIENWIGNLNFDLKEINDICSGCRGHDGFTSSWRSVADTLRQKVEDAVREHPDYRVVFTGHSLGGALATVAGADLRGNGYDIDVFSYGAPRVGNRAFAEFLTVQDGGTLYRITHTNDIVPRLPPREFGYSHSSPEYWIKSGTLVPVTRNDIVKIEGIDATGGNNQPNIPDIPAHLWYFGLIGTCL

SEQ ID NO: 5986 - protein, 269 aa, Thermomyces lanuginosus
EVSEDLFNQFNLFAQYSAAAYCGKNNDAPAGTNITCTGNACPEVEKADATFLYSFEDSGVGDVTGFLALDNTNKLIVLSFRGSRSIENWIGNLNFDLKEINDICSGCRGHDGFTSSWRSVADTLRQKVEDAVREHPQYRVVFTGHSLGGALATVAGADLRGNPYDIDVFSYGAPRVGNRAFAEFLTVQTGGTLYRITHTNDIVPRLPPREFGYSHSSPEYWIKSGTMVPVTRNDIVKIEGIDATGGNNQPNIPDIPAHLWYFGRIGTCL

SEQ ID NO: 5987 - protein, 269 aa, Thermomyces lanuginosus
EVSQDLFNQFNLFAQYSAAAYCGKNNSAPAGTNITCTGNACPEVEKADATFLYSFEDSGVGDVTGFLALDNTNKGIVLSFRGSRSIENWIGNLNFDLKEINDICSGCRGHDGFTSSWRSVADTLRQKVEAAVREHPDYRVVFTGHSLGGALATVAGADLRGNGYDIDVFSYGAPRVGNRAFAEFLTVQTGGTLYRITHTNDIVPRLPPREFGYSHSSPEYWIKSGTLVPVTRNDIVKIEGIDATGGNNQPNQPDIPAHLWYFGRIGTCL

SEQ ID NO: 5988 - protein, 269 aa, Thermomyces lanuginosus
EVSQDLFNQFNLFAQYSAAAYCGKNNDAPAGTQITCTGNACPEVEKADATFLYSFEDSGVGDVTGFLALDNTNKLIVLSFRGSRSIENWIGNLNFDLKEINDICSGCRGHDGFTSSYRSVADTLRQKVEDAVREHPDYRVVFTGHSLGGALATVAGADLRGNGYDIDVFSYGAPRDGNRAFAEFLTVQTGGTLYRITHTNDIVPRLPPREFGYSHSSPEYWIKSGTLVPVRRRDIVKIEGIDATGGNNQPNIPDIPAHLWYFGLIGTCL

SEQ ID NO: 5989 - protein, 269 aa, Thermomyces lanuginosus
EVSQDLFNQFNLFAQYSKAAYCGKNNDAEAGTNITCTGNACPEVFKADATFLYSFEDSGVGDVTGFLALDNTRKDIVLSFRGSRSIENWIGNLNFDLKEINDICSGCRGHDGFTSSWRSVADTLRQKVEDAVREHPDYRVVFTGHSLGGALATVAGADLRGNGYDIDVFSYGAPRVGNRAFAEFLTVQTGGTLYRITHTNDIVPRLPPREFGYSHSSPEYWIKSGTLVPVTRNDIVKIEGIDATGGNNQPNIPDIPAHLWYFGLIGTCL

SEQ ID NO: 5990 - protein, 269 aa, Thermomyces lanuginosus
EVSQDLFNQFKLFAQYSAAAYCGKNNSAPAGTNITCTGNACPEVEKADATFLYSFEDSGVGDVTGFLALDNTNKLIVLSFRGSRSIENWFGNLNFDLKEINDICSGCRGHDGFTSSWRSVADTLRQKVEDAVREHPDYRVVFTGHSLGGALATVAGADLRGNGYDIDVFSYGAPRVGNRAFAEFLTVQTGGTLYRITHTNDIVPRLPPREFGYSHSSPEYWIKSGTLVPVTRQDIVKIEGIDATGGNNQPNIPDITAHLWYFGLIGTCL

SEQ ID NO: 5991 - protein, 269 aa, Thermomyces lanuginosus
EVSRDLFNQFNLFAQYSAAAYCGKNNDAPAGTNITCTGNACPEVEKADATFLYSFEDSGVGDVTGFLALDNTNKLIVLSFRGSRSIENWIGNLNFDLKEINDICSGCRGHDGFTSSWRSVADTLRQKVEDAVREHPDYRVVFAGHSLGGALATVAGADLRGNGYDIDVFSYGAPRVGNRAFAEFLTVQTGGTLYRITHTNDIVPRLPPREFGYSHSSPEYWIKSGTLPPVRRRDIVKIEGIDATGGNNQPNIPDIPAHLWYFGLIGTCL

SEQ ID NO: 5992 - protein, 269 aa, Thermomyces lanuginosus
EVSRDLFNQFNLFAQYSAAAYCGKNNDAPAGTNITCTGNACPEVEKADATILYSFEDSGVGDVTGFLALDNTNKLIVLSFRGSRSIENWIGNLNFDLKEINDICSGCRGHDGFTSSWRSVADTLRQKVEDAVREHPDYRVVFTGHSLGGALATVAGADLRGDGYDIDVFSYGAPRVGNRAFAEFLTVQTGGTLYRITHTNDIVPRLPPREFGYSHSSPEYWIKSGTLVPVRRRDIVKIEGIDATGGNNQPNIPDIPAHLWYFGLIGTCL

SEQ ID NO: 5993 - protein, 269 aa, Thermomyces lanuginosus
EVSQDLFNQFNLFAQYSKAAYCGKNNSAPAGTNITCTGNACPEVEKADATFLYSFEDSGVGDVTGFLALDNTRKDIVLSFRGSRSIENWIGNLNFDLKEINDICSGCRGHDGFTSSWRSVADTLRQKVEDAVREHPDYRVVFTGHSLGGALATVAGADLRGNGYDIDVFSYGAPRVGNRAFAEFLTVQDGGTLYRITHTNDIVPRLPPREFGYSHSSPEYWIKSGTLVPVTRNDIVKIEGIDATGGNNQPNIPDIPAHLWYFGLIGTCL

SEQ ID NO: 5994 - protein, 269 aa, Thermomyces lanuginosus
EVSQDLFNQFNLFAQYSAAAYCGKNNDAPAGTNITCTGNACPEVEKADATFLYSFRDSGVGDVTGFLALDNTNKLIVLSFRGSRSIENWIGNLNFDLIEINDICSGCRGHDGFTSSWFSVADTLRQKVEDAVREHPDYRVVFTGHSLGGALATVAGADLRGNGYDIDVFSYGAPRVGNRAFAEFLTVQTGGTLYRITHTNDIVPRLPPREFGYSHSSPEYWIKSGTLVPVRRRDIVKIEGIDATGGNNQPNIPDIPAHLWYFGLIGTCL

SEQ ID NO: 5995 - protein, 269 aa, Thermomyces lanuginosus
EVSQDLFNQFNLFAQYSAAAYCGKNNDAPAGTNITCTGNACPEVEKAQATFLYSFEDSGVGDVTGFLALDNTNKLIVLSFRGSRSIENWIGNLNFDLKEINDICSGCRGHDGFTSSWRSVADTLRQKVEDAVREHPQYRVVFTGHSLGGALATVAGADLRGNPYDIDVFSYGAPRVGNRAFAEFLTVQTGGTLYRITHTNDIVPRLPPREFGYSHSSPEYWIKSGTMVPVTRNDIVKIEGIDATGGNNQPNIPDIPAHLWYFGRIGTCL

SEQ ID NO: 5996 - protein, 269 aa, Thermomyces lanuginosus
EVSQDLFNHFNLFAQYSAAAYCGKNNDAPAGTQITCTGNACPEVEKADATFLYSFEDSGVGDVTGFLALDNTNKLIVLSFRGSRSIENWIGNLNFDLKEINEICSGCRGHDGFTSSWRSVADTLRQKVEDAVREHPDYRVVFTGHSLGGALATVAGADLRGNGYDIDVFSYGAPRVGNRAFAEFLTVQTGGTLYRITHTNDIVPRLPPREFGYSHSSPEYWIKSGTLVPVRRRDIVKIEGIDATGGNNQPNIPDIPAHLWYFGLIGTCL

SEQ ID NO: 5997 - protein, 269 aa, Thermomyces lanuginosus
EVSQDLFNQFNLFAQYSAAAYCSKNNDAPAGTNITCTGNACPEVEKADATFLYSFRDSGVGDVTGFLALDNTNKLIVLSFRGSRSIENWIGNLNFDLKEINDICSGCRGHDGFTSSWFSVADTLRQKVEDAVREHPDYRVVFTGHSLGGALATVAGADLRGNGYDIDVFSYGAPRVGNRAFAEFLTVQTGGTLYRITHTNDIVPRLPPREFGYSHSSPEYWIKSGTLVPVRRRDIVKIEGIDATGGNNQPNIPDIPAHLWYFGLIGTCL

SEQ ID NO: 5998 - protein, 269 aa, Thermomyces lanuginosus
EVSQDLFNQFNLFAQYSKAAYCKANNDAPAGTNITCTGNACPEVEKADATFLYSFEDSGVGDVTGFLALDNTNKLIVLSFRGSRSIENWIGNLNFDLKEINDICSGCRGHDGFTSSWRSVADTLRQKVEAAVREHPDYRVVFTGHSLGGALATVAWADLRGNGYDIDVFSYGAPRVGNRAFAEFLTVQTGGTLYRITHTNDIVPRLPPREFGYSHSSPEYWIKSGTLVPVTRNDIVKIEGIDATGGNNQPNIPDIPAHLWYFGLIGTCL

SEQ ID NO: 5999 - protein, 269 aa, Thermomyces lanuginosus
EVSQDLFNQFNLFAQYSAAAYCGKNNDAPAGTNITCTGNACPEVEKADATFLYSFRDSGVGDVTGFLALDNTNKLIVLSFRGSRSIKNWIGNLNFLLKEINDICSGCRGHDGFTSSWRSVADTLRQKVEDAVREHPDYRVVFTGHSLGGALATVAGADLRGNGYDIDVFSYGAPRVGNRAFAEFLTVQTGGTLYRITHTNDIVPRLPPREFGYSHSSPEYWIKSGTLVPVRRRDIVKIEGIDATGGNNQPNIPDIPAHLWYFGLIGTCL

SEQ ID NO: 6000 - protein, 269 aa, Thermomyces lanuginosus
EVSQDLFNQFNLFAQYSKAAYCKKNNDAPAGTNITCTGNACPEVEKADATFLYSFEDSGVGDVTGFLALDNTNKLIVLSFRGSRSIENWIGNLNFDLKEINDICSGCRGHDGFTSSWRSVADTLRQKVEAAVREHPDYRVVFTGHSLGGALATIAWADLRGNGYDIDVFSYGAPRVGNRAFAEFLTVQTGGTLYRITHTNDIVPRLPPREFGYSHSSPEYWIKSGTLVPVTRNDIVKIEGIDATGGNNQPNIPDIPAHLWYFGLIGTCL

SEQ ID NO: 6001 - protein, 269 aa, Thermomyces lanuginosus
EVSQDLFNQFKLFAQYSAAAYCGKNNSAPAGTNITCTGNACPEVEKADATFLYSFKDSGVGDVTGFLALDNTNKLIVLSFRGSRSIENWIGNLNFDLKEINDICSGCRGHDGFTSSWRSVADTLRQKVEDAVREHPDYRVVFTGHSLGGALATVAGADLRGNGYDIDVFSYGAPRVGNRAFAEFLTVQTGGTLYRITHTNDIVPRLPPREFGYSHSSPEYWIKSGTLVPVTRQDIVKIEGIDATGGNNQPNIPDITAHLWYFGLIGTCL

SEQ ID NO: 6002 - protein, 269 aa, Thermomyces lanuginosus
EVSRDLFNQFNLFAQYSAAAYCGKNNDAPAGTNITCTGNACPEVEKADATFLYSFEDSGVGDVTGFLALDNTNKLIVLSFRGSRSIENWIGNLNFDLKEINDICSGCRGHDGFTSSWRSVADTLRQKVEDAVREHPDYRVVFAGHSLGGALATVAGADLRGNGYDIDVFSYGAPRVGNRAFAEFLTVQTGGTLYRITHTNDIVPRLPPREFGYSHSSPEYWIKSGTLRPVRRRDIVKIEGIDATGGNNQPNIPDIPAHLWYFGLIGTCL

SEQ ID NO: 6003 - protein, 269 aa, Thermomyces lanuginosus
EVSQDLFNQFNLFAQYSKAAYCKKNNDAPAGTNITCTGNACPEVEKADATFLYSFEDSGVGDVTGFLALDNTNKQIVLSFRGSRSIENWIGNLNFDLKEINDICSGCRGHDGFTSSWRSVADTLRQKVEAAVREHPDYRVVFTGHSLGGALATIAGADLRGNGYDIDVFSYGAPRVGNRAFAEFLTVQTGGTLYRITHTNDIVPRLPPREFGYSHSSPEYWIKSGTLVPVTRNDIVKIEGIDATGGNNQPNIPDIPAHLWYFGLIGTCL

SEQ ID NO: 6004 - protein, 269 aa, Thermomyces lanuginosus
EVSQDLFNQFNLFAQYSKAAYCKANNDAPAGTNITCTGNACPEVEKADATFLYSFEDSGVGDVTGFLALDNTNKLIVLSFRGSRSIENWIGNLNFDLKEINDICSGCRGHDGFTSSWRSVADTLRQKVEAAVREHPDYRVVFTGHSLGGALATIAGADLRGNGYDIDVFSYGAPRVGNRAFAEFLTVQTGGTLYRITHTNDIVPRLPPREFGYSHSSPEYWIKSGTLVPVTRNDIVKIEGIDATGGNNQPNIPDIPAHLWYFGLIGTCL

SEQ ID NO: 6005 - protein, 269 aa, Thermomyces lanuginosus
EVSQDLFNQFNLFAQYSAAAYCGKNNNAPAGTNITCTGNACPEVEKADATFLYSFKDSGVGDVTGFLALDNTNKLIVLSFRGSRSIENWFGNLNFDLKEINDICSGCRGHDGFTSSWRSVADTLRQKVEDAVREHPDYRVVFTGHSLGGALATVAGADLRGNGYDIDVFSYGAPRVGNRAFAEFLTVQTGGTLYRITHTNDIVPRLPPREFGYSHSSPEYWIKSGTLVPVTRQDIVKIEGIDATGGNNQPNIPDITAHLWYFGLIGTCL

SEQ ID NO: 6006 - protein, 269 aa, Thermomyces lanuginosus
EVSQDLFNQFNLFAQYSAAAYCGKNNDAPAGTNITCTGNACPEVEKADATFLYSFEDSGVGDVTGFLALDNTNKLIVLSFRGSRSIENWFGNLNFDLKEINDICSGCRGHDGFTSSWRSVADTLRQKVEDAVREHPDYRVVFTGHSLGGALATVAGADLRGNGYDIDVFSYGAPRVGNRAFAEFLTVQTGGTLYRITHTNDPVPRLPPREFGYSHSSPEYWIKSGTLVPVRRRDIVKIEGIDATGGNNQPNIPDLPAHLWYFGLIGTCL

SEQ ID NO: 6007 - protein, 269 aa, Thermomyces lanuginosus
EVSQDLFNQFNLFAQYSAAAYCGKNNDAPAGTNITCTGNACPEVEKADATFLYSFKDSGVGDVTGFLALDNTNKLIVLSFRGSRSIENWIGNLNFGLKEINDICSGCRGHAGFTSSWRSVADTLRQKVEDAVREHPDYRVVFTGHSLGGALATVAGADLRGNGYDIDVFSYGAPRVGNRAFAEFLTVQTGGTLYRITHTNDIVPRLPPREFGYSHSSPEYWIKSGTLVPVRRRDIVKIEGIDATGGNNQPNIPDIPAHLWYFGLIGTCL

SEQ ID NO: 6008 - protein, 269 aa, Thermomyces lanuginosus
EVSQDLFNQFNLFAQYSAAAYCGKNNDAPAGTQITCTGNACPEVEKADATFLYSFEDSGVGDVTGFLALDNTNKLIVLSFRGSRSIENWIGNLNFDLKEINDICSGCRGHDGFTSSWRSVADTLRQKVEDAVREHPDYRVVFTGHSLGGALATVAGADLRGNGYDIDVFSYGAPRVGNRAFAEFLTVQTGGTLYRITHTNDIVPRLPPRQFGYSHSSPEYWIKSGTLVPVRRRDIVKIEGIDATGGNNQPNIPDAPAHLWYFGLIGTCL

SEQ ID NO: 6009 - protein, 269 aa, Synthetic construct
KVSQDLFNQFNLFAQYSAAAYCGKNNDAPAGTNITCTGNACPEVEKADATFLYSFEDSGVGDVTGFLALDNTNKLIVLSFRGSRSIENWIGNLKFLLKKINDICSGCRGHDGFTSSWRSVADTLRQKVEDAVREHPDYRVVFTGHSLGGALATVAGADLRGNGYDIDVFSYGAPRVGNRAFAEFLTVQTGGTLYRITHTNDIVPRLPPREFGYSHSSPEYWIKSGTLVPVTRNDIVKIEGIDATGGNNRPNIPDIPAHLWYFGLIGTCL

SEQ ID NO: 6010 - protein, 269 aa, Thermomyces lanuginosus
EVSQDLFNQFNLFAQYSAAAYCQKNNDAPAGTNITCTGNACPEVEKADATTLYSFEDSGVGDVTGFLALDNTNKQIVLSFRGSRSIENWIQNLNFDLKEINDICSGCRGHDGFTSSWRSVADTLRQKVEDAVREHPDYRVVFTGHSLGGALATVAGADLRGNGYDIDVFSYGAPRVGNRAFAEFLTVQTGGTLYRITHTNDIVPRLPPREFGYSHSSPEYWIKSGTLVPVTRNDIVKIEGIDATGGNNQPNQPDIPAHLWYFGLIGTCL

SEQ ID NO: 6011 - protein, 269 aa, Thermomyces lanuginosus
EVSQDLFNQFNLFAQYSAAAYCGKNNDAEAGTDITCTGNACPEVFKADATFLYSFEDSGVGDVTGFLALDNTNKDIVLSFRGSRSIENWIGNLNFDLKEINDICSGCRGHDGFTSSWRSVADTLRQKVEDAVREHPDYRVVFTGHSLGGALATVAGADLRGNGYDIDVFSYGAPRVGNRAFAEFLTVQDGGTLYRITHTNDIVPRLPPREFGYSHSSPEYWIKSGTLVPVTRNDIVKIEGIDATGGNNQPNIPDIPAHLWYFGLIGTCL

SEQ ID NO: 6012 - protein, 269 aa, Thermomyces lanuginosus
EVSQDLFNQFNLFAQYSAAAYCGKNNEAPAGTNITCTGNACPEVEKAQATFLYSFEDMGVGDVTGFLALDNTNKLIVLSFRGSRSIENWIGNLNFDLKEINDICSGCRGHDGFTSSWRSVADTLRQKVEDAVREHPDYRVVFTGHSLGGALATVAGADLRGNPYDIDVFSYGAPRVGNRAFAEFLTVQTGGTLYRITHTNDIVPRLPPREFGYSHSSPEYWIKSGTLVPVTRQDIVKIEGIDATGGNNQPNIPDIPAHLWYFGLIGTCL

SEQ ID NO: 6013 - protein, 269 aa, Thermomyces lanuginosus
EVSQDLFNQFNLFAQYSAAAYCQKNNDAPAGTNITCTGNACPEVEKADVTFLYSFEDSGVGDVTGFLALDNTNKQIVLSFRGSRSIENWIGNLNFDLKEINDICSGCRGHDGFTSSWRSVADTLRQKVEDAVREHPDYRVVFTGHSLGGALATVAWADLRGNGYDIDVFSYGAPRVGNRAFAEFLTVQDGGTLYRITHTNDIVPRLPPREFGYSHSSPEYWIKSGTLVPVTRNDIVKIEGIDATGGNNQPNIPDIPAHLWYFGLIGTCL

SEQ ID NO: 6014 - protein, 269 aa, Thermomyces lanuginosus
EVSQDLFNQFKLFAQYSAAAYCKKNNDAPAGTNITCTGNACPEVEKADATFLYSFEDSGVGDVTGFLALDNTNKLIVLSFRGSRSIENWIGNLNFDLKEINDICSGCRGHAGFTSSWRSVADTLRQKVEDAVREHPDYRVVFTGHSLGGALATVAWADLRGNGYDIDVFSYGAPRVGNRAFAEFLTVQTGGTLYRITHTNDIVPRLPPREFGYSHSSPEYWIKSGTLVPVTRNDIVKIEGIDATGGNNQPNIPDIPAHLWYFGRIGTCL

SEQ ID NO: 6015 - protein, 269 aa, Thermomyces lanuginosus
EVSQDLFNQFNLFAQYSAAAYCGKNNDAPAGTQITCTGNACPEVEKADATFLYSFEDSGVGDVTGFLALDNTNKLIVLSFRGSRSIENWIGNLNFNLKEINDICSGCRGHDGFTSSWRSVADTLRQKVEDAVREHPDYRVVFTGHSLGGALATVAGADLRGNGYDIDVFSYGAPRVGNRAFAEFLTVQTGGTLYRITHTNDIVPRLPPREFGYSHSSPEYWIKSGTLVPVRRRDIVKIEGIDATGGNNRPNIPDIPAHLWYFGLIGTCL

SEQ ID NO: 6016 - protein, 269 aa, Thermomyces lanuginosus
EVSQDLFNQFNLFAQYSAAAYCGKNNEAPAGTNITCTGNACPEVEKADATFLYSFEDSGVGDVTGFLALDNTNKLIVLSFRGSRSIENWIGNLNFDLKEINDICSGCRGHDGFTSSWRSVADTLRQKVEAAVREHPDYRVVFTGHSLGGALATVAGADLRGNPYDIDVFSYGAPRVGNRAFAEFLTVQTGGTLYRITHTNDIVPRLPPREFGYSHSSPEYWIKSGTMVPVTRNDIVKIEGIDATGGNNQPNIPDIPAHLWYFGRIGTCL

SEQ ID NO: 6017 - protein, 269 aa, Thermomyces lanuginosus
EVSQDLFNQFKLFAQYSAAAYCGKNNNAPAGTNITCTGNACPEVEKADATFLYSFKDMGVGDVTGFLALDNTNKLIVLSFRGSRSIENWIGNLNFDLKEINDICSGCRGHDGFTSSWRSVADTLRQKVEDAVREHPDYRVVFTGHSLGGALATVAGADLRGNGYDIDVFSYGAPRVGNRAFAEFLTVQTGGTLYRITHTNDIVPRLPPREFGYSHSSPEYWIKSGTLVPVTRNDIVKIEGIDATGGNNQPNIPDITAHLWYFGLIGTCL

SEQ ID NO: 6018 - protein, 269 aa, Thermomyces lanuginosus
EVSQDLFNQFNLFAQYSAAAYCGKNNRAPAGTNITCTGNACPEVEKADATFLYSFEDSGVGDVTGFLALDNTNKLIVLSFRGSRSIENWIGNLNFDLKEINDICSGCRGHGGFTSSWRSVADTLRQKVEDAVREHPDYRVVFTGHSLGGALATVAGADLRGNGYDIDVFSYGAPRVGNRAFAEFLTVQTGGTLYRITHTNDIVPRLPPREFGYSHPSPEYWIKSGTVVPVTRNDIVKIEGIDATGGNNQPNIPDITAHLWYFGLIGTCL

SEQ ID NO: 6019 - protein, 269 aa, Thermomyces lanuginosus
EVSDDLFNQFNLFAQYSAAAYCGKNNQAPAGTNITCTGNACPEVEKADATFLYSFKDMGVGDVTGFLALDNTNKLIVLSFRGSRSIENWIGNLNFDLKEINDICSGCRGHDGFTSSWRSVADTLRQKVEDAVREHPDYRVVFTGHSLGGALATVAGADLRGNGYDIDVFSYGAPRVGNRAFAEFLTVQTGGTLYRITHTNDIVPRLPPREFGYSHSSPEYWIKSGTLVPVTRNDIVKIEGIDATGGNNQPNIPDITAHLWYFGLIGTCL

SEQ ID NO: 6020 - protein, 269 aa, Thermomyces lanuginosus
EVSQDLFNQFNLFAQYSAAAYCGANNDAPAGTNITCTGNACPEVEKADATFLYSFEDSGVGDVTGFLALDNTNKQIVLSFRGSRSIENWIGNLNFDLKEINDICSGCRGHAGFTSSWRSVADTLRQKVEDAVREHPDYRVVFTGHSLGGALATVAWADLRGNGYDIDVFSYGAPRVGNRAFAEFLTTQTGGTLYRITHTNDIVPRLPPREFGYSHSSPEYWIKSGTLVPVTRNDIVKIEGIDATGGNNQPNIPDIPAHLWYFGLIGTCL

SEQ ID NO: 6021 - protein, 269 aa, Thermomyces lanuginosus
EVSQDLFNQFNLFAQYSAAAYCGKNNDAPAGTNITCTGNACPEVEKADATFLYSFRDSGVGDVTGFLALDNTNKLIVLSFRGSRSIENWIGNLNFDLKEINDICSGCRGHDGFTSSWFSVADTLRQKVEDAVREHPDYRVVFTGHSLGGALATVAGADLRGNGYDIDVFSYGAPRVGNRAFAEFLTVQTGGTLYRITHTNDIVPRLPPREFGYSHSSPEFWIKSGTLVPVRRRDIVKIEGIDATGGNNQPNIPDIPAHLWYFGLIGTCL

SEQ ID NO: 6022 - protein, 269 aa, Thermomyces lanuginosus
EVSQDLFNQFNLFAQYSAAAYCGKNNDAPAGTQITCTGNACPEVEKADATFLYSFEDSGVGDVTGFLALDNTNKLIVLSFRGSRSIENWITNLNFDLKEINDICSGCRGHDGFTSSWRSVADTLRQKVEDAVREHPDYRVVFTGHSLGGALATVAGADLRGNGYDIDVFSYGAPRVGNRAFAEFLTVQTGGTLYRITHTNDIVPRLPPREFGYSHSSPDYWIKSGTLVPVRRRDIVKIEGIDATGGNNQPNIPDIPAHLWYFGLIGTCL

SEQ ID NO: 6023 - protein, 269 aa, Thermomyces lanuginosus
EVSQDLFNQFNLFAQYSAAAYCGKNNDAPAGTNITCTGNACPEVEKADATFLYSFEDSGVGDVTGFLALDNTNKLIVLSFRGSRSIENWIANLNFGLKEINDICSGCRGHDGFTSSWRSVADTLRQKVEDAVREHPDYRVVFTGHSLGGGLATVAGADLRGNGYDIDVFSYGAPRVGNRAFAEFLTVQTGGTLYRITHTNDIVPRLPPREFGYSHSSPEYWIKSGTLVPVRRRDIVKIEGIDATGGNNQPNIPDIPAHLWYFGLIGTCL

SEQ ID NO: 6024 - protein, 269 aa, Thermomyces lanuginosus
EVSQDLFNQFNLFAQYSAAAYCGKNNDAPAGTNITCTGNACPEVEKADATFLYSFEDSGVGDVTGFLALDNTNKLIVLSFRGSRSIENWIGNLNFWLKEINDICSGCRGHDGFTSSWRSVADTLRQKVEDAVREHPDYRVVFTGHSLGGALATVAGADLRGNGYDIDVFSYGAPRVGNRAFAEFLTVQTGGTLYRITHTNDIVPRLPPREFGYSHSSPEYWIKSGTLVPVTRNDIVKIEGIDATGGNNQPNIPDIPAHLWYFQLTDACL

SEQ ID NO: 6025 - protein, 269 aa, Thermomyces lanuginosus
EVSQDLFNQFNLFAQYSAAAYCGKNNDAPAGTQITCTGNACPEVEKADATFLYSFEDSGVGDVTGFLALDNTNKLIVLSFRGSRSIENWIGNLNFLLKEINDICSGCRGHDGFTSSWRSVADTLRQKVEDAVREHPDYRVVFTGHSLGGALATVAGADLRGNGYDIDVFSYGAPRVGNRAFAEFLTVQTGGTLYRITHTNDIVPRLPPREFGYSHSSPEYWIKSGTLVPVRRRDIVKIEGIDATGGNNRPNIPDIPAHLWYFGLIGTCL

SEQ ID NO: 6026 - protein, 269 aa, Thermomyces lanuginosus
EVSQDLFNQFNLFAQYSAAAYCGKNNDAPAGTNITCTGNACPEVEKADATFLYSFEDSGVGDVTGFLALDNTNKLIVLSFRGSRSIENWIANLNFDLKKINDICSGCRGHDGFTSSWRSVADTLRQKVEDAVREHPDYRVVFTGHSLGGALATVAGADLRGNGYDIDVFSYGAPRVGNRAFAEFLTVQTGGTLYRITHTNDIVPRLPPREFGYSHSSPEYWIKSGTLVPVRRRDIVKIEGIDATGGNNRPNIPDIPAHLWYFGLIGTCL

SEQ ID NO: 6027 - protein, 269 aa, Thermomyces lanuginosus
EVSQDLFNQFNLFAQYSAAAYCGKNNDAPAGTNITCTGNACPEVEKADATFLYSFEDSGVGDVTGFLALDNTNKLIVLSFRGSRSIENWIGNLKFLLKEINDICSGCRGHDGFTSSWRSVADTLRQKVEDAVREHPDYRVVFTGHSLGGALATVAGADLRGNGYDIDVFSYGAPRVGNRAFAEFLTVQTGGTLYRITHTNDIVPRLPPREFGYSHSSPEYWIKSGTLVPVRRRDIVKIEGIDATGGNNRPNIPDIPAHLWYFGLIGTCL

SEQ ID NO: 6028 - protein, 269 aa, Thermomyces lanuginosus
EVSQDLFNQFNLFAQYSAAAYCGCNNDAPAGTNITCTGNACPEVEKADATFLYSFEDSGVGDVTGFLALDNTNKLIVLSFRGSRSIENWIGNLNFSLKEINDICSGCRGHDGFTSSWRSVADTLRQKVEDAVREHPDYRVVFTGHSLGGALATVAGADLRGNGYDIDVFSYGAPRVGNRAFAEFLTVQTGGTLYRITHTNDIVPRLPPREFGYSHSSPEYWIKSGTLVPVRRRDIVKIEGIDATGGNNRPNIPDIPAHLWYFGLIGTCL

SEQ ID NO: 6029 - protein, 268 aa, Thermomyces lanuginosus
VSQDLFNQFNLFAQYSAAAYCGKNNDAPAGTNITCTGNACPEVEKADATILYSFEDSGVGDVTGFLALDNTNKLIVLSFRGSRSIENWIGNLNFDLKEINDICSGCRGHDGFTSSWRSVADTLRQKVEDAVREHPDYRVVFTGHSLGGALATVAGADLRGNGYDIDVFSYGAPRVGNRAFAEFLTVQTGGTLYRITNTNDIVPRLPPREFGYSHSSPEYWIKSGTLVPVRRCDIVKIEGIDATGGNNQPNIPDITAHLWYFGLIGTCL

SEQ ID NO: 6030 - protein, 268 aa, Thermomyces lanuginosus
VSQDLFNQFNLFAQYSAAAYCGKNNDAPAGTNITCTGNACPEVEKADATFLYSFEDSGVGDVTGFLALDNTNKLIVLSFRGSRSIENWIANLNFWLKKINDICSGCRGHDGFTSSWRSVADTLRQKVEDAVREHPDYRVVFTGHSLGGALATVAGADLRGNGYDIDVFSYGAPRVGNRAFAEFLTVQTGGTLYRITHTNDIVPRLPPREFGYSHSSPEYWIKSRTLVPVTRNDIVKIEGIDATGGNNRPNIPDIPAHLWYFGLIGTCL

SEQ ID NO: 6031 - protein, 268 aa, Thermomyces lanuginosus
VSQDLFNQFNLFAQYSAAAYCGKNNDAPAGTNITCTGNACPEVEKADATFLYSFEDSGVGDVTGFLALDNTNKLIVLSFRGSRSIENWIANLNFWLKKINDICSGCRGHDGFTSSWRSVADTLRQKVEDAVREHPDYRVVFTGHSLGGALATVAGADLRGNGYDIDVFSYGAPRVGNRAFAEFLTVQTGGTLYRITHTNDIVPRLPPREFGYSHSSPEYWIKSGTLVPVTRNDIVKIEGIDATGGNNRPNIPDIPAHLWYFGLIATCL

SEQ ID NO: 6032 - protein, 268 aa, Thermomyces lanuginosus
VSQDLFNQFNLFAQYSAAAYCGKNNDAPAGTNITCTGNACPEVEKADATFLYSFEDSGVGDVTGFLALDNTNKLIVLSFRGSRSIENWIANLNFWLKKINDICSGCRGHDGFTSSWRSVADTLRQKVEDAVREHPDYRVVFTGHSLGGALATVAGADLRGNGYDIDVFSYGAPRVGNRAFAEFLTVQTGGTLYRITHTNDIVPRLPPREFGYSHSSPEYWIKSGTLVPVTRNDIVKIEGIDATGGNNRPNIPDIPAHLWYFGXIGTCL

SEQ ID NO: 6033 - protein, 268 aa, Thermomyces lanuginosus
VSQDLFNQFNLFAQYSAAAYCGKNNDAPAGTNITCTGNACPEVEKADATILYSFEDSGVGDVTGFLALDNTNKLIVLSFRGSRSIENWIGNLNFDLKEINDICSGCRGHDGFTSSWRSVADTLRQKVEDAVREHPDYRVVFAGHSLGGALATVAGADLRGNGYDIDVFSYGAPRVGNRAFAEFLTVQTGGTLYRITSTNDIVPRLPPREFGYSHSSPEYWIKSGTLVPVRRCDIVKIEGIDATGGNNQPNIPDIPAHLWYFGLIGTCL

SEQ ID NO: 6034 - protein, 268 aa, Thermomyces lanuginosus
VSQDLFNQFNLFAQYSAAAYCGKNNDAPAGTNITCTGNACPEVEKADATFLYSFEDSGVGDVTGFLALDNTNKLIVLSFRGSRSIENWIGNLNFDLKEINDICSGCRGHDGFTSSWRSVADTLRQKVEDAVREHPDYRVVFAGHSLGGALATVAGADLRGNGYDIDVFSYGAPRVGNRAFAEFLTVQTGGTLYRITNTNDIVPRLPPREFGYSHSSPEYWIKSGTLPPVRRCDIVKIEGIDATGGNNQPNIPDIPAHLWYFGLIGTCL

SEQ ID NO: 6035 - protein, 268 aa, Thermomyces lanuginosus
VSQDLFNQFNLFAQYSAAAYCGKNNDAPAGTNITCTGNACPEVEKADATFLYSFEDSGVGDVTGFLALDNTNKLIVLSFRGSRSIENWIANLNFWLKKINDICSGCRGHDGFTSSWRSVADTLRQKVEDAVREHPDYRVVFTGHSLGGALATVAGADLRGNGYDIDVFSYGAPRVGNRAFAEFLTVQTGGTLYRITHTNDIVPRLPPREFGYSHSSPEYWIKSGTLVPVTRNDIVKIEGIDATGGNNRPNIPDIPAHLWYFGLIDTCL

SEQ ID NO: 6036 - protein, 268 aa, Thermomyces lanuginosus
VSQDLFNQFNLFAQYSAAAYCGKNNDAPAGTNITCTGNACPEVEKADATFLYSFEDSGVGDVTGFLALDNTNKLIVLSFRGSRSIENWIANLNFWLKKINDICSGCRGHDGFTSSWRSVADTLRQKVEDAVREHPDYRVVFTGHSLGGALATVAGADLRGNGYDIDVFSYGAPRVGNRAFAEFLTVQTGGTLYRITHTNDIVPRLPPREFGYSHSSPEYWIKSGTLVPVTRNDIVKIEGIDATGGNNRPNIPDIPAHLWYFGLISTCL

SEQ ID NO: 6037 - protein, 268 aa, Thermomyces lanuginosus
VSQDLFNQFNLFAQYSAAAYCGKNNDAPAGTNITCTGNACPEVEKADATFLYSFEDSGVGDVTGFLALDNTNKLIVLSFRGSRSIENWIANLNFDLKKINDICSGCRGHDGFTSSWRSVADTLRQKVEDAVREHPDYRVVFTGHSLGGALATVAGADLRGNGYDIDVFSYGAPRVGNRAFAEFLTVQTGGTLYRITHTNDIVPRLPPREFGYSHSSPEYWIKSGTLVPVRRRDIVKIEGIDATGGNNRPNIPDIPAHLWYFGLIGTCL

SEQ ID NO: 6038 - protein, 267 aa, Thermomyces lanuginosus
SQDLFNQFNLFAQYSAAAYCGKNNDAPAGTKITCTGNACPEVEKADATLLYSFEDSGVGDVTGFLALDNTNKLIVLSFRGSRSIENWIGNLNFDLKEINDICSGCRGHDGFTSSWRSVADTLRQKVEDAVREHPDYRVVFTGHSLGGALATVAGADLRGNGYDIDVFSYGAPRVGNRAFAEFLTVQTGGTLYRITHTNDIVPRLPPREFGYSHSSPEYWIKSGTLVPVRRCDIVKIEGIDATGGNNQPNIPDIPVHLWYFGLIGTCL

SEQ ID NO: 6039 - protein, 267 aa, Thermomyces lanuginosus
SQDLFNQFNLFAQYSAAAYCGKNNDAPAGTKITCTGNACPEVEKADATLLYSFEDSGVGDVTGFLALDNTNKLIVLSFRGSRSIENWIGNLNFDLKEINDICSGCRGHDGFTSSWRSVADTLRQKVEDAVREHPDYRVVFTGHSLGGALATVAGADLRGNGYDIDVFSYGAPRVGNRAFAEFLTVQTGGTLYRITHTNDIVPRLPPREFGYSHSSPEYWIKSGTDVPVRRCDIVKIEGIDATGGNNQPNIPDIPAHLWYFGLIGTCL

SEQ ID NO: 6040 - protein, 267 aa, Thermomyces lanuginosus
SQDLFNQFNLFAQYSAAAYCGKNNDAPAGTKITCTGNACPEVEKADATVLYSFEDSGVGDVTGFLALDNTNKLIVLSFRGSRSIENWIGNLNFDLKEINDICSGCRGHDGFTSSWRSVADTLRQKVEDAVREHPDYRVVFTGHSLGGALATVAGADLRGNGYDIDVFSYGAPRVGNRAFAEFLTVQTGGTLYRITHTNDIVPRLPPREFGYSHSSPEYWIKPGTLVPVRRCDIVKIEGIDATGGNNQPNIPDIPAHLWYFGLIGTCL

SEQ ID NO: 6041 - protein, 267 aa, Thermomyces lanuginosus
SQDLFNQFNLFAQYSAAAYCGKNNDAPAGTKITCTGNACPEVEKADATLLYSFEDSGVGDVTGFLALDNTNKLIVLSFRGSRSIENWIGNLNFDLKEINDICSGCRGHDGFTSSWRSVADTLRQKVEDAVREHPDYRVVFTGHSLGGALATVAGADLRGNGYDIDVFSYGAPRVGNRAFAEFLTVQTGGTLYRITHTNDIVPRLPPREFGYSHSSPEYWIKFGTLVPVRRCDIVKIEGIDATGGNNQPNIPDIPAHLWYFGLIGTCL

SEQ ID NO: 6042 - protein, 267 aa, Thermomyces lanuginosus
SQDLFNQFNLFAQYSAAAYCGKNNDAPAGTKITCTGNACPEVEKADATILYSFEDSGVGDVTGFLALDNTNKLIVLSFRGSRSIENWIGNLNFDLKEINDICSGCRGHDGFTSSWRSVADTLRQKVEDAVREHPDYRVVFTGHSLGGALATVAGADLRGNGYDIDVFSYGAPRVGNRAFAEFLTVQTGGTLYRITHTNDIVPRLPPREFGYSHSSPEYWIKSGTLVPVRRCDIVKIEGIDATGGNNQPNIPDIPIHLWYFGLIGTCL

SEQ ID NO: 6043 - protein, 267 aa, Thermomyces lanuginosus
SQDLFNQFNLFAQYSAAAYCGKNNDAPAGTKITCTGNACPEVEKADATVLYSFEDSGVGDVTGFLALDNTNKLIVLSFRGSRSIENWIGNLNFDLKEINDICSGCRGHDGFTSSWRSVADTLRQKVEDAVREHPDYRVVFTGHSLGGALATVAGADLRGNGYDIDVFSYGAPRVGNRAFAEFLTVQTGGTLYRITITNDIVPRLPPREFGYSHSSPEYWIKSGTLVPVRRCDIVKIEGIDATGGNNQPNIPDIPAHLWYFGLIGTCL

SEQ ID NO: 6044 - protein, 267 aa, Thermomyces lanuginosus
SQDLFNQFNLFAQYSAAAYCGKNNDAPAGTKITCTGNACPEVEKADATILYSFEDSGVGDVTGFLALDNTNKLIVLSFRGSRSIENWIGNLNFDLKEINDICSGCRGHDGFTSSWRSVADTLRQKVEDAVREHPDYRVVFTGHSLGGALATVAGADLRGNGYDIDVFSYGAPRVGNRAFAEFLTVQTGGTLYRITHTNDIVPRLPPREFGYSHSSPEYWIKSGTLPPVRRCDIVKIEGIDATGGNNQPNIPDIPAHLWYFGLIGTCL

SEQ ID NO: 6045 - protein, 267 aa, Thermomyces lanuginosus
SQDLFNQFNLFAQYSAAAYCGKNNDAPAGTKITCTGNACPEVEKADATILYSFEDSGVGDVTGFLALDNTNKLIVLSFRGSRSIENWIGNLNFDLKEINDICSGCRGHDGFTSSWRSVADTLRQKVEDAVREHPDYRVVFTGHSLGGALATVAGADLRGNGYDIDVFSYGAPRVGNRAFAEFLTVQTGGTLYRITHTNDIVPRLPPREFGYSHSSPEYWIKSGTLVPVRRCDIVKIEGIDATGGNNQPNIPDGPAHLWYFGLIGTCL

SEQ ID NO: 6046 - protein, 267 aa, Thermomyces lanuginosus
SQDLFNQFNLFAQYSAAAYCGKNNDAPAGTKITCTGNACPEVEKADATLLYSFEDSGVGDVTGFLALDNTNKLIVLSFRGSRSIENWIGNLNFDLKEINDICSGCRGHDGFTSSWRSVADTLRQKVEDAVREHPDYRVVFTGHSLGGALATVAGADLRGNGYDIDVFSYGAPRVGNRAFAEFLTVQTGGTLYRITYTNDIVPRLPPREFGYSHSSPEYWIKSGTLVPVRRCDIVKIEGIDATGGNNQPNIPDIPAHLWYFGLIGTCL

SEQ ID NO: 6047 - protein, 267 aa, Thermomyces lanuginosus
SQDLFNQFNLFAQYSAAAYCGKNNDAPAGTKITCTGNACPEVEKADATLLYSFEDSGVGDVTGFLALDNTNKLIVLSFRGSRSIENWIGNLNFDLKEINDICSGCRGHDGFTSSWRSVADTLRQKVEDAVREHPDYRVVFTGHSLGGALATVAGADLRGNGYDIDVFSYGAPRVGNRAFAEFLTVQTGGTLYRITHTNDIVPRLPPREFGYSHSSPEYWIKSGTLVPVRRCDIVKIEGIDATGGNNQPNIPDIPIHLWYFGLIGTCL

SEQ ID NO: 6048 - protein, 267 aa, Thermomyces lanuginosus
SQDLFNQFNLFAQYSAAAYCGKNNDAPAGTKITCTGNACPEVEKADATVLYSFEDSGVGDVTGFLALDNTNKLIVLSFRGSRSIENWIGNLNFDLKEINDICSGCRGHDGFTSSWRSVADTLRQKVEDAVREHPDYRVVFTGHSLGGALATVAGADLRGNGYDIDVFSYGAPRVGNRAFAEFLTVQTGGTLYRITHTNDIVPRLPPREFGYSHSSPEYWIKSGTLVPRRRCDIVKIEGIDATGGNNQPNIPDIPAHLWYFGLIGTCL

SEQ ID NO: 6049 - protein, 267 aa, Thermomyces lanuginosus
SQDLFNQFNLFAQYSAAAYCGKNNDAPAGTKITCTGNACPEVEKADATLLYSFEDSGVGDVTGFLALDNTNKLIVLSFRGSRSIENWIGNLNFDLKEINDICSGCRGHDGFTSSWRSVADTLRQKVEDAVREHPDYRVVFAGHSLGGALATVAGADLRGNGYDIDVFSYGAPRVGNRAFAEFLTVQTGGTLYRITHTNDIVPRLPPREFGYSHSSPEYWIKSGTLVPVRRCDIVKIEGIDATGGNNQPNIPDIPAHLWYFGLIGTCL

SEQ ID NO: 6050 - protein, 267 aa, Thermomyces lanuginosus
SQDLFNQFNLFAQYSAAAYCGKNNDAPAGTKITCTGNACPEVEKADATVLYSFEDSGVGDVTGFLALDNTNKLIVLSFRGSRSIENWIGNLNFDLKEINDICSGCRGHDGFTSSWRSVADTLRQKVEDAVREHPDYRVVFTGHSLGGALATVAGADLRGNGYDIDVFSYGAPRVGNRAFAEFLTVQTGGTLYRITHTNDIVPRLPPREFGYSHSSPEYWIKSGTLVPVRRCDIVKIEGIDATGGNNQPNIPDIPVHLWYFGLIGTCL

SEQ ID NO: 6051 - protein, 267 aa, Thermomyces lanuginosus
SQDLFNQFNLFAQYSAAAYCGKNNDAPAGTKITCTGNACPEVEKADATVLYSFEDSGVGDVTGFLALDNTNKLIVLSFRGSRSIENWIGNLNFDLKEINDICSGCRGHDGFTSSWRSVADTLRQKVEDAVREHPDYRVVFTGHSLGGALATVAGADLRGNGYDIDVFSYGAPRVGNRAFAEFLTVQTGGTLYRITYTNDIVPRLPPREFGYSHSSPEYWIKSGTLVPVRRCDIVKIEGIDATGGNNQPNIPDIPAHLWYFGLIGTCL

SEQ ID NO: 6052 - protein, 267 aa, Thermomyces lanuginosus
SQDLFNQFNLFAQYSAAAYCGKNNDAPAGTKITCTGNACPEVEKADATLLYSFEDSGVGDVTGFLALDNTNKLIVLSFRGSRSIENWIGNLNFDLKEINDICSGCRGHDGFTSSWRSVADTLRQKVEDAVREHPDYRVVFTGHSLGGALATVAGADLRGNGYDIDVFSYGAPRVGNRAFAEFLTVQTGGTLYRITNTNDIVPRLPPREFGYSHSSPEYWIKSGTLVPVRRCDIVKIEGIDATGGNNQPNIPDIPAHLWYFGLIGTCL

SEQ ID NO: 6053 - protein, 267 aa, Thermomyces lanuginosus
SQDLFNQFNLFAQYSAAAYCGKNNDAPAGTKITCTGNACPEVEKADATILYSFEDSGVGDVTGFLALDNTNKLIVLSFRGSRSIENWIGNLNFDLKEINDICSGCRGHDGFTSSWRSVADTLRQKVEDAVREHPDYRVVFTGHSLGGALATVAGADLRGNGYDIDVFSYGAPRVGNRAFAEFLTVQTGGTLYRITLTNDIVPRLPPREFGYSHSSPEYWIKSGTLVPVRRCDIVKIEGIDATGGNNQPNIPDIPAHLWYFGLIGTCL

SEQ ID NO: 6054 - protein, 267 aa, Thermomyces lanuginosus
SQDLFNQFNLFAQYSAAAYCGKNNDAPAGTKITCTGNACPEVEKADATVLYSFEDSGVGDVTGFLALDNTNKLIVLSFRGSRSIENWIGNLNFDLKEINDICSGCRGHDGFTSSWRSVADTLRQKVEDAVREHPDYRVVFTGHSLGGALATVAGADLRGNGYDIDVFSYGAPRVGNRAFAEFLTVQTGGTLYRITHTNDIVPRLPPREFGYSHSSPEYWIKSGTLVPVRRCDIVKIEGIDATGGNNQPNIPDIPIHLWYFGLIGTCL

SEQ ID NO: 6055 - protein, 267 aa, Thermomyces lanuginosus
SQDLFNQFNLFAQYSAAAYCGKNNDAPAGTKITCTGNACPEVEKADATLLYSFEDSGVGDVTGFLALDNTNKLIVLSFRGSRSIENWIGNLNFDLKEINDICSGCRGHDGFTSSWRSVADTLRQKVEDAVREHPDYRVVFTGHSLGGGLATVAGADLRGNGYDIDVFSYGAPRVGNRAFAEFLTVQTGGTLYRITHTNDIVPRLPPREFGYSHSSPEYWIKSGTLVPVRRCDIVKIEGIDATGGNNQPNIPDIPAHLWYFGLIGTCL

SEQ ID NO: 6056 - protein, 267 aa, Thermomyces lanuginosus
SQDLFNQFNLFAQYSAAAYCGKNNDAPAGTKITCTGNACPEVEKADATILYSFEDSGVGDVTGFLALDNTNKLIVLSFRGSRSIENWIGNLNFDLKEINDICSGCRGHDGFTSSWRSVADTLRQKVEDAVREHPDYRVVFTGHSLGGALATVAGADLRGNGYDIDVFSYGAPRVGNRAFAEFLTVQTGGTLYRITNTNDIVPRLPPREFGYSHSSPEYWIKSGTLVPVRRCDIVKIEGIDATGGNNQPNIPDIPAHLWYFGLIGTCL

SEQ ID NO: 6057 - protein, 267 aa, Thermomyces lanuginosus
SQDLFNQFNLFAQYSAAAYCGKNNDAPAGTKITCTGNACPEVEKADATILYSFEDSGVGDVTGFLALDNTNKLIVLSFRGSRSIENWIGNLNFDLKEINDICSGCRGHDGFTSSWRSVADTLRQKVEDAVREHPDYRVVFTGHSLGGALATVAGADLRGNGYDIDVFSYGAPRVGNRAFAEFLTVQTGGTLYRITHTNDIVPRLPPREFGYSHSSPEYWIKIGTLVPVRRCDIVKIEGIDATGGNNQPNIPDIPAHLWYFGLIGTCL

SEQ ID NO: 6058 - protein, 267 aa, Thermomyces lanuginosus
SQDLFNQFNLFAQYSAAAYCGKNNDAPAGTKITCTGNACPEVEKADATILYSFEDSGVGDVTGFLALDNTNKLIVLSFRGSRSIENWIGNLNFDLKEINDICSGCRGHDGFTSSWRSVADTLRQKVEDAVREHPDYRVVFTGHSLGGALATVAGADLRGNGYDIDVFSYGAPRVGNRAFAEFLTVQTGGTLYRITHTNDIVPRLPPREFGYSHSSPEYWIKFGTLVPVRRCDIVKIEGIDATGGNNQPNIPDIPAHLWYFGLIGTCL

SEQ ID NO: 6059 - protein, 267 aa, Thermomyces lanuginosus
SQDLFNQFNLFAQYSAAAYCGKNNDAPAGTKITCTGNACPEVEKADATVLYSFEDSGVGDVTGFLALDNTNKLIVLSFRGSRSIENWIGNLNFDLKEINDICSGCRGHDGFTSSWRSVADTLRQKVEDAVREHPDYRVVFTGHSLGGGLATVAGADLRGNGYDIDVFSYGAPRVGNRAFAEFLTVQTGGTLYRITHTNDIVPRLPPREFGYSHSSPEYWIKSGTLVPVRRCDIVKIEGIDATGGNNQPNIPDIPAHLWYFGLIGTCL

SEQ ID NO: 6060 - protein, 267 aa, Thermomyces lanuginosus
SQDLFNQFNLFAQYSAAAYCGKNNDAPAGTKITCTGNACPEVEKADATILYSFEDSGVGDVTGFLALDNTNKLIVLSFRGSRSIENWIGNLNFDLKEINDICSGCRGHDGFTSSWRSVADTLRQKVEDAVREHPDYRVVFTGHSLGGALATVAGADLRGNGYDIDVFSYGAPRVGNRAFAEFLTVQTGGTLYRITHTNDIVPRLPPREFGYSHSSPEYWIKSGTLVPVRRCDIVKIEGIDATGGNNQPNIPDIPVHLWYFGLIGTCL

SEQ ID NO: 6061 - protein, 267 aa, Thermomyces lanuginosus
SQDLFNQFNLFAQYSAAAYCGKNNDAPAGTKITCTGNACPEVEKADATILYSFEDSGVGDVTGFLALDNTNKLIVLSFRGSRSIENWIGNLNFDLKEINDICSGCRGHDGFTSSWRSVADTLRQKVEDAVREHPDYRVVFTGHSLGGALATVAGADLRGNGYDIDVFSYGAPRVGNRAFAEFLTVQTGGTLYRITYTNDIVPRLPPREFGYSHSSPEYWIKSGTLVPVRRCDIVKIEGIDATGGNNQPNIPDIPAHLWYFGLIGTCL

SEQ ID NO: 6062 - protein, 267 aa, Thermomyces lanuginosus
SQDLFNQFNLFAQYSAAAYCGKNNDAPAGTKITCTGNACPEVEKADATVLYSFEDSGVGDVTGFLALDNTNKLIVLSFRGSRSIENWIGNLNFDLKEINDICSGCRGHDGFTSSWRSVADTLRQKVEDAVREHPDYRVVFTGHSLGGALATVAGADLRGNGYDIDVFSYGAPRVGNRAFAEFLTVQTGGTLYRITHTNDIVPRLPPREFGYSHSSPEYWIKSGTLVPVRRCDIVKIEGIDATGGNNQPNIPDGPAHLWYFGLIGTCL

SEQ ID NO: 6063 - protein, 267 aa, Thermomyces lanuginosus
SQDLFNQFNLFAQYSAAAYCGKNNDAPAGTKITCTGNACPEVEKADATVLYSFEDSGVGDVTGFLALDNTNKLIVLSFRGSRSIENWIGNLNFDLKEINDICSGCRGHDGFTSSWRSVADTLRQKVEDAVREHPDYRVVFTGHSLGGALATVAGADLRGNGYDIDVFSYGAPRVGNRAFAEFLTVQTGGTLYRITLTNDIVPRLPPREFGYSHSSPEYWIKSGTLVPVRRCDIVKIEGIDATGGNNQPNIPDIPAHLWYFGLIGTCL

SEQ ID NO: 6064 - protein, 267 aa, Thermomyces lanuginosus
SQDLFNQFNLFAQYSAAAYCGKNNDAPAGTKITCTGNACPEVEKADATLLYSFEDSGVGDVTGFLALDNTNKLIVLSFRGSRSIENWIGNLNFDLKEINDICSGCRGHDGFTSSWRSVADTLRQKVEDAVREHPDYRVVFTGHSLGGALATVAGADLRGNGYDIDVFSYGAPRVGNRAFAEFLTVQTGGTLYRITHTNDIVPRLPPREFGYSHSSPEYWIKPGTLVPVRRCDIVKIEGIDATGGNNQPNIPDIPAHLWYFGLIGTCL

SEQ ID NO: 6065 - protein, 267 aa, Thermomyces lanuginosus
SQDLFNQFNLFAQYSAAAYCGKNNDAPAGTKITCTGNACPEVEKADATVLYSFEDSGVGDVTGFLALDNTNKLIVLSFRGSRSIENWIGNLNFDLKEINDICSGCRGHDGFTSSWRSVADTLRQKVEDAVREHPDYRVVFTGHSLGGALATVAGADLRGNGYDIDVFSYGAPRVGNRAFAEFLTVQTGGTLYRITNTNDIVPRLPPREFGYSHSSPEYWIKSGTLVPVRRCDIVKIEGIDATGGNNQPNIPDIPAHLWYFGLIGTCL

SEQ ID NO: 6066 - protein, 267 aa, Thermomyces lanuginosus
SQDLFNQFNLFAQYSAAAYCGKNNDAPAGTKITCTGNACPEVEKADATLLYSFEDSGVGDVTGFLALDNTNKLIVLSFRGSRSIENWIGNLNFDLKEINDICSGCRGHDGFTSSWRSVADTLRQKVEDAVREHPDYRVVFTGHSLGGALATVAGADLRGNGYDIDVFSYGAPRVGNRAFAEFLTVQTGGTLYRITHTNDIVPRLPPREFGYSHSSPEYWIKSGTLPPVRRCDIVKIEGIDATGGNNQPNIPDIPAHLWYFGLIGTCL

SEQ ID NO: 6067 - protein, 267 aa, Thermomyces lanuginosus
SQDLFNQFNLFAQYSAAAYCGKNNDAPAGTKITCTGNACPEVEKADATVLYSFEDSGVGDVTGFLALDNTNKLIVLSFRGSRSIENWIGNLNFDLKEINDICSGCRGHDGFTSSWRSVADTLRQKVEDAVREHPDYRVVFTGHSLGGALATVAGADLRGNGYDIDVFSYGAPRVGNRAFAEFLTVQTGGTLYRITHTNDIVPRLPPREFGYSHSSPEYWIKSGTLPPVRRCDIVKIEGIDATGGNNQPNIPDIPAHLWYFGLIGTCL

SEQ ID NO: 6068 - protein, 267 aa, Thermomyces lanuginosus
SQDLFNQFNLFAQYSAAAYCGKNNDAPAGTKITCTGNACPEVEKADATILYSFEDSGVGDVTGFLALDNTNKLIVLSFRGSRSIENWIGNLNFDLKEINDICSGCRGHDGFTSSWRSVADTLRQKVEDAVREHPDYRVVFTGHSLGGGLATVAGADLRGNGYDIDVFSYGAPRVGNRAFAEFLTVQTGGTLYRITHTNDIVPRLPPREFGYSHSSPEYWIKSGTLVPVRRCDIVKIEGIDATGGNNQPNIPDIPAHLWYFGLIGTCL

SEQ ID NO: 6069 - protein, 267 aa, Thermomyces lanuginosus
VSQDLFNQFNLFAQYSAAAYCGKNNDAPAGTNITCTGNACPEVEKADATFLYSFEDSGVGDVTGFLALDNTNKLIVLSFRGSRSIENWIANLNFWLKKINDICSGCRGHDGFTSSWRSVADTLRQKVEDAVREHPDYRVVFTGHSLGGALATVAGADLRGNGYDIDVFSYGAPRVGNRAFAEFLTVQTGGTLYRITHTNDIVPRLPPREFGYSHSSPEYWIKSGTLVPVTRNDIVKIEGIDATGGNNRPNIPDIPAHLWYFGPIGTC

SEQ ID NO: 6070 - protein, 267 aa, Thermomyces lanuginosus
SQDLFNQFNLFAQYSAAAYCGKNNDAPAGTKITCTGNACPEVEKADATLLYSFEDSGVGDVTGFLALDNTNKLIVLSFRGSRSIENWIGNLNFDLKEINDICSGCRGHDGFTSSWRSVADTLRQKVEDAVREHPDYRVVFTGHSLGGALATVAGADLRGNGYDIDVFSYGAPRVGNRAFAEFLTVQTGGTLYRITHTNDIVPRLPPREFGYSHSSPEYWIKSGTLVPVRRCDIVKIEGIDATGGNNQPNIPDGPAHLWYFGLIGTCL

SEQ ID NO: 6071 - protein, 267 aa, Thermomyces lanuginosus
SQDLFNQFNLFAQYSAAAYCGKNNDAPAGTKITCTGNACPEVEKADATVLYSFEDSGVGDVTGFLALDNTNKLIVLSFRGSRSIENWIGNLNFDLKEINDICSGCRGHDGFTSSWRSVADTLRQKVEDAVREHPDYRVVFTGHSLGGALATVAGADLRGNGYDIDVFSYGAPRVGNRAFAEFLTVQTGGTLYRITHTNDIVPRLPPREFGYSHSSPEYWIKIGTLVPVRRCDIVKIEGIDATGGNNQPNIPDIPAHLWYFGLIGTCL

SEQ ID NO: 6072 - protein, 267 aa, Thermomyces lanuginosus
SQDLFNQFNLFAQYSAAAYCGKNNDAPAGTKITCTGNACPEVEKADATVLYSFEDSGVGDVTGFLALDNTNKLIVLSFRGSRSIENWIGNLNFDLKEINDICSGCRGHDGFTSSWRSVADTLRQKVEDAVREHPDYRVVFTGHSLGGALATVAGADLRGNGYDIDVFSYGAPRVGNRAFAEFLTVQTGGTLYRITHTNDIVPRLPPREFGYSHSSPEYWIKFGTLVPVRRCDIVKIEGIDATGGNNQPNIPDIPAHLWYFGLIGTCL

SEQ ID NO: 6073 - protein, 267 aa, Thermomyces lanuginosus
SQDLFNQFNLFAQYSAAAYCGKNNDAPAGTKITCTGNACPEVEKADATVLYSFEDSGVGDVTGFLALDNTNKLIVLSFRGSRSIENWIGNLNFDLKEINDICSGCRGHDGFTSSWRSVADTLRQKVEDAVREHPDYRVVFTGHSLGGALATVAGADLRGNGYDIDVFSYGAPRVGNRAFAEFLTVQTGGTLYRITHTNDIVPRLPPREFGYSHSSPEYWIKSGTDVPVRRCDIVKIEGIDATGGNNQPNIPDIPAHLWYFGLIGTCL

SEQ ID NO: 6074 - protein, 267 aa, Thermomyces lanuginosus
SQDLFNQFNLFAQYSAAAYCGKNNDAPAGTKITCTGNACPEVEKADATLLYSFEDSGVGDVTGFLALDNTNKLIVLSFRGSRSIENWIGNLNFDLKEINDICSGCRGHDGFTSSWRSVADTLRQKVEDAVREHPDYRVVFTGHSLGGALATVAGADLRGNGYDIDVFSYGAPRVGNRAFAEFLTVQTGGTLYRITSTNDIVPRLPPREFGYSHSSPEYWIKSGTLVPVRRCDIVKIEGIDATGGNNQPNIPDIPAHLWYFGLIGTCL

SEQ ID NO: 6075 - protein, 267 aa, Thermomyces lanuginosus
SQDLFNQFNLFAQYSAAAYCGKNNDAPAGTKITCTGNACPEVEKADATVLYSFEDSGVGDVTGFLALDNTNKLIVLSFRGSRSIENWIGNLNFDLKEINDICSGCRGHDGFTSSWRSVADTLRQKVEDAVREHPDYRVVFAGHSLGGALATVAGADLRGNGYDIDVFSYGAPRVGNRAFAEFLTVQTGGTLYRITHTNDIVPRLPPREFGYSHSSPEYWIKSGTLVPVRRCDIVKIEGIDATGGNNQPNIPDIPAHLWYFGLIGTCL

SEQ ID NO: 6076 - protein, 267 aa, Thermomyces lanuginosus
SQDLFNQFNLFAQYSAAAYCGKNNDAPAGTKITCTGNACPEVEKADATVLYSFEDSGVGDVTGFLALDNTNKLIVLSFRGSRSIENWIGNLNFDLKEINDICSGCRGHDGFTSSWRSVADTLRQKVEDAVREHPDYRVVFTGHSLGGALATVAGADLRGNGYDIDVFSYGAPRVGNRAFAEFLTVQTGGTLYRITSTNDIVPRLPPREFGYSHSSPEYWIKSGTLVPVRRCDIVKIEGIDATGGNNQPNIPDIPAHLWYFGLIGTCL

SEQ ID NO: 6077 - protein, 267 aa, Thermomyces lanuginosus
SQDLFNQFNLFAQYSAAAYCGKNNDAPAGTKITCTGNACPEVEKADATLLYSFEDSGVGDVTGFLALDNTNKLIVLSFRGSRSIENWIGNLNFDLKEINDICSGCRGHDGFTSSWRSVADTLRQKVEDAVREHPDYRVVFTGHSLGGALATVAGADLRGNGYDIDVFSYGAPRVGNRAFAEFLTVQTGGTLYRITLTNDIVPRLPPREFGYSHSSPEYWIKSGTLVPVRRCDIVKIEGIDATGGNNQPNIPDIPAHLWYFGLIGTCL

SEQ ID NO: 6078 - protein, 267 aa, Thermomyces lanuginosus
SQDLFNQFNLFAQYSAAAYCGKNNDAPAGTKITCTGNACPEVEKADATILYSFEDSGVGDVTGFLALDNTNKLIVLSFRGSRSIENWIGNLNFDLKEINDICSGCRGHDGFTSSWRSVADTLRQKVEDAVREHPDYRVVFTGHSLGGALATVAGADLRGNGYDIDVFSYGAPRVGNRAFAEFLTVQTGGTLYRITSTNDIVPRLPPREFGYSHSSPEYWIKSGTLVPVRRCDIVKIEGIDATGGNNQPNIPDIPAHLWYFGLIGTCL

SEQ ID NO: 6079 - protein, 267 aa, Thermomyces lanuginosus
SQDLFNQFNLFAQYSAAAYCGKNNDAPAGTKITCTGNACPEVEKADATILYSFEDSGVGDVTGFLALDNTNKLIVLSFRGSRSIENWIGNLNFDLKEINDICSGCRGHDGFTSSWRSVADTLRQKVEDAVREHPDYRVVFTGHSLGGALATVAGADLRGNGYDIDVFSYGAPRVGNRAFAEFLTVQTGGTLYRITHTNDIVPRLPPREFGYSHSSPEYWIKSGTLVPRRRCDIVKIEGIDATGGNNQPNIPDIPAHLWYFGLIGTCL

SEQ ID NO: 6080 - protein, 267 aa, Thermomyces lanuginosus
SQDLFNQFNLFAQYSAAAYCGKNNDAPAGTKITCTGNACPEVEKADATLLYSFEDSGVGDVTGFLALDNTNKLIVLSFRGSRSIENWIGNLNFDLKEINDICSGCRGHDGFTSSWRSVADTLRQKVEDAVREHPDYRVVFTGHSLGGALATVAGADLRGNGYDIDVFSYGAPRVGNRAFAEFLTVQTGGTLYRITITNDIVPRLPPREFGYSHSSPEYWIKSGTLVPVRRCDIVKIEGIDATGGNNQPNIPDIPAHLWYFGLIGTCL

SEQ ID NO: 6081 - protein, 267 aa, Thermomyces lanuginosus
SQDLFNQFNLFAQYSAAAYCGKNNDAPAGTKITCTGNACPEVEKADATILYSFEDSGVGDVTGFLALDNTNKLIVLSFRGSRSIENWIGNLNFDLKEINDICSGCRGHDGFTSSWRSVADTLRQKVEDAVREHPDYRVVFTGHSLGGALATVAGADLRGNGYDIDVFSYGAPRVGNRAFAEFLTVQTGGTLYRITHTNDIVPRLPPREFGYSHSSPEYWIKSGTDVPVRRCDIVKIEGIDATGGNNQPNIPDIPAHLWYFGLIGTCL

SEQ ID NO: 6082 - protein, 267 aa, Thermomyces lanuginosus
SQDLFNQFNLFAQYSAAAYCGKNNDAPAGTKITCTGNACPEVEKADATLLYSFEDSGVGDVTGFLALDNTNKLIVLSFRGSRSIENWIGNLNFDLKEINDICSGCRGHDGFTSSWRSVADTLRQKVEDAVREHPDYRVVFTGHSLGGALATVAGADLRGNGYDIDVFSYGAPRVGNRAFAEFLTVQTGGTLYRITHTNDIVPRLPPREFGYSHSSPEYWIKSGTLVPRRRCDIVKIEGIDATGGNNQPNIPDIPAHLWYFGLIGTCL

SEQ ID NO: 6083 - protein, 267 aa, Thermomyces lanuginosus
SQDLFNQFNLFAQYSAAAYCGKNNDAPAGTKITCTGNACPEVEKADATLLYSFEDSGVGDVTGFLALDNTNKLIVLSFRGSRSIENWIGNLNFDLKEINDICSGCRGHDGFTSSWRSVADTLRQKVEDAVREHPDYRVVFTGHSLGGALATVAGADLRGNGYDIDVFSYGAPRVGNRAFAEFLTVQTGGTLYRITHTNDIVPRLPPREFGYSHSSPEYWIKIGTLVPVRRCDIVKIEGIDATGGNNQPNIPDIPAHLWYFGLIGTCL

SEQ ID NO: 6084 - protein, 267 aa, Thermomyces lanuginosus
SQDLFNQFNLFAQYSAAAYCGKNNDAPAGTKITCTGNACPEVEKADATILYSFEDSGVGDVTGFLALDNTNKLIVLSFRGSRSIENWIGNLNFDLKEINDICSGCRGHDGFTSSWRSVADTLRQKVEDAVREHPDYRVVFTGHSLGGALATVAGADLRGNGYDIDVFSYGAPRVGNRAFAEFLTVQTGGTLYRITITNDIVPRLPPREFGYSHSSPEYWIKSGTLVPVRRCDIVKIEGIDATGGNNQPNIPDIPAHLWYFGLIGTCL

SEQ ID NO: 6085 - protein, 267 aa, Thermomyces lanuginosus
SQDLFNQFNLFAQYSAAAYCGKNNDAPAGTKITCTGNACPEVEKADATILYSFEDSGVGDVTGFLALDNTNKLIVLSFRGSRSIENWIGNLNFDLKEINDICSGCRGHDGFTSSWRSVADTLRQKVEDAVREHPDYRVVFAGHSLGGALATVAGADLRGNGYDIDVFSYGAPRVGNRAFAEFLTVQTGGTLYRITHTNDIVPRLPPREFGYSHSSPEYWIKSGTLVPVRRCDIVKIEGIDATGGNNQPNIPDIPAHLWYFGLIGTCL

SEQ ID NO: 6086 - protein, 267 aa, Thermomyces lanuginosus
SQDLFNQFNLFAQYSAAAYCGKNNDAPAGTKITCTGNACPEVEKADATILYSFEDSGVGDVTGFLALDNTNKLIVLSFRGSRSIENWIGNLNFDLKEINDICSGCRGHDGFTSSWRSVADTLRQKVEDAVREHPDYRVVFTGHSLGGALATVAGADLRGNGYDIDVFSYGAPRVGNRAFAEFLTVQTGGTLYRITHTNDIVPRLPPREFGYSHSSPEYWIKPGTLVPVRRCDIVKIEGIDATGGNNQPNIPDIPAHLWYFGLIGTCL

SEQ ID NO: 6087 - protein, 267 aa, Thermomyces lanuginosus
VSQDLFNQFNLFAQYSAAAYCGKNNDAPAGTNITCTGNACPEVEKADATFLYSFEDSGVGDVTGFLALDNTNKLIVLSFRGSRSIENWIANLNFWLKKINDICSGCRGHDGFTSSWRSVADTLRQKVEDAVREHPDYRVVFTGHSLGGALATVAGADLRGNGYDIDVFSYGAPRVGNRAFAEFLTVQTGGTLYRITHTNDIVPRLPPREFGYSHSSPEYWIKSGTLVPVTRNDIVKIEGIDATGGNNRPNIPDIPAHLWYFGFITCL

SEQ ID NO: 6088 - protein, 267 aa, Thermomyces lanuginosus
VSQDLFNQFNLFAQYSAAAYCGKNNDAPAGTNITCTGNACPEVEKADATFLYSFEDSGVGDVTGFLALDNTNKLIVLSFRGSRSIENWIANLNFWLKKINDICSGCRGHDGFTSSWRSVADTLRQKVEDAVREHPDYRVVFTGHSLGGALATVAGADLRGNGYDIDVFSYGAPRVGNRAFAEFLTVQTGGTLYRITHTNDIVPRLPPREFGYSHSSPEYWIKSGTLVPVTRNDIVKIEGIDATGGNNRPNIPDIPAHLWYFGLISTC

SEQ ID NO: 6089 - protein, 267 aa, Thermomyces lanuginosus
VSQDLFNQFNLFAQYSAAAYCGKNNDAPAGTNITCTGNACPEVEKADATFLYSFEDSGVGDVTGFLALDNTNKLIVLSFRGSRSIENWIANLNFWLKKINDICSGCRGHDGFTSSWRSVADTLRQKVEDAVREHPDYRVVFTGHSLGGALATVAGADLRGNGYDIDVFSYGAPRVGNRAFAEFLTVQTGGTLYRITHTNDIVPRLPPREFGYSHSSPEYWIKSGTLVPVTRNDIVKIEGIDATGGNNRPNIPDIPAHLWYFGLIDTC

SEQ ID NO: 6090 - protein, 292 aa, Synthetic construct
MRSSLVLFFVSAWTALASPIRREVSQDLFNQFNLFAQYSAAAYCGKNNDAPAGTNITCTGNACPEVEKADATFLYSFEGSVVGDVTGFLALDNTNKLIVLSFRGSRSIENWIGNLNFLMKEINDICSGCRGHDGFTSPWRSVADTLRQKVEDAVREHPDYRVVFTGHSLGGALATVAGADLRGNGYDIDVFPYGAPRVGNRAFAEFLTVQTGGTLYRITHTNDIVPRLPPREFGYSHSSPEYWIKSGTLVPVTRNDIVKIEGIDATGGNRNQPNIPDIPAHLWYFGLIGTCL

SEQ ID NO: 6091 - protein, 291 aa, Thermomyces lanuginosus
MRSSLVLFFVSAWTALASPIRREVSQDLFNQFNLFAQYSAAAYCGKNNHAPAGTNITCTGNACPEVEKADATFLYSFEDSGVGDVTGFLALDNTNKLIVLSFRGSRSIQNWIGNLNFNLKEINDICSGCRGHDGFTSSWRSVADTLRQKVEDAVREHPDYRVVFTGHSLGGALATVAGADLRGNGYDIDVFSYGAPRVGNRAFAEFLTVQTGGTLYRITHTNDIVPRLPPREFGYSHSSPEYWIKSGTLVPVRRRDIVKIEGIDATGGNNQPNIPVIPAHLWYFGLIGTCL

SEQ ID NO: 6092 - protein, 291 aa, Thermomyces lanuginosus
MRSSLVLFFVSAWTALASPIRREVSVDLFNQFNLFAQYSAAAYCGKNNDAPAGTNITCTGNACPEVEKADATFLYSFEDSGKGDVTGFLALDNTNKLIVLSFRGSRSIENWRGNLNFDLKEINDICSGCRGHDGFTSSWRSVADTLRQKVEDAVREHPDYRVVFTGHSLGGALATVAGADLRGNGYDIDVFSYGAPRVGNRAFAEFLTVQTGGTLYRITHTNDIVPRLPPREFGYSHSSPEYWIKSGTLVPVRRRDIVKIEGIDATGGNNQPNIPDVPAHLWYFGLIGTCL

SEQ ID NO: 6093 - protein, 291 aa, Thermomyces lanuginosus
MRSSLVLFFVSAWTALASPIRREVSQDLFNQFNLFAQYSAAAYCGKNNDAPAGTNITCTGNACPEVEKADATFLYSFEDXGVGDVTGFLALDNTNKLIVLSFRGSRSXENWIGNLNFDLKEINDICSGCRGXDGFTSSWRSVADTLRQKVEDAVREHPDYRVVFTGXSLGGALATVAGADLRGNGYDIDVFSYGAPRVGNRAFAEFLTVQTGGTLYRITXTNDIVPRLPPREFGYXHSSPEYWIKSGTLVPVTRNDIVKIEGIDATGGNNQPNIPDIPAHLWYFGLIGTCL

SEQ ID NO: 6094 - protein, 291 aa, Thermomyces lanuginosus
MRSSLVLFFVSAWTALASPIRREVSQDLFNQFNLFAQYSAAAYCGKNNDAPAGTNITCTGNACPEVEKADATFLYSFEDNGSGDVTGFLALDNTNKLIVLSFRGSRSIENWIGNLNFDLKEINDICSGCRGHDGFTSSWRSVADTLRQKVEDAVREHPDYRVVFTGHSLGGALATVAGADLRGNGYDIDVFSYGAPRVGNRAFAEFLTVQTGGTLYRITHTNDIVPRLPPRVFGYSHSSPEYWIKSGTLVPVRRRDIVKIEGIDATGGNNRPNIPDIPAHLWYFGLIGTCL

SEQ ID NO: 6095 - protein, 291 aa, Thermomyces lanuginosus
MRSSLVLFFVSAWTALASPIRREVSQDLFNQFNLFAQYSAAAYCGKNNDAPAGTNITCTGNACPEVEKADATFLYSFEDSGVGDVTGFLALDNTNKLIVLSFRGSRSIENWIGNLNFDLKEINDICSGCRGHDGFTSSWRSVADTLRQKVEDAVREHPDYRVVFTGHSLGGALATVAGADLRGNGYDIDVFSYGAPRVGNRAFAEFLTVQTGGTLYRITHTNDIVPRLPPRELGYSHSSPEYWIKSGTGVPVRRRDIVKIEGIDATGGNNQPNIPDLKAHLWYFGLIGTCL

SEQ ID NO: 6096 - protein, 291 aa, Thermomyces lanuginosus
MRSSLVLFFVSAWTALASPIRREVSQDLFNQFNLFAQYSAAAYCGKNNDAPAGTNITCTGNACPEVEKADATFLYSFEDSGVGDVTGFLALDNTNKLIVLSFRGSRSIENWIQNLNFDLKEINDICSGCRGHDGFTSSWRSVADTLRQKVEDAVREHPDYRVVFAGHSLGGALATVAGADLRGNGYDIDVFSYGAPRVGNRAFAEFLTVQTGGTLYRITHTNDIVPRLPPRQFGYSHSSPEYWIKSGTLVPVRRRDIVKIEGIDATGGNNQRNIPDIPAHLWYFGLIGTCL

SEQ ID NO: 6097 - protein, 291 aa, Thermomyces lanuginosus
MRSSLVLFFVSAWTALASPIRREVSQDLFNQFNLFAQYSAAAYCGKNNDAPAGTNITCTGNACPEVEKADATFLYSFEDNGSGDVTGFLALDNTNKLIVLSFRGSRSPENWIGNLNFDLKEINDICSGCRGHDGFTSSWRSVADTLRQKVEDAVREHPDYRVVFTGHSLGGALATVAGADLRGNGYDIDVFSYGAPRVGNRAFAEFLTVQTGGTLYRITHTNDIVPRLPPREFGYSHSSPEYWIKSGTLVPVRRRDIVKIEGIDATGGNNQPNIPDISAHLWYFGLIGTCL

SEQ ID NO: 6098 - protein, 291 aa, Thermomyces lanuginosus
MRSSLVLFFVSAWTALASPIRREVSQDLFNQFNLFAQYSAAAYCGKNNDAPAGTNITCTGNACPEVEKADATFLYSFEDSGVGDVTGFLALDNTNKLIVLSFRGSRSIENWIQNLNFDLKEINDICSGCRGHDGFTSSWRSVADTLRQKVEDAVREHPDYRVVFTGHSLGGGLATVAGADLRGNGYDIDVFSYGAPRVGNRAFAEFLTVQTGGTLYRITHTNDIVPRLPPRQFGYSHSSPEYWIKSGTLVPVRRRDIVKIEGIDATGGNNQRNIPDIPAHLWYFGLIGTCL

SEQ ID NO: 6099 - protein, 291 aa, Thermomyces lanuginosus
MRSSLVLFFVSAWTALASPIRREVSQDLFNQFNLFAQYSAAAYCGKNNDAPAGTNITCRGRACPEVEKADATFLYSFEDSGVGDVTGFLALDNTNKLIVLSFRGSRSIENWIANLNFGLKEINDICSGCRGHDGFTSSWRSVADTLRQKVEDAVREHPDYRVVFTGHSLGGALATVAGADLRGNGYDIDVFSYGAPRVGNRAFAEFLTVQTGGTLYRITHTNDIVPRLPPREFGYSHSSPEYWIKSGTLVPVRRRDIVKIEGIDATGGNNQPNIPDIPAHLWYFGLIGTCL

SEQ ID NO: 6100 - protein, 291 aa, Thermomyces lanuginosus
MRSSLVLFFVSAWTALASPIRREVSQDLFNQFNLFAQYSAAAYCGKNNDAPAGTNITCTGNACPEVEKADATFLYSFEDTGKGDVTGFLALDNTNKLIVLSFRGSRSIENWIGNLNFDLKEINDICSGCRGHDGFTSSWRSVADTLRQKVEDAVREHPDYRVVFTGHSLGGGLATVAGADLRGNGYDIDVFSYGAPRVGNRAFAEFLTVQTGGTLYRITHTNDIVPRLPPREFGYSHSSPEYWIKSGTLVPVRRIGIVKIEGIDATGGNNQPNIPDIPAHLWYFGLIGTCL

SEQ ID NO: 6101 - protein, 291 aa, Thermomyces lanuginosus
MRSSLVLFFVSAWTALASPIRREVSVDLFNQFNLFAQYSAAAYCGKNNDAPAGTNITCTGNACPEVEKADATFLYSVEDSGVGDVTGFLALDNTNKLIVLSFRGSRSVENWIGNLNFDLKEINDICSGCRGHDGFTSSWRSVADTLRQKVEDAVREHPDYRVVFTGHSLGGALATVAGADLRGNGYDIDVFSYGAPRVGNRAFAEFLTVQTGGTLYRITHTNDIVPRLPPREFGYSHSSPEYWIKSGTLVPVRRRDIVKIEGIDATGGNNQPNIPDVPAHLWYFGLIGTCL

SEQ ID NO: 6102 - protein, 291 aa, Thermomyces lanuginosus
MRSSLVLFFVSAWTALASPIRREVSQDLFNQFNLFAQYSAAAYCGKNNDAPAGTNITCTGNACPEVEKADATFLYSFEDAGVGDVTGFLALDNTNKLIVLSFRGSRSIENWIGNLNFDLKEINDICSGCRGRDGFTSSWRSVADTLRQKVEDAVREHPDYRVVFTGXSLGGALATVAGADLRGNGYDIDVFSYGAPRVGNRAFAEFLTVQTGGTLYRITXTNDIVPRLPPREFGYXXSSPEYWIKSGTLVPVTRNDIVKIEGIDATGGNNQPNIPDIPAHLWYFGLIGTCL

SEQ ID NO: 6103 - protein, 291 aa, Thermomyces lanuginosus
MRSSLVLFFVSAWTALASPIRREVSQDLFNQFNLFAQYSAAAYCGKNNDAPAGTNITCTGNACPEVEKADATFLASFEDNGSGDVTGFLALDNTNKLIVLSFRGSRSIENWIGNLNFDLKEINDICSGCRGHDGFTSSWRSVADTLRQKVEDAVREHPDYRVVFTGHSLGGALATVAGADLRGNGYDIDVFSYGAPRVGNRAFAEFLTVQTGGTLYRITHTNDIVPRLPPREFGYSHSSPEYWIKSGTLVPVRRRDIVKIEGIDATGGNNQPNIPDILAHLWYFGLIGTCL

SEQ ID NO: 6104 - protein, 291 aa, Thermomyces lanuginosus
MRSSLVLFFVSAWTALASPIRREVSQDLFNQFNLFAQYSAAAYCGKNNDAPAGTNITCTGNACPEVEKADATFLYSFEDAGAGDVTGFLALDNTNKLIVLSFRGSRSVENWIGNLNFDLKEINDICSGCRGHDGFTSSWRSVADTLRQKVEDAVREHPDYRVVFTGHSLGGGLATVAGADLRGNGYDIDVFSYGAPRVGNRAFAEFLTVQTGGTLYRITHTNDIVPRLPPREFGYSHSSPEYWIKSGTLVPVRRRDIVKIEGIDATGGNNQPNIPDIPAHLWYFGLIGTCL

SEQ ID NO: 6105 - protein, 282 aa, Haloquadratum walsbyi DSM 16790
VHAEVGKESPIRREVSQDLFNQFNLFAQYSAAAYCGKNNDAPAGTNITCTGNACPEVEKADATFLYSFEDSGVGDVTGFLALDNTNKLIVLSFRGSRSIENWIGNLNFDLKEINDICSGCRGHDGFTSSWRSVADTLRQKVEDAVREHPDYRVVFTGHSLGGALATVAGADLRGNGYDIDVFSYGAPRVGNRAFAEFLTVQTGGTLYRITHTNDIVPRLPPREFGYSHSSPEYWIKSGTLVPVTRNDIVKIEGIDATGGNNQPNIPDIPAHLWYFGLIGTCL

SEQ ID NO: 6106 - protein, 278 aa, Synthetic construct
AIADDVADSEVSQDLFNQFNLFAQYSAAAYCGKNNDAPAGTNITCTGNACPEVEKADATFLYSFEDSGVGDVTGFLALDNTNKLIVLSFRGSRSIENWIGNLNFDLKEINDICSGCRGHDGFTSSWRSVADTLRQKVEDAVREHPDYRVVFTGHSLGGALATVAGADLRGNGYDIDVFSYGAPRVGNRAFAEFLTVQTGGTLYRITHTNDIVPRLPPREFGYSHSSPEYWIKSGTLVPVTRNDIVKIEGIDATGGNNQPNIPDIPAHLWYFGLIGTCL

SEQ ID NO: 6107 - protein, 274 aa, Thermomyces lanuginosus
SPPRRPVSQDLFNQFNLFAQYSAAAYCGKNNDAPAGTNITCTGNACPEVEKADATFLYSFEDSGVGDVTGFLALDNTNKLIVLSFRGSRSIENWIGNLNFSLKEINDICSGCRGHDGFTSSWRSVADTLRQKVEDAVREHPDYRVVFTGHSLGGALATVAGADLRGNGYDIDVFSYGAPRVGNRAFAEFLTVQTGGTLYRITHTNDIVPRLPPREFGYSHSSPEYWIKSGTLVPVTRNDIVKICGIDATGGNNRPNIPDIPAHLWYFGLIDTCL

SEQ ID NO: 6108 - protein, 274 aa, Thermomyces lanuginosus
SPIRREVSQDLFNQFNLFAQYSAAAYCGKNNDAPAGTNITCTGNACPEVEKADATFLYSFEDNGSGDVTGFLALDNTNKLIVLSFRGSRSSENWIGNLNFDLKEINDICSGCRGHDGFTSSWRSVADTLRQKVEDAVREHPDYRVVFTGHSLGGALATVAGADLRGNGYDIDVFSYGAPRVGNRAFAEFLTVQTGGTLYRITHTNDIVPRLPPREFGYSHSSPEYWIKSGTGVPVKRRDIVKIEGIDATGGNNQPNIPDISAHLWYFGLIGTCL

SEQ ID NO: 6109 - protein, 274 aa, Thermomyces lanuginosus
SPIRREVSVDLFNQFNLFAQYSAAAYCGKNNDAPAGTNITCTGNACPEVEKADATFLYSFEDNGSGDVTGFLALDNTNKLIVLSFRGSRSIENWAGNLNFDLKEINDICSGCRGHDGFTSSWRSVADTLRQKVEDAVREHPDYRVVFTGHSLGGGLATVAGADLRGNGYDIDVFSYGAPRVGNRAFAEFLTVQTGGTLYRITHTNDIVPRLPPREFGYSHSSPEYWIKSGTLVPVRRRDIVKIEGIDATGGNNQPNIPDVPAHLWYFGLIGTCL

SEQ ID NO: 6110 - protein, 274 aa, Thermomyces lanuginosus
SPIRREVSQDLFNQFNLFAQYSAAAYCGKNNDAPAGTNITCTGNACPEVEKADATFLYSFEDNGSGDVTGFLALDNTNKLIVLSFRGSRSTENWIGNLNFDLKEINDICSGCRGHDGFTSSWRSVADTLRQKVEDAVREHPDYRVVFTGHSLGGALATVAGADLRGNGYDIDVFSYGAPRVGNRAFAEFLTVQTGGTLYRITHTNDIVPRLPPREFGYSHSSPEYWIKSGTGVPVKRRDIVKIEGIDATGGNNQPNIPDISAHLWYFGLIGTCL

SEQ ID NO: 6111 - protein, 274 aa, Thermomyces lanuginosus
SPIRREVSQDLFNQFNLFAQYSAAAYCGKNNDAPAGTNITCTGNACPEVEKADATFLYSFEDKGLGDVTGFLALDNTNKLIVLSFRGSRSIENWIGNLNFDLKEINDICSGCRGHDGFTSSWRSVADTLRQKVEDAVREHPDYRVVFTGHSLGGALATVAGADLRGNGYDIDVFSYGAPRVGNRAFAEFLTVQTGGTLYRITHTNDIVPRLPPRVFGYSHSSPEYWIKSGTLVPVTRNDIVKIEGIDATGGNNRPNIPDIPAHLWYFGLIGTCL

SEQ ID NO: 6112 - protein, 274 aa, Thermomyces lanuginosus
SPIRRNVSQDLFNQFNLFAQYSAAAYCGKNNDAPAGTNITCTGNACPEVEKADATFLYSFEDSGKGDVTGFLALDNTNKLIVLSFRGSRSVENWIGNLNFDLKEINDICSGCRGHDGFTSSWRSVADTLRQKVEDAVREHPDYRVVFTGHSLGGGLATVAGADLRGNGYDIDVFSYGAPRVGNRAFAEFLTVQTGGTLYRITHTNDIVPRLPPREFGYSHSSPEYWIKSGTGVPVRRRDIVKIEGIDATGGNNQPNIPDIKAHLWYFGLIGTCL

SEQ ID NO: 6113 - protein, 274 aa, Thermomyces lanuginosus
SPIRREVSQDLFNQFNLFAQYSAAAYCGKNNDAPAGTNITCTGNACPEVEKADATFLYSFEDAGSGDVTGFLALDNTNKLIVLSFRGSRSVENWIGNLNFDLKEINDICSGCRGHDGFTSSWRSVADTLRQKVEDAVREHPDYRVVFTGHSLGGGLATVAGADLRGNGYDIDVFSYGAPRVGNRAFAEFLTVQTGGTLYRITHTNDIVPRLPPREFGYSHSSPEYWIKSGTGVPVRRRDIVKIEGIDATGGNNQPNIPDIKAHLWYFGLIGTCL

SEQ ID NO: 6114 - protein, 274 aa, Thermomyces lanuginosus
SPIRREVSVDLFNQFNLFAQYSAAAYCGKNNDAPAGTNITCTGNACPEVEKADATFLYSFEDNGSGDVTGFLALDNTNKLIVLSFRGSRSVENWIGNLNFDLKEINDICSGCRGHDGFTSSWRSVADTLRQKVEDAVREHPDYRVVFTGHSLGGGLATVAGADLRGNGYDIDVFSYGAPRVGNRAFAEFLTVQTGGTLYRITHTNDIVPRLPPREFGYSHSSPEYWIKSGTLVPVRRRDIVKIEGIDATGGNNQPNIPDVPAHLWYFGLIGTCL

SEQ ID NO: 6115 - protein, 274 aa, Thermomyces lanuginosus
SPIRREVSQDLFNQFNLFAQYSAAAYCGKNNDAPAGTNITCTGNACPTVEIADATFLYSFEDNGSGDVTGFLALDNTNKLIVLSFRGSRSIENWIGNLNFDLKEINDICSGCRGHDGFTSSWRSVADTLRQKVEDAVREHPDYRVVFTGHSLGGALATVAGADLRGNGYDIDVFSYGAPRVGNRAFAEFLTVQTGGTLYRITHTNDIVPRLPPREFGYSHSSPEYWIKSGTLVPVRRRDIVKIEGIDATGGNNLPNIPIIPAHLWYFGLIGTCL

SEQ ID NO: 6116 - protein, 274 aa, Thermomyces lanuginosus
SPIRREVSQDLFNQFNLFAQYSAAAYCGKNNDAPAGTNITCTGNACPEVEKADATFLYSFEDSGVGDVTGFLALDNTNKLIVLSFRGSRSIQNWIGNLNFDLKEINDICSGCRGHDGFTSSWRSVADTLRQKVEDAVREHPDYRVVFTGHSLGGALATVAGADLRGNGYDIDVFSYGAPRVGNRAFAEFLTVQTGGTLYRITHTNDIVPRLPPRQFGYSHSSPEYWIKSGTLVPVTRNDIVKIEGINATGGNNQPNIPNIPAHLWYFGLIGTCL

SEQ ID NO: 6117 - protein, 274 aa, Thermomyces lanuginosus
SPIRREVSQDLFNQFNLFAQYSAAAYCGKNNDAPAGTNITCTGNACPEVEKADATFLYSFEDXGVGDVTGFLALDNTNKLIVLSFRGSRSIENWIGNLNFDLKEINDICSGCRGRDGFTSSWRSVADTLRQKVEDAVREHPDYRVVFTGXSLGGALATVAGADLRGNGYDIDVFSYGAPRVGNRAFAEFLTVQTGGTLYRITXTNDIVPRLPPREFGYSHSSPEYWIKSGTLVPVTRNDIVKIEGIDATGGNNQPNIPDIPAHLWYFGLIGTCL

SEQ ID NO: 6118 - protein, 274 aa, Thermomyces lanuginosus
SPIRREVSQDLFNQFNLFAQYSAAAYCGKNNDAPAGTNITCTGNACPEVEKADATFLYSFEDSGVGDVTGFLALDNTNKLIVLSFRGSRSIENWIGNLNFDLKEINDICSGCRGHDGFTSSWRSVADTLRQKVEDAVREHPDYRVVFTGHSLGGALATVAGADLRGNGYDIDVFSYGAPRVGNRAFAEFLTVQTGGTLYRITHTNDXVPRXPPREXGYSHSSPEYWIKSGTLVPVTRNDIVKIEGIDATGGNNQPNIPDXPAHLWYFGLIGTCL

SEQ ID NO: 6119 - protein, 274 aa, Thermomyces lanuginosus
SPIRREVSQDLFNQFNLFAQYSAAAYCGKNNDAPAGTNITCTGNACPEVEKADATFLYSFEDAGSGDVTGFLALDNTNKLIVLSFRGSRSIENWIGNLNFDLKEINDICSGCRGHDGFTSSWRSVADTLRQKVEDAVREHPDYRVVFTGHSLGGGLATVAGADLRGNGYDIDVFSYGAPRVGNRAFAEFLTVQTGGTLYRITHTNDIVPRLPPREFGYSHSSPEYWIKSGTGVPVTRNDIVKIEGIDATGGNNQPNIPDIPAHLWYFGLIGTCL

SEQ ID NO: 6120 - protein, 274 aa, Thermomyces lanuginosus
SPIRREVSQDLFNQFNLFAQYSAAAYCGKNNDAPAGTNITCTGNACPEVEKADATFLYSFEDNGSGDVTGFLALDNTNKLIVLSFRGSRSVENWIGNLNFDLKEINDICSGCRGHDGFTSSWRSVADTLRQKVEDAVREHPDYRVVFTGHSLGGGLATVAGADLRGNGYDIDVFSYGAPRVGNRAFAEFLTVQTGGTLYRITHTNDIVPRLPPREFGYSHSSPEYWIKSGTGVPVRRRDIVKIEGIDATGGNNQPNIPDIKAHLWYFGLIGTCL

SEQ ID NO: 6121 - protein, 274 aa, Synthetic construct
SPIRREVSQDLFNQFNLFAQYSAAAYCGKNNDAPAGTNITCTGNACPEVEKADATFLYSFEGSGVGDVTGFLALDNTNKLIVLSFRGSRSIENWIGNLKFLLKEINDICSGCRGHDGFTSSWRSVADTLRQKVEDAVREHPDYRVVFTGHSLGGALATVAGADLRGNGYDIDVFSYGAPRVGNRAFAEFLTVQTGGTLYRITHTNDIVPRLPPREFGYSHSSPEYWIKSGTLVPVTRNDIVKIEGIDATGGNNQPNIPDITAHLWYFGLIGTCL

SEQ ID NO: 6122 - protein, 274 aa, Thermomyces lanuginosus
SPIRREVSQDLFNQFNLFAQYSAAAYCGKNNDAPAGTNITCTGNACPEVEKADATFLYSFEDSGKGDVTGFLALDNTNKLIVLSFRGSRSVENWIGNLNFDLKEINDICSGCRGHDGFTSSWRSVADTLRQKVEDAVREHPDYRVVFTGHSLGGGLATVAGADLRGNGYDIDVFSYGAPRVGNRAFAEFLTVQTGGTLYRITHTNDIVPRLPPREFGYSHSSPEYWINSSTLVPVRRRDIVKIEGIDATGGNNQPNIPDIKAHLWYFGLIGTCL

SEQ ID NO: 6123 - protein, 274 aa, Thermomyces lanuginosus
SPIRREVSQDLFNQFNLFAQYSAAAYCGKNNRAPAGTNITCTGNACPEVEKADATFLYSFEDSGKGDVTGFLALDNTNKLIVLSFRGSRSVENWIGNLNFDLKEINDICSGCRGHDGFTSSWRSVADTLRQKVEDAVREHPDYRVVFTGHSLGGGLATVAGADLRGNGYDIDVFSYGAPRVGNRAFAEFLTVQTGGTLYRITHTNDIVPRLPPREFGYSHSSPEYWIKSGTGVPVRRRDIVKIEGIDATGGNNQPNIPDIKAHLWYFGLIGTCL

SEQ ID NO: 6124 - protein, 274 aa, Thermomyces lanuginosus
SPIRREVSQDLFNQFNLFAQYSAAAYCGKNNDAPAGTNITCTGNACPEVEKADATFLYSFEDHGLGDVTGFLALDNTNKLIVLSFRGSRSIENWIGNLNFDLKEINDICSGCRGHDGFTSSWRSVADTLRQKVEDAVREHPDYRVVFTGHSLGGALATVAGADLRGNGYDIDVFSYGAPRVGNRAFAEFLTVQTGGTLYRITHTNDIVPRLPPRVFGYSHSSPEYWIKSGTLVPVTRNDIVKIEGIDATGGNNRPNIPDIPAHLWYFGLIGTCL

SEQ ID NO: 6125 - protein, 275 aa, Synthetic construct
SPPRRPEVSQDLFNQFNLFAQYSAAAYCGKNNDAPAGTNITCTGNACPEVEKADATFLYSFEDSGVGDVTGFLALDNTNKLIVLSFRGSRSIENWFGNLNFLLKKINDICSGCRGHDGFTSSWRSVADTLRQKVEDAVREHPGYRVVFTGHSLGGALATVAGADLRGNGYDIDVFSYGAPRVGNRAFAEFLTAQTGGTLYRITHTNDIVPRLPPREFGYSHSSPEYWIKSGTLVPVTRNDIVKIEGIDATGGNNQPNIPDIPAHLWYFGLIGTCL

SEQ ID NO: 6126 - protein, 274 aa, Synthetic construct
SPPRWPVSQDLFNQFNLFAQYSAAAYCGKNNDAPAGTNITCTGNACPEVEKADATFLYSFEDSGVGDVTGFLALDNTNKLIVLSFRGSRSIENWIGNLKFLLKEINDICSGCRGHDGFTSSWRSVADTLRQKVEDAVREHPDYRVVFTGHSLGGALATVAGADLRGNGYDIDVFSYGAPRVGNRAFAEFLTVQTGGTLYRITHTNDIVPRLPPREFGYSHSSPEYWIKSGTLVPVTRNDIVKIEGIDATGGNNRPNIPDIPAHLWYFGLIGTCL

SEQ ID NO: 6127 - protein, 274 aa, Synthetic construct
SPPRRPVSQDLFNQFNLFAQYSAAAYCGKNNDAPAGTNITCTGNACPEVEKADATFLYSFEDSGVGDVTGFLALDNTNKLIVLSFRGSRSIENWIGNLKFLLKKINDICSGCRGHDGFTSSWRSVADTLRQKVEDAVREHPDYRVVFTGHSLGGALATVAGADLRGNGYDIDVFSYGAPRVGNRAFAEFLTVQTGGTLYRITHTNDIVPRLPPREFGYSHSSPEYWIKSGTLVPVTRNDIVKIEGIDATGGNNRPNIPDIPAHLWYFGLIGTCL

SEQ ID NO: 6128 - protein, 274 aa, Synthetic construct
SPPRRPVSQDLFNQFNLFAQYSAAAYCGKNNDAPAGTNITCTGNACPEVEKADATFLYSFEDSGVGDVTGFLALDNTNKLIVLSFRGSRSIENWIGNLNFLLKKINDICSGCRGHDGFTSSWRSVADTLRQKVEDAVREHPDYRVVFTGHSLGGALATVAGADLRGNGYDIDVFSYGAPRVGNRAFAEFLTAQTGGTLYRITHTNDIVPRLPPREFGYSHSSPEYWIKSGTLVPVTRNDIVKIEGIDATGGNNRPNIPDIPAHLWYFGLIGTCL

SEQ ID NO: 6129 - protein, 275 aa, Synthetic construct
SPIRPRPVSQDLFNQFNLFAQYSAAAYCGKNNDAPAGTNITCTGNACPEVEKADATFLYSFEGSGVGRVTGFLALDNTNKLIVLSFRGSRSIENWIGNLKFLLKEINDICSGCRGHDGFTSSWRSVADTLRQKVEDAVREHPDYRVVFTGHSLGGALATVAGADLRGNGYDIDVFSYGAPRVGNRAFAEFLTVQTGGTLYRITHTNDIVPRLPPREFGYSHSSPEYWIKSGTLVPVTRNDIVKIEGIDATGGNNRPNIPDIPAHLWYFGLIGTCL

SEQ ID NO: 6130 - protein, 275 aa, Synthetic construct
SPIRPRPVSQDLFNQFNLFAQYSAAAYCGKNNDAPAGTNITCTGNACPEVEKADATFLYSFEDSGVGDVTGFLALDNTNKLIVLSFRGSRSIENWFGNLNFLLKKINDICSGCRGHDGFTSSWRSVADTLRQKVEDAVREHPDYRVVFTGHSLGGALATVAGADLRGNGYDIDVFSYGAPRVGNRAFAEFLTAQTGGTLYRITHTNDIVPRLPPREFGYSHSSPEYWIKSGTLVPVTRNDIVKIEGIDATGGNNRPNIPDIPAHLWYFGLIGTCL

SEQ ID NO: 6131 - protein, 275 aa, Synthetic construct
SPCRPRPVSQDLFNQFNLFAQYSAAAYCGKNNDAPAGTNITCTGNACPEVEKADATFLYSFEDSGVGDVTGFLALDNTNKLIVLSFRGSRSIENWIGNLKFLLKEINDICSGCRGHDGFTSSWRSVADTLRQKVEDAVREHPDYRVVFTGHSLGGALATVAGADLRGNGYDIDVFSYGAPRVGNRAFAEFLTVQTGGTLYRITHTNDIVPRLPPREFGYSHSSPEYWIKSGTLVPVTRNDIVKICGIDATGGNNRPNIPDIPAHLWYFGLIGTCL

SEQ ID NO: 6132 - protein, 276 aa, Synthetic construct
SPIRPRPEVSQDLFNQFNLFAQYSAAAYCGKNNDAPAGTNITCTGNACPEVEKADATFLYSFEGSGVGDVTGFLALDNTNKLIVLSFRGSRSIENWIGNLKFLMKEINDICSGCRGHDGFTSSWRSVADTLRQKVEDAVREHPDYRVVFTGHSLGGALATVAGADLRGNGYDIDVFSYGAPRVGNRAFAEFLTVQTGGTLYRITHTNDIVPRLPPREFGYSHSSPEYWIKSGTLVPVTRNDIVKIEGIDATGGNNRPNIPDIPAHLWYFGLIGTCL

SEQ ID NO: 6133 - protein, 271 aa, Thermomyces lanuginosus
RRPVSQDLFNQFNLFAQYSAAAYCGKNNDAPAGTNITCTGNACPEVEKADATFLYSFEDSGVGDVTGFLALDNTNKLIVLSFRGSRSIENWIGNLNFDLKEINDICSGCRGHDGFTSSWRSVADTLRQKVEDAVREHPDYRVVFTGHSLGGALATVAGADLRGNGYDIDVFSYGAPRVGNRAFAEFLTVQTGGTLYRITHTNDIVPRLPPREFGYSHSSPEYWIKSGTLVPVTRNDIVKICGIDATGGNNRPNIPDITAHLWYFGLISACL

SEQ ID NO: 6134 - protein, 271 aa, Thermomyces lanuginosus
RRPVSQDLFNQFNLFAQYSAAAYCGKNNDAPAGTNITCTGNACPEVEKADATFLYSFEDSGVGDVTGFLALDNTNKLIVLSFRGSRSIENWIGNKNFDLKKINDICSGCRGHDGFTSSWRSVADTLRQKVEDAVREHPDYRVVFTGHSLGGALATVAGADLRGNGYDIDVFSYGAPRVGNRAFAEFLTVQTGGTLYRITHTNDIVPRLPPREFGYSHSSPEYWIKSGTLVPVTRNDIVKICGIDATGGNNRPNIPDIPAHLWYFGLIDTCL

SEQ ID NO: 6135 - protein, 271 aa, Thermomyces lanuginosus
RRPVSQDLFNQFNLFAQYSAAAYCGKNNDAPAGTNITCTGNACPEVEKADATFLYSFEDSGVGDVTGFLALDNTNKLIVLSFRGSRSIENWIGNLNFSLKEINDICSGCRGHDGFTSSWRSVADTLRQKVEDAVREHPDYRVVFTGHSLGGALATVAGADLRGNGYDIDVFSYGAPRVGNRAFAEFLTVQTGGTLYRITHTNDIVPRLPPREFGYSHSSPEYWIKSGTLVPVTRNDIVKICGIDATGGNNRPNIPDIPAHLWYFGLICACL

SEQ ID NO: 6136 - protein, 271 aa, Thermomyces lanuginosus
RRPVSQDLFNQFNLFAQYSAAAYCGKNNDAPAGTNITCTGNACPEVEKADATFLYSFEDSGVGDVTGFLALDNTNKLIVLSFRGSRSIENWIANLNFWLKEINDICSGCRGHDGFTSSWRSVADTLRQKVEDAVREHPDYRVVFTGHSLGGALATVAGADLRGNGYDIDVFSYGAPRVGNRAFAEFLTVQTGGTLYRITHTNDIVPRLPPREFGYSHSSPEYWIKSGTLVPVTRNDIVKICGIDATGGNNRPNIPDIPAHLWYFGLIDTCL

SEQ ID NO: 6137 - protein, 271 aa, Thermomyces lanuginosus
RRPVSQDLFNQFNLFAQYSAAAYCGKNNDAPAGTNITCTGNACPEVEKADATFLYSFEDSGVGDVTGFLALDNTNKLIVLSFRGSRSIENWIANLNFWLKEINDICSGCRGHDGFTSSWRSVADTLRQKVEDAVREHPDYRVVFTGHSLGGALATVAGADLRGNGYDIDVFSYGAPRVGNRAFAEFLTVQTGGTLYRITHTNDIVPRLPPREFGYSHSSPEYWIKSGTLVPVTRNDIVKICGIDATGGNNRPNIPDIPAHLWYFGLISTCL

SEQ ID NO: 6138 - protein, 271 aa, Thermomyces lanuginosus
RRPVSQDLFNQFNLFAQYSAAAYCGKNNDAPAGTNITCTGNACPEVEKADATFLYSFEDSGVGAVTGFLALDNTNKLIVLSFRGTRSIENWIGNLNFDLKNINDICSGCRGHDGFTSSWRSVADTLRQKVEDAVREHPDYRVVFTGHSLGGALATVAGADLRGNGYDIDVFSYGAPRVGNRAFAEFLTVQTGGTLYRITHTNDIVPRLPPREFGYSHSSPEYWIKSGTLVPVTRNDIVKICGIDATGGNNRPNIPDIPAHLWYFGLIGTCL

SEQ ID NO: 6139 - protein, 271 aa, Thermomyces lanuginosus
RRPVSQDLFNQFNLFAQYSAAAKCGKNNDAPAGTNITCTGNACPEVEKADATFLYSFEDSGVGDVTGFLALDNTNKLIVLSFRGSRSIENWIGNLNFDLKNISDICSGCRGHDGFTSSWRSVADTLRQKVEDAVREHPDYRVVFTGHSLGGALATVAGADLRGNGYDIDVFSYGAPRVGNRAFAEFLTVQTGGTLYRITHTNDIVPRLPPREFGYSHSSPEYWIKSGTLVPVTRNDIVKICGIDATGGNNRPNIPDIPAHLWYFGLIGTCL

SEQ ID NO: 6140 - protein, 271 aa, Synthetic construct
KRKVSQDLFNQFNLFAQYSAAAYCGKNNDAPAGTNITCTGNACPEVEKADATFLYSFEDSGVGDVTGFLALDNTNKLIVLSFRGSRSIENWFGNLNFLLKKINDICSGCRGHDGFTSSWRSVADTLRQKVEDAVREHPDYRVVFTGHSLGGALATVAGADLRGNGYDIDVFSYGAPRVGNRAFAEFLTAQTGGTLYRITHTNDIVPRLPPREFGYSHSSPEYWIKSGTLVPVTRNDIVKIEGIDATGGNNQPNIPDIPAHLWYFGLIGTCL

SEQ ID NO: 6141 - protein, 271 aa, Synthetic construct
RIKVSQDLFNQFNLFAQYSAAAYCGKNNDAPAGTNITCTGNACPEVEKADATFLYSFEDSGVGDVTGFLALDNTNKLIVLSFRGSRSIENWFGNLNFLLKKINDICSGCRGHDGFTSSWRSVADTLRQKVEDAVREHPDYRVVFTGHSLGGALATVAGADLRGNGYDIDVFSYGAPRVGNRAFAEFLTAQTGGTLYRITHTNDIVPRLPPREFGYSHSSPEYWIKSGTLVPVTRNDIVKIEGIDATGGNNQPNIPDIPAHLWYFGLIGTCL

SEQ ID NO: 6142 - protein, 269 aa, Thermomyces lanuginosus
EVSQDLFNQFNLFAQYSKAAYCGKNNSAEAGTDITCTGNACPEVEKADATFLYSFEDSGVGDVTGFLALDNTNKDIVLSFRGSRSIENWIGNLNFDLKEINDICSGCRGHDGFTSSWRSVADTLRQKVEDAVREHPDYRVVFTGHSLGGALATVAGADLRGNGYDIDVFSYGAPRVGNRAFAEFLTVQDGGTLYRITHTNDIVPRLPPREFGYSHSSPEYWIKSGTLVPVTRNDIVKIEGIDATGGNNQPNIPDIPAHLWYFGLIGTCL

SEQ ID NO: 6143 - protein, 269 aa, Thermomyces lanuginosus
EVSQDLFNQFNLFAQYSAAAYCGKNNVAPAGTQITCTGNACPEVEKADATFLYSFEDSGSGDVTGFLALDNTNKLIVLSFRGSRSIENWIGNLNFDLKEINDICSGCRGHDGFTSSWRSVADTLRQKVEDAVREHPDYRVVFTGHSLGGALATVAGADLRGNGYDIDVFSYGAPRVGNRAFAEFLTVQTGGTLYRITHTNDIVPRLPPREFGYSHSSPEYWIKSGTLVPVRRRDIVKIEGIDATGGNNRPNIPDIPAHLWYFGLIGTCL

SEQ ID NO: 6144 - protein, 269 aa, Thermomyces lanuginosus
EKSQDLFNQFNLFAQYSAAAYCGKNNDAPAGTKITCTGNACPEVEKADATILYSFEDSGVGDVTGFLALDNTNKLIVLSFRGSRSIENWIGNLNFDLKEINDICSGCRGHDGFTSSWRSVADTLRQKVEDAVREHPDYRVVFTGHSLGGALATVAGADLRGNGYDIDVFSYGAPRVGNRAFAEFLTVQTGGTLYRITITNDIVPRLPPREFGYSHSSPEYWIKSGTLVPVRRRDIVKIEGIDATGGNNQPNIPDIPAHLWYFGLIGTCL

SEQ ID NO: 6145 - protein, 269 aa, Thermomyces lanuginosus
EVSQDLFNQFNLFAQYSKAAYCGKNNDAEAGTDITCTGNACPEVFKADATFLYSFEDSGVGDVTGFLALDNTNKDIVLSFRGSRSIENWIGNLNFDLKEINDICSGCRGHDGFTSSWRSVADTLRQKVEDAVREHPDYRVVFTGHSLGGALATVAGADLRGNGYDIDVFSYGAPRVGNRAFAEFLTVQDGGTLYRITHTNDIVPRLPPREFGYSHSSPEYWIKSGTLVPVTRNDIVKIEGIDATGGNNQPNIPDIPAHLWYFGLIGTCL

SEQ ID NO: 6146 - protein, 269 aa, Thermomyces lanuginosus
EVSQDLFNQFKLFAQYSAAAYCQKNNDAPAGTNITCTGNACPEVEKADATFLYSFEDSGVGDVTGFLALDNTNKQIVLSFRGSRSIENWIGNLRFDLKEINDICSGCRGHDGFTSSWRSVADTLRQKVEAAVREHPDYRVVFTGHSLGGALATVAGADLRGNGYDIDVFSYGAPRVGNRAFAEFLTVQTGGTLYRITHTNDIVPRLPPREFGYSHSSPEYWIKSGTLVPVTRNDIVKIEGIDATGGNNQPNIPDIPAHLWYFGRIGTCL

SEQ ID NO: 6147 - protein, 269 aa, Thermomyces lanuginosus
EVSQDLFNQFNLFAQYSAAAYCGKNNDAPAGTQITCTGNACPEVEKADATFLYSFEDSGVGDVTGFLALDNTNKLIVLSFRGSRSIENWIGNLNFDLKEINDICSGCRGHDGFTSSWRSVADTLRQKVEDAVREHPDYRVVFTGHSLGGALATVARADLRGNGYDIDVFSYGAPRWGNRAFAEFLTVQTGGTLYRITHTNDIVPRLPPREFGYSHSSPEYWIKSGTLVPVRRRDIVKIEGIDATGGNNRPNIPDIPAHLWYFGLIGTCL

SEQ ID NO: 6148 - protein, 269 aa, Thermomyces lanuginosus
EVSRDLFNQFNLFAQYSAAAYCGKNNDAPAGTNITCTGNACPEVEKADATILYSFEDSGVGDVTGFLALDNTNKLIVLSFRGSRSIENWIGNLNFDLKEINDICSGCRGHDGFTSSWRSVADTLRQKVEDAVREHPDYRVVFTGHSLGGALATVAGADLRGDGYDIDVFSYGAPRVGNRAFAEFLTVQTGGTLYRITSTNDIVPRLPPREFGYSHSSPEYWIKSGTLVPVRRRDIVKIEGIDATGGNNQPNIPDIPAHLWYFGLIGTCL

SEQ ID NO: 6149 - protein, 269 aa, Thermomyces lanuginosus
EVSQDLFNQFNLFAQYSAAAYCGKNNDAPAGTNITCTGNACPEVEKADATFLYSFEDSGVGDVTGFLALDNTNKLIVLSFRGSRSIENWIGNLNFELKEINDICSGCRGHAGFTSSWRSVADTLRQKVEDAVREHPDYRVVFTGHSLGGALATVAGADLRGNGYDIDVFSYGAPRVGNRAFAEFLTVQTGGTLYRITHTNDIVPRLPPREFGYSHSSPEYWIKSGTLVPVRRRDIVKIEGIDATGGNNQPNIPSITAHLWYFGLIGTCL

SEQ ID NO: 6150 - protein, 269 aa, Thermomyces lanuginosus
EVSQDLFNQFNLFAQYSAAAYCGKNNDAPAGTQITCTGNACPEVEKADATFLYSFEDSGVGDVTGFLALDNTNKLIVLSFRGSRSIENWIQNLNFDLKEINDICSGCRGHDGFTSSWRSVADTLRQKVEDAVREHPDYRVVFTGHSLGGALATVAGADLRGNGYDIDVFSYGAPRVGNRAFAEFLTVQTGGTLYRITHTNDIVPRLPPRQFGYSHSSPEYWIKSGTLVPVRRRDIVKIEGIDATGGNNQPNIPDAPAHLWYFGLIGTCL

SEQ ID NO: 6151 - protein, 269 aa, Thermomyces lanuginosus
EVSQDLFNQFNLFAQYSAAAYCGANNDAPAGTNITCTGNACPEVEKADATFLYSFEDSGVGDVTGFLALDNTNKLIVLSFRGSRSIENWIGNLRFDLKEINDICSGCRGHDGFTSSWRSVADTLRQKVEDAVREHPDYRVVFTGHSLGGALATIAWADLRGNGYDIDVFSYGAPRVGNRAFAEFLTVQQGGTLYRITHTNDIVPRLPPREFGYSHSSPEYWIKSGTLVPVTRNDIVKIEGIDATGGNNQPNIPDIPAHLWYFGRIGTCL

SEQ ID NO: 6152 - protein, 269 aa, Thermomyces lanuginosus
EKSQDLFNQFNLFAQYSAAAYCGKNNDAPAGTKITCTGNACPEVEKADATLLYSFEDSGVGDVTGFLALDNTNKLIVLSFRGSRSIENWIGNLNFDLKEINDICSGCRGHDGFTSSWRSVADTLRQKVEDAVREHPDYRVVFTGHSLGGALATVAGADLRGNGYDIDVFSYGAPRVGNRAFAEFLTVQTGGTLYRITNTNDIVPRLPPREFGYSHSSPEYWIKSGTLVPVRRRDIVKIEGIDATGGNNQPNIPDIPAHLWYFGLIGTCL

SEQ ID NO: 6153 - protein, 269 aa, Thermomyces lanuginosus
EVSQDLFNQFNLFAQYSAAAYCGKNNEAPAGTNITCTGNACPEVEKAQATFLYSFEDSGVGDVTGFLALDNTNKLIVLSFRGSRSIENWIGNLNFDLKEINDICSGCRGHDGFTSSWRSVADTLRQKVEAAVREHPQYRVVFTGHSLGGALATVAGADLRGNPYDIDVFSYGAPRVGNRAFAEFLTVQTGGTLYRITHTNDIVPRLPPREFGYSHSSPEYWIKSGTLVPVTRNDIVKIEGIDATGGNNQPNIPDIPAHLWYFGRIGTCL

SEQ ID NO: 6154 - protein, 269 aa, Thermomyces lanuginosus
EKSQDLFNQFNLFAQYSAAAYCGKNNDAPAGTKITCTGNACPEVEKADATILYSFEDSGVGDVTGFLALDNTNKLIVLSFRGSRSIENWIGNLNFDLKEINDICSGCRGHDGFTSSWRSVADTLRQKVEDAVREHPDYRVVFAGHSLGGALATVAGADLRGNGYDIDVFSYGAPRVGNRAFAEFLTVQTGGTLYRITHTNDIVPRLPPREFGYSHSSPEYWIKSGTLVPVRRRDIVKIEGIDATGGNNQPNIPDIPAHLWYFGLIGTCL

SEQ ID NO: 6155 - protein, 269 aa, Thermomyces lanuginosus
EVSQDLFNQFNLFAQYSAAAYCKKNNDAPAGTNITCTGNACPEVEKADATFLYSFEDSGVGDVTGFLALDNTNKGIVLSFRGSRSIENWIGNLNFDLKEINDICSGCRGHDGFTSSWRSVADTLRQKVEAAVREHPDYRVVFTGHSLGGALATVAGADLRGNGYDIDVFSYGAPRVGNRAFAEFLTTQTGGTLYRITHTNDIVPRLPPREFGYSHSSPEYWIKSGTLVPVTRNDIVKIEGIDATGGNNQPNQPDIPAHLWYFGRIGTCL

SEQ ID NO: 6156 - protein, 269 aa, Thermomyces lanuginosus
EKSQDLFNQFNLFAQYSAAAYCGKNNDAPAGTKITCTGNACPEVEKADATLLYSFEDSGVGDVTGFLALDNTNKLIVLSFRGSRSIENWIGNLNFDLKEINDICSGCRGHDGFTSSWRSVADTLRQKVEDAVREHPDYRVVFTGHSLGGALATVAGADLRGNGYDIDVFSYGAPRVGNRAFAEFLTVQTGGTLYRITHTNDIVPRLPPREFGYSHSSPEYWIKSGTDVPVRRRDIVKIEGIDATGGNNQPNIPDIPAHLWYFGLIGTCL

SEQ ID NO: 6157 - protein, 269 aa, Thermomyces lanuginosus
EVSQDLFNQFNLFAQYSKAAYCKKNNDAPAGTNITCTGNACPEVEKADATFLYSFEDSGVGDVTGFLALDNTNKQIVLSFRGSRSIENWIGNLRFDLKEINDICSGCRGHDGFTSSWRSVADTLRQKVEAAVREHPDYRVVFTGHSLGGALATVAGADLRGNGYDIDVFSYGAPRVGNRAFAEFLTNQTGGTLYRITHTNDIVPRLPPREFGYSHSSPEYWIKSGTLVPVTRNDIVKIEGIDATGGNNQPNIPDIPAHLWYFGLIGTCL

SEQ ID NO: 6158 - protein, 269 aa, Thermomyces lanuginosus
EVSQDLFNQFNLFAQYSAAAYCGKNNDAPAGTNITCTGNACPEVEKADATFLYSFRDSGVGDVTGFLALDNTNKLIVLSFRGSRSIENWIGNLNFDLIEINDICSGCRGHDGFTSSWFSVADTLRQKVEDAVREHPDYRVVFTGHSLGGALATVAGADLRGNGYDIDVFSYGAPRVGNRAFAEFLTVQTGGTLYRITHTNDIVPRLPPREFGYSHSSPEYWIKSGTLVPVRRRDIVKIEGIDATGGNNQPNIPDITAHLWYFGLIGTCL

SEQ ID NO: 6159 - protein, 269 aa, Thermomyces lanuginosus
EVSQDLFNQFNLFAQYSAAAYCGKNNDAPAGTNITCTGNACPEVEKADATFLYSFEDSGVGDVTGFLALDNTNKQIVLSFRGSRSIENWIQNLNFDLKEINDICSGCRGHDGFTSSWRSVADTLRQKVEAAVREHPDYRVVFTGHSLGGALATVAGADLRGNGYDIDVFSYGAPRVGNRAFAEFLTHQTGGTLYRITHTNDIVPRLPPREFGYSHSSPEYWIKSGTLVPVTRNDIVKIEGIDATGGNNQPNQPDIPAHLWYFGRIGTCL

SEQ ID NO: 6160 - protein, 269 aa, Thermomyces lanuginosus
EVSQDLFNQFNLFAQYSAAAYCKKNNDAPAGTNITCTGNACPEVEKADATTLYSFEDSGVGDVTGFLALDNTNKLIVLSFRGSRSIENWIQNLNFDLKEINDICSGCRGHDGFTSSWRSVADTLRQKVEAAVREHPDYRVVFTGHSLGGALATVAGADLRGNGYDIDVFSYGAPRVGNRAFAEFLTHQTGGTLYRITHTNDIVPRLPPREFGYSHSSPEYWIKSGTLVPVTRNDIVKIEGIDATGGNNQPNIPDIPAHLWYFGRIGTCL

SEQ ID NO: 6161 - protein, 269 aa, Thermomyces lanuginosus
EKSQDLFNQFNLFAQYSAAAYCGKNNDAPAGTKITCTGNACPEVEKADATVLYSFEDSGVGDVTGFLALDNTNKLIVLSFRGSRSIENWIGNLNFDLKEINDICSGCRGHDGFTSSWRSVADTLRQKVEDAVREHPDYRVVFTGHSLGGALATVAGADLRGNGYDIDVFSYGAPRVGNRAFAEFLTVQTGGTLYRITHTNDIVPRLPPREFGYSHSSPEYWIKIGTLVPVRRRDIVKIEGIDATGGNNQPNIPDIPAHLWYFGLIGTCL

SEQ ID NO: 6162 - protein, 269 aa, Thermomyces lanuginosus
EVSQDLFNQFNLFAQYSAAAYCQKNNDAPAGTNITCTGNACPEVEKADATFLYSFEDSGVGDVTGFLALDNTNKGIVLSFRGSRSIENWIQNLNFDLKEINDICSGCRGHDGFTSSWRSVADTLRQKVEAAVREHPDYRVVFTGHSLGGALATVAGADLRGNGYDIDVFSYGAPRVGNRAFAEFLTVQTGGTLYRITHTNDIVPRLPPREFGYSHSSPEYWIKSGTLVPVTRNDIVKIEGIDATGGNNQPNQPDIPAHLWYFGRIGTCL

SEQ ID NO: 6163 - protein, 269 aa, Thermomyces lanuginosus
EKSQDLFNQFNLFAQYSAAAYCGKNNDAPAGTKITCTGNACPEVEKADATILYSFEDSGVGDVTGFLALDNTNKLIVLSFRGSRSIENWIGNLNFDLKEINDICSGCRGHDGFTSSWRSVADTLRQKVEDAVREHPDYRVVFTGHSLGGALATVAGADLRGNGYDIDVFSYGAPRVGNRAFAEFLTVQTGGTLYRITHTNDIVPRLPPREFGYSHSSPEYWIKSGTLVPVRRRDIVKIEGIDATGGNNQPNIPDIPIHLWYFGLIGTCL

SEQ ID NO: 6164 - protein, 269 aa, Thermomyces lanuginosus
EVSQDLFNQFNLFAQYSAAAYCGKNNEAPAGTNITCTGNACPEVEKADATFLYSFEDSGVGDVTGFLALDNTNKLIVLSFRGSRSIENWIGNLNFDLKEINDICSGCRGHDGFTSSWRSVADTLRQKVEDAVREHPQYRVVFTGHSLGGALATVAGADLRGNPYDIDVFSYGAPRVGNRAFAEFLTVQTGGTLYRITHTNDIVPRLPPREFGYSHSSPEYWIKSGTMVPVTRQDIVKIEGIDATGGNNQPNIPDIPAHLWYFGRIGTCL

SEQ ID NO: 6165 - protein, 269 aa, Thermomyces lanuginosus
EKSQDLFNQFNLFAQYSAAAYCGKNNDAPAGTKITCTGNACPEVEKADATVLYSFEDSGVGDVTGFLALDNTNKLIVLSFRGSRSIENWIGNLNFDLKEINDICSGCRGHDGFTSSWRSVADTLRQKVEDAVREHPDYRVVFTGHSLGGALATVAGADLRGNGYDIDVFSYGAPRVGNRAFAEFLTVQTGGTLYRITHTNDIVPRLPPREFGYSHSSPEYWIKFGTLVPVRRRDIVKIEGIDATGGNNQPNIPDIPAHLWYFGLIGTCL

SEQ ID NO: 6166 - protein, 269 aa, Thermomyces lanuginosus
EKSQDLFNQFNLFAQYSAAAYCGKNNDAPAGTKITCTGNACPEVEKADATVLYSFEDSGVGDVTGFLALDNTNKLIVLSFRGSRSIENWIGNLNFDLKEINDICSGCRGHDGFTSSWRSVADTLRQKVEDAVREHPDYRVVFAGHSLGGALATVAGADLRGNGYDIDVFSYGAPRVGNRAFAEFLTVQTGGTLYRITHTNDIVPRLPPREFGYSHSSPEYWIKSGTLVPVRRRDIVKIEGIDATGGNNQPNIPDIPAHLWYFGLIGTCL

SEQ ID NO: 6167 - protein, 269 aa, Thermomyces lanuginosus
EVSQDLFNQFNLFAQYSAAAYCGKNNDAPAGTQITCTGNACPEVEKADATFLYSFEDSGVGDVTGFLALDNTNKLIVLSFRGSRSIENWIGNLNFDLKEINDICSGCRGHAGFTSSLRSVADTLRQKVEDAVREHPDYRVVFTGHSLGGALATVAGADLRGNGYDIDVFSYGAPRVGNRAFAEFLTVQTGGTLYRITHTNDIVPRLPPREFGYSHSSPEYWIKSGTLVPVRRRDIVKIEGIDATGGNNQPNIPSIPAHLWYFGLIGTCL

SEQ ID NO: 6168 - protein, 269 aa, Thermomyces lanuginosus
EVSQDLFNQFNLFAQYSAAAYCGKNNSAPAGTNITCTGNACPEVEKADATFLYSFEDSGVGDVTGFLALDNTNKQIVLSFRGSRSIENWIGNLNFDLKEINDICSGCRGHAGFTSSWRSVADTLRQKVEDAVREHPDYRVVFTGHSLGGALATVAWADLRGNGYDIDVFSYGAPRVGNRAFAEFLTNQQGGTLYRITHTNDIVPRLPPREFGYSHSSPEYWIKSGTLVPVTRNDIVKIEGIDATGGNNQPNIPDIPAHLWYFGLIGTCL

SEQ ID NO: 6169 - protein, 269 aa, Thermomyces lanuginosus
EVSQDLFNQFNLFAQYSAAAYCGKNNDAPAGTNITCTGNACPEVEKADATFLYSFEDSGVGDVTGFLALDNTNKLIVLSFRGSRSIENWIGNLNFDLKEINDICSGCRGHDGFTSSWRSVADTLRQKVEDAVREHPDYRVVFAGHSLGGALATVAGADLRGDGYDIDVFSYGAPRVGNRAFAEFLTVQTGGTLYRITSTNDIVPRLPPREFGYSHSSPEYWIKSGTLRPVRRRDIVKIEGIDATGGNNQPNIPDIPAHLWYFGLIGTCL

SEQ ID NO: 6170 - protein, 269 aa, Thermomyces lanuginosus
EVSQDLFNQFNLFAQYSAAAYCGKNNDAEAGTDITCTGNACPEVEKADATFLYSFEDSGVGDVTGFLALDNTNSDIVLSFRGSRSIENWIGNLNFDLKEIDDICSGCRGHDGFTSSWRSVADTLRQKVEDAVREHPDYRVVFTGHSLGGALATVAGADLRGNGYDIDVFSYGAPRVGNRAFAEFLTVQDGGTLYRITHTNDIVPRLPPREFGYSHSSPEYWIKSGTLVPVTRNDIVKIEGIDATGGNNQPNIPDIPAHLWYFGLIGTCL

SEQ ID NO: 6171 - protein, 269 aa, Thermomyces lanuginosus
EVSQDLFNQFNLFAQYSKAAYCGKNNDAPAGTNITCTGNACPEVEKADATFLYSFEDSGVGDVTGFLALDNTNKRIVLSFRGSRSIENWIGNLNFDLKEINDICSGCRGHDGFTSSWRSVADTLRQKVEAAVREHPDYRVVFTGHSLGGALATIAWADLRGNGYDIDVFSYGAPRVGNRAFAEFLTNQTGGTLYRITHTNDIVPRLPPREFGYSHSSPEYWIKSGTLVPVTRNDIVKIEGIDATGGNNQPNIPDIPAHLWYFGLIGTCL

SEQ ID NO: 6172 - protein, 269 aa, Thermomyces lanuginosus
EYSQDLFNQFNLFAQYSAAAYCGKNNDAPAGTKITCTGNACPEVEKADATILYSFEDSGVGDVTGFLALDNTNKLIVLSFRGSRSIENWIGNLNFDLKEINDICSGCRGHDGFTSSWRSVADTLRQKVEDAVREHPDYRVVFTGHSLGGALATVAGADLRGNGYDIDVFSYGAPRVGNRAFAEFLTVQTGGTLYRITHTNDIVPRLPPREFGYSHSSPEYWIKSGTDVPVRRRDIVKIEGIDATGGNNQPNIPDIPAHLWYFGLIGTCL

SEQ ID NO: 6173 - protein, 269 aa, Thermomyces lanuginosus
EVSQDLFNQFNLFAQYSKAAYCQANNDAPAGTNITCTGNACPEVEKADATFLYSFEDSGVGDVTGFLALDNTNKLIILSFRGSRSIENWIGNLNFDLKEINDICSGCRGHDGFTSSWRSVADTLRQKVEDAVREHPDYRVVFTGHSLGGALATIAGADLRGNGYDIDVFSYGAPRVGNRAFAEFLTNQTGGTLYRITHTNDIVPRLPPREFGYSHSSPEYWIKSGTLVPVTRNDIVKIEGIDATGGNNQPNIPDIPAHLWYFGLIGTCL

SEQ ID NO: 6174 - protein, 269 aa, Thermomyces lanuginosus
EVSQDLFNQFNLFAQYSAAAYCSKNNDAPAGTNITCTGNICPEVEKADATFLYSFRDSGVGDVTGFLALDNTNKLIVLSFRGSRSIENWIGNLNFDLKEINDICSGCRGHDGFTSSWFSVADTLRQKVEDAVREHPDYRVVFTGHSLGGALATVAGADLRGNGYDIDVFSYGAPRVGNRAFAEFLTVQTGGTLYRITHTNDIVPRLPPREFGYSHSSPEYWIKSGTLVPVRRRDIVKIEGIDATGGNNQPNIPDIPAHLWYFGLIGTCL

SEQ ID NO: 6175 - protein, 269 aa, Thermomyces lanuginosus
EVSQDLFNQFNLFAQYSAAAYCGKNNDAPAGTQITCTGNACPEVEKADATFLYSFEDSGVGDVTGFLALDNTNKLIVLSFRGSRSIENWITNLSFDLKEINDICSGCRGHAGFTSSWRSVADTLRQKVEDAVREHPDYRVVFTGHSLGGALATVAGADLRGNGYDIDVFSYGAPRVGNRAFAEFLTVQTGGTLYRITHTNDIVPRLPPREFGYSHSSPEYWIKSGTLVPVRRRDIVKIEGIDATGGNNQPNIPDIPAHLWYFGLIGTCL

SEQ ID NO: 6176 - protein, 269 aa, Thermomyces lanuginosus
EVSQDLFNQFNLFAQYSAAAYCKANNDAPAGTNITCTGNACPEVEKADATFLYSFEDSGVGDVTGFLALDNTNKQIVLSFRGSRSIENWIGNLRFDLKEINDICSGCRGHDGFTSSWRSVADTLRQKVEAAVREHPDYRVVFTGHSLGGALATVAWADLRGNGYDIDVFSYGAPRVGNRAFAEFLTVQTGGTLYRITHTNDIVPRLPPREFGYSHSSPEYWIKSGTLVPVTRNDIVKIEGIDATGGNNQPNIPDIPAHLWYFGLIGTCL

SEQ ID NO: 6177 - protein, 269 aa, Thermomyces lanuginosus
EVSQDLFNQFNLFAQYSAAAYCGKNNDAPAGTNITCTGNACPEVEKADATFLYSFEDSGVGDVTGFLALDNTNKLIVLSFRGSRSIENWIGNLNFDLKEINDICSGCRGHDGFTSSWRSVADTLRQKVEDAVREHPDYRVVFTGHSLGGGLATVAGADLRGNGYDIDVFSYGAPRVGNRAFAEFLTVQTGGTLYRITHTNDIVPRLPPRVFGYSHSSPEYWIKSGTLVPVRRRDIVKIEGIDATGGNNQPNIPDAKAHLWYFGLIGTCL

SEQ ID NO: 6178 - protein, 269 aa, Thermomyces lanuginosus
EVSQDLFNQFNLFAQYSAAAYCKKNNDAPAGTNITCTGNACPEVEKADATFLYSFEDSGVGDVTGFLALDNTNKQIILSFRGSRSIENWIGNLNFDLKEINDICSGCRGHDGFTSSWRSVADTLRQKVEAAVREHPDYRVVFTGHSLGGALATVAWADLRGNGYDIDVFSYGAPRVGNRAFAEFLTQQTGGTLYRITHTNDIVPRLPPREFGYSHSSPEYWIKSGTLVPVTRNDIVKIEGIDATGGNNQPNIPDIPAHLWYFGLIGTCL

SEQ ID NO: 6179 - protein, 269 aa, Thermomyces lanuginosus
EKSQDLFNQFNLFAQYSAAAYCGKNNDAPAGTKITCTGNACPEVEKADATLLYSFEDSGVGDVTGFLALDNTNKLIVLSFRGSRSIENWIGNLNFDLKEINDICSGCRGHDGFTSSWRSVADTLRQKVEDAVREHPDYRVVFTGHSLGGALATVAGADLRGNGYDIDVFSYGAPRVGNRAFAEFLTVQTGGTLYRITLTNDIVPRLPPREFGYSHSSPEYWIKSGTLVPVRRRDIVKIEGIDATGGNNQPNIPDIPAHLWYFGLIGTCL

SEQ ID NO: 6180 - protein, 269 aa, Thermomyces lanuginosus
EVSRDLFNQFNLFAQYSAAAYCGKNNDAPAGTNITCTGNACPEVEKADATILYSFEDSGVGDVTGFLALDNTNKLIVLSFRGSRSIENWIGNLNFDLKEINDICSGCRGHDGFTSSWRSVADTLRQKVEDAVREHPDYRVVFTGHSLGGALATVAGADLRGDGYDIDVFSYGAPRVGNRAFAEFLTVQTGGTLYRITHTNDIVPRLPPREFGYSHSSPEYWIKSGTLPPVRRRDIVKIEGIDATGGNNQPNIPDIPAHLWYFGLIGTCL

SEQ ID NO: 6181 - protein, 269 aa, Thermomyces lanuginosus
EYSQDLFNQFNLFAQYSAAAYCGKNNDAPAGTKITCTGNACPEVEKADATILYSFEDSGVGDVTGFLALDNTNKLIVLSFRGSRSIENWIGNLNFDLKEINDICSGCRGHDGFTSSWRSVADTLRQKVEDAVREHPDYRVVFTGHSLGGALATVAGADLRGNGYDIDVFSYGAPRVGNRAFAEFLTVQTGGTLYRITHTNDIVPRLPPREFGYSHSSPEYWIKSGTLVPVRRRDIVKIEGIDATGGNNQPNIPDGPAHLWYFGLIGTCL

SEQ ID NO: 6182 - protein, 269 aa, Thermomyces lanuginosus
EVSQDLFNQFNLFAQYSAAAYCGKNNRAPAGTNITCTGNACPEVEKADATFLYSFEDSGVGDVTGFLALDNTNKLIVLSFRGSRSIENWIGNLNFELKEINDICSGCRGHAGFTSSWRSVADTLRQKVEDAVREHPDYRVVFTGHSLGGALATVAGADLRGNKYDIDVFSYGAPRVGNRAFAEFLTVQTGGTLYRITHTNDIVPRLPPREFGYSHSSPEYWIKSGTLVPVRRRDIVKIEGIDATGGNNQPNIPDIPAHLWYFGLIGTCL

SEQ ID NO: 6183 - protein, 269 aa, Thermomyces lanuginosus
EVSQDLFNQFNLFAQYSAAAYCQKNNSAPAGTNITCTGNACPEVEKADATFLYSFEDSGVGDVTGFLALDNTNKQIVLSFRGSRSIENWIGNLNFDLKEINDICSGCRGHDGFTSSWRSVADTLRQKVEAAVREHPDYRVVFTGHSLGGALATVAGADLRGNGYDIDVFSYGAPRVGNRAFAEFLTVQTGGTLYRITHTNDIVPRLPPREFGYSHSSPEYWIKSGTLVPVTRNDIVKIEGIDATGGNNQPNQPDIPAHLWYFGRIGTCL

SEQ ID NO: 6184 - protein, 269 aa, Thermomyces lanuginosus
EYSQDLFNQFNLFAQYSAAAYCGKNNDAPAGTKITCTGNACPEVEKADATILYSFEDSGVGDVTGFLALDNTNKLIVLSFRGSRSIENWIGNLNFDLKEINDICSGCRGHDGFTSSWRSVADTLRQKVEDAVREHPDYRVVFTGHSLGGALATVAGADLRGNGYDIDVFSYGAPRVGNRAFAEFLTVQTGGTLYRITHTNDIVPRLPPREFGYSHSSPEYWIKSGTLPPVRRRDIVKIEGIDATGGNNQPNIPDIPAHLWYFGLIGTCL

SEQ ID NO: 6185 - protein, 269 aa, Thermomyces lanuginosus
EYSQDLFNQFNLFAQYSAAAYCGKNNDAPAGTKITCTGNACPEVEKADATILYSFEDSGVGDVTGFLALDNTNKLIVLSFRGSRSIENWIGNLNFDLKEINDICSGCRGHDGFTSSWRSVADTLRQKVEDAVREHPDYRVVFTGHSLGGALATVAGADLRGNGYDIDVFSYGAPRVGNRAFAEFLTVQTGGTLYRITHTNDIVPRLPPREFGYSHSSPEYWIKFGTLVPVRRRDIVKIEGIDATGGNNQPNIPDIPAHLWYFGLIGTCL

SEQ ID NO: 6186 - protein, 269 aa, Thermomyces lanuginosus
EVSQDLFNQFNLFAQYSAAAYCQKNNDAPAGTNITCTGNACPEVEKADVTFLYSFEDSGVGDVTGFLALDNTNKQIVLSFRGSRSIENWIGNLNFDLKEINDICSGCRGHDGFTSSWRSVADTLRQKVEDAVREHPDYRVVFTGHSLGGALATVAWADLRGNGYDIDVFSYGAPRVGNRAFAEFLTTQDGGTLYRITHTNDIVPRLPPREFGYSHSSPEYWIKSGTLVPVTRNDIVKIEGIDATGGNNQPNIPDIPAHLWYFGLIGTCL

SEQ ID NO: 6187 - protein, 269 aa, Thermomyces lanuginosus
EVSQDLFNQFNLFAQYSAAAYCQANNDAPAGTNITCTGNACPEVEKADATFLYSFEDSGVGDVTGFLALDNTNKQIVLSFRGSRSIENWIGNLNFDLKEINDICSGCRGHDGFTSSWRSVADTLRQKVEAAVREHPDYRVVFTGHSLGGALATIAWADLRGNGYDIDVFSYGAPRVGNRAFAEFLTVQTGGTLYRITHTNDIVPRLPPREFGYSHSSPEYWIKSGTLVPVTRNDIVKIEGIDATGGNNQPNIPDIPAHLWYFGLIGTCL

SEQ ID NO: 6188 - protein, 269 aa, Thermomyces lanuginosus
EVSRDLFNQFNLFAQYSAAAYCGKNNDAPAGTNITCTGNACPEVEKADATFLYSFEDSGVGDVTGFLALDNTNKLIVLSFRGSRSIENWIGNLNFDLKEINDICSGCRGHDGFTSSWRSVADTLRQKVEDAVREHPDYRVVFAGHSLGGALATVAGADLRGDGYDIDVFSYGAPRVGNRAFAEFLTVQTGGTLYRITSTNDIVPRLPPREFGYSHSSPEYWIKSGTLVPVRRRDIVKIEGIDATGGNNQPNIPDIPAHLWYFGLIGTCL

SEQ ID NO: 6189 - protein, 269 aa, Thermomyces lanuginosus
EVSDDLFNQFKLFAQYSAAAYCGKNNNAPAGTNITCTGNACPEVEKADATFLYSFEDMGVGDVTGFLALDNTNKLIVLSFRGSRSIENWIGNLNFDLKEINDICSGCRGHDGFTSSWRSVADTLRQKVEDAVREHPDYRVVFTGHSLGGALATVAGADLRGNGYDIDVFSYGAPRVGNRAFAEFLTVQTGGTLYRITHTNDIVPRLPPREFGYSHSSPEYWIKSGTLVPVTRQDIVKIEGIDATGGNNQPNIPDITAHLWYFGLIGTCL

SEQ ID NO: 6190 - protein, 269 aa, Thermomyces lanuginosus
EVSQDLFNQFNLFAQYSKAAYCGKNNSAPAGTDITCTGNACPEVEKADATFLYSFEDSGVGDVTGFLALDNTNRDIVLSFRGSRSIENWIGNLNFDLKEINDICSGCRGHDGFTSSWRSVADTLRQKVEDAVREHPDYRVVFTGHSLGGALATVAGADLRGNGYDIDVFSYGAPRVGNRAFAEFLTVQDGGTLYRITHTNDIVPRLPPREFGYSHSSPEYWIKSGTLVPVTRNDIVKIEGIDATGGNNQPNIPDIPAHLWYFGLIGTCL

SEQ ID NO: 6191 - protein, 269 aa, Thermomyces lanuginosus
EVSQDLFNQFNLFAQYSAAAYCGKNNNAPAGTNITCTGNACPEVEKADATFLYSFRDSGVGDVTGFLALDNTNKLIVLSFRGSRSIENWIGNLNFDLKEINDICSGCRGHDGFTSSWFSVADTLRQKVEDAVREHPDYRVVFTGHSLGGALATVAGADLRGNGYDIDVFSYGAPRVGNRAFAEFLTVQTGGTLYRITHTNDIVPRLPPREFGYSHSSPEYWIKSGTLVPVRRRDIVKIEGIDAEGGNNQPNIPDIPAHLWYFGLIGTCL

SEQ ID NO: 6192 - protein, 269 aa, Thermomyces lanuginosus
EKSQDLFNQFNLFAQYSAAAYCGKNNDAPAGTKITCTGNACPEVEKADATLLYSFEDSGVGDVTGFLALDNTNKLIVLSFRGSRSIENWIGNLNFDLKEINDICSGCRGHDGFTSSWRSVADTLRQKVEDAVREHPDYRVVFTGHSLGGALATVAGADLRGNGYDIDVFSYGAPRVGNRAFAEFLTVQTGGTLYRITHTNDIVPRLPPREFGYSHSSPEYWIKPGTLVPVRRRDIVKIEGIDATGGNNQPNIPDIPAHLWYFGLIGTCL

SEQ ID NO: 6193 - protein, 269 aa, Thermomyces lanuginosus
EVSQDLFNQFNLFAQYSAAAYCGKNNDAPAGTNITCTGNACPEVEKADATFLYSFRNSGVGDVTGFLALDNTNKLIVLSFRGSRSIENWIGNLNFDLIEINDICSGCRGHDGFTSSWFSVADTLRQKVEDAVREHPDYRVVFTGHSLGGALATVAGADLRGNGYDIDVFSYGAPRVGNRAFAEFLTVQTGGTLYRITHTNDIVPRLPPREFGYSHSSPEYWIKSGTLVPVRRRDIVKIEGIDATGGNNQPNIPDIPAHLWYFGLIGTCL

SEQ ID NO: 6194 - protein, 269 aa, Thermomyces lanuginosus
EVSQDLFNQFNLFAQYSKAAYCKKNNDAPAGTNITCTGNACPEVEKADATFLYSFEDSGVGDVTGFLALDNTNKQIVLSFRGSRSIENWIGNLNFDLKEINDICSGCRGHDGFTSSWRSVADTLRQKVEDAVREHPDYRVVFTGHSLGGALATVAWADLRGNGYDIDVFSYGAPRVGNRAFAEFLTNQTGGTLYRITHTNDIVPRLPPREFGYSHSSPEYWIKSGTLVPVTRNDIVKIEGIDATGGNNQPNIPDIPAHLWYFGRIGTCL

SEQ ID NO: 6195 - protein, 269 aa, Thermomyces lanuginosus
EVSQDLFNQFNLFAQYSKAAYCLKNNDAPAGTNITCTGNACPEVEKADATFLYSFEDSGVGDVTGFLALDNTNKQIILSFRGSRSIENWIGNLNFDLKEINDICSGCRGHDGFTSSWRSVADTLRQKVEDAVREHPDYRVVFTGHSLGGALATVAWADLRGNGYDIDVFSYGAPRVGNRAFAEFLTQQTGGTLYRITHTNDIVPRLPPREFGYSHSSPEYWIKSGTLVPVTRNDIVKIEGIDATGGNNQPNIPDIPAHLWYFGLIGTCL

SEQ ID NO: 6196 - protein, 269 aa, Thermomyces lanuginosus
EYSQDLFNQFNLFAQYSAAAYCGKNNDAPAGTKITCTGNACPEVEKADATILYSFEDSGVGDVTGFLALDNTNKLIVLSFRGSRSIENWIGNLNFDLKEINDICSGCRGHDGFTSSWRSVADTLRQKVEDAVREHPDYRVVFTGHSLGGALATVAGADLRGNGYDIDVFSYGAPRVGNRAFAEFLTVQTGGTLYRITHTNDIVPRLPPREFGYSHSSPEYWIKSGTLVPVRRRDIVKIEGIDATGGNNQPNIPDIPVHLWYFGLIGTCL

SEQ ID NO: 6197 - protein, 269 aa, Thermomyces lanuginosus
EVSQDLFNQFNLFAQYSAAAYCGKNNDAPAGTNITCTGNACPEVEKADATFLYSFEDSGVGDVTGFLALDNTNKLIVLSFRGSRSIENWIGNLNFDLKEINDICSGCRGHDGFTSSWRSVADTLRQKVEDAVREHPDYRVVFAGHSLGGGLATVAGADLRGNGYDIDVFSYGAPRVGNRAFAEFLTVQTGGTLYRITHTNDIVPRLPPRQFGYSHSSPEYWIKSGTLVPVRRRDIVKIEGIDATGGNNQPNIPDAPAHLWYFGLIGTCL

SEQ ID NO: 6198 - protein, 269 aa, Thermomyces lanuginosus
EVSQDLFNQFNLFAQYSAAAYCGKNNDAPAGTQITCTGNACPEVEKADATFLYSFEDSGVGDVTGFLALDNTNKLIVLSFRGSRSIENWIGNLNFDLKEINDICSGCRGHDGFTSSWRSVADTLRQKVEDAVREHPDYRVVFTGHSLGGGLATVAGADLRGNGYDIDVFSYGAPRVGNRAFAEFLTVQTGGTLYRITHTNDIVPRLPPRQFGYSHSSPEYWIKSGTLVPVRRRDIVKIEGIDATGGNNQPNIPDAPAHLWYFGLIGTCL

SEQ ID NO: 6199 - protein, 269 aa, Thermomyces lanuginosus
EVSRDLFNQFNLFAQYSAAAYCGKNNDAPAGTNITCTGNACPEVEKADATILYSFEDSGVGDVTGFLALDNTNKLIVLSFRGSRSIENWIGNLNFDLKEINDICSGCRGHDGFTSSWRSVADTLRQKVEDAVREHPDYRVVFTGHSLGGALATVAGADLRGNGYDIDVFSYGAPRVGNRAFAEFLTVQTGGTLYRITSTNDIVPRLPPREFGYSHSSPEYWIKSGTLRPVRRRDIVKIEGIDATGGNNQPNIPDIPAHLWYFGLIGTCL

SEQ ID NO: 6200 - protein, 269 aa, Thermomyces lanuginosus
EKSQDLFNQFNLFAQYSAAAYCGKNNDAPAGTKITCTGNACPEVEKADATILYSFEDSGVGDVTGFLALDNTNKLIVLSFRGSRSIENWIGNLNFDLKEINDICSGCRGHDGFTSSWRSVADTLRQKVEDAVREHPDYRVVFTGHSLGGALATVAGADLRGNGYDIDVFSYGAPRVGNRAFAEFLTVQTGGTLYRITYTNDIVPRLPPREFGYSHSSPEYWIKSGTLVPVRRRDIVKIEGIDATGGNNQPNIPDIPAHLWYFGLIGTCL

SEQ ID NO: 6201 - protein, 269 aa, Thermomyces lanuginosus
EVSQDLFNQFNLFAQYSAAAYCQKNNDAPAGTNITCTGNACPEVFKADATFLYSFEDSGVGDVTGFLALDNTNKQIILSFRGSRSIENWIGNLNFDLKEINDICSGCRGHDGFTSSWRSVADTLRQKVEDAVREHPDYRVVFTGHSLGGALATVAWADLRGNGYDIDVFSYGAPRVGNRAFAEFLTTQTGGTLYRITHTNDIVPRLPPREFGYSHSSPEYWIKSGTLVPVTRNDIVKIEGIDATGGNNQPNIPDIPAHLWYFGLIGTCL

SEQ ID NO: 6202 - protein, 269 aa, Thermomyces lanuginosus
EYSQDLFNQFNLFAQYSAAAYCGKNNDAPAGTKITCTGNACPEVEKADATILYSFEDSGVGDVTGFLALDNTNKLIVLSFRGSRSIENWIGNLNFDLKEINDICSGCRGHDGFTSSWRSVADTLRQKVEDAVREHPDYRVVFTGHSLGGALATVAGADLRGNGYDIDVFSYGAPRVGNRAFAEFLTVQTGGTLYRITHTNDIVPRLPPREFGYSHSSPEYWIKSGTLVPRRRRDIVKIEGIDATGGNNQPNIPDIPAHLWYFGLIGTCL

SEQ ID NO: 6203 - protein, 269 aa, Synthetic construct
EVSQDLFNQFNLFAQYSAAAYCGKNNDAPAGTNITCTGNACPEVEKADATFLYSFEDSGVGDVTGFLALDNTDKLIVLSFRGSRTIKNWIANLKFALKEINDICSGCRGHDGFTSSWRSVADTLRQKVEDAVREHPDYRVVFTGHSLGGALATVAGADLRGNGYDIDVFSYGAPRVGNRAFAEFLTVQTGGTLYRITHTNDIVPRLPPREFGYSHSSPEYWIKSGTLVPVTRNDIVKIEGIDATGGNNQPNIPDIPAHLWYFGLIGTCL

SEQ ID NO: 6204 - protein, 269 aa, Thermomyces lanuginosus
EVSQDLFNQFNLFAQYSAAAYCGKNNDAPAGTQITCTGNACPEVEKADATFLYSFEDSGVGDVTGFLALDNTNKLIVLSFRGSRSIENWIGNLNFDLKEINDICSGCRGHDGFTSSWRSVADTLRQKVEDAVREHPDYRVVFTGHSLGGALATVARADLRGNGYDIDVFSYGAPRWGNRAFAEFLTVQTGGTLYRITHTNDIVPRLPPREFGYSHSSPEYWIKSGTLVPVRRRDIVKIEGIDATGGNNQPNIPDIIAHLWYFGLIGTCL

SEQ ID NO: 6205 - protein, 269 aa, Thermomyces lanuginosus
EVSQDLFNQFNLFAQYSAAAYCQANNDAPAGTNITCTGNACPEVEKADATFLYSFEDSGVGDVTGFLALDNTNKQIVLSFRGSRSIENWIGNLNFDLKEINDICSGCRGHDGFTSSWRSVADTLRQKVEDAVREHPDYRVVFTGHSLGGALATIAWADLRGNGYDIDVFSYGAPRVGNRAFAEFLTNQTGGTLYRITHTNDIVPRLPPREFGYSHSSPEYWIKSGTLVPVTRNDIVKIEGIDATGGNNQPNIPDIPAHLWYFGLIGTCL

SEQ ID NO: 6206 - protein, 269 aa, Thermomyces lanuginosus
EKSQDLFNQFNLFAQYSAAAYCGKNNDAPAGTKITCTGNACPEVEKADATVLYSFEDSGVGDVTGFLALDNTNKLIVLSFRGSRSIENWIGNLNFDLKEINDICSGCRGHDGFTSSWRSVADTLRQKVEDAVREHPDYRVVFTGHSLGGALATVAGADLRGNGYDIDVFSYGAPRVGNRAFAEFLTVQTGGTLYRITHTNDIVPRLPPREFGYSHSSPEYWIKSGTLVPVRRRDIVKIEGIDATGGNNQPNIPDGPAHLWYFGLIGTCL

SEQ ID NO: 6207 - protein, 269 aa, Thermomyces lanuginosus
EVSQDLFNQFNLFAQYSAAAYCGKNNNAPAGTNITCTGNACPEVEKADATFLYSFRDSGVGDVTGFLALDNTNKLIVLSFRGSRSIENWIGNLNFDLIEINDICSGCRGHDGFTSSWFSVADTLRQKVEDAVREHPDYRVVFTGHSLGGALATVAGADLRGNGYDIDVFSYGAPRVGNRAFAEFLTVQTGGTLYRITHTNDIVPRLPPREFGYSHSSPEYWIKSGTLVPVRRRDIVKIEGIDATGGNNQPNIPDIPAHLWYFGLIGTCL

SEQ ID NO: 6208 - protein, 269 aa, Thermomyces lanuginosus
EVSQDLFNQFNLFAQYSAAAYCGKNNDAPAGTQITCTGNACPEVEKADATFLYSFEDSGVGDVTGFLALDNTNKLIVLSFRGSRSIENWITNLRFDLKEINDICSGCRGHDGFTSSWRSVADTLRQKVEDAVREHPDYRVVFTGHSLGGALATVAGADLRGNGYDIDVFSYGAPRVGNRAFAEFLTVQTGGTLYRITHTNDIVPRLPPREFGYSHSSPEYWIKSGTLVPVRRRDIVKIEGIDATGGNNQPNIPSIPAHLWYFGLIGTCL

SEQ ID NO: 6209 - protein, 269 aa, Thermomyces lanuginosus
EVSQDLFNQFNLFAQYSAAAYCGKNNDAPAGTNITCTGNACPEVEKADATTLYSFEDSGVGDVTGFLALDNTNKGIVLSFRGSRSIENWIQNLNFDLKEINDICSGCRGHDGFTSSWRSVADTLRQKVEDAVREHPDYRVVFTGHSLGGALATVAGADLRGNGYDIDVFSYGAPRVGNRAFAEFLTHQTGGTLYRITHTNDIVPRLPPREFGYSHSSPEYWIKSGTLVPVTRNDIVKIEGIDATGGNNQPNQPDIPAHLWYFGRIGTCL

SEQ ID NO: 6210 - protein, 269 aa, Thermomyces lanuginosus
EVSQDLFNQFNLFAQYSKAAYCQKNNDAPAGTNITCTGNACPEVFKADVTFLYSFEDSGVGDVTGFLALDNTNKQIVLSFRGSRSIENWIGNLNFDLKEINDICSGCRGHDGFTSSWRSVADTLRQKVEDAVREHPDYRVVFTGHSLGGALATVAGADLRGNGYDIDVFSYGAPRVGNRAFAEFLTVQDGGTLYRITHTNDIVPRLPPREFGYSHSSPEYWIKSGTLVPVTRNDIVKIEGIDATGGNNQPNIPDIPAHLWYFGLIGTCL

SEQ ID NO: 6211 - protein, 269 aa, Thermomyces lanuginosus
EVSQDLFNQFNLFAQYSAAAYCKKNNSAPAGTNITCTGNACPEVEKADATFLYSFEDSGVGDVTGFLALDNTNKRIVLSFRGSRSIENWIGNLNFDLKEINDICSGCRGHDGFTSSWRSVADTLRQKVEAAVREHPDYRVVFTGHSLGGALATVAGADLRGNGYDIDVFSYGAPRVGNRAFAEFLTTQTGGTLYRITHTNDIVPRLPPREFGYSHSSPEYWIKSGTLVPVTRNDIVKIEGIDATGGNNQPNQPDIPAHLWYFGLIGTCL

SEQ ID NO: 6212 - protein, 269 aa, Thermomyces lanuginosus
EVSQDLFNQFNLFAQYSAAAYCQKNNDAPAGTNITCTGNACPEVFKADVTFLYSFEDSGVGDVTGFLALDNTNKQIVLSFRGSRSIENWIGNLNFDLKEINDICSGCRGHDGFTSSWRSVADTLRQKVEDAVREHPDYRVVFTGHSLGGALATVAWADLRGNGYDIDVFSYGAPRVGNRAFAEFLTTQTGGTLYRITHTNDIVPRLPPREFGYSHSSPEYWIKSGTLVPVTRNDIVKIEGIDATGGNNQPNIPDIPAHLWYFGLIGTCL

SEQ ID NO: 6213 - protein, 269 aa, Thermomyces lanuginosus
EVSQDLFNQFNLFAQYSKAAYCKKNNDAPAGTNITCTGNACPEVEKADATFLYSFEDSGVGDVTGFLALDNTNKRIILSFRGSRSIENWIGNLNFDLKEINDICSGCRGHDGFTSSWRSVADTLRQKVEAAVREHPDYRVVFTGHSLGGALATIAGADLRGNGYDIDVFSYGAPRVGNRAFAEFLTVQTGGTLYRITHTNDIVPRLPPREFGYSHSSPEYWIKSGTLVPVTRNDIVKIEGIDATGGNNQPNIPDIPAHLWYFGLIGTCL

SEQ ID NO: 6214 - protein, 269 aa, Thermomyces lanuginosus
EYSQDLFNQFNLFAQYSAAAYCGKNNDAPAGTKITCTGNACPEVEKADATLLYSFEDSGVGDVTGFLALDNTNKLIVLSFRGSRSIENWIGNLNFDLKEINDICSGCRGHDGFTSSWRSVADTLRQKVEDAVREHPDYRVVFTGHSLGGALATVAGADLRGNGYDIDVFSYGAPRVGNRAFAEFLTVQTGGTLYRITHTNDIVPRLPPREFGYSHSSPEYWIKSGTLVPVRRRDIVKIEGIDATGGNNQPNIPDIPIHLWYFGLIGTCL

SEQ ID NO: 6215 - protein, 269 aa, Thermomyces lanuginosus
EVSQDLFNQFNLFAQYSAAAYCGKNNDAPAGTNITCTGNACPEVEKADATFLYSFEDTGKGDVTGFLALDNTNKLIVLSFRGSRSIENWIGNLNFDLKEINDICSGCRGHDGFTSSWRSVADTLRQKVEDAVREHPDYRVVFTGHSLGGGLATVAGADLRGNGYDIDVFSYGAPRVGNRAFAEFLTVQTGGTLYRITHTNDIVPRLPPREFGYSHSSPEYWIKSGTLVPVRRIGIVKIEGIDATGGNNQPNIPDIPAHLWYFGLIGTCL

SEQ ID NO: 6216 - protein, 269 aa, Thermomyces lanuginosus
EYSQDLFNQFNLFAQYSAAAYCGKNNDAPAGTKITCTGNACPEVEKADATILYSFEDSGVGDVTGFLALDNTNKLIVLSFRGSRSIENWIGNLNFDLKEINDICSGCRGHDGFTSSWRSVADTLRQKVEDAVREHPDYRVVFTGHSLGGGLATVAGADLRGNGYDIDVFSYGAPRVGNRAFAEFLTVQTGGTLYRITHTNDIVPRLPPREFGYSHSSPEYWIKSGTLVPVRRRDIVKIEGIDATGGNNQPNIPDIPAHLWYFGLIGTCL

SEQ ID NO: 6217 - protein, 269 aa, Thermomyces lanuginosus
EVSRDLFNQFNLFAQYSAAAYCGKNNDAPAGTNITCTGNACPEVEKADATFLYSFEDSGVGDVTGFLALDNTNKLIVLSFRGSRSIENWIGNLNFDLKEINDICSGCRGHDGFTSSWRSVADTLRQKVEDAVREHPDYRVVFTGHSLGGALATVAGADLRGDGYDIDVFSYGAPRVGNRAFAEFLTVQTGGTLYRITSTNDIVPRLPPREFGYSHSSPEYWIKSGTLRPVRRRDIVKIEGIDATGGNNQPNIPDIPAHLWYFGLIGTCL

SEQ ID NO: 6218 - protein, 269 aa, Thermomyces lanuginosus
EVSQDLFNQFNLFAQYSAAAYCGKNNEAPAGTNITCTGNACPEVEKADATFLYSFKDMGVGDVTGFLALDNTNKLIVLSFRGSRSIENWIGNLNFDLKEINDICSGCRGHDGFTSSWRSVADTLRQKVEDAVREHPDYRVVFTGHSLGGALATVAGADLRGNGYDIDVFSYGAPRVGNRAFAEFLTTQTGGTLYRITHTNDIVPRLPPREFGYSHSSPEYWIKSGTLVPVTRNDIVKIEGIDATGGNNQPNQPDIPAHLWYFGRIGTCL

SEQ ID NO: 6219 - protein, 269 aa, Thermomyces lanuginosus
EVSQDLFNQFNLFAQYSAAAYCKANNDAPAGTNITCTGNACPEVEKADATFLYSFEDSGVGDVTGFLALDNTNKQIVLSFRGSRSIENWIGNLNFDLKEINDICSGCRGHDGFTSSWRSVADTLRQKVEDAVREHPDYRVVFTGHSLGGALATIAWADLRGNGYDIDVFSYGAPRVGNRAFAEFLTQQTGGTLYRITHTNDIVPRLPPREFGYSHSSPEYWIKSGTLVPVTRNDIVKIEGIDATGGNNQPNIPDIPAHLWYFGLIGTCL

SEQ ID NO: 6220 - protein, 269 aa, Thermomyces lanuginosus
EVSQDLFNQFNLFAQYSAAAYCGKNNDAPAGTNITCTGNACPEVEKADATFLYSFEDSGVGDVTGFLALDNTNKRIVLSFRGSRSIENWIGNLNFDLKEINDICSGCRGHDGFTSSWRSVADTLRQKVEAAVREHPDYRVVFTGHSLGGALATIAWADLRGNGYDIDVFSYGAPRVGNRAFAEFLTNQTGGTLYRITHTNDIVPRLPPREFGYSHSSPEYWIKSGTLVPVTRNDIVKIEGIDATGGNNQPNIPDIPAHLWYFGRIGTCL

SEQ ID NO: 6221 - protein, 269 aa, Thermomyces lanuginosus
EVSQDLFNQFNLFAQYSAAAYCGKNNDAPAGTNITCTGNICPEVEKADATFLYSFRDSGVGDVTGFLALDNTNKLIVLSFRGSRSIENWIGNLNFDLKEINDICSGCRGHDGFTSSWFSVADTLRQKVEDAVREHPDYRVVFTGHSLGGALATVAGADLRGNGYDIDVFSYGAPRVGNRAFAEFLTVQTGGTLYRITHTNDIVPRLPPREFGYSHSSPEYWIKSGTLVPVRRRDIVKIEGIDAEGGNNQPNIPDIPAHLWYFGLIGTCL

SEQ ID NO: 6222 - protein, 269 aa, Thermomyces lanuginosus
EVSQDLFNQFNLFAQYSAAAYCGKNNDAPAGTNITCTGNACPEVEKADATFLYSFRDSGVGDVTGFLALDNTNKLIVLSFRGSRSIENWIGNLNFDLKEINDICSGCRGHDGFTSSWFSVADTLRQKVEDAVREHPDYRVVFTGHSLGGALATVAGADLRGNGYDIDVFSYGAPRVGNRAFAEFLTVQTGGTLYRITHTNDIVPRLPPREFGYSHSSPEFWIKSGTLVPVRRRDIVKIEGIDAEGGNNQPNIPDIPAHLWYFGLIGTCL

SEQ ID NO: 6223 - protein, 269 aa, Thermomyces lanuginosus
EKSQDLFNQFNLFAQYSAAAYCGKNNDAPAGTKITCTGNACPEVEKADATLLYSFEDSGVGDVTGFLALDNTNKLIVLSFRGSRSIENWIGNLNFDLKEINDICSGCRGHDGFTSSWRSVADTLRQKVEDAVREHPDYRVVFTGHSLGGALATVAGADLRGNGYDIDVFSYGAPRVGNRAFAEFLTVQTGGTLYRITSTNDIVPRLPPREFGYSHSSPEYWIKSGTLVPVRRRDIVKIEGIDATGGNNQPNIPDIPAHLWYFGLIGTCL

SEQ ID NO: 6224 - protein, 269 aa, Synthetic construct
EVSQDLFNQFNLFAQYSAAAYCGKNNDAPAGTNITCTGNACPEVEKADATFLYSFEGSGVGDVTGFLALDNTNKLIVLSFRGSRSIENWIGNLKFLLKEINDICSGCRGHDGFTSSWRSVADTLRQKVEDAVREHPDYRVVFTGHSLGGALATVAGADLRGNGYDIDVFSYGAPRVGNRAFAEFLTVQTGGTLYRITHRNDIVPRLPPAEFGYSHSSPEYWIKSGTLVPVTRNDIVKIEGIDATGGNNRPNIPDIPAHLWYFGLIGTCL

SEQ ID NO: 6225 - protein, 269 aa, Thermomyces lanuginosus
EVSQDLFNQFNLFAQYSAAAYCGKNNDAPAGTNITCTGNACPEVEKADATFLYSFEDSGGGAVTGFLALDNTNKLIVLSFRGTKSIENWIGNLNFWLKEINDICSGCRGHDGFTSSWRSVADTLRQKVEDAVREHPDYRVVFTGHSLGGALATVAGADLRGNGYDIDVFSYGAPRVGNRAFAEFLTVQTGGTLYRITHTNDIVPRLPPREFGYSHSSPEYWIKSGTLVPVTRNDIVKIEGIDATGGNNQPNIPDIPAHLWYFGLIDTCL

SEQ ID NO: 6226 - protein, 269 aa, Thermomyces lanuginosus
EVSQDLFNQFNLFAQYSAAAYCKKNNDAPAGTNITCTGNACPEVEKADATFLYSFKDSGVGDVTGFLALDNTNKRIVLSFRGSRSIENWIGNLNFDLKEINDICSGCRGHDGFTSSWRSVADTLRQKVEAAVREHPDYRVVFTGHSLGGALATVAGADLRGNGYDIDVFSYGAPRVGNRAFAEFLTVQQGGTLYRITHTNDIVPRLPPREFGYSHSSPEYWIKSGTLVPVTRNDIVKIEGIDATGGNNQPNIPDIPAHLWYFGRIGTCL

SEQ ID NO: 6227 - protein, 269 aa, Thermomyces lanuginosus
EVSQDLFNQFNLFAQYSKAAYCGKNNDAPAGTNITCTGNACPEVEKADVTFLYSFEDSGVGDVTGFLALDNTNKQIVLSFRGSRSIENWIGNLNFDLKEINDICSGCRGHDGFTSSWRSVADTLRQKVEDAVREHPDYRVVFTGHSLGGALATVAWADLRGNGYDIDVFSYGAPRVGNRAFAEFLTTQDGGTLYRITHTNDIVPRLPPREFGYSHSSPEYWIKSGTLVPVTRNDIVKIEGIDATGGNNQPNIPDIPAHLWYFGLIGTCL

SEQ ID NO: 6228 - protein, 269 aa, Thermomyces lanuginosus
EVSQDLFNQFNLFAQYSAAAYCGKNNRAPAGTNITCTGNACPEVEKADATFLYSFEDSGVGDVTGFLALDNTNKLIVLSFRGSRSIENWIANLNFDLKEINDICSGCRGHGGFTSSWRSVADTLRQKVEDAVREHPDYRVVFTGHSLGGALATVAGADLRGNGYDIDVFSYGAPRVGNRAFAEFLTVQTGGTLYRITHTNDIVPRLPPREFGYSHPSPEYWIKSGTGVPVTRNDIVKIEGIDATGGNNQPNIPDITAHLWYFGLIGTCL

SEQ ID NO: 6229 - protein, 269 aa, Thermomyces lanuginosus
EVSDDLFNQFKLFAQYSAAAYCGKNNSAPAGTNITCTGNACPEVEKADATFLYSFEDSGVGDVTGFLALDNTNKLIVLSFRGSRSIENWFGNLNFDLKEINDICSGCRGHDGFTSSWRSVADTLRQKVEDAVREHPDYRVVFTGHSLGGALATVAGADLRGNGYDIDVFSYGAPRVGNRAFAEFLTVQTGGTLYRITHTNDIVPRLPPREFGYSHSSPEYWIKSGTLVPVTRQDIVKIEGIDATGGNNQPNIPDITAHLWYFGLIGTCL

SEQ ID NO: 6230 - protein, 269 aa, Thermomyces lanuginosus
EVSQDLFNQFNLFAQYSAAAYCGKNNDAPAGTNITCTGNACPEVEKADATFLYSFEDMGVGDVTGFLALDNTNKLIVLSFRGSRSIENWIGNLNFDLKEINDICSGCRGHDGFTSSWRSVADTLRQKVEAAVREHPDYRVVFTGHSLGGALATVAGADLRGNPYDIDVFSYGAPRVGNRAFAEFLTVQTGGTLYRITHTNDIVPRLPPREFGYSHSSPEYWIKSGTMVPVTRQDIVKIEGIDATGGNNQPNIPDIPAHLWYFGRIGTCL

SEQ ID NO: 6231 - protein, 269 aa, Thermomyces lanuginosus
EVSQDLFNQFNLFAQYSAAAYCGKNNDAPAGTNITCTGNACPEVEKADATLLYSFRNSGVGDVTGFLALDNTNKLIVLSFRGSRSIENWIGNLNFDLKEINDICSGCRGHDGFTSSWFSVADTLRQKVEDAVREHPDYRVVFTGHSLGGALATVAGADLRGNGYDIDVFSYGAPRVGNRAFAEFLTVQTGGTLYRITHTNDIVPRLPPREFGYSHSSPEYWIKSGTLVPVRRRDIVKIEGIDATGGNNQPNIPDIPAHLWYFGLIGTCL

SEQ ID NO: 6232 - protein, 269 aa, Thermomyces lanuginosus
EVSQDLFNQFNLFAQYSKAAYCKKNNDAPAGTNITCTGNACPEVEKADATFLYSFEDSGVGDVTGFLALDNTNKQIILSFRGSRSIENWIGNLNFDLKEINDICSGCRGHDGFTSSWRSVADTLRQKVEDAVREHPDYRVVFTGHSLGGALATVAWADLRGNGYDIDVFSYGAPRVGNRAFAEFLTQQTGGTLYRITHTNDIVPRLPPREFGYSHSSPEYWIKSGTLVPVTRNDIVKIEGIDATGGNNQPNIPDIPAHLWYFGLIGTCL

SEQ ID NO: 6233 - protein, 269 aa, Thermomyces lanuginosus
EYSQDLFNQFNLFAQYSAAAYCGKNNDAPAGTKITCTGNACPEVEKADATILYSFEDSGVGDVTGFLALDNTNKLIVLSFRGSRSIENWIGNLNFDLKEINDICSGCRGHDGFTSSWRSVADTLRQKVEDAVREHPDYRVVFTGHSLGGALATVAGADLRGNGYDIDVFSYGAPRVGNRAFAEFLTVQTGGTLYRITLTNDIVPRLPPREFGYSHSSPEYWIKSGTLVPVRRRDIVKIEGIDATGGNNQPNIPDIPAHLWYFGLIGTCL

SEQ ID NO: 6234 - protein, 269 aa, Thermomyces lanuginosus
EVSQDLFNQFNLFAQYSAAAYCGKNNDAPAGTNITCTGNACPEVEKADTTFLYSFRDSGVGDVTGFLALDNTNKLIVLSFRGSRSIKNWIGNLNFDLKSINDICSGCRGHDGFTSSWRSVADTLRQKVEDAVREHPDYRVVFTGHSLGGALATVAGADLRGNGYDIDVFSYGAPRVGNRAFAEFLTVQTGGTLYRITHTNDIVPRLPPREFGYSHSSPEYWIKSGTLVPVRRRDIVKIEGIDATGGNNQPNIPDIPAHLWYFGLIGTCL

SEQ ID NO: 6235 - protein, 269 aa, Thermomyces lanuginosus
EKSQDLFNQFNLFAQYSAAAYCGKNNDAPAGTKITCTGNACPEVEKADATVLYSFEDSGVGDVTGFLALDNTNKLIVLSFRGSRSIENWIGNLNFDLKEINDICSGCRGHDGFTSSWRSVADTLRQKVEDAVREHPDYRVVFTGHSLGGALATVAGADLRGNGYDIDVFSYGAPRVGNRAFAEFLTVQTGGTLYRITHTNDIVPRLPPREFGYSHSSPEYWIKSGTLVPVRRRDIVKIEGIDATGGNNQPNIPDIPIHLWYFGLIGTCL

SEQ ID NO: 6236 - protein, 269 aa, Thermomyces lanuginosus
EVSQDLFNQFNLFAQYSAAAYCQKNNDAPAGTNITCTGNACPEVEKADATFLYSFKDSGVGDVTGFLALDNTNKQIVLSFRGSRSIENWIGNLNFDLKEINDICSGCRGHDGFTSSWRSVADTLRQKVEAAVREHPDYRVVFTGHSLGGALATIAGADLRGNGYDIDVFSYGAPRVGNRAFAEFLTVQTGGTLYRITHTNDIVPRLPPREFGYSHSSPEYWIKSGTLVPVTRNDIVKIEGIDATGGNNQPNIPDIPAHLWYFGRIGTCL

SEQ ID NO: 6237 - protein, 269 aa, Thermomyces lanuginosus
EVSQDLFNQFNLFAQYSAAAYCGKNNDAPAGTNITCTGNACPEVEKADATFLYSFEDSGVGDVTGFLALDNTNKLIVLSFRGSRSIENWIGNLNFDLKEINDICSGCRGHDGFTSSWRSVADTLRQKVEDAVREHPDYRVVFTGHSLGGALATVAGADLRGNGYDIDVFSYGAPRVGNRAFAEFLTVQTGGTLYRITHTNDIVPRLPPREFGYSHSSPEYWIKSGTLVPVTRNDIVKIEGIDATGGNGGTLGLDIPAHLWYFGLIGTCL

SEQ ID NO: 6238 - protein, 269 aa, Thermomyces lanuginosus
EVSQDLFNQFNLFAQYSKAAYCKKNNDAPAGTNITCTGNACPEVEKADATFLYSFEDSGVGDVTGFLALDNTNKQIVLSFRGSRSIENWIGNLNFDLKEINDICSGCRGHDGFTSSWRSVADTLRQKVEAAVREHPDYRVVFTGHSLGGALATVAWADLRGNGYDIDVFSYGAPRVGNRAFAEFLTNQTGGTLYRITHTNDIVPRLPPREFGYSHSSPEYWIKSGTLVPVTRNDIVKIEGIDATGGNNQPNIPDIPAHLWYFGLIGTCL

SEQ ID NO: 6239 - protein, 269 aa, Thermomyces lanuginosus
EVSQDLFNQFNLFAQYSAAAYCGKNNDAPAGTQITCTANACPEVEKADATFLYSFEDSGVGDVTGFLALDNTNKLIVLSFRGSRSIENWIGNLNFDLKEINDICSGCRGHDGFTSSWRSVADTLRQKVEDAVREHPDYRVVFTGHSLGGALATVAGADLRGNAYDIDVFSYGAPRVGNRAFAEFLTVQTGGTLYRITHTNDIVPRLPPREFGYSHSSPEYWIKSGTLVPVRRRDIVKIEGIDATGGNNQPNIPIIPAHLWYFGLIGTCL

SEQ ID NO: 6240 - protein, 269 aa, Thermomyces lanuginosus
EVSQDLFNQFNLFAQYSAAAYCGKNNDAPAGTNITCTGNACPEVEKADATFLYSFEDMGVGDVTGFLALDNTNKLIVLSFRGSRSIENWIGNLNFDLKEINDICSGCRGHDGFTSSWRSVADTLRQKVEAAVREHPQYRVVFTGHSLGGALATVAGADLRGNPYDIDVFSYGAPRVGNRAFAEFLTVQTGGTLYRITHTNDIVPRLPPREFGYSHSSPEYWIKSGTMVPVTRNDIVKIEGIDATGGNNQPNIPDIPAHLWYFGRIGTCL

SEQ ID NO: 6241 - protein, 269 aa, Thermomyces lanuginosus
EVSQDLFNQFNLFAQYSAAAYCGKNNNAPAGTNITCTGNACPEVEKADATILYSFRDSGVGDVTGFLALDNTNKLIVLSFRGSRSIENWIGNLNFDLKEINDICSGCRGHDGFTSSWFSVADTLRQKVEDAVREHPDYRVVFTGHSLGGALATVAGADLRGNGYDIDVFSYGAPRVGNRAFAEFLTVQTGGTLYRITHTNDIVPRLPPREFGYSHSSPEYWIKSGTLVPVRRRDIVKIEGIDATGGNNQPNIPDIPAHLWYFGLIGTCL

SEQ ID NO: 6242 - protein, 269 aa, Thermomyces lanuginosus
EVSQDLFNQFNLFAQYSKAAYCKANNDAPAGTNITCTGNACPEVEKADATFLYSFEDSGVGDVTGFLALDNTNKRIVLSFRGSRSIENWIGNLNFDLKEINDICSGCRGHDGFTSSWRSVADTLRQKVEAAVREHPDYRVVFTGHSLGGALATVAGADLRGNGYDIDVFSYGAPRVGNRAFAEFLTNQTGGTLYRITHTNDIVPRLPPREFGYSHSSPEYWIKSGTLVPVTRNDIVKIEGIDATGGNNQPNIPDIPAHLWYFGLIGTCL

SEQ ID NO: 6243 - protein, 269 aa, Thermomyces lanuginosus
EVSQDLFNQFNLFAQYSAAAYCGKNNDAPAGTQITCTGNACPEVEKADATFLYSFEDSGVGDVTGFLALDNTNKLIVLSFRGSRSIENWITNLNFDLKEINDICSGCRGHDGFTSSWRSVADTLRQKVEDAVREHPDYRVVFTGHSLGGALATVAGADLRGNKYDIDVFSYGAPRVGNRAFAEFLTVQTGGTLYRITHTNDIVPRLPPREFGYSHSSPEYWIKSGTLVPVRRRDIVKIEGIDATGGNNQPNIPGIPAHLWYFGLIGTCL

SEQ ID NO: 6244 - protein, 269 aa, Thermomyces lanuginosus
EVSQDLFNQFNLFAQYSAAAYCGKNNDAPAGTNITCTGNACPEVEKADATFLYSFEDSGVGDVTGFLALDNTNKQIVLSFRGSRSIENWIGNLNFDLKEINDICSGCRGHAGFTSSWRSVADTLRQKVEAAVREHPDYRVVFTGHSLGGALATIAWADLRGNGYDIDVFSYGAPRVGNRAFAEFLTVQQGGTLYRITHTNDIVPRLPPREFGYSHSSPEYWIKSGTLVPVTRNDIVKIEGIDATGGNNQPNIPDIPAHLWYFGLIGTCL

SEQ ID NO: 6245 - protein, 269 aa, Thermomyces lanuginosus
EVSQDLFNQFNLFAQYSAAAYCGKNNEAPAGTNITCTGNACPEVEKAQATFLYSFEDSGVGDVTGFLALDNTNKLIVLSFRGSRSIENWIGNLNFDLKEINDICSGCRGHDGFTSSWRSVADTLRQKVEDAVREHPDQRVVFTGHSLGGALATVAGADLRGNPYDIDVFSYGAPRVGNRAFAEFLTVQTGGTLYRITHTNDIVPRLPPREFGYSHSSPEYWIKSGTMVPVTRNDIVKIEGIDATGGNNQPNIPDIPAHLWYFGRIGTCL

SEQ ID NO: 6246 - protein, 269 aa, Thermomyces lanuginosus
EVSQDLFNQFNLFAQYSAAAYCGKNNDAPAGTNITCTGNICPEVEKADATFLYSFRNSGVGDVTGFLALDNTNKLIVLSFRGSRSIENWIGNLNFDLKEINDICSGCRGHDGFTSSWFSVADTLRQKVEDAVREHPDYRVVFTGHSLGGALATVAGADLRGNGYDIDVFSYGAPRVGNRAFAEFLTVQTGGTLYRITHTNDIVPRLPPREFGYSHSSPEYWIKSGTLVPVRRRDIVKIEGIDATGGNNQPNIPDIPAHLWYFGLIGTCL

SEQ ID NO: 6247 - protein, 269 aa, Thermomyces lanuginosus
EVSQDLFNQFNLFAQYSAAAYCQANNDAPAGTNITCTGNACPEVEKADATFLYSFEDSGVGDVTGFLALDNTNKLIILSFRGSRSIENWIGNLNFDLKEINDICSGCRGHDGFTSSWRSVADTLRQKVEAAVREHPDYRVVFTGHSLGGALATVAWADLRGNGYDIDVFSYGAPRVGNRAFAEFLTNQTGGTLYRITHTNDIVPRLPPREFGYSHSSPEYWIKSGTLVPVTRNDIVKIEGIDATGGNNQPNIPDIPAHLWYFGLIGTCL

SEQ ID NO: 6248 - protein, 269 aa, Thermomyces lanuginosus
EVSQDLFNQFNLFAQYSAAAYCGKNNDAPAGTNITCTGNACPEVEKADATILYSFEDSGVGDVTGFLALDNTNKLIVLSFRGSRSIENWIGNLNFELKEINDICSGCRGHAGFTSSWRSVADTLRQKVEDAVREHPDYRVVFTGHSLGGALATVAGADLRGNGYDIDVFSYGAPRVGNRAFAEFLTVQTGGTLYRITHTNDIVPRLPPREFGYSHSSPEYWIKSGTLVPVRRRDIVKIEGIDATGGNNQPNIPSIPAHLWYFGLIGTCL

SEQ ID NO: 6249 - protein, 269 aa, Thermomyces lanuginosus
EVSDDLFNQFKLFAQYSAAAYCGKNNSAPAGTNITCTGNACPEVEKADATFLYSFEDMGVGDVTGFLALDNTNKLIVLSFRGSRSIENWIGNLNFDLKEINDICSGCRGHDGFTSSWRSVADTLRQKVEDAVREHPDYRVVFTGHSLGGALATVAGADLRGNGYDIDVFSYGAPRVGNRAFAEFLTVQTGGTLYRITHTNDIVPRLPPREFGYSHSSPEYWIKSGTLVPVTRQDIVKIEGIDATGGNNQPNIPDITAHLWYFGLIGTCL

SEQ ID NO: 6250 - protein, 269 aa, Thermomyces lanuginosus
EVSQDLFNQFNLFAQYSAAAYCGKNNQAPAGTNITCTGNACPEVEKADATTLYSFEDSGVGDVTGFLALDNTNKLIVLSFRGSRSIENWIQNLNFDLKEINDICSGCRGHDGFTSSWRSVADTLRQKVEAAVREHPDYRVVFTGHSLGGALATVAGADLRGNGYDIDVFSYGAPRVGNRAFAEFLTVQTGGTLYRITHTNDIVPRLPPREFGYSHSSPEYWIKSGTLVPVTRNDIVKIEGIDATGGNNQPNQPDIPAHLWYFGRIGTCL

SEQ ID NO: 6251 - protein, 269 aa, Thermomyces lanuginosus
EVSQDLFNQFNLFAQYSAAAYCGKNNDAPAGTNITCTGNACPEVEKADATFLYSFEDSGVGDVTGFLALDNTNKLIVLSFRGSRSIENWIANLNFDLKKINDICSGCRGHDGFTSSWRSVADTLRQKVEDAVREHPDYRVVFTGHSLGGALATVAGADLRGNGYDIDVFSYGAPRVGNRAFAEFLTVQGGGTLYRITHTNDIVPRLPPREFGYSHSSPEYWIKSGTLVPVRRRDIVKIEGIDATGGNNRPNIPDIPAHLWYFGLIGTCL

SEQ ID NO: 6252 - protein, 269 aa, Thermomyces lanuginosus
EVSQDLFNQFNLFAQYSAAAYCGKNNDAPAGTNITCTGNACPKVEKADATFLYSFADSGVGDVTGFLALDNTNKLIVLSFRGSRSIKNWIGNLNFDLKEINDICSGCRGHDGFTSSWRSVADTLRQKVEDAVREHPDYRVVFTGHSLGGALATVAGADLRGNGYDIDVFSYGAPRVGNRAFAEFLTVQTGGTLYRITHTNDIVPRLPPREFGYSHSSPEYWIKSGTLVPVRRRKIVKIEGIDATGGNNQPNIPDIPAHLWYFGLIGTCL

SEQ ID NO: 6253 - protein, 269 aa, Thermomyces lanuginosus
EVSRDLFNQFNLFAQYSAAAYCGKNNDAPAGTNITCTGNACPEVEKADATFLYSFEDSGVGDVTGFLALDNTNKLIVLSFRGSRSIENWIGNLNFDLKEINDICSGCRGHDGFTSSWRSVADTLRQKVEDAVREHPDYRVVFTGHSLGGALATVAGADLRGDGYDIDVFSYGAPRVGNRAFAEFLTVQTGGTLYRITSTNDIVPRLPPREFGYSHSSPEYWIKSGTLPPVRRRDIVKIEGIDATGGNNQPNIPDIPAHLWYFGLIGTCL

SEQ ID NO: 6254 - protein, 269 aa, Thermomyces lanuginosus
EVSQDLFNQFNLFAQYSAAAYCKKNNDAPAGTNITCTGNACPEVEKADATFLYSFKDSGVGDVTGFLALDNTNKRIVLSFRGSRSIENWIGNLNFDLKEINDICSGCRGHDGFTSSWRSVADTLRQKVEAAVREHPDYRVVFTGHSLGGALATVAGADLRGNGYDIDVFSYGAPRVGNRAFAEFLTTQTGGTLYRITHTNDIVPRLPPREFGYSHSSPEYWIKSGTLVPVTRNDIVKIEGIDATGGNNQPNIPDIPAHLWYFGRIGTCL

SEQ ID NO: 6255 - protein, 269 aa, Thermomyces lanuginosus
EVSDDLFNQFLLFAQYSAAAYCGKNNSAPAGTNITCTGNACPEVEKADATFLYSFEDMGVGDVTGFLALDNTNKLIVLSFRGSRSIENWIGNLNFDLKEINDICSGCRGHDGFTSSWRSVADTLRQKVEDAVREHPDYRVVFTGHSLGGALATVAGADLRGNGYDIDVFSYGAPRVGNRAFAEFLTVQTGGTLYRITHTNDIVPRLPPREFGYSHSSPEYWIKSGTLVPVTRQDIVKIEGIDATGGNNQPNIPDITAHLWYFGLIGTCL

SEQ ID NO: 6256 - protein, 269 aa, Thermomyces lanuginosus
EVSQDLFNQFNLFAQYSAAAYCQKNNDAPAGTNITCTGNACPEVFKADVTFLYSFEDSGVGDVTGFLALDNTNKQIILSFRGSRSIENWIGNLNFDLKEINDICSGCRGHDGFTSSWRSVADTLRQKVEDAVREHPDYRVVFTGHSLGGALATVAGADLRGNGYDIDVFSYGAPRVGNRAFAEFLTTQTGGTLYRITHTNDIVPRLPPREFGYSHSSPEYWIKSGTLVPVTRNDIVKIEGIDATGGNNQPNIPDIPAHLWYFGLIGTCL

SEQ ID NO: 6257 - protein, 269 aa, Thermomyces lanuginosus
EYSQDLFNQFNLFAQYSAAAYCGKNNDAPAGTKITCTGNACPEVEKADATILYSFEDSGVGDVTGFLALDNTNKLIVLSFRGSRSIENWIGNLNFDLKEINDICSGCRGHDGFTSSWRSVADTLRQKVEDAVREHPDYRVVFTGHSLGGALATVAGADLRGNGYDIDVFSYGAPRVGNRAFAEFLTVQTGGTLYRITNTNDIVPRLPPREFGYSHSSPEYWIKSGTLVPVRRRDIVKIEGIDATGGNNQPNIPDIPAHLWYFGLIGTCL

SEQ ID NO: 6258 - protein, 269 aa, Thermomyces lanuginosus
EVSQDLFNQFNLFAQYSAAAYCGKNNQAPAGTNITCTGNACPEVEKADATFLYSFEDMGVGDVTGFLALDNTNKRIVLSFRGSRSIENWIGNLNFDLKEINDICSGCRGHDGFTSSWRSVADTLRQKVEAAVREHPDYRVVFTGHSLGGALATVAGADLRGNGYDIDVFSYGAPRVGNRAFAEFLTTQTGGTLYRITHTNDIVPRLPPREFGYSHSSPEYWIKSGTLVPVTRNDIVKIEGIDATGGNNQPNQPDIPAHLWYFGLIGTCL

SEQ ID NO: 6259 - protein, 269 aa, Thermomyces lanuginosus
EVSQDLFNQFRLFAQYSAAAYCGKNNDAPAGTQITCTGNACPEVEKADATFLYSFEDSGVGDVTGFLALDNTNKLIVLSFRGSRSIENWIGNLNFDLKEINDICSGCRGHDGFTSSWRSVADTLRQKVEDAVREHPDYRVVFTGHSLGGALATVAGADLRGNGYDIDVFSYGAPRVGNRAFAEFLTVQTGGTLYRITHTNDIVPRLPPRVFGYSHSSPEYWIKSGTLVPVRRRDIVKIEGIDATGGNNQPNIPSIPAHLWYFGLIGTCL

SEQ ID NO: 6260 - protein, 269 aa, Thermomyces lanuginosus
EVSQDLFNQFNLFAQYSKAAYCGKNNSAEAGTDITCTGNACPEVPKADATFLYSFEDSGVGDVTGFLALDNTNKDIVLSFRGSRSIENWIGNLNFDLKEINDICSGCRGHDGFTSSWRSVADTLRQKVEDAVREHPDYRVVFTGHSLGGALATVAGADLRGNGYDIDVFSYGAPRVGNRAFAEFLTVQTGGTLYRITHTNDIVPRLPPREFGYSHSSPEYWIKSGTLVPVTRNDIVKIEGIDATGGNNQPNIPDIPAHLWYFGLIGTCL

SEQ ID NO: 6261 - protein, 269 aa, Thermomyces lanuginosus
EVSQDLFNQFNLFAQYSAAAYCGKINRAPAGTNITCTGNACPEVEKADATFLYSFEDSGVGDVTGFLALDNTNKLIVLSFRGSRSIENWIGNLNFDLKEINDICSGCRGHAGFTSSWRSVADTLRQKVEDAVREHPDYRVVFTGHSLGGALATVAGADLRGNGYDIDVFSYGAPRVGNRAFAEFLTVQTGGTLYRITHTNDIVPRLPPREFGYSHPSPEYWIKSGTGVPVTRNDIVKIEGIDATGGNNQPNIPDITAHLWYFGLIGTCL

SEQ ID NO: 6262 - protein, 269 aa, Thermomyces lanuginosus
EVSQDLFNQFNLFAQYSAAAYCGKNNDAPAGTQITCTGNACPEVEKADATFLYSFEDSGVGDVTGFLALDNTNKLIVLSFRGSRSIENWIGNLNFDLKEINDICSGCRGHDGFTSSLRSVADTLRQKVEDAVREHPDYRVVFTGHSLGGALATVAGADLRGNGYDIDVFSYGAPRVGNRAFAEFLTVQTGGTLYRITHTNDIVPRLPPREFGYSHSSPEYWIKSGTGVPVRRRDIVKIEGIDATGGNNRPNIPDIPAHLWYFGLIGTCL

SEQ ID NO: 6263 - protein, 269 aa, Thermomyces lanuginosus
EVSRDLFNQFNLFAQYSAAAYCGKNNDAPAGTNITCTGNACPEVEKADATILYSFEDSGVGDVTGFLALDNTNKLIVLSFRGSRSIENWIGNLNFDLKEINDICSGCRGHDGFTSSWRSVADTLRQKVEDAVREHPDYRVVFAGHSLGGALATVAGADLRGDGYDIDVFSYGAPRVGNRAFAEFLTVQTGGTLYRITHTNDIVPRLPPREFGYSHSSPEYWIKSGTLVPVRRRDIVKIEGIDATGGNNQPNIPDIPAHLWYFGLIGTCL

SEQ ID NO: 6264 - protein, 269 aa, Thermomyces lanuginosus
EVSQDLFNQFNLFAQYSKAAYCQKNNDAPAGTNITCTGNACPEVEKADATFLYSFEDSGVGDVTGFLALDNTNKLIVLSFRGSRSIENWIGNLRFDLKEINDICSGCRGHDGFTSSWRSVADTLRQKVEAAVREHPDYRVVFTGHSLGGALATVAWADLRGNGYDIDVFSYGAPRVGNRAFAEFLTQQTGGTLYRITHTNDIVPRLPPREFGYSHSSPEYWIKSGTLVPVTRNDIVKIEGIDATGGNNQPNIPDIPAHLWYFGLIGTCL

SEQ ID NO: 6265 - protein, 269 aa, Thermomyces lanuginosus
EVSQDLFNQFNLFAQYSAAAYCKANNDAPAGTNITCTGNACPEVEKADATFLYSFEDSGVGDVTGFLALDNTNKRIVLSFRGSRSIENWIGNLNFDLKEINDICSGCRGHDGFTSSWRSVADTLRQKVEAAVREHPDYRVVFTGHSLGGALATIAGADLRGNGYDIDVFSYGAPRVGNRAFAEFLTNQTGGTLYRITHTNDIVPRLPPREFGYSHSSPEYWIKSGTLVPVTRNDIVKIEGIDATGGNNQPNIPDIPAHLWYFGLIGTCL

SEQ ID NO: 6266 - protein, 269 aa, Thermomyces lanuginosus
EVSQDLFNQFNLFAQYSAAAYCGKNNDAPAGTNITCTGNACPEVEKADATFLYSFEDSGVGDVTGFLALDNTNKLIVLSFRGSRSIENWIGNLNFDLKEINDICSGCRGHDGFTSSWRSVADTLRQKVEDAVREHPDYRVVFAGHSLGGALATVAGADLRGDGYDIDVFSYGAPRVGNRAFAEFLTVQTGGTLYRITSTNDIVPRLPPREFGYSHSSPEYWIKSGTLPPVRRRDIVKIEGIDATGGNNQPNIPDIPAHLWYFGLIGTCL

SEQ ID NO: 6267 - protein, 269 aa, Thermomyces lanuginosus
EKSQDLFNQFNLFAQYSAAAYCGKNNDAPAGTKITCTGNACPEVEKADATLLYSFEDSGVGDVTGFLALDNTNKLIVLSFRGSRSIENWIGNLNFDLKEINDICSGCRGHDGFTSSWRSVADTLRQKVEDAVREHPDYRVVFTGHSLGGGLATVAGADLRGNGYDIDVFSYGAPRVGNRAFAEFLTVQTGGTLYRITHTNDIVPRLPPREFGYSHSSPEYWIKSGTLVPVRRRDIVKIEGIDATGGNNQPNIPDIPAHLWYFGLIGTCL

SEQ ID NO: 6268 - protein, 269 aa, Thermomyces lanuginosus
EVSQDLFNQFNLFAQYSAQAYCGKNNDAPAGTNITCTGNACPEVEKADATTLYSFEDSGVGDVTGFLALDNTNKGIVLSFRGSRSIENWIGNLNFDLKEINDICSGCRGHDGFTSSWRSVADTLRQKVEAAVREHPDYRVVFTGHSLGGALATVAGADLRGNGYDIDVFSYGAPRVGNRAFAEFLTVQTGGTLYRITHTNDIVPRLPPREFGYSHSSPEYWIKSGTLVPVTRNDIVKIEGIDATGGNNQPNQPDIPAHLWYFGRIGTCL

SEQ ID NO: 6269 - protein, 269 aa, Thermomyces lanuginosus
EVSQDLFNQFNLFAQYSAAAYCQKNNDAPAGTNITCTGNACPEVEKADATFLYSFEDSGVGDVTGFLALDNTNKQIVLSFRGSRSIENWIQNLNFDLKEINDICSGCRGHDGFTSSWRSVADTLRQKVEAAVREHPDYRVVFTGHSLGGALATVAGADLRGNGYDIDVFSYGAPRVGNRAFAEFLTVQTGGTLYRITHTNDIVPRLPPREFGYSHSSPEYWIKSGTLVPVTRNDIVKIEGIDATGGNNQPNQPDIPAHLWYFGRIGTCL

SEQ ID NO: 6270 - protein, 269 aa, Thermomyces lanuginosus
EVSQDLFNQFNLFAQYSKAAYCQKNNDAPAGTNITCTGNACPEVFKADVTFLYSFEDSGVGDVTGFLALDNTNKQIVLSFRGSRSIENWIGNLNFDLKEINDICSGCRGHDGFTSSWRSVADTLRQKVEDAVREHPDYRVVFTGHSLGGALATVAGADLRGNGYDIDVFSYGAPRVGNRAFAEFLTTQTGGTLYRITHTNDIVPRLPPREFGYSHSSPEYWIKSGTLVPVTRNDIVKIEGIDATGGNNQPNIPDIPAHLWYFGLIGTCL

SEQ ID NO: 6271 - protein, 269 aa, Thermomyces lanuginosus
EKSQDLFNQFNLFAQYSAAAYCGKNNDAPAGTKITCTGNACPEVEKADATILYSFEDSGVGDVTGFLALDNTNKLIVLSFRGSRSIENWIGNLNFDLKEINDICSGCRGHDGFTSSWRSVADTLRQKVEDAVREHPDYRVVFTGHSLGGALATVAGADLRGNGYDIDVFSYGAPRVGNRAFAEFLTVQTGGTLYRITHTNDIVPRLPPREFGYSHSSPEYWIKSGTLVPRRRRDIVKIEGIDATGGNNQPNIPDIPAHLWYFGLIGTCL

SEQ ID NO: 6272 - protein, 269 aa, Thermomyces lanuginosus
EVSQDLFNQFNLFAQYSAAAYCQKNNQAPAGTNITCTGNACPEVEKADATFLYSFKDSGVGDVTGFLALDNTNKRIVLSFRGSRSIENWIGNLNFDLKEINDICSGCRGHDGFTSSWRSVADTLRQKVEDAVREHPDYRVVFTGHSLGGALATVAGADLRGNGYDIDVFSYGAPRVGNRAFAEFLTVQTGGTLYRITHTNDIVPRLPPREFGYSHSSPEYWIKSGTLVPVTRNDIVKIEGIDATGGNNQPNQPDIPAHLWYFGRIGTCL

SEQ ID NO: 6273 - protein, 269 aa, Synthetic construct
EVSQDLFNQFNLFAQYSAAAYCGKNNDAPAGTNITCTGNACPEVEKADATFLYSFEDSGVGDVTGFLALDNTNKLIVLSFRGTRSIKNWIAHLKFMLKEINDICSGCRGHDGFTSSWRSVADTLRQKVEDAVREHPDYRVVFTGHSLGGALATVAGADLRGNGYDIDVFSYGAPRVGNRAFAEFLTVQTGGTLYRITHTNDIVPRLPPREFGYSHSSPEYWIKSGTLVPVTRNDIVKIEGIDATGGNNQPNIPDIPAHLWYFGLIGTCL

SEQ ID NO: 6274 - protein, 269 aa, Thermomyces lanuginosus
EVSRDLFNQFNLFAQYSAAAYCGKNNDAPAGTNITCTGNACPEVEKADATFLYSFEDSGVGDVTGFLALDNTNKLIVLSFRGSRSIENWIGNLNFDLKEINDICSGCRGHDGFTSSWRSVADTLRQKVEDAVREHPDYRVVFTGHSLGGALATVAGADLRGDGYDIDVFSYGAPRVGNRAFAEFLTVQTGGTLYRITNTNDIVPRLPPREFGYSHSSPEYWIKSGTLPPVRRRDIVKIEGIDATGGNNQPNIPDIPAHLWYFGLIGTCL

SEQ ID NO: 6275 - protein, 269 aa, Thermomyces lanuginosus
EVSQDLFNQFNLFAQYSAAAYCKANNDAPAGTNITCTGNACPEVEKADATFLYSFEDSGVGDVTGFLALDNTNKQIVLSFRGSRSIENWIGNLNFDLKEINDICSGCRGHAGFTSSWRSVADTLRQKVEAAVREHPDYRVVFTGHSLGGALATVAGADLRGNGYDIDVFSYGAPRVGNRAFAEFLTVQQGGTLYRITHTNDIVPRLPPREFGYSHSSPEYWIKSGTLVPVTRNDIVKIEGIDATGGNNQPNIPDIPAHLWYFGLIGTCL

SEQ ID NO: 6276 - protein, 269 aa, Thermomyces lanuginosus
EYSQDLFNQFNLFAQYSAAAYCGKNNDAPAGTKITCTGNACPEVEKADATVLYSFEDSGVGDVTGFLALDNTNKLIVLSFRGSRSIENWIGNLNFDLKEINDICSGCRGHDGFTSSWRSVADTLRQKVEDAVREHPDYRVVFTGHSLGGALATVAGADLRGNGYDIDVFSYGAPRVGNRAFAEFLTVQTGGTLYRITHTNDIVPRLPPREFGYSHSSPEYWIKSGTDVPVRRRDIVKIEGIDATGGNNQPNIPDIPAHLWYFGLIGTCL

SEQ ID NO: 6277 - protein, 269 aa, Thermomyces lanuginosus
EVSQDLFNQFNLFAQYSAAAYCGKNNDAPAGTNITCTGNACPEVEKADATVLYSFEDSGVGDVTGFLALDNTNKLIVLSFRGSRSIENWIGNLNFELKEINDICSGCRGHAGFTSSWRSVADTLRQKVEDAVREHPDYRVVFTGHSLGGALATVAGADLRGNGYDIDVFSYGAPRVGNRAFAEFLTVQTGGTLYRITHTNDIVPRLPPREFGYSHSSPEYWIKSGTLVPVRRRDIVKIEGIDATGGNNQPNIPSIPAHLWYFGLIGTCL

SEQ ID NO: 6278 - protein, 269 aa, Thermomyces lanuginosus
EVSQDLFNQFNLFAQYSAAAYCGKNNSAPAGTNITCTGNACPEVEKADATTLYSFEDSGVGDVTGFLALDNTNKQIVLSFRGSRSIENWIGNLNFDLKEINDICSGCRGHDGFTSSWRSVADTLRQKVEAAVREHPDYRVVFTGHSLGGALATVAGADLRGNGYDIDVFSYGAPRVGNRAFAEFLTVQTGGTLYRITHTNDIVPRLPPREFGYSHSSPEYWIKSGTLVPVTRNDIVKIEGIDATGGNNQPNQPDIPAHLWYFGRIGTCL

SEQ ID NO: 6279 - protein, 269 aa, Thermomyces lanuginosus
EVSQDLFNQFNLFAQYSAAAYCSKNNNAPAGTNITCTGNACPEVEKADATFLYSFRDSGVGDVTGFLALDNTNKLIVLSFRGSRSIENWIGNLNFDLKEINDICSGCRGHDGFTSSWFSVADTLRQKVEDAVREHPDYRVVFTGHSLGGALATVAGADLRGNGYDIDVFSYGAPRVGNRAFAEFLTVQTGGTLYRITHTNDIVPRLPPREFGYSHSSPEYWIKSGTLVPVRRRDIVKIEGIDATGGNNQPNIPDIPAHLWYFGLIGTCL

SEQ ID NO: 6280 - protein, 269 aa, Thermomyces lanuginosus
EVSQDLFNQFNLFAQYSKAAYCQANNDAPAGTNITCTGNACPEVEKADATFLYSFEDSGVGDVTGFLALDNTNKRIVLSFRGSRSIENWIGNLRFDLKEINDICSGCRGHDGFTSSWRSVADTLRQKVEDAVREHPDYRVVFTGHSLGGALATVAWADLRGNGYDIDVFSYGAPRVGNRAFAEFLTVQTGGTLYRITHTNDIVPRLPPREFGYSHSSPEYWIKSGTLVPVTRNDIVKIEGIDATGGNNQPNIPDIPAHLWYFGLIGTCL

SEQ ID NO: 6281 - protein, 269 aa, Thermomyces lanuginosus
EVSRDLFNQFNLFAQYSAAAYCGKNNDAPAGTNITCTGNACPEVEKADATFLYSFEDSGVGDVTGFLALDNTNKLIVLSFRGSRSIENWIGNLNFDLKEINDICSGCRGHDGFTSSWRSVADTLRQKVEDAVREHPDYRVVFTGHSLGGALATVAGADLRGNGYDIDVFSYGAPRVGNRAFAEFLTVQTGGTLYRITSTNDIVPRLPPREFGYSHSSPEYWIKSGTLPPVRRRDIVKIEGIDATGGNNQPNIPDISAHLWYFGLIGTCL

SEQ ID NO: 6282 - protein, 269 aa, Thermomyces lanuginosus
EVSQDLFNQFNLFAQYSAAAYCGKNNDAPAGTNITCTGNACPEVEKADATILYSFEDSGVGDVTGFLALDNTNKLIVLSFRGSRSIENWIGNLNFDLKEINDICSGCRGHDGFTSSWRSVADTLRQKVEDAVREHPDYRVVFAGHSLGGALATVAGADLRGDGYDIDVFSYGAPRVGNRAFAEFLTVQTGGTLYRITSTNDIVPRLPPREFGYSHSSPEYWIKSGTLVPVRRRDIVKIEGIDATGGNNQPNIPDIPAHLWYFGLIGTCL

SEQ ID NO: 6283 - protein, 269 aa, Thermomyces lanuginosus
EVSQDLFNQFNLFAQYSAAAYCGKNNDAPAGTNITCTGNACPEVEKADATFLYSFEDSGVGDVTGFLALDNTNKLIVLSFRGSRSIENWIGNLNFDLKEINDICSGCRGHDGFTSSWRSVADTLRQKVEDAVREHPDYRVVFAGHSLGGALATVAGADLRGDGYDIDVFSYGAPRVGNRAFAEFLTVQTGGTLYRITNTNDIVPRLPPREFGYSHSSPEYWIKSGTLPPVRRRDIVKIEGIDATGGNNQPNIPDIPAHLWYFGLIGTCL

SEQ ID NO: 6284 - protein, 269 aa, Thermomyces lanuginosus
EVSRDLFNQFNLFAQYSAAAYCGKNNDAPAGTNITCTGNACPEVEKADATILYSFEDSGVGDVTGFLALDNTNKLIVLSFRGSRSIENWIGNLNFDLKEINDICSGCRGHDGFTSSWRSVADTLRQKVEDAVREHPDYRVVFTGHSLGGALATVAGADLRGDGYDIDVFSYGAPRVGNRAFAEFLTVQTGGTLYRITHTNDIVPRLPPREFGYSHSSPEYWIKSGTLRPVRRRDIVKIEGIDATGGNNQPNIPDIPAHLWYFGLIGTCL

SEQ ID NO: 6285 - protein, 269 aa, Thermomyces lanuginosus
EVSQDLFNQFNLFAQYSAAAYCSKNNDAPAGTNITCTGNACPEVEKADATILYSFRDSGVGDVTGFLALDNTNKLIVLSFRGSRSIENWIGNLNFDLKEINDICSGCRGHDGFTSSWFSVADTLRQKVEDAVREHPDYRVVFTGHSLGGALATVAGADLRGNGYDIDVFSYGAPRVGNRAFAEFLTVQTGGTLYRITHTNDIVPRLPPREFGYSHSSPEYWIKSGTLVPVRRRDIVKIEGIDATGGNNQPNIPDIPAHLWYFGLIGTCL

SEQ ID NO: 6286 - protein, 269 aa, Thermomyces lanuginosus
EVSQDLFNQFNLFAQYSAAAYCGANNDAPAGTNITCTGNACPEVEKADATFLYSFEDSGVGDVTGFLALDNTNKQIVLSFRGSRSIENWIGNLNFDLKEINDICSGCRGHAGFTSSWRSVADTLRQKVEDAVREHPDYRVVFTGHSLGGALATIAGADLRGNGYDIDVFSYGAPRVGNRAFAEFLTNQQGGTLYRITHTNDIVPRLPPREFGYSHSSPEYWIKSGTLVPVTRNDIVKIEGIDATGGNNQPNIPDIPAHLWYFGLIGTCL

SEQ ID NO: 6287 - protein, 269 aa, Thermomyces lanuginosus
EVSQDLFNQFNLFAQYSAAAYCGKNNRAPAGTNITCTGNACPEVEKADATFLYSFEDSGVGDVTGFLALDNTNKLIVLSFRGSRSIENWIGNVNFDLKEINDICSGCRGHAGFTSSWRSVADTLRQKVEDAVREHPDYRVVFTGHSLGGALATVAGADLRGNGYDIDVFSYGAPRVGNRAFAEFLTVQTGGTLYRITHTNDIVPRLPPREFGYSHPSPEYWIKSGTGVPVTRNDIVKIEGIDATGGNNQPNIPDITAHLWYFGLIGTCL

SEQ ID NO: 6288 - protein, 269 aa, Thermomyces lanuginosus
EVSQDLFNQFNLFAQYSAAAYCGKNNDAPAGTQITCTGNACPEVEKADATFLYSFEDSGVGDVTGFLALDNTNKLIVLSFRGSRSIENWIGNLNFNLKEINDICSGCRGHDGFTSSWRSVADTLRQKVEDAVREHPDYRVVFTGHSLGGALATVARADLRGNGYDIDVFSYGAPRWGNRAFAEFLTVQTGGTLYRITHTNDIVPRLPPREFGYSHSSPEYWIKSGTLVPVRRRDIVKIEGIDATGGNNQPNIPDIPAHLWYFGLIGTCL

SEQ ID NO: 6289 - protein, 269 aa, Thermomyces lanuginosus
EVSQDLFNQFNLFAQYSAAAYCGKLNRAPAGTNITCTGNACPEVEKADATFLYSFEDSGVGDVTGFLALDNTNKLIVLSFRGSRSIENWIGNLNFDLKEINDICSGCRGHAGFTSSWRSVADTLRQKVEDAVREHPDYRVVFTGHSLGGALATVAGADLRGNGYDIDVFSYGAPRVGNRAFAEFLTVQTGGTLYRITHTNDIVPRLPPREFGYSHPSPEYWIKSGTGVPVTRNDIVKIEGIDATGGNNQPNIPDITAHLWYFGLIGTCL

SEQ ID NO: 6290 - protein, 269 aa, Thermomyces lanuginosus
EYSQDLFNQFNLFAQYSAAAYCGKNNDAPAGTKITCTGNACPEVEKADATLLYSFEDSGVGDVTGFLALDNTNKLIVLSFRGSRSIENWIGNLNFDLKEINDICSGCRGHDGFTSSWRSVADTLRQKVEDAVREHPDYRVVFTGHSLGGALATVAGADLRGNGYDIDVFSYGAPRVGNRAFAEFLTVQTGGTLYRITYTNDIVPRLPPREFGYSHSSPEYWIKSGTLVPVRRRDIVKIEGIDATGGNNQPNIPDIPAHLWYFGLIGTCL

SEQ ID NO: 6291 - protein, 269 aa, Thermomyces lanuginosus
EVSQDLFNQFNLFAQYSAAAYCGKNNVAPAGTQITCTGNACPEVEKADATFLYSFEDSGVGDVTGFLALDNTNKLIVLSFRGSRSIENWIGNLNFDLKEINDICSGCRGHDGFTSSWRSVADTLRQKVEDAVREHPDYRVVFTGHSLGGALATVAGADLRGNGYDIDVFSYGAPRVGNRAFAEFLTVQTGGTLYRITHTNDIVPRLPPREFGYSHSSPEYWIKSGTFVPVRRRDIVKIEGIDATGGNNRPNIPDIPAHLWYFGLIGTCL

SEQ ID NO: 6292 - protein, 269 aa, Thermomyces lanuginosus
EVSQDLFNQFNLFAQYSAAAYCQKNNDAPAGTNITCTGNACPEVEKADATTLYSFEDSGVGDVTGFLALDNTNKQIVLSFRGSRSIENWIGNLNFDLKEINDICSGCRGHDGFTSSWRSVADTLRQKVEAAVREHPDYRVVFTGHSLGGALATVAGADLRGNGYDIDVFSYGAPRVGNRAFAEFLTHQTGGTLYRITHTNDIVPRLPPREFGYSHSSPEYWIKSGTLVPVTRNDIVKIEGIDATGGNNQPNQPDIPAHLWYFGLIGTCL

SEQ ID NO: 6293 - protein, 269 aa, Thermomyces lanuginosus
EVSQDLFNQFNLFAQYSAAAYCGKNNRAPAGTNITCTGNACPEVEKADATFLYSFEDSGNGDVTGFLALDNTNKLIVLSFRGSRSIENWIGNLNFDLKEINDICSGCRGHAGFTSSWRSVADTLRQKVEDAVREHPDYRVVFTGHSLGGALATVAGADLRGNGYDIDVFSYGAPRVGNRAFAEFLTVQTGGTLYRITHTNDIVPRLPPREFGYSHPSPEYWIKSGTGVPVTRNDIVKIEGIDATGGNNQPNIPDITAHLWYFGLIGTCL

SEQ ID NO: 6294 - protein, 269 aa, Thermomyces lanuginosus
EVSQDLFNQFNLFAQYSAAAYCQANNDAPAGTNITCTGNACPEVEKADATFLYSFEDSGVGDVTGFLALDNTNKLIVLSFRGSRSIENWIGNLNFDLKEINDICSGCRGHDGFTSSWRSVADTLRQKVEAAVREHPDYRVVFTGHSLGGALATIAWADLRGNGYDIDVFSYGAPRVGNRAFAEFLTQQTGGTLYRITHTNDIVPRLPPREFGYSHSSPEYWIKSGTLVPVTRNDIVKIEGIDATGGNNQPNIPDIPAHLWYFGLIGTCL

SEQ ID NO: 6295 - protein, 269 aa, Thermomyces lanuginosus
EVSQDLFNQFNLFAQYSKAAYCKKNNDAPAGTNITCTGNACPEVEKADATFLYSFEDSGVGDVTGFLALDNTNKLIVLSFRGSRSIENWIGNLNFDLKEINDICSGCRGHAGFTSSWRSVADTLRQKVEAAVREHPDYRVVFTGHSLGGALATIAGADLRGNGYDIDVFSYGAPRVGNRAFAEFLTVQQGGTLYRITHTNDIVPRLPPREFGYSHSSPEYWIKSGTLVPVTRNDIVKIEGIDATGGNNQPNIPDIPAHLWYFGLIGTCL

SEQ ID NO: 6296 - protein, 269 aa, Thermomyces lanuginosus
EVSQDLFNQFNLFAQYSKAAYCQKNNDAPAGTNITCTGNACPEVEKADATFLYSFEDSGVGDVTGFLALDNTNKQIILSFRGSRSIENWIGNLRFDLKEINDICSGCRGHDGFTSSWRSVADTLRQKVEDAVREHPDYRVVFTGHSLGGALATIAGADLRGNGYDIDVFSYGAPRVGNRAFAEFLTVQTGGTLYRITHTNDIVPRLPPREFGYSHSSPEYWIKSGTLVPVTRNDIVKIEGIDATGGNNQPNIPDIPAHLWYFGLIGTCL

SEQ ID NO: 6297 - protein, 269 aa, Thermomyces lanuginosus
EVSQDLFNQFNLFAQYSAAAYCGKNNQAPAGTNITCTGNACPEVEKADATFLYSFKDMGVGDVTGFLALDNTNKLIVLSFRGSRSIENWFGNLNFDLKEINDICSGCRGHDGFTSSWRSVADTLRQKVEDAVREHPDYRVVFTGHSLGGALATVAGADLRGNGYDIDVFSYGAPRVGNRAFAEFLTVQTGGTLYRITHTNDIVPRLPPREFGYSHSSPEYWIKSGTLVPVTRQDIVKIEGIDATGGNNQPNIPDITAHLWYFGLIGTCL

SEQ ID NO: 6298 - protein, 269 aa, Thermomyces lanuginosus
EVSQDLFNQFNLFAQYSAAAYCGKNNSAEAGTDITCTGNACPEVEKADATFLYSFEDSGVGDVTGFLALDNTRKDIVLSFRGSRSIENWIGNLNFDLKEINDICSGCRGHDGFTSSWRSVADTLRQKVEDAVREHPDYRVVFTGHSLGGALATVAGADLRGNGYDIDVFSYGAPRVGNRAFAEFLTVQDGGTLYRITHTNDIVPRLPPREFGYSHSSPEYWIKSGTLVPVTRNDIVKIEGIDATGGNNQPNIPDIPAHLWYFGLIGTCL

SEQ ID NO: 6299 - protein, 269 aa, Thermomyces lanuginosus
EKSQDLFNQFNLFAQYSAAAYCGKNNDAPAGTKITCTGNACPEVEKADATLLYSFEDSGVGDVTGFLALDNTNKLIVLSFRGSRSIENWIGNLNFDLKEINDICSGCRGHDGFTSSWRSVADTLRQKVEDAVREHPDYRVVFTGHSLGGALATVAGADLRGNGYDIDVFSYGAPRVGNRAFAEFLTVQTGGTLYRITHTNDIVPRLPPREFGYSHSSPEYWIKSGTLVPRRRRDIVKIEGIDATGGNNQPNIPDIPAHLWYFGLIGTCL

SEQ ID NO: 6300 - protein, 269 aa, Thermomyces lanuginosus
EVSQDLFNQFNLFAQYSAAAYCGKNNQAPAGTQITCTGNACPEVEKADATFLYSFEDSGVGDVTGFLALDNTNKLIVLSFRGSRSIENWIGNLNFDLKEINDICSGCRGHDGFTSSWRSVADTLRQKVEDAVREHPDYRVVFTGHSLGGALATVAGADLRGNGYDIDVFSYGAPRVGNRAFAEFLTVQTGGTLYRITHTNDIVPRLPPREFGYSHSSPEYWIKSGTGVPVRRRDIVKIEGIDATGGNNRPNIPDIPAHLWYFGLIGTCL

SEQ ID NO: 6301 - protein, 269 aa, Thermomyces lanuginosus
EVSQDLFNQFNLFAQYSAAAYCQKNNDAPAGTNITCTGNACPEVEKADATFLYSFEDSGVGDVTGFLALDNTNKQIVLSFRGSRSIENWIGNLNFDLKEINDICSGCRGHAGFTSSWRSVADTLRQKVEDAVREHPDYRVVFTGHSLGGALATIAGADLRGNGYDIDVFSYGAPRVGNRAFAEFLTVQQGGTLYRITHTNDIVPRLPPREFGYSHSSPEYWIKSGTLVPVTRNDIVKIEGIDATGGNNQPNIPDIPAHLWYFGRIGTCL

SEQ ID NO: 6302 - protein, 269 aa, Thermomyces lanuginosus
EVSQDLFNQFNLFAQYSAAAYCGKNNDAPAGTNITCTGNACPEVEKADATFLYSFEDSGVGDVTGFLALDNTNKLIVLSFRGSRSIENWIGNLNFELKEINDICSGCRGHDGFTSSWRSVADTLRQKVEDAVREHPDYRVVFTGHSLGGALATVAGADLRGNKYDIDVFSYGAPRVGNRAFAEFLTVQTGGTLYRITHTNDIVPRLPPREFGYSHSSPEYWIKSGTLVPVRRRDIVKIEGIDATGGNNQPNIPSITAHLWYFGLIGTCL

SEQ ID NO: 6303 - protein, 269 aa, Thermomyces lanuginosus
EVSQDLFNQFNLFAQYSAAAYCGKNNDAPAGTNITCTGNACPEVEKADATFLYSFEDSGVGDVTGFLALDNTNKLIVLSFRGSRSIENWIGNLNFDLKEINDICSGCRGHDGFTSSWRSVADTLRQKVEDAVREHPDYRVVFTGHSLGGALATVAGADLRGNGYDIDVFSYGAPRVGNRAFAEFLTVQTGGTLYRITHTNDIVPRLPPRELGYSHSSPEYWIKSGTGVPVRRRDIVKIEGIDATGGNNQPNIPDLKAHLWYFGLIGTCL

SEQ ID NO: 6304 - protein, 269 aa, Thermomyces lanuginosus
EVSQDLFNQFNLFAQYSKAAYCQKNNDAPAGTNITCTGNACPEVEKADVTFLYSFEDSGVGDVTGFLALDNTNKQIILSFRGSRSIENWIGNLNFDLKEINDICSGCRGHDGFTSSWRSVADTLRQKVEDAVREHPDYRVVFTGHSLGGALATVAWADLRGNGYDIDVFSYGAPRVGNRAFAEFLTVQTGGTLYRITHTNDIVPRLPPREFGYSHSSPEYWIKSGTLVPVTRNDIVKIEGIDATGGNNQPNIPDIPAHLWYFGLIGTCL

SEQ ID NO: 6305 - protein, 269 aa, Thermomyces lanuginosus
EVSQDLFNQFNLFAQYSAAAYCQANNDAPAGTNITCTGNACPEVEKADATFLYSFEDSGVGDVTGFLALDNTNKLIILSFRGSRSIENWIGNLNFDLKEINDICSGCRGHDGFTSSWRSVADTLRQKVEAAVREHPDYRVVFTGHSLGGALATIAWADLRGNGYDIDVFSYGAPRVGNRAFAEFLTVQTGGTLYRITHTNDIVPRLPPREFGYSHSSPEYWIKSGTLVPVTRNDIVKIEGIDATGGNNQPNIPDIPAHLWYFGLIGTCL

SEQ ID NO: 6306 - protein, 269 aa, Thermomyces lanuginosus
EVSQDLFNQFNLFAQYSAAAYCGKNNDAPAGTQITCTGNACPEVEKADATFLYSFEDSGVGDVTGFLALDNTNKLIVLSFRGSRSIENWIMNLNFDLKEINDICSGCRGHDGFTSSWRSVADTLRQKVEDAVREHPDYRVVFTGHSLGGALATVAGADLRGNADDIDVFSYGAPRVGNRAFAEFLTVQTGGTLYRITHTNDIVPRLPPREFGYSHSSPEYWIKSGTLVPVRRRDIVKIEGIDATGGNNQPNIPDIPAHLWYFGLIGTCL

SEQ ID NO: 6307 - protein, 269 aa, Thermomyces lanuginosus
EVSQDLFNQFKLFAQYSAAAYCGKNNSAPAGTNITCTGNACPEVEKADATFLYSFKDMGVGDVTGFLALDNTNKLIVLSFRGSRSIENWFGNLNFDLKEINDICSGCRGHDGFTSSWRSVADTLRQKVEDAVREHPDYRVVFTGHSLGGALATVAGADLRGNGYDIDVFSYGAPRVGNRAFAEFLTVQTGGTLYRITHTNDIVPRLPPREFGYSHSSPEYWIKSGTLVPVTRNDIVKIEGIDATGGNNQPNIPDITAHLWYFGLIGTCL

SEQ ID NO: 6308 - protein, 269 aa, Thermomyces lanuginosus
EVSQDLFNQFNLFAQYSAAAYCGKNNDAPAGTNITCTGNACPEVEKADATTLYSFKDSGVGDVTGFLALDNTNKLIVLSFRGSRSIENWIGNLNFDLKEINDICSGCRGHDGFTSSWRSVADTLRQKVEAAVREHPDYRVVFTGHSLGGALATVAGADLRGNGYDIDVFSYGAPRVGNRAFAEFLTNQTGGTLYRITHTNDIVPRLPPREFGYSHSSPEYWIKSGTLVPVTRNDIVKIEGIDATGGNNQPNQPDIPAHLWYFGRIGTCL

SEQ ID NO: 6309 - protein, 269 aa, Thermomyces lanuginosus
EVSQDLFNQFNLFAQYSAAAYCGKNNEAPAGTNITCTGNACPEVEKADATFLYSFEDMGVGDVTGFLALDNTNKLIVLSFRGSRSIENWIGNLNFDLKEINDICSGCRGHDGFTSSWRSVADTLRQKVEAAVREHPDYRVVFTGHSLGGALATVAGADLRGNGYDIDVFSYGAPRVGNRAFAEFLTVQTGGTLYRITHTNDIVPRLPPREFGYSHSSPEYWIKSGTMVPVTRQDIVKIEGIDATGGNNQPNIPDIPAHLWYFGRIGTCL

SEQ ID NO: 6310 - protein, 269 aa, Thermomyces lanuginosus
EVSQDLFNQFNLFAQYSAAAYCGKNNEAPAGTNITCTGNACPEVEKAQATFLYSFEDSGVGDVTGFLALDNTNKLIVLSFRGSRSIENWIGNLNFDLKEINDICSGCRGHDGFTSSWRSVADTLRQKVEDAVREHPQYRVVFTGHSLGGALATVAGADLRGNPYDIDVFSYGAPRVGNRAFAEFLTVQTGGTLYRITHTNDIVPRLPPREFGYSHSSPEYWIKSGTLVPVTRQDIVKIEGIDATGGNNQPNIPDIPAHLWYFGRIGTCL

SEQ ID NO: 6311 - protein, 269 aa, Thermomyces lanuginosus
EVSQDLFNQFNLFAQYSAAAYCGKNNDAPAGTNITCTGNACPEVEKADATFLYSFRDSGVGDVTGFLALDNTNKLIVLSFRGSRSIENWIGNLNFDLKEINDICSGCRGHDGFTSSWFSVADTLRQKVEDAVREHPDYRVVFTGHSLGGALATVAGADLRGNGYDIDVFSYGAPRVGNRAFAEFLTVQTGGTLYRITHTNDIVPRLPPREFGYSHSSPEFWIKSGTLVPVRRRDIVKIEGIDATGGNNQPNIPDITAHLWYFGLIGTCL

SEQ ID NO: 6312 - protein, 269 aa, Thermomyces lanuginosus
EKSQDLFNQFNLFAQYSAAAYCGKNNDAPAGTKITCTGNACPEVEKADATLLYSFEDSGVGDVTGFLALDNTNKLIVLSFRGSRSIENWIGNLNFDLKEINDICSGCRGHDGFTSSWRSVADTLRQKVEDAVREHPDYRVVFTGHSLGGALATVAGADLRGNGYDIDVFSYGAPRVGNRAFAEFLTVQTGGTLYRITHTNDIVPRLPPREFGYSHSSPEYWIKSGTLVPVRRRDIVKIEGIDATGGNNQPNIPDIPVHLWYFGLIGTCL

SEQ ID NO: 6313 - protein, 269 aa, Thermomyces lanuginosus
EVSQDLFNQFNLFAQYSAAAYCGKNNDAPAGTNITCTGNACPEVEKAQATFLYSFEDSGVGDVTGFLALDNTNKLIVLSFRGSRSIENWIGNLNFDLKEINDICSGCRGHDGFTSSWRSVADTLRQKVEDAVREHPQYRVVFTGHSLGGALATVAGADLRGNPYDIDVFSYGAPRVGNRAFAEFLTVQTGGTLYRITHTNDIVPRLPPREFGYSHSSPEYWIKSGTMVPVTRQDIVKIEGIDATGGNNQPNIPDIPAHLWYFGRIGTCL

SEQ ID NO: 6314 - protein, 269 aa, Thermomyces lanuginosus
EVSRDLFNQFNLFAQYSAAAYCGKNNDAPAGTNITCTGNACPEVEKADATFLYSFEDSGVGDVTGFLALDNTNKLIVLSFRGSRSIENWIGNLNFDLKEINDICSGCRGHDGFTSSWRSVADTLRQKVEDAVREHPDYRVVFAGHSLGGALATVAGADLRGDGYDIDVFSYGAPRVGNRAFAEFLTVQTGGTLYRITHTNDIVPRLPPREFGYSHSSPEYWIKSGTLPPVRRRDIVKIEGIDATGGNNQPNIPDIPAHLWYFGLIGTCL

SEQ ID NO: 6315 - protein, 269 aa, Thermomyces lanuginosus
EVSQDLFNQFNLFAQYSAAAYCGKNNEAPAGTNITCTGNACPEVEKADATFLYSFEDSGVGDVTGFLALDNTNKLIVLSFRGSRSIENWIGNLNFDLKEINDICSGCRGHDGFTSSWRSVADTLRQKVEAAVREHPQYRVVFTGHSLGGALATVAGADLRGNPYDIDVFSYGAPRVGNRAFAEFLTVQTGGTLYRITHTNDIVPRLPPREFGYSHSSPEYWIKSGTMVPVTRNDIVKIEGIDATGGNNQPNIPDIPAHLWYFGRIGTCL

SEQ ID NO: 6316 - protein, 269 aa, Thermomyces lanuginosus
EVSQDLFNQFNLFAQYSAAAYCGKNNDAPAGTQITCTGNACPEVEKADATFLYSFEDSGVGDVTGFLALDNTNKLIVLSFRGSRSIENWIGNLNFDLKEINDICSGCRGHDGFTSSWRSVADTLRQKVEDAVREHPDYRVVFTGHSLGGALATVAGADLRGNGYDIDVFSYGAPRVGNRAFAEFLTVQTGGTLYRITHTNDIVPRLPPREFGYSHPSPEYWIKSGTGVPVRRRDIVKIEGIDATGGNNRPNIPDIPAHLWYFGLIGTCL

SEQ ID NO: 6317 - protein, 269 aa, Thermomyces lanuginosus
EVSQDLFNQFNLFAQYSAAAYCGKNNSAPAGTNITCTGNACPEVEKADATFLYSFEDSGVGDVTGFLALDNTNKQIVLSFRGSRSIENWIANLNFDLKEINDICSGCRGHDGFTSSWRSVADTLRQKVEDAVREHPDYRVVFTGHSLGGALATVAGADLRGNGYDIDVFSYGAPRVGNRAFAEFLTTQTGGTLYRITHTNDIVPRLPPREFGYSHSSPEYWIKSGTLVPVTRNDIVKIEGIDATGGNNQPNQPDIPAHLWYFGRIGTCL

SEQ ID NO: 6318 - protein, 269 aa, Thermomyces lanuginosus
EVSQDLFNQFNLFAQYSAAAYCGKNNEAPAGTNITCTGNACPEVEKADATFLYSFEDMGVGDVTGFLALDNTNKLIVLSFRGSRSIENWIGNLNFDLKEINDICSGCRGHDGFTSSWRSVADTLRQKVEAAVREHPDYRVVFTGHSLGGALATVAGADLRGNPYDIDVFSYGAPRVGNRAFAEFLTVQTGGTLYRITHTNDIVPRLPPREFGYSHSSPEYWIKSGTLVPVTRQDIVKIEGIDATGGNNQPNIPDIPAHLWYFGRIGTCL

SEQ ID NO: 6319 - protein, 269 aa, Thermomyces lanuginosus
EVSQDLFNQFNLFAQYSAAAYCGKNNDAPAGTNITCTGNACPEVEKADATFLYSFRNSGVGDVTGFLALDNTNKLIVLSFRGSRSIENWIGNLNFDLKEINDICSGCRGHDGFTSSWFSVADTLRQKVEDAVREHPDYRVVFTGHSLGGALATVAGADLRGNSYDIDVFSYGAPRVGNRAFAEFLTVQTGGTLYRITHTNDIVPRLPPREFGYSHSSPEYWIKSGTLVPVRRRDIVKIEGIDATGGNNQPNIPDIPAHLWYFGLIGTCL

SEQ ID NO: 6320 - protein, 269 aa, Thermomyces lanuginosus
EVSQDLFNQFNLFAQYSKAAYCQKNNDAPAGTNITCTGNACPEVEKADATFLYSFEDSGVGDVTGFLALDNTNKQIILSFRGSRSIENWIGNLNFDLKEINDICSGCRGHDGFTSSWRSVADTLRQKVEDAVREHPDYRVVFTGHSLGGALATVAGADLRGNGYDIDVFSYGAPRVGNRAFAEFLTTQDGGTLYRITHTNDIVPRLPPREFGYSHSSPEYWIKSGTLVPVTRNDIVKIEGIDATGGNNQPNIPDIPAHLWYFGLIGTCL

SEQ ID NO: 6321 - protein, 269 aa, Thermomyces lanuginosus
EVSRDLFNQFNLFAQYSAAAYCGKNNDAPAGTNITCTGNACPEVEKADATFLYSFEDSGVGDVTGFLALDNTNKLIVLSFRGSRSIENWIGNLNFDLKEINDICSGCRGHDGFTSSWRSVADTLRQKVEDAVREHPDYRVVFTGHSLGGALATVAGADLRGNGYDIDVFSYGAPRVGNRAFAEFLTVQTGGTLYRITHTNDIVPRLPPREFGYSHSSPEYWIKSGTLPPVRRRDIVKCEGIDATCGNNQPNIPDIPAHLWYFGLIGTCL

SEQ ID NO: 6322 - protein, 269 aa, Thermomyces lanuginosus
EVSQDLFNQFNLFAQYSAAAYCGKNNDAPAGTNITCTGNACPEVEKADATILYSFEDSGVGDVTGFLALDNTNKLIVLSFRGSRSIENWIGNLNFDLKEINDICSGCRGHDGFTSSWRSVADTLRQKVEDAVREHPDYRVVFTGHSLGGALATVAGADLRGDGYDIDVFSYGAPRVGNRAFAEFLTVQTGGTLYRITNTNDIVPRLPPREFGYSHSSPEYWIKSGTLPPVRRRDIVKIEGIDATGGNNQPNIPDIPAHLWYFGLIGTCL

SEQ ID NO: 6323 - protein, 269 aa, Thermomyces lanuginosus
EVSQDLFNQFNLFAQYSAAAYCGKNNDAPAGTNITCTGNACPEVEKADATFLYSFEDAGAGDVTGFLALDNTNKLIVLSFRGSRSVENWIGNLNFDLKEINDICSGCRGHDGFTSSWRSVADTLRQKVEDAVREHPDYRVVFTGHSLGGGLATVAGADLRGNGYDIDVFSYGAPRVGNRAFAEFLTVQTGGTLYRITHTNDIVPRLPPREFGYSHSSPEYWIKSGTLVPVRRRDIVKIEGIDATGGNNQPNIPDIPAHLWYFGLIGTCL

SEQ ID NO: 6324 - protein, 269 aa, Thermomyces lanuginosus
EVSQDLFNQFNLFAQYSAAAYCGKNNEAPAGTNITCTGNACPEVEKADATFLYSFEDMGVGDVTGFLALDNTNKLIVLSFRGSRSIENWIGNLNFDLKEINDICSGCRGHDGFTSSWRSVADTLRQKVEDAVREHPQYRVVFTGHSLGGALATVAGADLRGNPYDIDVFSYGAPRVGNRAFAEFLTVQTGGTLYRITHTNDIVPRLPPREFGYSHSSPEYWIKSGTLVPVTRQDIVKIEGIDATGGNNQPNIPDIPAHLWYFGRIGTCL

SEQ ID NO: 6325 - protein, 269 aa, Thermomyces lanuginosus
EVSQDLFNQFNLFAQYSAAAYCGKNNDAPAGTNITCTGNACPEVEKADATLLYSFRDSGVGDVTGFLALDNTNKLIVLSFRGSRSIENWIGNLNFDLKEINDICSGCRGHDGFTSSWFSVADTLRQKVEDAVREHPDYRVVFTGHSLGGALATVAGADLRGNSYDIDVFSYGAPRVGNRAFAEFLTVQTGGTLYRITHTNDIVPRLPPREFGYSHSSPEYWIKSGTLVPVRRRDIVKIEGIDATGGNNQPNIPDIPAHLWYFGLIGTCL

SEQ ID NO: 6326 - protein, 269 aa, Thermomyces lanuginosus
EKSQDLFNQFNLFAQYSAAAYCGKNNDAPAGTKITCTGNACPEVEKADATILYSFEDSGVGDVTGFLALDNTNKLIVLSFRGSRSIENWIGNLNFDLKEINDICSGCRGHDGFTSSWRSVADTLRQKVEDAVREHPDYRVVFTGHSLGGALATVAGADLRGNGYDIDVFSYGAPRVGNRAFAEFLTVQTGGTLYRITHTNDIVPRLPPREFGYSHSSPEYWIKIGTLVPVRRRDIVKIEGIDATGGNNQPNIPDIPAHLWYFGLIGTCL

SEQ ID NO: 6327 - protein, 269 aa, Thermomyces lanuginosus
EVSQDLFNQFNLFAQYSKAAYCGANNDAPAGTNITCTGNACPEVEKADATFLYSFEDSGVGDVTGFLALDNTNKQIVLSFRGSRSIENWIGNLFFDLKEINDICSGCRGHDGFTSSWRSVADTLRQKVEDAVREHPDYRVVFTGHSLGGALATIAGADLRGNGYDIDVFSYGAPRVGNRAFAEFLTNQTGGTLYRITHTNDIVPRLPPREFGYSHSSPEYWIKSGTLVPVTRNDIVKIEGIDATGGNNQPNIPDIPAHLWYFGLIGTCL

SEQ ID NO: 6328 - protein, 269 aa, Thermomyces lanuginosus
EVSQDLFNQFNLFAQYSAAAYCGKNNDAPAGTNITCTGNACPEVEKADATFLASFEDNGSGDVTGFLALDNTNKLIVLSFRGSRSIENWIGNLNFDLKEINDICSGCRGHDGFTSSWRSVADTLRQKVEDAVREHPDYRVVFTGHSLGGALATVAGADLRGNGYDIDVFSYGAPRVGNRAFAEFLTVQTGGTLYRITHTNDIVPRLPPREFGYSHSSPEYWIKSGTLVPVRRRDIVKIEGIDATGGNNQPNIPDILAHLWYFGLIGTCL

SEQ ID NO: 6329 - protein, 269 aa, Thermomyces lanuginosus
EVSQDLFNQFNLFAQYSAAAYCGKNNDAPAGTNITCTGNACPEVEKADATFLYSFEDNGSGDVTGFLALDNTNKLIVLSFRGSRSIENWIGNLNFDLKEINDICSGCRGHDGFTSSWRSVADTLRQKVEDAVREHPDYRVVFTGHSMGGALATVAGADLRGNGYDIDVFSYGAPRVGNRAFAEFLTVQTGGTLYRITHTNDIVPRLPPRELGYSHSSPEYWIKSGTLVPVRRRDIVKIEGIDATGGNNQPNIPDIPAHLWYFGLIGTCL

SEQ ID NO: 6330 - protein, 269 aa, Synthetic construct
EVSQDLFNQFNLFAQYSAAAYCGKNNDAPAGTNITCTGNACPEVEKADATFLYSFEDSGVGDVTGFLALDNTNKLIVLSFRGSRSIENWIGNLKFLLKKINDICSGCRGHDGFTSSWRSVADTLRQKVEDAVREHPDYRVVFTGHSLGGALATVAGADLRGNGYDIDVFSYGAPRVGNRAFAEFLTVQTGGTLYRITHTNDIVPRLPPREFGYSHSSPEYWIRSGTLVPVRRNDIVKIEGIDATGGNNRPNIPDIPAHLWYFGLIGTCL

SEQ ID NO: 6331 - protein, 269 aa, Thermomyces lanuginosus
EVSQDLFNQFNLFAQYSAAAYCGANNDAPAGTNITCTGNACPEVEKADATFLYSFEDSGVGDVTGFLALDNTNKQIVLSFRGSRSIENWIGNLRFDLKEINDICSGCRGHDGFTSSWRSVADTLRQKVEAAVREHPDYRVVFTGHSLGGALATIAGADLRGNGYDIDVFSYGAPRVGNRAFAEFLTVQTGGTLYRITHTNDIVPRLPPREFGYSHSSPEYWIKSGTLVPVTRNDIVKIEGIDATGGNNQPNIPDIPAHLWYFGRIGTCL

SEQ ID NO: 6332 - protein, 269 aa, Thermomyces lanuginosus
EYSQDLFNQFNLFAQYSAAAYCGKNNDAPAGTKITCTGNACPEVEKADATVLYSFEDSGVGDVTGFLALDNTNKLIVLSFRGSRSIENWIGNLNFDLKEINDICSGCRGHDGFTSSWRSVADTLRQKVEDAVREHPDYRVVFTGHSLGGALATVAGADLRGNGYDIDVFSYGAPRVGNRAFAEFLTVQTGGTLYRITLTNDIVPRLPPREFGYSHSSPEYWIKSGTLVPVRRRDIVKIEGIDATGGNNQPNIPDIPAHLWYFGLIGTCL

SEQ ID NO: 6333 - protein, 269 aa, Thermomyces lanuginosus
EVSVDLFNQFNLFAQYSAAAYCGKNNDAPAGTNITCTGNACPEVEKADATFLYSFEDSGKGDVTGFLALDNTNKLIVLSFRGSRSIENWRGNLNFDLKEINDICSGCRGHDGFTSSWRSVADTLRQKVEDAVREHPDYRVVFTGHSLGGALATVAGADLRGNGYDIDVFSYGAPRVGNRAFAEFLTVQTGGTLYRITHTNDIVPRLPPREFGYSHSSPEYWIKSGTLVPVRRRDIVKIEGIDATGGNNQPNIPDVPAHLWYFGLIGTCL

SEQ ID NO: 6334 - protein, 269 aa, Thermomyces lanuginosus
EVSDDLFNQFNLFAQYSAAAYCGKNNNAPAGTNITCTGNACPEVEKADATFLYSFKDMGVGDVTGFLALDNTNKLIVLSFRGSRSIENWIGNLNFDLKEINDICSGCRGHDGFTSSWRSVADTLRQKVEDAVREHPDYRVVFTGHSLGGALATVAGADLRGNGYDIDVFSYGAPRVGNRAFAEFLTVQTGGTLYRITHTNDIVPRLPPREFGYSHSSPEYWIKSGTLVPVTRQDIVKIEGIDATGGNNQPNIPDITAHLWYFGLIGTCL

SEQ ID NO: 6335 - protein, 269 aa, Thermomyces lanuginosus
EVSQDLFNQFNLFAQYSKAAYCGKNNSAEAGTDITCTGNACPEVFKADATFLYSFEDSGVGDVTGFLALDNTNKDIVLSFRGSRSIENWIGNLNFDLKEINDICSGCRGHDGFTSSWRSVADTLRQKVEDAVREHPDYRVVFTGHSLGGALATVAGADLRGNGYDIDVFSYGAPRVGNRAFAEFLTVQTGGTLYRITHTNDIVPRLPPREFGYSHSSPEYWIKSGTLVPVTRNDIVKIEGIDATGGNNQPNIPDIPAHLWYFGLIGTCL

SEQ ID NO: 6336 - protein, 269 aa, Thermomyces lanuginosus
EVSQDLFNQFNLFAQYSAAAYCGKNNRAPAGTNITCTGNACPEVERADATFLYSFEDSGVGDVTGFLALDNTNKLIVLSFRGSRSIENWIGNLNFDLKEINDICSGCRGHAGFTSSWRSVADTLRQKVEDAVREHPDYRVVFTGHSLGGALATVAGADLRGNGYDIDVFSYGAPRVGNRAFAEFLTVQTGGTLYRITHTNDIVPRLPPREFGYSHPSPEYWIKSGTGVPVTRNDIVKIEGIDATGGNNQPNIPDITAHLWYFGLIGTCL

SEQ ID NO: 6337 - protein, 269 aa, Thermomyces lanuginosus
EVSQDLFNQFNLFAQYSAAAYCGKNNDAPAGTNITCTGNACPEVEKADATFLYSFEDSGVGDVTGFLALDNTNKLIVLSFRGSRSIENWIGNLNFELKEINDICSGCRGHAGFTSSWRSVADTLRQKVEDAVREHPDYRVVFTGHSLGGALATVAGADLRGNKYDIDVFSYGAPRVGNRAFAEFLTVQTGGTLYRITHTNDIVPRLPPREFGYSHSSPEYWIKSGTLVPVRRRDIVKIEGIDATGGNNQPNIPDITAHLWYFGLIGTCL

SEQ ID NO: 6338 - protein, 269 aa, Thermomyces lanuginosus
EVSQDLFNQFNLFAQYSAAAYCGKNNDAPAGTQITCTGNACPEVEKADATFLYSFEDSGVGDVTGFLALDNTNKLIVLSFRGSRSIENWITNLNFDLKEINDICSGCRGHDGFTSSWRSVADTLRQKVEDAVREHPDYRVVFTGHSLGGALATVAGADLRGNKYDIDVFSYGAPRVGNRAFAEFLTVQTGGTLYRITHTNDIVPRLPPREFGYSHSSPEYWIKSGTLVPVRRRDIVKIEGIDATGGNNQPNIPSIPAHLWYFGLIGTCL

SEQ ID NO: 6339 - protein, 269 aa, Thermomyces lanuginosus
EYSQDLFNQFNLFAQYSAAAYCGKNNDAPAGTKITCTGNACPEVEKADATVLYSFEDSGVGDVTGFLALDNTNKLIVLSFRGSRSIENWIGNLNFDLKEINDICSGCRGHDGFTSSWRSVADTLRQKVEDAVREHPDYRVVFTGHSLGGALATVAGADLRGNGYDIDVFSYGAPRVGNRAFAEFLTVQTGGTLYRITNTNDIVPRLPPREFGYSHSSPEYWIKSGTLVPVRRRDIVKIEGIDATGGNNQPNIPDIPAHLWYFGLIGTCL

SEQ ID NO: 6340 - protein, 269 aa, Thermomyces lanuginosus
EVSQDLFNQFKLFAQYSAAAYCGKNNNAPAGTNITCTGNACPEVEKADATFLYSFKDMGVGDVTGFLALDNTNKLIVLSFRGSRSIENWIGNLNFDLKEINDICSGCRGHDGFTSSWRSVADTLRQKVEDAVREHPDYRVVFTGHSLGGALATVAGADLRGNGYDIDVFSYGAPRVGNRAFAEFLTVQTGGTLYRITHTNDIVPRLPPREFGYSHSSPEYWIKSGTLVPVTRQDIVKIEGIDATGGNNQPNIPDITAHLWYFGLIGTCL

SEQ ID NO: 6341 - protein, 269 aa, Thermomyces lanuginosus
EVSQDLFNQFNLFAQYSAAAYCGKNNHAPAGTNITCTGNACPEVEKADATFLYSFEDSGVGDVTGFLALDNTNKLIVLSFRGSRSIQNWIGNLNFNLKEINDICSGCRGHDGFTSSWRSVADTLRQKVEDAVREHPDYRVVFTGHSLGGALATVAGADLRGNGYDIDVFSYGAPRVGNRAFAEFLTVQTGGTLYRITHTNDIVPRLPPREFGYSHSSPEYWIKSGTLVPVRRRDIVKIEGIDATGGNNQPNIPVIPAHLWYFGLIGTCL

SEQ ID NO: 6342 - protein, 269 aa, Thermomyces lanuginosus
EVSQDLFNQFNLFAQYSAAAYCGKNNDAPAGTNITCTGNACPEVEKADATFLYSFEDSGVGDVTGFLALDNTNKLIVLSFRGSRSIENWIGNLNFWLKEINDICSGCRGHDGFTSSWRSVADTLRQKVEDAVREHPDYRVVFTGHSLGGALATVAGADLRGNGYDIDVFSYGAPRVGNRAFAEFLTVQTGGTLYRITHTNDIVPRLPPREFGYSHSSPEYWIKSGTLVPVTRNDIVKIEGIDATGGNNQPNIPDIPAHLWYFQATDACL

SEQ ID NO: 6343 - protein, 269 aa, Thermomyces lanuginosus
EYSQDLFNQFNLFAQYSAAAYCGKNNDAPAGTKITCTGNACPEVEKADATLLYSFEDSGVGDVTGFLALDNTNKLIVLSFRGSRSIENWIGNLNFDLKEINDICSGCRGHDGFTSSWRSVADTLRQKVEDAVREHPDYRVVFAGHSLGGALATVAGADLRGNGYDIDVFSYGAPRVGNRAFAEFLTVQTGGTLYRITHTNDIVPRLPPREFGYSHSSPEYWIKSGTLVPVRRRDIVKIEGIDATGGNNQPNIPDIPAHLWYFGLIGTCL

SEQ ID NO: 6344 - protein, 269 aa, Thermomyces lanuginosus
EVSQDLFNQFNLFAQYSAAAYCSKNNDAPAGTNITCTGNACPEVEKADATFLYSFRDSGVGDVTGFLALDNTNKLIVLSFRGSRSIENWIGNLNFDLKEINDICSGCRGHDGFTSSWFSVADTLRQKVEDAVREHPDYRVVFTGHSLGGALATVAGADLRGNGYDIDVFSYGAPRVGNRAFAEFLTVQTGGTLYRITHTNDIVPRLPPREFGYSHSSPEFWIKSGTLVPVRRRDIVKIEGIDATGGNNQPNIPDIPAHLWYFGLIGTCL

SEQ ID NO: 6345 - protein, 269 aa, Thermomyces lanuginosus
EKSQDLFNQFNLFAQYSAAAYCGKNNDAPAGTKITCTGNACPEVEKADATVLYSFEDSGVGDVTGFLALDNTNKLIVLSFRGSRSIENWIGNLNFDLKEINDICSGCRGHDGFTSSWRSVADTLRQKVEDAVREHPDYRVVFTGHSLGGALATVAGADLRGNGYDIDVFSYGAPRVGNRAFAEFLTVQTGGTLYRITHTNDIVPRLPPREFGYSHSSPEYWIKSGTDVPVRRRDIVKIEGIDATGGNNQPNIPDIPAHLWYFGLIGTCL

SEQ ID NO: 6346 - protein, 269 aa, Thermomyces lanuginosus
EVSQDLFNQFNLFAQYSKAAYCQANNDAPAGTNITCTGNACPEVEKADATFLYSFEDSGVGDVTGFLALDNTNKAIVLSFRGSRSIENWIGNLRFDLKEINDICSGCRGHDGFTSSWRSVADTLRQKVEDAVREHPDYRVVFTGHSLGGALATVAWADLRGNGYDIDVFSYGAPRVGNRAFAEFLTVQTGGTLYRITHTNDIVPRLPPREFGYSHSSPEYWIKSGTLVPVTRNDIVKIEGIDATGGNNQPNIPDIPAHLWYFGLIGTCL

SEQ ID NO: 6347 - protein, 269 aa, Thermomyces lanuginosus
EVSQDLFNQFNLFAQYSAAAYCGKNNDAPAGTNITCTGNACPEVEKADATILYSFEDSGVGDVTGFLALDNTNKLIVLSFRGSRSIENWIGNLNFDLKEINDICSGCRGHDGFTSSWRSVADTLRQKVEDAVREHPDYRVVFTGHSLGGALATVAGADLRGDGYDIDVFSYGAPRVGNRAFAEFLTVQTGGTLYRITNTNDIVPRLPPREFGYSHSSPEYWIKSGTLRPVRRRDIVKIEGIDATGGNNQPNIPDIPAHLWYFGLIGTCL

SEQ ID NO: 6348 - protein, 269 aa, Thermomyces lanuginosus
EVSQDLFNQFNLFAQYSAAAYCQKNNDAPAGTNITCTGNACPEVEKADATFLYSFEDSGVGDVTGFLALDNTNKQIVLSFRGSRSIENWIQNLNFDLKEINDICSGCRGHDGFTSSWRSVADTLRQKVEDAVREHPDYRVVFTGHSLGGALATVAGADLRGNGYDIDVFSYGAPRVGNRAFAEFLTNQTGGTLYRITHTNDIVPRLPPREFGYSHSSPEYWIKSGTLVPVTRNDIVKIEGIDATGGNNQPNQPDIPAHLWYFGRIGTCL

SEQ ID NO: 6349 - protein, 269 aa, Thermomyces lanuginosus
EYSQDLFNQFNLFAQYSAAAYCGKNNDAPAGTKITCTGNACPEVEKADATLLYSFEDSGVGDVTGFLALDNTNKLIVLSFRGSRSIENWIGNLNFDLKEINDICSGCRGHDGFTSSWRSVADTLRQKVEDAVREHPDYRVVFTGHSLGGALATVAGADLRGNGYDIDVFSYGAPRVGNRAFAEFLTVQTGGTLYRITHTNDIVPRLPPREFGYSHSSPEYWIKPGTLVPVRRRDIVKIEGIDATGGNNQPNIPDIPAHLWYFGLIGTCL

SEQ ID NO: 6350 - protein, 269 aa, Thermomyces lanuginosus
EKSQDLFNQFNLFAQYSAAAYCGKNNDAPAGTKITCTGNACPEVEKADATILYSFEDSGVGDVTGFLALDNTNKLIVLSFRGSRSIENWIGNLNFDLKEINDICSGCRGHDGFTSSWRSVADTLRQKVEDAVREHPDYRVVFTGHSLGGGLATVAGADLRGNGYDIDVFSYGAPRVGNRAFAEFLTVQTGGTLYRITHTNDIVPRLPPREFGYSHSSPEYWIKSGTLVPVRRRDIVKIEGIDATGGNNQPNIPDIPAHLWYFGLIGTCL

SEQ ID NO: 6351 - protein, 269 aa, Thermomyces lanuginosus
EVSQDLFNQFNLFAQYSAAAYCGKNNRAPAGTNITCTGNACPEVEKADATFLYSFEDSGVGDVTGFLALDNTNKLIVLSFRGSRSIENWIGNLNFELKEINDICSGCRGHDGFTSSWRSVADTLRQKVEDAVREHPDYRVVFTGHSLGGALATVAGADLRGNKYDIDVFSYGAPRVGNRAFAEFLTVQTGGTLYRITHTNDIVPRLPPREFGYSHSSPEYWIKSGTLVPVRRRDIVKIEGIDATGGNNQPNIPSIPAHLWYFGLIGTCL

SEQ ID NO: 6352 - protein, 269 aa, Thermomyces lanuginosus
EVSQDLFNQFNLFAQYSAAAYCGKNNDAPAGTNITCTGNACPEVEKADATFLYSFEDSGVGDVTGFLALDNTNKLIVLSFRGSRSIENWIGNLNFDLKEINDICSGCRGHAGFTSSWRSVADTLRQKVEDAVREHPDYRVVFTGHSLGGALATVAGADLRGNKYDIDVFSYGAPRVGNRAFAEFLTVQTGGTLYRITHTNDIVPRLPPREFGYSHSSPEYWIKSGTLVPVRRRDIVKIEGIDATGGNNQPNIPSITAHLWYFGLIGTCL

SEQ ID NO: 6353 - protein, 269 aa, Thermomyces lanuginosus
EVSQDLFNQFNLFAQYSAAAYCKKNNDAPAGTNITCTGNACPEVEKADATFLYSFKDSGVGDVTGFLALDNTNKRIVLSFRGSRSIENWIGNLNFDLKEINDICSGCRGHDGFTSSWRSVADTLRQKVEAAVREHPDYRVVFTGHSLGGALATVAGADLRGNGYDIDVFSYGAPRVGNRAFAEFLTNQTGGTLYRITHTNDIVPRLPPREFGYSHSSPEYWIKSGTLVPVTRNDIVKIEGIDATGGNNQPNIPDIPAHLWYFGRIGTCL

SEQ ID NO: 6354 - protein, 269 aa, Thermomyces lanuginosus
EYSQDLFNQFNLFAQYSAAAYCGKNNDAPAGTKITCTGNACPEVEKADATLLYSFEDSGVGDVTGFLALDNTNKLIVLSFRGSRSIENWIGNLNFDLKEINDICSGCRGHDGFTSSWRSVADTLRQKVEDAVREHPDYRVVFTGHSLGGALATVAGADLRGNGYDIDVFSYGAPRVGNRAFAEFLTVQTGGTLYRITSTNDIVPRLPPREFGYSHSSPEYWIKSGTLVPVRRRDIVKIEGIDATGGNNQPNIPDIPAHLWYFGLIGTCL

SEQ ID NO: 6355 - protein, 269 aa, Thermomyces lanuginosus
EVSQDLFNQFNLFAQYSAAAYCSKNNDAPAGTNITCTGNACPEVEKADATFLYSFRDSGVGDVTGFLALDNTNKLIVLSFRGSRSIENWIGNLNFDLKEINDICSGCRGHDGFTSSWFSVADTLRQKVEDAVREHPDYRVVFTGHSLGGALATVAGADLRGNGYDIDVFSYGAPRVGNRAFAEFLTVQTGGTLYRITHTNDIVPRLPPREFGYSHSSPEYWIKSGTLVPVRRRDIVKIEGIDAEGGNNQPNIPDIPAHLWYFGLIGTCL

SEQ ID NO: 6356 - protein, 269 aa, Thermomyces lanuginosus
EVSQDLFNQFNLFAQYSAAAYCGKNNDAPAGTNITCTGNACPEVEKADATFLYSFEDSGVGDVTGFLALDNTNKLIVLSFRGSRSIENWIQNLNFDLKEINDICSGCRGHDGFTSSWRSVADTLRQKVEDAVREHPDYRVVFTGHSLGGGLATVAGADLRGNGYDIDVFSYGAPRVGNRAFAEFLTVQTGGTLYRITHTNDIVPRLPPRQFGYSHSSPEYWIKSGTLVPVRRRDIVKIEGIDATGGNNQRNIPDIPAHLWYFGLIGTCL

SEQ ID NO: 6357 - protein, 269 aa, Thermomyces lanuginosus
EVSQDLFNQFNLFAQYSAAAYCGKNNRAPAGTNITCTGFACPEVEKADATFLYSFEDSGVGDVTGFLALDNTNKLIVLSFRGSRSIENWIGNLNFDLKEINDICSGCRGHGGFTSSWRSVADTLRQKVEDAVREHPDYRVVFTGHSLGGALATVAGADLRGNGYDIDVFSYGAPRVGNRAFAEFLTVQTGGTLYRITHTNDIVPRLPPREFGYSHPSPEYWIKSGTGVPVTRNDIVKIEGIDATGGNNQPNIPDITAHLWYFGLIGTCL

SEQ ID NO: 6358 - protein, 269 aa, Thermomyces lanuginosus
EVSDDLFNQFNLFAQYSAAAYCGKNNSAPAGTNITCTGNACPEVEKADATFLYSFKDMGVGDVTGFLALDNTNKLIVLSFRGSRSIENWIGNLNFDLKEINDICSGCRGHDGFTSSWRSVADTLRQKVEDAVREHPDYRVVFTGHSLGGALATVAGADLRGNGYDIDVFSYGAPRVGNRAFAEFLTVQTGGTLYRITHTNDIVPRLPPREFGYSHSSPEYWIKSGTLVPVTRQDIVKIEGIDATGGNNQPNIPDITAHLWYFGLIGTCL

SEQ ID NO: 6359 - protein, 269 aa, Thermomyces lanuginosus
EKSQDLFNQFNLFAQYSAAAYCGKNNDAPAGTKITCTGNACPEVEKADATVLYSFEDSGVGDVTGFLALDNTNKLIVLSFRGSRSIENWIGNLNFDLKEINDICSGCRGHDGFTSSWRSVADTLRQKVEDAVREHPDYRVVFTGHSLGGGLATVAGADLRGNGYDIDVFSYGAPRVGNRAFAEFLTVQTGGTLYRITHTNDIVPRLPPREFGYSHSSPEYWIKSGTLVPVRRRDIVKIEGIDATGGNNQPNIPDIPAHLWYFGLIGTCL

SEQ ID NO: 6360 - protein, 269 aa, Thermomyces lanuginosus
EVSQDLFNQFNLFAQYSAAAYCGKNNDAPAGTNITCTGNACPEVEKADATILYSFRDSGVGDVTGFLALDNTNKLIVLSFRGSRSIENWIGNLNFDLKEINDICSGCRGHDGFTSSWFSVADTLRQKVEDAVREHPDYRVVFTGHSLGGALATVAGADLRGNGYDIDVFSYGAPRVGNRAFAEFLTVQTGGTLYRITHTNDIVPRLPPREFGYSHSSPEFWIKSGTLVPVRRRDIVKIEGIDATGGNNQPNIPDIPAHLWYFGLIGTCL

SEQ ID NO: 6361 - protein, 269 aa, Thermomyces lanuginosus
EVSQDLFNQFNLFAQYSAAAYCGKNNRAPAGTNITCTGNACPEVEKADATFLYSFEDSGVGDVTGFLALDNTNKLIVLSFRGSRSIENWIGNLNFDLKEINDICSGCRGHAGFTSSWRSVADTLRQKVEDAVREHPDYRVVFTGHSLGGALATVAGADLRGNGYDIDVFSYGAPRVGNRAFAEFLTVQTGGTLYRITHTNDIVPRLPPREFGYSHPSPEYWIKSGTGVPVTRNDIVKIEGIDATGGNNQPNIPDITAHLWYFGLFGTCL

SEQ ID NO: 6362 - protein, 269 aa, Thermomyces lanuginosus
EVSQDLFNQFNLFAQYSAAAYCQKNNSAPAGTNITCTGNACPEVEKADATFLYSFEDSGVGDVTGFLALDNTNKGIVLSFRGSRSIENWIGNLNFDLKEINDICSGCRGHDGFTSSWRSVADTLRQKVEAAVREHPDYRVVFTGHSLGGALATVAGADLRGNGYDIDVFSYGAPRVGNRAFAEFLTNQTGGTLYRITHTNDIVPRLPPREFGYSHSSPEYWIKSGTLVPVTRNDIVKIEGIDATGGNNQPNIPDIPAHLWYFGRIGTCL

SEQ ID NO: 6363 - protein, 269 aa, Thermomyces lanuginosus
EVSQDLFNQFNLFAQYSKAAYCGANNDAPAGTNITCTGNACPEVEKADATFLYSFEDSGVGDVTGFLALDNTNKRIVLSFRGSRSIENWIGNLNFDLKEINDICSGCRGHDGFTSSWRSVADTLRQKVEAAVREHPDYRVVFTGHSLGGALATVAGADLRGNGYDIDVFSYGAPRVGNRAFAEFLTNQQGGTLYRITHTNDIVPRLPPREFGYSHSSPEYWIKSGTLVPVTRNDIVKIEGIDATGGNNQPNIPDIPAHLWYFGLIGTCL

SEQ ID NO: 6364 - protein, 269 aa, Thermomyces lanuginosus
EVSQDLFNQFNLFAQYSAAAYCGKNNDAPAGTNITCTGNACPEVEKADATFLYSFSDSGVGDVTGFLALDNTNKLIVLSFRGSRSIKNWIGNLNFLLKDINDICSGCRGHDGFTSSWRSVADTLRQKVEDAVREHPDYRVVFTGHSLGGALATVAGADLRGNGYDIDVFSYGAPRVGNRAFAEFLTVQTGGTLYRITHTNDIVPRLPPREFGYSHSSPEYWIKSGTLVPVRRRDIVKIEGIDATGGNNQPNIPDIPAHLWYFGLIGTCL

SEQ ID NO: 6365 - protein, 269 aa, Thermomyces lanuginosus
EKSQDLFNQFNLFAQYSAAAYCGKNNDAPAGTKITCTGNACPEVEKADATVLYSFEDSGVGDVTGFLALDNTNKLIVLSFRGSRSIENWIGNLNFDLKEINDICSGCRGHDGFTSSWRSVADTLRQKVEDAVREHPDYRVVFTGHSLGGALATVAGADLRGNGYDIDVFSYGAPRVGNRAFAEFLTVQTGGTLYRITHTNDIVPRLPPREFGYSHSSPEYWIKSGTLVPRRRRDIVKIEGIDATGGNNQPNIPDIPAHLWYFGLIGTCL

SEQ ID NO: 6366 - protein, 269 aa, Thermomyces lanuginosus
EVSQDLFNQFNLFAQYSAAAYCGANNDAPAGTNITCTGNACPEVEKADATFLYSFEDSGVGDVTGFLALDNTNKRIVLSFRGSRSIENWIGNLNFDLKEINDICSGCRGHAGFTSSWRSVADTLRQKVEDAVREHPDYRVVFTGHSLGGALATIAWADLRGNGYDIDVFSYGAPRVGNRAFAEFLTNQTGGTLYRITHTNDIVPRLPPREFGYSHSSPEYWIKSGTLVPVTRNDIVKIEGIDATGGNNQPNIPDIPAHLWYFGLIGTCL

SEQ ID NO: 6367 - protein, 269 aa, Thermomyces lanuginosus
EVSQDLFNQFNLFAQYSAAAYCQKNNSAPAGTNITCTGNACPEVEKADATTLYSFEDSGVGDVTGFLALDNTNKQIVLSFRGSRSIENWIGNLNFDLKEINDICSGCRGHDGFTSSWRSVADTLRQKVEDAVREHPDYRVVFTGHSLGGALATVAGADLRGNGYDIDVFSYGAPRVGNRAFAEFLTTQTGGTLYRITHTNDIVPRLPPREFGYSHSSPEYWIKSGTLVPVTRNDIVKIEGIDATGGNNQPNIPDIPAHLWYFGRIGTCL

SEQ ID NO: 6368 - protein, 269 aa, Thermomyces lanuginosus
EVSQDLFNQFNLFAQYSAAAYCGKNNRAPAGTNITCTCNACPEVEKADATFLYSFEDSGVGDVTGFLALDNTNKLIVLSFRGSRSIENWIGNLNFDLKEINDICSGCRGHGGFTSSWRSVADTLRQKVEDAVREHPDYRVVFTGHSLGGALATVAGADLRGNGYDIDVFSYGAPRVGNRAFAEFLTVQTGGTLYRITHTNDIVPRLPPREFGYSHPSPEYWIKSGTGVPVTRNDIVKIEGIDATGGNNQPNIPDITAHLWYFGLIGTCL

SEQ ID NO: 6369 - protein, 269 aa, Thermomyces lanuginosus
EYSQDLFNQFNLFAQYSAAAYCGKNNDAPAGTKITCTGNACPEVEKADATILYSFEDSGVGDVTGFLALDNTNKLIVLSFRGSRSIENWIGNLNFDLKEINDICSGCRGHDGFTSSWRSVADTLRQKVEDAVREHPDYRVVFTGHSLGGALATVAGADLRGNGYDIDVFSYGAPRVGNRAFAEFLTVQTGGTLYRITITNDIVPRLPPREFGYSHSSPEYWIKSGTLVPVRRRDIVKIEGIDATGGNNQPNIPDIPAHLWYFGLIGTCL

SEQ ID NO: 6370 - protein, 269 aa, Thermomyces lanuginosus
EVSQDLFNQFNLFAQYSAAAYCGKNNDAPAGTNITCTGNACPEVEKADATFLYSFRDSGVGDVTGFLALDNTNKLIVLSFRGSRSIENWIGNLNFDLKEINDICSGCRGHDGFTSSWFSVADTLRQKVEDAVREHPDYRVVFTGHSLGGALATVAGADLRGNSYDIDVFSYGAPRVGNRAFAEFLTVQTGGTLYRITHTNDIVPRLPPREFGYSHSSPEYWIKSGTLVPVRRRDIVKIEGIDATGGNNQPNIPDITAHLWYFGLIGTCL

SEQ ID NO: 6371 - protein, 269 aa, Thermomyces lanuginosus
EVSQDLFNQFNLFAQYSAAAYCQKNNDAPAGTNITCTGNACPEVEKADATTLYSFEDSGVGDVTGFLALDNTNKLIVLSFRGSRSIENWIGNLNFDLKEINDICSGCRGHDGFTSSWRSVADTLRQKVEAAVREHPDYRVVFTGHSLGGALATVAGADLRGNGYDIDVFSYGAPRVGNRAFAEFLTTQTGGTLYRITHTNDIVPRLPPREFGYSHSSPEYWIKSGTLVPVTRNDIVKIEGIDATGGNNQPNQPDIPAHLWYFGRIGTCL

SEQ ID NO: 6372 - protein, 269 aa, Thermomyces lanuginosus
EVSQDLFNQFNLFAQYSKAAYCQKNNDAPAGTNITCTGNACPEVEKADVTFLYSFEDSGVGDVTGFLALDNTNKLIVLSFRGSRSIENWIGNLNFDLKEINDICSGCRGHDGFTSSWRSVADTLRQKVEDAVREHPDYRVVFTGHSLGGALATVAWADLRGNGYDIDVFSYGAPRVGNRAFAEFLTTQDGGTLYRITHTNDIVPRLPPREFGYSHSSPEYWIKSGTLVPVTRNDIVKIEGIDATGGNNQPNIPDIPAHLWYFGLIGTCL

SEQ ID NO: 6373 - protein, 269 aa, Thermomyces lanuginosus
EYSQDLFNQFNLFAQYSAAAYCGKNNDAPAGTKITCTGNACPEVEKADATLLYSFEDSGVGDVTGFLALDNTNKLIVLSFRGSRSIENWIGNLNFDLKEINDICSGCRGHDGFTSSWRSVADTLRQKVEDAVREHPDYRVVFTGHSLGGALATVAGADLRGNGYDIDVFSYGAPRVGNRAFAEFLTVQTGGTLYRITHTNDIVPRLPPREFGYSHSSPEYWIKFGTLVPVRRRDIVKIEGIDATGGNNQPNIPDIPAHLWYFGLIGTCL

SEQ ID NO: 6374 - protein, 269 aa, Thermomyces lanuginosus
EVSQDLFNQFNLFAQYSAAAYCGKNNDAPAGTNITCTGNACPEVEKAQATFLYSFEDMGVGDVTGFLALDNTNKLIVLSFRGSRSIENWIGNLNFDLKEINDICSGCRGHDGFTSSWRSVADTLRQKVEDAVREHPDYRVVFTGHSLGGALATVAGADLRGNPYDIDVFSYGAPRVGNRAFAEFLTVQTGGTLYRITHTNDIVPRLPPREFGYSHSSPEYWIKSGTMVPVTRQDIVKIEGIDATGGNNQPNIPDIPAHLWYFGRIGTCL

SEQ ID NO: 6375 - protein, 269 aa, Thermomyces lanuginosus
EVSQDLFNQFNLFAQYSAAAYCGKNNDAPAGTQITCTGNACPEVEKADATFLYSFEDSGVGDVTGFLALDNTNKLIVLSFRGSRSIENWIQNLNFDLKEINDICSGCRGHDGFTSSWRSVADTLRQKVEDAVREHPDYRVVFTGHSLGGALATVAGADLRGNGYDIDVFSYGAPRVGNRAFAEFLTVQTGGTLYRITHTNDIVPRLPPRQFGYSHSSPEYWIKSGTLVPVRRRDIVKIEGIDATGGNNQPNIPDGPAHLWYFGLIGTCL

SEQ ID NO: 6376 - protein, 269 aa, Thermomyces lanuginosus
EVSQDLFNQFNLFAQYSAAAYCGKNNDAPAGTNITCTGNACPEVEKADATFLYSFEDSGVGDVTGFLALDNTNKLIVLSFRGSRSIENWIQNLNFDLKEINDICSGCRGHDGFTSSWRSVADTLRQKVEDAVREHPDYRVVFAGHSLGGALATVAGADLRGNGYDIDVFSYGAPRVGNRAFAEFLTVQTGGTLYRITHTNDIVPRLPPRQFGYSHSSPEYWIKSGTLVPVRRRDIVKIEGIDATGGNNQRNIPDIPAHLWYFGLIGTCL

SEQ ID NO: 6377 - protein, 269 aa, Synthetic construct
EVSQDLFNQFNLFAQYSAAAYCGKNNDAPAGTNITCTGNACPEVEKADATFLYSFEDSGVGDVTGFLALDNTNKLIVLSFRGSRSIENWFGNLNFLLKKINDICSGCRGHDGFTSSWRSVADTLRQKVEDAVREHPGYRVVFTGHSLGGALATVAGADLRGNGYDIDVFSYGAPRVGNRAFAEFLTAQTGGTLYRITHTNDIVPRLPPREFGYSHSSPEYWIKSGTLVPVTRNDIVKIEGIDATGGNNRPNIPDIPAHLWYFGLIGTCL

SEQ ID NO: 6378 - protein, 269 aa, Thermomyces lanuginosus
EVSQDLFNQFNLFAQYSAAAYCQKNNSAPAGTNITCTGNACPEVEKADATTLYSFEDSGVGDVTGFLALDNTNKQIVLSFRGSRSIENWIGNLNFDLKEINDICSGCRGHDGFTSSWRSVADTLRQKVEDAVREHPDYRVVFTGHSLGGALATVAGADLRGNGYDIDVFSYGAPRVGNRAFAEFLTTQTGGTLYRITHTNDIVPRLPPREFGYSHSSPEYWIKSGTLVPVTRNDIVKIEGIDATGGNNQPNIPDIPAHLWYFGQIGTCL

SEQ ID NO: 6379 - protein, 269 aa, Thermomyces lanuginosus
EVSRDLFNQFNLFAQYSAAAYCGKNNDAPAGTNITCTGNACPEVEKADATILYSFEDSGVGDVTGFLALDNTNKLIVLSFRGSRSIENWIGNLNFDLKEINDICSGCRGHDGFTSSWRSVADTLRQKVEDAVREHPDYRVVFTGHSLGGALATVAGADLRGDGYDIDVFSYGAPRVGNRAFAEFLTVQTGGTLYRITNTNDIVPRLPPREFGYSHSSPEYWIKSGTLVPVRRRDIVKIEGIDATGGNNQPNIPDIPAHLWYFGLIGTCL

SEQ ID NO: 6380 - protein, 269 aa, Thermomyces lanuginosus
EVSDDLFNQFKLFAQYSAAAYCGKNNNAPAGTNITCTGNACPEVEKADATFLYSFEDSGVGDVTGFLALDNTNKLIVLSFRGSRSIENWFGNLNFDLKEINDICSGCRGHDGFTSSWRSVADTLRQKVEDAVREHPDYRVVFTGHSLGGALATVAGADLRGNGYDIDVFSYGAPRVGNRAFAEFLTVQTGGTLYRITHTNDIVPRLPPREFGYSHSSPEYWIKSGTLVPVTRQDIVKIEGIDATGGNNQPNIPDITAHLWYFGLIGTCL

SEQ ID NO: 6381 - protein, 269 aa, Thermomyces lanuginosus
EVSDDLFNQFKLFAQYSAAAYCGKNNQAPAGTNITCTGNACPEVEKADATFLYSFKDMGVGDVTGFLALDNTNKLIVLSFRGSRSIENWIGNLNFDLKEINDICSGCRGHDGFTSSWRSVADTLRQKVEDAVREHPDYRVVFTGHSLGGALATVAGADLRGNGYDIDVFSYGAPRVGNRAFAEFLTVQTGGTLYRITHTNDIVPRLPPREFGYSHSSPEYWIKSGTLVPVTRQDIVKIEGIDATGGNNQPNIPDIPAHLWYFGLIGTCL

SEQ ID NO: 6382 - protein, 269 aa, Thermomyces lanuginosus
EVSQDLFNQFKLFAQYSAAAYCGKNNSAPAGTNITCTGNACPEVEKADATFLYSFKDSGVGDVTGFLALDNTNKLIVLSFRGSRSIENWFGNLNFDLKEINDICSGCRGHDGFTSSWRSVADTLRQKVEDAVREHPDYRVVFTGHSLGGALATVAGADLRGNGYDIDVFSYGAPRVGNRAFAEFLTVQTGGTLYRITHTNDIVPRLPPREFGYSHSSPEYWIKSGTLVPVTRQDIVKIEGIDATGGNNQPNIPDITAHLWYFGLIGTCL

SEQ ID NO: 6383 - protein, 269 aa, Thermomyces lanuginosus
EVSQDLFNQFNLFAQYSAAAYCGANNDAPAGTNITCTGNACPEVEKADATFLYSFEDSGVGDVTGFLALDNTNKQIVLSFRGSRSIENWIGNLNFDLKEINDICSGCRGHDGFTSSWRSVADTLRQKVEAAVREHPDYRVVFTGHSLGGALATVAWADLRGNGYDIDVFSYGAPRVGNRAFAEFLTVQQGGTLYRITHTNDIVPRLPPREFGYSHSSPEYWIKSGTLVPVTRNDIVKIEGIDATGGNNQPNIPDIPAHLWYFGRIGTCL

SEQ ID NO: 6384 - protein, 269 aa, Thermomyces lanuginosus
EVSQDLFNQFNLFAQYSKAAYCQKNNDAPAGTNITCTGNACPEVEKADATFLYSFEDSGVGDVTGFLALDNTNKQIVLSFRGSRSIENWIGNLNFDLKEINDICSGCRGHDGFTSSWRSVADTLRQKVEDAVREHPDYRVVFTGHSLGGALATVAWADLRGNGYDIDVFSYGAPRVGNRAFAEFLTTQDGGTLYRITHTNDIVPRLPPREFGYSHSSPEYWIKSGTLVPVTRNDIVKIEGIDATGGNNQPNIPDIPAHLWYFGLIGTCL

SEQ ID NO: 6385 - protein, 269 aa, Thermomyces lanuginosus
EVSQDLFNQFRLFAQYSAAAYCGKNNDAPAGTQITCTGNACPEVEKADATFLYSFEDSGVGDVTGFLALDNTNKLIVLSFRGSRSIENWLGNLNFDLKEINDICSGCRGHDGFTSSWRSVADTLRQKVEDAVREHPDYRVVFTGHSLGGALATVAGADLRGNLYDIDVFSYGAPRVGNRAFAEFLTVQTGGTLYRITHTNDIVPRLPPREFGYSHSSPEYWIKSGTLVPVRRRDIVKIEGIDATGGNNQPNIPDIPAHLWYFGLIGTCL

SEQ ID NO: 6386 - protein, 269 aa, Thermomyces lanuginosus
EVSQDLFNQFNLFAQYSKAAYCQKNNDAPAGTNITCTGNACPEVFKADATFLYSFEDSGVGDVTGFLALDNTNKQIVLSFRGSRSIENWIGNLNFDLKEINDICSGCRGHDGFTSSWRSVADTLRQKVEDAVREHPDYRVVFTGHSLGGALATVAWADLRGNGYDIDVFSYGAPRVGNRAFAEFLTTQTGGTLYRITHTNDIVPRLPPREFGYSHSSPEYWIKSGTLVPVTRNDIVKIEGIDATGGNNQPNIPDIPAHLWYFGLIGTCL

SEQ ID NO: 6387 - protein, 269 aa, Thermomyces lanuginosus
EVSQDLFNQFNLFAQYSAAAYCGKNNRAPAGTNITCTGNACPEVEKADATFLYSFEDSGVGDVTGFLALDNTNKLIVLSFRGSRSIENWIGNLNFDLKEINDICSGCRGHAGFTSSWRSVADTLRQKVEDAVREHPDYRVVFTGHSLGGALATVAGADLRGNGYDIDVFSYGAPRVGNRAFAEFLTVQTGGTLYRITHTNDIVPRLPPREYGYSHPSPEYWIKSGTGVPVTRNDIVKIEGIDATGGNNQPNIPDITAHLWYFGLIGTCL

SEQ ID NO: 6388 - protein, 269 aa, Thermomyces lanuginosus
EYSQDLFNQFNLFAQYSAAAYCGKNNDAPAGTKITCTGNACPEVEKADATVLYSFEDSGVGDVTGFLALDNTNKLIVLSFRGSRSIENWIGNLNFDLKEINDICSGCRGHDGFTSSWRSVADTLRQKVEDAVREHPDYRVVFTGHSLGGALATVAGADLRGNGYDIDVFSYGAPRVGNRAFAEFLTVQTGGTLYRITYTNDIVPRLPPREFGYSHSSPEYWIKSGTLVPVRRRDIVKIEGIDATGGNNQPNIPDIPAHLWYFGLIGTCL

SEQ ID NO: 6389 - protein, 269 aa, Synthetic construct
EVSQDLFNQFNLFAQYSAAAYCGKNNDAPAGTNITCTGNACPEVEKADATFLYSFEGSVVGDVTGFLALDNTNKLIVLSFRGSRSIENWIGNLKFLLKEINDICSGCRGHDGFTSSWRSVADTLRQKVEDAVREHPDYRVVFTGHSLGGALATVAGADLRGNGYDIDVFPYGAPRVGNRAFAEFLTVQTGGTLYRITHTNDIVPRLPPREFGYSHSSPEYWIKSGTLVPVTRNDIVKIEGIDATGGNNRPNIPDIPAHLWYFGLIGTCL

SEQ ID NO: 6390 - protein, 269 aa, Thermomyces lanuginosus
EVSQDLFNQFNLFAQYSAAAYCSKNNDAPAGTNITCTGNACPEVEKADATFLYSFRDSGVGDVTGFLALDNTNKLIVLSFRGSRSIENWIGNLNFDLIEINDICSGCRGHDGFTSSWFSVADTLRQKVEDAVREHPDYRVVFTGHSLGGALATVAGADLRGNGYDIDVFSYGAPRVGNRAFAEFLTVQTGGTLYRITHTNDIVPRLPPREFGYSHSSPEYWIKSGTLVPVRRRDIVKIEGIDATGGNNQPNIPDIPAHLWYFGLIGTCL

SEQ ID NO: 6391 - protein, 269 aa, Thermomyces lanuginosus
EVSQDLFNQFNLFAQYSAAAYCGKNNDAPAGTNITCTGNACPEVEKADATILYSFEDSGVGDVTGFLALDNTNKLIVLSFRGSRSIENWIGNLNFDLKEINDICSGCRGHDGFTSSWRSVADTLRQKVEDAVREHPDYRVVFAGHSLGGALATVAGADLRGDGYDIDVFSYGAPRVGNRAFAEFLTVQTGGTLYRITNTNDIVPRLPPREFGYSHSSPEYWIKSGTLVPVRRRDIVKIEGIDATGGNNQPNIPDIPAHLWYFGLIGTCL

SEQ ID NO: 6392 - protein, 269 aa, Thermomyces lanuginosus
EVSQDLFNQFNLFAQYSKAAYCGKNNDAPAGTNITCTGNACPEVEKADATFLYSFEDSGVGDVTGFLALDNTNKQIVLSFRGSRSIENWIGNLNFDLKEINDICSGCRGHAGFTSSWRSVADTLRQKVEDAVREHPDYRVVFTGHSLGGALATIAWADLRGNGYDIDVFSYGAPRVGNRAFAEFLTNQTGGTLYRITHTNDIVPRLPPREFGYSHSSPEYWIKSGTLVPVTRNDIVKIEGIDATGGNNQPNIPDIPAHLWYFGLIGTCL

SEQ ID NO: 6393 - protein, 269 aa, Thermomyces lanuginosus
EVSQDLFNQFKLFAQYSAAAYCGKNNQAPAGTNITCTGNACPEVEKADATFLYSFEDMGVGDVTGFLALDNTNKLIVLSFRGSRSIENWFGNLNFDLKEINDICSGCRGHDGFTSSWRSVADTLRQKVEDAVREHPDYRVVFTGHSLGGALATVAGADLRGNGYDIDVFSYGAPRVGNRAFAEFLTVQTGGTLYRITHTNDIVPRLPPREFGYSHSSPEYWIKSGTLVPVTRQDIVKIEGIDATGGNNQPNIPDITAHLWYFGLIGTCL

SEQ ID NO: 6394 - protein, 269 aa, Thermomyces lanuginosus
EYSQDLFNQFNLFAQYSAAAYCGKNNDAPAGTKITCTGNACPEVEKADATLLYSFEDSGVGDVTGFLALDNTNKLIVLSFRGSRSIENWIGNLNFDLKEINDICSGCRGHDGFTSSWRSVADTLRQKVEDAVREHPDYRVVFTGHSLGGALATVAGADLRGNGYDIDVFSYGAPRVGNRAFAEFLTVQTGGTLYRITITNDIVPRLPPREFGYSHSSPEYWIKSGTLVPVRRRDIVKIEGIDATGGNNQPNIPDIPAHLWYFGLIGTCL

SEQ ID NO: 6395 - protein, 269 aa, Thermomyces lanuginosus
EVSQDLFNQFNLFAQYSKAAYCQKNNDAPAGTNITCTGNACPEVFKADVTFLYSFEDSGVGDVTGFLALDNTNKQIILSFRGSRSIENWIGNLNFDLKEINDICSGCRGHDGFTSSWRSVADTLRQKVEDAVREHPDYRVVFTGHSLGGALATVAGADLRGNGYDIDVFSYGAPRVGNRAFAEFLTVQTGGTLYRITHTNDIVPRLPPREFGYSHSSPEYWIKSGTLVPVTRNDIVKIEGIDATGGNNQPNIPDIPAHLWYFGLIGTCL

SEQ ID NO: 6396 - protein, 269 aa, Thermomyces lanuginosus
EVSQDLFNQFNLFAQYSAAAYCGKNNDAPAGTNITCTGNACPEVPKADVTFLYSFEDSGVGDVTGFLALDNTNKQIILSFRGSRSIENWIGNLNFDLKEINDICSGCRGHDGFTSSWRSVADTLRQKVEDAVREHPDYRVVFTGHSLGGALATVAGADLRGNGYDIDVFSYGAPRVGNRAFAEFLTTQDGGTLYRITHTNDIVPRLPPREFGYSHSSPEYWIKSGTLVPVTRNDIVKIEGIDATGGNNQPNIPDIPAHLWYFGLIGTCL

SEQ ID NO: 6397 - protein, 269 aa, Thermomyces lanuginosus
EVSQDLFNQFNLFAQYSAAAYCGKNNDAPAGTNITCTGNACPEVEKADATFLYSFRDSGVGDVTGFLALDNTNKLIVLSFRGSRSIENWIGNLNFDLIEINDICSGCRGHDGFTSSWFSVADTLRQKVEDAVREHPDYRVVFTGHSLGGALATVAGADLRGNGYDIDVFSYGAPRVGNRAFAEFLTVQTGGTLYRITHTNDIVPRLPPREFGYSHSSPEFWIKSGTLVPVRRRDIVKIEGIDATGGNNQPNIPDIPAHLWYFGLIGTCL

SEQ ID NO: 6398 - protein, 269 aa, Thermomyces lanuginosus
EVSQDLFNQFNLFAQYSAAAYCGKNNEAPAGTNITCTGNACPEVEKADATFLYSFEDSGVGDVTGFLALDNTNKLIVLSFRGSRSIENWIGNLNFDLKEINDICSGCRGHDGFTSSWRSVADTLRQKVEAAVREHPDYRVVFTGHSLGGALATVAGADLRGNPYDIDVFSYGAPRVGNRAFAEFLTVQTGGTLYRITHTNDIVPRLPPREFGYSHSSPEYWIKSGTMVPVTRADIVKIEGIDATGGNNQPNIPDIPAHLWYFGRIGTCL

SEQ ID NO: 6399 - protein, 269 aa, Thermomyces lanuginosus
EVSQDLFNQFNLFAQYSAAAYCGKNNDAPAGTQITCTGNACPEVEKADATFLYSFEDSGVGDVTGFLALDNTNKLIVLSFRGSRSIENWIGNLNFSLKEINDICSGCRGHDGFTSSWRSVADTLRQKVEDAVREHPDYRVVFTGHSLGGALATVAGADLRGNGYDIDVFSYGAPRVGNRAFAEFLTVQTGGTLYRITHTNDIVPRLPPREFGYSHSSPEYWIKSGTLIPVRRRDIVKIEGIDATGGNNRPNIPDIPAHLWYFGLIGTCL

SEQ ID NO: 6400 - protein, 269 aa, Thermomyces lanuginosus
EVSQDLFNQFNLFAQYSAAAYCGKNNDAPAGTNITCTGNACPEVEKADATFLYSFEDSGVGDVTGFLALDNTNKQIVLSFRGSRSIENWIGNLNFDLKEINDICSGCRGHAGFTSSWRSVADTLRQKVEAAVREHPDYRVVFTGHSLGGALATIAGADLRGNGYDIDVFSYGAPRVGNRAFAEFLTNQQGGTLYRITHTNDIVPRLPPREFGYSHSSPEYWIKSGTLVPVTRNDIVKIEGIDATGGNNQPNIPDIPAHLWYFGLIGTCL

SEQ ID NO: 6401 - protein, 269 aa, Thermomyces lanuginosus
EVSQDLFNQFNLFAQYSAAAYCGKNNDAPAGTNITCTGNICPEVEKADATLLYSFRDSGVGDVTGFLALDNTNKLIVLSFRGSRSIENWIGNLNFDLKEINDICSGCRGHDGFTSSWFSVADTLRQKVEDAVREHPDYRVVFTGHSLGGALATVAGADLRGNGYDIDVFSYGAPRVGNRAFAEFLTVQTGGTLYRITHTNDIVPRLPPREFGYSHSSPEYWIKSGTLVPVRRRDIVKIEGIDATGGNNQPNIPDIPAHLWYFGLIGTCL

SEQ ID NO: 6402 - protein, 269 aa, Thermomyces lanuginosus
EKSQDLFNQFNLFAQYSAAAYCGKNNDAPAGTKITCTGNACPEVEKADATILYSFEDSGVGDVTGFLALDNTNKLIVLSFRGSRSIENWIGNLNFDLKEINDICSGCRGHDGFTSSWRSVADTLRQKVEDAVREHPDYRVVFTGHSLGGALATVAGADLRGNGYDIDVFSYGAPRVGNRAFAEFLTVQTGGTLYRITHTNDIVPRLPPREFGYSHSSPEYWIKPGTLVPVRRRDIVKIEGIDATGGNNQPNIPDIPAHLWYFGLIGTCL

SEQ ID NO: 6403 - protein, 269 aa, Thermomyces lanuginosus
EVSQDLFNQFNLFAQYSAAAYCGKNNNAPAGTNITCTGNACPEVEKADATFLYSFRDSGVGDVTGFLALDNTNKLIVLSFRGSRSIENWIGNLNFDLKEINDICSGCRGHDGFTSSWFSVADTLRQKVEDAVREHPDYRVVFTGHSLGGALATVAGADLRGNGYDIDVFSYGAPRVGNRAFAEFLTVQTGGTLYRITHTNDIVPRLPPREFGYSHSSPEYWIKSGTLVPVRRRDIVKIEGIDATGGNNQPNIPDITAHLWYFGLIGTCL

SEQ ID NO: 6404 - protein, 269 aa, Thermomyces lanuginosus
EVSQDLFNQFNLFAQYSAAAYCGKNNDAPAGTNITCTGNACPEVEKADATFLYSFEDNGSGDVTGFLALDNTNKLIVLSFRGSRSPENWIGNLNFDLKEINDICSGCRGHDGFTSSWRSVADTLRQKVEDAVREHPDYRVVFTGHSLGGALATVAGADLRGNGYDIDVFSYGAPRVGNRAFAEFLTVQTGGTLYRITHTNDIVPRLPPREFGYSHSSPEYWIKSGTLVPVRRRDIVKIEGIDATGGNNQPNIPDISAHLWYFGLIGTCL

SEQ ID NO: 6405 - protein, 269 aa, Thermomyces lanuginosus
EVSRDLFNQFNLFAQYSAAAYCGKNNDAPAGTNITCTGNACPEVEKADATILYSFEDSGVGDVTGFLALDNTNKLIVLSFRGSRSIENWIGNLNFDLKEINDICSGCRGHDGFTSSWRSVADTLRQKVEDAVREHPDYRVVFTGHSLGGALATVAGADLRGNGYDIDVFSYGAPRVGNRAFAEFLTVQTGGTLYRITNTNDIVPRLPPREFGYSHSSPEYWIKSGTLPPVRRRDIVKIEGIDATGGNNQPNIPDIPAHLWYFGLIGTCL

SEQ ID NO: 6406 - protein, 269 aa, Thermomyces lanuginosus
EVSQDLFNQFNLFAQYSAAAYCQKNNDAPAGTNITCTGNACPEVEKADATTLYSFEDSGVGDVTGFLALDNTNKGIVLSFRGSRSIENWIQNLNFDLKEINDICSGCRGHDGFTSSWRSVADTLRQKVEDAVREHPDYRVVFTGHSLGGALATVAGADLRGNGYDIDVFSYGAPRVGNRAFAEFLTNQTGGTLYRITHTNDIVPRLPPREFGYSHSSPEYWIKSGTLVPVTRNDIVKIEGIDATGGNNQPNQPDIPAHLWYFGLIGTCL

SEQ ID NO: 6407 - protein, 269 aa, Thermomyces lanuginosus
EVSQDLFNQFNLFAQYSAAAYCQKNNDAPAGTNITCTGNACPEVEKADATTLYSFEDSGVGDVTGFLALDNTNKLIVLSFRGSRSIENWIQNLNFDLKEINDICSGCRGHDGFTSSWRSVADTLRQKVEDAVREHPDYRVVFTGHSLGGALATVAGADLRGNGYDIDVFSYGAPRVGNRAFAEFLTNQTGGTLYRITHTNDIVPRLPPREFGYSHSSPEYWIKSGTLVPVTRNDIVKIEGIDATGGNNQPNQPDIPAHLWYFGRIGTCL

SEQ ID NO: 6408 - protein, 269 aa, Thermomyces lanuginosus
EYSQDLFNQFNLFAQYSAAAYCGKNNDAPAGTKITCTGNACPEVEKADATVLYSFEDSGVGDVTGFLALDNTNKLIVLSFRGSRSIENWIGNLNFDLKEINDICSGCRGHDGFTSSWRSVADTLRQKVEDAVREHPDYRVVFTGHSLGGALATVAGADLRGNGYDIDVFSYGAPRVGNRAFAEFLTVQTGGTLYRITHTNDIVPRLPPREFGYSHSSPEYWIKSGTLVPRRRRDIVKIEGIDATGGNNQPNIPDIPAHLWYFGLIGTCL

SEQ ID NO: 6409 - protein, 269 aa, Thermomyces lanuginosus
EVSQDLFNQFNLFAQYSAAAYCGKNNSAEAGTDITCTGNACPEVFKADATFLYSFEDSGVGDVTGFLALDNTRKDIVLSFRGSRSIENWIGNLNFDLKEINDICSGCRGHDGFTSSWRSVADTLRQKVEDAVREHPDYRVVFTGHSLGGALATVAGADLRGNGYDIDVFSYGAPRVGNRAFAEFLTVQTGGTLYRITHTNDIVPRLPPREFGYSHSSPEYWIKSGTLVPVTRNDIVKIEGIDATGGNNQPNIPDIPAHLWYFGLIGTCL

SEQ ID NO: 6410 - protein, 269 aa, Thermomyces lanuginosus
EVSQDLFNQFNLFAQYSKAAYCGKNNDAPAGTNITCTGNACPEVFKADVTFLYSFEDSGVGDVTGFLALDNTNKQIILSFRGSRSIENWIGNLNFDLKEINDICSGCRGHDGFTSSWRSVADTLRQKVEDAVREHPDYRVVFTGHSLGGALATVAGADLRGNGYDIDVFSYGAPRVGNRAFAEFLTTQTGGTLYRITHTNDIVPRLPPREFGYSHSSPEYWIKSGTLVPVTRNDIVKIEGIDATGGNNQPNIPDIPAHLWYFGLIGTCL

SEQ ID NO: 6411 - protein, 269 aa, Thermomyces lanuginosus
EVSRDLFNQFNLFAQYSAAAYCGKNNDAPAGTNITCTGNACPEVEKADATILYSFEDSGVGDVTGFLALDNTNKLIVLSFRGSRSIENWIGNLNFDLKEINDICSGCRGHDGFTSSWRSVADTLRQKVEDAVREHPDYRVVFTGHSLGGALATVAGADLRGNGYDIDVFSYGAPRVGNRAFAEFLTVQTGGTLYRITSTNDIVPRLPPREFGYSHSSPEYWIKSGTLPPVRRRDIVKIEGIDATGGNNQPNIPDIPAHLWYFGLIGTCL

SEQ ID NO: 6412 - protein, 269 aa, Thermomyces lanuginosus
EVSQDLFNQFNLFAQYSKAAYCQKNNDAPAGTNITCTGNACPEVEKADATFLYSFEDSGVGDVTGFLALDNTNKQIILSFRGSRSIENWIGNLNFDLKEINDICSGCRGHDGFTSSWRSVADTLRQKVEAAVREHPDYRVVFTGHSLGGALATVAGADLRGNGYDIDVFSYGAPRVGNRAFAEFLTNQTGGTLYRITHTNDIVPRLPPREFGYSHSSPEYWIKSGTLVPVTRNDIVKIEGIDATGGNNQPNIPDIPAHLWYFGLIGTCL

SEQ ID NO: 6413 - protein, 269 aa, Thermomyces lanuginosus
EVSRDLFNQFNLFAQYSAAAYCGKNNDAPAGTNITCTGNACPEVEKADATFLYSFEDSGVGDVTGFLALDNTNKLIVLSFRGSRSIENWIGNLNFDLKEINDICSGCRGHDGFTSSWRSVADTLRQKVEDAVREHPDYRVVFTGHSLGGALATVAGADLRGDGYDIDVFSYGAPRVGNRAFAEFLTVQTGGTLYRITNTNDIVPRLPPREFGYSHSSPEYWIKSGTLRPVRRRDIVKIEGIDATGGNNQPNIPDIPAHLWYFGLIGTCL

SEQ ID NO: 6414 - protein, 269 aa, Thermomyces lanuginosus
EVSQDLFNQFNLFAQYSAAAYCGKNNQAPAGTNITCTGNACPEVEKADATFLYSFKDMGVGDVTGFLALDNTNKLIVLSFRGSRSIENWIGNLNFDLKEINDICSGCRGHDGFTSSWRSVADTLRQKVEAAVREHPDYRVVFTGHSLGGALATVAGADLRGNGYDIDVFSYGAPRVGNRAFAEFLTVQTGGTLYRITHTNDIVPRLPPREFGYSHSSPEYWIKSGTLVPVTRNDIVKIEGIDATGGNNQPNQPDIPAHLWYFGRIGTCL

SEQ ID NO: 6415 - protein, 269 aa, Thermomyces lanuginosus
EKSQDLFNQFNLFAQYSAAAYCGKNNDAPAGTKITCTGNACPEVEKADATILYSFEDSGVGDVTGFLALDNTNKLIVLSFRGSRSIENWIGNLNFDLKEINDICSGCRGHDGFTSSWRSVADTLRQKVEDAVREHPDYRVVFTGHSLGGALATVAGADLRGNGYDIDVFSYGAPRVGNRAFAEFLTVQTGGTLYRITHTNDIVPRLPPREFGYSHSSPEYWIKSGTLPPVRRRDIVKIEGIDATGGNNQPNIPDIPAHLWYFGLIGTCL

SEQ ID NO: 6416 - protein, 269 aa, Thermomyces lanuginosus
EVSQDLFNQFNLFAQYSAAAYCGKNNDAPAGTNITCTGNACPEVEKADATFLYSFEDMGVGDVTGFLALDNTNKLIVLSFRGSRSIENWIGNLNFDLKEINDICSGCRGHDGFTSSWRSVADTLRQKVEAAVREHPQYRVVFTGHSLGGALATVAGADLRGNPYDIDVFSYGAPRVGNRAFAEFLTVQTGGTLYRITHTNDIVPRLPPREFGYSHSSPEYWIKSGTLVPVTRQDIVKIEGIDATGGNNQPNIPDIPAHLWYFGRIGTCL

SEQ ID NO: 6417 - protein, 269 aa, Thermomyces lanuginosus
EVSQDLFNQFNLFAQYSAAAYCGKNNDAPAGTQITCTANACPEVEKADATFLYSFEDSGVGDVTGFLALDNTNKLIVLSFRGSRSIENWIGNLNFDLKEINDICSGCRGHDGFTSSWRSVADTLRQKVEDAVREHPDYRVVFTGHSLGGALATVAGADLRGNAYDIDVFSYGAPRVGNRAFAEFLTVQTGGTLYRITHTNDIVPRLPPREFGYSHSSPEYWIKSGTLVPVRRRDIVKIEGIDATGGNNQPNIPDIAAHLWYFGLIGTCL

SEQ ID NO: 6418 - protein, 269 aa, Thermomyces lanuginosus
EVSQDLFNQFNLFAQYSAAAYCGKNNNAPAGTNITCTGNICPEVEKADATFLYSFRDSGVGDVTGFLALDNTNKLIVLSFRGSRSIENWIGNLNFDLKEINDICSGCRGHDGFTSSWFSVADTLRQKVEDAVREHPDYRVVFTGHSLGGALATVAGADLRGNGYDIDVFSYGAPRVGNRAFAEFLTVQTGGTLYRITHTNDIVPRLPPREFGYSHSSPEYWIKSGTLVPVRRRDIVKIEGIDATGGNNQPNIPDIPAHLWYFGLIGTCL

SEQ ID NO: 6419 - protein, 269 aa, Thermomyces lanuginosus
EVSQDLFNQFNLFAQYSAAAYCGKNNDAPAGTNITCTGNACPEVEKADATFLYSFRDSGVGDVTGFLALDNTNKLIVLSFRGSRSIENWIGNLNFDLKEINDICSGCRGHDGFTSSWFSVADTLRQKVEDAVREHPDYRVVFTGHSLGGALATVAGADLRGNGYDIDVFSYGAPRVGNRAFAEFLTVQTGGTLYRITHTNDIVPRLPPREFGYSHSSPEYWIKSGTLVPVRRRDIVKIEGIDAEGGNNQPNIPDITAHLWYFGLIGTCL

SEQ ID NO: 6420 - protein, 269 aa, Thermomyces lanuginosus
EVSQDLFNQFNLFAQYSAAAYCQKNNSAPAGTNITCTGNACPEVEKADATFLYSFEDSGVGDVTGFLALDNTNKQIVLSFRGSRSIENWIGNLNFDLKEINDICSGCRGHDGFTSSWRSVADTLRQKVEAAVREHPDYRVVFTGHSLGGALATVAGADLRGNGYDIDVFSYGAPRVGNRAFAEFLTTQTGGTLYRITHTNDIVPRLPPREFGYSHSSPEYWIKSGTLVPVTRNDIVKIEGIDATGGNNQPNQPDIPAHLWYFGLIGTCL

SEQ ID NO: 6421 - protein, 269 aa, Thermomyces lanuginosus
EVSRDLFNQFNLFAQYSAAAYCGKNNDAPAGTNITCTGNACPEVEKADATFLYSFEDSGVGDVTGFLALDNTNKLIVLSFRGSRSIENWIGNLNFDLKEINDICSGCRGHDGFTSSWRSVADTLRQKVEDAVREHPDYRVVFAGHSLGGALATVAGADLRGNGYDIDVFSYGAPRVGNRAFAEFLTVQTGGTLYRITSTNDIVPRLPPREFGYSHSSPEYWIKSGTLRPVRRRDIVKIEGIDATGGNNQPNIPDIPAHLWYFGLIGTCL

SEQ ID NO: 6422 - protein, 269 aa, Thermomyces lanuginosus
EVSQDLFNQFNLFAQYSAAAYCGKNNDAPAGTNITCTGNACPEVEKADATFLYSFEDSGVGDVTGFLALDNTNKLIVLSFRGSRSIENWIGNLNFDLKEINDICSGCRGHDGFTSSWRSVADTLRQKVEDAVREHPDYRVVFTGHSLGGALATVAGADLRGNGYDIDVFSYGAPRVGNRAFAEFLTVQTGGTLYRITHTNDLVPRLPPRGFGYSHSSPEYWIKSGTLVPVRRRDIVKIEGIDATGGNNQPNIPDAKAHLWYFGLIGTCL

SEQ ID NO: 6423 - protein, 269 aa, Thermomyces lanuginosus
EYSQDLFNQFNLFAQYSAAAYCGKNNDAPAGTKITCTGNACPEVEKADATLLYSFEDSGVGDVTGFLALDNTNKLIVLSFRGSRSIENWIGNLNFDLKEINDICSGCRGHDGFTSSWRSVADTLRQKVEDAVREHPDYRVVFTGHSLGGALATVAGADLRGNGYDIDVFSYGAPRVGNRAFAEFLTVQTGGTLYRITHTNDIVPRLPPREFGYSHSSPEYWIKSGTDVPVRRRDIVKIEGIDATGGNNQPNIPDIPAHLWYFGLIGTCL

SEQ ID NO: 6424 - protein, 269 aa, Thermomyces lanuginosus
EVSQDLFNQFNLFAQYSAAAYCGKNNDAPAGTNITCTGNACPEVEKADATFLYSFEDNGSGDVTGFLALDNTNKLIVLSFRGSRSIENWIGNLNFDLKEINDICSGCRGHDGFTSSWRSVADTLRQKVEDAVREHPDYRVVFTGHSLGGALATVAGADLRGNGYDIDVFSYGAPRVGNRAFAEFLTVQTGGTLYRITHTNDIVPRLPPRVFGYSHSSPEYWIKSGTLVPVRRRDIVKIEGIDATGGNNRPNIPDIPAHLWYFGLIGTCL

SEQ ID NO: 6425 - protein, 269 aa, Thermomyces lanuginosus
EVSQDLFNQFNLFAQYSKAAYCGKNNSAPAGTDITCTGNACPEVFKADATFLYSFEDSGVGDVTGFLALDNTRKDIVLSFRGSRSIENWIGNLNFDLKEINDICSGCRGHDGFTSSWRSVADTLRQKVEDAVREHPDYRVVFTGHSLGGALATVAGADLRGNGYDIDVFSYGAPRVGNRAFAEFLTVQTGGTLYRITHTNDIVPRLPPREFGYSHSSPEYWIKSGTLVPVTRNDIVKIEGIDATGGNNQPNIPDIPAHLWYFGLIGTCL

SEQ ID NO: 6426 - protein, 269 aa, Thermomyces lanuginosus
EVSQDLFNQFNLFAQYSAAAYCGKNNRAPAGTNITCSGNACPEVEKADATFLYSFEDSGVGDVTGFLALDNTNKLIVLSFRGSRSIENWIGNLNFDLKEINDICSGCRGHGGFTSSWRSVADTLRQKVEDAVREHPDYRVVFTGHSLGGALATVAGADLRGNGYDIDVFSYGAPRVGNRAFAEFLTVQTGGTLYRITHTNDIVPRLPPREFGYSHPSPEYWIKSGTGVPVTRNDIVKIEGIDATGGNNQPNIPDITAHLWYFGLIGTCL

SEQ ID NO: 6427 - protein, 269 aa, Thermomyces lanuginosus
EVSQDLFNQFNLFAQYSAAAYCGKNNDAPAGTNITCTGNACPEVEKADATLLYSFRDSGVGDVTGFLALDNTNKLIVLSFRGSRSIENWIGNLNFDLKEINDICSGCRGHDGFTSSWFSVADTLRQKVEDAVREHPDYRVVFTGHSLGGALATVAGADLRGNGYDIDVFSYGAPRVGNRAFAEFLTVQTGGTLYRITHTNDIVPRLPPREFGYSHSSPEYWIKSGTLVPVRRRDIVKIEGIDATGGNNQPNIPDITAHLWYFGLIGTCL

SEQ ID NO: 6428 - protein, 269 aa, Thermomyces lanuginosus
EVSQDLFNQFNLFAQYSAAAYCGKNNDAPAGTQITCTGNACPEVEKADATFLYSFQDSGVGDVTGFLALDNTNKLIVLSFRGSRSIENWIGNLNFDLKEINDICSGCRGHDGFTSSWRSVADTLRQKVEDAVREHPDYRVVFTGHSLGGALATVARADLRGNGYDIDVFSYGAPRWGNRAFAEFLTVQTGGTLYRITHTNDIVPRLPPREFGYSHSSPEYWIKSGTLVPVRRRDIVKIEGIDATGGNNQPNIPDIPAHLWYFGLIGTCL

SEQ ID NO: 6429 - protein, 269 aa, Thermomyces lanuginosus
EVSQDLFNQFNLFAQYSAAAYCGKNNDAPAGTNITCTGNACPEVEKAQATFLYSFEDMGVGDVTGFLALDNTNKLIVLSFRGSRSIENWIGNLNFDLKEINDICSGCRGHDGFTSSWRSVADTLRQKVEDAVREHPQYRVVFTGHSLGGALATVAGADLRGNPYDIDVFSYGAPRVGNRAFAEFLTVQTGGTLYRITHTNDIVPRLPPREFGYSHSSPEYWIKSGTLVPVTRQDIVKIEGIDATGGNNQPNIPDIPAHLWYFGRIGTCL

SEQ ID NO: 6430 - protein, 269 aa, Thermomyces lanuginosus
EYSQDLFNQFNLFAQYSAAAYCGKNNDAPAGTKITCTGNACPEVEKADATILYSFEDSGVGDVTGFLALDNTNKLIVLSFRGSRSIENWIGNLNFDLKEINDICSGCRGHDGFTSSWRSVADTLRQKVEDAVREHPDYRVVFTGHSLGGALATVAGADLRGNGYDIDVFSYGAPRVGNRAFAEFLTVQTGGTLYRITHTNDIVPRLPPREFGYSHSSPEYWIKPGTLVPVRRRDIVKIEGIDATGGNNQPNIPDIPAHLWYFGLIGTCL

SEQ ID NO: 6431 - protein, 269 aa, Thermomyces lanuginosus
EVSQDLFNQFNLFAQYSAAAYCGKNNDAPAGTNITCTGNACPEVEKADATTLYSFEDSGVGDVTGFLALDNTNKGIVLSFRGSRSIENWIQNLNFDLKEINDICSGCRGHDGFTSSWRSVADTLRQKVEAAVREHPDYRVVFTGHSLGGALATVAGADLRGNGYDIDVFSYGAPRVGNRAFAEFLTVQTGGTLYRITHTNDIVPRLPPREFGYSHSSPEYWIKSGTLVPVTRNDIVKIEGIDATGGNNQPNQPDIPAHLWYFGRIGTCL

SEQ ID NO: 6432 - protein, 269 aa, Thermomyces lanuginosus
EVSQDLFNQFNLFAQYSAAAYCGKNNDAPAGTNITCTGNACPMVEKADATFLYSFEDSGVGDVTGFLALDNTNKLIVLSFRGSRSIKNWIGNLNFLLKPINDICSGCRGHDGFTSSWRSVADTLRQKVEDAVREHPDYRVVFTGHSLGGALATVAGADLRGNGYDIDVFSYGAPRVGNRAFAEFLTVQTGGTLYRITHTNDIVPRLPPREFGYSHSSPEYWIKSGTLVPVRRRDIVKIEGIDATGGNNQPNIPDIPAHLWYFGLIGTCL

SEQ ID NO: 6433 - protein, 269 aa, Thermomyces lanuginosus
EVSQDLFNQFNLFAQYSKAAYCQKNNDAPAGTNITCTGNACPEVEKADVTFLYSFEDSGVGDVTGFLALDNTNKQIILSFRGSRSIENWIGNLNFDLKEINDICSGCRGHDGFTSSWRSVADTLRQKVEDAVREHPDYRVVFTGHSLGGALATVAGADLRGNGYDIDVFSYGAPRVGNRAFAEFLTTQTGGTLYRITHTNDIVPRLPPREFGYSHSSPEYWIKSGTLVPVTRNDIVKIEGIDATGGNNQPNIPDIPAHLWYFGLIGTCL

SEQ ID NO: 6434 - protein, 269 aa, Thermomyces lanuginosus
EVSQDLFNQFNLFAQYSAAAYCGKNNDAPAGTNITCTGNACPEVEKADATILYSFEDSGVGDVTGFLALDNTNKLIVLSFRGSRSIENWIGNLNFDLKEINDICSGCRGHDGFTSSWRSVADTLRQKVEDAVREHPDYRVVFTGHSLGGALATVAGADLRGNGYDIDVFSYGAPRVGNRAFAEFLTVQTGGTLYRITNTNDIVPRLPPRQFGYSHSSPEYWIKSGTLPPVRRRDIVKIEGIDATGGNNQPNIPDIPAHLWYFGLIGTCL

SEQ ID NO: 6435 - protein, 269 aa, Thermomyces lanuginosus
EYSQDLFNQFNLFAQYSAAAYCGKNNDAPAGTKITCTGNACPEVEKADATILYSFEDSGVGDVTGFLALDNTNKLIVLSFRGSRSIENWIGNLNFDLKEINDICSGCRGHDGFTSSWRSVADTLRQKVEDAVREHPDYRVVFTGHSLGGALATVAGADLRGNGYDIDVFSYGAPRVGNRAFAEFLTVQTGGTLYRITYTNDIVPRLPPREFGYSHSSPEYWIKSGTLVPVRRRDIVKIEGIDATGGNNQPNIPDIPAHLWYFGLIGTCL

SEQ ID NO: 6436 - protein, 269 aa, Thermomyces lanuginosus
EKSQDLFNQFNLFAQYSAAAYCGKNNDAPAGTKITCTGNACPEVEKADATLLYSFEDSGVGDVTGFLALDNTNKLIVLSFRGSRSIENWIGNLNFDLKEINDICSGCRGHDGFTSSWRSVADTLRQKVEDAVREHPDYRVVFTGHSLGGALATVAGADLRGNGYDIDVFSYGAPRVGNRAFAEFLTVQTGGTLYRITITNDIVPRLPPREFGYSHSSPEYWIKSGTLVPVRRRDIVKIEGIDATGGNNQPNIPDIPAHLWYFGLIGTCL

SEQ ID NO: 6437 - protein, 269 aa, Thermomyces lanuginosus
EVSQDLFNQFNLFAQYSKAAYCGKNNSAEAGTNITCTGNACPEVEKADATFLYSFEDSGVGDVTGFLALDNTRKDIVLSFRGSRSIENWIGNLNFDLKEINDICSGCRGHDGFTSSWRSVADTLRQKVEDAVREHPDYRVVFTGHSLGGALATVAGADLRGNGYDIDVFSYGAPRVGNRAFAEFLTVQDGGTLYRITHTNDIVPRLPPREFGYSHSSPEYWIKSGTLVPVTRNDIVKIEGIDATGGNNQPNIPDIPAHLWYFGLIGTCL

SEQ ID NO: 6438 - protein, 269 aa, Thermomyces lanuginosus
EVSQDLFNQFNLFAQYSAAAYCGKNNDAPAGTQITCTGNACPEVEKADATFLYSFEDSGVGDVTGFLALDNTNKLIVLSFRGSRSIENWIGNLNFDLKEINDICSGCRGHDGFTSSWRSVADTLRQKVEDAVREHPDYRVVFTGHSLGGALATVAGADLRGNGYDIDVFSYGAPRVGNRAFAEFLTVQTGGTLYRITHTNDIVPRLPPREFGYSHSSPDYWIKSGTGVPVRRRDIVKIEGIDATGGNNRPNIPDIPAHLWYFGLIGTCL

SEQ ID NO: 6439 - protein, 269 aa, Thermomyces lanuginosus
EVSQDLFNQFNLFAQYSAAAYCGKNNDAPAGTNITCTGNACPEVEKADATILYSFRDSGVGDVTGFLALDNTNKLIVLSFRGSRSIENWIGNLNFDLKEINDICSGCRGHDGFTSSWFSVADTLRQKVEDAVREHPDYRVVFTGHSLGGALATVAGADLRGNGYDIDVFSYGAPRVGNRAFAEFLTVQTGGTLYRITHTNDIVPRLPPREFGYSHSSPEYWIKSGTLVPVRRRDIVKIEGIDATGGNNQPNIPDITAHLWYFGLIGTCL

SEQ ID NO: 6440 - protein, 269 aa, Thermomyces lanuginosus
EVSQDLFNQFKLFAQYSAAAYCQKNNDAPAGTNITCTGNACPEVEKADATFLYSFEDSGVGDVTGFLALDNTNKQIVLSFRGSRSIENWIGNLNFDLKEINDICSGCRGHDGFTSSWRSVADTLRQKVEAAVREHPDYRVVFTGHSLGGALATVAGADLRGNGYDIDVFSYGAPRVGNRAFAEFLTNQQGGTLYRITHTNDIVPRLPPREFGYSHSSPEYWIKSGTLVPVTRNDIVKIEGIDATGGNNQPNIPDIPAHLWYFGLIGTCL

SEQ ID NO: 6441 - protein, 269 aa, Thermomyces lanuginosus
EVSQDLFNQFNLFAQYSAAAYCGKNNSAPAGTNITCTGNACPEVEKADATFLYSFKDMGVGDVTGFLALDNTNKLIVLSFRGSRSIENWIGNLNFDLKEINDICSGCRGHDGFTSSWRSVADTLRQKVEDAVREHPDYRVVFTGHSLGGALATVAGADLRGNGYDIDVFSYGAPRVGNRAFAEFLTTQTGGTLYRITHTNDIVPRLPPREFGYSHSSPEYWIKSGTLVPVTRNDIVKIEGIDATGGNNQPNQPDIPAHLWYFGRIGTCL

SEQ ID NO: 6442 - protein, 269 aa, Thermomyces lanuginosus
EYSQDLFNQFNLFAQYSAAAYCGKNNDAPAGTKITCTGNACPEVEKADATLLYSFEDSGVGDVTGFLALDNTNKLIVLSFRGSRSIENWIGNLNFDLKEINDICSGCRGHDGFTSSWRSVADTLRQKVEDAVREHPDYRVVFTGHSLGGALATVAGADLRGNGYDIDVFSYGAPRVGNRAFAEFLTVQTGGTLYRITHTNDIVPRLPPREFGYSHSSPEYWIKSGTLPPVRRRDIVKIEGIDATGGNNQPNIPDIPAHLWYFGLIGTCL

SEQ ID NO: 6443 - protein, 269 aa, Thermomyces lanuginosus
EVSQDLFNQFNLFAQYSAAAYCGKNNDAPAGTNITCTGNICPEVEKADATILYSFRDSGVGDVTGFLALDNTNKLIVLSFRGSRSIENWIGNLNFDLKEINDICSGCRGHDGFTSSWFSVADTLRQKVEDAVREHPDYRVVFTGHSLGGALATVAGADLRGNGYDIDVFSYGAPRVGNRAFAEFLTVQTGGTLYRITHTNDIVPRLPPREFGYSHSSPEYWIKSGTLVPVRRRDIVKIEGIDATGGNNQPNIPDIPAHLWYFGLIGTCL

SEQ ID NO: 6444 - protein, 269 aa, Thermomyces lanuginosus
EVSQDLFNQFNLFAQYSKAAYCGANNDAPAGTNITCTGNACPEVEKADATFLYSFEDSGVGDVTGFLALDNTNKLIILSFRGSRSIENWIGNLRFDLKEINDICSGCRGHDGFTSSWRSVADTLRQKVEAAVREHPDYRVVFTGHSLGGALATVAWADLRGNGYDIDVFSYGAPRVGNRAFAEFLTVQTGGTLYRITHTNDIVPRLPPREFGYSHSSPEYWIKSGTLVPVTRNDIVKIEGIDATGGNNQPNIPDIPAHLWYFGLIGTCL

SEQ ID NO: 6445 - protein, 269 aa, Thermomyces lanuginosus
EVSQDLFNQFNLFAQYSKAAYCGKNNSAPAGTDITCTGNACPEVEKADATFLYSFEDSGVGDVTGFLALDNTRKDIVLSFRGSRSIENWIGNLNFDLKEINDICSGCRGHDGFTSSWRSVADTLRQKVEDAVREHPDYRVVFTGHSLGGALATVAGADLRGNGYDIDVFSYGAPRVGNRAFAEFLTVQDGGTLYRITHTNDIVPRLPPREFGYSHSSPEYWIKSGTLVPVTRNDIVKIEGIDATGGNNQPNIPDIPAHLWYFGLIGTCL

SEQ ID NO: 6446 - protein, 269 aa, Thermomyces lanuginosus
EVSQDLFNQFNLFAQYSAAAYCGKNNEAPAGTNITCTGNACPEVEKAQATFLYSFEDMGVGDVTGFLALDNTNKLIVLSFRGSRSIENWIGNLNFDLKEINDICSGCRGHDGFTSSWRSVADTLRQKVEDAVREHPDYRVVFTGHSLGGALATVAGADLRGNPYDIDVFSYGAPRVGNRAFAEFLTVQTGGTLYRITHTNDIVPRLPPREFGYSHSSPEYWIKSGTMVPVTRNDIVKIEGIDATGGNNQPNIPDIPAHLWYFGRIGTCL

SEQ ID NO: 6447 - protein, 269 aa, Thermomyces lanuginosus
EVSQDLFNQFNLFAQYSKAAYCQKNNDAPAGTNITCTGNACPEVFKADVTFLYSFEDSGVGDVTGFLALDNTNKLIVLSFRGSRSIENWIGNLNFDLKEINDICSGCRGHDGFTSSWRSVADTLRQKVEDAVREHPDYRVVFTGHSLGGALATVAWADLRGNGYDIDVFSYGAPRVGNRAFAEFLTTQTGGTLYRITHTNDIVPRLPPREFGYSHSSPEYWIKSGTLVPVTRNDIVKIEGIDATGGNNQPNIPDIPAHLWYFGLIGTCL

SEQ ID NO: 6448 - protein, 269 aa, Thermomyces lanuginosus
EVSRDLFNQFNLFAQYSAAAYCGKNNDAPAGTNITCTGNACPEVEKADATFLYSFEDSGVGDVTGFLALDNTNKLIVLSFRGSRSIENWIGNLNFDLKEINDICSGCRGHDGFTSSWRSVADTLRQKVEDAVREHPDYRVVFAGHSLGGALATVAGADLRGNGYDIDVFSYGAPRVGNRAFAEFLTVQTGGTLYRITNTNDIVPRLPPREFGYSHSSPEYWIKSGTLRPVRRRDIVKIEGIDATGGNNQPNIPDIPAHLWYFGLIGTCL

SEQ ID NO: 6449 - protein, 269 aa, Thermomyces lanuginosus
EVSQDLFNQFNLFAQYSAAAYCGKNNDAPAGTNITCTGNACPEVEKADATFLYSFRDSGVGDVTGFLALDNTNKLIVLSFRGSRSIENWIGNLNFDLIEINDICSGCRGHDGFTSSWFSVADTLRQKVEDAVREHPDYRVVFTGHSLGGALATVAGADLRGNGYDIDVFSYGAPRVGNRAFAEFLTVQTGGTLYRITHTNDIVPRLPPREFGYSHSSPEYWIKSGTLVPVRRRDIVKIEGIDAEGGNNQPNIPDIPAHLWYFGLIGTCL

SEQ ID NO: 6450 - protein, 269 aa, Thermomyces lanuginosus
EKSQDLFNQFNLFAQYSAAAYCGKNNDAPAGTKITCTGNACPEVEKADATILYSFEDSGVGDVTGFLALDNTNKLIVLSFRGSRSIENWIGNLNFDLKEINDICSGCRGHDGFTSSWRSVADTLRQKVEDAVREHPDYRVVFTGHSLGGALATVAGADLRGNGYDIDVFSYGAPRVGNRAFAEFLTVQTGGTLYRITLTNDIVPRLPPREFGYSHSSPEYWIKSGTLVPVRRRDIVKIEGIDATGGNNQPNIPDIPAHLWYFGLIGTCL

SEQ ID NO: 6451 - protein, 269 aa, Thermomyces lanuginosus
EYSQDLFNQFNLFAQYSAAAYCGKNNDAPAGTKITCTGNACPEVEKADATVLYSFEDSGVGDVTGFLALDNTNKLIVLSFRGSRSIENWIGNLNFDLKEINDICSGCRGHDGFTSSWRSVADTLRQKVEDAVREHPDYRVVFTGHSLGGGLATVAGADLRGNGYDIDVFSYGAPRVGNRAFAEFLTVQTGGTLYRITHTNDIVPRLPPREFGYSHSSPEYWIKSGTLVPVRRRDIVKIEGIDATGGNNQPNIPDIPAHLWYFGLIGTCL

SEQ ID NO: 6452 - protein, 269 aa, Thermomyces lanuginosus
EVSQDLFNQFNLFAQYSAAAYCGKNNDAPAGTNITCTGNACPEVEKAQATFLYSFEDSGVGDVTGFLALDNTNKLIVLSFRGSRMIENWIGNLNFDLKEINDICSGCRGHDGFTSSWRSVADTLRQKVEAAVREHPDYRVVFTGHSLGGALATVAGADLRGNPYDIDVFSYGAPRVGNRAFAEFLTVQTGGTLYRITHTNDIVPRLPPREFGYSHSSPEYWIKSGTLVPVTRQDIVKIEGIDATGGNNQPNIPDIPAHLWYFGRIGTCL

SEQ ID NO: 6453 - protein, 269 aa, Thermomyces lanuginosus
EVSQDLFNQFNLFAQYSAAAYCGKNNDAPAGTNITCTGNACPEVEKADATTLYSFEDSGVGDVTGFLALDNTNKQIVLSFRGSRSIENWIQNLNFDLKEINDICSGCRGHDGFTSSWRSVADTLRQKVEDAVREHPDYRVVFTGHSLGGALATVAGADLRGNGYDIDVFSYGAPRVGNRAFAEFLTHQTGGTLYRITHTNDIVPRLPPREFGYSHSSPEYWIKSGTLVPVTRNDIVKIEGIDATGGNNQPNQPDIPAHLWYFGRIGTCL

SEQ ID NO: 6454 - protein, 269 aa, Thermomyces lanuginosus
EVSQDLFNQFNLFAQYSAAAYCGKNNDAPAGTTITCTGNACPVVEKADATFLYSFKDSGVGDVTGFLALDNTNKLIVLSFRGSRSIENWIGNLNFGLKEINDICSGCRGHDGFTSSWRSVADTLRQKVEDAVREHPDYRVVFTGHSLGGALATVAGADLRGNGYDIDVFSYGAPRVGNRAFAEFLTVQTGGTLYRITHTNDIVPRLPPREFGYSHSSPEYWIKSGTLVPVRRRDIVKIEGIDATGGNNQPNIPDIPAHLWYFGLIGTCL

SEQ ID NO: 6455 - protein, 269 aa, Thermomyces lanuginosus
EVSQDLFNQFNLFAQYSAAAYCGKNNSAPAGTNITCTGNACPEVEKADATFLYSFEDSGVGDVTGFLALDNTNKQIVLSFRGSRSIENWIQNLNFDLKEINDICSGCRGHDGFTSSWRSVADTLRQKVEDAVREHPDYRVVFTGHSLGGALATVAGADLRGNGYDIDVFSYGAPRVGNRAFAEFLTHQTGGTLYRITHTNDIVPRLPPREFGYSHSSPEYWIKSGTLVPVTRNDIVKIEGIDATGGNNQPNQPDIPAHLWYFGRIGTCL

SEQ ID NO: 6456 - protein, 269 aa, Thermomyces lanuginosus
EVSQDLFNQFNLFAQYSAAAYCGKNNEAPAGTNITCTGNACPEVEKAQATFLYSFEDSGVGDVTGFLALDNTNKLIVLSFRGSRSIENWIGNLNFDLKEINDICSGCRGHDGFTSSWRSVADTLRQKVEAAVREHPDYRVVFTGHSLGGALATVAGADLRGNPYDIDVFSYGAPRVGNRAFAEFLTVQTGGTLYRITHTNDIVPRLPPREFGYSHSSPEYWIKSGTMVPVTRNDIVKIEGIDATGGNNQPNIPDIPAHLWYFGRIGTCL

SEQ ID NO: 6457 - protein, 269 aa, Thermomyces lanuginosus
EYSQDLFNQFNLFAQYSAAAYCGKNNDAPAGTKITCTGNACPEVEKADATILYSFEDSGVGDVTGFLALDNTNKLIVLSFRGSRSIENWIGNLNFDLKEINDICSGCRGHDGFTSSWRSVADTLRQKVEDAVREHPDYRVVFTGHSLGGALATVAGADLRGNGYDIDVFSYGAPRVGNRAFAEFLTVQTGGTLYRITHTNDIVPRLPPREFGYSHSSPEYWIKIGTLVPVRRRDIVKIEGIDATGGNNQPNIPDIPAHLWYFGLIGTCL

SEQ ID NO: 6458 - protein, 269 aa, Thermomyces lanuginosus
EKSQDLFNQFNLFAQYSAAAYCGKNNDAPAGTKITCTGNACPEVEKADATLLYSFEDSGVGDVTGFLALDNTNKLIVLSFRGSRSIENWIGNLNFDLKEINDICSGCRGHDGFTSSWRSVADTLRQKVEDAVREHPDYRVVFTGHSLGGALATVAGADLRGNGYDIDVFSYGAPRVGNRAFAEFLTVQTGGTLYRITHTNDIVPRLPPREFGYSHSSPEYWIKFGTLVPVRRRDIVKIEGIDATGGNNQPNIPDIPAHLWYFGLIGTCL

SEQ ID NO: 6459 - protein, 269 aa, Thermomyces lanuginosus
EVSQDLFNQFNLFAQYSAAAYCGKNNDAPAGTNITCTGNACPEVFKADVTFLYSFEDSGVGDVTGFLALDNTNKQIILSFRGSRSIENWIGNLNFDLKEINDICSGCRGHDGFTSSWRSVADTLRQKVEDAVREHPDYRVVFTGHSLGGALATVAGADLRGNGYDIDVFSYGAPRVGNRAFAEFLTTQDGGTLYRITHTNDIVPRLPPREFGYSHSSPEYWIKSGTLVPVTRNDIVKIEGIDATGGNNQPNIPDIPAHLWYFGLIGTCL

SEQ ID NO: 6460 - protein, 269 aa, Thermomyces lanuginosus
EVSQDLFNQFNLFAQYSAAAYCGKNNDAPAGTQITCTGNACPEVEKADATFLYSFEDSGVGDVTGFLALDNTNKLIVLSFRGSRSIENWIGNLNFDLKEINDICSGCRGHDGFTSSWRSVADTLRQKVEDAVREHPDYRVVFAGHSLGGALATVAGADLRGNGYDIDVFSYGAPRVGNRAFAEFLTVQTGGTLYRITHTNDIVPRLPPRQFGYSHSSPEYWIKSGTLVPVRRRDIVKIEGIDATGGNNQPNIPDAPAHLWYFGLIGTCL

SEQ ID NO: 6461 - protein, 269 aa, Thermomyces lanuginosus
EVSRDLFNQFNLFAQYSAAAYCGKNNDAPAGTNITCTGNACPEVEKADATILYSFEDSGVGDVTGFLALDNTNKLIVLSFRGSRSIENWIGNLNFDLKEINDICSGCRGHDGFTSSWRSVADTLRQKVEDAVREHPDYRVVFAGHSLGGALATVAGADLRGNGYDIDVFSYGAPRVGNRAFAEFLTVQTGGTLYRITHTNDIVPRLPPREFGYSHSSPEYWIKSGTLRPVRRRDIVKIEGIDATGGNNQPNIPDIPAHLWYFGLIGTCL

SEQ ID NO: 6462 - protein, 269 aa, Thermomyces lanuginosus
EYSQDLFNQFNLFAQYSAAAYCGKNNDAPAGTKITCTGNACPEVEKADATVLYSFEDSGVGDVTGFLALDNTNKLIVLSFRGSRSIENWIGNLNFDLKEINDICSGCRGHDGFTSSWRSVADTLRQKVEDAVREHPDYRVVFTGHSLGGALATVAGADLRGNGYDIDVFSYGAPRVGNRAFAEFLTVQTGGTLYRITHTNDIVPRLPPREFGYSHSSPEYWIKSGTLVPVRRRDIVKIEGIDATGGNNQPNIPDIPVHLWYFGLIGTCL

SEQ ID NO: 6463 - protein, 269 aa, Thermomyces lanuginosus
EVSQDLFNQFNLFAQYSAAAYCKKNNDAPAGTNITCTGNACPEVEKADATFLYSFEDSGVGDVTGFLALDNTNKQIVLSFRGSRSIENWIGNLRFDLKEINDICSGCRGHDGFTSSWRSVADTLRQKVEDAVREHPDYRVVFTGHSLGGALATIAGADLRGNGYDIDVFSYGAPRVGNRAFAEFLTTQTGGTLYRITHTNDIVPRLPPREFGYSHSSPEYWIKSGTLVPVTRNDIVKIEGIDATGGNNQPNIPDIPAHLWYFGRIGTCL

SEQ ID NO: 6464 - protein, 269 aa, Thermomyces lanuginosus
EVSQDLFNQFNLFAQYSAAAYCGKNNQAPAGTNITCTGNACPEVEKADATFLYSFEDSGVGDVTGFLALDNTNKQIVLSFRGSRSIENWIGNLNFDLKEINDICSGCRGHDGFTSSWRSVADTLRQKVEAAVREHPDYRVVFTGHSLGGALATVAGADLRGNGYDIDVFSYGAPRVGNRAFAEFLTTQTGGTLYRITHTNDIVPRLPPREFGYSHSSPEYWIKSGTLVPVTRNDIVKIEGIDATGGNNQPNQPDIPAHLWYFGRIGTCL

SEQ ID NO: 6465 - protein, 269 aa, Thermomyces lanuginosus
EVSQDLFNQFNLFAQYSAAAYCGKNNDAPAGTQITCTGHACPEVEKADATFLYSFEDSGVGDVTGFLALDNTNKLIVLSFRGSRSIENWIGNLNFDLKEINDICSGCRGHDGFTSSWRSVADTLRQKVEDAVREHPDYRVVFTGHSLGGALATVAGADLRGNGYDIDVFSYGAPRVGNRAFAEFLTVQTGGTLYRITHTQDIVPRLPPREFGYSHSSPEYWIKSGTLVPVRRRDIVKIEGIDATGGNNQPSIPDIPAHLWYFGLIGTCL

SEQ ID NO: 6466 - protein, 269 aa, Thermomyces lanuginosus
EVSQDLFNQFNLFAQYSAAAYCGKNNDAPAGTNITCTGNACPEVEKAQATFLYSFEDMGVGDVTGFLALDNTNKLIVLSFRGSRSIENWIGNLNFDLKEINDICSGCRGHDGFTSSWRSVADTLRQKVEAAVREHPDYRVVFTGHSLGGALATVAGADLRGNPYDIDVFSYGAPRVGNRAFAEFLTVQTGGTLYRITHTNDIVPRLPPREFGYSHSSPEYWIKSGTLVPVTRQDIVKIEGIDATGGNNQPNIPDIPAHLWYFGRIGTCL

SEQ ID NO: 6467 - protein, 269 aa, Thermomyces lanuginosus
EKSQDLFNQFNLFAQYSAAAYCGKNNDAPAGTKITCTGNACPEVEKADATVLYSFEDSGVGDVTGFLALDNTNKLIVLSFRGSRSIENWIGNLNFDLKEINDICSGCRGHDGFTSSWRSVADTLRQKVEDAVREHPDYRVVFTGHSLGGALATVAGADLRGNGYDIDVFSYGAPRVGNRAFAEFLTVQTGGTLYRITITNDIVPRLPPREFGYSHSSPEYWIKSGTLVPVRRRDIVKIEGIDATGGNNQPNIPDIPAHLWYFGLIGTCL

SEQ ID NO: 6468 - protein, 269 aa, Thermomyces lanuginosus
EVSQDLFNQFNLFAQYSAAAYCGKNNRAPAGTNITCTGNACPEVEKADATLLYSFEDSGVGDVTGFLALDNTNKLIVLSFRGSRSIENWIGNLNFDLKEINDICSGCRGHAGFTSSWRSVADTLRQKVEDAVREHPDYRVVFTGHSLGGALATVAGADLRGNGYDIDVFSYGAPRVGNRAFAEFLTVQTGGTLYRITHTNDIVPRLPPREFGYSHPSPEYWIKSGTGVPVTRNDIVKIEGIDATGGNNQPNIPDITAHLWYFGLIGTCL

SEQ ID NO: 6469 - protein, 269 aa, Thermomyces lanuginosus
EVSQDLFNQFNLFAQYSAAAYCGKNNDAPAGTNITCTGNACPEVEKADATFLYSFEDSGVGDVTGFLALDNTNKLIVLSFRGSRSIENWIQNLNFDLKEINDICSGCRGHDGFTSSWRSVADTLRQKVEDAVREHPDYRVVFAGHSLGGALATVAGADLRGNGYDIDVFSYGAPRVGNRAFAEFLTVQTGGTLYRITHTNDIVPRLPPRQFGYSHSSPEYWIKSGTLVPVRRRDIVKIEGIDATGGNNQPNIPDAPAHLWYFGLIGTCL

SEQ ID NO: 6470 - protein, 269 aa, Thermomyces lanuginosus
EYSQDLFNQFNLFAQYSAAAYCGKNNDAPAGTKITCTGNACPEVEKADATLLYSFEDSGVGDVTGFLALDNTNKLIVLSFRGSRSIENWIGNLNFDLKEINDICSGCRGHDGFTSSWRSVADTLRQKVEDAVREHPDYRVVFTGHSLGGALATVAGADLRGNGYDIDVFSYGAPRVGNRAFAEFLTVQTGGTLYRITHTNDIVPRLPPREFGYSHSSPEYWIKSGTLVPVRRRDIVKIEGIDATGGNNQPNIPDIPVHLWYFGLIGTCL

SEQ ID NO: 6471 - protein, 269 aa, Thermomyces lanuginosus
EVSQDLFNQFNLFAQYSKAAYCGKNNDAPAGTNITCTGNACPEVEKADATFLYSFEDSGVGDVTGFLALDNTNKQIVLSFRGSRSIENWIGNLNFDLKEINDICSGCRGHDGFTSSWRSVADTLRQKVEAAVREHPDYRVVFTGHSLGGALATVAGADLRGNGYDIDVFSYGAPRVGNRAFAEFLTNQQGGTLYRITHTNDIVPRLPPREFGYSHSSPEYWIKSGTLVPVTRNDIVKIEGIDATGGNNQPNIPDIPAHLWYFGRIGTCL

SEQ ID NO: 6472 - protein, 269 aa, Thermomyces lanuginosus
EVSQDLFNQFNLFAQYSAAAYCGKNNNAPAGTNITCTGNACPEVEKADATFLYSFRDSGVGDVTGFLALDNTNKLIVLSFRGSRSIENWIGNLNFDLKEINDICSGCRGHDGFTSSWFSVADTLRQKVEDAVREHPDYRVVFTGHSLGGALATVAGADLRGNGYDIDVFSYGAPRVGNRAFAEFLTVQTGGTLYRITHTNDIVPRLPPREFGYSHSSPEFWIKSGTLVPVRRRDIVKIEGIDATGGNNQPNIPDIPAHLWYFGLIGTCL

SEQ ID NO: 6473 - protein, 269 aa, Thermomyces lanuginosus
EVSQDLFNQFNLFAQYAAAAYCGKNNDAPAGTKITCTGNACPEVEKADATFLYSFEDSGVGDVTGFLALDNTNKLIVLSFRGSRSIENWIANLNFDLKEINDICSGCRAHDGFYSSWRSVADTLRQKVEDAVREHPDYRVVFTGHSLGGALATIAGADLRGNGYDIDVFSYGAPRVGNRAFAEFLTVQTGGTLYRITHTNDIVPRLPPREFGYSHSSPEYWIKSGTLVPVTRNDIVKIEGIDATGGNNQPNIPDIPAHLWYFGLIGTCL

SEQ ID NO: 6474 - protein, 269 aa, Synthetic construct
EVSQDLFNQFNLFAQYSAAAYCGKNNDAPAGTNITCTGNACPEVEKADATFLYSFEGSGVGDVTGFLALDNTNKLIVLSFRGSRSIENWIGNLKFLLKEINDICSGCRGHDGFTSPWRSVADTLRQKVEDAVREHPDYRVVFTGHSLGGALATVAGADLRGNGYDIDVFPYGAPRVGNRAFAEFLTVQTGGTLYRITHTNDIVPRLPPREFGYSHSSPEYWIKSGTLVPVTRNDIVKIEGIDATGGNNRPNIPDIPAHLWYFGLIGTCL

SEQ ID NO: 6475 - protein, 269 aa, Thermomyces lanuginosus
EVSQDLFNQFNLFAQYSAAAYCGKNNRAPAGTNITCTGNACPEVEKADATFLYSFEDSGVGDVTGFLALDNTNKLIVLSFRGSRSIENWIGNLNFDLKEINDICSGCRGHAGFTSSWRSVADTLRQKVEDAVREHADYRVVFTGHSLGGALATVAGADLRGNGYDIDVFSYGAPRVGNRAFAEFLTVQTGGTLYRITHTNDIVPRLPPREFGYSHPSPEYWIKSGTGVPVTRNDIVKIEGIDATGGNNQPNIPDITAHLWYFGLIGTCL

SEQ ID NO: 6476 - protein, 269 aa, Thermomyces lanuginosus
EVSQDLFNQFNLFAQYSAAAYCGKNNDAPAGTNITCTGNACPEVEKAQATFLYSFEDMGVGDVTGFLALDNTNKLIVLSFRGSRSIENWIGNLNFDLKEINDICSGCRGHDGFTSSWRSVADTLRQKVEAAVREHPDYRVVFTGHSLGGALATVAGADLRGNPYDIDVFSYGAPRVGNRAFAEFLTVQTGGTLYRITHTNDIVPRLPPREFGYSHSSPEYWIKSGTMVPVTRNDIVKIEGIDATGGNNQPNIPDIPAHLWYFGRIGTCL

SEQ ID NO: 6477 - protein, 269 aa, Thermomyces lanuginosus
EVSQDLFNQFKLFAQYSAAAYCGKNNNAPAGTNITCTGNACPEVEKADATFLYSFKDSGVGDVTGFLALDNTNKLIVLSFRGSRSIENWFGNLNFDLKEINDICSGCRGHDGFTSSWRSVADTLRQKVEDAVREHPDYRVVFTGHSLGGALATVAGADLRGNGYDIDVFSYGAPRVGNRAFAEFLTVQTGGTLYRITHTNDIVPRLPPREFGYSHSSPEYWIKSGTLVPVTRQDIVKIEGIDATGGNNQPNIPDITAHLWYFGLIGTCL

SEQ ID NO: 6478 - protein, 269 aa, Thermomyces lanuginosus
EVSQDLFNQFNLFAQYSKAAYCQKNNDAPAGTNITCTGNACPEVFKADATFLYSFEDSGVGDVTGFLALDNTNKLIVLSFRGSRSIENWIGNLNFDLKEINDICSGCRGHDGFTSSWRSVADTLRQKVEDAVREHPDYRVVFTGHSLGGALATVAWADLRGNGYDIDVFSYGAPRVGNRAFAEFLTTQDGGTLYRITHTNDIVPRLPPREFGYSHSSPEYWIKSGTLVPVTRNDIVKIEGIDATGGNNQPNIPDIPAHLWYFGLIGTCL

SEQ ID NO: 6479 - protein, 269 aa, Thermomyces lanuginosus
EVSRDLFNQFNLFAQYSAAAYCGKNNDAPAGTNITCTGNACPEVEKADATFLYSFEDSGVGDVTGFLALDNTNKLIVLSFRGSRSIENWIGNLNFDLKEINDICSGCRGHDGFTSSWRSVADTLRQKVEDAVREHPDYRVVFAGHSLGGALATVAGADLRGDGYDIDVFSYGAPRVGNRAFAEFLTVQTGGTLYRITHTNDIVPRLPPREFGYSHSSPEYWIKSGTLRPVRRRDIVKIEGIDATGGNNQPNIPDIPAHLWYFGLIGTCL

SEQ ID NO: 6480 - protein, 269 aa, Thermomyces lanuginosus
EVSQDLFNQFKLFAQYSAAAYCGKNNSAPAGTNITCTGNACPEVEKADATFLYSFKDMGVGDVTGFLALDNTNKLIVLSFRGSRSIENWIGNLNFDLKEINDICSGCRGHDGFTSSWRSVADTLRQKVEDAVREHPDYRVVFTGHSLGGALATVAGADLRGNGYDIDVFSYGAPRVGNRAFAEFLTVQTGGTLYRITHTNDIVPRLPPREFGYSHSSPEYWIKSGTLVPVTRQDIVKIEGIDATGGNNQPNIPDITAHLWYFGLIGTCL

SEQ ID NO: 6481 - protein, 269 aa, Thermomyces lanuginosus
EVSQDLFNQFNLFAQYSKAAYCKANNDAPAGTNITCTGNACPEVEKADATFLYSFEDSGVGDVTGFLALDNTNKLIILSFRGSRSIENWIGNLNFDLKEINDICSGCRGHDGFTSSWRSVADTLRQKVEDAVREHPDYRVVFTGHSLGGALATVAWADLRGNGYDIDVFSYGAPRVGNRAFAEFLTQQTGGTLYRITHTNDIVPRLPPREFGYSHSSPEYWIKSGTLVPVTRNDIVKIEGIDATGGNNQPNIPDIPAHLWYFGLIGTCL

SEQ ID NO: 6482 - protein, 269 aa, Thermomyces lanuginosus
EVSQDLFNQFNLFAQYSAAAYCGKNNDAPAGTNITCTGNICPEVEKADATFLYSFRDSGVGDVTGFLALDNTNKLIVLSFRGSRSIENWIGNLNFDLKEINDICSGCRGHDGFTSSWFSVADTLRQKVEDAVREHPDYRVVFTGHSLGGALATVAGADLRGNGYDIDVFSYGAPRVGNRAFAEFLTVQTGGTLYRITHTNDIVPRLPPREFGYSHSSPEYWIKSGTLVPVRRRDIVKIEGIDATGGNNQPNIPDITAHLWYFGLIGTCL

SEQ ID NO: 6483 - protein, 269 aa, Thermomyces lanuginosus
EYSQDLFNQFNLFAQYSAAAYCGKNNDAPAGTKITCTGNACPEVEKADATVLYSFEDSGVGDVTGFLALDNTNKLIVLSFRGSRSIENWIGNLNFDLKEINDICSGCRGHDGFTSSWRSVADTLRQKVEDAVREHPDYRVVFTGHSLGGALATVAGADLRGNGYDIDVFSYGAPRVGNRAFAEFLTVQTGGTLYRITSTNDIVPRLPPREFGYSHSSPEYWIKSGTLVPVRRRDIVKIEGIDATGGNNQPNIPDIPAHLWYFGLIGTCL

SEQ ID NO: 6484 - protein, 269 aa, Thermomyces lanuginosus
EVSQDLFNQFNLFAQYSAAAYCGKNNEAPAGTNITCTGNACPEVEKADATFLYSFEDMGVGDVTGFLALDNTNKLIVLSFRGSRSIENWIGNLNFDLKEINDICSGCRGHDGFTSSWRSVADTLRQKVEDAVREHPQYRVVFTGHSLGGALATVAGADLRGNPYDIDVFSYGAPRVGNRAFAEFLTVQTGGTLYRITHTNDIVPRLPPREFGYSHSSPEYWIKSGTMVPVTRNDIVKIEGIDATGGNNQPNIPDIPAHLWYFGRIGTCL

SEQ ID NO: 6485 - protein, 269 aa, Thermomyces lanuginosus
EVSQDLFNQFNLFAQYSAAAYCGKNNRAPAGTNITCTGNACPEVEKADATFLYSFEDSGVGDVTGFLALDNTNKLIVLSFRGSRSIENWISNLNFDLKEINDICSGCRGHAGFTSSWRSVADTLRQKVEDAVREHPDYRVVFTGHSLGGALATVAGADLRGNGYDIDVFSYGAPRVGNRAFAEFLTVQTGGTLYRITHTNDIVPRLPPREFGYSHPSPEYWIKSGTGVPVTRNDIVKIEGIDATGGNNQPNIPDITAHLWYFGLIGTCL

SEQ ID NO: 6486 - protein, 269 aa, Thermomyces lanuginosus
EVSQDLFNQFNLFAQYSAAAYCGANNDAPAGTNITCTGNACPEVEKADATFLYSFEDSGVGDVTGFLALDNTNKLIVLSFRGSRSIENWIGNLNFDLKEINDICSGCRGHAGFTSSWRSVADTLRQKVEAAVREHPDYRVVFTGHSLGGALATVAGADLRGNGYDIDVFSYGAPRVGNRAFAEFLTTQQGGTLYRITHTNDIVPRLPPREFGYSHSSPEYWIKSGTLVPVTRNDIVKIEGIDATGGNNQPNIPDIPAHLWYFGRIGTCL

SEQ ID NO: 6487 - protein, 269 aa, Thermomyces lanuginosus
EYSQDLFNQFNLFAQYSAAAYCGKNNDAPAGTKITCTGNACPEVEKADATILYSFEDSGVGDVTGFLALDNTNKLIVLSFRGSRSIENWIGNLNFDLKEINDICSGCRGHDGFTSSWRSVADTLRQKVEDAVREHPDYRVVFAGHSLGGALATVAGADLRGNGYDIDVFSYGAPRVGNRAFAEFLTVQTGGTLYRITHTNDIVPRLPPREFGYSHSSPEYWIKSGTLVPVRRRDIVKIEGIDATGGNNQPNIPDIPAHLWYFGLIGTCL

SEQ ID NO: 6488 - protein, 269 aa, Thermomyces lanuginosus
EVSQDLFNQFNLFAQYSAAAYCGKNNDAPAGTNITCTGNACPEVEKADATFLYSFKDSGVGDVTGFLALDNTNKLIVLSFRGSRSIKNWIGNLNFLLKPINDICSGCRGHDGFTSSWRSVADTLRQKVEDAVREHPDYRVVFTGHSLGGALATVAGADLRGNGYDIDVFSYGAPRVGNRAFAEFLTVQTGGTLYRITHTNDIVPRLPPREFGYSHSSPEYWIKSGTLVPVRRRDIVKIEGIDATGGNNQPNIPDIPAHLWYFGLIGTCL

SEQ ID NO: 6489 - protein, 269 aa, Thermomyces lanuginosus
EYSQDLFNQFNLFAQYSAAAYCGKNNDAPAGTKITCTGNACPEVEKADATLLYSFEDSGVGDVTGFLALDNTNKLIVLSFRGSRSIENWIGNLNFDLKEINDICSGCRGHDGFTSSWRSVADTLRQKVEDAVREHPDYRVVFTGHSLGGALATVAGADLRGNGYDIDVFSYGAPRVGNRAFAEFLTVQTGGTLYRITLTNDIVPRLPPREFGYSHSSPEYWIKSGTLVPVRRRDIVKIEGIDATGGNNQPNIPDIPAHLWYFGLIGTCL

SEQ ID NO: 6490 - protein, 269 aa, Thermomyces lanuginosus
EVSQDLFNQFNLFAQYSAAAYCGKNNDAPAGTNITCTGNACPEVEKADATFLYQFEDSGVGDVTGFLALDNTNKLIVLSFRGSRSIENWIGNLRFDLKEINDICSGCRGHAGFTSSWRSVADTLRQKVEDAVREHPDYRVVFTGHSLGGALATVAWADLRGNGYDIDVFSYGAPRVGNRAFAEFLTVQQGGTLYRITHTNDIVPRLPPREFGYSHSSPEYWIKSGTLVPVTRNDIVKIEGIDATGGNNQPNIPDIPAHLWYFGRIGTCL

SEQ ID NO: 6491 - protein, 269 aa, Thermomyces lanuginosus
EVSQDLFNQFNLFAQYSAAAYCGKNNEAPAGTNITCTGNACPEVEKAQATFLYSFEDSGVGDVTGFLALDNTNKLIVLSFRGSRSIENWIGNLNFDLKEINDICSGCRGHDGFTSSWRSVADTLRQKVEAAVREHPHYRVVFTGHSLGGALATVAGADLRGNPYDIDVFSYGAPRVGNRAFAEFLTVQTGGTLYRITHTNDIVPRLPPREFGYSHSSPEYWIKSGTLVPVTRNDIVKIEGIDATGGNNQPNIPDIPAHLWYFGRIGTCL

SEQ ID NO: 6492 - protein, 269 aa, Thermomyces lanuginosus
EVSRDLFNQFNLFAQYSAAAYCGKNNDAPAGTNITCTGNACPEVEKADATFLYSFEDSGVGDVTGFLALDNTNKLIVLSFRGSRSIENWIGNLNFDLKEINDICSGCRGHDGFTSSWRSVADTLRQKVEDAVREHPDYRVVFAGHSLGGALATVAGADLRGDGYDIDVFSYGAPRVGNRAFAEFLTVQTGGTLYRITNTNDIVPRLPPREFGYSHSSPEYWIKSGTLVPVRRRDIVKIEGIDATGGNNQPNIPDIPAHLWYFGLIGTCL

SEQ ID NO: 6493 - protein, 269 aa, Thermomyces lanuginosus
EVSQDLFNQFNLFAQYSAAAYCGKNNSAPAGTNITCTGNACPEVEKADATFLYSFEDSGVGDVTGFLALDNTNKLIVLSFRGSRSIENWIQNLNFDLKEINDICSGCRGHDGFTSSWRSVADTLRQKVEAAVREHPDYRVVFTGHSLGGALATVAGADLRGNGYDIDVFSYGAPRVGNRAFAEFLTNQTGGTLYRITHTNDIVPRLPPREFGYSHSSPEYWIKSGTLVPVTRNDIVKIEGIDATGGNNQPNQPDIPAHLWYFGRIGTCL

SEQ ID NO: 6494 - protein, 269 aa, Thermomyces lanuginosus
EVSQDLFNQFNLFAQYSAAAYCQKNNDAPAGTNITCTGNACPEVEKADATFLYSFKDSGVGDVTGFLALDNTNKLIVLSFRGSRSIENWIGNLNFDLKEINDICSGCRGHAGFTSSWRSVADTLRQKVEAAVREHPDYRVVFTGHSLGGALATVAGADLRGNGYDIDVFSYGAPRVGNRAFAEFLTNQQGGTLYRITHTNDIVPRLPPREFGYSHSSPEYWIKSGTLVPVTRNDIVKIEGIDATGGNNQPNIPDIPAHLWYFGLIGTCL

SEQ ID NO: 6495 - protein, 269 aa, Thermomyces lanuginosus
EVSQDLFNQFNLFAQYSAAAYCGKNNDAPAGTNITCTGNACPEVEKADATILYSFEDSGVGDVTGFLALDNTNKLIVLSFRGSRSIENWIGNLNFDLKEINDICSGCRGHDGFTSSWRSVADTLRQKVEDAVREHPDYRVVFAGHSLGGALATVAGADLRGDGYDIDVFSYGAPRVGNRAFAEFLTVQTGGTLYRITHTNDIVPRLPPREFGYSHSSPEYWIKSGTLPPVRRRDIVKIEGIDATGGNNQPNIPDIPAHLWYFGLIGTCL

SEQ ID NO: 6496 - protein, 269 aa, Thermomyces lanuginosus
EKSQDLFNQFNLFAQYSAAAYCGKNNDAPAGTKITCTGNACPEVEKADATLLYSFEDSGVGDVTGFLALDNTNKLIVLSFRGSRSIENWIGNLNFDLKEINDICSGCRGHDGFTSSWRSVADTLRQKVEDAVREHPDYRVVFTGHSLGGALATVAGADLRGNGYDIDVFSYGAPRVGNRAFAEFLTVQTGGTLYRITYTNDIVPRLPPREFGYSHSSPEYWIKSGTLVPVRRRDIVKIEGIDATGGNNQPNIPDIPAHLWYFGLIGTCL

SEQ ID NO: 6497 - protein, 269 aa, Thermomyces lanuginosus
EVSQDLFNQFNLFAQYSAAAYCGKNNDAPAGTNITCTGNACPEVEKADATFLYSFEDSGVGDVTGFLALDNTNKLIVLSFRGSRSIENWIGNLNFDLKEINDICSGCRGHDGFTSSWRSVADTLRQKVEDAVREHPDYRVVFAGHSLGGALATVAGADLRGDGYDIDVFSYGAPRVGNRAFAEFLTVQTGGTLYRITNTNDIVPRLPPREFGYSHSSPEYWIKSGTLRPVRRRDIVKIEGIDATGGNNQPNIPDIPAHLWYFGLIGTCL

SEQ ID NO: 6498 - protein, 269 aa, Thermomyces lanuginosus
EYSQDLFNQFNLFAQYSAAAYCGKNNDAPAGTKITCTGNACPEVEKADATVLYSFEDSGVGDVTGFLALDNTNKLIVLSFRGSRSIENWIGNLNFDLKEINDICSGCRGHDGFTSSWRSVADTLRQKVEDAVREHPDYRVVFTGHSLGGALATVAGADLRGNGYDIDVFSYGAPRVGNRAFAEFLTVQTGGTLYRITITNDIVPRLPPREFGYSHSSPEYWIKSGTLVPVRRRDIVKIEGIDATGGNNQPNIPDIPAHLWYFGLIGTCL

SEQ ID NO: 6499 - protein, 269 aa, Thermomyces lanuginosus
EYSQDLFNQFNLFAQYSAAAYCGKNNDAPAGTKITCTGNACPEVEKADATVLYSFEDSGVGDVTGFLALDNTNKLIVLSFRGSRSIENWIGNLNFDLKEINDICSGCRGHDGFTSSWRSVADTLRQKVEDAVREHPDYRVVFAGHSLGGALATVAGADLRGNGYDIDVFSYGAPRVGNRAFAEFLTVQTGGTLYRITHTNDIVPRLPPREFGYSHSSPEYWIKSGTLVPVRRRDIVKIEGIDATGGNNQPNIPDIPAHLWYFGLIGTCL

SEQ ID NO: 6500 - protein, 269 aa, Thermomyces lanuginosus
EVSQDLFNQFNLFAQYSAAAYCQANNDAPAGTNITCTGNACPEVEKADATFLYSFEDSGVGDVTGFLALDNTNKQIVLSFRGSRSIENWIGNLNFDLKEINDICSGCRGHDGFTSSWRSVADTLRQKVEAAVREHPDYRVVFTGHSLGGALATIAGADLRGNGYDIDVFSYGAPRVGNRAFAEFLTNQTGGTLYRITHTNDIVPRLPPREFGYSHSSPEYWIKSGTLVPVTRNDIVKIEGIDATGGNNQPNIPDIPAHLWYFGLIGTCL

SEQ ID NO: 6501 - protein, 269 aa, Thermomyces lanuginosus
EVSQDLFNQFNLFAQYSAAAYCGKNNSAEAGTDITCTGNACPEVFKADATFLYSFEDSGVGDVTGFLALDNTRKLIVLSFRGSRSIENWIGNLNFDLKEINDICSGCRGHDGFTSSWRSVADTLRQKVEDAVREHPDYRVVFTGHSLGGALATVAGADLRGNGYDIDVFSYGAPRVGNRAFAEFLTVQDGGTLYRITHTNDIVPRLPPREFGYSHSSPEYWIKSGTLVPVTRNDIVKIEGIDATGGNNQPNIPDIPAHLWYFGLIGTCL

SEQ ID NO: 6502 - protein, 269 aa, Thermomyces lanuginosus
EVSQDLFNQFNLFAQYSAAAYCKKNNDAPAGTNITCTGNACPEVEKADATFLYSFEDSGVGDVTGFLALDNTNKLIVLSFRGSRSIENWIGNLRFDLKEINDICSGCRGHAGFTSSWRSVADTLRQKVEDAVREHPDYRVVFTGHSLGGALATVAWADLRGNGYDIDVFSYGAPRVGNRAFAEFLTTQTGGTLYRITHTNDIVPRLPPREFGYSHSSPEYWIKSGTLVPVTRNDIVKIEGIDATGGNNQPNIPDIPAHLWYFGRIGTCL

SEQ ID NO: 6503 - protein, 269 aa, Thermomyces lanuginosus
EVSQDLFNQFNLFAQYSAAAYCGKNNDAPAGTNITCTGNACPEVEKADATFLYSFRDSGVGDVTGFLALDNTNKLIVLSFRGSRSIENWIGNLNFDLIEINDICSGCRGHDGFTSSWFSVADTLRQKVEDAVREHPDYRVVFTGHSLGGALATVAGADLRGNSYDIDVFSYGAPRVGNRAFAEFLTVQTGGTLYRITHTNDIVPRLPPREFGYSHSSPEYWIKSGTLVPVRRRDIVKIEGIDATGGNNQPNIPDIPAHLWYFGLIGTCL

SEQ ID NO: 6504 - protein, 269 aa, Thermomyces lanuginosus
EVSQDLFNQFNLFAQYSAAAYCQKNNSAPAGTNITCTGNACPEVEKADATFLYSFEDSGVGDVTGFLALDNTNKGIVLSFRGSRSIENWIGNLNFDLKEINDICSGCRGHDGFTSSWRSVADTLRQKVEAAVREHPDYRVVFTGHSLGGALATVAGADLRGNGYDIDVFSYGAPRVGNRAFAEFLTHQTGGTLYRITHTNDIVPRLPPREFGYSHSSPEYWIKSGTLVPVTRNDIVKIEGIDATGGNNQPNIPDIPAHLWYFGRIGTCL

SEQ ID NO: 6505 - protein, 269 aa, Thermomyces lanuginosus
EVSQDLFNQFNLFAQYSKAAYCQKNNDAPAGTNITCTGNACPEVFKADATFLYSFEDSGVGDVTGFLALDNTNKQIVLSFRGSRSIENWIGNLNFDLKEINDICSGCRGHDGFTSSWRSVADTLRQKVEDAVREHPDYRVVFTGHSLGGALATVACADLRGNGYDIDVFSYGAPRVGNRAFAEFLTTQTGGTLYRITHTNDIVPRLPPREFGYSHSSPEYWIKSGTLVPVTRNDIVKIEGIDATGGNNQPNIPDIPAHLWYFGLIGTCL

SEQ ID NO: 6506 - protein, 269 aa, Synthetic construct
EVSQDLFNQFNLFAQYSAAAYCGKNNDAPAGTNITCTGNACPEVEKADATFLYSFEDSGVGDVTGFLALDNTNKLIVLSFRGSRSIENWFGNLNFLLKKINDICSGCRGHDGFTSSWRSVADTLRQKVEDAVREHPDYRVVFTGHSLGGALATVAGADLRGNGYDIDVFSYGAPRVGNRAFAEFLTAQTGGTLYRITHTRDIVPRLPPAEFGYSHSSPEYWIKSGTLVPVTRNDIVKIEGIDATGGNNQPNIPDIPAHLWYFGLIGTCL

SEQ ID NO: 6507 - protein, 269 aa, Thermomyces lanuginosus
EVSQDLFNQFNLFAQYSAAAYCGKNNQAPAGTNITCTGNACPEVEKADATTLYSFEDSGVGDVTGFLALDNTNKGIVLSFRGSRSIENWIQNLNFDLKEINDICSGCRGHDGFTSSWRSVADTLRQKVEDAVREHPDYRVVFTGHSLGGALATVAGADLRGNGYDIDVFSYGAPRVGNRAFAEFLTNQTGGTLYRITHTNDIVPRLPPREFGYSHSSPEYWIKSGTLVPVTRNDIVKIEGIDATGGNNQPNQPDIPAHLWYFGLIGTCL

SEQ ID NO: 6508 - protein, 269 aa, Thermomyces lanuginosus
EVSQDLFNQFNLFAQYSAAAYCKKNNSAPAGTNITCTGNACPEVEKADATTLYSFEDSGVGDVTGFLALDNTNKQIVLSFRGSRSIENWIGNLNFDLKEINDICSGCRGHDGFTSSWRSVADTLRQKVEDAVREHPDYRVVFTGHSLGGALATVAGADLRGNGYDIDVFSYGAPRVGNRAFAEFLTTQTGGTLYRITHTNDIVPRLPPREFGYSHSSPEYWIKSGTLVPVTRNDIVKIEGIDATGGNNQPNIPDIPAHLWYFGRIGTCL

SEQ ID NO: 6509 - protein, 269 aa, Thermomyces lanuginosus
EKSQDLFNQFNLFAQYSAAAYCGKNNDAPAGTKITCTGNACPEVEKADATILYSFEDSGVGDVTGFLALDNTNKLIVLSFRGSRSIENWIGNLNFDLKEINDICSGCRGHDGFTSSWRSVADTLRQKVEDAVREHPDYRVVFTGHSLGGALATVAGADLRGNGYDIDVFSYGAPRVGNRAFAEFLTVQTGGTLYRITHTNDIVPRLPPREFGYSHSSPEYWIKSGTLVPVRRRDIVKIEGIDATGGNNQPNIPDGPAHLWYFGLIGTCL

SEQ ID NO: 6510 - protein, 269 aa, Thermomyces lanuginosus
EKSQDLFNQFNLFAQYSAAAYCGKNNDAPAGTKITCTGNACPEVEKADATVLYSFEDSGVGDVTGFLALDNTNKLIVLSFRGSRSIENWIGNLNFDLKEINDICSGCRGHDGFTSSWRSVADTLRQKVEDAVREHPDYRVVFTGHSLGGALATVAGADLRGNGYDIDVFSYGAPRVGNRAFAEFLTVQTGGTLYRITSTNDIVPRLPPREFGYSHSSPEYWIKSGTLVPVRRRDIVKIEGIDATGGNNQPNIPDIPAHLWYFGLIGTCL

SEQ ID NO: 6511 - protein, 269 aa, Thermomyces lanuginosus
EVSQDLFNQFNLFAQYSAAAYCGKNNEAPAGTNITCTGNACPEVEKAQATFLYSFEDSGVGDVTGFLALDNTNKLIVLSFRGSRSIENWIGNLNFDLKEINDICSGCRGHDGFTSSWRSVADTLRQKVEDAVREHPQYRVVFTGHSLGGALATVAGADLRGNPYDIDVFSYGAPRVGNRAFAEFLTVQTGGTLYRITHTNDIVPRLPPREFGYSHSSPEYWIKSGTMVPVTRNDIVKIEGIDATGGNNQPNIPDIPAHLWYFGRIGTCL

SEQ ID NO: 6512 - protein, 269 aa, Thermomyces lanuginosus
EYSQDLFNQFNLFAQYSAAAYCGKNNDAPAGTKITCTGNACPEVEKADATVLYSFEDSGVGDVTGFLALDNTNKLIVLSFRGSRSIENWIGNLNFDLKEINDICSGCRGHDGFTSSWRSVADTLRQKVEDAVREHPDYRVVFTGHSLGGALATVAGADLRGNGYDIDVFSYGAPRVGNRAFAEFLTVQTGGTLYRITHTNDIVPRLPPREFGYSHSSPEYWIKIGTLVPVRRRDIVKIEGIDATGGNNQPNIPDIPAHLWYFGLIGTCL

SEQ ID NO: 6513 - protein, 269 aa, Thermomyces lanuginosus
EKSQDLFNQFNLFAQYSAAAYCGKNNDAPAGTKITCTGNACPEVEKADATVLYSFEDSGVGDVTGFLALDNTNKLIVLSFRGSRSIENWIGNLNFDLKEINDICSGCRGHDGFTSSWRSVADTLRQKVEDAVREHPDYRVVFTGHSLGGALATVAGADLRGNGYDIDVFSYGAPRVGNRAFAEFLTVQTGGTLYRITNTNDIVPRLPPREFGYSHSSPEYWIKSGTLVPVRRRDIVKIEGIDATGGNNQPNIPDIPAHLWYFGLIGTCL

SEQ ID NO: 6514 - protein, 269 aa, Thermomyces lanuginosus
EKSQDLFNQFNLFAQYSAAAYCGKNNDAPAGTKITCTGNACPEVEKADATLLYSFEDSGVGDVTGFLALDNTNKLIVLSFRGSRSIENWIGNLNFDLKEINDICSGCRGHDGFTSSWRSVADTLRQKVEDAVREHPDYRVVFAGHSLGGALATVAGADLRGNGYDIDVFSYGAPRVGNRAFAEFLTVQTGGTLYRITHTNDIVPRLPPREFGYSHSSPEYWIKSGTLVPVRRRDIVKIEGIDATGGNNQPNIPDIPAHLWYFGLIGTCL

SEQ ID NO: 6515 - protein, 269 aa, Thermomyces lanuginosus
EVSQDLFNQFNLFAQYSAAAYCGKNNDAPAGTQITCTGNACPEVEKADATFLYSFEDSGVGDVTGFLALDNTNKLIVLSFRGSRSIENWIQNLNFDLKEINDICSGCRGHDGFTSSWRSVADTLRQKVEDAVREHPDYRVVFTGHSLGGALATVAGADLRGNGYDIDVFSYGAPRVGNRAFAEFLTVQTGGTLYRITHTNDIVPRLPPRQFGYSHSSPEYWIKSGTLVPVRRRDIVKIEGIDATGGNNQPNIPDNPAHLWYFGLIGTCL

SEQ ID NO: 6516 - protein, 269 aa, Thermomyces lanuginosus
EVSQDLFNQFNLFAQYSAAAYCGKNNEAPAGTNITCTGNACPEVEKADATFLYSFEDMGVGDVTGFLALDNTNKLIVLSFRGSRSIENWIGNLNFDLKEINDICSGCRGHDGFTSSWRSVADTLRQKVEAAVREHPDYRVVFTGHSLGGALATVAGADLRGNPYDIDVFSYGAPRVGNRAFAEFLTVQTGGTLYRITHTNDIVPRLPPREFGYSHSSPEYWIKSGTMVPVTRNDIVKIEGIDATGGNNQPNIPDIPAHLWYFGRIGTCL

SEQ ID NO: 6517 - protein, 269 aa, Thermomyces lanuginosus
EVSQDLFNQFNLFAQYSAAAYCGKNNDAPAGTQITCTGNACPEVEKADATFLYSFEDSGVGDVTGFLALDNTNKLIVLSFRGSRSIENWIGNLNFDLKEINDICSGCRGHDGFTSSWRSVADTLRQKVEDAVREHPDYRVVFTGHSLGGALATVAGADLRGNKYDIDVFSYGAPRVANRAFAEFLTVQTGGTLYRITHTNDIVPRLPPREFGYSHSSPEYWIKSGTLVPVRRRDIVKIEGIDATGANNQPNIPDIPAHLWYFGLIGTCL

SEQ ID NO: 6518 - protein, 269 aa, Thermomyces lanuginosus
EKSQDLFNQFNLFAQYSAAAYCGKNNDAPAGTKITCTGNACPEVEKADATLLYSFEDSGVGDVTGFLALDNTNKLIVLSFRGSRSIENWIGNLNFDLKEINDICSGCRGHDGFTSSWRSVADTLRQKVEDAVREHPDYRVVFTGHSLGGALATVAGADLRGNGYDIDVFSYGAPRVGNRAFAEFLTVQTGGTLYRITHTNDIVPRLPPREFGYSHSSPEYWIKSGTLPPVRRRDIVKIEGIDATGGNNQPNIPDIPAHLWYFGLIGTCL

SEQ ID NO: 6519 - protein, 269 aa, Thermomyces lanuginosus
EYSQDLFNQFNLFAQYSAAAYCGKNNDAPAGTKITCTGNACPEVEKADATILYSFEDSGVGDVTGFLALDNTNKLIVLSFRGSRSIENWIGNLNFDLKEINDICSGCRGHDGFTSSWRSVADTLRQKVEDAVREHPDYRVVFTGHSLGGALATVAGADLRGNGYDIDVFSYGAPRVGNRAFAEFLTVQTGGTLYRITSTNDIVPRLPPREFGYSHSSPEYWIKSGTLVPVRRRDIVKIEGIDATGGNNQPNIPDIPAHLWYFGLIGTCL

SEQ ID NO: 6520 - protein, 269 aa, Thermomyces lanuginosus
EVSQDLFNQFNLFAQYSAAAYCGANNDAPAGTNITCTGNACPEVEKADATFLYSFEDSGVGDVTGFLALDNTNKQIILSFRGSRSIENWIGNLRFDLKEINDICSGCRGHDGFTSSWRSVADTLRQKVEAAVREHPDYRVVFTGHSLGGALATVAGADLRGNGYDIDVFSYGAPRVGNRAFAEFLTNQTGGTLYRITHTNDIVPRLPPREFGYSHSSPEYWIKSGTLVPVTRNDIVKIEGIDATGGNNQPNIPDIPAHLWYFGLIGTCL

SEQ ID NO: 6521 - protein, 269 aa, Thermomyces lanuginosus
EYSQDLFNQFNLFAQYSAAAYCGKNNDAPAGTKITCTGNACPEVEKADATVLYSFEDSGVGDVTGFLALDNTNKLIVLSFRGSRSIENWIGNLNFDLKEINDICSGCRGHDGFTSSWRSVADTLRQKVEDAVREHPDYRVVFTGHSLGGALATVAGADLRGNGYDIDVFSYGAPRVGNRAFAEFLTVQTGGTLYRITHTNDIVPRLPPREFGYSHSSPEYWIKPGTLVPVRRRDIVKIEGIDATGGNNQPNIPDIPAHLWYFGLIGTCL

SEQ ID NO: 6522 - protein, 269 aa, Thermomyces lanuginosus
EVSRDLFNQFNLFAQYSAAAYCGKNNDAPAGTNITCTGNACPEVEKADATILYSFEDSGVGDVTGFLALDNTNKLIVLSFRGSRSIENWIGNLNFDLKEINDICSGCRGHDGFTSSWRSVADTLRQKVEDAVREHPDYRVVFTGHSLGGALATVAGADLRGNGYDIDVFSYGAPRVGNRAFAEFLTVQTGGTLYRITNTNDIVPRLPPREFGYSHSSPEYWIKSGTLVPVRRRDIVKIEGIDATGGNNQPNIPDITAHLWYFGLIGTCL

SEQ ID NO: 6523 - protein, 269 aa, Thermomyces lanuginosus
EVSQDLFNQFNLFAQYSAAAYCGANNDAPAGTNITCTGNACPEVEKADATFLYSFEDSGVGDVTGFLALDNTNKQIVLSFRGSRSIENWIGNLNFDLKEINDICSGCRGHDGFTSSWRSVADTLRQKVEDAVREHPDYRVVFTGHSLGGALATIAGADLRGNGYDIDVFSYGAPRVGNRAFAEFLTNQQGGTLYRITHTNDIVPRLPPREFGYSHSSPEYWIKSGTLVPVTRNDIVKIEGIDATGGNNQPNIPDIPAHLWYFGRIGTCL

SEQ ID NO: 6524 - protein, 269 aa, Thermomyces lanuginosus
EYSQDLFNQFNLFAQYSAAAYCGKNNDAPAGTKITCTGNACPEVEKADATLLYSFEDSGVGDVTGFLALDNTNKLIVLSFRGSRSIENWIGNLNFDLKEINDICSGCRGHDGFTSSWRSVADTLRQKVEDAVREHPDYRVVFTGHSLGGALATVAGADLRGNGYDIDVFSYGAPRVGNRAFAEFLTVQTGGTLYRITHTNDIVPRLPPREFGYSHSSPEYWIKSGTLVPVRRRDIVKIEGIDATGGNNQPNIPDGPAHLWYFGLIGTCL

SEQ ID NO: 6525 - protein, 269 aa, Thermomyces lanuginosus
EVSQDLFNQFNLFAQYSAAAYCGKNNDAPAGTNITCTGNACPEVEKADATILYSFEDSGVGDVTGFLALDNTNKLIVLSFRGSRSIENWIGNLNFDLKEINDICSGCRGHDGFTSSWRSVADTLRQKVEDAVREHPDYRVVFAGHSLGGALATVAGADLRGNGYDIDVFSYGAPRVGNRAFAEFLTVQTGGTLYRITSTNDIVPRLPPREFGYSHSSPEYWIKSGTLRPVRRRDIVKIEGIDATGGNNQPNIPDIPAHLWYFGLIGTCL

SEQ ID NO: 6526 - protein, 269 aa, Thermomyces lanuginosus
EVSQDLFNQFNLFAQYSAAAYCGANNDAPAGTNITCTGNACPEVEKADATFLYSFEDSGVGDVTGFLALDNTNKQIVLSFRGSRSIENWIGNLNFDLKEINDICSGCRGHDGFTSSWRSVADTLRQKVEDAVREHPDYRVVFTGHSLGGALATIAGADLRGNGYDIDVFSYGAPRVGNRAFAEFLTTQQGGTLYRITHTNDIVPRLPPREFGYSHSSPEYWIKSGTLVPVTRNDIVKIEGIDATGGNNQPNIPDIPAHLWYFGRIGTCL

SEQ ID NO: 6527 - protein, 269 aa, Thermomyces lanuginosus
EVSRDLFNQFNLFAQYSAAAYCGKNNDAPAGTNITCTGNACPEVEKADATILYSFEDSGVGDVTGFLALDNTNKLIVLSFRGSRSIENWIGNLNFDLKEINDICSGCRGHDGFTSSWRSVADTLRQKVEDAVREHPDYRVVFAGHSLGGALATVAGADLRGNGYDIDVFSYGAPRVGNRAFAEFLTVQTGGTLYRITSTNDIVPRLPPREFGYSHSSPEYWIKSGTLVPVRRRDIVKIEGIDATGGNNQPNIPDIPAHLWYFGLIGTCL

SEQ ID NO: 6528 - protein, 269 aa, Thermomyces lanuginosus
EVSRDLFNQFNLFAQYSAAAYCGKNNDAPAGTNITCTGNACPEVEKADATFLYSFEDSGVGDVTGFLALDNTNKLIVLSFRGSRSIENWIGNLNFDLKEINDICSGCRGHDGFTSSWRSVADTLRQKVEDAVREHPDYRVVFAGHSLGGALATVAGADLRGNGYDIDVFSYGAPRVGNRAFAEFLTVQTGGTLYRITNTNDIVPRLPPREFGYSHSSPEYWIKSGTLPPVRRRDIVKIEGIDATGGNNQPNIPDIPAHLWYFGLIGTCL

SEQ ID NO: 6529 - protein, 269 aa, Thermomyces lanuginosus
EVSQDLFNQFNLFAQYSKAAYCKANNDAPAGTNITCTGNACPEVEKADATFLYSFEDSGVGDVTGFLALDNTNKLIVLSFRGSRSIENWIGNLRFDLKEINDICSGCRGHDGFTSSWRSVADTLRQKVEAAVREHPDYRVVFTGHSLGGALATIAGADLRGNGYDIDVFSYGAPRVGNRAFAEFLTVQTGGTLYRITHTNDIVPRLPPREFGYSHSSPEYWIKSGTLVPVTRNDIVKIEGIDATGGNNQPNIPDIPAHLWYFGLIGTCL

SEQ ID NO: 6530 - protein, 269 aa, Thermomyces lanuginosus
EYSQDLFNQFNLFAQYSAAAYCGKNNDAPAGTKITCTGNACPEVEKADATLLYSFEDSGVGDVTGFLALDNTNKLIVLSFRGSRSIENWIGNLNFDLKEINDICSGCRGHDGFTSSWRSVADTLRQKVEDAVREHPDYRVVFTGHSLGGALATVAGADLRGNGYDIDVFSYGAPRVGNRAFAEFLTVQTGGTLYRITNTNDIVPRLPPREFGYSHSSPEYWIKSGTLVPVRRRDIVKIEGIDATGGNNQPNIPDIPAHLWYFGLIGTCL

SEQ ID NO: 6531 - protein, 269 aa, Thermomyces lanuginosus
EKSQDLFNQFNLFAQYSAAAYCGKNNDAPAGTKITCTGNACPEVEKADATILYSFEDSGVGDVTGFLALDNTNKLIVLSFRGSRSIENWIGNLNFDLKEINDICSGCRGHDGFTSSWRSVADTLRQKVEDAVREHPDYRVVFTGHSLGGALATVAGADLRGNGYDIDVFSYGAPRVGNRAFAEFLTVQTGGTLYRITHTNDIVPRLPPREFGYSHSSPEYWIKSGTDVPVRRRDIVKIEGIDATGGNNQPNIPDIPAHLWYFGLIGTCL

SEQ ID NO: 6532 - protein, 269 aa, Thermomyces lanuginosus
EKSQDLFNQFNLFAQYSAAAYCGKNNDAPAGTKITCTGNACPEVEKADATILYSFEDSGVGDVTGFLALDNTNKLIVLSFRGSRSIENWIGNLNFDLKEINDICSGCRGHDGFTSSWRSVADTLRQKVEDAVREHPDYRVVFTGHSLGGALATVAGADLRGNGYDIDVFSYGAPRVGNRAFAEFLTVQTGGTLYRITHTNDIVPRLPPREFGYSHSSPEYWIKSGTLVPVRRRDIVKIEGIDATGGNNQPNIPDIPVHLWYFGLIGTCL

SEQ ID NO: 6533 - protein, 269 aa, Thermomyces lanuginosus
EVSQDLFNQFNLFAQYSAAAYCGKNNQAPAGTNITCTGNACPEVEKADATTLYSFEDSGVGDVTGFLALDNTNKQIVLSFRGSRSIENWIQNLNFDLKEINDICSGCRGHDGFTSSWRSVADTLRQKVEDAVREHPDYRVVFTGHSLGGALATVAGADLRGNGYDIDVFSYGAPRVGNRAFAEFLTNQTGGTLYRITHTNDIVPRLPPREFGYSHSSPEYWIKSGTLVPVTRNDIVKIEGIDATGGNNQPNQPDIPAHLWYFGLIGTCL

SEQ ID NO: 6534 - protein, 269 aa, Thermomyces lanuginosus
EVSQDLFNQFNLFAQYSKAAYCQKNNDAPAGTNITCTGNACPEVEKADATFLYSFEDSGVGDVTGFLALDNTNKQIILSFRGSRSIENWIGNLNFDLKEINDICSGCRGHDGFTSSWRSVADTLRQKVEAAVREHPDYRVVFTGHSLGGALATVAWADLRGNGYDIDVFSYGAPRVGNRAFAEFLTVQTGGTLYRITHTNDIVPRLPPREFGYSHSSPEYWIKSGTLVPVTRNDIVKIEGIDATGGNNQPNIPDIPAHLWYFGLIGTCL

SEQ ID NO: 6535 - protein, 269 aa, Thermomyces lanuginosus
EVSQDLFNQFNLFAQYSAAAYCGKNNDAPAGTNITCTGNACPEVEKAQATFLYSFEDSGVGDVTGFLALDNTNKLIVLSFRGSRSIENWIGNLNFDLKEINDICSGCRGHDGFTSSWRSVADTLRQKVEAAVREHPDYRVVFTGHSLGGALATVAGADLRGNPYDIDVFSYGAPRVGNRAFAEFLTVQTGGTLYRITHTNDIVPRLPPREFGYSHSSPEYWIKSGTMVPVTRQDIVKIEGIDATGGNNQPNIPDIPAHLWYFGRIGTCL

SEQ ID NO: 6536 - protein, 269 aa, Thermomyces lanuginosus
EVSQDLFNQFNLFAQYSAAAYCQKNNDAPAGTNITCTGNACPEVEKADATFLYSFEDSGVGDVTGFLALDNTNKQIVLSFRGSRSIENWIGNLRFDLKEINDICSGCRGHAGFTSSWRSVADTLRQKVEDAVREHPDYRVVFTGHSLGGALATVAWADLRGNGYDIDVFSYGAPRVGNRAFAEFLTVQTGGTLYRITHTNDIVPRLPPREFGYSHSSPEYWIKSGTLVPVTRNDIVKIEGIDATGGNNQPNIPDIPAHLWYFGRIGTCL

SEQ ID NO: 6537 - protein, 269 aa, Thermomyces lanuginosus
EVSRDLFNQFNLFAQYSAAAYCGKNNDAPAGTNITCTGNACPEVEKADATILYSFEDSGVGDVTGFLALDNTNKLIVLSFRGSRSIENWIGNLNFDLKEINDICSGCRGHDGFTSSWRSVADTLRQKVEDAVREHPDYRVVFTGHSLGGALATVAGADLRGNGYDIDVFSYGAPRVGNRAFAEFLTVQTGGTLYRITNTNDIVPRLPPREFGYSHSSPEYWIKSGTLRPVRRRDIVKIEGIDATGGNNQPNIPDIPAHLWYFGLIGTCL

SEQ ID NO: 6538 - protein, 269 aa, Thermomyces lanuginosus
EVSQDLFNQFKLFAQYSAAAYCGKNNSAPAGTNITCTGNACPEVEKADATFLYSFEDMGVGDVTGFLALDNTNKLIVLSFRGSRSIENWFGNLNFDLKEINDICSGCRGHDGFTSSWRSVADTLRQKVEDAVREHPDYRVVFTGHSLGGALATVAGADLRGNGYDIDVFSYGAPRVGNRAFAEFLTVQTGGTLYRITHTNDIVPRLPPREFGYSHSSPEYWIKSGTLVPVTRQDIVKIEGIDATGGNNQPNIPDITAHLWYFGLIGTCL

SEQ ID NO: 6539 - protein, 269 aa, Thermomyces lanuginosus
EVSQDLFNQFNLFAQYSAAAYCGKNNDAPAGTNITCTGNACPEVEKADATTLYSFEDSGVGDVTGFLALDNTNKGIVLSFRGSRSIENWIQNLNFDLKEINDICSGCRGHDGFTSSWRSVADTLRQKVEDAVREHPDYRVVFTGHSLGGALATVAGADLRGNGYDIDVFSYGAPRVGNRAFAEFLTTQTGGTLYRITHTNDIVPRLPPREFGYSHSSPEYWIKSGTLVPVTRNDIVKIEGIDATGGNNQPNQPDIPAHLWYFGRIGTCL

SEQ ID NO: 6540 - protein, 269 aa, Thermomyces lanuginosus
EVSRDLFNQFNLFAQYSAAAYCGKNNDAPAGTNITCTGNACPEVEKADATFLYSFEDSGVGDVTGFLALDNTNKLIVLSFRGSRSIENWIGNLNFDLKEINDICSGCRGHDGFTSSWRSVADTLRQKVEDAVREHPDYRVVFAGHSLGGALATVAGADLRGNGYDIDVFSYGAPRVGNRAFAEFLTVQTGGTLYRITSTNDIVPRLPPREFGYSHSSPEYWIKSGTLPPVRRRDIVKIEGIDATGGNNQPNIPDIPAHLWYFGLIGTCL

SEQ ID NO: 6541 - protein, 269 aa, Thermomyces lanuginosus
EVSQDLFNQFNLFAQYSKAAYCGKNNDAPAGTDITCTGNACPEVFKADATFLYSFEDSGVGDVTGFLALDNTRKDIVLSFRGSRSIENWIGNLNFDLKEINDICSGCRGHDGFTSSWRSVADTLRQKVEDAVREHPDYRVVFTGHSLGGALATVAGADLRGNGYDIDVFSYGAPRVGNRAFAEFLTVQDGGTLYRITHTNDIVPRLPPREFGYSHSSPEYWIKSGTLVPVTRNDIVKIEGIDATGGNNQPNIPDIPAHLWYFGLIGTCL

SEQ ID NO: 6542 - protein, 269 aa, Thermomyces lanuginosus
EVSQDLFNQFNLFAQYSAAAYCGKNNEAPAGTNITCTGNACPEVEKADATFLYSFEDSGVGDVTGFLALDNTNKLIVLSFRGSRSIENWIGNLNFDLKEINDICSGCRGHDGFTSSWRSVADTLRQKVEAAVREHPDYRVVFTGHSLGGALATVAGADLRGNPYDIDVFSYGAPRVGNRAFAEFLTVQTGGTLYRITHTNDIVPRLPPREFGYSHSSPEYWIKSGTMVPVTRQDIVKIEGIDATGGNNQPNIPDIPAHLWYFGRIGTCL

SEQ ID NO: 6543 - protein, 269 aa, Thermomyces lanuginosus
EVSQDLFNQFNLFAQYSAAAYCGKNNQAPAGTNITCTGNACPEVEKADATTLYSFEDSGVGDVTGFLALDNTNKQIVLSFRGSRSIENWIGNLNFDLKEINDICSGCRGHDGFTSSWRSVADTLRQKVEAAVREHPDYRVVFTGHSLGGALATVAGADLRGNGYDIDVFSYGAPRVGNRAFAEFLTHQTGGTLYRITHTNDIVPRLPPREFGYSHSSPEYWIKSGTLVPVTRNDIVKIEGIDATGGNNQPNIPDIPAHLWYFGRIGTCL

SEQ ID NO: 6544 - protein, 269 aa, Thermomyces lanuginosus
EVSQDLFNQFNLFAQYSAAAYCQKNNSAPAGTNITCTGNACPEVEKADATFLYSFEDSGVGDVTGFLALDNTNKQIVLSFRGSRSIENWIGNLNFDLKEINDICSGCRGHAGFTSSWRSVADTLRQKVEDAVREHPDYRVVFTGHSLGGALATVAWADLRGNGYDIDVFSYGAPRVGNRAFAEFLTVQTGGTLYRITHTNDIVPRLPPREFGYSHSSPEYWIKSGTLVPVTRNDIVKIEGIDATGGNNQPNIPDIPAHLWYFGRIGTCL

SEQ ID NO: 6545 - protein, 269 aa, Thermomyces lanuginosus
EKSQDLFNQFNLFAQYSAAAYCGKNNDAPAGTKITCTGNACPEVEKADATVLYSFEDSGVGDVTGFLALDNTNKLIVLSFRGSRSIENWIGNLNFDLKEINDICSGCRGHDGFTSSWRSVADTLRQKVEDAVREHPDYRVVFTGHSLGGALATVAGADLRGNGYDIDVFSYGAPRVGNRAFAEFLTVQTGGTLYRITHTNDIVPRLPPREFGYSHSSPEYWIKSGTLPPVRRRDIVKIEGIDATGGNNQPNIPDIPAHLWYFGLIGTCL

SEQ ID NO: 6546 - protein, 269 aa, Thermomyces lanuginosus
EVSQDLFNQFNLFAQYSAAAYCGKNNQAPAGTNITCTGNACPEVEKADATTLYSFEDSGVGDVTGFLALDNTNKGIVLSFRGSRSIENWIGNLNFDLKEINDICSGCRGHDGFTSSWRSVADTLRQKVEAAVREHPDYRVVFTGHSLGGALATVAGADLRGNGYDIDVFSYGAPRVGNRAFAEFLTVQTGGTLYRITHTNDIVPRLPPREFGYSHSSPEYWIKSGTLVPVTRNDIVKIEGIDATGGNNQPNQPDIPAHLWYFGRIGTCL

SEQ ID NO: 6547 - protein, 269 aa, Thermomyces lanuginosus
EVSQDLFNQFNLFAQYSAAAYCQKNNSAPAGTNITCTGNACPEVEKADATFLYSFEDSGVGDVTGFLALDNTNKRIVLSFRGSRSIENWIGNLNFDLKEINDICSGCRGHAGFTSSWRSVADTLRQKVEDAVREHPDYRVVFTGHSLGGALATVAGADLRGNGYDIDVFSYGAPRVGNRAFAEFLTNQTGGTLYRITHTNDIVPRLPPREFGYSHSSPEYWIKSGTLVPVTRNDIVKIEGIDATGGNNQPNIPDIPAHLWYFGRIGTCL

SEQ ID NO: 6548 - protein, 269 aa, Thermomyces lanuginosus
EVSQDLFNQFNLFAQYSAAAYCGKNNEAPAGTNITCTGNACPEVEKADATFLYSFEDSGVGDVTGFLALDNTNKLIVLSFRGSRSIENWIGNLNFDLKEINDICSGCRGHDGFTSSWRSVADTLRQKVEAAVREHPQYRVVFTGHSLGGALATVAGADLRGNPYDIDVFSYGAPRVGNRAFAEFLTVQTGGTLYRITHTNDIVPRLPPREFGYSHSSPEYWIKSGTLVPVTRQDIVKIEGIDATGGNNQPNIPDIPAHLWYFGRIGTCL

SEQ ID NO: 6549 - protein, 269 aa, Thermomyces lanuginosus
EKSQDLFNQFNLFAQYSAAAYCGKNNDAPAGTKITCTGNACPEVEKADATILYSFEDSGVGDVTGFLALDNTNKLIVLSFRGSRSIENWIGNLNFDLKEINDICSGCRGHDGFTSSWRSVADTLRQKVEDAVREHPDYRVVFTGHSLGGALATVAGADLRGNGYDIDVFSYGAPRVGNRAFAEFLTVQTGGTLYRITNTNDIVPRLPPREFGYSHSSPEYWIKSGTLVPVRRRDIVKIEGIDATGGNNQPNIPDIPAHLWYFGLIGTCL

SEQ ID NO: 6550 - protein, 269 aa, Thermomyces lanuginosus
EKSQDLFNQFNLFAQYSAAAYCGKNNDAPAGTKITCTGNACPEVEKADATLLYSFEDSGVGDVTGFLALDNTNKLIVLSFRGSRSIENWIGNLNFDLKEINDICSGCRGHDGFTSSWRSVADTLRQKVEDAVREHPDYRVVFTGHSLGGALATVAGADLRGNGYDIDVFSYGAPRVGNRAFAEFLTVQTGGTLYRITHTNDIVPRLPPREFGYSHSSPEYWIKSGTLVPVRRRDIVKIEGIDATGGNNQPNIPDGPAHLWYFGLIGTCL

SEQ ID NO: 6551 - protein, 269 aa, Thermomyces lanuginosus
EVSQDLFNQFNLFAQYSAAAYCKANNDAPAGTNITCTGNACPEVEKADATFLYSFEDSGVGDVTGFLALDNTNKQIVLSFRGSRSIENWIGNLNFDLKEINDICSGCRGHDGFTSSWRSVADTLRQKVEDAVREHPDYRVVFTGHSLGGALATVAWADLRGNGYDIDVFSYGAPRVGNRAFAEFLTTQQGGTLYRITHTNDIVPRLPPREFGYSHSSPEYWIKSGTLVPVTRNDIVKIEGIDATGGNNQPNIPDIPAHLWYFGLIGTCL

SEQ ID NO: 6552 - protein, 269 aa, Thermomyces lanuginosus
EVSQDLFNQFNLFAQYSKAAYCGANNDAPAGTNITCTGNACPEVEKADATFLYSFEDSGVGDVTGFLALDNTNKLIVLSFRGSRSIENWIGNLNFDLKEINDICSGCRGHAGFTSSWRSVADTLRQKVEDAVREHPDYRVVFTGHSLGGALATVAGADLRGNGYDIDVFSYGAPRVGNRAFAEFLTNQQGGTLYRITHTNDIVPRLPPREFGYSHSSPEYWIKSGTLVPVTRNDIVKIEGIDATGGNNQPNIPDIPAHLWYFGRIGTCL

SEQ ID NO: 6553 - protein, 269 aa, Thermomyces lanuginosus
EVSDDLFNQFLLFAQYSAAAYCGKNNNAPAGTNITCTGNACPEVEKADATFLYSFEDMGVGDVTGFLALDNTNKLIVLSFRGSRSIENWIGNLNFDLKEINDICSGCRGHDGFTSSWRSVADTLRQKVEDAVREHPDYRVVFTGHSLGGALATVAGADLRGNGYDIDVFSYGAPRVGNRAFAEFLTVQTGGTLYRITHTNDIVPRLPPREFGYSHSSPEYWIKSGTLVPVTRQDIVKIEGIDATGGNNQPNIPDITAHLWYFGLIGTCL

SEQ ID NO: 6554 - protein, 269 aa, Thermomyces lanuginosus
EVSQDLFNQFNLFAQYSAAAYCGKNNDAPAGTNITCTGNACPEVEKADATFLYSFEDSGVGDVTGFLALDNTNKLIVLSFRGSRSIENWIQNLNFDLKEINDICSGCRGHDGFTSSWRSVADTLRQKVEDAVREHPDYRVVFTGHSLGGGLATVAGADLRGNGYDIDVFSYGAPRVGNRAFAEFLTVQTGGTLYRITHTNDIVPRLPPRQFGYSHSSPEYWIKSGTLVPVRRRDIVKIEGIDATGGNNQPNIPDAPAHLWYFGLIGTCL

SEQ ID NO: 6555 - protein, 269 aa, Thermomyces lanuginosus
EVSQDLFNQFNLFAQYSAAAYCGKNNDAPAGTNITCRGRACPEVEKADATFLYSFEDSGVGDVTGFLALDNTNKLIVLSFRGSRSIENWIANLNFGLKEINDICSGCRGHDGFTSSWRSVADTLRQKVEDAVREHPDYRVVFTGHSLGGALATVAGADLRGNGYDIDVFSYGAPRVGNRAFAEFLTVQTGGTLYRITHTNDIVPRLPPREFGYSHSSPEYWIKSGTLVPVRRRDIVKIEGIDATGGNNQPNIPDIPAHLWYFGLIGTCL

SEQ ID NO: 6556 - protein, 269 aa, Synthetic construct
EVRQDLFNQFNLFAQYSAAAYCGKNNDAPAGTNITCTGNACPEVEKADATFLYSFEDSGVGDVTGFLALDNTNKLIVLSFRGSRSIENWFGNLNFLLKKINDICSGCRGHDGFTSSWRSVADTLRQKVEDAVREHPDYRVVFTGHSLGGALATVAGADLRGNGYDIDVFSYGAPRVGNRAFAEFLTAQTGGTLYRITHTNDIVPRLPPREFGYSHSSPEYWIKSGTLVPVTRNDIVKIEGIDATGGNNRPNIPDIPAHLWYFGLIGTCL

SEQ ID NO: 6557 - protein, 269 aa, Thermomyces lanuginosus
EVSQDLFNQFNLFAQYSAAAYCGKNNDAPAGTNITCTGNICPEVEKADATFLYSFRDSGVGDVTGFLALDNTNKLIVLSFRGSRSIENWIGNLNFDLIEINDICSGCRGHDGFTSSWFSVADTLRQKVEDAVREHPDYRVVFTGHSLGGALATVAGADLRGNGYDIDVFSYGAPRVGNRAFAEFLTVQTGGTLYRITHTNDIVPRLPPREFGYSHSSPEYWIKSGTLVPVRRRDIVKIEGIDATGGNNQPNIPDIPAHLWYFGLIGTCL

SEQ ID NO: 6558 - protein, 269 aa, Thermomyces lanuginosus
EVSQDLFNQFNLFAQYSAAAYCKKNNDAPAGTNITCTGNACPEVEKADATFLYSFKDSGVGDVTGFLALDNTNKRIVLSFRGSRSIENWIGNLNFDLKEINDICSGCRGHDGFTSSWRSVADTLRQKVEAAVREHPDYRVVFTGHSLGGALATVAGADLRGNGYDIDVFSYGAPRVGNRAFAEFLTVQNGGTLYRITHTNDIVPRLPPREFGYSHSSPEYWIKSGTLVPVTRNDIVKIEGIDATGGNNQPNIPDIPAHLWYFGRIGTCL

SEQ ID NO: 6559 - protein, 269 aa, Thermomyces lanuginosus
EVSQDLFNQFNLFAQYSAAAYCSKNNDAPAGTNITCTGNACPEVEKADATFLYSFRDSGVGDVTGFLALDNTNKLIVLSFRGSRSIENWIGNLNFDLKEINDICSGCRGHDGFTSSWFSVADTLRQKVEDAVREHPDYRVVFTGHSLGGALATVAGADLRGNGYDIDVFSYGAPRVGNRAFAEFLTVQTGGTLYRITHTNDIVPRLPPREFGYSHSSPEYWIKSGTLVPVRRRDIVKIEGIDATGGNNQPNIPDITAHLWYFGLIGTCL

SEQ ID NO: 6560 - protein, 269 aa, Thermomyces lanuginosus
EVSQDLFNQFNLFAQYSKAAYCGKNNDAPAGTNITCTGNACPEVEKADATFLYSFEDSGVGDVTGFLALDNTNKQIVLSFRGSRSIENWIGNLNFDLKEINDICSGCRGHDGFTSSWRSVADTLRQKVEAAVREHPDYRVVFTGHSLGGALATIAGADLRGNGYDIDVFSYGAPRVGNRAFAEFLTVQQGGTLYRITHTNDIVPRLPPREFGYSHSSPEYWIKSGTLVPVTRNDIVKIEGIDATGGNNQPNIPDIPAHLWYFGRIGTCL

SEQ ID NO: 6561 - protein, 269 aa, Thermomyces lanuginosus
EVSRDLFNQFNLFAQYSAAAYCGKNNDAPAGTNITCTGNACPEVEKADATILYSFEDSGVGDVTGFLALDNTNKLIVLSFRGSRSIENWIGNLNFDLKEINDICSGCRGHDGFTSSWRSVADTLRQKVEDAVREHPDYRVVFAGHSLGGALATVAGADLRGNGYDIDVFSYGAPRVGNRAFAEFLTVQTGGTLYRITNTNDIVPRLPPREFGYSHSSPEYWIKSGTLVPVRRRDIVKIEGIDATGGNNQPNIPDIPAHLWYFGLIGTCL

SEQ ID NO: 6562 - protein, 269 aa, Thermomyces lanuginosus
EVSQDLFNQFNLFAQYSAAAYCGKNNDAPAGTNITCTGNACPEVEKAQATFLYSFEDMGVGDVTGFLALDNTNKLIVLSFRGSRSIENWIGNLNFDLKEINDICSGCRGHDGFTSSWRSVADTLRQKVEDAVREHPQYRVVFTGHSLGGALATVAGADLRGNPYDIDVFSYGAPRVGNRAFAEFLTVQTGGTLYRITHTNDIVPRLPPREFGYSHSSPEYWIKSGTMVPVTRNDIVKIEGIDATGGNNQPNIPDIPAHLWYFGRIGTCL

SEQ ID NO: 6563 - protein, 269 aa, Thermomyces lanuginosus
EYSQDLFNQFNLFAQYSAAAYCGKNNDAPAGTKITCTGNACPEVEKADATVLYSFEDSGVGDVTGFLALDNTNKLIVLSFRGSRSIENWIGNLNFDLKEINDICSGCRGHDGFTSSWRSVADTLRQKVEDAVREHPDYRVVFTGHSLGGALATVAGADLRGNGYDIDVFSYGAPRVGNRAFAEFLTVQTGGTLYRITHTNDIVPRLPPREFGYSHSSPEYWIKFGTLVPVRRRDIVKIEGIDATGGNNQPNIPDIPAHLWYFGLIGTCL

SEQ ID NO: 6564 - protein, 269 aa, Thermomyces lanuginosus
EVSQDLFNQFNLFAQYSAAAYCGKNNDAPAGTNITCTGNACPEVEKADATFLYSFEDSGVGDVTGFLALDNTNKLIVLSFRGSRSIENWIGNLNFDLKEINDICSGCRGHDGFTSSWRSVADTLRQKVEDAVREHPDYRVVFTGHSLGGALATVAGADLRGNGYDIDVFSYGAPRVGNRAFAEFLTVQTGGTLYRITNTNDIVPRLPPREFGYSHSSPEYWIKSGTLPPVRRRDIVKCEGIDATCGNNQPNIPDIPAHLWYFGLIGTCL

SEQ ID NO: 6565 - protein, 269 aa, Thermomyces lanuginosus
EVSQDLFNQFNLFAQYSAAAYCGKNNDAPAGTNITCTGNACPEVEKADATILYSFRDSGVGDVTGFLALDNTNKLIVLSFRGSRSIENWIGNLNFDLIEINDICSGCRGHDGFTSSWFSVADTLRQKVEDAVREHPDYRVVFTGHSLGGALATVAGADLRGNGYDIDVFSYGAPRVGNRAFAEFLTVQTGGTLYRITHTNDIVPRLPPREFGYSHSSPEYWIKSGTLVPVRRRDIVKIEGIDATGGNNQPNIPDIPAHLWYFGLIGTCL

SEQ ID NO: 6566 - protein, 269 aa, Thermomyces lanuginosus
EVSQDLFNQFNLFAQYSKAAYCQKNNDAPAGTNITCTGNACPEVEKADVTFLYSFEDSGVGDVTGFLALDNTNKLIILSFRGSRSIENWIGNLNFDLKEINDICSGCRGHDGFTSSWRSVADTLRQKVEDAVREHPDYRVVFTGHSLGGALATVAGADLRGNGYDIDVFSYGAPRVGNRAFAEFLTTQDGGTLYRITHTNDIVPRLPPREFGYSHSSPEYWIKSGTLVPVTRNDIVKIEGIDATGGNNQPNIPDIPAHLWYFGLIGTCL

SEQ ID NO: 6567 - protein, 269 aa, Thermomyces lanuginosus
EVSQDLFNQFNLFAQYSAAAYCGKNNEAPAGTNITCTGNACPEVEKAQATFLYSFEDMGVGDVTGFLALDNTNKLIVLSFRGSRSIENWIGNLNFDLKEINDICSGCRGHDGFTSSWRSVADTLRQKVEAAVREHPDYRVVFTGHSLGGALATVAGADLRGNGYDIDVFSYGAPRVGNRAFAEFLTVQTGGTLYRITHTNDIVPRLPPREFGYSHSSPEYWIKSGTMVPVTRQDIVKIEGIDATGGNNQPNIPDIPAHLWYFGLIGTCL

SEQ ID NO: 6568 - protein, 269 aa, Thermomyces lanuginosus
EVSQDLFNQFNLFAQYSAAAYCGKNNDAPAGTNITCTGNACPEVEKADATFLYSFEDSGVGDVTGFLALDNTNKLIVLSFRGSRSIENWIGNLNFDLKEINDICSGCRGHAGFTSSWRSVADTLRQKVEAAVREHPDYRVVFTGHSLGGALATIAWADLRGNGYDIDVFSYGAPRVGNRAFAEFLTNQTGGTLYRITHTNDIVPRLPPREFGYSHSSPEYWIKSGTLVPVTRNDIVKIEGIDATGGNNQPNIPDIPAHLWYFGRIGTCL

SEQ ID NO: 6569 - protein, 269 aa, Thermomyces lanuginosus
EVSRDLFNQFNLFAQYSAAAYCGKNNDAPAGTNITCTGNACPEVEKADATILYSFEDSGVGDVTGFLALDNTNKLIVLSFRGSRSIENWIGNLNFDLKEINDICSGCRGHDGFTSSWRSVADTLRQKVEDAVREHPDYRVVFAGHSLGGALATVAGADLRGNGYDIDVFSYGAPRVGNRAFAEFLTVQTGGTLYRITHTNDIVPRLPPREFGYSHSSPEYWIKSGTLPPVRRRDIVKIEGIDATGGNNQPNIPDIPAHLWYFGLIGTCL

SEQ ID NO: 6570 - protein, 269 aa, Thermomyces lanuginosus
EVSQDLFNQFNLFAQYSKAAYCKANNDAPAGTNITCTGNACPEVEKADATFLYSFEDSGVGDVTGFLALDNTNKRIVLSFRGSRSIENWIGNLNFDLKEINDICSGCRGHAGFTSSWRSVADTLRQKVEDAVREHPDYRVVFTGHSLGGALATVAGADLRGNGYDIDVFSYGAPRVGNRAFAEFLTVQTGGTLYRITHTNDIVPRLPPREFGYSHSSPEYWIKSGTLVPVTRNDIVKIEGIDATGGNNQPNIPDIPAHLWYFGRIGTCL

SEQ ID NO: 6571 - protein, 269 aa, Thermomyces lanuginosus
EYSQDLFNQFNLFAQYSAAAYCGKNNDAPAGTKITCTGNACPEVEKADATVLYSFEDSGVGDVTGFLALDNTNKLIVLSFRGSRSIENWIGNLNFDLKEINDICSGCRGHDGFTSSWRSVADTLRQKVEDAVREHPDYRVVFTGHSLGGALATVAGADLRGNGYDIDVFSYGAPRVGNRAFAEFLTVQTGGTLYRITHTNDIVPRLPPREFGYSHSSPEYWIKSGTLPPVRRRDIVKIEGIDATGGNNQPNIPDIPAHLWYFGLIGTCL

SEQ ID NO: 6572 - protein, 269 aa, Thermomyces lanuginosus
EYSQDLFNQFNLFAQYSAAAYCGKNNDAPAGTKITCTGNACPEVEKADATVLYSFEDSGVGDVTGFLALDNTNKLIVLSFRGSRSIENWIGNLNFDLKEINDICSGCRGHDGFTSSWRSVADTLRQKVEDAVREHPDYRVVFTGHSLGGALATVAGADLRGNGYDIDVFSYGAPRVGNRAFAEFLTVQTGGTLYRITHTNDIVPRLPPREFGYSHSSPEYWIKSGTLVPVRRRDIVKIEGIDATGGNNQPNIPDGPAHLWYFGLIGTCL

SEQ ID NO: 6573 - protein, 269 aa, Thermomyces lanuginosus
EVSQDLFNQFNLFAQYSAAAYCGKNNRAPAGTNITCTGNACPEVEKADATFLYSFEDSGVGDVTGFLALDNTNKLIVLSFRGSRSIENWITNLNFDLKEINDICSGCRGHAGFTSSWRSVADTLRQKVEDAVREHPDYRVVFTGHSLGGALATVAGADLRGNGYDIDVFSYGAPRVGNRAFAEFLTVQTGGTLYRITHTNDIVPRLPPREFGYSHPSPEYWIKSGTGVPVTRNDIVKIEGIDATGGNNQPNIPDITAHLWYFGLIGTCL

SEQ ID NO: 6574 - protein, 269 aa, Thermomyces lanuginosus
EVSQDLFNQFNLFAQYSAAAYCGKNNRAPAGTNITCTGNACPEVEKADATFLYSFEDSGVGDVTGFLALDNTNKLIVLSFRGSRSIENWIGNLNFDLKEINDICSGCRGHGGFTSSWRSVADTLRQKVEDAVREHPDYRVVFTGHSLGGALATVAGADLRGNGYDIDVFSYGAPRVGNRAFAEFLTVQTGGTLYRITHTNDIVPRLPPREFGYSHPSPEYWIKSGTGVPVTRNDIVKIEGIDAIGGNNQPNIPDITAHLWYFGLIGTCL

SEQ ID NO: 6575 - protein, 269 aa, Thermomyces lanuginosus
EKSQDLFNQFNLFAQYSAAAYCGKNNDAPAGTKITCTGNACPEVEKADATVLYSFEDSGVGDVTGFLALDNTNKLIVLSFRGSRSIENWIGNLNFDLKEINDICSGCRGHDGFTSSWRSVADTLRQKVEDAVREHPDYRVVFTGHSLGGALATVAGADLRGNGYDIDVFSYGAPRVGNRAFAEFLTVQTGGTLYRITHTNDIVPRLPPREFGYSHSSPEYWIKPGTLVPVRRRDIVKIEGIDATGGNNQPNIPDIPAHLWYFGLIGTCL

SEQ ID NO: 6576 - protein, 269 aa, Thermomyces lanuginosus
EVSQDLFNQFKLFAQYSAAAYCGKNNNAPAGTNITCTGNACPEVEKADATFLYSFKDMGVGDVTGFLALDNTNKLIVLSFRGSRSIENWFGNLNFDLKEINDICSGCRGHDGFTSSWRSVADTLRQKVEDAVREHPDYRVVFTGHSLGGALATVAGADLRGNGYDIDVFSYGAPRVGNRAFAEFLTVQTGGTLYRITHTNDIVPRLPPREFGYSHSSPEYWIKSGTLVPVTRNDIVKIEGIDATGGNNQPNIPDITAHLWYFGLIGTCL

SEQ ID NO: 6577 - protein, 269 aa, Thermomyces lanuginosus
EVSQDLFNQFNLFAQYSAAAYCGKNNDAPAGTNITCTGNACPEVEKADATTLYSFKDSGVGDVTGFLALDNTNKQIVLSFRGSRSIENWIGNLNFDLKEINDICSGCRGHDGFTSSWRSVADTLRQKVEDAVREHPDYRVVFTGHSLGGALATVAGADLRGNGYDIDVFSYGAPRVGNRAFAEFLTHQTGGTLYRITHTNDIVPRLPPREFGYSHSSPEYWIKSGTLVPVTRNDIVKIEGIDATGGNNQPNQPDIPAHLWYFGRIGTCL

SEQ ID NO: 6578 - protein, 269 aa, Thermomyces lanuginosus
EVSQDLFNQFNLFAQYSAAAYCQKNNSAPAGTNITCTGNACPEVEKADATFLYSFEDSGVGDVTGFLALDNTNKLIVLSFRGSRSIENWIGNLRFDLKEINDICSGCRGHDGFTSSWRSVADTLRQKVEDAVREHPDYRVVFTGHSLGGALATIAWADLRGNGYDIDVFSYGAPRVGNRAFAEFLTVQQGGTLYRITHTNDIVPRLPPREFGYSHSSPEYWIKSGTLVPVTRNDIVKIEGIDATGGNNQPNIPDIPAHLWYFGLIGTCL

SEQ ID NO: 6579 - protein, 269 aa, Thermomyces lanuginosus
EYSQDLFNQFNLFAQYSAAAYCGKNNDAPAGTKITCTGNACPEVEKADATVLYSFEDSGVGDVTGFLALDNTNKLIVLSFRGSRSIENWIGNLNFDLKEINDICSGCRGHDGFTSSWRSVADTLRQKVEDAVREHPDYRVVFTGHSLGGALATVAGADLRGNGYDIDVFSYGAPRVGNRAFAEFLTVQTGGTLYRITHTNDIVPRLPPREFGYSHSSPEYWIKSGTLVPVRRRDIVKIEGIDATGGNNQPNIPDIPIHLWYFGLIGTCL

SEQ ID NO: 6580 - protein, 269 aa, Thermomyces lanuginosus
EVSQDLFNQFNLFAQYSAAAYCQKNNDAPAGTNITCTGNACPEVEKADATFLYSFEDSGVGDVTGFLALDNTNKRIVLSFRGSRSIENWIGNLNFDLKEINDICSGCRGHDGFTSSWRSVADTLRQKVEDAVREHPDYRVVFTGHSLGGALATIAWADLRGNGYDIDVFSYGAPRVGNRAFAEFLTNQTGGTLYRITHTNDIVPRLPPREFGYSHSSPEYWIKSGTLVPVTRNDIVKIEGIDATGGNNQPNIPDIPAHLWYFGRIGTCL

SEQ ID NO: 6581 - protein, 269 aa, Thermomyces lanuginosus
EVSQDLFNQFNLFAQYSAAAYCKKNNQAPAGTNITCTGNACPEVEKADATTLYSFKDMGVGDVTGFLALDNTNKQIVLSFRGSRSIENWIGNLNFDLKEINDICSGCRGHDGFTSSWRSVADTLRQKVEDAVREHPDYRVVFTGHSLGGALATVAGADLRGNGYDIDVFSYGAPRVGNRAFAEFLTVQTGGTLYRITHTNDIVPRLPPREFGYSHSSPEYWIKSGTLVPVTRNDIVKIEGIDATGGNNQPNIPDIPAHLWYFGLIGTCL

SEQ ID NO: 6582 - protein, 269 aa, Synthetic construct
EVSQDLFNQFNLFAQYSAAAYCGKNNDAPAGTNITCTGNACPEVEKADATFLYSFEGSGVGDVTGFLALDNTNKLIVLSFRGSRSIENWIGNLKFLLKEINDICSGCRGHDGFTSSWRSVADTLRQKVEDAVREHPDYRVVFTGHSLGGALATVAGADLRGNGYDIDVFSYGAPRVGNRAFAEFLTVQTGGTLYRITHRRDIVPRLPPREFGYSHSSPEYWIKSGTLVPVTRNDIVKIEGIDATGGNNRPNIPDIPAHLWYFGLIGTCL

SEQ ID NO: 6583 - protein, 269 aa, Thermomyces lanuginosus
EVSQDLFNQFNLFAQYSKAAYCGANNDAPAGTNITCTGNACPEVEKADATFLYSFEDSGVGDVTGFLALDNTNKQIVLSFRGSRSIENWIGNLRFDLKEINDICSGCRGHDGFTSSWRSVADTLRQKVEDAVREHPDYRVVFTGHSLGGALATIAWADLRGNGYDIDVFSYGAPRVGNRAFAEFLTVQTGGTLYRITHTNDIVPRLPPREFGYSHSSPEYWIKSGTLVPVTRNDIVKIEGIDATGGNNQPNIPDIPAHLWYFGLIGTCL

SEQ ID NO: 6584 - protein, 269 aa, Thermomyces lanuginosus
EVSQDLFNQFNLFAQYSAAAYCGKNNDAPAGTNITCTGNACPEVEKADATFLYSFEDSGVGDVTGFLALDNTNKQIVLSFRGSRSIENWIGNLRFDLKEINDICSGCRGHAGFTSSWRSVADTLRQKVEDAVREHPDYRVVFTGHSLGGALATVAWADLRGNGYDIDVFSYGAPRVGNRAFAEFLTVQQGGTLYRITHTNDIVPRLPPREFGYSHSSPEYWIKSGTLVPVTRNDIVKIEGIDATGGNNQPNIPDIPAHLWYFGRIGTCL

SEQ ID NO: 6585 - protein, 269 aa, Thermomyces lanuginosus
EVSQDLFNQFNLFAQYSAAAYCGKNNRAPAGTNITCTGNACPEVEKADATFLYSFEDSGVGDVTGFLALDNTNKLIVLSFRGSRSIENWIWNLNFDLKEINDICSGCRGHAGFTSSWRSVADTLRQKVEDAVREHPDYRVVFTGHSLGGALATVAGADLRGNGYDIDVFSYGAPRVGNRAFAEFLTVQTGGTLYRITHTNDIVPRLPPREFGYSHPSPEYWIKSGTGVPVTRNDIVKIEGIDATGGNNQPNIPDITAHLWYFGLIGTCL

SEQ ID NO: 6586 - protein, 269 aa, Thermomyces lanuginosus
EVSQDLFNQFNLFAQYSKAAYCGKNNDAPAGTNITCTGNACPEVEKADATFLYSFEDSGVGDVTGFLALDNTNKLIVLSFRGSRSIENWIGNLRFDLKEINDICSGCRGHAGFTSSWRSVADTLRQKVEAAVREHPDYRVVFTGHSLGGALATIAGADLRGNGYDIDVFSYGAPRVGNRAFAEFLTNQTGGTLYRITHTNDIVPRLPPREFGYSHSSPEYWIKSGTLVPVTRNDIVKIEGIDATGGNNQPNIPDIPAHLWYFGLIGTCL

SEQ ID NO: 6587 - protein, 269 aa, Thermomyces lanuginosus
EKSQDLFNQFNLFAQYSAAAYCGKNNDAPAGTKITCTGNACPEVEKADATVLYSFEDSGVGDVTGFLALDNTNKLIVLSFRGSRSIENWIGNLNFDLKEINDICSGCRGHDGFTSSWRSVADTLRQKVEDAVREHPDYRVVFTGHSLGGALATVAGADLRGNGYDIDVFSYGAPRVGNRAFAEFLTVQTGGTLYRITYTNDIVPRLPPREFGYSHSSPEYWIKSGTLVPVRRRDIVKIEGIDATGGNNQPNIPDIPAHLWYFGLIGTCL

SEQ ID NO: 6588 - protein, 269 aa, Thermomyces lanuginosus
EVSQDLFNQFNLFAQYSAAAYCGKNDRAPAGTNITCTGNACPEVEKADATFLYSFEDSGVGDVTGFLALDNTNKLIVLSFRGSRSIENWIGNLNFDLKEINDICSGCRGHAGFTSSWRSVADTLRQKVEDAVREHPDYRVVFTGHSLGGALATVAGADLRGNGYDIDVFSYGAPRVGNRAFAEFLTVQTGGTLYRITHTNDIVPRLPPREFGYSHPSPEYWIKSGTGVPVTRNDIVKIEGIDATGGNNQPNIPDITAHLWYFGLIGTCL

SEQ ID NO: 6589 - protein, 269 aa, Thermomyces lanuginosus
EVSQDLFNQFNLFAQYSAAAYCGKNNDAPAGTNITCTGNACPEVEKADATFLYSFRNSGVGDVTGFLALDNTNKLIVLSFRGSRSIENWIGNLNFDLKEINDICSGCRGHDGFTSSWFSVADTLRQKVEDAVREHPDYRVVFTGHSLGGALATVAGADLRGNGYDIDVFSYGAPRVGNRAFAEFLTVQTGGTLYRITHTNDIVPRLPPREFGYSHSSPEYWIKSGTLVPVRRRDIVKIEGIDATGGNNQPNIPDITAHLWYFGLIGTCL

SEQ ID NO: 6590 - protein, 269 aa, Thermomyces lanuginosus
EVSQDLFNQFNLFAQYSAAAYCGKNNDAPAGTQITCTGNACPEVEKADATFLYSFEDSGVGDVTGFLALDNTNKLIVLSFRGSRSIENWIGNLNFDLKEINDICSGCRGHDGFTSSIRSVADTLRQKVEDAVREHPDYRVVFTGHSLGGALATVAGADLRGNGYDIDVFSYGAPRQGNRAFAEFLTVQTGGTLYRITHTNDIVPRLPPREFGYSHSSPEYWIKSGTLVPVRRRDIVKIEGIDATGGNNQPNIPDIAAHLWYFGLIGTCL

SEQ ID NO: 6591 - protein, 269 aa, Thermomyces lanuginosus
EVSQDLFNQFNLFAQYSAAAYCGKNNEAPAGTNITCTGNACPEVEKAQATFLYSFEDMGVGDVTGFLALDNTNKLIVLSFRGSRSIENWIGNLNFDLKEINDICSGCRGHDGFTSSWRSVADTLRQKVEDAVREHPDYRVVFTGHSLGGALATVAGADLRGNPYDIDVFSYGAPRVGNRAFAEFLTVQTGGTLYRITHTNDIVPRLPPREFGYSHSSPEYWIKSGTLVPVTRQDIVKIEGIDATGGNNQPNIPDIPAHLWYFGRIGTCL

SEQ ID NO: 6592 - protein, 269 aa, Thermomyces lanuginosus
EVSQDLFNQFNLFAQYSAAAYCGKNNDAPAGTNITCTGNACPEVEKADATFLYSFEDSGVGDVTGFLALDNTNKLIVLSFRGSWSIENWIANLNFDLKKINDICSGCRGHDGFTSSWRSVADTLRQKVEDAVREHPDYRVVFTGHSLGGALATVAGADLRGNGYDIDVFSYGAPRVGNRAFAEFLTVQTGGTLYRITHTNDIVPRLPPREFGYSHSSPEYWIKSGTLVPVRRRDIVKIEGIDATGGNNRPNIPDIPAHLWYFGLIGTCL

SEQ ID NO: 6593 - protein, 269 aa, Thermomyces lanuginosus
EVSQDLFNQFNLFAQYSAAAYCGANNDAPAGTNITCTGNACPEVEKADATFLYSFEDSGVGDVTGFLALDNTNKQIVLSFRGSRSIENWIGNLNFDLKEINDICSGCRGHDGFTSSWRSVADTLRQKVEDAVREHPDYRVVFTGHSLGGALATIAWADLRGNGYDIDVFSYGAPRVGNRAFAEFLTVQQGGTLYRITHTNDIVPRLPPREFGYSHSSPEYWIKSGTLVPVTRNDIVKIEGIDATGGNNQPNIPDIPAHLWYFGRIGTCL

SEQ ID NO: 6594 - protein, 269 aa, Thermomyces lanuginosus
EVSQDLFNQFNLFAQYSAAAYCGKNNDAPAGTNITCTGNACPEVEKADATILYSFEDSGVGDVTGFLALDNTNKLIVLSFRGSRSIENWIGNLNFDLKEINDICSGCRGHDGFTSSWRSVADTLRQKVEDAVREHPDYRVVFTGHSLGGALATVAGADLRGDGYDIDVFSYGAPRVGNRAFAEFLTVQTGGTLYRITSTNDIVPRLPPREFGYSHSSPEYWIKSGTLRPVRRRDIVKIEGIDATGGNNQPNIPDIPAHLWYFGLIGTCL

SEQ ID NO: 6595 - protein, 269 aa, Thermomyces lanuginosus
EVSQDLFNQFKLFAQYSAAAYCGKNNNAPAGTNITCTGNACPEVEKADATFLYSFEDMGVGDVTGFLALDNTNKLIVLSFRGSRSIENWFGNLNFDLKEINDICSGCRGHDGFTSSWRSVADTLRQKVEDAVREHPDYRVVFTGHSLGGALATVAGADLRGNGYDIDVFSYGAPRVGNRAFAEFLTVQTGGTLYRITHTNDIVPRLPPREFGYSHSSPEYWIKSGTLVPVTRQDIVKIEGIDATGGNNQPNIPDITAHLWYFGLIGTCL

SEQ ID NO: 6596 - protein, 269 aa, Thermomyces lanuginosus
EVSQDLFNQFNLFAQYSAAAYCKKNNDAPAGTNITCTGNACPEVEKADATFLYSFEDSGVGDVTGFLALDNTNKLIVLSFRGSRSIENWIGNLNFDLKEINDICSGCRGHDGFTSSWRSVADTLRQKVEAAVREHPDYRVVFTGHSLGGALATIAWADLRGNGYDIDVFSYGAPRVGNRAFAEFLTTQTGGTLYRITHTNDIVPRLPPREFGYSHSSPEYWIKSGTLVPVTRNDIVKIEGIDATGGNNQPNIPDIPAHLWYFGRIGTCL

SEQ ID NO: 6597 - protein, 269 aa, Thermomyces lanuginosus
EKSQDLFNQFNLFAQYSAAAYCGKNNDAPAGTKITCTGNACPEVEKADATVLYSFEDSGVGDVTGFLALDNTNKLIVLSFRGSRSIENWIGNLNFDLKEINDICSGCRGHDGFTSSWRSVADTLRQKVEDAVREHPDYRVVFTGHSLGGALATVAGADLRGNGYDIDVFSYGAPRVGNRAFAEFLTVQTGGTLYRITHTNDIVPRLPPREFGYSHSSPEYWIKSGTLVPVRRRDIVKIEGIDATGGNNQPNIPDIPVHLWYFGLIGTCL

SEQ ID NO: 6598 - protein, 269 aa, Thermomyces lanuginosus
EVSQDLFNQFNLFAQYSAAAYCGKNNEAPAGTNITCTGNACPEVEKADATFLYSFKDMGVGDVTGFLALDNTNKLIVLSFRGSRSIENWFGNLNFDLKEINDICSGCRGHDGFTSSWRSVADTLRQKVEDAVREHPDYRVVFTGHSLGGALATVAGADLRGNGYDIDVFSYGAPRVGNRAFAEFLTVQTGGTLYRITHTNDIVPRLPPREFGYSHSSPEYWIKSGTLVPVTRQDIVKIEGIDATGGNNQPNIPDITAHLWYFGLIGTCL

SEQ ID NO: 6599 - protein, 269 aa, Synthetic construct
EVSQDLFNQFNLFAQYSAAAYCGKNNDAPAGTNITCTGNACPEVEKADATFLYSFEDSGVGDVTGFLALDNTNKLIVLSFRGTRSIKNGIANLKFVLKEINDICSGCRGHDGFTSSWRSVADTLRQKVEDAVREHPDYRVVFTGHSLGGALATVAGADLRGNGYDIDVFSYGAPRVGNRAFAEFLTVQTGGTLYRITHTNDIVPRLPPREFGYSHSSPEYWIKSGTLVPVTRNDIVKIEGIDATGGNNQPNIPDIPAHLWYFGLIGTCL

SEQ ID NO: 6600 - protein, 269 aa, Thermomyces lanuginosus
EVSQDLFNQFNLFAQYSAAAYCGKNNDAPAGTNITCTGNACPEVEKADATFLYSFEDSGVGDVTGFLALDNTNKQIVLSFRGSRSIENWIGNLNFDLKEINDICSGCRGHDGFTSSWRSVADTLRQKVEAAVREHPDYRVVFTGHSLGGALATIAWADLRGNGYDIDVFSYGAPRVGNRAFAEFLTNQTGGTLYRITHTNDIVPRLPPREFGYSHSSPEYWIKSGTLVPVTRNDIVKIEGIDATGGNNQPNIPDIPAHLWYFGRIGTCL

SEQ ID NO: 6601 - protein, 269 aa, Synthetic construct
EVSQDLFNQFNLFAQYSAAAYCGKNNDAPAGTNITCTGNACPEVEKADATFLYSFEGSGVGDVTGFLALDNTNKLIVLSFRGSRSIENWIGNLKFLLKEINDICSGCRGHDGFTSSWRSVADTLRQKVEDAVREHPDYRVVFTGHSLGGALATVAGADLRGNGYDIDVFSYGAPRVGNRAFAEFLTVQTGGTLYRITHTRDIVPRLPPAEFGYSHSSPEYWIKSGTLVPVTRNDIVKIEGIDATGGNNRPNIPDIPAHLWYFGLIGTCL

SEQ ID NO: 6602 - protein, 269 aa, Thermomyces lanuginosus
EVSQDLFNQFNLFAQYSAAAYCKKNNDAPAGTNITCTGNACPEVEKADATTLYSFEDSGVGDVTGFLALDNTNKLIVLSFRGSRSIENWIGNLNFDLKEINDICSGCRGHDGFTSSWRSVADTLRQKVEAAVREHPDYRVVFTGHSLGGALATVAGADLRGNGYDIDVFSYGAPRVGNRAFAEFLTNQTGGTLYRITHTNDIVPRLPPREFGYSHSSPEYWIKSGTLVPVTRNDIVKIEGIDATGGNNQPNQPDIPAHLWYFGRIGTCL

SEQ ID NO: 6603 - protein, 269 aa, Thermomyces lanuginosus
EVSQDLFNQFNLFAQYSKAAYCGSNNDAPAGTNITCTGNACPEVEKADATFLYSFEDSGVGDVTGFLALDNTNKLIILSFRGSRSIENWIGNLRFDLKEINDICSGCRGHDGFTSSWRSVADTLRQKVEAAVREHPDYRVVFTGHSLGGALATVAWADLRGNGYDIDVFSYGAPRVGNRAFAEFLTVQTGGTLYRITHTNDIVPRLPPREFGYSHSSPEYWIKSGTLVPVTRNDIVKIEGIDATGGNNQPNIPDIPAHLWYFGLIGTCL

SEQ ID NO: 6604 - protein, 269 aa, Thermomyces lanuginosus
EVSQDLFNQFNLFAQYSAAAYCGKNNRAPAGTNITCTGNACPEVEKADATFLYSFEDSGVGDVTGFLALDNTNKLIVLSFRGSRSIENWIGNLNFDLKEINDICSGCRGHGGFTSSWRSVADTLRQKVEDAVREHPDYRVVFTGHSLGGALATVAGADLRGNGYDIDVFSYGAPRVGNRAFAEFLTVQTGGTLYRITHTNDIVPRLPPREFGYSHPSPEYWIKSPTGVPVTRNDIVKIEGIDATGGNNQPNIPDITAHLWYFGLIGTCL

SEQ ID NO: 6605 - protein, 269 aa, Thermomyces lanuginosus
EKSQDLFNQFNLFAQYSAAAYCGKNNDAPAGTKITCTGNACPEVEKADATLLYSFEDSGVGDVTGFLALDNTNKLIVLSFRGSRSIENWIGNLNFDLKEINDICSGCRGHDGFTSSWRSVADTLRQKVEDAVREHPDYRVVFTGHSLGGALATVAGADLRGNGYDIDVFSYGAPRVGNRAFAEFLTVQTGGTLYRITHTNDIVPRLPPREFGYSHSSPEYWIKIGTLVPVRRRDIVKIEGIDATGGNNQPNIPDIPAHLWYFGLIGTCL

SEQ ID NO: 6606 - protein, 269 aa, Thermomyces lanuginosus
EKSQDLFNQFNLFAQYSAAAYCGKNNDAPAGTKITCTGNACPEVEKADATILYSFEDSGVGDVTGFLALDNTNKLIVLSFRGSRSIENWIGNLNFDLKEINDICSGCRGHDGFTSSWRSVADTLRQKVEDAVREHPDYRVVFTGHSLGGALATVAGADLRGNGYDIDVFSYGAPRVGNRAFAEFLTVQTGGTLYRITHTNDIVPRLPPREFGYSHSSPEYWIKFGTLVPVRRRDIVKIEGIDATGGNNQPNIPDIPAHLWYFGLIGTCL

SEQ ID NO: 6607 - protein, 269 aa, Thermomyces lanuginosus
EVSQDLFNQFNLFAQYSKAAYCGANNDAPAGTNITCTGNACPEVEKADATFLYSFEDSGVGDVTGFLALDNTNKQIILSFRGSRSIENWIGNLNFDLKEINDICSGCRGHDGFTSSWRSVADTLRQKVEAAVREHPDYRVVFTGHSLGGALATVAGADLRGNGYDIDVFSYGAPRVGNRAFAEFLTNQTGGTLYRITHTNDIVPRLPPREFGYSHSSPEYWIKSGTLVPVTRNDIVKIEGIDATGGNNQPNIPDIPAHLWYFGLIGTCL

SEQ ID NO: 6608 - protein, 269 aa, Thermomyces lanuginosus
EVSQDLFNQFNLFAQYSAAAYCGKNNDAPAGTNITCTGNICPEVEKADATFLYSFRDSGVGDVTGFLALDNTNKLIVLSFRGSRSIENWIGNLNFDLKEINDICSGCRGHDGFTSSWFSVADTLRQKVEDAVREHPDYRVVFTGHSLGGALATVAGADLRGNSYDIDVFSYGAPRVGNRAFAEFLTVQTGGTLYRITHTNDIVPRLPPREFGYSHSSPEYWIKSGTLVPVRRRDIVKIEGIDATGGNNQPNIPDIPAHLWYFGLIGTCL

SEQ ID NO: 6609 - protein, 269 aa, Thermomyces lanuginosus
EVSQDLFNQFNLFAQYSAAAYCGKNNDAPAGTNITCTGNACPEVEKADATILYSFRDSGVGDVTGFLALDNTNKLIVLSFRGSRSIENWIGNLNFDLKEINDICSGCRGHDGFTSSWFSVADTLRQKVEDAVREHPDYRVVFTGHSLGGALATVAGADLRGNGYDIDVFSYGAPRVGNRAFAEFLTVQTGGTLYRITHTNDIVPRLPPREFGYSHSSPEYWIKSGTLVPVRRRDIVKIEGIDAEGGNNQPNIPDIPAHLWYFGLIGTCL

SEQ ID NO: 6610 - protein, 269 aa, Thermomyces lanuginosus
EKSQDLFNQFNLFAQYSAAAYCGKNNDAPAGTKITCTGNACPEVEKADATILYSFEDSGVGDVTGFLALDNTNKLIVLSFRGSRSIENWIGNLNFDLKEINDICSGCRGHDGFTSSWRSVADTLRQKVEDAVREHPDYRVVFTGHSLGGALATVAGADLRGNGYDIDVFSYGAPRVGNRAFAEFLTVQTGGTLYRITSTNDIVPRLPPREFGYSHSSPEYWIKSGTLVPVRRRDIVKIEGIDATGGNNQPNIPDIPAHLWYFGLIGTCL

SEQ ID NO: 6611 - protein, 269 aa, Thermomyces lanuginosus
EVSQDLFNQFNLFAQYSAAAYCQKNNDAPAGTNITCTGNACPEVEKADATFLYSFEDSGVGDVTGFLALDNTNKQIILSFRGSRSIENWIGNLRFDLKEINDICSGCRGHDGFTSSWRSVADTLRQKVEAAVREHPDYRVVFTGHSLGGALATVAGADLRGNGYDIDVFSYGAPRVGNRAFAEFLTQQTGGTLYRITHTNDIVPRLPPREFGYSHSSPEYWIKSGTLVPVTRNDIVKIEGIDATGGNNQPNIPDIPAHLWYFGLIGTCL

SEQ ID NO: 6612 - protein, 269 aa, Thermomyces lanuginosus
EVSQDLFNQFNLFAQYSAAAYCGKNNDAPAGTNITCTGNACPEVEKADATLLYSFEDSGVGDVTGFLALDNTNKLIVLSFRGSRSIENWIGNLNFDLKEINDICSGCRGHDGFTSSWRSVADTLRQKVEDAVREHPDYRVVFTGHSLGGALATVAGADLRGDGYDIDVFSYGAPRVGNRAFAEFLTVQTGGTLYRITSTNDIVPRLPPREFGYSHSSPEYWIKSGTLPPVRRRDIVKIEGIDATGGNNQPNIPDIPAHLWYFGLIGTCL

SEQ ID NO: 6613 - protein, 269 aa, Thermomyces lanuginosus
EVSQDLFNQFNLFAQYSAAAYCGKNNDAPAGTNITCTGNACPEVEKADATTLYSFEDSGVGDVTGFLALDNTNKRIVLSFRGSRSIENWIGNLNFDLKEINDICSGCRGHDGFTSSWRSVADTLRQKVEAAVREHPDYRVVFTGHSLGGALATVAGADLRGNGYDIDVFSYGAPRVGNRAFAEFLTNQTGGTLYRITHTNDIVPRLPPREFGYSHSSPEYWIKSGTLVPVTRNDIVKIEGIDATGGNNQPNQPDIPAHLWYFGRIGTCL

SEQ ID NO: 6614 - protein, 269 aa, Thermomyces lanuginosus
EVSQDLFNQFNLFAQYSAAAYCGKNNYAPAGTNITCTGNACPEVEKADATFLYSFEDSGVGDVTGFLALDNTNKLIVLSFRGSRSIKNWIGNLNFLLKPINDICSGCRGHDGFTSSWRSVADTLRQKVEDAVREHPDYRVVFTGHSLGGALATVAGADLRGNGYDIDVFSYGAPRVGNRAFAEFLTVQTGGTLYRITHTNDIVPRLPPREFGYSHSSPEYWIKSGTLVPVRRRDIVKIEGIDATGGNNQPNIPDIPAHLWYFGLIGTCL

SEQ ID NO: 6615 - protein, 269 aa, Thermomyces lanuginosus
EVSQDLFNQFNLFAQYSKAAYCQANNDAPAGTNITCTGNACPEVEKADATFLYSFEDSGVGDVTGFLALDNTNKLIVLSFRGSRSIENWIGNLNFDLKEINDICSGCRGHDGFTSSWRSVADTLRQKVEDAVREHPDYRVVFTGHSLGGALATIAWADLRGNGYDIDVFSYGAPRVGNRAFAEFLTQQTGGTLYRITHTNDIVPRLPPREFGYSHSSPEYWIKSGTLVPVTRNDIVKIEGIDATGGNNQPNIPDIPAHLWYFGLIGTCL

SEQ ID NO: 6616 - protein, 269 aa, Thermomyces lanuginosus
EVSQDLFNQFKLFAQYSAAAYCKKNNSAPAGTNITCTGNACPEVEKADATFLYSFEDSGVGDVTGFLALDNTNKLIVLSFRGSRSIENWIGNLNFDLKEINDICSGCRGHDGFTSSWRSVADTLRQKVEDAVREHPDYRVVFTGHSLGGALATIAWADLRGNGYDIDVFSYGAPRVGNRAFAEFLTVQQGGTLYRITHTNDIVPRLPPREFGYSHSSPEYWIKSGTLVPVTRNDIVKIEGIDATGGNNQPNIPDIPAHLWYFGLIGTCL

SEQ ID NO: 6617 - protein, 269 aa, Thermomyces lanuginosus
EVSQDLFNQFNLFAQYSAAAYCGKNNRAPAGTNITCTGNACPEVEKADATFLYSFEDSGVGDVTGFLALDNTNKLIVLSFRGSRSIENWIGNLNFDLKEINDICSGCRGHAGFTSSWRSVADTLRQKVEDAVREHPDYRVVFTGHSLGGALATVAGADLRGNGYDIDVFSYGAPRVGNRAFAEFLTIQTGGTLYRITHTNDIVPRLPPREFGYSHPSPEYWIKSGTGVPVTRNDIVKIEGIDATGGNNQPNIPDITAHLWYFGLIGTCL

SEQ ID NO: 6618 - protein, 269 aa, Thermomyces lanuginosus
EVSQDLFNQFNLFAQYSKAAYCKKNNDAPAGTNITCTGNACPEVEKADATFLYSFEDSGVGDVTGFLALDNTNKRIVLSFRGSRSIENWIGNLRFDLKEINDICSGCRGHDGFTSSWRSVADTLRQKVEAAVREHPDYRVVFTGHSLGGALATVAGADLRGNGYDIDVFSYGAPRVGNRAFAEFLTNQTGGTLYRITHTNDIVPRLPPREFGYSHSSPEYWIKSGTLVPVTRNDIVKIEGIDATGGNNQPNIPDIPAHLWYFGLIGTCL

SEQ ID NO: 6619 - protein, 269 aa, Thermomyces lanuginosus
EVSQDLFNQFNLFAQYSAAAYCGKNNDAPAGTNITCTGNACPEVEKADATILYSFEDSGVGDVTGFLALDNTNKLIVLSFRGSRSIENWIGNLNFDLKEINDICSGCRGHDGFTSSWRSVADTLRQKVEDAVREHPDYRVVFAGHSLGGALATVAGADLRGNGYDIDVFSYGAPRVGNRAFAEFLTVQTGGTLYRITSTNDIVPRLPPREFGYSHSSPEYWIKSGTLPPVRRRDIVKIEGIDATGGNNQPNIPDIPAHLWYFGLIGTCL

SEQ ID NO: 6620 - protein, 269 aa, Thermomyces lanuginosus
EKSQDLFNQFNLFAQYSAAAYCGKNNDAPAGTKITCTGNACPEVEKADATLLYSFEDSGVGDVTGFLALDNTNKLIVLSFRGSRSIENWIGNLNFDLKEINDICSGCRGHDGFTSSWRSVADTLRQKVEDAVREHPDYRVVFTGHSLGGALATVAGADLRGNGYDIDVFSYGAPRVGNRAFAEFLTVQTGGTLYRITHTNDIVPRLPPREFGYSHSSPEYWIKSGTLVPVRRRDIVKIEGIDATGGNNQPNIPDIPIHLWYFGLIGTCL

SEQ ID NO: 6621 - protein, 269 aa, Thermomyces lanuginosus
EVSQDLFNQFKLFAQYSAAAYCGKNNQAPAGTNITCTGNACPEVEKADATFLYSFKDMGVGDVTGFLALDNTNKLIVLSFRGSRSIENWIGNLNFDLKEINDICSGCRGHDGFTSSWRSVADTLRQKVEDAVREHPDYRVVFTGHSLGGALATVAGADLRGNGYDIDVFSYGAPRVGNRAFAEFLTVQTGGTLYRITHTNDIVPRLPPREFGYSHSSPEYWIKSGTLVPVTRQDIVKIEGIDATGGNNQPNIPDITAHLWYFGLIGTCL

SEQ ID NO: 6622 - protein, 269 aa, Thermomyces lanuginosus
EVSQDLFNQFNLFAQYSAAAYCGKNNDAPAGTNITCTGNACPEVEKADATILYSFEDSGVGDVTGFLALDNTNKLIVLSFRGSRSIENWIGNLNFDLKEINDICSGCRGHDGFTSSWRSVADTLRQKVEDAVREHPDYRVVFAGHSLGGALATVAGADLRGDGYDIDVFSYGAPRVGNRAFAEFLTVQTGGTLYRITHTNDIVPRLPPREFGYSHSSPEYWIKSGTLRPVRRRDIVKIEGIDATGGNNQPNIPDIPAHLWYFGLIGTCL

SEQ ID NO: 6623 - protein, 269 aa, Thermomyces lanuginosus
EVSQDLFNQFNLFAQYSAAAYCGKNNDAPAGTQITCTGNACPEVEKADATFLYSFEDSGVGDVTGFLALDNTNKLIVLSFRGSRSIENWIGNLNFNLKEINDICSGCRGHDGFTSSWRSVADTLRQKVEDAVREHPDYRVVFTGHSLGGALATVAGADLRGNGYDIDVFSYGAPRVGNRAFAEFLTVQTGGTLYRITHTNDIVPRLPPREFGYSHSSPEYWIKSGTGVPVRRRDIVKIEGIDATGGNNRPNIPDIPAHLWYFGLIGTCL

SEQ ID NO: 6624 - protein, 269 aa, Thermomyces lanuginosus
EVSQDLFNQFNLFAQYSAAAYCGKNNRAPAGTQITCTGNACPEVEKADATFLYSFEDSGVGDVTGFLALDNTNKLIVLSFRGSRSIENWIGNLNFDLKEINDICSGCRGHDGFTSSWRSVADTLRQKVEDAVREHPDYRVVFTGHSLGGALATVAGADLRGNGYDIDVFSYGAPRVGNRAFAEFLTVQTGGTLYRITHTNDIVPRLPPREFGYSHSSPEYWIKSGTGVPVRRRDIVKIEGIDATGGNNRPNIPDIPAHLWYFGLIGTCL

SEQ ID NO: 6625 - protein, 269 aa, Thermomyces lanuginosus
EVSQDLFNQFNLFAQYSAAAYCGKNNDAPAGTNITCTGNACPEVEKADATILYSFEDSGVGDVTGFLALDNTNKLIVLSFRGSRSIENWIGNLNFDLKEINDICSGCRGHDGFTSSWRSVADTLRQKVEDAVREHPDYRVVFAGHSLGGALATVAGADLRGNGYDIDVFSYGAPRVGNRAFAEFLTVQTGGTLYRITNTNDIVPRLPPREFGYSHSSPEYWIKSGTLRPVRRRDIVKIEGIDATGGNNQPNIPDIPAHLWYFGLIGTCL

SEQ ID NO: 6626 - protein, 269 aa, Thermomyces lanuginosus
EYSQDLFNQFNLFAQYSAAAYCGKNNDAPAGTKITCTGNACPEVEKADATILYSFEDSGVGDVTGFLALDNTNKLIVLSFRGSRSIENWIGNLNFDLKEINDICSGCRGHDGFTSSWRSVADTLRQKVEDAVREHPDYRVVFTGHSLGGALATVAGADLRGNGYDIDVFSYGAPRVGNRAFAEFLTVQTGGTLYRITHTNDIVPRLPPREFGYSHSSPEYWIKSGTLVPVRRRDIVKIEGIDATGGNNQPNIPDIPIHLWYFGLIGTCL

SEQ ID NO: 6627 - protein, 269 aa, Thermomyces lanuginosus
EVSQDLFNQFNLFAQYSAAAYCGKNNDAPAGTNITCTGNACPEVEKAQATFLYSFEDMGVGDVTGFLALDNTNKLIVLSFRGSRSIENWIGNLNFDLKEINDICSGCRGHDGFTSSWRSVADTLRQKVEAAVREHPDYRVVFTGHSLGGALATVAGADLRGNGYDIDVFSYGAPRVGNRAFAEFLTVQTGGTLYRITHTNDIVPRLPPREFGYSHSSPEYWIKSGTMVPVTRQDIVKIEGIDATGGNNQPNIPDIPAHLWYFGRIGTCL

SEQ ID NO: 6628 - protein, 269 aa, Thermomyces lanuginosus
EVSQDLFNQFNLFAQYSKAAYCGKNNSAPAGTDITCTGNACPEVFKADATFLYSFEDSGVGDVTGFLALDNTNKDIVLSFRGSRSIENWIGNLNFDLKEINDICSGCRGHDGFTSSWRSVADTLRQKVEDAVREHPDYRVVFTGHSLGGALATVAGADLRGNGYDIDVFSYGAPRVGNRAFAEFLTVQDGGTLYRITHTNDIVPRLPPREFGYSHSSPEYWIKSGTLVPVTRNDIVKIEGIDATGGNNQPNIPDIPAHLWYFGLIGTCL

SEQ ID NO: 6629 - protein, 269 aa, Thermomyces lanuginosus
EVSQDLFNQFNLFAQYSAAAYCKKNNDAPAGTNITCTGNACPEVEKADATTLYSFEDSGVGDVTGFLALDNTNKQIVLSFRGSRSIENWIGNLNFDLKEINDICSGCRGHDGFTSSWRSVADTLRQKVEAAVREHPDYRVVFTGHSLGGALATVAGADLRGNGYDIDVFSYGAPRVGNRAFAEFLTVQTGGTLYRITHTNDIVPRLPPREFGYSHSSPEYWIKSGTLVPVTRNDIVKIEGIDATGGNNQPNQPDIPAHLWYFGRIGTCL

SEQ ID NO: 6630 - protein, 269 aa, Thermomyces lanuginosus
EKSQDLFNQFNLFAQYSAAAYCGKNNDAPAGTKITCTGNACPEVEKADATVLYSFEDSGVGDVTGFLALDNTNKLIVLSFRGSRSIENWIGNLNFDLKEINDICSGCRGHDGFTSSWRSVADTLRQKVEDAVREHPDYRVVFTGHSLGGALATVAGADLRGNGYDIDVFSYGAPRVGNRAFAEFLTVQTGGTLYRITLTNDIVPRLPPREFGYSHSSPEYWIKSGTLVPVRRRDIVKIEGIDATGGNNQPNIPDIPAHLWYFGLIGTCL

SEQ ID NO: 6631 - protein, 269 aa, Thermomyces lanuginosus
EVSQDLFNQFNLFAQYSAAAYCGKNNDAPAGTNITCTGNACPEVEKAQATFLYSFEDMGVGDVTGFLALDNTNKLIVLSFRGSRSIENWIGNLNFDLKEINDICSGCRGHDGFTSSWRSVADTLRQKVEAAVREHPQYRVVFTGHSLGGALATVAGADLRGNPYDIDVFSYGAPRVGNRAFAEFLTVQTGGTLYRITHTNDIVPRLPPREFGYSHSSPEYWIKSGTLVPVTRNDIVKIEGIDATGGNNQPNIPDIPAHLWYFGRIGTCL

SEQ ID NO: 6632 - protein, 269 aa, Thermomyces lanuginosus
EVSQDLFNQFNLFAQYSAAAYCQKNNDAPAGTNITCTGNACPEVFKADATFLYSFEDSGVGDVTGFLALDNTNKQIILSFRGSRSIENWIGNLNFDLKEINDICSGCRGHDGFTSSWRSVADTLRQKVEDAVREHPDYRVVFTGHSLGGALATVAGADLRGNGYDIDVFSYGAPRVGNRAFAEFLTTQDGGTLYRITHTNDIVPRLPPREFGYSHSSPEYWIKSGTLVPVTRNDIVKIEGIDATGGNNQPNIPDIPAHLWYFGLIGTCL

SEQ ID NO: 6633 - protein, 269 aa, Thermomyces lanuginosus
EVSQDLFNQFNLFAQYSKAAYCQKNNDAPAGTNITCTGNACPEVEKADATFLYSFEDSGVGDVTGFLALDNTNKQIILSFRGSRSIENWIGNLNFDLKEINDICSGCRGHDGFTSSWRSVADTLRQKVEDAVREHPDYRVVFTGHSLGGALATVAWADLRGNGYDIDVFSYGAPRVGNRAFAEFLTNQTGGTLYRITHTNDIVPRLPPREFGYSHSSPEYWIKSGTLVPVTRNDIVKIEGIDATGGNNQPNIPDIPAHLWYFGLIGTCL

SEQ ID NO: 6634 - protein, 269 aa, Thermomyces lanuginosus
EVSQDLFNQFNLFAQYSAAAYCGKNNEAPAGTNITCTGNACPEVEKAQATFLYSFEDMGVGDVTGFLALDNTNKLIVLSFRGSRSIENWIGNLNFDLKEINDICSGCRGHDGFTSSWRSVADTLRQKVEAAVREHPDYRVVFTGHSLGGALATVAGADLRGNPYDIDVFSYGAPRVGNRAFAEFLTVQTGGTLYRITHTNDIVPRLPPREFGYSHSSPEYWIKSGTLVPVTRNDIVKIEGIDATGGNNQPNIPDIPAHLWYFGRIGTCL

SEQ ID NO: 6635 - protein, 269 aa, Thermomyces lanuginosus
EVSQDLFNQFKLFAQYSAAAYCGKNNDAPAGTNITCTGNACPEVEKADATFLYSFKDSGVGDVTGFLALDNTNKQIVLSFRGSRSIENWIGNLNFDLKEINDICSGCRGHDGFTSSWRSVADTLRQKVEAAVREHPDYRVVFTGHSLGGALATVAGADLRGNGYDIDVFSYGAPRVGNRAFAEFLTNQQGGTLYRITHTNDIVPRLPPREFGYSHSSPEYWIKSGTLVPVTRNDIVKIEGIDATGGNNQPNIPDIPAHLWYFGLIGTCL

SEQ ID NO: 6636 - protein, 269 aa, Thermomyces lanuginosus
EVSQDLFNQFNLFAQYSAAAYCGKNNDAPAGTNITCTGNACPEVEKADATILYSFEDSGVGDVTGFLALDNTNKLIVLSFRGSRSIENWIGNLNFDLKEINDICSGCRGHDGFTSSWRSVADTLRQKVEDAVREHPDYRVVFAGHSLGGALATVAGADLRGNGYDIDVFSYGAPRVGNRAFAEFLTVQTGGTLYRITNTNDIVPRLPPREFGYSHSSPEYWIKSGTLPPVRRRDIVKIEGIDATGGNNQPNIPDIPAHLWYFGLIGTCL

SEQ ID NO: 6637 - protein, 269 aa, Thermomyces lanuginosus
EVSQDLFNQFNLFAQYSKAAYCGANNDAPAGTNITCTGNACPEVEKADATFLYSFEDSGVGDVTGFLALDNTNKQIVLSFRGSRSIENWIGNLRFDLKEINDICSGCRGHDGFTSSWRSVADTLRQKVEDAVREHPDYRVVFTGHSLGGALATIAGADLRGNGYDIDVFSYGAPRVGNRAFAEFLTNQTGGTLYRITHTNDIVPRLPPREFGYSHSSPEYWIKSGTLVPVTRNDIVKIEGIDATGGNNQPNIPDIPAHLWYFGLIGTCL

SEQ ID NO: 6638 - protein, 269 aa, Thermomyces lanuginosus
EVSQDLFNQFNLFAQYSAAAYCKKNNDAPAGTNITCTGNACPEVEKADATFLYSFEDSGVGDVTGFLALDNTNKQIVLSFRGSRSIENWIGNLNFDLKEINDICSGCRGHAGFTSSWRSVADTLRQKVEAAVREHPDYRVVFTGHSLGGALATIAGADLRGNGYDIDVFSYGAPRVGNRAFAEFLTNQTGGTLYRITHTNDIVPRLPPREFGYSHSSPEYWIKSGTLVPVTRNDIVKIEGIDATGGNNQPNIPDIPAHLWYFGLIGTCL

SEQ ID NO: 6639 - protein, 269 aa, Thermomyces lanuginosus
EVSQDLFNQFNLFAQYSAAAYCGKNNDAPAGTNITCTGNACPEVEKADATLLYSFRDSGVGDVTGFLALDNTNKLIVLSFRGSRSIENWIGNLNFDLIEINDICSGCRGHDGFTSSWFSVADTLRQKVEDAVREHPDYRVVFTGHSLGGALATVAGADLRGNGYDIDVFSYGAPRVGNRAFAEFLTVQTGGTLYRITHTNDIVPRLPPREFGYSHSSPEYWIKSGTLVPVRRRDIVKIEGIDATGGNNQPNIPDIPAHLWYFGLIGTCL

SEQ ID NO: 6640 - protein, 269 aa, Thermomyces lanuginosus
EVSQDLFNQFNLFAQYSKAAYCGKNNDAPAGTNITCTGNACPEVEKADATFLYSFEDSGVGDVTGFLALDNTNKQIVLSFRGSRSIENWIGNLNFDLKEINDICSGCRGHAGFTSSWRSVADTLRQKVEDAVREHPDYRVVFTGHSLGGALATIAGADLRGNGYDIDVFSYGAPRVGNRAFAEFLTVQQGGTLYRITHTNDIVPRLPPREFGYSHSSPEYWIKSGTLVPVTRNDIVKIEGIDATGGNNQPNIPDIPAHLWYFGRIGTCL

SEQ ID NO: 6641 - protein, 269 aa, Thermomyces lanuginosus
EVSQDLFNQFNLFAQYSAAAYCGKNNDAPAGTKITCTCNACPEVEKADATFLYSFEDSGVGDVTGFLALDNTNKLIVLSFRGSRSIENWIGNLNFRLKEINDICSGCRGHAGFTSSWRSVADTLRQKVEDAVREHPDYRVVFTGHSLGGALATVAGADLRGNGYDIDVFSYGAPRVGNRAFAEFLTVQTGGTLYRITHTNDIVPRLPPREFGYSHSSPEYWIKSGTLVPVERRDIVKIEGIDATGGNNQPNIPDIPAHLWYFGLIGTCL

SEQ ID NO: 6642 - protein, 269 aa, Thermomyces lanuginosus
EVSQDLFNQFNLFAQYSAAAYCQKNNSAPAGTNITCTGNACPEVEKADATTLYSFEDSGVGDVTGFLALDNTNKQIVLSFRGSRSIENWIGNLNFDLKEINDICSGCRGHDGFTSSWRSVADTLRQKVEDAVREHPDYRVVFTGHSLGGALATVAGADLRGNGYDIDVFSYGAPRVGNRAFAEFLTTQTGGTLYRITHTNDIVPRLPPREFGYSHSSPEYWIKSGTLVPVTRNDIVKIEGIDATGGNNQPNQPDIPAHLWYFGLIGTCL

SEQ ID NO: 6643 - protein, 269 aa, Thermomyces lanuginosus
EVSQDLFNQFNLFAQYSAAAYCGKNNDAPAGTQITCTGNACPEVEKADATFLYSFEDSGVGDVTGFLALDNTNKLIVLSFRGSRSIENWIGNLNFDLKEINDICSGCRGHDGFTSSWRSVADTLRQKVEDAVREHPDYRVVFTGHSLGGALATVAGADLRGNGYDIDVFSYGAPRVGNRAFAEFLTVQTGGTLYRITHTNDIVPRLPPRYFGYSHSSPEYWIKSGTLVPVRRRDIVKIEGIDATGGNNQPNIPYFPAHLWYFGLIGTCL

SEQ ID NO: 6644 - protein, 269 aa, Thermomyces lanuginosus
EVSQDLFNQFNLFAQYSAAAYCKKNNSAPAGTNITCTGNACPEVEKADATFLYSFEDSGVGDVTGFLALDNTNKRIVLSFRGSRSIENWIGNLNFDLKEINDICSGCRGHDGFTSSWRSVADTLRQKVEDAVREHPDYRVVFTGHSLGGALATVAGADLRGNGYDIDVFSYGAPRVGNRAFAEFLTNQTGGTLYRITHTNDIVPRLPPREFGYSHSSPEYWIKSGTLVPVTRNDIVKIEGIDATGGNNQPNQPDIPAHLWYFGRIGTCL

SEQ ID NO: 6645 - protein, 269 aa, Thermomyces lanuginosus
EYSQDLFNQFNLFAQYSAAAYCGKNNDAPAGTKITCTGNACPEVEKADATLLYSFEDSGVGDVTGFLALDNTNKLIVLSFRGSRSIENWIGNLNFDLKEINDICSGCRGHDGFTSSWRSVADTLRQKVEDAVREHPDYRVVFTGHSLGGALATVAGADLRGNGYDIDVFSYGAPRVGNRAFAEFLTVQTGGTLYRITHTNDIVPRLPPREFGYSHSSPEYWIKIGTLVPVRRRDIVKIEGIDATGGNNQPNIPDIPAHLWYFGLIGTCL

SEQ ID NO: 6646 - protein, 269 aa, Thermomyces lanuginosus
EVSVDLFNQFNLFAQYSAAAYCGKNNDAPAGTNITCTGNACPEVEKADATFLYSVEDSGVGDVTGFLALDNTNKLIVLSFRGSRSVENWIGNLNFDLKEINDICSGCRGHDGFTSSWRSVADTLRQKVEDAVREHPDYRVVFTGHSLGGALATVAGADLRGNGYDIDVFSYGAPRVGNRAFAEFLTVQTGGTLYRITHTNDIVPRLPPREFGYSHSSPEYWIKSGTLVPVRRRDIVKIEGIDATGGNNQPNIPDVPAHLWYFGLIGTCL

SEQ ID NO: 6647 - protein, 269 aa, Thermomyces lanuginosus
EVSQDLFNQFNLFAQYSAAAYCGKNNDAPAGTQITCTGNACPEVEKADATFLYSFEDSGVGDVTGFLALDNTNKLIVLSFRGSRSIENWIGNLKFLLKEINDICSGCRGHDGFTSSWRSVADTLRQKVEDAVREHPDYRVVFTGHSLGGALATVAGADLRGNGYDIDVFSYGAPRVGNRAFAEFLTVQTGGTLYRITHTNDIVPRLPPREFGYSHSSPEYWIKSGTLVPVRRRDIVKIEGIDATGGNNRPNIPDIPAHLWYFGLIGTCL

SEQ ID NO: 6648 - protein, 269 aa, Thermomyces lanuginosus
EVSQDLFNQFNLFAQYSAAAYCGKNNDAPAGTQITCTGNACPEVEKADATFLYSFEDSGVGDVTGFLALDNTNKLIVLSFRGSRSIENWIGNLNFDLKNISDICSGCRGHDGFTSSWRSVADTLRQKVEDAVREHPDYRVVFTGHSLGGALATVAGADLRGNGYDIDVFSYGAPRVGNRAFAEFLTVQTGGTLYRITHTNDIVPRLPPREFGYSHSSPEYWIKSGTLVPVRRRDIVKIEGIDATGGNNRPNIPDIPAHLWYFGLIGTCL

SEQ ID NO: 6649 - protein, 269 aa, Thermomyces lanuginosus
EVSQDLFNQFNLFAQYSAAAYCGKNNDAPAGTNITCTGNACPEVEKADATFLYSFEDSGVGDVTGFLALDNTNKLIVLSFRGSRSIENWIANLNFDLKKINDICSGCRGHDGFTSSWRSVADTLRQKVEDAVREHPDYRVVFTGHSLGGALATVAGADLRGNGYDIDVFSYGAPRVGNRAFAEFLTVQTGGTLYRITHTNDIVPRLPPREFGYSHSSPEYWIKSGTLVPVRRRDIVKIEGIDARGGNNRPNIPDIPAHLWYFGLIGTCL

SEQ ID NO: 6650 - protein, 269 aa, Thermomyces lanuginosus
EVSQDLFNQFNLFAQYSAAAYCGCNNDAPAGTQITCTGNACPEVEKADATFLYSFEDSGVGDVTGFLALDNTNKLIVLSFRGSRSIENWIGNLNFSLKEINDICSGCRGHDGFTSSWRSVADTLRQKVEDAVREHPDYRVVFTGHSLGGALATVAGADLRGNGYDIDVFSYGAPRVGNRAFAEFLTVQTGGTLYRITHTNDIVPRLPPREFGYSHSSPEYWIKSGTLVPVRRRDIVKIEGIDATGGNNRPNIPDIPAHLWYFGLIGTCL

SEQ ID NO: 6651 - protein, 269 aa, Thermomyces lanuginosus
EVSQDLFNQFNLFAQYSAAAYCGKNNDAPAGTQITCTGNACPEVEKADATFLYSFEDSGVGDVTGFLALDNTNKLIVLSFRGSRSIENWIANLNFDLKKINDICSGCRGHDGFTSSWRSVADTLRQKVEDAVREHPDYRVVFTGHSLGGALATVAGADLRGNGYDIDVFSYGAPRVGNRAFAEFLTVQTGGTLYRITHTNDIVPRLPPREFGYSHSSPEYWIKSGTLVPVRRRDIVKIEGIDATGGNNRPNIPDIPAHLWYFGLIGTCL

SEQ ID NO: 6652 - protein, 268 aa, Thermomyces lanuginosus
VSQDLFNQFNLFAQYSAAAYCGKNNDAPAGTNITCTGNACPEVEKADATFLYSFEDSGVGDVTGFLALDNTNKLIVLSFRGSRSIENWIANLNFWLKKINDICSGCRGHDGFTSSWRSVADTLRQKVEDAVREHPDYRVVFTGHSLGGALATVAGADLRGNGYDIDVFSYGAPRVGNRAFAEFLTVQTGGTLYRITHTNDIVPRLPPREFGYSHSSPEYWIKSGTLVPVTRNDIVKIEGIDATGGNNRPNIPDIPAHLWYFGLISSCL

SEQ ID NO: 6653 - protein, 268 aa, Thermomyces lanuginosus
VSQDLFNQFNLFAQYSAAAYCGKNNRAPAGTNITCTGNACPEVEKADATILYSFRDSGVGDVTGFLALDNTNKLIVLSFRGSRSIENWIGNLNFDLEEINDICSGCRGHDGFTSSWRSVADTLRQKVEDAVREHPDYRVVFTGHSLGGALATVAGADLRGNGYDIDVFSYGAPRVGNRAFAEFLTVQTGGTLYRITHTNDIVPRLPPREFGYSHSSPEYWIKSGTLVPVRRCDIVKIEGIDATGGNNQPNIPDIPAHLWYFGLIGTCL

SEQ ID NO: 6654 - protein, 268 aa, Thermomyces lanuginosus
VSQDLFNQFNLFAQYSAAAYCGKNNDAPAGTNITCTGNACPEVEKADATFLYSFEDSGVGDVTGFLALDNTNKLIVLSFRGSRSIENWIANLNFWLKKINDICSGCRGHDGFTSSWRSVADTLRQKVEDAVREHPDYRVVFTGHSLGGALATVAGADLRGNGYDIDVFSYGAPRVGNRAFAEFLTVQTGGTLYRITHTNDIVPRLPPREFGYSHSSPEYWIKSGTLVPVTLNDIVKIEGIDATGGNNRPNIPDIPAHLWYFGLISTCL

SEQ ID NO: 6655 - protein, 268 aa, Thermomyces lanuginosus
EVSQDLFNQFNLFAQYSAAAYCGKNNDAPAGTNITCTGNACPEVEKADATFLYSFEDSGVGDVTGFLALDNTNKLIVLSFRGSRSIENWIGNLNFWLKEINDICSGCRGHDGFTSSWRSVADTLRQKVEDAVREHPDYRVVFTGHSLGGALATVAGADLRGNGYDIDVFSYGAPRVGNRAFAEFLTVQTGGTLYRITHTNDIVPRLPPREFGYSHSSPEYWIKSGTLVPVTRNDIVKIEGIDATGGNNQPNIPDIPAHLWYFQATDAC

SEQ ID NO: 6656 - protein, 268 aa, Thermomyces lanuginosus
VSQDLFNQFNLFAQYSAAAYCGKNNDAPAGTQITCTGNACPEVEKADATFLYSFEDSGVGDVTGFLALDNTNKLIVLSFRGSRSIENWIANLNFDLKKINDICSGCRGHDGFTSSWRSVADTLRQKVEDAVREHPDYRVVFTGHSLGGALATVAGADLRGNGYDIDVFSYGAPRVGNRAFAEFLTVQTGGTLYRITHTNDIVPRLPPREFGYSHSSPEYWIKSGTLVPVRRRDIVKIEGIDATGGNNRPNIPDIPAHLWYFGLIGTCL

SEQ ID NO: 6657 - protein, 267 aa, Thermomyces lanuginosus
VSQDLFNQFNLFAQYSAAAYCGKNNDAPAGTNITCTGNACPEVEKADATFLYSFEDSGVGDVTGFLALDNTNKLIVLSFRGSRSIENWIANLNFWLKKINDICSGCRGHDGFTSSWRSVADTLRQKVEDAVREHPDYRVVFTGHSLGGALATVAGADLRGNGYDIDVFSYGAPRVGNRAFAEFLTVQTGGTLYRITHTNDIVPRLPPREFGYSHSSPEYWIKSGTLVPVTRNDIVKIEGIDATGGNNRPNIPDIPAHLWYFGPFGTC

SEQ ID NO: 6658 - protein, 267 aa, Thermomyces lanuginosus
VSQDLFNQFNLFAQYSAAAYCGKNNDAPAGTNITCTGNACPEVEKADATFLYSFEDSGVGDVTGFLALDNTNKLIVLSFRGSRSIENWIANLNFWLKKINDICSGCRGHDGFTSSWRSVADTLRQKVEDAVREHPDYRVVFTGHSLGGALATVAGADLRGNGYDIDVFSYGAPRVGNRAFAEFLTVQTGGTLYRITHTNDIVPRLPPREFGYSHSSPEYWIKSGTLVPVTRNDIVKIEGIDATGGNNRPNIPDIPAHLWYFGPIGQC

SEQ ID NO: 6659 - protein, 267 aa, Thermomyces lanuginosus
VSQDLFNQFNLFAQYSAAAYCGKNNDAPAGTNITCTGNACPEVEKADATFLYSFEDSGVGDVTGFLALDNTNKLIVLSFRGSRSIENWIANLNFWLKKINDICSGCRGHDGFTSSWRSVADTLRQKVEDAVREHPDYRVVFTGHSLGGALATVAGADLRGNGYDIDVFSYGAPRVGNRAFAEFLTVQTGGTLYRITHTNDIVPRLPPREFGYSHSSPEYWIKSGTLVPVTRNDIVKIEGIDATGGNNRPNIPDIPAHLWYFRLLGTC

SEQ ID NO: 6660 - protein, 267 aa, Thermomyces lanuginosus
VSQDLFNQFNLFAQYSAAAYCGKNNDAPAGTNITCTGNACPEVEKADATFLYSFEDSGVGDVTGFLALDNTNKLIVLSFRGSRSIENWIANLNFWLKKINDICSGCRGHDGFTSSWRSVADTLRQKVEDAVREHPDYRVVFTGHSLGGALATVAGADLRGNGYDIDVFSYGAPRVGNRAFAEFLTVQTGGTLYRITHTNDIVPRLPPREFGYSHSSPEYWIKSGTLVPVTRNDIVKIEGIDATGGNNRPNIPDIPAHLWYFGPITCI

SEQ ID NO: 6661 - protein, 267 aa, Thermomyces lanuginosus
VSQDLFNQFNLFAQYSAAAYCGKNNDAPAGTNITCTGNACPEVEKADATFLYSFEDSGVGDVTGFLALDNTNKLIVLSFRGSRSIENWIANLNFWLKKINDICSGCRGHDGFTSSWRSVADTLRQKVEDAVREHPDYRVVFTGHSLGGALATVAGADLRGNGYDIDVFSYGAPRVGNRAFAEFLTVQTGGTLYRITHTNDIVPRLPPREFGYSHSSPEYWIKSGTLVPVTRNDIVKIEGIDATGGNNRPNIPDIPAHLWYFALISTC

SEQ ID NO: 6662 - protein, 267 aa, Thermomyces lanuginosus
VSQDLFNQFNLFAQYSAAAYCGKNNDAPAGTNITCTGNACPEVEKADATFLYSFEDSGVGDVTGFLALDNTNKLIVLSFRGSRSIENWIANLNFWLKKINDICSGCRGHDGFTSSWRSVADTLRQKVEDAVREHPDYRVVFTGHSLGGALATVAGADLRGNGYDIDVFSYGAPRVGNRAFAEFLTVQTGGTLYRITHTNDIVPRLPPREFGYSHSSPEYWIKSGTLVPVTRNDIVKIEGIDATGGNNRPNIPDIPAHLWYFELIDTC

SEQ ID NO: 6663 - protein, 267 aa, Thermomyces lanuginosus
VSQDLFNQFNLFAQYSAAAYCGKNNGAPAGTNITCTGNACPEVEKADATFLYSFEDSGVGDVTGFLALDNTNKLIVLSFRGSRSIENWIANLNFWLKKINDICSGCRGHDGFTSSWRSVADTLRQKVEDAVREHPDYRVVFTGHSLGGALATVAGADLRGNGYDIDVFSYGAPRVGNRAFAEFLTVQTGGTLYRITHTNDIVPRLPPREFGYSHSSPEYWIKSGTLVPVTRNDIVKIEGIDATGGNNRPNIPDIPAHLWYFGLISTC

SEQ ID NO: 6664 - protein, 291 aa, Thermomyces lanuginosus
MRSSLVLFFVSAWTALASPIRREVSQDLFNQFNLFAQYSAAAYCGKNNDAPAGTNITCTGNACPEVEKADATFLYSFEDSGKGDVTGFLALDNTNKLIVLSFRGSRSIENWIGNLNFDLKEINDICSGCRGHDGFTSSWRSVADTLRQKVEDAVREHPDYRVVFTGHSLGGALATVAGADLRGNGYDIDVFSYGAPRVGNRAFAEFLTVQTGGTLYRITHTNDVVPRLPPRKFGYSHSSPEYWIKSGTLVPVRRRDIVKIEGIDATGGNNQPNIPDAKAHLWYFGLIGTCL

SEQ ID NO: 6665 - protein, 291 aa, Thermomyces lanuginosus
MRSSLVLFFVSAWTALASPIRREVSQDLFNQFNLFAQYSAAAYCGKNNDAPAGTNITCTGNACPEVEKADATFLYSFEDSGVGDVTGFLALDNTNKLIVLSFRGSRSPANWIANLDFIFDEINDICSGCRGHDGFTSSWRSVADTLRQKVEDAVREHPDYRVVFTGHSLGGALATVAGADLRGNGYDIDVFSYGAPRVGNRAFAEFLTVQTGGTLYRITHTNDIVPRLPPREFGYSHSSPEYWIKSGTLVPVTRNDIVKIEGIDATGGNNQPNIPDIPAHLWYFGLIGTCL

SEQ ID NO: 6666 - protein, 291 aa, Thermomyces lanuginosus
MRSSLVLFFVSAWTALASPIRREVSQDLFNQFNLFAQYSAAAYCGKNNDAPAGTNITCTGNACPEVELADATFLYSFEDNGSGDVTGFLALDNTNKLIVLSFRGSRSIENWIGNLNFDLKEINDICSGCRGHDGFTSSWRSVADTLRQKVEDAVREHPDYRVVFTGHSLGGALATVAGADLRGNGYDIDVFSYGAPRVGNRAFAEFLTVQTGGTLYRITHTNDIVPRLPPREFGYSHSSPEYWIISGTLVPVRRRDIVKIEGIDATGGNNQPNIPIIPAHLWYFGLIGTCL

SEQ ID NO: 6667 - protein, 291 aa, Thermomyces lanuginosus
MRSSLVLFFVSAWTALASPIRREVSQDLFNQFNLFAQYSAAAYCGKNNDAPAGTNITCTGNACPEVEIADATFLYSFEDNGSGDVTGFLALDNTNKLIVLSFRGSRSIENWIGNLNFDLKEINDICSGCRGHDGFTSSWRSVADTLRQKVEDAVREHPDYRVVFTGHSLGGALATVAGADLRGNGYDIDVFSYGAPRVGNRAFAEFLTVQTGGTLYRITHTNDIVPRLPPREFGYSHSSPEYWIKSGTLVPVRRRDIVKIEGIDATGGNNLPNIPLIPAHLWYFGLIGTCL

SEQ ID NO: 6668 - protein, 291 aa, Synthetic construct
MRSSLVLFFVSAWTALASPIRREVSQDLFNQFNLFAQYSAAAYCGKNNDAPAGTNITCTGNACPEVEKADATFLYSFEDSGVGDVTGFLALDNTDKLIVLSFRGSPSIENWIGNLNFDLKEIKDICSGCRGHDGFTSSWRSVADRLRQKVEDAVRDHPDYRVVFTGHSLGGALATVAGADLRGNGYDIDVFSYGAPRVGNRAFAEFLTVQTGGTLYRITHTNDIVPRLPPREFGYSHSSPEYWIKSGTLVPVTRNDIVKIEGIDAPGGNNQPNIPDVPAHLWYFGLIGTCL

SEQ ID NO: 6669 - protein, 291 aa, Thermomyces lanuginosus
MRSSLVLFFVSAWTALASPIRREVSQDLFNQFNLFAQYSAAAYCGKNNDAPAGTNITCTGNACPEVELADATFLYSFEDNGSGDVTGFLALDNTNKLIVLSFRGSRSIENWIGNLNFDLKEINDICSGCRGHDGFTSSWRSVADTLRQKVEDAVREHPDYRVVFTGHSLGGALATVAGADLRGNGYDIDVFSYGAPRVGNRAFAEFLTVQTGGTLYRITHTNDIVPRLPPREFGYSHSSPEYWIKSGTLVPVRRRDIVKIEGIDATGGNNLPNIPIIPAHLWYFGLIGTCL

SEQ ID NO: 6670 - protein, 291 aa, Thermomyces lanuginosus
MRSSLVLFFVSAWTALASPIRREVSVDLFNQFNLFAQYSAAAYCGKNNDAPAGTNITCTGNACPEVEKADATFLYSFEDNGSGDVTGFLALDNTNKLIVLSFRGSRSVENWIGNLNFDLKEINDICSGCRGHDGFTSSWRSVADTLRQKVEDAVREHPDYRVVFTGHSLGGALATVAGADLRGNGYDIDVFSYGAPRVGNRAFAEFLTVQTGGTLYRITHTNDIVPRLPPREFGYSHSSPEYWIKSGTLVPVRRRDIVKIEGIDATGGNNLPNIPDIPAHLWYFGLIGTCL

SEQ ID NO: 6671 - protein, 291 aa, Thermomyces lanuginosus
MRSSLVLFFVSAWTALASPIRREVSQDLFNQFNLFAQYSAAAYCGKNNDAPAGTNITCTGNACPEVEKADATFLYSFEDNGSGDVTGFLALDNTNKLIVLSFRGSRSTENWIGNLNFDLKEINDICSGCRGHDGFTSSWRSVADTLRQKVEDAVREHPDYRVVFTGHSLGGALATVAGADLRGNGYDIDVFSYGAPRVGNRAFAEFLTVQTGGTLYRITHTNDIVPRLPPREFGYSHSSPEYWIKSGTGVPVKRRDIVKIEGIDATGGNNQPNIPDISAHLWYFGLIGTCL

SEQ ID NO: 6672 - protein, 291 aa, Thermomyces lanuginosus
MRSSLVLFFVSAWTALASPIRREVSQDLFNQFNLFAQYSAAAYCGKNNDAPAGTNITCTGNACPEVEKADATFLYSFEDNGSGDVTGFLALDNTNKLIVLSFRGSRSIENWIGNLNFDLKEINDICSGCRGHDGFTSSWRSVADTLRQKVEDAVREHPDYRVVFTGHSMGGGLATVAGADLRGNGYDIDVFSYGAPRVGNRAFAEFLTVQTGGTLYRITHTNDIVPRLPPRELGYSHSSPEYWIKSGTLVPVRRRDIVKIEGIDATGGNNQPNIPDIPAHLWYFGLIGTCL

SEQ ID NO: 6673 - protein, 291 aa, Thermomyces lanuginosus
MRSSLVLFFVSAWTALASPIRREVSQDLFNQFNLFAQYSAAAYCGKNNDAPAGTNITCTGNACPEVEKADATFLYSFEDNGSGDVTGFLALDNTNKLIVLSFRGSRSSENWIGNLNFDLKEINDICSGCRGHDGFTSSWRSVADTLRQKVEDAVREHPDYRVVFTGHSLGGALATVAGADLRGNGYDIDVFSYGAPRVGNRAFAEFLTVQTGGTLYRITHTNDIVPRLPPREFGYSHSSPEYWIKSGTGVPVKRRDIVKIEGIDATGGNNQPNIPDISAHLWYFGLIGTCL

SEQ ID NO: 6674 - protein, 291 aa, Thermomyces lanuginosus
MRSSLVLFFVSAWTALASPIRREVSQDLFNQFNLFAQYSAAAYCGKNNDAPAGTNITCTGNACPEVEKADATFLYSFEDSGKGDVTGFLALDNTNKLIVLSFRGSRSVENWIGNLNFDLKEINDICSGCRGHDGFTSSWRSVADTLRQKVEDAVREHPDYRVVFTGHSLGGGLATVAGADLRGNGYDIDVFSYGAPRVGNRAFAEFLTVQTGGTLYRITHTNDIVPRLPPREFGYSHSSPEYWIKSGTGVPVRRRDIVKIEGIDATGGNNQPNIPDIKAHLWYFGLIGTCL

SEQ ID NO: 6675 - protein, 291 aa, Thermomyces lanuginosus
MRSSLVLFFVSAWTALASPIRREVSLDLFNQFNLFAQYSAAAYCGKNNDAPAGTNITCTGNACPEVEKADATFLYSFEDNGSGDVTGFLALDNTNKLIVLSFRGSRSIENWIGNLNFDLKEINDICSGCRGHDGFTSSWRSVADTLRQKVEDAVREHPDYRVVFTGHSLGGALATVAGADLRGNGYDIDVFSYGAPRVGNRAFAEFLTVQTGGTLYRITHTNDIVPRLPPREFGYSHSSPEYWIKSGTLVPVRRRDIVKIEGIDATGGNNLPNIPIIPAHLWYFGLIGTCL

SEQ ID NO: 6676 - protein, 290 aa, Synthetic construct
MRSSLVLFFVSAWTALASPIRREVSQDLFNQFNLFAQYSAAAYCGKNNDAPAGTNITCTGNACPEVEKADATFLYSFEDSGVGDVTGFLALDNTDKLIVLSFRGSPSIENWIGNLNFDLKEIKDICSGCRGHDGFTSSWRSVADRLRQKVEDAVRDHPDYRVVFTGHSLGGALATVAGADLRGNGYDIDVFSYGAPRVGNRAFAEFLTVQTGGTLYRITHTNDIVPRLPPREFGYSHSSPEYWIKSPTLVPVTRNDIVKIEGIDPGGNNQPNIPDIPAHLWYFGLIGTCL

SEQ ID NO: 6677 - protein, 288 aa, Thermomyces lanuginosus
SLLLLGLSISAALASPIRREVSQDLFNQFNLFAQYSAAAYCGKNNDAPAGTNITCTGNACPEVEKADATFLYSFEDSGVGDVTGFLALDNTNKLIVLSFRGSRSIENWIGNLNFDLKEINDICSGCRGHDGFTSSWRSVADTLRQKVEDAVREHPDYRVVFTGHSLGGALATVAGADLRGNGYDIDVFSYGAPRVGNRAFAEFLTVQTGGTLYRITHTNDIVPRLPPREFGYSHSSPEYWIKSGTLVPVTRNDIVKIEGIDATGGNNQPNIPDIPAHLWYFGLIGTCL

SEQ ID NO: 6678 - protein, 283 aa, Thermomyces lanuginosus
SLLLLGLSISAALAEVSQDLFNQFNLFAQYSAAAYCGKNNDAPAGTNITCTGNACPEVEKADATFLYSFEDSGVGDVTGFLALDNTNKLIVLSFRGSRSIENWIGNLNFDLKEINDICSGCRGHDGFTSSWRSVADTLRQKVEDAVREHPDYRVVFTGHSLGGALATVAGADLRGNGYDIDVFSYGAPRVGNRAFAEFLTVQTGGTLYRITHTNDIVPRLPPREFGYSHSSPEYWIKSGTLVPVTRNDIVKIEGIDATGGNNQPNIPDIPAHLWYFGLIGTCL

SEQ ID NO: 6679 - protein, 274 aa, Thermomyces lanuginosus
SPPRRPVSQDLFNQFNLFAQYSAAAYCGKNNDAPAGTNITCTGNACPEVEKADATFLYSFEDSGVGDVTGFLALDNTNKLIVLSFRGSRSIENWIANLNFWLKEINDICSGCRGHDGFTSSWRSVADTLRQKVEDAVREHPDYRVVFTGHSLGGALATVAGADLRGNGYDIDVFSYGAPRVGNRAFAEFLTVQTGGTLYRITHTNDIVPRLPPREFGYSHSSPEYWIKSGTLVPVTRNDIVKICGIDATGGNNRPNIPDIPAHLWYFGLISTCL

SEQ ID NO: 6680 - protein, 274 aa, Thermomyces lanuginosus
SPPRRPVSQDLFNQFNLFAQYSAAAYCGKNNDAPAGTNITCTGNACPEVEKADATFLYSFEDSGVGDVTGFLALDNTNKLIVLSFRGSRSIENWIANLNFWLKEINDICSGCRGHDGFTSSWRSVADTLRQKVEDAVREHPDYRVVFTGHSLGGALATVAGADLRGNGYDIDVFSYGAPRVGNRAFAEFLTVQTGGTLYRITHTNDIVPRLPPREFGYSHSSPEYWIKSGTLVPVTRNDIVKICGIDATGGNNRPNIPDIPAHLWYFGLIDTCL

SEQ ID NO: 6681 - protein, 274 aa, Thermomyces lanuginosus
SPIRREVSQDLFNQFNLFAQYSAAAYCGKNNRAPAGTNITCTANACPEVEKADATFLYSFEDSGVGDVTGFLALDNTNKLIVLSFRGSRSIENWIGNLNFELKEINDICSGCRGHAGFTSSWRSVADTLRQKVEDAVREHPDYRVVFTGHSLGGALATVAGADLRGNKYDIDVFSYGAPRVGNRAFAEFLTVQTGGTLYRITHTNDIVPRLPPREFGYSHSSPEYWIKSGTLVPVRRRDIVKIEGIDATGGNNQPNIPSITAHLWYFGLIGTCL

SEQ ID NO: 6682 - protein, 274 aa, Thermomyces lanuginosus
SPIRREVSQDLFNQFNLFAQYSAAAYCGKNNRAPAGTNITCTGNACPEVEKADATLLYSFQDSGVGDVTGFLALDNTNKLIVLSFRGSRSIENWIADLNFDLQEINDICSGCRGHDGFTSSWRSVADTLRQKVEDAVREHPDYRVVFTGHSLGGALATVAGADLRGNGYDIDVFSYGAPRVGNRAFAEFLTVQTGGTLYRITHTNDIVPRLPPREFGYSHSSPEYWIKSGTLVPVRRRDIVKIEGIDATGGNNQPNIPSIPAHLWYFGLIGTCL

SEQ ID NO: 6683 - protein, 274 aa, Thermomyces lanuginosus
SPIRREVSQDLFNQFNLFAQYSAAAYCGKNNDAPAGTNITCTGNACPEVEKADATFLYSFEGSGVGDVTGFLALDNTNKLIVLSFRGSRSIENWIGNLKFLMKEINDICSGCRGHDGFTSSWRSVADTLRQKVEDAVREHPDYRVVFTGHSLGGALATVAGADLRGNGYDIDVFSYGAPRVGNRAFAEFLTVQTGGTLYRITHTNDIVPRLPPREFGYSHSSPEYWIKSGTLVPVTRNDIVKIEGIDATGGNNRPNIPDIPAHLWYFGLIGTCL

SEQ ID NO: 6684 - protein, 274 aa, Thermomyces lanuginosus
SPIRREVSQDLFNQFNLFAQYSAAAYCGKNNDAPAGTNITCTGNACPEVEKADATFLYSFEDSGVGDVTGFLALDNTNKLIVLSFRGSRSPANWIANLDFIFDEINDICSGCRGHDGFTSSWRSVADTLRQKVEDAVREHPDYRVVFTGHSLGGALATVAGADLRGNGYDIDVFSYGAPRVGNRAFAEFLTVQTGGTLYRITHTNDIVPRLPPREFGYSHSSPEYWIKSGTLVPVRRRDIVKIEGIDATGGNNQPNIPDIPAHLWYFGLIGTCL

SEQ ID NO: 6685 - protein, 274 aa, Thermomyces lanuginosus
SPIRREVSLDLFNQFNLFAQYSAAAYCGKNNDAPAGTNITCTGNACPTVEIADATFLYSFEDNGSGDVTGFLALDNTNKLIVLSFRGSRSIENWIGNLNFDLKEINDICSGCRGHDGFTSSWRSVADTLRQKVEDAVREHPDYRVVFTGHSLGGALATVAGADLRGNGYDIDVFSYGAPRVGNRAFAEFLTVQTGGTLYRITHTNDIVPRLPPREFGYSHSSPEYWIKSGTLVPVRRRDIVKIEGIDATGGNNLPNIPIIPAHLWYFGLIGTCL

SEQ ID NO: 6686 - protein, 274 aa, Thermomyces lanuginosus
SPIRREVSQDLFNQFNLFAQYSAAAYCGKNNRAPAGTNITCTGNACPEVEKADATFLYSFEDNGSGDVTGFLALDNTNKLIVLSFRGSRSVENWIGNLNFDLKEINDICSGCRGHDGFTSSWRSVADTLRQKVEDAVREHPDYRVVFTGHSLGGGLATVAGADLRGNGYDIDVFSYGAPRVGNRAFAEFLTVQTGGTLYRITHTNDIVPRLPPREFGYSHSSPEYWIKSGTGVPVRRRDIVKIEGIDATGGNNQPNIPDIKAHLWYFGLIGTCL

SEQ ID NO: 6687 - protein, 274 aa, Thermomyces lanuginosus
SPIRREVSQDLFNQFNLFAQYSAAAYCGKNNDAPAGTNITCTGNACPEVEKADATFLYSFEDTGKGDVTGFLALDNTNKLIVLSFRGSRSVENWIGNLNFDLKEINAICSGCRGHDGFTSSWRSVADTLRQKVEDAVREHPDYRVVFTGHSLGGGLATVAGADLRGNGYDIDVFSYGAPRVGNRAFAEFLTVQTGGTLYRITHTNDIVPRLPPREFGYSHSSPEYWIKSGTGVPVRRRDIVKIEGIDATGGNNQPNIPDIKAHLWYFGLIGTCL

SEQ ID NO: 6688 - protein, 274 aa, Thermomyces lanuginosus
SPIRREVSQDLFNQFNLFAQYSAAAYCGKNNDAPAGTNITCTGNACPEVEKADATFLYSFEDAGSGDVTGFLALDNTNKLIVLSFRGSRSVENWIGNLNFDLKEINDICSGCRGHDGFTSSWRSVADTLRQKVEDAVREHPDYRVVFSGHSLGGGLATVAGADLRGNGYDIDVFSYGAPRVGNRAFAEFLTVQTGGTLYRITHTNDIVPRLPPREFGYSHSSPEYWIKSGTGVPVRRRDIVKIEGIDATGGNNQPNIPDIKAHLWYFGLIGTCL

SEQ ID NO: 6689 - protein, 274 aa, Thermomyces lanuginosus
SPIRREVSVDLFNQFNLFAQYSAAAYCGKNNDAPAGTNITCTGNACPEVEKADATFLYSFEDSGKGDVTGFLALDNTNKLIVLSFRGTRSVENWIGNLNFDLKEINDICSGCRGHDGFTSSWRSVADTLRQKVEDAVREHPDYRVVFTGHSLGGGLATVAGADLRGNGYDIDVFSYGAPRVGNRAFAEFLTVQTGGTLYRITHTNDIVPRLPPREFGYSHSSPEYWIKSGTGVPVRRRDIVKIEGIDATGGNNQPNIPDIKAHLWYFGLIGTCL

SEQ ID NO: 6690 - protein, 274 aa, Synthetic construct
SPPRRPVSQDLFNQFNLFAQYSAAAYCGKNNDAPAGTNITCTGNACPEVEKADATFLYSFEDSGVGDVTGFLALDNTNKLIVLSFRGSRSIENWFGNLNFLLKKINDICSGCRGHDGFTSSWRSVADTLRQKVEDAVREHPDYRVVFTGHSLGGALATVAGADLRGNGYDIDVFSYGAPRVGNRAFAEFLTAQTGGTLYRITHRNDIVPRLPPREFGYSHSSPEYWIKSGTLVPVTRNDIVKIEGIDATGGNNQPNIPDIPAHLWYFGLIGTCL

SEQ ID NO: 6691 - protein, 274 aa, Synthetic construct
SPPRRPVSQDLFNQFNLFAQYSAAAYCGKNNDAPAGTNITCTGNACPEVEKADATFLYSFEDSGVGDVTGFLALDNTNKLIVLSFRGSRSIENWFGNLNFLLKKINDICSGCRGHDGFTSSWRSVADTLRQKVEDAVREHPDYRVVFTGHSLGGALATVAGADLRGNGYDIDVFSYGAPRVGNRAFAEFLTAQTGGTLYRITHTNDIVPRLPPREFGYSHSSPEYWIKSGTLVPVTRNDIVKIEGIDATGGNNQPNIRDIPAHLWYFGLIGTCL

SEQ ID NO: 6692 - protein, 274 aa, Synthetic construct
SPPRPRPSQDLFNQFNLFAQYSAAAYCGKNNDAPAGTNITCTGNACPEVEKADATFLYSFEDSGVGDVTGFLALDNTNKLIVLSFRGSRSIENWIGNLKFLLKEINDICSGCRGHDGFTSSWRSVADTLRQKVEDAVREHPDYRVVFTGHSLGGALATVAGADLRGNGYDIDVFSYGAPRVGNRAFAEFLTVQTGGTLYRITHTNDIVPRLPPREFGYSHSSPEYWIKSGTLVPVTRNDIVKIEGIDATGGNNRPNIPDIPAHLWYFGLIGTCL

SEQ ID NO: 6693 - protein, 275 aa, Thermomyces lanuginosus
SPCRPRPVSQDLFNQFNLFAQYSAAAYCGKNNDAPAGTNITCTGNACPEVEKADATFLYSFEDSGVGDVTGFLALDNTNKLIVLSFRGTRSIENWIGNLKFLLKEINDICSGCRGHDGFTSSWRSVADTLRQKVEDAVREHPDYRVVFTGHSLGGALATVAGADLRGNGYDIDVFSYGAPRVGNRAFAEFLTVQTGGTLYRITHTNDIVPRLPPREFGYSHSSPEYWIKSGTLVPVTRNDIVKICGIDATGGNNRPNIPDIPAHLWYFGLIGTCL

SEQ ID NO: 6694 - protein, 274 aa, Synthetic construct
SPPRRPVSQDLFNQFNLFAQYSAAAYCGKNNDAPAGTNITCTGNACPEVEKADATFLYSFEDSGVGRVTGFLALDNTNKLIVLSFRGSRSIENWFGNLNFLLKKINDICSGCRGHDGFTSSWRSVADTLRQKVEDAVREHPDYRVVFTGHSLGGALATVAGADLRGNGYDIDVFSYGAPRVGNRAFAEFLTAQTGGTLYRITHTNDIVPRLPPREFGYSHSSPEYWIKSGTLVPVTRNDIVKIEGIDATGGNNQPNIPDIPAHLWYFGLIGTCL

SEQ ID NO: 6695 - protein, 275 aa, Synthetic construct
SPIRPRPVSQDLFNQFNLFAQYSAAAYCGKNNDAPAGTNITCTGNACPEVEKADATFLYSFEGSGVGDVTGFLALDNTNKLIVLSFRGSRSIENWIGNLKFLLKEINDICSGCRGHDGFTSSWRSVADTLRQKVEDAVREHPDYRVVFTGHSLGGALATVAGADLRGNGYDIDVFSYGAPRVGNRAFAEFLTVQTGGTLYRITHRNDIVPRLPPAEFGYSHSSPEYWIKSGTLVPVTRNDIVKIEGIDATGGNNRPNIPDIPAHLWYFGLIGTCL

SEQ ID NO: 6696 - protein, 275 aa, Synthetic construct
SPPRRPRRPQDLFNQFNLFAQYSAAAYCGKNNDAPAGTNITCTGNACPEVEKADATFLYSFEDSGVGDVTGFLALDNTNKLIVLSFRGSRSIENWIGNLKFLLKEINDICSGCRGHDGFTSSWRSVADTLRQKVEDAVREHPDYRVVFTGHSLGGALATVAGADLRGNGYDIDVFSYGAPRVGNRAFAEFLTVQTGGTLYRITHTNDIVPRLPPREFGYSHSSPEYWIKSGTLVPVTRNDIVKIEGIDATGGNNRPNIPDIPAHLWYFGLIGTCL

SEQ ID NO: 6697 - protein, 275 aa, Synthetic construct
SPIRPRPVSQDLFNQFNLFAQYSAAAYCGKNNDAPAGTNITCTGNACPEVEKADATFLYSFEGSGVGDVTGFLALDNTNKLIVLSFRGSRSIENWIGNLKFLLKEINDICSGCRGHDGFTSSWRSVADTLRQKVEDAVREHPDYRVVFTGHSLGGALATVAGADLRGNGYDIDVFSYGAPRVGNRAFAEFLTVQTGGTLYRITHTRDIVPRLPPAEFGYSHSSPEYWIKSGTLVPVTRNDIVKIEGIDATGGNNRPNIPDIPAHLWYFGLIGTCL

SEQ ID NO: 6698 - protein, 275 aa, Synthetic construct
SPIRPRPVSQDLFNQFNLFAQYSAAAYCGKNNDAPAGTNITCTGNACPEVEKADATFLYSFEGSGVGDVTGFLALDNTNKLIVLSFRGSRSIENWIGNLKFLLKEINDICSGCRGHDGFTSSWRSVADTLRQKVEDAVREHPDYRVVFTGHSLGGALATVAGADLRGNGYDIDVFSYGAPRVGNRAFAEFLTVQTGGTLYRITHRRDIVPRLPPREFGYSHSSPEYWIKSGTLVPVTRNDIVKIEGIDATGGNNRPNIPDIPAHLWYFGLIGTCL

SEQ ID NO: 6699 - protein, 273 aa, Thermomyces lanuginosus
SPIRREVSQDLFNQFNLFAQYSAAAYCGKNNDAPAGTNITCTGNACPEVEKADATFLYSFEDSGVGDVTGFLALDNTNKLIVLSFRGSRSIENWIGNLNFDLKEINDICSGCRGHDGFTSSWRSVADTLRQKVEDAVREHPDYRVVFTGHSLGGALATVAGADLRGNGYDIDVFSYGAPRVGNRAFAEFLTVQTGGTLYRITHTNDIVPRLPPREFGYSHSSPEYWIKSGTLVPVTRNDIVKIEGIDATGGNNQPNIPDIPAHLWYFQATDAC

SEQ ID NO: 6700 - protein, 273 aa, Thermomyces lanuginosus
SPIRREVSQDLFNQFNLFAQYSAAAYCGKNNDAPAGTNITCTGNACPEVEKADATFLYSFRDSGVGDVTGFLALDNTNKLIVLSFRGTRSIENWIADLNFVLKEINDICSGCRGHDGFTSSWFSVADTLRQKVEDAVREHPDYRVVFTGHSLGGALATVAGADLRGNGYDIDVFSYGAPRVGNRAFAEFLTVQTGGTLYRITHTNDIVPRLPPREFGYSHSSPEYWIKSGTLVPVRRRDIVKIEGIDATGGNNQPNIPSIPAHLWYFGLIGTC

SEQ ID NO: 6701 - protein, 273 aa, Thermomyces lanuginosus
SPIRREVSQDLFNQFNLFAQYSAAAYCGKNNDAPAGTNITCTGNACPEVEKADATFLYSFEDTGKGDVTGFLALDNTNKLIVLSFRGSRVENWIGNLNFDLKEINAICSGCRGHDGFTSSWRSVADTLRQKVEDAVREHPDYRVVFTGHSLGGGLATVAGADLRGNGYDIDVFSYGAPRVGNRAFAEFLTVQTGGTLYRITHTNDIVPRLPPREFGYSHSSPEYWIKSGTGVPVRRRDIVKIEGIDATGGNNQPNIPDIKAHLWYFGLIGTCL

SEQ ID NO: 6702 - protein, 194 aa, Humicola insolens
QLGAIENDLESGSADACPDAILIFARGSTEPGNMGITVGPALANGLEEHIRNIWIQGVGGPYDAALATNFLPRGTSQANIDEGKRLFHLAHQKCPNTPVVAGGYSQGAALIAAAVSELSGAVKEQVKGVVLFGYTQNLQNRGGIPNYPRERTKVFCNVGDAVCTGTLIITPAHLSYTIEARGEAARFLVDRIRA

SEQ ID NO: 6703 - protein, 271 aa, Thermomyces lanuginosus
RRPVSQDLFNQFNLFAQYSAAAYCGKNNDAPAGTNITCTGNACPEVEKADATFLYSFEDSGVGDVTGFLALDNTNKLIVLSFRGSRSIENWIANLNFWLKEINDICSGCRGHDGFTSSWRSVADTLRQKVEDAVREHPDYRVVFTGHSLGGALATVAGADLRGNGYDIDVFSYGAPRVGNRAFAEFLTVQTGGTLYRITHTNDIVPRLPPREFGYSHSSPEYWIKSGTLVPVTRNDIVKICGIDATGGNNRPNIPDITAHLWYFGLISTCL

SEQ ID NO: 6704 - protein, 271 aa, Thermomyces lanuginosus
RRPVSQDLFNQFNLFAQYSAAAYCGKNNDAPAGTNITCTGNACPEVEKADATFLYSFEDSGVGDVTGFLALDNTNKLIVLSFRGSRSIENWIANLNFWLKEINDICSGCRGHDGFTSSWRSVADTLRQKVEDAVREHPDYRVVFTGHSLGGALATVAGADLRGNGYDIDVFSYGAPRVGNRAFAEFLTVQTGGTLYRITHTNDIVPRLPPREFGYSHSSPEYWIKSGTLVPVTRNDIVKICGIDATGGNNRPNIPDIPAHLWYFGPISTCL

SEQ ID NO: 6705 - protein, 271 aa, Thermomyces lanuginosus
RRPVSQDLFNQFNLFAQYSAAAYCGKNNDAPAGTNITCTGNACPEVEKADATFLYSFEDSGVGDVTGFLALDNTNKLIVLSFRGSRSIENWIGNLNFSLKEINDICSGCRGHDGFTSSWRSVADTLRQKVEDAVREHPDYRVVFTGHSLGGALATVAGADLRGNGYDIDVFSYGAPRVGNRAFAEFLTVQTGGTLYRITHTNDIVPRLPPREFGYSHSSPEYWIKSGTLVPVTRNDIVKICGIDATGGNNRPNMPDIPAHLWYFGQIDTCL

SEQ ID NO: 6706 - protein, 271 aa, Thermomyces lanuginosus
RRPVSQDLFNQFNLFAQYSAAAYCGKNNDAPAGTNITCTGNACPEVEKADATFLYSFEDSGVGDVTGFLALDNTNKLIVLSFRGSRSIENWIGNLNFDLKEINDICSGCRGHDGFTSSWRSVADTLRQKVEDAVREHPDYRVVFTGHSLGGALATVAGADLRGNGYDIDVFSYGAPRVGNRAFAEFLTVQTGGTLYRITHTNDIVPRLPPREFGYSHSSPEYWIKSGTLVPVTRNDIVKICGIDATGGNNRPNIPDIPAHLWYFFAISECL

SEQ ID NO: 6707 - protein, 271 aa, Thermomyces lanuginosus
RRPVSQDLFNQFNLFAQYSAAAYCGKNNDAPAGTNITCTGNACPEVEKADATFLYSFEDSGVGDVTGFLALDNTNKLIVLSFRGSRSIENWIANLNFWLKEINDICSGCRGHDGFTSSWRSVADTLRQKVEDAVREHPDYRVVFTGHSLGGALATVAGADLRGNGYDIDVFSYGAPRVGNRAFAEFLTVQTGGTLYRITHTNDIVPRLPPREFGYSHSSPEYWIKSGTLVPVTRNDIVKICGIDATGGNNRPNIPDITAHLWYFGLIDTCL

SEQ ID NO: 6708 - protein, 271 aa, Thermomyces lanuginosus
RRPVSQDLFNQFNLFAQYSAAAYCGKNNDAPAGTNITCTGNACPEVEKADATFLYSFEDSGVGDVTGFLALDNTNKLIVLSFRGSRSIENWIANLNFWLKEINDICSGCRGHDGFTSSWRSVADTLRQKVEDAVREHPDYRVVFTGHSLGGALATVAGADLRGNGYDIDVFSYGAPRVGNRAFAEFLTVQTGGTLYRITHTNDIVPRLPPREFGYSHSSPEYWIKSGTLVPVTRNDIVKICGIDATGGNNRPNIPDIPAHLWYFELISTCL

SEQ ID NO: 6709 - protein, 272 aa, Thermomyces lanuginosus
RRPVSQDLFNQFNLFAQYSAAAYCGKNNDAPAGTNITCTGNACPEVEKADATFLYSFEDSGVGDVTGFLALDNTNKLIVLSFRGSRSIENWIGNLNFSLKEINDICSGCRGHDGFTSSWRSVADTLRQKVEDAVREHPDYRVVFTGHSLGGALATVAGADLRGNGYDIDVFSYGAPRVGNRAFAEFLTVQTGGTLYRITHTNDIVPRLPPREFGYSHSSPEYWIKSGTLVPVTRNDIVKICGIDATGGNNRPNIPDIPAHLWYFGINTGLCL

SEQ ID NO: 6710 - protein, 270 aa, Thermomyces lanuginosus
RRPVSQDLFNQFNLFAQYSAAAYCGKNNDAPAGTNITCTGNACPEVEKADATFLYSFEDSGVGDVTGFLALDNTNKLIVLSFRGSRSIENWIANLNFWLKEINDICSGCRGHDGFTSSWRSVADTLRQKVEDAVREHPDYRVVFTGHSLGGALATVAGADLRGNGYDIDVFSYGAPRVGNRAFAEFLTVQTGGTLYRITHTNDIVPRLPPREFGYSHSSPEYWIKSGTLVPVTRNDIVKICGIDATGGNNRPNIPDIPAHLWYFGLISPC

SEQ ID NO: 6711 - protein, 270 aa, Thermomyces lanuginosus
RRPVSQDLFNQFNLFAQYSAAAYCGKNNDAPAGTNITCTGNACPEVEKADATFLYSFEDSGVGDVTGFLALDNTNKLIVLSFRGSRSIENWIANLNFWLKEINDICSGCRGHDGFTSSWRSVADTLRQKVEDAVREHPDYRVVFTGHSLGGALATVAGADLRGNGYDIDVFSYGAPRVGNRAFAEFLTVQTGGTLYRITHTNDIVPRLPPREFGYSHSSPEYWIKSGTLVPVTRNDIVKICGIDATGGNNRPNIPDIPAHLWYFGLICPC

SEQ ID NO: 6712 - protein, 269 aa, Thermomyces lanuginosus
EVSQDLFNQFNLFAQYSAAAYCSKNNDAPAGTNITCTGNICPEVEKADATFLYSFRDSGVGDVTGFLALDNTNKLIVLSFRGSRSIENWIGNLNFDLKEINDICSGCRGHDGFTSSWFSVADTLRQKVEDAVREHPDYRVVFTGHSLGGALATVAGADLRGNGYDIDVFSYGAPRVGNRAFAEFLTVQTGGTLYRITHTNDIVPRLPPREFGYSHSSPEYWIKSGTLVPVRRRDIVKIEGIDAEGGNNQPNIPDIPAHLWYFGLIGTCL

SEQ ID NO: 6713 - protein, 269 aa, Thermomyces lanuginosus
EVSQDLFNQFRLFAQYSAAAYCGKNNDAPAGTQITCTGNACPEVEKADATFLYSFEDSGVGDVTGFLALDNTNKLIVLSFRGSRSIENWITNLNFDLKEINDICSGCRGHDGFTSSWRSVADTLRQKVEDAVREHPDYRVVFTGHSLGGALATVAGADLRGNKYDIDVFSYGAPRVGNRAFAEFLTVQTGGTLYRITHTNDIVPRLPPREFGYSHSSPEYWIKSGTLVPVRRRDIVKIEGIDATGGNNQPNIPDIFAHLWYFGLIGTCL

SEQ ID NO: 6714 - protein, 269 aa, Thermomyces lanuginosus
EVSQDLFNQFNLFAQYSAAAYCQKNNDAPAGTNITCTGNACPEVFKADATFLYSFEDSGVGDVTGFLALDNTNKQIILSFRGSRSIENWIGNLNFDLKEINDICSGCRGHDGFTSSWRSVADTLRQKVEDAVREHPDYRVVFTGHSLGGALATVAWADLRGNGYDIDVFSYGAPRVGNRAFAEFLTTQDGGTLYRITHTNDIVPRLPPREFGYSHSSPEYWIKSGTLVPVTRNDIVKIEGIDATGGNNQPNIPDIPAHLWYFGLIGTCL

SEQ ID NO: 6715 - protein, 269 aa, Thermomyces lanuginosus
EVSQDLFNQFNLFAQYSAAAYCGKNNDAPAGTNITCTGNACPEVEKADATFLYSFEDSGVGDVTGFLALDNTNKLIVLSFRGSRSIENWIGNLNFDLKEINDICSGCRGHDGFTSSWRSVADTLRQKVEDAVREHPDYRVVFTGHSLGGALATVAGADLRGDGYDIDVFSYGAPRVGNRAFAEFLTVQTGGTLYRITSTNDIVPRLPPREFGYSHSSPEYWIKSGTLPPVRRRDIVKCEGIDATCGNNQPNIPDIPAHLWYFGLIGTCL

SEQ ID NO: 6716 - protein, 269 aa, Thermomyces lanuginosus
EVSQDLFNQFRLFAQYSAAAYCGKNNDAPAGTQITCTGNACPEVEKADATFLYSFEDSGVGDVTGFLALDNTNKLIVLSFRGSRSIENWITNLNFDLKEINDICSGCRGHDGFTSSWRSVADTLRQKVEDAVREHPDYRVVFTGHSLGGALATVAGADLRGNNYDIDVFSYGAPRVGNRAFAEFLTVQTGGTLYRITHTNDIVPRLPPREFGYSHSSPEYWIKSGTLVPVRRRDIVKIEGIDATGGNNQPNIPSIPAHLWYFGLIGTCL

SEQ ID NO: 6717 - protein, 269 aa, Thermomyces lanuginosus
EVSQDLFNQFNLFAQYSAAAYCGKNNDAPAGTNITCTGNACPEVEKADATFLYSFKDSGVGDVTGFLALDNTNKQIVLSFRGSRSIENWIGNLNFDLKEINDICSGCRGHAGFTSSWRSVADTLRQKVEAAVREHPDYRVVFTGHSLGGALATVAWADLRGNGYDIDVFSYGAPRVGNRAFAEFLTNQQGGTLYRITHTNDIVPRLPPREFGYSHSSPEYWIKSGTLVPVTRNDIVKIEGIDATGGNNQPNIPDIPAHLWYFGLIGTCL

SEQ ID NO: 6718 - protein, 269 aa, Thermomyces lanuginosus
EVSQDLFNQFNLFAQYSAAAYCGKNNRAPAGTQITCTGNACPEVEKADATFLYSFEDSGVGDVTGFLALDNTNKLIVLSFRGSRSIENWIGNLNFDLKEINDICSGCRGHDGFTSSWRSVADTLRQKVEDAVREHPDYRVVFTGHSLGGALATVAGADLRGNGYDIDVFSYGAPRVGNRAFAEFLTVQTGGTLYRITHTNDIVPRLPPREFGYSHPSPEYWIKSGTGVPVRRRDIVKIEGIDATGGNNRPNIPDIPAHLWYFGLIGTCL

SEQ ID NO: 6719 - protein, 269 aa, Thermomyces lanuginosus
EVSQDLFNQFNLFAQYSAAAYCGKNNDAPAGTNITCTGNACPEVEKAQATFLYSFEDMGVGDVTGFLALDNTNKLIVLSFRGSRSIENWIGNLNFDLKEINDICSGCRGHDGFTSSWRSVADTLRQKVEQAVREHPDYRVVFTGHSLGGALATVAGADLRGNPYDIDVFSYGAPRVGNRAFAEFLTVQTGGTLYRITHTNDIVPRLPPREFGYSHSSPEYWIKSGTMVPVTRQDIVKIEGIDATGGNNQPNIPDIPAHLWYFGRIGTCL

SEQ ID NO: 6720 - protein, 269 aa, Thermomyces lanuginosus
EVSQDLFNQFNLFAQYSAAAYCGKNNDAPAGTNITCTGNACPEVEKADATFLYSFEDSGVGAVTGFLALDNTNKLIVLSFRGTRSIENWIANLNFDLKKINDICSGCRGHDGFTSSWRSVADTLRQKVEDAVREHPDYRVVFTGHSLGGALATVAGADLRGNGYDIDVFSYGAPRVGNRAFAEFLTVQTGGTLYRITHTNDIVPRLPPREFGYSHSSPEYWIKSGTLVPVRRRDIVKIEGIDATGGNNRPNIPDIPAHLWYFGLIGTCL

SEQ ID NO: 6721 - protein, 269 aa, Thermomyces lanuginosus
EVSQDLFNQFNLFAQYSAAAYCGKNNDAPAGTNITCTGNACPEVEKADATFLYSFRNSGVGDVTGFLALDNTNKLIVLSFRGSRSIENWIGNLNFDLIEINDICSGCRGHDGFTSSWFSVADTLRQKVEDAVREHPDYRVVFTGHSLGGALATVAGADLRGNSYDIDVFSYGAPRVGNRAFAEFLTVQTGGTLYRITHTNDIVPRLPPREFGYSHSSPEYWIKSGTLVPVRRRDIVKIEGIDATGGNNQPNIPDIPAHLWYFGLIGTCL

SEQ ID NO: 6722 - protein, 269 aa, Thermomyces lanuginosus
EVSQDLFNQFNLFAQYSAAAYCGKNNDAPAGTQITCTANACPEVEKADATFLYSFEDSGVGDVTGFLALDNTNKLIVLSFRGSRSIENWITNLNFDLKEINDICSGCRGHDGFTSSWRSVADTLRQKVEDAVREHPDYRVVFTGHSLGGALATVAGADLRGNAYDIDVFSYGAPRVGNRAFAEFLTVQTGGTLYRITHTNDIVPRLPPREFGYSHSSPEYWIKSGTLVPVRRRDIVKIEGIDATGGNNQPNIPSIPAHLWYFGLIGTCL

SEQ ID NO: 6723 - protein, 269 aa, Thermomyces lanuginosus
EVSRDLFNQFNLFAQYSAAAYCGKNNDAPAGTNITCTGNACPEVEKADATFLYSFEDSGVGDVTGFLALDNTNKLIVLSFRGSRSIENWIGNLNFDLKEINDICSGCRGHDGFTSSWRSVADTLRQKVEDAVREHPDYRVVFAGHSLGGALATVAGADLRGDGYDIDVFSYGAPRVGNRAFAEFLTVQTGGTLYRITNTNDIVPRLPPREFGYSHSSPEYWIKSGTLRPVRRRDIVKIEGIDATGGNNQPNIPDIPAHLWYFGLIGTCL

SEQ ID NO: 6724 - protein, 269 aa, Thermomyces lanuginosus
EVSQDLFNQFNLFAQYSAAAYCGKNNDAPAGTNITCTGNACPEVEKADATTLYSFEDSGVGDVTGFLALDNTNKGIVLSFRGSRSIENWIANLNFDLKEINDICSGCRGHDGFTSSWRSVADTLRQKVEAAVREHPDYRVVFTGHSLGGALATVAGADLRGNGYDIDVFSYGAPRVGNRAFAEFLTNQTGGTLYRITHTNDIVPRLPPREFGYSHSSPEYWIKSGTLVPVTRNDIVKIEGIDATGGNNQPNQPDIPAHLWYFGRIGTCL

SEQ ID NO: 6725 - protein, 269 aa, Thermomyces lanuginosus
EVSQDLFNQFNLFAQYSKAAYCKANNDAPAGTNITCTGNACPEVEKADATFLYSFEDSGVGDVTGFLALDNTNKLIVLSFRGSRSIENWIGNLRFDLKEINDICSGCRGHDGFTSSWRSVADTLRQKVEDAVREHPDYRVVFTGHSLGGALATIAGADLRGNGYDIDVFSYGAPRVGNRAFAEFLTTQTGGTLYRITHTNDIVPRLPPREFGYSHSSPEYWIKSGTLVPVTRNDIVKIEGIDATGGNNQPNIPDIPAHLWYFGRIGTCL

SEQ ID NO: 6726 - protein, 269 aa, Thermomyces lanuginosus
EVSQDLFNQFKLFAQYSKAAYCGANNDAPAGTNITCTGNACPEVEKADATFLYSFEDSGVGDVTGFLALDNTNKLIILSFRGSRSIENWIGNLNFDLKEINDICSGCRGHDGFTSSWRSVADTLRQKVEDAVREHPDYRVVFTGHSLGGALATIAWADLRGNGYDIDVFSYGAPRVGNRAFAEFLTVQQGGTLYRITHTNDIVPRLPPREFGYSHSSPEYWIKSGTLVPVTRNDIVKIEGIDATGGNNQPNIPDIPAHLWYFGLIGTCL

SEQ ID NO: 6727 - protein, 269 aa, Thermomyces lanuginosus
EVSQDLFNQFNLFAQYSAAAYCKKNNDAPAGTNITCTGNACPEVEKADATFLYSFEDSGVGDVTGFLALDNTNKQIVLSFRGSRSIENWIGNLRFDLKEINDICSGCRGHDGFTSSWRSVADTLRQKVEDAVREHPDYRVVFTGHSLGGALATIAWADLRGNGYDIDVFSYGAPRVGNRAFAEFLTTQTGGTLYRITHTNDIVPRLPPREFGYSHSSPEYWIKSGTLVPVTRNDIVKIEGIDATGGNNQPNIPDIPAHLWYFGRIGTCL

SEQ ID NO: 6728 - protein, 269 aa, Thermomyces lanuginosus
EVSQDLFNQFNLFAQYSAAAYCGKNNQAPAGTQITCTGNACPEVEKADATFLYSFEDSGVGDVTGFLALDNTNKLIVLSFRGSRSIENWIGNLNFDLKEINDICSGCRGHDGFTSSWRSVADTLRQKVEDAVREHPDYRVVFTGHSLGGALATVAGADLRGNGYDIDVFSYGAPRVGNRAFAEFLTVQTGGTLYRITHTNDIVPRLPPREFGYSHSSPDYWIKSGTGVPVRRRDIVKIEGIDATGGNNRPNIPDIPAHLWYFGLIGTCL

SEQ ID NO: 6729 - protein, 269 aa, Thermomyces lanuginosus
EVSQDLFNQFNLFAQYSAAAYCGKNNDAPAGTNITCTGNICPEVEKADATLLYSFRDSGVGDVTGFLALDNTNKLIVLSFRGSRSIENWIGNLNFDLKEINDICSGCRGHDGFTSSWFSVADTLRQKVEDAVREHPDYRVVFTGHSLGGALATVAGADLRGNSYDIDVFSYGAPRVGNRAFAEFLTVQTGGTLYRITHTNDIVPRLPPREFGYSHSSPEYWIKSGTLVPVRRRDIVKIEGIDATGGNNQPNIPDIPAHLWYFGLIGTCL

SEQ ID NO: 6730 - protein, 269 aa, Thermomyces lanuginosus
EVSQDLFNQFNLFAQYSKAAYCQKNNDAPAGTNITCTGNACPEVFKADATFLYSFEDSGVGDVTGFLALDNTNKQIILSFRGSRSIENWIGNLNFDLKEINDICSGCRGHDGFTSSWRSVADTLRQKVEDAVREHPDYRVVFTGHSLGGALATVAWADLRGNGYDIDVFSYGAPRVGNRAFAEFLTTQTGGTLYRITHTNDIVPRLPPREFGYSHSSPEYWIKSGTLVPVTRNDIVKIEGIDATGGNNQPNIPDIPAHLWYFGLIGTCL

SEQ ID NO: 6731 - protein, 269 aa, Thermomyces lanuginosus
EVSQDLFNQFNLFAQYSAAAYCGKNNDAPAGTNITCTGNACPEVEKAQATFLYSFEDMGVGDVTGFLALDNTNKLIVLSFRGSRSIENWIGNLNFDLKEINDICSGCRGHDGFTSSWRSVADTLRQKVEAAVREHPDYRVVFTGHSLGGALATVAGADLRGNPYDIDVFSYGAPRVGNRAFAEFLTVQTGGTLYRITHTNDIVPRLPPREFGYSHSSPEYWIKSGTMVPVTRQDIVKIEGIDATGGNNQPNIPDIPAHLWYFGRIGTCL

SEQ ID NO: 6732 - protein, 269 aa, Thermomyces lanuginosus
EVSQDLFNQFNLFAQYSAAAYCGKNNEAPAGTNITCTGNACPEVEKADATFLYSFEDMGVGDVTGFLALDNTNKLIVLSFRGSRSIENWIGNLNFDLKEINDICSGCRGHDGFTSSWRSVADTLRQKVEAAVREHPQYRVVFTGHSLGGALATVAGADLRGNPYDIDVFSYGAPRVGNRAFAEFLTVQTGGTLYRITHTNDIVPRLPPREFGYSHSSPEYWIKSGTLVPVTRQDIVKIEGIDATGGNNQPNIPDIPAHLWYFGRIGTCL

SEQ ID NO: 6733 - protein, 269 aa, Thermomyces lanuginosus
EVSQDLFNQFNLFAQYSAAAYCGANNDAPAGTNITCTGNACPEVEKADATFLYSFEDSGVGDVTGFLALDNTNKQIVLSFRGSRSIENWIGNLNFDLKEINDICSGCRGHAGFTSSWRSVADTLRQKVEAAVREHPDYRVVFTGHSLGGALATIAWADLRGNGYDIDVFSYGAPRVGNRAFAEFLTVQTGGTLYRITHTNDIVPRLPPREFGYSHSSPEYWIKSGTLVPVTRNDIVKIEGIDATGGNNQPNIPDIPAHLWYFGRIGTCL

SEQ ID NO: 6734 - protein, 269 aa, Thermomyces lanuginosus
EVSQDLFNQFNLFAQYSAAAYCGKNNDAPAGTNITCTGNACPEVEKADATLLYSFRNSGVGDVTGFLALDNTNKLIVLSFRGSRSIENWIGNLNFDLKEINDICSGCRGHDGFTSSWFSVADTLRQKVEDAVREHPDYRVVFTGHSLGGALATVAGADLRGNSYDIDVFSYGAPRVGNRAFAEFLTVQTGGTLYRITHTNDIVPRLPPREFGYSHSSPEYWIKSGTLVPVRRRDIVKIEGIDATGGNNQPNIPDIPAHLWYFGLIGTCL

SEQ ID NO: 6735 - protein, 269 aa, Thermomyces lanuginosus
EVSQDLFNQFNLFAQYSAAAYCSKNNNAPAGTNITCTGNACPEVEKADATILYSFRDSGVGDVTGFLALDNTNKLIVLSFRGSRSIENWIGNLNFDLKEINDICSGCRGHDGFTSSWFSVADTLRQKVEDAVREHPDYRVVFTGHSLGGALATVAGADLRGNGYDIDVFSYGAPRVGNRAFAEFLTVQTGGTLYRITHTNDIVPRLPPREFGYSHSSPEYWIKSGTLVPVRRRDIVKIEGIDATGGNNQPNIPDIPAHLWYFGLIGTCL

SEQ ID NO: 6736 - protein, 269 aa, Thermomyces lanuginosus
EVSQDLFNQFNLFAQYSAAAYCGKNNDAPAGTNITCTGNACPEVEKADATFLYSFEDSGVGDVTGFLALDNTNKLIVLSFRGSRSIENWIGNLNFDLKEINDICSGCRGHDGFTSSWRSVADTLRQKVEDAVREHPDYRVVFTGHSLGGALATVAGADLRGNGYDIDVFSYGAPRVGNRAFAEFLTVQTGGTLYRITHTNDIVPRLPPLEFGYSHSSPEYWIKSGTLVPVTRNDIVKIEGIDATGGNGGTLGLDIPAHLWYFGLIGTCL

SEQ ID NO: 6737 - protein, 269 aa, Thermomyces lanuginosus
EVSQDLFNQFNLFAQYSAAAYCSKNNDAPAGTNITCTGNICPEVEKADATFLYSFRDSGVGDVTGFLALDNTNKLIVLSFRGSRSIENWIGNLNFDLKEINDICSGCRGHDGFTSSWFSVADTLRQKVEDAVREHPDYRVVFTGHSLGGALATVAGADLRGNGYDIDVFSYGAPRVGNRAFAEFLTVQTGGTLYRITHTNDIVPRLPPREFGYSHSSPEYWIKSGTLVPVRRRDIVKIEGIDATGGNNQPNIPDITAHLWYFGLIGTCL

SEQ ID NO: 6738 - protein, 269 aa, Thermomyces lanuginosus
EVSQDLFNQFNLFAQYSAAAYCGKNNDAPAGTNITCTGNACPEVEKADATILYSFRDSGVGDVTGFLALDNTNKLIVLSFRGSRSIENWIGNLNFDLKEINDICSGCRGHDGFTSSWFSVADTLRQKVEDAVREHPDYRVVFTGHSLGGALATVAGADLRGNGYDIDVFSYGAPRVGNRAFAEFLTVQTGGTLYRITHTNDIVPRLPPREFGYSHSSPEYWIKSGTLVPVRRRDIVKIEGIDAEGGNNQPNIPDITAHLWYFGLIGTCL

SEQ ID NO: 6739 - protein, 269 aa, Thermomyces lanuginosus
EVSQDLFNQFNLFAQYSAAAYCKKNNSAPAGTNITCTGNACPEVEKADATFLYSFEDSGVGDVTGFLALDNTNKQIVLSFRGSRSIENWIGNLRFDLKEINDICSGCRGHDGFTSSWRSVADTLRQKVEDAVREHPDYRVVFTGHSLGGALATIAWADLRGNGYDIDVFSYGAPRVGNRAFAEFLTVQQGGTLYRITHTNDIVPRLPPREFGYSHSSPEYWIKSGTLVPVTRNDIVKIEGIDATGGNNQPNIPDIPAHLWYFGLIGTCL

SEQ ID NO: 6740 - protein, 269 aa, Thermomyces lanuginosus
EVSQDLFNQFNLFAQYSAAAYCGKNNDAPAGTNITCTGNICPEVEKADATILYSFRDSGVGDVTGFLALDNTNKLIVLSFRGSRSIENWIGNLNFDLKEINDICSGCRGHDGFTSSWFSVADTLRQKVEDAVREHPDYRVVFTGHSLGGALATVAGADLRGNGYDIDVFSYGAPRVGNRAFAEFLTVQTGGTLYRITHTNDIVPRLPPREFGYSHSSPEYWIKSGTLVPVRRRDIVKIEGIDATGGNNQPNIPDITAHLWYFGLIGTCL

SEQ ID NO: 6741 - protein, 269 aa, Thermomyces lanuginosus
EVSQDLFNQFNLFAQYSAAAYCQKNNDAPAGTNITCTGNACPEVEKADATFLYSFEDSGVGDVTGFLALDNTNKGIVLSFRGSRSIENWIQNLNFDLKEINDICSGCRGHDGFTSSWRSVADTLRQKVEAAVREHPDYRVVFTGHSLGGALATVAGADLRGNGYDIDVFSYGAPRVGNRAFAEFLTTQTGGTLYRITHTNDIVPRLPPREFGYSHSSPEYWIKSGTLVPVTRNDIVKIEGIDATGGNNQPNQPDIPAHLWYFGRIGTCL

SEQ ID NO: 6742 - protein, 269 aa, Thermomyces lanuginosus
EVSQDLFNQFNLFAQYSAAAYCGKNNRAPAGTNITCTGNACPEVEKADATFLYSFEDSGVGDVTGFLALDNTNKLIVLSFRGSRSIENWIGNFNFDLKEINDICSGCRGHAGFTSSWRSVADTLRQKVEDAVREHPNYRVVFTGHSLGGALATVAGADLRGNGYDIDVFSYGAPRVGNRAFAEFLTVQTGGTLYRITHTNDIVPRLPPREFGYSHPSPEYWIKSGTGVPVTRNDIVKIEGIDATGGNNQPNIPDITAHLWYFGLIGTCL

SEQ ID NO: 6743 - protein, 269 aa, Thermomyces lanuginosus
EVSRDLFNQFNLFAQYSAAAYCGKNNDAPAGTNITCTGNACPEVEKADATILYSFEDSGVGDVTGFLALDNTNKLIVLSFRGSRSIENWIGNLNFDLKEINDICSGCRGHDGFTSSWRSVADTLRQKVEDAVREHPDYRVVFAGHSLGGALATVAGADLRGNGYDIDVFSYGAPRVGNRAFAEFLTVQTGGTLYRITNTNDIVPRLPPREFGYSHSSPEYWIKSGTLRPVRRRDIVKIEGIDATGGNNQPNIPDIPAHLWYFGLIGTCL

SEQ ID NO: 6744 - protein, 269 aa, Thermomyces lanuginosus
EVSQDLFNQFNLFAQYSAAAYCGKNNDAPAGTNITCTGNACPEVEKAQATFLYSFEDSGVGDVTGFLALDNTNKLIVLSFRGSRSIENWIGNLNFDLKEINDICSGCRGHDGFTSSWRSVADTLRQKVEAAVREHPQYRVVFTGHSLGGALATVAGADLRGNPYDIDVFSYGAPRVGNRAFAEFLTVQTGGTLYRITHTNDIVPRLPPREFGYSHSSPEYWIKSGTMVPVTRQDIVKIEGIDATGGNNQPNIPDIPAHLWYFGRIGTCL

SEQ ID NO: 6745 - protein, 269 aa, Thermomyces lanuginosus
EVSQDLFNQFNLFAQYSAAAYCGKNNDAPAGTNITCTGNACPEVEKADATTLYSFEDSGVGDVTGFLALDNTNKGIVLSFRGSRSIENWIQNLNFDLKEINDICSGCRGHDGFTSSWRSVADTLRQKVEAAVREHPDYRVVFTGHSLGGALATVAGADLRGNGYDIDVFSYGAPRVGNRAFAEFLTNQTGGTLYRITHTNDIVPRLPPREFGYSHSSPEYWIKSGTLVPVTRNDIVKIEGIDATGGNNQPNQPDIPAHLWYFGRIGTCL

SEQ ID NO: 6746 - protein, 269 aa, Thermomyces lanuginosus
EVSQDLFNQFNLFAQYSAAAYCGKNNDAPAGTNITCTGNACPEVEKADATLLYSFRDSGVGDVTGFLALDNTNKLIVLSFRGSRSIENWIGNLNFDLIEINDICSGCRGHDGFTSSWFSVADTLRQKVEDAVREHPDYRVVFTGHSLGGALATVAGADLRGNGYDIDVFSYGAPRVGNRAFAEFLTVQTGGTLYRITHTNDIVPRLPPREFGYSHSSPEYWIKSGTLVPVRRRDIVKIEGIDATGGNNQPNIPDITAHLWYFGLIGTCL

SEQ ID NO: 6747 - protein, 269 aa, Thermomyces lanuginosus
EVSQDLFNQFNLFAQYSAAAYCGKNNSAEAGTDITCTGNACPEVFKADATFLYSFEDSGVGDVTGFLALDNTRKDIVLSFRGSRSIENWIGNLNFDLKEINDICSGCRGHDGFTSSWRSVADTLRQKVEDAVREHPDYRVVFTGHSLGGALATVAGADLRGNGYDIDVFSYGAPRVGNRAFAEFLTVQDGGTLYRITHTNDIVPRLPPREFGYSHSSPEYWIKSGTLVPVTRNDIVKIEGIDATGGNNQPNIPDIPAHLWYFGLIGTCL

SEQ ID NO: 6748 - protein, 269 aa, Thermomyces lanuginosus
EVSQDLFNQFNLFAQYSAAAYCGKNNDAPAGTNITCTGNACPEVEKADATTLYSFEDSGVGDVTGFLALDNTNKQIVLSFRGSRSIENWIQNLNFDLKEINDICSGCRGHDGFTSSWRSVADTLRQKVEAAVREHPDYRVVFTGHSLGGALATVAGADLRGNGYDIDVFSYGAPRVGNRAFAEFLTHQTGGTLYRITHTNDIVPRLPPREFGYSHSSPEYWIKSGTLVPVTRNDIVKIEGIDATGGNNQPNQPDIPAHLWYFGRIGTCL

SEQ ID NO: 6749 - protein, 269 aa, Thermomyces lanuginosus
EVSQDLFNQFNLFAQYSAAAYCGKNNDAPAGTQITCTGNACPEVEKADATFLYSFEDSGVGDVTGFLALDNTNKLIVLSFRGSRSIENWITNLNFDLKEINDICSGCRGHAGFTSSWRSVADTLRQKVEDAVREHPDYRVVFTGHSLGGALATVAGADLRGNGYDIDVFSYGAPRIGNRAFAEFLTVQTGGTLYRITHTNDIVPRLPPREFGYSHSSPEYWIKSGTLVPVRRRDIVKIEGIDATGGNNQPNIPSIPAHLWYFGLIGTCL

SEQ ID NO: 6750 - protein, 269 aa, Thermomyces lanuginosus
EVSQDLFNQFNLFAQYSAAAYCGKNNDAPAGTNITCTGNACPEVEKADATFLYSFEDSGVGDVTGFLALDNTNKLIVLSFRGSRSIENWIGNLNFDLKEINDICSGCRGHDGFTSSWRSVADTLRQKVEDAVREHPDYRVVFAGHSLGGALATVAGADLRGNGYDIDVFSYGAPRVGNRAFAEFLTVQTGGTLYRITHTNDIVPRLPPREFGYSHSSPEYWIKSGTLPPVRRRDIVKCEGIDATCGNNQPNIPDITAHLWYFGLIGTCL

SEQ ID NO: 6751 - protein, 269 aa, Thermomyces lanuginosus
EVSQDLFNQFNLFAQYSAAAYCSKNNDAPAGTNITCTGNACPEVEKADATFLYSFRDSGVGDVTGFLALDNTNKLIVLSFRGSRSIENWIGNLNFDLKEINDICSGCRGHDGFTSSWFSVADTLRQKVEDAVREHPDYRVVFTGHSLGGALATVAGADLRGNGYDIDVFSYGAPRVGNRAFAEFLTVQTGGTLYRITHTNDIVPRLPPREFGYSHSSPEFWIKSGTLVPVRRRDIVKIEGIDAEGGNNQPNIPDIPAHLWYFGLIGTCL

SEQ ID NO: 6752 - protein, 269 aa, Thermomyces lanuginosus
EVSRDLFNQFNLFAQYSAAAYCGKNNDAPAGTNITCTGNACPEVEKADATILYSFEDSGVGDVTGFLALDNTNKLIVLSFRGSRSIENWIGNLNFDLKEINDICSGCRGHDGFTSSWRSVADTLRQKVEDAVREHPDYRVVFTGHSLGGALATVAGADLRGDGYDIDVFSYGAPRVGNRAFAEFLTVQTGGTLYRITNTNDIVPRLPPREFGYSHSSPEYWIKSGTLRPVRRRDIVKIEGIDATGGNNQPNIPDIPAHLWYFGLIGTCL

SEQ ID NO: 6753 - protein, 269 aa, Thermomyces lanuginosus
EVSQDLFNQFNLFAQYSKAAYCQKNNDAPAGTNITCTGNACPEVEKADATFLYSFEDSGVGDVTGFLALDNTNKRIILSFRGSRSIENWIGNLRFDLKEINDICSGCRGHDGFTSSWRSVADTLRQKVEDAVREHPDYRVVFTGHSLGGALATVAWADLRGNGYDIDVFSYGAPRVGNRAFAEFLTNQTGGTLYRITHTNDIVPRLPPREFGYSHSSPEYWIKSGTLVPVTRNDIVKIEGIDATGGNNQPNIPDIPAHLWYFGLIGTCL

SEQ ID NO: 6754 - protein, 269 aa, Thermomyces lanuginosus
EVSQDLFNQFNLFAQYSAAAYCGKNNNAPAGTNITCTGNACPEVEKADATFLYSFRDSGVGDVTGFLALDNTNKLIVLSFRGSRSIENWIGNLNFDLIEINDICSGCRGHDGFTSSWFSVADTLRQKVEDAVREHPDYRVVFTGHSLGGALATVAGADLRGNGYDIDVFSYGAPRVGNRAFAEFLTVQTGGTLYRITHTNDIVPRLPPREFGYSHSSPEFWIKSGTLVPVRRRDIVKIEGIDATGGNNQPNIPDIPAHLWYFGLIGTCL

SEQ ID NO: 6755 - protein, 269 aa, Thermomyces lanuginosus
EVSQDLFNQFKLFAQYSAAAYCGKNNDAPAGTNITCTGNACPEVEKADATFLYSFKDSGVGDVTGFLALDNTNKQIVLSFRGSRSIENWIGNLNFDLKEINDICSGCRGHDGFTSSWRSVADTLRQKVEAAVREHPDYRVVFTGHSLGGALATIAGADLRGNGYDIDVFSYGAPRVGNRAFAEFLTNQQGGTLYRITHTNDIVPRLPPREFGYSHSSPEYWIKSGTLVPVTRNDIVKIEGIDATGGNNQPNIPDIPAHLWYFGLIGTCL

SEQ ID NO: 6756 - protein, 269 aa, Thermomyces lanuginosus
EVSQDLFNQFNLFAQYSAAAYCKANNDAPAGTNITCTGNACPEVEKADATFLYSFEDSGVGDVTGFLALDNTNKQIILSFRGSRSIENWIGNLNFDLKEINDICSGCRGHDGFTSSWRSVADTLRQKVEAAVREHPDYRVVFTGHSLGGALATVAWADLRGNGYDIDVFSYGAPRVGNRAFAEFLTQQTGGTLYRITHTNDIVPRLPPREFGYSHSSPEYWIKSGTLVPVTRNDIVKIEGIDATGGNNQPNIPDIPAHLWYFGLIGTCL

SEQ ID NO: 6757 - protein, 269 aa, Thermomyces lanuginosus
EVSQDLFNQFNLFAQYSAAAYCGKNNEAPAGTNITCTGNACPEVEKAQATFLYSFEDSGVGDVTGFLALDNTNKLIVLSFRGSRSIENWIGNLNFDLKEINDICSGCRGHDGFTSSWRSVADTLRQKVEDAVREHPQYRVVFTGHSLGGALATVAGADLRGNPYDIDVFSYGAPRVGNRAFAEFLTVQTGGTLYRITHTNDIVPRLPPREFGYSHSSPEYWIKSGTMVPVTRQDIVKIEGIDATGGNNQPNIPDIPAHLWYFGRIGTCL

SEQ ID NO: 6758 - protein, 269 aa, Thermomyces lanuginosus
EVSQDLFNQFNLFAQYSAAAYCGKNNNAPAGTNITCTGNACPEVEKADATFLYSFRDSGVGDVTGFLALDNTNKLIVLSFRGSRSIENWIGNLNFDLIEINDICSGCRGHDGFTSSWFSVADTLRQKVEDAVREHPDYRVVFTGHSLGGALATVAGADLRGNGYDIDVFSYGAPRVGNRAFAEFLTVQTGGTLYRITHTNDIVPRLPPREFGYSHSSPEYWIKSGTLVPVRRRDIVKIEGIDATGGNNQPNIPDITAHLWYFGLIGTCL

SEQ ID NO: 6759 - protein, 269 aa, Thermomyces lanuginosus
EVSQDLFNQFNLFAQYSAAAYCKANNDAPAGTNITCTGNACPEVEKADATFLYSFEDSGVGDVTGFLALDNTNKQIVLSFRGSRSIENWIGNLNFDLKEINDICSGCRGHDGFTSSWRSVADTLRQKVEAAVREHPDYRVVFTGHSLGGALATVAGADLRGNGYDIDVFSYGAPRVGNRAFAEFLTTQQGGTLYRITHTNDIVPRLPPREFGYSHSSPEYWIKSGTLVPVTRNDIVKIEGIDATGGNNQPNIPDIPAHLWYFGRIGTCL

SEQ ID NO: 6760 - protein, 269 aa, Thermomyces lanuginosus
EVSQDLFNQFNLFAQYSAAAYCGKNNRAPAGTNITCTGNACPEVEKADATFLYSFEDSGVGDVTGFLALDNTNKLIVLSFRGSRSIENWISNLNFDLKEINDICSGCRGHAGFTSSWRSVADTLRQKVEDAVREHVDYRVVFTGHSLGGALATVAGADLRGNGYDIDVFSYGAPRVGNRAFAEFLTVQTGGTLYRITHTNDIVPRLPPREFGYSHPSPEYWIKSGTGVPVTRNDIVKIEGIDATGGNNQPNIPDITAHLWYFGLIGTCL

SEQ ID NO: 6761 - protein, 269 aa, Thermomyces lanuginosus
EVSQDLFNQFNLFAQYSAAAYCGKNNDAPAGTNITCTGNACPEVEKADATILYSFEDSGVGDVTGFLALDNTNKLIVLSFRGSRSIENWIGNLNFDLKEINDICSGCRGHDGFTSSWRSVADTLRQKVEDAVREHPDYRVVFAGHSLGGALATVAGADLRGDGYDIDVFSYGAPRVGNRAFAEFLTVQTGGTLYRITSTNDIVPRLPPREFGYSHSSPEYWIKSGTLPPVRRRDIVKIEGIDATGGNNQPNIPDIPAHLWYFGLIGTCL

SEQ ID NO: 6762 - protein, 269 aa, Thermomyces lanuginosus
EVSQDLFNQFNLFAQYSAAAYCGKNNNAPAGTNITCTGNACPEVEKADATILYSFRDSGVGDVTGFLALDNTNKLIVLSFRGSRSIENWIGNLNFDLKEINDICSGCRGHDGFTSSWFSVADTLRQKVEDAVREHPDYRVVFTGHSLGGALATVAGADLRGNGYDIDVFSYGAPRVGNRAFAEFLTVQTGGTLYRITHTNDIVPRLPPREFGYSHSSPEYWIKSGTLVPVRRRDIVKIEGIDAEGGNNQPNIPDIPAHLWYFGLIGTCL

SEQ ID NO: 6763 - protein, 269 aa, Thermomyces lanuginosus
EVSQDLFNQFNLFAQYSAAAYCKKNNDAPAGTNITCTGNACPEVEKADATTLYSFKDSGVGDVTGFLALDNTNKRIVLSFRGSRSIENWIGNLNFDLKEINDICSGCRGHDGFTSSWRSVADTLRQKVEAAVREHPDYRVVFTGHSLGGALATVAGADLRGNGYDIDVFSYGAPRVGNRAFAEFLTTQTGGTLYRITHTNDIVPRLPPREFGYSHSSPEYWIKSGTLVPVTRNDIVKIEGIDATGGNNQPNQPDIPAHLWYFGLIGTCL

SEQ ID NO: 6764 - protein, 269 aa, Thermomyces lanuginosus
EVSQDLFNQFNLFAQYSAAAYCGRNNDAPAGTNITCTGNACPEVERADATFLYSFEDSGVGDVTGFLALDNTNRLIVLSFRGSRSIENWIGNLNFDLREINDICSGCRGHDGFTSSWRSVADTLRQRVEDAVREHPDYRVVFTGHSLGGALATVAGADLRGNGYDIDVFSYGAPRVGNRAFAEFLTVQTGGTLYRITHTNDIVPRLPPREFGYSHSSPEYWIRSGTLVPVTRNDIVRIEGIDATGGNNQPNIPDIPAHLWYFGLIGTCL

SEQ ID NO: 6765 - protein, 269 aa, Thermomyces lanuginosus
EVSQDLFNQFNLFAQYSAAAYCGKNNNAPAGTNITCTGNICPEVEKADATILYSFRDSGVGDVTGFLALDNTNKLIVLSFRGSRSIENWIGNLNFDLKEINDICSGCRGHDGFTSSWFSVADTLRQKVEDAVREHPDYRVVFTGHSLGGALATVAGADLRGNGYDIDVFSYGAPRVGNRAFAEFLTVQTGGTLYRITHTNDIVPRLPPREFGYSHSSPEYWIKSGTLVPVRRRDIVKIEGIDATGGNNQPNIPDIPAHLWYFGLIGTCL

SEQ ID NO: 6766 - protein, 269 aa, Thermomyces lanuginosus
EVSQDLFNQFNLFAQYSAAAYCGKNNDAPAGTNITCTGNACPEVEKADATILYSFRDSGVGDVTGFLALDNTNKLIVLSFRGSRSIENWIGNLNFDLKEINDICSGCRGHDGFTSSWFSVADTLRQKVEDAVREHPDYRVVFTGHSLGGALATVAGADLRGNGYDIDVFSYGAPRVGNRAFAEFLTVQTGGTLYRITHTNDIVPRLPPREFGYSHSSPEFWIKSGTLVPVRRRDIVKIEGIDATGGNNQPNIPDITAHLWYFGLIGTCL

SEQ ID NO: 6767 - protein, 269 aa, Thermomyces lanuginosus
EVSQDLFNQFNLFAQYSAAAYCGKNNDAPAGTNITCTGNACPEVEKADATILYSFEDSGVGDVTGFLALDNTNKLIVLSFRGSRSIENWIGNLNFDLKEINDICSGCRGHDGFTSSWRSVADTLRQKVEDAVREHPDYRVVFAGHSLGGALATVAGADLRGDGYDIDVFSYGAPRVGNRAFAEFLTVQTGGTLYRITSTNDIVPRLPPREFGYSHSSPEYWIKSGTLRPVRRRDIVKIEGIDATGGNNQPNIPDIPAHLWYFGLIGTCL

SEQ ID NO: 6768 - protein, 269 aa, Thermomyces lanuginosus
EVSQDLFNQFNLFAQYSLAAYCGANNDAPAGTNITCTGNACPEVEKADATFLYSFEDSGVGDVTGFLALDNTNKLIVLSFRGSRSIENWIGNLRFDLKEINDICSGCRGHDGFTSSWRSVADTLRQKVEAAVREHPDYRVVFTGHSLGGALATVAWADLRGNGYDIDVFSYGAPRVGNRAFAEFLTTQTGGTLYRITHTNDIVPRLPPREFGYSHSSPEYWIKSGTLVPVTRNDIVKIEGIDATGGNNQPNIPDIPAHLWYFGRIGTCL

SEQ ID NO: 6769 - protein, 269 aa, Thermomyces lanuginosus
EVSQDLFNQFNLFAQYSAAAYCSKNNDAPAGTNITCTGNACPEVEKADATFLYSFRDSGVGDVTGFLALDNTNKLIVLSFRGSRSIENWIGNLNFDLIEINDICSGCRGHDGFTSSWFSVADTLRQKVEDAVREHPDYRVVFTGHSLGGALATVAGADLRGNGYDIDVFSYGAPRVGNRAFAEFLTVQTGGTLYRITHTNDIVPRLPPREFGYSHSSPEYWIKSGTLVPVRRRDIVKIEGIDATGGNNQPNIPDITAHLWYFGLIGTCL

SEQ ID NO: 6770 - protein, 269 aa, Thermomyces lanuginosus
EVSQDLFNQFNLFAQYSAAAYCGKNNDAPAGTNITCTGNACPEVEKADATFLYSFEDNGSGDVTGFLALDNTNKLIVLSFRGSRSSENWIGNLNFDLKEINDICSGCRGHDGFTSSWRSVADTLRQKVEDAVREHPDYRVVFTGHSLGGALATVAGADLRGNGYDIDVFSYGAPRVGNRAFAEFLTVQTGGTLYRITHTNDIVPRLPPREFGYSHSSPEYWIKSGTGVPVRRRDIVKIEGIDATGGNNQPNIPDISAHLWYFGLIGTCL

SEQ ID NO: 6771 - protein, 269 aa, Thermomyces lanuginosus
EVSQDLFNQFNLFAQYSAAAYCSKNNDAPAGTNITCTGNACPEVEKADATILYSFRDSGVGDVTGFLALDNTNKLIVLSFRGSRSIENWIGNLNFDLKEINDICSGCRGHDGFTSSWFSVADTLRQKVEDAVREHPDYRVVFTGHSLGGALATVAGADLRGNGYDIDVFSYGAPRVGNRAFAEFLTVQTGGTLYRITHTNDIVPRLPPREFGYSHSSPEYWIKSGTLVPVRRRDIVKIEGIDAEGGNNQPNIPDIPAHLWYFGLIGTCL

SEQ ID NO: 6772 - protein, 269 aa, Thermomyces lanuginosus
EVSQDLFNQFNLFAQYSKAAYCQANNDAPAGTNITCTGNACPEVEKADATFLYSFEDSGVGDVTGFLALDNTNKRIILSFRGSRSIENWIGNLNFDLKEINDICSGCRGHDGFTSSWRSVADTLRQKVEAAVREHPDYRVVFTGHSLGGALATVAWADLRGNGYDIDVFSYGAPRVGNRAFAEFLTVQTGGTLYRITHTNDIVPRLPPREFGYSHSSPEYWIKSGTLVPVTRNDIVKIEGIDATGGNNQPNIPDIPAHLWYFGLIGTCL

SEQ ID NO: 6773 - protein, 269 aa, Thermomyces lanuginosus
EVSQDLFNQFNLFAQYSAAAYCKANNDAPAGTNITCTGNACPEVEKADATFLYSFEDSGVGDVTGFLALDNTNKLIVLSFRGSRSIENWIGNLRFDLKEINDICSGCRGHDGFTSSWRSVADTLRQKVEDAVREHPDYRVVFTGHSLGGALATIAWADLRGNGYDIDVFSYGAPRVGNRAFAEFLTNQQGGTLYRITHTNDIVPRLPPREFGYSHSSPEYWIKSGTLVPVTRNDIVKIEGIDATGGNNQPNIPDIPAHLWYFGLIGTCL

SEQ ID NO: 6774 - protein, 269 aa, Thermomyces lanuginosus
EVSQDLFNQFNLFAQYSAAAYCGKNNDAPAGTNITCTGNICPEVEKADATLLYSFRNSGVGDVTGFLALDNTNKLIVLSFRGSRSIENWIGNLNFDLKEINDICSGCRGHDGFTSSWFSVADTLRQKVEDAVREHPDYRVVFTGHSLGGALATVAGADLRGNGYDIDVFSYGAPRVGNRAFAEFLTVQTGGTLYRITHTNDIVPRLPPREFGYSHSSPEYWIKSGTLVPVRRRDIVKIEGIDATGGNNQPNIPDIPAHLWYFGLIGTCL

SEQ ID NO: 6775 - protein, 269 aa, Thermomyces lanuginosus
EVSQDLFNQFNLFAQYSKAAYCKKNNDAPAGTNITCTGNACPEVFKADATFLYSFEDSGVGDVTGFLALDNTNKQIILSFRGSRSIENWIGNLNFDLKEINDICSGCRGHDGFTSSWRSVADTLRQKVEDAVREHPDYRVVFTGHSLGGALATVAWADLRGNGYDIDVFSYGAPRVGNRAFAEFLTTQTGGTLYRITHTNDIVPRLPPREFGYSHSSPEYWIKSGTLVPVTRNDIVKIEGIDATGGNNQPNIPDIPAHLWYFGLIGTCL

SEQ ID NO: 6776 - protein, 269 aa, Thermomyces lanuginosus
EVSQDLFNQFNLFAQYSKAAYCGKNNSAEAGTDITCTGNACPEVEKADATFLYSFEDSGVGDVTGFLALDNTRKDIVLSFRGSRSIENWIGNLNFDLKEINDICSGCRGHDGFTSSWRSVADTLRQKVEDAVREHPDYRVVFTGHSLGGALATVAGADLRGNGYDIDVFSYGAPRVGNRAFAEFLTVQDGGTLYRITHTNDIVPRLPPREFGYSHSSPEYWIKSGTLVPVTRNDIVKIEGIDATGGNNQPNIPDIPAHLWYFGLIGTCL

SEQ ID NO: 6777 - protein, 269 aa, Thermomyces lanuginosus
EVSQDLFNQFNLFAQYSAAAYCQKNNDAPAGTNITCTGNACPEVEKADATFLYSFEDSGVGDVTGFLALDNTNKGIVLSFRGSRSIENWIQNLNFDLKEINDICSGCRGHDGFTSSWRSVADTLRQKVEAAVREHPDYRVVFTGHSLGGALATVAGADLRGNGYDIDVFSYGAPRVGNRAFAEFTTVQTGGTLYRITHTNDIVPRLPPREFGYSHSSPEYWIKSGTLVPVTRNDIVKIEGIDATGGNNQPNQPDIPAHLWYFGRIGTCL

SEQ ID NO: 6778 - protein, 269 aa, Thermomyces lanuginosus
EVSDDLFNQFKLFAQYSAAAYCGKNNNAPAGTNITCTGNACPEVEKADATFLYSFEDMGVGDVTGFLALDNTNKLIVLSFRGSRSIENWFGNLNFDLKEINDICSGCRGHDGFTSSWRSVADTLRQKVEDAVREHPDYRVVFTGHSLGGALATVAGADLRGNGYDIDVFSYGAPRVGNRAFAEFLTVQTGGTLYRITHTNDIVPRLPPREFGYSHSSPEYWIKSGTLVPVTRQDIVKIEGIDATGGNNQPNIPDITAHLWYFGLIGTCL

SEQ ID NO: 6779 - protein, 269 aa, Thermomyces lanuginosus
EVSQDLFNQFNLFAQYSKAAYCGKNNDAPAGTNITCTGNACPEVEKADATFLYSFEDSGVGDVTGFLALDNTNKQIVLSFRGSRSIENWIGNLRFDLKEINDICSGCRGHAGFTSSWRSVADTLRQKVEDAVREHPDYRVVFTGHSLGGALATIAGADLRGNGYDIDVFSYGAPRVGNRAFAEFLTTQTGGTLYRITHTNDIVPRLPPREFGYSHSSPEYWIKSGTLVPVTRNDIVKIEGIDATGGNNQPNIPDIPAHLWYFGRIGTCL

SEQ ID NO: 6780 - protein, 269 aa, Thermomyces lanuginosus
EVSQDLFNQFNLFAQYSAAAYCGKNNDAPAGTNITCTGNACPEVEKADATILYSFRDSGVGDVTGFLALDNTNKLIVLSFRGSRSIENWIGNLNFDLKEINDICSGCRGHDGFTSSWFSVADTLRQKVEDAVREHPDYRVVFTGHSLGGALATVAGADLRGNGYDIDVFSYGAPRVGNRAFAEFLTVQTGGTLYRITHTNDIVPRLPPREFGYSHSSPEFWIKSGTLVPVRRRDIVKIEGIDAEGGNNQPNIPDIPAHLWYFGLIGTCL

SEQ ID NO: 6781 - protein, 269 aa, Thermomyces lanuginosus
EVSQDLFNQFNLFAQYSAAAYCGKNNDAPAGTNITCTGNACPEVELADATFLYSFEDNGSGDVTGFLALDNTNKLIVLSFRGSRSIENWIGNLNFDLKEINDICSGCRGHDGFTSSWRSVADTLRQKVEDAVREHPDYRVVFTGHSLGGALATVAGADLRGNGYDIDVFSYGAPRVGNRAFAEFLTVQTGGTLYRITHTNDIVPRLPPREFGYSHSSPEYWIISGTLVPVRRRDIVKIEGIDATGGNNQPNIPIIPAHLWYFGLIGTCL

SEQ ID NO: 6782 - protein, 269 aa, Synthetic construct
EVSQDLFNQFNLFAQYSAAAYCGKNNDAPAGTNITCTGNACPEVEKADATFLYSFEGSVVGDVTGFLALDNTNKLIVLSFRGSRSIENWIGNLKFLLKEINDICSGCRGHDGFTSPWRSVADTLRQKVEDAVREHPDYRVVFTGHSLGGALATVAGADLRGNGYDIDVFPYGAPRVGNRAFAEFLTVQTGGTLYRITHTNDIVPRLPPREFGYSHSSPEYWIKSGTLVPVTRNDIVKIEGIDATGGNNRPNIPDIPAHLWYFGLIGTCL

SEQ ID NO: 6783 - protein, 269 aa, Thermomyces lanuginosus
EVSQDLFNQFNLFAQYSAAAYCSKNNDAPAGTNITCTGNICPEVEKADATILYSFRDSGVGDVTGFLALDNTNKLIVLSFRGSRSIENWIGNLNFDLKEINDICSGCRGHDGFTSSWFSVADTLRQKVEDAVREHPDYRVVFTGHSLGGALATVAGADLRGNGYDIDVFSYGAPRVGNRAFAEFLTVQTGGTLYRITHTNDIVPRLPPREFGYSHSSPEYWIKSGTLVPVRRRDIVKIEGIDATGGNNQPNIPDIPAHLWYFGLIGTCL

SEQ ID NO: 6784 - protein, 269 aa, Thermomyces lanuginosus
EVSQDLFNQFNLFAQYSAAAYCKKNNSAPAGTNITCTGNACPEVEKADATTLYSFEDNGVGDVTGFLALDNTNKQIVLSFRGSRSIENWIGNLNFDLKEINDICSGCRGHDGFTSSWRSVADTLRQKVEAAVREHPDYRVVFTGHSLGGALATVAGADLRGNGYDIDVFSYGAPRVGNRAFAEFLTNQTGGTLYRITHTNDIVPRLPPREFGYSHSSPEYWIKSGTLVPVTRNDIVKIEGIDATGGNNQPNIPDIPAHLWYFGLIGTCL

SEQ ID NO: 6785 - protein, 269 aa, Thermomyces lanuginosus
EVSRDLFNQFNLFAQYSAAAYCGKNNDAPAGTNITCTGNACPEVEKADATILYSFEDSGVGDVTGFLALDNTNKLIVLSFRGSRSIENWIGNLNFDLKEINDICSGCRGHDGFTSSWRSVADTLRQKVEDAVREHPDYRVVFAGHSLGGALATVAGADLRGNGYDIDVFSYGAPRVGNRAFAEFLTVQTGGTLYRITSTNDIVPRLPPREFGYSHSSPEYWIKSGTLRPVRRRDIVKIEGIDATGGNNQPNIPDIPAHLWYFGLIGTCL

SEQ ID NO: 6786 - protein, 269 aa, Thermomyces lanuginosus
EVSQDLFNQFNLFAQYSAAAYCGKNNSAPAGTNITCTGNACPEVEKADATTLYSFEDMGVGDVTGFLALDNTNKRIVLSFRGSRSIENWIGNLNFDLKEINDICSGCRGHDGFTSSWRSVADTLRQKVEAAVREHPDYRVVFTGHSLGGALATVAGADLRGNGYDIDVFSYGAPRVGNRAFAEFLTVQTGGTLYRITHTNDIVPRLPPREFGYSHSSPEYWIKSGTLVPVTRNDIVKIEGIDATGGNNQPNQPDIPAHLWYFGRIGTCL

SEQ ID NO: 6787 - protein, 269 aa, Thermomyces lanuginosus
EVSQDLFNQFNLFAQYSAAAYCKKNNQAPAGTNITCTGNACPEVEKADATTLYSFEDSGVGDVTGFLALDNTNKGIVLSFRGSRSIENWIGNLNFDLKEINDICSGCRGHDGFTSSWRSVADTLRQKVEAAVREHPDYRVVFTGHSLGGALATVAGADLRGNGYDIDVFSYGAPRVGNRAFAEFLTHQTGGTLYRITHTNDIVPRLPPREFGYSHSSPEYWIKSGTLVPVTRNDIVKIEGIDATGGNNQPNIPDIPAHLWYFGRIGTCL

SEQ ID NO: 6788 - protein, 269 aa, Thermomyces lanuginosus
EVSQDLFNQFNLFAQYSKAAYCQANNDAPAGTNITCTGNACPEVEKADATFLYSFEDSGVGDVTGFLALDNTNKRIVLSFRGSRSIENWIGNLNFDLKEINDICSGCRGHDGFTSSWRSVADTLRQKVEAAVREHPDYRVVFTGHSLGGALATIAGADLRGNGYDIDVFSYGAPRVGNRAFAEFLTNQTGGTLYRITHTNDIVPRLPPREFGYSHSSPEYWIKSGTLVPVTRNDIVKIEGIDATGGNNQPNIPDIPAHLWYFGLIGTCL

SEQ ID NO: 6789 - protein, 269 aa, Thermomyces lanuginosus
EVSDDLFNQFKLFAQYSAAAYCGKNNQAPAGTNITCTGNACPEVEKADATFLYSFQDMGVGDVTGFLALDNTNKLIVLSFRGSRSIENWIGNLNFDLKEINDICSGCRGHDGFTSSWRSVADTLRQKVEDAVREHPDYRVVFTGHSLGGALATVAGADLRGNGYDIDVFSYGAPRVGNRAFAEFLTVQTGGTLYRITHTNDIVPRLPPREFGYSHSSPEYWIKSGTLVPVTRQDIVKIEGIDATGGNNQPNIPDITAHLWYFGLIGTCL

SEQ ID NO: 6790 - protein, 269 aa, Thermomyces lanuginosus
EVSQDLFNQFKLFAQYSAAAYCGKNNNAPAGTNITCTGNACPEVEKADATFLYSFKDMGVGDVTGFLALDNTNKLIVLSFRGSRSIENWFGNLNFDLKEINDICSGCRGHDGFTSSWRSVADTLRQKVEDAVREHPDYRVVFTGHSLGGALATVAGADLRGNGYDIDVFSYGAPRVGNRAFAEFLTVQTGGTLYRITHTNDIVPRLPPREFGYSHSSPEYWIKSGTLVPVTRQDIVKIEGIDATGGNNQPNIPDITAHLWYFGLIGTCL

SEQ ID NO: 6791 - protein, 269 aa, Thermomyces lanuginosus
EVSRDLFNQFNLFAQYSAAAYCGKNNDAPAGTNITCTGNACPEVEKADATILYSFEDSGVGDVTGFLALDNTNKLIVLSFRGSRSIENWIGNLNFDLKEINDICSGCRGHDGFTSSWRSVADTLRQKVEDAVREHPDYRVVFAGHSLGGALATVAGADLRGDGYDIDVFSYGAPRVGNRAFAEFLTVQTGGTLYRITNTNDIVPRLPPREFGYSHSSPEYWIKSGTLVPVRRRDIVKIEGIDATGGNNQPNIPDIPAHLWYFGLIGTCL

SEQ ID NO: 6792 - protein, 269 aa, Thermomyces lanuginosus
EVSQDLFNQFNLFAQYSAAAYCGKNNNAPAGTNITCTGNICPEVEKADATFLYSFRDSGVGDVTGFLALDNTNKLIVLSFRGSRSIENWIGNLNFDLKEINDICSGCRGHDGFTSSWFSVADTLRQKVEDAVREHPDYRVVFTGHSLGGALATVAGADLRGNGYDIDVFSYGAPRVGNRAFAEFLTVQTGGTLYRITHTNDIVPRLPPREFGYSHSSPEYWIKSGTLVPVRRRDIVKIEGIDAEGGNNQPNIPDIPAHLWYFGLIGTCL

SEQ ID NO: 6793 - protein, 269 aa, Thermomyces lanuginosus
EVSQDLFNQFNLFAQYSAAAYCGKNNDAPAGTNITCTGNACPEVEKAQATFLYSFEDMGVGDVTGFLALDNTNKLIVLSFRGSRSIENWIGNLNFDLKEINDICSGCRGHDGFTSSWRSVADTLRQKVEAAVREHPQYRVVFTGHSLGGALATVAGADLRGNGYDIDVFSYGAPRVGNRAFAEFLTVQTGGTLYRITHTNDIVPRLPPREFGYSHSSPEYWIKSGTMVPVTRQDIVKIEGIDATGGNNQPNIPDIPAHLWYFGRIGTCL

SEQ ID NO: 6794 - protein, 269 aa, Thermomyces lanuginosus
EVSDDLFNQFKLFAQYSAAAYCGKNNSAPAGTNITCTGNACPEVEKADATFLYSFKDMGVGDVTGFLALDNTNKLIVLSFRGSRSIENWIGNLNFDLKEINDICSGCRGHDGFTSSWRSVADTLRQKVEDAVREHPDYRVVFTGHSLGGALATVAGADLRGNGYDIDVFSYGAPRVGNRAFAEFLTVQTGGTLYRITHTNDIVPRLPPREFGYSHSSPEYWIKSGTLVPVTRQDIVKIEGIDATGGNNQPNIPDITAHLWYFGLIGTCL

SEQ ID NO: 6795 - protein, 269 aa, Thermomyces lanuginosus
EVSQDLFNQFNLFAQYSAAAYCGKNNDAPAGTNITCTGNICPEVEKADATLLYSFRDSGVGDVTGFLALDNTNKLIVLSFRGSRSIENWIGNLNFDLIEINDICSGCRGHDGFTSSWFSVADTLRQKVEDAVREHPDYRVVFTGHSLGGALATVAGADLRGNGYDIDVFSYGAPRVGNRAFAEFLTVQTGGTLYRITHTNDIVPRLPPREFGYSHSSPEYWIKSGTLVPVRRRDIVKIEGIDATGGNNQPNIPDIPAHLWYFGLIGTCL

SEQ ID NO: 6796 - protein, 269 aa, Thermomyces lanuginosus; identical to SEQ ID NO: 18

SEQ ID NO: 6797 - protein, 269 aa, Thermomyces lanuginosus
EVSQDLFNQFNLFAQYSAAAYCKKNNSAPAGTNITCTGNACPEVEKADATFLYSFEDSGVGDVTGFLALDNTNKQIVLSFRGSRSIENWIQNLNFDLKEINDICSGCRGHDGFTSSWRSVADTLRQKVEDAVREHPDYRVVFTGHSLGGALATVAGADLRGNGYDIDVFSYGAPRVGNRAFAEFLTTQTGGTLYRITHTNDIVPRLPPREFGYSHSSPEYWIKSGTLVPVTRNDIVKIEGIDATGGNNQPNQPDIPAHLWYFGRIGTCL

SEQ ID NO: 6798 - protein, 269 aa, Thermomyces lanuginosus
EVSQDLFNQFNLFAQYSAAAYCGKNNDAPAGTNITCTGNACPEVEKADATILYSFRDSGVGDVTGFLALDNTNKLIVLSFRGSRSIENWIGNLNFDLIEINDICSGCRGHDGFTSSWFSVADTLRQKVEDAVREHPDYRVVFTGHSLGGALATVAGADLRGNGYDIDVFSYGAPRVGNRAFAEFLTVQTGGTLYRITHTNDIVPRLPPREFGYSHSSPEYWIKSGTLVPVRRRDIVKIEGIDAEGGNNQPNIPDIPAHLWYFGLIGTCL

SEQ ID NO: 6799 - protein, 269 aa, Thermomyces lanuginosus
EVSRDLFNQFNLFAQYSAAAYCGKNNDAPAGTNITCTGNACPEVEKADATILYSFEDSGVGDVTGFLALDNTNKLIVLSFRGSRSIENWIGNLNFDLKEINDICSGCRGHDGFTSSWRSVADTLRQKVEDAVREHPDYRVVFAGHSLGGALATVAGADLRGDGYDIDVFSYGAPRVGNRAFAEFLTVQTGGTLYRITHTNDIVPRLPPREFGYSHSSPEYWIKSGTLRPVRRRDIVKIEGIDATGGNNQPNIPDIPAHLWYFGLIGTCL

SEQ ID NO: 6800 - protein, 269 aa, Thermomyces lanuginosus
EVSQDLFNQFNLFAQYSKAAYCKANNDAPAGTNITCTGNACPEVEKADATFLYSFEDSGVGDVTGFLALDNTNKQIILSFRGSRSIENWIGNLRFDLKEINDICSGCRGHDGFTSSWRSVADTLRQKVEDAVREHPDYRVVFTGHSLGGALATVAWADLRGNGYDIDVFSYGAPRVGNRAFAEFLTVQTGGTLYRITHTNDIVPRLPPREFGYSHSSPEYWIKSGTLVPVTRNDIVKIEGIDATGGNNQPNIPDIPAHLWYFGLIGTCL

SEQ ID NO: 6801 - protein, 269 aa, Thermomyces lanuginosus
EVSVDLFNQFNLFAQYSAAAYCGKNNDAPAGTNITCTGNACPEVEKADATFLYSFEDNGSGDVTGFLALDNTNKLIVLSFRGSRSIENWIGNLNFDLKEINDICSGCRGHDGFTSSWRSVADTLRQKVEDAVREHPDYRVVFTGHSLGGALATVAGADLRGNGYDIDVFSYGAPRVGNRAFAEFLTVQTGGTLYRITHTNDIVPRLPPRKFGYSHSSPEYWIKSGTLVPVRRRDIVKIEGIDATGGNNQPNIPDFPAHLWYFGLIGTCL

SEQ ID NO: 6802 - protein, 269 aa, Thermomyces lanuginosus
EVSQDLFNQFNLFAQYSAAAYCGKNNDAPAGTKITCTGNACPEVEKADATVLYSFEDSGVGDVTGFLALDNTNKLIVLSFRGSRSIENWIGNLNFDLEEIDDICSGCRGHDGFTSSWRSVADTLRQKVEDAVREHPDYRVVFTGHSLGGALATVAGADLRGNGYDIDVFSYGAPRVGNRAFAEFLTVQTGGTLYRITSTNDIVPRLPPREFGYSHSSPEYWIKSGTLVPVRRRDIVKIEGIDATGGNNQPNIPDIPAHLWYFGLIGTCL

SEQ ID NO: 6803 - protein, 269 aa, Thermomyces lanuginosus
EVSQDLFNQFNLFAQYSAAAYCGKNNSAPAGTNITCTGNACPEVEKADATFLYSFKDSGVGDVTGFLALDNTNKRIVLSFRGSRSIENWIGNLNFDLKEINDICSGCRGHAGFTSSWRSVADTLRQKVEDAVREHPDYRVVFTGHSLGGALATVAWADLRGNGYDIDVFSYGAPRVGNRAFAEFLTNQTGGTLYRITHTNDIVPRLPPREFGYSHSSPEYWIKSGTLVPVTRNDIVKIEGIDATGGNNQPNIPDIPAHLWYFGRIGTCL

SEQ ID NO: 6804 - protein, 269 aa, Thermomyces lanuginosus
EVSQDLFNQFNLFAQYSKAAYCGANNDAPAGTNITCTGNACPEVEKADATFLYSFEDSGVGDVTGFLALDNTNKLIVLSFRGSRSIENWIGNLNFDLKEINDICSGCRGHDGFTSSWRSVADTLRQKVEAAVREHPDYRVVFTGHSLGGALATIAWADLRGNGYDIDVFSYGAPRVGNRAFAEFLTTQTGGTLYRITHTNDIVPRLPPREFGYSHSSPEYWIKSGTLVPVTRNDIVKIEGIDATGGNNQPNIPDIPAHLWYFGRIGTCL

SEQ ID NO: 6805 - protein, 269 aa, Thermomyces lanuginosus
EVSQDLFNQFNLFAQYSAAAYCGKNNRAPAGSNITCTGNACPEVEKADATFLYSFEDSGVGDVTGFLALDNTNKLIVLSFRGSRSIENWIGNLNFDLKEINDICSGCRGHAGFTSSWRSVADTLRQKVEDAVREYPDYRVVFTGHSLGGALATVAGADLRGNGYDIDVFSYGAPRVGNRAFAEFLTVQTGGTLYRITHTNDIVPRLPPREFGYSHPSPEYWIKSGTGVPVTRNDIVKIEGIDATGGNNQPNIPDITAHLWYFGLIGTCL

SEQ ID NO: 6806 - protein, 269 aa, Thermomyces lanuginosus
EVSQDLFNQFNLFAQYSAAAYCGKNNDAPAGTQITCTGNACPEVEKADATFLYSFEDSGVGDVTGFLALDNTNKLIVLSFRGSRSIENWITNLSFDLKEINDICSGCRGHAGFTSSWRSVADTLRQKVEDAVREHPDYRVVFTGHSLGGALATVAGADLRGNGYDIDVFSYGAPRVGNRAFAEFLTVQTGGTLYRITHTNDIVPRLPPREFGYSHSSPEYWIKSGTLVPVRRRDIVKIEGIDATGGNNQPNIPDITAHLWYFGLIGTCL

SEQ ID NO: 6807 - protein, 269 aa, Thermomyces lanuginosus
EVSRDLFNQFNLFAQYSAAAYCGKNNDAPAGTNITCTGNACPEVEKADATILYSFEDSGVGDVTGFLALDNTNKLIVLSFRGSRSIENWIGNLNFDLKEINDICSGCRGHDGFTSSWRSVADTLRQKVEDAVREHPDYRVVFAGHSLGGALATVAGADLRGNGYDIDVFSYGAPRVGNRAFAEFLTVQTGGTLYRITSTNDIVPRLPPREFGYSHSSPEYWIKSGTLPPVRRRDIVKIEGIDATGGNNQPNIPDIPAHLWYFGLIGTCL

SEQ ID NO: 6808 - protein, 269 aa, Thermomyces lanuginosus
EVSQDLFNQFNLFAQYSAAAYCGKNNDAPAGTQITCTGNACPEVEKADATFLYSFEDSGVGDVTGFLALDNTNKLIVLSFRGSRSIENWIQNLNFDLKEINDICSGCRGHDGFTSSWRSVADTLRQKVEDAVREHPDYRVVFTGHSLGGGLATVAGADLRGNGYDIDVFSYGAPRVGNRAFAEFLTVQTGGTLYRITHTNDIVPRLPPRQFGYSHSSPEYWIKSGTLVPVRRRDIVKIEGIDATGGNNQPNIPDNPAHLWYFGLIGTCL

SEQ ID NO: 6809 - protein, 269 aa, Thermomyces lanuginosus
EVSQDLFNQFNLFAQYSAAAYCGKNNDAPAGTNITCTGNACPEVEKADATILYSFRDSGVGDVTGFLALDNTNKLIVLSFRGSRSIENWIGNLNFDLIEINDICSGCRGHDGFTSSWFSVADTLRQKVEDAVREHPDYRVVFTGHSLGGALATVAGADLRGNGYDIDVFSYGAPRVGNRAFAEFLTVQTGGTLYRITHTNDIVPRLPPREFGYSHSSPEFWIKSGTLVPVRRRDIVKIEGIDATGGNNQPNIPDIPAHLWYFGLIGTCL

SEQ ID NO: 6810 - protein, 269 aa, Thermomyces lanuginosus
EVSQDLFNQFNLFAQYSAAAYCGKNNDAPAGTNITCTGNACPEVEKADATLLYSFRDSGVGDVTGFLALDNTNKLIVLSFRGSRSIENWIGNLNFDLKEINDICSGCRGHDGFTSSWFSVADTLRQKVEDAVREHPDYRVVFTGHSLGGALATVAGADLRGNSYDIDVFSYGAPRVGNRAFAEFLTVQTGGTLYRITHTNDIVPRLPPREFGYSHSSPEYWIKSGTLVPVRRRDIVKIEGIDATGGNNQPNIPDITAHLWYFGLIGTCL

SEQ ID NO: 6811 - protein, 269 aa, Thermomyces lanuginosus
EVSQDLFNQFNLFAQYSAAAYCSKNNDAPAGTNITCTGNACPEVEKADATFLYSFRDSGVGDVTGFLALDNTNKLIVLSFRGSRSIENWIGNLNFDLKEINDICSGCRGHDGFTSSWFSVADTLRQKVEDAVREHPDYRVVFTGHSLGGALATVAGADLRGNGYDIDVFSYGAPRVGNRAFAEFLTVQTGGTLYRITHTNDIVPRLPPREFGYSHSSPEFWIKSGTLVPVRRRDIVKIEGIDATGGNNQPNIPDITAHLWYFGLIGTCL

SEQ ID NO: 6812 - protein, 269 aa, Thermomyces lanuginosus
EVSQDLFNQFRLFAQYSAAAYCGKNNDAPAGTQITCTGNACPEVEKADATFLYSFEDSGVGDVTGFLALDNTNKLIVLSFRGSRSIENWLGNLNFDLKEINDICSGCRGHDGFTSSWRSVADTLRQKVEDAVREHPDYRVVFTGHSLGGALATVAGADLRGNKYDIDVFSYGAPRVGNRAFAEFLTVQTGGTLYRITHTNDIVPRLPPREFGYSHSSPEYWIKSGTLVPVRRRDIVKIEGIDATGGNNQPNIPSIPAHLWYFGLIGTCL

SEQ ID NO: 6813 - protein, 269 aa, Thermomyces lanuginosus
EVSQDLFNQFNLFAQYSAAAYCGKNNDAPAGTNITCTGNACPEVELADATFLYSFEDNGSGDVTGFLALDNTNKLIVLSFRGSRSIENWIGNLNFDLKEINDICSGCRGHDGFTSSWRSVADTLRQKVEDAVREHPDYRVVFTGHSLGGALATVAGADLRGNGYDIDVFSYGAPRVGNRAFAEFLTVQTGGTLYRITHTNDIVPRLPPREFGYSHSSPEYWIKSGTLVPVRRRDIVKIEGIDATGGNNLPNIPIIPAHLWYFGLIGTCL

SEQ ID NO: 6814 - protein, 269 aa, Thermomyces lanuginosus
EVSQDLFNQFNLFAQYSAAAYCGKNNNAPAGTNITCTGNACPEVEKADATFLYSFRDSGVGDVTGFLALDNTNKLIVLSFRGSRSIENWIGNLNFDLKEINDICSGCRGHDGFTSSWFSVADTLRQKVEDAVREHPDYRVVFTGHSLGGALATVAGADLRGNGYDIDVFSYGAPRVGNRAFAEFLTVQTGGTLYRITHTNDIVPRLPPREFGYSHSSPEYWIKSGTLVPVRRRDIVKIEGIDAEGGNNQPNIPDITAHLWYFGLIGTCL

SEQ ID NO: 6815 - protein, 269 aa, Thermomyces lanuginosus
EVSQDLFNQFNLFAQYSAAAYCQANNDAPAGTNITCTGNACPEVEKADATFLYSFEDSGVGDVTGFLALDNTNKQIILSFRGSRSIENWIGNLNFDLKEINDICSGCRGHDGFTSSWRSVADTLRQKVEAAVREHPDYRVVFTGHSLGGALATIAWADLRGNGYDIDVFSYGAPRVGNRAFAEFLTVQTGGTLYRITHTNDIVPRLPPREFGYSHSSPEYWIKSGTLVPVTRNDIVKIEGIDATGGNNQPNIPDIPAHLWYFGLIGTCL

SEQ ID NO: 6816 - protein, 269 aa, Thermomyces lanuginosus
EVSQDLFNQFNLFAQYSAAAYCGKNNEAPAGTNITCTGNACPEVEKAQATFLYSFEDMGVGDVTGFLALDNTNKLIVLSFRGSRSIENWIGNLNFDLKEINDICSGCRGHDGFTSSWRSVADTLRQKVEAAVREHPDYRVVFTGHSLGGALATVAGADLRGNPYDIDVFSYGAPRVGNRAFAEFLTVQTGGTLYRITHTNDIVPRLPPREFGYSHSSPEYWIKSGTMVPVTRNDIVKIEGIDATGGNNQPNIPDIPAHLWYFGRIGTCL

SEQ ID NO: 6817 - protein, 269 aa, Thermomyces lanuginosus
EVSQDLFNQFNLFAQYSAAAYCGKNNDAPAGTNITCTGNACPEVEKADATILYSFRDSGVGDVTGFLALDNTNKLIVLSFRGSRSIENWIGNLNFDLIEINDICSGCRGHDGFTSSWFSVADTLRQKVEDAVREHPDYRVVFTGHSLGGALATVAGADLRGNGYDIDVFSYGAPRVGNRAFAEFLTVQTGGTLYRITHTNDIVPRLPPREFGYSHSSPEYWIKSGTLVPVRRRDIVKIEGIDATGGNNQPNIPDITAHLWYFGLIGTCL

SEQ ID NO: 6818 - protein, 269 aa, Thermomyces lanuginosus
EVSQDLFNQFNLFAQYSAAAYCGKNNDAPAGTNITCTGNICPEVEKADATFLYSFRNSGVGDVTGFLALDNTNKLIVLSFRGSRSIENWIGNLNFDLKEINDICSGCRGHDGFTSSWFSVADTLRQKVEDAVREHPDYRVVFTGHSLGGALATVAGADLRGNGYDIDVFSYGAPRVGNRAFAEFLTVQTGGTLYRITHTNDIVPRLPPREFGYSHSSPEYWIKSGTLVPVRRRDIVKIEGIDATGGNNQPNIPDITAHLWYFGLIGTCL

SEQ ID NO: 6819 - protein, 269 aa, Thermomyces lanuginosus
EVSQDLFNQFNLFAQYSAAAYCGKNNRAPAGTNITCTGNACPEVEKADATFLYSFEDSGVGDVTGFLALDNTNKLIVLSFRGSRSIENWIGNLNFDLKEINDICSGCRGHAGFTSSWMSVADTLRQKVEDVVREHPDYRVVFTGHSLGGALATVAGADLRGNGYDIDVFSYGAPRVGNRAFAEFLTVQTGGTLYRITHTNDIVPRLPPREFGYSHPSPEYWIKSGTGVPVTRNDIVKIEGIDATGGNNQPNIPDITAHLWYFGLIGTCL

SEQ ID NO: 6820 - protein, 269 aa, Thermomyces lanuginosus
EVSQDLFNQFNLFAQYSAAAYCGKNNDAPAGTNITCTGNACPEVEKADATFLYSFEDSGVGDVTGFLALDNTNKLIVLSFRGSRSIENWIGNLNFDLKEINDICSGCRGHDGFTSSWRSVADTLRQKVEDAVREHPDYRVVFTGHSLGGALATVAGADLRGNGYDIDVFSYGAPRVGNRAFAEFLTVQTGGTLYRITHTNDIVPRLPPREFGYSHSSPEYWIKSGTLVPVTRNDIVKIEGIDALGGNGGTLGLDIPAHLWYFGLIGTCL

SEQ ID NO: 6821 - protein, 269 aa, Thermomyces lanuginosus
EVSQDLFNQFCLFAQYSAAAYCGKNNDAPAGTQITCTGNACPEVEKADATFLYSFEDSGVGDVTGFLALDNTNKLIVLSFRGSRSIENWITNLNFDLKEINDICSGCRGHDGFTSSWRSVADTLRQKVEDAVREHPDYRVVFTGHSLGGALATVAGADLRGNKYDIDVFSYGAPRVGNRAFAEFLTVQTGGTLYRITHTNDIVPRLPPREFGYSHSSPEYWIKSGTLVPVRRRDIVKIEGIDATGGNNQPNIPSIPAHLWYFGLIGTCL

SEQ ID NO: 6822 - protein, 269 aa, Thermomyces lanuginosus
EVSQDLFNQFNLFAQYSAAAYCGKNNRAPAGTNITCTGNACPEVEKADATFLYSFEDSGVGDVTGFLALDNTNKLIVLSFRGSRSIENWIGNLNFELKEINDICSGCRGHAGFTSSWRSVADTLRQKVEDAVREHPDYRVVFTGHSLGGALATVAGADLRGNKYDIDVFSYGAPRVGNRAFAEFLTVQTGGTLYRITHTNDIVPRLPPREFGYSHSSPEYWIKSGTLVPVRRRDIVKIEGIDATGGNNQPNIPDITAHLWYFGLIGTCL

SEQ ID NO: 6823 - protein, 269 aa, Thermomyces lanuginosus
EVSQDLFNQFRLFAQYSAAAYCGKNNDAPAGTQITCTGNACPEVEKADATFLYSFEDSGVGDVTGFLALDNTNKLIVLSFRGSRSIENWITNLNFDLKEINDICSGCRGHDGFTSSWRSVADTLRQKVEDAVREHPDYRVVFTGHSLGGALATVAGADLRGNPYDIDVFSYGAPRVGNRAFAEFLTVQTGGTLYRITHTNDIVPRLPPREFGYSHSSPEYWIKSGTLVPVRRRDIVKIEGIDATGGNNQPNIPSIPAHLWYFGLIGTCL

SEQ ID NO: 6824 - protein, 269 aa, Thermomyces lanuginosus
EVSQDLFNQFNLFAQYSAAAYCGKNNEAPAGTNITCTGNACPEVEKADATFLYSFEDMGVGDVTGFLALDNTNKLIVLSFRGSRSIENWIGNLNFDLKEINDICSGCRGHDGFTSSWRSVADTLRQKVEAAVREHPQYRVVFTGHSLGGALATVAGADLRGNPYDIDVFSYGAPRVGNRAFAEFLTVQTGGTLYRITHTNDIVPRLPPREFGYSHSSPEYWIKSGTMVPVTRNDIVKIEGIDATGGNNQPNIPDIPAHLWYFGRIGTCL

SEQ ID NO: 6825 - protein, 269 aa, Thermomyces lanuginosus
EVSQDLFNQFNLFAQYSAAAYCGKNNDAPAGTNITCTGNACPEVEKADATILYSFEDSGVGDVTGFLALDNTNKLIVLSFRGSRSIENWIGNLNFDLKEINDICSGCRGHDGFTSSWRSVADTLRQKVEDAVREHPDYRVVFAGHSLGGALATVAGADLRGDGYDIDVFSYGAPRVGNRAFAEFLTVQTGGTLYRITNTNDIVPRLPPREFGYSHSSPEYWIKSGTLRPVRRRDIVKIEGIDATGGNNQPNIPDIPAHLWYFGLIGTCL

SEQ ID NO: 6826 - protein, 269 aa, Thermomyces lanuginosus
EVSQDLFNQFNLFAQYSAAAYCQKNNDAPAGTNITCTGNACPEVEKADATTLYSFEDSGVGDVTGFLALDNTNKRIVLSFRGSRSIENWIQNLNFDLKEINDICSGCRGHDGFTSSWRSVADTLRQKVEDAVREHPDYRVVFTGHSLGGALATVAGADLRGNGYDIDVFSYGAPRVGNRAFAEFLTNQTGGTLYRITHTNDIVPRLPPREFGYSHSSPEYWIKSGTLVPVTRNDIVKIEGIDATGGNNQPNQPDIPAHLWYFGRIGTCL

SEQ ID NO: 6827 - protein, 269 aa, Thermomyces lanuginosus
EVSQDLFNQFNLFAQYSAAAYCQKNNDAPAGTNITCTGNACPEVEKADATFLYSFEDSGVGDVTGFLALDNTNKQIVLSFRGSRSIENWIGNLNFDLKEINDICSGCRGHAGFTSSWRSVADTLRQKVEAAVREHPDYRVVFTGHSLGGALATIAWADLRGNGYDIDVFSYGAPRVGNRAFAEFLTVQTGGTLYRITHTNDIVPRLPPREFGYSHSSPEYWIKSGTLVPVTRNDIVKIEGIDATGGNNQPNIPDIPAHLWYFGRIGTCL

SEQ ID NO: 6828 - protein, 269 aa, Thermomyces lanuginosus
EVSQDLFNQFNLFAQYSAAAYCSKNNDAPAGTNITCTGNACPEVEKADATILYSFRDSGVGDVTGFLALDNTNKLIVLSFRGSRSIENWIGNLNFDLIEINDICSGCRGHDGFTSSWFSVADTLRQKVEDAVREHPDYRVVFTGHSLGGALATVAGADLRGNGYDIDVFSYGAPRVGNRAFAEFLTVQTGGTLYRITHTNDIVPRLPPREFGYSHSSPEYWIKSGTLVPVRRRDIVKIEGIDATGGNNQPNIPDIPAHLWYFGLIGTCL

SEQ ID NO: 6829 - protein, 269 aa, Thermomyces lanuginosus
EVSQDLFNQFNLFAQYSAAAYCGKNNDAPAGTNITCTGNICPEVEKADATFLYSFRNSGVGDVTGFLALDNTNKLIVLSFRGSRSIENWIGNLNFDLKEINDICSGCRGHDGFTSSWFSVADTLRQKVEDAVREHPDYRVVFTGHSLGGALATVAGADLRGNSYDIDVFSYGAPRVGNRAFAEFLTVQTGGTLYRITHTNDIVPRLPPREFGYSHSSPEYWIKSGTLVPVRRRDIVKIEGIDATGGNNQPNIPDIPAHLWYFGLIGTCL

SEQ ID NO: 6830 - protein, 269 aa, Thermomyces lanuginosus
EVSQDLFNQFNLFAQYSAAAYCGKNNRAPAGTNITCTGNACPEVEKADATFLYSFEDSGVGDVTGFLALDNTNKLIVLSFRGSRSIENWLTNLNFDLKEINDICSGCRGHAGFTSSWRSVADTLRQKVEDAVREHPDYRVVFTGHSLGGALATVAGADLRGNGYDIDVFSYGAPRVGNRAFAEFLTVQTGGTLYRITHTNDIVPRLPPREFGYSHPSPEYWIKSGTGVPVTRNDIVKIEGIDATGGNNQPNIPDITAHLWYFGLIGTCL

SEQ ID NO: 6831 - protein, 269 aa, Thermomyces lanuginosus
EVSQDLFNQFNLFAQYSAAAYCGKNNDAPAGTKITCTGNACPEVEKADATLLYSFEDSGVGDVTGFLALDNTNKLIVLSFRGSRSIENWIGNLNFDLEEIDDICSGCRGHDGFTSSWRSVADTLRQKVEDAVREHPDYRVVFTGHSLGGALATVAGADLRGNGYDIDVFSYGAPRVGNRAFAEFLTVQTGGTLYRITSTNDIVPRLPPREFGYSHSSPEYWIKSGTLVPVRRRDIVKIEGIDATGGNNQPNIPDIPAHLWYFGLIGTCL

SEQ ID NO: 6832 - protein, 269 aa, Thermomyces lanuginosus
EVSQDLFNQFNLFAQYSAAAYCGKNNRAPAGTNITCTGNACPEVEKADATFLYSFEDSGVGDVTGFLALDNTNKLIVLSFRGSRSIENWIGNLNFELKEINDICSGCRGHAGFTSSWRSVADTLRQKVEDAVREHPDYRVVFTGHSLGGALATVAGADLRGNKYDIDVFSYGAPRVGNRAFAEFLTVQTGGTLYRITHTNDIVPRLPPREFGYSHSSPEYWIKSGTLVPVRRRDIVKIEGIDATGGNNQPNIPSIPAHLWYFGLIGTCL

SEQ ID NO: 6833 - protein, 269 aa, Thermomyces lanuginosus
EVSQDLFNQFNLFAQYSAAAYCGKNNDAPAGTNITCTGNACPEVEKAQATFLYSFEDMGVGDVTGFLALDNTNKLIVLSFRGSRSIENWIGNLNFDLKEINDICSGCRGHDGFTSSWRSVADTLRQKVEAAVREHPQYRVVFTGHSLGGALATVAGADLRGNPYDIDVFSYGAPRVGNRAFAEFLTVQTGGTLYRITHTNDIVPRLPPREFGYSHSSPEYWIKSGTMVPVTRNDIVKIEGIDATGGNNQPNIPDIPAHLWYFGRIGTCL

SEQ ID NO: 6834 - protein, 269 aa, Thermomyces lanuginosus
EVSRDLFNQFNLFAQYSAAAYCGKNNDAPAGTNITCTGNACPEVEKADATILYSFEDSGVGDVTGFLALDNTNKLIVLSFRGSRSIENWIGNLNFDLKEINDICSGCRGHDGFTSSWRSVADTLRQKVEDAVREHPDYRVVFAGHSLGGALATVAGADLRGNGYDIDVFSYGAPRVGNRAFAEFLTVQTGGTLYRITNTNDIVPRLPPREFGYSHSSPEYWIKSGTLPPVRRRDIVKIEGIDATGGNNQPNIPDIPAHLWYFGLIGTCL

SEQ ID NO: 6835 - protein, 269 aa, Thermomyces lanuginosus
EVSQDLFNQFNLFAQYSAAAYCGKNNRAPAGTNITCTGNACPEVEKADATFLYSFEDSGVGDVTGFLALDNTNKLIVLSFRGSRSIENWINNLNFDLKEINDICSGCRGHAGFTSSWRSVADTLRQKVEDAVREHVDYRVVFTGHSLGGALATVAGADLRGNGYDIDVFSYGAPRVGNRAFAEFLTVQTGGTLYRITHTNDIVPRLPPREFGYSHPSPEYWIKSGTGVPVTRNDIVKIEGIDATGGNNQPNIPDITAHLWYFGLIGTCL

SEQ ID NO: 6836 - protein, 269 aa, Thermomyces lanuginosus
EVSQDLFNQFNLFAQYSAAAYCGKNNDAPAGTNITCTGNICPEVEKADATFLYSFRDSGVGDVTGFLALDNTNKLIVLSFRGSRSIENWIGNLNFDLKEINDICSGCRGHDGFTSSWFSVADTLRQKVEDAVREHPDYRVVFTGHSLGGALATVAGADLRGNGYDIDVFSYGAPRVGNRAFAEFLTVQTGGTLYRITHTNDIVPRLPPREFGYSHSSPEYWIKSGTLVPVRRRDIVKIEGIDAEGGNNQPNIPDITAHLWYFGLIGTCL

SEQ ID NO: 6837 - protein, 269 aa, Thermomyces lanuginosus
EVSQDLFNQFNLFAQYSAAAYCGKNNRAPAGTNITCTGNACPEVEKADATFLYSFEDSGVGDVTGFLALDNTNKLIVLSFRGSRSIENWISNLNFNLKEINDICSGCRGHAGFTSSWRSVADTLRQKVEDAVREHPDYRVVFTGHSLGGALATVAGADLRGNGYDIDVFSYGAPRVGNRAFAEFLTVQTGGTLYRITHTNDIVPRLPPREFGYSHPSPEYWIKSGTGVPVTRNDIVKIEGIDATGGNNQPNIPDITAHLWYFGLIGTCL

SEQ ID NO: 6838 - protein, 269 aa, Thermomyces lanuginosus
EVSQDLFNQFNLFAQYSAAAYCSKNNNAPAGTNITCTGNACPEVEKADATFLYSFRDSGVGDVTGFLALDNTNKLIVLSFRGSRSIENWIGNLNFDLKEINDICSGCRGHDGFTSSWFSVADTLRQKVEDAVREHPDYRVVFTGHSLGGALATVAGADLRGNGYDIDVFSYGAPRVGNRAFAEFLTVQTGGTLYRITHTNDIVPRLPPREFGYSHSSPEYWIKSGTLVPVRRRDIVKIEGIDAEGGNNQPNIPDIPAHLWYFGLIGTCL

SEQ ID NO: 6839 - protein, 269 aa, Thermomyces lanuginosus
EVSQDLFNQFNLFAQYSAAAYCGKNNEAPAGTNITCTGNACPEVEKADATFLYSFEDMGVGDVTGFLALDNTNKLIVLSFRGSRSIENWIGNLNFDLKEINDICSGCRGHDGFTSSWRSVADTLRQKVEDAVREHPQYRVVFTGHSLGGALATVAGADLRGNPYDIDVFSYGAPRVGNRAFAEFLTVQTGGTLYRITHTNDIVPRLPPREFGYSHSSPEYWIKSGTMVPVTRQDIVKIEGIDATGGNNQPNIPDIPAHLWYFGRIGTCL

SEQ ID NO: 6840 - protein, 269 aa, Thermomyces lanuginosus
EVSQDLFNQFNLFAQYSAAAYCGKNNDAPAGTNITCTGNACPEVEKADATFLYSFEDSGVGDVTGFLALDNTNKLIVLSFRGSRSIENWIGNLNFDLKEINDICSGCRGHDGFTSSWRSVADTLRQKVEDAVREHPDYRVVFTGHSLGGALATVAGADLRGNGYDIDVFSYGAPRVGNRAFAEFLTVQTGGTLYRITHTNDPVPRLPPREFGYSHSSPEYWIKSGTLVPVTRNDIVKIEGIDATGGNGGTLGLDIPAHLWYFGLIGTCL

SEQ ID NO: 6841 - protein, 269 aa, Thermomyces lanuginosus
EVSQDLFNQFNLFAQYSAAAYCGKNNDAPAGTNITCTGNACPEVEKADATFLYSFRNSGVGDVTGFLALDNTNKLIVLSFRGSRSIENWIGNLNFDLKEINDICSGCRGHDGFTSSWFSVADTLRQKVEDAVREHPDYRVVFTGHSLGGALATVAGADLRGNSYDIDVFSYGAPRVGNRAFAEFLTVQTGGTLYRITHTNDIVPRLPPREFGYSHSSPEYWIKSGTLVPVRRRDIVKIEGIDATGGNNQPNIPDITAHLWYFGLIGTCL

SEQ ID NO: 6842 - protein, 269 aa, Thermomyces lanuginosus
EVSQDLFNQFNLFAQYSAAAYCGKNNDAPAGTNITCTGNACPEVEKADATTLYSFEDSGVGDVTGFLALDNTNKRIVLSFRGSRSIENWIQNLNFDLKEINDICSGCRGHDGFTSSWRSVADTLRQKVEAAVREHPDYRVVFTGHSLGGALATVAGADLRGNGYDIDVFSYGAPRVGNRAFAEFLTTQTGGTLYRITHTNDIVPRLPPREFGYSHSSPEYWIKSGTLVPVTRNDIVKIEGIDATGGNNQPNQPDIPAHLWYFGRIGTCL

SEQ ID NO: 6843 - protein, 269 aa, Thermomyces lanuginosus
EVSQDLFNQFNLFAQYSAAAYCSKNNDAPAGTNITCTGNACPEVEKADATILYSFRDSGVGDVTGFLALDNTNKLIVLSFRGSRSIENWIGNLNFDLKEINDICSGCRGHDGFTSSWFSVADTLRQKVEDAVREHPDYRVVFTGHSLGGALATVAGADLRGNGYDIDVFSYGAPRVGNRAFAEFLTVQTGGTLYRITHTNDIVPRLPPREFGYSHSSPEYWIKSGTLVPVRRRDIVKIEGIDATGGNNQPNIPDITAHLWYFGLIGTCL

SEQ ID NO: 6844 - protein, 269 aa, Thermomyces lanuginosus
EVSQDLFNQFNLFAQYSAAAYCQKNNSAPAGTNITCTGNACPEVEKADATFLYSFEDSGVGDVTGFLALDNTNKQIVLSFRGSRSIENWIQNLNFDLKEINDICSGCRGHDGFTSSWRSVADTLRQKVEDAVREHPDYRVVFTGHSLGGALATVAGADLRGNGYDIDVFSYGAPRVGNRAFAEFLTTQTGGTLYRITHTNDIVPRLPPREFGYSHSSPEYWIKSGTLVPVTRNDIVKIEGIDATGGNNQPNQPDIPAHLWYFGRIGTCL

SEQ ID NO: 6845 - protein, 269 aa, Thermomyces lanuginosus
EVSQDLFNQFNLFAQYSAAAYCGKNNQAPAGTNITCTGNACPEVEKADATTLYSFEDSGVGDVTGFLALDNTNKQIVLSFRGSRSIENWIGNLNFDLKEINDICSGCRGHDGFTSSWRSVADTLRQKVEAAVREHPDYRVVFTGHSLGGALATVAGADLRGNGYDIDVFSYGAPRVGNRAFAEFLTTQTGGTLYRITHTNDIVPRLPPREFGYSHSSPEYWIKSGTLVPVTRNDIVKIEGIDATGGNNQPNQPDIPAHLWYFGRIGTCL

SEQ ID NO: 6846 - protein, 269 aa, Thermomyces lanuginosus
EVSQDLFNQFRLFAQYSAAAYCGKNNDAPAGTQITCTGNACPEVEKADATFLYSFEDSGVGDVTGFLALDNTNKLIVLSFRGSRSIENWITNLNFDLKEINDICSGCRGHDGFTSSWRSVADTLRQKVEDAVREHPDYRVVFTGHSLGGALATVAGADLRGNLYDIDVFSYGAPRVGNRAFAEFLTVQTGGTLYRITHTNDIVPRLPPREFGYSHSSPEYWIKSGTLVPVRRRDIVKIEGIDATGGNNQPNIPSIPAHLWYFGLIGTCL

SEQ ID NO: 6847 - protein, 269 aa, Thermomyces lanuginosus
EVSQDLFNQFNLFAQYSAAAYCGKNNNAPAGTNITCTGNACPEVEKADATILYSFRDSGVGDVTGFLALDNTNKLIVLSFRGSRSIENWIGNLNFDLKEINDICSGCRGHDGFTSSWFSVADTLRQKVEDAVREHPDYRVVFTGHSLGGALATVAGADLRGNGYDIDVFSYGAPRVGNRAFAEFLTVQTGGTLYRITHTNDIVPRLPPREFGYSHSSPEYWIKSGTLVPVRRRDIVKIEGIDATGGNNQPNIPDITAHLWYFGLIGTCL

SEQ ID NO: 6848 - protein, 269 aa, Thermomyces lanuginosus
EVSQDLFNQFNLFAQYSKAAYCGKNNDAPAGTNITCTGNACPEVEKADATFLYSFEDSGVGDVTGFLALDNTNKQIVLSFRGSRSIENWIGNLNFDLKEINDICSGCRGHDGFTSSWRSVADTLRQKVEAAVREHPDYRVVFTGHSLGGALATVAWADLRGNGYDIDVFSYGAPRVGNRAFAEFLTNQQGGTLYRITHTNDIVPRLPPREFGYSHSSPEYWIKSGTLVPVTRNDIVKIEGIDATGGNNQPNIPDIPAHLWYFGRIGTCL

SEQ ID NO: 6849 - protein, 269 aa, Thermomyces lanuginosus
EVSQDLFNQFNLFAQYSKAAYCKANNDAPAGTNITCTGNACPEVEKADATFLYSFEDSGVGDVTGFLALDNTNKQIVLSFRGSRSIENWIGNLNFDLKEINDICSGCRGHDGFTSSWRSVADTLRQKVEAAVREHPDYRVVFTGHSLGGALATVAWADLRGNGYDIDVFSYGAPRVGNRAFAEFLTNQTGGTLYRITHTNDIVPRLPPREFGYSHSSPEYWIKSGTLVPVTRNDIVKIEGIDATGGNNQPNIPDIPAHLWYFGLIGTCL

SEQ ID NO: 6850 - protein, 269 aa, Thermomyces lanuginosus
EVSRDLFNQFNLFAQYSAAAYCGKNNDAPAGTNITCTGNACPEVEKADATFLYSFEDSGVGDVTGFLALDNTNKLIVLSFRGSRSIENWIGNLNFDLKEINDICSGCRGHDGFTSSWRSVADTLRQKVEDAVREHPDYRVVFAGHSLGGALATVAGADLRGNGYDIDVFSYGAPRVGNRAFAEFLTVQTGGTLYRITHTNDIVPRLPPREFGYSHSSPEYWIKSGTLPPVRRRDIVKCEGIDATCGNNQPNIPDIPAHLWYFGLIGTCL

SEQ ID NO: 6851 - protein, 269 aa, Thermomyces lanuginosus
EVSQDLFNQFNLFAQYSAAAYCGKNNDAPAGTNITCTGNACPEVEKADATLLYSFRNSGVGDVTGFLALDNTNKLIVLSFRGSRSIENWIGNLNFDLKEINDICSGCRGHDGFTSSWFSVADTLRQKVEDAVREHPDYRVVFTGHSLGGALATVAGADLRGNGYDIDVFSYGAPRVGNRAFAEFLTVQTGGTLYRITHTNDIVPRLPPREFGYSHSSPEYWIKSGTLVPVRRRDIVKIEGIDATGGNNQPNIPDITAHLWYFGLIGTCL

SEQ ID NO: 6852 - protein, 269 aa, Thermomyces lanuginosus
EVSQDLFNQFNLFAQYSAAAYCGKNNRAPAGTNITCTGNACPEVEKADATFLYSFEDSGVGDVTGFLALDNTNKLIVLSFRGSRSIENWIRNLNFDLKEINDICSGCRGHAGFTSSWRSVADTLRQKVEDAVREHPDYRVVFTGHSLGGALATVAGADLRGNGYDIDVFSYGAPRVGNRAFAEFLTVQTGGTLYRITHTNDIVPRLPPREFGYSHPSPEYWIKSGTGVPVTRNDIVKVEGIDATGGNNQPNIPDITAHLWYFGLIGTCL

SEQ ID NO: 6853 - protein, 269 aa, Thermomyces lanuginosus
EVSQDLFNQFNLFAQYSAAAYCGKNNNAPAGTNITCTGNACPEVEKADATILYSFRDSGVGDVTGFLALDNTNKLIVLSFRGSRSIENWIGNLNFDLKEINDICSGCRGHDGFTSSWFSVADTLRQKVEDAVREHPDYRVVFTGHSLGGALATVAGADLRGNGYDIDVFSYGAPRVGNRAFAEFLTVQTGGTLYRITHTNDIVPRLPPREFGYSHSSPEFWIKSGTLVPVRRRDIVKIEGIDATGGNNQPNIPDIPAHLWYFGLIGTCL

SEQ ID NO: 6854 - protein, 269 aa, Thermomyces lanuginosus
EVSQDLFNQFNLFAQYSAAAYCGKNNDAPAGTQITCTANACPEVEKADATFLYSFEDSGVGDVTGFLALDNTNKLIVLSFRGSRSIENWITNLNFDLKEINDICSGCRGHDGFTSSWRSVADTLRQKVEDAVREHPDYRVVFTGHSLGGALATVAGADLRGNKYDIDVFSYGAPRVGNRAFAEFLTVQTGGTLYRITHTNDIVPRLPPREFGYSHSSPEYWIKSGTLVPVRRRDIVKIEGIDATGGNNQPNIPSIPAHLWYFGLIGTCL

SEQ ID NO: 6855 - protein, 269 aa, Thermomyces lanuginosus
EVSQDLFNQFRLFAQYSAAAYCGKNNDAPAGTQITCTGNACPEVEKADATFLYSFEDSGVGDVTGFLALDNTNKLIVLSFRGSRSIENWITNLNFDLKEINDICSGCRGHDGFTSSWRSVADTLRQKVEDAVREHPDYRVVFTGHSLGGALATVAGADLRGNKYDIDVFSYGAPRVGNRAFAEFLTVQTGGTLYRITHTNDIVPRLPPREFGYSHSSPEYWIKSGTLVPVRRRDIVKIEGIDATGGNNQPNIPSIPAHLWYFGLIGTCL

SEQ ID NO: 6856 - protein, 269 aa, Thermomyces lanuginosus
EVSQDLFNQFNLFAQYSAAAYCQKNNDAPAGTNITCTGNACPEVEKADATTLYSFEDSGVGDVTGFLALDNTNKQIVLSFRGSRSIENWIQNLNFDLKEINDICSGCRGHDGFTSSWRSVADTLRQKVEDAVREHPDYRVVFTGHSLGGALATVAGADLRGNGYDIDVFSYGAPRVGNRAFAEFLTHQTGGTLYRITHTNDIVPRLPPREFGYSHSSPEYWIKSGTLVPVTRNDIVKIEGIDATGGNNQPNQPDIPAHLWYFGRIGTCL

SEQ ID NO: 6857 - protein, 269 aa, Thermomyces lanuginosus
EVSQDLFNQFNLFAQYSAAAYCGKNNDAPAGTNITCTGNACPEVEKADATFLYSFEDSGVGDVTGFLALDNTNKLIVLSFRGSRSIENWIGNLNFELKEINDICSGCRGHAGFTSSWRSVADTLRQKVEDAVREHPDYRVVFTGHSLGGALATVAGADLRGNKYDIDVFSYGAPRVGNRAFAEFLTVQTGGTLYRITHTNDIVPRLPPREFGYSHSSPEYWIKSGTLVPVRRRDIVKIEGIDATGGNNQPNIPSITAHLWYFGLIGTCL

SEQ ID NO: 6858 - protein, 269 aa, Thermomyces lanuginosus
EVSQDLFNQFNLFAQYSKAAYCKANNDAPAGTNITCTGNACPEVEKADATFLYSFEDSGVGDVTGFLALDNTNKQIVLSFRGSRSIENWIGNLRFDLKEINDICSGCRGHDGFTSSWRSVADTLRQKVEDAVREHPDYRVVFTGHSLGGALATIAGADLRGNGYDIDVFSYGAPRVGNRAFAEFLTQQTGGTLYRITHTNDIVPRLPPREFGYSHSSPEYWIKSGTLVPVTRNDIVKIEGIDATGGNNQPNIPDIPAHLWYFGLIGTCL

SEQ ID NO: 6859 - protein, 269 aa, Thermomyces lanuginosus
EVSQDLFNQFNLFAQYSAAAYCGKNNEAPAGTNITCTGNACPEVEKADATFLYSFEDMGVGDVTGFLALDNTNKLIVLSFRGSRSIENWIGNLNFDLKEINDICSGCRGHDGFTSSWRSVADTLRQKVEDAVREHPQYRVVFTGHSLGGALATVAGADLRGNPYDIDVFSYGAPRVGNRAFAEFLTVQTGGTLYRITHTNDIVPRLPPREFGYSHSSPEYWIKSGTMVPVTRNDIVKIEGIDATGGNQQPNIPDIPAHLWYFGRIGTCL

SEQ ID NO: 6860 - protein, 269 aa, Thermomyces lanuginosus
EVSQDLFNQFNLFAQYSAAAYCGKNNDAPAGTQITCTGNACPEVEKADATFLYSFEDSGVGDVTGFLALDNTNKLIVLSFRGSRSIENWIGNLNFELKEINDICSGCRGHDGFTSSWRSVADTLRQKVEDAVREHPDYRVVFTGHSLGGALATVAGADLRGNGYDIDVFSYGAPRVGNRAFAEFLTVQTGGTLYRITHTNDIVPRLPPREFGYSHSSPDYWIKSGTGVPVRRRDIVKIEGIDATGGNNRPNIPDIPAHLWYFGLIGTCL

SEQ ID NO: 6861 - protein, 269 aa, Thermomyces lanuginosus
EVSQDLFNQFNLFAQYSAAAYCGKNNRAPAGTNITCTGNACPEVEKADATFLYSFEDSGVGDVTGFLALDNTNKLIVLSFRGSRSIENWISNFNFDLKEINDICSGCRGHAGFTSSWRSVADTLRQKVEDAVREHPDYRVVFTGHSLGGALATVAGADLRGNGYDIDVFSYGAPRVGNRAFAEFLTVQTGGTLYRITHTNDIVPRLPPREFGYSHPSPEYWIKSGTGVPVTRNDIVKIEGIDATGGNNQPNIPDITAHLWYFGLIGTCL

SEQ ID NO: 6862 - protein, 269 aa, Thermomyces lanuginosus
EVSQDLFNQFNLFAQYSAAAYCGKNNSAPAGTNITCTGNACPEVEKADATTLYSFEDMGVGDVTGFLALDNTNKQIVLSFRGSRSIENWIGNLNFDLKEINDICSGCRGHDGFTSSWRSVADTLRQKVEDAVREHPDYRVVFTGHSLGGALATVAGADLRGNGYDIDVFSYGAPRVGNRAFAEFLTNQTGGTLYRITHTNDIVPRLPPREFGYSHSSPEYWIKSGTLVPVTRNDIVKIEGIDATGGNNQPNQPDIPAHLWYFGRIGTCL

SEQ ID NO: 6863 - protein, 269 aa, Thermomyces lanuginosus
EVSQDLFNQFRLFAQYSAAAYCGKNNDAPAGTQITCTGNACPEVEKADATFLYSFEDSGVGDVTGFLALDNTNKLIVLSFRGSRSIENWITNLNFDLKEINDICSGCRGHDGFTSSWRSVADTLRQKVEDAVREHPDYRVVFTGHSLGGALATVAGADLRGNTYDIDVFSYGAPRVGNRAFAEFLTVQTGGTLYRITHTNDIVPRLPPREFGYSHSSPEYWIKSGTLVPVRRRDIVKIEGIDATGGNNQPNIPSIPAHLWYFGLIGTCL

SEQ ID NO: 6864 - protein, 269 aa, Thermomyces lanuginosus
EVSQDLFNQFNLFAQYSAAAYCGKNNDAPAGTNITCTGNACPEVEKADATFLYSFEDSGVGDVTGFLALDNTNKQIVLSFRGSRSIENWIGNLNFDLKEINDICSGCRGHAGFTSSWRSVADTLRQKVEAAVREHPDYRVVFTGHSLGGALATVAWADLRGNGYDIDVFSYGAPRVGNRAFAEFLTNQQGGTLYRITHTNDIVPRLPPREFGYSHSSPEYWIKSGTLVPVTRNDIVKIEGIDATGGNNQPNIPDIPAHLWYFGRIGTCL

SEQ ID NO: 6865 - protein, 269 aa, Thermomyces lanuginosus
EVSQDLFNQFNLFAQYSKAAYCQKNNDAPAGTNITCTGNACPEVFKADVTFLYSFEDSGVGDVTGFLALDNTNKQIVLSFRGSRSIENWIGNLNFDLKEINDICSGCRGHDGFTSSWRSVADTLRQKVEDAVREHPDYRVVFTGHSLGGALATVAWADLRGNGYDIDVFSYGAPRVGNRAFAEFLTTQTGGTLYRITHTNDIVPRLPPREFGYSHSSPEYWIKSGTLVPVTRNDIVKIEGIDATGGNNQPNIPDIPAHLWYFGLIGTCL

SEQ ID NO: 6866 - protein, 269 aa, Thermomyces lanuginosus
EVSQDLFNQFNLFAQYSAAAYCGKNNDAPAGTNITCTGNACPEVEKADATFLYSFRDSGVGDVTGFLALDNTNKLIVLSFRGSRSIENWIGNLNFDLIEINDICSGCRGHDGFTSSWFSVADTLRQKVEDAVREHPDYRVVFTGHSLGGALATVAGADLRGNSYDIDVFSYGAPRVGNRAFAEFLTVQTGGTLYRITHTNDIVPRLPPREFGYSHSSPEYWIKSGTLVPVRRRDIVKIEGIDATGGNNQPNIPDITAHLWYFGLIGTCL

SEQ ID NO: 6867 - protein, 269 aa, Thermomyces lanuginosus
EVSRDLFNQFNLFAQYSAAAYCGKNNDAPAGTNITCTGNACPEVEKADATFLYSFEDSGVGDVTGFLALDNTNKLIVLSFRGSRSIENWIGNLNFDLKEINDICSGCRGHDGFTSSWRSVADTLRQKVEDAVREHPDYRVVFAGHSLGGALATVAGADLRGDGYDIDVFSYGAPRVGNRAFAEFLTVQTGGTLYRITSTNDIVPRLPPREFGYSHSSPEYWIKSGTLPPVRRRDIVKIEGIDATGGNNQPNIPDIPAHLWYFGLIGTCL

SEQ ID NO: 6868 - protein, 269 aa, Thermomyces lanuginosus
EVSQDLFNQFNLFAQYSAAAYCGKNNQAPAGTNITCTGNACPEVEKADATTLYSFEDSGVGDVTGFLALDNTNKGIVLSFRGSRSIENWIGNLNFDLKEINDICSGCRGHDGFTSSWRSVADTLRQKVEAAVREHPDYRVVFTGHSLGGALATVAGADLRGNGYDIDVFSYGAPRVGNRAFAEFLTHQTGGTLYRITHTNDIVPRLPPREFGYSHSSPEYWIKSGTLVPVTRNDIVKIEGIDATGGNNQPNQPDIPAHLWYFGRIGTCL

SEQ ID NO: 6869 - protein, 269 aa, Thermomyces lanuginosus
EVSQDLFNQFNLFAQYSAAAYCQKNNDAPAGTNITCTGNACPEVFKADVTFLYSFEDSGVGDVTGFLALDNTNKLIILSFRGSRSIENWIGNLNFDLKEINDICSGCRGHDGFTSSWRSVADTLRQKVEDAVREHPDYRVVFTGHSLGGALATVAWADLRGNGYDIDVFSYGAPRVGNRAFAEFLTTQDGGTLYRITHTNDIVPRLPPREFGYSHSSPEYWIKSGTLVPVTRNDIVKIEGIDATGGNNQPNIPDIPAHLWYFGLIGTCL

SEQ ID NO: 6870 - protein, 269 aa, Thermomyces lanuginosus
EVSQDLFNQFNLFAQYSAAAYCGRNNDAPAGTNITCTGNACPEVERADATFLYSFEDSGVGDVTGFLALDNTNRLIVLSFRGSRSIENWIGNLNFDLKEINDICSGCRGHDGFTSSWRSVADTLRQRVEDAVREHPDYRVVFTGHSLGGALATVAGADLRGNGYDIDVFSYGAPRVGNRAFAEFLTVQTGGTLYRITHTNDIVPRLPPREFGYSHSSPEYWIRSGTLVPVTRNDIVRIEGIDATGGNNQPNIPDIPAHLWYFGLIGKCL

SEQ ID NO: 6871 - protein, 269 aa, Thermomyces lanuginosus
EVSQDLFNQFNLFAQYSAAAYCGKNNDAPAGTNITCTGNACPEVEKADATFLYSFEDSGVGDVTGFLALDNTNKLIVLSFRGSRSIENWIGNLNFDLKEINDICSGCRGHDGFTSSWRSVADTLRQKVEDAVREHPDYRVVFTGHSLGGALATVAGADLRGDGYDIDVFSYGAPRVGNRAFAEFLTVQTGGTLYRITNTNDIVPRLPPREFGYSHSSPEYWIKSGTLPPVRRRDIVKCEGIDATCGNNQPNIPDIPAHLWYFGLIGTCL

SEQ ID NO: 6872 - protein, 269 aa, Thermomyces lanuginosus
EVSQDLFNQFNLFAQYSAAAYCGKNNDAPAGTNITCTGNACPDVEKADATFLYSFEDSGVGDVTGFLALDNTNKLIVLSFRGSRSIKNWIGNLNFLLKPINDICSGCRGHDGFTSSWRSVADTLRQKVEDAVREHPDYRVVFTGHSLGGALATVAGADLRGNGYDIDVFSYGAPRVGNRAFAEFLTVQTGGTLYRITHTNDIVPRLPPREFGYSHSSPEYWIKSGTLVPVRRRDIVKIVGIDATGGNNQPNIPDIPAHLWYFGLIGTCL

SEQ ID NO: 6873 - protein, 269 aa, Thermomyces lanuginosus
EVSQDLFNQFNLFAQYSAAAYCGKNNEAPAGTNITCTGNACPEVEKAQATFLYSFEDMGVGDVTGFLALDNTNKLIVLSFRGSRSIENWIGNLNFDLKEINDICSGCRGHDGFTSSWRSVADTLRQKVEAAVREHPQYRVVFTGHSLGGALATVAGADLRGNPYDIDVFSYGAPRVGNRAFAEFLTVQTGGTLYRITHTNDIVPRLPPREFGYSHSSPEYWIKSGTLVPVTRNDIVKIEGIDATGGNNQPNIPDIPAHLWYFGRIGTCL

SEQ ID NO: 6874 - protein, 269 aa, Thermomyces lanuginosus
EVSQDLFNQFNLFAQYSAAAYCGKNNRAPAGTQITCTGNACPEVEKADATFLYSFEDSGVGDVTGFLALDNTNKLIVLSFRGSRSIENWIGNLNFDLKEINDICSGCRGHDGFTSSWRSVADTLRQKVEDAVREHPDYRVVFTGHSLGGALATVAGADLRGNGYDIDVFSYGAPRVGNRAFAEFLTVQTGGTLYRITHTNDIVPRLPPREFGYSHSSPEYWIKSGTGVPVRRRDIVKIEGIDATGGNNRPNIPSIPAHLWYFGLIGTCL

SEQ ID NO: 6875 - protein, 269 aa, Thermomyces lanuginosus
EVSDDLFNQFKLFAQYSAAAYCGKNNQAPAGTNITCTGNACPEVEKADATFLYSFEDMGVGDVTGFLALDNTNKLIVLSFRGSRSIENWFGNLNFDLKEINDICSGCRGHDGFTSSWRSVADTLRQKVEDAVREHPDYRVVFTGHSLGGALATVAGADLRGNGYDIDVFSYGAPRVGNRAFAEFLTVQTGGTLYRITHTNDIVPRLPPREFGYSHSSPEYWIKSGTLVPVTRQDIVKIEGIDATGGNNQPNIPDITAHLWYFGLIGTCL

SEQ ID NO: 6876 - protein, 269 aa, Thermomyces lanuginosus
EVSQDLFNQFNLFAQYSAAAYCGKNNDAPAGTNITCTGNACPEVEKADATFLYSFEDNGSGDVTGFLALDNTNKLIVLSFRGSRSIENWIGNLNFDLKEINDICSGCRGHDGFTSSWRSVADTLRQKVEDAVREHPDYRVVFTGHSMGGGLATVAGADLRGNGYDIDVFSYGAPRVGNRAFAEFLTVQTGGTLYRITHTNDIVPRLPPRELGYSHSSPEYWIKSGTLVPVRRRDIVKIEGIDATGGNNQPNIPDIPAHLWYFGLIGTCL

SEQ ID NO: 6877 - protein, 269 aa, Thermomyces lanuginosus
EVSQDLFNQFNLFAQYSAAAYCGKNNNAPAGTNITCTGNACPEVEKADATILYSFRDSGVGDVTGFLALDNTNKLIVLSFRGSRSIENWIGNLNFDLIEINDICSGCRGHDGFTSSWFSVADTLRQKVEDAVREHPDYRVVFTGHSLGGALATVAGADLRGNGYDIDVFSYGAPRVGNRAFAEFLTVQTGGTLYRITHTNDIVPRLPPREFGYSHSSPEYWIKSGTLVPVRRRDIVKIEGIDATGGNNQPNIPDIPAHLWYFGLIGTCL

SEQ ID NO: 6878 - protein, 269 aa, Thermomyces lanuginosus
EVSQDLFNQFNLFAQYSAAAYCGKNNDAPAGTNITCTGNACPEVEIADATFLYSFEDNGSGDVTGFLALDNTNKLIVLSFRGSRSIENWIGNLNFDLKEINDICSGCRGHDGFTSSWRSVADTLRQKVEDAVREHPDYRVVFTGHSLGGALATVAGADLRGNGYDIDVFSYGAPRVGNRAFAEFLTVQTGGTLYRITHTNDIVPRLPPREFGYSHSSPEYWIKSGTLVPVRRRDIVKIEGIDATGGNNLPNIPLIPAHLWYFGLIGTCL

SEQ ID NO: 6879 - protein, 269 aa, Thermomyces lanuginosus
EVSQDLFNQFNLFAQYSAAAYCKANNDAPAGTNITCTGNACPEVEKADATFLYSFEDSGVGDVTGFLALDNTNKQIVLSFRGSRSIENWIGNLNFDLKEINDICSGCRGHAGFTSSWRSVADTLRQKVEAAVREHPDYRVVFTGHSLGGALATVAGADLRGNGYDIDVFSYGAPRVGNRAFAEFLTVQQGGTLYRITHTNDIVPRLPPREFGYSHSSPEYWIKSGTLVPVTRNDIVKIEGIDATGGNNQPNIPDIPAHLWYFGRIGTCL

SEQ ID NO: 6880 - protein, 269 aa, Thermomyces lanuginosus
EVSLDLFNQFNLFAQYSAAAYCGKNNDAPAGTNITCTGNACPEVEKADATFLYSFEDNGSGDVTGFLALDNTNKLIVLSFRGSRSIENWIGNLNFDLKEINDICSGCRGHDGFTSSWRSVADTLRQKVEDAVREHPDYRVVFTGHSLGGALATVAGADLRGNGYDIDVFSYGAPRVGNRAFAEFLTVQTGGTLYRITHTNDIVPRLPPREFGYSHSSPEYWIKSGTLVPVRRRDIVKIEGIDATGGNNLPNIPIIPAHLWYFGLIGTCL

SEQ ID NO: 6881 - protein, 269 aa, Thermomyces lanuginosus
EVSQDLFNQFNLFAQYSAAAYCQKNNDAPAGTNITCTGNACPEVEKADATFLYSFKDSGVGDVTGFLALDNTNKRIVLSFRGSRSIENWIGNLNFDLKEINDICSGCRGHAGFTSSWRSVADTLRQKVEAAVREHPDYRVVFTGHSLGGALATVAGADLRGNGYDIDVFSYGAPRVGNRAFAEFLTNQQGGTLYRITHTNDIVPRLPPREFGYSHSSPEYWIKSGTLVPVTRNDIVKIEGIDATGGNNQPNIPDIPAHLWYFGLIGTCL

SEQ ID NO: 6882 - protein, 269 aa, Thermomyces lanuginosus
EVSQDLFNQFNLFAQYSAAAYCGKNNEAPAGTNITCTGNACPEVEKAQATFLYSFEDMGVGDVTGFLALDNTNKLIVLSFRGSRSIENWIGNLNFDLKEINDICSGCRGHDGFTSSWRSVADTLRQKVEDAVREHPQYRVVFTGHSLGGALATVAGADLRGNPYDIDVFSYGAPRVGNRAFAEFLTVQTGGTLYRITHTNDIVPRLPPREFGYSHSSPEYWIKSGTMVPVTRNDIVKIEGIDATGGNNQPNIPDIPAHLWYFGRIGTCL

SEQ ID NO: 6883 - protein, 269 aa, Thermomyces lanuginosus
EVSQDLFNQFNLFAQYSAAAYCKANNDAPAGTNITCTGNACPEVEKADATFLYSFEDSGVGDVTGFLALDNTNKQIVLSFRGSRSIENWIGNLNFDLKEINDICSGCRGHAGFTSSWRSVADTLRQKVEDAVREHPDYRVVFTGHSLGGALATIAWADLRGNGYDIDVFSYGAPRVGNRAFAEFLTNQTGGTLYRITHTNDIVPRLPPREFGYSHSSPEYWIKSGTLVPVTRNDIVKIEGIDATGGNNQPNIPDIPAHLWYFGLIGTCL

SEQ ID NO: 6884 - protein, 269 aa, Thermomyces lanuginosus
EVSQDLFNQFNLFAQYSAAAYCKKNNDAPAGTNITCTGNACPEVEKADATFLYSFEDSGVGDVTGFLALDNTNKQIVLSFRGSRSIENWIGNLNFDLKEINDICSGCRGHAGFTSSWRSVADTLRQKVEDAVREHPDYRVVFTGHSLGGALATIAWADLRGNGYDIDVFSYGAPRVGNRAFAEFLTVQQGGTLYRITHTNDIVPRLPPREFGYSHSSPEYWIKSGTLVPVTRNDIVKIEGIDATGGNNQPNIPDIPAHLWYFGRIGTCL

SEQ ID NO: 6885 - protein, 269 aa, Thermomyces lanuginosus
EVSQDLFNQFRLFAQYSAAAYCGKNNDAPAGTQITCTGNACPEVEKADATFLYSFEDSGVGDVTGFLALDNTNKLIVLSFRGSRSIENWITNLNFDLKEINDICSGCRGHDGFTSSWRSVADTLRQKVEDAVREHPDYRVVFTGHSLGGALATVAGADLRGNAYDIDVFSYGAPRVGNRAFAEFLTVQTGGTLYRITHTNDIVPRLPPREFGYSHSSPEYWIKSGTLVPVRRRDIVKIEGIDATGGNNQPNIPSIPAHLWYFGLIGTCL

SEQ ID NO: 6886 - protein, 269 aa, Thermomyces lanuginosus
EVSQDLFNQFNLFAQYSAAAYCGKNNDAPAGTNITCTGNICPEVEKADATFLYSFRNSGVGDVTGFLALDNTNKLIVLSFRGSRSIENWIGNLNFDLIEINDICSGCRGHDGFTSSWFSVADTLRQKVEDAVREHPDYRVVFTGHSLGGALATVAGADLRGNGYDIDVFSYGAPRVGNRAFAEFLTVQTGGTLYRITHTNDIVPRLPPREFGYSHSSPEYWIKSGTLVPVRRRDIVKIEGIDATGGNNQPNIPDIPAHLWYFGLIGTCL

SEQ ID NO: 6887 - protein, 269 aa, Thermomyces lanuginosus
EVSQDLFNQFNLFAQYSAAAYCGKNNRAPAGTNITCTGNACPEVEKADATFLYSFEDSGVGDVTGFLALDNTNKLIVLSFRGSRSIENWITNLKFDLKEINDICSGCRGHAGFTSSWRSVADTLRQKVEDAVREHPDYRVVFTGHSLGGALATVAGADLRGNGYDIDVFSYGAPRVGNRAFAEFLTVQTGGTLYRITHTNDIVPRLPPREFGYSHPSPEYWIKSGTGVPVTRNDIVKIEGIDATGGNNQPNIPDITAHLWYFGLIGTCL

SEQ ID NO: 6888 - protein, 269 aa, Synthetic construct
EVSQDLFNQFNLFAQYSAAAYCGKNNDAPAGTNITCTGNACPEVEKADATFLYSFEDSGVGDVTGFLALDNTNKLIVLSFRGSRSIENWIGNLKFLLKKINDICSGCRGHDGFTSSWRSVADTLRQKVEDAVREHPDYRVVFTGHSLGGALATVAGADLRGNGYDIDVFSYGAPRVGNRAFAEFLTVQTGGTLYRITHTNDIVPRLPPREFGYSHSSPEYWIKSGTLVPVRRRRIVKIEGIDATGGNNRPNIPDIPAHLWYFGLIGTCL

SEQ ID NO: 6889 - protein, 269 aa, Thermomyces lanuginosus
EVSQDLFNQFNLFAQYSAAAYCGKNNDAPAGTNITCTGNACPEVEKADATFLYSFRDSGVGDVTGFLALDNTNKLIVLSFRGSRSIENWIGNLNFDLIEINDICSGCRGHDGFTSSWFSVADTLRQKVEDAVREHPDYRVVFTGHSLGGALATVAGADLRGNGYDIDVFSYGAPRVGNRAFAEFLTVQTGGTLYRITHTNDIVPRLPPREFGYSHSSPEYWIKSGTLVPVRRRDIVKIEGIDAEGGNNQPNIPDITAHLWYFGLIGTCL

SEQ ID NO: 6890 - protein, 269 aa, Thermomyces lanuginosus
EVSQDLFNQFNLFAQYSAAAYCGKNNDAPAGTNITCTGNACPEVEKADATFLYSFEDNGSGDVTGFLALDNTNKLIVLSFRGSRSIENWIGNLNFDLKEINDICSGCRGHDGFTSSWRSVADTLRQKVEDAVREHPDYRVVFTGHSLGGALATVAGADLRGNGYDIDVFSYGAPRVGNRAFAEFLTVQTGGTLYRITHTNDIVPRLPPREFGYSHSSPEYWIKSGTLVPVRRRDIVKIEGIDATGGNNIPNIPDLKAHLWYFGLIGTCL

SEQ ID NO: 6891 - protein, 269 aa, Thermomyces lanuginosus
EVSQDLFNQFNLFAQYSAAAYCKKNNSAPAGTNITCTGNACPEVEKADATTLYSFEDMGVGDVTGFLALDNTNKQIVLSFRGSRSIENWIGNLNFDLKEINDICSGCRGHDGFTSSWRSVADTLRQKVEAAVREHPDYRVVFTGHSLGGALATVAGADLRGNGYDIDVFSYGAPRVGNRAFAEFLTNQTGGTLYRITHTNDIVPRLPPREFGYSHSSPEYWIKSGTLVPVTRNDIVKIEGIDATGGNNQPNIPDIPAHLWYFGLIGTCL

SEQ ID NO: 6892 - protein, 269 aa, Thermomyces lanuginosus
EVSQDLFNQFNLFAQYSAAAYCGKNNDAPAGTQITCTGNACPEVEKADATFLYSFEDSGVGDVTGFLALDNTNKLIVLSFRGSRSIENWIQNLNFDLKEINDICSGCRGHDGFTSSWRSVADTLRQKVEDAVREHPDYRVVFAGHSLGGALATVAGADLRGNGYDIDVFSYGAPRVGNRAFAEFLTVQTGGTLYRITHTNDIVPRLPPRQFGYSHSSPEYWIKSGTLVPVRRRDIVKIEGIDATGGNNQPNIPDNPAHLWYFGLIGTCL

SEQ ID NO: 6893 - protein, 269 aa, Thermomyces lanuginosus
EVSQDLFNQFNLFAQYSAAAYCGKNNDAPAGTQITCTGNACPEVEKADATFLYSFEDSGVGDVTGFLALDNTNKLIVLSFRGSRSIENWIQNLNFDLKEINDICSGCRGHDGFTSSWRSVADTLRQKVEDAVREHPDYRVVFTGHSLGGALATVAGADLRGNGYDIDVFSYGAPRVGNRAFAEFLTVQTGGTLYRITHTNDIVPRLPPRQFGYSHSSPEYWIKSGTLVPVRRRDIVKIEGIDATGGNNQPNIPDATAHLWYFGLIGTCL

SEQ ID NO: 6894 - protein, 269 aa, Thermomyces lanuginosus
EVSQDLFNQFNLFAQYSAAAYCGKNNRAPAGTNITCTGNACPEVEKADATFLYSFEDSGVGDVTGFLALDNTNKLIVLSFRGSRSIENWITNLSFDLKEINDICSGCRGHAGFTSSWRSVADTLRQKVEDAVREHPDYRVVFTGHSLGGALATVAGADLRGNGYDIDVFSYGAPRVGNRAFAEFLTVQTGGTLYRITHTNDIVPRLPPREFGYSHPSPEYWIKSGTGVPVTRNDIVKIEGIDATGGNNQPNIPDITAHLWYFGLIGTCL

SEQ ID NO: 6895 - protein, 269 aa, Thermomyces lanuginosus
EVSQDLFNQFNLFAQYSAAAYCGKNNDAPAGTNITCTGNACPEVEKADATILYSFEDSGVGDVTGFLALDNTNKLIVLSFRGSRSIENWIGNLNFDLKEINDICSGCRGHDGFTSSWRSVADTLRQKVEDAVREHPDYRVVFAGHSLGGALATVAGADLRGDGYDIDVFSYGAPRVGNRAFAEFLTVQTGGTLYRITNTNDIVPRLPPREFGYSHSSPEYWIKSGTLPPVRRRDIVKIEGIDATGGNNQPNIPDIPAHLWYFGLIGTCL

SEQ ID NO: 6896 - protein, 269 aa, Thermomyces lanuginosus
EVSQDLFNQFNLFAQYSKAAYCKKNNDAPAGTNITCTGNACPEVEKADATFLYSFEDSGVGDVTGFLALDNTNKQIILSFRGSRSIENWIGNLRFDLKEINDICSGCRGHDGFTSSWRSVADTLRQKVEDAVREHPDYRVVFTGHSLGGALATIAWADLRGNGYDIDVFSYGAPRVGNRAFAEFLTVQTGGTLYRITHTNDIVPRLPPREFGYSHSSPEYWIKSGTLVPVTRNDIVKIEGIDATGGNNQPNIPDIPAHLWYFGLIGTCL

SEQ ID NO: 6897 - protein, 269 aa, Thermomyces lanuginosus
EVSQDLFNQFNLFAQYSAAAYCGKNNSAPAGTNITCTGNACPEVEKADATTLYSFEDSGVGDVTGFLALDNTNKGIVLSFRGSRSIENWIQNLNFDLKEINDICSGCRGHDGFTSSWRSVADTLRQKVEDAVREHPDYRVVFTGHSLGGALATVAGADLRGNGYDIDVFSYGAPRVGNRAFAEFLTTQTGGTLYRITHTNDIVPRLPPREFGYSHSSPEYWIKSGTLVPVTRNDIVKIEGIDATGGNNQPNQPDIPAHLWYFGRIGTCL

SEQ ID NO: 6898 - protein, 269 aa, Thermomyces lanuginosus
EVSQDLFNQFNLFAQYSAAAYCGKNNDAPAGTQITCTGNACPEVEKADATFLYSFEDSGVGDVTGFLALDNTNKLIVLSFRGSRSIENWIGNLNFNLKEINDICSGCRGHDGFTSSWRSVADTLRQKVEDAVREHPDYRVVFTGHSLGGALATVARADLRGNGYDIDVFSYGAPRWGNRAFAEFLTVQTGGTLYRITHTNDIVPRLPPREFGYSHSSPEYWIKSGTLVPVRRRDIVKIEGIDATGGNNRPNIPDIPAHLWYFGLIGTCL

SEQ ID NO: 6899 - protein, 269 aa, Thermomyces lanuginosus
EVSQDLFNQFNLFAQYSAAAYCGKNNDAPAGTNITCTGNACPEVEKADATFLYSFRDSGVGDVTGFLALDNTNKLIVLSFRGSRSIENWIGNLNFDLIEINDICSGCRGHDGFTSSWFSVADTLRQKVEDAVREHPDYRVVFTGHSLGGALATVAGADLRGNGYDIDVFSYGAPRVGNRAFAEFLTVQTGGTLYRITHTNDIVPRLPPREFGYSHSSPEFWIKSGTLVPVRRRDIVKIEGIDAEGGNNQPNIPDIPAHLWYFGLIGTCL

SEQ ID NO: 6900 - protein, 269 aa, Thermomyces lanuginosus
EVSVDLFNQFNLFAQYSAAAYCGKNNDAPAGTNITCTGNACPEVEKADATFLYSFEDNGSGDVTGFLALDNTNKLIVLSFRGSRSVENWIGNLNFDLKEINDICSGCRGHDGFTSSWRSVADTLRQKVEDAVREHPDYRVVFTGHSLGGALATVAGADLRGNGYDIDVFSYGAPRVGNRAFAEFLTVQTGGTLYRITHTNDIVPRLPPREFGYSHSSPEYWIKSGTLVPVRRRDIVKIEGIDATGGNNLPNIPDIPAHLWYFGLIGTCL

SEQ ID NO: 6901 - protein, 269 aa, Thermomyces lanuginosus
EVSQDLFNQFNLFAQYSKAAYCGANNDAPAGTNITCTGNACPEVEKADATFLYSFEDSGVGDVTGFLALDNTNKQIILSFRGSRSIENWIGNLRFDLKEINDICSGCRGHDGFTSSWRSVADTLRQKVEAAVREHPDYRVVFTGHSLGGALATVAWADLRGNGYDIDVFSYGAPRVGNRAFAEFLTVQTGGTLYRITHTNDIVPRLPPREFGYSHSSPEYWIKSGTLVPVTRNDIVKIEGIDATGGNNQPNIPDIPAHLWYFGLIGTCL

SEQ ID NO: 6902 - protein, 269 aa, Thermomyces lanuginosus
EVSQDLFNQFNLFAQYSKAAYCKANNDAPAGTNITCTGNACPEVEKADATFLYSFEDSGVGDVTGFLALDNTNKRIVLSFRGSRSIENWIGNLNFDLKEINDICSGCRGHDGFTSSWRSVADTLRQKVEDAVREHPDYRVVFTGHSLGGALATIAWADLRGNGYDIDVFSYGAPRVGNRAFAEFLTQQTGGTLYRITHTNDIVPRLPPREFGYSHSSPEYWIKSGTLVPVTRNDIVKIEGIDATGGNNQPNIPDIPAHLWYFGLIGTCL

SEQ ID NO: 6903 - protein, 269 aa, Thermomyces lanuginosus
EVSQDLFNQFNLFAQYSAAAYCGKNNDAPAGTQITCTGNACPEVEKADATFLYSFEDSGVGDVTGFLALDNTNKLIVLSFRGSRSIENWIQNLNFDLKEINDICSGCRGHDGFTSSWRSVADTLRQKVEDAVREHPDYRVVFAGHSLGGALATVAGADLRGNGYDIDVFSYGAPRVGNRAFAEFLTVQTGGTLYRITHTNDIVPRLPPRQFGYSHSSPEYWIKSGTLVPVRRRDIVKIEGIDATGGNNQPNIPDAPAHLWYFGLIGTCL

SEQ ID NO: 6904 - protein, 269 aa, Thermomyces lanuginosus
EVSQDLFNQFNLFAQYSAAAYCGKNNDAPAGTNITCTGNICPEVEKADATFLYSFRDSGVGDVTGFLALDNTNKLIVLSFRGSRSIENWIGNLNFDLIEINDICSGCRGHDGFTSSWFSVADTLRQKVEDAVREHPDYRVVFTGHSLGGALATVAGADLRGNSYDIDVFSYGAPRVGNRAFAEFLTVQTGGTLYRITHTNDIVPRLPPREFGYSHSSPEYWIKSGTLVPVRRRDIVKIEGIDATGGNNQPNIPDIPAHLWYFGLIGTCL

SEQ ID NO: 6905 - protein, 269 aa, Thermomyces lanuginosus
EVSQDLFNQFNLFAQYSAAAYCGKNNRAPAGTNITCTGNACPEVEKADATFLYSFEDYGVGDVTGFLALDNTNKLIVLSFRGSRSIENWIGNLNFDLKEINDICSGCRGHAGFTSSWRSVADTLRQKVEDAVREHVDYRVVFTGHSLGGALATVAGADLRGNGYDIDVFSYGAPRVGNRAFAEFLTVQTGGTLYRITHTNDIVPRLPPREFGYSHPSPEYWIKSGTGVPVTRNDIVKIEGIDATGGNNQPNIPDITAHLWYFGLIGTCL

SEQ ID NO: 6906 - protein, 269 aa, Thermomyces lanuginosus
EVSRDLFNQFNLFAQYSAAAYCGKNNDAPAGTNITCTGNACPEVEKADATILYSFEDSGVGDVTGFLALDNTNKLIVLSFRGSRSIENWIGNLNFDLKEINDICSGCRGHDGFTSSWRSVADTLRQKVEDAVREHPDYRVVFAGHSLGGALATVAGADLRGDGYDIDVFSYGAPRVGNRAFAEFLTVQTGGTLYRITHTNDIVPRLPPREFGYSHSSPEYWIKSGTLPPVRRRDIVKIEGIDATGGNNQPNIPDIPAHLWYFGLIGTCL

SEQ ID NO: 6907 - protein, 269 aa, Thermomyces lanuginosus
EVSQDLFNQFNLFAQYSAAAYCQKNNDAPAGTNITCTGNACPEVEKADATFLYSFKDSGVGDVTGFLALDNTNKQIVLSFRGSRSIENWIGNLNFDLKEINDICSGCRGHDGFTSSWRSVADTLRQKVEAAVREHPDYRVVFTGHSLGGALATIAWADLRGNGYDIDVFSYGAPRVGNRAFAEFLTVQQGGTLYRITHTNDIVPRLPPREFGYSHSSPEYWIKSGTLVPVTRNDIVKIEGIDATGGNNQPNIPDIPAHLWYFGLIGTCL

SEQ ID NO: 6908 - protein, 269 aa, Thermomyces lanuginosus
EVSQDLFNQFNLFAQYSKAAYCQKNNDAPAGTNITCTGNACPEVFKADATFLYSFEDSGVGDVTGFLALDNTNKQIVLSFRGSRSIENWIGNLNFDLKEINDICSGCRGHDGFTSSWRSVADTLRQKVEDAVREHPDYRVVFTGHSLGGALATVAWADLRGNGYDIDVFSYGAPRVGNRAFAEFLTTQDGGTLYRITHTNDIVPRLPPREFGYSHSSPEYWIKSGTLVPVTRNDIVKIEGIDATGGNNQPNIPDIPAHLWYFGLIGTCL

SEQ ID NO: 6909 - protein, 269 aa, Thermomyces lanuginosus
EVSQDLFNQFNLFAQYSAAAYCGKNNDAPAGTQITCTGNACPEVEKADATFLYSFEDSGVGDVTGFLALDNTNKLIVLSFRGSRSIENWIQNLNFDLKEINDICSGCRGHDGFTSSWRSVADTLRQKVEDAVREHPDYRVVFAGHSLGGALATVAGADLRGNGYDIDVFSYGAPRVGNRAFAEFLTVQTGGTLYRITHTNDIVPRLPPRQFGYSHSSPEYWIKSGTLVPVRRRDIVKIEGIDATGGNNQPNIPDGPAHLWYFGLIGTCL

SEQ ID NO: 6910 - protein, 269 aa, Thermomyces lanuginosus
EVSQDLFNQFNLFAQYSAAAYCGKNNRAPAGTKITCTCNACPEVEKADATFLYSFEDSGVGDVTGFLALDNTNKLIVLSFRGSRSIENWIGNLNFRLKEINDICSGCRGHAGFTSSWRSVADTLRQKVEDAVREHPDYRVVFTGHSLGGALATVAGADLRGNGYDIDVFSYGAPRVGNRAFAEFLTVQTGGTLYRITHTNDIVPRLPPREFGYSHSSPEYWIKSGTLVPVERRDIVKIEGIDATGGNNQPNIPDIPAHLWYFGLIGTCL

SEQ ID NO: 6911 - protein, 269 aa, Synthetic construct
EGTQDLFNQFNLFAQYSAAAYCGKNNDAPAGTNITCTGNACPEVEKADATFLYSFEGSGVGDVTGFLALDNTNKLIVLSFRGSRSIENWIGNLKFLMKEINDICSGCRGHDGFTSSWRSVADTLRQKVEDAVREHPDYRVVFTGHSLGGALATVAGADLRGNGYDIDVFSYGAPRVGNRAFAEFLTVQTGGTLYRITHTNDIVPRLPPREFGYSHSSPEYWIKSGTLVPVTRNDIVKIEGIDATGGNNRPNIPDIPAHLWYFGLIGTCL

SEQ ID NO: 6912 - protein, 269 aa, Thermomyces lanuginosus
EVSQDLFNQFNLFAQYSKAAYCQANNDAPAGTNITCTGNACPEVEKADATFLYSFEDSGVGDVTGFLALDNTNKRIVLSFRGSRSIENWIGNLRFDLKEINDICSGCRGHDGFTSSWRSVADTLRQKVEDAVREHPDYRVVFTGHSLGGALATVAWADLRGNGYDIDVFSYGAPRVGNRAFAEFLTNQTGGTLYRITHTNDIVPRLPPREFGYSHSSPEYWIKSGTLVPVTRNDIVKIEGIDATGGNNQPNIPDIPAHLWYFGLIGTCL

SEQ ID NO: 6913 - protein, 269 aa, Thermomyces lanuginosus
EVSQDLFNQFNLFAQYSKAAYCKANNDAPAGTNITCTGNACPEVEKADATFLYSFEDSGVGDVTGFLALDNTNKRIVLSFRGSRSIENWIGNLRFDLKEINDICSGCRGHDGFTSSWRSVADTLRQKVEAAVREHPDYRVVFTGHSLGGALATIAGADLRGNGYDIDVFSYGAPRVGNRAFAEFLTVQTGGTLYRITHTNDIVPRLPPREFGYSHSSPEYWIKSGTLVPVTRNDIVKIEGIDATGGNNQPNIPDIPAHLWYFGLIGTCL

SEQ ID NO: 6914 - protein, 269 aa, Thermomyces lanuginosus
EVSQDLFNQFNLFAQYSAAAYCGKNNVAPAGTQITCTGNACPEVEKADATFLYSFEDSGSGDVTGFLALDNTNKLIVLSFRGSRSIENWIGNLNFWLKEINDICSGCRGHDGFTSSWRSVADTLRQKVEDAVREHPDYRVVFTGHSLGGALATVAGADLRGNGYDIDVFSYGAPRVGNRAFAEFLTVQTGGTLYRITHTNDIVPRLPPREFGYSHSSPEYWIKSGTLVPVRRRDIVKIEGIDATGGNNRPNIPDIPAHLWYFGLIGTCL

SEQ ID NO: 6915 - protein, 269 aa, Thermomyces lanuginosus
EVSQDLFNQFNLFAQYSAAAYCSKNNNAPAGTNITCTGNICPEVEKADATFLYSFRDSGVGDVTGFLALDNTNKLIVLSFRGSRSIENWIGNLNFDLKEINDICSGCRGHDGFTSSWFSVADTLRQKVEDAVREHPDYRVVFTGHSLGGALATVAGADLRGNGYDIDVFSYGAPRVGNRAFAEFLTVQTGGTLYRITHTNDIVPRLPPREFGYSHSSPEYWIKSGTLVPVRRRDIVKIEGIDATGGNNQPNIPDIPAHLWYFGLIGTCL

SEQ ID NO: 6916 - protein, 269 aa, Thermomyces lanuginosus
EVSQDLFNQFNLFAQYSKAAYCQANNDAPAGTNITCTGNACPEVEKADATFLYSFEDSGVGDVTGFLALDNTNKQIILSFRGSRSIENWIGNLRFDLKEINDICSGCRGHDGFTSSWRSVADTLRQKVEDAVREHPDYRVVFTGHSLGGALATIAGADLRGNGYDIDVFSYGAPRVGNRAFAEFLTVQTGGTLYRITHTNDIVPRLPPREFGYSHSSPEYWIKSGTLVPVTRNDIVKIEGIDATGGNNQPNIPDIPAHLWYFGLIGTCL

SEQ ID NO: 6917 - protein, 269 aa, Thermomyces lanuginosus
EVSQDLFNQFKLFAQYSAAAYCGKNNSAPAGTNITCTGNACPEVEKADATFLYSFEDSGVGDVTGFLALDNTNKLIVLSFRGSRSIENWIGNLNFDLKEINDICSGCRGHAGFTSSWRSVADTLRQKVEAAVREHPDYRVVFTGHSLGGALATIAGADLRGNGYDIDVFSYGAPRVGNRAFAEFLTNQQGGTLYRITHTNDIVPRLPPREFGYSHSSPEYWIKSGTLVPVTRNDIVKIEGIDATGGNNQPNIPDIPAHLWYFGLIGTCL

SEQ ID NO: 6918 - protein, 269 aa, Thermomyces lanuginosus
EVSQDLFNQFNLFAQYSAAAYCGKNNQAPAGTNITCTGNACPEVEKADATFLYSFEDSGVGDVTGFLALDNTNKGIVLSFRGSRSIENWIQNLNFDLKEINDICSGCRGHDGFTSSWRSVADTLRQKVEAAVREHPDYRVVFTGHSLGGALATVAGADLRGNGYDIDVFSYGAPRVGNRAFAEFLTHQTGGTLYRITHTNDIVPRLPPREFGYSHSSPEYWIKSGTLVPVTRNDIVKIEGIDATGGNNQPNQPDIPAHLWYFGRIGTCL

SEQ ID NO: 6919 - protein, 269 aa, Thermomyces lanuginosus
EVSQDLFNQFNLFAQYSAAAYCGKNNRAPAGTNITCTGNACPEVEKADATFLYSFEDSGVGDVTGFLALDNTNKLIVLSFRGSRSIENWVSNLNFDLKEINDICSGCRGHAGFTSSWRSVADTLRQKVEDAVREHPDYRVVFTGHSLGGALATVAGADLRGNGYDIDVFSYGAPRVGNRAFAEFLTVQTGGTLYRITHTNDIVPRLPPREFGYSHPSPEYWIKSGTGVPVTRNDIVKIEGIDATGGNNQPNIPDITAHLWYFGLIGTCL

SEQ ID NO: 6920 - protein, 269 aa, Thermomyces lanuginosus
EVSQDLFNQFNLFAQYSAAAYCGKNNNAPAGTNITCTGNACPEVEKADATFLYSFRDSGVGDVTGFLALDNTNKLIVLSFRGSRSIENWIGNLNFDLIEINDICSGCRGHDGFTSSWFSVADTLRQKVEDAVREHPDYRVVFTGHSLGGALATVAGADLRGNGYDIDVFSYGAPRVGNRAFAEFLTVQTGGTLYRITHTNDIVPRLPPREFGYSHSSPEYWIKSGTLVPVRRRDIVKIEGIDAEGGNNQPNIPDIPAHLWYFGLIGTCL

SEQ ID NO: 6921 - protein, 269 aa, Thermomyces lanuginosus
EVSQDLFNQFKLFAQYSAAAYCKKNNDAPAGTNITCTGNACPEVEKADATFLYSFEDSGVGDVTGFLALDNTNKQIVLSFRGSRSIENWIGNLNFDLKEINDICSGCRGHAGFTSSWRSVADTLRQKVEAAVREHPDYRVVFTGHSLGGALATIAGADLRGNGYDIDVFSYGAPRVGNRAFAEFLTNQTGGTLYRITHTNDIVPRLPPREFGYSHSSPEYWIKSGTLVPVTRNDIVKIEGIDATGGNNQPNIPDIPAHLWYFGLIGTCL

SEQ ID NO: 6922 - protein, 269 aa, Thermomyces lanuginosus
EVSQDLFNQFNLFAQYSAAAYCGKNNEAPAGTNITCTGNACPEVEKADATFLYSFEDMGVGDVTGFLALDNTNKLIVLSFRGSRSIENWIGNLNFDLKEINDICSGCRGHDGFTSSWRSVADTLRQKVEAAVREHPDYRVVFTGHSLGGALATVAGADLRGNPYDIDVFSYGAPRVGNRAFAEFLTVQTGGTLYRITHTNDIVPRLPPREFGYSHSSPEYWIKSGTMVPVTRQDIVKIEGIDATGGNNQPNIPDIPAHLWYFGRIGTCL

SEQ ID NO: 6923 - protein, 269 aa, Thermomyces lanuginosus
EVSQDLFNQFNLFAQYSAAAYCGKNNNAPAGTNITCTGNICPEVEKADATFLYSFRDSGVGDVTGFLALDNTNKLIVLSFRGSRSIENWIGNLNFDLKEINDICSGCRGHDGFTSSWFSVADTLRQKVEDAVREHPDYRVVFTGHSLGGALATVAGADLRGNGYDIDVFSYGAPRVGNRAFAEFLTVQTGGTLYRITHTNDIVPRLPPREFGYSHSSPEYWIKSGTLVPVRRRDIVKIEGIDATGGNNQPNIPDITAHLWYFGLIGTCL

SEQ ID NO: 6924 - protein, 269 aa, Thermomyces lanuginosus
EVSQDLFNQFNLFAQYSAAAYCQKNNDAPAGTNITCTGNACPEVEKADATTLYSFKDSGVGDVTGFLALDNTNKRIVLSFRGSRSIENWIQNLNFDLKEINDICSGCRGHDGFTSSWRSVADTLRQKVEDAVREHPDYRVVFTGHSLGGALATVAGADLRGNGYDIDVFSYGAPRVGNRAFAEFLTHQTGGTLYRITHTNDIVPRLPPREFGYSHSSPEYWIKSGTLVPVTRNDIVKIEGIDATGGNNQPNQPDIPAHLWYFGLIGTCL

SEQ ID NO: 6925 - protein, 269 aa, Thermomyces lanuginosus
EVSQDLFNQFNLFAQYSAAAYCQKNNDAPAGTNITCTGNACPEVEKADATFLYSFKDSGVGDVTGFLALDNTNKQIVLSFRGSRSIENWIGNLNFDLKEINDICSGCRGHAGFTSSWRSVADTLRQKVEDAVREHPDYRVVFTGHSLGGALATVAWADLRGNGYDIDVFSYGAPRVGNRAFAEFLTNQTGGTLYRITHTNDIVPRLPPREFGYSHSSPEYWIKSGTLVPVTRNDIVKIEGIDATGGNNQPNIPDIPAHLWYFGRIGTCL

SEQ ID NO: 6926 - protein, 269 aa, Thermomyces lanuginosus
EVSDDLFNQFKLFAQYSAAAYCGKNNNAPAGTNITCTGNACPEVEKADATFLYSFEDMGVGDVTGFLALDNTNKLIVLSFRGSRSIENWPGNLNFDLKEINDICSGCRGHDGFTSSWRSVADTLRQKVEDAVREHPDYRVVFTGHSLGGALATVAGADLRGNGYDIDVFSYGAPRVGNRAFAEFLTVQTGGTLYRITHTNDIVPRLPPREFGYSHSSPEYWIKSGTLVPVTRQDIVKIEGIDATGGNNQPNIPDITAHLWYFGLIGTCL

SEQ ID NO: 6927 - protein, 269 aa, Thermomyces lanuginosus
EVSQELFNQFNLFAQYSAAAYCGKNNDAPAGTQITCTGNACPEVEKADATFLYSFEDSGVGDVTGFLALDNTNKLIVLSFRGSRSIENWIGNLNFDLKEINDICSGCRGHDGFTSSLRSVADTLRQKVEDAVREHPDYRVVFTGHSLGGALATVAGADLRGNGYDIDVFSYGAPRVGNRAFAEFLTVQTGGTLYRITHTNDIVPRLPPREFGYSHSSPEYWIKSGTGVPVRRRDIVKIEGIDATGGNNRPNIPDIPAHLWYFGLIGTCL

SEQ ID NO: 6928 - protein, 269 aa, Thermomyces lanuginosus
EVSQDLFNQFNLFAQYSAAAYCGKNNEAPAGTNITCTGNACPEVEKAQATFLYSFEDMGVGDVTGFLALDNTNKLIVLSFRGSRSIENWIGNLNFDLKEINDICSGCRGHDGFTSSWRSVADTLRQKVEAAVREHPDYRVVFTGHSLGGALATVAGADLRGNPYDIDVFSYGAPRVGNRAFAEFLTVQTGGTLYRITHTNDIVPRLPPREFGYSHSSPEYWIKSGTLVPVTRQDIVKIEGIDATGGNNQPNIPDIPAHLWYFGRIGTCL

SEQ ID NO: 6929 - protein, 269 aa, Thermomyces lanuginosus
EVSQDLFNQFNLFAQYSAAAYCGKNNDAPAGTNITCTGNACPEVEKADATFLYSFEDSGVGDVTGFLALDNTNKLIVLSFRGSRSIKNWIDNLNFLLKEINDICSGCRGHDGFTSSWRSVADTLRQKVEDAVREHPDYRVVFTGHSLGGALATVAGADLRGNGYDIDVFSYGAPRVGNRAFAEFLTVQTGGTLYRITHTNDIVPRLPPREFGYSHSSPEYWIKSPTLVPVRRRDIVKIEGIDATGGNNQPDIPDIPAHLWYFGLIGTCL

SEQ ID NO: 6930 - protein, 269 aa, Thermomyces lanuginosus
EVSQDLFNQFNLFAQYSAAAYCQKNNDAPAGTNITCTGNACPEVEKADATFLYSFEDSGVGDVTGFLALDNTNKQIVLSFRGSRSIENWIGNLNFDLKEINDICSGCRGHDGFTSSWRSVADTLRQKVEAAVREHPDYRVVFTGHSLGGALATIAWADLRGNGYDIDVFSYGAPRVGNRAFAEFLTVQQGGTLYRITHTNDIVPRLPPREFGYSHSSPEYWIKSGTLVPVTRNDIVKIEGIDATGGNNQPNIPDIPAHLWYFGRIGTCL

SEQ ID NO: 6931 - protein, 269 aa, Thermomyces lanuginosus
EVSQDLFNQFNLFAQYSAAAYCQKNNDAPAGTNITCTGNACPEVEKADATFLYSFEDMGVGDVTGFLALDNTNKGIVLSFRGSRSIENWIQNLNFDLKEINDICSGCRGHDGFTSSWRSVADTLRQKVEAAVREHPDYRVVFTGHSLGGALATVAGADLRGNGYDIDVFSYGAPRVGNRAFAEFLTVQTGGTLYRITHTNDIVPRLPPREFGYSHSSPEYWIKSGTLVPVTRNDIVKIEGIDATGGNNQPNQPDIPAHLWYFGRIGTCL

SEQ ID NO: 6932 - protein, 269 aa, Thermomyces lanuginosus
EVSQDLFNQFNLFAQYSAAAYCGKNNDAPAGTQITCTGNACPEVEKADATFLYSFEDSGVGDVTGFLALDNTNKLIVLSFRGSRSIENWIQNLNFDLKEINDICSGCRGHDGFTSSWRSVADTLRQKVEDAVREHPDYRVVFTGHSLGGGLATVAGADLRGNGYDIDVFSYGAPRVGNRAFAEFLTVQTGGTLYRITHTNDIVPRLPPRQFGYSHSSPEYWIKSGTLVPVRRRDIVKIEGIDATGGNNQPNIPDAPAHLWYFGLIGTCL

SEQ ID NO: 6933 - protein, 269 aa, Thermomyces lanuginosus
EVSQDLFNQFNLFAQYSAAAYCGKNNDAPAGTNITCTGNACPEVEKADATILYSFEDSGVGDVTGFLALDNTNKLIVLSFRGSRSIENWIGNLNFDLKEINDICSGCRGHDGFTSSWRSVADTLRQKVEDAVREHPDYRVVFTGHSLGGALATVAGADLRGNGYDIDVFSYGAPRVGNRAFAEFLTVQTGGTLYRITNTNDIVPRLPPREFGYSHSSPEYWIKSGTLPPVRRRDIVKCEGIDATCGNNQPNIPDIPAHLWYFGLIGTCL

SEQ ID NO: 6934 - protein, 269 aa, Thermomyces lanuginosus
EVSQDLFNQFRLFAQYSAAAYCGKNNDAPAGTQITCTGNACPEVEKADATFLYSFEDSGVGDVTGFLALDNTNKLIVLSFRGSRSIENWLGNLNFDLKEINDICSGCRGHDGFTSSWRSVADTLRQKVEDAVREHPDYRVVFTGHSLGGALATVAGADLRGNLYDIDVFSYGAPRVGNRAFAEFLTVQTGGTLYRITHTNDIVPRLPPREFGYSHSSPEYWIKSGTLVPVRRRDIVKIEGIDATGGNNQPNIPSIPAHLWYFGLIGTCL

SEQ ID NO: 6935 - protein, 269 aa, Thermomyces lanuginosus
EVSQDLFNQFNLFAQYSAAAYCGKNNSAPAGTNITCTGNACPEVEKADATFLYSFEDSGVGDVTGFLALDNTNKRIVLSFRGSRSIENWIGNLNFDLKEINDICSGCRGHDGFTSSWRSVADTLRQKVEDAVREHPDYRVVFTGHSLGGALATIAWADLRGNGYDIDVFSYGAPRVGNRAFAEFLTNQQGGTLYRITHTNDIVPRLPPREFGYSHSSPEYWIKSGTLVPVTRNDIVKIEGIDATGGNNQPNIPDIPAHLWYFGRIGTCL

SEQ ID NO: 6936 - protein, 269 aa, Thermomyces lanuginosus
EVSQDLFNQFNLFAQYSKAAYCGKNNDAPAGTNITCTGNACPEVEKADATFLYSFEDSGVGDVTGFLALDNTNKQIVLSFRGSRSIENWIGNLNFDLKEINDICSGCRGHAGFTSSWRSVADTLRQKVEDAVREHPDYRVVFTGHSLGGALATIAGADLRGNGYDIDVFSYGAPRVGNRAFAEFLTTQQGGTLYRITHTNDIVPRLPPREFGYSHSSPEYWIKSGTLVPVTRNDIVKIEGIDATGGNNQPNIPDIPAHLWYFGRIGTCL

SEQ ID NO: 6937 - protein, 269 aa, Thermomyces lanuginosus
EVSQDLFNQFNLFAQYSAAAYCGKNNRAPAGTNITCTGNACPEVEKADATFLYSFEDSGVGDVTGFLALDNTNKLIVLSFRGSRSIENWIGNLNFDLKEINDICSGCRGHAGFTSSWRSVADTLRQKVEDAVREHPDYRVVFTGHSLGGALATVAGADLRGNKYDIDVFSYGAPRVGNRAFAEFLTVQTGGTLYRITHTNDIVPRLPPREFGYSHSSPEYWIKSGTLVPVRRRDIVKIEGIDATGGNNQPNIPSITAHLWYFGLIGTCL

SEQ ID NO: 6938 - protein, 269 aa, Thermomyces lanuginosus
EVSQDLFNQFNLFAQYSKAAYCKQNNDAPAGTNITCTGNACPEVEKADATFLYSFEDSGVGDVTGFLALDNTNKQIVLSFRGSRSIENWIGNLRFDLKEINDICSGCRGHDGFTSSWRSVADTLRQKVEDAVREHPDYRVVFTGHSLGGALATIAGADLRGNGYDIDVFSYGAPRVGNRAFAEFLTQQTGGTLYRITHTNDIVPRLPPREFGYSHSSPEYWIKSGTLVPVTRNDIVKIEGIDATGGNNQPNIPDIPAHLWYFGLIGTCL

SEQ ID NO: 6939 - protein, 269 aa, Thermomyces lanuginosus
EVSQDLFNQFNLFAQYSAAAYCKKNNDAPAGTNITCTGNACPEVEKADATFLYSFEDSGVGDVTGFLALDNTNKRIVLSFRGSRSIENWIGNLRFDLKEINDICSGCRGHDGFTSSWRSVADTLRQKVEDAVREHPDYRVVFTGHSLGGALATIAWADLRGNGYDIDVFSYGAPRVGNRAFAEFLTNQTGGTLYRITHTNDIVPRLPPREFGYSHSSPEYWIKSGTLVPVTRNDIVKIEGIDATGGNNQPNIPDIPAHLWYFGRIGTCL

SEQ ID NO: 6940 - protein, 269 aa, Thermomyces lanuginosus
EVSRDLFNQFNLFAQYSAAAYCGKNNDAPAGTNITCTGNACPEVEKADATILYSFEDSGVGDVTGFLALDNTNKLIVLSFRGSRSIENWIGNLNFDLKEINDICSGCRGHDGFTSSWRSVADTLRQKVEDAVREHPDYRVVFTGHSLGGALATVAGADLRGDGYDIDVFSYGAPRVGNRAFAEFLTVQTGGTLYRITSTNDIVPRLPPREFGYSHSSPEYWIKSGTLPPVRRRDIVKIEGIDATGGNNQPNIPDIPAHLWYFGLIGTCL

SEQ ID NO: 6941 - protein, 269 aa, Thermomyces lanuginosus
EVSQDLFNQFNLFAQYSAAAYCGKNNNAPAGTQITCTGNACPEVEKADATFLYSFEDSGVGDVTGFLALDNTNKLIVLSFRGSRSIENWITNLNFDLKEINDICSGCRGHDGFTSSWRSVADTLRQKVEDAVREHPDYRVVFTGHSLGGALATVAGADLRGNKYDIDVFSYGAPRVGNRAFAEFLTVQTGGTLYRITHTNDIVPRLPPREFGYSHSSPEYWIKSGTLVPVRRRDIVKIEGIDATGGNNQPNIPSIPAHLWYFGLIGTCL

SEQ ID NO: 6942 - protein, 269 aa, Thermomyces lanuginosus
EVSQDLFNQFNLFAQYSAAAYCGKNNDAPAGTNITCTGNACPEVEKAQATFLYSFEDMGVGDVTGFLALDNTNKLIVLSFRGSRSIENWIGNLNFDLKEINDICSGCRGHDGFTSSWRSVADTLRQKVEDAVREHPQYRVVFTGHSLGGALATVAGADLRGNPYDIDVFSYGAPRVGNRAFAEFLTVQTGGTLYRITHTNDIVPRLPPREFGYSHSSPEYWIKSGTMVPVTRQDIVKIEGIDATGGNNQPNIPDIPAHLWYFGRIGTCL

SEQ ID NO: 6943 - protein, 269 aa, Thermomyces lanuginosus
EVSQDLFNQFNLFAQYSAAAYCGANNDAPAGTNITCTGNACPEVEKADATFLYSFEDSGVGDVTGFLALDNTNKRIVLSFRGSRSIENWIGNLNFDLKEINDICSGCRGHDGFTSSWRSVADTLRQKVEAAVREHPDYRVVFTGHSLGGALATIAWADLRGNGYDIDVFSYGAPRVGNRAFAEFLTVQQGGTLYRITHTNDIVPRLPPREFGYSHSSPEYWIKSGTLVPVTRNDIVKIEGIDATGGNNQPNIPDIPAHLWYFGRIGTCL

SEQ ID NO: 6944 - protein, 269 aa, Thermomyces lanuginosus
EVSDDLFNQFNLFAQYSAAAYCGKNNNAPAGTNITCTGNACPEVEKADATFLYSFKDMGVGDVTGFLALDNTNKLIVLSFRGSRSIENWFGNLNFDLKEINDICSGCRGHDGFTSSWRSVADTLRQKVEDAVREHPDYRVVFTGHSLGGALATVAGADLRGNGYDIDVFSYGAPRVGNRAFAEFLTVQTGGTLYRITHTNDIVPRLPPREFGYSHSSPEYWIKSGTLVPVTRQDIVKIEGIDATGGNNQPNIPDITAHLWYFGLIGTCL

SEQ ID NO: 6945 - protein, 269 aa, Thermomyces lanuginosus
EVSRDLFNQFNLFAQYSAAAYCGKNNDAPAGTNITCTGNACPEVEKADATILYSFEDSGVGDVTGFLALDNTNKLIVLSFRGSRSIENWIGNLNFDLKEINDICSGCRGHDGFTSSWRSVADTLRQKVEDAVREHPDYRVVFTGHSLGGALATVAGADLRGDGYDIDVFSYGAPRVGNRAFAEFLTVQTGGTLYRITNTNDIVPRLPPREFGYSHSSPEYWIKSGTLPPVRRRDIVKIEGIDATGGNNQPNIPDIPAHLWYFGLIGTCL

SEQ ID NO: 6946 - protein, 269 aa, Thermomyces lanuginosus
EVSQDLFNQFNLFAQYSAAAYCGKNNDAPAGTNITCTGNACPDVEKADATFLYSFAASGVGDVTGFLALDNTNKLIVLSFRGSRSIKNWIGNLNFDLKEINDICSGCRGHAGFTSSWRSVADTLRQKVEDAVREHPDYRVVFTGHSLGGALATVAGADLRGNGYDIDVFSYGAPRVGNRAFAEFLTVQTGGTLYRITHTNDIVPRLPPREFGYSHSSPEYWIKSGTLVPVRRRDIVKIEGIDATGGNNQPNIPDIPAHLWYFGLIGTCL

SEQ ID NO: 6947 - protein, 269 aa, Thermomyces lanuginosus
EVSQDLFNQFNLFAQYSAAAYCSKNNDAPAGTNITCTGNACPEVEKADATFLYSFRDSGVGDVTGFLALDNTNKLIVLSFRGSRSIENWIGNLNFDLIEINDICSGCRGHDGFTSSWFSVADTLRQKVEDAVREHPDYRVVFTGHSLGGALATVAGADLRGNGYDIDVFSYGAPRVGNRAFAEFLTVQTGGTLYRITHTNDIVPRLPPREFGYSHSSPEYWIKSGTLVPVRRRDIVKIEGIDAEGGNNQPNIPDIPAHLWYFGLIGTCL

SEQ ID NO: 6948 - protein, 269 aa, Thermomyces lanuginosus
EVSQDLFNQFNLFAQYSKAAYCGANNDAPAGTNITCTGNACPEVEKADATFLYSFEDSGVGDVTGFLALDNTNKQIVLSFRGSRSIENWIGNLNFDLKEINDICSGCRGHDGFTSSWRSVADTLRQKVEAAVREHPDYRVVFTGHSLGGALATIAWADLRGNGYDIDVFSYGAPRVGNRAFAEFLTTQTGGTLYRITHTNDIVPRLPPREFGYSHSSPEYWIKSGTLVPVTRNDIVKIEGIDATGGNNQPNIPDIPAHLWYFGLIGTCL

SEQ ID NO: 6949 - protein, 269 aa, Thermomyces lanuginosus
EVSQDLFNQFNLFAQYSAAAYCQKNNDAPAGTNITCTGNACPEVEKADATFLYSFEDSGVGDVTGFLALDNTNKQIILSFRGSRSIENWIGNLRFDLKEINDICSGCRGHDGFTSSWRSVADTLRQKVEAAVREHPDYRVVFTGHSLGGALATVAWADLRGNGYDIDVFSYGAPRVGNRAFAEFLTQQTGGTLYRITHTNDIVPRLPPREFGYSHSSPEYWIKSGTLVPVTRNDIVKIEGIDATGGNNQPNIPDIPAHLWYFGLIGTCL

SEQ ID NO: 6950 - protein, 269 aa, Thermomyces lanuginosus
EVSQDLFNQFNLFAQYSAAAYCGKNNNAPAGTNITCTGNACPEVEKADATFLYSFRDSGVGDVTGFLALDNTNKLIVLSFRGSRSIENWIGNLNFDLKEINDICSGCRGHDGFTSSWFSVADTLRQKVEDAVREHPDYRVVFTGHSLGGALATVAGADLRGNGYDIDVFSYGAPRVGNRAFAEFLTVQTGGTLYRITHTNDIVPRLPPREFGYSHSSPEFWIKSGTLVPVRRRDIVKIEGIDATGGNNQPNIPDITAHLWYFGLIGTCL

SEQ ID NO: 6951 - protein, 269 aa, Thermomyces lanuginosus
EVSQDLFNQFNLFAQYSAAAYCGRNNDAPAGTNITCTGNACPEVEKADATFLYSFEDSGVGDVTGFLALDNTNRLIVLSFRGSRSIENWIGNLNFDLREINDICSGCRGHDGFTSSWRSVADTLRQRVEDAVREHPDYRVVFTGHSLGGALATVAGADLRGNGYDIDVFSYGAPKVGNRAFAEFLTVQTGGTLYRITHTNDIVPRLPPREFGYSHSSPEYWIRSGTLVPVTRNDIVRIEGIDATGGNNQPNIPDIPAHLWYFGLIGTCL

SEQ ID NO: 6952 - protein, 269 aa, Thermomyces lanuginosus
EVSQDLFNQFNLFAQYSKAAYCGANNDAPAGTNITCTGNACPEVEKADATFLYSFEDSGVGDVTGFLALDNTNKQIVLSFRGSRSIENWIGNLNFDLKEINDICSGCRGHDGFTSSWRSVADTLRQKVEAAVREHPDYRVVFTGHSLGGALATVAWADLRGNGYDIDVFSYGAPRVGNRAFAEFLTTQQGGTLYRITHTNDIVPRLPPREFGYSHSSPEYWIKSGTLVPVTRNDIVKIEGIDATGGNNQPNIPDIPAHLWYFGLIGTCL

SEQ ID NO: 6953 - protein, 269 aa, Thermomyces lanuginosus
EVSQDLFNQFNLFAQYSAAAYCKKNNDAPAGTNITCTGNACPEVEKADATFLYSFEDSGVGDVTGFLALDNTNKQIVLSFRGSRSIENWIGNLNFDLKEINDICSGCRGHDGFTSSWRSVADTLRQKVEAAVREHPDYRVVFTGHSLGGALATIAGADLRGNGYDIDVFSYGAPRVGNRAFAEFLTNQQGGTLYRITHTNDIVPRLPPREFGYSHSSPEYWIKSGTLVPVTRNDIVKIEGIDATGGNNQPNIPDIPAHLWYFGRIGTCL

SEQ ID NO: 6954 - protein, 269 aa, Thermomyces lanuginosus
EVSQDLFNQFNLFAQYSKAAYCQANNDAPAGTNITCTGNACPEVEKADATFLYSFEDSGVGDVTGFLALDNTNKQIILSFRGSRSIENWIGNLNFDLKEINDICSGCRGHDGFTSSWRSVADTLRQKVEAAVREHPDYRVVFTGHSLGGALATVAWADLRGNGYDIDVFSYGAPRVGNRAFAEFLTVQTGGTLYRITHTNDIVPRLPPREFGYSHSSPEYWIKSGTLVPVTRNDIVKIEGIDATGGNNQPNIPDIPAHLWYFGLIGTCL

SEQ ID NO: 6955 - protein, 269 aa, Thermomyces lanuginosus
EVSQDLFNQFNLFAQYSAAAYCQKNNDAPAGTNITCTGNACPEVEKADATTLYSFEDSGVGDVTGFLALDNTNKLIVLSFRGSRSIENWIQNLNFDLKEINDICSGCRGHDGFTSSWRSVADTLRQKVEAAVREHPDYRVVFTGHSLGGALATVAGADLRGNGYDIDVFSYGAPRVGNRAFAEFLTHQTGGTLYRITHTNDIVPRLPPREFGYSHSSPEYWIKSGTLVPVTRNDIVKIEGIDATGGNNQPNQPDIPAHLWYFGRIGTCL

SEQ ID NO: 6956 - protein, 269 aa, Thermomyces lanuginosus
EVSQDLFNQFNLFAQYSAAAYCGKNNDAPAGTNITCTGNACPEVEKADATFLYSFEDNGSGDVTGFLALDNTNKLIVLSFRGSRSTENWIGNLNFDLKEINDICSGCRGHDGFTSSWRSVADTLRQKVEDAVREHPDYRVVFTGHSLGGALATVAGADLRGNGYDIDVFSYGAPRVGNRAFAEFLTVQTGGTLYRITHTNDIVPRLPPREFGYSHSSPEYWIKSGTGVPVRRRDIVKIEGIDATGGNNQPNIPDILAHLWYFGLIGTCL

SEQ ID NO: 6957 - protein, 269 aa, Thermomyces lanuginosus
EVSQDLFNQFNLFAQYSAAAYCQKNNSAPAGTNITCTGNACPEVEKADATTLYSFKDSGVGDVTGFLALDNTNKLIVLSFRGSRSIENWIGNLNFDLKEINDICSGCRGHDGFTSSWRSVADTLRQKVEAAVREHPDYRVVFTGHSLGGALATVAGADLRGNGYDIDVFSYGAPRVGNRAFAEFLTVQTGGTLYRITHTNDIVPRLPPREFGYSHSSPEYWIKSGTLVPVTRNDIVKIEGIDATGGNNQPNQPDIPAHLWYFGRIGTCL

SEQ ID NO: 6958 - protein, 269 aa, Thermomyces lanuginosus
EVSQDLFNQFNLFAQYSAAAYCGKNNQAPAGTNITCTGNACPEVEKADATTLYSFEDSGVGDVTGFLALDNTNKQIVLSFRGSRSIENWIQNLNFDLKEINDICSGCRGHDGFTSSWRSVADTLRQKVEAAVREHPDYRVVFTGHSLGGALATVAGADLRGNGYDIDVFSYGAPRVGNRAFAEFLTTQTGGTLYRITHTNDIVPRLPPREFGYSHSSPEYWIKSGTLVPVTRNDIVKIEGIDATGGNNQPNQPDIPAHLWYFGLIGTCL

SEQ ID NO: 6959 - protein, 269 aa, Thermomyces lanuginosus
EVSQDLFNQFNLFAQYSAAAYCGKNNDAPAGTQITCTGNACPEVEKADATFLYSFEDSGVGDVTGFLALDNTNKLIVLSFRGSRSIENWITNLSFDLKEINDICSGCRGHAGFTSSWRSVADTLRQKVEDAVREHPDYRVVFTGHSLGGALATVAGADLRGNGYDIDVFSYGAPRIGNRAFAEFLTVQTGGTLYRITHTNDIVPRLPPREFGYSHSSPEYWIKSGTLVPVRRRDIVKIEGIDATGGNNQPNIPDIPAHLWYFGLIGTCL

SEQ ID NO: 6960 - protein, 269 aa, Thermomyces lanuginosus
EVSQDLFNQFNLFAQYSAAAYCGANNDAPAGTNITCTGNACPEVEKADATFLYSFEDSGVGDVTGFLALDNTNKQIVLSFRGSRSIENWIGNLNFDLKEINDICSGCRGHAGFTSSWRSVADTLRQKVEAAVREHPDYRVVFTGHSLGGALATVAGADLRGNGYDIDVFSYGAPRVGNRAFAEFLTNQQGGTLYRITHTNDIVPRLPPREFGYSHSSPEYWIKSGTLVPVTRNDIVKIEGIDATGGNNQPNIPDIPAHLWYFGRIGTCL

SEQ ID NO: 6961 - protein, 269 aa, Thermomyces lanuginosus
EVSRDLFNQFNLFAQYSAAAYCGKNNDAPAGTNITCTGNACPEVEKADATFLYSFEDSGVGDVTGFLALDNTNKLIVLSFRGSRSIENWIGNLNFDLKEINDICSGCRGHDGFTSSWRSVADTLRQKVEDAVREHPDYRVVFAGHSLGGALATVAGADLRGDGYDIDVFSYGAPRVGNRAFAEFLTVQTGGTLYRITNTNDIVPRLPPREFGYSHSSPEYWIKSGTLPPVRRRDIVKIEGIDATGGNNQPNIPDIPAHLWYFGLIGTCL

SEQ ID NO: 6962 - protein, 269 aa, Thermomyces lanuginosus
EVSQDLFNQFNLFAQYSAAAYCSKNNDAPAGTNITCTGNACPEVEKADATFLYSFRDSGVGDVTGFLALDNTNKLIVLSFRGSRSIENWIGNLNFDLIEINDICSGCRGHDGFTSSWFSVADTLRQKVEDAVREHPDYRVVFTGHSLGGALATVAGADLRGNGYDIDVFSYGAPRVGNRAFAEFLTVQTGGTLYRITHTNDIVPRLPPREFGYSHSSPEFWIKSGTLVPVRRRDIVKIEGIDATGGNNQPNIPDIPAHLWYFGLIGTCL

SEQ ID NO: 6963 - protein, 269 aa, Thermomyces lanuginosus
EVSQDLFNQFNLFAQYSAAAYCGKNNNAPAGTNITCTGNACPEVEKADATFLYSFRDSGVGDVTGFLALDNTNKLIVLSFRGSRSIENWIGNLNFDLKEINDICSGCRGHDGFTSSWFSVADTLRQKVEDAVREHPDYRVVFTGHSLGGALATVAGADLRGNGYDIDVFSYGAPRVGNRAFAEFLTVQTGGTLYRITHTNDIVPRLPPREFGYSHSSPEFWIKSGTLVPVRRRDIVKIEGIDAEGGNNQPNIPDIPAHLWYFGLIGTCL

SEQ ID NO: 6964 - protein, 269 aa, Thermomyces lanuginosus
EVSRDLFNQFNLFAQYSAAAYCGKNNDAPAGTNITCTGNACPEVEKADATFLYSFEDSGVGDVTGFLALDNTNKLIVLSFRGSRSIENWIGNLNFDLKEINDICSGCRGHDGFTSSWRSVADTLRQKVEDAVREHPDYRVVFAGHSLGGALATVAGADLRGDGYDIDVFSYGAPRVGNRAFAEFLTVQTGGTLYRITSTNDIVPRLPPREFGYSHSSPEYWIKSGTLRPVRRRDIVKIEGIDATGGNNQPNIPDIPAHLWYFGLIGTCL

SEQ ID NO: 6965 - protein, 269 aa, Thermomyces lanuginosus
EVSQDLFNQFNLFAQYSAAAYCGKNNDAPAGTQITCTGNACPEVEKADATFLYSFEDSGVGDVTGFLALDNTNKLIVLSFRGSRSIENWITNLRFDLKEINDICSGCRGHAGFTSSLRSVADTLRQKVEDAVREHPDYRVVFTGHSLGGALATVAGADLRGNGYDIDVFSYGAPRVGNRAFAEFLTVQTGGTLYRITHTNDIVPRLPPREFGYSHSSPEYWIKSGTLVPVRRRDIVKIEGIDATGGNNQPNIPDIPAHLWYFGLIGTCL

SEQ ID NO: 6966 - protein, 269 aa, Thermomyces lanuginosus
EVSQDLFNQFNLFAQYSAAAYCQKNNDAPAGTNITCTGNACPEVEKADATFLYSFEDSGVGDVTGFLALDNTNKQIILSFRGSRSIENWIGNLRFDLKEINDICSGCRGHDGFTSSWRSVADTLRQKVEAAVREHPDYRVVFTGHSLGGALATVAWADLRGNGYDIDVFSYGAPRVGNRAFAEFLTNQTGGTLYRITHTNDIVPRLPPREFGYSHSSPEYWIKSGTLVPVTRNDIVKIEGIDATGGNNQPNIPDIPAHLWYFGLIGTCL

SEQ ID NO: 6967 - protein, 269 aa, Thermomyces lanuginosus
EVSQDLFNQFNLFAQYSAAAYCGKNNDAPAGTNITCTGNICPEVEKADATILYSFRDSGVGDVTGFLALDNTNKLIVLSFRGSRSIENWIGNLNFDLKEINDICSGCRGHDGFTSSWFSVADTLRQKVEDAVREHPDYRVVFTGHSLGGALATVAGADLRGNGYDIDVFSYGAPRVGNRAFAEFLTVQTGGTLYRITHTNDIVPRLPPREFGYSHSSPEYWIKSGTLVPVRRRDIVKIEGIDAEGGNNQPNIPDIPAHLWYFGLIGTCL

SEQ ID NO: 6968 - protein, 269 aa, Thermomyces lanuginosus
EVSQDLFNQFNLFAQYSAAAYCGKNNDAPAGTQITCTGNACPEVEKADATFLYSFEDSGVGDVTGFLALDNTNKLIVLSFRGSRSIENWIQNLNFDLKEINDICSGCRGHDGFTSSWRSVADTLRQKVEDAVREHPDYRVVFTGHSLGGGLATVAGADLRGNGYDIDVFSYGAPRVGNRAFAEFLTVQTGGTLYRITHTNDIVPRLPPRQFGYSHSSPEYWIKSGTLVPVRRRDIVKIEGIDATGGNNQPNIPDGPAHLWYFGLIGTCL

SEQ ID NO: 6969 - protein, 269 aa, Thermomyces lanuginosus
EVSQDLFNQFNLFAQYSAAAYCGKNNDAPAGTNITCTGNACPEVEKADATFLYSFEDSGVGDVTGFLALDNTNKLIVLSFRGSADIANWIANLNFGLEDINDICSGCRGHDGFTSSWRSVADTLRQKVEDAVREHPDYRVVFTGHSLGGALATVAGADLRGNGYDIDVFSYGAPRVGNRAFAEFLTVQTGGTLYRITHTNDIVPRLPPREFGYSHSSPEYWIKSGTLVPVTRNDIVKIEGIDATGGNNQPNIPDIPAHLWYFGLIGTCL

SEQ ID NO: 6970 - protein, 269 aa, Thermomyces lanuginosus
EVSQDLFNQFNLFAQYSAAAYCKKNNDAPAGTNITCTGNACPEVEKADATTLYSFEDSGVGDVTGFLALDNTNKQIVLSFRGSRSIENWIQNLNFDLKEINDICSGCRGHDGFTSSWRSVADTLRQKVEAAVREHPDYRVVFTGHSLGGALATVAGADLRGNGYDIDVFSYGAPRVGNRAFAEFLTHQTGGTLYRITHTNDIVPRLPPREFGYSHSSPEYWIKSGTLVPVTRNDIVKIEGIDATGGNNQPNQPDIPAHLWYFGLIGTCL

SEQ ID NO: 6971 - protein, 269 aa, Thermomyces lanuginosus
EVSQDLFNQFNLFAQYSAAAYCGKNNDAPAGTNITCTGNACPEVEKADATLLYSFRNSGVGDVTGFLALDNTNKLIVLSFRGSRSIENWIGNLNFDLIEINDICSGCRGHDGFTSSWFSVADTLRQKVEDAVREHPDYRVVFTGHSLGGALATVAGADLRGNGYDIDVFSYGAPRVGNRAFAEFLTVQTGGTLYRITHTNDIVPRLPPREFGYSHSSPEYWIKSGTLVPVRRRDIVKIEGIDATGGNNQPNIPDIPAHLWYFGLIGTCL

SEQ ID NO: 6972 - protein, 269 aa, Thermomyces lanuginosus
EVSQDLFNQFNLFAQYSAAAYCGKNNRAPAGTNITCTGNACPEVEKADATFLYSFEDSGVGDVTGFLALDNTNKLIVLSFRGSRSIENWIGNLNFELKEINDICSGCRGHDGFTSSWRSVADTLRQKVEDAVREHPDYRVVFTGHSLGGALATVAGADLRGNKYDIDVFSYGAPRVGNRAFAEFLTVQTGGTLYRITHTNDIVPRLPPREFGYSHSSPEYWIKSGTLVPVRRRDIVKIEGIDATGGNNQPNIPSITAHLWYFGLIGTCL

SEQ ID NO: 6973 - protein, 269 aa, Thermomyces lanuginosus
EVSQDLFNQFNLFAQYSAAAYCSKNNNAPAGTNITCTGNACPEVEKADATFLYSFRDSGVGDVTGFLALDNTNKLIVLSFRGSRSIENWIGNLNFDLIEINDICSGCRGHDGFTSSWFSVADTLRQKVEDAVREHPDYRVVFTGHSLGGALATVAGADLRGNGYDIDVFSYGAPRVGNRAFAEFLTVQTGGTLYRITHTNDIVPRLPPREFGYSHSSPEYWIKSGTLVPVRRRDIVKIEGIDATGGNNQPNIPDIPAHLWYFGLIGTCL

SEQ ID NO: 6974 - protein, 269 aa, Thermomyces lanuginosus
EVSQDLFNQFNLFAQYSAAAYCGKNNEAPAGTNITCTGNACPEVEKADATTLYSFEDSGVGDVTGFLALDNTNKGIVLSFRGSRSIENWIGNLNFDLKEINDICSGCRGHDGFTSSWRSVADTLRQKVEAAVREHPDYRVVFTGHSLGGALATVAGADLRGNGYDIDVFSYGAPRVGNRAFAEFLTHQTGGTLYRITHTNDIVPRLPPREFGYSHSSPEYWIKSGTLVPVTRNDIVKIEGIDATGGNNQPNQPDIPAHLWYFGRIGTCL

SEQ ID NO: 6975 - protein, 269 aa, Thermomyces lanuginosus
EVSQDLFNQFNLFAQYSAAAYCGKNNDAPAGTNITCTGNACPEVEKADATFLYSFEDSGGGEVTGFLALDNTNKLIVLSFRGSRSIENWIANLNFDLKKINDICSGCRGHDGFTSSWRSVADTLRQKVEDAVREHPDYRVVFTGHSLGGALATVAGADLRGNGYDIDVFSYGAPRVGNRAFAEFLTVQTGGTLYRITHTNDIVPRLPPREFGYSHSSPEYWIKSGTLVPVRRRDIVKIEGIDATGGNNRPNIPDIPAHLWYFGLIGTCL

SEQ ID NO: 6976 - protein, 269 aa, Thermomyces lanuginosus
EVSQDLFNQFRLFAQYSAAAYCGKNNDAPAGTQITCTGNACPEVEKADATFLYSFEDSGVGDVTGFLALDNTNKLIVLSFRGSRSIENWIKNLNFDLKEINDICSGCRGHDGFTSSWRSVADTLRQKVEDAVREHPDYRVVFTGHSLGGALATVAGADLRGNKYDIDVFSYGAPRVGNRAFAEFLTVQTGGTLYRITHTNDIVPRLPPREFGYSHSSPEYWIKSGTLVPVRRRDIVKIEGIDATGGNNQPNIPSIPAHLWYFGLIGTCL

SEQ ID NO: 6977 - protein, 269 aa, Thermomyces lanuginosus
EVSQDLFNQFDLFAQYSAAAYCGKNNDAPAGTQITCTGNACPEVEKADATFLYSFEDSGVGDVTGFLALDNTNKLIVLSFRGSRSIENWITNLNFDLKEINDICSGCRGHDGFTSSWRSVADTLRQKVEDAVREHPDYRVVFTGHSLGGALATVAGADLRGNKYDIDVFSYGAPRVGNRAFAEFLTVQTGGTLYRITHTNDIVPRLPPREFGYSHSSPEYWIKSGTLVPVRRRDIVKIEGIDATGGNNQPNIPSIPAHLWYFGLIGTCL

SEQ ID NO: 6978 - protein, 269 aa, Thermomyces lanuginosus
EVSQDLFNQFNLFAQYSAAAYCQANNDAPAGTNITCTGNACPEVEKADATFLYSFEDSGVGDVTGFLALDNTNKQIILSFRGSRSIENWIGNLNFDLKEINDICSGCRGHDGFTSSWRSVADTLRQKVEAAVREHPDYRVVFTGHSLGGALATVAWADLRGNGYDIDVFSYGAPRVGNRAFAEFLTNQTGGTLYRITHTNDIVPRLPPREFGYSHSSPEYWIKSGTLVPVTRNDIVKIEGIDATGGNNQPNIPDIPAHLWYFGLIGTCL

SEQ ID NO: 6979 - protein, 269 aa, Thermomyces lanuginosus
EVSQDLFNQFNLFAQYSAAAYCGKNNQAPAGTNITCTGNACPEVEKADATTLYSFEDMGVGDVTGFLALDNTNKQIVLSFRGSRSIENWIQNLNFDLKEINDICSGCRGHDGFTSSWRSVADTLRQKVEDAVREHPDYRVVFTGHSLGGALATVAGADLRGNGYDIDVFSYGAPRVGNRAFAEFLTVQTGGTLYRITHTNDIVPRLPPREFGYSHSSPEYWIKSGTLVPVTRNDIVKIEGIDATGGNNQPNQPDIPAHLWYFGRIGTCL

SEQ ID NO: 6980 - protein, 269 aa, Thermomyces lanuginosus
EVSQDLFNQFNLFAQYSAAAYCGKNNDAPAGTNITCTGNICPEVEKADATFLYSFRDSGVGDVTGFLALDNTNKLIVLSFRGSRSIENWIGNLNFDLIEINDICSGCRGHDGFTSSWFSVADTLRQKVEDAVREHPDYRVVFTGHSLGGALATVAGADLRGNGYDIDVFSYGAPRVGNRAFAEFLTVQTGGTLYRITHTNDIVPRLPPREFGYSHSSPEYWIKSGTLVPVRRRDIVKIEGIDATGGNNQPNIPDITAHLWYFGLIGTCL

SEQ ID NO: 6981 - protein, 269 aa, Thermomyces lanuginosus
EVSQDLFNQFRLFAQYSAAAYCGKNNDAPAGTQITCTGNACPEVEKADATFLYSFEDSGVGDVTGFLALDNTNKLIVLSFRGSRSIENWITNLNFDLKEINDICSGCRGHDGFTSSWRSVADTLRQKVEDAVREHPDYRVVFTGHSLGGALATVAGADLRGNKYDIDVFSYGAPRVGNRAFAEFLTVQTGGTLYRITHTNDIVPRLPPREFGYSHSSPEYWIKSGTLVPVRRRDIVKIEGIDATGGNNQPNIPIIPAHLWYFGLIGTCL

SEQ ID NO: 6982 - protein, 269 aa, Thermomyces lanuginosus
EVSQDLFNQFNLFAQYSAAAYCGKNNRAPAGTNITCTGNACPEVEKADATFLYSFEDSGVGDVTGFLALDNTNKLIVLSFRGSRSIENWIANLNFDLKEINDICSGCRGHAGFTSSWRSVADTLRQKVEDAVREHVDYRVVFTGHSLGGALATVAGADLRGNGYDIDVFSYGAPRVGNRAFAEFLTVQTGGTLYRITHTNDIVPRLPPREFGYSHPSPEYWIKSGTGVPVTRNDIVKIEGIDATGGNNQPNIPDITAHLWYFGLIGTCL

SEQ ID NO: 6983 - protein, 269 aa, Synthetic construct
EVSQDLFNQFNLFAQYSAAAYCGKNNDAPAGTNITCTGNACPEVEKADATFLYSFRLSGMGNVTGFLALDNTNKLIVLSFRGTRSIENWIGNLNFPLKEINEICSGCRGHDGFTSSWRSVADTLRQKVEDAVREHPDYRVVFTGHSLGGALATVAGADLRGNGYDIDVFSYGAPRVGNRAFAEFLTVQTGGTLYRITHTNDIVPRLPPREFGYSHSSPEYWIKSGTLVPVTRNDIVKIEGIDATGGNNQPNIPDIPAHLWYFGLIGTCL

SEQ ID NO: 6984 - protein, 269 aa, Thermomyces lanuginosus
EVSQDLFNQFNLFAQYSAAAYCGKNNRAPAGTNITCTGNACPEVEKADATFLYSFEDSGVGDVTGFLALDNTNKLIVLSFRGSRSIENWITNLNFNLKEINDICSGCRGHAGFTSSWRSVADTLRQKVEDAVREHPDYRVVFTGHSLGGALATVAGADLRGNGYDIDVFSYGAPRVGNRAFAEFLTVQTGGTLYRITHTNDIVPRLPPREFGYSHSPPEYWIKSGTGVPVTRNDIVKIEGIDATGGNNQPNIPDITAHLWYFGLIGTCL

SEQ ID NO: 6985 - protein, 269 aa, Thermomyces lanuginosus
EVSQDLFNQFKLFAQYSAAAYCQKNNDAPAGTNITCTGNACPEVEKADATFLYSFEDSGVGDVTGFLALDNTNKQIVLSFRGSRSIENWIGNLNFDLKEINDICSGCRGHDGFTSSWRSVADTLRQKVEDAVREHPDYRVVFTGHSLGGALATIAGADLRGNGYDIDVFSYGAPRVGNRAFAEFLTNQQGGTLYRITHTNDIVPRLPPREFGYSHSSPEYWIKSGTLVPVTRNDIVKIEGIDATGGNNQPNIPDIPAHLWYFGRIGTCL

SEQ ID NO: 6986 - protein, 269 aa, Synthetic construct
EVSQDLFNQFNLFAQYSAAAYCGKNNDAPAGTNITCTGNACPEVEKADATFLYSFEDSGVGDVTGFLALDNTNKLIVLSFRGSRSIENWFGNLNFLLKKINDICSGCRGHDGFTSSWRSVADTLRQKVEDAVREHPDYRVVFTGHSLGGALATVAGADLRGNGYDIDVFSYGAPRVGNRAFAEFLTAQTGGTLYRITHRRDIVPRLPPAEFGYSHSSPEYWIKSGTLVPVTRNDIVKIEGIDATGGNNQPNIPDIPAHLWYFGLIGTCL

SEQ ID NO: 6987 - protein, 269 aa, Thermomyces lanuginosus
EVSQDLFNQFNLFAQYSAAAYCGKNNRAPAGTNITCTGNACPEVEKADATFLYSFEDSGVGDVTGFLALDNTNKLIVLSFRGSRSIENWISNLKFDLKEINDICSGCRGHAGFTSSWRSVADTLRQKVEDAVREHPDYRVVFTGHSLGGALATVAGADLRGNGYDIDVFSYGAPRVGNRAFAEFLTVQTGGTLYRITHTNDIVPRLPPREFGYSHPSPEYWIKSGTGVPVTRNDIVKIEGIDATGGNNQPNIPDITAHLWYFGLIGTCL

SEQ ID NO: 6988 - protein, 269 aa, Thermomyces lanuginosus
EVSQDLFNQFNLFAQYSAAAYCQKNNSAPAGTNITCTGNACPEVEKADATFLYSFEDMGVGDVTGFLALDNTNKQIVLSFRGSRSIENWIGNLNFDLKEINDICSGCRGHDGFTSSWRSVADTLRQKVEAAVREHPDYRVVFTGHSLGGALATVAGADLRGNGYDIDVFSYGAPRVGNRAFAEFLTVQTGGTLYRITHTNDIVPRLPPREFGYSHSSPEYWIKSGTLVPVTRNDIVKIEGIDATGGNNQPNQPDIPAHLWYFGRIGTCL

SEQ ID NO: 6989 - protein, 269 aa, Thermomyces lanuginosus
EVSQDLFNQFNLFAQYSAAAYCQKNNDAPAGTNITCTGNACPEVEKADATFLYSFEDSGVGDVTGFLALDNTNKQIVLSFRGSRSIENWIGNLNFDLKEINDICSGCRGHDGFTSSWRSVADTLRQKVEAAVREHPDYRVVFTGHSLGGALATIAGADLRGNGYDIDVFSYGAPRVGNRAFAEFLTNQQGGTLYRITHTNDIVPRLPPREFGYSHSSPEYWIKSGTLVPVTRNDIVKIEGIDATGGNNQPNIPDIPAHLWYFGRIGTCL

SEQ ID NO: 6990 - protein, 269 aa, Thermomyces lanuginosus
EVSQDLFNQFNLFAQYSAAAYCGKNNDAPAGTNITCTGNICPEVEKADATLLYSFRDSGVGDVTGFLALDNTNKLIVLSFRGSRSIENWIGNLNFDLKEINDICSGCRGHDGFTSSWFSVADTLRQKVEDAVREHPDYRVVFTGHSLGGALATVAGADLRGNGYDIDVFSYGAPRVGNRAFAEFLTVQTGGTLYRITHTNDIVPRLPPREFGYSHSSPEYWIKSGTLVPVRRRDIVKIEGIDATGGNNQPNIPDITAHLWYFGLIGTCL

SEQ ID NO: 6991 - protein, 269 aa, Thermomyces lanuginosus
EVSQDLFNQFNLFAQYSAAAYCGKNNDAPAGTNITCTGNACPEVEKADATFLYSFEDSGKGDVTGFLALDNTNKLIVLSFRGSRSIENWIGNLNFDLKEINDICSGCRGHDGFTSSWRSVADTLRQKVEDAVREHPDYRVVFTGHSLGGALATVAGADLRGNGYDIDVFSYGAPRVGNRAFAEFLTVQTGGTLYRITHTNDVVPRLPPRKFGYSHSSPEYWIKSGTLVPVRRRDIVKIEGIDATGGNNQPNIPDAKAHLWYFGLIGTCL

SEQ ID NO: 6992 - protein, 269 aa, Thermomyces lanuginosus
EVSQDLFNQFNLFAQYSAAAYCSKNNDAPAGTNITCTGNACPEVEKADATILYSFRDSGVGDVTGFLALDNTNKLIVLSFRGSRSIENWIGNLNFDLKEINDICSGCRGHDGFTSSWFSVADTLRQKVEDAVREHPDYRVVFTGHSLGGALATVAGADLRGNGYDIDVFSYGAPRVGNRAFAEFLTVQTGGTLYRITHTNDIVPRLPPREFGYSHSSPEFWIKSGTLVPVRRRDIVKIEGIDATGGNNQPNIPDIPAHLWYFGLIGTCL

SEQ ID NO: 6993 - protein, 269 aa, Thermomyces lanuginosus
EVSQDLFNQFNLFAQYSKAAYCGANNDAPAGTNITCTGNACPEVEKADATFLYSFEDSGVGDVTGFLALDNTNKLIVLSFRGSRSIENWIGNLRFDLKEINDICSGCRGHDGFTSSWRSVADTLRQKVEAAVREHPDYRVVFTGHSLGGALATVAWADLRGNGYDIDVFSYGAPRVGNRAFAEFLTTQTGGTLYRITHTNDIVPRLPPREFGYSHSSPEYWIKSGTLVPVTRNDIVKIEGIDATGGNNQPNIPDIPAHLWYFGRIGTCL

SEQ ID NO: 6994 - protein, 269 aa, Thermomyces lanuginosus
EVSQDLFNQFNLFAQYSAAAYCGKNNQAPAGTNITCTGNACPEVEKADATFLYSFEDSGVGDVTGFLALDNTNKQIVLSFRGSRSIENWIQNLNFDLKEINDICSGCRGHDGFTSSWRSVADTLRQKVEAAVREHPDYRVVFTGHSLGGALATVAGADLRGNGYDIDVFSYGAPRVGNRAFAEFLTHQTGGTLYRITHTNDIVPRLPPREFGYSHSSPEYWIKSGTLVPVTRNDIVKIEGIDATGGNNQPNQPDIPAHLWYFGRIGTCL

SEQ ID NO: 6995 - protein, 269 aa, Thermomyces lanuginosus
EVSQDLFNQFNLFAQYSAAAYCGKNNDAPAGTQITCTGNACPEVEKADATFLYSFEDSGVGDVTGFLALDNTNKLIVLSFRGSRSIENWITNLNFDLKEINDICSGCRGHDGFISSWRSVADTLRQKVEDAVREHPDYRVVFTGHSLGGALATVAGADLRGNKYDIDVFSYGAPRVGNRAFAEFLTVQTGGTLYRITHTNDIVPRLPPRDFGYSHSSPEYWIKSGTLVPVRRRDIVKIEGIDATGGNNQPNIPDIPAHLWYFGLIGTCL

SEQ ID NO: 6996 - protein, 269 aa, Thermomyces lanuginosus
EVSQDLFNQFNLFAQYSAAAYCGKNNDAPAGTNITCTGNACPEVEKADATFLYSFEDSGKGDVTGFLALDNTNKLIVLSFRGSRSVENWIGNLNFDLKEINDICSGCRGHDGFTSSWRSVADTLRQKVEDAVREHPDYRVVFTGHSLGGGLATVAGADLRGNGYDIDVFSYGAPRVGNRAFAEFLTVQTGGTLYRITHTNDIVPRLPPREFGYSHSSPEYWIKSGTGVPVRRRDIVKIEGIDATGGNNQPNIPDIKAHLWYFGLIGTCL

SEQ ID NO: 6997 - protein, 269 aa, Thermomyces lanuginosus
EVSQDLFNQFNLFAQYSAAAYCKKNNSAPAGTNITCTGNACPEVEKADATTLYSFEDMGVGDVTGFLALDNTNKLIVLSFRGSRSIENWIQNLNFDLKEINDICSGCRGHDGFTSSWRSVADTLRQKVEDAVREHPDYRVVFTGHSLGGALATVAGADLRGNGYDIDVFSYGAPRVGNRAFAEFLTNQTGGTLYRITHTNDIVPRLPPREFGYSHSSPEYWIKSGTLVPVTRNDIVKIEGIDATGGNNQPNQPDIPAHLWYFGLIGTCL

SEQ ID NO: 6998 - protein, 269 aa, Thermomyces lanuginosus
EVSQDLFNQFNLFAQYSAAAYCKKNNDAPAGTNITCTGNACPEVEKADATFLYSFEDSGVGDVTGFLALDNTNKQIVLSFRGSRSIENWIGNLNFDLKEINDICSGCRGHDGFTSSWRSVADTLRQKVEAAVREHPDYRVVFTGHSLGGALATVAWADLRGNGYDIDVFSYGAPRVGNRAFAEFLTNQQGGTLYRITHTNDIVPRLPPREFGYSHSSPEYWIKSGTLVPVTRNDIVKIEGIDATGGNNQPNIPDIPAHLWYFGRIGTCL

SEQ ID NO: 6999 - protein, 269 aa, Thermomyces lanuginosus
EVSQDLFNQFNLFAQYSAAAYCSKNNDAPAGTNITCTGNACPEVEKADATFLYSFRDSGVGDVTGFLALDNTNKLIVLSFRGSRSIENWIGNLNFDLKEINDICSGCRGHDGFTSSWFSVADTLRQKVEDAVREHPDYRVVFTGHSLGGALATVAGADLRGNGYDIDVFSYGAPRVGNRAFAEFLTVQTGGTLYRITHTNDIVPRLPPREFGYSHSSPEYWIKSGTLVPVRRRDIVKIEGIDAEGGNNQPNIPDITAHLWYFGLIGTCL

SEQ ID NO: 7000 - protein, 269 aa, Synthetic construct
EVSQDLFNQFNLFAQYSAAAYCGKNNDAPAGTNITCTGNACPEVEKADATFLYSFEDSGVGDVTGFLALDNTNKLIVLSFRGSRSIENWFGNLNFLLKKINDICSGCRGHDGFTSSWRSVADTLRQKVEDAVREHPGYRVVFTGHSLGGALATVAGADLRGNGYDIGVFSYGAPRVGNRAFAEFLTAQTGGTLYRITHTNDIVPRLPPREFGYSHSSPEYWIKSGTLVPVTRNDIVKIEGIDATGGNNRPNIPDIPAHLWYFGLIGTCL

SEQ ID NO: 7001 - protein, 269 aa, Thermomyces lanuginosus
EVSQDLFNQFRLFAQYSAAAYCGKNNDAPAGTQITCTGNACPEVEKADATFLYSFQDSGVGDVTGFLALDNTNKLIVLSFRGSRSIENWIGNLNFDLKEINDICSGCRGHDGFTSSWRSVADTLRQKVEDAVREHPDYRVVFTGHSLGGALATVAGADLRGNKYDIDVFSYGAPRVGNRAFAEFLTVQTGGTLYRITHTNDIVPRLPPREFGYSHSSPEYWIKSGTLVPVRRRDIVKIEGIDATGGNNQPNIPSIPAHLWYFGLIGTCL

SEQ ID NO: 7002 - protein, 269 aa, Thermomyces lanuginosus
EVSQDLFNQFLLFAQYSAAAYCGKNNDAPAGTQITCTGNACPEVEKADATFLYSFEDSGVGDVTGFLALDNTNKLIVLSFRGSRSIENWITNLNFDLKEINDICSGCRGHDGFTSSWRSVADTLRQKVEDAVREHPDYRVVFTGHSLGGALATVAGADLRGNKYDIDVFSYGAPRVGNRAFAEFLTVQTGGTLYRITHTNDIVPRLPPREFGYSHSSPEYWIKSGTLVPVRRRDIVKIEGIDATGGNNQPNIPSIPAHLWYFGLIGTCL

SEQ ID NO: 7003 - protein, 269 aa, Thermomyces lanuginosus
EVSQDLFNQFNLFAQYSAAAYCQKNNDAPAGTNITCTGNACPEVEKADATTLYSFEDMGVGDVTGFLALDNTNKLIVLSFRGSRSIENWIQNLNFDLKEINDICSGCRGHDGFTSSWRSVADTLRQKVEAAVREHPDYRVVFTGHSLGGALATVAGADLRGNGYDIDVFSYGAPRVGNRAFAEFLTVQTGGTLYRITHTNDIVPRLPPREFGYSHSSPEYWIKSGTLVPVTRNDIVKIEGIDATGGNNQPNQPDIPAHLWYFGRIGTCL

SEQ ID NO: 7004 - protein, 269 aa, Thermomyces lanuginosus
EVSQDLFNQFNLFAQYSAAAYCKKNNDAPAGTNITCTGNACPEVEKADATFLYSFEDSGVGDVTGFLALDNTNKQIVLSFRGSRSIENWIGNLNFDLKEINDICSGCRGHAGFTSSWRSVADTLRQKVEAAVREHPDYRVVFTGHSLGGALATIAWADLRGNGYDIDVFSYGAPRVGNRAFAEFLTVQTGGTLYRITHTNDIVPRLPPREFGYSHSSPEYWIKSGTLVPVTRNDIVKIEGIDATGGNNQPNIPDIPAHLWYFGRIGTCL

SEQ ID NO: 7005 - protein, 269 aa, Thermomyces lanuginosus
EVSQDLFNQFNLFAQYSAAAYCGKNNDAPAGTNITCTGNACPEVEKADATLLYSFRDSGVGDVTGFLALDNTNKLIVLSFRGSRSIENWIGNLNFDLIEINDICSGCRGHDGFTSSWFSVADTLRQKVEDAVREHPDYRVVFTGHSLGGALATVAGADLRGNSYDIDVFSYGAPRVGNRAFAEFLTVQTGGTLYRITHTNDIVPRLPPREFGYSHSSPEYWIKSGTLVPVRRRDIVKIEGIDATGGNNQPNIPDIPAHLWYFGLIGTCL

SEQ ID NO: 7006 - protein, 269 aa, Thermomyces lanuginosus
EVSQDLFNQFNLFAQYSAAAYCGKNNDAPAGTQITCTGNACPEVEKADATFLYSFEDSGVGDVTGFLALDNTNKLIVLSFRGSRSIENWIGNLNFDLIEINDICSGCRGHDGFTSSWRSVADTLRQKVEDAVREHPDYRVVFTGHSLGGALATVAGADLRGNKYDIDVFSYGAPRVGNRAFAEFLTVQTGGTLYRITHTQDIVPRLPPREFGYSHSSPEYWIKSGTLVPVRRRDIVKIEGIDATGGNNQPSIPDIPAHLWYFGLIGTCL

SEQ ID NO: 7007 - protein, 269 aa, Thermomyces lanuginosus
EVSQDLFNQFNLFAQYSAAAYCGKNNDAPAGTQITCTGNACPEVEKADATFLYSFEDSGVGDVTGFLALDNTNKLIVLSFRGSRSIENWIKNLNFSLKEINDICSGCRGHDGFTSSWRSVADTLRQKVEDAVREHPDYRVVFTGHSLGGALATVAGADLRGNTYDIDVFSYGAPRVGNRAFAEFLTVQTGGTLYRITHTNDIVPRLPPREFGYSHSSPEYWIKSGTLVPVRRRDIVKIEGIDATGGNNRPNIPDIPAHLWYFGLIGTCL

SEQ ID NO: 7008 - protein, 269 aa, Thermomyces lanuginosus
EVSRDLFNQFNLFAQYSAAAYCGKNNDAPAGTNITCTGNACPEVEKADATILYSFEDSGVGDVTGFLALDNTNKLIVLSFRGSRSIENWIGNLNFDLKEINDICSGCRGHDGFTSSWRSVADTLRQKVEDAVREHPDYRVVFTGHSLGGALATVAGADLRGDGYDIDVFSYGAPRVGNRAFAEFLTVQTGGTLYRITSTNDIVPRLPPREFGYSHSSPEYWIKSGTLRPVRRRDIVKIEGIDATGGNNQPNIPDIPAHLWYFGLIGTCL

SEQ ID NO: 7009 - protein, 269 aa, Thermomyces lanuginosus
EVSQDLFNQFNLFAQYSAAAYCQKNNSAPAGTNITCTGNACPEVEKADATFLYSFEDSGVGDVTGFLALDNTNKQIVLSFRGSRSIENWIGNLNFDLKEINDICSGCRGHDGFTSSWRSVADTLRQKVEDAVREHPDYRVVFTGHSLGGALATIAWADLRGNGYDIDVFSYGAPRVGNRAFAEFLTNQTGGTLYRITHTNDIVPRLPPREFGYSHSSPEYWIKSGTLVPVTRNDIVKIEGIDATGGNNQPNIPDIPAHLWYFGRIGTCL

SEQ ID NO: 7010 - protein, 269 aa, Thermomyces lanuginosus
EVSDDLFNQFKLFAQYSAAAYCGKNNQAPAGTNITCTGNACPEVEKADATFLYSFKDMGVGDVTGFLALDNTNKLIVLSFRGSRSIENWIGNLNFDLKEINDICSGCRGHDGFTSSWRSVADTLRQKVEDAVREHPDYRVVFTGHSLGGALATVAGADLRGNGYDIDVFSYGAPRVGNRAFAEFLTVQTGGTLYRITHTNDIVPRLPPREFGYSHSSPEYWIKSGTLVPVTRQDIVKIEGIDATGGNNQPNIPDITAHLWYFGLIGTCL

SEQ ID NO: 7011 - protein, 269 aa, Thermomyces lanuginosus
EVSQDLFNQFNLFAQYSAAAYCGKNNEAPAGTNITCTGNACPEVEKADATTLYSFEDSGVGDVTGFLALDNTNKQIVLSFRGSRSIENWIGNLNFDLKEINDICSGCRGHDGFTSSWRSVADTLRQKVEAAVREHPDYRVVFTGHSLGGALATVAGADLRGNGYDIDVFSYGAPRVGNRAFAEFLTTQTGGTLYRITHTNDIVPRLPPREFGYSHSSPEYWIKSGTLVPVTRNDIVKIEGIDATGGNNQPNQPDIPAHLWYFGRIGTCL

SEQ ID NO: 7012 - protein, 269 aa, Thermomyces lanuginosus
EVSQDLFNQFNLFAQYSAAAYCGKNNEAPAGTNITCTGNACPEVEKADATFLYSFEDSGVGDVTGFLALDNTNKLIVLSFRGSRSIENWIGNLNFDLKEINDICSGCRGHDGFTSSWRSVADTLRQKVEAAVREHPQYRVVFTGHSLGGALATVAGADLRGNPYDIDVFSYGAPRVGNRAFAEFLTVQTGGTLYRITHTNDIVPRLPPREFGYSHSSPEYWIKSGTMVPVTRQDIVKIEGIDATGGNNQPNIPDIPAHLWYFGRIGTCL

SEQ ID NO: 7013 - protein, 269 aa, Thermomyces lanuginosus
EVSQDLFNQFNLFAQYSKAAYCGKNNDAPAGTNITCTGNACPEVEKADATFLYSFEDSGVGDVTGFLALDNTNKQIVLSFRGSRSIENWIGNLNFDLKEINDICSGCRGHAGFTSSWRSVADTLRQKVEAAVREHPDYRVVFTGHSLGGALATIAWADLRGNGYDIDVFSYGAPRVGNRAFAEFLTVQTGGTLYRITHTNDIVPRLPPREFGYSHSSPEYWIKSGTLVPVTRNDIVKIEGIDATGGNNQPNIPDIPAHLWYFGRIGTCL

SEQ ID NO: 7014 - protein, 269 aa, Thermomyces lanuginosus
EVSQDLFNQFNLFAQYSAAAYCSKNNNAPAGTNITCTGNACPEVEKADATFLYSFRDSGVGDVTGFLALDNTNKLIVLSFRGSRSIENWIGNLNFDLKEINDICSGCRGHDGFTSSWFSVADTLRQKVEDAVREHPDYRVVFTGHSLGGALATVAGADLRGNGYDIDVFSYGAPRVGNRAFAEFLTVQTGGTLYRITHTNDIVPRLPPREFGYSHSSPEYWIKSGTLVPVRRRDIVKIEGIDATGGNNQPNIPDITAHLWYFGLIGTCL

SEQ ID NO: 7015 - protein, 269 aa, Thermomyces lanuginosus
EYSQDLFNQFNLFAQYSAAAYCGKNNDAPAGTKITCTGNACPEVEKADATLLYSFEDSGVGDVTGFLALDNTNKLIVLSFRGSRSIENWIGNLNFDLKEINDICSGCRGHDGFTSSWRSVADTLRQKVEDAVREHPDYRVVFTGHSLGGGLATVAGADLRGNGYDIDVFSYGAPRVGNRAFAEFLTVQTGGTLYRITHTNDIVPRLPPREFGYSHSSPEYWIKSGTLVPRRRRDIVKIEGIDATGGNNQPNIPDIPAHLWYFGLIGTCL

SEQ ID NO: 7016 - protein, 269 aa, Thermomyces lanuginosus
EVSQDLFNQFNLFAQYSAAAYCGKNNDAPAGTNITCTGNACPEVEKADATFLYSFEDSGVGDVTGFLALDNTNKLIVLSFRGSRSIENWIGNLNFDLKEINDICSGCRGHDGFTSSWRSVADTLRQKVEDAVREHPDYRVVFTGHSLGGALATVAGADLRGDGYDIDVFSYGAPRVGNRAFAEFLTVQTGGTLYRITNTNDCVPRLPPREFGYSHSSPEYWIKSGTLPPVRRRDIVKIEGIDATGGNNQPNICDIPAHLWYFGLIGTCL

SEQ ID NO: 7017 - protein, 269 aa, Thermomyces lanuginosus
EVSVDLFNQFNLFAQYSAAAYCGKNNDAPAGTNITCTGNACPEVEKADATFLYSFEDNGSGDVTGFLALDNTNKLIVLSFRGSRSIENWIGNLNFDLKEINDICSGCRGHDGFTSSWRSVADTLRQKVEDAVREHPDYRVVFTGHSLGGGLATVAGADLRGNGYDIDVFSYGAPRVGNRAFAEFLTVQTGGTLYRITHTNDIVPRLPPREFGYSHSSPEYWIKSGTLVPVRRRDIVKIEGIDATGGNNQPNIPDVPAHLWYFGLIGTCL

SEQ ID NO: 7018 - protein, 269 aa, Thermomyces lanuginosus
EVSQDLFNQFNLFAQYSAAAYCGKNNRAPAGTNITCTGNACPEVEKADATFLYSFEDSGVGDVTGFLALDNTNKLIVLSFRGSRSIENWITNLNFNLKEINDICSGCRGHAGFTSSWRSVADTLRQKVEDAVREHPDYRVVFTGHSLGGALATVAGADLRGNGYDIDVFSYGAPRVGNRAFAEFLTVQTGGTLYRITHTNDIVPRLPPREFGYSHPSPEYWIKSGTGVPVTRNDIVKIEGIDATGGNNQPNIPDITAHLWYFGLIGTCL

SEQ ID NO: 7019 - protein, 269 aa, Thermomyces lanuginosus
EVSQDLFNQFNLFAQYSAAAYCGKNNDAPAGTNITCTGNACPEVEKADATFLYSFEDSGVGDVTGFLALDNTNKLIVLSFRGSRSIENWIQNLNFDLKEINDICSGCRGHDGFTSSWRSVADTLRQKVEDAVREHPDYRVVFAGHSLGGGLATVAGADLRGNGYDIDVFSYGAPRVGNRAFAEFLTVQTGGTLYRITHTNDIVPRLPPRQFGYSHSSPEYWIKSGTLVPVRRRDIVKIEGIDATGGNNQPNIPDAPAHLWYFGLIGTCL

SEQ ID NO: 7020 - protein, 269 aa, Thermomyces lanuginosus
EVSQDLFNQFNLFAQYSKAAYCKANNDAPAGTNITCTGNACPEVEKADATFLYSFEDSGVGDVTGFLALDNTNKQIVLSFRGSRSIENWIGNLRFDLKEINDICSGCRGHDGFTSSWRSVADTLRQKVEDAVREHPDYRVVFTGHSLGGALATVAWADLRGNGYDIDVFSYGAPRVGNRAFAEFLTQQTGGTLYRITHTNDIVPRLPPREFGYSHSSPEYWIKSGTLVPVTRNDIVKIEGIDATGGNNQPNIPDIPAHLWYFGLIGTCL

SEQ ID NO: 7021 - protein, 269 aa, Thermomyces lanuginosus
EVSQDLFNQFNLFAQYSAAAYCGKNNDAPAGTQITCTGNACPEVEKADATFLYSFEDSGVGDVTGFLALDNTNKLIVLSFRGSRSIENWIGNLNFDLKEINDICSGCRGHDGFTSSWRSVADTLRQKVEDAVREHPDYRVVFAGHSLGGGLATVAGADLRGNGYDIDVFSYGAPRVGNRAFAEFLTVQTGGTLYRITHTNDIVPRLPPRQFGYSHSSPEYWIKSGTLVPVRRRDIVKIEGIDATGGNNQPNIPDAPAHLWYFGLIGTCL

SEQ ID NO: 7022 - protein, 269 aa, Thermomyces lanuginosus
EVSQDLFNQFRLFAQYSAAAYCGKNNDAPAGTQITCTGNACPEVEKADATFLYSFEDSGVGDVTGFLALDNTNKLIVLSFRGSRSIENWIMNLNFDLKEINDICSGCRGHDGFTSSWRSVADTLRQKVEDAVREHPDYRVVFTGHSLGGALATVAGADLRGNTYDIDVFSYGAPRVGNRAFAEFLTVQTGGTLYRITHTNDIVPRLPPREFGYSHSSPEYWIKSGTLVPVRRRDIVKIEGIDATGGNNQPNIPSIPAHLWYFGLIGTCL

SEQ ID NO: 7023 - protein, 269 aa, Thermomyces lanuginosus
EVSQDLFNQFNLFAQYSAAAYCGKNNRAPAGTNITCTGNACPEVEKADATFLYSFEDSGVGDVTGFLALDNTNKLIVLSFRGSRSIENWIGNLNFELKEINDICSGCRGHAGFTSSWRSVADTLRQKVEDAVREHVDYRVVFTGHSLGGALATVAGADLRGNGYDIDVFSYGAPRVGNRAFAEFLTVQTGGTLYRITHTNDIVPRLPPREFGYSHPSPEYWIKSGTGVPVTRNDIVKIEGIDATGGNNQPNIPDITAHLWYFGLIGTCL

SEQ ID NO: 7024 - protein, 269 aa, Thermomyces lanuginosus
EVSQDLFNQFPLFAQYSAAAYCGKNNDAPAGTQITCTGNACPEVEKADATFLYSFEDSGVGDVTGFLALDNTNKLIVLSFRGSRSIENWITNLNFDLKEINDICSGCRGHDGFTSSWRSVADTLRQKVEDAVREHPDYRVVFTGHSLGGALATVAGADLRGNKYDIDVFSYGAPRVGNRAFAEFLTVQTGGTLYRITHTNDIVPRLPPREFGYSHSSPEYWIKSGTLVPVRRRDIVKIEGIDATGGNNQPNIPSIPAHLWYFGLIGTCL

SEQ ID NO: 7025 - protein, 269 aa, Thermomyces lanuginosus
EVSQDLFNQFNLFAQYSAAAYCGKNNDAPAGTKITCTGNACPEVEKADATVLYTFKDSGVGDVTGFLALDNTNKLIVLSFRGSRSIENWIGNLNFDLIEINDICSGCRGHDGFTSSWRSVADTLRQKVEDAVREHPDYRVVFTGHSLGGALATVAGADLRGNGYDIDVFSYGAPRVGNRAFAEFLTVQTGGTLYRITHTNDIVPRLPPREFGYSHSSPEYWIKSGTLVPVRRRDIVKIEGIDATGGNNQPNIPDIPAHLWYFGLIGTCL

SEQ ID NO: 7026 - protein, 269 aa, Thermomyces lanuginosus
EVSQDLFNQFNLFAQYSAAAYCSKNNNAPAGTNITCTGNACPEVEKADATFLYSFRDSGVGDVTGFLALDNTNKLIVLSFRGSRSIENWIGNLNFDLKEINDICSGCRGHDGFTSSWFSVADTLRQKVEDAVREHPDYRVVFTGHSLGGALATVAGADLRGNGYDIDVFSYGAPRVGNRAFAEFLTVQTGGTLYRITHTNDIVPRLPPREFGYSHSSPEFWIKSGTLVPVRRRDIVKIEGIDATGGNNQPNIPDIPAHLWYFGLIGTCL

SEQ ID NO: 7027 - protein, 269 aa, Thermomyces lanuginosus
EVSQDLFNQFKLFAQYSAAAYCGKNNDAPAGTNITCTGNACPEVEKADATFLYSFKDSGVGDVTGFLALDNTNKQIVLSFRGSRSIENWIGNLNFDLKEINDICSGCRGHAGFTSSWRSVADTLRQKVEAAVREHPDYRVVFTGHSLGGALATIAGADLRGNGYDIDVFSYGAPRVGNRAFAEFLTVQTGGTLYRITHTNDIVPRLPPREFGYSHSSPEYWIKSGTLVPVTRNDIVKIEGIDATGGNNQPNIPDIPAHLWYFGRIGTCL

SEQ ID NO: 7028 - protein, 269 aa, Thermomyces lanuginosus
EVSQDLFNQFNLFAQYSAAAYCGKNNEAPAGTNITCTGNACPEVEKAQATFLYSFEDSGVGDVTGFLALDNTNKLIVLSFRGSRSIENWIGNLNFDLKEINDICSGCRGHDGFTSSWRSVADTLRQKVEAAVREHPQYRVVFTGHSLGGALATVAGADLRGNPYDIDVFSYGAPRVGNRAFAEFLTVQTGGTLYRITHTNDIVPRLPPREFGYSHSSPEYWIKSGTLVPVTRQDIVKIEGIDATGGNNQPNIPDIPAHLWYFGRIGTCL

SEQ ID NO: 7029 - protein, 269 aa, Thermomyces lanuginosus
EVSQDLFNQFNLFAQYSAAAYCGKNNDAPAGTNITCTGNACPEVEKADATFLYSFRNSGVGDVTGFLALDNTNKLIVLSFRGSRSIENWIGNLNFDLIEINDICSGCRGHDGFTSSWFSVADTLRQKVEDAVREHPDYRVVFTGHSLGGALATVAGADLRGNGYDIDVFSYGAPRVGNRAFAEFLTVQTGGTLYRITHTNDIVPRLPPREFGYSHSSPEYWIKSGTLVPVRRRDIVKIEGIDATGGNNQPNIPDITAHLWYFGLIGTCL

SEQ ID NO: 7030 - protein, 269 aa, Thermomyces lanuginosus
EVSQDLFNQFNLFAQYSKAAYCGKNNDAPAGTNITCTGNACPEVEKADATFLYSFEDSGVGDVTGFLALDNTNKLIVLSFRGSRSIENWIGNLNFDLKEINDICSGCRGHAGFTSSWRSVADTLRQKVEAAVREHPDYRVVFTGHSLGGALATIAWADLRGNGYDIDVFSYGAPRVGNRAFAEFLTTQQGGTLYRITHTNDIVPRLPPREFGYSHSSPEYWIKSGTLVPVTRNDIVKIEGIDATGGNNQPNIPDIPAHLWYFGLIGTCL

SEQ ID NO: 7031 - protein, 269 aa, Thermomyces lanuginosus
EVSRDLFNQFNLFAQYSAAAYCGKNNDAPAGTNITCTGNACPEVEKADATILYSFEDSGVGDVTGFLALDNTNKLIVLSFRGSRSIENWIGNLNFDLKEINDICSGCRGHDGFTSSWRSVADTLRQKVEDAVREHPDYRVVFAGHSLGGALATVAGADLRGDGYDIDVFSYGAPRVGNRAFAEFLTVQTGGTLYRITSTNDIVPRLPPREFGYSHSSPEYWIKSGTLVPVRRRDIVKIEGIDATGGNNQPNIPDIPAHLWYFGLIGTCL

SEQ ID NO: 7032 - protein, 269 aa, Thermomyces lanuginosus
EVSQDLFNQFNLFAQYSAAAYCGKNNDAPAGTNITCTGNACPEVEKADATFLYSFRDSGVGDVTGFLALDNTNKLIVLSFRGSRSIENWIGNLNFDLKEINDICSGCRGHDGFTSSWFSVADTLRQKVEDAVREHPDYRVVFTGHSLGGALATVAGADLRGNGYDIDVFSYGAPRVGNRAFAEFLTVQTGGTLYRITHTNDIVPRLPPREFGYSHSSPEFWIKSGTLVPVRRRDIVKIEGIDAEGGNNQPNIPDITAHLWYFGLIGTCL

SEQ ID NO: 7033 - protein, 269 aa, Thermomyces lanuginosus
EVSQDLFNQFNLFAQYSKAAYCGANNDAPAGTNITCTGNACPEVEKADATFLYSFEDSGVGDVTGFLALDNTNKQIVLSFRGSRSIENWIGNLNFDLKEINDICSGCRGHAGFTSSWRSVADTLRQKVEDAVREHPDYRVVFTGHSLGGALATVAWADLRGNGYDIDVFSYGAPRVGNRAFAEFLTNQTGGTLYRITHTNDIVPRLPPREFGYSHSSPEYWIKSGTLVPVTRNDIVKIEGIDATGGNNQPNIPDIPAHLWYFGRIGTCL

SEQ ID NO: 7034 - protein, 269 aa, Thermomyces lanuginosus
EVSQDLFNQFNLFAQYSAAAYCKANNDAPAGTNITCTGNACPEVEKADATFLYSFEDSGVGDVTGFLALDNTNKQIVLSFRGSRSIENWIGNLRFDLKEINDICSGCRGHDGFTSSWRSVADTLRQKVEDAVREHPDYRVVFTGHSLGGALATIAWADLRGNGYDIDVFSYGAPRVGNRAFAEFLTNQTGGTLYRITHTNDIVPRLPPREFGYSHSSPEYWIKSGTLVPVTRNDIVKIEGIDATGGNNQPNIPDIPAHLWYFGLIGTCL

SEQ ID NO: 7035 - protein, 269 aa, Thermomyces lanuginosus
EVSQDLFNQFRLFAQYSAAAYCGKNNDAPAGTQITCTGNACPEVEKADATFLYSFEDSGVGDVTGFLALDNTNKLIVLSFRGSRSIENWITNLNFDLKEINDICSGCRGHDGFTSSWRSVADTLRQKVEDAVREHPDYRVVFTGHSLGGALATVAGADLRGNWYDIDVFSYGAPRVGNRAFAEFLTVQTGGTLYRITHTNDIVPRLPPREFGYSHSSPEYWIKSGTLVPVRRRDIVKIEGIDATGGNNQPNIPSIPAHLWYFGLIGTCL

SEQ ID NO: 7036 - protein, 269 aa, Thermomyces lanuginosus
EVSQDLFNQFNLFAQYSAAAYCGKNNDAPAGTQITCTSNACPEVEKADATFLYSFEDSGVGDVTGFLALDNTNKLIVLSFRGSRSIENWIGNLNFDLKEINDICSGCRGHDGFTSSWRSVADTLRQKVEDAVREHPDYRVVFTGHSLGGALATVARADLRGNKYDIDVFSYGAPRWGNRAFAEFLTVQTGGTLYRITHTNDIVPRLPPREFGYSHSSPEYWIKSGTLVPVRRRDIVKIEGIDATGGNNQPNIPDIPAHLWYFGLIGTCL

SEQ ID NO: 7037 - protein, 269 aa, Thermomyces lanuginosus
EVSQDLFNQFNLFAQYSAAAYCGKNNQAPAGTQITCTGNACPEVEKADATFLYSFEDSGVGDVTGFLALDNTNKLIVLSFRGSRSIENWITNLNFDLKEINDICSGCRGHDGFTSSWRSVADTLRQKVEDAVREHPDYRVVFTGHSLGGALATVAGADLRGNKYDIDVFSYGAPRVGNRAFAEFLTVQTGGTLYRITHTNDIVPRLPPREFGYSHSSPDYWIKSGTLVPVRRRDIVKIEGIDATGGNNQPNIPDIPAHLWYFGLIGTCL

SEQ ID NO: 7038 - protein, 269 aa, Thermomyces lanuginosus
EVSQDLFNQFNLFAQYSAAAYCKKNNDAPAGTNITCTGNACPEVEKADATFLYSFEDSGVGDVTGFLALDNTNKQIVLSFRGSRSIENWIGNLRFDLKEINDICSGCRGHDGFTSSWRSVADTLRQKVEAAVREHPDYRVVFTGHSLGGALATIAGADLRGNGYDIDVFSYGAPRVGNRAFAEFLTNQTGGTLYRITHTNDIVPRLPPREFGYSHSSPEYWIKSGTLVPVTRNDIVKIEGIDATGGNNQPNIPDIPAHLWYFGRIGTCL

SEQ ID NO: 7039 - protein, 269 aa, Thermomyces lanuginosus
EVSQDLFNQFNLFAQYSAAAYCGKNNDAPAGTNITCTGNICPEVEKADATFLYSFRDSGVGDVTGFLALDNTNKLIVLSFRGSRSIENWIGNLNFDLKEINDICSGCRGHDGFTSSWFSVADTLRQKVEDAVREHPDYRVVFTGHSLGGALATVAGADLRGNSYDIDVFSYGAPRVGNRAFAEFLTVQTGGTLYRITHTNDIVPRLPPREFGYSHSSPEYWIKSGTLVPVRRRDIVKIEGIDATGGNNQPNIPDITAHLWYFGLIGTCL

SEQ ID NO: 7040 - protein, 269 aa, Thermomyces lanuginosus
EVSQDLFNQFNLFAQYSKAAYCGKNNDAPAGTNITCTGNACPEVFKADATFLYSFEDSGVGDVTGFLALDNTNKQIILSFRGSRSIENWIGNLNFDLKEINDICSGCRGHDGFTSSWRSVADTLRQKVEDAVREHPDYRVVFTGHSLGGALATVAWADLRGNGYDIDVFSYGAPRVGNRAFAEFLTTQDGGTLYRITHTNDIVPRLPPREFGYSHSSPEYWIKSGTLVPVTRNDIVKIEGIDATGGNNQPNIPDIPAHLWYFGLIGTCL

SEQ ID NO: 7041 - protein, 269 aa, Thermomyces lanuginosus
EVSQDLFNQFNLFAQYSAAAYCGKNNDAPAGTNITCTGNACPEVEKADATFLYSFRDSGVGDVTGFLALDNTNKLIVLSFRGSRSIENWIGNLNFDLIEINDICSGCRGHDGFTSSWFSVADTLRQKVEDAVREHPDYRVVFTGHSLGGALATVAGADLRGNGYDIDVFSYGAPRVGNRAFAEFLTVQTGGTLYRITHTNDIVPRLPPREFGYSHSSPEFWIKSGTLVPVRRRDIVKIEGIDATGGNNQPNIPDITAHLWYFGLIGTCL

SEQ ID NO: 7042 - protein, 269 aa, Thermomyces lanuginosus
EVSQDLFNQFNLFAQYSAAAYCKKNNSAPAGTNITCTGNACPEVEKADATFLYSFEDSGVGDVTGFLALDNTNKQIVLSFRGSRSIENWIGNLNFDLKEINDICSGCRGHDGFTSSWRSVADTLRQKVEDAVREHPDYRVVFTGHSLGGALATIAWADLRGNGYDIDVFSYGAPRVGNRAFAEFLTNQTGGTLYRITHTNDIVPRLPPREFGYSHSSPEYWIKSGTLVPVTRNDIVKIEGIDATGGNNQPNIPDIPAHLWYFGRIGTCL

SEQ ID NO: 7043 - protein, 269 aa, Thermomyces lanuginosus
EVSQDLFNQFNLFAQYSAAAYCGKNNDAPAGTNITCTGNACPEVEKADATFLYSFEDSGVGDVTGFLALDNTNKLIVLSFRGSRSIENWIPNLNFDLKEINDICSGCRGHDGFTSSWRSVADTLRQKVEDAVREHPDYRVVFTGHSLGGALATVAGADLRGNGYDIDVFSYGAPRVGNRAFAEFLTVQTGGTLYRITHTNDIVPRLPPREFGYSHSSPEYWIKSGTLVPVTRNDIVKIEGIDATGGNNQPNIPDIPAHLWYFGLIGTCL

SEQ ID NO: 7044 - protein, 269 aa, Thermomyces lanuginosus
EVSQDLFNQFNLFAQYSAAAYCGKNNDAPAGTNITCTGNACPEVEKADATFLYSFEDSGVGDVTGFLALDNTNKLIVLSFRGSRSIENWICNLNFDLKEINDICSGCRGHDGFTSSWRSVADTLRQKVEDAVREHPDYRVVFTGHSLGGALATVAGADLRGNGYDIDVFSYGAPRVGNRAFAEFLTVQTGGTLYRITHTNDIVPRLPPREFGYSHSSPEYWIKSGTLVPVTRNDIVKIEGIDATGGNNQPNIPDIPAHLWYFGLIGTCL

SEQ ID NO: 7045 - protein, 269 aa, Thermomyces lanuginosus
EVSQDLFNQFNLFAQYSAAAYCGKNNDAPAGTNITCTGNACPEVEKADATFLYSFEDSGVGDVTGFLALDNTNKLIVLSFRGSRSIENWIDNLNFDLKEINDICSGCRGHDGFTSSWRSVADTLRQKVEDAVREHPDYRVVFTGHSLGGALATVAGADLRGNGYDIDVFSYGAPRVGNRAFAEFLTVQTGGTLYRITHTNDIVPRLPPREFGYSHSSPEYWIKSGTLVPVTRNDIVKIEGIDATGGNNQPNIPDIPAHLWYFGLIGTCL

SEQ ID NO: 7046 - protein, 269 aa, Thermomyces lanuginosus
EVSQDLFNQFNLFAQYSAAAYCGKNNDAPAGTNITCTGNACPEVEKADATFLYSFEDSGVGDVTGFLALDNTNKLIVLSFRGSRSIENWIGNLNFDLKEINDICSGCRGHDGFTSSWRSVADTLRQKVEDAVREHPDYRVVFTGHSLGGALATVAGADLRGNGYDIDVFSYGAPRVGNRAFAEFLTVQTGGTLYRITHTNDIVPRLPPREFGYSHPPPEYWIKSGTLVPVTRNDIVKIEGIDATGGNNQPNIPDIPAHLWYFGLIGTCL

SEQ ID NO: 7047 - protein, 269 aa, Thermomyces lanuginosus
EVSQDLFNQFNLFAQYSAAAYCGKNNDAPAGTNITCTGNACPEVEKADATFLYSFEDSGVGDVTGFLALDNTNKLIVLSFRGSRSIENWIGNLNFDLKEINDICSGCRGHKGFTSSWRSVADTLRQKVEDAVREHPDYRVVFTGHSLGGALATVAGADLRGNGYDIDVFSYGAPRVGNRAFAEFLTVQTGGTLYRITHTNDIVPRLPPREFGYSHSSPEYWIKSGTLVPVTRNDIVKIEGIDATGGNNQPNIPDIPAHLWYFGLIGTCL

SEQ ID NO: 7048 - protein, 269 aa, Thermomyces lanuginosus
EVSQDLFNQFNLFAQYSAAAYCGKNNDAPAGTQITCTGNACPEVEKADATFLYSFEDSGVGDVTGFLALDNTNKLIVLSFRGSRSIENWIANLNFDLKKINDICSGCRGHDGFTSSWRSVADTLRQKVEDAVREHPDYRVVFTGHSLGGALATVAGADLRGNGYDIDVFSYGAPRVGNRAFAEFLTVQTGGTLYRITHTNDIVPRLPPREFGYSHSSPEYWIKSGTLVPVRRRDIVKIEGIDATGGNNRPNIPDRPAHLWYFGLIGTCL

SEQ ID NO: 7049 - protein, 269 aa, Thermomyces lanuginosus
EVSQDLFNQFNLFAQYSAAAYCGKNNDAPAGTQITCTGNACPEVEKADATFLYSFEDSGVGDVTGFLALDNTNKLIVLSFRGSRSIENWIANLNFDLKKINDICSGCRGHDGFTSSWRSVADTLRQKVEDAVREHPDYRVVFTGHSLGGALATVAGADLRGNGYDIDVFSYGAPRVGNRAFAEFLTVQTGGTLYRITHTNDIVPRLPPREFGYSHSSPEYWIKSGTLVPVRRRDIVKIEGIDARGGNNRPNIPDIPAHLWYFGLIGTCL

SEQ ID NO: 7050 - protein, 269 aa, Thermomyces lanuginosus
EVSQDLFNQFNLFAQYSAAAYCGKNNDAPAGTNITCTGNACPEVEKADATFLYSFEDSGVGDVTGFLALDNTNKLIVLSFRGSRSIENWIANLNFFLKKINDICSGCRGHDGFTSSWRSVADTLRQKVEDAVREHPDYRVVFTGHSLGGALATVAGADLRGNGYDIDVFSYGAPRVGNRAFAEFLTVQTGGTLYRITHTNDIVPRLPPREFGYSHSSPEYWIKSGTLVPVTRNDIVKIEGIDATGGNNQPNIPDIPAHLWYFGATDACL

SEQ ID NO: 7051 - protein, 269 aa, Thermomyces lanuginosus
EVSQDLFNQFNLFAQYSAAAYCGKNNDAPAGTNITCTGNACPEVEKADATFLYSFEDSGVGDVTGFLALDNTNKLIVLSFRGSRSIENWIANLNFGLKKINDICSGCRGHDGFTSSWRSVADTLRQKVEDAVREHPDYRVVFTGHSLGGALATVAGADLRGNGYDIDVFSYGAPRVGNRAFAEFLTVQTGGTLYRITHTNDIVPRLPPREFGYSHSSPEYWIKSGTLVPVTRNDIVKIEGIDATGGNNQPNIPDIPAHLWYFGATDACL

SEQ ID NO: 7052 - protein, 269 aa, Thermomyces lanuginosus
EVSQDLFNQFNLFAQYSAAAYCGKNNDAPAGTNITCTGNACPEVEKADATFLYSFEDSGVGDVTGFLALDNTNKLIVLSFRGSRSIENWIANLNFWLKKINDICSGCRGHDGFTSSWRSVADTLRQKVEDAVREHPDYRVVFTGHSLGGALATVAGADLRGNGYDIDVFSYGAPRVGNRAFAEFLTVQTGGTLYRITHTNDIVPRLPPREFGYSHSSPEYWIKSGTLVPVTRNDIVKIEGIDATGGNNQPNIPDIPAHLWYFGATSACL

SEQ ID NO: 7053 - protein, 269 aa, Thermomyces lanuginosus
EVSQDLFNQFNLFAQYSAAAYCGKNNDAPAGTNITCTGNACPEVEKADATFLYSFEDSGVGDVTGFLALDNTNKLIVLSFRGSRSIENWIANLNFFLKKINDICSGCRGHDGFTSSWRSVADTLRQKVEDAVREHPDYRVVFTGHSLGGALATVAGADLRGNGYDIDVFSYGAPRVGNRAFAEFLTVQTGGTLYRITHTNDIVPRLPPREFGYSHSSPEYWIKSGTLVPVTRNDIVKIEGIDATGGNNQPNIPDIPAHLWYFGATSACL

SEQ ID NO: 7054 - protein, 269 aa, Thermomyces lanuginosus
EVSQDLFNQFNLFAQYSAAAYCGKNNDAPAGTNITCTGNACPEVEKADATFLYSFEDSGVGDVTGFLALDNTNKLIVLSFRGSRSIENWIANLNFSLKKINDICSGCRGHDGFTSSWRSVADTLRQKVEDAVREHPDYRVVFTGHSLGGALATVAGADLRGNGYDIDVFSYGAPRVGNRAFAEFLTVQTGGTLYRITHTNDIVPRLPPREFGYSHSSPEYWIKSGTLVPVTRNDIVKIEGIDATGGNNQPNIPDIPAHLWYFGATDACL

SEQ ID NO: 7055 - protein, 269 aa, Thermomyces lanuginosus
EVSQDLFNQFNLFAQYSAAAYCGKNNDAPAGTNITCTGNACPEVEKADATFLYSFEDSGVGDVTGFLALDNTNKLIVLSFRGSRSIENWIANLNFRLKKINDICSGCRGHDGFTSSWRSVADTLRQKVEDAVREHPDYRVVFTGHSLGGALATVAGADLRGNGYDIDVFSYGAPRVGNRAFAEFLTVQTGGTLYRITHTNDIVPRLPPREFGYSHSSPEYWIKSGTLVPVTRNDIVKIEGIDATGGNNQPNIPDIPAHLWYFGATDACL

SEQ ID NO: 7056 - protein, 269 aa, Thermomyces lanuginosus
EVSQDLFNQFNLFAQYSAAAYCGKNNDAPAGTNITCTGNACPEVEKADATFLYSFEDSGVGDVTGFLALDNTNKLIVLSFRGSRSIENWIANLNFQLKKINDICSGCRGHDGFTSSWRSVADTLRQKVEDAVREHPDYRVVFTGHSLGGALATVAGADLRGNGYDIDVFSYGAPRVGNRAFAEFLTVQTGGTLYRITHTNDIVPRLPPREFGYSHSSPEYWIKSGTLVPVTRNDIVKIEGIDATGGNNQPNIPDIPAHLWYFGATDACL

SEQ ID NO: 7057 - protein, 192 aa, Humicola insolens
GAIENDLESGSADACPDAILIFARGSTEPGNMGITVGPALANGLEEHIRNIWIQGVGGPYDAALATNFLPRGTSQANIDEGKRLFHLAHQKCPNTPVVAGGYSQGAALIAAAVSELSGAVKEQVKGVVLFGYTQNLQNRGGIPNYPRERTKVFCNVGDAVCTGTLIITPAHLSYTIEARGEAARFLVDRIRA

SEQ ID NO: 7058 - protein, 268 aa, Thermomyces lanuginosus
VSQDLFNQFNLFAQYSAAAYCGKNNDAPAGTQITCTANACPEVEKADATFLYSFEDSGVGDVTGFLALDNTNKLIVLSFRGSRSIENWITNLNFDLKEINDICSGCRGHDGFTSSWRSVADTLRQKVEDAVREHPDYRVVFTGHSLGGALATVAGADLRGNPYDIDVFSYGAPRFGNRAFAEFLTVQTGGTLYRITHTNDIVPRLPPREFGYSHSSPEYWIKSGTLVPVRRRDIVKIEGIDATGGNNQPNIPDIPAHLWYFGLIGTCL

SEQ ID NO: 7059 - protein, 268 aa, Thermomyces lanuginosus
VSQDLFNQFNLFAQYSAAAYCGKNNRAPAGTNITCTGNACPEVEKADATILYSFRDSGVGDVTGFLALDNTNKLIVLSFRGSRSIENWIGNLNFDLEEINDICSGCRGHDGFTSSWRSVADTLRQKVEDAVREHPDYRVVFTGHSLGGALATVAGADLRGNGYDIDVFSYGAPRVGNRAFAEFLTVQTGGTLYRITHTNDIVPRLPPREFGYSHSSPEYWIKSGTLVPVRRCDIVKIEGIDATGGNNQPNIPSIPAHLWYFGLIGTCL

SEQ ID NO: 7060 - protein, 268 aa, Thermomyces lanuginosus
VSQDLFNQFNLFAQYSAAAYCGKNNDAPAGTNITCTGNACPEVEKADATFLYSFEDSGKGDVTGFLALDNTNKLIVLSFRGSRSVENWIGNLNFDLKEINDICSGCRGHDGFTSSWRSVADTLRQKVEDAVREHPDYRVVFTGHSLGGGLATVAGADLRGNGYDIDVFSYGAPRVGNRAFAEFLTVQTGGTLYRITHTNDIVPRLPPREFGYSHSSPEYWIKSGTGVPVRRRDIVKIEGIDATGGNNQPNIPDIKAHLWYFGLIGTCL

SEQ ID NO: 7061 - protein, 268 aa, Thermomyces lanuginosus
EVSQDLFNQFNLFAQYSAAAYCGKNNDAPAGTNITCTGNACPEVEKADATFLYSFEDSGVGDVTGFLALDNTNKLIVLSFRGSRSIENWIGNLNFDLKEINDICSGCRGHDGFTSSWRSVADTLRQKVEDAVREHPDYRVVFTGHSLGGALATVAGADLRGNGYDIDVFSYGAPRVGNRAFAEFLTVQTGGTLYRITHTNDIVPRLPPREFGYSHSSPEYWIKSGTLVVTRNDIVKIEGIDATGGNNQPNIPDIPAHLWYFGLIGTCL

SEQ ID NO: 7062 - protein, 268 aa, Thermomyces lanuginosus
EVSQDLFNQFNLFAQYSAAAYCGKNNDAPAGTNITCTGNACPEVEKADATFLYSFEDSGVGDVTGFLALDNTNKLIVLSFRGSRSIENWIVNLNFDLKEINDICSGCRGHDGFTSSWRSVADTLRQKVEDAVREHPDYRVVFTGHSLGGALATVAGADLRGNGYDIDVFSYGAPRVGNRAFAEFLTVQTGGTLYRITHTNDIVPRLPPREFGYSHSSPEYWIKSGTLVPVTRNDIVKIEGIDATGGNNQPNIPDIPAHLWYFGLIGTC

SEQ ID NO: 7063 - protein, 268 aa, Thermomyces lanuginosus
EVSQDLFNQFNLFAQYSAAAYCGKNNDAPAGTNITCTGNACPEVEKADATFLYSFEDSGVGDVTGFLALDNTNKLIVLSFRGSRSIENWIANLNFWLKEINDICSGCRGHDGFTSSWRSVADTLRQKVEDAVREHPDYRVVFTGHSLGGALATVAGADLRGNGYDIDVFSYGAPRVGNRAFAEFLTVQTGGTLYRITHTNDIVPRLPPREFGYSHSSPEYWIKSGTLVPVTRNDIVKIEGIDATGGNNQPNIPDIPAHLWYFQATDAC

SEQ ID NO: 7064 - protein, 268 aa, Thermomyces lanuginosus
EVSQDLFNQFNLFAQYSAAAYCGKNNDAPAGTNITCTGNACPEVEKADATFLYSFEDSGVGDVTGFLALDNTNKLIVLSFRGSRSIENWIANLNFWLKEINDICSGCRGHDGFTSSWRSVADTLRQKVEDAVREHPDYRVVFTGHSLGGALATVAGADLRGNGYDIDVFSYGAPRVGNRAFAEFLTVQTGGTLYRITHTNDIVPRLPPREFGYSHSSPEYWIKSGTLVPVTRNDIVKIEGIDATGGNNQPNIPDIPAHLWYFQATSAC

SEQ ID NO: 7065 - protein, 268 aa, Thermomyces lanuginosus
EVSQDLFNQFNLFAQYSAAAYCGKNNDAPAGTNITCTGNACPEVEKADATFLYSFEDSGVGDVTGFLALDNTNKLIVLSFRGSRSIENWIANLNFFLKEINDICSGCRGHDGFTSSWRSVADTLRQKVEDAVREHPDYRVVFTGHSLGGALATVAGADLRGNGYDIDVFSYGAPRVGNRAFAEFLTVQTGGTLYRITHTNDIVPRLPPREFGYSHSSPEYWIKSGTLVPVTRNDIVKIEGIDATGGNNQPNIPDIPAHLWYFQATDAC

SEQ ID NO: 7066 - protein, 268 aa, Thermomyces lanuginosus
EVSQDLFNQFNLFAQYSAAAYCGKNNDAPAGTNITCTGNACPEVEKADATFLYSFEDSGVGDVTGFLALDNTNKLIVLSFRGSRSIENWIANLNFFLKEINDICSGCRGHDGFTSSWRSVADTLRQKVEDAVREHPDYRVVFTGHSLGGALATVAGADLRGNGYDIDVFSYGAPRVGNRAFAEFLTVQTGGTLYRITHTNDIVPRLPPREFGYSHSSPEYWIKSGTLVPVTRNDIVKIEGIDATGGNNQPNIPDIPAHLWYFQATSAC

SEQ ID NO: 7067 - protein, 267 aa, Thermomyces lanuginosus
EVSQDLFNQFNLFAQYSAAAYCGKNNDAPAGTNITCTGNACPEVEKADATFLYSFEDSGVGDVTGFLALDNTNKLIVLSFRGSRSIENWIGNLNFDLKEINDICSGCRGHDGFTSSWRSVADTLRQKVEDAVREHPDYRVVFTGHSLGGALATVAGADLRGNGYDIDVFSYGAPRVGNRAFAEFLTVQTGGTLYRITHTNDIVPRLPPFGYSHSSPEYWIKSGTLVPVTRNDIVKIEGIDATGGNNQPNIPDIPAHLWYFGLIGTCL

SEQ ID NO: 7068 - protein, 267 aa, Thermomyces lanuginosus
EVSQDLFNQFNLFAQYSAAAYCGKNNDAPAGTNITCTGNACPEVEKADATFLYSFEDSGVGDVTGFLALDNTNKLIVLSFRGSRSIENWIGNLNFDLKEINDICSGCRGHDGFTSSWRSVADTLRQKVEDAVREHPDYRVVFTGHSLGGALATVAGADLRGNGYDIDVFSYGAPRVGNRAFAEFLTVQTGGTLYRITHTNDIVPRLPPREGSHSSPEYWIKSGTLVPVTRNDIVKIEGIDATGGNNQPNIPDIPAHLWYFGLIGTCL

SEQ ID NO: 7069 - protein, 266 aa, Thermomyces lanuginosus
EVSQDLFNQFNLFAQYSAAAYCGKNNDAPAGTNITCTGNACPEVEKADATFLYSFEDSGVGDVTGFLALDNTNKLIVLSFRGSRSIENWIGNLNFDLKEINDICSGCRGHDGFTSSWRSVADTLRQKVEDAVREHPDYRVVFTGHSLGGALATVAGADLRGNGYDIDVFSYGAPRVGNRAFAEFLTVQTGGTLYRITHTNDIVPRLPPREFGYSHSSPEYWIKSGTLVPVTRNDIVKIGATGGNNQPNIPDIPAHLWYFGLIGTCL

SEQ ID NO: 7070 - protein, 262 aa, Thermomyces lanuginosus
EVSQDLFNQFNLFAQYSAAAYCGKNNDAPAGTNITCTGNACPEVEKADATFLYSFEDSGVGDVTGFLALDNTNKLIVLSFRGSSTIENWIANLNFSLKEINDICSGCRGHDGFTSSWRSVADTLRQKVEDAVREHPDYRVVFTGHSLGGALATVAGADLRGNGYDIDVFSYGAPRVGNRAFAEFLTVQTGGTLYRITHTNDIVPRLPPREFGYSHSSPEYWIKSGTLVPVRRRDIVKIEGIDATGGNNQPNIPDIPAHPWYF

SEQ ID NO: 7071 - protein, 291 aa, Thermomyces lanuginosus
MRSSLVLFFVSAWTALASPIRREVSQDLFNQFNLFAQYSAAAYCGKNNDAPAGTNITCTGNACPEVEKADATFLYSFEDNGSGDVTGFLALDNTNKLIVLSFRGSRSVENWIGNLNFDLKEINDICSGCRGHDGFTSSWRSVADTLRQKVEDAVREHPDYRVVFTGHSLGGGLATVAGADLRGNGYDIDVFSYGAPRVGNRAFAEFLTVQTGGTLYRITHTNDIVPRLPPREFGYSHSSPEYWIKSGTGVPVRRRDIVKIEGIDATGGNNQPNIPDIKAHLWYFGLIGTCL

SEQ ID NO: 7072 - protein, 291 aa, Thermomyces lanuginosus
MRSSLVLFFVSAWTALASPIRREVSVDLFNQFNLFAQYSAAAYCGKNNDAPAGTNITCTGNACPEVEKADATFLYSFEDNGSGDVTGFLALDNTNKLIVLSFRGSRSVENWIGNLNFDLKEINDICSGCRGHDGFTSSWRSVADTLRQKVEDAVREHPDYRVVFTGHSLGGGLATVAGADLRGNGYDIDVFSYGAPRVGNRAFAEFLTVQTGGTLYRITHTNDIVPRLPPREFGYSHSSPEYWIKSGTLVPVRRRDIVKIEGIDATGGNNQPNIPDVPAHLWYFGLIGTCL

SEQ ID NO: 7073 - protein, 291 aa, Thermomyces lanuginosus
MRSSLVLFFVSAWTALASPIRREVSQDLFNQFNLFAQYSAAAYCGKNNDAPAGTNITCTGNACPEVEKADATFLYSFEDXGVGDVTGFLALDNTNKLIVLSFRGSRSXENWIGNLNFDLKEINDICSGCRGRDGFTSSWRSVADTLRQKVEDAVREHPDYRVVFTGXSLGGALATVAGADLRGNGYDIDVFSYGAPRVGNRAFAEFLTVQTGGTLYRITRTNDIVPRLPPREFGYSHSSPEYWIKSGTLVPVTRNDIVKXCGIDATGGNNQPNIPDIPAHLHYFGLIGTCL

SEQ ID NO: 7074 - protein, 291 aa, Synthetic construct
MRSSLVLFFVSAWTALASPIRREVSQDLFNQFNLFAQYSAAAYCGKNNDAPAGTNITCTGNACPEVEKADATFLYSFEDSGVGDVTGFLALDNTNKLIVLSFRGSRSIENWIGNLNFDLKEINDICSGCRGHDGFTSSWRSVAHTLSQKVQDAEREHPDYRVLFTGHSLVGALATVAGADLRGNGYDIDVFSYGAPRVGNRAFAEFLTVQTGGTLYRITHTNDIVPRLPPREFGYSHSSPEYWIKSGTLVPVTRNANVKIEGIDATGGNNQPNIPDIPAHLWYFGLIGTCL

SEQ ID NO: 7075 - protein, 291 aa, Thermomyces lanuginosus
MRSSLVLFFVSAWTALASPIRRNVSQDLFNQFNLFAQYSAAAYCGKNNDAPAGTNITCTGNACPEVEKADATFLYSFEDSGKGDVTGFLALDNTNKLIVLSFRGSRSVENWIGNLNFDLKEINDICSGCRGHDGFTSSWRSVADTLRQKVEDAVREHPDYRVVFTGHSLGGGLATVAGADLRGNGYDIDVFSYGAPRVGNRAFAEFLTVQTGGTLYRITHTNDIVPRLPPREFGYSHSSPEYWIKSGTGVPVRRRDIVKIEGIDATGGNNQPNIPDIKAHLWYFGLIGTCL

SEQ ID NO: 7076 - protein, 291 aa, Thermomyces lanuginosus
MRSSLVLFFVSAWTALASPIRREVSVDLFNQFNLFAQYSAAAYCGKNNDAPAGTNITCTGNACPEVEKADATFLYSFEDNGSGDVTGFLALDNTNKLIVLSFRGSRSIENWAGNLNFDLKEINDICSGCRGHDGFTSSWRSVADTLRQKVEDAVREHPDYRVVFTGHSLGGGLATVAGADLRGNGYDIDVFSYGAPRVGNRAFAEFLTVQTGGTLYRITHTNDIVPRLPPREFGYSHSSPEYWIKSGTLVPVRRRDIVKIEGIDATGGNNQPNIPDVPAHLWYFGLIGTCL

SEQ ID NO: 7077 - protein, 291 aa, Thermomyces lanuginosus
MRSSLVLFFVSAWTALASPIRREVSQDLFNQFNLFAQYSAAAYCGKNNDAPAGTNITCTGNACPEVEKADATFLYSFEDSGVGDVTGFLALDNTNKLIVLSFRGTRSITNWILDLNYTPQEINDICSGCRGHDGFTSSWRSVADTLRQKVEDAVREHPDYRVVFTGHSLGGALATVAGADLRGNGYDIDVFSYGAPRVGNRAFAEFLTVQTGGTLYRITHTNDIVPRLPPREFGYSHSSPEYWIKSGTLVPVTRNDIVKIEGIDATGGNNQPNIPDIPAHLWYFGLIGTCL

SEQ ID NO: 7078 - protein, 291 aa, Thermomyces lanuginosus
MRSSLVLFFVSAWTALASPIRREVSQDLFNQFNLFAQYSAAAYCGKNNDAPAGTNITCTGNACPEVEKADATFLYSFEDAGSGDVTGFLALDNTNKLIVLSFRGSRSVENWIGNLNFDLKEINDICSGCRGHDGFTSSWRSVADTLRQKVEDAVREHPDYRVVFTGHSLGGGLATVAGADLRGNGYDIDVFSYGAPRVGNRAFAEFLTVQTGGTLYRITHTNDIVPRLPPREFGYSHSSPEYWIKSGTGVPVRRRDIVKIEGIDATGGNNQPNIPDIKAHLWYFGLIGTCL

SEQ ID NO: 7079 - protein, 291 aa, Thermomyces lanuginosus
MRSSLVLFFVSAWTALASPIRREVSQDLFNQFNLFAQYSAAAYCGKNNDAPAGTNITCTGNACPEVEKADATFLYSFEDSGVGCVTGFLALDNTNKLIVLSFRGSRSPCNWIANLDFIFDEINDICSGCRGHDGFTSSWRSVADTLRQKVEDAVREHPDYRVVFTGHSLGGALATVAGADLRGNGYDIDVFSYGAPRVGNRAFAEFLTVQTGGTLYRITHTNDIVPRLPPREFGYSHSSPEYWIKSGTLVPVTRNDIVKIEGIDATGGNNQPNIPDIPAHLWYFGLIGTCL

SEQ ID NO: 7080 - protein, 291 aa, Thermomyces lanuginosus
MRSSLVLFFVSAWTALASPIRREVSQDLFNQFNLFAQYSAAAYCGKNNRAPAGTNITCTGNACPEVEKADATFLYSFEDSGKGDVTGFLALDNTNKLIVLSFRGSRSVENWIGNLNFDLKEINDICSGCRGHDGFTSSWRSVADTLRQKVEDAVREHPDYRVVFTGHSLGGGLATVAGADLRGNGYDIDVFSYGAPRVGNRAFAEFLTVQTGGTLYRITHTNDIVPRLPPREFGYSHSSPEYWIKSGTGVPVRRRDIVKIEGIDATGGNNQPNIPDIKAHLWYFGLIGTCL

SEQ ID NO: 7081 - protein, 291 aa, Thermomyces lanuginosus
MRSSLVLFFVSAWTALASPIRREVSQDLFNQFNLFAQYSAAAYCGKNNDAPAGTNITCTGNACPTVEIADATFLYSFEDNGSGDVTGFLALDNTNKLIVLSFRGSRSIENWIGNLNFDLKEINDICSGCRGHDGFTSSWRSVADTLRQKVEDAVREHPDYRVVFTGHSLGGALATVAGADLRGNGYDIDVFSYGAPRVGNRAFAEFLTVQTGGTLYRITHTNDIVPRLPPREFGYSHSSPEYWIKSGTLVPVRRRDIVKIEGIDATGGNNLPNIPIIPAHLWYFGLIGTCL

SEQ ID NO: 7082 - protein, 291 aa, Thermomyces lanuginosus
MRSSLVLFFVSAWTALASPIRREVSQDLFNQFNLFAQYSAAAYCGKNNDAPAGTNITCTGNACPEVEKADATFLYSFEDSGKGDVTGFLALDNTNKLIVLSFRGSRSVENWIGNLNFDLKEINDICSGCRGHDGFTSSWRSVADTLRQKVEDAVREHPDYRVVFTGHSLGGGLATVAGADLRGNGYDIDVFSYGAPRVGNRAFAEFLTVQTGGTLYRITHTNDIVPRLPPREFGYSHSSPEYWINSSTLVPVRRRDIVKIEGIDATGGNNQPNIPDIKAHLWYFGLIGTCL

SEQ ID NO: 7083 - protein, 290 aa, Thermomyces lanuginosus
MRSSLVLFFVSAWTALASPIRREVSQDLFNQFNLFAQYSAAAYCGKNNDAPAGTNITCTGNACPEVEKADATFLYSFEDSGVGDVTGFLALDNTNKLIVLSFRGSRSIENWIANLNFWLKKINDICSGCRGHDGFTSSWRSVADTLRQKVEDAVREHPDYRVVFTGHSLGGALATVAGADLRGNGYDIDVFSYGAPRVGNRAFAEFLTVQTGGTLYRITHTNDIVPRLPPREFGYSHSSPEYWIKSGTLVPVTRNDIVKIEGIDATGGNNQPNIPDIPAHLWYFQATDAC

SEQ ID NO: 7084 - protein, 274 aa, Thermomyces lanuginosus
SPPRRPVSQDLFNQFNLFAQYSAAAYCGKNNDAPAGTNITCTGNACPEVEKADATFLYSFEDSGVGDVTGFLALDNTNKLIVLSFRGSRSIENWIANLNFWLKEINDICSGCRGHDGFTSSWRSVADTLRQKVEDAVREHPDYRVVFTGHSLGGALATVAGADLRGNGYDIDVFSYGAPRVGNRAFAEFLTVQTGGTLYRITHTNDIVPRLPPREFGYSHSSPEYWIKSGTLVPVTRNDIVKICGIDATGGNNRPNIPDIPAHLWYFGPISTCL

SEQ ID NO: 7085 - protein, 274 aa, Thermomyces lanuginosus
SPPRRPVSQDLFNQFNLFAQYSAAAYCGKNNDAPAGTNITCTGNACPEVEKADATFLYSFEDSGVGDVTGFLALDNTNKLIVLSFRGSRSIENWIANLNFWLKEINDICSGCRGHDGFTSSWRSVADTLRQKVEDAVREHPDYRVVFTGHSLGGALATVAGADLRGNGYDIDVFSYGAPRVGNRAFAEFLTVQTGGTLYRITHTNDIVPRLPPREFGYSHSSPEYWIKSGTLVPVTRNDIVKICGIDATGGNNRPNIPDITAHLWYFGLIDTCL

SEQ ID NO: 7086 - protein, 274 aa, Thermomyces lanuginosus
SPIRREVSQDLFNQFNLFAQYSAAAYCGKNNDAPAGTNITCTGNACPEVEKADATFLYSFEDNGSGDVTGFLALDNTNKLIVLSFRGSRSVENWIGNLNFDLKEINDICSGCRGHDGFTSSWRSVADTLRQKVEDAVREHPDYRVVFTGHSLGGGLATVAGADLRGNGYDIDVFSYGAPRVGNRAFAEFLTVQTGGTLYRITHTNDIVPRLPPRKFGYSHSSPEYWIKSGTGVPVRRRDIVKIEGIDATGGNNRPNIPDIKAHLWYFGLIGTCL

SEQ ID NO: 7087 - protein, 275 aa, Synthetic construct
SPIRREVSQDLFNQFNLFAQYSAAAYCGKNNDAPAGTNITCTGNACPEVEKADATFLYSFEGSVVGDVTGFLALDNTNKLIVLSFRGSRSIENWIGNLNFLMKEINDICSGCRGHDGFTSPWRSVADTLRQKVEDAVREHPDYRVVFTGHSLGGALATVAGADLRGNGYDIDVFPYGAPRVGNRAFAEFLTVQTGGTLYRITHTNDIVPRLPPREFGYSHSSPEYWIKSGTLVPVTRNDIVKIEGIDATGGNRNQPNIPDIPAHLWYFGLIGTCL

SEQ ID NO: 7088 - protein, 274 aa, Thermomyces lanuginosus
SPIRREVSVDLFNQFNLFAQYSAAAYCGKNNDAPAGTNITCTGNACPEVEKADATFLYSFEDTGKGDVTGFLALDNTNKLIVLSFRGSRSIENWIGNLNFDLKEINDICSGCRGHDGFTSSWRSVADTLRQKVEDAVREHPDYRVVFTGHSLGGALATVAGADLRGNGYDIDVFSYGAPRVGNRAFAEFLTVQTGGTLYRITHLADIVPRLPPRKFGYSHSSPEYWIKSGTLVPVRRRDIVKIEGIDATGGNNQPNIPDAKAHLWYFGLIGTCL

SEQ ID NO: 7089 - protein, 274 aa, Thermomyces lanuginosus
SPIRREVSQDLFNQFNLFAQYSAAAYCGKNNDAPAGTNITCTGNACPEVEKADATFLYSFEDTGKGDVTGFLALDNTNKLIVLSFRGSRSVENWIGNLKFDLKEINDICSGCRGHDGFTSSWRSVADTLRQKVEDAVREHPDYRVVFTGHSLGGGLATVAGADLRGNGYDIDVFSYGAPRVGNRAFAEFLTVQTGGTLYRITHTNDIVPRLPPRVFGYSHSSPEYWIKSGTGVPVRRRDIVKIEGIDATGGNNQPNIPDIKAHLWYFGLIGTCL

SEQ ID NO: 7090 - protein, 274 aa, Thermomyces lanuginosus
SPIRREVSQDLFNQFNLFAQYSAAAYCGKNNDAPAGTNITCTGNACPEVEKADATFLYSFEDAGVGDVTGFLALDNTNKLIVLSFRGSRSIENWIGNLNFDLKEINDICSGCRGRDGFTSSWRSVADTLRQKVEDAVREHPDYRVVFTGXSLGGALATVAGADLRGNGYDIDVFSYGAPRVGNRAFAEFLTVQTGGTLYRITXTNDIVPRLPPREFGYXXSSPEYWIKSGTLVPVTRNDIVKIEGIDATGGNNQPNIPDIPAHLWYFGLIGTCL

SEQ ID NO: 7091 - protein, 274 aa, Thermomyces lanuginosus
SPIRREVSNDSFNQFNLFAQYSAAAYCGKNNDAPAGTNITCTGNACPEVEKADATFLYSFEDNGSGDVTGFLALDNTNKLIVLSFRGSRSVENWIGNLNFDLKEINDICSGCRGHDGFTSSWRSVADTLRQKVEDAVREHPDYRVVFTGHSLGGGLATVAGADLRGNGYDIDVFSYGAPRVGNRAFAEFLTVQTGGTLYRITHTNDIVPRLPPREFGYSHSSPEYWIKSGTGVPVRRRDIVKIEGIDATGGNNQPNIPDIKAHLWYFGLIGTCL

SEQ ID NO: 7092 - protein, 274 aa, Thermomyces lanuginosus
SPIRREVSQDLFNQFNLFAQYSAAAYCGKNNDAPAGTNITCTGNACPEVEKADATFLYSFEDSGVGCVTGFLALDNTNKLIVLSFRGSRSPCNWIANLDFIFDEINDICSGCRGHDGFTSSWRSVADTLRQKVEDAVREHPDYRVVFTGHSLGGALATVAGADLRGNGYDIDVFSYGAPRVGNRAFAEFLTVQTGGTLYRITHTNDIVPRLPPREFGYSHSSPEYWIKSGTLVPVRRRDIVKIEGIDATGGNNQPNIPDIPAHLWYFGLIGTCL

SEQ ID NO: 7093 - protein, 274 aa, Thermomyces lanuginosus
SPIRREVSQDLFNQFNLFAQYSAAAYCGKNNDAPAGTNITCTGNACPEVEKADATFLYSFEDSGVGDVTGFLALDNTNKLIVLSFRGTRSITNWILDLNYTPQEINDICSGCRGHDGFTSSWRSVADTLRQKVEDAVREHPDYRVVFTGHSLGGALATVAGADLRGNGYDIDVFSYGAPRVGNRAFAEFLTVQTGGTLYRITHTNDIVPRLPPREFGYSHSSPEYWIKSGTLVPVRRRDIVKIEGIDATGGNNQPNIPDIPAHLWYFGLIGTCL

SEQ ID NO: 7094 - protein, 274 aa, Thermomyces lanuginosus
SPIRREVSQDLFNQFNLFAQYSAAAYCGKNNDAPAGTNITCTGNACPEVEKADATFLYSFRDSGVGDVTGFLALDNTNKLIVLSFRGTRSIENWIADLNFVLKEINDICSGCRGHDGFTSSWFSVADTLRQKVEDAVREHPDYRVVFTGHSLGGALATVAGADLRGNGYDIDVFSYGAPRVGNRAFAEFLTVQTGGTLYRITHTNDIVPRLPPREFGYSHSSPEYWIKSGTLVPVRRRDIVKIEGIDATGGNNQPNIPSIPAHLWYFGAIGTCL

SEQ ID NO: 7095 - protein, 274 aa, Thermomyces lanuginosus
SPIRREVSQDLFNQFNLFAQYSAAAYCGKNNDAPAGTNITCTGNACPEVEKADATFLYSFEDXGVGDVTGFLALDNTNKLIVLSFRGSRSXENWIGNLNFDLKEINDICSGCRGXDGFTSSWRSVADTLRQKVEDAVREHPDYRVVFTGXSLGGALATVAGADLRGNGYDIDVFSYGAPRVGNRAFAEFLTVQTGGTLYRITXTNDIVPRLPPREFGYXHSSPEYWIKSGTLVPVTRNDIVKIEGIDATGGNNQPNIPDIPAHLWYFGLIGTCL

SEQ ID NO: 7096 - protein, 274 aa, Thermomyces lanuginosus
SPIRREVSQDLFNQFNLFAQYSAAAYCGKNNDAPAGTNITCTGNACPEVEKADATFLYSFEDTGKGDVTGFLALDNTNKLIVLSFRGSRSVENWIGNLNFDLKEINAICSGCRGHDGFTSSWRSVADTLRQKVEDAVREHPDYRVVFTGHSLGGGLATVAGADLRGNGYDIDVFSYGAPRVGNRAFAEFLTVQTGGTLYRITHTNDIVPRLPPRVFGYSHSSPEYWIKSGTGVPVRRRDIVKIEGIDATGGNNQPNIPDIKAHLWYFGLIGTCL

SEQ ID NO: 7097 - protein, 274 aa, Thermomyces lanuginosus
SPIRREVSQDLFNQFNLFAQYSAAAYCGKNNDAPAGTNITCTGNACPEVEKADATFLYSFRDSGVGDVTGFLALDNTNKLIVLSFRGSRSIENWIADLNFILIEINDICSGCRGHDGFTSSWFSVADTLRQKVEDAVREHPDYRVVFTGHSLGGALATVAGADLRGNGYDIDVFSYGAPRVGNRAFAEFLTVQTGGTLYRITHTNDIVPRLPPREFGYSHSSPEYWIKSGTLVPVRRRDIVKIEGIDATGGNNQPNIPSIPAHLWYFGPIGTCL

SEQ ID NO: 7098 - protein, 274 aa, Thermomyces lanuginosus
SPIRREVSQDLFNQFNLFAQYSAAAYCGKNNDAPAGTNITCTGNACPEVEKADATFLYSFEDNGSGDVTGFLALDNTNKLIVLSFRGSRSVENWIGNLNFDLKEINDICSGCRGHDGFTSSWRSVADTLRQKVEDAVREHPDYRVVFTGHSLGGGLATVAGADLRGNGYDIDVFSYGAPRVGNRAFAEFLTVQTGGTLYRITHTNDIVPRLPPRKFGYSHSSPEYWIKSGTGVPVRRRDIVKIEGIDATGGNNQPNIPDAKAHLWYFGLIGTCL

SEQ ID NO: 7099 - protein, 274 aa, Synthetic construct
SPPRWPRRQDLFNQFNLFAQYSAAAYCGKNNDAPAGTNITCTGNACPEVEKADATFLYSFEDSGVGDVTGFLALDNTNKLIVLSFRGSRSIENWIGNLKFLLKEINDICSGCRGHDGFTSSWRSVADTLRQKVEDAVREHPDYRVVFTGHSLGGALATVAGADLRGNGYDIDVFSYGAPRVGNRAFAEFLTVQTGGTLYRITHTNDIVPRLPPREFGYSHSSPEYWIKSGTLVPVTRNDIVKIEGIDATGGNNRPNIPDIPAHLWYFGLIGTCL

SEQ ID NO: 7100 - protein, 275 aa, Thermomyces lanuginosus
SPCRPRPVSQDLFNQFNLFAQYSAAAYCGKNNDAPAGTNITCTGNACPEVEKADATFLYSFEDSGGGDVTGFLALDNTNKLIVLSFRGSRSIENWIGNLNFDLKNINDICSGCRGHDGFTSSWRGVADTLRQKVEDAVREHPDYRVVFTGHSLGGALATVAGADLRGNGYDIDVFSYGAPRVGNRAFAEFLTVQTGGTLYRITHTNDIVPRLPPPEFGYSHSSPEYWIKSGTLVPVTRNDIVKICGIDATGGNNRPNIPDIPAHLWYFGLIGTCL

SEQ ID NO: 7101 - protein, 274 aa, Synthetic construct
SPPRWPRWQDLFNQFNLFAQYSAAAYCGKNNDAPAGTNITCTGNACPEVEKADATFLYSFEDSGVGDVTGFLALDNTNKLIVLSFRGSRSIENWIGNLKFLLKEINDICSGCRGHDGFTSSWRSVADTLRQKVEDAVREHPDYRVVFTGHSLGGALATVAGADLRGNGYDIDVFSYGAPRVGNRAFAEFLTVQTGGTLYRITHTNDIVPRLPPREFGYSHSSPEYWIKSGTLVPVTRNDIVKIEGIDATGGNNRPNIPDIPAHLWYFGLIGTCL

SEQ ID NO: 7102 - protein, 274 aa, Synthetic construct
SPPRRPVSQDLFNQFNLFAQYSAAAYCGKNNDAPAGTNITCTGNACPEVEKADATFLYSFEDSGVGDVTGFLALDNTNKLIVLSFRGSRSIENWFGNLNFLLKKINDICSGCRGHDGFTSSWRSVADTLRQKVEDAVREHPGYRVVFTGHSLGGALATVAGADLRGNGYDIDVFSYGAPRVGNRAFAEFLTAQTGGTLYRITHTNDIVPRLPPREFGYSHSSPEYWIKSGTLVPVTRNDIVKIEGIDATGGNNRPNIPDIPAHLWYFGLIGTCL

SEQ ID NO: 7103 - protein, 274 aa, Thermomyces lanuginosus
SPPRRPVSQDLFNQFNLFAQYSAAAYCGKNNDAPAGTNITCTGNACPEVEKADATFLYSFEDSGVGDVTGFLALDNTNKLIVLSFRGSRSIENWIANLNFWLKEINDICSGCRGHDGFTSSWRSVADTLRQKVEDAVREHPDYRVVFTGHSLGGALATVAGADLRGNGYDIDVFSYGAPRVGNRAFAEFLTVQTGGTLYRITHTNDIVPRLPPREFGYSHSSPEYWIKSGTLVPVTRNDIVKICGIDATGGNNRPNIPDIPAHLWYFELISTCL

SEQ ID NO: 7104 - protein, 274 aa, Synthetic construct
SPPRWPWRQDLFNQFNLFAQYSAAAYCGKNNDAPAGTNITCTGNACPEVEKADATFLYSFEDSGVGDVTGFLALDNTNKLIVLSFRGSRSIENWIGNLKFLLKEINDICSGCRGHDGFTSSWRSVADTLRQKVEDAVREHPDYRVVFTGHSLGGALATVAGADLRGNGYDIDVFSYGAPRVGNRAFAEFLTVQTGGTLYRITHTNDIVPRLPPREFGYSHSSPEYWIKSGTLVPVTRNDIVKIEGIDATGGNNRPNIPDIPAHLWYFGLIGTCL

SEQ ID NO: 7105 - protein, 274 aa, Synthetic construct
SPPRRPVSQDLFNQFNLFAQYSAAAYCGKNNDAPAGTNITCTGNACPEVEKADATFLYSFEDSGVGDVTGFLALDNTNKLIVLSFRGSRSIENWFGNLNFLLKKINDICSGCRGHDGFTSSWRSVADTLRQKVEDAVREHPDYRVVFTGHSLGGALATVAGADLRGNGYDIDVFSYGAPRVGNRAFAEFLTAQTGGTLYRITHTRDIVPRLPPAEFGYSHSSPEYWIKSGTLVPVTRNDIVKIEGIDATGGNNQPNIPDIPAHLWYFGLIGTCL

SEQ ID NO: 7106 - protein, 274 aa, Synthetic construct
SPPWRPRRQDLFNQFNLFAQYSAAAYCGKNNDAPAGTNITCTGNACPEVEKADATFLYSFEDSGVGDVTGFLALDNTNKLIVLSFRGSRSIENWIGNLKFLLKEINDICSGCRGHDGFTSSWRSVADTLRQKVEDAVREHPDYRVVFTGHSLGGALATVAGADLRGNGYDIDVFSYGAPRVGNRAFAEFLTVQTGGTLYRITHTNDIVPRLPPREFGYSHSSPEYWIKSGTLVPVTRNDIVKIEGIDATGGNNRPNIPDIPAHLWYFGLIGTCL

SEQ ID NO: 7107 - protein, 274 aa, Synthetic construct
SPPRRPVSQDLFNQFNLFAQYSAAAYCGKNNDAPAGTNITCTGNACPEVEKADATFLCSFEGSGVGDVTGFLALDNTNKLIVLSFRGSRSIENWIGNLKFLLKEINDICSGCRGHDGFTSSWRSVADTLRQCVEDAVREHPDYRVVFTGHSLGGALATVAGADLRGNGYDIDVFSYGAPRVGNRAFAEFLTVQTGGTLYRITHTNDIVPRLPPREFGYSHSSPEYWIKSGTLVPVTRNDIVKIEGIDATGGNNRPNIPDIPAHLWYFGLIGTCL

SEQ ID NO: 7108 - protein, 273 aa, Thermomyces lanuginosus
SPPRRPVSQDLFNQFNLFAQYSAAAYCGKNNDAPAGTNITCTGNACPEVEKADATFLYSFEDSGVGDVTGFLALDNTNKLIVLSFRGSRSIENWIANLNFWLKEINDICSGCRGHDGFTSSWRSVADTLRQKVEDAVREHPDYRVVFTGHSLGGALATVAGADLRGNGYDIDVFSYGAPRVGNRAFAEFLTVQTGGTLYRITHTNDIVPRLPPREFGYSHSSPEYWIKSGTLVPVTRNDIVKICGIDATGGNNRPNIPDIPAHLWYFGLICPC

SEQ ID NO: 7109 - protein, 273 aa, Thermomyces lanuginosus
SPIRREVSQDLFNQFNLFAQYSAAAYCGKNNDAPAGTNITCTGNACPEVEKADATFLYSFRDSGVGDVTGFLALDNTNKLIVLSFRGSRSLENWIADLNFHLQEINDICSGCRGHDGFTSSWFSVADTLRQKVEDAVREHPDYRVVFTGHSLGGALATVAGADLRGNGYDIDVFSYGAPRVGNRAFAEFLTVQTGGTLYRITHTNDIVPRLPPREFGYSHSSPEYWIKSGTLVPVRRRDIVKIEGIDATGGNNQPNIPSIPAHLWYFGLIGTC

SEQ ID NO: 7110 - protein, 273 aa, Synthetic construct
PWPRPRPQDLFNQFNLFAQYSAAAYCGKNNDAPAGTNITCTGNACPEVEKADATFLYSFEDSGVGDVTGFLALDNTNKLIVLSFRGSRSIENWIGNLKFLLKEINDICSGCRGHDGFTSSWRSVADTLRQKVEDAVREHPDYRVVFTGHSLGGALATVAGADLRGNGYDIDVFSYGAPRVGNRAFAEFLTVQTGGTLYRITHTNDIVPRLPPREFGYSHSSPEYWIKSGTLVPVTRNDIVKIEGIDATGGNNRPNIPDIPAHLWYFGLIGTCL

SEQ ID NO: 7111 - protein, 271 aa, Thermomyces lanuginosus
RRPVSQDLFNQFNLFAQYSAAAYCGKNNDAPAGTNITCTGNACPEVEKADATFLYSFEDSGVGDVTGFLALDNTNKLIVLSFRGSRSIENWIGNLNFDLKEINDICSGCRGHDGFTSSWRSVADTLRQKVEDAVREHPDYRVVFTGHSLGGALATVAGADLRGNGYDIDVFSYGAPRVGNRAFAEFLTVQTGGTLYRITHTNDIVPRLPPREFGYSHSSPEYWIKSGTLVPVTRNDIVKICGIDATGGNNRPNIPDIPAHLWYFQATDACL

SEQ ID NO: 7112 - protein, 271 aa, Thermomyces lanuginosus
RRPVSQDLFNQFNLFAQYSAAAYCGKNNDAPAGTNITCTGNACPEVEKADATFLYSFEDSGVGDVTGFLALDNTNKLIVLSFRGSRSIENWIGNLNFSLKEINDICSGCRGHDGFTSSWRSVADTLRQKVEDAVREHPDYRVVFTGHSLGGALATVAGADLRGNGYDIDVFSYGAPRVGNRAFAEFLTVQTGGTLYRITHTNDIVPRLPPREFGYSHSSPEYWIKSGTLVPVTRNDIVKICGIDATGGNNRPNIPDIPAHLWYFFAISECL

SEQ ID NO: 7113 - protein, 271 aa, Thermomyces lanuginosus
RRPVSQDLFNQFNLFAQYSAAAYCGKNNDAPAGTNITCTGNACPEVEKADATFLYSFEDSGVGDVTGFLALDNTNKLIVLSFRGSRSIENWIGNLNFDLKNISDICSGCRGHDGFTSSWRSVADTLRQKVEDAVREHPDYRVVFTGHSLGGALATVAGADLRGNGYDIDVFSYGAPRVGNRAFAEFLTVQTGGTLYRITHTNDIVPRLPPREFGYSHSSPEYWIKSGTLVPVKGNGIVKICGIDATGGNNRPNIPDIPAHLWYFGLIGTCL

SEQ ID NO: 7114 - protein, 272 aa, Thermomyces lanuginosus
RRPVSQDLFNQFNLFAQYSAAAYCGKNNDAPAGTNITCTGNACPEVEKADATFLYSFEDSGVGDVTGFLALDNTNKLIVLSFRGSRSIENWIGNLNFSLKEINDICSGCRGHDGFTSSWRSVADTLRQKVEDAVREHPDYRVVFTGHSLGGALATVAGADLRGNGYDIDVFSYGAPRVGNRAFAEFLTVQTGGTLYRITHTNDIVPRLPPREFGYSHSSPEYWIKSGTLVPVTRNDIVKICGIDATGGNNRPNIPDIPAHLWYFDINEGSCL

SEQ ID NO: 7115 - protein, 269 aa, Thermomyces lanuginosus
EVSQDLFNQFNLFAQYSAAAYCGKNNDAPAGTKITCTGNACPEVEKADATVLYSFKDSGVGDVTGFLARDNTNKLIVLSFRGSRSIENWIGNLNFDLEEINDICSGCRGHDGFTSSWRSVADTLRQKVEDAVREHPDYRVVFTGHSLGGALATVAGADLRGNGYDIDVFSYGAPRVGNRAFAEFLTVQTGGTLYRITSTNDIVPRLPPREFGYSHSSPEYWIKSGTLVPVRRRDIVKIEGIDATGGNNQPNIPDIPAHLWYFGLIGTCL

SEQ ID NO: 7116 - protein, 269 aa, Thermomyces lanuginosus
EVSQDLFNQFNLFAQYSAAAYCGKNNDAPAGTKITCTGNACPEVEKADATVLYTFKDSGVGDVTGFLALDNTNKLIVLSFRGSRSIENWIGNLNFDLIEINDICSGCRGHDGFTSSWRSVADTLRQKVEDAVREHPDYRVVFTGHSLGGALATVAGADLRGNGYDIDVFSYGAPRVGNRAFAEFLTVQTGGTLYRITHTNDIVPRLPPREFGYSHSSPEYWIKFGTLVPVRRRDIVKIEGIDATGGNNQPNIPDIPAHLWYFGLIGTCL

SEQ ID NO: 7117 - protein, 269 aa, Thermomyces lanuginosus
EVSQDLFNQFNLFAQYSAAAYCGKNNNAPAGTNITCTGNACPEVEKADATFLYSFRDSGVGDVTGFLALDNTNKLIVLSFRGSRSIENWIGNLNFDLKEINDICSGCRGHDGFTSSWFSVADTLRQKVEDAVREHPDYRVVFTGHSLGGALATVAGADLRGNGYDIDVFSYGAPRVGNRAFAEFLTVQTGGTLYRITHTNDIVPRLPPREFGYSHSSPEFWIKSGTLVPVRRRDIVKIEGIDAEGGNNQPNIPDITAHLWYFGLIGTCL

SEQ ID NO: 7118 - protein, 269 aa, Thermomyces lanuginosus
EVSQDLFNQFNLFAQYSAAAYCGKNDRAPAGTNITCTGNACPEVEKADATFLYSFQDSGVGDVTGFLALDNTNKLIVLSFRGSRSIENWIGNLNFDLKEINDICSGCRGHAGFTSSWRSVADTLRQKVEDAVREHVDYRVVFTGHSLGGALATVAGADLRGNGYDIDVFSYGAPRVGNRAFAEFLTVQTGGTLYRITHTNDIVPRLPPREFGYSHPSPEYWIKSGTGVPVTRNDIVKIEGIDATGGNNQPNIPDITAHLWYFGLIGTCL

SEQ ID NO: 7119 - protein, 269 aa, Thermomyces lanuginosus
EVSQDLFNQFNLFAQYSAAAYCQKNNSAPAGTNITCTGNACPEVEKADATFLYSFKDMGVGDVTGFLALDNTNKRIVLSFRGSRSIENWIQNLNFDLKEINDICSGCRGHDGFTSSWRSVADTLRQKVEDAVREHPDYRVVFTGHSLGGALATVAGADLRGNGYDIDVFSYGAPRVGNRAFAEFLTTQTGGTLYRITHTNDIVPRLPPREFGYSHSSPEYWIKSGTLVPVTRNDIVKIEGIDATGGNNQPNQPDIPAHLWYFGLIGTCL

SEQ ID NO: 7120 - protein, 269 aa, Thermomyces lanuginosus
EVSQDLFNQFRLFAQYSAAAYCGKNNDAPAGTQITCTGNACPEVEKADATFLYSFEDSGVGDVTGFLALDNTNKLIVLSFRGSRSIENWITNLNFDLKEINDICSGCRGHDGFTSSWRSVADTLRQKVEDAVREHPDYRVVFTGHSLGGALATVAGADLRGNKYDIDVFSYGAPRTGNRAFAEFLTVQTGGTLYRITHTNDIVPRLPPREFGYSHSSPEYWIKSGTLVPVRRRDIVKIEGIDATGGNNQPNIPSIPAHLWYFGLIGTCL

SEQ ID NO: 7121 - protein, 269 aa, Thermomyces lanuginosus
EVSQDLFNQFNLFAQYSAAAYCGKNNDAPAGTKITCTGNACPEVEKADATILYTFKDSGVGDVTGFLALDNTNKLIVLSFRGSRSIENWIGNLNFDLIEINDICSGCRGHDGFTSSWRSVADTLRQKVEDAVREHPDYRVVFTGHSLGGALATVAGADLRGNGYDIDVFSYGAPRVGNRAFAEFLTVQTGGTLYRITHTNDIVPRLPPREFGYSHSSPEYWIKPGTLVPVRRRDIVKIEGIDATGGNNQPNIPDIPAHLWYFGLIGTCL

SEQ ID NO: 7122 - protein, 269 aa, Thermomyces lanuginosus
EVSQDLFNQFNLFAQYSAAAYCQKNNDAPAGTNITCTGNACPEVEKADATTLYSFEDSGVGDVTGFLALDNTNKQIVLSFRGSRSIENWIQNLNFDLKEINDICSGCRGHDGFTSSWRSVADTLRQKVEAAVREHPDYRVVFTGHSLGGALATVAGADLRGNGYDIDVFSYGAPRVGNRAFAEFLTTQTGGTLYRITHTNDIVPRLPPREFGYSHSSPEYWIKSGTLVPVTRNDIVKIEGIDATGGNNQPNQPDIPAHLWYFGRIGTCL

SEQ ID NO: 7123 - protein, 269 aa, Thermomyces lanuginosus
EVSQDLFNQFNLFAWYSAAAYCQKNNSAPAGTNITCTGNACPEVEKADATFLYSFEDSGVGDVTGFLALDNTNKRIVLSFRGSRSIENWIGNLRFDLKEINDICSGCRGHDGFTSSWRSVADTLRQKVEDAVREHPDYRVVFTGHSLGGALATIAGADLRGNGYDIDVFSYGAPRVGNRAFAEFLTNQQGGTLYRITHTNDIVPRLPPREFGYSHSSPEYWIKSGTLVPVTRNDIVKIEGIDATGGNNQPNIPDIPAHLWYFGLIGTCL

SEQ ID NO: 7124 - protein, 269 aa, Thermomyces lanuginosus
EVSQDLFNQFNLFAQYSAAAYCGKNNDAPAGTKITCTGNACPEVEKADATLLYSFKDSGVGDVTGFLARDNTNKLIVLSFRGSRSIENWIGNLNFDLEEINDICSGCRGHDGFTSSWRSVADTLRQKVEDAVREHPDYRVVFTGHSLGGALATVAGADLRGNGYDIDVFSYGAPRVGNRAFAEFLTVQTGGTLYRITHTNDIVPRLPPREFGYSHSSPEYWIKSGTLVPVRRRDIVKIEGIDATGGNNQPNIPDGPAHLWYFGLIGTCL

SEQ ID NO: 7125 - protein, 269 aa, Thermomyces lanuginosus
EVSRDLFNQFNLFAQYSAAAYCGKNNDAPAGTNITCTGNACPEVEKADATFLYSFEDSGVGDVTGFLALDNTNKLIVLSFRGSRSIENWIGNLNFDLKEINDICSGCRGHDGFTSSWRSVADTLRQKVEDAVREHPDYRVVFAGHSLGGALATVAGADLRGDGYDIDVFSYGAPRVGNRAFAEFLTVQTGGTLYRITHTNDIVPRLPPREFGYSHSSPEYWIKSGTLPPVRRRDIVKCEGIDATCGNNQPNIPDIPAHLWYFGLIGTCL

SEQ ID NO: 7126 - protein, 269 aa, Thermomyces lanuginosus
EVSQDLFNQFNLFAQYSAAAYCGKNNDAPAGTKITCTGNACPEVEKADATVLYSFKDSGVGDVTGFLARDNTNKLIVLSFRGSRSIENWIGNLNFDLEEINDICSGCRGHDGFTSSWRSVADTLRQKVEDAVREHPDYRVVFTGHSLGGALATVAGADLRGNGYDIDVFSYGAPRVGNRAFAEFLTVQTGGTLYRITNTNDIVPRLPPREFGYSHSSPEYWIKSGTLVPVRRRDIVKIEGIDATGGNNQPNIPDIPAHLWYFGLIGTCL

SEQ ID NO: 7127 - protein, 269 aa, Thermomyces lanuginosus
EVSQDLFNQFNLFAQYSAAAYCGKNNDAPAGTKITCTGNACPEVEKADATILYTFKDSGVGDVTGFLALDNTNKLIVLSFRGSRSIENWIGNLNFDLIEINDICSGCRGHDGFTSSWRSVADTLRQKVEDAVREHPDYRVVFTGHSLGGALATVAGADLRGNGYDIDVFSYGAPRVGNRAFAEFLTVQTGGTLYRITHTNDIVPRLPPREFGYSHSSPEYWIKSGTLVPRRRRDIVKIEGIDATGGNNQPNIPDIPAHLWYFGLIGTCL

SEQ ID NO: 7128 - protein, 269 aa, Thermomyces lanuginosus
EVSQDLFNQFNLFAQYSAAAYCGKNNRAPAGTQITCTGNACPEVEKADATFLYSFEDSGVGDVTGFLALDNTNKLIVLSFRGSRSIENWINNLRFDLKEINDICSGCRGHAGFTSSWRSVADTLRQKVEDAVREHPDYRVVFTGHSLGGALATVAGADLRGNGYDIDVFSYGAPRVGNRAFAEFLTVQTGGTLYRITHTNDIVPRLPPREFGYSHSSPEYWIKSGTLVPVRRRDIVKIEGIDATGGNNQPNIPDITAHLWYFGLIGTCL

SEQ ID NO: 7129 - protein, 269 aa, Thermomyces lanuginosus
EVSQDLFNQFNLFAQYSAAAYCGKNNDAPAGTKITCTGNACPEVEKADATLLYTFKDSGVGDVTGFLALDNTNKLIVLSFRGSRSIENWIGNLNFDLIEINDICSGCRGHDGFTSSWRSVADTLRQKVEDAVREHPDYRVVFTGHSLGGALATVAGADLRGNGYDIDVFSYGAPRVGNRAFAEFLTVQTGGTLYRITNTNDIVPRLPPREFGYSHSSPEYWIKSGTLVPVRRRDIVKIEGIDATGGNNQPNIPDIPAHLWYFGLIGTCL

SEQ ID NO: 7130 - protein, 269 aa, Thermomyces lanuginosus
EVSQDLFNQFNLFAQYSAAAYCGKNNDAPAGTKITCTGNACPEVEKADATVLYSFKDSGVGDVTGFLARDNTNKLIVLSFRGSRSIENWIGNLNFDLEEINDICSGCRGHDGFTSSWRSVADTLRQKVEDAVREHPDYRVVFTGHSLGGALATVAGADLRGNGYDIDVFSYGAPRVGNRAFAEFLTVQTGGTLYRITHTNDIVPRLPPREFGYSHSSPEYWIKSGTLPPVRRRDIVKIEGIDATGGNNQPNIPDIPAHLWYFGLIGTCL

SEQ ID NO: 7131 - protein, 269 aa, Thermomyces lanuginosus
EVSRDLFNQFNLFAQYSAAAYCGKNNDAPAGTNITCTGNACPEVEKADATILYSFEDSGVGDVTGFLALDNTNKLIVLSFRGSRSIENWIGNLNFDLKEINDICSGCRGHDGFTSSWRSVADTLRQKVEDAVREHPDYRVVFTGHSLGGALATVAGADLRGNGYDIDVFSYGAPRVGNRAFAEFLTVQTGGTLYRITNTNDIVPRLPPREFGYSHSSPEYWIKSGTLVPVRRRDIVKCEGIDATCGNNQPNIPDISAHLWYFGLIGTCL

SEQ ID NO: 7132 - protein, 269 aa, Thermomyces lanuginosus
EVSQDLFNQFNLFAQYSAAAYCGKNNDAPAGTNITCTGNACPEVEKADATILYSFRDSGVGDVTGFLALDNTNKLIVLSFRGSRSIENWIGNLNFDLKEINDICSGCRGHDGFTSSWFSVADTLRQKVEDAVREHPDYRVVFTGHSLGGALATVAGADLRGNGYDIDVFSYGAPRVGNRAFAEFLTVQTGGTLYRITHTNDIVPRLPPREFGYSHSSPEFWIKSGTLVPVRRRDIVKIEGIDAEGGNNQPNIPDITAHLWYFGLIGTCL

SEQ ID NO: 7133 - protein, 269 aa, Thermomyces lanuginosus
EVSQDLFNQFNLFAQYSAAAYCGKNNDAPAGTQITCTGNACPEVEKADATFLYSFEDSGVGDVTGFLALDNTNKLIVLSFRGSRSIENWITNLRFDLKEINDICSGCRGHAGFTSSLRSVADTLRQKVEDAVREHPDYRVVFTGHSLGGALATVAGADLRGNGYDIDVFSYGAPRWGNRAFAEFLTVQTGGTLYRITHTNDIVPRLPPREFGYSHSSPEYWIKSGTLVPVRRRDIVKIEGIDATGGNNQPNIPDIPAHLWYFGLIGTCL

SEQ ID NO: 7134 - protein, 269 aa, Thermomyces lanuginosus
EVSQDLFNQFNLFAQYSAAAYCGKNNDAPAGTKITCTGNACPEVEKADATVLYTFKDSGVGDVTGFLALDNTNKLIVLSFRGSRSIENWIGNLNFDLIEINDICSGCRGHDGFTSSWRSVADTLRQKVEDAVREHPDYRVVFTGHSLGGALATVAGADLRGNGYDIDVFSYGAPRVGNRAFAEFLTVQTGGTLYRITHTNDIVPRLPPREFGYSHSSPEYWIKIGTLVPVRRRDIVKIEGIDATGGNNQPNIPDIPAHLWYFGLIGTCL

SEQ ID NO: 7135 - protein, 269 aa, Thermomyces lanuginosus
EVSQDLFNQFNLFAQYSAAAYCKKNNSAPAGTNITCTGNACPEVEKADATTLYSFKDSGVGDVTGFLALDNTNKQIVLSFRGSRSIENWIQNLNFDLKEINDICSGCRGHDGFTSSWRSVADTLRQKVEDAVREHPDYRVVFTGHSLGGALATVAGADLRGNGYDIDVFSYGAPRVGNRAFAEFLTHQTGGTLYRITHTNDIVPRLPPREFGYSHSSPEYWIKSGTLVPVTRNDIVKIEGIDATGGNNQPNQPDIPAHLWYFGLIGTCL

SEQ ID NO: 7136 - protein, 269 aa, Thermomyces lanuginosus
EVSQDLFNQFNLFAQYSAAAYCGKNNDAPAGTKITCTGNACPEVEKADATILYTFKDSGVGDVTGFLALDNTNKLIVLSFRGSRSIENWIGNLNFDLIEINDICSGCRGHDGFTSSWRSVADTLRQKVEDAVREHPDYRVVFTGHSLGGALATVAGADLRGNGYDIDVFSYGAPRVGNRAFAEFLTVQTGGTLYRITHTNDIVPRLPPREFGYSHSSPEYWIKSGTLVPVRRRDIVKIEGIDATGGNNQPNIPDGPAHLWYFGLIGTCL

SEQ ID NO: 7137 - protein, 269 aa, Thermomyces lanuginosus
EVSQDLFNQFNLFAQYSAAAYCGKNNNAPAGTNITCTGNACPEVEKADATILYSFRDSGVGDVTGFLALDNTNKLIVLSFRGSRSIENWIGNLNFDLIEINDICSGCRGHDGFTSSWFSVADTLRQKVEDAVREHPDYRVVFTGHSLGGALATVAGADLRGNGYDIDVFSYGAPRVGNRAFAEFLTVQTGGTLYRITHTNDIVPRLPPREFGYSHSSPEFWIKSGTLVPVRRRDIVKIEGIDATGGNNQPNIPDIPAHLWYFGLIGTCL

SEQ ID NO: 7138 - protein, 269 aa, Thermomyces lanuginosus
EVSQDLFNQFNLFAQYSKAAYCQANNDAPAGTNITCTGNACPEVEKADATFLYSFEDSGVGDVTGFLALDNTNKRIILSFRGSRSIENWIGNLRFDLKEINDICSGCRGHDGFTSSWRSVADTLRQKVEAAVREHPDYRVVFTGHSLGGALATVAWADLRGNGYDIDVFSYGAPRVGNRAFAEFLTVQTGGTLYRITHTNDIVPRLPPREFGYSHSSPEYWIKSGTLVPVTRNDIVKIEGIDATGGNNQPNIPDIPAHLWYFGLIGTCL

SEQ ID NO: 7139 - protein, 269 aa, Thermomyces lanuginosus
EVSQDLFNQFNLFAQYSAAAYCGKNNRAPAGTNITCTGNACPEVEKADATFLYSFEDSGVGDVTGFLALDNTNKLIVLSFRGSRSIENWIGNLNFELKEINDICSGCRGHAGFTSSWRSVADTLRQKVEDAVREHPDYRVVFTGHSLGGALATVAGADLRGNKYDIDVFSYGAPRVGNRAFAEFLTVQTGGTLYRITHTNDIVPRLPPREFGYSHSSPEYWIKSGTLVPVRRRDIVKIEGIDATGGNNQPNIPSITAHLWYFGLIGTCL

SEQ ID NO: 7140 - protein, 269 aa, Thermomyces lanuginosus
EVSQDLFNQFNLFAQYSAAAYCGKNNDAPAGTKITCTGNACPEVEKADATVLYSFKDSGVGDVTGFLARDNTNKLIVLSFRGSRSIENWIGNLNFDLEEINDICSGCRGHDGFTSSWRSVADTLRQKVEDAVREHPDYRVVFTGHSLGGALATVAGADLRGNGYDIDVFSYGAPRVGNRAFAEFLTVQTGGTLYRITHTNDIVPRLPPREFGYSHSSPEYWIKSGTDVPVRRRDIVKIEGIDATGGNNQPNIPDIPAHLWYFGLIGTCL

SEQ ID NO: 7141 - protein, 269 aa, Thermomyces lanuginosus
EVSQDLFNQFNLFAQYSAAAYCGKNNEAPAGTNITCTGNACPEVEKAQATFLYSFEDMGVGDVTGFLALDNTNKLIVLSFRGSRSIENWIGNLNFDLKEINDICSGCRGHDGFTSSWRSVADTLRQKVEDAVREHPQYRVVFTGHSLGGALATVAGADLRGNPYDIDVFSYGAPRVGNRAFAEFLTVQTGGTLYRITHTNDIVPRLPPREFGYSHSSPEYWIKSGTMVPVTRQDIVKIEGIDATGGNNQPNIPDIPAHLWYFGRIGTCL

SEQ ID NO: 7142 - protein, 269 aa, Thermomyces lanuginosus
EVSQDLFNQFNLFAQYSAAAYCGKNNDAPAGTNITCTGNACPEVEKADATILYSFEDSGVGDVTGFLALDNTNKLIVLSFRGSRSIENWIGNLNFDLKEINDICSGCRGHDGFTSSWRSVADTLRQKVEDAVREHPDYRVVFTGHSLGGALATVAGADLRGNGYDIDVFSYGAPRVGNRAFAEFLTVQTGGTLYRITNTNDIVPRLPPRQFGYSHSSPEYWIKSGTLPPVRRRDIVKCEGIDATCGNNQPNIPDIPAHLWYFGLIGTCL

SEQ ID NO: 7143 - protein, 269 aa, Thermomyces lanuginosus
EVSQDLFNQFNLFAQYSAAAYCGKNNDAPAGTNITCTGNACPEVEKADATILYSFRDSGVGDVTGFLALDNTNKLIVLSFRGSRSIENWIGNLNFDLIEINDICSGCRGHDGFTSSWFSVADTLRQKVEDAVREHPDYRVVFTGHSLGGALATVAGADLRGNGYDIDVFSYGAPRVGNRAFAEFLTVQTGGTLYRITHTNDIVPRLPPREFGYSHSSPEYWIKSGTLVPVRRRDIVKIEGIDAEGGNNQPNIPDITAHLWYFGLIGTCL

SEQ ID NO: 7144 - protein, 269 aa, Thermomyces lanuginosus
EVSQDLFNQFNLFAQYSAAAYCQKNNQAPAGTNITCTGNACPEVEKADATTLYSFEDSGVGDVTGFLALDNTNKQIVLSFRGSRSIENWIQNLNFDLKEINDICSGCRGHDGFTSSWRSVADTLRQKVEAAVREHPDYRVVFTGHSLGGALATVAGADLRGNGYDIDVFSYGAPRVGNRAFAEFLTVQTGGTLYRITHTNDIVPRLPPREFGYSHSSPEYWIKSGTLVPVTRNDIVKIEGIDATGGNNQPNQPDIPAHLWYFGRIGTCL

SEQ ID NO: 7145 - protein, 269 aa, Thermomyces lanuginosus
EVSQDLFNQFNLFAQYSAAAYCGKNNDAPAGTQITCTWNACPEVEKADATFLYSFEDSGVGDVTGFLALDNTNKLIVLSFRGSRSIENWITNLNFDLKEINDICSGCRGHDGFISSWRSVADTLRQKVEDAVREHPDYRVVFTGHSLGGALATVAGADLRGNKYDIDVFSYGAPRVGNRAFAEFLTVQTGGTLYRITHTNDIVPRLPPRVFGYSHSSPEYWIKSGTLVPVRRRDIVKIEGIDATGGNNQPNIPDIPAHLWYFGLIGTCL

SEQ ID NO: 7146 - protein, 269 aa, Thermomyces lanuginosus
EVSQDLFNQFNLFAQYSAAAYCSKNNDAPAGTNITCTGNACPEVEKADATFLYSFRDSGVGDVTGFLALDNTNKLIVLSFRGSRSIENWIGNLNFDLIEINDICSGCRGHDGFTSSWFSVADTLRQKVEDAVREHPDYRVVFTGHSLGGALATVAGADLRGNGYDIDVFSYGAPRVGNRAFAEFLTVQTGGTLYRITHTNDIVPRLPPREFGYSHSSPEFWIKSGTLVPVRRRDIVKIEGIDATGGNNQPNIPDITAHLWYFGLIGTCL

SEQ ID NO: 7147 - protein, 269 aa, Thermomyces lanuginosus
EVSQDLFNQFRLFAQYSAAAYCGKNNDAPAGTQITCTGNACPEVEKADATFLYSFEDSGVGDVTGFLALDNTNKLIVLSFRGSRSIENWITNLNFDLKEINDICSGCRGHDGFTSSWRSVADTLRQKVEDAVREHPDYRVVFTGHSLGGALATVAGADLRGNLYDIDVFSYGAPRTGNRAFAEFLTVQTGGTLYRITHTNDIVPRLPPREFGYSHSSPEYWIKSGTLVPVRRRDIVKIEGIDATGGNNQPNIPSIPAHLWYFGLIGTCL

SEQ ID NO: 7148 - protein, 269 aa, Thermomyces lanuginosus
EVSQDLFNQFNLFAQYSAAAYCQKNNSAPAGTNITCTGNACPEVEKADATFLYSFKDMGVGDVTGFLALDNTNKGIVLSFRGSRSIENWIQNLNFDLKEINDICSGCRGHDGFTSSWRSVADTLRQKVEDAVREHPDYRVVFTGHSLGGALATVAGADLRGNGYDIDVFSYGAPRVGNRAFAEFLTTQTGGTLYRITHTNDIVPRLPPREFGYSHSSPEYWIKSGTLVPVTRNDIVKIEGIDATGGNNQPNIPDIPAHLWYFGRIGTCL

SEQ ID NO: 7149 - protein, 269 aa, Thermomyces lanuginosus
EVSQDLFNQFNLFAQYSAAAYCGKNNDAPAGTQITCTGNACPEVEKADATFLYSFEDSGVGDVTGFLALDNTNKLIVLSFRGSRSIENWIQNLNFDLKEINDICSGCRGHDGFTSSWRSVADTLRQKVEDAVREHPDYRVVFAGHSLGGGLATVAGADLRGNGYDIDVFSYGAPRVGNRAFAEFLTVQTGGTLYRITHTNDIVPRLPPRQFGYSHSSPEYWIKSGTLVPVRRRDIVKIEGIDATGGNNQPNIPDAPAHLWYFGLIGTCL

SEQ ID NO: 7150 - protein, 269 aa, Thermomyces lanuginosus
EVSQDLFNQFRLFAQYSAAAYCGKNNDAPAGTQITCTGNACPEVEKADATFLYSFEDSGVGDVTGFLALDNTNKLIVLSFRGSRSIENWITNLNFDLKEINDICSGCRGHDGFTLSWRSVADTLRQKVEDAVREHPDYRVVFTGHSLGGALATVAGADLRGNKYDIDVFSYGAPRVGNRAFAEFLTVQTGGTLYRITHTNDIVPRLPPREFGYSHSSPEYWIKSGTLVPVRRRDIVKIEGIDATGGNNQPNIPSIPAHLWYFGLIGTCL

SEQ ID NO: 7151 - protein, 269 aa, Thermomyces lanuginosus
EVSQDLFNQFNLFAQYSAAAYCSKNNDAPAGTNITCTGNICPEVEKADATILYSFRDSGVGDVTGFLALDNTNKLIVLSFRGSRSIENWIGNLNFDLKEINDICSGCRGHDGFTSSWFSVADTLRQKVEDAVREHPDYRVVFTGHSLGGALATVAGADLRGNGYDIDVFSYGAPRVGNRAFAEFLTVQTGGTLYRITHTNDIVPRLPPREFGYSHSSPEYWIKSGTLVPVRRRDIVKIEGIDAEGGNNQPNIPDIPAHLWYFGLIGTCL

SEQ ID NO: 7152 - protein, 269 aa, Thermomyces lanuginosus
EVSQDLFNQFNLFAQYSAAAYCGKNNDAPAGTKITCTGNACPEVEKADATILYTFKDSGVGDVTGFLALDNTNKLIVLSFRGSRSIENWIGNLNFDLIEINDICSGCRGHDGFTSSWRSVADTLRQKVEDAVREHPDYRVVFTGHSLGGALATVAGADLRGNGYDIDVFSYGAPRVGNRAFAEFLTVQTGGTLYRITHTNDIVPRLPPREFGYSHSSPEYWIKIGTLVPVRRRDIVKIEGIDATGGNNQPNIPDIPAHLWYFGLIGTCL

SEQ ID NO: 7153 - protein, 269 aa, Thermomyces lanuginosus
EVSQDLFNQFNLFAQYSAAAYCGKNNRAPAGTNITCTGNACPEVEKADATFLYSFEDSGVGDVTGFLALDNTNKLIVLSFRGSRSIENWISNLNVDLKEINDICSGCRGHAGFTSSWRSVADTLRQKVEDAVREHVDYRVVFTGHSLGGALATVAGADLRGNGYDIDVFSYGAPRVGNRAFAEFLTVQTGGTLYRITHTNDIVPRLPPREFGYSHPSPEYWIKSGTGVPVTRNDIVKIEGIDATGGNNQPNIPDITAHLWYFGLIGTCL

SEQ ID NO: 7154 - protein, 269 aa, Thermomyces lanuginosus
EVSQDLFNQFNLFAQYSAAAYCGRNNDAPAGTNITCTGNACPEVERADATFLYSFEDSGVGDVTGFLALDNTNRLIVLSFRGSRSIENWIGNLNFDLREINDICSGCRGHDGFTSSWRSVADTLRQRVEDAVREHPDYRVVFTGHSLGGALATVAGADLRGNGYDIDVFSYGAPRVGNRAFAEFLTVQTGGTLYRITHTNDIVPRLPPREFGYSHSSPEYWIRSGTLVPVTRNDIVRIEGIDATGGNNQPNIPDIPAHLWYFGLIGKCL

SEQ ID NO: 7155 - protein, 269 aa, Thermomyces lanuginosus
EVSQDLFNQFNLFAQYSAAAYCKKNNDAPAGTNITCTGNACPEVEKADATFLYSFEDSGVGDVTGFLALDNTNKQIVLSFRGSRSIENWIGNLNFDLKEINDICSGCRGHAGFTSSWRSVADTLRQKVEDAVREHPDYRVVFTGHSLGGALATIAWADLRGNGYDIDVFSYGAPRVGNRAFAEFLTNQQGGTLYRITHTNDIVPRLPPREFGYSHSSPEYWIKSGTLVPVTRNDIVKIEGIDATGGNNQPNIPDIPAHLWYFGRIGTCL

SEQ ID NO: 7156 - protein, 269 aa, Thermomyces lanuginosus
EVSQDLFNQFNLFAQYSAAAYCGKNNDAPAGTKITCTGNACPEVEKADATLLYTFKDSGVGDVTGFLALDNTNKLIVLSFRGSRSIENWIGNLNFDLIEINDICSGCRGHDGFTSSWRSVADTLRQKVEDAVREHPDYRVVFTGHSLGGALATVAGADLRGNGYDIDVFSYGAPRVGNRAFAEFLTVQTGGTLYRITHTNDIVPRLPPREFGYSHSSPEYWIKSGTLVPVRRRDIVKIEGIDATGGNNQPNIPDGPAHLWYFGLIGTCL

SEQ ID NO: 7157 - protein, 269 aa, Thermomyces lanuginosus
EVSQDLFNQFKLFAQYSAAAYCKKNNDAPAGTNITCTGNACPEVEKADATFLYSFKDSGVGDVTGFLALDNTNKQIVLSFRGSRSIENWIGNLNFDLKEINDICSGCRGHDGFTSSWRSVADTLRQKVEAAVREHPDYRVVFTGHSLGGALATIAGADLRGNGYDIDVFSYGAPRVGNRAFAEFLTVQQGGTLYRITHTNDIVPRLPPREFGYSHSSPEYWIKSGTLVPVTRNDIVKIEGIDATGGNNQPNIPDIPAHLWYFGRIGTCL

SEQ ID NO: 7158 - protein, 269 aa, Thermomyces lanuginosus
EVSQDLFNQFNLFAQYSAAAYCGKNNDAPAGTKITCTGNACPEVEKADATILYTFKDSGVGDVTGFLALDNTNKLIVLSFRGSRSIENWIGNLNFDLIEINDICSGCRGHDGFTSSWRSVADTLRQKVEDAVREHPDYRVVFTGHSLGGGLATVAGADLRGNGYDIDVFSYGAPRVGNRAFAEFLTVQTGGTLYRITHTNDIVPRLPPREFGYSHSSPEYWIKSGTLVPVRRRDIVKIEGIDATGGNNQPNIPDIPAHLWYFGLIGTCL

SEQ ID NO: 7159 - protein, 269 aa, Thermomyces lanuginosus
EVSQDLFNQFNLFAQYSAAAYCKKNNSAPAGTNITCTGNACPEVEKADATFLYSFKDSGVGDVTGFLALDNTNKRIVLSFRGSRSIENWIGNLNFDLKEINDICSGCRGHAGFTSSWRSVADTLRQKVEDAVREHPDYRVVFTGHSLGGALATIAWADLRGNGYDIDVFSYGAPRVGNRAFAEFLTVQTGGTLYRITHTNDIVPRLPPREFGYSHSSPEYWIKSGTLVPVTRNDIVKIEGIDATGGNNQPNIPDIPAHLWYFGRIGTCL

SEQ ID NO: 7160 - protein, 269 aa, Thermomyces lanuginosus
EVSQDLFNQFNLFAQYSAAAYCGKNNDAPAGTNITCTGNACPEVEKADATLLYSFRNSGVGDVTGFLALDNTNKLIVLSFRGSRSIENWIGNLNFDLIEINDICSGCRGHDGFTSSWFSVADTLRQKVEDAVREHPDYRVVFTGHSLGGALATVAGADLRGNGYDIDVFSYGAPRVGNRAFAEFLTVQTGGTLYRITHTNDIVPRLPPREFGYSHSSPEYWIKSGTLVPVRRRDIVKIEGIDATGGNNQPNIPDITAHLWYFGLIGTCL

SEQ ID NO: 7161 - protein, 269 aa, Thermomyces lanuginosus
EVSQDLFNQFNLFAQYSAAAYCGKNNDAPAGTKITCTGNACPEVEKADATLLYTFKDSGVGDVTGFLALDNTNKLIVLSFRGSRSIENWIGNLNFDLIEINDICSGCRGHDGFTSSWRSVADTLRQKVEDAVREHPDYRVVFTGHSLGGALATVAGADLRGNGYDIDVFSYGAPRVGNRAFAEFLTVQTGGTLYRITHTNDIVPRLPPREFGYSHSSPEYWIKSGTDVPVRRRDIVKIEGIDATGGNNQPNIPDIPAHLWYFGLIGTCL

SEQ ID NO: 7162 - protein, 269 aa, Thermomyces lanuginosus
EVSQDLFNQFNLFAQYSAAAYCSKNNNAPAGTNITCTGNACPEVEKADATFLYSFRDSGVGDVTGFLALDNTNKLIVLSFRGSRSIENWIGNLNFDLIEINDICSGCRGHDGFTSSWFSVADTLRQKVEDAVREHPDYRVVFTGHSLGGALATVAGADLRGNGYDIDVFSYGAPRVGNRAFAEFLTVQTGGTLYRITHTNDIVPRLPPREFGYSHSSPEYWIKSGTLVPVRRRDIVKIEGIDATGGNNQPNIPDITAHLWYFGLIGTCL

SEQ ID NO: 7163 - protein, 269 aa, Thermomyces lanuginosus
EVSQDLFNQFNLFAQYSKAAYCKKNNDAPAGTNITCTGNACPEVEKADATFLYSFEDSGVGDVTGFLALDNTNKQIILSFRGSRSIENWIGNLNFDLKEINDICSGCRGHDGFTSSWRSVADTLRQKVEAAVREHPDYRVVFTGHSLGGALATIAWADLRGNGYDIDVFSYGAPRVGNRAFAEFLTNQTGGTLYRITHTNDIVPRLPPREFGYSHSSPEYWIKSGTLVPVTRNDIVKIEGIDATGGNNQPNIPDIPAHLWYFGLIGTCL

SEQ ID NO: 7164 - protein, 269 aa, Thermomyces lanuginosus
EVSQDLFNQFNLFAQYSAAAYCQKNNDAPAGTNITCTGNACPEVEKADATTLYSFEDSGVGDVTGFLALDNTNKRIVLSFRGSRSIENWIQNLNFDLKEINDICSGCRGHDGFTSSWRSVADTLRQKVEAAVREHPDYRVVFTGHSLGGALATVAGADLRGNGYDIDVFSYGAPRVGNRAFAEFLTTQTGGTLYRITHTNDIVPRLPPREFGYSHSSPEYWIKSGTLVPVTRNDIVKIEGIDATGGNNQPNQPDIPAHLWYFGRIGTCL

SEQ ID NO: 7165 - protein, 269 aa, Thermomyces lanuginosus
EVSQDLFNQFNLFAQYSAAAYCGKNNDAPAGTKITCTGNACPEVEKADATLLYTFKDSGVGDVTGFLALDNTNKLIVLSFRGSRSIENWIGNLNFDLIEINDICSGCRGHDGFTSSWRSVADTLRQKVEDAVREHPDYRVVFTGHSLGGGLATVAGADLRGNGYDIDVFSYGAPRVGNRAFAEFLTVQTGGTLYRITHTNDIVPRLPPREFGYSHSSPEYWIKSGTLVPVRRRDIVKIEGIDATGGNNQPNIPDIPAHLWYFGLIGTCL

SEQ ID NO: 7166 - protein, 269 aa, Synthetic construct
EVSQDLFNQFNLFAQYSAAAYCGKNNDAPAGTNITCTGNACPEVEKADATFLYSFEGSVVGDVTGFLALDNTNKLIVLSFRGSRSIENWIGNLKFLMKEINDICSGCRGHDGFTSPWRSVADTLRQKVEDAVREHPDYRVVFTGHSLGGALATVAGADLRGNGYDIDVFPYGAPRVGNRAFAEFLTVQTGGTLYRITHTNDIVPRLPPREFGYSHSSPEYWIKSGTLVPVTRNDIVKIEGIDATGGNNRPNIPDIPAHLWYFGLIGTCL

SEQ ID NO: 7167 - protein, 269 aa, Thermomyces lanuginosus
EVSQDLFNQFNLFAQYSAAAYCGKNNDAPAGTKITCTGNACPEVEKADATILYSFKDSGVGDVTGFLARDNTNKLIVLSFRGSRSIENWIGNLNFDLEEINDICSGCRGHDGFTSSWRSVADTLRQKVEDAVREHPDYRVVFTGHSLGGALATVAGADLRGNGYDIDVFSYGAPRVGNRAFAEFLTVQTGGTLYRITNTNDIVPRLPPREFGYSHSSPEYWIKSGTLVPVRRRDIVKIEGIDATGGNNQPNIPDIPAHLWYFGLIGTCL

SEQ ID NO: 7168 - protein, 269 aa, Thermomyces lanuginosus
EVSQDLFNQFNLFAQYSAAAYCSKNNDAPAGTNITCTGNACPEVEKADATILYSFRDSGVGDVTGFLALDNTNKLIVLSFRGSRSIENWIGNLNFDLIEINDICSGCRGHDGFTSSWFSVADTLRQKVEDAVREHPDYRVVFTGHSLGGALATVAGADLRGNGYDIDVFSYGAPRVGNRAFAEFLTVQTGGTLYRITHTNDIVPRLPPREFGYSHSSPEYWIKSGTLVPVRRRDIVKIEGIDATGGNNQPNIPDITAHLWYFGLIGTCL

SEQ ID NO: 7169 - protein, 269 aa, Thermomyces lanuginosus
EVSQDLFNQFNLFAQYSAAAYCQKNNDAPAGTNITCTGNACPEVEKADATFLYSFKDSGVGDVTGFLALDNTNKQIVLSFRGSRSIENWIGNLNFDLKEINDICSGCRGHAGFTSSWRSVADTLRQKVEDAVREHPDYRVVFTGHSLGGALATIAGADLRGNGYDIDVFSYGAPRVGNRAFAEFLTNQQGGTLYRITHTNDIVPRLPPREFGYSHSSPEYWIKSGTLVPVTRNDIVKIEGIDATGGNNQPNIPDIPAHLWYFGRIGTCL

SEQ ID NO: 7170 - protein, 269 aa, Thermomyces lanuginosus
EVSQDLFNQFNLFAQYSAAAYCGKNNDAPAGTKITCTGNACPEVEKADATVLYTFKDSGVGDVTGFLALDNTNKLIVLSFRGSRSIENWIGNLNFDLIEINDICSGCRGHDGFTSSWRSVADTLRQKVEDAVREHPDYRVVFTGHSLGGALATVAGADLRGNGYDIDVFSYGAPRVGNRAFAEFLTVQTGGTLYRITHTNDIVPRLPPREFGYSHSSPEYWIKSGTLVPVRRRDIVKIEGIDATGGNNQPNIPDGPAHLWYFGLIGTCL

SEQ ID NO: 7171 - protein, 269 aa, Thermomyces lanuginosus
EVSQDLFNQFNLFAQYSAAAYCSKNNNAPAGTNITCTGNACPEVEKADATILYSFRDSGVGDVTGFLALDNTNKLIVLSFRGSRSIENWIGNLNFDLKEINDICSGCRGHDGFTSSWFSVADTLRQKVEDAVREHPDYRVVFTGHSLGGALATVAGADLRGNGYDIDVFSYGAPRVGNRAFAEFLTVQTGGTLYRITHTNDIVPRLPPREFGYSHSSPEFWIKSGTLVPVRRRDIVKIEGIDATGGNNQPNIPDIPAHLWYFGLIGTCL

SEQ ID NO: 7172 - protein, 269 aa, Thermomyces lanuginosus
EVSQDLFNQFNLFAQYSAAAYCKANNDAPAGTNITCTGNACPEVEKADATFLYSFEDSGVGDVTGFLALDNTNKRIVLSFRGSRSIENWIGNLRFDLKEINDICSGCRGHDGFTSSWRSVADTLRQKVEDAVREHPDYRVVFTGHSLGGALATIAWADLRGNGYDIDVFSYGAPRVGNRAFAEFLTTQQGGTLYRITHTNDIVPRLPPREFGYSHSSPEYWIKSGTLVPVTRNDIVKIEGIDATGGNNQPNIPDIPAHLWYFGLIGTCL

SEQ ID NO: 7173 - protein, 269 aa, Thermomyces lanuginosus
EVSQDLFNQFNLFAQYSAAAYCGKNNDAPAGTKITCTGNACPEVEKADATLLYTFKDSGVGDVTGFLALDNTNKLIVLSFRGSRSIENWIGNLNFDLIEINDICSGCRGHDGFTSSWRSVADTLRQKVEDAVREHPDYRVVFTGHSLGGALATVAGADLRGNGYDIDVFSYGAPRVGNRAFAEFLTVQTGGTLYRITHTNDIVPRLPPREFGYSHSSPEYWIKSGTLVPVRRRDIVKIEGIDATGGNNQPNIPDIPIHLWYFGLIGTCL

SEQ ID NO: 7174 - protein, 269 aa, Thermomyces lanuginosus
EVSQDLFNQFNLFAQYSAAAYCGKNNDAPAGTKITCTGNACPEVEKADATILYTFKDSGVGDVTGFLALDNTNKLIVLSFRGSRSIENWIGNLNFDLIEINDICSGCRGHDGFTSSWRSVADTLRQKVEDAVREHPDYRVVFTGHSLGGALATVAGADLRGNGYDIDVFSYGAPRVGNRAFAEFLTVQTGGTLYRITYTNDIVPRLPPREFGYSHSSPEYWIKSGTLVPVRRRDIVKIEGIDATGGNNQPNIPDIPAHLWYFGLIGTCL

SEQ ID NO: 7175 - protein, 269 aa, Thermomyces lanuginosus
EVSQDLFNQFRLFAQYSAAAYCGKNNDAPAGTQITCTGNACPEVEKADATFLYSFEDSGVGDVTGFLALDNTNKLIVLSFRGSRSIENWITNLNFDLKEINDICSGCRGHDGFTSSWRSVADTLRQKVEDAVREHPDYRVVFTGHSLGGALATVAGADLRGNKYDIDVFSYGAPRVGNRAFAEFLTVQTGGTLYRITHTNDIVPRLPPREFGYSHSSPEYWIKSGTLVPVRRRDIVKIEGIDATGGNNQPNIPSIIAHLWYFGLIGTCL

SEQ ID NO: 7176 - protein, 269 aa, Thermomyces lanuginosus
EVSQDLFNQFNLFAQYSAAAYCGKNNDAPAGTKITCTGNACPEVEKADATLLYSFKDSGVGDVTGFLARDNTNKLIVLSFRGSRSIENWIGNLNFDLEEINDICSGCRGHDGFTSSWRSVADTLRQKVEDAVREHPDYRVVFTGHSLGGALATVAGADLRGNGYDIDVFSYGAPRVGNRAFAEFLTVQTGGTLYRITHTNDIVPRLPPREFGYSHSSPEYWIKSGTLVPRRRRDIVKIEGIDATGGNNQPNIPDIPAHLWYFGLIGTCL

SEQ ID NO: 7177 - protein, 269 aa, Thermomyces lanuginosus
EVSQDLFNQFRLFAQYSAAAYCGKNNDAPAGTQITCTGNACPEVEKADATFRYSFEDSGVGDVTGFLALDNTNKLIVLSFRGSRSIENWITNLNFDLKEINDICSGCRGHDGFTSSWRSVADTLRQKVEDAVREHPDYRVVFTGHSLGGALATVAGADLRGNKYDIDVFSYGAPRVGNRAFAEFLTVQTGGTLYRITHTNDIVPRLPPREFGYSHSSPEYWIKSGTLVPVRRRDIVKIEGIDATGGNNQPNIPSIPAHLWYFGLIGTCL

SEQ ID NO: 7178 - protein, 269 aa, Thermomyces lanuginosus
EVSQDLFNQFNLFAQYSAAAYCGKNNDAPAGTKITCTGNACPEVEKADATLLYTFKDSGVGDVTGFLALDNTNKLIVLSFRGSRSIENWIGNLNFDLIEINDICSGCRGHDGFTSSWRSVADTLRQKVEDAVREHPDYRVVFTGHSLGGALATVAGADLRGNGYDIDVFSYGAPRVGNRAFAEFLTVQTGGTLYRITHTNDIVPRLPPREFGYSHSSPEYWIKSGTLPPVRRRDIVKIEGIDATGGNNQPNIPDIPAHLWYFGLIGTCL

SEQ ID NO: 7179 - protein, 269 aa, Thermomyces lanuginosus
EVSQDLFNQFNLFAQYSAAAYCGKNNDAPAGTKITCTGNACPEVEKADATILYTFKDSGVGDVTGFLALDNTNKLIVLSFRGSRSIENWIGNLNFDLIEINDICSGCRGHDGFTSSWRSVADTLRQKVEDAVREHPDYRVVFTGHSLGGALATVAGADLRGNGYDIDVFSYGAPRVGNRAFAEFLTVQTGGTLYRITSTNDIVPRLPPREFGYSHSSPEYWIKSGTLVPVRRRDIVKIEGIDATGGNNQPNIPDIPAHLWYFGLIGTCL

SEQ ID NO: 7180 - protein, 269 aa, Thermomyces lanuginosus
EVSQDLFNQFNLFAQYSAAAYCGKNNDAPAGTKITCTGNACPEVEKADATILYSFKDSGVGDVTGFLARDNTNKLIVLSFRGSRSIENWIGNLNFDLEEINDICSGCRGHDGFTSSWRSVADTLRQKVEDAVREHPDYRVVFTGHSLGGALATVAGADLRGNGYDIDVFSYGAPRVGNRAFAEFLTVQTGGTLYRITHTNDIVPRLPPREFGYSHSSPEYWIKIGTLVPVRRRDIVKIEGIDATGGNNQPNIPDIPAHLWYFGLIGTCL

SEQ ID NO: 7181 - protein, 269 aa, Thermomyces lanuginosus
EVSQDLFNQFNLFAQYSAAAYCGKNNDAPAGTKITCTGNACPEVEKADATILYTFKDSGVGDVTGFLALDNTNKLIVLSFRGSRSIENWIGNLNFDLIEINDICSGCRGHDGFTSSWRSVADTLRQKVEDAVREHPDYRVVFTGHSLGGALATVAGADLRGNGYDIDVFSYGAPRVGNRAFAEFLTVQTGGTLYRITHTNDIVPRLPPREFGYSHSSPEYWIKSGTDVPVRRRDIVKIEGIDATGGNNQPNIPDIPAHLWYFGLIGTCL

SEQ ID NO: 7182 - protein, 269 aa, Thermomyces lanuginosus
EVSQDLFNQFNLFAQYSAAAYCGKNNDAPAGTKITCTGNACPEVEKADATVLYTFKDSGVGDVTGFLALDNTNKLIVLSFRGSRSIENWIGNLNFDLIEINDICSGCRGHDGFTSSWRSVADTLRQKVEDAVREHPDYRVVFTGHSLGGGLATVAGADLRGNGYDIDVFSYGAPRVGNRAFAEFLTVQTGGTLYRITHTNDIVPRLPPREFGYSHSSPEYWIKSGTLVPVRRRDIVKIEGIDATGGNNQPNIPDIPAHLWYFGLIGTCL

SEQ ID NO: 7183 - protein, 269 aa, Thermomyces lanuginosus
EVSQDLFNQFNLFAQYSAAAYCGKNNNAPAGTNITCTGNACPEVEKADATILYSFRDSGVGDVTGFLALDNTNKLIVLSFRGSRSIENWIGNLNFDLIEINDICSGCRGHDGFTSSWFSVADTLRQKVEDAVREHPDYRVVFTGHSLGGALATVAGADLRGNGYDIDVFSYGAPRVGNRAFAEFLTVQTGGTLYRITHTNDIVPRLPPREFGYSHSSPEYWIKSGTLVPVRRRDIVKIEGIDATGGNNQPNIPDITAHLWYFGLIGTCL

SEQ ID NO: 7184 - protein, 269 aa, Thermomyces lanuginosus
EVSQDLFNQFNLFAQYSAAAYCGKNNDAPAGTNITCTGNACPEVEKADATFLYSFEDSGKGDVTGFLALDNTNKLIVLSFRGSRSVENWIGNLNFDLKEINDICSGCRGHDGFTSSWRSVADTLRQKVEDAVREHPDYRVVFTGHSLGGGLATVAGADLRGNGYDIDVFSYGAPRVGNRAFAEFLTVQTGGTLYRITHTNDIVPRLPPREFGYSHSSPEYWINSSTLVPVRRRDIVKIEGIDATGGNNQPNIPDIKAHLWYFGLIGTCL

SEQ ID NO: 7185 - protein, 269 aa, Thermomyces lanuginosus
EVSQDLFNQFNLFAQYSAAAYCGKNNDAPAGTNITCTGNICPEVEKADATFLYSFRNSGVGDVTGFLALDNTNKLIVLSFRGSRSIENWIGNLNFDLIEINDICSGCRGHDGFTSSWFSVADTLRQKVEDAVREHPDYRVVFTGHSLGGALATVAGADLRGNGYDIDVFSYGAPRVGNRAFAEFLTVQTGGTLYRITHTNDIVPRLPPREFGYSHSSPEYWIKSGTLVPVRRRDIVKIEGIDATGGNNQPNIPDITAHLWYFGLIGTCL

SEQ ID NO: 7186 - protein, 269 aa, Thermomyces lanuginosus
EVSQDLFNQFNLFAQYSAAAYCGANNDAPAGTNITCTGNACPEVEKADATFLYSFEDSGVGDVTGFLALDNTNKLIVLSFRGSRSIENWIGNLRFDLKEINDICSGCRGHDGFTSSWRSVADTLRQKVEAAVREHPDYRVVFTGHSLGGALATIAWADLRGNGYDIDVFSYGAPRVGNRAFAEFLTTQQGGTLYRITHTNDIVPRLPPREFGYSHSSPEYWIKSGTLVPVTRNDIVKIEGIDATGGNNQPNIPDIPAHLWYFGRIGTCL

SEQ ID NO: 7187 - protein, 269 aa, Thermomyces lanuginosus
EVSQDLFNQFNLFAQYSKAAYCKANNDAPAGTNITCTGNACPEVEKADATFLYSFEDSGVGDVTGFLALDNTNKQIILSFRGSRSIENWIGNLRFDLKEINDICSGCRGHDGFTSSWRSVADTLRQKVEAAVREHPDYRVVFTGHSLGGALATVAWADLRGNGYDIDVFSYGAPRVGNRAFAEFLTVQTGGTLYRITHTNDIVPRLPPREFGYSHSSPEYWIKSGTLVPVTRNDIVKIEGIDATGGNNQPNIPDIPAHLWYFGLIGTCL

SEQ ID NO: 7188 - protein, 269 aa, Thermomyces lanuginosus
EVSQDLFNQFNLFAQYSAAAYCGKNNRAPAGTKITCTANACPEVEKADATVLYSFKDSGVGDVTGFLARDNTNKLIVLSFRGSRSIENWIGNLNFELEEINDICSGCRGHDGFTSSWRSVADTLRQKVEDAVREHPDYRVVFTGHSLGGALATVAGADLRGNGYDIDVFSYGAPRVGNRAFAEFLTVQTGGTLYRITHTNDIVPRLPPREFGYSHSSPEYWIKSGTLVPVTRNDIVKIEGIDATGGNNQPNIPDIPAHLWYFGLIGTCL

SEQ ID NO: 7189 - protein, 269 aa, Thermomyces lanuginosus
EVSQDLFNQFNLFAQYSAAAYCGKNNDAPAGTKITCTGNACPEVEKADATVLYTFKDSGVGDVTGFLALDNTNKLIVLSFRGSRSIENWIGNLNFDLIEINDICSGCRGHDGFTSSWRSVADTLRQKVEDAVREHPDYRVVFTGHSLGGALATVAGADLRGNGYDIDVFSYGAPRVGNRAFAEFLTVQTGGTLYRITHTNDIVPRLPPREFGYSHSSPEYWIKSGTLPPVRRRDIVKIEGIDATGGNNQPNIPDIPAHLWYFGLIGTCL

SEQ ID NO: 7190 - protein, 269 aa, Thermomyces lanuginosus
EVSQDLFNQFNLFAQYSAAAYCGKNNRAPAGTNITCTANACPEVEKADATFLYSFEDSGVGDVTGFLALDNTNKLIVLSFRGSRSIENWIGNLNFDLKEINDICSGCRGHAGFTSSWRSVADTLRQKVEDAVREHPDYRVVFTGHSLGGALATVAGADLRGNKYDIDVFSYGAPRVGNRAFAEFLTVQTGGTLYRITHTNDIVPRLPPREFGYSHSSPEYWIKSGTLVPVRRRDIVKIEGIDATGGNNQPNIPSITAHLWYFGLIGTCL

SEQ ID NO: 7191 - protein, 269 aa, Thermomyces lanuginosus
EVSQDLFNQFNLFAQYSAAAYCQKNNDAPAGTNITCTGNACPEVEKADATTLYSFEDSGVGDVTGFLALDNTNKQIVLSFRGSRSIENWIQNLNFDLKEINDICSGCRGHDGFTSSWRSVADTLRQKVEAAVREHPDYRVVFTGHSLGGALATVAGADLRGNGYDIDVFSYGAPRVGNRAFAEFLTHQTGGTLYRITHTNDIVPRLPPREFGYSHSSPEYWIKSGTLVPVTRNDIVKIEGIDATGGNNQPNQPDIPAHLWYFGRIGTCL

SEQ ID NO: 7192 - protein, 269 aa, Thermomyces lanuginosus
EVSQDLFNQFNLFAQYSAAAYCGKNNRAPAGTNITCTANACPEVEKADATFLYSFEDSGVGDVTGFLALDNTNKLIVLSFRGSRSIENWIGNLNFELKEINDICSGCRGHDGFTSSWRSVADTLRQKVEDAVREHPDYRVVFTGHSLGGALATVAGADLRGNKYDIDVFSYGAPRVGNRAFAEFLTVQTGGTLYRITHTNDIVPRLPPREFGYSHSSPEYWIKSGTLVPVRRRDIVKIEGIDATGGNNQPNIPSITAHLWYFGLIGTCL

SEQ ID NO: 7193 - protein, 269 aa, Thermomyces lanuginosus
EVSQDLFNQFNLFAQYSAAAYCGKNNDAPAGTQITCTGNACPEVEKADATFLYSFEDSGVGDVTGFLALDNTNKLIVLSFRGSRSIENWITNLSFDLKEINDICSGCRGHAGFTSSWRSVADTLRQKVEDAVREHPDYRVVFTGHSLGGALATVAGADLRGNTYDIDVFSYGAPRWGNRAFAEFLTVQTGGTLYRITHTNDIVPRLPPREFGYSHSSPEYWIKSGTLVPVRRRDIVKIEGIDATGGNNQPNIPDIPAHLWYFGLIGTCL

SEQ ID NO: 7194 - protein, 269 aa, Thermomyces lanuginosus
EVSQDLFNQFNLFAQYSAAAYCGKNNDAPAGTKITCTGNACPEVEKADATVLYTFKDSGVGDVTGFLALDNTNKLIVLSFRGSRSIENWIGNLNFDLIEINDICSGCRGHDGFTSSWRSVADTLRQKVEDAVREHPDYRVVFTGHSLGGALATVAGADLRGNGYDIDVFSYGAPRVGNRAFAEFLTVQTGGTLYRITLTNDIVPRLPPREFGYSHSSPEYWIKSGTLVPVRRRDIVKIEGIDATGGNNQPNIPDIPAHLWYFGLIGTCL

SEQ ID NO: 7195 - protein, 269 aa, Thermomyces lanuginosus
EVSQDLFNQFNLFAQYSKAAYCQANNDAPAGTNITCTGNACPEVEKADATFLYSFEDSGVGDVTGFLALDNTNKRIVLSFRGSRSIENWIGNLRFDLKEINDICSGCRGHDGFTSSWRSVADTLRQKVEAAVREHPDYRVVFTGHSLGGALATIAWADLRGNGYDIDVFSYGAPRVGNRAFAEFLTVQTGGTLYRITHTNDIVPRLPPREFGYSHSSPEYWIKSGTLVPVTRNDIVKIEGIDATGGNNQPNIPDIPAHLWYFGLIGTCL

SEQ ID NO: 7196 - protein, 269 aa, Thermomyces lanuginosus
EVSQDLFNQFRLFAQYSAAAYCGKNNDAPAGTQITCKGNACPEVEKADATFLYSFEDSGVGDVTGFLALDNTNKLIVLSFRGSRSIENWITNLNFDLKEINDICSGCRGHDGFTSSWRSVADTLRQKVEDAVREHPDYRVVFTGHSLGGALATVAGADLRGNKYDIDVFSYGAPRVGNRAFAEFLTVQTGGTLYRITHTNDIVPRLPPREFGYSHSSPEYWIKSGTLVPVRRRDIVKIEGIDATGGNNQPNIPSIPAHLWYFGLIGTCL

SEQ ID NO: 7197 - protein, 269 aa, Thermomyces lanuginosus
EVSQDLFNQFNLFAQYSAAAYCGKNNDAPAGTKITCTGNACPEVEKADATILYSFKDSGVGDVTGFLARDNTNKLIVLSFRGSRSIENWIGNLNFDLEEINDICSGCRGHDGFTSSWRSVADTLRQKVEDAVREHPDYRVVFTGHSLGGALATVAGADLRGNGYDIDVFSYGAPRVGNRAFAEFLTVQTGGTLYRITITNDIVPRLPPREFGYSHSSPEYWIKSGTLVPVRRRDIVKIEGIDATGGNNQPNIPDIPAHLWYFGLIGTCL

SEQ ID NO: 7198 - protein, 269 aa, Thermomyces lanuginosus
EVSQDLFNQFNLFAQYSAAAYCGKNNDAPAGTKITCTGNACPEVEKADATLLYTFKDSGVGDVTGFLALDNTNKLIVLSFRGSRSIENWIGNLNFDLIEINDICSGCRGHDGFTSSWRSVADTLRQKVEDAVREHPDYRVVFTGHSLGGALATVAGADLRGNGYDIDVFSYGAPRVGNRAFAEFLTVQTGGTLYRITLTNDIVPRLPPREFGYSHSSPEYWIKSGTLVPVRRRDIVKIEGIDATGGNNQPNIPDIPAHLWYFGLIGTCL

SEQ ID NO: 7199 - protein, 269 aa, Thermomyces lanuginosus
EVSQDLFNQFNLFAQYSAAAYCGKNNRAPAGTNITCTGNACPEVEKADATFLYSFEDSGVGDVTGFLALDNTNKLIVLSFRGSRSIENWLGNFNFNLKEINDICSGCRGHAGFTSSWRSVADTLRQKVEDAVREHPDYRVVFTGHSLGGALATVAGADLRGNGYDIDVFSYGAPRVGNRAFAEFLTVQTGGTLYRITHTNDIVPRLPPREFGYSHPSPEYWIKSGTGVPVTRNDIVKIEGIDATGGNNQPNIPDITAHLWYFGLIGTCL

SEQ ID NO: 7200 - protein, 269 aa, Thermomyces lanuginosus
EVSQDLFNQFNLFAQYSAAAYCGKNNDAPAGTQITCTGNACPEVEKADATFLYSFEDSGVGDVTGFLALDNTNKLIVLSFRGSRSIENWITNLNFDLIEINDICSGCRGHDGFTSSWRSVADTLRQKVEDAVREHPDYRVVFTGHSLGGALATVAGADLRGNKYDIDVFSYGAPRVGNRAFAEFLTVQTGGTLYRITHTNDIVPRLPPREFGYSHSSPEYWIKSGTLVPVRRRDIVKIEGIDATGGNNQPNIPSILAHLWYFGLIGTCL

SEQ ID NO: 7201 - protein, 269 aa, Thermomyces lanuginosus
EVSQDLFNQFRLFAQYSAAAYCGKNNDAPAGTQITCTGNACPEVEKADATFLYSFEDSGVGDVTGFLALDNTNKLIVLSFRGSRSIENWITNLNFDLKEINDICSGCRGHDGFTSSWRSVADTLRQKVEDAVREHPDYRVEFTGHSLGGALATVAGADLRGNEYDIDVFSYGAPRVGNRAFAEFLTVQTGGTLYRITHTNDIVPRLPPREFGYSHSSPEYWIKSGTLVPVRRRDIVKIEGIDATGGNNQPNIPSIPAHLWYFGLIGTCL

SEQ ID NO: 7202 - protein, 269 aa, Thermomyces lanuginosus
EVSQDLFNQFNLFAQYSAAAYCGKNNDAPAGTKITCTGNACPEVEKADATLLYSFKDSGVGDVTGFLARDNTNKLIVLSFRGSRSIENWIGNLNFDLEEINDICSGCRGHDGFTSSWRSVADTLRQKVEDAVREHPDYRVVFTGHSLGGALATVAGADLRGNGYDIDVFSYGAPRVGNRAFAEFLTVQTGGTLYRITHTNDIVPRLPPREFGYSHSSPEYWIKPGTLVPVRRRDIVKIEGIDATGGNNQPNIPDIPAHLWYFGLIGTCL

SEQ ID NO: 7203 - protein, 269 aa, Thermomyces lanuginosus
EVSQDLFNQFKLFAQYSAAAYCQKNNSAPAGTNITCTGNACPEVEKADATFLYSFEDSGVGDVTGFLALDNTNKLIVLSFRGSRSIENWIGNLRFDLKEINDICSGCRGHDGFTSSWRSVADTLRQKVEDAVREHPDYRVVFTGHSLGGALATIAWADLRGNGYDIDVFSYGAPRVGNRAFAEFLTVQQGGTLYRITHTNDIVPRLPPREFGYSHSSPEYWIKSGTLVPVTRNDIVKIEGIDATGGNNQPNIPDIPAHLWYFGRIGTCL

SEQ ID NO: 7204 - protein, 269 aa, Thermomyces lanuginosus
EVSQDLFNQFNLFAQYSAAAYCGKNNDAPAGTNITCTGNICPEVEKADATLLYSFRNSGVGDVTGFLALDNTNKLIVLSFRGSRSIENWIGNLNFDLKEINDICSGCRGHDGFTSSWFSVADTLRQKVEDAVREHPDYRVVFTGHSLGGALATVAGADLRGNSYDIDVFSYGAPRVGNRAFAEFLTVQTGGTLYRITHTNDIVPRLPPREFGYSHSSPEYWIKSGTLVPVRRRDIVKIEGIDATGGNNQPNIPDIPAHLWYFGLIGTCL

SEQ ID NO: 7205 - protein, 269 aa, Thermomyces lanuginosus
EVSQDLFNQFNLFAQYSAAAYCSKNNNAPAGTNITCTGNACPEVEKADATILYSFRDSGVGDVTGFLALDNTNKLIVLSFRGSRSIENWIGNLNFDLIEINDICSGCRGHDGFTSSWFSVADTLRQKVEDAVREHPDYRVVFTGHSLGGALATVAGADLRGNGYDIDVFSYGAPRVGNRAFAEFLTVQTGGTLYRITHTNDIVPRLPPREFGYSHSSPEYWIKSGTLVPVRRRDIVKIEGIDATGGNNQPNIPDIPAHLWYFGLIGTCL

SEQ ID NO: 7206 - protein, 269 aa, Thermomyces lanuginosus
EVSQDLFNQFNLFAQYSAAAYCGKNNDAPAGTNITCTGNACPEVEKADATILYSFRDSGVGDVTGFLALDNTNKLIVLSFRGSRSIENWIGNLNFDLIEINDICSGCRGHDGFTSSWFSVADTLRQKVEDAVREHPDYRVVFTGHSLGGALATVAGADLRGNGYDIDVFSYGAPRVGNRAFAEFLTVQTGGTLYRITHTNDIVPRLPPREFGYSHSSPEFWIKSGTLVPVRRRDIVKIEGIDATGGNNQPNIPDITAHLWYFGLIGTCL

SEQ ID NO: 7207 - protein, 269 aa, Thermomyces lanuginosus
EVSQDLFNQFNLFAQYSAAAYCSKNNNAPAGTNITCTGNICPEVEKADATFLYSFRDSGVGDVTGFLALDNTNKLIVLSFRGSRSIENWIGNLNFDLKEINDICSGCRGHDGFTSSWFSVADTLRQKVEDAVREHPDYRVVFTGHSLGGALATVAGADLRGNGYDIDVFSYGAPRVGNRAFAEFLTVQTGGTLYRITHTNDIVPRLPPREFGYSHSSPEYWIKSGTLVPVRRRDIVKIEGIDATGGNNQPNIPDITAHLWYFGLIGTCL

SEQ ID NO: 7208 - protein, 269 aa, Thermomyces lanuginosus
EVSQDLFNQFNLFAQYSAAAYCGKNNDAPAGTKITCTGNACPEVEKADATILYSFKDSGVGDVTGFLARDNTNKLIVLSFRGSRSIENWIGNLNFDLEEINDICSGCRGHDGFTSSWRSVADTLRQKVEDAVREHPDYRVVFTGHSLGGGLATVAGADLRGNGYDIDVFSYGAPRVGNRAFAEFLTVQTGGTLYRITHTNDIVPRLPPREFGYSHSSPEYWIKSGTLVPVRRRDIVKIEGIDATGGNNQPNIPDIPAHLWYFGLIGTCL

SEQ ID NO: 7209 - protein, 269 aa, Thermomyces lanuginosus
EVSQDLFNQFNLFAQYSAAAYCSKNNDAPAGTNITCTGNACPEVEKADATILYSFRDSGVGDVTGFLALDNTNKLIVLSFRGSRSIENWIGNLNFDLKEINDICSGCRGHDGFTSSWFSVADTLRQKVEDAVREHPDYRVVFTGHSLGGALATVAGADLRGNGYDIDVFSYGAPRVGNRAFAEFLTVQTGGTLYRITHTNDIVPRLPPREFGYSHSSPEYWIKSGTLVPVRRRDIVKIEGIDAEGGNNQPNIPDITAHLWYFGLIGTCL

SEQ ID NO: 7210 - protein, 269 aa, Thermomyces lanuginosus
EVSQDLFNQFNLFAQYSAAAYCKKNNDAPAGTNITCTGNACPEVEKADATFLYSFEDSGVGDVTGFLALDNTNKQIVLSFRGSRSIENWIGNLRFDLKEINDICSGCRGHDGFTSSWRSVADTLRQKVEAAVREHPDYRVVFTGHSLGGALATIAWADLRGNGYDIDVFSYGAPRVGNRAFAEFLTNQTGGTLYRITHTNDIVPRLPPREFGYSHSSPEYWIKSGTLVPVTRNDIVKIEGIDATGGNNQPNIPDIPAHLWYFGRIGTCL

SEQ ID NO: 7211 - protein, 269 aa, Thermomyces lanuginosus
EVSQDLFNQFNLFAQYSAAAYCGKNNDAPAGTKITCTGNACPEVEKADATLLYTFKDSGVGDVTGFLALDNTNKLIVLSFRGSRSIENWIGNLNFDLIEINDICSGCRGHDGFTSSWRSVADTLRQKVEDAVREHPDYRVVFTGHSLGGALATVAGADLRGNGYDIDVFSYGAPRVGNRAFAEFLTVQTGGTLYRITSTNDIVPRLPPREFGYSHSSPEYWIKSGTLVPVRRRDIVKIEGIDATGGNNQPNIPDIPAHLWYFGLIGTCL

SEQ ID NO: 7212 - protein, 269 aa, Thermomyces lanuginosus
EVSQDLFNQFNLFAQYSAAAYCGKNNDAPAGTKITCTGNACPEVEKADATVLYSFKDSGVGDVTGFLARDNTNKLIVLSFRGSRSIENWIGNLNFDLEEINDICSGCRGHDGFTSSWRSVADTLRQKVEDAVREHPDYRVVFTGHSLGGALATVAGADLRGNGYDIDVFSYGAPRVGNRAFAEFLTVQTGGTLYRITYTNDIVPRLPPREFGYSHSSPEYWIKSGTLVPVRRRDIVKIEGIDATGGNNQPNIPDIPAHLWYFGLIGTCL

SEQ ID NO: 7213 - protein, 269 aa, Thermomyces lanuginosus
EVSQDLFNQFNLFAQYSKAAYCKKNNDAPAGTNITCTGNACPEVEKADATFLYSFEDSGVGDVTGFLALDNTNKRIILSFRGSRSIENWIGNLRFDLKEINDICSGCRGHDGFTSSWRSVADTLRQKVEAAVREHPDYRVVFTGHSLGGALATVAWADLRGNGYDIDVFSYGAPRVGNRAFAEFLTQQTGGTLYRITHTNDIVPRLPPREFGYSHSSPEYWIKSGTLVPVTRNDIVKIEGIDATGGNNQPNIPDIPAHLWYFGLIGTCL

SEQ ID NO: 7214 - protein, 269 aa, Thermomyces lanuginosus
EVSQDLFNQFNLFAQYSKAAYCKANNDAPAGTNITCTGNACPEVEKADATFLYSFEDSGVGDVTGFLALDNTNKQIVLSFRGSRSIENWIGNLNFDLKEINDICSGCRGHDGFTSSWRSVADTLRQKVEYAVREHPDYRVVFTGHSLGGALATIAGADLRGNGYDIDVFSYGAPRVGNRAFAEFLTNQQGGTLYRITHTNDIVPRLPPREFGYSHSSPEYWIKSGTLVPVTRNDIVKIEGIDATGGNNQPNIPDIPAHLWYFGLIGTCL

SEQ ID NO: 7215 - protein, 269 aa, Thermomyces lanuginosus
EVSQDLFNQFNLFAQYSAAAYCGKNNDAPAGTNITCTGNACPEVEKADATFLYSFRDSGVGDVTGFLALDNTNKLIVLSFRGSRSIENWIGNLNFDLIEINDICSGCRGHDGFTSSWFSVADTLRQKVEDAVREHPDYRVVFTGHSLGGALATVAGADLRGNGYDIDVFSYGAPRVGNRAFAEFLTVQTGGTLYRITHTNDIVPRLPPREFGYSHSSPEFWIKSGTLVPVRRRDIVKIEGIDAEGGNNQPNIPDITAHLWYFGLIGTCL

SEQ ID NO: 7216 - protein, 269 aa, Thermomyces lanuginosus
EVSQDLFNQFNLFAQYSAAAYCKKNNSAPAGTNITCTGNACPEVEKADATFLYSFEDSGVGDVTGFLALDNTNKRIVLSFRGSRSIENWIGNLRFDLKEINDICSGCRGHDGFTSSWRSVADTLRQKVEDAVREHPDYRVVFTGHSLGGALATIAWADLRGNGYDIDVFSYGAPRVGNRAFAEFLTNQQGGTLYRITHTNDIVPRLPPREFGYSHSSPEYWIKSGTLVPVTRNDIVKIEGIDATGGNNQPNIPDIPAHLWYFGLIGTCL

SEQ ID NO: 7217 - protein, 269 aa, Thermomyces lanuginosus
EVSQDLFNQFRLFAQYSAAAYCGKNNDAPAGTQITCTGNACPEVEKADATFLYSFEDSGVGDVTGFLALDNTNKLIVLSFRGSRSIENWITNLNFWLKEINDICSGCRGHDGFTSSWRSVADTLRQKVEDAVREHPDYRVVFTGHSLGGALATVAGADLRGNKYDIDVFSYGAPRVGNRAFAEFLTVQTGGTLYRITHTNDIVPRLPPREFGYSHSSPEYWIKSGTLVPVRRRDIVKIEGIDATGGNNQPNIPSIPAHLWYFGLIGTCL

SEQ ID NO: 7218 - protein, 269 aa, Thermomyces lanuginosus
EVSQDLFNQFNLFAQYSAAAYCGKNNNAPAGTNITCTGNACPEVEKADATFLYSFRDSGVGDVTGFLALDNTNKLIVLSFRGSRSIENWIGNLNFDLIEINDICSGCRGHDGFTSSWFSVADTLRQKVEDAVREHPDYRVVFTGHSLGGALATVAGADLRGNGYDIDVFSYGAPRVGNRAFAEFLTVQTGGTLYRITHTNDIVPRLPPREFGYSHSSPEYWIKSGTLVPVRRRDIVKIEGIDAEGGNNQPNIPDITAHLWYFGLIGTCL

SEQ ID NO: 7219 - protein, 269 aa, Thermomyces lanuginosus
EVSQDLFNQFNLFAQYSAAAYCGKNNDAPAGTKITCTGNACPEVEKADATVLYTFKDSGVGDVTGFLALDNTNKLIVLSFRGSRSIENWIGNLNFDLIEINDICSGCRGHDGFTSSWRSVADTLRQKVEDAVREHPDYRVVFTGHSLGGALATVAGADLRGNGYDIDVFSYGAPRVGNRAFAEFLTVQTGGTLYRITHTNDIVPRLPPREFGYSHSSPEYWIKSGTLVPRRRRDIVKIEGIDATGGNNQPNIPDIPAHLWYFGLIGTCL

SEQ ID NO: 7220 - protein, 269 aa, Thermomyces lanuginosus
EVSQDLFNQFNLFAQYSAAAYCGKNNDAPAGTNITCTGNACPEVEIADATFLYSFEDNGSGDVTGFLALDNTNKLIVLSFRGSRSIENWIGNLNFDLKEINDICSGCRGHDGFTSSWRSVADTLRQKVEDAVREHPDYRVVFTGHSLGGALATVAGADLRGNGYDIDVFSYGAPRVGNRAFAEFLTVQTGGTLYRITHTNDIVPRLPPREFGYSHSSPEYWIISGTLVPVRRRDIVKIEGIDATGGNNLPNIPLIPAHLWYFGLIGTCL

SEQ ID NO: 7221 - protein, 269 aa, Thermomyces lanuginosus
EVSQDLFNQFNLFAQYSAAAYCGKNNRAPAGTQITCTGNACPEVEKADATFLYSFEDSGVGDVTGFLALDNTNKLIVLSFRGSRSIENWIGNLNFDLKEINDICSGCRGHDGFTSSWRSVADTLRQKVEDAVREHHDYRVVFTGHSLGGALATVAGADLRGNGYDIDVFSYGAPRVGNRAFAEFLTVQTGGTLYRITHTNDIVPRLPPREFGYSHSSPEYWIKSGTGVPVRRRDIVKIEGIDATGGNNRPNIPSIPAHLWYFGLIGTCL

SEQ ID NO: 7222 - protein, 269 aa, Thermomyces lanuginosus
EVSQDLFNQFNLFAQYSKAAYCKANNDAPAGTNITCTGNACPEVEKADATFLYSFEDSGVGDVTGFLALDNTNKQIILSFRGSRSIENWIGNLRFDLKEINDICSGCRGHDGFTSSWRSVADTLRQKVENAVREHPDYRVVFTGHSLGGALATVAWADLRGNGYDIDVFSYGAPRVGNRAFAEFLTVQTGGTLYRITHTNDIVPRLPPREFGYSHSSPEYWIKSGTLVPVTRNDIVKIEGIDATGGNNQPNIPDIPAHLWYFGLIGTCL

SEQ ID NO: 7223 - protein, 269 aa, Thermomyces lanuginosus
EVSQDLFNQFNLFAQYSAAAYCGKNNDAPAGTKITCTGNACPEVEKADATLLYTFKDSGVGDVTGFLALDNTNKLIVLSFRGSRSIENWIGNLNFDLIEINDICSGCRGHDGFTSSWRSVADTLRQKVEDAVREHPDYRVVFTGHSLGGALATVAGADLRGNGYDIDVFSYGAPRVGNRAFAEFLTVQTGGTLYRITHTNDIVPRLPPREFGYSHSSPEYWIKFGTLVPVRRRDIVKIEGIDATGGNNQPNIPDIPAHLWYFGLIGTCL

SEQ ID NO: 7224 - protein, 269 aa, Thermomyces lanuginosus
EVSQDLFNQFNLFAQYSAAAYCGKNNNAPAGTNITCTGNICPEVEKADATILYSFRDSGVGDVTGFLALDNTNKLIVLSFRGSRSIENWIGNLNFDLKEINDICSGCRGHDGFTSSWFSVADTLRQKVEDAVREHPDYRVVFTGHSLGGALATVAGADLRGNGYDIDVFSYGAPRVGNRAFAEFLTVQTGGTLYRITHTNDIVPRLPPREFGYSHSSPEYWIKSGTLVPVRRRDIVKIEGIDATGGNNQPNIPDITAHLWYFGLIGTCL

SEQ ID NO: 7225 - protein, 269 aa, Thermomyces lanuginosus
EVSQDLFNQFNLFAQYSAAAYCGKNNNAPAGTNITCTGNACPEVEKADATFLYSFRDSGVGDVTGFLALDNTNKLIVLSFRGSRSIENWIGNLNFDLIEINDICSGCRGHDGFTSSWFSVADTLRQKVEDAVREHPDYRVVFTGHSLGGALATVAGADLRGNGYDIDVFSYGAPRVGNRAFAEFLTVQTGGTLYRITHTNDIVPRLPPREFGYSHSSPEFWIKSGTLVPVRRRDIVKIEGIDAEGGNNQPNIPDIPAHLWYFGLIGTCL

SEQ ID NO: 7226 - protein, 269 aa, Thermomyces lanuginosus
EVSQDLFNQFKLFAQYSAAAYCKKNNSAPAGTNITCTGNACPEVEKADATFLYSFEDSGVGDVTGFLALDNTNKRIVLSFRGSRSIENWIGNLNFDLKEINDICSGCRGHDGFTSSWRSVADTLRQKVEDAVREHPDYRVVFTGHSLGGALATIAWADLRGNGYDIDVFSYGAPRVGNRAFAEFLTNQQGGTLYRITHTNDIVPRLPPREFGYSHSSPEYWIKSGTLVPVTRNDIVKIEGIDATGGNNQPNIPDIPAHLWYFGLIGTCL

SEQ ID NO: 7227 - protein, 269 aa, Thermomyces lanuginosus
EVSQDLFNQFNLFAQYSAAAYCGKNNDAPAGTKITCTGNACPEVEKADATLLYSFKDSGVGDVTGFLARDNTNKLIVLSFRGSRSIENWIGNLNFDLEEINDICSGCRGHDGFTSSWRSVADTLRQKVEDAVREHPDYRVVFTGHSLGGALATVAGADLRGNGYDIDVFSYGAPRVGNRAFAEFLTVQTGGTLYRITHTNDIVPRLPPREFGYSHSSPEYWIKSGTLVPVRRRDIVKIEGIDATGGNNQPNIPDIPIHLWYFGLIGTCL

SEQ ID NO: 7228 - protein, 269 aa, Thermomyces lanuginosus
EVSQDLFNQFNLFAQYSAAAYCGKNNRAPAGTNITCTGNACPEVEKADATFLYSFEDSGVGDVTGFLALDNTNKLIVLSFRGSRSIENWIGNLNFELKEINDICSGCRGHAGFTSSWRSVADTLRQKVEDAVREHPDYRVVFTGHSLGGALATVAGADLRGNDYDIDVFSYGAPRVGNRAFAEFLTVQTGGTLYRITHTNDIVPRLPPREFGYSHSSPEYWIKSGTLVPVRRRDIVKIEGIDATGGNNQPNIPSITAHLWYFGLIGTCL

SEQ ID NO: 7229 - protein, 269 aa, Thermomyces lanuginosus
EVSRDLFNQFNLFAQYSAAAYCGKNNDAPAGTNITCTGNACPEVEKADATILYSFEDSGVGDVTGFLALDNTNKLIVLSFRGSRSIENWIGNLNFDLKEINDICSGCRGHDGFTSSWRSVADTLRQKVEDAVREHPDYRVVFAGHSLGGALATVAGADLRGDGYDIDVFSYGAPRVGNRAFAEFLTVQTGGTLYRITNTNDIVPRLPPREFGYSHSSPEYWIKSGTLRPVRRRDIVKIEGIDATGGNNQPNIPDIPAHLWYFGLIGTCL

SEQ ID NO: 7230 - protein, 269 aa, Thermomyces lanuginosus
EVSQDLFNQFNLFAQYSAAAYCGKNNDAPAGTNITCTGNACPEVEKADATFLYSFEDSGVGDVTGFLALDNTNKLIVLSFRGSRSIENWITNLNFELKEINDICSGCRGHAGFTSSWRSVADTLRQKVEDAVREHPDYRVVFTGHSLGGALATVAGADLRGNKYDIDVFSYGAPRVGNRAFAEFLTVQTGGTLYRITHTNDIVPRLPPREFGYSHSSPEYWIKSGTLVPVRRRDIVKIEGIDATGGNNQPNIPSITAHLWYFGLIGTCL

SEQ ID NO: 7231 - protein, 269 aa, Thermomyces lanuginosus
EVSQDLFNQFNLFAQYSAAAYCKKNNSAPAGTNITCTGNACPEVEKADATTLYSFEDMGVGDVTGFLALDNTNKQIVLSFRGSRSIENWIGNLNFDLKEINDICSGCRGHDGFTSSWRSVADTLRQKVEDAVREHPDYRVVFTGHSLGGALATVAGADLRGNGYDIDVFSYGAPRVGNRAFAEFLTHQTGGTLYRITHTNDIVPRLPPREFGYSHSSPEYWIKSGTLVPVTRNDIVKIEGIDATGGNNQPNQPDIPAHLWYFGRIGTCL

SEQ ID NO: 7232 - protein, 269 aa, Thermomyces lanuginosus
EVSQDLFNQFNLFAQYSAAAYCQKNNDAPAGTNITCTGNACPEVEKADATFLYSFEDMGVGDVTGFLALDNTNKRIVLSFRGSRSIENWIQNLNFDLKEINDICSGCRGHDGFTSSWRSVADTLRQKVEAAVREHPDYRVVFTGHSLGGALATVAGADLRGNGYDIDVFSYGAPRVGNRAFAEFLTHQTGGTLYRITHTNDIVPRLPPREFGYSHSSPEYWIKSGTLVPVTRNDIVKIEGIDATGGNNQPNQPDIPAHLWYFGRIGTCL

SEQ ID NO: 7233 - protein, 269 aa, Thermomyces lanuginosus
EVSQDLFNQFNLFAQYSAAAYCSKNNDAPAGTNITCTGNICPEVEKADATFLYSFRDSGVGDVTGFLALDNTNKLIVLSFRGSRSIENWIGNLNFDLKEINDICSGCRGHDGFTSSWFSVADTLRQKVEDAVREHPDYRVVFTGHSLGGALATVAGADLRGNGYDIDVFSYGAPRVGNRAFAEFLTVQTGGTLYRITHTNDIVPRLPPREFGYSHSSPEYWIKSGTLVPVRRRDIVKIEGIDAEGGNNQPNIPDITAHLWYFGLIGTCL

SEQ ID NO: 7234 - protein, 269 aa, Thermomyces lanuginosus
EVSQDLFNQFNLFAQYSAAAYCQKNNDAPAGTNITCTGNACPEVEKADATFLYSFEDSGVGDVTGFLALDNTNKQIVLSFRGSRSIENWIGNLRFDLKEINDICSGCRGHDGFTSSWRSVADTLRQKVEAAVREHPDYRVVFTGHSLGGALATIAWADLRGNGYDIDVFSYGAPRVGNRAFAEFLTVQQGGTLYRITHTNDIVPRLPPREFGYSHSSPEYWIKSGTLVPVTRNDIVKIEGIDATGGNNQPNIPDIPAHLWYFGRIGTCL

SEQ ID NO: 7235 - protein, 269 aa, Thermomyces lanuginosus
EVSQDLFNQFNLFAQYSAAAYCGKNNDAPAGTKITCTGNACPEVEKADATVLYSFKDSGVGDVTGFLARDNTNKLIVLSFRGSRSIENWIGNLNFDLEEINDICSGCRGHDGFTSSWRSVADTLRQKVEDAVREHPDYRVVFTGHSLGGALATVAGADLRGNGYDIDVFSYGAPRVGNRAFAEFLTVQTGGTLYRITHTNDIVPRLPPREFGYSHSSPEYWIKIGTLVPVRRRDIVKIEGIDATGGNNQPNIPDIPAHLWYFGLIGTCL

SEQ ID NO: 7236 - protein, 269 aa, Thermomyces lanuginosus
EVSQDLFNQFNLFAQYSAAAYCQANNDAPAGTNITCTGNACPEVEKADATFLYSFEDSGVGDVTGFLALDNTNKQIILSFRGSRSIENWIGNLRFDLKEINDICSGCRGHDGFTSSWRSVADTLRQKVEAAVREHPDYRVVFTGHSLGGALATIAGADLRGNGYDIDVFSYGAPRVGNRAFAEFLTNQTGGTLYRITHTNDIVPRLPPREFGYSHSSPEYWIKSGTLVPVTRNDIVKIEGIDATGGNNQPNIPDIPAHLWYFGLIGTCL

SEQ ID NO: 7237 - protein, 269 aa, Thermomyces lanuginosus
EVSQDLFNQFRLFAQYSAAAYCGKNNDAPAGTQITCTGNACPEVEKADATFLYSFEDSGVGDVTGFLALDNTNKLIVLSFRGSRSIENWITNLNFDLKEINDICSGCRGHDGFTSSWRSVADTLRQKVEDAVREHPDYRVVFTGHSLGGALATVAGADLRGNLYDIDVFSYGAPRVGNRAFAEFLTVQTGGTLYRITHTNDIVPRLPPREFGYSHSSPEYWIKSGTLVPVRRRDIVKIEGIDATGGNNQPNIPSINAHLWYFGLIGTCL

SEQ ID NO: 7238 - protein, 269 aa, Thermomyces lanuginosus
EVSQDLFNQFNLFAQYSAAAYCGKNNDAPAGTNITCTGNACPEVEKADATILYSFRDSGVGDVTGFLALDNTNKLIVLSFRGSRSIENWIGNLNFDLIEINDICSGCRGHDGFTSSWFSVADTLRQKVEDAVREHPDYRVVFTGHSLGGALATVAGADLRGNGYDIDVFSYGAPRVGNRAFAEFLTVQTGGTLYRITHTNDIVPRLPPREFGYSHSSPEFWIKSGTLVPVRRRDIVKIEGIDAEGGNNQPNIPDIPAHLWYFGLIGTCL

SEQ ID NO: 7239 - protein, 269 aa, Thermomyces lanuginosus
EVSQDLFNQFNLFAQYSAAAYCSKNNDAPAGTNITCTGNICPEVEKADATILYSFRDSGVGDVTGFLALDNTNKLIVLSFRGSRSIENWIGNLNFDLKEINDICSGCRGHDGFTSSWFSVADTLRQKVEDAVREHPDYRVVFTGHSLGGALATVAGADLRGNGYDIDVFSYGAPRVGNRAFAEFLTVQTGGTLYRITHTNDIVPRLPPREFGYSHSSPEYWIKSGTLVPVRRRDIVKIEGIDATGGNNQPNIPDITAHLWYFGLIGTCL

SEQ ID NO: 7240 - protein, 269 aa, Thermomyces lanuginosus
EVSQDLFNQFNLFAQYSAAAYCGKNNDAPAGTKITCTGNACPEVEKADATVLYTFKDSGVGDVTGFLALDNTNKLIVLSFRGSRSIENWIGNLNFDLIEINDICSGCRGHDGFTSSWRSVADTLRQKVEDAVREHPDYRVVFTGHSLGGALATVAGADLRGNGYDIDVFSYGAPRVGNRAFAEFLTVQTGGTLYRITHTNDIVPRLPPREFGYSHSSPEYWIKSGTLVPVRRRDIVKIEGIDATGGNNQPNIPDIPVHLWYFGLIGTCL

SEQ ID NO: 7241 - protein, 269 aa, Thermomyces lanuginosus
EVSQDLFNQFNLFAQYSAAAYCGKNNDAPAGTNITCTGNACPTVEIADATFLYSFEDNGSGDVTGFLALDNTNKLIVLSFRGSRSIENWIGNLNFDLKEINDICSGCRGHDGFTSSWRSVADTLRQKVEDAVREHPDYRVVFTGHSLGGALATVAGADLRGNGYDIDVFSYGAPRVGNRAFAEFLTVQTGGTLYRITHTNDIVPRLPPREFGYSHSSPEYWIKSGTLVPVRRRDIVKIEGIDATGGNNLPNIPIIPAHLWYFGLIGTCL

SEQ ID NO: 7242 - protein, 269 aa, Thermomyces lanuginosus
EVSQDLFNQFRLFAQYSAAAYCGKNNDAPAGTQITCTGNACPEVEKADATFLYSFEDSGVGDVTGFLALDNTNKLIVLSFRGSRSIENWITNLNFDLKEINDICSGCRGHDGFTSSWRSVADTLRQKVEDAVREHPDYRVVFTGHSLGGALATVAGADLRGNAYDIDVFSYGAPRTGNRAFAEFLTVQTGGTLYRITHTNDIVPRLPPREFGYSHSSPEYWIKSGTLVPVRRRDIVKIEGIDATGGNNQPNIPSIPAHLWYFGLIGTCL

SEQ ID NO: 7243 - protein, 269 aa, Thermomyces lanuginosus
EVSQDLFNQFNLFAQYSAAAYCGKNNDAPAGTKITCTGNACPEVEKADATVLYSFKDSGVGDVTGFLARDNTNKLIVLSFRGSRSIENWIGNLNFDLEEINDICSGCRGHDGFTSSWRSVADTLRQKVEDAVREHPDYRVVFTGHSLGGALATVAGADLRGNGYDIDVFSYGAPRVGNRAFAEFLTVQTGGTLYRITHTNDIVPRLPPREFGYSHSSPEYWIKSGTLVPRRRRDIVKIEGIDATGGNNQPNIPDIPAHLWYFGLIGTCL

SEQ ID NO: 7244 - protein, 269 aa, Thermomyces lanuginosus
EVSQDLFNQFNLFAQYSAAAYCGKNNNAPAGTNITCTGNACPEVEKADATILYSFRDSGVGDVTGFLALDNTNKLIVLSFRGSRSIENWIGNLNFDLKEINDICSGCRGHDGFTSSWFSVADTLRQKVEDAVREHPDYRVVFTGHSLGGALATVAGADLRGNGYDIDVFSYGAPRVGNRAFAEFLTVQTGGTLYRITHTNDIVPRLPPREFGYSHSSPEYWIKSGTLVPVRRRDIVKIEGIDAEGGNNQPNIPDITAHLWYFGLIGTCL

SEQ ID NO: 7245 - protein, 269 aa, Thermomyces lanuginosus
EVSQDLFNQFNLFAQYSAAAYCGKNNDAPAGTNITCTGNACPEVEKADATILYSFEDSGVGDVTGFLALDNTNKLIVLSFRGSRSIENWIGNLNFDLKEINDICSGCRGHDGFTSSWRSVADTLRQKVEDAVREHPDYRVVFTGHSLGGALATVAGADLRGNGYDIDVFSYGAPRVGNRAFAEFLTVQTGGTLYRITNTNDCVPRLPPRQFGYSHSSPEYWIKSGTLPPVRRRDIVKIEGIDATGGNNQPNICDIPAHLWYFGLIGTCL

SEQ ID NO: 7246 - protein, 269 aa, Thermomyces lanuginosus
EVSQDLFNQFNLFAQYSAAAYCGKNNDAPAGTKITCTGNACPEVEKADATLLYSFKDSGVGDVTGFLARDNTNKLIVLSFRGSRSIENWIGNLNFDLEEINDICSGCRGHDGFTSSWRSVADTLRQKVEDAVREHPDYRVVFTGHSLGGGLATVAGADLRGNGYDIDVFSYGAPRVGNRAFAEFLTVQTGGTLYRITHTNDIVPRLPPREFGYSHSSPEYWIKSGTLVPVRRRDIVKIEGIDATGGNNQPNIPDIPAHLWYFGLIGTCL

SEQ ID NO: 7247 - protein, 269 aa, Thermomyces lanuginosus
EVSQDLFNQFNLFAQYSAAAYCGKNNDAPAGTNITCTGNICPEVEKADATLLYSFRDSGVGDVTGFLALDNTNKLIVLSFRGSRSIENWIGNLNFDLIEINDICSGCRGHDGFTSSWFSVADTLRQKVEDAVREHPDYRVVFTGHSLGGALATVAGADLRGNGYDIDVFSYGAPRVGNRAFAEFLTVQTGGTLYRITHTNDIVPRLPPREFGYSHSSPEYWIKSGTLVPVRRRDIVKIEGIDATGGNNQPNIPDITAHLWYFGLIGTCL

SEQ ID NO: 7248 - protein, 269 aa, Thermomyces lanuginosus
EVSQDLFNQFNLFAQYSAAAYCQKNNSAPAGTNITCTGNACPEVEKADATFLYSFKDMGVGDVTGFLALDNTNKRIVLSFRGSRSIENWIQNLNFDLKEINDICSGCRGHDGFTSSWRSVADTLRQKVEDAVREHPDYRVVFTGHSLGGALATVAGADLRGNGYDIDVFSYGAPRVGNRAFAEFLTNQTGGTLYRITHTNDIVPRLPPREFGYSHSSPEYWIKSGTLVPVTRNDIVKIEGIDATGGNNQPNQPDIPAHLWYFGLIGTCL

SEQ ID NO: 7249 - protein, 269 aa, Thermomyces lanuginosus
EVSQDLFNQFNLFAQYSAAAYCGKNNDAPAGTKITCTGNACPEVEKADATLLYTFKDSGVGDVTGFLALDNTNKLIVLSFRGSRSIENWIGNLNFDLIEINDICSGCRGHDGFTSSWRSVADTLRQKVEDAVREHPDYRVVFTGHSLGGALATVAGADLRGNGYDIDVFSYGAPRVGNRAFAEFLTVQTGGTLYRITYTNDIVPRLPPREFGYSHSSPEYWIKSGTLVPVRRRDIVKIEGIDATGGNNQPNIPDIPAHLWYFGLIGTCL

SEQ ID NO: 7250 - protein, 269 aa, Thermomyces lanuginosus
EVSQDLFNQFKLFAQYSAAAYCKKNNSAPAGTNITCTGNACPEVEKADATFLYSFEDSGVGDVTGFLALDNTNKQIVLSFRGSRSIENWIGNLNFDLKEINDICSGCRGHAGFTSSWRSVADTLRQKVEAAVREHPDYRVVFTGHSLGGALATIAGADLRGNGYDIDVFSYGAPRVGNRAFAEFLTVQQGGTLYRITHTNDIVPRLPPREFGYSHSSPEYWIKSGTLVPVTRNDIVKIEGIDATGGNNQPNIPDIPAHLWYFGLIGTCL

SEQ ID NO: 7251 - protein, 269 aa, Thermomyces lanuginosus
EVSQDLFNQFNLFAQYSAAAYCGKNNDAPAGTKITCTGNACPEVEKADATLLYTFKDSGVGDVTGFLALDNTNKLIVLSFRGSRSIENWIGNLNFDLIEINDICSGCRGHDGFTSSWRSVADTLRQKVEDAVREHPDYRVVFTGHSLGGALATVAGADLRGNGYDIDVFSYGAPRVGNRAFAEFLTVQTGGTLYRITHTNDIVPRLPPREFGYSHSSPEYWIKSGTLVPVRRRDIVKIEGIDATGGNNQPNIPDIPVHLWYFGLIGTCL

SEQ ID NO: 7252 - protein, 269 aa, Thermomyces lanuginosus
EVSQDLFNQFNLFAQYSAAAYCGKNNDAPAGTKITCTGNACPEVEKADATVLYSFKDSGVGDVTGFLARDNTNKLIVLSFRGSRSIENWIGNLNFDLEEINDICSGCRGHDGFTSSWRSVADTLRQKVEDAVREHPDYRVVFTGHSLGGALATVAGADLRGNGYDIDVFSYGAPRVGNRAFAEFLTVQTGGTLYRITHTNDIVPRLPPREFGYSHSSPEYWIKPGTLVPVRRRDIVKIEGIDATGGNNQPNIPDIPAHLWYFGLIGTCL

SEQ ID NO: 7253 - protein, 269 aa, Thermomyces lanuginosus
EVSQDLFNQFNLFAQYSAAAYCSKNNDAPAGTNITCTGNACPEVEKADATILYSFRDSGVGDVTGFLALDNTNKLIVLSFRGSRSIENWIGNLNFDLIEINDICSGCRGHDGFTSSWFSVADTLRQKVEDAVREHPDYRVVFTGHSLGGALATVAGADLRGNGYDIDVFSYGAPRVGNRAFAEFLTVQTGGTLYRITHTNDIVPRLPPREFGYSHSSPEYWIKSGTLVPVRRRDIVKIEGIDAEGGNNQPNIPDIPAHLWYFGLIGTCL

SEQ ID NO: 7254 - protein, 269 aa, Thermomyces lanuginosus
EVSQDLFNQFNLFAQYSAAAYCGKNNNAPAGTNITCTGNACPEVEKADATILYSFRDSGVGDVTGFLALDNTNKLIVLSFRGSRSIENWIGNLNFDLIEINDICSGCRGHDGFTSSWFSVADTLRQKVEDAVREHPDYRVVFTGHSLGGALATVAGADLRGNGYDIDVFSYGAPRVGNRAFAEFLTVQTGGTLYRITHTNDIVPRLPPREFGYSHSSPEYWIKSGTLVPVRRRDIVKIEGIDAEGGNNQPNIPDIPAHLWYFGLIGTCL

SEQ ID NO: 7255 - protein, 269 aa, Thermomyces lanuginosus
EVSQDLFNQFRLFAQYSAAAYCGKNNDAPAGTQITCTGNACPEVEKADATFLYSFEDSGVGDVTGFLALDNTNKLIVLSFRGSRSIENWITNLNFDLKEINDICSGCRGHDGFTSSIRSVADTLRQKVEDAVREHPDYRVVFTGHSLGGALATVAGADLRGNKYDIDVFSYGAPRVGNRAFAEFLTVQTGGTLYRITHTNDIVPRLPPREFGYSHSSPEYWIKSGTLVPVRRRDIVKIEGIDATGGNNQPNIPSIPAHLWYFGLIGTCL

SEQ ID NO: 7256 - protein, 269 aa, Thermomyces lanuginosus
EVSQDLFNQFNLFAQYSAAAYCGKNNDAPAGTNITCTGNACPEVEKADATFLYSFEDNGSGDVTGFLALDNTNKLIVLSFRGSRSVENWIGNLNFDLKEINDICSGCRGHDGFTSSWRSVADTLRQKVEDAVREHPDYRVVFTGHSLGGGLATVAGADLRGNGYDIDVFSYGAPRVGNRAFAEFLTVQTGGTLYRITHTNDIVPRLPPREFGYSHSSPEYWIKSGTGVPVRRRDIVKIEGIDATGGNNQPNIPDIKAHLWYFGLIGTCL

SEQ ID NO: 7257 - protein, 269 aa, Thermomyces lanuginosus
EVSQDLFNQFNLFAQYSAAAYCGKNNNAPAGTNITCTGNICPEVEKADATILYSFRDSGVGDVTGFLALDNTNKLIVLSFRGSRSIENWIGNLNFDLKEINDICSGCRGHDGFTSSWFSVADTLRQKVEDAVREHPDYRVVFTGHSLGGALATVAGADLRGNGYDIDVFSYGAPRVGNRAFAEFLTVQTGGTLYRITHTNDIVPRLPPREFGYSHSSPEYWIKSGTLVPVRRRDIVKIEGIDAEGGNNQPNIPDIPAHLWYFGLIGTCL

SEQ ID NO: 7258 - protein, 269 aa, Synthetic construct
EGSQQMFNQFNLFAQYSAAAYCGKNNDAPAGTNITCTGNACPEVEKADATFLYSFEGSGVGDVTGFLALDNTNKLIVLSFRGSRSIENWIGNLKFLMKEINDICSGCRGHDGFTSSWRSVADTLRQKVEDAVREHPDYRVVFTGHSLGGALATVAGADLRGNGYDIDVFSYGAPRVGNRAFAEFLTVQTGGTLYRITHTNDIVPRLPPREFGYSHSSPEYWIKSGTLVPVTRNDIVKIEGIDATGGNNRPNIPDIPAHLWYFGLIGTCL

SEQ ID NO: 7259 - protein, 269 aa, Thermomyces lanuginosus
EVSQDLFNQFNLFAQYSAAAYCGKNNDAPAGTNITCTGNICPEVEKADATLLYSFRNSGVGDVTGFLALDNTNKLIVLSFRGSRSIENWIGNLNFDLKEINDICSGCRGHDGFTSSWFSVADTLRQKVEDAVREHPDYRVVFTGHSLGGALATVAGADLRGNGYDIDVFSYGAPRVGNRAFAEFLTVQTGGTLYRITHTNDIVPRLPPREFGYSHSSPEYWIKSGTLVPVRRRDIVKIEGIDATGGNNQPNIPDITAHLWYFGLIGTCL

SEQ ID NO: 7260 - protein, 269 aa, Thermomyces lanuginosus
EVSQDLFNQFNLFAQYSAAAYCGKNNDAPAGTNITCTGNACPEVEKADATILYSFRDSGEGDVTGFLALDNTNKLIVLSFRGSRSIENWIGNLNFDLKEINDICSGCRGHDGFTSSWFSVADTLRQKVEDAVREHPDYRVVFTGHSLGGALATVAGADLRGNGYDIDVFSYGAPRVGNRAFAEFLTVQTGGTLYRITHTNDIVPRLPPREFGYSHSSPEYWIKSGTLVPVRRRDIVKIEGIDAEGGNNQPNIPDITAHLWYFGLIGTCL

SEQ ID NO: 7261 - protein, 269 aa, Thermomyces lanuginosus
EVSQDLFNQFNLFAQYSAAAYCGKNNRAPAGTNITCTGNACPEVEKADATFLYSFEDSGVGDVTGFLALDNTNKLIVLSFRGSRSIENWITNLSFDLKEINDICSGCRGHAGFTSSWRSVADTLRQKVEDAVREHVDYRVVFTGHSLGGALATVAGADLRGNGYDIDVFSYGAPRVGNRAFAEFLTVQTGGTLYRITHTNDIVPRLPPREFGYSHPSPEYWIKSGTGVPVTRNDIVKIEGIDATGGNNQPNIPDITAHLWYFGLIGTCL

SEQ ID NO: 7262 - protein, 269 aa, Thermomyces lanuginosus
EVSQDLFNQFNLFAQYSAAAYCGKNNDAPAGTKITCTGNACPEVEKADATILYTFKDSGVGDVTGFLALDNTNKLIVLSFRGSRSIENWIGNLNFDLIEINDICSGCRGHDGFTSSWRSVADTLRQKVEDAVREHPDYRVVFTGHSLGGALATVAGADLRGNGYDIDVFSYGAPRVGNRAFAEFLTVQTGGTLYRITLTNDIVPRLPPREFGYSHSSPEYWIKSGTLVPVRRRDIVKIEGIDATGGNNQPNIPDIPAHLWYFGLIGTCL

SEQ ID NO: 7263 - protein, 269 aa, Thermomyces lanuginosus
EVSQDLFNQFNLFAQYSAAAYCSKNNNAPAGTNITCTGNICPEVEKADATFLYSFRDSGEGDVTGFLALDNTNKLIVLSFRGSRSIENWIGNLNFDLKEINDICSGCRGHDGFTSSWFSVADTLRQKVEDAVREHPDYRVVFTGHSLGGALATVAGADLRGNGYDIDVFSYGAPRVGNRAFAEFLTVQTGGTLYRITHTNDIVPRLPPREFGYSHSSPEYWIKSGTLVPVRRRDIVKIEGIDATGGNNQPNIPDIPAHLWYFGLIGTCL

SEQ ID NO: 7264 - protein, 269 aa, Thermomyces lanuginosus
EVSQDLFNQFRLFAQYSAAAYCGKNNDAPAGTQITCTGNACPEVEKADATFLYSFEDSGVGDVTGFLALDNTNKLIVLSFRGSRSIENWITNLNFDLKEINDICSGCRGHDGFTSSWRSVADTLRQKVEDAVREHPDYRVVFTGHSLGGALATVAGADLRGNKYDIDVFSYGAPRWGNRAFAEFLTVQTGGTLYRITHTNDIVPRLPPREFGYSHSSPEYWIKSGTLVPVRRRDIVKIEGIDATGGNNQPNIPSIPAHLWYFGLIGTCL

SEQ ID NO: 7265 - protein, 269 aa, Thermomyces lanuginosus
EVSQDLFNQFNLFAQYSAAAYCSKNNNAPAGTNITCTGNACPEVEKADATILYSFRDSGVGDVTGFLALDNTNKLIVLSFRGSRSIENWIGNLNFDLKEINDICSGCRGHDGFTSSWFSVADTLRQKVEDAVREHPDYRVVFTGHSLGGALATVAGADLRGNGYDIDVFSYGAPRVGNRAFAEFLTVQTGGTLYRITHTNDIVPRLPPREFGYSHSSPEYWIKSGTLVPVRRRDIVKIEGIDATGGNNQPNIPDITAHLWYFGLIGTCL

SEQ ID NO: 7266 - protein, 269 aa, Thermomyces lanuginosus
EVSQDLFNQFNLFAQYSAAAYCSKNNDAPAGTNITCTGNACPEVEKADATILYSFRDSGVGDVTGFLALDNTNKLIVLSFRGSRSIENWIGNLNFDLKEINDICSGCRGHDGFTSSWFSVADTLRQKVEDAVREHPDYRVVFTGHSLGGALATVAGADLRGNGYDIDVFSYGAPRVGNRAFAEFLTVQTGGTLYRITHTNDIVPRLPPREFGYSHSSPEFWIKSGTLVPVRRRDIVKIEGIDATGGNNQPNIPDITAHLWYFGLIGTCL

SEQ ID NO: 7267 - protein, 269 aa, Thermomyces lanuginosus
EVSQDLFNQFNLFAQYSAAAYCGKNNDAPAGTKITCTGNACPEVEKADATILYSFKDSGVGDVTGFLARDNTNKLIVLSFRGSRSIENWIGNLNFDLEEINDICSGCRGHDGFTSSWRSVADTLRQKVEDAVREHPDYRVVFTGHSLGGALATVAGADLRGNGYDIDVFSYGAPRVGNRAFAEFLTVQTGGTLYRITHTNDIVPRLPPREFGYSHSSPEYWIKSGTLVPRRRRDIVKIEGIDATGGNNQPNIPDIPAHLWYFGLIGTCL

SEQ ID NO: 7268 - protein, 269 aa, Thermomyces lanuginosus
EVSQDLFNQFNLFAQYSKAAYCQKNNDAPAGTNITCTGNACPEVFKADATFLYSFEDSGVGDVTGFLALDNTNKQIILSFRGSRSIENWIGNLNFDLKEINDICSGCRGHDGFTSSWRSVADTLRQKVEDAVREHPDYRVVFTGHSLGGALATVAWADLRGNGYDIDVFSYGAPRVGNRAFAEFLTTQDGGTLYRITHTNDIVPRLPPREFGYSHSSPEYWIKSGTLVPVTRNDIVKIEGIDATGGNNQPNIPDIPAHLWYFGLIGTCL

SEQ ID NO: 7269 - protein, 269 aa, Thermomyces lanuginosus
EVSQDLFNQFNLFAQYSKAAYCQANNDAPAGTNITCTGNACPEVEKADATFLYSFEDSGVGDVTGFLALDNTNKQIILSFRGSRSIENWIGNLNFDLKEINDICSGCRGHDGFTSSWRSVADTLRQKVEAAVREHPDYRVVFTGHSLGGALATIAWADLRGNGYDIDVFSYGAPRVGNRAFAEFLTVQTGGTLYRITHTNDIVPRLPPREFGYSHSSPEYWIKSGTLVPVTRNDIVKIEGIDATGGNNQPNIPDIPAHLWYFGLIGTCL

SEQ ID NO: 7270 - protein, 269 aa, Thermomyces lanuginosus
EVSQDLFNQFRLFAQYSAAAYCGKNNDAPAGTQITCTGNACPEVEKADATFLYSFEDSGVGDVTGFLALDNTNKLIVLSFRGSRSIENWITNLNFDLKEINDICSGCRGHDGFTSSWRSVADTLRQKVEDAVREHPDYRVVFTGHSLGGALATVAGADLRGNPYDIDVFSYGAPRIGNRAFAEFLTVQTGGTLYRITHTNDIVPRLPPREFGYSHSSPEYWIKSGTLVPVRRRDIVKIEGIDATGGNNQPNIPSIPAHLWYFGLIGTCL

SEQ ID NO: 7271 - protein, 269 aa, Thermomyces lanuginosus
EVSQDLFNQFNLFAQYSAAAYCGKNNDAPAGTKITCTGNACPEVEKADATVLYSFKDSGVGDVTGFLARDNTNKLIVLSFRGSRSIENWIGNLNFDLEEINDICSGCRGHDGFTSSWRSVADTLRQKVEDAVREHPDYRVVFTGHSLGGALATVAGADLRGNGYDIDVFSYGAPRVGNRAFAEFLTVQTGGTLYRITHTNDIVPRLPPREFGYSHSSPEYWIKSGTLVPVRRRDIVKIEGIDATGGNNQPNIPDGPAHLWYFGLIGTCL

SEQ ID NO: 7272 - protein, 269 aa, Thermomyces lanuginosus
EVSQDLFNQFNLFAQYSAAAYCGKNNDAPAGTQITCTGNACPEVEKADATFLYSFEDSGVGDVTGFLALDNTNKLIVLSFRGSRSIENWIGNLNFELKEINDICSGCRGHAGFTSSWRSVADTLRQKVEDAVREHPDYRVVFTGHSLGGALATVAGADLRGNKYDIDVFSYGAPRVGNRAFAEFLTVQTGGTLYRITHTNDIVPRLPPREFGYSHSSPEYWIKSGTLVPVRRRDIVKIEGIDATGGNNQPNIPSITAHLWYFGLIGTCL

SEQ ID NO: 7273 - protein, 269 aa, Thermomyces lanuginosus
EVSQDLFNQFNLFAQYSAAAYCGKNNDAPAGTQITCTGNACPEVEKADATFLYSFEDSGVGDVTGFLALDNTNKLIVLSFRGSRSIENWITNLNFDLIEINDICSGCRGHDGFISSWRSVADTLRQKVEDAVREHPDYRVVFTGHSLGGALATVAGADLRGNKYDIDVFSYGAPRVGNRAFAEFLTVQTGGTLYRITHTNDIVPRLPPREFGYSHSSPEYWIKSGTLVPVRRRDIVKIEGIDATGGNNQPNIPSIPAHLWYFGLIGTCL

SEQ ID NO: 7274 - protein, 269 aa, Thermomyces lanuginosus
EVSQDLFNQFNLFAQYSAAAYCQKNNSAPAGTNITCTGNACPEVEKADATFLYSFKDSGVGDVTGFLALDNTNKRIVLSFRGSRSIENWIGNLNFDLKEINDICSGCRGHAGFTSSWRSVADTLRQKVEDAVREHPDYRVVFTGHSLGGALATIAWADLRGNGYDIDVFSYGAPRVGNRAFAEFLTVQTGGTLYRITHTNDIVPRLPPREFGYSHSSPEYWIKSGTLVPVTRNDIVKIEGIDATGGNNQPNIPDIPAHLWYFGRIGTCL

SEQ ID NO: 7275 - protein, 269 aa, Thermomyces lanuginosus
EVSQDLFNQFNLFAQYSKAAYCGKNNDAPAGTNITCTGNACPEVEKADATFLYSFEDSGVGDVTGFLALDNTNKQIVLSFRGSRSIENWIGNLRFDLKEINDICSGCRGHAGFTSSWRSVADTLRQKVEDAVREHPDYRVVFTGHSLGGALATIAWADLRGNGYDIDVFSYGAPRVGNRAFAEFLTVQQGGTLYRITHTNDIVPRLPPREFGYSHSSPEYWIKSGTLVPVTRNDIVKIEGIDATGGNNQPNIPDIPAHLWYFGRIGTCL

SEQ ID NO: 7276 - protein, 269 aa, Thermomyces lanuginosus
EVSQDLFNQFNLFAQYSAAAYCGKNNDAPAGTNITCTGNACPEVEKADATFLYSFRNSGVGDVTGFLALDNTNKLIVLSFRGSRSIENWIGNLNFDLIEINDICSGCRGHDGFTSSWFSVADTLRQKVEDAVREHPDYRVVFTGHSLGGALATVAGADLRGNSYDIDVFSYGAPRVGNRAFAEFLTVQTGGTLYRITHTNDIVPRLPPREFGYSHSSPEYWIKSGTLVPVRRRDIVKIEGIDATGGNNQPNIPDITAHLWYFGLIGTCL

SEQ ID NO: 7277 - protein, 269 aa, Thermomyces lanuginosus
EVSQDLFNQFNLFAQYSAAAYCGKNNDAPAGTNITCTGNACPEVEKADATLLYSFRNSGVGDVTGFLALDNTNKLIVLSFRGSRSIENWIGNLNFDLIEINDICSGCRGHDGFTSSWFSVADTLRQKVEDAVREHPDYRVVFTGHSLGGALATVAGADLRGNSYDIDVFSYGAPRVGNRAFAEFLTVQTGGTLYRITHTNDIVPRLPPREFGYSHSSPEYWIKSGTLVPVRRRDIVKIEGIDATGGNNQPNIPDIPAHLWYFGLIGTCL

SEQ ID NO: 7278 - protein, 269 aa, Thermomyces lanuginosus
EVSQDLFNQFNLFAQYSAAAYCSKNNNAPAGTNITCTGNICPEVEKADATILYSFRDSGVGDVTGFLALDNTNKLIVLSFRGSRSIENWIGNLNFDLKEINDICSGCRGHDGFTSSWFSVADTLRQKVEDAVREHPDYRVVFTGHSLGGALATVAGADLRGNGYDIDVFSYGAPRVGNRAFAEFLTVQTGGTLYRITHTNDIVPRLPPREFGYSHSSPEYWIKSGTLVPVRRRDIVKIEGIDATGGNNQPNIPDIPAHLWYFGLIGTCL

SEQ ID NO: 7279 - protein, 269 aa, Thermomyces lanuginosus
EVSQDLFNQFRLFAQYSAAAYCGKNNDAPAGTQITCTGNACPEVEKADATFLYSFEDSGVGDVTGFLALDNTNKLIVLSFRGSRSIENWITNLNFDLKEINDICSGCRGHDGFTSSWRSVADTLRQKVEDAVREHPDYRVVFTGHSLGGALATVAGADLRGNKYDIDVFSYGAPRVGNRAFAEFLTVQTGGTLYRITHTNDIVPRLPPREFGYSHSSPEYWIKSGTLVPVRRRDIVKIEGIDATGGNNQPNIPAIFAHLWYFGLIGTCL

SEQ ID NO: 7280 - protein, 269 aa, Thermomyces lanuginosus
EVSQDLFNQFNLFAQYSKAAYCKANNDAPAGTNITCTGNACPEVEKADATFLYSFEDSGVGDVTGFLALDNTNKQIVLSFRGSRSIENWIGNLRFDLKEINDICSGCRGHDGFTSSWRSVADTLRQKVEAAVREHPDYRVVFTGHSLGGALATVAWADLRGNGYDIDVFSYGAPRVGNRAFAEFLTQQTGGTLYRITHTNDIVPRLPPREFGYSHSSPEYWIKSGTLVPVTRNDIVKIEGIDATGGNNQPNIPDIPAHLWYFGLIGTCL

SEQ ID NO: 7281 - protein, 269 aa, Thermomyces lanuginosus
EVSQDLFNQFNLFAQYSAAAYCGKNNDAPAGTKITCTGNACPEVEKADATILYSFKDSGVGDVTGFLARDNTNKLIVLSFRGSRSIENWIGNLNFDLEEINDICSGCRGHDGFTSSWRSVADTLRQKVEDAVREHPDYRVVFTGHSLGGALATVAGADLRGNGYDIDVFSYGAPRVGNRAFAEFLTVQTGGTLYRITLTNDIVPRLPPREFGYSHSSPEYWIKSGTLVPVRRRDIVKIEGIDATGGNNQPNIPDIPAHLWYFGLIGTCL

SEQ ID NO: 7282 - protein, 269 aa, Thermomyces lanuginosus
EVSQDLFNQFNLFAQYSAAAYCGKNNDAPAGTKITCTGNACPEVEKADATILYTFKDSGVGDVTGFLALDNTNKLIVLSFRGSRSIENWIGNLNFDLIEINDICSGCRGHDGFTSSWRSVADTLRQKVEDAVREHPDYRVVFTGHSLGGALATVAGADLRGNGYDIDVFSYGAPRVGNRAFAEFLTVQTGGTLYRITHTNDIVPRLPPREFGYSHSSPEYWIKSGTLVPVRRRDIVKIEGIDATGGNNQPNIPDIPVHLWYFGLIGTCL

SEQ ID NO: 7283 - protein, 269 aa, Thermomyces lanuginosus
EVSQDLFNQFRLFAQYSAAAYCGKNNDAPAGTQITCTGNACPEVEKADATFLYSFEDSGVGDVTGFLALDNTNKLIVLSFRGSRSIENWITNLNFDLKEINDICSGCRGHDGFTSSWRSVADTLRQKVEDAVREHPDYRVVFTGHSLGGALATVAGADLRGNKYDIDVFSYGAPRIGNRAFAEFLTVQTGGTLYRITHTNDIVPRLPPREFGYSHSSPEYWIKSGTLVPVRRRDIVKIEGIDATGGNNQPNIPSIPAHLWYFGLIGTCL

SEQ ID NO: 7284 - protein, 269 aa, Thermomyces lanuginosus
EVSQDLFNQFNLFAQYSAAAYCSKNNNAPAGTNITCTGNACPEVEKADATFLYSFRDSGVGDVTGFLALDNTNKLIVLSFRGSRSIENWIGNLNFDLKEINDICSGCRGHDGFTSSWFSVADTLRQKVEDAVREHPDYRVVFTGHSLGGALATVAGADLRGNGYDIDVFSYGAPRVGNRAFAEFLTVQTGGTLYRITHTNDIVPRLPPREFGYSHSSPEFWIKSGTLVPVRRRDIVKIEGIDAEGGNNQPNIPDIPAHLWYFGLIGTCL

SEQ ID NO: 7285 - protein, 269 aa, Thermomyces lanuginosus
EVSQDLFNQFNLFAQYSAAAYCGKNNNAPAGTNITCTGNACPEVEKADATFLYSFRDSGVGDVTGFLALDNTNKLIVLSFRGSRSIENWIGNLNFDLIEINDICSGCRGHDGFTSSWFSVADTLRQKVEDAVREHPDYRVVFTGHSLGGALATVAGADLRGNGYDIDVFSYGAPRVGNRAFAEFLTVQTGGTLYRITHTNDIVPRLPPREFGYSHSSPEFWIKSGTLVPVRRRDIVKIEGIDATGGNNQPNIPDITAHLWYFGLIGTCL

SEQ ID NO: 7286 - protein, 269 aa, Thermomyces lanuginosus
EVSQDLFNQFNLFAQYSAAAYCGKNNDAPAGTKITCTGNACPEVEKADATVLYSFKDSGVGDVTGFLARDNTNKLIVLSFRGSRSIENWIGNLNFDLEEINDICSGCRGHDGFTSSWRSVADTLRQKVEDAVREHPDYRVVFTGHSLGGALATVAGADLRGNGYDIDVFSYGAPRVGNRAFAEFLTVQTGGTLYRITHTNDIVPRLPPREFGYSHSSPEYWIKSGTLVPVRRRDIVKIEGIDATGGNNQPNIPDIPIHLWYFGLIGTCL

SEQ ID NO: 7287 - protein, 269 aa, Thermomyces lanuginosus
EVSQDLFNQFNLFAQYSAAAYCGKNNRAPAGTQITCTGNACPEVEKADATFLYSFEDSGVGDVTGFLALDNTNKLIVLSFRGSRSIENWIGNLNFDLKEINDICSGCRGHDGFTSSWRSVADTLRQKVEDAVREHPDYRVVFTGHSLGGALATVAGADLRGNGYDIDVFSYGAPRQGNRAFAEFLTVQTGGTLYRITHTNDIVPRLPPREFGYSHSSPEYWIKSGTGVPVRRRDIVKIEGIDATGGNNRPNIPSIPAHLWYFGLIGTCL

SEQ ID NO: 7288 - protein, 269 aa, Thermomyces lanuginosus
EVSQDLFNQFNLFAQYSKAAYCQANNDAPAGTNITCTGNACPEVEKADATFLYSFEDSGVGDVTGFLALDNTNKQIILSFRGSRSIENWIGNLNFDLKEINDICSGCRGHDGFTSSWRSVADTLRQKVEAAVREHPDYRVVFTGHSLGGALATVAWADLRGNGYDIDVFSYGAPRVGNRAFAEFLTQQTGGTLYRITHTNDIVPRLPPREFGYSHSSPEYWIKSGTLVPVTRNDIVKIEGIDATGGNNQPNIPDIPAHLWYFGLIGTCL

SEQ ID NO: 7289 - protein, 269 aa, Thermomyces lanuginosus
EVSQDLFNQFNLFAQYSAAAYCKKNNSAPAGTNITCTGNACPEVEKADATTLYSFEDMGVGDVTGFLALDNTNKLIVLSFRGSRSIENWIQNLNFDLKEINDICSGCRGHDGFTSSWRSVADTLRQKVEAAVREHPDYRVVFTGHSLGGALATVAGADLRGNGYDIDVFSYGAPRVGNRAFAEFLTNQTGGTLYRITHTNDIVPRLPPREFGYSHSSPEYWIKSGTLVPVTRNDIVKIEGIDATGGNNQPNQPDIPAHLWYFGLIGTCL

SEQ ID NO: 7290 - protein, 269 aa, Thermomyces lanuginosus
EVSQDLFNQFNLFAQYSAAAYCGKNNDAPAGTKITCTGNACPEVEKADATVLYTFKDSGVGDVTGFLALDNTNKLIVLSFRGSRSIENWIGNLNFDLIEINDICSGCRGHDGFTSSWRSVADTLRQKVEDAVREHPDYRVVFTGHSLGGALATVAGADLRGNGYDIDVFSYGAPRVGNRAFAEFLTVQTGGTLYRITSTNDIVPRLPPREFGYSHSSPEYWIKSGTLVPVRRRDIVKIEGIDATGGNNQPNIPDIPAHLWYFGLIGTCL

SEQ ID NO: 7291 - protein, 269 aa, Thermomyces lanuginosus
EVSQDLFNQFNLFAQYSAAAYCSKNNNAPAGTNITCTGNICPEVEKADATFLYSFRDSGVGDVTGFLALDNTNKLIVLSFRGSRSIENWIGNLNFDLKEINDICSGCRGHDGFTSSWFSVADTLRQKVEDAVREHPDYRVVFTGHSLGGALATVAGADLRGNGYDIDVFSYGAPRVGNRAFAEFLTVQTGGTLYRITHTNDIVPRLPPREFGYSHSSPEYWIKSGTLVPVRRRDIVKIEGIDAEGGNNQPNIPDIPAHLWYFGLIGTCL

SEQ ID NO: 7292 - protein, 269 aa, Thermomyces lanuginosus
EVSQDLFNQFNLFAQYSAAAYCGKNNDAPAGTKITCTGNACPEVEKADATVLYTFKDSGVGDVTGFLALDNTNKLIVLSFRGSRSIENWIGNLNFDLIEINDICSGCRGHDGFTSSWRSVADTLRQKVEDAVREHPDYRVVFTGHSLGGALATVAGADLRGNGYDIDVFSYGAPRVGNRAFAEFLTVQTGGTLYRITHTNDIVPRLPPREFGYSHSSPEYWIKSGTDVPVRRRDIVKIEGIDATGGNNQPNIPDIPAHLWYFGLIGTCL

SEQ ID NO: 7293 - protein, 269 aa, Thermomyces lanuginosus
EVSQDLFNQFKLFAQYSAAAYCQKNNSAPAGTNITCTGNACPEVEKADATFLYSFEDSGVGDVTGFLALDNTNKQIVLSFRGSRSIENWIGNLRFDLKEINDICSGCRGHDGFTSSWRSVADTLRQKVEDAVREHPDYRVVFTGHSLGGALATIAWADLRGNGYDIDVFSYGAPRVGNRAFAEFLTVQQGGTLYRITHTNDIVPRLPPREFGYSHSSPEYWIKSGTLVPVTRNDIVKIEGIDATGGNNQPNIPDIPAHLWYFGLIGTCL

SEQ ID NO: 7294 - protein, 269 aa, Thermomyces lanuginosus
EVSQDLFNQFNLFAQYSQAAYCGKNNDAPAGTNITCTGNACPEVEKADATFLYSFEDMGVGDVTGFLALDNTNKLIVLSFRGSRSIENWIGNLNFDLKEINDICSGCRGHDGFTSSWRSVADTLRQKVEAAVREHPQYRVVFTGHSLGGALATVAGADLRGNPYDIDVFSYGAPRVGNRAFAEFLTVQTGGTLYRITHTNDIVPRLPPREFGYSHSSPEYWIKSGTMVPVTRQDIVKIEGIDATGGNNQPNIPDIPAHLWYFGRIGTCL

SEQ ID NO: 7295 - protein, 269 aa, Thermomyces lanuginosus
EVSQDLFNQFNLFAQYSAAAYCGKNNDAPAGTKITCTGNACPEVEKADATLLYTFKDSGVGDVTGFLALDNTNKLIVLSFRGSRSIENWIGNLNFDLIEINDICSGCRGHDGFTSSWRSVADTLRQKVEDAVREHPDYRVVFTGHSLGGALATVAGADLRGNGYDIDVFSYGAPRVGNRAFAEFLTVQTGGTLYRITHTNDIVPRLPPREFGYSHSSPEYWIKPGTLVPVRRRDIVKIEGIDATGGNNQPNIPDIPAHLWYFGLIGTCL

SEQ ID NO: 7296 - protein, 269 aa, Thermomyces lanuginosus
EVSQDLFNQFNLFAQYSAAAYCGKNNDAPAGTKITCTGNACPEVEKADATILYTFKDSGVGDVTGFLALDNTNKLIVLSFRGSRSIENWIGNLNFDLIEINDICSGCRGHDGFTSSWRSVADTLRQKVEDAVREHPDYRVVFTGHSLGGALATVAGADLRGNGYDIDVFSYGAPRVGNRAFAEFLTVQTGGTLYRITITNDIVPRLPPREFGYSHSSPEYWIKSGTLVPVRRRDIVKIEGIDATGGNNQPNIPDIPAHLWYFGLIGTCL

SEQ ID NO: 7297 - protein, 269 aa, Thermomyces lanuginosus
EVSQDLFNQFNLFAQYSAAAYCGKNNDAPAGTQITCTGNACPEVEKADATFLYSFEDSGVGDVTGFLALDNTNKLIVLSFRGSRSIENWITNLNFDLKEINDICSGCRGHDGFISSWRSVADTLRQKVEDAVREHPDYRVVFTGHSLGGALATVAGADLRGNKYDIDVFSYGAPRVGNRAFAEFLTVQTGGTLYRITHTNDIVPRLPPREFGYSHSSPEYWIKSGTLVPVRRRDIVKIEGIDATGGNNQPNIPSILAHLWYFGLIGTCL

SEQ ID NO: 7298 - protein, 269 aa, Thermomyces lanuginosus
EVSQDLFNQFNLFAQYSAAAYCSKNNNAPAGTNITCTGNACPEVEKADATFLYSFRDSGVGDVTGFLALDNTNKLIVLSFRGSRSIENWIGNLNFDLKEINDICSGCRGHDGFTSSWFSVADTLRQKVEDAVREHPDYRVVFTGHSLGGALATVAGADLRGNGYDIDVFSYGAPRVGNRAFAEFLTVQTGGTLYRITHTNDIVPRLPPREFGYSHSSPEFWIKSGTLVPVRRRDIVKIEGIDATGGNNQPNIPDITAHLWYFGLIGTCL

SEQ ID NO: 7299 - protein, 269 aa, Thermomyces lanuginosus
EVSQDLFNQFNLFAQYSAAAYCSKNNNAPAGTNITCTGNACPEVEKADATFLYSFRDSGVGDVTGFLALDNTNKLIVLSFRGSRSIENWIGNLNFDLIEINDICSGCRGHDGFTSSWFSVADTLRQKVEDAVREHPDYRVVFTGHSLGGALATVAGADLRGNGYDIDVFSYGAPRVGNRAFAEFLTVQTGGTLYRITHTNDIVPRLPPREFGYSHSSPEYWIKSGTLVPVRRRDIVKIEGIDAEGGNNQPNIPDIPAHLWYFGLIGTCL

SEQ ID NO: 7300 - protein, 269 aa, Thermomyces lanuginosus
EVSQDLFNQFNLFAQYSAAAYCQKNNSAPAGTNITCTGNACPEVEKADATFLYSFEDMGVGDVTGFLALDNTNKLIVLSFRGSRSIENWIQNLNFDLKEINDICSGCRGHDGFTSSWRSVADTLRQKVEAAVREHPDYRVVFTGHSLGGALATVAGADLRGNGYDIDVFSYGAPRVGNRAFAEFLTHQTGGTLYRITHTNDIVPRLPPREFGYSHSSPEYWIKSGTLVPVTRNDIVKIEGIDATGGNNQPNQPDIPAHLWYFGRIGTCL

SEQ ID NO: 7301 - protein, 269 aa, Thermomyces lanuginosus
EVSQDLFNQFNLFAQYSAAAYCGKNNDAPAGTNITCTGNACPEVEKADATLLYSFRDSGVGDVTGFLALDNTNKLIVLSFRGSRSIENWIGNLNFDLIEINDICSGCRGHDGFTSSWFSVADTLRQKVEDAVREHPDYRVVFTGHSLGGALATVAGADLRGNSYDIDVFSYGAPRVGNRAFAEFLTVQTGGTLYRITHTNDIVPRLPPREFGYSHSSPEYWIKSGTLVPVRRRDIVKIEGIDATGGNNQPNIPDITAHLWYFGLIGTCL

SEQ ID NO: 7302 - protein, 269 aa, Thermomyces lanuginosus
EVSQDLFNQFNLFAQYSAAAYCGKNNDAPAGTKITCTGNACPEVEKADATLLYTFKDSGVGDVTGFLALDNTNKLIVLSFRGSRSIENWIGNLNFDLIEINDICSGCRGHDGFTSSWRSVADTLRQKVEDAVREHPDYRVVFTGHSLGGALATVAGADLRGNGYDIDVFSYGAPRVGNRAFAEFLTVQTGGTLYRITHTNDIVPRLPPREFGYSHSSPEYWIKSGTLVPRRRRDIVKIEGIDATGGNNQPNIPDIPAHLWYFGLIGTCL

SEQ ID NO: 7303 - protein, 269 aa, Thermomyces lanuginosus
EVSQDLFNQFRLFAQYSAAAYCEKNNDAPAGTQITCTGNACPEVEKADATFLYSFEDSGVGDVTGFLALDNTNKLIVLSFRGSRSIENWITNLNFDLKEINDICSGCRGHDGFTSSWRSVADTLRQKVEDAVREHPDYRVVFTGHSLGGALATVAGADLRGNKYDIDVFSYGAPRVGNRAFAEFLTVQTGGTLYRITHTNDIVPRLPPREFGYSHSSPEYWIKSGTLVPVRRRDIVKIEGIDATGGNNQPNIPSIPAHLWYFGLIGTCL

SEQ ID NO: 7304 - protein, 269 aa, Thermomyces lanuginosus
EVSQDLFNQFNLFAQYSAAAYCGKNNDAPAGTQITCTGNACPEVEKADATFLYSFEDSGVRDRTGFLALDNTNKLIVLSFRGSRSIENWIGNLNFDLKEINDICSGCRGHDGFTSSWRSVADTLRQKVEDAVREHPDYRVVFTGHSLGGALATVARADLRGNGYDIDVFSYGAPRWGNRAFAEFLTVQTGGTLYRITHTNDIVPRLPPREFGYSHSSPEYWIKSGTLVPVRRRDIVKIEGIDATGGNNQPNIPDIIAHLWYFGLIGTCL

SEQ ID NO: 7305 - protein, 269 aa, Thermomyces lanuginosus
EVSQDLFNQFNLFAQYSAAAYCGKNNDAPAGTKITCTGNACPEVEKADATILYSFKDSGVGDVTGFLARDNTNKLIVLSFRGSRSIENWIGNLNFDLEEINDICSGCRGHDGFTSSWRSVADTLRQKVEDAVREHPDYRVVFAGHSLGGALATVAGADLRGNGYDIDVFSYGAPRVGNRAFAEFLTVQTGGTLYRITHTNDIVPRLPPREFGYSHSSPEYWIKSGTLVPVRRRDIVKIEGIDATGGNNQPNIPDIPAHLWYFGLIGTCL

SEQ ID NO: 7306 - protein, 269 aa, Thermomyces lanuginosus
EVSQDLFNQFNLFAQYSAAAYCQKNNDAPAGTNITCTGNACPEVEKADATFLYSFEDSGVGDVTGFLALDNTNKQIVLSFRGSRSIENWIGNLNFDLKEINDICSGCRGHAGFTSSWRSVADTLRQKVEAAVREHPDYRVVFTGHSLGGALATIAWADLRGNGYDIDVFSYGAPRVGNRAFAEFLTNQTGGTLYRITHTNDIVPRLPPREFGYSHSSPEYWIKSGTLVPVTRNDIVKIEGIDATGGNNQPNIPDIPAHLWYFGRIGTCL

SEQ ID NO: 7307 - protein, 269 aa, Synthetic construct
EVSQDLFNQFNLFAQYSAAAYCGKNNDAPAGTNITCTGNACPEVEKADATFLYSFKGSGVGRVTGFLALDNTNKLIVLSFRGTRFIENWIGNLNFLLKEINYICSGCRGHDGFTSSWRSVADTLRQKVEDAVREHPDYRVVFTGHSLGGALATVAGADLRGNGYDIDVFSYGAPRVGNRAFAEFLTVQTGGTLYRITHTNDIVPRLPPRKFGYSHSSPEYWIKSGTLVPVTRNDIVKIEGIDATGGNNQPNIPDIPAHLWYFGLIGTCL

SEQ ID NO: 7308 - protein, 269 aa, Thermomyces lanuginosus
EVSQDLFNQFNLFAQYSAAAYCGKNNDAPAGTNITCTGNICPEVEKADATFLYSFRNSGVGDVTGFLALDNTNKLIVLSFRGSRSIENWIGNLNFDLIEINDICSGCRGHDGFTSSWFSVADTLRQKVEDAVREHPDYRVVFTGHSLGGALATVAGADLRGNSYDIDVFSYGAPRVGNRAFAEFLTVQTGGTLYRITHTNDIVPRLPPREFGYSHSSPEYWIKSGTLVPVRRRDIVKIEGIDATGGNNQPNIPDIPAHLWYFGLIGTCL

SEQ ID NO: 7309 - protein, 269 aa, Thermomyces lanuginosus
EVSQDLFNQFRLFAQYSAAAYCGKNNDAPAGTQITCTGNACPEVEKADATFLYSFEDSGVGDVTGFLALDNTNKLIVLSFRGSRSIENWITNLNFDLKEINDICSGCRGHDGFTSSWRSVADTLRQKVEDAVREHPDYRVLFTGHSLGGALATVAGADLRGNKYDIDVFSYGAPRVGNRAFAEFLTVQTGGTLYRITHTNDIVPRLPPREFGYSHSSPEYWIKSGTLVPVRRRDIVKIEGIDATGGNNQPNIPSIPAHLWYFGLIGTCL

SEQ ID NO: 7310 - protein, 269 aa, Thermomyces lanuginosus
EVSQDLFNQFNLFAQYSAAAYCSKNNDAPAGTNITCTGNACPEVEKADATFLYSFRDSGEGDVTGFLALDNTNKLIVLSFRGSRSIENWIGNLNFDLKEINDICSGCRGHDGFTSSWFSVADTLRQKVEDAVREHPDYRVVFTGHSLGGALATVAGADLRGNGYDIDVFSYGAPRVGNRAFAEFLTVQTGGTLYRITHTNDIVPRLPPREFGYSHSSPEYWIKSGTLVPVRRRDIVKIEGIDAEGGNNQPNIPDITAHLWYFGLIGTCL

SEQ ID NO: 7311 - protein, 269 aa, Thermomyces lanuginosus
EVSRDLFNQFNLFAQYSAAAYCGKNNDAPAGTNITCTGNACPEVEKADATILYSFEDSGVGDVTGFLALDNTNKLIVLSFRGSRSIENWIGNLNFDLKEINDICSGCRGHDGFTSSWRSVADTLRQKVEDAVREHPDYRVVFTGHSLGGALATVAGADLRGNGYDIDVFSYGAPRVGNRAFAEFLTVQTGGTLYRITNTNDIVPRLPPRQFGYSHSSPEYWIKSGTLPPVRRNDIVKCEGIDATCGNNQPNIPDIPAHLWYFGLIGTCL

SEQ ID NO: 7312 - protein, 269 aa, Thermomyces lanuginosus
EVSQDLFNQFNLFAQYSAAAYCGKNNDAPAGTKITCTGNACPEVEKADATVLYTFKDSGVGDVTGFLALDNTNKLIVLSFRGSRSIENWIGNLNFDLIEINDICSGCRGHDGFTSSWRSVADTLRQKVEDAVREHPDYRVVFTGHSLGGALATVAGADLRGNGYDIDVFSYGAPRVGNRAFAEFLTVQTGGTLYRITHTNDIVPRLPPREFGYSHSSPEYWIKSGTLVPVRRRDIVKIEGIDATGGNNQPNIPDIPIHLWYFGLIGTCL

SEQ ID NO: 7313 - protein, 269 aa, Thermomyces lanuginosus
EVSQDLFNQFNLFAQYSAAAYCGKNNDAPAGTKITCTGNACPEVEKADATVLYTFKDSGVGDVTGFLALDNTNKLIVLSFRGSRSIENWIGNLNFDLIEINDICSGCRGHDGFTSSWRSVADTLRQKVEDAVREHPDYRVVFTGHSLGGALATVAGADLRGNGYDIDVFSYGAPRVGNRAFAEFLTVQTGGTLYRITHTNDIVPRLPPREFGYSHSSPEYWIKPGTLVPVRRRDIVKIEGIDATGGNNQPNIPDIPAHLWYFGLIGTCL

SEQ ID NO: 7314 - protein, 269 aa, Thermomyces lanuginosus
EVSQDLFNQFRLFAQYSAAAYCGKNNDAPAGTQITCTGNACPEVEKADATFLYSFEDSGVGDVTGFLVLDNTNKLIVLSFRGSRSIENWITNLNFDLKEINDICSGCRGHDGFTSSWRSVADTLRQKVEDAVREHPDYRVVFTGHSLGGALATVAGADLRGNKYDIDVFSYGAPRVGNRAFAEFLTVQTGGTLYRITHTNDIVPRLPPREFGYSHSSPEYWIKSGTLVPVRRRDIVKIEGIDATGGNNQPNIPSIPAHLWYFGLIGTCL

SEQ ID NO: 7315 - protein, 269 aa, Thermomyces lanuginosus
EVSQDLFNQFNLFAQYSAAAYCKKNNSAPAGTNITCTGNACPEVEKADATTLYSFKDSGVGDVTGFLALDNTNKRIVLSFRGSRSIENWIGNLNFDLKEINDICSGCRGHDGFTSSWRSVADTLRQKVEAAVREHPDYRVVFTGHSLGGALATVAGADLRGNGYDIDVFSYGAPRVGNRAFAEFLTTQTGGTLYRITHTNDIVPRLPPREFGYSHSSPEYWIKSGTLVPVTRNDIVKIEGIDATGGNNQPNIPDIPAHLWYFGRIGTCL

SEQ ID NO: 7316 - protein, 269 aa, Thermomyces lanuginosus
EVSQDLFNQFNLFAQYSAAAYCGKNNDAPAGTKITCTGNACPEVEKADATILYSFKDSGVGDVTGFLARDNTNKLIVLSFRGSRSIENWIGNLNFDLEEINDICSGCRGHDGFTSSWRSVADTLRQKVEDAVREHPDYRVVFTGHSLGGALATVAGADLRGNGYDIDVFSYGAPRVGNRAFAEFLTVQTGGTLYRITHTNDIVPRLPPREFGYSHSSPEYWIKFGTLVPVRRRDIVKIEGIDATGGNNQPNIPDIPAHLWYFGLIGTCL

SEQ ID NO: 7317 - protein, 269 aa, Thermomyces lanuginosus
EVSQDLFNQFNLFAQYSAAAYCGKNNDAPAGTKITCTGNACPEVEKADATVLYSFKDSGVGDVTGFLARDNTNKLIVLSFRGSRSIENWIGNLNFDLEEINDICSGCRGHDGFTSSWRSVADTLRQKVEDAVREHPDYRVVFTGHSLGGALATVAGADLRGNGYDIDVFSYGAPRVGNRAFAEFLTVQTGGTLYRITHTNDIVPRLPPREFGYSHSSPEYWIKSGTLVPVRRRDIVKIEGIDATGGNNQPNIPDIPVHLWYFGLIGTCL

SEQ ID NO: 7318 - protein, 269 aa, Thermomyces lanuginosus
EVSQDLFNQFNLFAQYSAAAYCGKNNDAPAGTKITCTGNACPEVEKADATVLYTFKDSGVGDVTGFLALDNTNKLIVLSFRGSRSIENWIGNLNFDLIEINDICSGCRGHDGFTSSWRSVADTLRQKVEDAVREHPDYRVVFAGHSLGGALATVAGADLRGNGYDIDVFSYGAPRVGNRAFAEFLTVQTGGTLYRITHTNDIVPRLPPREFGYSHSSPEYWIKSGTLVPVRRRDIVKIEGIDATGGNNQPNIPDIPAHLWYFGLIGTCL

SEQ ID NO: 7319 - protein, 269 aa, Thermomyces lanuginosus
EVSQDLFNQFNLFAQYSAAAYCKKNNSAPAGTNITCTGNACPEVEKADATFLYSFKDMGVGDVTGFLALDNTNKRIVLSFRGSRSIENWIQNLNFDLKEINDICSGCRGHDGFTSSWRSVADTLRQKVEDAVREHPDYRVVFTGHSLGGALATVAGADLRGNGYDIDVFSYGAPRVGNRAFAEFLTNQTGGTLYRITHTNDIVPRLPPREFGYSHSSPEYWIKSGTLVPVTRNDIVKIEGIDATGGNNQPNQPDIPAHLWYFGLIGTCL

SEQ ID NO: 7320 - protein, 269 aa, Thermomyces lanuginosus
EVSQDLFNQFNLFAQYSAAAYCSKNNDAPAGTNITCTGNACPEVEKADATFLYSFRDSGVGDVTGFLALDNTNKLIVLSFRGSRSIENWIGNLNFDLIEINDICSGCRGHDGFTSSWFSVADTLRQKVEDAVREHPDYRVVFTGHSLGGALATVAGADLRGNGYDIDVFSYGAPRVGNRAFAEFLTVQTGGTLYRITHTNDIVPRLPPREFGYSHSSPEYWIKSGTLVPVRRRDIVKIEGIDAEGGNNQPNIPDITAHLWYFGLIGTCL

SEQ ID NO: 7321 - protein, 269 aa, Thermomyces lanuginosus
EVSQDLFNQFNLFAQYSAAAYCGKNNDAPAGTKITCTGNACPEVEKADATLLYTFKDSGVGDVTGFLALDNTNKLIVLSFRGSRSIENWIGNLNFDLIEINDICSGCRGHDGFTSSWRSVADTLRQKVEDAVREHPDYRVVFTGHSLGGALATVAGADLRGNGYDIDVFSYGAPRVGNRAFAEFLTVQTGGTLYRITHTNDIVPRLPPREFGYSHSSPEYWIKIGTLVPVRRRDIVKIEGIDATGGNNQPNIPDIPAHLWYFGLIGTCL

SEQ ID NO: 7322 - protein, 269 aa, Thermomyces lanuginosus
EVSQDLFNQFNLFAQYSAAAYCAKNNDAPAGTNITCTGNACPEVEKADATFLYSFEDSGVGDVTGFLALDNTNKQIVLSFRGSRSIENWIGNLRFDLKEINDICSGCRGHAGFTSSWRSVADTLRQKVEAAVREHPDYRVVFTGHSLGGALATVAWADLRGNGYDIDVFSYGAPRVGNRAFAEFLTVQQGGTLYRITHTNDIVPRLPPREFGYSHSSPEYWIKSGTLVPVTRNDIVKIEGIDATGGNNQPNIPDIPAHLWYFGRIGTCL

SEQ ID NO: 7323 - protein, 269 aa, Thermomyces lanuginosus
EVSQDLFNQFNLFAQYSAAAYCGKNNDAPAGTKITCTGNACPEVEKADATILYSFKDSGVGDVTGFLARDNTNKLIVLSFRGSRSIENWIGNLNFDLEEINDICSGCRGHDGFTSSWRSVADTLRQKVEDAVREHPDYRVVFTGHSLGGALATVAGADLRGNGYDIDVFSYGAPRVGNRAFAEFLTVQTGGTLYRITHTNDIVPRLPPREFGYSHSSPEYWIKSGTLVPVRRRDIVKIEGIDATGGNNQPNIPDGPAHLWYFGLIGTCL

SEQ ID NO: 7324 - protein, 269 aa, Thermomyces lanuginosus
EVSQDLFNQFNLFAQYSAAAYCGKNNDAPAGTQITCTGNACPEVEKADATFLYSFEDSGVGDVTGFLALDNTNKLIVLSFRGSRSIENWITNLNFELTEINDICSGCRGHDGFISSWRSVADTLRQKVEDAVREHPDYRVVFTGHSLGGALATVAGADLRGNSYDIDVFSYGAPRVGNRAFAEFLTVQTGGTLYRITHTNDIVPRLPPREFGYSHSSPEYWIKSGTLVPVRRRDIVKIEGIDATGGNNQPNIPDIPAHLWYFGLIGTCL

SEQ ID NO: 7325 - protein, 269 aa, Thermomyces lanuginosus
EVSQDLFNQFNLFAQYSAAAYCGKNNDAPAGTNITCTGNACPEVEKADATTLYSFKDSGVGDVTGFLALDNTNKGIVLSFRGSRSIENWIQNLNFDLKEINDICSGCRGHDGFTSSWRSVADTLRQKVEAAVREHPDYRVVFTGHSLGGALATVAGADLRGNGYDIDVFSYGAPRVGNRAFAEFLTHQTGGTLYRITHTNDIVPRLPPREFGYSHSSPEYWIKSGTLVPVTRNDIVKIEGIDATGGNNQPNQPDIPAHLWYFGRIGTCL

SEQ ID NO: 7326 - protein, 269 aa, Thermomyces lanuginosus
EVSQDLFNQFNLFAQYSAAAYCGKNNDAPAGTKITCTGNACPEVEKADATLLYSFKDSGVGDVTGFLARDNTNKLIVLSFRGSRSIENWIGNLNFDLEEINDICSGCRGHDGFTSSWRSVADTLRQKVEDAVREHPDYRVVFTGHSLGGALATVAGADLRGNGYDIDVFSYGAPRVGNRAFAEFLTVQTGGTLYRITHTNDIVPRLPPREFGYSHSSPEYWIKSGTLVPVRRRDIVKIEGIDATGGNNQPNIPDIPVHLWYFGLIGTCL

SEQ ID NO: 7327 - protein, 269 aa, Thermomyces lanuginosus
EVSQDLFNQFNLFAQYSAAAYCGKNNDAPAGTKITCTGNACPEVEKADATLLYSFKDSGVGDVTGFLARDNTNKLIVLSFRGSRSIENWIGNLNFDLEEINDICSGCRGHDGFTSSWRSVADTLRQKVEDAVREHPDYRVVFTGHSLGGALATVAGADLRGNGYDIDVFSYGAPRVGNRAFAEFLTVQTGGTLYRITHTNDIVPRLPPREFGYSHSSPEYWIKSGTDVPVRRRDIVKIEGIDATGGNNQPNIPDIPAHLWYFGLIGTCL

SEQ ID NO: 7328 - protein, 269 aa, Thermomyces lanuginosus
EVSQDLFNQFNLFAQYSAAAYCQKNNSAPAGTNITCTGNACPEVEKADATTLYSFEDMGVGDVTGFLALDNTNKLIVLSFRGSRSIENWIQNLNFDLKEINDICSGCRGHDGFTSSWRSVADTLRQKVEAAVREHPDYRVVFTGHSLGGALATVAGADLRGNGYDIDVFSYGAPRVGNRAFAEFLTNQTGGTLYRITHTNDIVPRLPPREFGYSHSSPEYWIKSGTLVPVTRNDIVKIEGIDATGGNNQPNQPDIPAHLWYFGLIGTCL

SEQ ID NO: 7329 - protein, 269 aa, Thermomyces lanuginosus
EVSQDLFNQFNLFAQYSAAAYCGKNNRAPAGTQITCTGNACPEVEKADATFLYSFEDSGVGDVTGFLALDNTNKLIVLSFRGSRSIENWITNLNFDLKEINDICSGCRGHDGFISSWRSVADTLRQKVEDAVREHPDYRVVFTGHSLGGALATVAGADLRGNWYDIDVFSYGAPRVGNRAFAEFLTVQTGGTLYRITHTNDIVPRLPPRDFGYSHSSPEYWIKSGTLVPVRRRDIVKIEGIDATGGNNQPNIPDIPAHLWYFGLIGTCL

SEQ ID NO: 7330 - protein, 269 aa, Thermomyces lanuginosus
EVSQDLFNQFNLFAQYSAAAYCGKNNDAPAGTNITCTGNACPEVEKADATFLYSFEDAGSGDVTGFLALDNTNKLIVLSFRGTRSIENWIGNLNFDLKEINDICSGCRGHDGFTSSWRSVADTLRQKVEDAVREHPDYRVVFTGHSLGGALATVAGADLRGNGYDIDVFSYGAPRVGNRAFAEFLTVQTGGTLYRITHTNDIVPRLPPREFGYSHSSPEYWIKSGTGVPVRRRDIVKIEGIDATGGNNQPNIPDAKAHLWYFGLIGTCL

SEQ ID NO: 7331 - protein, 269 aa, Thermomyces lanuginosus
EVSQDLFNQFNLFAQYSAAAYCQKNNSAPAGTNITCTGNACPEVEKADATFLYSFEDSGVGDVTGFLALDNTNKRIVLSFRGSRSIENWIGNLRFDLKEINDICSGCRGHDGFTSSWRSVADTLRQKVEDAVREHPDYRVVFTGHSLGGALATIAWADLRGNGYDIDVFSYGAPRVGNRAFAEFLTNQQGGTLYRITHTNDIVPRLPPREFGYSHSSPEYWIKSGTLVPVTRNDIVKIEGIDATGGNNQPNIPDIPAHLWYFGLIGTCL

SEQ ID NO: 7332 - protein, 269 aa, Thermomyces lanuginosus
EVSVDLFNQFNLFAQYSAAAYCGKNNDAPAGTNITCTGNACPEVEKADATFLYSFEDNGSGDVTGFLALDNTNKLIVLSFRGSRSIENWAGNLNFDLKEINDICSGCRGHDGFTSSWRSVADTLRQKVEDAVREHPDYRVVFTGHSLGGGLATVAGADLRGNGYDIDVFSYGAPRVGNRAFAEFLTVQTGGTLYRITHTNDIVPRLPPREFGYSHSSPEYWIKSGTLVPVRRRDIVKIEGIDATGGNNQPNIPDVPAHLWYFGLIGTCL

SEQ ID NO: 7333 - protein, 269 aa, Thermomyces lanuginosus
EVSQDLFNQFNLFAQYSAAAYCGKNNDAPAGTKITCTGNACPEVEKADATILYSFKDSGVGDVTGFLARDNTNKLIVLSFRGSRSIENWIGNLNFDLEEINDICSGCRGHDGFTSSWRSVADTLRQKVEDAVREHPDYRVVFTGHSLGGALATVAGADLRGNGYDIDVFSYGAPRVGNRAFAEFLTVQTGGTLYRITHTNDIVPRLPPREFGYSHSSPEYWIKPGTLVPVRRRDIVKIEGIDATGGNNQPNIPDIPAHLWYFGLIGTCL

SEQ ID NO: 7334 - protein, 269 aa, Thermomyces lanuginosus
EVSQDLFNQFNLFAQYSAAAYCSKNNNAPAGTNITCTGNACPEVEKADATFLYSFRDSGVGDVTGFLALDNTNKLIVLSFRGSRSIENWIGNLNFDLIEINDICSGCRGHDGFTSSWFSVADTLRQKVEDAVREHPDYRVVFTGHSLGGALATVAGADLRGNGYDIDVFSYGAPRVGNRAFAEFLTVQTGGTLYRITHTNDIVPRLPPREFGYSHSSPEFWIKSGTLVPVRRRDIVKIEGIDATGGNNQPNIPDIPAHLWYFGLIGTCL

SEQ ID NO: 7335 - protein, 269 aa, Thermomyces lanuginosus
EVSQDLFNQFRLFAQYSAAAYCGKNNDAPAGTQITCTGNACPEVEKADATFLYSFEDSGVGDVTGFLALDNTNKLIVLSFRGSRSIENWITNLNFDLKEINDICSGCRGHDGFTSSWRSVADTLRQKVEDAVREHPDYRVVFTGHSLGGALATVAGADLRGNKYDIDVFSYGAPRVGNRAFAEFLTVQTGGTLYRITHTNDIVPRLPPREFGYSHSSPEYWIKSGTLVPVRRRDIVKIEGIDATGGNNQPNIPSIFAHLWYFGLIGTCL

SEQ ID NO: 7336 - protein, 269 aa, Thermomyces lanuginosus
EVSQDLFNQFNLFAQYSAAAYCGKNNDAPAGTKITCTGNACPEVEKADATVLYSFKDSGVGDVTGFLARDNTNKLIVLSFRGSRSIENWIGNLNFDLEEINDICSGCRGHDGFTSSWRSVADTLRQKVEDAVREHPDYRVVFAGHSLGGALATVAGADLRGNGYDIDVFSYGAPRVGNRAFAEFLTVQTGGTLYRITHTNDIVPRLPPREFGYSHSSPEYWIKSGTLVPVRRRDIVKIEGIDATGGNNQPNIPDIPAHLWYFGLIGTCL

SEQ ID NO: 7337 - protein, 269 aa, Thermomyces lanuginosus
EVSQDLFNQFNLFAQYSAAAYCKKNNDAPAGTNITCTGNACPEVEKADATTLYSFKDSGVGDVTGFLALDNTNKRIVLSFRGSRSIENWIQNLNFDLKEINDICSGCRGHDGFTSSWRSVADTLRQKVEAAVREHPDYRVVFTGHSLGGALATVAGADLRGNGYDIDVFSYGAPRVGNRAFAEFLTTQTGGTLYRITHTNDIVPRLPPREFGYSHSSPEYWIKSGTLVPVTRNDIVKIEGIDATGGNNQPNIPDIPAHLWYFGRIGTCL

SEQ ID NO: 7338 - protein, 269 aa, Thermomyces lanuginosus
EVSQDLFNQFNLFAQYSAAAYCGKNNDAPAGTKITCTGNACPEVEKADATLLYSFKDSGVGDVTGFLARDNTNKLIVLSFRGSRSIENWIGNLNFDLEEINDICSGCRGHDGFTSSWRSVADTLRQKVEDAVREHPDYRVVFTGHSLGGALATVAGADLRGNGYDIDVFSYGAPRVGNRAFAEFLTVQTGGTLYRITHTNDIVPRLPPREFGYSHSSPEYWIKIGTLVPVRRRDIVKIEGIDATGGNNQPNIPDIPAHLWYFGLIGTCL

SEQ ID NO: 7339 - protein, 269 aa, Thermomyces lanuginosus
EVSQDLFNQFNLFAQYSAAAYCSKNNDAPAGTNITCTGNACPEVEKADATFLYSFRDSGVGDVTGFLALDNTNKLIVLSFRGSRSIENWIGNLNFDLKEINDICSGCRGHDGFTSSWFSVADTLRQKVEDAVREHPDYRVVFTGHSLGGALATVAGADLRGNGYDIDVFSYGAPRVGNRAFAEFLTVQTGGTLYRITHTNDIVPRLPPREFGYSHSSPEFWIKSGTLVPVRRRDIVKIEGIDAEGGNNQPNIPDITAHLWYFGLIGTCL

SEQ ID NO: 7340 - protein, 269 aa, Thermomyces lanuginosus
EVSQDLFNQFNLFAQYSAAAYCGKNNRAPAGTNITCTGNACPEVEKADATFLYSFEDSGKGDVTGFLALDNTNKLIVLSFRGSRSVENWIGNLNFDLKEINDICSGCRGHDGFTSSWRSVADTLRQKVEDAVREHPDYRVVFTGHSLGGGLATVAGADLRGNGYDIDVFSYGAPRVGNRAFAEFLTVQTGGTLYRITHTNDIVPRLPPREFGYSHSSPEYWIKSGTGVPVRRRDIVKIEGIDATGGNNQPNIPDIKAHLWYFGLIGTCL

SEQ ID NO: 7341 - protein, 269 aa, Thermomyces lanuginosus
EVSQDLFNQFNLFAQYSAAAYCGKNNDAPAGTKITCTGNACPEVEKADATVLYSFKDSGVGDVTGFLARDNTNKLIVLSFRGSRSIENWIGNLNFDLEEINDICSGCRGHDGFTSSWRSVADTLRQKVEDAVREHPDYRVVFTGHSLGGALATVAGADLRGNGYDIDVFSYGAPRVGNRAFAEFLTVQTGGTLYRITITNDIVPRLPPREFGYSHSSPEYWIKSGTLVPVRRRDIVKIEGIDATGGNNQPNIPDIPAHLWYFGLIGTCL

SEQ ID NO: 7342 - protein, 269 aa, Thermomyces lanuginosus
EVSQDLFNQFNLFAQYSAAAYCSKNNDAPAGTNITCTGNACPEVEKADATFLYSFRDSGKGDVTGFLALDNTNKLIVLSFRGSRSIENWIGNLNFDLKEINDICSGCRGHDGFTSSWFSVADTLRQKVEDAVREHPDYRVVFTGHSLGGALATVAGADLRGNGYDIDVFSYGAPRVGNRAFAEFLTVQTGGTLYRITHTNDIVPRLPPREFGYSHSSPEYWIKSGTLVPVRRRDIVKIEGIDAEGGNNQPNIPDITAHLWYFGLIGTCL

SEQ ID NO: 7343 - protein, 269 aa, Thermomyces lanuginosus
EVSQDLFNQFNLFAQYSAAAYCGKNNDAPAGTKITCTGNACPEVEKADATILYTFKDSGVGDVTGFLALDNTNKLIVLSFRGSRSIENWIGNLNFDLIEINDICSGCRGHDGFTSSWRSVADTLRQKVEDAVREHPDYRVVFAGHSLGGALATVAGADLRGNGYDIDVFSYGAPRVGNRAFAEFLTVQTGGTLYRITHTNDIVPRLPPREFGYSHSSPEYWIKSGTLVPVRRRDIVKIEGIDATGGNNQPNIPDIPAHLWYFGLIGTCL

SEQ ID NO: 7344 - protein, 269 aa, Thermomyces lanuginosus
EVSQDLFNQFNLFAQYSAAAYCGKNNEAPAGTNITCTGNACPEVEKAQATFLYSFEDSGVGDVTGFLALDNTNKLIVLSFRGSRSIENWIGNLNFDLKEINDICSGCRGHDGFTSSWRSVADTLRQKVEAAVREHPQYRVVFTGHSLGGALATVAGADLRGNPYDIDVFSYGAPRVGNRAFAEFLTVQTGGTLYRITHTNDIVPRLPPREFGYSHSSPEYWIKSGTMVPVTRQDIVKIEGIDATGGNNQPNIPDIPAHLWYFGRIGTCL

SEQ ID NO: 7345 - protein, 269 aa, Thermomyces lanuginosus
EVSQDLFNQFNLFAQYSAAAYCSKNNNAPAGTNITCTGNICPEVEKADATFLYSFRDSGKGDVTGFLALDNTNKLIVLSFRGSRSIENWIGNLNFDLKEINDICSGCRGHDGFTSSWFSVADTLRQKVEDAVREHPDYRVVFTGHSLGGALATVAGADLRGNGYDIDVFSYGAPRVGNRAFAEFLTVQTGGTLYRITHTNDIVPRLPPREFGYSHSSPEYWIKSGTLVPVRRRDIVKIEGIDATGGNNQPNIPDIPAHLWYFGLIGTCL

SEQ ID NO: 7346 - protein, 269 aa, Thermomyces lanuginosus
EVSQDLFNQFNLFAQYSAAAYCGKNNRAPAGTNITCTANACPEVEKADATFLYSFEDSGVGDVTGFLALDNTNKLIVLSFRGSRSIENWITNLNFELKEINDICSGCRGHAGFTSSWRSVADTLRQKVEDAVREHPDYRVVFTGHSLGGALATVAGADLRGNKYDIDVFSYGAPRVGNRAFAEFLTVQTGGTLYRITHTNDIVPRLPPREFGYSHSSPEYWIKSGTLVPVTRRDIVKIEGIDATGGNNQPNIPSIPAHLWYFGLIGTCL

SEQ ID NO: 7347 - protein, 269 aa, Thermomyces lanuginosus
EVSQDLFNQFNLFAQYSAAAYCGKNNDAPAGTKITCTGNACPEVEKADATVLYSFKDSGVGDVTGFLARDNTNKLIVLSFRGSRSIENWIGNLNFDLEEINDICSGCRGHDGFTSSWRSVADTLRQKVEDAVREHPDYRVVFTGHSLGGALATVAGADLRGNGYDIDVFSYGAPRVGNRAFAEFLTVQTGGTLYRITLTNDIVPRLPPREFGYSHSSPEYWIKSGTLVPVRRRDIVKIEGIDATGGNNQPNIPDIPAHLWYFGLIGTCL

SEQ ID NO: 7348 - protein, 269 aa, Thermomyces lanuginosus
EVSQDLFNQFKLFAQYSAAAYCKKNNDAPAGTNITCTGNACPEVEKADATFLYSFEDSGVGDVTGFLALDNTNKQIVLSFRGSRSIENWIGNLNFDLKEINDICSGCRGHAGFTSSWRSVADTLRQKVEDAVREHPDYRVVFTGHSLGGALATVAWADLRGNGYDIDVFSYGAPRVGNRAFAEFLTNQQGGTLYRITHTNDIVPRLPPREFGYSHSSPEYWIKSGTLVPVTRNDIVKIEGIDATGGNNQPNIPDIPAHLWYFGRIGTCL

SEQ ID NO: 7349 - protein, 269 aa, Thermomyces lanuginosus
EVSQDLFNQFNLFAQYSAAAYCGKNNDAPAGTNITCTGNICPEVEKADATLLYSFRDSGVGDVTGFLALDNTNKLIVLSFRGSRSIENWIGNLNFDLKEINDICSGCRGHDGFTSSWFSVADTLRQKVEDAVREHPDYRVVFTGHSLGGALATVAGADLRGNSYDIDVFSYGAPRVGNRAFAEFLTVQTGGTLYRITHTNDIVPRLPPREFGYSHSSPEYWIKSGTLVPVRRRDIVKIEGIDATGGNNQPNIPDITAHLWYFGLIGTCL

SEQ ID NO: 7350 - protein, 269 aa, Thermomyces lanuginosus
EVSQDLFNQFNLFAQYSAAAYCQANNDAPAGTNITCTGNACPEVEKADATFLYSFEDSGVGDVTGFLALDNTNKQIILSFRGSRSIENWIGNLNFDLKEINDICSGCRGHDGFTSSWRSVADTLRQKVEAAVREHPDYRVVFTGHSLGGALATIAWADLRGNGYDIDVFSYGAPRVGNRAFAEFLTNQTGGTLYRITHTNDIVPRLPPREFGYSHSSPEYWIKSGTLVPVTRNDIVKIEGIDATGGNNQPNIPDIPAHLWYFGLIGTCL

SEQ ID NO: 7351 - protein, 269 aa, Thermomyces lanuginosus
EVSQDLFNQFNLFAQYSAAAYCGKNNDAPAGTNITCTGNACPEVEKADATFLYSFEDAGSGDVTGFLALDNTNKLIVLSFRGSRSVENWIGNLNFDLKEINDICSGCRGHDGFTSSWRSVADTLRQKVEDAVREHPDYRVVFTGHSLGGGLATVAGADLRGNGYDIDVFSYGAPRVGNRAFAEFLTVQTGGTLYRITHTNDIVPRLPPREFGYSHSSPEYWIKSGTGVPVRRRDIVKIEGIDATGGNNQPNIPDIKAHLWYFGLIGTCL

SEQ ID NO: 7352 - protein, 269 aa, Thermomyces lanuginosus
EVSQDLFNQFNLFAQYSAAAYCGKNNDAPAGTNITCTGNACPEVEKADATFLYSFEDSGVGDVTGFLALDNTNKLIVLSFRGSRSIKNWIDNLNFLLKEINDICSGCRGHDGFTSSWRSVADTLRQKVEDAVREHPDYRVVFTGHSLGGALATVAGADLRGNGYDIDVFSYGAPRVGNRAFAEFLTVQTGGTLYRITHTNDIVPRLPPREFGYSHSSPEYWIKSPTLVPVRRRDIVKIEGIDATGGNNRPDIPDIPAHLWYFGLIGTCL

SEQ ID NO: 7353 - protein, 269 aa, Thermomyces lanuginosus
EVSQDLFNQFKLFAQYSAAAYCQKNNDAPAGTNITCTGNACPEVEKADATFLYSFEDSGVGDVTGFLALDNTNKQIVLSFRGSRSIENWIGNLNFDLKEINDICSGCRGHAGFTSSWRSVADTLRQKVEAAVREHPDYRVVFTGHSLGGALATIAGADLRGNGYDIDVFSYGAPRVGNRAFAEFLTNQTGGTLYRITHTNDIVPRLPPREFGYSHSSPEYWIKSGTLVPVTRNDIVKIEGIDATGGNNQPNIPDIPAHLWYFGRIGTCL

SEQ ID NO: 7354 - protein, 269 aa, Thermomyces lanuginosus
EVSQDLFNQFNLFAQYSAAAYCGKNNRAPAGTNITCTANACPEVEKADATFLYSFEDSGVGDVTGFLALDNTNKLIVLSFRGSRSIENWIGNLNFELKEINDICSGCRGHAGFTSSWRSVADTLRQKVEDAVREHPDYRVVFTGHSLGGALATVAGADLRGNKYDIDVFSYGAPRVGNRAFAEFLTVQTGGTLYRITHTNDIVPRLPPREFGYSHSSPEYWIKSGTLVPVRRRDIVKIEGIDATGGNNQPNIPSIPAHLWYFGLIGTCL

SEQ ID NO: 7355 - protein, 269 aa, Thermomyces lanuginosus
EVSQDLFNQFNLFAQYSAAAYCGKNNDAPAGTKITCTGNACPEVEKADATLLYTFKDSGVGDVTGFLALDNTNKLIVLSFRGSRSIENWIGNLNFDLIEINDICSGCRGHDGFTSSWRSVADTLRQKVEDAVREHPDYRVVFTGHSLGGALATVAGADLRGNGYDIDVFSYGAPRVGNRAFAEFLTVQTGGTLYRITITNDIVPRLPPREFGYSHSSPEYWIKSGTLVPVRRRDIVKIEGIDATGGNNQPNIPDIPAHLWYFGLIGTCL

SEQ ID NO: 7356 - protein, 269 aa, Thermomyces lanuginosus
EVSQDLFNQFNLFAQYSAAAYCGKNNDAPAGTKITCTGNACPEVEKADATLLYSFKDSGVGDVTGFLARDNTNKLIVLSFRGSRSIENWIGNLNFDLEEINDICSGCRGHDGFTSSWRSVADTLRQKVEDAVREHPDYRVVFTGHSLGGALATVAGADLRGNGYDIDVFSYGAPRVGNRAFAEFLTVQTGGTLYRITITNDIVPRLPPREFGYSHSSPEYWIKSGTLVPVRRRDIVKIEGIDATGGNNQPNIPDIPAHLWYFGLIGTCL

SEQ ID NO: 7357 - protein, 269 aa, Thermomyces lanuginosus
EVSQDLFNQFNLFAQYSAAAYCSKNNDAPAGTNITCTGNACPEVEKADATFLYSFRDSGVGDVTGFLALDNTNKLIVLSFRGSRSIENWIGNLNFDLIEINDICSGCRGHDGFTSSWFSVADTLRQKVEDAVREHPDYRVVFTGHSLGGALATVAGADLRGNGYDIDVFSYGAPRVGNRAFAEFLTVQTGGTLYRITHTNDIVPRLPPREFGYSHSSPEFWIKSGTLVPVRRRDIVKIEGIDAEGGNNQPNIPDIPAHLWYFGLIGTCL

SEQ ID NO: 7358 - protein, 269 aa, Thermomyces lanuginosus
EVSQDLFNQFNLFAQYSAAAYCGANNDAPAGTNITCTGNACPEVEKADATFLYSFEDSGVGDVTGFLALDNTNKLIVLSFRGSRSIENWIGNLNFDLKEINDICSGCRGHAGFTSSWRSVADTLRQKVEAAVREHPDYRVVFTGHSLGGALATIAWADLRGNGYDIDVFSYGAPRVGNRAFAEFLTTQQGGTLYRITHTNDIVPRLPPREFGYSHSSPEYWIKSGTLVPVTRNDIVKIEGIDATGGNNQPNIPDIPAHLWYFGRIGTCL

SEQ ID NO: 7359 - protein, 269 aa, Thermomyces lanuginosus
EVSQDLFNQFNLFAQYSAAAYCGKNNDAPAGTNITCTGNACPEVEKAQATFLYSFEDMGVGDVTGFLALDNTNKLIVLSFRGSRSIENWIGNLNFDLKEINDICSGCRGHDGFTSSWRSVADTLRQKVEAAVREHPQYRVVFTGHSLGGALATVAGADLRGNPYDIDVFSYGAPRVGNRAFAEFLTVQTGGTLYRITHTNDIVPRLPPREFGYSHSSPEYWIKSGTMVPVTRQDIVKIEGIDATGGNNQPNIPDIPAHLWYFGRIGTCL

SEQ ID NO: 7360 - protein, 269 aa, Thermomyces lanuginosus
EVSQDLFNQFNLFAQYSAAAYCQKNNDAPAGTNITCTGNACPEVEKADATFLYSFEDSGVGDVTGFLALDNTNKQIVLSFRGSRSIENWIGNLRFDLKEINDICSGCRGHAGFTSSWRSVADTLRQKVEAAVREHPDYRVVFTGHSLGGALATVAWADLRGNGYDIDVFSYGAPRVGNRAFAEFLTVQQGGTLYRITHTNDIVPRLPPREFGYSHSSPEYWIKSGTLVPVTRNDIVKIEGIDATGGNNQPNIPDIPAHLWYFGRIGTCL

SEQ ID NO: 7361 - protein, 269 aa, Thermomyces lanuginosus
EVSQDLFNQFRLFAQYSAAAYCGKNNDAPAGTQITCTGNACPEVEKADATFLYSFEDSGVGDVTGFLALDNTNKLIVLSFRGSRSIENWITNLNFDLKEINDICSGCRGHDGFTSSWRSVADTLRQKVEDAVREHPDYRVVFTGHSLGGALATVAGADLRGNKYDIDVFSYGAPRVGNRAFAEFLTVQTGGTLYRITHTNDIVPRLPPRDFGYSHSSPEYWIKSGTLVPVRRRDIVKIEGIDATGGNNQPNIPSIPAHLWYFGLIGTCL

SEQ ID NO: 7362 - protein, 269 aa, Thermomyces lanuginosus
EVSQDLFNQFNLFAQYSAAAYCGRNNDAPAGTNITCTGNACPEVERADATFLYSFEDSGVGDVTGFLALDNTNRLIVLSFRGSRSIENWIGNLNFDLREINDICSGCRGHDGFTSSWRSVADTLRQRVEDAVREHPKYRVVFTGHSLGGALATVAGADLRGNGYDIDVFSYGAPRVGNRAFAEFLTVQTGGTLYRITHTNDIVPRLPPREFGYSHSSPEYWIRSGTLVPVTRNDIVRIEGIDATGGNNQPNIPDIPAHLWYFGLIGTCL

SEQ ID NO: 7363 - protein, 269 aa, Thermomyces lanuginosus
EVSQDLFNQFNLFAQYSAAAYCGKNNNAPAGTNITCTGNACPEVEKADATILYSFRDSGVGDVTGFLALDNTNKLIVLSFRGSRSIENWIGNLNFDLKEINDICSGCRGHDGFTSSWFSVADTLRQKVEDAVREHPDYRVVFTGHSLGGALATVAGADLRGNGYDIDVFSYGAPRVGNRAFAEFLTVQTGGTLYRITHTNDIVPRLPPREFGYSHSSPEFWIKSGTLVPVRRRDIVKIEGIDATGGNNQPNIPDITAHLWYFGLIGTCL

SEQ ID NO: 7364 - protein, 269 aa, Thermomyces lanuginosus
EVSQDLFNQFNLFAQYSAAAYCGKNNDAPAGTKITCTGNACPEVEKADATVLYSFKDSGVGDVTGFLARDNTNKLIVLSFRGSRSIENWIGNLNFDLEEINDICSGCRGHDGFTSSWRSVADTLRQKVEDAVREHPDYRVVFTGHSLGGALATVAGADLRGNGYDIDVFSYGAPRVGNRAFAEFLTVQTGGTLYRITHTNDIVPRLPPREFGYSHSSPEYWIKFGTLVPVRRRDIVKIEGIDATGGNNQPNIPDIPAHLWYFGLIGTCL

SEQ ID NO: 7365 - protein, 269 aa, Thermomyces lanuginosus
EVSRDLFNQFNLFAQYSAAAYCGKNNDAPAGTNITCTGNACPEVEKADATILYSFEDSGVGDVTGFLALDNTNKLIVLSFRGSRSIENWIGNLNFDLKEINDICSGCRGHDGFTSSWRSVADTLRQKVEDAVREHPDYRVVFAGHSLGGALATVAGADLRGDGYDIDVFSYGAPRVGNRAFAEFLTVQTGGTLYRITSTNDIVPRLPPREFGYSHSSPEYWIKSGTLRPVRRRDIVKIEGIDATGGNNQPNIPDIPAHLWYFGLIGTCL

SEQ ID NO: 7366 - protein, 269 aa, Thermomyces lanuginosus
EVSQDLFNQFKLFAQYSAAAYCQKNNDAPAGTNITCTGNACPEVEKADATFLYSFEDSGVGDVTGFLALDNTNKQIVLSFRGSRSIENWIGNLRFDLKEINDICSGCRGHDGFTSSWRSVADTLRQKVEDAVREHPDYRVVFTGHSLGGALATIAWADLRGNGYDIDVFSYGAPRVGNRAFAEFLTVQQGGTLYRITHTNDIVPRLPPREFGYSHSSPEYWIKSGTLVPVTRNDIVKIEGIDATGGNNQPNIPDIPAHLWYFGRIGTCL

SEQ ID NO: 7367 - protein, 269 aa, Thermomyces lanuginosus
EVSQDLFNQFNLFAQYSAAAYCGKNNEAPAGTNITCTGNACPEVEKADATFLYSFEDSGVGDVTGFLALDNTNKLIVLSFRGSRMIENWIGNLNFDLKEINDICSGCRGHDGFTSSWRSVADTLRQKVEAAVREHPQYRVVFTGHSLGGALATVAGADLRGNPYDIDVFSYGAPRVGNRAFAEFLTVQTGGTLYRITHTNDIVPRLPPREFGYSHSSPEYWIKSGTMVPVTRQDIVKIEGIDATGGNNQPNIPDIPAHLWYFGRIGTCL

SEQ ID NO: 7368 - protein, 269 aa, Thermomyces lanuginosus
EVSQDLFNQFNLFAQYSAAAYCGKNNDAPAGTNITCTGNICPEVEKADATILYSFRDSGVGDVTGFLALDNTNKLIVLSFRGSRSIENWIGNLNFDLKEINDICSGCRGHDGFTSSWFSVADTLRQKVEDAVREHPDYRVVFTGHSLGGALATVAGADLRGNGYDIDVFSYGAPRVGNRAFAEFLTVQTGGTLYRITHTNDIVPRLPPREFGYSHSSPEYWIKSGTLVPVRRRDIVKIEGIDAEGGNNQPNIPDITAHLWYFGLIGTCL

SEQ ID NO: 7369 - protein, 269 aa, Thermomyces lanuginosus
EVSQDLFNQFNLFAQYSKAAYCKANNDAPAGTNITCTGNACPEVEKADATFLYSFEDSGVGDVTGFLALDNTNKRIVLSFRGSRSIENWIGNLNFDLKEINDICSGCRGHAGFTSSWRSVADTLRQKVEDAVREHPDYRVVFTGHSLGGALATIAGADLRGNGYDIDVFSYGAPRVGNRAFAEFLTTQTGGTLYRITHTNDIVPRLPPREFGYSHSSPEYWIKSGTLVPVTRNDIVKIEGIDATGGNNQPNIPDIPAHLWYFGRIGTCL

SEQ ID NO: 7370 - protein, 269 aa, Thermomyces lanuginosus
EVSQDLFNQFNLFAQYSAAAYCGKNNDAPAGTKITCTGNACPEVEKADATILYSFKDSGVGDVTGFLARDNTNKLIVLSFRGSRSIENWIGNLNFDLEEINDICSGCRGHDGFTSSWRSVADTLRQKVEDAVREHPDYRVVFTGHSLGGALATVAGADLRGNGYDIDVFSYGAPRVGNRAFAEFLTVQTGGTLYRITHTNDIVPRLPPREFGYSHSSPEYWIKSGTLVPVRRRDIVKIEGIDATGGNNQPNIPDIPVHLWYFGLIGTCL

SEQ ID NO: 7371 - protein, 269 aa, Thermomyces lanuginosus
EVSQDLFNQFNLFAQYSAAAYCGKNNDAPAGTKITCTGNACPEVEKADATVLYSFKDSGVGDVTGFLARDNTNKLIVLSFRGSRSIENWIGNLNFDLEEINDICSGCRGHDGFTSSWRSVADTLRQKVEDAVREHPDYRVVFTGHSLGGGLATVAGADLRGNGYDIDVFSYGAPRVGNRAFAEFLTVQTGGTLYRITHTNDIVPRLPPREFGYSHSSPEYWIKSGTLVPVRRRDIVKIEGIDATGGNNQPNIPDIPAHLWYFGLIGTCL

SEQ ID NO: 7372 - protein, 269 aa, Thermomyces lanuginosus
EVSQDLFNQFNLFAQYSAAAYCGKNNDAPAGTKITCTGNACPEVEKADATLLYSFKDSGVGDVTGFLARDNTNKLIVLSFRGSRSIENWIGNLNFDLEEINDICSGCRGHDGFTSSWRSVADTLRQKVEDAVREHPDYRVVFTGHSLGGALATVAGADLRGNGYDIDVFSYGAPRVGNRAFAEFLTVQTGGTLYRITLTNDIVPRLPPREFGYSHSSPEYWIKSGTLVPVRRRDIVKIEGIDATGGNNQPNIPDIPAHLWYFGLIGTCL

SEQ ID NO: 7373 - protein, 269 aa, Thermomyces lanuginosus
EVSQDLFNQFNLFAQYSAAAYCGKNNDAPAGTKITCTGNACPEVEKADATILYSFKDSGVGDVTGFLARDNTNKLIVLSFRGSRSIENWIGNLNFDLEEINDICSGCRGHDGFTSSWRSVADTLRQKVEDAVREHPDYRVVFTGHSLGGALATVAGADLRGNGYDIDVFSYGAPRVGNRAFAEFLTVQTGGTLYRITSTNDIVPRLPPREFGYSHSSPEYWIKSGTLVPVRRRDIVKIEGIDATGGNNQPNIPDIPAHLWYFGLIGTCL

SEQ ID NO: 7374 - protein, 269 aa, Thermomyces lanuginosus
EVSQDLFNQFNLFAQYSAAAYCGKNNDAPAGTNITCTGNICPEVEKADATFLYSFRDSGVGDVTGFLALDNTNKLIVLSFRGSRSIENWIGNLNFDLIEINDICSGCRGHDGFTSSWFSVADTLRQKVEDAVREHPDYRVVFTGHSLGGALATVAGADLRGNSYDIDVFSYGAPRVGNRAFAEFLTVQTGGTLYRITHTNDIVPRLPPREFGYSHSSPEYWIKSGTLVPVRRRDIVKIEGIDATGGNNQPNIPDITAHLWYFGLIGTCL

SEQ ID NO: 7375 - protein, 269 aa, Thermomyces lanuginosus
EVSQDLFNQFNLFAQYSAAAYCGKNNDAPAGTKITCTGNACPEVEKADATILYSFKDSGVGDVTGFLARDNTNKLIVLSFRGSRSIENWIGNLNFDLEEINDICSGCRGHDGFTSSWRSVADTLRQKVEDAVREHPDYRVVFTGHSLGGALATVAGADLRGNGYDIDVFSYGAPRVGNRAFAEFLTVQTGGTLYRITHTNDIVPRLPPREFGYSHSSPEYWIKSGTLPPVRRRDIVKIEGIDATGGNNQPNIPDIPAHLWYFGLIGTCL

SEQ ID NO: 7376 - protein, 269 aa, Thermomyces lanuginosus
EVSQDLFNQFNLFAQYSAAAYCGKNNVAPAGTQITCTGNACPEVEKADATFLYSFEDSGSGDVTGFLALDNTNKLIVLSFRGSRSIENWITNLNFWLKEINDICSGCRGHDGFTSSWRSVADTLRQKVEDAVREHPDYRVVFTGHSLGGALATVAGADLRGNGYDIDVFSYGAPRVGNRAFAEFLTVQTGGTLYRITHTNDIVPRLPPREFGYSHSSPEYWIKSGTLVPVRRRDIVKIEGIDATGGNNRPNIPDIPAHLWYFGLIGTCL

SEQ ID NO: 7377 - protein, 269 aa, Thermomyces lanuginosus
EVSQDLFNQFNLFAQYSAAAYCGKNNDAPAGTKITCTGNACPEVEKADATLLYSFKDSGVGDVTGFLARDNTNKLIVLSFRGSRSIENWIGNLNFDLEEINDICSGCRGHDGFTSSWRSVADTLRQKVEDAVREHPDYRVVFTGHSLGGALATVAGADLRGNGYDIDVFSYGAPRVGNRAFAEFLTVQTGGTLYRITSTNDIVPRLPPREFGYSHSSPEYWIKSGTLVPVRRRDIVKIEGIDATGGNNQPNIPDIPAHLWYFGLIGTCL

SEQ ID NO: 7378 - protein, 269 aa, Thermomyces lanuginosus
EVSQDLFNQFNLFAQYSAAAYCGKNNDAPAGTNITCTGNACPEVEKADATILYSFRDSGKGDVTGFLALDNTNKLIVLSFRGSRSIENWIGNLNFDLKEINDICSGCRGHDGFTSSWFSVADTLRQKVEDAVREHPDYRVVFTGHSLGGALATVAGADLRGNGYDIDVFSYGAPRVGNRAFAEFLTVQTGGTLYRITHTNDIVPRLPPREFGYSHSSPEYWIKSGTLVPVRRRDIVKIEGIDAEGGNNQPNIPDITAHLWYFGLIGTCL

SEQ ID NO: 7379 - protein, 269 aa, Thermomyces lanuginosus
EVSQDLFNQFNLFAQYSAAAYCSKNNNAPAGTNITCTGNACPEVEKADATILYSFRDSGVGDVTGFLALDNTNKLIVLSFRGSRSIENWIGNLNFDLKEINDICSGCRGHDGFTSSWFSVADTLRQKVEDAVREHPDYRVVFTGHSLGGALATVAGADLRGNGYDIDVFSYGAPRVGNRAFAEFLTVQTGGTLYRITHTNDIVPRLPPREFGYSHSSPEYWIKSGTLVPVRRRDIVKIEGIDAEGGNNQPNIPDIPAHLWYFGLIGTCL

SEQ ID NO: 7380 - protein, 269 aa, Thermomyces lanuginosus
EVSQDLFNQFNLFAQYSAAAYCKANNDAPAGTNITCTGNACPEVEKADATFLYSFEDSGVGDVTGFLALDNTNKQIVLSFRGSRSIENWIGNLRFDLKEINDICSGCRGHDGFTSSWRSVADTLRQKVEDAVREHPDYRVVFTGHSLGGALATIAWADLRGNGYDIDVFSYGAPRVGNRAFAEFLTTQTGGTLYRITHTNDIVPRLPPREFGYSHSSPEYWIKSGTLVPVTRNDIVKIEGIDATGGNNQPNIPDIPAHLWYFGRIGTCL

SEQ ID NO: 7381 - protein, 269 aa, Thermomyces lanuginosus
EVSQDLFNQFNLFAQYSAAAYCGKNNDAPAGTNITCTGNICPEVEKADATLLYSFRDSGVGDVTGFLALDNTNKLIVLSFRGSRSIENWIGNLNFDLIEINDICSGCRGHDGFTSSWFSVADTLRQKVEDAVREHPDYRVVFTGHSLGGALATVAGADLRGNSYDIDVFSYGAPRVGNRAFAEFLTVQTGGTLYRITHTNDIVPRLPPREFGYSHSSPEYWIKSGTLVPVRRRDIVKIEGIDATGGNNQPNIPDIPAHLWYFGLIGTCL

SEQ ID NO: 7382 - protein, 269 aa, Thermomyces lanuginosus
EVSVDLFNQFNLFAQYSAAAYCGKNNDAPAGTNITCTGNACPEVEKADATFLYSFEDNGSGDVTGFLALDNTNKLIVLSFRGSRSVENWIGNLNFDLKEINDICSGCRGHDGFTSSWRSVADTLRQKVEDAVREHPDYRVVFTGHSLGGGLATVAGADLRGNGYDIDVFSYGAPRVGNRAFAEFLTVQTGGTLYRITHTNDIVPRLPPREFGYSHSSPEYWIKSGTLVPVRRRDIVKIEGIDATGGNNQPNIPDVPAHLWYFGLIGTCL

SEQ ID NO: 7383 - protein, 269 aa, Thermomyces lanuginosus
EVSQDLFNQFNLFAQYSKAAYCQANNDAPAGTNITCTGNACPEVEKADATFLYSFEDSGVGDVTGFLALDNTNKRIVLSFRGSRSIENWIGNLNFDLKEINDICSGCRGHDGFTSSWRSVADTLRQKVEAAVREHPDYRVVFTGHSLGGALATIAWADLRGNGYDIDVFSYGAPRVGNRAFAEFLTNQTGGTLYRITHTNDIVPRLPPREFGYSHSSPEYWIKSGTLVPVTRNDIVKIEGIDATGGNNQPNIPDIPAHLWYFGLIGTCL

SEQ ID NO: 7384 - protein, 269 aa, Thermomyces lanuginosus
EVSQDLFNQFNLFAQYSAAAYCGKNNDAPAGTKITCTGNACPEVEKADATLLYSFKDSGVGDVTGFLARDNTNKLIVLSFRGSRSIENWIGNLNFDLEEINDICSGCRGHDGFTSSWRSVADTLRQKVEDAVREHPDYRVVFTGHSLGGALATVAGADLRGNGYDIDVFSYGAPRVGNRAFAEFLTVQTGGTLYRITNTNDIVPRLPPREFGYSHSSPEYWIKSGTLVPVRRRDIVKIEGIDATGGNNQPNIPDIPAHLWYFGLIGTCL

SEQ ID NO: 7385 - protein, 269 aa, Thermomyces lanuginosus
EVSQDLFNQFNLFAQYSAAAYCGKNNDAPAGTQITCTGNACPEVEKADATFLYSFEDSGVGDVTGFLALDNTNKLIVLSFRGSRSIENWITNLSFDLKEINDICSGCRGHAGFTSSWRSVADTLRQKVEDAVREHPDYRVVFTGHSLGGALATVAGADLRGNGYDIDVFSYGAPRIGNRAFAEFLTVQTGGTLYRITHTNDIVPRLPPREFGYSHSSPEYWIKSGTLVPVRRRDIVKIEGIDATGGNNQPNIPSIPAHLWYFGLIGTCL

SEQ ID NO: 7386 - protein, 269 aa, Thermomyces lanuginosus
EVSQDLFNQFNLFAQYSAAAYCGKNNDAPAGTKITCTGNACPEVEKADATVLYTFKDSGVGDVTGFLALDNTNKLIVLSFRGSRSIENWIGNLNFDLIEINDICSGCRGHDGFTSSWRSVADTLRQKVEDAVREHPDYRVVFTGHSLGGALATVAGADLRGNGYDIDVFSYGAPRVGNRAFAEFLTVQTGGTLYRITYTNDIVPRLPPREFGYSHSSPEYWIKSGTLVPVRRRDIVKIEGIDATGGNNQPNIPDIPAHLWYFGLIGTCL

SEQ ID NO: 7387 - protein, 269 aa, Thermomyces lanuginosus
EVSQDLFNQFNLFAQYSAAAYCSKNNNAPAGTNITCTGNACPEVEKADATFLYSFRDSGVGDVTGFLALDNTNKLIVLSFRGSRSIENWIGNLNFDLKEINDICSGCRGHDGFTSSWFSVADTLRQKVEDAVREHPDYRVVFTGHSLGGALATVAGADLRGNGYDIDVFSYGAPRVGNRAFAEFLTVQTGGTLYRITHTNDIVPRLPPREFGYSHSSPEYWIKSGTLVPVRRRDIVKIEGIDAEGGNNQPNIPDITAHLWYFGLIGTCL

SEQ ID NO: 7388 - protein, 269 aa, Thermomyces lanuginosus
EVSQDLFNQFNLFAQYSAAAYCQKNNDAPAGTNITCTGNACPEVEKADATFLYSFEDSGVGDVTGFLALDNTNKQIILSFRGSRSIENWIGNLRFDLKEINDICSGCRGHDGFTSSWRSVADTLRQKVEAAVREHPDYRVVFTGHSLGGALATIAWADLRGNGYDIDVFSYGAPRVGNRAFAEFLTQQTGGTLYRITHTNDIVPRLPPREFGYSHSSPEYWIKSGTLVPVTRNDIVKIEGIDATGGNNQPNIPDIPAHLWYFGLIGTCL

SEQ ID NO: 7389 - protein, 269 aa, Thermomyces lanuginosus
EVSQDLFNQFNLFAQYSAAAYCGKNNDAPAGTKITCTGNACPEVEKADATILYTFKDSGVGDVTGFLALDNTNKLIVLSFRGSRSIENWIGNLNFDLIEINDICSGCRGHDGFTSSWRSVADTLRQKVEDAVREHPDYRVVFTGHSLGGALATVAGADLRGNGYDIDVFSYGAPRVGNRAFAEFLTVQTGGTLYRITHTNDIVPRLPPREFGYSHSSPEYWIKFGTLVPVRRRDIVKIEGIDATGGNNQPNIPDIPAHLWYFGLIGTCL

SEQ ID NO: 7390 - protein, 269 aa, Thermomyces lanuginosus
EVSQDLFNQFNLFAQYSAAAYCGKNNDAPAGTKITCTGNACPEVEKADATILYSFKDSGVGDVTGFLARDNTNKLIVLSFRGSRSIENWIGNLNFDLEEINDICSGCRGHDGFTSSWRSVADTLRQKVEDAVREHPDYRVVFTGHSLGGALATVAGADLRGNGYDIDVFSYGAPRVGNRAFAEFLTVQTGGTLYRITHTNDIVPRLPPREFGYSHSSPEYWIKSGTDVPVRRRDIVKIEGIDATGGNNQPNIPDIPAHLWYFGLIGTCL

SEQ ID NO: 7391 - protein, 269 aa, Thermomyces lanuginosus
EVSQDLFNQFNLFAQYSAAAYCGKNNDAPAGTKITCTGNACPEVEKADATLLYSFKDSGVGDVTGFLARDNTNKLIVLSFRGSRSIENWIGNLNFDLEEINDICSGCRGHDGFTSSWRSVADTLRQKVEDAVREHPDYRVVFTGHSLGGALATVAGADLRGNGYDIDVFSYGAPRVGNRAFAEFLTVQTGGTLYRITHTNDIVPRLPPREFGYSHSSPEYWIKSGTLPPVRRRDIVKIEGIDATGGNNQPNIPDIPAHLWYFGLIGTCL

SEQ ID NO: 7392 - protein, 269 aa, Thermomyces lanuginosus
EVSQDLFNQFNLFAQYSAAAYCGKNNNAPAGTNITCTGNICPEVEKADATFLYSFRDSGVGDVTGFLALDNTNKLIVLSFRGSRSIENWIGNLNFDLKEINDICSGCRGHDGFTSSWFSVADTLRQKVEDAVREHPDYRVVFTGHSLGGALATVAGADLRGNGYDIDVFSYGAPRVGNRAFAEFLTVQTGGTLYRITHTNDIVPRLPPREFGYSHSSPEYWIKSGTLVPVRRRDIVKIEGIDAEGGNNQPNIPDITAHLWYFGLIGTCL

SEQ ID NO: 7393 - protein, 269 aa, Thermomyces lanuginosus
EVSQDLFNQFNLFAQYSAAAYCGKNNDAPAGTNITCTGNACPEVEKADATLLYSFRNSGVGDVTGFLALDNTNKLIVLSFRGSRSIENWIGNLNFDLKEINDICSGCRGHDGFTSSWFSVADTLRQKVEDAVREHPDYRVVFTGHSLGGALATVAGADLRGNSYDIDVFSYGAPRVGNRAFAEFLTVQTGGTLYRITHTNDIVPRLPPREFGYSHSSPEYWIKSGTLVPVRRRDIVKIEGIDATGGNNQPNIPDITAHLWYFGLIGTCL

SEQ ID NO: 7394 - protein, 269 aa, Thermomyces lanuginosus
EVSQDLFNQFNLFAQYSAAAYCQKNNDAPAGTNITCTGNACPEVEKADATFLYSFKDSGVGDVTGFLALDNTNKQIVLSFRGSRSIENWIGNLRFDLKEINDICSGCRGHAGFTSSWRSVADTLRQKVEDAVREHPDYRVVFTGHSLGGALATVAWADLRGNGYDIDVFSYGAPRVGNRAFAEFLTVQQGGTLYRITHTNDIVPRLPPREFGYSHSSPEYWIKSGTLVPVTRNDIVKIEGIDATGGNNQPNIPDIPAHLWYFGRIGTCL

SEQ ID NO: 7395 - protein, 269 aa, Thermomyces lanuginosus
EVSQDLFNQFRLFAQYSAAAYCGKNNDAPAGTQITCTGNACPEVEKADATFLYSFEDSGVGDVTGFLALDNTNKLIVLSFRGSRSIENWITNLNFDLKEINDICSGCRGHDGFTSSWRSVADTLRQKVEDAVREHPDYRVVFTGHSLGGALATVAGADLRGNAYDIDVFSYGAPRIGNRAFAEFLTVQTGGTLYRITHTNDIVPRLPPREFGYSHSSPEYWIKSGTLVPVRRRDIVKIEGIDATGGNNQPNIPSIPAHLWYFGLIGTCL

SEQ ID NO: 7396 - protein, 269 aa, Thermomyces lanuginosus
EVSQDLFNQFNLFAQYSAAAYCGKNNDAPAGTKITCTGNACPEVEKADATLLYSFKDSGVGDVTGFLARDNTNKLIVLSFRGSRSIENWIGNLNFDLEEINDICSGCRGHDGFTSSWRSVADTLRQKVEDAVREHPDYRVVFTGHSLGGALATVAGADLRGNGYDIDVFSYGAPRVGNRAFAEFLTVQTGGTLYRITHTNDIVPRLPPREFGYSHSSPEYWIKFGTLVPVRRRDIVKIEGIDATGGNNQPNIPDIPAHLWYFGLIGTCL

SEQ ID NO: 7397 - protein, 269 aa, Thermomyces lanuginosus
EVSQDLFNQFNLFAQYSAAAYCGKNNRAPAGTQITCTGNACPEVEKADATFLYSFEDSGVGDVTGFLALDNTNKLIVLSFRGSRSIENWIANLSFDLKEINDICSGCRGHAGFTSSWRSVADTLRQKVEDAVREHPDYRVVFTGHSLGGALATVAGADLRGNGYDIDVFSYGAPRVGNRAFAEFLTVQTGGTLYRITHTNDIVPRLPPREFGYSHSSPEYWIKSGTLVPVRRRDIVKIEGIDATGGNNQPNIPDITAHLWYFGLIGTCL

SEQ ID NO: 7398 - protein, 269 aa, Thermomyces lanuginosus
EVSQDLFNQFNLFAQYSAAAYCQKNNQAPAGTNITCTGNACPEVEKADATTLYSFEDMGVGDVTGFLALDNTNKRIVLSFRGSRSIENWIGNLNFDLKEINDICSGCRGHDGFTSSWRSVADTLRQKVEAAVREHPDYRVVFTGHSLGGALATVAGADLRGNGYDIDVFSYGAPRVGNRAFAEFLTTQTGGTLYRITHTNDIVPRLPPREFGYSHSSPEYWIKSGTLVPVTRNDIVKIEGIDATGGNNQPNIPDIPAHLWYFGRIGTCL

SEQ ID NO: 7399 - protein, 269 aa, Thermomyces lanuginosus
EVSQDLFNQFNLFAQYSAAAYCGKNNDAPAGTNITCTGNICPEVEKADATFLYSFRNSGVGDVTGFLALDNTNKLIVLSFRGSRSIENWIGNLNFDLKEINDICSGCRGHDGFTSSWFSVADTLRQKVEDAVREHPDYRVVFTGHSLGGALATVAGADLRGNSYDIDVFSYGAPRVGNRAFAEFLTVQTGGTLYRITHTNDIVPRLPPREFGYSHSSPEYWIKSGTLVPVRRRDIVKIEGIDATGGNNQPNIPDITAHLWYFGLIGTCL

SEQ ID NO: 7400 - protein, 269 aa, Thermomyces lanuginosus
EVSQDLFNQFRLFAQYSAAAYCGKNNDAPAGTQITCTGNACPEVEKADATFLYSFEDSGVGDVTGFLALDNTNKLIVLSFRGSRSIENWITNLNFDLKEINDICSGCRGHDGFTSSWRSVADTLRQKVEDAVREHPDYRVVFTGHSLGGALATVAGADLRGNKYDIDVFSYGAPRQGNRAFAEFLTVQTGGTLYRITHTNDIVPRLPPREFGYSHSSPEYWIKSGTLVPVRRRDIVKIEGIDATGGNNQPNIPSIPAHLWYFGLIGTCL

SEQ ID NO: 7401 - protein, 269 aa, Thermomyces lanuginosus
EVSQDLFNQFNLFAQYSAAAYCGKNNDAPAGTNITCTGNACPEVEKAWATFLYSFEDMGVGDVTGFLALDNTNKLIVLSFRGSRSIENWIGNLNFDLKEINDICSGCRGHDGFTSSWRSVADTLRQKVEAAVREHPQYRVVFTGHSLGGALATVAGADLRGNPYDIDVFSYGAPRVGNRAFAEFLTVQTGGTLYRITHTNDIVPRLPPREFGYSHSSPEYWIKSGTMVPVTRQDIVKIEGIDATGGNNQPNIPDIPAHLWYFGRIGTCL

SEQ ID NO: 7402 - protein, 269 aa, Thermomyces lanuginosus
EVSQDLFNQFNLFAQYSAAAYCGKNNDAPAGTKITCTGNACPEVEKADATLLYSFKDSGVGDVTGFLARDNTNKLIVLSFRGSRSIENWIGNLNFDLEEINDICSGCRGHDGFTSSWRSVADTLRQKVEDAVREHPDYRVVFTGHSLGGALATVAGADLRGNGYDIDVFSYGAPRVGNRAFAEFLTVQTGGTLYRITYTNDIVPRLPPREFGYSHSSPEYWIKSGTLVPVRRRDIVKIEGIDATGGNNQPNIPDIPAHLWYFGLIGTCL

SEQ ID NO: 7403 - protein, 269 aa, Thermomyces lanuginosus
EVSQDLFNQFNLFAQYSAAAYCGKNNRAPAGTNITCTANACPEVEKADATFLYSFEDSGVGDVTGFLALDNTNKLIVLSFRGSRSIENWIGNLNFELKEINDICSGCRGHAGFTSSWRSVADTLRQKVEDAVREHPDYRVVFTGHSLGGALATVAGADLRGNGYDIDVFSYGAPRVGNRAFAEFLTVQTGGTLYRITHTNDIVPRLPPREFGYSHSSPEYWIKSGTLVPVRRRDIVKIEGIDATGGNNQPNIPSITAHLWYFGLIGTCL

SEQ ID NO: 7404 - protein, 269 aa, Thermomyces lanuginosus
EVSQDLFNQFNLFAQYSAAAYCGKNNDAPAGTKITCTGNACPEVEKADATILYSFKDSGVGDVTGFLARDNTNKLIVLSFRGSRSIENWIGNLNFDLEEINDICSGCRGHDGFTSSWRSVADTLRQKVEDAVREHPDYRVVFTGHSLGGALATVAGADLRGNGYDIDVFSYGAPRVGNRAFAEFLTVQTGGTLYRITYTNDIVPRLPPREFGYSHSSPEYWIKSGTLVPVRRRDIVKIEGIDATGGNNQPNIPDIPAHLWYFGLIGTCL

SEQ ID NO: 7405 - protein, 269 aa, Thermomyces lanuginosus
EVSQDLFNQFNLFAQYSKAAYCQKNNDAPAGTNITCTGNACPEVFKADVTFLYSFEDSGVGDVTGFLALDNTNKQIVLSFRGSRSIENWIGNLNFDLKEINDICSGCKGHDGFTSSWRSVADTLRQKVEDAVREHPDYRVVFTGHSLGGALATVAGADLRGNGYDIDVFSYGAPRVGNRAFAEFLTTQDGGTLYRITHTNDIVPRLPPREFGYSHSSPEYWIKSGTLVPVTRNDIVKIEGIDATGGNNQPNIPDIPAHLWYFGLIGTCL

SEQ ID NO: 7406 - protein, 269 aa, Thermomyces lanuginosus
EVSQDLFNQFNLFAQYSKAAYCGANNDAPAGTNITCTGNACPEVEKADATFLYSFEDSGVGDVTGFLALDNTNKQIILSFRGSRSIENWIGNLRFDLKEINDICSGCRGHDGFTSSWRSVADTLRQKVEAAVREHPDYRVVFTGHSLGGALATIAWADLRGNGYDIDVFSYGAPRVGNRAFAEFLTVQTGGTLYRITHTNDIVPRLPPREFGYSHSSPEYWIKSGTLVPVTRNDIVKIEGIDATGGNNQPNIPDIPAHLWYFGLIGTCL

SEQ ID NO: 7407 - protein, 269 aa, Thermomyces lanuginosus
EVSQDLFNQFNLFAQYSKAAYCGANNDAPAGTNITCTGNACPEVEKADATFLYSFEDSGVGDVTGFLALDNTNKRIVLSFRGSRSIENWIGNLNFDLKEINDICSGCRGHDGFTSSWRSVADTLRQKVEAAVREHPDYRVVFTGHSLGGALATIAWADLRGNGYDIDVFSYGAPRVGNRAFAEFLTTQTGGTLYRITHTNDIVPRLPPREFGYSHSSPEYWIKSGTLVPVTRNDIVKIEGIDATGGNNQPNIPDIPAHLWYFGRIGTCL

SEQ ID NO: 7408 - protein, 269 aa, Thermomyces lanuginosus
EVSQDLFNQFNLFAQYSAAAYCKKNNDAPAGTNITCTGNACPEVEKADATFLYSFKDSGVGDVTGFLALDNTNKQIVLSFRGSRSIENWIGNLNFDLKEINDICSGCRGHDGFTSSWRSVADTLRQKVEAAVREHPDYRVVFTGHSLGGALATIAGADLRGNGYDIDVFSYGAPRVGNRAFAEFLTNQQGGTLYRITHTNDIVPRLPPREFGYSHSSPEYWIKSGTLVPVTRNDIVKIEGIDATGGNNQPNIPDIPAHLWYFGRIGTCL

SEQ ID NO: 7409 - protein, 269 aa, Thermomyces lanuginosus
EVSQDLFNQFNLFAQYSAAAYCSKNNDAPAGTNITCTGNACPEVEKADATILYSFRDSGVGDVTGFLALDNTNKLIVLSFRGSRSIENWIGNLNFDLIEINDICSGCRGHDGFTSSWFSVADTLRQKVEDAVREHPDYRVVFTGHSLGGALATVAGADLRGNGYDIDVFSYGAPRVGNRAFAEFLTVQTGGTLYRITHTNDIVPRLPPREFGYSHSSPEFWIKSGTLVPVRRRDIVKIEGIDATGGNNQPNIPDIPAHLWYFGLIGTCL

SEQ ID NO: 7410 - protein, 269 aa, Thermomyces lanuginosus
EVSQDLFLQFRLFAQYSAAAYCGKNNDAPAGTQITCTGNACPEVEKADATFLYSFEDSGVGDVTGFLALDNTNKLIVLSFRGSRSIENWITNLNFDLKEINDICSGCRGHDGFTSSWRSVADTLRQKVEDAVREHPDYRVVFTGHSLGGALATVAGADLRGNKYDIDVFSYGAPRVGNRAFAEFLTVQTGGTLYRITHTNDIVPRLPPREFGYSHSSPEYWIKSGTLVPVRRRDIVKIEGIDATGGNNQPNIPSIPAHLWYFGLIGTCL

SEQ ID NO: 7411 - protein, 269 aa, Thermomyces lanuginosus
EVSQDLFNQFNLFAQYSAAAYCQKNNSAPAGTNITCTGNACPEVEKADATFLYSFEDSGVGDVTGFLALDNTNKQIVLSFRGSRSIENWIGNLNFDLKEINDICSGCRGHDGFTSSWRSVADTLRQKVEAAVREHPDYRVVFTGHSLGGALATIAWADLRGNGYDIDVFSYGAPRVGNRAFAEFLTVQQGGTLYRITHTNDIVPRLPPREFGYSHSSPEYWIKSGTLVPVTRNDIVKIEGIDATGGNNQPNIPDIPAHLWYFGRIGTCL

SEQ ID NO: 7412 - protein, 269 aa, Thermomyces lanuginosus
EVSQDLFNQFNLFAQYSKAAYCQKNNDAPAGTNITCTGNACPEVEKADATFLYSFEDSGVGDVTGFLALDNTNKQIILSFRGSRSIENWIGNLNFDLKEINDICSGCRGHDGFTSSWRSVADTLRQKVEAAVREHPDYRVVFTGHSLGGALATIAWADLRGNGYDIDVFSYGAPRVGNRAFAEFLTNQTGGTLYRITHTNDIVPRLPPREFGYSHSSPEYWIKSGTLVPVTRNDIVKIEGIDATGGNNQPNIPDIPAHLWYFGLIGTCL

SEQ ID NO: 7413 - protein, 269 aa, Thermomyces lanuginosus
EVSQDLFNQFNLFAQYSAAAYCGKNNDAPAGTKITCTGNACPEVEKADATILYTFKDSGVGDVTGFLALDNTNKLIVLSFRGSRSIENWIGNLNFDLIEINDICSGCRGHDGFTSSWRSVADTLRQKVEDAVREHPDYRVVFTGHSLGGALATVAGADLRGNGYDIDVFSYGAPRVGNRAFAEFLTVQTGGTLYRITNTNDIVPRLPPREFGYSHSSPEYWIKSGTLVPVRRRDIVKIEGIDATGGNNQPNIPDIPAHLWYFGLIGTCL

SEQ ID NO: 7414 - protein, 269 aa, Thermomyces lanuginosus
EVSQDLFNQFNLFAQYSAAAYCGKNNDAPAGTKITCTGNACPEVEKADATLLYSFKDSGVGDVTGFLARDNTNKLIVLSFRGSRSIENWIGNLNFDLEEINDICSGCRGHDGFTSSWRSVADTLRQKVEDAVREHPDYRVVFAGHSLGGALATVAGADLRGNGYDIDVFSYGAPRVGNRAFAEFLTVQTGGTLYRITHTNDIVPRLPPREFGYSHSSPEYWIKSGTLVPVRRRDIVKIEGIDATGGNNQPNIPDIPAHLWYFGLIGTCL

SEQ ID NO: 7415 - protein, 269 aa, Thermomyces lanuginosus
EVSQDLFNQFNLFAQYSAAAYCGKNNDAPAGTKITCTGNACPEVEKADATILYTFKDSGVGDVTGFLALDNTNKLIVLSFRGSRSIENWIGNLNFDLIEINDICSGCRGHDGFTSSWRSVADTLRQKVEDAVREHPDYRVVFTGHSLGGALATVAGADLRGNGYDIDVFSYGAPRVGNRAFAEFLTVQTGGTLYRITHTNDIVPRLPPREFGYSHSSPEYWIKSGTLVPVRRRDIVKIEGIDATGGNNQPNIPDIPIHLWYFGLIGTCL

SEQ ID NO: 7416 - protein, 269 aa, Thermomyces lanuginosus
EVSQDLFNQFNLFAQYSAAAYCGKNNDAPAGTKITCTGNACPEVEKADATILYSFKDSGVGDVTGFLARDNTNKLIVLSFRGSRSIENWIGNLNFDLEEINDICSGCRGHDGFTSSWRSVADTLRQKVEDAVREHPDYRVVFTGHSLGGALATVAGADLRGNGYDIDVFSYGAPRVGNRAFAEFLTVQTGGTLYRITHTNDIVPRLPPREFGYSHSSPEYWIKSGTLVPVRRRDIVKIEGIDATGGNNQPNIPDIPIHLWYFGLIGTCL

SEQ ID NO: 7417 - protein, 269 aa, Thermomyces lanuginosus
EVSQDLFNQFNLFAQYSKAAYCKANNDAPAGTNITCTGNACPEVEKADATFLYSFEDSGVGDVTGFLALDNTNKQIILSFRGSRSIENWIGNLNFDLKEINDICSGCRGHDGFTSSWRSVADTLRQKVEAAVREHPDYRVVFTGHSLGGALATIAWADLRGNGYDIDVFSYGAPRVGNRAFAEFLTVQTGGTLYRITHTNDIVPRLPPREFGYSHSSPEYWIKSGTLVPVTRNDIVKIEGIDATGGNNQPNIPDIPAHLWYFGLIGTCL

SEQ ID NO: 7418 - protein, 269 aa, Thermomyces lanuginosus
EVSQDLFNQFNLFAQYSAAAYCGKNNRASAGTNITCTGNACPEVEKADATFLYSFEDSGVGDVTGFLALDNTNKLIVLSFRGSCSIENWIGNLNFDLKEINDICSGCRGHAGFTSSWRSVADTLRQKVEDAVREYPDYRVVFTGHSLGGALATVAGADLRGNGYDIDVFSYGAPRVGNRAFAEFLTVQTGGTLYRITHTNDIVPRLPPREFGYSHPSPEYWIKSGTGVPVTRNDIVKIEGIDATGGNNQPNIPDITAHLWYFGLIGTCL

SEQ ID NO: 7419 - protein, 269 aa, Thermomyces lanuginosus
EVSQDLFNQFNLFAQYSAAAYCGKNNDAPAGTQITCTGNACPEVEKADATFLYSFEDSGVGDVTGFLALDNTNKLIVLSFRGSRSIENWITNLNFDLKEINDICSGCRGHDGFISSWRSVADTLRQKVEDAVREHPDYRVVFTGHSLGGALATVAGADLRGNGYDIDVFSYGAPRVGNRAFAEFLTVQTGGTLYRITHTNDIVPRLPPRVFGYSHSSPEYWIKSGTLVPVRRRDIVKIEGIDATGGNNQPNIPKIAAHLWYFGLIGTCL

SEQ ID NO: 7420 - protein, 269 aa, Thermomyces lanuginosus
EVSQDLFNQFNLFAQYSAAAYCGKNNEAPAGTNITCTGNACPEVEKADATFLYSFEDMGVGDVTGFLALDNTNKLIVLSFRGSRSIENWIGNLNFDLKEINDICSGCRGHDGFTSSWRSVADTLRQKVEAAVREHPQYRVVFTGHSLGGALATVAGADLRGNPYDIDVFSYGAPRVGNRAFAEFLTVQTGGTLYRITHTNDIVPRLPPREFGYSHSSPEYWIKSGTMVPVTRQDIVKIEGIDATGGNNQPNIPDIPAHLWYFGRIGTCL

SEQ ID NO: 7421 - protein, 269 aa, Thermomyces lanuginosus
EVSQDLFNQFRLFAQYSAAAYCGKNNDAPAGTQITCTGNACPEVEKADATFLYSFEDSGVGDVTGFLALDNTNKLIVLSFRGSRSIENWITNLNFDLKEINDICSGCRGHDGFTSSWRSVADTLRQKVEDAVREHPDYRVVFTGHSLGGALATVAGADLRGNLYDIDVFSYGAPRIGNRAFAEFLTVQTGGTLYRITHTNDIVPRLPPREFGYSHSSPEYWIKSGTLVPVRRRDIVKIEGIDATGGNNQPNIPSIPAHLWYFGLIGTCL

SEQ ID NO: 7422 - protein, 269 aa, Thermomyces lanuginosus
EVSQDLFNQFNLFAQYSAAAYCGKNNNAPAGTNITCTGNACPEVEKADATILYSFRDSGVGDVTGFLALDNTNKLIVLSFRGSRSIENWIGNLNFDLKEINDICSGCRGHDGFTSSWFSVADTLRQKVEDAVREHPDYRVVFTGHSLGGALATVAGADLRGNGYDIDVFSYGAPRVGNRAFAEFLTVQTGGTLYRITHTNDIVPRLPPREFGYSHSSPEFWIKSGTLVPVRRRDIVKIEGIDAEGGNNQPNIPDIPAHLWYFGLIGTCL

SEQ ID NO: 7423 - protein, 269 aa, Thermomyces lanuginosus
EVSQDLFNQFNLFAQYSAAAYCSKNNDAPAGTNITCTGNACPEVEKADATILYSFRDSGVGDVTGFLALDNTNKLIVLSFRGSRSIENWIGNLNFDLKEINDICSGCRGHDGFTSSWFSVADTLRQKVEDAVREHPDYRVVFTGHSLGGALATVAGADLRGNGYDIDVFSYGAPRVGNRAFAEFLTVQTGGTLYRITHTNDIVPRLPPREFGYSHSSPEFWIKSGTLVPVRRRDIVKIEGIDAEGGNNQPNIPDIPAHLWYFGLIGTCL

SEQ ID NO: 7424 - protein, 269 aa, Thermomyces lanuginosus
EVSQDLFNQFNLFAQYSAAAYCGKNNDAPAGTKITCTGNACPEVEKADATILYTFKDSGVGDVTGFLALDNTNKLIVLSFRGSRSIENWIGNLNFDLIEINDICSGCRGHDGFTSSWRSVADTLRQKVEDAVREHPDYRVVFTGHSLGGALATVAGADLRGNGYDIDVFSYGAPRVGNRAFAEFLTVQTGGTLYRITHTNDIVPRLPPREFGYSHSSPEYWIKSGTLPPVRRRDIVKIEGIDATGGNNQPNIPDIPAHLWYFGLIGTCL

SEQ ID NO: 7425 - protein, 269 aa, Thermomyces lanuginosus
EVSQDLFNQFNLFAQYSAAAYCGKNNRAPAGTNITCTANACPEVEKADATFLYSFEDSGVGDVTGFLALDNTNKLIVLSFRGSRSIENWIGNLNFELKEINDICSGCRGHAGFTSSWRSVADTLRQKVEDAVREHPDYRVVFTGHSLGGALATVAGADLRGNKYDIDVFSYGAPRVGNRAFAEFLTVQTGGTLYRITHTNDIVPRLPPREFGYSHSSPEYWIKSGTLVPVRRRDIVKIEGIDATGGNNQPNIPDITAHLWYFGLIGTCL

SEQ ID NO: 7426 - protein, 269 aa, Thermomyces lanuginosus
EVSRDLFNQFNLFAQYSAAAYCGKNNDAPAGTNITCTGNACPEVEKADATILYSFEDSGVGDVTGFLALDNTNKLIVLSFRGSRSIENWIGNLNFDLKEINDICSGCRGHDGFTSSWRSVADTLRQKVEDAVREHPDYRVVFAGHSLGGALATVAGADLRGDGYDIDVFSYGAPRVGNRAFAEFLTVQTGGTLYRITSTNDIVPRLPPREFGYSHSSPEYWIKSGTLPPVRRRDIVKIEGIDATGGNNQPNIPDIPAHLWYFGLIGTCL

SEQ ID NO: 7427 - protein, 269 aa, Thermomyces lanuginosus
EVSQDLFNQFNLFAQYSAAAYCGKNNDAPAGTKITCTGNACPEVEKADATLLYTFKDSGVGDVTGFLALDNTNKLIVLSFRGSRSIENWIGNLNFDLIEINDICSGCRGHDGFTSSWRSVADTLRQKVEDAVREHPDYRVVFAGHSLGGALATVAGADLRGNGYDIDVFSYGAPRVGNRAFAEFLTVQTGGTLYRITHTNDIVPRLPPREFGYSHSSPEYWIKSGTLVPVRRRDIVKIEGIDATGGNNQPNIPDIPAHLWYFGLIGTCL

SEQ ID NO: 7428 - protein, 269 aa, Thermomyces lanuginosus
EVSQDLFNQFNLFAQYSAAAYCKKNNSAPAGTNITCTGNACPEVEKADATFLYSFKDSGVGDVTGFLALDNTNKGIVLSFRGSRSIENWIGNLNFDLKEINDICSGCRGHDGFTSSWRSVADTLRQKVEAAVREHPDYRVVFTGHSLGGALATVAGADLRGNGYDIDVFSYGAPRVGNRAFAEFLTTQTGGTLYRITHTNDIVPRLPPREFGYSHSSPEYWIKSGTLVPVTRNDIVKIEGIDATGGNNQPNQPDIPAHLWYFGRIGTCL

SEQ ID NO: 7429 - protein, 269 aa, Thermomyces lanuginosus
EVSQDLFNQFRLFAQYSAAAYCGKNNDAPAGTQITCTANACPEVEKADATFLYSFEDSGVGDVTGFLALDNTNKLIVLSFRGSRSIENWITNLNFDLKEINDICSGCRGHDGFTSSWRSVADTLRQKVEDAVREHPDYRVVFTGHSLGGALATVAGADLRGNKYDIDVFSYGAPRVGNRAFAEFLTVQTGGTLYRITHTNDIVPRLPPREFGYSHSSPEYWIKSGTLVPVRRRDIVKIEGIDATGGNNQPNIPSIPAHLWYFGLIGTCL

SEQ ID NO: 7430 - protein, 269 aa, Thermomyces lanuginosus
EVSQDLFNQFNLFAQYSAAAYCGKNNDAPAGTNITCTGNICPEVEKADATLLYSFRNSGVGDVTGFLALDNTNKLIVLSFRGSRSIENWIGNLNFDLIEINDICSGCRGHDGFTSSWFSVADTLRQKVEDAVREHPDYRVVFTGHSLGGALATVAGADLRGNGYDIDVFSYGAPRVGNRAFAEFLTVQTGGTLYRITHTNDIVPRLPPREFGYSHSSPEYWIKSGTLVPVRRRDIVKIEGIDATGGNNQPNIPDIPAHLWYFGLIGTCL

SEQ ID NO: 7431 - protein, 269 aa, Thermomyces lanuginosus
EVSQDLFNQFNLFAQYSAAAYCGKNNRAPAGTNITCTGNACPEVEKADATFLYSFEDSGVGDVTGFLALDNTNKLIVLSFRGSRSIENWLANLNFELKEINDICSGCRGHAGFTSSWRSVADTLRQKVEDAVREHPDYRVVFTGHSLGGALATVAGADLRGNGYDIDVFSYGAPRVGNRAFAEFLTVQTGGTLYRITHTNDIVPRLPPREFGYSHPSPEYWIKSGTGVPVTRNDIVKIEGIDATGGNNQPNIPDITAHLWYFGLIGTCL

SEQ ID NO: 7432 - protein, 269 aa, Thermomyces lanuginosus
EVSRDLFNQFNLFAQYSAAAYCGKNNDAPAGTNITCTGNACPEVEKADATILYSFEDSGVGDVTGFLALDNTNKLIVLSFRGSRSIENWIGNLNFDLKEINDICSGCRGHDGFTSSWRSVADTLRQKVEDAVREHPDYRVVFAGHSLGGALATVAGADLRGDGYDIDVFSYGAPRVGNRAFAEFLTVQTGGTLYRITNTNDIVPRLPPREFGYSHSSPEYWIKSGTLPPVRRRDIVKIEGIDATGGNNQPNIPDIPAHLWYFGLIGTCL

SEQ ID NO: 7433 - protein, 269 aa, Thermomyces lanuginosus
EVSQDLFNQFNLFAQYSAAAYCGKNNDAPAGTKITCTGNACPEVEKADATVLYTFKDSGVGDVTGFLALDNTNKLIVLSFRGSRSIENWIGNLNFDLIEINDICSGCRGHDGFTSSWRSVADTLRQKVEDAVREHPDYRVVFTGHSLGGALATVAGADLRGNGYDIDVFSYGAPRVGNRAFAEFLTVQTGGTLYRITNTNDIVPRLPPREFGYSHSSPEYWIKSGTLVPVRRRDIVKIEGIDATGGNNQPNIPDIPAHLWYFGLIGTCL

SEQ ID NO: 7434 - protein, 269 aa, Synthetic construct
EVSQDLFNQFNLFAQYSAAAYCGKNNDAPAGTNITCTGNACPEVEKADATFLYSFEDSGVGDVTGFLALDNTNKLIVLSFRGSRSIENWIGNLKFLLKKINDICSGCRGHNGFTSSWRSVADTLRQKVEDAVREHPDYRVVFTGHSLGGALATVAGADLRGNGYDIDVFSYGAPRVGNRAFAEFLTVQTGGTLYRITHTNDIVPRLPPREAGYSHSSPEYWIKSPTLVPVTRNDIVKIEGIDATGGNNRPNIPDIPAHLWYFGLIGRCL

SEQ ID NO: 7435 - protein, 269 aa, Synthetic construct
EVSQDLFNQFNLFAQYSAAAYCGKNNDAPAGTNITCTGNACPEVEKADATFLYSFEDSGVGDVTGFLALDNTNKLIVLSFRGSRSIENWIGNLNFHLKEINDICSGCRGHDGFTSSWRSVADTLRQKVEDAVREHPDYRVVFTGHSLGGALATVAGADLRGNGYDIDVFSYGAPRVGNRAFAEFLTVQTGGTLYRITHTNDIVPRLPPREFGYSHSSPEYWIKSGTLVPVTRNDIVKIEGIDATGGNNQPNIPDIPAHLWYFGLIGTCL

SEQ ID NO: 7436 - protein, 269 aa, Thermomyces lanuginosus
EVSQDLFNQFNLFAQYSAAAYCGKNNDAPAGTNITCSGNACPEVEKADATFLYSFEDSGVGDVTGFLALDNTNKLIVLSFRGSRSIENWIGNLNFDLKEINDICSGCRGHDGFTSSWRSVADTLRQKVEDAVREHPDYRVVFTGHSLGGALATVAGADLRGNGYDIDVFSYGAPRVGNRAFAEFLTVQTGGTLYRITHTNDIVPRLPPREFGYSHSSPEYWIKSGTLVPVTRNDIVKIEGIDATGGNNQPNIPDIPAHLWYFGLIGTCL

SEQ ID NO: 7437 - protein, 269 aa, Synthetic construct
EVSQDLFNQFNLFAQYSAAAYCGKNNDAPAGTNITCTGNACPEVEKADATFLYSFEDSGVGDVTGFLALDNTNKLIVLSFRGSRSIENWIGNLNFDLKEINDICSGCRGHDGFTSSWRSVADTLRQKVEDAVREHPDYRVVFTGHSLGGALATVAGADLRGNGYDIDVFSYGAPRVGNRAFAEFLTVQTGGTLYRITHTNDIVPRLPPREFGYSHSSPEYWIKSGTLVPVTRNDIVKIEGIDATGGNNQPNIPDIPAHCWYFGLIGTCL

SEQ ID NO: 7438 - protein, 269 aa, Synthetic construct
EVSQDLFNQFNLFAQYSAAAYCGKNNDAPAGTNITCTGNACPEVEKADATFLYSFEDSGVGDVTGFLALDNTNKLIVLSFRGSRSIENWIGNLNFDLKEINDICSGCRGHDGFTSSWRSVADTLRQKVEDAVREHPDYRVVFTGHSLGGALATVAGADLRGNGYDIDVFSYGAPRVGNRAFAEFLTVQTGGTLYRITHTNDIVPRPPPREFGYSHSSPEYWIKSGTLVPVTRNDIVKIEGIDATGGNNQPNIPDIPAHLWYFGLIGTCL

SEQ ID NO: 7439 - protein, 269 aa, Thermomyces lanuginosus
EVSQDLFNQFNLFAQYSAAAYCGKNNDAPAGTNITCTGNACPEVEKADATFLYSFEDSGVGDVTGFLALDNTNKLIVLSFRGSRSIENWIGNLNFDLKEINDICSGCRGHDGFTSSWRSVADTLRQKVEDAVREHPDYRVVFTGHSLGGALATVAGADLRGNGYDIDVFSYGAPRVGNRAFAEFLTVQTGGTLYRITHTNDIVPRLPPREFGYSHSSPEYWIKSGTLVPVTRNDIVKIEGIDATGGNNQPNIPDIPAHTWYFGLIGTCL

SEQ ID NO: 7440 - protein, 269 aa, Synthetic construct
EVSQDLFNQFNLFAQYSAAAYCGKNNDAPAGTNITCTGNACPEVEKADATFLYSFEDSGVGDVTGFLALDNTNKLIVLSFRGSRSIENWIGNLNFWLKEINDICSGCRGHDGFTSSWRSVADTLRQKVEDAVREHPDYRVVFTGHSLGGALATVAGADLRGNGYDIDVFSYGAPRVGNRAFAEFLTVQTGGTLYRITHTNDIVPRLPPREFGYSHSSPEYWIKSGTLVPVTRNDIVKIEGIDATGGNNQPNIPDIPAHLWYFGLIGTCL

SEQ ID NO: 7441 - protein, 269 aa, Thermomyces lanuginosus
EVSQDLFNQFNLFAQYSAAAYCGKNNDAPAGTNITCTGNACPEVEKADATFLYSFEDSGVGDVTGFLALDNTNKLIVLSFRGSRSIENWIGNLNFDLKEINDICSGCRGHDGFTSSWRSVADTLRQKVEDAVREHPDYRVVFTGHSLGGALATVAGADLRGNGYDIDVFSYGAPRVGNRAFAEFLTVQTGGTLYRITHTNDIVPRLPPRQFGYSHSSPEYWIKSGTLVPVTRNDIVKIEGIDATGGNNQPNIPDIPAHLWYFGLIGTCL

SEQ ID NO: 7442 - protein, 269 aa, Synthetic construct
EVSQDLFNQFNLFAQYSAAAYCGKNNDAPAGTNITCTGNACPEVEKADATFLYSFEDSGVGDVTGFLALDNTNKLIVLSFRGSRSIENWIGNLNFDLKEINDICSGCRGHDGFTSSWRSVADTLRQKVEDAVREHPDYRVVFTGHSLGGALATVAGADLRGNGYDIDVFSYGAPRVGNRAFAEFLTVQTGGTLYRITHTNDIVPRHPPREFGYSHSSPEYWIKSGTLVPVTRNDIVKIEGIDATGGNNQPNIPDIPAHLWYFGLIGTCL

SEQ ID NO: 7443 - protein, 269 aa, Synthetic construct
EVSQDLFNQFNLFAQYSAAAYCGKNNDAPAGTNITCTGNACPEVEKADATFLYSFEDSGVGDVTGFLALDNTNKLIVLSFRGSRSIENWIGNLNFDLKEINDICSGCRGHDGFTSSWRSVADTLRQKVEDAVREHPDYRVVFTGHSLGGALATVAGADLRGNGYDIDVFSYGAPRVGNRAFAEFLTVQTGGTLYRITHTNDIVPRLPPREFGYSHSSPEYWIKSGTLVPVTRNDIVKIEGIDATGGNNQPNIPDIPAHDWYFGLIGTCL

SEQ ID NO: 7444 - protein, 269 aa, Synthetic construct
EVSQDLFNQFNLFAQYSAAAYCGKNNDAPAGTNITCTGNACPEVEKADATFLYSFEDSGVGDVTGFLALDNTNKLIVLSFRGSRSIENWIGNLNFFLKEINDICSGCRGHDGFTSSWRSVADTLRQKVEDAVREHPDYRVVFTGHSLGGALATVAGADLRGNGYDIDVFSYGAPRVGNRAFAEFLTVQTGGTLYRITHTNDIVPRLPPREFGYSHSSPEYWIKSGTLVPVTRNDIVKIEGIDATGGNNQPNIPDIPAHLWYFGLIGTCL

SEQ ID NO: 7445 - protein, 269 aa, Synthetic construct
EVSQDLFNQFNLFAQYSAAAYCGKNNDAPAGTNITCTGNACPEVEKADATFLYSFEDSGVGDVTGFLALDNTNKLIVLSFRGSRSIENWIGNLNFDLKEINDICSGCRGHDGFTSSWRSVADTLRQKVEDAVREHPDYRVVFTGHSLGGALATVAGADLRGNGYDIDVFSYGAPRVGNRAFAEFLTVQTGGTLYRITHTNDIVPRLPPREFGYSHSSPEYWIKSGTLVPVTRNDIVKIEGIDATGGNNQPNIPDIPAHEWYFGLIGTCL

SEQ ID NO: 7446 - protein, 269 aa, Thermomyces lanuginosus
EVSQDLFNQFNLFAQYSAAAYCGKNNDAPAGTNITCTGFACPEVEKADATFLYSFEDSGVGDVTGFLALDNTNKLIVLSFRGSRSIENWIGNLNFDLKEINDICSGCRGHDGFTSSWRSVADTLRQKVEDAVREHPDYRVVFTGHSLGGALATVAGADLRGNGYDIDVFSYGAPRVGNRAFAEFLTVQTGGTLYRITHTNDIVPRLPPREFGYSHSSPEYWIKSGTLVPVTRNDIVKIEGIDATGGNNQPNIPDIPAHLWYFGLIGTCL

SEQ ID NO: 7447 - protein, 269 aa, Synthetic construct
EVSQDLFNQFNLFAQYSAAAYCGKNNDAPAGTNITCTGNACPEVEKADATFLYSFEDSGVGDVTGFLALDNTNKLIVLSFRGSRSIENWIGNLNFDLKEINDICSGCRGHDGFWSSWRSVADTLRQKVEDAVREHPDYRVVFTGHSLGGALATVAGADLRGNGYDIDVFSYGAPRVGNRAFAEFLTVQTGGTLYRITHTNDIVPRLPPREFGYSHSSPEYWIKSGTLVPVTRNDIVKIEGIDATGGNNQPNIPDIPAHLWYFGLIGTCL

SEQ ID NO: 7448 - protein, 269 aa, Thermomyces lanuginosus
EVSQDLFNQFNLFAQYSAAAYCGKNNDAPAGTNITCTGNACPEVEKADATFLYSFEDSGVGDVTGFLALDNTNKLIVLSFRGSRSIENWIGNLNFDLKEINDICSGCRGHDGFTSSWRSVADTLRQKVEDAVREHPDYRVVFTGHSLGGALATVAGADLRGNGYDIDVFSYGAPRVGNRAFAEFLTVQTGGTLYRITHTNDIVPRLPPREFGYSHSSPEYWIKSGTLVPVTRNDIVKIEGIDATGGNNQPNIPDTPAHLWYFGLIGTCL

SEQ ID NO: 7449 - protein, 269 aa, Synthetic construct
EVSQDLFNQFNLFAQYSAAAYCGKNNDAPAGTNITCTGNACPEVEKADATFLYSFEDSGVGDVTGFLALDNTNKLIVLSFRGSRSIENWIGNLNFDLKEINDICSGCRGHDGFTSSWRSVADTLRQKVEDAVREHPDYRVVFTGHSLGGALATVAGADLRGNGYDIDVFSYGAPRVGNRAFAEFLTVQTGGTLYRITHTNDIVPRCPPREFGYSHSSPEYWIKSGTLVPVTRNDIVKIEGIDATGGNNQPNIPDIPAHLWYFGLIGTCL

SEQ ID NO: 7450 - protein, 269 aa, Synthetic construct
EVSQDLFNQFNLFAQYSAAAYCGKNNDAPAGTNITCTGNACPEVEKADATFLYSFYDSGVGDVTGFLALDNTNKLIVLSFRGSRSIENWIGNLNFDLKEINDICSGCRGHDGFTSSWRSVADTLRQKVEDAVREHPDYRVVFTGHSLGGALATVAGADLRGNGYDIDVFSYGAPRVGNRAFAEFLTVQTGGTLYRITHTNDIVPRLPPREFGYSHSSPEYWIKSGTLVPVTRNDIVKIEGIDATGGNNQPNIPDIPAHLWYFGLIGTCL

SEQ ID NO: 7451 - protein, 269 aa, Synthetic construct
EVSQDLFNQFNLFAQYSAAAYCGKNNDAPAGTNITCTGNACPEVEKADATFLYSFEDSGVGDVTGFLALDNTNKLIVLSFRGSRSIENWIGNLNFILKEINDICSGCRGHDGFTSSWRSVADTLRQKVEDAVREHPDYRVVFTGHSLGGALATVAGADLRGNGYDIDVFSYGAPRVGNRAFAEFLTVQTGGTLYRITHTNDIVPRLPPREFGYSHSSPEYWIKSGTLVPVTRNDIVKIEGIDATGGNNQPNIPDIPAHLWYFGLIGTCL

SEQ ID NO: 7452 - protein, 269 aa, Synthetic construct
EVSQDLFNQFNLFAQYSAAAYCGKNNDAPAGTNITCTGNACPEVEKADATFLYSFIDSGVGDVTGFLALDNTNKLIVLSFRGSRSIENWIGNLNFDLKEINDICSGCRGHDGFTSSWRSVADTLRQKVEDAVREHPDYRVVFTGHSLGGALATVAGADLRGNGYDIDVFSYGAPRVGNRAFAEFLTVQTGGTLYRITHTNDIVPRLPPREFGYSHSSPEYWIKSGTLVPVTRNDIVKIEGIDATGGNNQPNIPDIPAHLWYFGLIGTCL

SEQ ID NO: 7453 - protein, 269 aa, Thermomyces lanuginosus
EVSQDLFNQFNLFAQYSAAAYCGKNNDAPAGTNITCTGDACPEVEKADATFLYSFEDSGVGDVTGFLALDNTNKLIVLSFRGSRSIENWIGNLNFDLKEINDICSGCRGHDGFTSSWRSVADTLRQKVEDAVREHPDYRVVFTGHSLGGALATVAGADLRGNGYDIDVFSYGAPRVGNRAFAEFLTVQTGGTLYRITHTNDIVPRLPPREFGYSHSSPEYWIKSGTLVPVTRNDIVKIEGIDATGGNNQPNIPDIPAHLWYFGLIGTCL

SEQ ID NO: 7454 - protein, 269 aa, Synthetic construct
EVSQDLFNQFNLFAQYSAAAYCGKNNDAPAGTNITCTGNACPEVEKADATFLYSFEDSGVGDVTGFLALDNTNKLIVLSFRGSRSIENWIGNLNFDLKEINDICSGCRGHDGFTSSWRSVADTLRQKVEDAVREHPDYRVVFTGHSLGGALATVAGADLRGNGYDIDVFSYGAPRVGNRAFAEFLTVQTGGTLYRITHTNDIVPREPPREFGYSHSSPEYWIKSGTLVPVTRNDIVKIEGIDATGGNNQPNIPDIPAHLWYFGLIGTCL

SEQ ID NO: 7455 - protein, 269 aa, Synthetic construct
EVSQDLFNQFNLFAQYSAAAYCGKNNDAPAGTNITCTGNACPEVEKADATFLYSFEDSGVGDVTGFLALDNTNKLIVLSFRGSRSIENWIGNLNFDLKEINDICSGCRGHDGFTSSWRSVADTLRQKVEDAVREHPDYRVVFTGHSLGGALATVAGADLRGNGYDIDVFSYGAPRVGNRAFAEFLTVQTGGTLYRITHTNDIVPRWPPREFGYSHSSPEYWIKSGTLVPVTRNDIVKIEGIDATGGNNQPNIPDIPAHLWYFGLIGTCL

SEQ ID NO: 7456 - protein, 269 aa, Thermomyces lanuginosus
EVSQDLFNQFNLFAQYSAAAYCGKNNDAPAGTNITCTGNACPEVEKADATFLYSFEDSGVGDVTGFLALDNTNKLIVLSFRGSRSIENWIADLNFDLKEINDICSGCRGHDGFTSSWRSVADTLRQKVEDAVREHPDYRVVFTGHSLGGALATVAGADLRGNGYDIDVFSYGAPRVGNRAFAEFLTVQTGGTLYRITHTNDIVPRLPPREFGYSHSSPEYWIKSGTLVPVTRNDIVKIEGIDATGGNNQPNIPDIPAHLWYFGLIGTCL

SEQ ID NO: 7457 - protein, 269 aa, Synthetic construct
EVSQDLFNQFNLFAQYSAAAYCGKNNDAPAGTNITCTGNACPEVEKADATFLYSFEDSGVGDVTGFLALDNTNKLIVLSFRGSRSIENWIGNLNFDLKEINDICSGCRGHDGFTSSWRSVADTLRQKVEDAVREHPDYRVVFTGHSLGGALATVAGADLRGNGYDIDVFSYGAPRVGNRAFAEFLTVQTGGTLYRITHTNDIVPRLPPREFGYSHSSPEYWIKSGTLVPVTRNDIVKIEGIDATGGNNQPNIPDIPAHHWYFGLIGTCL

SEQ ID NO: 7458 - protein, 269 aa, Synthetic construct
EVSQDLFNQFNLFAQYSAAAYCGKNNDAPAGTNITCTGNACPEVEKADATFLYSFGDSGVGDVTGFLALDNTNKLIVLSFRGSRSIENWIGNLNFDLKEINDICSGCRGHDGFTSSWRSVADTLRQKVEDAVREHPDYRVVFTGHSLGGALATVAGADLRGNGYDIDVFSYGAPRVGNRAFAEFLTVQTGGTLYRITHTNDIVPRLPPREFGYSHSSPEYWIKSGTLVPVTRNDIVKIEGIDATGGNNQPNIPDIPAHLWYFGLIGTCL

SEQ ID NO: 7459 - protein, 269 aa, Synthetic construct
EVSQDLFNQFNLFAQYSAAAYCGKNNDAPAGTNITCTGNACPEVEKADATFLYSFPDSGVGDVTGFLALDNTNKLIVLSFRGSRSIENWIGNLNFDLKEINDICSGCRGHDGFTSSWRSVADTLRQKVEDAVREHPDYRVVFTGHSLGGALATVAGADLRGNGYDIDVFSYGAPRVGNRAFAEFLTVQTGGTLYRITHTNDIVPRLPPREFGYSHSSPEYWIKSGTLVPVTRNDIVKIEGIDATGGNNQPNIPDIPAHLWYFGLIGTCL

SEQ ID NO: 7460 - protein, 269 aa, Synthetic construct
EVSQDLFNQFNLFAQYSAAAYCGKNNDAPAGTNITCTGNACPEVEKADATFLYSFEDSGVGDVTGFLALDNTNKLIVLSFRGSRSIENWIGNLNFDLKEINDICSGCRGHDGFTSSWRSVADTLRQKVEDAVREHPDYRVVFTGHSLGGALATVAGADLRGNGYDIDVFSYGAPRVGNRAFAEFLTVQTGGTLYRITHTNDIVPRIPPREFGYSHSSPEYWIKSGTLVPVTRNDIVKIEGIDATGGNNQPNIPDIPAHLWYFGLIGTCL

SEQ ID NO: 7461 - protein, 269 aa, Thermomyces lanuginosus
EVSQDLFNQFNLFAQYSAAAYCGKNNDAPAGTNITCTGAACPEVEKADATFLYSFEDSGVGDVTGFLALDNTNKLIVLSFRGSRSIENWIGNLNFDLKEINDICSGCRGHDGFTSSWRSVADTLRQKVEDAVREHPDYRVVFTGHSLGGALATVAGADLRGNGYDIDVFSYGAPRVGNRAFAEFLTVQTGGTLYRITHTNDIVPRLPPREFGYSHSSPEYWIKSGTLVPVTRNDIVKIEGIDATGGNNQPNIPDIPAHLWYFGLIGTCL

SEQ ID NO: 7462 - protein, 269 aa, Synthetic construct
EVSQDLFNQFNLFAQYSAAAYCGKNNDAPAGTNITCTGNACPEVEKADATFLYSFEDSGVGDVTGFLALDNTNKLIVLSFRGSRSIENWIGNLNFDLKEINDICSGCRGHDGFTSSWRSVADTLRQKVEDAVREHPDYRVVFTGHSLGGALATVAGADLRGNGYDIDVFSYGAPRVGNRAFAEFLTVQTGGTLYRITHTNDIVPRKPPREFGYSHSSPEYWIKSGTLVPVTRNDIVKIEGIDATGGNNQPNIPDIPAHLWYFGLIGTCL

SEQ ID NO: 7463 - protein, 269 aa, Thermomyces lanuginosus
EVSQDLFNQFNLFAQYSAAAYCGKNNDAPAGTNITCNGNACPEVEKADATFLYSFEDSGVGDVTGFLALDNTNKLIVLSFRGSRSIENWIGNLNFDLKEINDICSGCRGHDGFTSSWRSVADTLRQKVEDAVREHPDYRVVFTGHSLGGALATVAGADLRGNGYDIDVFSYGAPRVGNRAFAEFLTVQTGGTLYRITHTNDIVPRLPPREFGYSHSSPEYWIKSGTLVPVTRNDIVKIEGIDATGGNNQPNIPDIPAHLWYFGLIGTCL

SEQ ID NO: 7464 - protein, 269 aa, Synthetic construct
EVSQDLFNQFNLFAQYSAAAYCGKNNDAPAGTNITCTGNACPEVEKADATFLYSFEDSGVGDVTGFLALDNTNKLIVLSFRGSRSIENWIVNLNFDLKEINDICSGCRGHDGFWSSWRSVADTLRQKVEDAVREHPDYRVVFTGHSLGGALATVAGADLRGNGYDIDVFSYGAPRVGNRAFAEFLTVQTGGTLYRITHTNDIVPRLPPREFGYSHSSPEYWIKSGTLVPVTRNDIVKIEGIDATGGNNQPNIPDIPAHLWYFGLIGTCL

SEQ ID NO: 7465 - protein, 269 aa, Synthetic construct
EVSQDLFNQFNLFAQYSAAAYCGKNNDAPAGTNITCTGNACPEVEKADATFLYSFEDSGVGDVTGFLALDNTNKLIVLSFRGSRSIENWIGNLNFDLKEINDICSGCRGHDGFTSSWRSVADTLRQKVEDAVREHPDYRVVFTGHSLGGALATVAGADLRGNGYDIDVFSYGAPRVGNRAFAEFLTVQTGGTLYRITHTNDIVPRDPPREFGYSHSSPEYWIKSGTLVPVTRNDIVKIEGIDATGGNNQPNIPDIPAHLWYFGLIGTCL

SEQ ID NO: 7466 - protein, 269 aa, Synthetic construct
EVSQDLFNQFNLFAQYSAAAYCGKNNDAPAGTNITCTGNACPEVEKADATFLYSFCDSGVGDVTGFLALDNTNKLIVLSFRGSRSIENWIGNLNFDLKEINDICSGCRGHDGFTSSWRSVADTLRQKVEDAVREHPDYRVVFTGHSLGGALATVAGADLRGNGYDIDVFSYGAPRVGNRAFAEFLTVQTGGTLYRITHTNDIVPRLPPREFGYSHSSPEYWIKSGTLVPVTRNDIVKIEGIDATGGNNQPNIPDIPAHLWYFGLIGTCL

SEQ ID NO: 7467 - protein, 269 aa, Thermomyces lanuginosus
EVSQDLFNQFNLFAQYSAAAYCGKNNDAPAGTNITCTGNACPEVEKADATFLYSFEDSGVGDVTGFLALDNTNKLIVLSFRGSRSIENWIGNLNFDLKEINDICSGCRGHDGFTSSWRSVADTLRQKVEDAVREHPDYRVVFTGHSLGGALATVAGADLRGNGYDIDVFSYGAPRVGNRAFAEFLTVQTGGTLYRITHTNDIVPRTPPREFGYSHSSPEYWIKSGTLVPVTRNDIVKIEGIDATGGNNQPNIPDIPAHLWYFGLIGTCL

SEQ ID NO: 7468 - protein, 269 aa, Synthetic construct
EVSQDLFNQFNLFAQYSAAAYCGKNNDAPAGTNITCTGNACPEVEKADATFLYSFFDSGVGDVTGFLALDNTNKLIVLSFRGSRSIENWIGNLNFDLKEINDICSGCRGHDGFTSSWRSVADTLRQKVEDAVREHPDYRVVFTGHSLGGALATVAGADLRGNGYDIDVFSYGAPRVGNRAFAEFLTVQTGGTLYRITHTNDIVPRLPPREFGYSHSSPEYWIKSGTLVPVTRNDIVKIEGIDATGGNNQPNIPDIPAHLWYFGLIGTCL

SEQ ID NO: 7469 - protein, 269 aa, Synthetic construct
EVSQDLFNQFNLFAQYSAAAYCGKNNDAPAGTNITCTGNACPEVEKADATFLYSFWDSGVGDVTGFLALDNTNKLIVLSFRGSRSIENWIGNLNFDLKEINDICSGCRGHDGFTSSWRSVADTLRQKVEDAVREHPDYRVVFTGHSLGGALATVAGADLRGNGYDIDVFSYGAPRVGNRAFAEFLTVQTGGTLYRITHTNDIVPRLPPREFGYSHSSPEYWIKSGTLVPVTRNDIVKIEGIDATGGNNQPNIPDIPAHLWYFGLIGTCL

SEQ ID NO: 7470 - protein, 269 aa, Synthetic construct
EVSQDLFNQFNLFAQYSAAAYCGKNNDAPAGTNITCTGNACPEVEKADATFLYSFMDSGVGDVTGFLALDNTNKLIVLSFRGSRSIENWIGNLNFDLKEINDICSGCRGHDGFTSSWRSVADTLRQKVEDAVREHPDYRVVFTGHSLGGALATVAGADLRGNGYDIDVFSYGAPRVGNRAFAEFLTVQTGGTLYRITHTNDIVPRLPPREFGYSHSSPEYWIKSGTLVPVTRNDIVKIEGIDATGGNNQPNIPDIPAHLWYFGLIGTCL

SEQ ID NO: 7471 - protein, 269 aa, Thermomyces lanuginosus
EVSQDLFNQFNLFAQYSAAAYCGKNNDAPAGTNITCTGNACPEVEKADATFLYSFEDSGVGDVTGFLALDNTNKLIVLSFRGSRSIENWIGNLNFDLKEINDICSGCRGHDGFTSSWRSVADTLRQKVEDAVREHPDYRVVFTGHSLGGGLATVAGADLRGNGYDIDVFSYGAPRVGNRAFAEFLTVQTGGTLYRITHTNDIVPRLPPREFGYSHSSPEYWIKSGTLVPVTRNDIVKIEGIDATGGNNQPNIPDIPAHLWYFGLIGTCL

SEQ ID NO: 7472 - protein, 269 aa, Thermomyces lanuginosus
EVSQDLFNQFNLFAQYSAAAYCGKNNDAPAGTNITCTGNACPEVEKADATFLYSFEDSGVGDVTGFLALDNTNKLIVLSFRGSRSIENWIGNLNFDLKEINDICSGCRGHDGFTSSWRSVADTLRQKVEDAVREHPDYRVVFTGHSLGGALATVAGADLRGNGYAIDVFSYGAPRVGNRAFAEFLTVQTGGTLYRITHTNDIVPRLPPREFGYSHSSPEYWIKSGTLVPVTRNDIVKIEGIDATGGNNQPNIPDIPAHLWYFGLIGTCL

SEQ ID NO: 7473 - protein, 269 aa, Synthetic construct
EVSQDLFNQFNLFAQYSAAAYCGKNNDAPAGTNITCTGNACPEVEKADATFLYSFEDSGVGDVTGFLALDNTNKLIVLSFRGSRSIENWIGNLNFDLKEINDICSGCRGHDGFTSSWRSVADTLRQKVEDAVREHPDYRVVFTGHSLGGALATVAGADLRGNGYDIDVFSYGAPRVGNRAFAEFLTVQTGGTLYRITHTNDIVPRQPPREFGYSHSSPEYWIKSGTLVPVTRNDIVKIEGIDATGGNNQPNIPDIPAHLWYFGLIGTCL

SEQ ID NO: 7474 - protein, 269 aa, Synthetic construct
EVSQDLFNQFNLFAQYSAAAYCGKNNDAPAGTNITCTGNACPEVEKADATFLYSFEDSGVGDVTGFLALDNTNKLIVLSFRGSRSIENWIGNLNFDLKEINDICSGCRGHDGFTSSWRSVADTLRQKVEDAVREHPDYRVVFTGHSLGGALATVAGADLRGNGYDIDVFSYGAPRVGNRAFAEFLTVQTGGTLYRITHTNDIVPRLPPREFGYSHSSPEYWIKSGTLVPVTRNDIVKIEGIDATGGNNQPNIPDIPAHPWYFGLIGTCL

SEQ ID NO: 7475 - protein, 269 aa, Thermomyces lanuginosus
EVSQDLFNQFNLFAQYSAAAYCGKNNDAPAGTNITCTGNACPEVEKADATFLYSFEDAGVGDVTGFLALDNTNKLIVLSFRGSRSIENWIGNLNFDLKEINDICSGCRGHDGFTSSWRSVADTLRQKVEDAVREHPDYRVVFTGHSLGGALATVAGADLRGNGYDIDVFSYGAPRVGNRAFAEFLTVQTGGTLYRITHTNDIVPRLPPREFGYSHSSPEYWIKSGTLVPVTRNDIVKIEGIDATGGNNQPNIPDIPAHLWYFGLIGTCL

SEQ ID NO: 7476 - protein, 269 aa, Synthetic construct
EVSQDLFNQFNLFAQYSAAAYCGKNNDAPAGTNITCTGNACPEVEKADATFLYSFEDSGVGDVTGFLALDNTNKLIVLSFRGSRSIENWIGNLNFDLKEINDICSGCRGHDGFTSSWRSVADTLRQKVEDAVREHPDYRVVFTGHSLGGALATVAGADLRGNGYDIDVFSYGAPRVGNRAFAEFLTVQTGGTLYRITHTNDIVPRMPPREFGYSHSSPEYWIKSGTLVPVTRNDIVKIEGIDATGGNNQPNIPDIPAHLWYFGLIGTCL

SEQ ID NO: 7477 - protein, 269 aa, Thermomyces lanuginosus
EVSQDLFNQFNLFAQYSAAAYCGKNNDAPAGTAITCTGNACPEVEKADATFLYSFEDSGVGDVTGFLALDNTNKLIVLSFRGSRSIENWIGNLNFDLKEINDICSGCRGHDGFTSSWRSVADTLRQKVEDAVREHPDYRVVFTGHSLGGALATVAGADLRGNGYDIDVFSYGAPRVGNRAFAEFLTVQTGGTLYRITHTNDIVPRLPPREFGYSHSSPEYWIKSGTLVPVTRNDIVKIEGIDATGGNNQPNIPDIPAHLWYFGLIGTCL

SEQ ID NO: 7478 - protein, 269 aa, Thermomyces lanuginosus
EVSQDLFNQFNLFAQYSAAAYCGKNNDAPAGTNITCVGNACPEVEKADATFLYSFEDSGVGDVTGFLALDNTNKLIVLSFRGSRSIENWIGNLNFDLKEINDICSGCRGHDGFTSSWRSVADTLRQKVEDAVREHPDYRVVFTGHSLGGALATVAGADLRGNGYDIDVFSYGAPRVGNRAFAEFLTVQTGGTLYRITHTNDIVPRLPPREFGYSHSSPEYWIKSGTLVPVTRNDIVKIEGIDATGGNNQPNIPDIPAHLWYFGLIGTCL

SEQ ID NO: 7479 - protein, 269 aa, Synthetic construct
EVSQDLFNQFNLFAQYSAAAYCGKNNDAPAGTNITCTGNACPEVEKADATFLYSFEDSGVGDVTGFLALDNTNKLIVLSFRGSRSIENWIGNLNFMLKEINDICSGCRGHDGFTSSWRSVADTLRQKVEDAVREHPDYRVVFTGHSLGGALATVAGADLRGNGYDIDVFSYGAPRVGNRAFAEFLTVQTGGTLYRITHTNDIVPRLPPREFGYSHSSPEYWIKSGTLVPVTRNDIVKIEGIDATGGNNQPNIPDIPAHLWYFGLIGTCL

SEQ ID NO: 7480 - protein, 269 aa, Thermomyces lanuginosus
EVSQDLFNQFNLFAQYSAAAYCGKNNDAPAGTNITCTGMACPEVEKADATFLYSFEDSGVGDVTGFLALDNTNKLIVLSFRGSRSIENWIGNLNFDLKEINDICSGCRGHDGFTSSWRSVADTLRQKVEDAVREHPDYRVVFTGHSLGGALATVAGADLRGNGYDIDVFSYGAPRVGNRAFAEFLTVQTGGTLYRITHTNDIVPRLPPREFGYSHSSPEYWIKSGTLVPVTRNDIVKIEGIDATGGNNQPNIPDIPAHLWYFGLIGTCL

SEQ ID NO: 7481 - protein, 269 aa, Synthetic construct
EVSQDLFNQFNLFAQYSAAAYCGKNNDAPAGTNITCTGNACPEVEKADATFLYSFEGSGVGDVTGFLALDNTNKLIVLSFRGSRSIENWIGNLKFLLKEINDICSGCRGHDGFTSSWRSVADTLRQKVEDAVREHPDYRVVFTGHSLGGALATVAGADLRGNGYDIDVFSYGAPRVGNRAFAEFLTVQTGGTLYRITHTNDIVPRLPPREFGYSHSSPEYWIKSGTLVPVTRNDIVKIEGIDATGGNNQPNIPDITAHLWYFGLIGTCL

SEQ ID NO: 7482 - protein, 269 aa, Synthetic construct
EVSQDLFNQFNLFAQYSAAAYCGKNNDAPAGTNITCTGNACPEVEKADATFLYSFEDSGVGDVTGFLALDNTNKLIVLSFRGSRSIENWIGNLNFCLKEINDICSGCRGHDGFTSSWRSVADTLRQKVEDAVREHPDYRVVFTGHSLGGALATVAGADLRGNGYDIDVFSYGAPRVGNRAFAEFLTVQTGGTLYRITHTNDIVPRLPPREFGYSHSSPEYWIKSGTLVPVTRNDIVKIEGIDATGGNNQPNIPDIPAHLWYFGLIGTCL

SEQ ID NO: 7483 - protein, 269 aa, Synthetic construct
EVSQDLFNQFNLFAQYSAAAYCGKNNDAPAGTNITCTGNACPEVEKADATFLYSFEDSGVGDVTGFLALDNTNKLIVLSFRGSRSIENWIGNLNFYLKEINDICSGCRGHDGFTSSWRSVADTLRQKVEDAVREHPDYRVVFTGHSLGGALATVAGADLRGNGYDIDVFSYGAPRVGNRAFAEFLTVQTGGTLYRITHTNDIVPRLPPREFGYSHSSPEYWIKSGTLVPVTRNDIVKIEGIDATGGNNQPNIPDIPAHLWYFGLIGTCL

SEQ ID NO: 7484 - protein, 269 aa, Synthetic construct
EVSQDLFNQFNLFAQYSAAAYCGKNNDAPAGTNITCTGNACPEVEKADATFLYSFEDSGVGDVTGFLALDNTNKLIVLSFRGSRSIENWIGNLNFDLKEINDICSGCRGHDGFTSSWRSVADTLRQKVEDAVREHPDYRVVFTGHSLGGALATVAGADLRGNGYDIDVFSYGAPRVGNRAFAEFLTVQTGGTLYRITHTNDIVPRRPPREFGYSHSSPEYWIKSGTLVPVTRNDIVKIEGIDATGGNNQPNIPDIPAHLWYFGLIGTCL

SEQ ID NO: 7485 - protein, 269 aa, Bacillus sp.
EVSQDLFNQFNLFAQYSAAAYCGKNNDAPAGTNITCTGNACPEVEKADATFLYSFEDSGVGDVTGFLALDNTNKLIVLSFRGSRSIENWIGNLNFLLKEINDICSGCRGHDGFTSSWRSVADTLRQKVEDAVREHPDYRVVFTGHSLGGALATVAGADLRGNGYDIDVFSYGAPRVGNRAFAEFLTVQTGGTLYRITHTNDIVPRLPPREFGYSHSSPEYWIKSGTLVPVTRNDIVKIEGIDATGGNNQPNIPDIPAHLWYFGLIGTCL

SEQ ID NO: 7486 - protein, 269 aa, Synthetic construct
EVSQDLFNQFNLFAQYSAAAYCGKNNDAPAGTNITCTGNACPEVEKADATFLYSFEDSGVGDVTGFLALDNTNKLIVLSFRGSRSIENWIGNLNFDLKEINDICSGCRGHDGFTSSWRSVADTLRQKVEDAVREHPDYRVVFTGHSLGGALATVAGADLRGNGYDIDVFSYGAPRVGNRAFAEFLTVQTGGTLYRITHTNDIVPRYPPREFGYSHSSPEYWIKSGTLVPVTRNDIVKIEGIDATGGNNQPNIPDIPAHLWYFGLIGTCL

SEQ ID NO: 7487 - protein, 269 aa, Thermomyces lanuginosus
EVSQDLFNQFNLFAQYSAAAYCGKNNDAPAGTNITCTGNACPEVEKADATFLYSFEDSGVGDVTGFLALDNTNKLIVLSFRGSRSIENWIGNLNFDLKEINDICSGCRGHDGFTSSWRSVADTLRQKVEDAVREHPDYRVVFTGHSLGGALATVAGADLRGNGYDIDVFSYGAPRVGNRAFAEFLTVQTGGTLYRITHTNDIVPRLPPREFGYSHSSPEYWIKSGTLVPVTRNDIVKIEGIDATGGNNQPNIPYIPAHLWYFGLIGTCL

SEQ ID NO: 7488 - protein, 269 aa, Thermomyces lanuginosus
EVSQDLFNQFNLFAQYSAAAYCGKNNDAPAGTNITCTGGACPEVEKADATFLYSFEDSGVGDVTGFLALDNTNKLIVLSFRGSRSIENWIGNLNFDLKEINDICSGCRGHDGFTSSWRSVADTLRQKVEDAVREHPDYRVVFTGHSLGGALATVAGADLRGNGYDIDVFSYGAPRVGNRAFAEFLTVQTGGTLYRITHTNDIVPRLPPREFGYSHSSPEYWIKSGTLVPVTRNDIVKIEGIDATGGNNQPNIPDIPAHLWYFGLIGTCL

SEQ ID NO: 7489 - protein, 269 aa, Thermomyces lanuginosus
EVSQDLFNQFNLFAQYSAAAYCGKNNDAPAGTNITCLGNACPEVEKADATFLYSFEDSGVGDVTGFLALDNTNKLIVLSFRGSRSIENWIGNLNFDLKEINDICSGCRGHDGFTSSWRSVADTLRQKVEDAVREHPDYRVVFTGHSLGGALATVAGADLRGNGYDIDVFSYGAPRVGNRAFAEFLTVQTGGTLYRITHTNDIVPRLPPREFGYSHSSPEYWIKSGTLVPVTRNDIVKIEGIDATGGNNQPNIPDIPAHLWYFGLIGTCL

SEQ ID NO: 7490 - protein, 269 aa, Thermomyces lanuginosus
EVSQDLFNQFNLFAQYSAAAYCGKNNDAPAGTQITCTGNACPEVEKADATFLYSFEDSGVGDVTGFLALDNTNKLIVLSFRGTRSIKNWIANLNFDLKKINDICSGCRGHDGFTSSWRSVADTLRQKVEDAVREHPDYRVVFTGHSLGGALATVAGADLRGNGYDIDVFSYGAPRVGNRAFAEFLTVQTGGTLYRITHTNDIVPRLPPREFGYSHSSPEYWIKSGTLVPVRRRDIVKIEGIDATGGNNRPNIPDIPAHLWYFGLIGTCL

SEQ ID NO: 7491 - protein, 268 aa, Thermomyces lanuginosus
EVSQDLFNQFNLFAQYSAAAYCGKNNDAPAGTNITCTGNACPEVEKADATILYSFEDSGVGDVTGFLALDNTNKLIVLSFRGSRSIENWIGNLNFDLKEINDICSGCRGHDGFTSSWRSVADTLRQKVEDAVREHPDYRVVFTGHSLGGALATVAGADLRGNGYDIDVFSYGAPRVGNRAFAEFLTVQTGGTLYRITNTNDCVPRLPPRQFGYSHSSPEYWIKSGTLPPVRRRDIVKIEGIDATGGNNQPNIDISAHLWYFGLIGTCL

SEQ ID NO: 7492 - protein, 268 aa, Thermomyces lanuginosus
VSQDLFNQFRLFAQYSAAAYCGKNNDAPAGTQITCTANACPEVEKADATFLYSFEDSGVGDVTGFLALDNTNKLIVLSFRGSRSIENWITNLNFDLKEINDICSGCRGHDGFTSSWRSVADTLRQKVEDAVREHPDYRVVFTGHSLGGALATVAGADLRGNPYDIDVFSYGAPRFGNRAFAEFLTVQTGGTLYRITHTNDIVPRLPPREFGYSHSSPEYWIKSGTLVPVRRRDIVKIEGIDATGGNNQPNIPDIPAHLWYFGLIGTCL

SEQ ID NO: 7493 - protein, 268 aa, Thermomyces lanuginosus
VSQDLFNQFNLFAQYSAAAYCGKNNDAPAGTQITCTANACPEVEKADATFLYSFEDSGVGDVTGFLALDNTNKLIVLSFRGSRSIENWITNLNFDLKEINDICSGCRGHDGFTSSWRSVADTLRQKVEDAVREHPDYRVVFTGHSLGGALATVAGADLRGNPYDIDVFSYGAPRFGNRAFAEFLTVQTGGTLYRITHTNDIVPRLPPREFGYSHSSPEYWIKSGTLVPVRRRDIVKIEGIDATGGNNQPNIPSIPAHLWYFGLIGTCL

SEQ ID NO: 7494 - protein, 268 aa, Thermomyces lanuginosus
VSQDLFNQFNLFAQYSAAAYCGKNNKAPAGTNITCTGNACPEVEKADATFLYSFEDSGKGDVTGFLALDNTNKLIVLSFRGSRSVENWIGNLNFDLKEINDICSGCRGHDGFTSSWRSVADTLRQKVEDAVREHPDYRVVFTGHSLGGGLATVAGADLRGNGYDIDVFSYGAPRVGNRAFAEFLTVQTGGTLYRITHTNDIVPRLPPREFGYSHSSPEYWIKSGTGVPVRRRDIVKIEGIDATGGNNQPNIPDIKAHLWYFGLIGTCL

SEQ ID NO: 7495 - protein, 268 aa, Thermomyces lanuginosus
VSQDLFNQFRLFAQYSAAAYCGKNNDAPAGTQITCTGNACPEVEKADATFLYSFEDSGVGDVTGFLALDNTNKLIVLSFRGSRSIENWITNLNFDLKEINDICSGCRGHDGFTSSWRSVADTLRQKVEDAVREHPDYRVVFTGHSLGGALATVAGADLRGNAYDIDVFSYGAPRVGNRAFAEFLTVQTGGTLYRITHTNDIVPRLPPREFGYSHSSPEYWIKSGTLVPVRRRDIVKIEGIDATGANNQPNIPSIPAHLWYFGLIGTCL

SEQ ID NO: 7496 - protein, 268 aa, Thermomyces lanuginosus
VSQDLFNQFNLFAQYSAAAYCGKNNDAPAGTQITCTANACPEVEKADATFLYSFEDSGVGDVTGFLALDNTNKLIVLSFRGSRSIENWITNLNFDLKEINDICSGCRGHAGFTSSWRSVADTLRQKVEDAVREHPDYRVVFTGHSLGGALATVAGADLRGNPYDIDVFSYGAPRFGNRAFAEFLTVQTGGTLYRITHTNDIVPRLPPREFGYSHSSPEYWIKSGTLVPVRRRDIVKIEGIDATGGNNQPNIPDIPAHLWYFGLIGTCL

SEQ ID NO: 7497 - protein, 268 aa, Thermomyces lanuginosus
VSQDLFNQFNLFAQYSAAAYCGKNNDAPAGTNITCTGNACPEVEKADATFLYSFEDSGVGDVTGFLALDNTNKLIVLSFRGSRSIENWIANLNFWLKKINDICSGCRGHDGFTSSWRSVADTLRQKVEDAVREHPDYRVVFTGHSLGGALATVAGADLRGNGYDIDVFSYGAPRVGNRAFAEFLTVQTGGTLYRITHTNDIVPRLPPREFGYSHSSPEYWIKSGTLVPVTRNDIVKIEGIDATGGNNRPNIPDIPAHLWYFGCNPXCL

SEQ ID NO: 7498 - protein, 268 aa, Thermomyces lanuginosus
VSQDLFNQFNLFAQYSAAAYCGKNNDAPAGTQITCTANACPEVEKADATFLYSFEDSGVGDVTGFLALDNTNKLIVLSFRGSRSIENWITNLNFDLKEINDICSGCRGHDGFTSSWRSVADTLRQKVEDAVREHPDYRVVFTGHSLGGALATVAGADLRGNPYDIDVFSYGAPRFGNRAFAEFLTVQTGGTLYRITHTNDIVPRLPPREFGYSHSSPEYWIKSGTFVPVRRRDIVKIEGIDATGGNNQPNIPDIPAHLWYFGLIGTCL

SEQ ID NO: 7499 - protein, 268 aa, Thermomyces lanuginosus
VSQDLFNQFNLFAQYSAAAYCGKNNDAPAGTNITCTGNACPEVEKADATFLYSFEDSGVGDVTGFLALDNTNKLIVLSFRGSRSIENWIANLNFWLKKINDICSGCRGHDGFTSSWRSVADTLRQKVEDAVREHPDYRVVFTGHSLGGALATVAGADLRGNGYDIDVFSYGAPRVGNRAFAEFLTVQTGGTLYRITHTNDIVPRLPPREFGYSHSSPEYWIKSGTLVPVTRNDIVKIEGIDATGGNNRPNIPDIPAHLWYFGGGFXCL

SEQ ID NO: 7500 - protein, 268 aa, Thermomyces lanuginosus
EVSQDLFNQFNLFAQYSAAAYCGKNNDAPAGTNITCTGNACPEVEKADATFLYSFEDSGVGDVTGFLALDNTNKLIVLSFRGSRSIENWIANLNFKLKKINDICSGCRGHDGFTSSWRSVADTLRQKVEDAVREHPDYRVVFTGHSLGGALATVAGADLRGNGYDIDVFSYGAPRVGNRAFAEFLTVQTGGTLYRITHTNDIVPRLPPREFGYSHSSPEYWIKSGTLVPVTRNDIVKIEGIDATGGNNQPNIPDIPAHLWYFQATDAC

SEQ ID NO: 7501 - protein, 268 aa, Thermomyces lanuginosus
EVSQDLFNQFNLFAQYSAAAYCGKNNDAPAGTNITCTGNACPEVEKADATFLYSFEDSGVGDVTGFLALDNTNKLIVLSFRGSRSIENWIGNLNFDLKEINDICSGCRGHDGFTSSWRSVADTLRQKVEDAVREHPDYRVVFTGHSLGGALATVAGADLRGNGYDIDVFSYGAPRVGNRAFAEFLTVQTGGTLYRITHTNDIVPRLPRREFGYSHSSPEYWIKSGTLVPVTRNDIVKIEGIDATGGNNQPNIPDIPAHLWYFGLIGTC

SEQ ID NO: 7502 - protein, 268 aa, Thermomyces lanuginosus
EVSQDLFNQFNLFAQYSAAAYCGKNNDAPAGTNITCTGNACPEVEKADATFLYSFEDSGVGDVTGFLALDNTNKLIVLSFRGSRSIENWIGNLNFDLKEINDICSGCRGHDGFTSSWRSVADTLRQKVEDAVREHPDYRVVFTGHSLGGALATVAGADLRGNGYDIDVFSYGAPRVGNRAFAEFLTAQTGGTLYRITHTNDIVPRLPPREFGYSHSSPEYWIKSGTLVPVTRNDIVKIEGIDATGGNNQPNIPDIPAHLWYFGLIGTC

SEQ ID NO: 7503 - protein, 268 aa, Thermomyces lanuginosus
EVSQDLFNQFNLFAQYSAAAYCGKNNDAPAGTNITCTGNACPEVEKADATFLYSFEDSGVGDVTGFLALDNTNKLIVLSFRGSRSIENWIANLNFSLKKINDICSGCRGHDGFTSSWRSVADTLRQKVEDAVREHPDYRVVFTGHSLGGALATVAGADLRGNGYDIDVFSYGAPRVGNRAFAEFLTVQTGGTLYRITHTNDIVPRLPPREFGYSHSSPEYWIKSGTLVPVTRNDIVKIEGIDATGGNNQPNIPDIPAHLWYFQATDAC

SEQ ID NO: 7504 - protein, 268 aa, Thermomyces lanuginosus
EVSQDLFNQFNLFAQYSAAAYCGKNNDAPAGTNITCTGNACPEVEKADATFLYSFEDSGVGDVTGFLALDNTNKLIVLSFRGSRSIENWIANLNFGLKKINDICSGCRGHDGFTSSWRSVADTLRQKVEDAVREHPDYRVVFTGHSLGGALATVAGADLRGNGYDIDVFSYGAPRVGNRAFAEFLTVQTGGTLYRITHTNDIVPRLPPREFGYSHSSPEYWIKSGTLVPVTRNDIVKIEGIDATGGNNQPNIPDIPAHLWYFQATDAC

SEQ ID NO: 7505 - protein, 268 aa, Thermomyces lanuginosus
EVSQDLFNQFNLFAQYSAAAYCGKNNDAPAGTNITCTGNACPEVEKADATFLYSFEDSGVGDVTGFLALDNTNKLIVLSFRGSRSIENWIANLNFNLKKINDICSGCRGHDGFTSSWRSVADTLRQKVEDAVREHPDYRVVFTGHSLGGALATVAGADLRGNGYDIDVFSYGAPRVGNRAFAEFLTVQTGGTLYRITHTNDIVPRLPPREFGYSHSSPEYWIKSGTLVPVTRNDIVKIEGIDATGGNNQPNIPDIPAHLWYFQATDAC

SEQ ID NO: 7506 - protein, 268 aa, Thermomyces lanuginosus
EVSQDLFNQFNLFAQYSAAAYCGKNNDAPAGTNITCTGNACPEVEKADATFLYSFEDSGVGDVTGFLALDNTNKLIVLSFRGSRSIENWIANLNFELKKINDICSGCRGHDGFTSSWRSVADTLRQKVEDAVREHPDYRVVFTGHSLGGALATVAGADLRGNGYDIDVFSYGAPRVGNRAFAEFLTVQTGGTLYRITHTNDIVPRLPPREFGYSHSSPEYWIKSGTLVPVTRNDIVKIEGIDATGGNNQPNIPDIPAHLWYFQATDAC

SEQ ID NO: 7507 - protein, 268 aa, Thermomyces lanuginosus
EVSQDLFNQFNLFAQYSAAAYCGKNNDAPAGTNITCTGNACPEVEKADATFLYSFEDSGVGDVTGFLALDNTNKLIVLSFRGSRSIENWIANLNFRLKKINDICSGCRGHDGFTSSWRSVADTLRQKVEDAVREHPDYRVVFTGHSLGGALATVAGADLRGNGYDIDVFSYGAPRVGNRAFAEFLTVQTGGTLYRITHTNDIVPRLPPREFGYSHSSPEYWIKSGTLVPVTRNDIVKIEGIDATGGNNQPNIPDIPAHLWYFQATDAC

SEQ ID NO: 7508 - protein, 268 aa, Thermomyces lanuginosus
EVSQDLFNQFNLFAQYSAAAYCGKNNDAPAGTNITCTGNACPEVEKADATFLYSFEDSGVGDVTGFLALDNTNKLIVLSFRGSRSIENWIANLNFWLKKINDICSGCRGHDGFTSSWRSVADTLRQKVEDAVREHPDYRVVFTGHSLGGALATVAGADLRGNGYDIDVFSYGAPRVGNRAFAEFLTVQTGGTLYRITHTNDIVPRLPPREFGYSHSSPEYWIKSGTLVPVTRNDIVKIEGIDATGGNNQPNIPDIPAHLWYFQATDAC

SEQ ID NO: 7509 - protein, 268 aa, Thermomyces lanuginosus
EVSQDLFNQFNLFAQYSAAAYCGKNNDAPAGTNITCTGNACPEVEKADATFLYSFEDSGVGDVTGFLALDNTNKLIVLSFRGSRSIENWIANLNFFLKKINDICSGCRGHDGFTSSWRSVADTLRQKVEDAVREHPDYRVVFTGHSLGGALATVAGADLRGNGYDIDVFSYGAPRVGNRAFAEFLTVQTGGTLYRITHTNDIVPRLPPREFGYSHSSPEYWIKSGTLVPVTRNDIVKIEGIDATGGNNQPNIPDIPAHLWYFQATDAC

SEQ ID NO: 7510 - protein, 268 aa, Thermomyces lanuginosus
EVSQDLFNQFNLFAQYSAAAYCGKNNDAPAGTNITCTGNACPEVEKADATFLYSFEDSGVGDVTGFLALDNTNKLIVLSFRGSRSIENWIANLNFLLKKINDICSGCRGHDGFTSSWRSVADTLRQKVEDAVREHPDYRVVFTGHSLGGALATVAGADLRGNGYDIDVFSYGAPRVGNRAFAEFLTVQTGGTLYRITHTNDIVPRLPPREFGYSHSSPEYWIKSGTLVPVTRNDIVKIEGIDATGGNNQPNIPDIPAHLWYFQATDAC

SEQ ID NO: 7511 - protein, 268 aa, Thermomyces lanuginosus
EVSQDLFNQFNLFAQYSAAAYCGKNNDAPAGTNITCTGNACPEVEKADATFLYSFEDSGVGDVTGFLALDNTNKLIVLSFRGSRSIENWIANLNFQLKKINDICSGCRGHDGFTSSWRSVADTLRQKVEDAVREHPDYRVVFTGHSLGGALATVAGADLRGNGYDIDVFSYGAPRVGNRAFAEFLTVQTGGTLYRITHTNDIVPRLPPREFGYSHSSPEYWIKSGTLVPVTRNDIVKIEGIDATGGNNQPNIPDIPAHLWYFQATDAC

SEQ ID NO: 7512 - protein, 268 aa, Thermomyces lanuginosus
EVSQDLFNQFNLFAQYSAAAYCGKNNDAPAGTNITCTGNACPEVEKADATFLYSFEDSGVGDVTGFLALDNTNKLIVLSFRGSRSIENWIANLNFFLKKINDICSGCRGHDGFTSSWRSVADTLRQKVEDAVREHPDYRVVFTGHSLGGALATVAGADLRGNGYDIDVFSYGAPRVGNRAFAEFLTVQTGGTLYRITHTNDIVPRLPPREFGYSHSSPEYWIKSGTLVPVTRNDIVKIEGIDATGGNNQPNIPDIPAHLWYFQATSAC

SEQ ID NO: 7513 - protein, 268 aa, Thermomyces lanuginosus
EVSQDLFNQFNLFAQYSAAAYCGKNNDAPAGTNITCTGNACPEVEKADATFLYSFEDSGVGDVTGFLALDNTNKLIVLSFRGSRSIENWIANLNFALKKINDICSGCRGHDGFTSSWRSVADTLRQKVEDAVREHPDYRVVFTGHSLGGALATVAGADLRGNGYDIDVFSYGAPRVGNRAFAEFLTVQTGGTLYRITHTNDIVPRLPPREFGYSHSSPEYWIKSGTLVPVTRNDIVKIEGIDATGGNNQPNIPDIPAHLWYFQATDAC

SEQ ID NO: 7514 - protein, 268 aa, Thermomyces lanuginosus
EVSQDLFNQFNLFAQYSAAAYCGKNNDAPAGTNITCTGNACPEVEKADATFLYSFEDSGVGDVTGFLALDNTNKLIVLSFRGSRSIENWIANLNFWLKKINDICSGCRGHDGFTSSWRSVADTLRQKVEDAVREHPDYRVVFTGHSLGGALATVAGADLRGNGYDIDVFSYGAPRVGNRAFAEFLTVQTGGTLYRITHTNDIVPRLPPREFGYSHSSPEYWIKSGTLVPVTRNDIVKIEGIDATGGNNQPNIPDIPAHLWYFQATSAC

SEQ ID NO: 7515 - protein, 268 aa, Thermomyces lanuginosus
EVSQDLFNQFNLFAQYSAAAYCGKNNDAPAGTNITCTGNACPEVEKADATFLYSFEDSGVGDVTGFLALDNTNKLIVLSFRGSWSIENWIGNLNFWLKKINDICSGCRGHDGFTSSWRSVADTLRQKVEDAVREHPDYRVVFTGHSLGGALATVAGADLRGNGYDIDVFSYGAPRVGNRAFAEFLTVQTGGTLYRITHTNDIVPRLPPREFGYSHSSPEYWIKSGTLVPVTRNDIVKIEGIDATGGNNQPNIPDIPAHLWYFQATDAC

SEQ ID NO: 7516 - protein, 267 aa, Fusarium oxysporum
EVSQDLFNQFNLFAQYSAAAYCGKNNDAPAGTNITCTGNACPEVEKADATFLYSFEDSGVGDVTGFLALDNTNKLIVLSFRGSSIENWIANLNFWLKKINDICSGCRGHDGFTSSWRSVADTLRQKVEDAVREHPDYRVVFTGHSLGGALATVAGADLRGNGYDIDVFSYGAPRVGNRAFAEFLTVQTGGTLYRITHTNDIVPRLPPREFGYSHSSPEYWIKSGTLVPVTRNDIVKIEGIDATGGNNQPNIPDIPAHLWYFQATDAC

SEQ ID NO: 7517 - protein, 267 aa, Fusarium oxysporum
EVSQDLFNQFNLFAQYSAAAYCGKNNDAPAGTNITCTGNACPEVEKADATFLYSFEDSGVGDVTGFLALDNTNKLIVLSFRGSRSIENWIANLNFWLKKINDICSGCRGHDGFTSSWRSVADTLRQKVEDAVREHPDYRVVFTGHSLGGALATVAGADLRGNGYDIDVFSYGAPRVGNRAFAEFLTVQTGGTLYRITHTNDIVPRLPPREFGYSHSSPEYWIKSGTLVPVTRNDIVKIEGIDATGGNNQPNIPDIAHLWYFQATDAC

SEQ ID NO: 7518 - protein, 267 aa, Thermomyces lanuginosus
VSQDLFNQFNLFAQYSAAAYCGKNNDAPAGTNITCTGNACPEVEKADATFLYSFEDSGVGDVTGFLALDNTNKLIVLSFRGSRSIENWIANLNFWLKKINDICSGCRGHDGFTSSWRSVADTLRQKVEDAVREHPDYRVVFTGHSLGGALATVAGADLRGNGYDIDVFSYGAPRVGNRAFAEFLTVQTGGTLYRITHTNDIVPRLPPREFGYSHSSPEYWIKSGTLVPVTRNDIVKIEGIDATGGNNQPNIPDIPAHLWYFQATDAC

SEQ ID NO: 7519 - protein, 263 aa, Thermomyces lanuginosus
EVSQDLFNQFNLFAQYSAAAYTGKNNDAPAGTNITCTGNACPEVEKADATFLYSFEDSGVGDVTGFLALDNTNKLIVLSFRGSRSIENWIGNLNFDLKEINDICSGCRGHDGFTSSWRSVADTLRQKVEDAVREHPDYRVVFTGHSLGGALATVAGADLRGNGYDIDVFSYGAPRVGNRAFAEFLTVQTGGTLYRITHTNDIVPRLPPREFGYSHSSPEYWIKSGTLVPVTRNDIVKIEGIDATGGNNQPNIPDIPAHLWYFG

SEQ ID NO: 7520 - protein, 291 aa, Thermomyces lanuginosus
MRSSLVLFFVSAWTALASPIRREVSQDLYNQFKLFAHYSAAAYCGKNNDAPAGTNITCTGNACPEVEKADATFIYSFEDSGVGDVTGFLALDNTNKLIVLSFRGSRSIENWIANLNFDLKEINDICSGCRGHDGFWESWRSVADTLRQKVEDAVREYPDYRVVFTGHSLGGALATVAGADLRGNGYDIDVFSYGAPRVGNRAFAEFLTVQTGGTLYRITHTNDIVPRLPPREFGYSHSSPEYWIKSGTLVPVTRNDIVVIEGIDATGGNNQPNIPDIPAHLWYFGLIGTCL

SEQ ID NO: 7521 - protein, 291 aa, Thermomyces lanuginosus
MRSSLVLFFVSAWTALASPIRREVSQDLYNQFKLFAHYSAAAYCGKNNDAPAGTNITCTGNACPEVEKADATFIYSFEDSGVGDVTGFLALDNTNKLIVLSFRGSRSIENWIANLNFDLKEINDICSGCRGHDGFWNSWRSVADTLRQKVEDAVREYPDYRVVFTGHSLGGALATVAGADLRGNGYDIDVFSYGAPRVGNRAFAEFLTVQTGGTLYRITHTNDIVPRLPPREFGYSHSSPEYWIKSGTLVPVTRNDIVVIEGIDATGGNNQPNIPDIPAHLWYFGLIGTCL

SEQ ID NO: 7522 - protein, 291 aa, Thermomyces lanuginosus
MRSSLVLFFVSAWTALASPIRREVSQDLFNQFNLFAQYSAAAYCGKNNDAPAGTNITCTGNACPEVEKADATFLYSFEDSGVGDVTGFLALDNTNKLIVLSFRGSRSPANWIANLDFIFDEINDICSGCRGHDGFTSSWRSVADTLRQKVEDAVREHPDYRVVFTGHSLGGALATVAGADLRGNGYDIDVFSYGAPRVGNRAFAEFLTVQTGGTLYRITHTNDIVPRLPPREFGYSHSSPEYWIKSGTLVPVRRRDIVKIEGIDATGGNNQPNIPDIPAHLWYFGLIGTCL

SEQ ID NO: 7523 - protein, 291 aa, Thermomyces lanuginosus
MRSSLVLFFVSAWTALASPIRREVSQDLFNQFNLFAQYSAAAYCGKNNDAPAGTNITCTGNACPEVEKADATFLYSFEDTGKGDVTGFLALDNTNKLIVLSFRGSRSVENWIGNLNFDLKEINAICSGCRGHDGFTSSWRSVADTLRQKVEDAVREHPDYRVVFTGHSLGGGLATVAGADLRGNGYDIDVFSYGAPRVGNRAFAEFLTVQTGGTLYRITHTNDIVPRLPPREFGYSHSSPEYWIKSGTGVPVRRRDIVKIEGIDATGGNNQPNIPDIKAHLWYFGLIGTCL

SEQ ID NO: 7524 - protein, 291 aa, Thermomyces lanuginosus
MRSSLVLFFVSAWTALASPIRREVSQDLFNQFNLFAQYSAAAYCGKNNDAPAGTNITCTGNACPEVEKADATFLYSFEDAGSGDVTGFLALDNTNKLIVLSFRGSRSVENWIGNLNFDLKEINDICSGCRGHDGFTSSWRSVADTLRQKVEDAVREHPDYRVVFSGHSLGGGLATVAGADLRGNGYDIDVFSYGAPRVGNRAFAEFLTVQTGGTLYRITHTNDIVPRLPPREFGYSHSSPEYWIKSGTGVPVRRRDIVKIEGIDATGGNNQPNIPDIKAHLWYFGLIGTCL

SEQ ID NO: 7525 - protein, 291 aa, Thermomyces lanuginosus
MRSSLVLFFVSAWTALASPIRREVSQDLFNQFNLFAQYSAAAYCGKNNRAPAGTNITCTANACPEVEKADATFLYSFEDSGVGDVTGFLALDNTNKLIVLSFRGSRSIENWIGNLNFELKEINDICSGCRGHAGFTSSWRSVADTLRQKVEDAVREHPDYRVVFTGHSLGGALATVAGADLRGNKYDIDVFSYGAPRVGNRAFAEFLTVQTGGTLYRITHTNDIVPRLPPREFGYSHSSPEYWIKSGTLVPVRRRDIVKIEGIDATGGNNQPNIPSITAHLWYFGLIGTCL

SEQ ID NO: 7526 - protein, 291 aa, Thermomyces lanuginosus
MRSSLVLFFVSAWTALASPIRREVSQDLFNQFNLFAQYSAAAYCGKNNRAPAGTNITCTGNACPEVEKADATLLYSFQDSGVGDVTGFLALDNTNKLIVLSFRGSRSIENWIADLNFDLQEINDICSGCRGHDGFTSSWRSVADTLRQKVEDAVREHPDYRVVFTGHSLGGALATVAGADLRGNGYDIDVFSYGAPRVGNRAFAEFLTVQTGGTLYRITHTNDIVPRLPPREFGYSHSSPEYWIKSGTLVPVRRRDIVKIEGIDATGGNNQPNIPSIPAHLWYFGLIGTCL

SEQ ID NO: 7527 - protein, 291 aa, Thermomyces lanuginosus
MRSSLVLFFVSAWTALASPIRREVSLDLFNQFNLFAQYSAAAYCGKNNDAPAGTNITCTGNACPTVEIADATFLYSFEDNGSGDVTGFLALDNTNKLIVLSFRGSRSIENWIGNLNFDLKEINDICSGCRGHDGFTSSWRSVADTLRQKVEDAVREHPDYRVVFTGHSLGGALATVAGADLRGNGYDIDVFSYGAPRVGNRAFAEFLTVQTGGTLYRITHTNDIVPRLPPREFGYSHSSPEYWIKSGTLVPVRRRDIVKIEGIDATGGNNLPNIPIIPAHLWYFGLIGTCL

SEQ ID NO: 7528 - protein, 291 aa, Thermomyces lanuginosus
MRSSLVLFFVSAWTALASPIRREVSQDLFNQFNLFAQYSAAAYCGKNNDAPAGTNITCTGNACPEVEKADATFLYSFEDSGVGCVTGFLALDNTNKLIVLSFRTSRSICNWILDLNYTPQEINDICSGCRGHDGFTSSWRSVADTLRQKVEDAVREHPDYRVVFTGHSLGGALATVAGADLRGNGYDIDVFSYGAPRVGNRAFAEFLTVQTGGTLYRITHTNDIVPRLPPREFGYSHSSPEYWIKSGTLVPVTRNDIVKIEGIDATGGNNQPNIPDIPAHLWYFGLIGTCL

SEQ ID NO: 7529 - protein, 291 aa, Thermomyces lanuginosus
MRSSLVLFFVSAWTALASPIRREVSQDLFNQFNLFAQYSAAAYCGKNNRAPAGTNITCTGNACPEVEKADATFLYSFEDNGSGDVTGFLALDNTNKLIVLSFRGSRSVENWIGNLNFDLKEINDICSGCRGHDGFTSSWRSVADTLRQKVEDAVREHPDYRVVFTGHSLGGGLATVAGADLRGNGYDIDVFSYGAPRVGNRAFAEFLTVQTGGTLYRITHTNDIVPRLPPREFGYSHSSPEYWIKSGTGVPVRRRDIVKIEGIDATGGNNQPNIPDIKAHLWYFGLIGTCL

SEQ ID NO: 7530 - protein, 291 aa, Thermomyces lanuginosus
MRSSLVLFFVSAWTALASPIRREVSVDLFNQFNLFAQYSAAAYCGKNNDAPAGTNITCTGNACPEVEKADATFLYSFEDSGKGDVTGFLALDNTNKLIVLSFRGTRSVENWIGNLNFDLKEINDICSGCRGHDGFTSSWRSVADTLRQKVEDAVREHPDYRVVFTGHSLGGGLATVAGADLRGNGYDIDVFSYGAPRVGNRAFAEFLTVQTGGTLYRITHTNDIVPRLPPREFGYSHSSPEYWIKSGTGVPVRRRDIVKIEGIDATGGNNQPNIPDIKAHLWYFGLIGTCL

SEQ ID NO: 7531 - protein, 194 aa, Humicola insolens
QLGAIENDLESGSADACPDAILIFARGSCEPGNMGITVGPALANGLEEHIRNIWIQGVGGPYDAALATNFLPRGTSQANIDEGKRLFHLAHQKCPNTPVVAGGYSQGAALIAAAVSELSGAVKEQVKGVVLFGYTQNLQNRGGIPNYPRERTKVFCNVGDAVCTGTLIITPAHLSYTIEARGEAARFLVDRIRA

SEQ ID NO: 7532 - protein, 194 aa, Humicola insolens
QLGAIQNDLESGSPDTCPDAILIFARGSTEPGNMGITVGPALANGLKSHIPNIWIQGVGGPYDAALATNFLPRGTSQANIDEGKRLFALANQKCPNTPVVAGGYSQGAALIAAAVSELSGAVKEQVKGVALFGYTQNLQNRGGIPNYPRERTKVFCNVGDAVCTGTLIITPAHLSYTIQARGEAARFLRDRIRA

SEQ ID NO: 7533 - protein, 194 aa, Humicola insolens
QLGAIENDLESGSADACPDAILIFARGSIEPGNMGITVGPALANGLEEHIRNIWIQGVGGPYDAALATNFLPRGTSQANIDEGKRLFHLAHQKCPNTPVVAGGYSQGAALIAAAVSELSGAVKEQVKGVVLFGYTQNLQNRGGIPNYPRERTKVFCNVGDAVCTGTLIITPAHLSYTIEARGEAARFLVDRIRA

SEQ ID NO: 7534 - protein, 194 aa, Humicola insolens
QLGAIQNGLESGSPNACPDAILIFARGSTEPGNMGITVGPALANGLKSHIPNIWIQGVGGPYDAALATNFLPRGTSQANIDEGKRLFALANQKCPNTPVVAGGYSQGAALIAAAVSELSGAVKEQVKGVVLFGYTQNLQNRGGIPNYPRERTKVFCNVGDAVCTGTLIITPAHLSYTIQARGEAARFLRDRIRA

SEQ ID NO: 7535 - protein, 194 aa, Humicola insolens
QLGAIENDLESGSADACPDAILIFARGSTEPGNMGITHGPALANGLEEHIRNIWIQGVGGPYDAALATNFLPRGTSQANIDEGKRLFHLAHQKCPNTPVVAGGYSQGAALIAAAVSELSGAVKEQVKGVVLFGYTQNLQNRGGIPNYPRERTKVFCNVGDAVCTGTLIITPAHLSYTIEARGEAARFLVDRIRA

SEQ ID NO: 7536 - protein, 194 aa, Humicola insolens
QLGAIENDLESGSADACPDAILIFARGSMEPGNMGITVGPALANGLEEHIRNIWIQGVGGPYDAALATNFLPRGTSQANIDEGKRLFHLAHQKCPNTPVVAGGYSQGAALIAAAVSELSGAVKEQVKGVVLFGYTQNLQNRGGIPNYPRERTKVFCNVGDAVCTGTLIITPAHLSYTIEARGEAARFLVDRIRA

SEQ ID NO: 7537 - protein, 290 aa, Thermomyces lanuginosus
MRSSLVLFFVSAWTALASPIRREVSQDLFNQFNLFAQYSAAAYCGKNNDAPAGTNITCTGNACPEVEKADATFLYSFEDTGKGDVTGFLALDNTNKLIVLSFRGSRVENWIGNLNFDLKEINAICSGCRGHDGFTSSWRSVADTLRQKVEDAVREHPDYRVVFTGHSLGGGLATVAGADLRGNGYDIDVFSYGAPRVGNRAFAEFLTVQTGGTLYRITHTNDIVPRLPPREFGYSHSSPEYWIKSGTGVPVRRRDIVKIEGIDATGGNNQPNIPDIKAHLWYFGLIGTCL

SEQ ID NO: 7538 - protein, 290 aa, Thermomyces lanuginosus
MRSSLVLFFVSAWTALASPIRREVSQDLFNQFNLFAQYSAAAYCGKNNDAPAGTNITCTGNACPEVEKADATFLYSFRDSGVGDVTGFLALDNTNKLIVLSFRGTRSIENWIADLNFVLKEINDICSGCRGHDGFTSSWFSVADTLRQKVEDAVREHPDYRVVFTGHSLGGALATVAGADLRGNGYDIDVFSYGAPRVGNRAFAEFLTVQTGGTLYRITHTNDIVPRLPPREFGYSHSSPEYWIKSGTLVPVRRRDIVKIEGIDATGGNNQPNIPSIPAHLWYFGLIGTC

SEQ ID NO: 7539 - protein, 192 aa, Humicola insolens
GAIENDLESGSADACPDAILIFARGSTEPGNMGITVGPALANGLEEHIRNIWIQGVGGPYDAALATNFLPRGTSQANIDEGKRLFHLAHQKCPNTPVVAGGYSQGAALIAAAVSELSGAVKEQVKGVALFGYTQNLQNRGGIPNYPRERTKVFCNVGDAVCTGTLIITPAHLSYTIEARGEAARFLVDRIRA

SEQ ID NO: 7540 - protein, 274 aa, Thermomyces lanuginosus
SPIRREVSVDLFNQFNLFAQYSAAAYCGKNNRAPAGTNITCTANACPEVEKADATFLYSFEDSGVGDVTGFLALDNTNKLIVLSFRGSRSIENWITNLNFELKEINDICSGCRGHAGFTSSWRSVADTLRQKVEDAVREHPDYRVVFTGHSLGGALATVAGADLRGNKYDIDVFSYGAPRVGNRAFAEFLTVQTGGTLYRITHTNDIVPRLPPREFGYSHSSPEYWIKSGTLVPVRRRDIVKIEGIDATGGNNQPNIPSITAHLWYFGLIGTCL

SEQ ID NO: 7541 - protein, 274 aa, Thermomyces lanuginosus
SPIRREVSQDLFNQFNLFAQYSAAAYCGRNNDAPAGTNITCTGNACPEVERADATFLYSFEDSGVGDVTGFLALDNTNRLIVLSFRGSRSVENWIGNLNFDLREINDICSGCRGHDGFTSSWRSVADTLRQRVEDAVREHPKYRVVFTGHSLGGGLATVAGADLRGNGYDIDVFSYGAPRVGNRAFAEFLTVQTGGTLYRITHTNDIVPRLPPREFGYSHSSPEYWIRSGTLVPVRRRDIVKIEGIDATGGNNQPNIPDIPAHLWYFGLIGTCL

SEQ ID NO: 7542 - protein, 274 aa, Thermomyces lanuginosus
SPIRREVSQDLFNQFNLFAQYSAAAYCGKNNDAPAGTNITCTGNACPEVEKADATFLYSFRDSGVGDVTGFLALDNTNKLIVLSFRGSRSIENWIADLNFILIEINDICSGCRGHDGFTSSWFSVADTLRQKVEDAVREHPDYRVVFTGHSLGGALATVAGADLRGNGYDIDVFSYGAPRVGNRAFAEFLTVQTGGTLYRITHTNDIVPRLPPREFGYSHSSPEYWIKSGTLVPVRRRDIVKIEGIDATGGNNQPNIPSITAHLWYFGAIGTCL

SEQ ID NO: 7543 - protein, 274 aa, Synthetic construct
SPIRREVSQDLFNQFNLFAQYSAAAYCGKNNDAPAGTNITCTGNACPEVEKADATFLYSFEDSGVGDVTGFLALDNTDKLIVLSFRGSPSIENWIGNLNFDLKEIKDICSGCRGHDGFTSSWRSVADRLRQKVEDAVRDHPDYRVVFTGHSLGGALATVAGADLRGNGYDIDVFSYGAPRVGNRAFAEFLTVQTGGTLYRITHTNDIVPRLPPREFGYSHSSPEYWIKSGTLVPVTRNDIVKIEGIDAPGGNNQPNIPDVPAHLWYFGLIGTCL

SEQ ID NO: 7544 - protein, 274 aa, Thermomyces lanuginosus
SPIRREVSQDLFNQFNLFAQYSAAAYCGKNNDAPAGTNITCTGNACPEVEKADATFLYSFRDSGVGDVTGFLALDNTNKLIVLSFRGSRSIENWIADLEFILIEINDICSGCRGHDGFTSSWFSVADTLRQKVEDAVREHPDYRVVFTGHSLGGALATVAGADLRGNGYDIDVFSYGAPRVGNRAFAEFLTVQTGGTLYRITHTNDIVPRLPPREFGYSHSSPEYWIKSGTLVPVRRRDIVKIEGIDATGGNNQPNIPSIPAHLWYFGAIGTCL

SEQ ID NO: 7545 - protein, 274 aa, Thermomyces lanuginosus
SPIRREVSQDLFNQFNLFAQYSAAAYCGKNNDAPAGTNITCTGNACPEVEKADATFLYSFRDSGVGDVTGFLALDNTNKLIVLSFRGSRSIENWIADLNFILIEINDICSGCRGHDGFTSSWFSVADTLRQKVEDAVREHPDYRVVFTGHSLGGALATVAGADLRGNGYDIDVFSYGAPRVGNRAFAEFLTVQTGGTLYRITHTNDIVPRLPPREFGYSHSSPEYWIKSGTLVPVRRRDIVKIEGIDATGGNNQPNIPGIRAHLWYFGAIGTCL

SEQ ID NO: 7546 - protein, 274 aa, Thermomyces lanuginosus
SPIRREVSQDLFNQFNLFAQYSAAAYCGKNNDAPAGTNITCTGNACPEVEKADATFLYSFRDSGVGDVTGFLALDNTNKLIVLSFRGSRSLENWIADLNFHLQEINDICSGCRGHDGFTSSWFSVADTLRQKVEDAVREHPDYRVVFTGHSLGGALATVAGADLRGNGYDIDVFSYGAPRVGNRAFAEFLTVQTGGTLYRITHTNDIVPRLPPREFGYSHSSPEYWIKSGTLVPVRRRDIVKIEGIDATGGNNQPNIPSIPAHLWYFGAIGTCL

SEQ ID NO: 7547 - protein, 274 aa, Thermomyces lanuginosus
SPIRREVSQDLFNQFNLFAQYSAAAYCGKNNDAPAGTNITCTGNACPEVEKADATFLYSFRDSGVGDVTGFLALDNTNKLIVLSFRGSRSIENWIADLNFILIEINDICSGCRGHDGFTSSWFSVADTLRQKVEDAVREHPDYRVVFTGHSLGGALATVAGADLRGNGYDIDVFSYGAPRVGNRAFAEFLTVQTGGTLYRITHTNDIVPRLPPREFGYSHSSPEYWIKSGTLVPVRRRDIVKIEGIDATGGNNQPNIPSILAHLWYFGAIGTCL

SEQ ID NO: 7548 - protein, 274 aa, Thermomyces lanuginosus
SPIRREVSQDLFNQFNLFAQYSAAAYCGKNNDAPAGTNITCTGNACPEVEKADATFLYSFRDSGVGDVTGFLALDNTNKLIVLSFRGSRSIENWIADLNFILIEINDICSGCRGHDGFTSSWFSVADTLRQKVEDAVREHPDYRVVFTGHSLGGALATVAGADLRGNGYDIDVFSYGAPRVGNRAFAEFLTVQTGGTLYRITHTNDIVPRLPPREFGYSHSSPEYWIKSGTLVPVRRRDIVKIEGIDATGGNNQPNIPTINAHLWYFGAIGTCL

SEQ ID NO: 7549 - protein, 274 aa, Thermomyces lanuginosus
SPIRREVSQDLFNQFNLFAQYSAAAYCGKNNDAPAGTNITCTGNACPEVEKADATFLYSFRDSGVGDVTGFLALDNTNKLIVLSFRGSRSIENWIADLNFILIEINDICSGCRGHDGFTSSWFSVADTLRQKVEDAVREHPDYRVVFTGHSLGGALATVAGADLRGNGYDIDVFSYGAPRVGNRAFAEFLTVQTGGTLYRITHTNDIVPRLPPREFGYSHSSPEYWIKSGTLVPVRRRDIVKIEGIDATGGNNQPNIPGVPAHLWYFGAIGTCL

SEQ ID NO: 7550 - protein, 274 aa, Thermomyces lanuginosus
SPIRREVSQDLFNQFNLFAQYSAAAYCGKNNDAPAGTNITCTANACPEVEKADATFLYSFEDSGVGDVTGFLALDNTNKLIVLSFRGSRSIENWIADLNFILQEINDICSGCRGHAGFTSSWRSVADTLRQKVEDAVREHPDYRVVFTGHSLGGALATVAGADLRGNKYDIDVFSYGAPRVGNRAFAEFLTVQTGGTLYRITHTNDIVPRLPPREFGYSHSSPEYWIKSGTLVPVRRRDIVKIEGIDATGGNNQPNIPSITAHLWYFGLIGTCL

SEQ ID NO: 7551 - protein, 274 aa, Thermomyces lanuginosus
SPIRREVSQDLFNQFNLFAQYSAAAYCGKNNDAPAGTNITCTGNACPEVEKADATFLYSFRDSGVGDVTGFLALDNTNKLIVLSFRGSRSIENWIADLNFILIEINDICSGCRGHDGFTSSWFSVADTLRQKVEDAVREHPDYRVVFTGHSLGGALATVAGADLRGNGYDIDVFSYGAPRVGNRAFAEFLTVQTGGTLYRITHTNDIVPRLPPREFGYSHSSPEYWIKSGTLVPVRRRDIVKIEGIDATGGNNQPNIPSISAHLWYFGAIGTCL

SEQ ID NO: 7552 - protein, 274 aa, Thermomyces lanuginosus
SPIRREVSVDLFNQFNLFAQYSAAAYCGKNNDAPAGTNITCTGNACPEVEKADATFLYSFEDAGSGDVTGFLALDNTNKLIVLSFRGTRSVENWIGNLNFDLKEINDICSGCRGHDGFTSSWRSVADTLRQKVEDAVREHPDYRVVFTGHSLGGGLATVAGADLRGNGYDIDVFSYGAPRVGNRAFAEFLTVQTGGTLYRITHTNDIVPRLPPRKFGYSHSSPEYWIKSGTGVPVRRRDIVKIEGIDATGGNNQPNIPDIKAHLWYFGLIGTCL

SEQ ID NO: 7553 - protein, 274 aa, Thermomyces lanuginosus
SPIRREVSQDLFNQFNLFAQYSAAAYCGKNNDAPAGTNITCTGNACPEVEKADATFLYSFRDSGVGDVTGFLALDNTNKLIVLSFRGSRSIENWIADLNFILIEINDICSGCRGHDGFTSSWFSVADTLRQKVEDAVREHPDYRVVFTGHSLGGALATVAGADLRGNGYDIDVFSYGAPRVGNRAFAEFLTVQTGGTLYRITHTNDIVPRLPPREFGYSHSSPEYWIKSGTLVPVRRRDIVKIEGIDATGGNNQPNIPGLPAHLWYFGAIGTCL

SEQ ID NO: 7554 - protein, 274 aa, Thermomyces lanuginosus
SPIRREVSQDLFNQFNLFAQYSAAAYCGKNNDAPAGTNITCTANACPEVEKADATFLYSFEDSGVGDVTGFLALDNTNKLIVLSFRGTRSLENWIADLNFILQEINDICSGCRGHAGFTSSWRSVADTLRQKVEDAVREHPDYRVVFTGHSLGGALATVAGADLRGNGYDIDVFSYGAPRVGNRAFAEFLTVQTGGTLYRITHTNDIVPRLPPREFGYSHSSPEYWIKSGTLVPVRRRDIVVIEGIDATGGNNQPNIPDIPAHLWYFGLIGTCL

SEQ ID NO: 7555 - protein, 274 aa, Thermomyces lanuginosus
SPIRREVSQDLFNQFNLFAQYSAAAYCGKNNDAPAGTNITCTANACPEVEKADATFLYSFEDSGVGDVTGFLALDNTNKLIVLSFRGSRTIENWIADLNFLLKEINDICSGCRGHAGFTSSWRSVADTLRQKVEDAVREHPDYRVVFTGHSLGGALATVAGADLRGNKYDIDVFSYGAPRVGNRAFAEFLTVQTGGTLYRITHTNDIVPRLPPREFGYSHSSPEYWIKSGTLVPVRRRDIVKIEGIDATGGNNQPNIPSITAHLWYFGLIGTCL

SEQ ID NO: 7556 - protein, 274 aa, Thermomyces lanuginosus
SPIRREVSQDLFNQFNLFAQYSAAAYCGKNNDAPAGTNITCTGNACPEVEKADATFLYSFEDTGKGDVTGFLALDNTNKLIVLSFRGTRSVENWIGNLKFDLKEINDICSGCRGHDGFTSSWRSVADTLRQKVEDAVREHPDYRVVFTGHSLGGGLATVAGADLRGNGYDIDVFSYGAPRVGNRAFAEFLTVQTGGTLYRITHTNDIVPRLPPRVFGYSHSSPEYWIKSGTGVPVRRRDIVKIEGIDATGGNNQPNIPDIKAHLWYFGLIGTCL

SEQ ID NO: 7557 - protein, 274 aa, Thermomyces lanuginosus
SPIRREVSQDLFNQFNLFAQYSAAAYCGKNNDAPAGTNITCTGNACPEVEKADATFLYSFEDSGVGCVTGFLALDNTNKLIVLSFRGTRSICNWILDLNYTPQEINDICSGCRGHDGFTSSWRSVADTLRQKVEDAVREHPDYRVVFTGHSLGGALATVAGADLRGNGYDIDVFSYGAPRVGNRAFAEFLTVQTGGTLYRITHTNDIVPRLPPREFGYSHSSPEYWIKSGTLVPVRRRDIVKIEGIDATGGNNQPNIPDIPAHLWYFGLIGTCL

SEQ ID NO: 7558 - protein, 274 aa, Thermomyces lanuginosus
SPIRREVSQDLFNQFNLFAQYSAAAYCGKNNDAPAGTNITCTGNACPEVEKADATFLYSFEDNGSGDVTGFLALDNTNKLIVLSFRGSRSVENWIGNLNFDLKEINDICSGCRGHDGFTSSWRSVADTLRQKVEDAVREHPDYRVVFTGHSLGGGLATVARADLRGNGYDIDVFSYGAPRVGNRAFAEFLTVQTGGTLYRITHTNDIVPRLPPRKFGYSHSSPEYWIKSGTGVPVRRRDIVKIEGIDATGGNNQPNIPDAKAHLWYFGLIGTCL

SEQ ID NO: 7559 - protein, 274 aa, Thermomyces lanuginosus
SPIRREVSQDLFNQFNLFAQYSAAAYCGKNNDAPAGTNITCTGNACPEVEKADATFLYSFRDSGVGDVTGFLALDNTNKLIVLSFRGSRSIENWIADLNFILIEINDICSGCRGHDGFTSSWFSVADTLRQKVEDAVREHPDYRVVFTGHSLGGALATVAGADLRGNGYDIDVFSYGAPRVGNRAFAEFLTVQTGGTLYRITHTNDIVPRLPPREFGYSHSSPEYWIKSGTLVPVRRRDIVKIEGIDATGGNNQPNIPSVPAHLWYFGAIGTCL

SEQ ID NO: 7560 - protein, 274 aa, Thermomyces lanuginosus
SPIRREVSQDLFNQFNLFAQYSAAAYCGKNNDAPAGTNITCTGNACPEVEKADATFLYSFRDSGVGDVTGFLALDNTNKLIVLSFRGSRSIENWIADLNFILIEINDICSGCRGHDGFTSSWFSVADTLRQKVEDAVREHPDYRVVFTGHSLGGALATVAGADLRGNGYDIDVFSYGAPRVGNRAFAEFLTVQTGGTLYRITHTNDIVPRLPPREFGYSHSSPEYWIKSGTLVPVRRRDIVKIEGIDATGGNNQPNIPSIRAHLWYFGAIGTCL

SEQ ID NO: 7561 - protein, 274 aa, Thermomyces lanuginosus
SPIRREVSQDLFNQFNLFAQYSAAAYCGKNNDAPAGTNITCTGNACPEVEKADATFLYSFRDSGVGDVTGFLALDNTNKLIVLSFRGSRSIENWIADLNFILIEINDICSGCRGHDGFTSSWFSVADTLRQKVEDAVREHPDYRVVFTGHSLGGALATVAGADLRGNGYDIDVFSYGAPRVGNRAFAEFLTVQTGGTLYRITHTNDIVPRLPPREFGYSHSSPEYWIKSGTLVPVRRRDIVKIEGIDATGGNNQPNIPAIYAHLWYFGAIGTCL

SEQ ID NO: 7562 - protein, 274 aa, Thermomyces lanuginosus
SPIRREVSQDLFNQFNLFAQYSAAAYCGKNNDAPAGTNITCTGNACPEVEKADATFLYSFRDSGVGDVTGFLALDNTNKLIVLSFRGSRSIENWIADLNFILIEINDICSGCRGHDGFTSSWFSVADTLRQKVEDAVREHPDYRVVFTGHSLGGALATVAGADLRGNGYDIDVFSYGAPRVGNRAFAEFLTVQTGGTLYRITHTNDIVPRLPPREFGYSHSSPEYWIKSGTLVPVRRRDIVKIEGIDATGGNNQPNIPSIGAHLWYFGAIGTCL

SEQ ID NO: 7563 - protein, 274 aa, Thermomyces lanuginosus
SPIRREVSQDLFNQFNLFAQYSAAAYCGKNNDAPAGTNITCTGNACPEVEKADATFLYSFRDSGVGDVTGFLALDNTNKLIVLSFRGSRSIENWIADLNFILIEINDICSGCRGHDGFTSSWFSVADTLRQKVEDAVREHPDYRVVFTGHSLGGALATVAGADLRGNGYDIDVFSYGAPRVGNRAFAEFLTVQTGGTLYRITHTNDIVPRLPPREFGYSHSSPEYWIKSGTLVPVRRRDIVKIEGIDATGGNNQPNIPLISAHLWYFGAIGTCL

SEQ ID NO: 7564 - protein, 274 aa, Thermomyces lanuginosus
SPIRREVSQDLFNQFNLFAQYSAAAYCGKNNDAPAGTNITCTANACPEVEKADATFLYSFEDSGVGDVTGFLALDNTNKLIVLSFRGSRSIENWIADLNFLLQEINDICSGCRGHAGFTSSWRSVADTLRQKVEDAVREHPDYRVVFTGHSLGGALATVAGADLRGNKYDIDVFSYGAPRVGNRAFAEFLTVQTGGTLYRITHTNDIVPRLPPREFGYSHSSPEYWIKSGTLVPVRRRDIVKIEGIDATGGNNQPNIPSITAHLWYFGLIGTCL

SEQ ID NO: 7565 - protein, 274 aa, Thermomyces lanuginosus
SPIRREVSQDLFNQFNLFAQYSAAAYCGKNNRAPAGTNITCTANACPEVEKADATFLYSFEDSGVGDVTGFLALDNTNKLIVLSFRGSRSIENWIADLNFILQEINDICSGCRGHDGFTSSWRSVADTLRQKVEDAVREHPDYRVVFTGHSLGGALATVAGADLRGNKYDIDVFSYGAPRVGNRAFAEFLTVQTGGTLYRITHTNDIVPRLPPREFGYSHSSPEYWIKSGTLVPVRRRDIVKIEGIDATGGNNQPNIPSITAHLWYFGLIGTCL

SEQ ID NO: 7566 - protein, 274 aa, Thermomyces lanuginosus
SPIRREVSQDLFNQFNLFAQYSAAAYCGKNNDAPAGTNITCTGNACPEVEKADATFLYSFEDSGVGDVTGFLALDNTNKLIVLSFRGSRSPANWIANLDFIFDEINDICSGCRGHDGFTSSWRSVADTLRQKVEDAVREHPDYRVVFTGHSLGGALATVAGADLRGNGYDIDVFSYGAPRVGNRAFAEFLTVQTGGTLYRITHTNDIVPRLPPREFGYSHSSPEYWIKSGTLVPVTRNDIVKIEGIDATGGNNQPNIPDIPAHLWYFGLIGTCL

SEQ ID NO: 7567 - protein, 274 aa, Thermomyces lanuginosus
SPIRREVSQDLFNQFNLFAQYSAAAYCGKNNDAPAGTNITCTGNACPEVEKADATFLYSFRDSGVGDVTGFLALDNTNKLIVLSFRGSRSIENWIADLNFILIEINDICSGCRGHDGFTSSWFSVADTLRQKVEDAVREHPDYRVVFTGHSLGGALATVAGADLRGNGYDIDVFSYGAPRVGNRAFAEFLTVQTGGTLYRITHTNDIVPRLPPREFGYSHSSPEYWIKSGTLVPVRRRDIVKIEGIDATGGNNQPNIPSIQAHLWYFGAIGTCL

SEQ ID NO: 7568 - protein, 274 aa, Synthetic construct
SPPRRPVSQDLFNQFNLFAQYSAAAYCGKNNDAPAGTNITCTGNACPEVEKADATFLYSFEDSGVGDVTGFLALDNTNKLIVLSFRGSRSIENWFGNLNFLLKKINDICSGCRGHDGFTSSWRSVADTLRQKVEDAVREHPDYRVVFTGHSLGGALATVAGADLRGNGYDIDVFSYGAPRVGNRAFAEFLTAQTGGTLYRITHRRDIVPRLPPAEFGYSHSSPEYWIKSGTLVPVTRNDIVKIEGIDATGGNNQPNIPDIPAHLWYFGLIGTCL

SEQ ID NO: 7569 - protein, 274 aa, Synthetic construct
SPPRRPVSQDLFNQFNLFAQYSAAAYCGKNNDAPAGTNITCTGNACPEVEKADATFLYSFEDSGVGDVTGFLALDNTNKLIVLSFRGSRSIENWFGNLNFLLKKINDICSGCRGHDGFTSSWRSVADTLRQKVEDAVREHPGYRVVFTGHSLGGALATVAGADLRGNGYDIGVFSYGAPRVGNRAFAEFLTAQTGGTLYRITHTNDIVPRLPPREFGYSHSSPEYWIKSGTLVPVTRNDIVKIEGIDATGGNNRPNIPDIPAHLWYFGLIGTCL

SEQ ID NO: 7570 - protein, 273 aa, Thermomyces lanuginosus
SPIRREVSQDLFNQFNLFAQYSAAAYCGKNNDAPAGTNITCTGNACPEVEKADATFLYSFRDSGVGDVTGFLALDNTNKLIVLSFRGTRSLENWIADLNFILQEINDICSGCRGHDGFTSSWFSVADTLRQKVEDAVREHPDYRVVFTGHSLGGALATVAGADLRGNGYDIDVFSYGAPRVGNRAFAEFLTVQTGGTLYRITHTNDIVPRLPPREFGYSHSSPEYWIKSGTLVPVRRRDIVKIEGIDATGGNNQPNIPSIPAHLWYFGLIGTC

SEQ ID NO: 7571 - protein, 273 aa, Synthetic construct
SPIRREVSQDLFNQFNLFAQYSAAAYCGKNNDAPAGTNITCTGNACPEVEKADATFLYSFEDSGVGDVTGFLALDNTDKLIVLSFRGSPSIENWIGNLNFDLKEIKDICSGCRGHDGFTSSWRSVADRLRQKVEDAVRDHPDYRVVFTGHSLGGALATVAGADLRGNGYDIDVFSYGAPRVGNRAFAEFLTVQTGGTLYRITHTNDIVPRLPPREFGYSHSSPEYWIKSPTLVPVTRNDIVKIEGIDPGGNNQPNIPDIPAHLWYFGLIGTCL

SEQ ID NO: 7572 - protein, 269 aa, Thermomyces lanuginosus
EVSQDLFNQFNLFAQYSAAAYCSKNNNAPAGTNITCTGNACPEVEKADATFLYSFRDSGVGDVTGFLALDNTNKLIVLSFRGSRSIENWIGNLNFDLIEINDICSGCRGHDGFTSSWFSVADTLRQKVEDAVREHPDYRVVFTGHSLGGALATVAGADLRGNGYDIDVFSYGAPRVGNRAFAEFLTVQTGGTLYRITHTNDIVPRLPPREFGYSHSSPEFWIKSGTLVPVRRRDIVKIEGIDATGGNNQPNIPDITAHLWYFGLIGTCL

SEQ ID NO: 7573 - protein, 269 aa, Thermomyces lanuginosus
EVSQDLFNQFNLFAQYSAAAYCGKNNDAPAGTNITCTGNACPEVEKADATFLYSFEDAGSGDVTGFLALDNTNKLIVLSFRGSRSVENWIGNLNFDLKEINDICSGCRGHDGFTSSWRSVADTLRQKVEDAVREHPDYRVVFTGHSLGGGLATVAGADLRGNGYDIDVFSYGAPRVGNRAFAEFLTVQTGGTLYRITHTNDIVPRLPPREFGYSHSSPEYWIKSGTGVPVRRRDIVKIEGIDATGGNNQPNIPDAKAHLWYFGLIGTCL

SEQ ID NO: 7574 - protein, 269 aa, Thermomyces lanuginosus
EVSQDLFNQFNLFAQYSAAAYCGKNNRAPAGTNITCTANACPEVEKADATFLYSFEDSGVGDVTGFLALDNTNKLIVLSFRGSRSIENWIGNLNFELKEINDICSGCRGHAGFTSSWRSVADTLRQKVEDAVREHPDYRVVFTGHSLGGALATVAGADLRGNKYDIDVFSYGAPRVGNRAFAEFLTVQTGGTLYRITHTNDIVPRLPPREFGYSHSSPEYWIKSGTLVPVRRRDIVKIEGIDATGGNNQPNIPSIKAHLWYFGLIGTCL

SEQ ID NO: 7575 - protein, 269 aa, Thermomyces lanuginosus
EVSQDLFNQFNLFAQYSAAAYCGKNNQAPAGTNITCTGNACPEVEKADATTLYSFEDMGVGDVTGFLALDNTNKGIVLSFRGSRSIENWIQNLNFDLKEINDICSGCRGHDGFTSSWRSVADTLRQKVEAAVREHPDYRVVFTGHSLGGALATVAGADLRGNGYDIDVFSYGAPRVGNRAFAEFLTTQTGGTLYRITHTNDIVPRLPPREFGYSHSSPEYWIKSGTLVPVTRNDIVKIEGIDATGGNNQPNQPDIPAHLWYFGRIGTCL

SEQ ID NO: 7576 - protein, 269 aa, Thermomyces lanuginosus
EVSQDLFNQFNLFAQYSAAAYCGKNNRAPAGTNITCTGNACPEVEKADATFLYSFEDSGVGDVTGFLALDNTNKLIVLSFRGSRSIENWIANLNFEQKEINDICSGCRGHAGFTSSWRSVADTLRQKVEDAVREHVDYRVVFTGHSLGGALATVAGADLRGNGYDIDVFSYGAPRVGNRAFAEFLTVQTGGTLYRITHTNDIVPRLPPREFGYSHPSPEYWIKSGTGVPVTRNDIVKIEGIDATGGNNQPNIPDITAHLWYFGLIGTCL

SEQ ID NO: 7577 - protein, 269 aa, Thermomyces lanuginosus
EVSQDLFNQFNLFAQYSAAAYCSKNNDAPAGTNITCTGNICPEVEKADATILYSFRDSGVGDVTGFLALDNTNKLIVLSFRGSRSIENWIGNLNFDLKEINDICSGCRGHDGFTSSWFSVADTLRQKVEDAVREHPDYRVVFTGHSLGGALATVAGADLRGNGYDIDVFSYGAPRVGNRAFAEFLTVQTGGTLYRITHTNDIVPRLPPREFGYSHSSPEYWIKSGTLVPVRRRDIVKIEGIDAEGGNNQPNIPDITAHLWYFGLIGTCL

SEQ ID NO: 7578 - protein, 269 aa, Thermomyces lanuginosus
EVSQDLFNQFNLFAQYSAAAYCSKNNNAPAGTNITCTGNACPEVEKADATILYSFRDSGVGDVTGFLALDNTNKLIVLSFRGSRSIENWIGNLNFDLKEINDICSGCRGHDGFTSSWFSVADTLRQKVEDAVREHPDYRVVFTGHSLGGALATVAGADLRGNGYDIDVFSYGAPRVGNRAFAEFLTVQTGGTLYRITHTNDIVPRLPPREFGYSHSSPEFWIKSGTLVPVRRRDIVKIEGIDATGGNNQPNIPDITAHLWYFGLIGTCL

SEQ ID NO: 7579 - protein, 269 aa, Thermomyces lanuginosus
EVSQDLFNQFNLFAQYSAAAYCGKNNRAPAGTNITCTANACPEVEKADATFLYSFEDSGVGDVTGFLALDNTNKLIVLSFRGSRSIENWIGNLNFILKEINDICSGCRGHAGFTSSWRSVADTLRQKVEDAVREHPDYRVVFTGHSLGGALATVAGADLRGNKYDIDVFSYGAPRVGNRAFAEFLTVQTGGTLYRITHTNDIVPRLPPREFGYSHSSPEYWIKSGTLVPVRRRDIVKIEGIDATGGNNQPNIPSITAHLWYFGLIGTCL

SEQ ID NO: 7580 - protein, 269 aa, Thermomyces lanuginosus
EVSQDLFNQFNLFAQYSAAAYCGKNNDAPAGTNITCTGNACPEVEKADATLLYSFRNSGVGDVTGFLALDNTNKLIVLSFRGSRSIENWIGNLNFDLIEINDICSGCRGHDGFTSSWFSVADTLRQKVEDAVREHPDYRVVFTGHSLGGALATVAGADLRGNSYDIDVFSYGAPRVGNRAFAEFLTVQTGGTLYRITHTNDIVPRLPPREFGYSHSSPEYWIKSGTLVPVRRRDIVKIEGIDATGGNNQPNIPDITAHLWYFGLIGTCL

SEQ ID NO: 7581 - protein, 269 aa, Thermomyces lanuginosus
EVSQDLFNQFNLFAQYSAAAYCGKNNDAPAGTKITCTGNACPEVEKADATLLYSFEDSGVGDVTGFLALDNTNKLIVLSFRGSRSIENWIGNLNFDLEEIDDICSGCRGHDGFTSSWRSVADTLRQKVEDAVREHPDYRVVFTGHSLGGALATVAGADLRGNGYDIDVFSYGAPRVGNRAFAEFLTVQTGGTLYRITSTNDIVPRLPPRKFGYSHSSPEYWIKPGTLVPVRRRDIVKIEGIDATGGNNQPNIPDIPAHLWYFGLIGTCL

SEQ ID NO: 7582 - protein, 269 aa, Thermomyces lanuginosus
EVSQDLFNQFNLFAQYSAAAYCGKNNDAPAGTNITCTGNICPEVEKADATLLYSFRDSGVGDVTGFLALDNTNKLIVLSFRGSRSIENWIGNLNFDLIEINDICSGCRGHDGFTSSWFSVADTLRQKVEDAVREHPDYRVVFTGHSLGGALATVAGADLRGNSYDIDVFSYGAPRVGNRAFAEFLTVQTGGTLYRITHTNDIVPRLPPREFGYSHSSPEYWIKSGTLVPVRRRDIVKIEGIDATGGNNQPNIPDITAHLWYFGLIGTCL

SEQ ID NO: 7583 - protein, 269 aa, Thermomyces lanuginosus
EVSQDLFNQFNLFAQYSAAAYCQKNNSAPAGTNITCTGNACPEVEKADATTLYSFKDSGVGDVTGFLALDNTNKGIVLSFRGSRSIENWIQNLNFDLKEINDICSGCRGHDGFTSSWRSVADTLRQKVEDAVREHPDYRVVFTGHSLGGALATVAGADLRGNGYDIDVFSYGAPRVGNRAFAEFLTNQTGGTLYRITHTNDIVPRLPPREFGYSHSSPEYWIKSGTLVPVTRNDIVKIEGIDATGGNNQPNQPDIPAHLWYFGRIGTCL

SEQ ID NO: 7584 - protein, 269 aa, Thermomyces lanuginosus
EVSQDLFNQFNLFAQYSAAAYCSKNNDAPAGTNITCTGNACPEVEKADATILYSFRDSGVGDVTGFLALDNTNKLIVLSFRGSRSIENWIGNLNFDLIEINDICSGCRGHDGFTSSWFSVADTLRQKVEDAVREHPDYRVVFTGHSLGGALATVAGADLRGNGYDIDVFSYGAPRVGNRAFAEFLTVQTGGTLYRITHTNDIVPRLPPREFGYSHSSPEFWIKSGTLVPVRRRDIVKIEGIDAEGGNNQPNIPDIPAHLWYFGLIGTCL

SEQ ID NO: 7585 - protein, 269 aa, Thermomyces lanuginosus
EVSQDLFNQFNLFAQYSAAAYCSKNNNAPAGTNITCTGNICPEVEKADATILYSFRDSGEGDVTGFLALDNTNKLIVLSFRGSRSIENWIGNLNFDLKEINDICSGCRGHDGFTSSWFSVADTLRQKVEDAVREHPDYRVVFTGHSLGGALATVAGADLRGNGYDIDVFSYGAPRVGNRAFAEFLTVQTGGTLYRITHTNDIVPRLPPREFGYSHSSPEYWIKSGTLVPVRRRDIVKIEGIDATGGNNQPNIPDIPAHLWYFGLIGTCL

SEQ ID NO: 7586 - protein, 269 aa, Thermomyces lanuginosus
EVSQDLFNQFNLFAQYSAAAYCGKNNNAPAGTNITCTGNACPEVEKADATILYSFRDSGVGDVTGFLALDNTNKLIVLSFRGSRSIENWIGNLNFDLIEINDICSGCRGHDGFTSSWFSVADTLRQKVEDAVREHPDYRVVFTGHSLGGALATVAGADLRGNGYDIDVFSYGAPRVGNRAFAEFLTVQTGGTLYRITHTNDIVPRLPPREFGYSHSSPEFWIKSGTLVPVRRRDIVKIEGIDATGGNNQPNIPDITAHLWYFGLIGTCL

SEQ ID NO: 7587 - protein, 269 aa, Thermomyces lanuginosus
EVSQDLFNQFNLFAQYSAAAYCSKNNNAPAGTNITCTGNICPEVEKADATILYSFRDSGKGDVTGFLALDNTNKLIVLSFRGSRSIENWIGNLNFDLKEINDICSGCRGHDGFTSSWFSVADTLRQKVEDAVREHPDYRVVFTGHSLGGALATVAGADLRGNGYDIDVFSYGAPRVGNRAFAEFLTVQTGGTLYRITHTNDIVPRLPPREFGYSHSSPEYWIKSGTLVPVRRRDIVKIEGIDATGGNNQPNIPDIPAHLWYFGLIGTCL

SEQ ID NO: 7588 - protein, 269 aa, Thermomyces lanuginosus
EVSQDLFNQFNLFAQYSAAAYCSKNNNAPAGTNITCTGNACPEVEKADATILYSFRDSGVGDVTGFLALDNTNKLIVLSFRGSRSIENWIGNLNFDLKEINDICSGCRGHDGFTSSWFSVADTLRQKVEDAVREHPDYRVVFTGHSLGGALATVAGADLRGNGYDIDVFSYGAPRVGNRAFAEFLTVQTGGTLYRITHTNDIVPRLPPREFGYSHSSPEFWIKSGTLVPVRRRDIVKIEGIDAEGGNNQPNIPDIPAHLWYFGLIGTCL

SEQ ID NO: 7589 - protein, 269 aa, Thermomyces lanuginosus
EVSQDLFNQFNLFAQYSAAAYCGRNNDAPAGTQITCTGNACPEVERADATFLYSFEDSGVGDVTGFLALDNTNRLIVLSFRGSRSIENWIGNLNFDLREINDICSGCRGHDGFTSSWRSVADTLRQRVEDAVREHPDYRVVFTGHSLGGALATVAGADLRGNGYDIDVFSYGAPKVGNRAFAEFLTVQTGGTLYRITHTNDIVPRLPPREFGYSHSSPEYWIRSGTLVPVTRNDIVRIEGIDATGGNNQPNIPDIPAHLWYFGLIGTCL

SEQ ID NO: 7590 - protein, 269 aa, Thermomyces lanuginosus
EVSQDLFNQFNLFAQYSAAAYCKKNNSAPAGTNITCTGNACPEVEKADATTLYSFKDMGVGDVTGFLALDNTNKRIVLSFRGSRSIENWIQNLNFDLKEINDICSGCRGHDGFTSSWRSVADTLRQKVEDAVREHPDYRVVFTGHSLGGALATVAGADLRGNGYDIDVFSYGAPRVGNRAFAEFLTHQTGGTLYRITHTNDIVPRLPPREFGYSHSSPEYWIKSGTLVPVTRNDIVKIEGIDATGGNNQPNQPDIPAHLWYFGLIGTCL

SEQ ID NO: 7591 - protein, 269 aa, Thermomyces lanuginosus
EVSQDLFNQFNLFAQYSKAAYCKKNNDAPAGTNITCTGNACPEVEKADATFLYSFEDSGVGDVTGFLALDNTNKQIVLSFRGSRSIENWIGNLRFDLKEINDICSGCRGHAGFTSSWRSVADTLRQKVEDAVREHPDYRVVFTGHSLGGALATIAWADLRGNGYDIDVFSYGAPRVGNRAFAEFLTVQQGGTLYRITHTNDIVPRLPPREFGYSHSSPEYWIKSGTLVPVTRNDIVKIEGIDATGGNNQPNIPDIPAHLWYFGRIGTCL

SEQ ID NO: 7592 - protein, 269 aa, Thermomyces lanuginosus
EVSQDLFNQFNLFAQYSKAAYCGANNDAPAGTNITCTGNACPEVEKADATFLYSFEDSGVGDVTGFLALDNTNKQIVLSFRGSRSIENWIGNLRFDLKEINDICSGCRGHDGFTSSWRSVADTLRQKVEDAVREHPDYRVVFTGHSLGGALATIAWADLRGNGYDIDVFSYGAPRVGNRAFAEFLTNQQGGTLYRITHTNDIVPRLPPREFGYSHSSPEYWIKSGTLVPVTRNDIVKIEGIDATGGNNQPNIPDIPAHLWYFGRIGTCL

SEQ ID NO: 7593 - protein, 269 aa, Thermomyces lanuginosus
EVSQDLFNQFRLFAQYSAAAYCGKNNDAPAGTQITCTANACPEVEKADATFLYSFEDSGVGDVTGFLALDNTNKLIVLSFRGSRSIENWITNLNFDLKEINDICSGCRGHDGFTSSWRSVADTLRQKVEDAVREHPDYRVVFTGHSLGGALATVAGADLRGNTYDIDVFSYGAPRGGNRAFAEFLTVQTGGTLYRITHTNDIVPRLPPREFGYSHSSPEYWIKSGTLVPVRRRDIVKIEGIDATGGNNQPNIPSIPAHLWYFGLIGTCL

SEQ ID NO: 7594 - protein, 269 aa, Thermomyces lanuginosus
EVSQDLFNQFKLFAQYSKAAYCKANNDAPAGTNITCTGNACPEVEKADATFLYSFEDSGVGDVTGFLALDNTNKLIILSFRGSRSIENWIGNLNFDLKEINDICSGCRGHDGFTSSWRSVADTLRQKVEAAVREHPDYRVVFTGHSLGGALATIAGADLRGNGYDIDVFSYGAPRVGNRAFAEFLTTQQGGTLYRITHTNDIVPRLPPREFGYSHSSPEYWIKSGTLVPVTRNDIVKIEGIDATGGNNQPNIPDIPAHLWYFGLIGTCL

SEQ ID NO: 7595 - protein, 269 aa, Thermomyces lanuginosus
EVSQDLFNQFNLFAQYSKAAYCKKNNSAEAGTNITCTGNACPEVEKADATFLYSFEDSGVGDVTGFLALDNTNKQIILSFRGSRSIENWIGNLNFDLKEINDICSGCKGHDGFTSSWRSVADTLRQKVEDAVREFPDYRVVFTGHSLGGALATVAGADLRGNGYDIDVFSYGAPRVGNRAFAEFLTHQTGGTLYRITHTNDIVPRLPPREFGYSHSSPEYWIKSGTLVPVTRNDIVKIEGIDATGGNNQPNIPDIPAHLWYFGLIGTCL

SEQ ID NO: 7596 - protein, 269 aa, Thermomyces lanuginosus
EVSQDLFNQFNLFAQYSAAAYCSKNNDAPAGTNITCTGNACPEVEKADATILYSFRDSGVGDVTGFLALDNTNKLIVLSFRGSRSIENWIGNLNFDLIEINDICSGCRGHDGFTSSWFSVADTLRQKVEDAVREHPDYRVVFTGHSLGGALATVAGADLRGNGYDIDVFSYGAPRVGNRAFAEFLTVQTGGTLYRITHTNDIVPRLPPREFGYSHSSPEFWIKSGTLVPVRRRDIVKIEGIDATGGNNQPNIPDITAHLWYFGLIGTCL

SEQ ID NO: 7597 - protein, 269 aa, Thermomyces lanuginosus
EVSLDLFNQFNLFAQYSAAAYCGKNNDAPAGTNITCTGNACPTVEIADATFLYSFEDNGSGDVTGFLALDNTNKLIVLSFRGSRSIENWIGNLNFDLKEINDICSGCRGHDGFTSSWRSVADTLRQKVEDAVREHPDYRVVFTGHSLGGALATVAGADLRGNGYDIDVFSYGAPRVGNRAFAEFLTVQTGGTLYRITHTNDIVPRLPPREFGYSHSSPEYWIKSGTLVPVRRRDIVKIEGIDATGGNNLPNIPIIPAHLWYFGLIGTCL

SEQ ID NO: 7598 - protein, 269 aa, Thermomyces lanuginosus
EVSQDLFNQFNLFAQYSKAAYCQANNDAPAGTNITCTGNACPEVEKADATFLYSFEDSGVGDVTGFLALDNTNKRIVLSFRGSRSIENWIGNLRFDLKEINDICSGCRGHDGFTSSWRSVADTLRQKVEAAVREHPDYRVVFTGHSLGGALATIAWADLRGNGYDIDVFSYGAPRVGNRAFAEFLTNQTGGTLYRITHTNDIVPRLPPREFGYSHSSPEYWIKSGTLVPVTRNDIVKIEGIDATGGNNQPNIPDIPAHLWYFGLIGTCL

SEQ ID NO: 7599 - protein, 269 aa, Thermomyces lanuginosus
EVSQDLFNQFNLFAQYSAAAYCSKNNNAPAGTNITCTGNACPEVEKADATILYSFRDSGEGDVTGFLALDNTNKLIVLSFRGSRSIENWIGNLNFDLKEINDICSGCRGHDGFTSSWFSVADTLRQKVEDAVREHPDYRVVFTGHSLGGALATVAGADLRGNGYDIDVFSYGAPRVGNRAFAEFLTVQTGGTLYRITHTNDIVPRLPPREFGYSHSSPEYWIKSGTLVPVRRRDIVKIEGIDATGGNNQPNIPDITAHLWYFGLIGTCL

SEQ ID NO: 7600 - protein, 269 aa, Thermomyces lanuginosus
EVSQDLFNQFNLFAQYSAAAYCGKNNDAPAGTKITCTGNACPEVEKADATVLYSFEDSGVGDVTGFLALDNTNKLIVLSFRGSRSIENWIGNLNFDLEEIDDICSGCRGHDGFTSSWRSVADTLRQKVEDAVREHPDYRVVFTGHSLGGALATVAGADLRGNGYDIDVFSYGAPRVGNRAFAEFLTVQTGGTLYRITSTNDIVPRLPPRKFGYSHSSPEYWIKPGTLVPVRRRDIVKIEGIDATGGNNQPNIPDIPAHLWYFGLIGTCL

SEQ ID NO: 7601 - protein, 269 aa, Thermomyces lanuginosus
EVSQDLFNQFNLFAQYSAAAYCGKNNDAPAGTNITCTGNACPEVEKADATFLYSFEDAGSGDVTGFLALDNTNKLIVLSFRGSRSVENWIGNLNFDLKEINDICSGCRGHDGFTSSWRSVADTLRQKVEDAVREHPDYRVVFSGHSLGGGLATVAGADLRGNGYDIDVFSYGAPRVGNRAFAEFLTVQTGGTLYRITHTNDIVPRLPPREFGYSHSSPEYWIKSGTGVPVRRRDIVKIEGIDATGGNNQPNIPDIKAHLWYFGLIGTCL

SEQ ID NO: 7602 - protein, 269 aa, Thermomyces lanuginosus
EVSQDLFNQFNLFAQYSAAAYCGKNNDAPAGTNITCTGNACPEVEKADATILYSFRDSGVGDVTGFLALDNTNKLIVLSFRGSRSIENWIGNLNFDLIEINDICSGCRGHDGFTSSWFSVADTLRQKVEDAVREHPDYRVVFTGHSLGGALATVAGADLRGNGYDIDVFSYGAPRVGNRAFAEFLTVQTGGTLYRITHTNDIVPRLPPREFGYSHSSPEFWIKSGTLVPVRRRDIVKIEGIDAEGGNNQPNIPDITAHLWYFGLIGTCL

SEQ ID NO: 7603 - protein, 269 aa, Thermomyces lanuginosus
EVSQDLFNQFKLFAQYSAAAYCQKNNDAPAGTNITCTGNACPEVEKADATFLYSFEDSGVGDVTGFLALDNTNKQIVLSFRGSRSIENWIGNLNFDLKEINDICSGCRGHAGFTSSWRSVADTLRQKVEDAVREHPDYRVVFTGHSLGGALATIAWADLRGNGYDIDVFSYGAPRVGNRAFAEFLTNQQGGTLYRITHTNDIVPRLPPREFGYSHSSPEYWIKSGTLVPVTRNDIVKIEGIDATGGNNQPNIPDIPAHLWYFGRIGTCL

SEQ ID NO: 7604 - protein, 269 aa, Thermomyces lanuginosus
EVSQDLFNQFNLFAQYSAAAYCGKNNRAPAGTNITCTANACPEVEKADATFLYSFEDSGVGDVTGFLALDNTNKLIVLSFRGSRSIENWIGNLNFELKEINDICSGCRGHAGFTSSWRSVADTLRQKVEDAVREHPDYRVVFTGHSLGGALATVAGADLRGNKYDIDVFSYGAPRVGNRAFAEFLTVQTGGTLYRITHTNDIVPRLPPREFGYSHSSPEYWIKSGTLVPVRRRDIVKIEGIDATGGNNQPNIPSIRAHLWYFGLIGTCL

SEQ ID NO: 7605 - protein, 269 aa, Thermomyces lanuginosus
EVSQDLFNQFNLFAQYSAAAYCGKNNDAPAGTQITCTGNACPEVEKADATFLYSFEDSGVGDVTGFLALDNTNKLIVLSFRGSRSIENWITNLSFDLKEINDICSGCRGHAGFTSSWRSVADTLRQKVEDAVREHPDYRVVFTGHSLGGALATVARADLRGNTYDIDVFSYGAPRIGNRAFAEFLTVQTGGTLYRITHTNDIVPRLPPREFGYSHSSPEYWIKSGTLVPVRRRDIVKIEGIDATGGNNQPNIPDIPAHLWYFGLIGTCL

SEQ ID NO: 7606 - protein, 269 aa, Thermomyces lanuginosus
EVSQDLFNQFNLFAQYSAAAYCSKNNNAPAGTNITCTGNICPEVEKADATILYSFRDSGVGDVTGFLALDNTNKLIVLSFRGSRSIENWIGNLNFDLKEINDICSGCRGHDGFTSSWFSVADTLRQKVEDAVREHPDYRVVFTGHSLGGALATVAGADLRGNGYDIDVFSYGAPRVGNRAFAEFLTVQTGGTLYRITHTNDIVPRLPPREFGYSHSSPEYWIKSGTLVPVRRRDIVKIEGIDATGGNNQPNIPDITAHLWYFGLIGTCL

SEQ ID NO: 7607 - protein, 269 aa, Thermomyces lanuginosus
EVSQDLFNQFNLFAQYSAAAYCGKNNNAPAGTNITCTGNACPEVEKADATILYSFRDSGVGDVTGFLALDNTNKLIVLSFRGSRSIENWIGNLNFDLIEINDICSGCRGHDGFTSSWFSVADTLRQKVEDAVREHPDYRVVFTGHSLGGALATVAGADLRGNGYDIDVFSYGAPRVGNRAFAEFLTVQTGGTLYRITHTNDIVPRLPPREFGYSHSSPEYWIKSGTLVPVRRRDIVKIEGIDAEGGNNQPNIPDITAHLWYFGLIGTCL

SEQ ID NO: 7608 - protein, 269 aa, Thermomyces lanuginosus [sequence omitted]

SEQ ID NO: 7609 - protein, 269 aa, Thermomyces lanuginosus
EVSQDLFNQFNLFAQYSAAAYCSKNNNAPAGTNITCTGNICPEVEKADATFLYSFRDSGKGDVTGFLALDNTNKLIVLSFRGSRSIENWIGNLNFDLKEINDICSGCRGHDGFTSSWFSVADTLRQKVEDAVREHPDYRVVFTGHSLGGALATVAGADLRGNGYDIDVFSYGAPRVGNRAFAEFLTVQTGGTLYRITHTNDIVPRLPPREFGYSHSSPEYWIKSGTLVPVRRRDIVKIEGIDAEGGNNQPNIPDIPAHLWYFGLIGTCL

SEQ ID NO: 7610 - protein, 269 aa, Thermomyces lanuginosus
EVSQDLFNQFNLFAQWSKAAYCQKNNSAPAGTNITCTGNACPEVEKADATFLYSFEDSGVGDVTGFLALDNTNKQIILSFRGSRSIENWIGNLNFDLKEINDICSGCKGHDGFTSSWRSVADTLRQKVEDAVREFPDYRVVFTGHSLGGALATVAGADLRGNGYDIDVFSYGAPRVGNRAFAEFLTTQTGGTLYRITHTNDIVPRLPPREFGYSHSSPEYWIKSGTLVPVTRNDIVKIEGIDATGGNNQPNIPDIPAHLWYFGLIGTCL

SEQ ID NO: 7611 - protein, 269 aa, Thermomyces lanuginosus
EVSQDLFNQFRLFAQYSAAAYCGKNNDAPAGTQITCTANACPEVEKADATFLYSFEDSGVGDVTGFLALDNTNKLIVLSFRGSRSIENWITNLNFDLKEINDICSGCRGHDGFTSSWRSVADTLRQKVEDAVREHPDYRVVFTGHSLGGALATVAGADLRGNQYDIDVFSYGAPRGGNRAFAEFLTVQTGGTLYRITHTNDIVPRLPPREFGYSHSSPEYWIKSGTLVPVRRRDIVKIEGIDATGGNNQPNIPSIPAHLWYFGLIGTCL

SEQ ID NO: 7612 - protein, 269 aa, Thermomyces lanuginosus
EVSQDLFNQFNLFAQYSAAAYCSKNNDAPAGTNITCTGNACPEVEKADATFLYSFRDSGVGDVTGFLALDNTNKLIVLSFRGSRSIENWIGNLNFDLIEINDICSGCRGHDGFTSSWFSVADTLRQKVEDAVREHPDYRVVFTGHSLGGALATVAGADLRGNGYDIDVFSYGAPRVGNRAFAEFLTVQTGGTLYRITHTNDIVPRLPPREFGYSHSSPEFWIKSGTLVPVRRRDIVKIEGIDAEGGNNQPNIPDITAHLWYFGLIGTCL

SEQ ID NO: 7613 - protein, 269 aa, Thermomyces lanuginosus
EVSQDLFNQFKLFAQYSAAAYCKKNNSAPAGTNITCTGNACPEVEKADATFLYSFKDSGVGDVTGFLALDNTNKRIVLSFRGSRSIENWIGNLNFDLKEINDICSGCRGHAGFTSSWRSVADTLRQKVEDAVREHPDYRVVFTGHSLGGALATVAWADLRGNGYDIDVFSYGAPRVGNRAFAEFLTNQTGGTLYRITHTNDIVPRLPPREFGYSHSSPEYWIKSGTLVPVTRNDIVKIEGIDATGGNNQPNIPDIPAHLWYFGRIGTCL

SEQ ID NO: 7614 - protein, 269 aa, Thermomyces lanuginosus
EVSQDLFNQFNLFAQYSAAAYCGKNNRAPAGTNITCTGNACPEVEKADATFLYSFEDSGVGDVTGFLALDNTNKLIVLSFRGSRSIENWITNLNFELKEINDICSGCRGHAGFTSSWRSVADTLRQKVEDAVREHPDYRVVFTGHSLGGALATVAGADLRGNKYDIDVFSYGAPRVGNRAFAEFLTVQTGGTLYRITHTNDIVPRLPPREFGYSHSSPEYWIKSGTLVPVRRRDIVKIEGIDATGGNNQPNIPSITAHLWYFGLIGTCL

SEQ ID NO: 7615 - protein, 269 aa, Thermomyces lanuginosus
EVSQDLFNQFNLFAQYSAAAYCSKNNNAPAGTNITCTGNACPEVEKADATFLYSFRDSGVGDVTGFLALDNTNKLIVLSFRGSRSIENWIGNLNFDLKEINDICSGCRGHDGFTSSWFSVADTLRQKVEDAVREHPDYRVVFTGHSLGGALATVAGADLRGNGYDIDVFSYGAPRVGNRAFAEFLTVQTGGTLYRITHTNDIVPRLPPREFGYSHSSPEFWIKSGTLVPVRRRDIVKIEGIDAEGGNNQPNIPDITAHLWYFGLIGTCL

SEQ ID NO: 7616 - protein, 269 aa, Thermomyces lanuginosus
EVSQDLFNQFNLFAQYSAAAYCGKNNDAPAGTKITCTGNACPEVEKADATFLYSFEDSGVGDVTGFLALDNTNKLIVLSFRGSRSIENWIGNLNFDLKEINDICSGCRGHDGFTSSWRSVADTLRQKVEDAVREHPDYRVVFAGHSLGGALATVAGADLRGNNYSIDVFSYGAPRVGNRAFAEFLTVQTGGTLYRITNTNDIVPRLPPREFGYSHSSPEYWIKSGTLPPVRRRDIVKIEGIDATGGNNQPNIPDISAHLWYFGLIGTCL

SEQ ID NO: 7617 - protein, 269 aa, Thermomyces lanuginosus
EVSQDLFNQFNLFAQYSAAAYCSKNNNAPAGTNITCTGNACPEVEKADATFLYSFRDSGVGDVTGFLALDNTNKLIVLSFRGSRSIENWIGNLNFDLIEINDICSGCRGHDGFTSSWFSVADTLRQKVEDAVREHPDYRVVFTGHSLGGALATVAGADLRGNGYDIDVFSYGAPRVGNRAFAEFLTVQTGGTLYRITHTNDIVPRLPPREFGYSHSSPEYWIKSGTLVPVRRRDIVKIEGIDAEGGNNQPNIPDITAHLWYFGLIGTCL

SEQ ID NO: 7618 - protein, 269 aa, Thermomyces lanuginosus
EVSQDLFNQFNLFAQYSAAAYCKKNNSAPAGTNITCTGNACPEVEKADATFLYSFEDSGVGDVTGFLALDNTNKQIVLSFRGSRSIENWIGNLNFDLKEINDICSGCRGHAGFTSSWRSVADTLRQKVEAAVREHPDYRVVFTGHSLGGALATIAWADLRGNGYDIDVFSYGAPRVGNRAFAEFLTVQQGGTLYRITHTNDIVPRLPPREFGYSHSSPEYWIKSGTLVPVTRNDIVKIEGIDATGGNNQPNIPDIPAHLWYFGRIGTCL

SEQ ID NO: 7619 - protein, 269 aa, Thermomyces lanuginosus
EVSQDLFNQFRLFAQYSAAAYCGKNNDAPAGTQITCTANACPEVEKADATFLYSFEDSGVGDVTGFLALDNTNKLIVLSFRGSRSIENWITNLNFDLKEINDICSGCRGHDAFTSSWRSVADTLRQKVEDAVREHPDYRVVFTGHSLGGALATVAGADLRGNAYDIDVFSYGAPRVGNRAFAEFLTVQTGGTLYRITHTNDIVPRLPPREFGYSHSSPEYWIKSGTLVPVRRRDIVKIEGIDATGGNNQPNIPSIPAHLWYFGLIGTCL

SEQ ID NO: 7620 - protein, 269 aa, Thermomyces lanuginosus
EVSQDLFNQFNLFAQYSAAAYCGRNNDAPAGTQITCTGNACPEVERADATFLYSFEDSGVGDVTGFLALDNTNRLIVLSFRGSRSIENWIGNLNFDLREINDICSGCRGHDGFTSSWRSVADTLRQRVEDAVREHPDYRVVFTGHSLGGALATVAGADLRGNGYDIDVFSYGAPRVGNRAFAEFLTVQTGGTLYRITHTNDIVPKLPPREFGYSHSSPEYWIRSGTLVPVTRNDIVRIEGIDATGGNNQPNIPDIPAHLWYFGLIGTCL

SEQ ID NO: 7621 - protein, 269 aa, Thermomyces lanuginosus
EVSQDLFNQFNLFAQYSAAAYCGKNNNAPAGTNITCTGNACPEVEKADATILYSFRDSGVGDVTGFLALDNTNKLIVLSFRGSRSIENWIGNLNFDLKEINDICSGCRGHDGFTSSWFSVADTLRQKVEDAVREHPDYRVVFTGHSLGGALATVAGADLRGNGYDIDVFSYGAPRVGNRAFAEFLTVQTGGTLYRITHTNDIVPRLPPREFGYSHSSPEFWIKSGTLVPVRRRDIVKIEGIDAEGGNNQPNIPDITAHLWYFGLIGTCL

SEQ ID NO: 7622 - protein, 269 aa, Thermomyces lanuginosus
EVSQDLFNQFNLFAQYSAAAYCGKNNRAPAGTNITCTANACPEVEKADATFLYSFEDSGVGDVTGFLALDNTNKLIVLSFRGSRSIENWITNLNFELKEINDICSGCRGHDGFTSSWRSVADTLRQKVEDAVREHPDYRVVFTGHSLGGALATVAGADLRGNKYDIDVFSYGAPRVGNRAFAEFLTVQTGGTLYRITHTNDIVPRLPPREFGYSHSSPEYWIKSGTLVPVRRRDIVKIEGIDATGGNNQPNIPSITAHLWYFGLIGTCL

SEQ ID NO: 7623 - protein, 269 aa, Thermomyces lanuginosus
EVSQDLFNQFNLFAQYSAAAYCGKNNNAPAGTQITCTGNACPEVEKADATFLYSFEDSGVGDVTGFLALDNTNKLIVLSFRGSRSIENWITNLNFDLKEINDICSGCRGHDGFISSWRSVADTLRQKVEDAVREHPDYRVVFTGHSLGGALATVAGADLRGNSYDIDVFSYGAPRVGNRAFAEFLTVQTGGTLYRITHTNDIVPRLPPRDFGYSHSSPEYWIKSGTLVPVRRRDIVKIEGIDATGGNNQPNIPDITAHLWYFGLIGTCL

SEQ ID NO: 7624 - protein, 269 aa, Thermomyces lanuginosus
EVSQDLFNQFNLFAQYSAAAYCSKNNDAPAGTNITCTGNACPEVEKADATILYSFRDSGVGDVTGFLALDNTNKLIVLSFRGSRSIENWIGNLNFDLIEINDICSGCRGHDGFTSSWFSVADTLRQKVEDAVREHPDYRVVFTGHSLGGALATVAGADLRGNGYDIDVFSYGAPRVGNRAFAEFLTVQTGGTLYRITHTNDIVPRLPPREFGYSHSSPEYWIKSGTLVPVRRRDIVKIEGIDAEGGNNQPNIPDITAHLWYFGLIGTCL

SEQ ID NO: 7625 - protein, 269 aa, Thermomyces lanuginosus
EVSQDLFNQFNLFAQYSAAAYCKKNNSAPAGTNITCTGNACPEVEKADATTLYSFKDMGVGDVTGFLALDNTNKQIVLSFRGSRSIENWIQNLNFDLKEINDICSGCRGHDGFTSSWRSVADTLRQKVEDAVREHPDYRVVFTGHSLGGALATVAGADLRGNGYDIDVFSYGAPRVGNRAFAEFLTNQTGGTLYRITHTNDIVPRLPPREFGYSHSSPEYWIKSGTLVPVTRNDIVKIEGIDATGGNNQPNIPDIPAHLWYFGRIGTCL

SEQ ID NO: 7626 - protein, 269 aa, Thermomyces lanuginosus
EVSQDLFNQFNLFAQYSKAAYCKANNDAPAGTNITCTGNACPEVEKADATFLYSFEDSGVGDVTGFLALDNTNKQIVLSFRGSRSIENWIGNLRFDLKEINDICSGCRGHAGFTSSWRSVADTLRQKVEAAVREHPDYRVVFTGHSLGGALATIAGADLRGNGYDIDVFSYGAPRVGNRAFAEFLTVQQGGTLYRITHTNDIVPRLPPREFGYSHSSPEYWIKSGTLVPVTRNDIVKIEGIDATGGNNQPNIPDIPAHLWYFGLIGTCL

SEQ ID NO: 7627 - protein, 269 aa, Thermomyces lanuginosus
EVSQDLFNQFNLFAQYSKAAYCQKNNSAEAGTNITCTGNACPEVEKADATFLYSFEDSGVGDVTGFLALDNTNKQIILSFRGSRSIENWIGNLNFDLKEINDICSGCKGHDGFTSSWRSVADTLRQKVEDAFREHPDYRVVFTGHSLGGALATVAGADLRGNGYDIDVFSYGAPRVGNRAFAEFLTHQTGGTLYRITHTNDIVPRLPPREFGYSHSSPEYWIKSGTLVPVTRNDIVKIEGIDATGGNNQPNIPDIPAHLWYFGLIGTCL

SEQ ID NO: 7628 - protein, 269 aa, Thermomyces lanuginosus
EVSQDLFNQFNLFAQYSAAAYCGKNNRAPAGTNITCTGNACPEVEKADATFLYSFEDSGVGDVTGFLALDNTNKLIVLSFRGSRSIENWLANLKFDLKEINDICSGCRGHAGFTSSWRSVADTLRQKVEDAVREHVDYRVVFTGHSLGGALATVAGADLRGNGYDIDVFSYGAPRVGNRAFAEFLTVQTGGTLYRITHTNDIVPRLPPREFGYSHPSPEYWIKSGTGVPVTRNDIVKIEGIDATGGNNQPNIPDITAHLWYFGLIGTCL

SEQ ID NO: 7629 - protein, 269 aa, Thermomyces lanuginosus
EVSVDLFNQFNLFAQYSAAAYCGKNNDAPAGTNITCTGNACPEVEKADATFLYSFEDSGKGDVTGFLALDNTNKLIVLSFRGTRSVENWIGNLNFDLKEINDICSGCRGHDGFTSSWRSVADTLRQKVEDAVREHPDYRVVFTGHSLGGGLATVAGADLRGNGYDIDVFSYGAPRVGNRAFAEFLTVQTGGTLYRITHTNDIVPRLPPREFGYSHSSPEYWIKSGTGVPVRRRDIVKIEGIDATGGNNQPNIPDIKAHLWYFGLIGTCL

SEQ ID NO: 7630 - protein, 269 aa, Thermomyces lanuginosus
EVSQDLFNQFNLFAQYSKAAYCQKNNSAPAGTNITCTGNACPEVEKADATFLYSFEDSGVGDVTGFLALDNTNKQIILSFRGSRSIENWIGNLNFDLKEINDICSGCKGHDGFTSSWRSVADTLRQKVEDAVREFPDYRVVFTGHSLGGALATVAWADLRGNGYDIDVFSYGAPRVGNRAFAEFLTTQTGGTLYRITHTNDIVPRLPPREFGYSHSSPEYWIKSGTLVPVTRNDIVKIEGIDATGGNNQPNIPDIPAHLWYFGLIGTCL

SEQ ID NO: 7631 - protein, 269 aa, Thermomyces lanuginosus
EVSQDLFNQFNLFAQYSAAAYCGKNNDAPAGTNITCTGNICPEVEKADATLLYSFRNSGVGDVTGFLALDNTNKLIVLSFRGSRSIENWIGNLNFDLKEINDICSGCRGHDGFTSSWFSVADTLRQKVEDAVREHPDYRVVFTGHSLGGALATVAGADLRGNSYDIDVFSYGAPRVGNRAFAEFLTVQTGGTLYRITHTNDIVPRLPPREFGYSHSSPEYWIKSGTLVPVRRRDIVKIEGIDATGGNNQPNIPDITAHLWYFGLIGTCL

SEQ ID NO: 7632 - protein, 269 aa, Thermomyces lanuginosus
EVSQDLFNQFNLFAQYSAAAYCGKNNNAPAGTNITCTGNICPEVEKADATILYSFRDSGVGDVTGFLALDNTNKLIVLSFRGSRSIENWIGNLNFDLKEINDICSGCRGHDGFTSSWFSVADTLRQKVEDAVREHPDYRVVFTGHSLGGALATVAGADLRGNGYDIDVFSYGAPRVGNRAFAEFLTVQTGGTLYRITHTNDIVPRLPPREFGYSHSSPEYWIKSGTLVPVRRRDIVKIEGIDAEGGNNQPNIPDITAHLWYFGLIGTCL

SEQ ID NO: 7633 - protein, 269 aa, Thermomyces lanuginosus
EVSQDLFNQFNLFAQYSAAAYCGKNNDAPAGTNITCTGNACPEVEKADATILYSFEDSGVGDVTGFLALDNTNKLIVLSFRGSRSIENWIGNLNFDLKEINDICSGCRGHDGFTSSWRSVADTLRQKVEDAVREHPDYRVVFAGHSLGGALATVAGADLRGNGYDIDVFSYGAPRVGNRAFAEFLTVQTGGTLYRITNTNDCVPRLPPRQFGYSHSSPEYWIKSGTLPPVRRRDIVKIEGIDATGGNNQPNICDIPAHLWYFGLIGTCL

SEQ ID NO: 7634 - protein, 269 aa, Thermomyces lanuginosus
EVSQDLFNQFKLFAQYSAAAYCKKNNDAPAGTNITCTGNACPEVEKADATFLYSFEDSGVGDVTGFLALDNTNKRIILSFRGSRSIENWIGNLNFDLKEINDICSGCRGHDGFTSSWRSVADTLRQKVEAAVREHPDYRVVFTGHSLGGALATIAWADLRGNGYDIDVFSYGAPRVGNRAFAEFLTTQQGGTLYRITHTNDIVPRLPPREFGYSHSSPEYWIKSGTLVPVTRNDIVKIEGIDATGGNNQPNIPDIPAHLWYFGLIGTCL

SEQ ID NO: 7635 - protein, 269 aa, Thermomyces lanuginosus
EVSQDLFNQFNLFAQYSAAAYCGKNNDAPAGTNITCTGNICPEVEKADATLLYSFRNSGVGDVTGFLALDNTNKLIVLSFRGSRSIENWIGNLNFDLIEINDICSGCRGHDGFTSSWFSVADTLRQKVEDAVREHPDYRVVFTGHSLGGALATVAGADLRGNSYDIDVFSYGAPRVGNRAFAEFLTVQTGGTLYRITHTNDIVPRLPPREFGYSHSSPEYWIKSGTLVPVRRRDIVKIEGIDATGGNNQPNIPDIPAHLWYFGLIGTCL

SEQ ID NO: 7636 - protein, 269 aa, Thermomyces lanuginosus
EVSQDLFNQFNLFAQYSAAAYCGKNNDAPAGTNITCTGNICPEVEKADATFLYSFRNSGVGDVTGFLALDNTNKLIVLSFRGSRSIENWIGNLNFDLIEINDICSGCRGHDGFTSSWFSVADTLRQKVEDAVREHPDYRVVFTGHSLGGALATVAGADLRGNSYDIDVFSYGAPRVGNRAFAEFLTVQTGGTLYRITHTNDIVPRLPPREFGYSHSSPEYWIKSGTLVPVRRRDIVKIEGIDATGGNNQPNIPDITAHLWYFGLIGTCL

SEQ ID NO: 7637 - protein, 269 aa, Thermomyces lanuginosus
EVSQDLFNQFNLFAQYSAAAYCGKNNRAPAGTNITCTANACPEVEKADATFLYSFEDSGVGDVTGFLALDNTNKLIVLSFRGSRSIENWITNLNFELKEINDICSGCRGHAGFTSSWRSVADTLRQKVEDAVREHPDYRVVFTGHSLGGALATVAGADLRGNKYDIDVFSYGAPRVGNRAFAEFLTVQTGGTLYRITHTNDIVPRLPPREFGYSHSSPEYWIKSGTLVPVRRRDIVKIEGIDATGGNNQPNIPSIPAHLWYFGLIGTCL

SEQ ID NO: 7638 - protein, 269 aa, Thermomyces lanuginosus
EVSQDLFNQFNLFAQYSKAAYCKANNDAPAGTNITCTGNACPEVEKADATFLYSFEDSGVGDVTGFLALDNTNKLIILSFRGSRSIENWIGNLNFDLKEINDICSGCRGHDGFTSSWRSVADTLRQKVEAAVREHPDYRVVFTGHSLGGALATIAWADLRGNGYDIDVFSYGAPRVGNRAFAEFLTTQQGGTLYRITHTNDIVPRLPPREFGYSHSSPEYWIKSGTLVPVTRNDIVKIEGIDATGGNNQPNIPDIPAHLWYFGLIGTCL

SEQ ID NO: 7639 - protein, 269 aa, Thermomyces lanuginosus
EVSQDLFNQFNLFAQYSAAAYCKKNNSAPAGTNITCTGNACPEVEKADATTLYSFKDSGVGDVTGFLALDNTNKGIVLSFRGSRSIENWIQNLNFDLKEINDICSGCRGHDGFTSSWRSVADTLRQKVEDAVREHPDYRVVFTGHSLGGALATVAGADLRGNGYDIDVFSYGAPRVGNRAFAEFLTNQTGGTLYRITHTNDIVPRLPPREFGYSHSSPEYWIKSGTLVPVTRNDIVKIEGIDATGGNNQPNQPDIPAHLWYFGRIGTCL

SEQ ID NO: 7640 - protein, 269 aa, Thermomyces lanuginosus
EVSQDLFNQFNLFAQYSAAAYCSKNNNAPAGTNITCTGNACPEVEKADATILYSFRDSGVGDVTGFLALDNTNKLIVLSFRGSRSIENWIGNLNFDLKEINDICSGCRGHDGFTSSWFSVADTLRQKVEDAVREHPDYRVVFTGHSLGGALATVAGADLRGNGYDIDVFSYGAPRVGNRAFAEFLTVQTGGTLYRITHTNDIVPRLPPREFGYSHSSPEYWIKSGTLVPVRRRDIVKIEGIDAEGGNNQPNIPDITAHLWYFGLIGTCL

SEQ ID NO: 7641 - protein, 269 aa, Thermomyces lanuginosus
EVSQDLFNQFNLFAQYSAAAYCSKNNNAPAGTNITCTGNACPEVEKADATFLYSFRDSGVGDVTGFLALDNTNKLIVLSFRGSRSIENWIGNLNFDLIEINDICSGCRGHDGFTSSWFSVADTLRQKVEDAVREHPDYRVVFTGHSLGGALATVAGADLRGNGYDIDVFSYGAPRVGNRAFAEFLTVQTGGTLYRITHTNDIVPRLPPREFGYSHSSPEFWIKSGTLVPVRRRDIVKIEGIDAEGGNNQPNIPDIPAHLWYFGLIGTCL

SEQ ID NO: 7642 - protein, 269 aa, Thermomyces lanuginosus
EVSQDLFNQFNLFAQYSAAAYCGKNNDAPAGTNITCTGNICPEVEKADATLLYSFRNSGVGDVTGFLALDNTNKLIVLSFRGSRSIENWIGNLNFDLIEINDICSGCRGHDGFTSSWFSVADTLRQKVEDAVREHPDYRVVFTGHSLGGALATVAGADLRGNGYDIDVFSYGAPRVGNRAFAEFLTVQTGGTLYRITHTNDIVPRLPPREFGYSHSSPEYWIKSGTLVPVRRRDIVKIEGIDATGGNNQPNIPDITAHLWYFGLIGTCL

SEQ ID NO: 7643 - protein, 269 aa, Thermomyces lanuginosus
EVSQDLFNQFNLFAQYSAAAYCSKNNNAPAGTNITCTGNICPEVEKADATFLYSFRDSGEGDVTGFLALDNTNKLIVLSFRGSRSIENWIGNLNFDLKEINDICSGCRGHDGFTSSWFSVADTLRQKVEDAVREHPDYRVVFTGHSLGGALATVAGADLRGNGYDIDVFSYGAPRVGNRAFAEFLTVQTGGTLYRITHTNDIVPRLPPREFGYSHSSPEYWIKSGTLVPVRRRDIVKIEGIDAEGGNNQPNIPDIPAHLWYFGLIGTCL

SEQ ID NO: 7644 - protein, 269 aa, Thermomyces lanuginosus
EVSQDLFNQFNLFAQYSKAAYCQKNNSAEAGTNITCTGNACPEVEKADATFLYSFEDSGVGDVTGFLALDNTNKQIILSFRGSRSIENWIGNLNFDLKEINDICSGCKGHDGFTSSWRSVADTLRQKVEDAVREFPDYRVVFTGHSLGGALATVAGADLRGNGYDIDVFSYGAPRVGNRAFAEFLTHQTGGTLYRITHTNDIVPRLPPREFGYSHSSPEYWIKSGTLVPVTRNDIVKIEGIDATGGNNQPNIPDIPAHLWYFGLIGTCL

SEQ ID NO: 7645 - protein, 269 aa, Thermomyces lanuginosus
EVSQDLFNQFNLFAQYSAAAYCGKNNRAPAGTNITCTANACPEVEKADATFLYSFEDSGVGDVTGFLALDNTNKLIVLSFRGSRSIENWIGNLNFELKEINDICSGCRGHAGFTSSWRSVADTLRQKVEDAVREHPDYRVVFTGHSLGGALATVAGADLRGNPYDIDVFSYGAPRVGNRAFAEFLTVQTGGTLYRITHTNDIVPRLPPREFGYSHSSPEYWIKSGTLVPVRRRDIVKIEGIDATGGNNQPNIPSITAHLWYFGLIGTCL

SEQ ID NO: 7646 - protein, 269 aa, Thermomyces lanuginosus
EVSQDLFNQFNLFAQYSAAAYCQKNNDAPAGTNITCTGNACPEVEKADATFLYSFKDSGVGDVTGFLALDNTNKQIVLSFRGSRSIENWIGNLNFDLKEINDICSGCRGHAGFTSSWRSVADTLRQKVEAAVREHPDYRVVFTGHSLGGALATIAWADLRGNGYDIDVFSYGAPRVGNRAFAEFLTVQQGGTLYRITHTNDIVPRLPPREFGYSHSSPEYWIKSGTLVPVTRNDIVKIEGIDATGGNNQPNIPDIPAHLWYFGRIGTCL

SEQ ID NO: 7647 - protein, 269 aa, Thermomyces lanuginosus
EVSQDLFNQFNLFAQYSAAAYCSKNNNAPAGTNITCTGNACPEVEKADATILYSFRDSGVGDVTGFLALDNTNKLIVLSFRGSRSIENWIGNLNFDLIEINDICSGCRGHDGFTSSWFSVADTLRQKVEDAVREHPDYRVVFTGHSLGGALATVAGADLRGNGYDIDVFSYGAPRVGNRAFAEFLTVQTGGTLYRITHTNDIVPRLPPREFGYSHSSPEYWIKSGTLVPVRRRDIVKIEGIDAEGGNNQPNIPDIPAHLWYFGLIGTCL

SEQ ID NO: 7648 - protein, 269 aa, Thermomyces lanuginosus
EVSQDLFNQFNLFAQYSAAAYCGKNNRAPAGTNITCTANACPEVEKADATFLYSFEDSGVGDVTGFLALDNTNKLIVLSFRGSRSIENWIGNLNFELKEINDICSGCRGHAGFTSSWRSVADTLRQKVEDAVREHPDYRVVFTGHSLGGALATVAGADLRGNKYDIDVFSYGAPRVGNRAFAEFLTVQTGGTLYRITHTNDIVPRLPPREFGYSHSSPEYWIKSGTLVPVRRRDIVKIEGIDATGGNNQPNIPSIWAHLWYFGLIGTCL

SEQ ID NO: 7649 - protein, 269 aa, Thermomyces lanuginosus
EVSQDLFNQFNLFAQYSAAAYCGKNNRAPAGTNITCTANACPEVEKADATFLYSFEDSGVGDVTGFLALDNTNKLIVLSFRGSRSIENWIGNLNFELKEINDICSGCRGHAGFTSSWRSVADTLRQKVEDAVREHPDYRVVFTGHSLGGALATVAGADLRGNKYDIDVFSYGAPRVGNRAFAEFLTVQTGGTLYRITHTNDIVPRLPPREFGYSHSSPEYWIKSGTLVPVRRRDIVKIEGIDATGGNNQPNIPSIQAHLWYFGLIGTCL

SEQ ID NO: 7650 - protein, 269 aa, Thermomyces lanuginosus
EVSQDLFNQFNLFAQYSAAAYCGKNNDAPAGTQITCTWNACPEVEKADATFLYSFEDSGVGDVTGFLALDNTNKLIVLSFRGSRSIENWITNLNFDLKEINDICSGCRGHDGFISSWRSVADTLRQKVEDAVREHPDYRVVFTGHSLGGALATVAGADLRGNKYDIDVFSYGAPRVGNRAFAEFLTVQTGGTLYRITHTNDIVPRLPPRDFGYSHSSPEYWIKSGTLVPVRRRDIVKIEGIDATGGNNQPNIPDITAHLWYFGLIGTCL

SEQ ID NO: 7651 - protein, 269 aa, Thermomyces lanuginosus
EVSQDLFNQFRLFAQYSAAAYCGKNNDAPAGTQITCTANACPEVEKADATFLYSFEDSGVGDVTGFLALDNTNKLIVLSFRGSRSIENWITNLNFDLKEINDICSGCRGHDGFTSSWRSVADTLRQKVEDAVREHPDYRVVFTGHSLGGALATVAGADLRGNPYDIDVFSYGAPRGGNRAFAEFLTVQTGGTLYRITHTNDIVPRLPPREFGYSHSSPEYWIKSGTLVPVRRRDIVKIEGIDATGGNNQPNIPSIPAHLWYFGLIGTCL

SEQ ID NO: 7652 - protein, 269 aa, Thermomyces lanuginosus
EVSVDLFNQFNLFAQYSAAAYCGKNNDAPAGTNITCTGNACPEVEKADATFLYSFEDNGSGDVTGFLALDNTNKLIVLSFRGSRSVENWAGNLNFDLKEINDICSGCRGHDGFTSSWRSVADTLRQKVEDAVREHPDYRVVFTGHSLGGGLATVAGADLRGNGYDIDVFSYGAPRVGNRAFAEFLTVQTGGTLYRITHTNDIVPRLPPREFGYSHSSPEYWIKSGTLVPVRRRDIVKIEGIDATGGNNLPNIPDIPAHLWYFGLIGTCL

SEQ ID NO: 7653 - protein, 269 aa, Thermomyces lanuginosus
EVSQDLFNQFNLFAQYSAAAYCGKNNRAPAGTQITCTANACPEVEKADATFLYSFEDSGVGDVTGFLALDNTNKLIVLSFRGSRSIENWIGNLNFELKEINDICSGCRGHAGFTSSWRSVADTLRQKVEDAVREHPDYRVVFTGHSLGGALATVAGADLRGNGYDIDVFSYGAPRVGNRAFAEFLTVQTGGTLYRITHTNDIVPRLPPREFGYSHSSPEYWIKSGTLVPVRRRDIVKIEGIDATGGNNQPNIPSITAHLWYFGLIGTCL

SEQ ID NO: 7654 - protein, 269 aa, Thermomyces lanuginosus
EVSQDLFNQFRLFAQYSAAAYCGKNNDAPAGTQITCTANACPEVEKADATFLYSFEDSGVGDVTGFLALDNTNKLIVLSFRGSRSIENWIANLNFDLKEINDICSGCRGHDGFTSSWRSVADTLRQKVEDAVREHPDYRVVFTGHSLGGALATVAGADLRGNKYDIDVFSYGAPRDGNRAFAEFLTVQTGGTLYRITHTNDIVPRLPPREFGYSHSSPEYWIKSGTLVPVRRRDIVKIEGIDATGGNNQPNIPSIPAHLWYFGLIGTCL

SEQ ID NO: 7655 - protein, 269 aa, Thermomyces lanuginosus
EVSQDLFNQFNLFAQYSAAAYCGKNNDAPAGTNITCTGNICPEVEKADATILYSFRDSGKGDVTGFLALDNTNKLIVLSFRGSRSIENWIGNLNFDLKEINDICSGCRGHDGFTSSWFSVADTLRQKVEDAVREHPDYRVVFTGHSLGGALATVAGADLRGNGYDIDVFSYGAPRVGNRAFAEFLTVQTGGTLYRITHTNDIVPRLPPREFGYSHSSPEYWIKSGTLVPVRRRDIVKIEGIDAEGGNNQPNIPDITAHLWYFGLIGTCL

SEQ ID NO: 7656 - protein, 269 aa, Thermomyces lanuginosus
EVSQDLFNQFNLFAQYSKAAYCKKNNDAPAGTNITCTGNACPEVFKADVTFLYSFEDSGVGDVTGFLALDNTSKQIVLSFRGSRSIENWIGNLNFDLKEINDICSGCKGHDGFTSSWRSVADTLRQKVEDAVREHPDYRVVFTGHSLGGALATVAGADLRGNGYDIDVFSYGAPRVGNRAFAEFLTTQDGGTLYRITHTNDIVPRLPPREFGYSHSSPEYWIKSGTLVPVTRNDIVKIEGIDATGGNNQPNIPDIPAHLWYFGLIGTCL

SEQ ID NO: 7657 - protein, 269 aa, Thermomyces lanuginosus
EVSQDLFNQFNLFAQYSAAAYCGKNNRAPAGTQITCTGNACPEVEKADATFLYSFEDSGVGDVTGFLALDNTNKLIVLSFRGSRSIENWITNLRFDLKEINDICSGCRGHAGFTSSWRSVADTLRQKVEDAVREHPDYRVVFTGHSLGGALATVAGADLRGNGYDIDVFSYGAPRVGNRAFAEFLTVQTGGTLYRITHTNDIVPRLPPREFGYSHPSPEYWIKSGTGVPVRRRDIVKIEGIDATGGNNQPNIPDIPAHLWYFGLIGTCL

SEQ ID NO: 7658 - protein, 269 aa, Thermomyces lanuginosus
EVSQDLFNQFNLFAQYSAAAYCQKNNDAPAGTNITCTGNACPEVEKADATTLYSFEDMGVGDVTGFLALDNTNKQIVLSFRGSRSIENWIQNLNFDLKEINDICSGCRGHDGFTSSWRSVADTLRQKVEAAVREHPDYRVVFTGHSLGGALATVAGADLRGNGYDIDVFSYGAPRVGNRAFAEFLTHQTGGTLYRITHTNDIVPRLPPREFGYSHSSPEYWIKSGTLVPVTRNDIVKIEGIDATGGNNQPNQPDIPAHLWYFGRIGTCL

SEQ ID NO: 7659 - protein, 269 aa, Thermomyces lanuginosus
EVSQDLFNQFNLFAQYSAAAYCSKNNNAPAGTNITCTGNICPEVEKADATFLYSFRDSGVGDVTGFLALDNTNKLIVLSFRGSRSIENWIGNLNFDLKEINDICSGCRGHDGFTSSWFSVADTLRQKVEDAVREHPDYRVVFTGHSLGGALATVAGADLRGNGYDIDVFSYGAPRVGNRAFAEFLTVQTGGTLYRITHTNDIVPRLPPREFGYSHSSPEYWIKSGTLVPVRRRDIVKIEGIDAEGGNNQPNIPDITAHLWYFGLIGTCL

SEQ ID NO: 7660 - protein, 269 aa, Thermomyces lanuginosus
EVSQDLFNQFNLFAQYSKAAYCQKNNSAEAGTNITCTGNACPEVEKADATFLYSFEDSGVGDVTGFLALDNTNKQIILSFRGSRSIENWIGNLNFDLKEINDICSGCRGHDGFTSSWRSVADTLRQKVEDAFREHPDYRVVFTGHSLGGALATVAWADLRGNGYDIDVFSYGAPRVGNRAFAEFLTTQTGGTLYRITHTNDIVPRLPPREFGYSHSSPEYWIKSGTLVPVTRNDIVKIEGIDATGGNNQPNIPDIPAHLWYFGLIGTCL

SEQ ID NO: 7661 - protein, 269 aa, Thermomyces lanuginosus
EVSQDLFNQFNLFAQYSAAAYCSKNNNAPAGTNITCTGNACPEVEKADATILYSFRDSGVGDVTGFLALDNTNKLIVLSFRGSRSIENWIGNLNFDLIEINDICSGCRGHDGFTSSWFSVADTLRQKVEDAVREHPDYRVVFTGHSLGGALATVAGADLRGNGYDIDVFSYGAPRVGNRAFAEFLTVQTGGTLYRITHTNDIVPRLPPREFGYSHSSPEFWIKSGTLVPVRRRDIVKIEGIDATGGNNQPNIPDIPAHLWYFGLIGTCL

SEQ ID NO: 7662 - protein, 269 aa, Thermomyces lanuginosus
EVSQDLFNQFNLFAQYSAAAYCGKNNRAPAGTNITCTGNACPEVEKADATFLYSFEDSGVGDVTGFLALDNTNKLIVLSFRGSRSIENWVTNFKFDLKEINDICSGCRGHAGFTSSWRSVADTLRQKVEDAVREHPDYRVVFTGHSLGGALATVAGADLRGNGYDIDVFSYGAPRVGNRAFAEFLTVQTGGTLYRITHTNDIVPRLPPREFGYSHPSPEYWIKSGTGVPVTRNDIVKIEGIDATGGNNQPNIPDITAHLWYFGLIGTCL

SEQ ID NO: 7663 - protein, 269 aa, Thermomyces lanuginosus
EVSQDLFNQFNLFAQYSAAAYCGKNNDAPAGTQITCTGNACPEVEKADATFLYSFEDSGVGDVTGFLALDNTNKLIVLSFRGSRSIENWIANLKFDLKEINDICSGCRGHAGFTSSWRSVADTLRQKVEDAVREHPDYRVVFTGHSLGGALATVAGADLRGNKYDIDVFSYGAPRVGNRAFAEFLTVQTGGTLYRITHTNDIVPRLPPREFGYSHSSPEYWIKSGTFVPVRRRDIVKIEGIDATGGNNRPNIPDIPAHLWYFGLIGTCL

SEQ ID NO: 7664 - protein, 269 aa, Thermomyces lanuginosus
EVSQDLFNQFNLFAQYSAAAYCGKNNSAPAGTNITCTGNACPEVEKADATFLYSFKDSGVGDVTGFLALDNTNKQIVLSFRGSRSIENWIGNLRFDLKEINDICSGCRGHAGFTSSWRSVADTLRQKVEAAVREHPDYRVVFTGHSLGGALATVAGADLRGNGYDIDVFSYGAPRVGNRAFAEFLTNQQGGTLYRITHTNDIVPRLPPREFGYSHSSPEYWIKSGTLVPVTRNDIVKIEGIDATGGNNQPNIPDIPAHLWYFGRIGTCL

SEQ ID NO: 7665 - protein, 269 aa, Thermomyces lanuginosus
EVSQDLFNQFNLFAQYSAAAYCGKNNNAPAGTNITCTGNACPEVEKADATILYSFRDSGVGDVTGFLALDNTNKLIVLSFRGSRSIENWIGNLNFDLIEINDICSGCRGHDGFTSSWFSVADTLRQKVEDAVREHPDYRVVFTGHSLGGALATVAGADLRGNGYDIDVFSYGAPRVGNRAFAEFLTVQTGGTLYRITHTNDIVPRLPPREFGYSHSSPEFWIKSGTLVPVRRRDIVKIEGIDAEGGNNQPNIPDIPAHLWYFGLIGTCL

SEQ ID NO: 7666 - protein, 269 aa, Thermomyces lanuginosus
EVSQDLFNQFRLFAQYSAAAYCGKNNDAPAGTQITCTGNACPEVEKADATFLYSFEDSGVGDVTGFLALDNTNKLIVLSFRGSRSIENWITNLNFDLKEINDICSGCRGHDGFTSSWRSVADTLRQKVEDAVREHPDYRVVFTGHSLGGALATVAGADLRGNKYDIDVFSYGAPRVGNRAFAEFLTVQTGGTLYRITHTNDIVPRLPPREFGYSHSSPEYWIKSGTGVRVRRRDIVKIEGIDATGGNNQPNIPSIPAHLWYFGLIGTCL

SEQ ID NO: 7667 - protein, 269 aa, Thermomyces lanuginosus
EVSQDLFNQFNLFAQYSAAAYCQKNNSAPAGTNITCTGNACPEVEKADATFLYSFEDSGVGDVTGFLALDNTNKQIVLSFRGSRSIENWIGNLRFDLKEINDICSGCRGHAGFTSSWRSVADTLRQKVEAAVREHPDYRVVFTGHSLGGALATIAWADLRGNGYDIDVFSYGAPRVGNRAFAEFLTVQTGGTLYRITHTNDIVPRLPPREFGYSHSSPEYWIKSGTLVPVTRNDIVKIEGIDATGGNNQPNIPDIPAHLWYFGRIGTCL

SEQ ID NO: 7668 - protein, 269 aa, Thermomyces lanuginosus
EVSQDLFNQFNLFAQYSAAAYCGKNNRAPAGTNITCTANACPEVEKADATFLYSFEDSGVGDVTGFLALDNTNKLIVLSFRGSRSIENWIGNLNFLLKEINDICSGCRGHAGFTSSWRSVADTLRQKVEDAVREHPDYRVVFTGHSLGGALATVAGADLRGNKYDIDVFSYGAPRVGNRAFAEFLTVQTGGTLYRITHTNDIVPRLPPREFGYSHSSPEYWIKSGTLVPVRRRDIVKIEGIDATGGNNQPNIPSITAHLWYFGLIGTCL

SEQ ID NO: 7669 - protein, 269 aa, Thermomyces lanuginosus
EVSQDLFNQFRLFAQYSAAAYCGKNNDAPAGTQITCTGNACPEVEKADATFLYSFQDSGVGDVTGFLALDNTNKLIVLSFRGSRSIENWITNLNFDLKEINDICSGCRGHDGFTSSWRSVADTLRQKVEDAVREHPDYRVVFTGHSLGGALATVAGADLRGNKYDIDVFSYGAPRQGNRAFAEFLTVQTGGTLYRITHTNDIVPRLPPREFGYSHSSPEYWIKSGTLVPVRRRDIVKIEGIDATGGNNQPNIPSIPAHLWYFGLIGTCL

SEQ ID NO: 7670 - protein, 269 aa, Thermomyces lanuginosus
EVSQDLFNQFNLFAQYSAAAYCGKNNNAPAGTNITCTGNACPEVEKADATFLYSFRDSGVGDVTGFLALDNTNKLIVLSFRGSRSIENWIGNLNFDLIEINDICSGCRGHDGFTSSWFSVADTLRQKVEDAVREHPDYRVVFTGHSLGGALATVAGADLRGNGYDIDVFSYGAPRVGNRAFAEFLTVQTGGTLYRITHTNDIVPRLPPREFGYSHSSPEFWIKSGTLVPVRRRDIVKIEGIDAEGGNNQPNIPDITAHLWYFGLIGTCL

SEQ ID NO: 7671 - protein, 269 aa, Thermomyces lanuginosus
EVSQDLFNQFNLFAQYSAAAYCSKNNNAPAGTNITCTGNICPEVEKADATILYSFRDSGVGDVTGFLALDNTNKLIVLSFRGSRSIENWIGNLNFDLKEINDICSGCRGHDGFTSSWFSVADTLRQKVEDAVREHPDYRVVFTGHSLGGALATVAGADLRGNGYDIDVFSYGAPRVGNRAFAEFLTVQTGGTLYRITHTNDIVPRLPPREFGYSHSSPEYWIKSGTLVPVRRRDIVKIEGIDAEGGNNQPNIPDIPAHLWYFGLIGTCL

SEQ ID NO: 7672 - protein, 269 aa, Thermomyces lanuginosus
EVSQDLFNQFNLFAQYSAAAYCGKNNDAPAGTQITCTGNACPEVEKADATFLYSFEDSGVGDVTGFLALDNTNKLIVLSFRGSRSIENWITNLNFDLKEINDICSGCRGHDGFISSWRSVADTLRQKVEDAVREHPDYRVVFTGHSLGGALATVAGADLRGNKYDIDVFSYGAPRVGNRAFAEFLTVQTGGTLYRITHTNDIVPRLPPRDFGYSHSSPEYWIKSGTLVPVRRRDIVKIEGIDATGGNNQPNIPGIAAHLWYFGLIGTCL

SEQ ID NO: 7673 - protein, 269 aa, Thermomyces lanuginosus
EVSQDLFNQFNLFAQYSAAAYCGKNNRAPAGTNITCTGNACPEVEKADATFLYSFEDNGSGDVTGFLALDNTNKLIVLSFRGSRSVENWIGNLNFDLKEINDICSGCRGHDGFTSSWRSVADTLRQKVEDAVREHPDYRVVFTGHSLGGGLATVAGADLRGNGYDIDVFSYGAPRVGNRAFAEFLTVQTGGTLYRITHTNDIVPRLPPREFGYSHSSPEYWIKSGTGVPVRRRDIVKIEGIDATGGNNQPNIPDIKAHLWYFGLIGTCL

SEQ ID NO: 7674 - protein, 269 aa, Thermomyces lanuginosus
EVSQDLFNQFNLFAQYSAAAYCGKNNDAPAGTNITCTGNACPEVEKADATILYSFEDSGVGDVTGFLALDNTNKLIVLSFRGSRSIENWIGNLNFDLKEINDICSGCRGHDGFTSSWRSVADTLRQKVEDAVREHPDYRVVFTGHSLGGALATVAGADLRGNGYDIDVFSYGAPRVGNRAFAEFLTVQTGGTLYRITNTNDCVPRLPPRQFGYSHSSPEYWIKSGTLPPVRRRDIVKIEGIDATGGNNQPNICDITAHLWYFGLIGTCL

SEQ ID NO: 7675 - protein, 269 aa, Thermomyces lanuginosus
EVSQDLFNQFNLFAQYSAAAYCGKNNRAPAGTNITCTGNACPEVEKADATLLYSFEDSGVGDVTGFLALDNTNKLVVLSFRGSRSIENWIGNLNFDLKEIDDICSGCRGHAGFTSSWRSVADTLRQKVEDAVREHPDYRVVFTGHSLGGALATVAGADLRGRGYDIDVFSYGAPRVGNRAFAEFLTVQTGGTLYRITHTNDIVPRLPPREFGYSHPSPEYWIKSGTGVPVTRNDIVKIEGIDATGGNNQPNIPDITAHLWYFGLIGTCL

SEQ ID NO: 7676 - protein, 269 aa, Thermomyces lanuginosus
EVSQDLFNQFNLFAQYSAAAYCGKNNRAPAGTQITCTGNACPEVEKADATFLYSFEDSGVGDVTGFLALDNTNKLIVLSFRGSRSIENWIANLNFELKEINDICSGCRGHAGFTSSWRSVADTLRQKVEDAVREHPDYRVVFTGHSLGGALATVAGADLRGNGYDIDVFSYGAPRVGNRAFAEFLTVQTGGTLYRITHTNDIVPRLPPREFGYSHSSPEYWIKSGTLVPVRRRDIVKIEGIDATGGNNQPNIPGITAHLWYFGLIGTCL

SEQ ID NO: 7677 - protein, 269 aa, Thermomyces lanuginosus
EVSQDLFNQFNLFAQYSKAAYCQKNNSAEAGTNITCTGNACPEVEKADATFLYSFEDSGVGDVTGFLALDNTNKQIILSFRGSRSIENWIGNLNFDLKEINDICSGCKGHDGFTSSWRSVADTLRQKVEDAVREHPDYRVVFTGHSLGGALATVAWADLRGNGYDIDVFSYGAPRVGNRAFAEFLTHQTGGTLYRITHTNDIVPRLPPREFGYSHSSPEYWIKSGTLVPVTRNDIVKIEGIDATGGNNQPNIPDIPAHLWYFGLIGTCL

SEQ ID NO: 7678 - protein, 269 aa, Thermomyces lanuginosus
EVSQDLFNQFNLFAQYSKAAYCQKNNDAPAGTNITCTGNACPEVFKADVTFLYSFEDSGVGDVTGFLALDNTSKQIVLSFRGSRSIENWIGNLNFDLKEINDICSGCKGHDGFTSSWRSVADTLRQKVEDAVREHPDYRVVFTGHSLGGALATVAGADLRGNGYDIDVFSYGAPRVGNRAFAEFLTTQDGGTLYRITHTNDIVPRLPPREFGYSHSSPEYWIKSGTLVPVTRNDIVKIEGIDATGGNNQPNIPDIPAHLWYFGLIGTCL

SEQ ID NO: 7679 - protein, 269 aa, Thermomyces lanuginosus
EVSQDLFNQFNLFAQYSKAAYCQKNNSAEAGTNITCTGNACPEVEKADATFLYSFEDSGVGDVTGFLALDNTNKQIILSFRGSRSIENWIGNLNFDLKEINDICSGCRGHDGFTSSWRSVADTLRQKVEDAVREFPDYRVVFTGHSLGGALATVAWADLRGNGYDIDVFSYGAPRVGNRAFAEFLTTQTGGTLYRITHTNDIVPRLPPREFGYSHSSPEYWIKSGTLVPVTRNDIVKIEGIDATGGNNQPNIPDIPAHLWYFGLIGTCL

SEQ ID NO: 7680 - protein, 269 aa, Thermomyces lanuginosus
EVSQDLFNQFKLFAQYSAAAYCKKNNDAPAGTNITCTGNACPEVEKADATFLYSFEDSGVGDVTGFLALDNTNKRIVLSFRGSRSIENWIGNLNFDLKEINDICSGCRGHAGFTSSWRSVADTLRQKVEAAVREHPDYRVVFTGHSLGGALATIAGADLRGNGYDIDVFSYGAPRVGNRAFAEFLTNQQGGTLYRITHTNDIVPRLPPREFGYSHSSPEYWIKSGTLVPVTRNDIVKIEGIDATGGNNQPNIPDIPAHLWYFGRIGTCL

SEQ ID NO: 7681 - protein, 269 aa, Thermomyces lanuginosus
EVSQDLFNQFNLFAQYSAAAYCGKNNRAPAGTNITCTGNACPEVEKADATFLYSFEDSGVGDVTGFLALDNTNKLIVLSFRGSRSIENWISNFRFGLKEINDICSGCRGHAGFTSSWRSVADTLRQKVEDAVREHPDYRVVFTGHSLGGALATVAGADLRGNGYDIDVFSYGAPRVGNRAFAEFLTVQTGGTLYRITHTNDIVPRLPPREFGYSHPSPEYWIKSGTGVPVTRNDIVKIEGIDATGGNNQPNIPDITAHLWYFGLIGTCL

SEQ ID NO: 7682 - protein, 269 aa, Thermomyces lanuginosus
EVSQDLFNQFNLFAQYSAAAYCQKNNSAPAGTNITCTGNACPEVEKADATFLYSFEDSGVGDVTGFLALDNTNKQIVLSFRGSRSIENWIGNLRFDLKEINDICSGCRGHDGFTSSWRSVADTLRQKVEAAVREHPDYRVVFTGHSLGGALATIAWADLRGNGYDIDVFSYGAPRVGNRAFAEFLTNQTGGTLYRITHTNDIVPRLPPREFGYSHSSPEYWIKSGTLVPVTRNDIVKIEGIDATGGNNQPNIPDIPAHLWYFGRIGTCL

SEQ ID NO: 7683 - protein, 269 aa, Thermomyces lanuginosus
EVSQDLFNQFNLFAQYSAAAYCKANNDAPAGTNITCTGNACPEVEKADATFLYSFEDSGVGDVTGFLALDNTNKQIVLSFRGSRSIENWIGNLRFDLKEINDICSGCRGHDGFTSSWRSVADTLRQKVEDAVREHPDYRVVFTGHSLGGALATIAWADLRGNGYDIDVFSYGAPRVGNRAFAEFLTNQQGGTLYRITHTNDIVPRLPPREFGYSHSSPEYWIKSGTLVPVTRNDIVKIEGIDATGGNNQPNIPDIPAHLWYFGRIGTCL

SEQ ID NO: 7684 - protein, 269 aa, Thermomyces lanuginosus
EVSQDLFNQFNLFAQYSAAAYCGKNNRAPAGTQITCTGNACPEVEKADATFLYSFEDSGVGDVTGFLALDNTNKLIVLSFRGSRSIENWIGNLNFDLKEINDICSGCRGHDGFTSSIRSVADTLRQKVEDAVREHPDYRVVFTGHSLGGALATVAGADLRGNGYDIDVFSYGAPRQGNRAFAEFLTVQTGGTLYRITHTNDIVPRLPPREFGYSHSSPEYWIKSGTGVPVRRRDIVKIEGIDATGGNNRPNIPSIPAHLWYFGLIGTCL

SEQ ID NO: 7685 - protein, 269 aa, Thermomyces lanuginosus
EVSQDLFNQFNLFAQYSAAAYCGKNNRAPAGTNITCTGNACPEVEKADATFLYSFENSGSGDVTGFLALDNTNKLIVLSFRGSRSVENWIGNLNFDLKEINDICSGCRGHDGFTSSWRSVADTLRQKVEDAVREHPDYRVVFTGHSLGGGLATVAGADLRGNGYDIDVFSYGAPRVGNRAFAEFLTVQTGGTLYRITHTNDIVPRLPPREFGYSHSSPEYWIKSGTGVPVRRRDIVKIEGIDATGGNNQPNIPDIKAHLWYFGLIGTCL

SEQ ID NO: 7686 - protein, 269 aa, Thermomyces lanuginosus
EVSQDLFNQFNLFAQYSAAAYCGKNNRAPAGTNITCTANACPEVEKADATFLYSFEDSGVGDVTGFLALDNTNKLIVLSFRGSRSIENWIGNLNFTLKEINDICSGCRGHAGFTSSWRSVADTLRQKVEDAVREHPDYRVVFTGHSLGGALATVAGADLRGNKYDIDVFSYGAPRVGNRAFAEFLTVQTGGTLYRITHTNDIVPRLPPREFGYSHSSPEYWIKSGTLVPVRRRDIVKIEGIDATGGNNQPNIPSITAHLWYFGLIGTCL

SEQ ID NO: 7687 - protein, 269 aa, Thermomyces lanuginosus
EVSQDLFNQFNLFAQYSKAAYCQKNNSAEAGTNITCTGNACPEVEKADATFLYSFEDMGVGDVTGFLALDNTNKLIILSFRGSRSIENWIGNLNFDLKEINDICSGCKGHDGFTSSWRSVADTLRQKVEDAVREFPDYRVVFTGHSLGGALATVAWADLRGNGYDIDVFSYGAPRVGNRAFAEFLTVQTGGTLYRITHTNDIVPRLPPREFGYSHSSPEYWIKSGTLVPVTRNDIVKIEGIDATGGNNQPNIPDIPAHLWYFGLIGTCL

SEQ ID NO: 7688 - protein, 269 aa, Thermomyces lanuginosus
EVSQDLFNQFNLFAQYSAAAYCGKNNRAPAGTNITCTANACPEVEKADATFLYSFEDSGVGDVTGFLALDNTNKLIVLSFRGSRSIENWIGNLNFELKEINDICSGCRGHAGFTSSWRSVADTLRQKVEDAVREHPDYRVVFTGHSLGGALATVAGADLRGNKYDIDVFSYGAPRVGNRAFAEFLTVQTGGTLYRITHTNDIVPRLPPREFGYSHSSPEYWIKSGTLVPVRRRDIVKIEGIDATGGNNQPNIPSISAHLWYFGLIGTCL

SEQ ID NO: 7689 - protein, 269 aa, Thermomyces lanuginosus
EVSQDLFNQFNLFAQYSAAAYCGKNNRAPAGTNITCTGNACPEVEKADATFLYSFEDSGVGDVTGFLALDNTNKLIVLSFRGSRSIENWISNFNINLKEINDICSGCRGHAGFTSSWRSVADTLRQKVEDAVREHPDYRVVFTGHSLGGALATVAGADLRGNGYDIDVFSYGAPRVGNRAFAEFLTVQTGGTLYRITHTNDIVPRLPPREFGYSHPSPEYWIKSGTGVPVTRNDIVKIEGIDATGGNNQPNIPDITAHLWYFGLIGTCL

SEQ ID NO: 7690 - protein, 269 aa, Thermomyces lanuginosus
EVSQDLFNQFNLFAQYSKAAYCQKNNSAEAGTNITCTGNACPEVEKADATFLYSFEDMGVGDVTGFLALDNTNKLIILSFRGSRSIENWIGNLNFDLKEINDICSGCKGHDGFTSSWRSVADTLRQKVEDAFREHPDYRVVFTGHSLGGALATVAWADLRGNGYDIDVFSYGAPRVGNRAFAEFLTVQTGGTLYRITHTNDIVPRLPPREFGYSHSSPEYWIKSGTLVPVTRNDIVKIEGIDATGGNNQPNIPDIPAHLWYFGLIGTCL

SEQ ID NO: 7691 - protein, 269 aa, Thermomyces lanuginosus
EVSQDLFNQFNLFAQYSAAAYCGKNNDAPAGTQITCTGNACPEVEKADATFLYSFEDSGVGDVTGFLALDNTNKLIVLSFRGSRSIENWITNLNFELTEINDICSGCRGHDGFISSWRSVADTLRQKVEDAVREHPDYRVVFTGHSLGGALATVAGADLRGNKYDIDVFSYGAPRVGNRAFAEFLTVQTGGTLYRITHTNDIVPRLPPRDFGYSHSSPEYWIKSGTLVPVRRRDIVKIEGIDATGGNNQPNIPDIPAHLWYFGLIGTCL

SEQ ID NO: 7692 - protein, 269 aa, Thermomyces lanuginosus
EVSQDLFNQFNLFAQYSAAAYCGKNNRAPAGTNITCTANACPEVEKADATFLYSFEDSGVGDVTGFLALDNTNKLIVLSFRGSRSIENWIGNLNFELKEINDICSGCRGHAGFTSSWRSVADTLRQKVEDAVREHPDYRVVFTGHSLGGALATVAGADLRGNKYDIDVFSYGAPRVGNRAFAEFLTVQTGGTLYRITHTNDIVPRLPPREFGYSHSSPEYWIKSGTLVPVRRRDIVKIEGIDATGGNNQPNIPSINAHLWYFGLIGTCL

SEQ ID NO: 7693 - protein, 269 aa, Thermomyces lanuginosus
EVSQDLFNQFNLFAQYSAAAYCGKNNRAPAGTQITCTGNACPEVEKADATFLYSFEDSGVGDVTGFLALDNTNKLIVLSFRGSRSIENWIANLNFEQKEINDICSGCRGHAGFTSSWRSVADTLRQKVEDAVREHPDYRVVFTGHSLGGALATVAGADLRGNGYDIDVFSYGAPRVGNRAFAEFLTVQTGGTLYRITHTNDIVPRLPPREFGYSHSSPEYWIKSGTLVPVRRRDIVKIEGIDATGGNNQPNIPDIRAHLWYFGLIGTCL

SEQ ID NO: 7694 - protein, 269 aa, Thermomyces lanuginosus
EVSQDLFNQFNLFAQYSAAAYCGKNNDAPAGTQITCTGNACPEVEKADATFLYSFEDSGVGDVTGFLALDNTNKLIVLSFRGSRSIENWITNLSFDLKEINDICSGCRGHAGFTSSWRSVADTLRQKVEDAVREHPDYRVVFTGHSLGGALATVARADLRGNTYDIDVFSYGAPRWGNRAFAEFLTVQTGGTLYRITHTNDIVPRLPPREFGYSHSSPEYWIKSGTLVPVRRRDIVKIEGIDATGGNNQPNIPDIPAHLWYFGLIGTCL

SEQ ID NO: 7695 - protein, 269 aa, Thermomyces lanuginosus
EVSQDLFNQFNLFAQYSAAAYCGKNNRAPAGTNITCTANACPEVEKADATVLYSFEDSGVGDVTGFLALDNTNKLIVLSFRGSRSIENWIGNLNFDLKEINDICSGCRGHAGFTSSWRSVADTLRQKVEDAVREHPDYRVVFTGHSLGGALATVAGADLRGNKYDIDVFSYGAPRVGNRAFAEFLTVQTGGTLYRITHTNDIVPRLPPREFGYSHSSPEYWIKSGTLVPVRRRDIVKIEGIDATGGNNQPNIPSITAHLWYFGLIGTCL

SEQ ID NO: 7696 - protein, 269 aa, Thermomyces lanuginosus
EVSQDLFNQFNLFAQYSAAAYCGKNNSAPAGTNITCTGNACPEVEKADATFLYSFKDSGVGDVTGFLALDNTNKQIVLSFRGSRSIENWIGNLRFDLKEINDICSGCRGHAGFTSSWRSVADTLRQKVEAAVREHPDYRVVFTGHSLGGALATIAWADLRGNGYDIDVFSYGAPRVGNRAFAEFLTVQTGGTLYRITHTNDIVPRLPPREFGYSHSSPEYWIKSGTLVPVTRNDIVKIEGIDATGGNNQPNIPDIPAHLWYFGRIGTCL

SEQ ID NO: 7697 - protein, 269 aa, Thermomyces lanuginosus
EVSQDLFNQFNLFAQYSAAAYCGKNNRAPAGTNITCTANACPEVEKADATFLYSFEDSGVGDVTGFLALDNTNKLIVLSFRGSRSIENWIGNLNFELKEINDICSGCRGHAGFTSSWRSVADTLRQKVEDAVREHPDYRVVFTGHSLGGALATVAGADLRGNKYDIDVFSYGAPRVGNRAFAEFLTVQTGGTLYRITHTNDIVPRLPPREFGYSHSSPEYWIKSGTLVPVRRRDIVKIEGIDATGGNNQPNIPSIAAHLWYFGLIGTCL

SEQ ID NO: 7698 - protein, 269 aa, Thermomyces lanuginosus
EVSQDLFNQFNLFAQYSAAAYCSKNNNAPAGTNITCTGNACPEVEKADATILYSFRDSGKGDVTGFLALDNTNKLIVLSFRGSRSIENWIGNLNFDLKEINDICSGCRGHDGFTSSWFSVADTLRQKVEDAVREHPDYRVVFTGHSLGGALATVAGADLRGNGYDIDVFSYGAPRVGNRAFAEFLTVQTGGTLYRITHTNDIVPRLPPREFGYSHSSPEYWIKSGTLVPVRRRDIVKIEGIDATGGNNQPNIPDITAHLWYFGLIGTCL

SEQ ID NO: 7699 - protein, 269 aa, Thermomyces lanuginosus
EVSRDLFNQFNLFAQYSAAAYCGKNNDAPAGTNITCTGNACPEVEKADATILYSFEDSGVGDVTGFLALDNTNKLIVLSFRGSRSIENWIGNLNFDLKEINDICSGCRGHDGFTSSWRSVADTLRQKVEDAVREHPDYRVVFTGHSLGGALATVAGADLRGNGYDIDVFSYGAPRVGNRAFAEFLTVQTGGTLYRITNTNDIVPRLPPRQFGYSHSSPEYWIKSGTLPPVRRRDIVKCEGIDATCGNNQPNIPDIPAHLWYFGLIGTCL

SEQ ID NO: 7700 - protein, 269 aa, Thermomyces lanuginosus
EVSQDLFNQFNLFAQYSAAAYCSKNNNAPAGTNITCTGNACPEVEKADATILYSFRDSGVGDVTGFLALDNTNKLIVLSFRGSRSIENWIGNLNFDLIEINDICSGCRGHDGFTSSWFSVADTLRQKVEDAVREHPDYRVVFTGHSLGGALATVAGADLRGNGYDIDVFSYGAPRVGNRAFAEFLTVQTGGTLYRITHTNDIVPRLPPREFGYSHSSPEYWIKSGTLVPVRRRDIVKIEGIDATGGNNQPNIPDITAHLWYFGLIGTCL

SEQ ID NO: 7701 - protein, 269 aa, Thermomyces lanuginosus
DVSQDLFNQFNLFAQYSAAAYCGKNNDAPAGTQITCTGNACPEVEKADATFLYSFEDSGVGDVTGFLALDNTNKLIVLSFRGSRSIENWITNLRFDLKEINDICSGCRGHAGFTSSLRSVADTLRQKVEDAVREHPDYRVVFTGHSLGGALATVAGADLRGNGYDIDVFSYGAPRVGNRAFAEFLTVQTGGTLYRITHTNDIVPRLPPREFGYSHSSPEYWIKSGTLVPVRRRDIVKIEGIDATGGNNQPNIPSIPAHLWYFGLIGTCL

SEQ ID NO: 7702 - protein, 269 aa, Thermomyces lanuginosus
EVSQDLFNQFNLFAQYSKAAYCKANNDAPAGTNITCTGNACPEVEKADATFLYSFEDSGVGDVTGFLALDNTNKRIILSFRGSRSIENWIGNLNFDLKEINDICSGCRGHDGFTSSWRSVADTLRQKVEAAVREHPDYRVVFTGHSLGGALATIAWADLRGNGYDIDVFSYGAPRVGNRAFAEFLTNQTGGTLYRITHTNDIVPRLPPREFGYSHSSPEYWIKSGTLVPVTRNDIVKIEGIDATGGNNQPNIPDIPAHLWYFGLIGTCL

SEQ ID NO: 7703 - protein, 269 aa, Thermomyces lanuginosus
EVSQDLFNQFNLFAQYSAAAYCKANNDAPAGTNITCTGNACPEVEKADATFLYSFEDSGVGDVTGFLALDNTNKLIVLSFRGSRSIENWIGNLRFDLKEINDICSGCRGHDGFTSSWRSVADTLRQKVEAAVREHPDYRVVFTGHSLGGALATIAWADLRGNGYDIDVFSYGAPRVGNRAFAEFLTTQQGGTLYRITHTNDIVPRLPPREFGYSHSSPEYWIKSGTLVPVTRNDIVKIEGIDATGGNNQPNIPDIPAHLWYFGRIGTCL

SEQ ID NO: 7704 - protein, 269 aa, Thermomyces lanuginosus
EVSQDLFNQFNLFAQYSAAAYCGKNNDAPAGTNITCTGNACPEVEKADATFLYSFEDSGVGDVTGFLALDNTNKLIVLSFRGSRSIENWIGNLNPDLKEINDICSGCRGHDGFTSSWRGVADTLRQKVEDAVREHPDYRVVFTGHSLGGALATVAGADLRGNGYDTDVFSYGAPRVGNRAFAEFLTVQTGGTLYRITHTNDIVPRLPPREFGYSHSSPEYWIKSGTLVPVTRNDTVKTEGTDATGGNNQPNTPDTPAHLWYFGLTGTCL

SEQ ID NO: 7705 - protein, 269 aa, Thermomyces lanuginosus
EVSQDLFNQFNLFAQYSAAAYCGKNNDAPAGTKITCTGNACPEVEKADATILYSFEDSGVGDVTGFLALDNTNKLIVLSFRGSRSIENWIGNLNFDLEEIDDICSGCRGHDGFTSSWRSVADTLRQKVEDAVREHPDYRVVFTGHSLGGALATVAGADLRGNGYDIDVFSYGAPRVGNRAFAEFLTVQTGGTLYRITSTNDIVPRLPPRKFGYSHSSPEYWIKPGTLVPVRRRDIVKIEGIDATGGNNQPNIPDIPAHLWYFGLIGTCL

SEQ ID NO: 7706 - protein, 269 aa, Thermomyces lanuginosus
EVSQDLFNQFRLFAQYSAAAYCGKNNDAPAGTQITCMGNACPEVEKADATFLYSFEDSGVGDVTGFLALDNTNKLIVLSFRGSRSIENWITNLNFDLKEINDICSGCRGHDGFTSSWRSVADTLRQKVEDAVREHPDYRVVFTGHSLGGALATVAGADLRGNPYDIDVFSYGAPRTGNRAFAEFLTVQTGGTLYRITHTNDIVPRLPPREFGYSHSSPEYWIKSGTLVPVRRRDIVKIEGIDATGGNNQPNIPSIPAHLWYFGLIGTCL

SEQ ID NO: 7707 - protein, 269 aa, Thermomyces lanuginosus
EVSQDLFNQFNLFAQYSAAAYCGKNNDAPAGTNITCTGNACPEVEKADATFLYSFEDTGKGDVTGFLALDNTNKLIVLSFRGSRSVENWIGNLNFDLKEINAICSGCRGHDGFTSSWRSVADTLRQKVEDAVREHPDYRVVFTGHSLGGGLATVAGADLRGNGYDIDVFSYGAPRVGNRAFAEFLTVQTGGTLYRITHTNDIVPRLPPREFGYSHSSPEYWIKSGTGVPVRRRDIVKIEGIDATGGNNQPNIPDIKAHLWYFGLIGTCL

SEQ ID NO: 7708 - protein, 269 aa, Thermomyces lanuginosus
EVSQDLFNQFNLFAQYSAAAYCGKNNDAPAGTNITCTGNACPEVEKADATFLYSFEDSGGGEVTGFLALDNTNKLIVLSFRGTKSIENWIANLNFDLKKINDICSGCRGHDGFTSSWRSVADTLRQKVEDAVREHPDYRVVFTGHSLGGALATVAGADLRGNGYDIDVFSYGAPRVGNRAFAEFLTVQTGGTLYRITHTNDIVPRLPPREFGYSHSSPEYWIKSGTLVPVRRRDIVKIEGIDATGGNNRPNIPDIPAHLWYFGLIGTCL

SEQ ID NO: 7709 - protein, 269 aa, Thermomyces lanuginosus
EVSQDLFNQFNLFAQYSAAAYCQKNNDAPAGTNITCTGNACPEVEKADATTLYSFEDMGVGDVTGFLALDNTNKGIVLSFRGSRSIENWIQNLNFDLKEINDICSGCRGHDGFTSSWRSVADTLRQKVEAAVREHPDYRVVFTGHSLGGALATVAGADLRGNGYDIDVFSYGAPRVGNRAFAEFLTTQTGGTLYRITHTNDIVPRLPPREFGYSHSSPEYWIKSGTLVPVTRNDIVKIEGIDATGGNNQPNQPDIPAHLWYFGRIGTCL

SEQ ID NO: 7710 - protein, 269 aa, Thermomyces lanuginosus
EVSQDLFNQFNLFAQYSAAAYCGKNNRAPAGTQITCTGNACPEVEKADATFLYSFEDSGVGDVTGFLALDNTNKLIVLSFRGSRSIENWITNLNFELKEINDICSGCRGHAGFTSSWRSVADTLRQKVEDAVREHPDYRVVFTGHSLGGALATVAGADLRGNGYDIDVFSYGAPRVGNRAFAEFLTVQTGGTLYRITHTNDIVPRLPPREFGYSHSSPEYWIKSGTLVPVRRRDIVKIEGIDATGGNNQPNIPSITAHLWYFGLIGTCL

SEQ ID NO: 7711 - protein, 269 aa, Thermomyces lanuginosus
EVSQDLFNQFNLFAQYSAAAYCKKNNDAPAGTNITCTGNACPEVEKADATFLYSFEDSGVGDVTGFLALDNTNKQIVLSFRGSRSIENWIGNLNFDLKEINDICSGCRGHAGFTSSWRSVADTLRQKVEAAVREHPDYRVVFTGHSLGGALATIAWADLRGNGYDIDVFSYGAPRVGNRAFAEFLTTQQGGTLYRITHTNDIVPRLPPREFGYSHSSPEYWIKSGTLVPVTRNDIVKIEGIDATGGNNQPNIPDIPAHLWYFGRIGTCL

SEQ ID NO: 7712 - protein, 269 aa, Thermomyces lanuginosus
EVSQDLFNQFNLFAQYSKAAYCKANNDAPAGTNITCTGNACPEVEKADATFLYSFEDSGVGDVTGFLALDNTNKQIVLSFRGSRSIENWIGNLRFDLKEINDICSGCRGHDGFTSSWRSVADTLRQKVEAAVREHPDYRVVFTGHSLGGALATIAWADLRGNGYDIDVFSYGAPRVGNRAFAEFLTNQTGGTLYRITHTNDIVPRLPPREFGYSHSSPEYWIKSGTLVPVTRNDIVKIEGIDATGGNNQPNIPDIPAHLWYFGLIGTCL

SEQ ID NO: 7713 - protein, 269 aa, Thermomyces lanuginosus
EVSQDLFNQFNLFAQYSAAAYCKKNNDAPAGTNITCTGNACPEVEKADATFLYSFKDSGVGDVTGFLALDNTNKQIVLSFRGSRSIENWIGNLNFDLKEINDICSGCRGHAGFTSSWRSVADTLRQKVEAAVREHPDYRVVFTGHSLGGALATIAWADLRGNGYDIDVFSYGAPRVGNRAFAEFLTVQQGGTLYRITHTNDIVPRLPPREFGYSHSSPEYWIKSGTLVPVTRNDIVKIEGIDATGGNNQPNIPDIPAHLWYFGRIGTCL

SEQ ID NO: 7714 - protein, 269 aa, Synthetic construct
EGTPELFNQFNLFAQYSAAAYCGKNNDAPAGTNITCTGNACPEVEKADATFLYSFEGSGVGDVTGFLALDNTNKLIVLSFRGSRSIENWIGNLKFLMKEINDICSGCRGHDGFTSSWRSVADTLRQKVEDAVREHPDYRVVFTGHSLGGALATVAGADLRGNGYDIDVFSYGAPRVGNRAFAEFLTVQTGGTLYRITHTNDIVPRLPPREFGYSHSSPEYWIKSGTLVPVTRNDIVKIEGIDATGGNNRPNIPDIPAHLWYFGLIGTCL

SEQ ID NO: 7715 - protein, 269 aa, Thermomyces lanuginosus
EVSQDLFNQFNLFAQYSAAAYCGKNNDAPAGTNITCTGNACPEVEKADATFLYSFEDAGSGDVTGFLALDNTNKLIVLSFRGTRSIENWIGNLNFDLKEINDICSGCRGHDGFTSSWRSVADTLRQKVEDAVREHPDYRVVFTGHSLGGGLATVAGADLRGNGYDIDVFSYGAPRVGNRAFAEFLTVQTGGTLYRITHTNDIVPRLPPREFGYSHSSPEYWIKSGTGVPVRRRDIVKIEGIDATGGNNQPNIPDAKAHLWYFGLIGTCL

SEQ ID NO: 7716 - protein, 269 aa, Thermomyces lanuginosus
EVSQDLFNQFNLFAQYSKAAYCKANNDAPAGTNITCTGNACPEVEKADATFLYSFEDSGVGDVTGFLALDNTNKQIVLSFRGSRSIENWIGNLRFDLKEINDICSGCRGHDGFTSSWRSVADTLRQKVEAAVREHPDYRVVFTGHSLGGALATVAGADLRGNGYDIDVFSYGAPRVGNRAFAEFLTTQQGGTLYRITHTNDIVPRLPPREFGYSHSSPEYWIKSGTLVPVTRNDIVKIEGIDATGGNNQPNIPDIPAHLWYFGKIGTCL

SEQ ID NO: 7717 - protein, 269 aa, Thermomyces lanuginosus
EVSQDLFNQFNLFAQYSAAAYCGKNNDAPAGTQITCTGNACPEVEKADATFLYSFEDSGVGDVTGFLALDNTNKLIVLSFRGSRSIENWITNLSFDLKEINDICSGCRGHAGFTLSWRSVADTLRQKVEDAVREHPDYRVVFTGHSLGGALATVAGADLRGNTYDIDVFSYGAPRIGNRAFAEFLTVQTGGTLYRITHTNDIVPRLPPREFGYSHSSPEYWIKSGTLVPVRRRDIVKIEGIDATGGNNQPNIPDIPAHLWYFGLIGTCL

SEQ ID NO: 7718 - protein, 269 aa, Thermomyces lanuginosus
EVSQDLFNQFNLFAQYSAAAYCSKNNDAPAGTNITCTGNACPEVEKADATILYSFRDSGVGDVTGFLALDNTNKLIVLSFRGSRSIENWIGNLNFDLKEINDICSGCRGHDGFTSSWFSVADTLRQKVEDAVREHPDYRVVFTGHSLGGALATVAGADLRGNGYDIDVFSYGAPRVGNRAFAEFLTVQTGGTLYRITHTNDIVPRLPPREFGYSHSSPEFWIKSGTLVPVRRRDIVKIEGIDAEGGNNQPNIPDITAHLWYFGLIGTCL

SEQ ID NO: 7719 - protein, 269 aa, Thermomyces lanuginosus
EVSQDLFNQFNLFAQYSAAAYCGKNNRAPAGTQITCTGNACPEVEKADATFLYSFEDSGVGDVTGFLALDNTNKLIVLSFRGSRSIENWINNLRFDLKEINDICSGCRGHAGFTSSWRSVADTLRQKVEDAVREHPDYRVVFTGHSLGGALATVAGADLRGNGYDIDVFSYGAPRVGNRAFAEFLTVQTGGTLYRITHTNDIVPRLPPREFGYSHPSPEYWIKSGTGVPVRRRDIVKIEGIDATGGNNQPNIPDIPAHLWYFGLIGTCL

SEQ ID NO: 7720 - protein, 269 aa, Thermomyces lanuginosus
EVSQDLFNQFNLFAQYSAAAYCGKNNDAPAGTNITCTGNICPEVEKADATILYSFRDSGEGDVTGFLALDNTNKLIVLSFRGSRSIENWIGNLNFDLKEINDICSGCRGHDGFTSSWFSVADTLRQKVEDAVREHPDYRVVFTGHSLGGALATVAGADLRGNGYDIDVFSYGAPRVGNRAFAEFLTVQTGGTLYRITHTNDIVPRLPPREFGYSHSSPEYWIKSGTLVPVRRRDIVKIEGIDAEGGNNQPNIPDITAHLWYFGLIGTCL

SEQ ID NO: 7721 - protein, 269 aa, Thermomyces lanuginosus
EVSQDLFNQFNLFAQYSAAAYCGKNNDAPAGTNITCTGNACPEVEKADATFLYSFEDSGVGDVTGFLALDNTNKLIVLSFRGSRSIENWIGNLNFDLKEINDICSGCRGHDGFTSSWRSVADTLRQKVEDAVREHPDYRVVFTGHSLGGALATVAGADLRGNGYDIDVFSYGAPRVGNRAFAEFLTVQTGGTLYRITHTNDIVPRLPPREFGYSHSSPEYWIKSGTLVPVRRNDIVKIEGIDATGGNNQPNIPSIPAHLWYFGLIGTCL

SEQ ID NO: 7722 - protein, 269 aa, Synthetic construct
EVSQDLFNQFNLFAQYSAAAYCGKNNDAPAGTNITCTGNACPEVEKADATFLYSFEDSGVGDVTGFLALDNTNKLIVLSFRGSRSIENWIGNLNFWLKEINNICSGCRGHDGFTSSWRSVADTLRQKVEDAVREHPDYRVVFTGHSLGGALATVAGADLRGNGYDIDVFSYGAPRVGNRAFAEFLTVQTGGTLYRITHTNDIVPRLPPREFGYSHSSPEYWIKSGTLVPVTRNDIVKIEGIDATGGNNQPNIPDIPAHLWYFGLIGTCL

SEQ ID NO: 7723 - protein, 269 aa, Thermomyces lanuginosus
EVSQDLFNQFNLFAQYSAAAYCGKNNDAPAGTNITCTGNACPEVEKADATFLYSFEDSGVGDVTGFLALDNTNKLIVLSFRGSRSIENWIGNLNFDLKEINDICSGCRGHDGFTSSWRSVADTLRQKVEDAVREHPDYRVVFTGHSLGGALATVAGADLRGNGYDIDVFSYGAPRVGNRAFAEFLTVQTGGTLYRITHTNDIVPRLPPREFGYSHSSPEYWIKSGTLVPVTRRDIVKIEGIDATGGNNQPNIPHIPAHLWYFGLIGTCL

SEQ ID NO: 7724 - protein, 269 aa, Thermomyces lanuginosus
EVSQDLFNQFNLFAQYSAAAYCGKNNDAPAGTNITCTGNACPEVEKADATFLYSFEDSGVGDVTGFLALDNTNKLIVLSFRGSRSIENWIGNLNFDLKEINDICSGCRGHDGFTSSWRSVADTLRQKVEDAVREHPDYRVVFTGHSLGGALATVAGADLRGNGYDIDVFSYGAPRVGNRAFAEFLTVQTGGTLYRITHTNDIVPRLPPREFGYSHSSPEYWIKSGTLVPVTRRDIVKIEGIDATGGNNQPNIPQIPAHLWYFGLIGTCL

SEQ ID NO: 7725 - protein, 269 aa, Thermomyces lanuginosus
EVSQDLFNQFNLFAQYSAAAYCGKNNDAPAGTQITCTGNACPEVEKADATFLYSFEDSGVGDVTGFLALDNTNKLIVLSFRGSRSIENWIGNLNFDLKEINDICSGCRGHDGFTSSWRSVADTLRQKVEDAVREHPDYRVVFTGHSLGGALATVAGADLRGNGYDIDVFSYGAPRVGNRAFAEFLTVQTGGTLYRITHTNDIVPRLPPREFGYSHSSPEYWIKSGTLVPVTRNDIVKIEGIDATGGNNQPNIPLIPAHLWYFGLIGTCL

SEQ ID NO: 7726 - protein, 269 aa, Thermomyces lanuginosus
EVSQDLFNQFNLFAQYSAAAYCGKNNDAPAGTQITCTGNACPEVEKADATFLYSFEDSGVGDVTGFLALDNTNKLIVLSFRGSRSIENWIGNLNFDLKEINDICSGCRGHDGFTSSWRSVADTLRQKVEDAVREHPDYRVVFTGHSLGGALATVAGADLRGNGYDIDVFSYGAPRVGNRAFAEFLTVQTGGTLYRITHTNDIVPRLPPREFGYSHSSPEYWIKSGTLVPVTRNDIVKIEGIDATGGNNQPNIPQIPAHLWYFGLIGTCL

SEQ ID NO: 7727 - protein, 269 aa, Thermomyces lanuginosus
EVSQDLFNQFNLFAQYSAAAYCGKNNDAPAGTNITCTGNACPEVEKADATFLYSFEDSGVGDVTGFLALDNTNKLIVLSFRGSRSIENWIGNLNFDLKEINDICSGCRGHDGFTSSWRSVADTLRQKVEDAVREHPDYRVVFTGHSLGGALATVAGADLRGNGYDIDVFSYGAPRVGNRAFAEFLTVQTGGTLYRITHTNDIVPRLPPREFGYSHSSPEYWIKSGTLVPVTRRDIVKIEGIDATGGNNQPNIPYIPAHLWYFGLIGTCL

SEQ ID NO: 7728 - protein, 269 aa, Thermomyces lanuginosus
EVSQDLFNQFNLFAQYSAAAYCGKNNDAPAGTNITCTGNACPEVEKADATFLYSFEDSGVGDVTGFLALDNTNKLIVLSFRGSRSIENWIGNLNFDLKEINDICSGCRGHDGFTSSWRSVADTLRQKVEDAVREHPDYRVVFTGHSLGGALATVAGADLRGNGYDIDVFSYGAPRVGNRAFAEFLTVQTGGTLYRITHTNDIVPRLPPREFGYSHSSPEYWIKSGTLVPVTRRDIVKIEGIDATGGNNQPNIPTIPAHLWYFGLIGTCL

SEQ ID NO: 7729 - protein, 269 aa, Synthetic construct
EVSQDLFNQFNLFAQYSAAAYCGKNNDAPAGTNITCTGNACPEVEKADATFLYSFEDSGVGDVTGFLALDNTNKLIVLSFRGSRSIENWIGNLNFLLKEINDICSGCRGHDGFTSSWRSVADTLRQKVEDAVREHPDYRVVFTGHSLGGALATVAGADLRGNGYDIDVFSYGAPRVGNRAFAEFLTVQTGGTLYRITHTNDIVPRVPPREFGYSHSSPEYWIKSGTLVPVTRNDIVKIEGIDATGGNNQPNIPDIPAHLWYFGLIGTCL

SEQ ID NO: 7730 - protein, 269 aa, Thermomyces lanuginosus
EVSQDLFNQFNLFAQYSAAAYCGKNNDAPAGTNITCTGNACPEVEKADATFLYSFEDSGVGDVTGFLALDNTNKLIVLSFRGSRSIENWIGNLNFDLKEINDICSGCRGHDGFTSSWRSVADTLRQKVEDAVREHPDYRVVFTGHSLGGALATVAGADLRGNGYDIDVFSYGAPRVGNRAFAEFLTVQTGGTLYRITHTNDIVPRLPPREFGYSHSSPEYWIKSGTLVPVRRNDIVKIEGIDATGGNNQPNIPNIPAHLWYFGLIGTCL

SEQ ID NO: 7731 - protein, 269 aa, Thermomyces lanuginosus
EVSQDLFNQFNLFAQYSAAAYCGKNNDAPAGTQITCTGNACPEVEKADATFLYSFEDSGVGDVTGFLALDNTNKLIVLSFRGSRSIENWIGNLNFDLKEINDICSGCRGHDGFTSSWRSVADTLRQKVEDAVREHPDYRVVFTGHSLGGALATVAGADLRGNGYDIDVFSYGAPRVGNRAFAEFLTVQTGGTLYRITHTNDIVPRLPPREFGYSHSSPEYWIKSGTLVPVTRNDIVKIEGIDATGGNNQPNIPTIPAHLWYFGLIGTCL

SEQ ID NO: 7732 - protein, 269 aa, Synthetic construct
EVSQDLFNQFNLFAQYSAAAYCGKNNDAPAGTNITCTGNACPEVEKADATFLYSFEDSGVGDVTGFLALDNTNKLIVLSFRGSRSIENWIGNLNFLLKEINDICSGCRGHDGFTSSWRSVADTLRQKVEDAVREHPDYRVVFTGHSLGGALATVAGADLRGNGYDIDVFSYGAPRVGNRAFAEFLTVQTGGTLYRITHTNDIVPRSPPREFGYSHSSPEYWIKSGTLVPVTRNDIVKIEGIDATGGNNQPNIPDIPAHLWYFGLIGTCL

SEQ ID NO: 7733 - protein, 269 aa, Thermomyces lanuginosus
EVSQDLFNQFNLFAQYSAAAYCGKNNDAPAGTNITCTGNACPEVEKADATFLYSFEDSGVGDVTGFLALDNTNKLIVLSFRGSRSIENWIGNLNFDLKEINDICSGCRGHDGFTSSWRSVADTLRQKVEDAVREHPDYRVVFTGHSLGGALATVAGADLRGNGYDIDVFSYGAPRVGNRAFAEFLTVQTGGTLYRITHTNDIVPRLPPREFGYSHSSPEYWIKSGTLVPVTRRDIVKIEGIDATGGNNQPNIPLIPAHLWYFGLIGTCL

SEQ ID NO: 7734 - protein, 269 aa, Synthetic construct
EVSQDLFNQFNLFAQYSAAAYCGKNNDAPAGTNITCTGNACPEVEKADATFLYSFEDSGVGDVTGFLALDNTNKLIVLSFRGSRSIENWIVNLNFDLKEINDICSGCRGHDGFWSSWRSVADTLRQKVEDAVREHPDYRVVFTGHSLGGALATVAGADLRGNGYDIDVFSYGAPRVGNRAFAEFLTVQTGGTLYRITHTNDIVPRLPPREFGYSHSSPEYWIKSGTLVPVTRNDIVKIEGIDATGGNNQPNIPDPPAHLWYFGLIGTCL

SEQ ID NO: 7735 - protein, 269 aa, Thermomyces lanuginosus
EVSQDLFNQFNLFAQYSAAAYCGKNNDAPAGTNITCTGNACPEVEKADATFLYSFEDSGVGDVTGFLALDNTNKLIVLSFRGSRSIENWIGNLNFDLKEINDICSGCRGHDGFTSSWRSVADTLRQKVEDAVREHPDYRVVFTGHSLGGALATVAGADLRGNGYDIDVFSYGAPRVGNRAFAEFLTVQTGGTLYRITHTNDIVPRLPPREFGYSHSSPEYWIKSGTLVPVRRNDIVKIEGIDATGGNNQPNIPHIPAHLWYFGLIGTCL

SEQ ID NO: 7736 - protein, 269 aa, Thermomyces lanuginosus
EVSQDLFNQFNLFAQYSAAAYCGKNNDAPAGTQITCTGNACPEVEKADATFLYSFEDSGVGDVTGFLALDNTNKLIVLSFRGSRSIENWIGNLNFDLKEINDICSGCRGHDGFTSSWRSVADTLRQKVEDAVREHPDYRVVFTGHSLGGALATVAGADLRGNGYDIDVFSYGAPRVGNRAFAEFLTVQTGGTLYRITHTNDIVPRLPPREFGYSHSSPEYWIKSGTLVPVTRNDIVKIEGIDATGGNNQPNIPHIPAHLWYFGLIGTCL

SEQ ID NO: 7737 - protein, 269 aa, Thermomyces lanuginosus
EVSQDLFNQFNLFAQYSAAAYCGKNNDAPAGTQITCTGNACPEVEKADATFLYSFEDSGVGDVTGFLALDNTNKLIVLSFRGSRSIENWIGNLNFDLKEINDICSGCRGHDGFTSSWRSVADTLRQKVEDAVREHPDYRVVFTGHSLGGALATVAGADLRGNGYDIDVFSYGAPRVGNRAFAEFLTVQTGGTLYRITHTNDIVPRLPPREFGYSHSSPEYWIKSGTLVPVTRNDIVKIEGIDATGGNNQPNIPNIPAHLWYFGLIGTCL

SEQ ID NO: 7738 - protein, 269 aa, Thermomyces lanuginosus
EVSQDLFNQFNLFAQYSAAAYCGKNNDAPAGTNITCTGNACPEVEKADATFLYSFEDSGVGDVTGFLALDNTNKLIVLSFRGSRSIENWIGNLNFDLKEINDICSGCRGHDGFTSSWRSVADTLRQKVEDAVREHPDYRVVFTGHSLGGALATVAGADLRGNGYDIDVFSYGAPRVGNRAFAEFLTVQTGGTLYRITHTNDIVPRLPPREFGYSHSSPEYWIKSGTLVPVRRNDIVKIEGIDATGGNNQPNIPTIPAHLWYFGLIGTCL

SEQ ID NO: 7739 - protein, 269 aa, Thermomyces lanuginosus
EVSQDLFNQFNLFAQYSAAAYCGKNNDAPAGTNITCTGNACPEVEKADATFLYSFEDSGVGDVTGFLALDNTNKLIVLSFRGSRSIENWIGNLNFDLKEINDICSGCRGHDGFTSSWRSVADTLRQKVEDAVREHPDYRVVFTGHSLGGALATVAGADLRGNGYDIDVFSYGAPRVGNRAFAEFLTVQTGGTLYRITHTNDIVPRLPPAAFGYSHSSPEYWIKSGTLVPVTRNDIVKIEGIDATGGNNQPNIPDIPAHLWYFGLIGTCL

SEQ ID NO: 7740 - protein, 269 aa, Thermomyces lanuginosus
EVSQDLFNQFNLFAQYSAAAYCGKNNDAPAGTQITCTGNACPEVEKADATFLYSFEDSGVGDVTGFLALDNTNKLIVLSFRGSRSIENWIGNLNFDLKEINDICSGCRGHDGFTSSWRSVADTLRQKVEDAVREHPDYRVVFTGHSLGGALATVAGADLRGNGYDIDVFSYGAPRVGNRAFAEFLTVQTGGTLYRITHTNDIVPRLPPREFGYSHSSPEYWIKSGTLVPVTRNDIVKIEGIDATGGNNQPNIPYIPAHLWYFGLIGTCL

SEQ ID NO: 7741 - protein, 269 aa, Thermomyces lanuginosus
EVSQDLFNQFNLFAQYSAAAYCGKNNDAPAGTNITCTGNACPEVEKADATFLYSFEDSGVGDVTGFLALDNTNKLIVLSFRGSRSIENWIGNLNFDLKEINDICSGCRGHDGFTSSWRSVADTLRQKVEDAVREHPDYRVVFTGHSLGGALATVAGADLRGNGYDIDVFSYGAPRVGNRAFAEFLTVQTGGTLYRITHTNDIVPRLPPREFGYSHSSPEYWIKSGTLVPVTRRDIVKIEGIDATGGNNQPNIPSIPAHLWYFGLIGTCL

SEQ ID NO: 7742 - protein, 269 aa, Thermomyces lanuginosus
EVSQDLFNQFNLFAQYSAAAYCGKNNDAPAGTNITCTGNACPEVEKADATFLYSFEDSGVGDVTGFLALDNTNKLIVLSFRGSRSIENWIGNLNFDLKEINDICSGCRGHDGFTSSWRSVADTLRQKVEDAVREHPDYRVVFTGHSLGGALATVAGADLRGNGYDIDVFSYGAPRVGNRAFAEFLTVQTGGTLYRITHTNDIVPRLPPREFGYSHSSPEYWIKSGTLVPVRRNDIVKIEGIDATGGNNQPNIPYIPAHLWYFGLIGTCL

SEQ ID NO: 7743 - protein, 269 aa, Thermomyces lanuginosus
EVSQDLFNQFNLFAQYSAAAYCGKNNDAPAGTNITCTGNACPEVEKADATFLYSFEDSGVGDVTGFLALDNTNKLIVLSFRGSRSIENWIGNLNFKLKEINDICSGCRGHDGFTSSWRSVADTLRQKVEDAVREHPDYRVVFTGHSLGGALATVAGADLRGNGYDIDVFSYGAPRVGNRAFAEFLTVQTGGTLYRITHTNDIVPRLPPREFGYRHSSPEYWIKSGTLVPVTRNDIVKIEGIDATGGNNQPNIPDIPAHLWYFGLIGTCL

SEQ ID NO: 7744 - protein, 269 aa, Aspergillus niger
EVSQDLFNQFNLFAQYSAAAYCGKNNDAPAGTNITCTGNACPEVEKADATFLYSFRDSGVGDVTGFLALDNTNKLIVLSFRGSRSIENWIGNLNFDLKEINDICSGCRGHDGFTSSWRSVADTLRQKVEDAVREHPDYRVVFTGHSLGGALATVAGADLRGNGYRIDVFSYGAPRVGNRAFAEFLTVQTGGTLYRITHTNDIVPRLPPREFGYSHSSPEYWIKSGTLVPVTRNDIVKIEGIDATGGNNQPNIPDIPAHLWYFGLIGTCL

SEQ ID NO: 7745 - protein, 269 aa, Thermomyces lanuginosus
EVSQDLFNQFNLFAQYSAAAYCGKNNDAPAGTQITCTGNACPEVEKADATFLYSFEDSGVGDVTGFLALDNTNKLIVLSFRGSRSIENWIGNLNFDLKEINDICSGCRGHDGFTSSWRSVADTLRQKVEDAVREHPDYRVVFTGHSLGGALATVAGADLRGNGYDIDVFSYGAPRVGNRAFAEFLTVQTGGTLYRITHTNDIVPRLPPREFGYSHSSPEYWIKSGTLVPVTRNDIVKIEGIDATGGNNQPNIPSIPAHLWYFGLIGTCL

SEQ ID NO: 7746 - protein, 269 aa, Synthetic construct
EVSQDLFNQFNLFAQYSAAAYCGKNNDAPAGTNITCTGNACPEVEKADATFLYSFEDSGVGDVTGFLALDNTNKLIVLSFRGSRSIENWIGNLNFDLKEINDICSGCRGHDGFTSSWRSVADTLRQKVEDAVREHPDYRVVFTGHSLGGALATVAGADLRGNGYDIDVFSYGAPRVGNRAFAEFLTVQTGGTLYRITHTNDIVPRLPPREFGYSHSSPEYWIKSGTLVPVTRNDIVKIEGIDATGGNNQPNIPKIPAHIWYFGLIGTCL

SEQ ID NO: 7747 - protein, 269 aa, Thermomyces lanuginosus
EVSQDLFNQFNLFAQYSAAAYCGKNNDAPAGTNITCTGNACPEVEKADATFLYSFEDAGVGDVTGFLALDNTNKLIVLSFRGDRSIENWIGNLNFDLKEINDICSGCRGHDGFTSSWRSVADTLRQKVEDAVREHPDYRVVFTGHSLGGALATVAGADLRGNGYDIDVFSYGAPRVGNRAFAEFLTVQTGGTLYRITHTNDIVPRLPPREFGYSHSSPEYWIKSGTLVPVTRNDIVKIEGIDATGGNNQPNIPDIPAHLWYFGLIGTCL

SEQ ID NO: 7748 - protein, 269 aa, Thermomyces lanuginosus
EVSQDLFNQFNLFAQYSAAAYCGKNNDAPAGTNITCTGNACPEVEKADATFLYSFEDSGVGDVTGFLALDNTNKLIVLSFRGSRSIENWIGNLNFDLKEINDICSGCRGHDGFTSSWRSVADTLRQKVEDAVREHPDYRVVFTGHSLGGALATVAGADLRGNGYDIDVFSYGAPRVGNRAFAEFLTVQTGGTLYRITHTNDIVPRLPPREFGYSHSSPEYWIKSGTLVPVTRRDIVKIEGIDATGGNNQPNIPNIPAHLWYFGLIGTCL

SEQ ID NO: 7749 - protein, 269 aa, Thermomyces lanuginosus
EVSQDLFNQFNLFAQYSAAAYCGKNNDAPAGTNITCTGNACPEVEKADATFLYSFEDSGVGDVTGFLALDNTNKLIVLSFRGSRSIENWIGNLNFDLKEINDICSGCRGHDGFTSSWRSVADTLRQKVEDAVREHPDYRVVFTGHSLGGALATVAGADLRGNGYDIDVFSYGAPRVGNRAFAEFLTVQTGGTLYRITHTNDIVPRLPPREFGYSHSSPEYWIKSGTLVPVRRNDIVKIEGIDATGGNNQPNIPLIPAHLWYFGLIGTCL

SEQ ID NO: 7750 - protein, 269 aa, Synthetic construct
EVSQDLFNQFNLFAQYSAAAYCGKNNDAPAGTNITCTGNACPEVEKADATFLYSFEDSGVGDVTGFLALDNTNKLIVLSFRGSRSIENWIGNLNFWLKEINDICSGCRGHDGFTSSWRSVADTLRQKVEDAVREHPDYRVVFTGHSLGGALATVAGADLRGNGYDIDVFSYGAPRVGNRAFAEFLTVQTGGTLYRITHTNDIVPRLPPRNFGYSHSSPEYWIKSGTLVPVTRNDIVKIEGIDATGGNNQPNIPDIPAHLWYFGLIGTCL

SEQ ID NO: 7751 - protein, 269 aa, Thermomyces lanuginosus
EVSQDLFNQFNLFAQYSAAAYCGKNNDAPAGTNITCTGNACPEVEKADATFLYSFEDSGVGDVTGFLALDNTNKLIVLSFRGSRSIENWIGNLNFDLKEINDICSGCRGHDGFTSSWRSVADTLRQKVEDAVREHPDYRVVFTGHSLGGALATVAGADLRGNGYDIDVFSYGAPRVGNRAFAEFLTVQTGGTLYRITHTNDIVPRLPPREFGYSHSSPEYWIKSGTLVPVRRNDIVKIEGIDATGGNNQPNIPQIPAHLWYFGLIGTCL

SEQ ID NO: 7752 - protein, 268 aa, Thermomyces lanuginosus
EVSQDLFNQFNLFAQYSAAAYCGKNNRAPAGTNITCTANACPEVEKADATFLYSFEDSGVGDVTGFLALDNTNKLIVLSFRGSRSIENWIGNLNFELKEINDICSGCRGHAGFTSSWRSVADTLRQKVEDAVREHPDYRVVFTGHSLGGALATVAGADLRGNKYDIDVFSYGAPRVGNRAFAEFLTVQTGGTLYRITHTNDIVPRLPPREFGYSHSSPEYWISGTLVPVRRRDIVKIEGIDATGGNNQPNIPSITAHLWYFGLIGTCL

SEQ ID NO: 7753 - protein, 268 aa, Thermomyces lanuginosus
EVSQDLFNQFNLFAQYSAAAYCGKNNRAPAGTNITCTANACPEVEKADATFLYSFEDSGVGDVTGFLALDNTNKLIVLSFRGSRSIENWITNLNFELKEINDICSGCRGHAGFTSSWRSVADTLRQKVEDAVREHPDYRVVFTGHSLGGALATVAGADLRGNKYDIDVFSYGAPRVGNRAFAEFLTVQTGGTLYRITHTNDIVPRLPPREFGYSHSSPEYWIKSGTLVPVRRRDIVKIEGIDATGGNNQPNIPSIPAHLWYFGLIGTC

SEQ ID NO: 7754 - protein, 268 aa, Thermomyces lanuginosus
VSQDLFNQFNLFAQYSAAAYCGKNNDAPAGTQITCTANACPEVEKADATFLYSFEDSGVGDVTGFLALDNTNKLIVLSFRGSRSIENWITNLNFDLKEINDICSGCRGHDGFTSSWRSVADTLRQKVEDAVREHPDYRVVFTGHSLGGALATVAGADLRGNPYDIDVFSYGAPRFGNRAFAEFLTVQTGGTLYRITHTNDIVPRLPPREFGYSHSSPEYWIKSGTFVPVRRRDIVKIEGIDATGGNNQPNIPSIPAHLWYFGLIGTCL

SEQ ID NO: 7755 - protein, 268 aa, Thermomyces lanuginosus
EVSQDLFNQFNLFAQYSAAAYCGKNNDAPAGTNITCTGNACPEVEKADATFLYSFEDSGVGDVTGFLALDNTNKLIVLSFRGSYSIENWIANLNFFLKKINDICSGCRGHDGFTSSWRSVADTLRQKVEDAVREHPDYRVVFTGHSLGGALATVAGADLRGNGYDIDVFSYGAPRVGNRAFAEFLTVQTGGTLYRITHTNDIVPRLPPREFGYSHSSPEYWIKSGTLVPVTRNDIVKIEGIDATGGNNQPNIPDIPAHLWYFQATDAC

SEQ ID NO: 7756 - protein, 268 aa, Thermomyces lanuginosus
EVSQDLFNQFNLFAQYSAAAYCGKNNDAPAGTQITCTGNACPEVEKADATFLYSFEDSGVGDVTGFLALDNTNKLIVLSFRGSRSIENWIGNFNFDLKEINYICSGCRGHDGFTSSWRSVADTLRQKVEDAVREHPDYRVVFTGHSLGGALATVAGADLRGNGYDIDVFSYGAPRVGNRAFAEFLTVQTGGTLYRITHTNDIVPRLPPRYFGYSHSSPEYWIKSGTFVPVRRRDIVKIEGIDATGGNNQPNIPYFPAHLWYFGLIGTC

SEQ ID NO: 7757 - protein, 268 aa, Thermomyces lanuginosus
VSQDLFNQFRLFAQYSAAAYCGKNNDAPAGTQITCTANACPEVEKADATFLYSFEDSGVGDVTGFLALDNTNKLIVLSFRGSRSIENWITNLNFDLKEINDICSGCRGHAGFTSSWRSVADTLRQKVEDAVREHPDYRVVFTGHSLGGALATVAGADLRGNPYDIDVFSYGAPRFGNRAFAEFLTVQTGGTLYRITHTNDIVPRLPPREFGYSHSSPEYWIKSGTLVPVRRRDIVKIEGIDATGGNNQPNIPDIPAHLWYFGLIGTCL

SEQ ID NO: 7758 - protein, 268 aa, Thermomyces lanuginosus
VSQDLFNQFNLFAQYSKAAYCGKNNDAPAGTNITCTGNACPEVEKADATFLYSFEDSGKGDVTGFLALDNTNKLIVLSFRGSRSVENWIGNLNFDLKEINDICSGCRGHDGFTSSWRSVADTLRQKVEDAVREHPDYRVVFTGHSLGGGLATVAGADLRGNGYDIDVFSYGAPRVGNRAFAEFLTVQTGGTLYRITHTNDIVPRLPPRAFGYSHSSPEYWIKSGTGVPVRRRDIVKIEGIDATGGNNQPNIPDIKAHLWYFGLIGTCL

SEQ ID NO: 7759 - protein, 268 aa, Thermomyces lanuginosus
EVSQDLFNQFNLFAQYSAAAYCGKNNDAPAGTNITCTGNACPEVEKADATFLYSFEDSGVGDVTGFLALDNTNKLIVLSFRGSRSIENWIANLNFWLKKINDICSGCRGHDGFTSSWRSVADTLRQKVEDAVREHPDYRVVFTGHSLGGALATVAGADLRGNGYDIDVFSYGAPRVGNRAFAEFLTVQTGGTLYRITHTNDIVPRLPPREFGYSHSSPEYWIKSGTGVPVTRNDIVKIEGIDATGGNNQPNIPDIPAHLWYFQATDAC

SEQ ID NO: 7760 - protein, 268 aa, Thermomyces lanuginosus
VSQDLFNQFNLFAQYSAAAYCGKNNDAPAGTNITCTGNACPEVEKADATFLYSFEDAGSGDVTGFLALDNTNKLIVLSFRGTRSIENWIGNLNFDLKEINDICSGCRGHDGFTSSWRSVADTLRQKVEDAVREHPDYRVVFTGHSLGGGLATVAGADLRGNGYDIDVFSYGAPRVGNRAFAEFLTVQTGGTLYRITHTNDIVPRLPPREFGYSHSSPEYWIKSGTGVPVRRRDIVKIEGIDATGGNNQPNIPDAKAHLWYFGLIGTCL

SEQ ID NO: 7761 - protein, 268 aa, Thermomyces lanuginosus
VSQDLFNQLRLFAQYSAAAYCGKNNDAPAGTQITCTANACPEVEKADATFLYSFEDSGVGDVTGFLALDNTNKLIVLSFRGSRSIENWITNLNFDLKEINDICSGCRGHDGFTSSWRSVADTLRQKVEDAVREHPDYRVVFTGHSLGGALATVAGADLRGNPYDIDVFSYGAPRFGNRAFAEFLTVQTGGTLYRITHTNDIVPRLPPREFGYSHSSPEYWIKSGTLVPVRRRDIVKIEGIDATGGNNQPNIPDIPAHLWYFGLIGTCL

SEQ ID NO: 7762 - protein, 268 aa, Thermomyces lanuginosus
VSQDLFNQFNLFAQYSAAAYCGKNNDAPAGTNITCTGNACPEVEKADATFLYSFEDSGVGDVTGFLALDNTNKLIVLSFRGSRSIENWIGNLNFDLKKINDICSGCRGHDGFTSSWRSVADTLRQKVEDAVREHPDYRVVFTGHSLGGALATVAGADLRGNGYDIDVFSYGAPRVGNRAFAEFLTVQTGGTLYRITHTNDIVPRLPPREFGYSHSSPEYWIKSGTLVPVTRNDIVKIEGIDATGGNNRPNIPDIPAHLWYFGLIGTCL

SEQ ID NO: 7763 - protein, 268 aa, Synthetic construct
VSQDLFNQFNLFAQYSAAAYCGKNNDAPAGTNITCTGNACPEVEKADATFLYSFEDSGVGDVTGFLALDNTNKLIVLSFRGSRSIENWIGNLKFLLKEINDICSGCRGHDGFTSSWRSVADTLRQKVEDAVREHPDYRVVFTGHSLGGALATVAGADLRGNGYDIDVFSYGAPRVGNRAFAEFLTVQTGGTLYRITHTNDIVPRLPPREFGYSHSSPEYWIKSGTLVPVTRNDIVKIEGIDATGGNNRPNIPDIPAHLWYFGLIGTCL

SEQ ID NO: 7764 - protein, 268 aa, Thermomyces lanuginosus
EVSQDLFNQFNLFAQYSAAAYCGKNNDAPAGTNITCTGNACPEVEKADATFLYSFEDAGVGDVTGFLALDNTNKLIVLSFRGSRSIENWIGNLNFDLKEINDICSGCRGHDGFTSSWRSVADTLRQKVEDAVREHPDYRVVFTGHSLGGALATVAGADLRGNGYDIDVFSYGAPRVGNRAFAEFLTVQTGGTLYRITHTNDIVPRLPRREFGYSHSSPEYWIKSGTLVPVTRNDIVKIEGIDATGGNNQPNIPDIPAHLWYFGLIGTC

SEQ ID NO: 7765 - protein, 268 aa, Synthetic construct
VSQDLFNQFNLFAQYSAAAYCGKNNDAPAGTNITCTGNACPEVEKADATFLYSFEDSGVGDVTGFLALDNTNKLIVLSFRGSRSIENWIGNLKFLLKKINDICSGCRGHDGFTSSWRSVADTLRQKVEDAVREHPDYRVVFTGHSLGGALATVAGADLRGNGYDIDVFSYGAPRVGNRAFAEFLTVQTGGTLYRITHTNDIVPRLPPREFGYSHSSPEYWIKSGTLVPVTRNDIVKIEGIDATGGNNQPNIPDIPAHLWYFGLIGTCL

SEQ ID NO: 7766 - protein, 268 aa, Fusarium oxysporum
EVSQDLFNQFNLFAQYSAAAYCGKNNDAPAGTNITCTGNACPEVEKADATFLYSFEDSGVGDVTGFLALDNTNKLIVLSFRGSRSIENWIANLNFWLKKINDICSGCRGHDGFTSSWRSVADTLRQKVEDAVREHPDYRVVFTGHSLGGALATVAGADLRGNGYDIDVFSYGAPRVGNRAFAEFLTVQTGGTLYRITHTNDIVPRLPPREFGYSHSSPEYWIKSGTLVPVTRNDIVKIEGIDATGGNNQPNIPDIIAHLWYFQATDAC

SEQ ID NO: 7767 - protein, 268 aa, Fusarium oxysporum
EVSQDLFNQFNLFAQYSAAAYCGKNNDAPAGTNITCTGNACPEVEKADATFLYSFEDSGVGDVTGFLALDNTNKLIVLSFRGSLSIENWIANLNFWLKKINDICSGCRGHDGFTSSWRSVADTLRQKVEDAVREHPDYRVVFTGHSLGGALATVAGADLRGNGYDIDVFSYGAPRVGNRAFAEFLTVQTGGTLYRITHTNDIVPRLPPREFGYSHSSPEYWIKSGTLVPVTRNDIVKIEGIDATGGNNQPNIPDIPAHLWYFQATDAC

SEQ ID NO: 7768 - protein, 268 aa, Fusarium oxysporum
EVSQDLFNQFNLFAQYSAAAYCGKNNDAPAGTNITCTGNACPEVEKADATFLYSFEDSGVGDVTGFLALDNTNKLIVLSFRGSDSIENWIANLNFWLKKINDICSGCRGHDGFTSSWRSVADTLRQKVEDAVREHPDYRVVFTGHSLGGALATVAGADLRGNGYDIDVFSYGAPRVGNRAFAEFLTVQTGGTLYRITHTNDIVPRLPPREFGYSHSSPEYWIKSGTLVPVTRNDIVKIEGIDATGGNNQPNIPDIPAHLWYFQATDAC

SEQ ID NO: 7769 - protein, 268 aa, Fusarium oxysporum
EVSQDLFNQFNLFAQYSAAAYCGKNNDAPAGTNITCTGNACPEVEKADATFLYSFEDSGVGDVTGFLALDNTNKLIVLSFRGSRSIENWIANLNFWLKKINDICSGCRGHDGFTSSWRSVADTLRQKVEDAVREHPDYRVVFTGHSLGGALATVAGADLRGNGYDIDVFSYGAPRVGNRAFAEFLTVQTGGTLYRITHTNDIVPRLPPREFGYSHSSPEYWIKSGTLVPVTRNDIVKIEGIDATGGNNQPNIPDIWAHLWYFQATDAC

SEQ ID NO: 7770 - protein, 268 aa, Thermomyces lanuginosus
EVSQDLFNQFNLFAQYSAAAYCGKNNDAPAGTNITCTGNACPEVEKADATFLYSFEDSGVGDVTGFLALDNTNKLIVLSFRGSRSIENWIANLNFWLKKINDICSGCRGHDGFTSSWRSVADTLRQKVEDAVREHPDYRVVFTGHSLGGALATVAGADLRGNGYDIDVFSYGAPRVGNRAFAEFLTVQTGGTLYRITHTNDIVPRLPPREFGYSHSSPEYWIKSGTLVPVTRNDIVKIEGIDATGGNNQNNIPDIPAHLWYFQATDAC

SEQ ID NO: 7771 - protein, 268 aa, Thermomyces lanuginosus
EVSQDLFNQFNLFAQYSAAAYCGKNNDAPAGTNITCTGNACPEVEKADATFLYSFEDSGVGDVTGFLALDNTNKLIVLSFRGSWSIENWIANLNFFLKKINDICSGCRGHDGFTSSWRSVADTLRQKVEDAVREHPDYRVVFTGHSLGGALATVAGADLRGNGYDIDVFSYGAPRVGNRAFAEFLTVQTGGTLYRITHTNDIVPRLPPREFGYSHSSPEYWIKSGTLVPVTRNDIVKIEGIDATGGNNQPNIPDIPAHLWYFQATDAC

SEQ ID NO: 7772 - protein, 268 aa, Thermomyces lanuginosus
EVSQDLFNQFNLFAQYSAAAYCGKNNDAPAGTNITCTGNACPEVEKADATFLYSFEDSGVGDVTGFLALDNTNKLIVLSFRGSWSIENWIANLNFFLKKINDICSGCRGHDGFTSSWRSVADTLRQKVEDAVREHPDYRVVFTGHSLGGALATVAGADLRGNGYDIDVFSYGAPRVGNRAFAEFLTVQTGGTLYRITHTNDIVPRLPPREFGYSHSSPEYWIKSGTLVPVTRNDIVKIEGIDATGGNNQPNIPDIPAHLWYFQATSAC

SEQ ID NO: 7773 - protein, 268 aa, Fusarium oxysporum
EVSQDLFNQFNLFAQYSAAAYCGKNNDAPAGTNITCTGNACPEVEKADATFLYSFEDSGVGDVTGFLALDNTNKLIVLSFRGSQSIENWIANLNFWLKKINDICSGCRGHDGFTSSWRSVADTLRQKVEDAVREHPDYRVVFTGHSLGGALATVAGADLRGNGYDIDVFSYGAPRVGNRAFAEFLTVQTGGTLYRITHTNDIVPRLPPREFGYSHSSPEYWIKSGTLVPVTRNDIVKIEGIDATGGNNQPNIPDIPAHLWYFQATDAC

SEQ ID NO: 7774 - protein, 268 aa, Fusarium oxysporum
EVSQDLFNQFNLFAQYSAAAYCGKNNDAPAGTNITCTGNACPEVEKADATFLYSFEDSGVGDVTGFLALDNTNKLIVLSFRGSRSIENWIANLNFWLKKINDICSGCRGHDGFTSSWRSVADTLRQKVEDAVREHPDYRVVFTGHSLGGALATVAGADLRGNGYDIDVFSYGAPRVGNRAFAEFLTVQTGGTLYRITHTNDIVPRLPPREFGYSHSSPEYWIKSGTLVPVTRNDIVKIEGIDATGGNNQPNIPDIDAHLWYFQATDAC

SEQ ID NO: 7775 - protein, 268 aa, Fusarium oxysporum
EVSQDLFNQFNLFAQYSAAAYCGKNNDAPAGTNITCTGNACPEVEKADATFLYSFEDSGVGDVTGFLALDNTNKLIVLSFRGSRSIENWIANLNFWLKKINDICSGCRGHDGFTSSWRSVADTLRQKVEDAVREHPDYRVVFTGHSLGGALATVAGADLRGNGYDIDVFSYGAPRVGNRAFAEFLTVQTGGTLYRITHTNDIVPRLPPREFGYSHSSPEYWIKSGTLVPVTRNDIVKIEGIDATGGNNQPNIPDISAHLWYFQATDAC

SEQ ID NO: 7776 - protein, 268 aa, Fusarium oxysporum
EVSQDLFNQFNLFAQYSAAAYCGKNNDAPAGTNITCTGNACPEVEKADATFLYSFEDSGVGDVTGFLALDNTNKLIVLSFRGSRSIENWIANLNFWLKKINDICSGCRGHDGFTSSWRSVADTLRQKVEDAVREHPDYRVVFTGHSLGGALATVAGADLRGNGYDIDVFSYGAPRVGNRAFAEFLTVQTGGTLYRITHTNDIVPRLPPREFGYSHSSPEYWIKSGTLVPVTRNDIVKIEGIDATGGNNQPNIPDILAHLWYFQATDAC

SEQ ID NO: 7777 - protein, 268 aa, unidentified
EVSQDLFNQFNLFAQYSAAAYCGKNNDAPAGTNITCTGNACPEVEKADATFLYSFEDSGVGDVTGFLALDNTNKLIVLSFRGSRSIENWIANLNFWLKKINDICSGCRGHDGFTSSWRSVADTLRQKVEDAVREHPDYRVVFTGHSLGGALATVAGADLRGNGYDIDVFSYGAPRVGNRAFAEFLTVQTGGTLYRITHTNDIVPRLPPREFGYSHSSPEYWIKSGTLVPVTRNDIVKIEGIDATGGNNQPNIPDIVAHLWYFQATDAC

SEQ ID NO: 7778 - protein, 268 aa, Fusarium oxysporum
EVSQDLFNQFNLFAQYSAAAYCGKNNDAPAGTNITCTGNACPEVEKADATFLYSFEDSGVGDVTGFLALDNTNKLIVLSFRGSMSIENWIANLNFWLKKINDICSGCRGHDGFTSSWRSVADTLRQKVEDAVREHPDYRVVFTGHSLGGALATVAGADLRGNGYDIDVFSYGAPRVGNRAFAEFLTVQTGGTLYRITHTNDIVPRLPPREFGYSHSSPEYWIKSGTLVPVTRNDIVKIEGIDATGGNNQPNIPDIPAHLWYFQATDAC

SEQ ID NO: 7779 - protein, 268 aa, Fusarium oxysporum
EVSQDLFNQFNLFAQYSAAAYCGKNNDAPAGTNITCTGNACPEVEKADATFLYSFEDSGVGDVTGFLALDNTNKLIVLSFRGSRSIENWIANLNFWLKKINDICSGCRGHDGFTSSWRSVADTLRQKVEDAVREHPDYRVVFTGHSLGGALATVAGADLRGNGYDIDVFSYGAPRVGNRAFAEFLTVQTGGTLYRITHTNDIVPRLPPREFGYSHSSPEYWIKSGTLVPVTRNDIVKIEGIDATGGNNQPNIPDIQAHLWYFQATDAC

SEQ ID NO: 7780 - protein, 268 aa, Thermomyces lanuginosus
EVSQDLFNQFNLFAQYSAAAYCGKNNDAPAGTNITCTGNACPEVEKADATFLYSFEDSGVGDVTGFLALDNTNKLIVLSFRGSWSIENWIANLNFWLKKINDICSGCRGHDGFTSSWRSVADTLRQKVEDAVREHPDYRVVFTGHSLGGALATVAGADLRGNGYDIDVFSYGAPRVGNRAFAEFLTVQTGGTLYRITHTNDIVPRLPPREFGYSHSSPEYWIKSGTLVPVTRNDIVKIEGIDATGGNNQPNIPDIPAHLWYFQATSAC

SEQ ID NO: 7781 - protein, 268 aa, Fusarium oxysporum
EVSQDLFNQFNLFAQYSAAAYCGKNNDAPAGTNITCTGNACPEVEKADATFLYSFEDSGVGDVTGFLALDNTNKLIVLSFRGSISIENWIANLNFWLKKINDICSGCRGHDGFTSSWRSVADTLRQKVEDAVREHPDYRVVFTGHSLGGALATVAGADLRGNGYDIDVFSYGAPRVGNRAFAEFLTVQTGGTLYRITHTNDIVPRLPPREFGYSHSSPEYWIKSGTLVPVTRNDIVKIEGIDATGGNNQPNIPDIPAHLWYFQATDAC

SEQ ID NO: 7782 - protein, 268 aa, Thermomyces lanuginosus
EVSQDLFNQFNLFAQYSAAAYCGKNNDAPAGTNITCTGNACPEVEKADATFLYSFEDSGVGDVTGFLALDNTNKLIVLSFRGSRSIENWIANLNFWLKKINDICSGCRGHDGFTSSWRSVADTLRQKVEDAVREHPDYRVVFTGHSLGGALATVAGADLRGNGYDIDVFSYGAPRVGNRAFAEFLTVQTGGTLYRITHTNDIVPRLPPREFGYSHSSPEYWIKSGTLVPVTRNDIVKIEGIDATGGNNQPNIPDIKAHLWYFQATDAC

SEQ ID NO: 7783 - protein, 268 aa, Thermomyces lanuginosus
EVSQDLFNQFNLFAQYSAAAYCGKNNDAPAGTNITCTGNACPEVEKADATFLYSFEDSGVGDVTGFLALDNTNKLIVLSFRGSRSIENWIANLNFWLKKINDICSGCRGHDGFTSSWRSVADTLRQKVEDAVREHPDYRVVFTGHSLGGALATVAGADLRGNGYDIDVFSYGAPRVGNRAFAEFLTVQTGGTLYRITHTNDIVPRLPPREFGYSHSSPEYWIKSGTLVPVTRNDIVKIEGIDATGGNNQPNIPDIRAHLWYFQATDAC

SEQ ID NO: 7784 - protein, 268 aa, Thermomyces lanuginosus
EVSQDLFNQFNLFAQYSAAAYCGKNNDAPAGTNITCTGNACPEVEKADATFLYSFEDSGVGDVTGFLALDNTNKLIVLSFRGSRSIENWIANLNFWLKKINDICSGCRGHDGFTSSWRSVADTLRQKVEDAVREHPDYRVVFTGHSLGGALATVAGADLRGNGYDIDVFSYGAPRVGNRAFAEFLTVQTGGTLYRITHTNDIVPRLPPREFGYSHSSPEYWIKSGTLVPVTRNDIVKIEGIDATGGNNQPNIPDITAHLWYFQATDAC

SEQ ID NO: 7785 - protein, 268 aa, Thermomyces lanuginosus
EVSQDLFNQFNLFAQYSAAAYCGKNNDAPAGTNITCTGNACPEVEKADATFLYSFEDSGVGDVTGFLALDNTNKLIVLSFRGSWSIENWIRNLNFFLKKINDICSGCRGHDGFTSSWRSVADTLRQKVEDAVREHPDYRVVFTGHSLGGALATVAGADLRGNGYDIDVFSYGAPRVGNRAFAEFLTVQTGGTLYRITHTNDIVPRLPPREFGYSHSSPEYWIKSGTLVPVTRNDIVKIEGIDATGGNNQPNIPDIPAHLWYFQATDAC

SEQ ID NO: 7786 - protein, 268 aa, Thermomyces lanuginosus
EVSQDLFNQFNLFAQYSAAAYCGKNNDAPAGTNITCTGNACPEVEKADATFLYSFEDSGVGDVTGFLALDNTNKLIVLSFRGSWSIENWIENLNFWLKKINDICSGCRGHDGFTSSWRSVADTLRQKVEDAVREHPDYRVVFTGHSLGGALATVAGADLRGNGYDIDVFSYGAPRVGNRAFAEFLTVQTGGTLYRITHTNDIVPRLPPREFGYSHSSPEYWIKSGTLVPVTRNDIVKIEGIDATGGNNQPNIPDIPAHLWYFQATDAC

SEQ ID NO: 7787 - protein, 268 aa, Thermomyces lanuginosus
EVSQDLFNQFNLFAQYSAAAYCGKNNDAPAGTNITCTGNACPEVEKADATFLYSFEDSGVGDVTGFLALDNTNKLIVLSFRGSRSIENWIANLNFWLKKINDICSGCRGHDGFTSSWRSVADTLRQKVEDAVREHPDYRVVFTGHSLGGALATVAGADLRGNGYDIDVFSYGAPRVGNRAFAEFLTVQTGGTLYRITHTNDIVPRLPPREFGYSHSSPEYWIKSGTLVPVTRNDIVKIEGIDATGGNNQPNIPDIGAHLWYFQATDAC

SEQ ID NO: 7788 - protein, 268 aa, Thermomyces lanuginosus
EVSQDLFNQFNLFAQYSAAAYCGKNNDAPAGTNITCTGNACPEVEKADATFLYSFEDSGVGDVTGFLALDNTNKLIVLSFRGSRSIENWIANLNFWLKKINDICSGCRGHDGFTSSWRSVADTLRQKVEDAVREHPDYRVVFTGHSLGGALATVAGADLRGNGYDIDVFSYGAPRVGNRAFAEFLTVQTGGTLYRITHTNDIVPRLPPREFGYSHSSPEYWIKSGTLVPVTRNDIVKIEGIDATGGNNQPNIPDIMAHLWYFQATDAC

SEQ ID NO: 7789 - protein, 268 aa, Thermomyces lanuginosus
EVSQDLFNQFNLFAQYSAAAYCGKNNDAPAGTNITCTGNACPEVEKADATFLYSFEDSGVGDVTGFLALDNTNKLIVLSFRGSRSIENWIANLNFWLKKINDICSGCRGHDGFTSSWRSVADTLRQKVEDAVREHPDYRVVFTGHSLGGALATVAGADLRGNGYDIDVFSYGAPRVGNRAFAEFLTVQTGGTLYRITHTNDIVPRLPPREFGYSHSSPEYWIKSGTLVPVTRNDIVKIEGIDATGGNNQPNIPDINAHLWYFQATDAC

SEQ ID NO: 7790 - protein, 268 aa, Thermomyces lanuginosus
EVSQDLFNQFNLFAQYSAAAYCGKNNDAPAGTNITCTGNACPEVEKADATFLYSFEDSGVGDVTGFLALDNTNKLIVLSFRGSRSIENWIANLNFWLKKINDICSGCRGHDGFTSSWRSVADTLRQKVEDAVREHPDYRVVFTGHSLGGALATVAGADLRGNGYDIDVFSYGAPRVGNRAFAEFLTVQTGGTLYRITHTNDIVPRLPPREFGYSHSSPEYWIKSGTLVPVTRNDIVKIEGIDATGGNNQPNIPDIAAHLWYFQATDAC

SEQ ID NO: 7791 - protein, 267 aa, Synthetic construct
SQDLFNQFNLFAQYSAAAYCGKNNDAPAGTNITCTGNACPEVEKADATFLYSFEDSGVGDVTGFLALDNTNKLIVLSFRGSRSIENWIGNLKFLLKEINDICSGCRGHDGFTSSWRSVADTLRQKVEDAVREHPDYRVVFTGHSLGGALATVAGADLRGNGYDIDVFSYGAPRVGNRAFAEFLTVQTGGTLYRITHTNDIVPRLPPREFGYSHSSPEYWIKSGTLVPVTRNDIVKIEGIDATGGNNRPNIPDIPAHLWYFGLIGTCL

SEQ ID NO: 7792 - protein, 267 aa, Thermomyces lanuginosus
VSQDLFNQFNLFAQYSAAAYCGKNNDAPAGTNITCTGNACPEVEKADATFLYSFEDSGVGDVTGFLALDNTNKLIVLSFRGSRSIENWIANLNFWLKEINDICSGCRGHDGFTSSWRSVADTLRQKVEDAVREHPDYRVVFTGHSLGGALATVAGADLRGNGYDIDVFSYGAPRVGNRAFAEFLTVQTGGTLYRITHTNDIVPRLPPREFGYSHSSPEYWIKSGTLVPVTRNDIVKIEGIDATGGNNQPNIPDIAAHLHYFQATDAC

SEQ ID NO: 7793 - protein, 267 aa, Thermomyces lanuginosus
VSQDLFNQFNLFAQYSAAAYCGKNNDAPAGTNITCTGNACPEVEKADATFLYSFEDSGVGDVTGFLALDNTNKLIVLSFRGSRSIENWIGNLNFWLKKINDICSGCRGHDGFTSSWRSVADTLRQKVEDAVREHPDYRVVFTGHSLGGALATVAGADLRGNGYDIDVFSYGAPRVGNRAFAEFLTVQTGGTLYRITHTNDIVPRLPPREFGYSHSSPEYWIKSGTLVPVTRNDIVKIEGIDATGGNNQPNIPDIAAHLHYFQATDAC

SEQ ID NO: 7794 - protein, 264 aa, Thermomyces lanuginosus
EVSQDLFNQFNLFAQYSAAAYCGKNNDAPAGTNITCTGNACPEVEKADATFLYSFEDSGVGDVTGFLALDNTNKLIVLSFRGSRSIENWIGNLNFDLKEINDICSGCRGHDGFTSSWRSVADTLRQKVEDAVREHPDYRVVFTGHSLGGALATVAGADLRGNGYDIDVFSYGAPRVGNRAFAEFLTVQTGGTLYRITHTNDIVPRLPPREFGYSHSSPEYWIKSGTLVPVRRRDIVKIEGIDATGGNNQPNIPDIPAHLWYFGL

SEQ ID NO: 7795 - protein, 291 aa, Thermomyces lanuginosus
MRSSLVLFFVSAWTALASPIRREVSQDLFNQFNLFAQYSAAAYCGKNNDAPAGTNITCTGNACPEVEKADATFLYSFRDSGVGDVTGFLALDNTNKLIVLSFRGSRSIENWIADLNFILIEINDICSGCRGHDGFTSSWFSVADTLRQKVEDAVREHPDYRVVFTGHSLGGALATVAGADLRGNGYDIDVFSYGAPRVGNRAFAEFLTVQTGGTLYRITHTNDIVPRLPPREFGYSHSSPEYWIKSGTLVPVRRRDIVKIEGIDATGGNNQPNIPSIPAHLWYFGPIGTCL

SEQ ID NO: 7796 - protein, 291 aa, Thermomyces lanuginosus
MRSSLVLFFVSAWTALASPIRREVSQDLFNQFNLFAQYSAAAYCGKNNDAPAGTNITCTGNACPEVEKADATFLYSFEDSGVGCVTGFLALDNTNKLIVLSFRGSRSPCNWIANLDFIFDEINDICSGCRGHDGFTSSWRSVADTLRQKVEDAVREHPDYRVVFTGHSLGGALATVAGADLRGNGYDIDVFSYGAPRVGNRAFAEFLTVQTGGTLYRITHTNDIVPRLPPREFGYSHSSPEYWIKSGTLVPVRRRDIVKIEGIDATGGNNQPNIPDIPAHLWYFGLIGTCL

SEQ ID NO: 7797 - protein, 291 aa, Thermomyces lanuginosus
MRSSLVLFFVSAWTALASPIRREVSNDSFNQFNLFAQYSAAAYCGKNNDAPAGTNITCTGNACPEVEKADATFLYSFEDNGSGDVTGFLALDNTNKLIVLSFRGSRSVENWIGNLNFDLKEINDICSGCRGHDGFTSSWRSVADTLRQKVEDAVREHPDYRVVFTGHSLGGGLATVAGADLRGNGYDIDVFSYGAPRVGNRAFAEFLTVQTGGTLYRITHTNDIVPRLPPREFGYSHSSPEYWIKSGTGVPVRRRDIVKIEGIDATGGNNQPNIPDIKAHLWYFGLIGTCL

SEQ ID NO: 7798 - protein, 291 aa, Thermomyces lanuginosus
MRSSLVLFFVSAWTALASPIRREVSQDLYNQFKLFAHYAAAAYCGKNNDAPAGTNITCTGNACPEVEKADATFIYSFEDSGVGDVTGFLALDNTNKLIVLSFRGSRSIENWIANLNFDLKEINDICSGCRGHDGFYNSWRSVADTLRQKVEDAVREYPDYRVVFTGHSLGGALATVAGADLRGNGYDIDVFSYGAPRVGNRAFAEFLTVQTGGTLYRITHTNDIVPRLPPREFGYSHSSPEYWIKSGTLVPVTRNDIVVIEGIDATGGNNQPNIPDIPAHLWYFGLIGTCL

SEQ ID NO: 7799 - protein, 291 aa, Thermomyces lanuginosus
MRSSLVLFFVSAWTALASPIRREVSQDLFNQFNLFAQYSAAAYCGKNNDAPAGTNITCTGNACPEVEKADATFLYSFRDSGVGDVTGFLALDNTNKLIVLSFRGTRSIENWIADLNFVLKEINDICSGCRGHDGFTSSWFSVADTLRQKVEDAVREHPDYRVVFTGHSLGGALATVAGADLRGNGYDIDVFSYGAPRVGNRAFAEFLTVQTGGTLYRITHTNDIVPRLPPREFGYSHSSPEYWIKSGTLVPVRRRDIVKIEGIDATGGNNQPNIPSIPAHLWYFGAIGTCL

SEQ ID NO: 7800 - protein, 291 aa, Thermomyces lanuginosus
MRSSLVLFFVSAWTALASPIRREVSQDLFNQFNLFAQYSAAAYCGKNNDAPAGTNITCTGNACPEVEKADATFLYSFEDNGSGDVTGFLALDNTNKLIVLSFRGSRSVENWIGNLNFDLKEINDICSGCRGHDGFTSSWRSVADTLRQKVEDAVREHPDYRVVFTGHSLGGGLATVAGADLRGNGYDIDVFSYGAPRVGNRAFAEFLTVQTGGTLYRITHTNDIVPRLPPRKFGYSHSSPEYWIKSGTGVPVRRRDIVKIEGIDATGGNNRPNIPDIKAHLWYFGLIGTCL

SEQ ID NO: 7801 - protein, 291 aa, Thermomyces lanuginosus
MRSSLVLFFVSAWTALASPIRREVSQDLFNQFNLFAQYSAAAYCGKNNDAPAGTNITCTGNACPEVEKADATFLYSFEDTGKGDVTGFLALDNTNKLIVLSFRGSRSVENWIGNLNFDLKEINAICSGCRGHDGFTSSWRSVADTLRQKVEDAVREHPDYRVVFTGHSLGGGLATVAGADLRGNGYDIDVFSYGAPRVGNRAFAEFLTVQTGGTLYRITHTNDIVPRLPPRVFGYSHSSPEYWIKSGTGVPVRRRDIVKIEGIDATGGNNQPNIPDIKAHLWYFGLIGTCL

SEQ ID NO: 7802 - protein, 291 aa, Thermomyces lanuginosus
MRSSLVLFFVSAWTALASPIRREVSVDLFNQFNLFAQYSAAAYCGKNNDAPAGTNITCTGNACPEVEKADATFLYSFEDTGKGDVTGFLALDNTNKLIVLSFRGSRSIENWIGNLNFDLKEINDICSGCRGHDGFTSSWRSVADTLRQKVEDAVREHPDYRVVFTGHSLGGALATVAGADLRGNGYDIDVFSYGAPRVGNRAFAEFLTVQTGGTLYRITHLADIVPRLPPRKFGYSHSSPEYWIKSGTLVPVRRRDIVKIEGIDATGGNNQPNIPDAKAHLWYFGLIGTCL

SEQ ID NO: 7803 - protein, 291 aa, Thermomyces lanuginosus
MRSSLVLFFVSAWTALASPIRREVSQDLFNQFNLFAQYSAAAYCGKNNDAPAGTNITCTGNACPEVEKADATFLYSFEDSGVGDVTGFLALDNTNKLIVLSFRGTRSITNWILDLNYTPQEINDICSGCRGHDGFTSSWRSVADTLRQKVEDAVREHPDYRVVFTGHSLGGALATVAGADLRGNGYDIDVFSYGAPRVGNRAFAEFLTVQTGGTLYRITHTNDIVPRLPPREFGYSHSSPEYWIKSGTLVPVRRRDIVKIEGIDATGGNNQPNIPDIPAHLWYFGLIGTCL

SEQ ID NO: 7804 - protein, 291 aa, Thermomyces lanuginosus
MRSSLVLFFVSAWTALASPIRREVSQDLFNQFNLFAQYSAAAYCGKNNDAPAGTNITCTGNACPEVEKADATFLYSFEDTGKGDVTGFLALDNTNKLIVLSFRGSRSVENWIGNLKFDLKEINDICSGCRGHDGFTSSWRSVADTLRQKVEDAVREHPDYRVVFTGHSLGGGLATVAGADLRGNGYDIDVFSYGAPRVGNRAFAEFLTVQTGGTLYRITHTNDIVPRLPPRVFGYSHSSPEYWIKSGTGVPVRRRDIVKIEGIDATGGNNQPNIPDIKAHLWYFGLIGTCL

SEQ ID NO: 7805 - protein, 291 aa, Thermomyces lanuginosus
MRSSLVLFFVSAWTALASPIRREVSQDLFNQFNLFAQYSAAAYCGKNNDAPAGTNITCTGNACPEVEKADATFLYSFEDNGSGDVTGFLALDNTNKLIVLSFRGSRSVENWIGNLNFDLKEINDICSGCRGHDGFTSSWRSVADTLRQKVEDAVREHPDYRVVFTGHSLGGGLATVAGADLRGNGYDIDVFSYGAPRVGNRAFAEFLTVQTGGTLYRITHTNDIVPRLPPRKFGYSHSSPEYWIKSGTGVPVRRRDIVKIEGIDATGGNNQPNIPDAKAHLWYFGLIGTCL

SEQ ID NO: 7806 - protein, 290 aa, Thermomyces lanuginosus
MRSSLVLFFVSAWTALASPIRREVSQDLFNQFNLFAQYSAAAYCGKNNDAPAGTNITCTGNACPEVEKADATFLYSFRDSGVGDVTGFLALDNTNKLIVLSFRGSRSLENWIADLNFHLQEINDICSGCRGHDGFTSSWFSVADTLRQKVEDAVREHPDYRVVFTGHSLGGALATVAGADLRGNGYDIDVFSYGAPRVGNRAFAEFLTVQTGGTLYRITHTNDIVPRLPPREFGYSHSSPEYWIKSGTLVPVRRRDIVKIEGIDATGGNNQPNIPSIPAHLWYFGLIGTC

SEQ ID NO: 7807 - protein, 194 aa, Humicola insolens
QLGAIQNGLESGSPNACPDAILIFARGSTEPGNMGITVGPALANGLKKHIPNIWIQGVGGPYDAALATNFLPRGTSQANIDEGKRLFHLANQKCPNTPVVAGGYSQGAALIAAAVSELSGAVKEQVKGVALFGYTQNLQNRGGIPNYPRERTKVFCNVGDAVCTGTLIGTPAHLSYTIQARGEAARFLHDRIRA

SEQ ID NO: 7808 - protein, 194 aa, Humicola insolens
QLGAIQNGLESGSPNACPDAILIFARGSTEPGNMGITVGPALADGLKSHIPNIWIQGVGGPYDAALATNFLPRGTSQANIDEGKRLFALANQKCPNTPVVAGGYSQGAALIAAAVSELSGAVKEQVKGVVLFGYTQNLQNRGGIPNYPRERTKVFCNVGDAVCTGTLIITPAHLSYTIQARGEAARFLRDRIRA

SEQ ID NO: 7809 - protein, 194 aa, Humicola insolens
QLGAIQNGLESGSPNACPDAILIFARGSTEPGNMGITVGPALANGLKSHIPNIWIQGVGGPYDAALATNFLPRGTSQANIDEGKRLFVLANQKCPNTPVVAGGYSQGAALIAAAVSELSGAVKEQVKGVALFGYTQNLQNRGGIPNYPRERTKVFCNVGDAVCTGTLIITPAHLSYTIQARGEAARFLADRIRA

SEQ ID NO: 7810 - protein, 194 aa, Humicola insolens
QLGAIENDLESGSADACPDAILIFARGSTEPGNMGITVGPALANGLEEHIRNIWIQGVGGPYDAALATNFLPRGTSQANIDEGKRLFHLAHQKCPNTPVVAGGYSQGAALIAAAVSELSGAVKEQVKGVVLFGYTQNLQNRGGIPNYPRERTKVFCNVGDAVCTGTLIITPAHFSYTVEARGEAARFLVDRIRA

SEQ ID NO: 7811 - protein, 194 aa, Humicola insolens
QLGAIENDLESGSADACPDAILIFARGSTEPGNMGITHGPALANGLEEHIRNIWIQGVGGPYDAALATNFLPRGTSQANIDEGKRLFHLAHQKCPNTPVVAGGYSQGAALIAAAVSELSGAVKEQVKGVVLFGYTQNLQNRGGIPNYPRERTKVFCNVGDAVCTGTLITTPAHLSYTIEARGEAARFLVDRIRA

SEQ ID NO: 7812 - protein, 194 aa, Humicola insolens
QLGAIQNGLESGSPNACPDAILIFARGSTEPGNMGITVGPALANGLKSHIPNIWIQGVGGPYDAALATNFLPRGTSQANIDEGKRLFLLANQKCPNTPVVAGGYSQGAALIAAAVSELSGAVKEQVKGVALFGYTQNLQNRGGIPNYPRERTKVFCNVGDAVCTGTLIITPAHLSYTIQARGEAARFLADRIRA

SEQ ID NO: 7813 - protein, 194 aa, Humicola insolens
QLGAIQNGLESGSPNACPDAILIFARGSTEPGNMGITVGPALANGLKSHIPNIWIQGVGGPYDAALATNFLPRGTSQANIDEGKRLFALANQKCPNTPVVAGGYSQGAALIAAAVSELSGAVKEQVKGVALFGYTQNLQNRGGIPNYPRERTKVFCNVGDAVCTGTLIITPAHLSYTIQARGEAARFLRDRIRA

SEQ ID NO: 7814 - protein, 194 aa, Humicola insolens
QLGAIENDLESGSADACPDAILIFARGSTEPGNMGITVGPALANGLEEHIRNIWIQGVGGPYDAALATNFLPRGTSQANIDEGKRLFHLAHQKCPNTPVVAGGYSQGAALIAAAVSELSGAVKEQVKGVVLFGYTQNLQNRGGIPNYPRERTKVFCNVGDAVCTGIPIITPAHLSYTIEARGEAARFLVDRIRA

SEQ ID NO: 7815 - protein, 194 aa, Humicola insolens
QLGAIENDLESGSADACPDAILIFARGSTEPGNMGITVGPALANGLEEHIRNIWIQGVGGPYDAALATNFLPRGTSQANIDEGKRLFHLAHQKCPNTPVVAGGYSQGAALIAAAVSELSGAVKEQVKGVVLFGYTQNLQNRGGIPNYPRERTKVFCNVGDAVCTGMLFITPAHLSYTIEARGEAARFLVDRIRA

SEQ ID NO: 7816 - protein, 274 aa, Thermomyces lanuginosus
SPIRREVSQDLFNQFNLFAQYSAAAYCGKNNRAPAGTNITCTANACPEVEKADATFLYSFEDSGVGDVTGFLALDNTNKLIVLSFRGSRSIENWIADLNFLLQEINDICSGCRGHAGFTSSWRSVADTLRQKVEDAVREHPDYRVVFTGHSLGGALATVAGADLRGNKYDIDVFSYGAPRVGNRAFAEFLTVQTGGTLYRITHTNDIVPRLPPREFGYSHSSPEYWIKSGTLVPVRRRDIVKIEGIDATGGNNQPNIPSITAHLWYFGLIGTCL

SEQ ID NO: 7817 - protein, 274 aa, Thermomyces lanuginosus
SPIRREVSQDLFNQFNLFAQYSAAAYCGKNNRAPAGTNITCTANACPEVEKADATFLYSFEDSGVGDVTGFLALDNTNKLIVLSFRGTRSIENWIADLNFLLQEYNDICSGCRGHAGFTSSWRSVADTLRQKVEDAVREHPDYRVVFTGHSLGGALATVAGADLRGNKYDIDVFSYGAPRVGNRAFAEFLTVQTGGTLYRITHTNDIVPRLPPREFGYSHSSPEYWIKSGTLVPVRRRDIVKIEGIDATGGNNQPNIPDIPAHLWYFGLIGTCL

SEQ ID NO: 7818 - protein, 274 aa, Thermomyces lanuginosus
SPIRREVSQDLFNQFNLFAQYSAAAYCGKNNDAPAGTNITCTGNACPEVEKADATFLYSFEDSGVGDVTGFLALDNTNKLIVLSFRGTRSITNWILDLNYTPQEINDICSGCRGHDGFTSSWRSVADTLRQKVEDAVREHPDYRVVFTGHSLGGALATVAGADLRGNGYDIDVFSYGAPRVGNRAFAEFLTVQTGGTLYRITHTNDIVPRLPPREFGYSHSSPEYWIKSGTLVPVTRNDIVKIEGIDATGGNNQPNIPDIPAHLWYFGLIGTCL

SEQ ID NO: 7819 - protein, 274 aa, Thermomyces lanuginosus
SPIRREVSQDLFNQFNLFAQYSAAAYCGKNNDAPAGTNITCTGNACPEVEKADATFLYSFRDSGVGDVTGFLALDNTNKLIVLSFRGSRSIENWIADLNFILIEINDICSGCRGHDGFTSSWFSVADTLRQKVEDAVREHPDYRVVFTGHSLGGALATVAGADLRGNGYDIDVFSYGAPRVGNRAFAEFLTVQTGGTLYRITHTNDIVPRLPPREFGYSHSSPEYWIKSGTLVPVRRRDIVKIEGIDATGGNNQPNIPSGSAHLWYFGAIGTCL

SEQ ID NO: 7820 - protein, 274 aa, Thermomyces lanuginosus
SPIRREVSQDLFNQFNLFAQYSAAAYCGKNNDAPAGTNITCTGNACPEVEKADATFLYSFEDXGVGDVTGFLALDNTNKLIVLSFRGSRSXENWIGNLNFDLKEINDICSGCRGRDGFTSSWRSVADTLRQKVEDAVREHPDYRVVFTGXSLGGALATVAGADLRGNGYDIDVFSYGAPRVGNRAFAEFLTVQTGGTLYRITRTNDIVPRLPPREFGYSHSSPEYWIKSGTLVPVTRNDIVKXCGIDATGGNNQPNIPDIPAHLHYFGLIGTCL

SEQ ID NO: 7821 - protein, 274 aa, Synthetic construct
SPIRREVSQDLFNQFNLFAQYSAAAYCGKNNDAPAGTNITCTGNACPEVEKADATFLYSFEDSGVGDVTGFLALDNTNKLIVLSFRGSRSIENWIGNLNFDLKEINDICSGCRGHDGFTSSWRSVAHTLSQKVQDAEREHPDYRVLFTGHSLVGALATVAGADLRGNGYDIDVFSYGAPRVGNRAFAEFLTVQTGGTLYRITHTNDIVPRLPPREFGYSHSSPEYWIKSGTLVPVTRNANVKIEGIDATGGNNQPNIPDIPAHLWYFGLIGTCL

SEQ ID NO: 7822 - protein, 274 aa, Thermomyces lanuginosus
SPIRREVSQDLFNQFNLFAQYSAAAYCGKNNDAPAGTNITCTGNACPEVEKADATFLYSFRDSGVGDVTGFLALDNTNKLIVLSFRGSRSIENWIADLNFILIEINDICSGCRGHDGFTSSWFSVADTLRQKVEDAVREHPDYRVVFTGHSLGGALATVAGADLRGNGYDIDVFSYGAPRVGNRAFAEFLTVQTGGTLYRITHTNDIVPRLPPREFGYSHSSPEYWIKSGTLVPVRRRDIVKIEGIDATGGNNQPNIPSGAAHLWYFGAIGTCL

SEQ ID NO: 7823 - protein, 274 aa, Thermomyces lanuginosus
SPIRREVSQDLFNQFNLFAQYSAAAYCGKNNRAPAGTNITCTANACPEVEKADATFLYSFEDSGVGDVTGFLALDNTNKLIVLSFRGTRSIENWIADLNFILQEINDICSGCRGHDGFTSSWRSVADTLRQKVEDAVREHPDYRVVFTGHSLGGALATVAGADLRGNKYDIDVFSYGAPRVGNRAFAEFLTVQTGGTLYRITHTNDIVPRLPPREFGYSHSSPEYWIKSGTLVPVRRRDIVKIEGIDATGGNNQPNIPSITAHLWYFGLIGTCL

SEQ ID NO: 7824 - protein, 274 aa, Thermomyces lanuginosus
SPIRREVSQDLFNQFNLFAQYSAAAYCGKNNDAPAGTNITCTGNACPEVEKADATFLYSFRDSGVGDVTGFLALDNTNKLIVLSFRGSRSIENWIADLNFILIEINDICSGCRGHDGFTSSWFSVADTLRQKVEDAVREHPDYRVVFTGHSLGGALATVAGADLRGNGYDIDVFSYGAPRVGNRAFAEFLTVQTGGTLYRITHTNDIVPRLPPREFGYSHSSPEYWIKSGTLVPVRRRDIVKIEGIDATGGNNQPNIPSMSAHLWYFGAIGTCL

SEQ ID NO: 7825 - protein, 274 aa, Thermomyces lanuginosus
SPIRREVSQDLFNQFNLFAQYSAAAYCGKNNDAPAGTNITCTGNACPEVEKADATFLYSFRDSGVGDVTGFLALDNTNKLIVLSFRGTRSLENWIADLNFILQEINDICSGCRGHDGFTSSWFSVADTLRQKVEDAVREHPDYRVVFTGHSLGGALATVAGADLRGNGYDIDVFSYGAPRVGNRAFAEFLTVQTGGTLYRITHTNDIVPRLPPREFGYSHSSPEYWIKSGTLVPVRRRDIVKIEGIDATGGNNQPNIPSIPAHLWYFGAIGTCL

SEQ ID NO: 7826 - protein, 274 aa, Thermomyces lanuginosus
SPIRREVSQDLFNQFNLFAQYSAAAYCGRNNDAPAGTNITCTGNACPEVERADATFLYSFEDNGSGDVTGFLALDNTNRLIVLSFRGSRSVENWIGNLNFDLREINDICSGCRGHDGFTSSWRSVADTLRQRVEDAVREHPKYRVVFTGHSLGGALATVAGADLRGNGYDIDVFSYGAPRVGNRAFAEFLTVQTGGTLYRITHTNDIVPRLPPREFGYSHSSPEYWIRSGTLVPVRRRDIVKIEGIDATGGNNQPNIPDIPAHLWYFGLIGTCL

SEQ ID NO: 7827 - protein, 274 aa, Thermomyces lanuginosus
SPIRREVSQDLFNQFNLFAQYSAAAYCGKNNDAPAGTNITCTGNACPEVEKADATFLYSFEDSGVGCVTGFLALDNTNKLIVLSFRGSRSPCNWIANLDFIFDEINDICSGCRGHDGFTSSWRSVADTLRQKVEDAVREHPDYRVVFTGHSLGGALATVAGADLRGNGYDIDVFSYGAPRVGNRAFAEFLTVQTGGTLYRITHTNDIVPRLPPREFGYSHSSPEYWIKSGTLVPVTRNDIVKIEGIDATGGNNQPNIPDIPAHLWYFGLIGTCL

SEQ ID NO: 7828 - protein, 274 aa, Thermomyces lanuginosus
SPIRREVSQDLFNQFNLFAQYSAAAYCGKNNDAPAGTNITCTGNACPEVEKADATFLYSFRDSGVGDVTGFLALDNTNKLIVLSFRGSRSIENWIADLNFILIEINDICSGCRGHDGFTSSWFSVADTLRQKVEDAVREHPDYRVVFTGHSLGGALATVAGADLRGNGYDIDVFSYGAPRVGNRAFAEFLTVQTGGTLYRITHTNDIVPRLPPREFGYSHSSPEFWIKSGTLVPVRRRDIVKIEGIDAEGGNNQPNIPSIPAHLWYFGAIGTCL

SEQ ID NO: 7829 - protein, 274 aa, Thermomyces lanuginosus
SPIRREVSQDLFNQFNLFAQYSAAAYCGKNNDAPAGTNITCTGNACPEVEKADATFLYSFRDSGVGDVTGFLALDNTNKLIVLSFRGSRSIENWIADLNFILIEINDICSGCRGHDGFTSSWFSVADTLRQKVEDAVREHPDYRVVFTGHSLGGALATVAGADLRGNGYDIDVFSYGAPRVGNRAFAEFLTVQTGGTLYRITHTNDIVPRLPPREFGYSHSSPEYWIKSGTLVPVRRRDIVKIEGIDATGGNNQPNIPSSVAHLWYFGAIGTCL

SEQ ID NO: 7830 - protein, 273 aa, Thermomyces lanuginosus
SPIRREVSQDLFNQFNLFAQYSAAAYCGKNNDAPAGTNITCTGNACPEVEKADATFLYSFEDSGVGDVTGFLALDNTNKLIVLSFRGSRSIENWIANLNFWLKKINDICSGCRGHDGFTSSWRSVADTLRQKVEDAVREHPDYRVVFTGHSLGGALATVAGADLRGNGYDIDVFSYGAPRVGNRAFAEFLTVQTGGTLYRITHTNDIVPRLPPREFGYSHSSPEYWIKSGTLVPVTRNDIVKIEGIDATGGNNQPNIPDIPAHLWYFQATDAC

SEQ ID NO: 7831 - protein, 273 aa, Synthetic construct
PRPRPGTQDLFNQFNLFAQYSAAAYCGKNNDAPAGTNITCTGNACPEVEKADATFLYSFEGSGVGDVTGFLALDNTNKLIVLSFRGSRSIENWIGNLKFLMKEINDICSGCRGHDGFTSSWRSVADTLRQKVEDAVREHPDYRVVFTGHSLGGALATVAGADLRGNGYDIDVFSYGAPRVGNRAFAEFLTVQTGGTLYRITHTNDIVPRLPPREFGYSHSSPEYWIKSGTLVPVTRNDIVKIEGIDATGGNNRPNIPDIPAHLWYFGLIGTCL

SEQ ID NO: 7832 - protein, 269 aa, Thermomyces lanuginosus
EVSQDLFNQFNLFAQYSKAAYCQKNNSAEAGTNITCTGNACPEVEKADATFLYSFEDMGVGDVTGFLALDNTNKQIILSFRGSRSIENWIGNLNFDLKEINDICSGCKGHDGFTSSWRSVADTLRQKVEDAVREFPDYRVVFTGHSLGGALATVAGADLRGNGYDIDVFSYGAPRVGNRAFAEFLTHQTGGTLYRITHTNDIVPRLPPREFGYSHSSPEYWIKSGTLVPVTRNDIVKIEGIDATGGNNQPNIPDIPAHLWYFGLIGTCL

SEQ ID NO: 7833 - protein, 269 aa, Synthetic construct
EVSQDLFNQFNLFAQYSAAAYCGKNNDAPAGTNITCTGNACPEVEKADATFLYSFEDSGVGDVTGFLALDNTNKLIVLSFRGSRSIKNWIANLNFRLKEVNDICSGCRGHDGFTSSWRSVADTLRQKVKDAVREHPDYRVVFTGHSLGGALATVAGADLRGNGYDIDVFSYGAPRVGNRAFAEFLTVQTGGTLYRITHTNDIVPRLPPREFGYSHSSPEYWIKSGTLVPVTRNDIVMIEGIDATGGNNQPNLPDITAHLWYFAQIGTCL

SEQ ID NO: 7834 - protein, 269 aa, Thermomyces lanuginosus
EVSQDLFNQFNLFAQYSAAAYCGKNNDAPAGTNITCTGNACPEVEKADATILYSFEDSGVGDVTGFLALDNTNKLIVLSFRGSRSIENWIGNLNFDLKEINDICSGCRGHDGFTSSWRSVADTLRQKVEDAVREHPDYRVVFTGHSLGGALATVAGADLRGDGYDIDVFSYGAPRVGNRAFAEFLTVQTGGTLYRITNTNDCVPRLPPRQFGYSHSSPEYWIKSGTLPPVRRRDIVKIEGIDATGGNNQPNICDITAHLWYFGLIGTCL

SEQ ID NO: 7835 - protein, 269 aa, Thermomyces lanuginosus
EVSQDLFNQFNLFAQYSAAAYCGKNNDAPAGTNITCTGNACPEVEKADATFLYSFEDAGSGDVTGFLALDNTNKLIVLSFRGSRSVENWIGNLNFDLKEINDICSGCRGHDGFTSSWRSVADTLRQKVEDAVREHPDYRVVFSGHSLGGGLATVAGADLRGNGYDIDVFSYGAPRVGNRAFAEFLTVQTGGTLYRITHTNDIVPRLPPREFGYSHSSPEYWIKSGTGVPVRRRDIVKIEGIDATGGNNQPNIPDAKAHLWYFGLIGTCL

SEQ ID NO: 7836 - protein, 269 aa, Thermomyces lanuginosus
EVSQDLFNQFNLFAQYSAAAYCGKNNRAPAGTNITCTANACPEVEKADATFLYSFEDSGVGDVTGFLALDNTNKLIVLSFRGSRSIENWIGNLNFELKEINDICSGCRGHAGFTSSWRSVADTLRQKVEDAVREHPDYRVVFTGHSLGGALATVAGADLRGNKYDIDVFSYGAPRVGNRAFAEFLTVQTGGTLYRITHTQDIVPRLPPREFGYSHSSPEYWIKSGTLVPVRRRDIVKIEGIDATGGNNQPNIPSITAHLWYFGLIGTCL

SEQ ID NO: 7837 - protein, 269 aa, Thermomyces lanuginosus
EVSQDLFNQFNLFAQYSAAAYCGKNNRAPAGTNITCTANACPEVEKADATFLYSFEDSGVGDVTGFLALDNTNKLIVLSFRGSRSIENWIGNLNFELKEINDICSGCRGHAGFTSSWRSVADTLRQKVEDAVREHPDYRVVFVGHSLGGALATVAGADLRGNKYDIDVFSYGAPRVGNRAFAEFLTVQTGGTLYRITHTNDIVPRLPPREFGYSHSSPEYWIKSGTLVPVRRRDIVKIEGIDATGGNNQPNIPSITAHLWYFGLIGTCL

SEQ ID NO: 7838 - protein, 269 aa, Thermomyces lanuginosus
EVSQDLFNQFNLFAQYSAAAYCGKNNDAPAGTKITCTGNACPEVEKADATILYSFEDSGVGDVTGFLALDNTNKLIVLSFRGSRSIENWIGNLNFDLEEIDDICSGCRGHDGFTSSWRSVADTLRQKVEDAVREHPDYRVVFTGHSLGGALATVAGADLRGNGYDIDVFSYGAPRVGNRAFAEFLTVQTGGTLYRITSTNDIVPRLPPRRFGYSHSSPEFWIKSGTLVPVRRRDIVKIEGIDATGGNNQPNIPDIPVHLWYFGLIGTCL

SEQ ID NO: 7839 - protein, 269 aa, Thermomyces lanuginosus
EVSQDLFNQFNLFAQYSAAAYCGKNNRAPAGTNITCTANACPEVEKADATFLYSFKDSGVGDVTGFLALDNTNKLIVLSFRGSRSIENWIGNLNFELKEINDICSGCRGHAGFTSSWRSVADTLRQKVEDAVREHPDYRVVFTGHSLGGALATVAGADLRGNKYDIDVFSYGAPRVGNRAFAEFLTVQTGGTLYRITHTNDIVPRLPPREFGYSHSSPEYWIKSGTLVPVRRRDIVKIEGIDATGGNNQPNIPSITAHLWYFGLIGTCL

SEQ ID NO: 7840 - protein, 269 aa, Thermomyces lanuginosus
EVSQDLFNQFNLFAQYSAAAYCGKNNRAPAGTNITCTANACPEVEKADATFLYSFEDSGVGDVTGFLALDNTNKLIVLSFRGSRSIENWIGNLNFELEEINDICSGCRGHAGFTSSWRSVADTLRQKVEDAVREHPDYRVVFTGHSLGGALATVAGADLRGNKYDIDVFSYGAPRVGNRAFAEFLTVQTGGTLYRITHTNDIVPRLPPREFGYSHSSPEYWIKSGTLVPVRRRDIVKIEGIDATGGNNQPNIPSITAHLWYFGLIGTCL

SEQ ID NO: 7841 - protein, 269 aa, Thermomyces lanuginosus
EVSQDLFNQFNLFAQYSAAAYCKKNNSAPAGTNITCTGNACPEVEKADATTLYSFKDMGVGDVTGFLALDNTNKGIVLSFRGSRSIENWIQNLNFDLKEINDICSGCRGHDGFTSSWRSVADTLRQKVEAAVREHPDYRVVFTGHSLGGALATVAGADLRGNGYDIDVFSYGAPRVGNRAFAEFLTVQTGGTLYRITHTNDIVPRLPPREFGYSHSSPEYWIKSGTLVPVTRNDIVKIEGIDATGGNNQPNQPDIPAHLWYFGRIGTCL

SEQ ID NO: 7842 - protein, 269 aa, Thermomyces lanuginosus
EVSQDLFNQFNLFAQYSAAAYCGKNNRAPAGTNITCTANACPEVEKADATFLYSFEDSGVGDVTGFLALDNTNKLIVLSFRGSRSIENWIGNLNFELIEINDICSGCRGHAGFTSSWRSVADTLRQKVEDAVREHPDYRVVFTGHSLGGALATVAGADLRGNKYDIDVFSYGAPRVGNRAFAEFLTVQTGGTLYRITHTNDIVPRLPPREFGYSHSSPEYWIKSGTLVPVRRRDIVKIEGIDATGGNNQPNIPSITAHLWYFGLIGTCL

SEQ ID NO: 7843 - protein, 269 aa, Thermomyces lanuginosus
EVSQDLFNQFNLFAQYSAAAYCGKNNRAPAGTNITCTANACPEVEKADATFLYSFEDSGVGDVTGFLALDNTNKLIVLSFRGSRSIENWIGNLNFELKEINDICSGCRGHAGFTSSWRSVADTLRQKVEDAVREHPDYRVVFTGHSLGGALATVAGADLRGNKYDIDVFSYGAPRVGNRAFAEFLTVQTGGTLYRITHTNDIVPRLPPREFGYSHSSPEYWIKSGTLVPVRRRDIVKIEGIDATGGNNQPNIPSITAHLSYFGLIGTCL

SEQ ID NO: 7844 - protein, 269 aa, Thermomyces lanuginosus
EVSQDLFNQFNLFAQYSAAAYCGKNNRAPAGTNITCTANACPEVEKADATMLYSFEDSGVGDVTGFLALDNTNKLIVLSFRGSRSIENWIGNLNFELKEINDICSGCRGHAGFTSSWRSVADTLRQKVEDAVREHPDYRVVFTGHSLGGALATVAGADLRGNKYDIDVFSYGAPRVGNRAFAEFLTVQTGGTLYRITHTNDIVPRLPPREFGYSHSSPEYWIKSGTLVPVRRRDIVKIEGIDATGGNNQPNIPSITAHLWYFGLIGTCL

SEQ ID NO: 7845 - protein, 269 aa, Thermomyces lanuginosus
EVSQDLFNQFNLFAQYSAAAYCGKNNDAPAGTNITCTGNACPEVEKADATFLYSFEDTGKGDVTGFLALDNTNKLIVLSFRGSRSVENWIGNLKFDLKEINDICSGCRGHDGFTSSWRSVADTLRQKVEDAVREHPDYRVVFTGHSLGGGLATVAGADLRGNGYDIDVFSYGAPRVGNRAFAEFLTVQTGGTLYRITHTNDIVPRLPPRVFGYSHSSPEYWIKSGTGVPVRRRDIVKIEGIDATGGNNQPNIPDIKAHLWYFGLIGTCL

SEQ ID NO: 7846 - protein, 269 aa, Thermomyces lanuginosus
EVSQDLFNQFNLFAQYSKAAYCQKNNSAPAGTNITCTGNACPEVFKADVTFLYSFEDSGVGDVTGFLALDNTSKQIVLSFRGSRSIENWIGNLNFDLKEINDICSGCKGHDGFTSSWRSVADTLRQKVEDAVREHPDYRVVFTGHSLGGALATVAGADLRGNGYDIDVFSYGAPRVGNRAFAEFLTTQDGGTLYRITHTNDIVPRLPPREFGYSHSSPEYWIKSGTLVPVTRNDIVKIEGIDATGGNNQPNIPDIPAHLWYFGLIGTCL

SEQ ID NO: 7847 - protein, 269 aa, Thermomyces lanuginosus
EVSQDLFNQFNLFAQYSAAAYCGKNNRAPAGTNITCTANACPEVEKADATLLYSFEDSGVGDVTGFLALDNTNKLIVLSFRGSRSIENWIGNLNFELKEINDICSGCRGHAGFTSSWRSVADTLRQKVEDAVREHPDYRVVFTGHSLGGALATVAGADLRGNKYDIDVFSYGAPRVGNRAFAEFLTVQTGGTLYRITHTNDIVPRLPPREFGYSHSSPEYWIKSGTLVPVRRRDIVKIEGIDATGGNNQPNIPSITAHLWYFGLIGTCL

SEQ ID NO: 7848 - protein, 269 aa, Thermomyces lanuginosus
EVSQDLFNQFNLFAQYSAAAYCGKNNRAPAGTNITCTANACPEVEKADATFLYSFEDSGVGDVTGFLALDNTNKLIVLSFRGSRSIENWIGNLNFELKEINDICSGCRGHAGFTSSWRSVADTLRQKVEDAVREHPDYRVVFTGHSLGGALATVAGADLRGNKYDIDVFSYGAPRVGNRAFAEFLTVQTGGTLYRITHTNDIVPRLPPREFGYSHSSPEYWIKSGTLVPVRRRDIVKIEGIDATGGNNQPNIPSITAHYWYFGLIGTCL

SEQ ID NO: 7849 - protein, 269 aa, Thermomyces lanuginosus
EVSQDLFNQFNLFAQYSAAAYCGKNNDAPAGTKITCTGNACPEVEKADATLLYSFEDSGVGDVTGFLALDNTNKLIVLSFRGSRSIENWIGNLNFDLEEIDDICSGCRGHDGFTSSWRSVADTLRQKVEDAVREHPDYRVVFTGHSLGGALATVAGADLRGNGYDIDVFSYGAPRVGNRAFAEFLTVQTGGTLYRITSTNDIVPRLPPRKFGYSHSSPEFWIKSGTLVPVRRRDIVKIEGIDATGGNNQPNIPDIPVHLWYFGLIGTCL

SEQ ID NO: 7850 - protein, 269 aa, Thermomyces lanuginosus
EVSQDLFNQFNLFAQYSAAAYCGKNNRAPAGTNITCTANACPEVEKADATFLYSFEDSGVGDVTGFLALDNTNKLIVLSFRGSRSIENWIGNLNFELKEINDICSGCRGHAGFTSSWRSVADTLRQKVEDAVREHPDYRVVFTGHSLGGALATVAGADLRGNKYDIDVFSYGAPRVGNRAFAEFLTVQTGGTLYRITHTNDIVPRLPPREFGYSHSSPEYWIKSGTLVPVRRRDIVKIEGIDATGGNNQPNIPSITLHLWYFGLIGTCL

SEQ ID NO: 7851 - protein, 269 aa, Thermomyces lanuginosus
EVSQDLFNQFNLFAQYSAAAYCGKNNRAPAGTNITCTANACPEVEKADATFLYSFEDSGVGDVTGFLALDNTNKLIVLSFRGSRSIENWIGNLNFELKEINDICSGCRGHAGFTSSWRSVADTLRQKVEDAVREHPDYRVVFTGHSLGGALATVAGADLRGNKYDIDVFSYGAPRVGNRAFAEFLTVQTGGTLYRITHTNDIVPRLPPREFGYSHSSPEYWIKSGTLVPVRRRDIVKIEGIDATGGNNQPNIPSITAHLWYFGLIGTCV

SEQ ID NO: 7852 - protein, 269 aa, Thermomyces lanuginosus
EVSQDLFNQFNLFAQYSAAAYCGKNNRAPAGTNITCTANACPEVEKADATFLYSFEDSGVGDVTGFLALDNTNKLIVLSFRGSRSIENWIGNLNFELKEINDICSGCRGHAGFTSSWRSVADTLRQKVEDAVREHPDYRVVFTGHSLGGALATVAGADLRGNKYDIDVFSYGAPRVGNRAFAEFLTVQTGGTLYRITHTNDIVPRLPPREFGYSHSSPEYWIKSGTLVPVRRRDIVKIEGIDATGGNNQPNIPSSTAHLWYFGLIGTCL

SEQ ID NO: 7853 - protein, 269 aa, Thermomyces lanuginosus
EVSQDLFNQFNLFAQYSAAAYCGKNNRAPAGTNITCTANACPEVEKADATFLYSFEDSGVGDVTGFLALDNTNKLIVLSFRGSRSIENWIGNLNFELKEINDICSGCRGHAGFTSSWRSVADTLRQKVEDAVREHPDYRVVFTGHSLGGALATVAGADLRGNKYDIDVFSYGAPRVGNRAFAEFLTVQTGGTLYRITHTNDIVPRLPPREFGYSHSSPEYWIKSGTLVPVRRRDIVKIEGIDATGGNNQPNIPSITAHFWYFGLIGTCL

SEQ ID NO: 7854 - protein, 269 aa, Thermomyces lanuginosus
EVSQDLFNQFNLFAQYSAAAYCGKNNRAPAGTQITCTGNACPEVEKADATFLYSFEDSGVGDVTGFLALDNTNKLIVLSFRGSRSIENWITNLNFELKEINDICSGCRGHAGFTSSWRSVADTLRQKVEDAVREHPDYRVVFTGHSLGGALATVAGADLRGNAYDIDVFSYGAPRVGNRAFAEFLTVQTGGTLYRITHTNDIVPRLPPREFGYSHSSPEYWIKSGTLVPVRRRDIVKIEGIDATGGNNQPNIPSITAHLWYFGLIGTCL

SEQ ID NO: 7855 - protein, 269 aa, Thermomyces lanuginosus
EVSQDLFNQFNLFAQYSAAAYCGKNNRAPAGTNITCTANACPEVEKADATFLYSFEDSGVGDVTGFLALDNTNKLIVLSFRGSRSIENWIGNLNFELKEINDICSGCRGHAGFTSSWRSVADTLRQKVEDAVREHPDYRVVFTGHSLGGALATVAGADLRGNKYDIDVFSYGAPRVGNRAFAEFLTVQTGGTLYRITHTNDIVPRLPPREFGYSHSSPEYWIKSGTLVPVRRRDIVKIEGIDATGGNNQPNIPSITVHLWYFGLIGTCL

SEQ ID NO: 7856 - protein, 269 aa, Thermomyces lanuginosus
EVSQDLFNQFNLFAQYSAAAYCSKNNNAPAGTNITCTGNICPEVEKADATILYSFRDSGVGDVTGFLALDNTNKLIVLSFRGSRSIENWIGNLNFDLKEINDICSGCRGHDGFTSSWFSVADTLRQKVEDAVREHPDYRVVFTGHSLGGALATVAGADLRGNGYDIDVFSYGAPRVGNRAFAEFLTVQTGGTLYRITHTNDIVPRLPPREFGYSHSSPEYWIKSGTLVPVRRRDIVKIEGIDAEGGNNQPNIPDITAHLWYFGLIGTCL

SEQ ID NO: 7857 - protein, 269 aa, Thermomyces lanuginosus
EVSQDLFNQFNLFAQYSAAAYCGKNNRAPAGTNITCTANACPEVEKADATFLYSFEDSGVGDVTGFLALDNTNKLIVLSFRGSRSIENWIGNLNFELKEINDICSGCRGHAGFTSSWRSVADTLRQKVEDAVREHPDYRVVFTGHSLGGALATVAGADLRGNKYDIDVFSYGAPRVGNRAFAEFLTVQTGGTLYRITHTNDIVPRLPPREFGYSHSSPEYWIKSGTLVPVRRRDIVKIEGIDATGGNNQPNIPSYTAHLWYFGLIGTCL

SEQ ID NO: 7858 - protein, 269 aa, Thermomyces lanuginosus
EVSQDLFNQFNLFAQYSAAAYCGKNNRAPAGTNITCTANACPEVEKADATFLYSFEDSGVGDVTGFLALDNTNKLIVLSFQGSRSIENWIGNLNFELKEINDICSGCRGHAGFTSSWRSVADTLRQKVEDAVREHPDYRVVFTGHSLGGALATVAGADLRGNKYDIDVFSYGAPRVGNRAFAEFLTVQTGGTLYRITHTNDIVPRLPPREFGYSHSSPEYWIKSGTLVPVRRRDIVKIEGIDATGGNNQPNIPSITAHLWYFGLIGTCL

SEQ ID NO: 7859 - protein, 269 aa, Thermomyces lanuginosus
EVSQDLFNQFNLFAQYSAAAYCGKNNRAPAGTNITCTANACPEVEKADATFLYSFEDSGVGDVTGFLALDNTNKLIVLSFRGSRSIENWIGNLNFELKEINDICSGCRGHAGFTSSWRSVADTLRQKVEDAVREHPDYRVVFTGHSLGGALATVAGADLRGNKYDIDVFSYGAPRVGNRAFAEFLTVQTGGTLYRITHTNDIVPRLPPREFGYSHSSPEYWIKSGTLVPVRRRDIVKIEGIDATGGNNQPNIPSITAHLEYFGLIGTCL

SEQ ID NO: 7860 - protein, 269 aa, Thermomyces lanuginosus
EVSQDLFNQFNLFAQYSAAAYCGKNNRAPAGTNITCTANACPEVEKADATFLYSFEDSGVGDVTGFLALDNTNKLIVLSFRGSRSIENWIGNLNFELKEINDICSGCRGHAGFTSSWRSVADTLRQKVEDAVREHPDYRVVFTGHSLGGALATVAGADLRGNKYDIDVFSYGAPRVGNRAFAEFLTVQTGGTLYRITHTNDIVPRLPPREFGYSHSSPEYWIKSGTLVPVRRRDIVKIEGIDATGGNNQPNIPSITAHLIYFGLIGTCL

SEQ ID NO: 7861 - protein, 269 aa, Thermomyces lanuginosus
EVSQDLFNQFKLFAQYSKAAYCKANNDAPAGTNITCTGNACPEVEKADATFLYSFEDSGVGDVTGFLALDNTNKRIILSFRGSRSIENWIGNLNFDLKEINDICSGCRGHDGFTSSWRSVADTLRQKVEAAVREHPDYRVVFTGHSLGGALATIAGADLRGNGYDIDVFSYGAPRVGNRAFAEFLTTQQGGTLYRITHTNDIVPRLPPREFGYSHSSPEYWIKSGTLVPVTRNDIVKIEGIDATGGNNQPNIPDIPAHLWYFGLIGTCL

SEQ ID NO: 7862 - protein, 269 aa, Thermomyces lanuginosus
EVSQDLFNQFNLFAQYSAAAYCSKNNNAPAGTNITCTGNICPEVEKADATILYSFRDSGKGDVTGFLALDNTNKLIVLSFRGSRSIENWIGNLNFDLKEINDICSGCRGHDGFTSSWFSVADTLRQKVEDAVREHPDYRVVFTGHSLGGALATVAGADLRGNGYDIDVFSYGAPRVGNRAFAEFLTVQTGGTLYRITHTNDIVPRLPPREFGYSHSSPEYWIKSGTLVPVRRRDIVKIEGIDAEGGNNQPNIPDIPAHLWYFGLIGTCL

SEQ ID NO: 7863 - protein, 269 aa, Thermomyces lanuginosus
EVSQDLFNQFNLFAQYSAAAYCGKNNRAPAGTNITCTANACPEVEKADATFLYSFEDSGVGDVTGFLALDNTNKLIVLSFRGSRSIENWIGNLNFELKEINDICSGCRGHAGFTSSWRSVADTLRQKVEDAVREHPDYRVVFTGHSLGGALATVAGADLRGNKYDIDVFSYGAPRVGNRAFAEFLTVQTGGTLYRITTTNDIVPRLPPREFGYSHSSPEYWIKSGTLVPVRRRDIVKIEGIDATGGNNQPNIPSITAHLWYFGLIGTCL

SEQ ID NO: 7864 - protein, 269 aa, Thermomyces lanuginosus
EVSQDLFNQFNLFAQYSAAAYCGKNNRAPAGTNITCTANACPEVEKADATFLYSFEDSGVGDVTGFLALDNTNKLIVLSFRGSRSIENWIGNLNFELKEINDICSGCRGHAGFTSSWRSVADTLRQKVEDAVREHPDYRVVFTGHSLGGALATVAGADLRGNKYDIDVFSYGAPRVGNRAFAEFLTVQTGGTLYRITGTNDIVPRLPPREFGYSHSSPEYWIKSGTLVPVRRRDIVKIEGIDATGGNNQPNIPSITAHLWYFGLIGTCL

SEQ ID NO: 7865 - protein, 269 aa, Thermomyces lanuginosus
EVSQDLFNQFRLFAQYSAAAYCGKNNDAPAGTQITCTANACPEVEKADATFLYSFEDSGVGDVTGFLALDNTNKLIVLSFRGSRSIENWITNLNFDLKEINDICSGCRGHDGFTLSWRSVADTLRQKVEDAVREHPDYRVVFTGHSLGGALATVAGADLRGNKYDIDVFSYGAPRVGNRAFAEFLTVQTGGTLYRITHTNDIVPRLPPREFGYSHSSPEYWIKSGTLVPVRRRDIVKIEGIDATGGNNQPNIPSITAHLWYFGLIGTCL

SEQ ID NO: 7866 - protein, 269 aa, Thermomyces lanuginosus
EVSQDLFNQFNLFAQYSAAAYCGKNNDAPAGTQITCTGNACPEVEKADATFLYSFEDSGVGDVTGFLALDNTNKLIVLSFRGSRSFENWIGNFNFDLKEINYICSGCRGHDGFTSSWRSVADTLRQKVEDAVREHPDYRVVFTGHSLGGALATVAGADLRGNGYDIDVFSYGAPRVGNRAFAEFLTVQTGGTLYRITHTNDIVPRLPPRYFGYSHSSPEYWIKSGTFVPVRRRDIVKIEGIDATGGNNQPNIPYFPAHLWYFGLIGTCL

SEQ ID NO: 7867 - protein, 269 aa, Thermomyces lanuginosus
EVSQDLFNQFNLFAQYSAAAYCQKNNSAPAGTNITCTGNACPEVEKADATTLYSFKDSGVGDVTGFLALDNTNKRIVLSFRGSRSIENWIQNLNFDLKEINDICSGCRGHDGFTSSWRSVADTLRQKVEAAVREHPDYRVVFTGHSLGGALATVAGADLRGNGYDIDVFSYGAPRVGNRAFAEFLTHQTGGTLYRITHTNDIVPRLPPREFGYSHSSPEYWIKSGTLVPVTRNDIVKIEGIDATGGNNQPNQPDIPAHLWYFGRIGTCL

SEQ ID NO: 7868 - protein, 269 aa, Thermomyces lanuginosus
EVSQDLFNQFNLFAQYSAAAYCGKNNRAPAGTNITCTANACPEVEKADATFLYSFEDSGVGDVTGFLALDNTNKLIVLSFRGSRSIENWIGNLNFELKEINDICSGCRGHAGFTSSWRSVADTLRQKVEDAVREHPDYRVVFTGHSLGGALATVAGADLRGNKYDIDVFSYGAPRVGNRAFAEFLTVQTGGTLYRITHTNDIVPRLPPREFGYSHSSPEYWIKLGTLVPVRRRDIVKIEGIDATGGNNQPNIPSITAHLWYFGLIGTCL

SEQ ID NO: 7869 - protein, 269 aa, Thermomyces lanuginosus
EVSQDLFNQFNLFAQYSAAAYCGKNNRAPAGTNITCTANACPEVEKADATFLYSFEDSGVGDVTGFLALDNTNKLIVLSFRGSHSIENWIGNLNFELKEINDICSGCRGHAGFTSSWRSVADTLRQKVEDAVREHPDYRVVFTGHSLGGALATVAGADLRGNKYDIDVFSYGAPRVGNRAFAEFLTVQTGGTLYRITHTNDIVPRLPPREFGYSHSSPEYWIKSGTLVPVRRRDIVKIEGIDATGGNNQPNIPSITAHLWYFGLIGTCL

SEQ ID NO: 7870 - protein, 269 aa, Thermomyces lanuginosus
EVSQDLFNQFNLFAQYSAAAYCGKNNRAPAGTNITCTANACPEVEKADATFLYSFEDSGVGDVTGFLALDNTNKLIVLSFRGSRSIENWIGNLDFELKEINDICSGCRGHAGFTSSWRSVADTLRQKVEDAVREHPDYRVVFTGHSLGGALATVAGADLRGNKYDIDVFSYGAPRVGNRAFAEFLTVQTGGTLYRITHTNDIVPRLPPREFGYSHSSPEYWIKSGTLVPVRRRDIVKIEGIDATGGNNQPNIPSITAHLWYFGLIGTCL

SEQ ID NO: 7871 - protein, 269 aa, Thermomyces lanuginosus
EVSQDLFNQFNLFAQYSAAAYCGKNNRAPAGTNITCTANACPEVEKADATFLYSFEDSGVGDVTGFLALDNTNKLIVLSFRGSRSIENWIGNLNFELKEINDICSGCRGHAGFTSSWRSVADTLRQKVEDAVREHPDYRVVFTGHSLGGALATVAGADLRGNKYDIDVFSYGAPRVGNRAFAEFLTVQTGGTLYRITHTNDIVPRLPPREFGYSHSSPEYWIKSGTLPPVRRRDIVKIEGIDATGGNNQPNIPSITAHLWYFGLIGTCL

SEQ ID NO: 7872 - protein, 269 aa, Thermomyces lanuginosus
EVSQDLFNQFNLFAQYSAAAYCGKNNRAPAGTNITCTANACPEVEKADATFLYSFEDSGVGDVTGFLALDNTNKLIVLSFRGSRSIENWIGNLNFELKEINDICSGCRGHAGFTSSWRSVADTLRQKVEDAVREHPDYRVVFTGHSLGGALATVAGADLRGNKYDIDVFSYGAPRVGNRAFAEFLTVQTGGTLYRITHTNDLVPRLPPREFGYSHSSPEYWIKSGTLVPVRRRDIVKIEGIDATGGNNQPNIPSITAHLWYFGLIGTCL

SEQ ID NO: 7873 - protein, 269 aa, Thermomyces lanuginosus
EVSQDLFNQFNLFAQYSAAAYCGKNNRAPAGTNITCTANACPEVEKADATFLYSFEDSGVGDVTGFLALDNTNKLIVLSFRGSRSIENWIGNLNFELKEINDICSGCRGHAGFTSSWRSVADTLRQKVEDAVREHPDYRVVFTGHSLGGALATVAGADLRGNKYDIDVFSYGAPRVGNRAFAEFLTVQTGGTLYRITYTNDIVPRLPPREFGYSHSSPEYWIKSGTLVPVRRRDIVKIEGIDATGGNNQPNIPSITAHLWYFGLIGTCL

SEQ ID NO: 7874 - protein, 269 aa, Thermomyces lanuginosus
EVSQDLFNQFNLFAQYSAAAYCGKNNRAPAGTNITCTANACPEVEKADATILYSFEDSGVGDVTGFLALDNTNKLIVLSFRGSRSIENWIGNLNFELKEINDICSGCRGHAGFTSSWRSVADTLRQKVEDAVREHPDYRVVFTGHSLGGALATVAGADLRGNKYDIDVFSYGAPRVGNRAFAEFLTVQTGGTLYRITHTNDIVPRLPPREFGYSHSSPEYWIKSGTLVPVRRRDIVKIEGIDATGGNNQPNIPSITAHLWYFGLIGTCL

SEQ ID NO: 7875 - protein, 269 aa, Thermomyces lanuginosus
EVSQDLFNQFNLFAQYSAAAYCGKNNRAPAGTNITCTANACPEVEKADATFLYSFEDSGVGDVTGFLALDNTNKLIVLSFRGSRSIENWIGNLNFELKEINDICSGCRGHAGFTSSWRSVADTLRQKVEDAVREHPDYRVVFTGHSLGGALATVAGADLRGNKYDIDVFSYGAPRVGNRAFAEFLTVQTGGTLYRITDTNDIVPRLPPREFGYSHSSPEYWIKSGTLVPVRRRDIVKIEGIDATGGNNQPNIPSITAHLWYFGLIGTCL

SEQ ID NO: 7876 - protein, 269 aa, Thermomyces lanuginosus
EVSQDLFNQFNLFAQYSAAAYCGKNNDAPAGTKITCTGNACPEVEKADATVLYSFEDSGVGDVTGFLALDNTNKLIVLSFRGSRSIENWIGNLNFDLEEIDDICSGCRGHDGFTSSWRSVADTLRQKVEDAVREHPDYRVVFTGHSLGGALATVAGADLRGNGYDIDVFSYGAPRVGNRAFAEFLTVQTGGTLYRITSTNDIVPRLPPRKFGYSHSSPEFWIKSGTLVPVRRRDIVKIEGIDATGGNNQPNIPDIPVHLWYFGLIGTCL

SEQ ID NO: 7877 - protein, 269 aa, Thermomyces lanuginosus
EVSQDLFNQFNLFAQYSAAAYCGKNNRAPAGTNITCTANACPEVEKADATFLYSFEDSGVGDVTGFLALDNTNKLIVLSFRGSRSIENWIGNLNFELDEINDICSGCRGHAGFTSSWRSVADTLRQKVEDAVREHPDYRVVFTGHSLGGALATVAGADLRGNKYDIDVFSYGAPRVGNRAFAEFLTVQTGGTLYRITHTNDIVPRLPPREFGYSHSSPEYWIKSGTLVPVRRRDIVKIEGIDATGGNNQPNIPSITAHLWYFGLIGTCL

SEQ ID NO: 7878 - protein, 269 aa, Thermomyces lanuginosus
EVSQDLFNQFNLFAQYSAAAYCGKNNRAPAGTQITCTANACPEVEKADATFLYSFEDSGVGDVTGFLALDNTNKLIVLSFRGSRSIENWITNLNFELKEINDICSGCRGHAGFTSSWRSVADTLRQKVEDAVREHPDYRVVFTGHSLGGALATVAGADLRGNKYDIDVFSYGAPRVGNRAFAEFLTVQTGGTLYRITHTNDIVPRLPPREFGYSHSSPEYWIKSGTLVPVRRRDIVKIEGIDATGGNNQPNIPDITAHLWYFGLIGTCL

SEQ ID NO: 7879 - protein, 269 aa, Thermomyces lanuginosus
EVSQDLFNQFNLFAQYSAAAYCGKNNRAPAGTQITCTGNACPEVEKADATFLYSFEDSGVGDVTGFLALDNTNKLIVLSFRGSRSIENWITNLNFELKEINDICSGCRGHAGFTSSWRSVADTLRQKVEDAVREHPDYRVVFTGHSLGGALATVAGADLRGNKYDIDVFSYGAPRVGNRAFAEFLTVQTGGTLYRITHTNDIVPRLPPREFGYSHSSPEYWIKSGTLVPVRRRDIVKIEGIDATGGNNQPNIPSITAHLWYFGLIGTCL

SEQ ID NO: 7880 - protein, 269 aa, Thermomyces lanuginosus
EKSQDLFNQFNLFAQYSAAAYCGKNNDAPAGTKITCTGNACPEVEKADATILYSFEDSGVGDVTGFLARDNTNKLIVLSFRGSRSIENWIGNLNFDLEEINDICSGCRGHDGFTSSWRSVADTLRQKVEDAVREHPDYRVVFTGHSLGGALATVAGADLRGNGYDIDVFSYGAPRLGNRAFAEFLTVQTGGTLYRITHTNDIVPRLPPRKFGYSHSSPEYWIKSGTDVPVRRRDIVKIEGIDATGGNNQPNIPDIPAHLWYFGLIGTCL

SEQ ID NO: 7881 - protein, 269 aa, Thermomyces lanuginosus
EVSQDLFNQFNLFAQYSAAAYCGKNNDAPAGTKITCTGNACPEVEKADATILYSFEDSGVGDVTGFLALDNTNKLIVLSFRGSRSIENWIGNLNFDLEEIDDICSGCRGHDGFTSSWRSVADTLRQKVEDAVREHPDYRVVFTGHSLGGALATVAGADLRGNGYDIDVFSYGAPRVGNRAFAEFLTVQTGGTLYRITDTNDIVPRLPPRKFGYSHSSPEFWIKSGTLVPVRRRDIVKIEGIDATGGNNQPNIPDIPVHLWYFGLIGTCL

SEQ ID NO: 7882 - protein, 269 aa, Thermomyces lanuginosus
EYSQDLFNQFNLFAQYSAAAYCGKNNRAPAGTNITCTANACPEVEKADATFLYSFEDSGVGDVTGFLALDNTNKLIVLSFRGSRSIENWIGNLNFELKEINDICSGCRGHAGFTSSWRSVADTLRQKVEDAVREHPDYRVVFTGHSLGGALATVAGADLRGNKYDIDVFSYGAPRVGNRAFAEFLTVQTGGTLYRITHTNDIVPRLPPREFGYSHSSPEYWIKSGTLVPVRRRDIVKIEGIDATGGNNQPNIPSITAHLWYFGLIGTCL

SEQ ID NO: 7883 - protein, 269 aa, Thermomyces lanuginosus
EVSQDLFNQFNLFAQYSAAAYCGKNNRAPAGTNITCTANACPEVEKADATFLYSFEDSGVGDVTGFLALDNTNKLIVLSFRGSRSIENWIGNLNFELKEINDICSGCRGHAGFTSSWRSVADTLRQKVEDAVREHPDYRVVFTGHSLGGALATVAGADLRGNKYDIDVFSYGAPRVGNRAFAEFLTVQTGGTLYRITHTNDIVPRLPPREFGYSHSSPEYWIKSGTLVPVRRRDIVKIEGIDATGGNNQPNTPSITAHLWYFGLIGTCL

SEQ ID NO: 7884 - protein, 269 aa, Thermomyces lanuginosus
EVSQDLFNQFNLFAQYSAAAYCGKNNRAPAGTQITCTGNACPEVEKADATFLYSFEDSGVGDVTGFLALDNTNKLIVLSFRGSRSIENWITNLNFEQKEINDICSGCRGHAGFTSSWRSVADTLRQKVEDAVREHPDYRVVFTGHSLGGALATVAGADLRGNGYDIDVFSYGAPRVGNRAFAEFLTVQTGGTLYRITHTNDIVPRLPPREFGYSHSSPEYWIKSGTLVPVRRRDIVKIEGIDATGGNNQPNIPSITAHLWYFGLIGTCL

SEQ ID NO: 7885 - protein, 269 aa, Thermomyces lanuginosus
EVSQDLFNQFNLFAQYSAAAYCGKNNRAPAGTNITCTANACPEVEKADATFLYSFEDSGVGDVTGFLALDNTNKLIVLSFRGSRSIENWIGNLNFELKEINDICSGCRGHAGFTSSWRSVADTLRQKVEDAVREHPDYRVVFGGHSLGGALATVAGADLRGNKYDIDVFSYGAPRVGNRAFAEFLTVQTGGTLYRITHTNDIVPRLPPREFGYSHSSPEYWIKSGTLVPVRRRDIVKIEGIDATGGNNQPNIPSITAHLWYFGLIGTCL

SEQ ID NO: 7886 - protein, 269 aa, Thermomyces lanuginosus
EVSQDLFNQFNLFAQYSAAAYCSKNNNAPAGTNITCTGNACPEVEKADATILYSFRDSGVGDVTGFLALDNTNKLIVLSFRGSRSIENWIGNLNFDLIEINDICSGCRGHDGFTSSWFSVADTLRQKVEDAVREHPDYRVVFTGHSLGGALATVAGADLRGNGYDIDVFSYGAPRVGNRAFAEFLTVQTGGTLYRITHTNDIVPRLPPREFGYSHSSPEYWIKSGTLVPVRRRDIVKIEGIDAEGGNNQPNIPDITAHLWYFGLIGTCL

SEQ ID NO: 7887 - protein, 269 aa, Thermomyces lanuginosus
EVSQDLFNQFNLFAQYSAAAYCGKNNRAPAGTNITCTANACPEVEKADATFLYSFEDSGVGDVTGFLALDNTNKLIVLSFRGSRSIENWIGNLNFELKEINDICSGCRGHAGFTSSWRSVADTLRQKVEDAVREHPDYRVVFTGHSLGGALATVAGADLRGNKYDIDVFSYGAPRVGNRAFAEFLTVQTGGTLYRITHTNDGVPRLPPREFGYSHSSPEYWIKSGTLVPVRRRDIVKIEGIDATGGNNQPNIPSITAHLWYFGLIGTCL

SEQ ID NO: 7888 - protein, 269 aa, Thermomyces lanuginosus
EVSQDLFNQFNLFAQYSAAAYCQKNNDAPAGTNITCTGNACPEVEKADATFLYSFEDSGVGDVTGFLALDNTNKRIVLSFRGSRSIENWIGNLRFDLKEINDICSGCRGHAGFTSSWRSVADTLRQKVEAAVREHPDYRVVFTGHSLGGALATIAWADLRGNGYDIDVFSYGAPRVGNRAFAEFLTNQQGGTLYRITHTNDIVPRLPPREFGYSHSSPEYWIKSGTLVPVTRNDIVKIEGIDATGGNNQPNIPDIPAHLWYFGRIGTCL

SEQ ID NO: 7889 - protein, 269 aa, Thermomyces lanuginosus
EVSQDLFNQFNLFAQYSAAAYCGKNNRAPAGTNITCTANACPEVEKADATFLYSFEDSGVGDVTGFLALDNTNKLIVLSFRGSRSIENWIGNLNFELKEINDICSGCRGHAGFTSSWRSVADTLRQKVEDAVREHPDYRVVFTGHSLGGALATVAGADLRGNKYDIDVFSYGAPRVGNRAFAEFLTVQTGGTLYRITHTNDIVPRLPPREFGYSHSSPEYWIKSGTLVPVRRRDIVKIEGIDATGGNNQPNIPSATAHLWYFGLIGTCL

SEQ ID NO: 7890 - protein, 269 aa, Thermomyces lanuginosus
EVSQDLFNQFNLFAQYSAAAYCGKNNRAPAGTQITCTANACPEVEKADATFLYSFEDSGVGDVTGFLALDNTNKLIVLSFRGSRSIENWITNLNFELKEINDICSGCRGHAGFTSSWRSVADTLRQKVEDAVREHPDYRVVFTGHSLGGALATVAGADLRGNGYDIDVFSYGAPRVGNRAFAEFLTVQTGGTLYRITHTNDIVPRLPPREFGYSHSSPEYWIKSGTLVPVRRRDIVKIEGIDATGGNNQPNIPSITAHLWYFGLIGTCL

SEQ ID NO: 7891 - protein, 269 aa, Thermomyces lanuginosus
EVSQDLFNQFNLFAQYSAAAYCSKNNNAPAGTNITCTGNACPEVEKADATILYSFRDSGVGDVTGFLALDNTNKLIVLSFRGSRSIENWIGNLNFDLKEINDICSGCRGHDGFTSSWFSVADTLRQKVEDAVREHPDYRVVFTGHSLGGALATVAGADLRGNGYDIDVFSYGAPRVGNRAFAEFLTVQTGGTLYRITHTNDIVPRLPPREFGYSHSSPEFWIKSGTLVPVRRRDIVKIEGIDAEGGNNQPNIPDITAHLWYFGLIGTCL

SEQ ID NO: 7892 - protein, 269 aa, Thermomyces lanuginosus
EVSQDLFNQFNLFAQYSAAAYCGKNNRAPAGTNITCTANACPEVEKADATFLYSFEDSGVGDVTGFLALDNTNKLIVLSFRGSRSIENWIGNLNFEPKEINDICSGCRGHAGFTSSWRSVADTLRQKVEDAVREHPDYRVVFTGHSLGGALATVAGADLRGNKYDIDVFSYGAPRVGNRAFAEFLTVQTGGTLYRITHTNDIVPRLPPREFGYSHSSPEYWIKSGTLVPVRRRDIVKIEGIDATGGNNQPNIPSITAHLWYFGLIGTCL

SEQ ID NO: 7893 - protein, 269 aa, Thermomyces lanuginosus
EVSQDLFNQFNLFAQYSAAAYCGKNNRAPAGTQITCTGNACPEVEKADATFLYSFEDSGVGDVTGFLALDNTNKLIVLSFRGSRSIENWITNLRFDLKEINDICSGCRGHAGFTSSWRSVADTLRQKVEDAVREHPDYRVVFTGHSLGGALATVAGADLRGNGYDIDVFSYGAPRVGNRAFAEFLTVQTGGTLYRITHTNDIVPRLPPREFGYSHPSPEYWIKSGTGVPVRRRDIVKIEGIDATGGNNQPNIPDITAHLWYFGLIGTCL

SEQ ID NO: 7894 - protein, 269 aa, Thermomyces lanuginosus
EVSQDLFNQFNLFAQYSAAAYCGKNNRAPAGTNITCTANACPEVEKADATFLYSFEDSGVGDVTGFLALDNTNKLIVLSFRGSRSIENWIGNLNFELTEINDICSGCRGHAGFTSSWRSVADTLRQKVEDAVREHPDYRVVFTGHSLGGALATVAGADLRGNKYDIDVFSYGAPRVGNRAFAEFLTVQTGGTLYRITHTNDIVPRLPPREFGYSHSSPEYWIKSGTLVPVRRRDIVKIEGIDATGGNNQPNIPSITAHLWYFGLIGTCL

SEQ ID NO: 7895 - protein, 269 aa, Thermomyces lanuginosus
EVSQDLFNQFNLFAQYSAAAYCGKNNDAPAGTQITCTANACPEVEKADATFLYSFEDSGVGDVTGFLALDNTNKLIVLSFRGSRSIENWITNLNFELKEINDICSGCRGHAGFTSSWRSVADTLRQKVEDAVREHPDYRVVFTGHSLGGALATVAGADLRGNKYDIDVFSYGAPRVGNRAFAEFLTVQTGGTLYRITHTNDIVPRLPPREFGYSHSSPEYWIKSGTLVPVRRRDIVKIEGIDATGGNNQPNIPSITAHLWYFGLIGTCL

SEQ ID NO: 7896 - protein, 269 aa, Thermomyces lanuginosus
EVSQDLFNQFNLFAQYSAAAYCGKNNRAPAGTNITCTANACPEVEKADATFLYSFEDSGVGDVTGFLALDNTNKLIVLSFRGSRSIENWITNLNFELKEINDICSGCRGHAGFTSSWRSVADTLRQKVEDAVREHPDYRVVFTGHSLGGALATVAGADLRGNKYDIDVFSYGAPRVGNRAFAEFLTVQTGGTLYRITHTNDIVPRLPPREFGYSHSSPEYWIKSGTLVPVRRRDIVKIEGIDATGGNNQPNIPSITAHLWYFGLIGTCL

SEQ ID NO: 7897 - protein, 269 aa, Thermomyces lanuginosus
EVSQDLFNQFNLFAQYSAAAYCSKNNDAPAGTNITCTGNACPEVEKADATILYSFRDSGVGDVTGFLALDNTNKLIVLSFRGSRSIENWIGNLNFDLIEINDICSGCRGHDGFTSSWFSVADTLRQKVEDAVREHPDYRVVFTGHSLGGALATVAGADLRGNGYDIDVFSYGAPRVGNRAFAEFLTVQTGGTLYRITHTNDIVPRLPPREFGYSHSSPEFWIKSGTLVPVRRRDIVKIEGIDAEGGNNQPNIPDITAHLWYFGLIGTCL

SEQ ID NO: 7898 - protein, 269 aa, Thermomyces lanuginosus
EVSQDLFNQFNLFAQYSAAAYCGKNNNAPAGTNITCTGNICPEVEKADATILYSFRDSGEGDVTGFLALDNTNKLIVLSFRGSRSIENWIGNLNFDLKEINDICSGCRGHDGFTSSWFSVADTLRQKVEDAVREHPDYRVVFTGHSLGGALATVAGADLRGNGYDIDVFSYGAPRVGNRAFAEFLTVQTGGTLYRITHTNDIVPRLPPREFGYSHSSPEYWIKSGTLVPVRRRDIVKIEGIDAEGGNNQPNIPDITAHLWYFGLIGTCL

SEQ ID NO: 7899 - protein, 269 aa, Thermomyces lanuginosus
EVSQDLFNQFNLFAQYSAAAYCGKNNRAPAGTNITCTANACPEVEKADATFLYSFEDSGVGDVTGFLALDNTNKLIVLSFRGSRSIENWIGNLNFELKEINDICSGCRGHAGFTSSWRSVADTLRQKVEDAVREHPDYRVVFTGHSLGGGLATVAGADLRGNKYDIDVFSYGAPRVGNRAFAEFLTVQTGGTLYRITHTNDIVPRLPPREFGYSHSSPEYWIKSGTLVPVRRRDIVKIEGIDATGGNNQPNIPSITAHLWYFGLIGTCL

SEQ ID NO: 7900 - protein, 269 aa, Thermomyces lanuginosus
EVSQDLFNQFNLFAQYSAAAYCGKNNRAPAGTNITCTANACPEVEKADATFLYSFEDSGVGDVTGFLALDNTNKLIVLSFRGSRSIENWIGNLNFELKEINDICSGCRGHAGFTSSWRSVADTLRQKVEDAVREHPDYRVVFTGHSLGGALATVAGADLRGNKYDIDVFSYGAPRVGNRAFAEFLTVQTGGTLYRITHTNDIVPRLPPREFGYSHSSPEYWIKSGTRVPVRRRDIVKIEGIDATGGNNQPNIPSITAHLWYFGLIGTCL

SEQ ID NO: 7901 - protein, 269 aa, Thermomyces lanuginosus
EVSQDLFNQFNLFAQYSAAAYCGKNNRAPAGTNITCTANACPEVEKADATFLYSFEDSGVGDVTGFLALDNTNKLIVLSFRGSRSIENWIGNLNFELKEINDICSGCRGHAGFTSSWRSVADTLRQKVEDAVREHPDYRVVFTGHSLGGALATVAGADLRGNKYDIDVFSYGAPRLGNRAFAEFLTVQTGGTLYRITHTNDIVPRLPPREFGYSHSSPEYWIKSGTLVPVRRRDIVKIEGIDATGGNNQPNIPSITAHLWYFGLIGTCL

SEQ ID NO: 7902 - protein, 269 aa, Thermomyces lanuginosus
EVSQDLFNQFNLFAQYSAAAYCGKNNDAPAGTKITCTGNACPEVEKADATVLYSFEDSGVGDVTGFLALDNTNKLIVLSFRGSRSIENWIGNLNFDLEEIDDICSGCRGHDGFTSSWRSVADTLRQKVEDAVREHPDYRVVFTGHSLGGALATVAGADLRGNGYDIDVFSYGAPRVGNRAFAEFLTVQTGGTLYRITSTNDIVPRLPPRRFGYSHSSPEFWIKSGTLVPVRRRDIVKIEGIDATGGNNQPNIPDIPVHLWYFGLIGTCL

SEQ ID NO: 7903 - protein, 269 aa, Thermomyces lanuginosus
EVSQDLFNQFKLFAQYSAAAYCQKNNDAPAGTNITCTGNACPEVEKADATFLYSFEDSGVGDVTGFLALDNTNKQIVLSFRGSRSIENWIGNLRFDLKEINDICSGCRGHAGFTSSWRSVADTLRQKVEAAVREHPDYRVVFTGHSLGGALATIAWADLRGNGYDIDVFSYGAPRVGNRAFAEFLTNQTGGTLYRITHTNDIVPRLPPREFGYSHSSPEYWIKSGTLVPVTRNDIVKIEGIDATGGNNQPNIPDIPAHLWYFGRIGTCL

SEQ ID NO: 7904 - protein, 269 aa, Thermomyces lanuginosus
EVSQDLFNQFNLFAQYSAAAYCGKNNRAPAGTNITCTANACPEVEKADATFLYSFEDSGVGDVTGFLALDNTNKLIVLSFRGSRSIENWIGNLNFELKEINDICSGCRGHAGFTSSWRSVADTLRQKVEDAVREHPDYRVVFTGHSLGGALATVAGADLRGNKYDIDVFSYGAPRVGNRAFAEFLTVQTGGTLYRITATNDIVPRLPPREFGYSHSSPEYWIKSGTLVPVRRRDIVKIEGIDATGGNNQPNIPSITAHLWYFGLIGTCL

SEQ ID NO: 7905 - protein, 269 aa, Thermomyces lanuginosus
EVSQDLFNQFNLFAQYSAAAYCGKNNRAPAGTQITCTGNACPEVEKADATFLYSFEDSGVGDVTGFLALDNTNKLIVLSFRGSRSIENWIANLNFEQKEINDICSGCRGHAGFTSSWRSVADTLRQKVEDAVREHPDYRVVFTGHSLGGALATVAGADLRGNGYDIDVFSYGAPRVGNRAFAEFLTVQTGGTLYRITHTNDIVPRLPPREFGYSHSSPEYWIKSGTLVPVRRRDIVKIEGIDATGGNNQPNIPSITAHLWYFGLIGTCL

SEQ ID NO: 7906 - protein, 269 aa, Thermomyces lanuginosus
EVSQDLFNQFNLFAQYSAAAYCGKNNDAPAGTKITCTGNACPEVEKADATVLYSFEDSGVGDVTGFLALDNTNKLIVLSFRGSRSIENWIGNLNFDLEEIDDICSGCRGHDGFTSSWRSVADTLRQKVEDAVREHPDYRVVFTGHSLGGALATVAGADLRGNGYDIDVFSYGAPRVGNRAFAEFLTVQTGGTLYRITDTNDIVPRLPPRKFGYSHSSPEFWIKSGTLVPVRRRDIVKIEGIDATGGNNQPNIPDIPVHLWYFGLIGTCL

SEQ ID NO: 7907 - protein, 269 aa, Thermomyces lanuginosus
EVSQDLFNQFNLFAQYSAAAYCGKNNRAPAGTQITCTANACPEVEKADATFLYSFEDSGVGDVTGFLALDNTNKLIVLSFRGSRSIENWITNLNFDLKEINDICSGCRGHAGFTSSWRSVADTLRQKVEDAVREHPDYRVVFTGHSLGGALATVAGADLRGNKYDIDVFSYGAPRVGNRAFAEFLTVQTGGTLYRITHTNDIVPRLPPREFGYSHSSPEYWIKSGTLVPVRRRDIVKIEGIDATGGNNQPNIPSITAHLWYFGLIGTCL

SEQ ID NO: 7908 - protein, 269 aa, Thermomyces lanuginosus
EVSQDLFNQFNLFAQYSAAAYCGKNNRAPAGTNITCTANACPEVEKADATFLYSFEDSGVGDVTGFLALDNTNKLIVLSFRGSRSIENWIGNLNFELKEINDICSGCRGHAGFTSSWRSVADTLRQKVEDAVREHPDYRVVFTGHSLGGALATVAGADLRGNKYDIDVFSYGAPRVGNRAFAEFLTVQTGGTLYRITHTNDIVPRLPPREFGYSHSSPEYWIKSGTLVPVRRRDIVKIEGIDATGGNNQPNIPSITAHLLYFGLIGTCL

SEQ ID NO: 7909 - protein, 269 aa, Thermomyces lanuginosus
EVSQDLFNQFNLFAQYSAAAYCGKNNRAPAGTNITCTANACPEVEKADATFLYSFEDSGVGDVTGFLALDNTNKLIVLSFRGSRSIENWIGNLNFELKEINDICSGCRGHAGFTSSWRSVADTLRQKVEDAVREHPDYRVVFTGHSLGGALATVAGADLRGNKYDIDVFSYGAPRVGNRAFAEFLTVQTGGTLYRITHTNDIVPRLPPREFGYSHSSPEYWIKIGTLVPVRRRDIVKIEGIDATGGNNQPNIPSITAHLWYFGLIGTCL

SEQ ID NO: 7910 - protein, 269 aa, Thermomyces lanuginosus
EVSQDLFNQFNLFAQYSAAAYCGKNNRAPAGTQITCTANACPEVEKADATFLYSFEDSGVGDVTGFLALDNTNKLIVLSFRGSRSIENWITNLNFELKEINDICSGCRGHAGFTSSWRSVADTLRQKVEDAVREHPDYRVVFTGHSLGGALATVAGADLRGNKYDIDVFSYGAPRVGNRAFAEFLTVQTGGTLYRITHTNDIVPRLPPREFGYSHSSPEYWIKSGTLVPVRRRDIVKIEGIDATGGNNQPNIPSIPAHLWYFGLIGTCL

SEQ ID NO: 7911 - protein, 269 aa, Thermomyces lanuginosus
EVSQDLFNQFNLFAQYSAAAYCGKNNRAPAGTNITCTANACPEVEKADATFLYSFEDSGVGDVTGFLALDNTNKLIVLSFRGSRSIENWIGNLNFELKEINDICSGCRGHAGFTSSWRSVADTLRQKVEDAVREHPDYRVVFSGHSLGGALATVAGADLRGNKYDIDVFSYGAPRVGNRAFAEFLTVQTGGTLYRITHTNDIVPRLPPREFGYSHSSPEYWIKSGTLVPVRRRDIVKIEGIDATGGNNQPNIPSITAHLWYFGLIGTCL

SEQ ID NO: 7912 - protein, 269 aa, Thermomyces lanuginosus
EVSQDLFNQFNLFAQYSAAAYCGKNNDAPAGTNITCTGNACPEVEKADATFLYSFEDNGSGDVTGFLALDNTNKLIVLSFRGSRSVENWIGNLNFDLKEINDICSGCRGHDGFTSSWRSVADTLRQKVEDAVREHPDYRVVFTGHSLGGGLATVAGADLRGNGYDIDVFSYGAPRVGNRAFAEFLTVQTGGTLYRITHTNDIVPRLPPRKFGYSHSSPEYWIKSGTGVPVRRRDIVKIEGIDATGGNNRPNIPDIKAHLWYFGLIGTCL

SEQ ID NO: 7913 - protein, 269 aa, Thermomyces lanuginosus
EVSQDLFNQFNLFAQYSAAAYCGKNNRAPAGTNITCTANACPEVEKADATFLYSFEDSGVGDVTGFLALDNTNKLIVLSFRGSRSIENWIGNLNFELKEINDICSGCRGHAGFTSSWRSVADTLRQKVEDAVREHPDYRVVFTGHSLGGALATVAGADLRGNKYDIDVFSYGAPRVGNRAFAEFLTVQTGGTLYRITQTNDIVPRLPPREFGYSHSSPEYWIKSGTLVPVRRRDIVKIEGIDATGGNNQPNIPSITAHLWYFGLIGTCL

SEQ ID NO: 7914 - protein, 269 aa, Thermomyces lanuginosus
EVSQDLFNQFNLFAQYSAAAYCGKNNRAPAGTNITCTANACPEVEKADATFLYSFEDSGVGDVTGFLALDNTNKLIVLSFRGSRSIENWIGNLNFELKEINDICSGCRGHAGFTSSWRSVADTLRQKVEDAVREHPDYRVVFTGHSLGGALATVAGADLRGNKYDIDVFSYGAPRVGNRAFAEFLTVQTGGTLYRITHTNDIVPRLPPREFGYSHSSPEYWIKSGTLVPVRRRDIVKIEGIDATGGNNQPNIPSITAHLTYFGLIGTCL

SEQ ID NO: 7915 - protein, 269 aa, Thermomyces lanuginosus
EVSQDLRNQFNLFAQYSAAAYCGKNNRAPAGTNITCTANACPEVEKADATFLYSFEDSGVGDVTGFLALDNTNKLIVLSFRGSRSIENWIGNLNFELKEINDICSGCRGHAGFTSSWRSVADTLRQKVEDAVREHPDYRVVFTGHSLGGALATVAGADLRGNKYDIDVFSYGAPRVGNRAFAEFLTVQTGGTLYRITHTNDIVPRLPPREFGYSHSSPEYWIKSGTLVPVRRRDIVKIEGIDATGGNNQPNIPSITAHLWYFGLIGTCL

SEQ ID NO: 7916 - protein, 269 aa, Thermomyces lanuginosus
EVSQDLFNQFNLFAQYSAAAYCGKNNRAPAGTNITCTANACPEVEKADATFLYSFEDSGVGDVTGFLALDNTNKLIVLSFRGSRSIENWILNLNFELKEINDICSGCRGHAGFTSSWRSVADTLRQKVEDAVREHPDYRVVFTGHSLGGALATVAGADLRGNKYDIDVFSYGAPRVGNRAFAEFLTVQTGGTLYRITHTNDIVPRLPPREFGYSHSSPEYWIKSGTLVPVRRRDIVKIEGIDATGGNNQPNIPSITAHLWYFGLIGTCL

SEQ ID NO: 7917 - protein, 269 aa, Thermomyces lanuginosus
EVSQDLFNQFNLFAQYSAAAYCGKNNRAPAGTNITCTANACPEVEKADATFLYSFEDSGVGDVTGFLALDNTNKLIVLSFRGSRSIENWIGNLNFELKEINDICSGCRGHAGFTSSWRSVADTLRQKVEDAVREHPDYRVVFTGHSLGGALATVAGADLRGNKYDIDVFSYGAPRVGNRAFAEFLTVQTGGTLYRITHTNDIVPRLPPREFGYSHSSPEYWIKSGTLVPKRRRDIVKIEGIDATGGNNQPNIPSITAHLWYFGLIGTCL

SEQ ID NO: 7918 - protein, 269 aa, Thermomyces lanuginosus
EVSQDLFNQFNLFAQYSAAAYCGKNNRAPAGTNITCTANACPEVEKADATALYSFEDSGVGDVTGFLALDNTNKLIVLSFRGSRSIENWIGNLNFELKEINDICSGCRGHAGFTSSWRSVADTLRQKVEDAVREHPDYRVVFTGHSLGGALATVAGADLRGNKYDIDVFSYGAPRVGNRAFAEFLTVQTGGTLYRITHTNDIVPRLPPREFGYSHSSPEYWIKSGTLVPVRRRDIVKIEGIDATGGNNQPNIPSITAHLWYFGLIGTCL

SEQ ID NO: 7919 - protein, 269 aa, Thermomyces lanuginosus
EVSQDLFNQFNLFAQYSAAAYCGKNNRAPAGTNITCTANACPEVEKADATFLYSFEDSGVGDVTGFLALDNTNKLIVLSFRGSRSIENWIGNLNFELKEINDICSGCRGHAGFTSSWRSVADTLRQKVEDAVREHPDYRVVFTGHSLGGALATVAGADLRGNKYDIDVFSYGAPRVGNRAFAEFLTVQTGGTLYRITETNDIVPRLPPREFGYSHSSPEYWIKSGTLVPVRRRDIVKIEGIDATGGNNQPNIPSITAHLWYFGLIGTCL

SEQ ID NO: 7920 - protein, 269 aa, Thermomyces lanuginosus
EVSQDLFNQFNLFAQYSAAAYCGKNNRAPAGTNITCTANACPEVEKADATFLYSFEDSGVGDVTGFLALDNTNKLIVLSFRGSRSIEQWIGNLNFELKEINDICSGCRGHAGFTSSWRSVADTLRQKVEDAVREHPDYRVVFTGHSLGGALATVAGADLRGNKYDIDVFSYGAPRVGNRAFAEFLTVQTGGTLYRITHTNDIVPRLPPREFGYSHSSPEYWIKSGTLVPVRRRDIVKIEGIDATGGNNQPNIPSITAHLWYFGLIGTCL

SEQ ID NO: 7921 - protein, 269 aa, Thermomyces lanuginosus
EVSQDLFNQFNLFAQYSAAAYCGKNNRAPAGTQITCTANACPEVEKADATFLYSFEDSGVGDVTGFLALDNTNKLIVLSFRGSRSIENWIGNLNFELKEINDICSGCRGHAGFTSSWRSVADTLRQKVEDAVREHPDYRVVFTGHSLGGALATVAGADLRGNKYDIDVFSYGAPRVGNRAFAEFLTVQTGGTLYRITHTNDIVPRLPPREFGYSHSSPEYWIKSGTLVPVRRRDIVKIEGIDATGGNNQPNIPSITAHLWYFGLIGTCL

SEQ ID NO: 7922 - protein, 269 aa, Thermomyces lanuginosus
EVSQDLFNQFNLFAQYSAAAYCGKNNDAPAGTNITCTGNICPEVEKADATLLYSFRNSGVGDVTGFLALDNTNKLIVLSFRGSRSIENWIGNLNFDLIEINDICSGCRGHDGFTSSWFSVADTLRQKVEDAVREHPDYRVVFTGHSLGGALATVAGADLRGNSYDIDVFSYGAPRVGNRAFAEFLTVQTGGTLYRITHTNDIVPRLPPREFGYSHSSPEYWIKSGTLVPVRRRDIVKIEGIDATGGNNQPNIPDITAHLWYFGLIGTCL

SEQ ID NO: 7923 - protein, 269 aa, Thermomyces lanuginosus
EVSQDLFNQFNLFAQYSAAAYCGKNNRAPAGTNITCTANACPEVEKADATFLYSFEDSGVGDVTGFLALDNTNKLIVLSFRGSRSIKNWIGNLNFELKEINDICSGCRGHAGFTSSWRSVADTLRQKVEDAVREHPDYRVVFTGHSLGGALATVAGADLRGNKYDIDVFSYGAPRVGNRAFAEFLTVQTGGTLYRITHTNDIVPRLPPREFGYSHSSPEYWIKSGTLVPVRRRDIVKIEGIDATGGNNQPNIPSITAHLWYFGLIGTCL

SEQ ID NO: 7924 - protein, 269 aa, Thermomyces lanuginosus
EVSQDLFNQFNLFAQYSAAAYCGKNNRAPAGTNITCTANACPEVEKADATVLYSFEGSGVGDVTGFLALDNTNKLIVLSFRGSRSIENWIGNLNFDLKEINDICSGCRGHAGFTSSWRSVADTLRQKVEDAVREHPDYRVVFTGHSLGGALATVAGADLRGNKYDIDVFSYGAPRVGNRAFAEFLTVQTGGTLYRITHTNDIVPRLPPREFGYSHSSPEYWIKSGTLVPVRRRDIVKIEGIDATGGNNQPNIPSITAHLWYFGLIGTCL

SEQ ID NO: 7925 - protein, 269 aa, Thermomyces lanuginosus
EVSQDLFNQFNLFAQYSAAAYCGKNNRAPAGTNITCTANACPEVEKADATFLYSFEDSGVGDVTGFLALDNTNKLIVLSFRGSRSIENWIGNLNFELKEINDICSGCRGHAGFTSSWRSVADTLRQKVEDAVREHPDYRVVFTGHSLGGALATVAGADLRGNKYDIDVFSYGAPRVGNRAFAEFLTVQTGGTLYRITHTNDIVPRLPPREFGYSHSSPEYWIKSGTLVPVRRRDIVKIEGIDATGGNNQPNIPSITHHLWYFGLIGTCL

SEQ ID NO: 7926 - protein, 269 aa, Thermomyces lanuginosus
EVSQDLFNQFNLFAQYSAAAYCGKNNRAPAGTNITCTANACPEVEKADATFLYSFEDSGVGDVTGFLALDNTNKLIVLSFRGSRSIENWIGNLNFELKEINDICSGCRGHAGFTSSWRSVADTLRQKVEDAVREHPDYRVVFTGHSLGGALATVAGADLRGNKYDIDVFSYGAPRVGNRAFAEFLTVQTGGTLYRITHTNDIVPRLPPREFGYSHSSPEYWIKSGTLVPVRRRDIVKIEGIDATGGNNQPNIPSITYHLWYFGLIGTCL

SEQ ID NO: 7927 - protein, 269 aa, Thermomyces lanuginosus
EVSQDLFNQFNLFAQYSAAAYCGKNNRAPAGTNITCTANACPEVEKADATFLYSFEGSGVGDVTGFLALDNTNKLIVLSFRGSRSIENWIGNLNFELKEINDICSGCRGHAGFTSSWRSVADTLRQKVEDAVREHPDYRVVFTGHSLGGALATVAGADLRGNKYDIDVFSYGAPRVGNRAFAEFLTVQTGGTLYRITHTNDIVPRLPPREFGYSHSSPEYWIKSGTLVPVRRRDIVKIEGIDATGGNNQPNIPSITAHLWYFGLIGTCL

SEQ ID NO: 7928 - protein, 269 aa, Thermomyces lanuginosus
EVSQDLFNQFNLFAQYSAAAYCGKNNRAPAGTNITCTANACPEVEKADATFLYSFEDSGVGDVTGFLALDNTNKLIVLSFRGSRSIENWIGNLNFELKEINDICSGCRGHAGFTSSWRSVADTLRQKVEDAVREHPDYRVVFTGHSLGGALATVAGADLRGNKYDIDVFSYGAPRVGNRAFAEFLTVQTGGTLYRITHTNDIVPRLPPREFGYSHSSPEYWIKSGTLVPVRRRDIVKIEGIDATGGNNQPNIPSITFHLWYFGLIGTCL

SEQ ID NO: 7929 - protein, 269 aa, Thermomyces lanuginosus
EVSQDLFNQFNLFAQYSAAAYCGKNNRAPAGTQITCTGNACPEVEKADATFLYSFEDSGVGDVTGFLALDNTNKLIVLSFRGSRSIENWINNLRFDLKEINDICSGCRGHAGFTSSWRSVADTLRQKVEDAVREHPDYRVVFTGHSLGGALATVAGADLRGNGYDIDVFSYGAPRVGNRAFAEFLTVQTGGTLYRITHTNDIVPRLPPREFGYSHPSPEYWIKSGTGVPVRRRDIVKIEGIDATGGNNQPNIPDITAHLWYFGLIGTCL

SEQ ID NO: 7930 - protein, 269 aa, Thermomyces lanuginosus
EVSQDLFNQFNLFAQYSAAAYCSKNNNAPAGTNITCTGNACPEVEKADATILYSFRDSGVGDVTGFLALDNTNKLIVLSFRGSRSIENWIGNLNFDLIEINDICSGCRGHDGFTSSWFSVADTLRQKVEDAVREHPDYRVVFTGHSLGGALATVAGADLRGNGYDIDVFSYGAPRVGNRAFAEFLTVQTGGTLYRITHTNDIVPRLPPREFGYSHSSPEFWIKSGTLVPVRRRDIVKIEGIDAEGGNNQPNIPDIPAHLWYFGLIGTCL

SEQ ID NO: 7931 - protein, 269 aa, Thermomyces lanuginosus
EVSQDLFNQFNLFAQYSAAAYCGKNNDAPAGTNITCTGNACPEVEKADATFLYSFEDTGKGDVTGFLALDNTNKLIVLSFRGSRSVENWIGNLNFDLKEINAICSGCRGHDGFTSSWRSVADTLRQKVEDAVREHPDYRVVFTGHSLGGGLATVAGADLRGNGYDIDVFSYGAPRVGNRAFAEFLTVQTGGTLYRITHTNDIVPRLPPRVFGYSHSSPEYWIKSGTGVPVRRRDIVKIEGIDATGGNNQPNIPDIKAHLWYFGLIGTCL

SEQ ID NO: 7932 - protein, 269 aa, Thermomyces lanuginosus
EVSQDLFNQFNLFAQYSKAAYCQANNDAPAGTNITCTGNACPEVEKADATFLYSFEDSGVGDVTGFLALDNTNKQIILSFRGSRSIENWIGNLRFDLKEINDICSGCRGHDGFTSSWRSVADTLRQKVEAAVREHPDYRVVFTGHSLGGALATIAWADLRGNGYDIDVFSYGAPRVGNRAFAEFLTQQTGGTLYRITHTNDIVPRLPPREFGYSHSSPEYWIKSGTLVPVTRNDIVKIEGIDATGGNNQPNIPDIPAHLWYFGLIGTCL

SEQ ID NO: 7933 - protein, 269 aa, Thermomyces lanuginosus
EVSQDLFNQFNLFAQYSAAAYCGKNNRAPAGTNITCTANACPEVEKADATFLYSFEDSGVGDVTGFLALDNTNKLIVLSFRGSRSIENWIGNLNFELKEINDICSGCRGHAGFTSSWRSVADTLRQKVEDAVREHPDYRVVFTGHSLGGALATVAGADLRGNKYDIDVFSYGAPRVGNRAFAEFLTVQTGGTLYRITHTNDIVPRLPPRKFGYSHSSPEYWIKSGTLVPVRRRDIVKIEGIDATGGNNQPNIPSITAHLWYFGLIGTCL

SEQ ID NO: 7934 - protein, 269 aa, Thermomyces lanuginosus
EVSQDLFNQFNLFAQYSAAAYCGKNNRAPAGTNITCTANACPEVEKADATFLYSFEDSGVGDVTGFLALDNTNKLIVLSFRGSRSIENWIGNLKFELKEINDICSGCRGHAGFTSSWRSVADTLRQKVEDAVREHPDYRVVFTGHSLGGALATVAGADLRGNKYDIDVFSYGAPRVGNRAFAEFLTVQTGGTLYRITHTNDIVPRLPPREFGYSHSSPEYWIKSGTLVPVRRRDIVKIEGIDATGGNNQPNIPSITAHLWYFGLIGTCL

SEQ ID NO: 7935 - protein, 269 aa, Thermomyces lanuginosus
EVSQDLFNQFNLFAQYSAAAYCGKNNRAPAGTNITCTANACPEVEKADATFLYSFEDSGVGDVTGFLALDNTNKLIVLSFRGSRSIENWIGNLNFELKEINDICSGCRGHAGFTSSWRSVADTLRQKVEDAVREHPDYRVVFTGHSLGGALATVAGADLRGNKYDIDVFSYGAPRVGNRAFAEFLTVQTGGTLYRITFTNDIVPRLPPREFGYSHSSPEYWIKSGTLVPVRRRDIVKIEGIDATGGNNQPNIPSITAHLWYFGLIGTCL

SEQ ID NO: 7936 - protein, 269 aa, Thermomyces lanuginosus
EVSQDLFNQFNLFAQYSAAAYCGKNNDAPAGTKITCTGNACPEVEKADATLLYSFEDSGVGDVTGFLALDNTNKLIVLSFRGSRSIENWIGNLNFDLEEIDDICSGCRGHDGFTSSWRSVADTLRQKVEDAVREHPDYRVVFTGHSLGGALATVAGADLRGNGYDIDVFSYGAPRVGNRAFAEFLTVQTGGTLYRITSTNDIVPRLPPRRFGYSHSSPEFWIKSGTLVPVRRRDIVKIEGIDATGGNNQPNIPDIPVHLWYFGLIGTCL

SEQ ID NO: 7937 - protein, 269 aa, Thermomyces lanuginosus
EVSQDLFNQFNLFAQYSAAAYCGKNNRAPAGTNITCTANACPEVEKADATFLYSFEDSGVGDVTGFLALDNTNKLIVLSFRGSRSIENWLGNLNFELKEINDICSGCRGHAGFTSSWRSVADTLRQKVEDAVREHPDYRVVFTGHSLGGALATVAGADLRGNKYDIDVFSYGAPRVGNRAFAEFLTVQTGGTLYRITHTNDIVPRLPPREFGYSHSSPEYWIKSGTLVPVRRRDIVKIEGIDATGGNNQPNIPSITAHLWYFGLIGTCL

SEQ ID NO: 7938 - protein, 269 aa, Thermomyces lanuginosus
EVSVDLFNQFNLFAQYSAAAYCGKNNDAPAGTNITCTGNACPEVEKADATFLYSFEDTGKGDVTGFLALDNTNKLIVLSFRGSRSIENWIGNLNFDLKEINDICSGCRGHDGFTSSWRSVADTLRQKVEDAVREHPDYRVVFTGHSLGGALATVAGADLRGNGYDIDVFSYGAPRVGNRAFAEFLTVQTGGTLYRITHLADIVPRLPPRKFGYSHSSPEYWIKSGTLVPVRRRDIVKIEGIDATGGNNQPNIPDAKAHLWYFGLIGTCL

SEQ ID NO: 7939 - protein, 269 aa, Thermomyces lanuginosus
EVSQDLFNQFNLFAQYSAAAYCGKNNRAPAGTNITCTANACPEVEKADATVLYSFEDSGVGDVTGFLALDNTNKLIVLSFRGSRSIENWIGNLNFELKEINDICSGCRGHAGFTSSWRSVADTLRQKVEDAVREHPDYRVVFTGHSLGGALATVAGADLRGNKYDIDVFSYGAPRVGNRAFAEFLTVQTGGTLYRITHTNDIVPRLPPREFGYSHSSPEYWIKSGTLVPVRRRDIVKIEGIDATGGNNQPNIPSITAHLWYFGLIGTCL

SEQ ID NO: 7940 - protein, 269 aa, Thermomyces lanuginosus
EVSQDLFNQFNLFAQYSAAAYCSKNNNAPAGTNITCTGNICPEVEKADATILYSFRDSGKGDVTGFLALDNTNKLIVLSFRGSRSIENWIGNLNFDLKEINDICSGCRGHDGFTSSWFSVADTLRQKVEDAVREHPDYRVVFTGHSLGGALATVAGADLRGNGYDIDVFSYGAPRVGNRAFAEFLTVQTGGTLYRITHTNDIVPRLPPREFGYSHSSPEYWIKSGTLVPVRRRDIVKIEGIDATGGNNQPNIPDITAHLWYFGLIGTCL

SEQ ID NO: 7941 - protein, 269 aa, Thermomyces lanuginosus
EYSQDLFNQFNLFAQYSAAAYCGKNNDAPAGTKITCTGNACPEVEKADATFLYSFEDSGVGDVTGFLARDNTNKLIVLSFRGSRSIENWIGNLNFDLEEINDICSGCRGHDGFTSSWRSVADTLRQKVEDAVREHPDYRVVFTGHSLGGALATVAGADLRGNGYDIDVFSYGAPRLGNRAFAEFLTVQTGGTLYRITHTNDIVPRLPPRKFGYSHSSPEYWIKSGTGVPVRRRDIVKIEGIDATGGNNQPNIPDGPAHLWYFGLIGTCL

SEQ ID NO: 7942 - protein, 269 aa, Thermomyces lanuginosus
EVSQDLFNQFNLFAQYSAAAYCGKNNRAPAGTQITCTANACPEVEKADATFLYSFEDSGVGDVTGFLALDNTNKLIVLSFRGSRSIENWITNLNFELKEINDICSGCRGHDGFTSSWRSVADTLRQKVEDAVREHPDYRVVFTGHSLGGALATVAGADLRGNKYDIDVFSYGAPRVGNRAFAEFLTVQTGGTLYRITHTNDIVPRLPPREFGYSHSSPEYWIKSGTLVPVRRRDIVKIEGIDATGGNNQPNIPSITAHLWYFGLIGTCL

SEQ ID NO: 7943 - protein, 269 aa, Thermomyces lanuginosus
EVSQDLFNQFNLFAQYSAAAYCGKNNRAPAGTNITCTANACPEVEKADATFLYSFEDSGVGDVTGFLALDNTNKLIVLSFRGSRSIENWIGNLNYELKEINDICSGCRGHAGFTSSWRSVADTLRQKVEDAVREHPDYRVVFTGHSLGGALATVAGADLRGNKYDIDVFSYGAPRVGNRAFAEFLTVQTGGTLYRITHTNDIVPRLPPREFGYSHSSPEYWIKSGTLVPVRRRDIVKIEGIDATGGNNQPNIPSITAHLWYFGLIGTCL

SEQ ID NO: 7944 - protein, 269 aa, Thermomyces lanuginosus
EVSQDLFNQFNLFAQYSAAAYCGKNNRAPAGTNITCTANACPEVEKADATFLYSFEDSGVGDVSGFLALDNTNKLIVLSFRGSRSIENWIGNLNFELKEINDICSGCRGHAGFTSSWRSVADTLRQKVEDAVREHPDYRVVFTGHSLGGALATVAGADLRGNKYDIDVFSYGAPRVGNRAFAEFLTVQTGGTLYRITHTNDIVPRLPPREFGYSHSSPEYWIKSGTLVPVRRRDIVKIEGIDATGGNNQPNIPSITAHLWYFGLIGTCL

SEQ ID NO: 7945 - protein, 269 aa, Thermomyces lanuginosus
EVSQDLFNQFNLFAQYSAAAYCGKNNRAPAGTNITCTANACPEVEKADATFLYSFEDSGVGDVTGFLALDNTNKLIVLSFRGSRSIENWIGNLNFELKEINDICSGCRGHAGFTSSWRSVADTLRQKVEDAVREHPDYRVVFTGHSLGGALATVAGADLRGNKYDIDVFSYGAPRVGNRAFAEFLTVQTGGTLYRITHTNDIVPRLPPREFGYSHSSPEYWIKSGTLVPVRRRDIVKIEGIDATGGNNQPNIPSITAHLNYFGLIGTCL

SEQ ID NO: 7946 - protein, 269 aa, Thermomyces lanuginosus
EVSQDLFNQFNLFAQYSAAAYCGKNNRAPAGTNITCTANACPEVEKADATFLYSFEDSGVGDVTGFLALDNTNKLIVLSFRGSRSIENWIGNLNFELKEINDICSGCRGHAGFTSSWRSVADTLRQKVEDAVREHPDYRVVFTGHSLGGALATVAGADLRGNKYDIDVFSYGAPRVGNRAFAEFLTVQTGGTLYRITHTNDIVPRLPPREFGYSHSSPEYWIKSGTEVPVRRRDIVKIEGIDATGGNNQPNIPSITAHLWYFGLIGTCL

SEQ ID NO: 7947 - protein, 269 aa, Thermomyces lanuginosus
EVSNDSFNQFNLFAQYSAAAYCGKNNDAPAGTNITCTGNACPEVEKADATFLYSFEDNGSGDVTGFLALDNTNKLIVLSFRGSRSVENWIGNLNFDLKEINDICSGCRGHDGFTSSWRSVADTLRQKVEDAVREHPDYRVVFTGHSLGGGLATVAGADLRGNGYDIDVFSYGAPRVGNRAFAEFLTVQTGGTLYRITHTNDIVPRLPPREFGYSHSSPEYWIKSGTGVPVRRRDIVKIEGIDATGGNNQPNIPDIKAHLWYFGLIGTCL

SEQ ID NO: 7948 - protein, 269 aa, Thermomyces lanuginosus
EVSQDLFNQFNLFAQYSAAAYCGKNNRAPAGTNITCTANACPEVEKADATFLYSFEDSGVGDVTGFLALDNTNKLIVLSFRGSRSIENWIGNLNFELKEINDICSGCRGHAGFTSSWRSVADTLRQKVEDAVREHPDYRVVFTGHSLGGALATVAGADLRGNKYDIDVFSYGAPRVGNRAFAEFLTVQTGGTLYRITHTNDIVPRLPPRQFGYSHSSPEYWIKSGTLVPVRRRDIVKIEGIDATGGNNQPNIPSITAHLWYFGLIGTCL

SEQ ID NO: 7949 - protein, 269 aa, Thermomyces lanuginosus
EVSQDLFNQFNLFAQYSAAAYCGKNNRAPAGTNITCTANACPEVEKADATFLYSFEDSGVGDVTGFLALDNTNKLIVLSFRGSRSIENWIGNLNFELKEINDICSGCRGHAGFTSSWRSVADTLRQKVEDAVREHPDYRVVFTGHSLGGALATVAGADLRGNKYDIDVFSYGAPRVGNRAFAEFLTVQTGGTLYRITHTNDIVPRLPPREFGYSHSSPEYWIKFGTLVPVRRRDIVKIEGIDATGGNNQPNIPSITAHLWYFGLIGTCL

SEQ ID NO: 7950 - protein, 269 aa, Thermomyces lanuginosus
EVSQDLFNQFNLFAQYSAAAYCGKNNDAPAGTKITCTGNACPEVEKADATLLYSFEDSGVGDVTGFLALDNTNKLIVLSFRGSRSIENWIGNLNFDLEEIDDICSGCRGHDGFTSSWRSVADTLRQKVEDAVREHPDYRVVFTGHSLGGALATVAGADLRGNGYDIDVFSYGAPRVGNRAFAEFLTVQTGGTLYRITDTNDIVPRLPPRKFGYSHSSPEFWIKSGTLVPVRRRDIVKIEGIDATGGNNQPNIPDIPVHLWYFGLIGTCL

SEQ ID NO: 7951 - protein, 269 aa, Thermomyces lanuginosus
EVSQDLFNQFNLFAQYSAAAYCGKNNRAPAGTNITCTANACPEVEKADATFLYSFEDSGVGDVTGFLALDNTNKLIVLSFRGSRSLENWIGNLNFELKEINDICSGCRGHAGFTSSWRSVADTLRQKVEDAVREHPDYRVVFTGHSLGGALATVAGADLRGNKYDIDVFSYGAPRVGNRAFAEFLTVQTGGTLYRITHTNDIVPRLPPREFGYSHSSPEYWIKSGTLVPVRRRDIVKIEGIDATGGNNQPNIPSITAHLWYFGLIGTCL

SEQ ID NO: 7952 - protein, 269 aa, Thermomyces lanuginosus
EVSQDLFNQFNLFAQYSAAAYCGKNNRAPAGTNITCTANACPEVEKADATFLYSFEDSGVGDVTGFLALDNTNKLIVLSFRGSRSIENWIGNLNFELKEINDICSGCRGHAGFTSSWRSVADTLRQKVEDAVREHPDYRVVFTGHSLGGALATVAGADLRGNKYDIDVFSYGAPRVGNRAFAEFLTVQTGGTLYRITHTNDIVPRLPPREFGYSHSSPEYWIKCGTLVPVRRRDIVKIEGIDATGGNNQPNIPSITAHLWYFGLIGTCL

SEQ ID NO: 7953 - protein, 269 aa, Thermomyces lanuginosus
EVSQDLFNQFKLFAQYSAAAYCKKNNDAPAGTNITCTGNACPEVEKADATFLYSFEDSGVGDVTGFLALDNTNKRIVLSFRGSRSIENWIGNLRFDLKEINDICSGCRGHAGFTSSWRSVADTLRQKVEDAVREHPDYRVVFTGHSLGGALATIAWADLRGNGYDIDVFSYGAPRVGNRAFAEFLTNQQGGTLYRITHTNDIVPRLPPREFGYSHSSPEYWIKSGTLVPVTRNDIVKIEGIDATGGNNQPNIPDIPAHLWYFGRIGTCL

SEQ ID NO: 7954 - protein, 269 aa, Thermomyces lanuginosus
EVSQDLFNQFNLFAQYSAAAYCGKNNRAPAGTNITCTANACPEVEKADATFLYSFEDSGVGDVTGFLALDNTNKLIVLSFRGSRSIENWIGNLNFELKEINDICSGCRGHAGFTSSWRSVADTLRQKVEDAVREHPDYRVVFTGHSLGGALATVAGADLRGNKYDIDVFSYGAPRVGNRAFAEFLTVQTGGTLYRITHTNDIVPRLPPREFGYSHSSPEYWIKSGTLVPVRRRDIVKIEGIDATGGNNQPNIPSITAHLDYFGLIGTCL

SEQ ID NO: 7955 - protein, 269 aa, Thermomyces lanuginosus
EVSQDLFNQFRLFAQYSAAAYCGKNNDAPAGTQITCTGNACPEVEKADATFLYSFEDSGVGDVTGFLALDNTNKLIVLSFRGSRSIENWLTNLSFELKEINDICSGCRGHDGFTSSWRSVADTLRQKVEDAVREHPDYRVVFTGHSLGGALATVAGADLRGNKYDIDVFSYGAPRVGNRAFAEFLTVQTGGTLYRITHTNDIVPRLPPREFGYSHSSPEYWIKSGTLVPVRRRDIVKIEGIDATGGNNQPNIPSIPAHLWYFGLIGTCL

SEQ ID NO: 7956 - protein, 269 aa, Thermomyces lanuginosus
EVSQDLFNQFNLFAQYSAAAYCGKNNRAPAGTQITCTGNACPEVEKADATFLYSFEDSGVGDVTGFLALDNTNKLIVLSFRGSRSIENWIANLNFEQKEINDICSGCRGHAGFTSSWRSVADTLRQKVEDAVREHPDYRVVFTGHSLGGALATVAGADLRGNGYDIDVFSYGAPRVGNRAFAEFLTVQTGGTLYRITHTNDIVPRLPPREFGYSHPSPEYWIKSGTLVPVRRRDIVKIEGIDATGGNNQPNIPDITAHLWYFGLIGTCL

SEQ ID NO: 7957 - protein, 269 aa, Thermomyces lanuginosus
EVSQDLFNQFNLFAQYSAAAYCGKNNDAPAGTNITCTGNACPEVEKADATFLYSFEDTGKGDVTGFLALDNTNKLIVLSFRGTRSVENWIGNLNFDLKEINDICSGCRGHDGFTSSWRSVADTLRQKVEDAVREHPDYRVVFTGHSLGGGLATVAGADLRGNGYDIDVFSYGAPRVGNRAFAEFLTVQTGGTLYRITHTNDIVPRLPPRVFGYSHSSPEYWIKSGTGVPVRRRDIVKIEGIDATGGNNQPNIPDIKAHLWYFGLIGTCL

SEQ ID NO: 7958 - protein, 269 aa, Thermomyces lanuginosus
EVSQDLFNQFNLFAQYSAAAYCGKNNRAPAGTNITCTANACPEVEKADATFLYSFEDSGVGDVTGFLALDNTNKLIVLSFRGSRSIENWIANLNFELKEINDICSGCRGHAGFTSSWRSVADTLRQKVEDAVREHPDYRVVFTGHSLGGALATVAGADLRGNKYDIDVFSYGAPRVGNRAFAEFLTVQTGGTLYRITHTNDIVPRLPPREFGYSHSSPEYWIKSGTLVPVRRRDIVKIEGIDATGGNNQPNIPSITAHLWYFGLIGTCL

SEQ ID NO: 7959 - protein, 269 aa, Thermomyces lanuginosus
EVSQDLFNQFNLFAQYSAAAYCGKNNRAPAGTNITCTANACPEVEKADATFLYSFEDSGVGDVTGFLALDNTNKLIVLSFRGSRSIENWIGNLNFELKEINDICSGCRGHAGFTSSWRSVADTLRQKVEDAVREHPDYRVVFTGHSLGGALATVAGADLRGNKYDIDVFSYGAPRVGNRAFAEFLTVQTGGTLYRITVTNDIVPRLPPREFGYSHSSPEYWIKSGTLVPVRRRDIVKIEGIDATGGNNQPNIPSITAHLWYFGLIGTCL

SEQ ID NO: 7960 - protein, 269 aa, Thermomyces lanuginosus
EVSQDLFNQFNLFAQYSAAAYCGKNNRAPAGTNITCTANACPEVEKADATFLYSFEDSGVGDVTGFLALDNTNKLIVLSFRGSRSIENWIGNLNFELKEINDICSGCRGHAGFTSSWRSVADTLRQKVEDAVREHPDYRVVFTGHSLGGALATVAGADLRGNKYDIDVFSYGAPRVGNRAFAEFLTVQTGGTLYRITHTNDIVPRLPPREFGYSHSSPEYWIKSGTLVHVRRRDIVKIEGIDATGGNNQPNIPSITAHLWYFGLIGTCL

SEQ ID NO: 7961 - protein, 269 aa, Thermomyces lanuginosus
EVSQDLFNQFNLFAQYSKAAYCQKNNSAPAGTNITCTGNACPEVEKADATFLYSFEDMGVGDVTGFLALDNTNKQIILSFRGSRSIENWIGNLNFDLKEINDICSGCKGHDGFTSSWRSVADTLRQKVEDAVREFPDYRVVFTGHSLGGALATVAWADLRGNGYDIDVFSYGAPRVGNRAFAEFLTHQTGGTLYRITHTNDIVPRLPPREFGYSHSSPEYWIKSGTLVPVTRNDIVKIEGIDATGGNNQPNIPDIPAHLWYFGLIGTCL

SEQ ID NO: 7962 - protein, 269 aa, Thermomyces lanuginosus
EVSQDLFNQFNLFAQYSAAAYCGKNNRAPAGTNITCTANACPEVEKADATFLYSFEDSGVGDVTGFLALDNTNKLIVLSFRGSRSIENWIGNLNFELKEINDICSGCRGHAGFTSSWRSVADTLRQKVEDAVREHPDYRVVFTGHSLGGALATVAGADLRGNKYDIDVFSYGAPRVGNRAFAEFLTVQTGGTLYRITHTNDIVPRLPPREFGYSHSSPEYWIKSGTLVPVRRRDIVKIEGIDATGGNNQPNIPSITAHLYYFGLIGTCL

SEQ ID NO: 7963 - protein, 269 aa, Thermomyces lanuginosus
EVSQDLFNQFNLFAQYSAAAYCGKNNRAPAGTNITCTANACPEVEKADATFLYSFEDSGVGDVTGFLALDNTNKLIVLSFRGSRSIENWIGNLNFELKEINDICSGCRGHAGFTSSWRSVADTLRQKVEDAVREHPDYRVVFTGHSLGGALATVAGADLRGNKYDIDVFSYGAPRVGNRAFAEFLTVQTGGTLYRITHTNDIVPRLPPRRFGYSHSSPEYWIKSGTLVPVRRRDIVKIEGIDATGGNNQPNIPSITAHLWYFGLIGTCL

SEQ ID NO: 7964 - protein, 269 aa, Thermomyces lanuginosus
EVSQDLFNQFNLFAQYSAAAYCGKNNDAPAGTKITCTGNACPEVEKADATVLYSFEDSGVGDVTGFLALDNTNKLIVLSFRGSRSIENWIGNLNFDLEEIDDICSGCRGHDGFTSSWRSVADTLRQKVEDAVREHPDYRVVFTGHSLGGALATVAGADLRGNGYDIDVFSYGAPRVGNRAFAEFLTVQTGGTLYRITSTNDIVPRLPPRKFGYSHSSPEFWIKSGTLVPVRRRDIVKIEGIDATGGNNQPNIPDIPFHLWYFGLIGTCL

SEQ ID NO: 7965 - protein, 269 aa, Thermomyces lanuginosus
EVSQDLFNQFNLFAQYSKAAYCQKNNSAEAGTNITCTGNACPEVEKADATFLYSFEDMGVGDVTGFLALDNTNKQIILSFRGSRSIENWIGNLNFDLKEINDICSGCRGHDGFTSSWRSVADTLRQKVEDAVREFPDYRVVFTGHSLGGALATVAWADLRGNGYDIDVFSYGAPRVGNRAFAEFLTTQTGGTLYRITHTNDIVPRLPPREFGYSHSSPEYWIKSGTLVPVTRNDIVKIEGIDATGGNNQPNIPDIPAHLWYFGLIGTCL

SEQ ID NO: 7966 - protein, 269 aa, Thermomyces lanuginosus
EVSQDLFNQFNLFAQYSAAAYCGKNNRAPAGTNITCTANACPEVEKADATFLYSFEDSGVGDVTGFLALDNTNKLIVLSFRGSRSIENWIGNLNAELKEINDICSGCRGHAGFTSSWRSVADTLRQKVEDAVREHPDYRVVFTGHSLGGALATVAGADLRGNKYDIDVFSYGAPRVGNRAFAEFLTVQTGGTLYRITHTNDIVPRLPPREFGYSHSSPEYWIKSGTLVPVRRRDIVKIEGIDATGGNNQPNIPSITAHLWYFGLIGTCL

SEQ ID NO: 7967 - protein, 269 aa, Thermomyces lanuginosus
EVSQDLFNQFNLFAQYSAAAYCGKNNRAPAGTNITCTANACPEVEKADATFLYSFEDSGVGDVTGFLALDNTNKLIVLSFRGSRSIENWIGNLNFEFKEINDICSGCRGHAGFTSSWRSVADTLRQKVEDAVREHPDYRVVFTGHSLGGALATVAGADLRGNKYDIDVFSYGAPRVGNRAFAEFLTVQTGGTLYRITHTNDIVPRLPPREFGYSHSSPEYWIKSGTLVPVRRRDIVKIEGIDATGGNNQPNIPSITAHLWYFGLIGTCL

SEQ ID NO: 7968 - protein, 269 aa, Thermomyces lanuginosus
EVSQDLFNQFNLFAQYSAAAYCGKNNRAPAGTNITCTANACPEVEKADATFLYSFEDSGVGDVTGFLALDNTNKLIVLSFRGSRSIENWIGNLNFELKEINDICSGCRGHAGFTSSWRSVADTLRQKVEDAVREHPDYRVVFTGHSLGGALATVAGADLRGNKYDIDVFSYGAPRVGNRAFAEFLTVQTGGTLYRITHTNDIVPRLPPREFGYSHSSPEYWIKSGTLVRVRRRDIVKIEGIDATGGNNQPNIPSITAHLWYFGLIGTCL

SEQ ID NO: 7969 - protein, 269 aa, Thermomyces lanuginosus
EVSQDLFNQFNLFAQYSAAAYCGKNNRAPAGTNITCTANACPEVEKADATFLYSFEDSGVGDVTGFLALDNTNKLIVLSFRGSRSIENWIGNLNFELKEINDICSGCRGHAGFTSSWRSVADTLRQKVEDAVREHPDYRVVFTGHSLGGALATVAGADLRGNKYDIDVFSYGAPRVGNRAFAEFLTVQTGGTLYRITHTNDIVPRLPPREFGYSHSSPEYWIKPGTLVPVRRRDIVKIEGIDATGGNNQPNIPSITAHLWYFGLIGTCL

SEQ ID NO: 7970 - protein, 269 aa, Thermomyces lanuginosus
EVSQDLFNQFNLFAQYSAAAYCSKNNNAPAGTNITCTGNACPEVEKADATFLYSFRDSGVGDVTGFLALDNTNKLIVLSFRGSRSIENWIGNLNFDLIEINDICSGCRGHDGFTSSWFSVADTLRQKVEDAVREHPDYRVVFTGHSLGGALATVAGADLRGNGYDIDVFSYGAPRVGNRAFAEFLTVQTGGTLYRITHTNDIVPRLPPREFGYSHSSPEFWIKSGTLVPVRRRDIVKIEGIDAEGGNNQPNIPDITAHLWYFGLIGTCL

SEQ ID NO: 7971 - protein, 269 aa, Thermomyces lanuginosus
EKSQDLFNQFNLFAQYSAAAYCGKNNRAPAGTNITCTANACPEVEKADATFLYSFEDSGVGDVTGFLALDNTNKLIVLSFRGSRSIENWIGNLNFELKEINDICSGCRGHAGFTSSWRSVADTLRQKVEDAVREHPDYRVVFTGHSLGGALATVAGADLRGNKYDIDVFSYGAPRVGNRAFAEFLTVQTGGTLYRITHTNDIVPRLPPREFGYSHSSPEYWIKSGTLVPVRRRDIVKIEGIDATGGNNQPNIPSITAHLWYFGLIGTCL

SEQ ID NO: 7972 - protein, 269 aa, Thermomyces lanuginosus
EVSQDLFNQFNLFAQYSAAAYCGKNNRAPAGTNITCTANACPEVEKADATFLYSFEDSGVGDVTGFLALDNTNKLIVLSFRGSRSIENWIGNLNFELKEINDICSGCRGHAGFTSSWRSVADTLRQKVEDAVREHPDYRVVFTGHSLGGALATVAGADLRGNKYDIDVFSYGAPRVGNRAFAEFLTVQTGGTLYRITLTNDIVPRLPPREFGYSHSSPEYWIKSGTLVPVRRRDIVKIEGIDATGGNNQPNIPSITAHLWYFGLIGTCL

SEQ ID NO: 7973 - protein, 269 aa, Thermomyces lanuginosus
EVSQDLFNQFNLFAQYSAAAYCGKNNRAPAGTNITCTANACPEVEKADATFLYSFEDSGVGDVTGFLALDNTNKLIVLSFRGSRSIENWIGNLNFELKEINDICSGCRGHAGFTSSWRSVADTLRQKVEDAVREHPDYRVVFTGHSLGGALATVAGADLRGNKYDIDVFSYGAPRVGNRAFAEFLTVQTGGTLYRITHTNDIVPRLPPREFGYSHSSPEYWIKSGTKVPVRRRDIVKIEGIDATGGNNQPNIPSITAHLWYFGLIGTCL

SEQ ID NO: 7974 - protein, 269 aa, Thermomyces lanuginosus
EVSQDLFNQFNLFAQYSAAAYCGKNNRAPAGTNITCTANACPEVEKADATFLYSFEDSGVGDVTGFLALDNTNKLIVLSFRGSRSIENWIGDLNFLLKEINDICSGCRGHAGFTSSWRSVADTLRQKVEDAVREHPDYRVVFTGHSLGGALATVAGADLRGNKYDIDVFSYGAPRVGNRAFAEFLTVQTGGTLYRITHTNDIVPRLPPREFGYSHSSPEYWIKSGTLVPVRRRDIVKIEGIDATGGNNQPNIPSITAHLWYFGLIGTCL

SEQ ID NO: 7975 - protein, 269 aa, Thermomyces lanuginosus
EVSQDLFNQFNLFAQYSAAAYCGKNNRAPAGTNITCTANACPEVEKADATFLYSFEDSGVGDVTGFLALDNTNKLIVLSFRGSRSIENWIGNLNFELKEINDICSGCRGHAGFTSSWRSVADTLRQKVEDAVREHPDYRVVFTGHSLGGALATVAGADLRGNKYDIDVFSYGAPRVGNRAFAEFLTVQTGGTLYRITHTNDIVPRLPPREFGYSHSSPEYWIKSGTLVPVRRRDIVKIEGIDATGGNNQPNIPSITAHLHYFGLIGTCL

SEQ ID NO: 7976 - protein, 269 aa, Thermomyces lanuginosus
EKSQDLFNQFNLFAQYSAAAYCGKNNDAPAGTKITCTGNACPEVEKADATVLYSFEDSGVGDVTGFLARDNTNKLIVLSFRGSRSIENWIGNLNFDLEEINDICSGCRGHDGFTSSWRSVADTLRQKVEDAVREHPDYRVVFTGHSLGGALATVAGADLRGNGYDIDVFSYGAPRLGNRAFAEFLTVQTGGTLYRITHTNDIVPRLPPRKFGYSHSSPEYWIKSGTDVPVRRRDIVKIEGIDATGGNNQPNIPDIPAHLWYFGLIGTCL

SEQ ID NO: 7977 - protein, 269 aa, Thermomyces lanuginosus
EVSQDLFNQFNLFAQYSAAAYCGKNNDAPAGTKITCTGNACPEVEKADATLLYSFEDSGVGDVTGFLALDNTNKLIVLSFRGSRSIENWIGNLNFDLEEIDDICSGCRGHDGFTSSWRSVADTLRQKVEDAVREHPDYRVVFTGHSLGGALATVAGADLRGNGYDIDVFSYGAPRVGNRAFAEFLTVQTGGTLYRITSTNDIVPRLPPRKFGYSHSSPEFWIKSGTLPPVRRRDIVKIEGIDATGGNNQPNIPDIPAHLWYFGLIGTCL

SEQ ID NO: 7978 - protein, 269 aa, Thermomyces lanuginosus
EVSQDLFNQFNLFAQYSKAAYCQKNNSAPAGTNITCTGNACPEVFKADVTFLYSFEDMGVGDVTGFLALDNTSKQIVLSFRGSRSIENWIGNLNFDLKEINDICSGCRGHDGFTSSWRSVADTLRQKVEDAVREHPDYRVVFTGHSLGGALATVAGADLRGNGYDIDVFSYGAPRVGNRAFAEFLTTQDGGTLYRITHTNDIVPRLPPREFGYSHSSPEYWIKSGTLVPVTRNDIVKIEGIDATGGNNQPNIPDIPAHLWYFGLIGTCL

SEQ ID NO: 7979 - protein, 269 aa, Thermomyces lanuginosus
EVSQDLFNQFNLFAQYSAAAYCGKNNRAPAGTNITCTANACPEVEKADATFLYSFEDSGVGDVTGFLALDNTNKLIVLSFRGSRSIENWIGNLNFELKEINDICSGCRGHAGFTSSWRSVADTLRQKVEDAVREHPDYRVVFTGHSLGGALATVAGADLRGNKYDIDVFSYGAPRVGNRAFAEFLTVQTGGTLYRITHTNDIVPRLPPREFGYSHSSPEYWIKSGTLVPVRRRDIVKIEGIDATGGNNQPNIPSTTAHLWYFGLIGTCL

SEQ ID NO: 7980 - protein, 269 aa, Thermomyces lanuginosus
EVSQDLFNQFNLFAQYSAAAYCGKNNRAPAGTPITCTANACPEVEKADATFLYSFEDSGVGDVTGFLALDNTNKLIVLSFRGSRSIENWIGNLNFELKEINDICSGCRGHAGFTSSWRSVADTLRQKVEDAVREHPDYRVVFTGHSLGGALATVAGADLRGNKYDIDVFSYGAPRVGNRAFAEFLTVQTGGTLYRITHTNDIVPRLPPREFGYSHSSPEYWIKSGTLVPVRRRDIVKIEGIDATGGNNQPNIPSITAHLWYFGLIGTCL

SEQ ID NO: 7981 - protein, 269 aa, Thermomyces lanuginosus
EVSQDLKNQFNLFAQYSAAAYCGKNNRAPAGTNITCTANACPEVEKADATFLYSFEDSGVGDVTGFLALDNTNKLIVLSFRGSRSIENWIGNLNFELKEINDICSGCRGHAGFTSSWRSVADTLRQKVEDAVREHPDYRVVFTGHSLGGALATVAGADLRGNKYDIDVFSYGAPRVGNRAFAEFLTVQTGGTLYRITHTNDIVPRLPPREFGYSHSSPEYWIKSGTLVPVRRRDIVKIEGIDATGGNNQPNIPSITAHLWYFGLIGTCL

SEQ ID NO: 7982 - protein, 269 aa, Thermomyces lanuginosus
EVSQDLFNQFNLFAQYSAAAYCGKNNRAPAGTNITCTANACPEVEKADATFLYSFEDSGVGDVTGFLALDNTNKLIVLSFRGSRTIENWIGNLNFELKEINDICSGCRGHAGFTSSWRSVADTLRQKVEDAVREHPDYRVVFTGHSLGGALATVAGADLRGNKYDIDVFSYGAPRVGNRAFAEFLTVQTGGTLYRITHTNDIVPRLPPREFGYSHSSPEYWIKSGTLVPVRRRDIVKIEGIDATGGNNQPNIPSITAHLWYFGLIGTCL

SEQ ID NO: 7983 - protein, 269 aa, Thermomyces lanuginosus
EVSQDLFNQFNLFAQYSAAAYCGKNNRAPAGTNITCTANACPEVEKADATFLYSFEDSGVGDVTGFLALDNTNKLIVLSFRGSRSIENWIGNLNFELKEINDICSGCRGHAGFTSSWRSVADTLRQKVEDAVREHPDYRVVFTGHSLGGVLATVAGADLRGNKYDIDVFSYGAPRVGNRAFAEFLTVQTGGTLYRITHTNDIVPRLPPREFGYSHSSPEYWIKSGTLVPVRRRDIVKIEGIDATGGNNQPNIPSITAHLWYFGLIGTCL

SEQ ID NO: 7984 - protein, 269 aa, Thermomyces lanuginosus
EVSQDLFNQFNLFAQYSAAAYCGKNNRAPAGTNITCTANACPEVEKADATFLYSFEDSGVGDVTGFLALDNTNKLIVLSFRGSRSIENWIGNLNFELKEINDICSGCRGHAGFTSSWRSVADTLRQKVEDAVREHPDYRVVFTGHSLGGALATVAGADLRGNKYDIDVFSYGAPRVGNRAFAEFLTVQTGGTLYRITHTNDIVPRLPPREFGYSHSSPEYWIKYGTLVPVRRRDIVKIEGIDATGGNNQPNIPSITAHLWYFGLIGTCL

SEQ ID NO: 7985 - protein, 269 aa, Thermomyces lanuginosus
EVSQDLFNQFNLFAQYSAAAYCGKNNRAPAGTNITCTANACPEVEKADATFLYSFEDSGVGDVTGFLALDNTNKLIVLSFRGSRSIENWIGNLNFELKEINDICSGCRGHAGFTSSWRSVADTLRQKVEDAVREHPDYRVVFTGHSLGGALATVAGADLRGNKYDIDVFSYGAPRVGNRAFAEFLTVQTGGTLYRITHTNDIVPRLPPREFGYSHSSPEYWIKSGTLVPLRRRDIVKIEGIDATGGNNQPNIPSITAHLWYFGLIGTCL

SEQ ID NO: 7986 - protein, 269 aa, Thermomyces lanuginosus
EYSQDLFNQFNLFAQYSAAAYCGKNNDAPAGTKITCTGNACPEVEKADATVLYSFEDSGVGDVTGFLARDNTNKLIVLSFRGSRSIENWIGNLNFDLEEINDICSGCRGHDGFTSSWRSVADTLRQKVEDAVREHPDYRVVFTGHSLGGALATVAGADLRGNGYDIDVFSYGAPRLGNRAFAEFLTVQTGGTLYRITHTNDIVPRLPPRKFGYSHSSPEYWIKSGTDVPVRRRDIVKIEGIDATGGNNQPNIPDIPAHLWYFGLIGTCL

SEQ ID NO: 7987 - protein, 269 aa, Thermomyces lanuginosus
EVSQDLFNQFNLFAQYSAAAYCGKNNDAPAGTQITCTGNACPEVEKADATFLYSFEDSGVGDVTGFLALDNTNKLIVLSFRGSRSIENWIANLKFDLKEINDICSGCRGHAGFTSSWRSVADTLRQKVEDAVREHPDYRVVFTGHSLGGALATVAGADLRGNKYDIDVFSYGAPRVGNRAFAEFLTVQTGGTLYRITHTNDIVPRLPPREFGYSHSSPEYWIKSGTFVPVRRRDIVKIEGIDATGGNNRPNIPSIPAHLWYFGLIGTCL

SEQ ID NO: 7988 - protein, 269 aa, Thermomyces lanuginosus
EVSQDLFNQFNLFAQYSAAAYCGKNNRAPAGTNITCTANACPEVEKADATFLYSFEDSGVGDVTGFLALDNTNKLIVLSFRGSRSPENWIGNLNFELKEINDICSGCRGHAGFTSSWRSVADTLRQKVEDAVREHPDYRVVFTGHSLGGALATVAGADLRGNKYDIDVFSYGAPRVGNRAFAEFLTVQTGGTLYRITHTNDIVPRLPPREFGYSHSSPEYWIKSGTLVPVRRRDIVKIEGIDATGGNNQPNIPSITAHLWYFGLIGTCL

SEQ ID NO: 7989 - protein, 269 aa, Thermomyces lanuginosus
EVSQDLFNQFNLFAQYSAAAYCGKNNRAPAGTNITCTANACPEVEKADATFLYSFEDSGVGDVTGFLALDNTNKLIVLSFRGSRSIENWIGDLNFTLKEINDICSGCRGHAGFTSSWRSVADTLRQKVEDAVREHPDYRVVFTGHSLGGALATVAGADLRGNKYDIDVFSYGAPRVGNRAFAEFLTVQTGGTLYRITHTNDIVPRLPPREFGYSHSSPEYWIKSGTLVPVRRRDIVKIEGIDATGGNNQPNIPSITAHLWYFGLIGTCL

SEQ ID NO: 7990 - protein, 269 aa, Thermomyces lanuginosus
EVSQDLFNQFNLFAQYSAAAYCGKNNRAPAGTNITCTANACPEVEKADATFLYSFEDSGVGDVTGFLALDNTNKLIVLSFRGSRSIENWIGNLNFELKEINDICSGCRGHAGFTSSWRSVADTLRQKVEDAVREHPDYRVVFTGHSLGGALATVAGADLRGNKYDIDVFSYGAPRVGNRAFAEFLTVQTGGTLYRITHTNDIVPRLPPREFGYSHSSPEYWIKSGTLVPVRRRDIVKIEGIDATGGNNQPNIPSITAHLQYFGLIGTCL

SEQ ID NO: 7991 - protein, 269 aa, Thermomyces lanuginosus
EVSQDLFNQFNLFAQYSAAAYCGKNNRAPAGTNITCTANACPEVEKADATFLYSFEDSGVGDVTGFLALDNTNKLIVLSFRGSRSIENWIGNLNFELKEINDICSGCRGHAGFTSSWRSVADTLRQKVEDAVREHPDYRVVFTGHSLGGALATVAGADLRGNKYDIDVFSYGAPRVGNRAFAEFLTVQTGGTLYRITHTNDIVPRLPPREFGYSHSSPEYWIKSGTLVPVRRRDIVKIEGIDATGGNNQPNIPSITAHLFYFGLIGTCL

SEQ ID NO: 7992 - protein, 269 aa, Thermomyces lanuginosus
EVSRDLFNQFNLFAQYSAAAYCGKNNDAPAGTNITCTGNACPEVEKADATILYSFEDSGVGDVTGFLALDNTNKLIVLSFRGSRSIENWIGNLNFDLKEINDICSGCRGHDGFTSSWRSVADTLRQKVEDAVREHPDYRVVFTGHSLGGALATVAGADLRGNGYDIDVFSYGAPRVGNRAFAEFLTVQTGGTLYRITNTNDCVPRLPPRQFGYSHSSPEYWIKSGTLPPVRRRDIVKIEGIDATGGNNQPNICDISAHLWYFGLIGTCL

SEQ ID NO: 7993 - protein, 269 aa, Thermomyces lanuginosus
EVSQDLFNQFNLFAQYSAAAYCGKNNRAPAGTNITCTANACPEVEKADATFLYSFEDSGVGDVTGFLALDNTNKLIVLSFRGSRSIANWIGNLNFELKEINDICSGCRGHAGFTSSWRSVADTLRQKVEDAVREHPDYRVVFTGHSLGGALATVAGADLRGNKYDIDVFSYGAPRVGNRAFAEFLTVQTGGTLYRITHTNDIVPRLPPREFGYSHSSPEYWIKSGTLVPVRRRDIVKIEGIDATGGNNQPNIPSITAHLWYFGLIGTCL

SEQ ID NO: 7994 - protein, 269 aa, Thermomyces lanuginosus
EVSQDLFNQFNLFAQYSAAAYCGKNNDAPAGTKITCTGNACPEVEKADATILYSFEDSGVGDVTGFLALDNTNKLIVLSFRGSRSIENWIGNLNFDLEEIDDICSGCRGHDGFTSSWRSVADTLRQKVEDAVREHPDYRVVFTGHSLGGALATVAGADLRGNGYDIDVFSYGAPRVGNRAFAEFLTVQTGGTLYRITSTNDIVPRLPPRKFGYSHSSPEFWIKSGTLVPVRRRDIVKIEGIDATGGNNQPNIPDIPFHLWYFGLIGTCL

SEQ ID NO: 7995 - protein, 269 aa, Thermomyces lanuginosus
EVSQDLFNQFNLFAQYSAAAYCGKNNRAPAGTNITCTANACPEVEKADATFLYSFEDSGVGDVTGFLALDNTNKLIVLSFRGSRSIENWIGNLNFELKEINDICSGCRGHAGFTSSWRSVADTLRQKVEDAVREHPDYRVVFTGHSLGGALATVAGADLRGNKYDIDVFSYGAPRVGNRAFAEFLTVQTGGTLYRITHTNDIVPRLPPREFGYSHSSPEYWIKSGTLVPVRRRDIVKIEGIDATGGNNQPNIPSGTAHLWYFGLIGTCL

SEQ ID NO: 7996 - protein, 269 aa, Thermomyces lanuginosus
EVSQDLFNQFNLFAQYSAAAYCGKNNVAPAGTQITCTGNACPEVEKADATFLYSFEDSGVGDVTGFLALDNTNKLIVLSFRGSRSIENWIANLRFDLKEINDICSGCRGHAGFTSSWRSVADTLRQKVEDAVREHPDYRVVFTGHSLGGALATVAGADLRGNKYDIDVFSYGAPRVGNRAFAEFLTVQTGGTLYRITHTNDIVPRLPPREFGYSHSSPEYWIKSGTFVPVRRRDIVKIEGIDATGGNNRPNIPDIPAHLWYFGLIGTCL

SEQ ID NO: 7997 - protein, 269 aa, Thermomyces lanuginosus
DVSQDLFNQFNLFAQYSAAAYCGKNNDAPAGTQITCTANACPEVEKADATFLYSFEDSGVGDVTGFLALDNTNKLIVLSFRGSRSIENWITNLRFDLKEINDICSGCRGHAGFTSSLRSVADTLRQKVEDAVREHPDYRVVFTGHSLGGALATVAGADLRGNGYDIDVFSYGAPRWGNRAFAEFLTVQTGGTLYRITHTNDIVPRLPPREFGYSHSSPEYWIKSGTLVPVRRRDIVKIEGIDATGGNNQPNIPDIPAHLWYFGLIGTCL

SEQ ID NO: 7998 - protein, 269 aa, Thermomyces lanuginosus
EVSQDLFNQFNLFAQYSAAAYCGKNNRAPAGTNITCTANACPEVEKADATFLYSFEDSGVGDVTGFLALDNTNKLIVLSFRGSRSIENWIGKLNFILKEINDICSGCRGHAGFTSSWRSVADTLRQKVEDAVREHPDYRVVFTGHSLGGALATVAGADLRGNKYDIDVFSYGAPRVGNRAFAEFLTVQTGGTLYRITHTNDIVPRLPPREFGYSHSSPEYWIKSGTLVPVRRRDIVKIEGIDATGGNNQPNIPSITAHLWYFGLIGTCL

SEQ ID NO: 7999 - protein, 269 aa, Thermomyces lanuginosus
EVSQDLFNQFNLFAQYSAAAYCSKNNNAPAGTNITCTGNICPEVEKADATILYSFRDSGEGDVTGFLALDNTNKLIVLSFRGSRSIENWIGNLNFDLKEINDICSGCRGHDGFTSSWFSVADTLRQKVEDAVREHPDYRVVFTGHSLGGALATVAGADLRGNGYDIDVFSYGAPRVGNRAFAEFLTVQTGGTLYRITHTNDIVPRLPPREFGYSHSSPEYWIKSGTLVPVRRRDIVKIEGIDATGGNNQPNIPDITAHLWYFGLIGTCL

SEQ ID NO: 8000 - protein, 269 aa, Thermomyces lanuginosus
EVSQDLFNQFNLFAQYSAAAYCQKNNSAPAGTNITCTGNACPEVEKADATTLYSFKDMGVGDVTGFLALDNTNKRIVLSFRGSRSIENWIQNLNFDLKEINDICSGCRGHDGFTSSWRSVADTLRQKVEAAVREHPDYRVVFTGHSLGGALATVAGADLRGNGYDIDVFSYGAPRVGNRAFAEFLTHQTGGTLYRITHTNDIVPRLPPREFGYSHSSPEYWIKSGTLVPVTRNDIVKIEGIDATGGNNQPNQPDIPAHLWYFGLIGTCL

SEQ ID NO: 8001 - protein, 269 aa, Thermomyces lanuginosus
EVSQDLFNQFRLFAQYSAAAYCGKNNDAPAGTQITCTANACPEVEKADATFLYSFEDSGVGDVTGFLALDNTNKLIVLSFRGSRSIENWITNLRFDLKEINDICSGCRGHDGFTSSWRSVADTLRQKVEDAVREHPDYRVVFTGHSLGGALATVAGADLRGNPYDIDGFSYGAPRVGNRAFAEFLTVQTGGTLYRITHTNDIVPRLPPREFGYSHSSPEYWIKSGTLVPVRRRDIVKIEGIDATGGNNQPNIPSIPAHLWYFGLIGTCL

SEQ ID NO: 8002 - protein, 269 aa, Thermomyces lanuginosus
EVSQDLFNQFNLFAQYSAAAYCGKNNRAPAGTNITCTANACPEVEKADATFLYSFEDSGVGDVTGFLALDNTNKLIVLSFRGSRSIENWIGNLNFELKEINDICSGCRGHAGFTSSWRSVADTLRQKVEDAVREHPDYRVVFTGHSLGGALATVAGADLRGNKYDIDVFSYGAPRVGNRAFAEFLTVQTGGTLYRITHTNDIVPRLPPREFGYSHSSPEYWIKSGTLVPVRRRDIVKIEGIDSTGGNNQPNIPSITAHLWYFGLIGTCL

SEQ ID NO: 8003 - protein, 269 aa, Thermomyces lanuginosus
EVSQDLFNQFNLFAQYSAAAYCGKNNRAPAGTNITCTANACPEVEKADATFLYSFEDSGVGDVTGFLALDNTNKLIVLSFRGSRSITNWIGNLNFELKEINDICSGCRGHAGFTSSWRSVADTLRQKVEDAVREHPDYRVVFTGHSLGGALATVAGADLRGNKYDIDVFSYGAPRVGNRAFAEFLTVQTGGTLYRITHTNDIVPRLPPREFGYSHSSPEYWIKSGTLVPVRRRDIVKIEGIDATGGNNQPNIPSITAHLWYFGLIGTCL

SEQ ID NO: 8004 - protein, 269 aa, Thermomyces lanuginosus
EVSQDLFNQFNLFAQYSAAAYCGKNNRAPAGTQITCTGNACPEVEKADATFLYSFEDSGVGDVTGFLALDNTNKLIVLSFRGSRSIENWITNLSFDLKEINDICSGCRGHAGFTSSWRSVADTLRQKVEDAVREHPDYRVVFTGHSLGGALATVAGADLRGNGYDIDVFSYGAPRVGNRAFAEFLTVQTGGTLYRITHTNDIVPRLPPREFGYSHPSPEYWIKSGTGVPVRRRDIVKIEGIDATGGNNQPNIPDITAHLWYFGLIGTCL

SEQ ID NO: 8005 - protein, 269 aa, Synthetic construct
EVSQDLFNQFNLFAQYSAAAYCGKNNDAPAGTNITCTGNACPEVEKADATFLYSFEDSGVGDVTGFLALDNTNKLIVLSFRGSRSIENWIGNLKLHLKEISDICSGCRGHDGFTSSWRSVADTLRQKVEDAVREHPDYRVVFTGHSLGGALATVAGADLRGNGYDIDVFSYGAPRVGNRALAEFLTVQTGGTLYRITHTNDIVPRLPPREFGYSHSSPEYWIKSGTLVPVTRNYIVKIEGIDATGGNNQPNLPDITAHLWYFAQIGTCL

SEQ ID NO: 8006 - protein, 269 aa, Thermomyces lanuginosus
EVSQDLFNQFNLFAQYSAAAYCGKNNRAPAGTNITCTANACPEVEKADATFLYSFEDSGVGDVTGFLALDNTNKLIVLSFRGSRSIENWIGNLNFELKEINDICSGCRGHAGFTSSWRSVADTLRQKVEDAVREHPDYRVVFTGHSLGGALATVAGADLRGNKYDIDVFSYGAPRVGNRAFAEFLTVQTGGTLYRITHTNDIVPRLPPRELGYSHSSPEYWIKSGTLVPVRRRDIVKIEGIDATGGNNQPNIPSITAHLWYFGLIGTCL

SEQ ID NO: 8007 - protein, 269 aa, Thermomyces lanuginosus
EVSQDLFNQFNLFAQYSAAAYCGKNNRAPAGTNITCTANACPEVEKADATFLYSFEDSGVGDVTGFLALDNTNKLIVLSFRGSRSIENWIGNLNFELKEINDICSGCRGHAGFTSSWRSVADTLRQKVEDAVREHPDYRVVFTGHSLGGALATVAGADLRGNKYDIDVFSYGAPRVGNRAFAEFLTVQTGGTLYRITHTHDIVPRLPPREFGYSHSSPEYWIKSGTLVPVRRRDIVKIEGIDATGGNNQPNIPSITAHLWYFGLIGTCL

SEQ ID NO: 8008 - protein, 269 aa, Thermomyces lanuginosus
EVSQDLFNQFNLFAQYSAAAYCGKNNRAPAGTNITCTANACPEVEKADATFLYSFEDSGVGDVTGFLALDNTNKLIVLSFRGSRSIENWIGNLNFELKEINDICSGCRGHAGFTSSWRSVADTLRQKVEDAVREHPDYRVVFTGHSLGGALATVAGADLRGNKYDIDVFSYGAPRVGNRAFAEFLTVQTGGTLYRITSTNDIVPRLPPREFGYSHSSPEYWIKSGTLVPVRRRDIVKIEGIDATGGNNQPNIPSITAHLWYFGLIGTCL

SEQ ID NO: 8009 - protein, 269 aa, Thermomyces lanuginosus
EVSQDLFNQFNLFAQYSAAAYCGKNNRAPAGTNITCTANACPEVEKADATFLYSFEDSGVGDVTGFLALDNTNKLIVLSFRGSRSIENWIGNLNFELKEINDICSGCRGHAGFTSSWRSVADTLRQKVEDAVREHPDYRVVFTGHSLGGALATVAGADLRGNKYDIDVFSYGAPRVGNRAFAEFLTVQTGGTLYRITNTNDIVPRLPPREFGYSHSSPEYWIKSGTLVPVRRRDIVKIEGIDATGGNNQPNIPSITAHLWYFGLIGTCL

SEQ ID NO: 8010 - protein, 269 aa, Thermomyces lanuginosus
EVSQDLFNQFKLFAQYSAAAYCQKNNDAPAGTNITCTGNACPEVEKADATFLYSFKDSGVGDVTGFLALDNTNKRIVLSFRGSRSIENWIGNLNFDLKEINDICSGCRGHAGFTSSWRSVADTLRQKVEAAVREHPDYRVVFTGHSLGGALATIAWADLRGNGYDIDVFSYGAPRVGNRAFAEFLTNQTGGTLYRITHTNDIVPRLPPREFGYSHSSPEYWIKSGTLVPVTRNDIVKIEGIDATGGNNQPNIPDIPAHLWYFGRIGTCL

SEQ ID NO: 8011 - protein, 269 aa, Thermomyces lanuginosus
EVSQDLFNQFNLFAQYSAAAYCGKNNRAPAGTNITCTANACPEVEKADATFLYSFEDSGVGDVTGFLALDNTNKLIVLSFRGTRSIENWIGNLNFELKEINDICSGCRGHAGFTSSWRSVADTLRQKVEDAVREHPDYRVVFTGHSLGGALATVAGADLRGNKYDIDVFSYGAPRVGNRAFAEFLTVQTGGTLYRITHTNDIVPRLPPREFGYSHSSPEYWIKSGTLVPVRRRDIVKIEGIDATGGNNQPNIPSITAHLWYFGLIGTCL

SEQ ID NO: 8012 - protein, 269 aa, Thermomyces lanuginosus
EVSQDLFNQFNLFAQYSAAAYCGKNNDAPAGTKITCTGNACPEVEKADATILYSFEDSGVGDVTGFLALDNTNKLIVLSFRGSRSIENWIGNLNFDLEEIDDICSGCRGHDGFTSSWRSVADTLRQKVEDAVREHPDYRVVFTGHSLGGALATVAGADLRGNGYDIDVFSYGAPRVGNRAFAEFLTVQTGGTLYRITSTNDIVPRLPPRKFGYSHSSPEFWIKSGTLVPVRRRDIVKIEGIDATGGNNQPNIPDIPHHLWYFGLIGTCL

SEQ ID NO: 8013 - protein, 269 aa, Thermomyces lanuginosus
EVSQDLFNQFNLFAQYSAAAYCGKNNRAPAGTNITCTANACPEVEKADATFLYSFEDSGVGDVTGFLALDNTNKLIVLSFRGSRSIENWIGNLNFELKEINDICSGCRGHAGFTSSWRSVADTLRQKVEDAVREHPDYRVVFAGHSLGGALATVAGADLRGNKYDIDVFSYGAPRVGNRAFAEFLTVQTGGTLYRITHTNDIVPRLPPREFGYSHSSPEYWIKSGTLVPVRRRDIVKIEGIDATGGNNQPNIPSITAHLWYFGLIGTCL

SEQ ID NO: 8014 - protein, 269 aa, Thermomyces lanuginosus
EVSQDLFNQFNLFAQYSAAAYCGKNNRAPAGTKITCTANACPEVEKADATFLYSFEDSGVGDVTGFLALDNTNKLIVLSFRGSRSIENWIGNLNFELKEINDICSGCRGHAGFTSSWRSVADTLRQKVEDAVREHPDYRVVFTGHSLGGALATVAGADLRGNKYDIDVFSYGAPRVGNRAFAEFLTVQTGGTLYRITHTNDIVPRLPPREFGYSHSSPEYWIKSGTLVPVRRRDIVKIEGIDATGGNNQPNIPSITAHLWYFGLIGTCL

SEQ ID NO: 8015 - protein, 269 aa, Thermomyces lanuginosus
EVSQDLFNQFNLFAQYSAAAYCGKNNRAPAGTNITCTANACPEVEKADATYLYSFEDSGVGDVTGFLALDNTNKLIVLSFRGSRSIENWIGNLNFELKEINDICSGCRGHAGFTSSWRSVADTLRQKVEDAVREHPDYRVVFTGHSLGGALATVAGADLRGNKYDIDVFSYGAPRVGNRAFAEFLTVQTGGTLYRITHTNDIVPRLPPREFGYSHSSPEYWIKSGTLVPVRRRDIVKIEGIDATGGNNQPNIPSITAHLWYFGLIGTCL

SEQ ID NO: 8016 - protein, 269 aa, Thermomyces lanuginosus
EYSQDLFNQFNLFAQYSAAAYCGKNNDAPAGTKITCTGNACPEVEKADATLLYSFEDSGVGDVTGFLARDNTNKLIVLSFRGSRSIENWIGNLNFDLEEINDICSGCRGHDGFTSSWRSVADTLRQKVEDAVREHPDYRVVFTGHSLGGALATVAGADLRGNGYDIDVFSYGAPRLGNRAFAEFLTVQTGGTLYRITHTNDIVPRLPPRKFGYSHSSPEYWIKSGTDVPVRRRDIVKIEGIDATGGNNQPNIPDIPAHLWYFGLIGTCL

SEQ ID NO: 8017 - protein, 269 aa, Thermomyces lanuginosus
EVSQDLFNQFNLFAQYSAAAYCGKNNNAPAGTNITCTGNICPEVEKADATILYSFRDSGKGDVTGFLALDNTNKLIVLSFRGSRSIENWIGNLNFDLKEINDICSGCRGHDGFTSSWFSVADTLRQKVEDAVREHPDYRVVFTGHSLGGALATVAGADLRGNGYDIDVFSYGAPRVGNRAFAEFLTVQTGGTLYRITHTNDIVPRLPPREFGYSHSSPEYWIKSGTLVPVRRRDIVKIEGIDAEGGNNQPNIPDITAHLWYFGLIGTCL

SEQ ID NO: 8018 - protein, 269 aa, Thermomyces lanuginosus
EVSQDLFNQFNLFAQYSAAAYCGKNNRAPAGTNITCTANACPEVEKADATFLYSFEDSGVGDVTGFLALDNTNKLIVLSFRGSRSIENWIGDLNFELKEINDICSGCRGHAGFTSSWRSVADTLRQKVEDAVREHPDYRVVFTGHSLGGALATVAGADLRGNKYDIDVFSYGAPRVGNRAFAEFLTVQTGGTLYRITHTNDIVPRLPPREFGYSHSSPEYWIKSGTLVPVRRRDIVKIEGIDATGGNNQPNIPSITAHLWYFGLIGTCL

SEQ ID NO: 8019 - protein, 269 aa, Thermomyces lanuginosus
EVSQDLHNQFNLFAQYSAAAYCGKNNRAPAGTNITCTANACPEVEKADATFLYSFEDSGVGDVTGFLALDNTNKLIVLSFRGSRSIENWIGNLNFELKEINDICSGCRGHAGFTSSWRSVADTLRQKVEDAVREHPDYRVVFTGHSLGGALATVAGADLRGNKYDIDVFSYGAPRVGNRAFAEFLTVQTGGTLYRITHTNDIVPRLPPREFGYSHSSPEYWIKSGTLVPVRRRDIVKIEGIDATGGNNQPNIPSITAHLWYFGLIGTCL

SEQ ID NO: 8020 - protein, 269 aa, Thermomyces lanuginosus
EVSQDLFNQFNLFAQYSAAAYCGKNNRAPAGTNITCTANACPEVEKADATFLYSFEDSGVGDVTGFLALDNTNKLIVLSFRGSRSIENWIGNLNFELKEINDICSGCRGHAGFTSSWRSVADTLRQKVEDAVREHPDYRVVFTGHSLGGALATVAGADLRGNKYDIDVFSYGAPRVGNRAFAEFLTVQTGGTLYRITHTNDIVPRLPPREFGYSHSSPEYWIKSGTLVPVRRRDIVKIEGIDATGGNNQPNIPSNTAHLWYFGLIGTCL

SEQ ID NO: 8021 - protein, 269 aa, Thermomyces lanuginosus
EVSQDLFNQFKLFAQYSAAAYCQKNNSAPAGTNITCTGNACPEVEKADATFLYSFKDSGVGDVTGFLALDNTNKRIVLSFRGSRSIENWIGNLNFDLKEINDICSGCRGHDGFTSSWRSVADTLRQKVEAAVREHPDYRVVFTGHSLGGALATIAWADLRGNGYDIDVFSYGAPRVGNRAFAEFLTVQQGGTLYRITHTNDIVPRLPPREFGYSHSSPEYWIKSGTLVPVTRNDIVKIEGIDATGGNNQPNIPDIPAHLWYFGRIGTCL

SEQ ID NO: 8022 - protein, 269 aa, Thermomyces lanuginosus
EVSQDLFNQFNLFAQYSAAAYCGKNNRAPAGTNITCTANACPEVEKADATFLYSFEDSGVGDVTGFLALDNTNKLIVLSFRGSRSIENWIGNLNFELKEINDICSGCRGHAGFTSSWRSVADTLRQKVEDAVREHPDYRVVFTGHSLGGALATVAGADLRGNKYDIDVFSYGAPRVGNRAFAEFLTVQTGGTLYRITHTNDIVPRLPPREFGYSHSSPEYWIKHGTLVPVRRRDIVKIEGIDATGGNNQPNIPSITAHLWYFGLIGTCL

SEQ ID NO: 8023 - protein, 269 aa, Thermomyces lanuginosus
EVSQDLFNQFNLFAQYSAAAYCGKNNRAPAGTNITCTANACPEVEKADATFLYSFEDSGVGDVTGFLALDNTNKLIVLSFRGSRSIENWIGNLNFELKEINDICSGCRGHAGFTSSWRSVADTLRQKVEDAVREHPDYRVVFTGHSLGGALATVAGADLRGNKYDIDVFSYGAPRVGNRAFAEFLTVQTGGTLYRITHTNDIVPRLPPREFGYSHSSPEYWIKSGTLVPHRRRDIVKIEGIDATGGNNQPNIPSITAHLWYFGLIGTCL

SEQ ID NO: 8024 - protein, 269 aa, Thermomyces lanuginosus
EVSQDLFNQFNLFAQYSAAAYCGKNNRAPAGTNITCTANACPEVEKADATFLYSFEDSGVGDVTGFLALDNTNKLIVLSFRGSRSIENWIGDLNFILKEINDICSGCRGHAGFTSSWRSVADTLRQKVEDAVREHPDYRVVFTGHSLGGALATVAGADLRGNKYDIDVFSYGAPRVGNRAFAEFLTVQTGGTLYRITHTNDIVPRLPPREFGYSHSSPEYWIKSGTLVPVRRRDIVKIEGIDATGGNNQPNIPSITAHLWYFGLIGTCL

SEQ ID NO: 8025 - protein, 269 aa, Thermomyces lanuginosus
EVSQDLFNQFNLFAQYSAAAYCGKNNDAPAGTKITCTGNACPEVEKADATLLYSFEDSGVGDVTGFLALDNTNKLIVLSFRGSRSIENWIGNLNFDLEEIDDICSGCRGHDGFTSSWRSVADTLRQKVEDAVREHPDYRVVFTGHSLGGALATVAGADLRGNGYDIDVFSYGAPRVGNRAFAEFLTVQTGGTLYRITSTNDIVPRLPPRKFGYSHSSPEFWIKSGTLVPVRRRDIVKIEGIDATGGNNQPNIPDIPFHLWYFGLIGTCL

SEQ ID NO: 8026 - protein, 269 aa, Thermomyces lanuginosus
EVSQDLFNQFNLFAQYSAAAYCGKNNNAPAGTNITCTGNACPEVEKADATILYSFRDSGVGDVTGFLALDNTNKLIVLSFRGSRSIENWIGNLNFDLIEINDICSGCRGHDGFTSSWFSVADTLRQKVEDAVREHPDYRVVFTGHSLGGALATVAGADLRGNGYDIDVFSYGAPRVGNRAFAEFLTVQTGGTLYRITHTNDIVPRLPPREFGYSHSSPEFWIKSGTLVPVRRRDIVKIEGIDAEGGNNQPNIPDITAHLWYFGLIGTCL

SEQ ID NO: 8027 - protein, 269 aa, Thermomyces lanuginosus
EVSQDLFNQFNLFAQYSAAAYCGKNNDAPAGTKITCTGNACPEVEKADATVLYSFEDSGVGDVTGFLALDNTNKLIVLSFRGSRSIENWIGNLNFDLEEIDDICSGCRGHDGFTSSWRSVADTLRQKVEDAVREHPDYRVVFTGHSLGGALATVAGADLRGNGYDIDVFSYGAPRVGNRAFAEFLTVQTGGTLYRITSTNDIVPRLPPRKFGYSHSSPEFWIKSGTLVPVRRRDIVKIEGIDATGGNNQPNIPDIPHHLWYFGLIGTCL

SEQ ID NO: 8028 - protein, 269 aa, Thermomyces lanuginosus
EVSQDLFNQFNLFAQYSAAAYCGKNNSAPAGTQITCTGNACPEVEKADATFLYSFEDSGVGDVTGFLALDNTNKLIVLSFRGSRSIENWIANLNFEQKEINDICSGCRGHAGFTSSWRSVADTLRQKVEDAVREHPDYRVVFTGHSLGGALATVAGADLRGNGYDIDVFSYGAPRVGNRAFAEFLTVQTGGTLYRITHTNDIVPRLPPREFGYSHPSPEYWIKSGTLVPVRRRDIVKIEGIDATGGNNQPNIPDITAHLWYFGLIGTCL

SEQ ID NO: 8029 - protein, 269 aa, Thermomyces lanuginosus
EVSQDLFNQFNLFAQYSAAAYCGKNNRAPAGTNITCTANACPEVEKADATFLYSFEDSGVGDVTGFLALDNTNKLIVLSFRGSRSIENWIGNLNFELKEINDICSGCRGHAGFTSSWRSVADTLRQKVEDAVREHPDYRVVFTGHSLGGALATVAGADLRGNKYDIDVFSYGAPRVGNRAFAEFLTVQTGGTLYRITHTNDIVPRLPPREFGYSHSSPEYWIKSGTLVPVRRRDIVKIEGIDATGGNNQPNIPSPTAHLWYFGLIGTCL

SEQ ID NO: 8030 - protein, 269 aa, Thermomyces lanuginosus
EVSQDLFNQFNLFAQYSAAAYCGKNNRAPAGTNITCTANACPEVEKADATFLYSFEDSGVGDVTGFLARDNTNKLIVLSFRGSRSIENWIGNLNFELKEINDICSGCRGHAGFTSSWRSVADTLRQKVEDAVREHPDYRVVFTGHSLGGALATVAGADLRGNKYDIDVFSYGAPRVGNRAFAEFLTVQTGGTLYRITHTNDIVPRLPPREFGYSHSSPEYWIKSGTLVPVRRRDIVKIEGIDATGGNNQPNIPSITAHLWYFGLIGTCL

SEQ ID NO: 8031 - protein, 269 aa, Thermomyces lanuginosus
EVSQDLFNQFNLFAQYSAAAYCGKNNDAPAGTKITCTGNACPEVEKADATLLYSFEDSGVGDVTGFLALDNTNKLIVLSFRGSRSIENWIGNLNFDLEEIDDICSGCRGHDGFTSSWRSVADTLRQKVEDAVREHPDYRVVFTGHSLGGALATVAGADLRGNGYDIDVFSYGAPRVGNRAFAEFLTVQTGGTLYRITSTNDIVPRLPPRKFGYSHSSPEFWIKSGTLVPVRRRDIVKIEGIDATGGNNQPNIPDIPHHLWYFGLIGTCL

SEQ ID NO: 8032 - protein, 269 aa, Thermomyces lanuginosus
EVSQDLFNQFNLFAQYSAAAYCSKNNNAPAGTNITCTGNACPEVEKADATILYSFRDSGVGDVTGFLALDNTNKLIVLSFRGSRSIENWIGNLNFDLIEINDICSGCRGHDGFTSSWFSVADTLRQKVEDAVREHPDYRVVFTGHSLGGALATVAGADLRGNGYDIDVFSYGAPRVGNRAFAEFLTVQTGGTLYRITHTNDIVPRLPPREFGYSHSSPEFWIKSGTLVPVRRRDIVKIEGIDATGGNNQPNIPDITAHLWYFGLIGTCL

SEQ ID NO: 8033 - protein, 269 aa, Thermomyces lanuginosus
EVSQDLFNQFNLFAQYSAAAYCGKNNRAPAGTNITCTANACPEVEKADATFLYSFEDSGVGDVTGFLALDNTNKLIVLSFRGSRSIENWIGNLNFELQEINDICSGCRGHAGFTSSWRSVADTLRQKVEDAVREHPDYRVVFTGHSLGGALATVAGADLRGNKYDIDVFSYGAPRVGNRAFAEFLTVQTGGTLYRITHTNDIVPRLPPREFGYSHSSPEYWIKSGTLVPVRRRDIVKIEGIDATGGNNQPNIPSITAHLWYFGLIGTCL

SEQ ID NO: 8034 - protein, 269 aa, Thermomyces lanuginosus
EVSQDLFNQFNLFAQYSAAAYCGKNNRAPAGTNITCTANACPEVEKADATFLYSFEDSGVGDVTGFLALDNTNKLIVLSFRGSRSIENWMGNLNFELKEINDICSGCRGHAGFTSSWRSVADTLRQKVEDAVREHPDYRVVFTGHSLGGALATVAGADLRGNKYDIDVFSYGAPRVGNRAFAEFLTVQTGGTLYRITHTNDIVPRLPPREFGYSHSSPEYWIKSGTLVPVRRRDIVKIEGIDATGGNNQPNIPSITAHLWYFGLIGTCL

SEQ ID NO: 8035 - protein, 269 aa, Thermomyces lanuginosus
EVSQDLFNQFNLFAQYSAAAYCGKNNDAPAGTKITCTGNACPEVEKADATVLYSFEDSGVGDVTGFLALDNTNKLIVLSFRGSRSIENWIGNLNFDLEEIDDICSGCRGHDGFTSSWRSVADTLRQKVEDAVREHPDYRVVFTGHSLGGALATVAGADLRGNGYDIDVFSYGAPRVGNRAFAEFLTVQTGGTLYRITSTNDIVPRLPPRKFGYSHSSPEFWIKSGTLPPVRRRDIVKIEGIDATGGNNQPNIPDIPAHLWYFGLIGTCL

SEQ ID NO: 8036 - protein, 269 aa, Thermomyces lanuginosus
EVSQDLFNQFNLFAQYSAAAYCGKNNRAPAGTNITCTANACPEVEKADATFLYSFEDSGVGDVTGFLALDNTNKLIVLSFRGSRSIENWIGNLNFELKEINDICSGCRGHAGFTSSWRSVADTLRQKVEDAVREHPDYRVVFTGHSLGGALATVAGADLRGNKYDIDVFSYGAPRVGNRAFAEFLTVQTGGTLYRITHTNDIVPRLPPREFGYSHSSPEYWIKSGTLVKVRRRDIVKIEGIDATGGNNQPNIPSITAHLWYFGLIGTCL

SEQ ID NO: 8037 - protein, 269 aa, Thermomyces lanuginosus
EVSQDLFNQFNLFAQYSAAAYCGKNNRAPAGTNITCTANACPEVEKADATFLYSFEDSGVGDVTGFLALDNTNKLIVLSFRGSRSIENWIGKLNFTLKEINDICSGCRGHAGFTSSWRSVADTLRQKVEDAVREHPDYRVVFTGHSLGGALATVAGADLRGNKYDIDVFSYGAPRVGNRAFAEFLTVQTGGTLYRITHTNDIVPRLPPREFGYSHSSPEYWIKSGTLVPVRRRDIVKIEGIDATGGNNQPNIPSITAHLWYFGLIGTCL

SEQ ID NO: 8038 - protein, 269 aa, Thermomyces lanuginosus
EVSQDLFNQFNLFAQYSAAAYCGKNNRAPAGTNITCTANACPEVEKADATFLYSFEDSGVGDVTGFLALDNTNKLIVLSFRGSRSIENWIGNLNFELKEINDICSGCRGHAGFTSSWRSVADTLRQKVEDAVREHPDYRVVFTGHSLGGALATVAGADLRGNKYDIDVFSYGAPRVGNRAFAEFLTVQTGGTLYRITHTRDIVPRLPPREFGYSHSSPEYWIKSGTLVPVRRRDIVKIEGIDATGGNNQPNIPSITAHLWYFGLIGTCL

SEQ ID NO: 8039 - protein, 269 aa, Thermomyces lanuginosus
EVSQDLFNQFNLFAQYSAAAYCGKNNDAPAGTKITCTGNACPEVEKADATILYSFEDSGVGDVTGFLALDNTNKLIVLSFRGSRSIENWIGNLNFDLEEIDDICSGCRGHDGFTSSWRSVADTLRQKVEDAVREHPDYRVVFTGHSLGGALATVAGADLRGNGYDIDVFSYGAPRVGNRAFAEFLTVQTGGTLYRITSTNDIVPRLPPRKFGYSHSSPEFWIKSGTLVPVRRRDIVKIEGIDATGGNNQPNIPDIPVHLWYFGLIGTCL

SEQ ID NO: 8040 - protein, 269 aa, Thermomyces lanuginosus
EVSQDLFNQFNLFAQYSAAAYCGKNNRAPAGTNITCTANACPEVEKADATFLYSFEDSGVGDVTGFLALDNTNKLIVLSFRGSRSIENWIGNLNLELKEINDICSGCRGHAGFTSSWRSVADTLRQKVEDAVREHPDYRVVFTGHSLGGALATVAGADLRGNKYDIDVFSYGAPRVGNRAFAEFLTVQTGGTLYRITHTNDIVPRLPPREFGYSHSSPEYWIKSGTLVPVRRRDIVKIEGIDATGGNNQPNIPSITAHLWYFGLIGTCL

SEQ ID NO: 8041 - protein, 269 aa, Thermomyces lanuginosus
EYSQDLFNQFNLFAQYSAAAYCGKNNDAPAGTKITCTGNACPEVEKADATILYSFEDSGVGDVTGFLARDNTNKLIVLSFRGSRSIENWIGNLNFDLEEINDICSGCRGHDGFTSSWRSVADTLRQKVEDAVREHPDYRVVFTGHSLGGALATVAGADLRGNGYDIDVFSYGAPRLGNRAFAEFLTVQTGGTLYRITHTNDIVPRLPPRKFGYSHSSPEYWIKSGTDVPVRRRDIVKIEGIDATGGNNQPNIPDIPAHLWYFGLIGTCL

SEQ ID NO: 8042 - protein, 269 aa, Thermomyces lanuginosus
EVSQDLFNQFNLFAQYSAAAYCGKNNRAPAGTNITCTANACPEVEKADATFLYTFEDSGVGDVTGFLALDNTNKLIVLSFRGSRSIENWIGNLNFELKEINDICSGCRGHAGFTSSWRSVADTLRQKVEDAVREHPDYRVVFTGHSLGGALATVAGADLRGNKYDIDVFSYGAPRVGNRAFAEFLTVQTGGTLYRITHTNDIVPRLPPREFGYSHSSPEYWIKSGTLVPVRRRDIVKIEGIDATGGNNQPNIPSITAHLWYFGLIGTCL

SEQ ID NO: 8043 - protein, 269 aa, Thermomyces lanuginosus
EVSQDLFNQFNLFAQYSAAAYCGKNNRAPAGTNITCTANACPEVEKADATFLYSFEDSGVGDVTGFLALDNTNKLIVLSFRGSRSIENWIGNLNFELKEINDICSGCRGHAGFTSSWRSVADTLRQKVEDAVREHPDYRVVFTGHSLGGALATVAGADLRGNKYDIDVFSYGAPRVGNRAFAEFLTVQTGGTLYRITHTNDIVPRLPPREFGYSHSSPEYWIKSGTLVPRRRRDIVKIEGIDATGGNNQPNIPSITAHLWYFGLIGTCL

SEQ ID NO: 8044 - protein, 269 aa, Thermomyces lanuginosus
EVSQDLFNQFNLFAQYSAAAYCGKNNDAPAGTKITCTGNACPEVEKADATILYSFEDSGVGDVTGFLALDNTNKLIVLSFRGSRSIENWIGNLNFDLEEIDDICSGCRGHDGFTSSWRSVADTLRQKVEDAVREHPDYRVVFTGHSLGGALATVAGADLRGNGYDIDVFSYGAPRVGNRAFAEFLTVQTGGTLYRITSTNDIVPRLPPRKFGYSHSSPEFWIKSGTLPPVRRRDIVKIEGIDATGGNNQPNIPDIPAHLWYFGLIGTCL

SEQ ID NO: 8045 - protein, 269 aa, Thermomyces lanuginosus
EVSQDLFNQFRLFAQYSAAAYCGKNNDAPAGTQITCTANACPEVEKADATFLYSFEDSGVGDVTGFLALDNTNKLIVLSFRGSRSIENWITNLNFDLKEINDICSGCRGHDGFTSSWRSVADTLRQKVEDAVREHPDYRVVFTGHSLGGALATVARADLRGNKYDIDVFSYGAPRTGNRAFAEFLTVQTGGTLYRITHTNDIVPRLPPREFGYSHSSPEYWIKSGTLVPVRRRDIVKIEGIDATGGNNQPNIPSIPAHLWYFGLIGTCL

SEQ ID NO: 8046 - protein, 269 aa, Thermomyces lanuginosus
EVSQDLFNQFNLFAQYSKAAYCQKNNSAPAGTNITCTGNACPEVFKADVTFLYSFEDMGVGDVTGFLALDNTNKQIVLSFRGSRSIENWIGNLNFDLKEINDICSGCKGHDGFTSSWRSVADTLRQKVEDAVREHPDYRVVFTGHSLGGALATVAGADLRGNGYDIDVFSYGAPRVGNRAFAEFLTTQDGGTLYRITHTNDIVPRLPPREFGYSHSSPEYWIKSGTLVPVTRNDIVKIEGIDATGGNNQPNIPDIPAHLWYFGLIGTCL

SEQ ID NO: 8047 - protein, 269 aa, Thermomyces lanuginosus
EVSQDLFNQFNLFAQYSAAAYCGKNNRAPAGTNITCTANACPEVEKADATFLYSFEDSGVGDVTGFLALDNTNKLIVLSFRGSRSIENWIGNLNFELKEINDICSGCRGHAGFTSSWRSVADTLRQKVEDAVREHPDYRVVFTGHSLGGALATVAGADLRGNKYDIDVFSYGAPRVGNRAFAEFLTVQTGGTLYRITHTKDIVPRLPPREFGYSHSSPEYWIKSGTLVPVRRRDIVKIEGIDATGGNNQPNIPSITAHLWYFGLIGTCL

SEQ ID NO: 8048 - protein, 269 aa, Thermomyces lanuginosus
EVSQDLFNQFNLFAQYSAAAYCGKNNRAPAGTNITCTANACPEVEKADATFLYSFEDSGVGDVTGFLALDNTNKLIVLSFRGSRSIENWIGNLNFELKEINDICSGCRGHAGFTSSWRSVADTLRQKVEDAVREHPDYRVVFTGHSLGGALATVAGADLRGNKYDIDVFSYGAPRVGNRAFAEFLTVQTGGTLYRITHTNDIVPRLPPREFGYSHSSPEYWIKSGTLVPVRRRDIVKIEGIDATGGNNQPNIPSITIHLWYFGLIGTCL

SEQ ID NO: 8049 - protein, 269 aa, Thermomyces lanuginosus
EVSQDLFNQFNLFAQYSAAAYCGKNNRAPAGTQITCTGNACPEVEKADATFLYSFEDSGVGDVTGFLALDNTNKLIVLSFRGSRSIENWIANLNFEQKEINDICSGCRGHAGFTSSWRSVADTLRQKVEDAVREHPDYRVVFTGHSLGGALATVAGADLRGNGYDIDVFSYGAPRVGNRAFAEFLTVQTGGTLYRITHTNDIVPRLPPREFGYSHSSPEYWIKSGTLVPVRRRDIVKIEGIDATGGNNQPNIPGITAHLWYFGLIGTCL

SEQ ID NO: 8050 - protein, 269 aa, Thermomyces lanuginosus
EVSQDLFNQFNLFAQYSAAAYCGKNNRAPAGTNITCTANACPEVEKADATFLYSFEDSGVGDVTGFLALDNTNKLIVLSFRGSRSIENWIGKLNFLLKEINDICSGCRGHAGFTSSWRSVADTLRQKVEDAVREHPDYRVVFTGHSLGGALATVAGADLRGNKYDIDVFSYGAPRVGNRAFAEFLTVQTGGTLYRITHTNDIVPRLPPREFGYSHSSPEYWIKSGTLVPVRRRDIVKIEGIDATGGNNQPNIPSITAHLWYFGLIGTCL

SEQ ID NO: 8051 - protein, 269 aa, Thermomyces lanuginosus
EVSQDLFNQFNLFAQYSAAAYCGKNNRAPAGTNITCTANACPEVEKADATFLYSFEDSGVGDVTGFLALDNTNKLIVLSFRGSRSIENWIGNLNFELKEINDICSGCRGHAGFTSSWRSVADTLRQKVEDAVREHPDYRVVFTGHSLGGALATVAGADLRGNKYDIDVFSYGAPRVGNRAFAEFLTVQTGGTLYRITITNDIVPRLPPREFGYSHSSPEYWIKSGTLVPVRRRDIVKIEGIDATGGNNQPNIPSITAHLWYFGLIGTCL

SEQ ID NO: 8052 - protein, 269 aa, Thermomyces lanuginosus
EVSQDLFNQFNLFAQYSAAAYCGKNNRAPAGTNITCTANACPEVEKADATFLYSFEDSGVGDVTGFLALDNTNKLIVLSFRGSRSIENWIGNLNFELKEINDICSGCRGHAGFTSSWRSVADTLRQKVEDAVREHHDYRVVFTGHSLGGALATVAGADLRGNKYDIDVFSYGAPRVGNRAFAEFLTVQTGGTLYRITHTNDIVPRLPPREFGYSHSSPEYWIKSGTLVPVRRRDIVKIEGIDATGGNNQPNIPSITAHLWYFGLIGTCL

SEQ ID NO: 8053 - protein, 269 aa, Thermomyces lanuginosus
EVSQDLFNQFNLFAQYSAAAYCGKNNRAPAGTNITCTANACPEVEKADATFLYSFEDSGVGDVTGFLALDNTNKLIVLSFRGSRSIENWIGNLNFELKEINDICSGCRGHAGFTSSWRSVADTLRQKVEDAVREHPDYRVVFTGHSLGGALATVAGADLRGNKYDIDVFSYGAPRVGNRAFAEFLTVQTGGTLYRITHTNDIVPRLPPREFGYSHSSPEYWIKSGTDVPVRRRDIVKIEGIDATGGNNQPNIPSITAHLWYFGLIGTCL

SEQ ID NO: 8054 - protein, 269 aa, Thermomyces lanuginosus
EVSQDLFNQFNLFAQYSAAAYCGKNNRAPAGTNITCTANACPEVEKADATFLYSFEDSGVGDVTGFLALDNTNKLIVLSFRGSRSIENWIGNLNFELKEINDICSGCRGHAGFTSSWRSVADTLRQKVEDAVREHPDYRVVFTGHSLGGALATVAGADLRGNKYDIDVFSYGAPRVGNRAFAEFLTVQTGGTLYRITHTNDIVPRLPPREFGYSHSSPEYWIKSGTLVPVRRRDIVKIEGIDATGGNNQPNIPSVTAHLWYFGLIGTCL

SEQ ID NO: 8055 - protein, 269 aa, Thermomyces lanuginosus
EVSQDLFNQFNLFAQYSAAAYCGKNNDAPAGTNITCTGNACPEVEKADATFLYSFEDNGSGDVTGFLALDNTNKLIVLSFRGSRSVENWIGNLNFDLKEINDICSGCRGHDGFTSSWRSVADTLRQKVEDAVREHPDYRVVFTGHSLGGGLATVAGADLRGNGYDIDVFSYGAPRVGNRAFAEFLTVQTGGTLYRITHTNDIVPRLPPRKFGYSHSSPEYWIKSGTGVPVRRRDIVKIEGIDATGGNNQPNIPDAKAHLWYFGLIGTCL

SEQ ID NO: 8056 - protein, 269 aa, Thermomyces lanuginosus
EVSQDLFNQFNLFAQYSAAAYCGKNNRAPAGTNITCTANACPEVEKADATFLYSFEDSGVGDVTGFLALDNTNKLIVLSFRGSRSWENWIGNLNFELKEINDICSGCRGHAGFTSSWRSVADTLRQKVEDAVREHPDYRVVFTGHSLGGALATVAGADLRGNKYDIDVFSYGAPRVGNRAFAEFLTVQTGGTLYRITHTNDIVPRLPPREFGYSHSSPEYWIKSGTLVPVRRRDIVKIEGIDATGGNNQPNIPSITAHLWYFGLIGTCL

SEQ ID NO: 8057 - protein, 269 aa, Thermomyces lanuginosus
EVSQDLFNQFNLFAQYSAAAYCGKNNRAPAGTNITCTANACPEVEKADATFLYSFEDSGVGDVTGFLALDNTNKLIVLSFRGSRSIENWIGNFNFELKEINDICSGCRGHAGFTSSWRSVADTLRQKVEDAVREHPDYRVVFTGHSLGGALATVAGADLRGNKYDIDVFSYGAPRVGNRAFAEFLTVQTGGTLYRITHTNDIVPRLPPREFGYSHSSPEYWIKSGTLVPVRRRDIVKIEGIDATGGNNQPNIPSITAHLWYFGLIGTCL

SEQ ID NO: 8058 - protein, 269 aa, Thermomyces lanuginosus
EVSQDLFNQFNLFAQYSAAAYCGKNNRAPAGTNITCTANACPEVEKADATFLYSFEDSGVGDVTGFLALDNTNKLIVLSFRGSRSIENWIGKLNFELKEINDICSGCRGHAGFTSSWRSVADTLRQKVEDAVREHPDYRVVFTGHSLGGALATVAGADLRGNKYDIDVFSYGAPRVGNRAFAEFLTVQTGGTLYRITHTNDIVPRLPPREFGYSHSSPEYWIKSGTLVPVRRRDIVKIEGIDATGGNNQPNIPSITAHLWYFGLIGTCL

SEQ ID NO: 8059 - protein, 269 aa, Thermomyces lanuginosus
EVSQDLFNQFNLFAQYSAAAYCGKNNRAPAGTNITCTANACPEVEKADATFLYSFEDSGVGDVTGFLALDNTNKLIVLSFRGSRSIENWIGNLNFELKEINDICSGCRGHAGFTSSWRSVADTLRQKVEDAVREHPDYRVVFTGHSLGGALATVAGADLRGNKYDIDVFSYGAPRVGNRAFAEFLTVQTGGTLYRITHTNDVVPRLPPREFGYSHSSPEYWIKSGTLVPVRRRDIVKIEGIDATGGNNQPNIPSITAHLWYFGLIGTCL

SEQ ID NO: 8060 - protein, 269 aa, Thermomyces lanuginosus
EVSQDLFNQFNLFAQYSAAAYCGKNNDAPAGTQITCTGNACPEVEKADATFLYSFEDSGVGDVTGFLALDNTNKLIVLSFRGSRSIENWIGNLNFDLKEINDICSGCRGHDGFTSSWRSVADTLRQKVEDAVREHPDYRVVFTGHSLGGALATVAGADLRGNGYDIDVFSYGAPRVGNRAFAEFLTVQTGGTLYRITHTNDIVPRLPPREFGYSHSSPEYWIKSGTLVPVRRNDIVKIEGIDATGGNNQPNIPYIPAHLWYFGLIGTCL

SEQ ID NO: 8061 - protein, 269 aa, Thermomyces lanuginosus
EVSQDLFNQFNLFAQYSAAAYCGKNNDAPAGTNITCTGNACPEVEKADATFLYSFEDSGVGDVTGFLALDNTNKLIVLSFRGSRSIENWIGNLNFDLKEINDICSGCRGHDGFTSSWRSVADTLRQKVEDAVREHPDYRVVFTGHSLGGALATVAGADLRGNGYDIDVFSYGAPRVGNRAFAEFLTVQTGGTLYRITHTNDIVPRLPPREFGYSHSSPEYWIKSGTLVPVRRRDIVKIEGIDATGGNNQPNIPYIPAHLWYFGLIGTCL

SEQ ID NO: 8062 - protein, 269 aa, Thermomyces lanuginosus
EVSQDLFNQFNLFAQYSAAAYCGKNNDAPAGTNITCTGNACPEVEKADATFLYSFEDSGVGDVTGFLALDNTNKLIVLSFRGSRSIQNWIGNLNFNLKEINDICSGCRGHDGFTSSWRSVADTLRQKVEDAVREHPDYRVVFTGHSLGGALATVAGADLRGNGYDIDVFSYGAPRVGNRAFAEFLTVQTGGTLYRITHTNDIVPRLPPREFGYSHSSPEYWIKSGTLVPVTRNDIVKIEGIDATGGNNQPNIPNIPAHLWYFGLIGTCL

SEQ ID NO: 8063 - protein, 269 aa, Synthetic construct
EVSQDLFNQFNLFAQYSAAAYCGKNNDAPAGTNITCTGNACPEVEKADATFLYSFEDSGVGDVTGFLALDNTNKLIVLSFRGSRSIENWIGNLNFLLKEINDICSGCRGHDGFTSSWRSVADTLRQKVEDAVREHPDYRVVFTGHSLGGALATVAGADLRGNGYDIDVFSYGAPRVGNRAFAEFLTVQTGGTLYRITHTNDIVPRVPPREFGYSHSSPEYWIKSGTLVPVTRNDIVKIEGIDATGGNNQPNIPDIPAHIWYFGLIGTCL

SEQ ID NO: 8064 - protein, 269 aa, Thermomyces lanuginosus
EVSQDLFNQFNLFAQYSAAAYCGKNNDAPAGTQITCTGNACPEVEKADATFLYSFEDSGVGDVTGFLALDNTNKLIVLSFRGSRSIENWIGNLNFDLKEINDICSGCRGHDGFTSSWRSVADTLRQKVEDAVREHPDYRVVFTGHSLGGALATVAGADLRGNGYDIDVFSYGAPRVGNRAFAEFLTVQTGGTLYRITHTNDIVPRLPPREFGYSHSSPEYWIKSGTLVPVRRNDIVKIEGIDATGGNNQPNIPQIPAHLWYFGLIGTCL

SEQ ID NO: 8065 - protein, 269 aa, Thermomyces lanuginosus
EVSQDLFNQFNLFAQYSAAAYCGKNNDAPAGTQITCTGNACPEVEKADATFLYSFEDSGVGDVTGFLALDNTNKLIVLSFRGSRSIENWIGNLNFDLKEINDICSGCRGHDGFTSSWRSVADTLRQKVEDAVREHPDYRVVFTGHSLGGALATVAGADLRGNGYDIDVFSYGAPRVGNRAFAEFLTVQTGGTLYRITHTNDIVPRLPPREFGYSHSSPEYWIKSGTLVPVRRNDIVKIEGIDATGGNNQPNIPSIPAHLWYFGLIGTCL

SEQ ID NO: 8066 - protein, 269 aa, Thermomyces lanuginosus
EVSQDLFNQFNLFAQYSAAAYCGKNNDAPAGTQITCTGNACPEVEKADATFLYSFEDSGVGDVTGFLALDNTNKLIVLSFRGSRSIENWIGNLNFDLKEINDICSGCRGHDGFTSSWRSVADTLRQKVEDAVREHPDYRVVFTGHSLGGALATVAGADLRGNGYDIDVFSYGAPRVGNRAFAEFLTVQTGGTLYRITHTNDIVPRLPPREFGYSHSSPEYWIKSGTLVPVRRNDIVKIEGIDATGGNNQPNIPHIPAHLWYFGLIGTCL

SEQ ID NO: 8067 - protein, 269 aa, Thermomyces lanuginosus
EVSQDLFNQFNLFAQYSAAAYCGKNNDAPAGTQITCTGNACPEVEKADATFLYSFEDSGVGDVTGFLALDNTNKLIVLSFRGSRSIENWIGNLNFDLKEINDICSGCRGHDGFTSSWRSVADTLRQKVEDAVREHPDYRVVFTGHSLGGALATVAGADLRGNGYDIDVFSYGAPRVGNRAFAEFLTVQTGGTLYRITHTNDIVPRLPPREFGYSHSSPEYWIKSGTLVPVRRNDIVKIEGIDATGGNNQPNIPNIPAHLWYFGLIGTCL

SEQ ID NO: 8068 - protein, 269 aa, Thermomyces lanuginosus
EVSQDLFNQFNLFAQYSAAAYCGKNNDAPAGTQITCTGNACPEVEKADATFLYSFEDSGVGDVTGFLALDNTNKLIVLSFRGSRSIENWIGNLNFDLKEINDICSGCRGHDGFTSSWRSVADTLRQKVEDAVREHPDYRVVFTGHSLGGALATVAGADLRGNGYDIDVFSYGAPRVGNRAFAEFLTVQTGGTLYRITHTNDIVPRLPPREFGYSHSSPEYWIKSGTLVPVTRRDIVKIEGIDATGGNNQPNIPYIPAHLWYFGLIGTCL

SEQ ID NO: 8069 - protein, 269 aa, Thermomyces lanuginosus
EVSQDLFNQFNLFAQYSAAAYCGKNNDAPAGTNITCTGNACPEVEKADATFLYSFEDSGVGDVTGFLALDNTNKLIVLSFRGSRSIENWIGNLNFDLKEINDICSGCRGHDGFTSSWRSVADTLRQKVEDAVREHPDYRVVFTGHSLGGALATVAGADLRGNGYDIDVFSYGAPRVGNRAFAEFLTVQTGGTLYRITHTNDIVPRLPPREFGYSHSSPEYWIKSGTLVPVRRRDIVKIEGIDATGGNNQPNIPQIPAHLWYFGLIGTCL

SEQ ID NO: 8070 - protein, 270 aa, Thermomyces lanuginosus
EVSQDLFNQFNLFAQYSAAAYCGKNNDAPAGTNITCTGNACPEVEKADATFLYSFEDSGVGDVTGFLALDNTNKLIVLSFRGSRSIEETGSGNLNFDLKEINDICSGCRGHDGFTSSWRSVADTLRQKVEDAVREHPDYRVVFTGHSLGGALATVAGADLRGNGYDIDVFSYGAPRVGNRAFAEFLTVQTGGTLYRITHTNDIVPRLPPREFGYSHSSPEYWIKSGTLVPVTRNDIVKIEGIDATGGNNQPNIPDIPAHLWYFGLIGTCL

SEQ ID NO: 8071 - protein, 269 aa, Thermomyces lanuginosus
EVSQDLFNQFNLFAQYSAAAYCGKNNDAPAGTNITCTGNACPEVEKADATFLYSFEDSGVGDVTGFLALDNTNKLIVLSFRGSRSIENWIGNLNFDLKEINDICSGCRGHDGFTSSWRSVADTLRQKVEDAVREHPDYRVVFTGHSLGGALATVAGADLRGNGYDIDVFSYGAPRVGNRAFAEFLTVQTGGTLYRITHTNDIVPRLPPREFGYSHSSPEYWIKSGTLVPVRRRDIVKIEGIDATGGNNQPNIPLIPAHLWYFGLIGTCL

SEQ ID NO: 8072 - protein, 269 aa, Thermomyces lanuginosus
EVSQDLFNQFNLFAQYSAAAYCGKNNDAPAGTQITCTGNACPEVEKADATFLYSFEDSGVGDVTGFLALDNTNKLIVLSFRGSRSIENWIGNLNFDLKEINDICSGCRGHDGFTSSWRSVADTLRQKVEDAVREHPDYRVVFTGHSLGGALATVAGADLRGNGYDIDVFSYGAPRVGNRAFAEFLTVQTGGTLYRITHTNDIVPRLPPREFGYSHSSPEYWIKSGTLVPVTRRDIVKIEGIDATGGNNQPNIPNIPAHLWYFGLIGTCL

SEQ ID NO: 8073 - protein, 269 aa, Thermomyces lanuginosus
EVSQDLFNQFNLFAQYSAAAYCGKNNDAPAGTNITCTGNACPEVEKADATFLYSFEDSGVGDVTGFLALDNTNKLIVLSFRGSRSIENWIGNLNFDLKEINDICSGCRGHDGFTSSWRSVADTLRQKVEDAVREHPDYRVVFTGHSLGGALATVAGADLRGNGYDIDVFSYGAPRVGNRAFAEFLTVQTGGTLYRITHTNDIVPRLPPREFGYSHSSPEYWIKSGTLVPVRRRDIVKIEGIDATGGNNQPNIPHIPAHLWYFGLIGTCL

SEQ ID NO: 8074 - protein, 269 aa, Thermomyces lanuginosus
EVSQDLFNQFNLFAQYSAAAYCGKNNDAPAGTNITCTGNACPEVEKADATFLYSFEDSGVGDVTGFLALDNTNKLIVLSFRGSRSIENWIGNLNFDLKEINDICSGCRGHDGFTSSWRSVADTLRQKVEDAVREHPDYRVVFTGHSLGGALATVAGADLRGNGYDIDVFSYGAPRVGNRAFAEFLTVQTGGTLYRITHTNDIVPRLPPREFGYSHSSPEYWIKSGTLVPVRRRDIVKIEGIDATGGNNQPNIPTIPAHLWYFGLIGTCL

SEQ ID NO: 8075 - protein, 269 aa, Thermomyces lanuginosus
EVSQDLFNQFNLFAQYSAAAYCGKNNDAPAGTQITCTGNACPEVEKADATFLYSFEDSGVGDVTGFLALDNTNKLIVLSFRGSRSIENWIGNLNFDLKEINDICSGCRGHDGFTSSWRSVADTLRQKVEDAVREHPDYRVVFTGHSLGGALATVAGADLRGNGYDIDVFSYGAPRVGNRAFAEFLTVQTGGTLYRITHTNDIVPRLPPREFGYSHSSPEYWIKSGTLVPVTRRDIVKIEGIDATGGNNQPNIPTIPAHLWYFGLIGTCL

SEQ ID NO: 8076 - protein, 269 aa, Thermomyces lanuginosus
EVSQDLFNQFNLFAQYSAAAYCGKNNDAPAGTNITCTGNACPEVEKADATFLYSFEDSGVGDVTGFLALDNTNKLIVLSFRGSRSIENWIGNLNFDLKEINDICSGCRGHDGFTSSWRSVADTLRQKVEDAVREHPDYRVVFTGHSLGGALATVAGADLRGNGYDIDVFSYGAPRVGNRAFAEFLTVQTGGTLYRITHTNDIVPRTPPREFGYSHSSPEYWIKSGTLVPVTRNDIVKIEGIDATGGNNQPNIPDTPAHTWYFGLIGTCL

SEQ ID NO: 8077 - protein, 269 aa, Thermomyces lanuginosus
EVSQDLFNQFNLFAQYSAAAYCGKNNDAPAGTNITCTGNACPEVEKADATFLYSFEDAGVGDVTGFLALDNTNKLIVLSFRGDRSIENWIGNLNFDLKEINDICSGCRGRDGFTSSWRSVADTLRQKVEDAVREHPDYRVVFTGHSLGGALATVAGADLRGNGYDIDVFSYGAPRVGNRAFAEFLTVQTGGTLYRITHTNDIVPRLPPREFGYSHSSPEYWIKSGTLVPVTRNDIVKIEGIDATGGNNQPNIPDIPAHLWYFGLIGTCL

SEQ ID NO: 8078 - protein, 269 aa, Thermomyces lanuginosus
EVSQDLFNQFNLFAQYSAAAYCGKNNDAPAGTNITCTGNACPEVEKADATFLYSFEDSGVGDVTGFLALDNTNKLIVLSFRGSRSIQNWIGNLNFDLKEINDICSGCRGHDGFTSSWRSVADTLRQKVEDAVREHPDYRVVFTGHSLGGALATVAGADLRGNGYDIDVFSYGAPRVGNRAFAEFLTVQTGGTLYRITHTNDIVPRLPPRQFGYSHSSPEYWIKSGTLVPVTRNDIVKIEGIDATGGNNQPNIPNIPAHLWYFGLIGTCL

SEQ ID NO: 8079 - protein, 269 aa, Synthetic construct
EVSQDLFNQFNLFAQYSAAAYCGKNNDAPAGTNITCTGNACPEVEKADATFLYSFEDSGVGDVTGFLALDNTNKLIVLSFRGSRSIENWIGNLKFLLKEINDICSGCRGHDGFTSSWRSVADTLRQKVEDAVREHPDYRVVFTGHSLGGALATVAGADLRGNGYDIDVFSYGAPRVGNRAFAEFLTVQTGGTLYRITHTNDIVPRLPPREFGYSHSSPEYWIKSGTLVPVTRNDIVKICGIDATGGNNRPNIPDIPAHLWYFGLIGTCL

SEQ ID NO: 8080 - protein, 269 aa, Thermomyces lanuginosus
EVSQDLFNQFNLFAQYSAAAYCGKNNDAPAGTQITCTGNACPEVEKADATFLYSFEDSGVGDVTGFLALDNTNKLIVLSFRGSRSIENWIGNLNFDLKEINDICSGCRGHDGFTSSWRSVADTLRQKVEDAVREHPDYRVVFTGHSLGGALATVAGADLRGNGYDIDVFSYGAPRVGNRAFAEFLTVQTGGTLYRITHTNDIVPRLPPREFGYSHSSPEYWIKSGTLVPVTRRDIVKIEGIDATGGNNQPNIPQIPAHLWYFGLIGTCL

SEQ ID NO: 8081 - protein, 269 aa, Thermomyces lanuginosus
EVSQDLFNQFNLFAQYSAAAYCGKNNDAPAGTNITCTGNACPEVEKADATFLYSFEDSGVGDVTGFLALDNTNKLIVLSFRGSRSIENWIGNLNFDLKEINDICSGCRGHDGFTSSWRSVADTLRQKVEDAVREHPDYRVVFTGHSLGGALATVAGADLRGNGYDIDVFSYGAPRVGNRAFAEFLTVQTGGTLYRITHTNDIVPRLPPREFGYSHSSPEYWIKSGTLVPVRRRDIVKIEGIDATGGNNQPNIPNIPAHLWYFGLIGTCL

SEQ ID NO: 8082 - protein, 269 aa, Synthetic construct
EVSQDLFNQFNLFAQYSAAAYCGKNNDAPAGTNITCTGNACPEVEKADATFLYSFQDSGVGDVTGFLALDNTNKLIVLSFRGSRSIENWIGNLNFDLKEINDICSGCRGHDGFTSSWRSVADTLRQKVEDAVREHPDYRVVFTGHSLGGALATVAGADLRGNGYDIDVFSYGAPRVGNRAFAEFLTVQTGGTLYRITHTNDIVPRVPPREFGYSHSSPEYWIKSGTLVPVTRNDIVKIEGIDATGGNNQPNIPDIPAHIWYFGLIGTCL

SEQ ID NO: 8083 - protein, 269 aa, Thermomyces lanuginosus
EVSQDLFNQFNLFAQYSAAAYCGKNNDAPAGTNITCTGNACPEVEKADATFLYSFEDSGVGDVTGFLALDNTNKLIVLSFRGSRSIENWIGNLNFDLKEINDICSGCRGHDGFTSSWRSVADTLRQKVEDAVREHPDYRVVFTGHSLGGALATVAGADLRGNGYDIDVFSYGAPRVGNRAFAEFLTVXTGGTLYRITHTNDIVFRLPPREFGYSHSSPEYWIKSGTLVPVTRNDIVKIEGIDATGGNNQFNIPDIFAHLWYFGLIGTCL

SEQ ID NO: 8084 - protein, 269 aa, Thermomyces lanuginosus
EVSQDLFNQFNLFAQYSAAAYCGKNNDAPAGTNITCTGNACPEVEKADATFLYSFEDSGVGDVTGFLALDNTNKLIVLSFRGSRSIENWIGNLNFDLKEINDICSGCRGHDGFTSSWRSVADTLRQKVEDAVREHPDYRVVFTGHSLGGALATVAGADLRGNGYDIDVFSYGAPRVGNRAFAEFLTVQTGGTLYRITHTNDIVPRLPPREFGYSHSSPEYWIKSGTLVPVRRRGIVKIEGIDATGGNNQPNIPDIPAHLWYFGLIGTCL

SEQ ID NO: 8085 - protein, 269 aa, Thermomyces lanuginosus
EVSQDLFNQFNLFAQYSAAAYCGKNNDAPAGTQITCTGNACPEVEKADATFLYSFEDSGVGDVTGFLALDNTNKLIVLSFRGSRSIENWIGNLNFDLKEINDICSGCRGHDGFTSSWRSVADTLRQKVEDAVREHPDYRVVFTGHSLGGALATVAGADLRGNGYDIDVFSYGAPRVGNRAFAEFLTVQTGGTLYRITHTNDIVPRLPPREFGYSHSSPEYWIKSGTLVPVRRNDIVKIEGIDATGGNNQPNIPTIPAHLWYFGLIGTCL

SEQ ID NO: 8086 - protein, 269 aa, Thermomyces lanuginosus
EVSQDLFNQFNLFAQYSAAAYCGKNNDAPAGTQITCTGNACPEVEKADATFLYSFEDSGVGDVTGFLALDNTNKLIVLSFRGSRSIENWIGNLNFDLKEINDICSGCRGHDGFTSSWRSVADTLRQKVEDAVREHPDYRVVFTGHSLGGALATVAGADLRGNGYDIDVFSYGAPRVGNRAFAEFLTVQTGGTLYRITHTNDIVPRLPPREFGYSHSSPEYWIKSGTLVPVRRNDIVKIEGIDATGGNNQPNIPLIPAHLWYFGLIGTCL

SEQ ID NO: 8087 - protein, 269 aa, Thermomyces lanuginosus
EVSQDLFNQFNLFAQYSAAAYCGKNNDAPAGTQITCTGNACPEVEKADATFLYSFEDSGVGDVTGFLALDNTNKLIVLSFRGSRSIENWIGNLNFDLKEINDICSGCRGHDGFTSSWRSVADTLRQKVEDAVREHPDYRVVFTGHSLGGALATVAGADLRGNGYDIDVFSYGAPRVGNRAFAEFLTVQTGGTLYRITHTNDIVPRLPPREFGYSHSSPEYWIKSGTLVPVTRRDIVKIEGIDATGGNNQPNIPHIPAHLWYFGLIGTCL

SEQ ID NO: 8088 - protein, 269 aa, Thermomyces lanuginosus
EVSQDLFNQFNLFAQYSAAAYCGKNNDAPAGTQITCTGNACPEVEKADATFLYSFEDSGVGDVTGFLALDNTNKLIVLSFRGSRSIENWIGNLNFDLKEINDICSGCRGHDGFTSSWRSVADTLRQKVEDAVREHPDYRVVFTGHSLGGALATVAGADLRGNGYDIDVFSYGAPRVGNRAFAEFLTVQTGGTLYRITHTNDIVPRLPPREFGYSHSSPEYWIKSGTLVPVTRRDIVKIEGIDATGGNNQPNIPSIPAHLWYFGLIGTCL

SEQ ID NO: 8089 - protein, 269 aa, Thermomyces lanuginosus
EVSQDLFNQFNLFAQYSAAAYCGKNNDAPAGTQITCTGNACPEVEKADATFLYSFEDSGVGDVTGFLALDNTNKLIVLSFRGSRSIENWIGNLNFDLKEINDICSGCRGHDGFTSSWRSVADTLRQKVEDAVREHPDYRVVFTGHSLGGALATVAGADLRGNGYDIDVFSYGAPRVGNRAFAEFLTVQTGGTLYRITHTNDIVPRLPPREFGYSHSSPEYWIKSGTLVPVTRRDIVKIEGIDATGGNNQPNIPLIPAHLWYFGLIGTCL

SEQ ID NO: 8090 - protein, 268 aa, Thermomyces lanuginosus
EKSQDLFNQFNLFAQYSAAAYCGKNNDAPAGTKITCTGNACPEVEKADATILYSFEDSGVGDVTGFLARDNTNKLIVLSFRGSRSIENWIGNLNFDLEEINDICSGCRGHDGFTSSWRSVADTLRQKVEDAVREHPDYRVVFTGHSLGGALATVAGADLRGNGYDIDVFSYGAPRLGNRAFAEFLTVQTGGTLYRITTNDIVPRLPPRKFGYSHSSPEYWIKSGTGVPVRRRDIVKIEGIDATGGNNQPNIPDIPAHLWYFGLIGTCL

SEQ ID NO: 8091 - protein, 268 aa, Thermomyces lanuginosus
VSQDLFNQFNLFAQYSAAAYCGKNNDAPAGTNITCTGNACPEVEKADATFLYSFEDAGSGDVTGFLALDNTNKLIVLSFRGSRSVENWIGNLNFDLKEINDICSGCRGHDGFTSSWRSVADTLRQKVEDAVREHPDYRVVFSGHSLGGGLATVAGADLRGNGYDIDVFSYGAPRVGNRAFAEFLTVQTGGTLYRITHTNDIVPRLPPREFGYSHSSPEYWIKSGTGVPVRRRDIVKIEGIDATGGNNQPNIPDAKAHLWYFGLIGTCL

SEQ ID NO: 8092 - protein, 268 aa, Thermomyces lanuginosus
VSQDLFNQFNLFAQYSAAAYCGKNNDAPAGTNITCTGNACPEVEKADATVLYSFEDSGVGDVTGFLALDNTNKLIVLSFRGSRSIENWIGNLNFDLIEINDICSGCRGHAGFTSSWRSVADTLRQKVEDAVREHPDYRVVFTGHSLGGALATVAGADLRGNKYDIDVFSYGAPRVGNRAFAEFLTVQTGGTLYRITSTNDIVPRLPPREFGYSHSSPEFWIKSGTLVPVRRCDIVKIEGIDATGGNNQPNIPSITAHLWYFGLIGTCL

SEQ ID NO: 8093 - protein, 268 aa, Thermomyces lanuginosus
VSQDLFNQFNLFAQYSAAAYCGKNNDAPAGTNITCTGNACPEVEKADATVLYSFEDSGVGDVTGFLALDNTNKLIVLSFRGSRSIENWIGNLNFELIEINDICSGCRGHAGFTSSWRSVADTLRQKVEDAVREHPDYRVVFTGHSLGGALATVAGADLRGNSYDIDVFSYGAPRVGNRAFAEFLTVQTGGTLYRITSTNDIVPRLPPREFGYSHSSPEFWIKSGTLVPVRRCDIVKIEGIDATGGNNQPNIPDITAHLWYFGLIGTCL

SEQ ID NO: 8094 - protein, 268 aa, Thermomyces lanuginosus
VSQDLFNQFNLFAQYSAAAYCGKNNDAPAGTQITCTANACPEVEKADATFLYSFEDSGVGDVTGFLALDNTNKLIVLSFRGSRSIENWITNLNFDLKEINDICSGCRGHDGFTSSWRSVADTLRQKVEDAVREHPDYRVVFTGHSLGGALATVAGADLRGNPYDIDVFSYGAPRFGNRAFAEFLTVQTGGTLYRITHTNDIVPRLPPREFGYSHSSPEYWIKSGTLVPVRRRDIVKIEGIDATGGNNQPNIPSAQAHLWYFGLIGTCL

SEQ ID NO: 8095 - protein, 268 aa, Thermomyces lanuginosus
VSQDLFNQFRLFAQYSAAAYCGKNNDAPAGTQITCTANACPEVEKADATFLYSFEDSGVGDVTGFLALDNTNKLIVLSFRGSRSIENWITNLNFDLKEINDICSGCRGHAGFTSSWRSVADTLRQKVEDAVREHPDYRVVFTGHSLGGALATVAGADLRGNPYDIDVFSYGAPRFGNRAFAEFLTVQTGGTLYRITHTNDIVPRLPPREFGYSHSSPEYWIKSGTLVPVRRRDIVKIEGIDATGGNNQPNIPSIPAHLWYFGLIGTCL

SEQ ID NO: 8096 - protein, 268 aa, Thermomyces lanuginosus
VSQDLFNQFNLFAQYSAAAYCGKNNDAPAGTNITCTGNACPEVEKADATVLYSFEDSGVGDVTGFLALDNTNKLIVLSFRGSRSIENWIGNLNFELIEINDICSGCRGHAGFTSSWRSVADTLRQKVEDAVREHPDYRVVFTGHSLGGALATVAGADLRGNKYDIDVFSYGAPRVGNRAFAEFLTVQTGGTLYRITSTNDIVPRLPPREFGYSHSSPEFWIKSGTLVPVRRCDIVKIEGIDATGGNNQPNIPDITAHLWYFGLIGTCL

SEQ ID NO: 8097 - protein, 268 aa, Thermomyces lanuginosus
VSQDLFNQFRLFAQYSAAAYCGKNNDAPAGTQITCTANACPEVEKADATFLYSFEDSGVGDVTGFLALDNTNKLIVLSFRGSRSIENWINNLRFDLKEINDICSGCRGHDGFTSSWRSVADTLRQKVEDAVREHPDYRVVFTGHSLGGALATVAGADLRGNPYDIDVFSYGAPRGGNRAFAEFLTVQTGGTLYRITHTNDIVPRLPPREFGYSHSSPEYWIKSGTLVPVRRRDIVKIEGIDATGGNNQPNIPSIPAHLWYFGLIGTCL

SEQ ID NO: 8098 - protein, 268 aa, Synthetic construct
VSQDLFNQFNLFAQYSAAAYCGKNNDAPAGTNITCTGNACPEVEKADATFLYSFEDSGVGDVTGFLALDNTNKLIVLSFRGSRSIENWIGNLKFLLKEINDICSGCRGHDGFTSSWRSVADTLRQKVEDAVREHPDYRVVFTGHSLGGALATVAGADLRGNGYDIDVFSYGAPRVGNRAFAEFLTVQTGGTLYRITHTNDIVPRLPPREFGYSHSSPEYWIKSGTLVPVTRNDIVKICGIDATGGNNRPNIPDIPAHLWYFGLIGTCL

SEQ ID NO: 8099 - protein, 268 aa, Thermomyces lanuginosus
VSQDLFNQFNLFAQYSAAAYCGKNNDAPAGTNITCTGNACPEVEKADATFLYSFEDSGVGDVTGFLALDNTNKLIVLSFRGSRSIENWIGNLNFDLKNINDICSGCRGHDGFTSSWRSVADTLRQKVEDAVREHPDYRVVFTGHSLGGALATVAGADLRGNGYDIDVFSYGAPRVGNRAFAEFLTVQTGGTLYRITHTNDIVPRLPPREFGYSHSSPEYWIKSGTLVPVTRNDIVKICGIDATGGNNRPNIPDIPAHLWYFGLIGTCL

SEQ ID NO: 8100 - protein, 268 aa, Thermomyces lanuginosus
EVSQDLFNQFNLFAQYSAAAYCGKNNDAPAGTNITCTGNACPEVEKADATFLYSFEDAGVGDVTGFLALDNTNKLIVLSFRGDRSIENWIGNLNFDLKEINDICSGCRGHDGFTSSWRSVADTLRQKVEDAVREHPDYRVVFTGHSLGGALATVAGADLRGNGYDIDVFSYGAPRVGNRAFAEFLTVQTGGTLYRITHTNDIVPRLPRREFGYSHSSPEYWIKSGTLVPVTRNDIVKIEGIDATGGNNQPNIPDIPAHLWYFGLIGTC

SEQ ID NO: 8101 - protein, 268 aa, Thermomyces lanuginosus
VSQDLFNQFNLFAQYSAAAYCGKNNDAPAGTNITCTGNACPEVEKADATFLYSFEDSGVGDVTGFLALDNTNKLIVLSFRGSRSIENWIANLNFWLKEINDICSGCRGHDGFTSSWRSVADTLRQKVEDAVREHPDYRVVFTGHSLGGALATVAGADLRGNGYDIDVFSYGAPRVGNRAFAEFLTVQTGGTLYRITHTNDIVPRLPPREFGYSHSSPEYWIKSGTLVPVTRNDIVKICGIDATGGNNRPNIPDITAHLWYFGLIDTCL

SEQ ID NO: 8102 - protein, 268 aa, Thermomyces lanuginosus
VSQDLFNQFNLFAQYSAAAYCGKNNDAPAGTNITCTGNACPEVEKADATFLYSFEDSGVGGVTGFLALDNTNKLIVLSFRGSRSIENWIGNLNFDLKKINDICSGCRGHDGFTSSWRSVADTLRQKVEDAVREHPDYRVVFTGHSLGGALATVAGADLRGNGYDIDVFSYGAPRVGNRAFAEFLTVQTGGTLYRITHTNDIVPRLPPREFGYSHSSPEYWIKSGTLVPVTRNDIVKIEGIDATGGNNRPNIPDIPAHLWYFGLIGTCL

SEQ ID NO: 8103 - protein, 268 aa, Thermomyces lanuginosus
VSQDLFNQFNLFAQYSAAAYCGKNNDAPAGTNITCTGNACPEVEKADATFLYSFEDSGVGDVTGFLALDNTNKLIVLSFRGSRSIENWIANLNFWLKEINDICSGCRGHDGFTSSWRSVADTLRQKVEDAVREHPDYRVVFTGHSLGGALATVAGADLRGNGYDIDVFSYGAPRVGNRAFAEFLTVQTGGTLYRITHTNDIVPRLPPREFGYSHSSPEYWIKSGTLVPVTRNDIVKICGIDATGGNNRPNIPDITAHLWYFGLISTCL

SEQ ID NO: 8104 - protein, 268 aa, Thermomyces lanuginosus
VSQDLFNQFNLFAQYSAAAYCGKNNDAPAGTNITCTGNACPEVEKADATFLYSFEDSGVGAVTGFLALDNTNKLIVLSFRGSRSIENWIGNLNFDLKKINDICSGCRGHDGFTSSWRSVADTLRQKVEDAVREHPDYRVVFTGHSLGGALATVAGADLRGNGYDIDVFSYGAPRVGNRAFAEFLTVQTGGTLYRITHTNDIVPRLPPREFGYSHSSPEYWIKSGTLVPVTRNDIVKIEGIDATGGNNRPNIPDIPAHLWYFGLIGTCL

SEQ ID NO: 8105 - protein, 268 aa, Thermomyces lanuginosus
VSQDLFNQFNLFAQYSAAAYCGKNNDAPAGTNITCTGNACPEVEKADATFLYSFEDSGVGDVTGFLALDNTNKLIVLSFRGSRSIENWIGNLNFDLDKINDICSGCRGHDGFTSSWRSVADTLRQKVEDAVREHPDYRVVFTGHSLGGALATVAGADLRGNGYDIDVFSYGAPRVGNRAFAEFLTVQTGGTLYRITHTNDIVPRLPPREFGYSHSSPEYWIKSGTLVPVTRNDIVKIEGIDATGGNNRPNIPDIPAHLWYFGLIGTCL

SEQ ID NO: 8106 - protein, 268 aa, Thermomyces lanuginosus
VSQDLFNQFNLFAQYSAAAYCGKNNDAPAGTNITCTGNACPEVEKADATFLYSFEDSGVGDVTGFLALDNTNKLIVLSFRGSRSIENWIGNLNFDLKKINDICSGCRGHDGFTSSWRSVADTLRQKVEDAVREHPDYRVVFTGHSLGGALATVAGADLRGNGYDIDVFSYGAPRVGNRAFAEFLTVQTGGTLYRITHTNDIVPRLPPREFGYSHSSPEYWIKSGTLVPVTRNDIVKICGIDATGGNNRPNIPDIPAHLWYFGLIGTCL

SEQ ID NO: 8107 - protein, 268 aa, Thermomyces lanuginosus
VSQDLFNQFNLFAQYSAAAYCGKNNDAPAGTNITCTGNACPEVEKADATFLYSFEDSGVGDVTGFLALDNTNKLIVLSFRGSWSIENWIGNLNFDLKKINDICSGCRGHDGFTSSWRSVADTLRQKVEDAVREHPDYRVVFTGHSLGGALATVAGADLRGNGYDIDVFSYGAPRVGNRAFAEFLTVQTGGTLYRITHTNDIVPRLPPREFGYSHSSPEYWIKSGTLVPVTRNDIVKIEGIDATGGNNRPNIPDIPAHLWYFGLIGTCL

SEQ ID NO: 8108 - protein, 268 aa, Synthetic construct
VSQDLFNQFNLFAQYSAAAYCGKNNDAPAGTNITCTGNACPEVEKADATFLYSFEDSGVGDVTGFLALDNTNKLIVLSFRGSRSIENWIGNLKFLLKKINDICSGCRGHDGFTSSWRSVADTLRQKVEDAVREHPDYRVVFTGHSLGGALATVAGADLRGNGYDIDVFSYGAPRVGNRAFAEFLTVQTGGTLYRITHTNDIVPRLPPREFGYSHSSPEYWIKSGTLVPVTRNDIVKIEGIDATGGNNRPNIPDIPAHLWYFGLIGTCL

SEQ ID NO: 8109 - protein, 268 aa, Thermomyces lanuginosus
VSQDLFNQFNLFAQYSAAAYCGKNNDAPAGTNITCTGNACPEVEKADATFLYSFEDSGVGDVTGFLALDNTNKLIVLSFRGSRSIENWIGNLNFDLKEINDICSGCRGHDGFTSSWRSVADTLRQKVEDAVREHPDYRVVFTGHSLGGALATVAGADLRGNGYDIDVFSYGAPRVGNRAFAEFLTVQTGGTLYRITHTNDIVPRLPPREFGYSHSSPEYWIKSGTLVPVTRNDIVKICGIDATGGNNRPNIPDITAHLWYFGLISACL

SEQ ID NO: 8110 - protein, 268 aa, Thermomyces lanuginosus
VSQDLFNQFNLFAQYSAAAYCGKNNDAPAGTNITCTGNACPEVEKADATFLYSFEDSGVGDVTGFLALDNTNKLIVLSFRGSRSIENWIGNLNFDLKEINDICSGCRGHDGFTSSWRSVADTLRQKVEDAVREHPDYRVVFTGHSLGGALATVAGADLRGNGYDIDVFSYGAPRVGNRAFAEFLTVQTGGTLYRITHTNDIVPRLPPREFGYSHSSPEYWIKSGTLVPVTRNDIVKICGIDATGGNNRPNIPDIPAHLWYFGLISTCL

SEQ ID NO: 8111 - protein, 268 aa, Thermomyces lanuginosus
VSQDLFNQFNLFAQYSAAAYCGKNNDAPAGTNITCTGNACPEVEKADATFLYSFEDSGVGDVTGFLALDNTNKLIVLSFRGSRSIENWIGNLNFDLKEINDICSGCRGHDGFTSSWRSVADTLRQKVEDAVREHPDYRVVFTGHSLGGALATVAGADLRGNGYDIDVFSYGAPRVGNRAFAEFLTVQTGGTLYRITHTNDIVPRLPPREFGYSHSSPEYWIKSGTLVPVTRNDIVKICGIDATGGNNRPNIPDIPAHLWYFGLIATCL

SEQ ID NO: 8112 - protein, 268 aa, Thermomyces lanuginosus
VSQDLFNQFNLFAQYSAAAYCGKNNDAPAGTNITCTGNACPEVEKADATFLYSFEDSGVGDVTGFLALDNTNKLIVLSFRGSRSIENWIGNLNFDLKEINDICSGCRGHDGFTSSWRSVADTLRQKVEDAVREHPDYRVVFTGHSLGGALATVAGADLRGNGYDIDVFSYGAPRVGNRAFAEFLTVQTGGTLYRITHTNDIVPRLPPREFGYSHSSPEYWIKSGTLVPVTRNDIVKICGIDATGGNNRPNIPDIPAHLWYFGLIDTCL

SEQ ID NO: 8113 - protein, 268 aa, Thermomyces lanuginosus
VSQDLFNQFNLFAQYSAAAYCGKNNDAPAGTNITCTGNACPEVEKADATFLYSFEDSGVGVVTGFLALDNTNKLIVLSFRGSRSIENWIGNLNFDLKKINDICSGCRGHDGFTSSWRSVADTLRQKVEDAVREHPDYRVVFTGHSLGGALATVAGADLRGNGYDIDVFSYGAPRVGNRAFAEFLTVQTGGTLYRITHTNDIVPRLPPREFGYSHSSPEYWIKSGTLVPVTRNDIVKIEGIDATGGNNRPNIPDIPAHLWYFGLIGTCL

SEQ ID NO: 8114 - protein, 268 aa, Thermomyces lanuginosus
VSQDLFNQFNLFAQYSAAAYCGKNNDAPAGTNITCTGNACPEVEKADATFLYSFEDSGVGDVTGFLALDNTNKLIVLSFRGSRSIENWIANLNFNLKKINDICSGCRGHDGFTSSWRSVADTLRQKVEDAVREHPDYRVVFTGHSLGGALATVAGADLRGNGYDIDVFSYGAPRVGNRAFAEFLTVQTGGTLYRITHTNDIVPRLPPREFGYSHSSPEYWIKSGTLVPVTRNDIVKIEGIDATGGNNRPNIPDIPAHLWYFGLIGTCL

SEQ ID NO: 8115 - protein, 268 aa, Thermomyces lanuginosus
EVSQDLFNQFNLFAQYSAAAYCGKNNDAPAGTNITCTGNACPEVEKADATFLYSFEDSGVGDVTGFLALDNTNKLIVLSFRGSRSIENWIGNLNFDLKEINDICSGCRGHDGFTSSWRSVADTLRQKVEDAVREHPDYRVVFTGHSLGGALATVAGADLRGNGYDIDVFSYGAPRVGNRAFAEFLTVQTGGTLYRITHTNDIVPRLPPREFGYSHSSPEYWIKSGTLVPVTRNDIVKIEGIDATGGNNQPNIPDIPAHLWYFGPISEC

SEQ ID NO: 8116 - protein, 268 aa, Thermomyces lanuginosus
VSQDLFNQFNLFAQYSAAAYCGKNNDAPAGTNITCTGNACPEVEKADATFLYSFEDSGVGDVTGFLALDNTNKLIVLSFRGSKSIENWIGNLNFDLKKINDICSGCRGHDGFTSSWRSVADTLRQKVEDAVREHPDYRVVFTGHSLGGALATVAGADLRGNGYDIDVFSYGAPRVGNRAFAEFLTVQTGGTLYRITHTNDIVPRLPPREFGYSHSSPEYWIKSGTLVPVTRNDIVKIEGIDATGGNNRPNIPDIPAHLWYFGLIGTCL

SEQ ID NO: 8117 - protein, 268 aa, Thermomyces lanuginosus
EVSQDLFNQFNLFAQYSAAAYCGKNNDAPAGTNITCTGNACPEVEKADATFLYSFEDSGVGDVTGFLALDNTNKLIVLSFRGSRSIENWIANLNFWLKKINDICSGCRGHDGFTSSWRSVADTLRQKVEDAVREHPDYRVVFTGHSLGGALATVAGADLRGNGYDIDVFSYGAPRVGNRAFAEFLTVQTGGTLYRITHTNDIVPRLPPREFGYSHSSPEYWIKSGTLVPVRRRDIVKIEGIDATGGNNQPNIPDIPAHLWYFQATSAC

SEQ ID NO: 8118 - protein, 268 aa, Thermomyces lanuginosus
EVSQDLFNQFNLFAQYSAAAVCGKNNDAPAGTNITCTGNACPEVEKADATFLYSFEDSGVGDVTGFLALDNTNKLIVLSFRGSGSIENWIANLNFFLKKINDICSGCRGHDGFTSSWRSVADTLRQKVEDAVREHPDYRVVFTGHSLGGALATVAGADLRGNGYDIDVFSYGAPRVGNRAFAEFLTVQTGGTLYRITHTNDIVPRLPPREFGYSHSSPEYWIKSGTLVPVTRNDIVKIEGIDATGGNNQPNIPDIPAHLWYFQATDAC

SEQ ID NO: 8119 - protein, 268 aa, Thermomyces lanuginosus
EVSQDLFNQFNLFAQYSAAAYCGKNNDAPAGTNITCTGNACPEVEKADATFLYSFEDSGVGDVTGFLALDNTNKLIVLSFRGSWSIENWIANLNFWLKKINDICSGCRGHDGFTSSWRSVADTLRQKVEDAVREHPDYRVVFTGHSLGGALATVAGADLRGNGYDIDVFSYGAPRVGNRAFAEFLTVQTGGTLYRITHTNDIVPRLPPREFGYSHSSPEYWIKSGTLVPVTRNDIVKIEGIDATGGNNQPNIPDIPAHLWQFQATDAC

SEQ ID NO: 8120 - protein, 268 aa, Thermomyces lanuginosus
EVSQDLFNQFNLFAQYSAAAYCGKNNDAPAGTNITCTGNACPEVEKADATFLYSFEDSGVGDVTGFLALDNTNKLIVLSFRGSWYIENWIANLNFWLKKINDICSGCRGHDGFTSSWRSVADTLRQKVEDAVREHPDYRVVFTGHSLGGALATVAGADLRGNGYDIDVFSYGAPRVGNRAFAEFLTVQTGGTLYRITHTNDIVPRLPPREFGYSHSSPEYWIKSGTLVPVTRNDIVKIEGIDATGGNNQPNIPDIPAHLWYFQATDAC

SEQ ID NO: 8121 - protein, 268 aa, Thermomyces lanuginosus
EVSQDLFNQFNLFAQYSAAAYCGKNNDAPAGTNITCTGNACPEVEKADATFLYSFEDSGVGQVTGFLALDNTNKLIVLSFRGSWSIENWIANLNFWLKKINDICSGCRGHDGFTSSWRSVADTLRQKVEDAVREHPDYRVVFTGHSLGGALATVAGADLRGNGYDIDVFSYGAPRVGNRAFAEFLTVQTGGTLYRITHTNDIVPRLPPREFGYSHSSPEYWIKSGTLVPVTRNDIVKIEGIDATGGNNQPNIPDIPAHLWYFQATDAC

SEQ ID NO: 8122 - protein, 268 aa, Thermomyces lanuginosus
EVSQDLFNQFNLFAQYSAAAYCGKNNDAPAGTNITCTGNACPEVEKADATFLYSFEDSGVGEVTGFLALDNTNKLIVLSFRGSWSIENWIANLNFWLKKINDICSGCRGHDGFTSSWRSVADTLRQKVEDAVREHPDYRVVFTGHSLGGALATVAGADLRGNGYDIDVFSYGAPRVGNRAFAEFLTVQTGGTLYRITHTNDIVPRLPPREFGYSHSSPEYWIKSGTLVPVTRNDIVKIEGIDATGGNNQPNIPDIPAHLWYFQATDAC

SEQ ID NO: 8123 - protein, 268 aa, Thermomyces lanuginosus
EVSQDLFNQFNLFAQYSAAAYCGKNNDAPAGTNITCTGNACPEVEKADATFLYSFEDSGVGDVTGFLALDNTNKLIVLSFRGSWSIENWIANLNFWLKKINDICSGCRGHDGFTSSWRSVADTLRQKVEDAVREHPDYRVVFTGHSLGGALATVAGADLRGNGYDIDVFSYGAPRVGNRAFAEFLTVQTGGTLYRITHTNDITPRLPPREFGYSHSSPEYWIKSGTLVPVTRNDIVKIEGIDATGGNNQPNIPDIPAHLWYFQATDAC

SEQ ID NO: 8124 - protein, 268 aa, Thermomyces lanuginosus
EVSQDLFNQFNLFAQYSAAAYCGKNNDAPAGTNITCTGNACPEVEKADATFLYSFEDSGVGDVTGFLALDNTNKLIVLSFRGSRSIENWIANLNFWLKKINDICSGCRGHDGFTSSWRSVADTLRQKVEDAVREHPDYRVVFTGHSLGGALATVAGADLRGNGYDIDVFSYGAPRVGNRAFAEFLTVQTGGTLYRITHTNDIVPRLPPREFGYSHSSPEYWIKSGTLVPVTRNDIVKIEDIDATGGNNQPNIPDICAHLWYFQATDAC

SEQ ID NO: 8125 - protein, 268 aa, Thermomyces lanuginosus
EVSQDLFNQFNLFAQYSAAAYCGKNNDAPAGTNITCTGNACPEVEKADATFLYSFEDSGVGDVTGFLALDNTNKLIVLSFRGSWSIENWIANLNFWLKKINDICSGCRGHDGFTSSWRSVADTLRQKVEDAVREHPDYRVVFTGHSLGGALATVAGADLRGNGYDIDVFSYGAPRVGNRAFAEFLTVQTGGTLYRITHTNDIVPRLPPREFGYSHSSPEYWIKSGTLVPVTRNDIVKIEGIDATGGNNQPNIPDIPAHVWYFQATDAC

SEQ ID NO: 8126 - protein, 268 aa, Thermomyces lanuginosus
EVSQDLFNQFNLFAQYSAAAYCGKNNDAPAGTNITCTGNACPEVEKADATFLYSFEDSGVGDVTGFLALDNTNKLIVLSFRGSPSIENWIANLNFWLKKINDICSGCRGHDGFTSSWRSVADTLRQKVEDAVREHPDYRVVFTGHSLGGALATVAGADLRGNGYDIDVFSYGAPRVGNRAFAEFLTVQTGGTLYRITHTNDIVPRLPPREFGYSHSSPEYWIKSGTLVPVTRNDIVKIEGIDATGGNNQPNIPDIVAHLWYFQATDAC

SEQ ID NO: 8127 - protein, 268 aa, Thermomyces lanuginosus
EVSQDLFNQFNLFAQYSAAAYCGKNNDAPAGTNITCTGNACPEVEKADATFLYSFEDSGVGDVTGFLALDNTNKLIVLSFRGSESIENWIANLNFWLKKINDICSGCRGHDGFTSSWRSVADTLRQKVEDAVREHPDYRVVFTGHSLGGALATVAGADLRGNGYDIDVFSYGAPRVGNRAFAEFLTVQTGGTLYRITHTNDIVPRLPPREFGYSHSSPEYWIKSGTLVPVTRNDIVKIEGIDATGGNNQPNIPDIVAHLWYFQATDAC

SEQ ID NO: 8128 - protein, 268 aa, Thermomyces lanuginosus
EVSQDLFNQFNLFAQYSAAAYCGKNNDAPAGTNITCTGNACPEVEKADATFLYSFEDSGVGDVTGFLALDNTNKLIVLSFRGSMSIENWIANLNFWLKKINDICSGCRGHDGFTSSWRSVADTLRQKVEDAVREHPDYRVVFTGHSLGGALATVAGADLRGNGYDIDVFSYGAPRVGNRAFAEFLTVQTGGTLYRITHTNDIVPRLPPREFGYSHSSPEYWIKSGTLVPVTRNDIVKIEGIDATGGNNQPNIPDIVAHLWYFQATDAC

SEQ ID NO: 8129 - protein, 268 aa, Thermomyces lanuginosus
EVSQDLFNQFNLFAQYSAAAYCGKNNDAPAGTNITCTGNACPEVEKADATFLYSFEDSGVGDVTGFLALDNTNKLIVLSFRGSWSIENWIRNKNFGLKKINDICSGCRGHDGFTSSWRSVADTLRQKVEDAVREHPDYRVVFTGHSLGGALATVAGADLRGNGYDIDVFSYGAPRVGNRAFAEFLTVQTGGTLYRITHTNDIVPRLPPREFGYSHSSPEYWIKSGTLVPVTRNDIVKIEGIDATGGNNQPNIPDIPAHLWYFQATDAC

SEQ ID NO: 8130 - protein, 268 aa, Thermomyces lanuginosus
EVSQDLFNQFNLFAQYSAAAYCGKNNDAPAGTNITCTGNACPEVEKADATFLYSFEDSGVGDVTGFLALDNTNKLIVLSFRGSSSIENWIANLNFWLKKINDICSGCRGHDGFTSSWRSVADTLRQKVEDAVREHPDYRVVFTGHSLGGALATVAGADLRGNGYDIDVFSYGAPRVGNRAFAEFLTVQTGGTLYRITHTNDIVPRLPPREFGYSHSSPEYWIKSGTLVPVTRNDIVKIEGIDATGGNNQPNIPDIVAHLWYFQATDAC

SEQ ID NO: 8131 - protein, 268 aa, Thermomyces lanuginosus
EVSQDLFNQFNLFAQYSAAAYCGKNNDAPAGTNITCTGNACPEVEKADATFLYSFEDSGVGDVTGFLALDNTNKLIVLSFRGSWSIENWIANLNFWLKKINDICSGCRGHDGFTSSWRSVADTLRQKVEDAVREHPDYRVVFTGHSLGGALATVAGADLRGNGYDIDVFSYGAPRVGNRAFAEFLTVQTGGTLYRITHTNDIVPRLPPREFGYSHSSPEYWIKSGTLVPVTRNDIVKIEGIDATGGNNQPNIPDIPAHRWYFQATDAC

SEQ ID NO: 8132 - protein, 267 aa, Thermomyces lanuginosus
VSQDLFNQFNLFAQYSAAAYCGKNNDAPAGTNITCTGNACPEVEKADATFLYSFEDSGVGDVTGFLALDNTNKLIVLSFRGSRSIENWIANLNFWLKKINDICSGCRGHDGFTSSWRSVADTLRQKVEDAVREHPDYRVVFTGHSLGGALATVAGADLRGNGYDIDVFSYGAPRVGNRAFAEFLTVQTGGTLYRITHTNDIVPRLPPREFGYSHSSPEYWIKSGTLVPVTRNDIVKIEGIDATGGNNQPNIPDIAAHLHYFQATDAC

SEQ ID NO: 8133 - protein, 291 aa, Thermomyces lanuginosus
MRSSLVLFFVSAWTALASPIRREVSQDLFNQFNLFAQYSAAAYCGKNNDAPAGTNITCTGNACPEVEKADATFLYSFRDSGVGDVTGFLALDNTNKLIVLSFRGSRSIENWIADLNFILIEINDICSGCRGHDGFTSSWFSVADTLRQKVEDAVREHPDYRVVFTGHSLGGALATVAGADLRGNGYDIDVFSYGAPRVGNRAFAEFLTVQTGGTLYRITHTNDIVPRLPPREFGYSHSSPEYWIKSGTLVPVRRRDIVKIEGIDATGGNNQPNIPSIGAHLWYFGAIGTCL

SEQ ID NO: 8134 - protein, 291 aa, Thermomyces lanuginosus
MRSSLVLFFVSAWTALASPIRREVSQDLFNQFNLFAQYSAAAYCGKNNDAPAGTNITCTGNACPEVEKADATFLYSFEDTGKGDVTGFLALDNTNKLIVLSFRGTRSVENWIGNLKFDLKEINDICSGCRGHDGFTSSWRSVADTLRQKVEDAVREHPDYRVVFTGHSLGGGLATVAGADLRGNGYDIDVFSYGAPRVGNRAFAEFLTVQTGGTLYRITHTNDIVPRLPPRVFGYSHSSPEYWIKSGTGVPVRRRDIVKIEGIDATGGNNQPNIPDIKAHLWYFGLIGTCL

SEQ ID NO: 8135 - protein, 291 aa, Thermomyces lanuginosus
MRSSLVLFFVSAWTALASPIRREVSQDLFNQFNLFAQYSAAAYCGKNNDAPAGTNITCTGNACPEVEKADATFLYSFEDNGSGDVTGFLALDNTNKLIVLSFRGSRSVENWIGNLNFDLKEINDICSGCRGHDGFTSSWRSVADTLRQKVEDAVREHPDYRVVFTGHSLGGGLATVARADLRGNGYDIDVFSYGAPRVGNRAFAEFLTVQTGGTLYRITHTNDIVPRLPPRKFGYSHSSPEYWIKSGTGVPVRRRDIVKIEGIDATGGNNQPNIPDAKAHLWYFGLIGTCL

SEQ ID NO: 8136 - protein, 291 aa, Thermomyces lanuginosus
MRSSLVLFFVSAWTALASPIRREVSQDLFNQFNLFAQYSAAAYCGKNNDAPAGTNITCTGNACPEVEKADATFLYSFRDSGVGDVTGFLALDNTNKLIVLSFRGSRSLENWIADLNFHLQEINDICSGCRGHDGFTSSWFSVADTLRQKVEDAVREHPDYRVVFTGHSLGGALATVAGADLRGNGYDIDVFSYGAPRVGNRAFAEFLTVQTGGTLYRITHTNDIVPRLPPREFGYSHSSPEYWIKSGTLVPVRRRDIVKIEGIDATGGNNQPNIPSIPAHLWYFGAIGTCL

SEQ ID NO: 8137 - protein, 291 aa, Thermomyces lanuginosus
MRSSLVLFFVSAWTALASPIRREVSQDLFNQFNLFAQYSAAAYCGKNNDAPAGTNITCTGNACPEVEKADATFLYSFRDSGVGDVTGFLALDNTNKLIVLSFRGSRSIENWIADLNFILIEINDICSGCRGHDGFTSSWFSVADTLRQKVEDAVREHPDYRVVFTGHSLGGALATVAGADLRGNGYDIDVFSYGAPRVGNRAFAEFLTVQTGGTLYRITHTNDIVPRLPPREFGYSHSSPEYWIKSGTLVPVRRRDIVKIEGIDATGGNNQPNIPSIQAHLWYFGAIGTCL

SEQ ID NO: 8138 - protein, 291 aa, Thermomyces lanuginosus
MRSSLVLFFVSAWTALASPIRREVSQDLFNQFNLFAQYSAAAYCGKNNDAPAGTNITCTANACPEVEKADATFLYSFEDSGVGDVTGFLALDNTNKLIVLSFRGSRTIENWIADLNFLLKEINDICSGCRGHAGFTSSWRSVADTLRQKVEDAVREHPDYRVVFTGHSLGGALATVAGADLRGNKYDIDVFSYGAPRVGNRAFAEFLTVQTGGTLYRITHTNDIVPRLPPREFGYSHSSPEYWIKSGTLVPVRRRDIVKIEGIDATGGNNQPNIPSITAHLWYFGLIGTCL

SEQ ID NO: 8139 - protein, 291 aa, Thermomyces lanuginosus
MRSSLVLFFVSAWTALASPIRREVSQDLFNQFNLFAQYSAAAYCGKNNRAPAGTNITCTANACPEVEKADATFLYSFEDSGVGDVTGFLALDNTNKLIVLSFRGSRSIENWIADLNFILQEINDICSGCRGHDGFTSSWRSVADTLRQKVEDAVREHPDYRVVFTGHSLGGALATVAGADLRGNKYDIDVFSYGAPRVGNRAFAEFLTVQTGGTLYRITHTNDIVPRLPPREFGYSHSSPEYWIKSGTLVPVRRRDIVKIEGIDATGGNNQPNIPSITAHLWYFGLIGTCL

SEQ ID NO: 8140 - protein, 291 aa, Thermomyces lanuginosus
MRSSLVLFFVSAWTALASPIRREVSQDLFNQFNLFAQYSAAAYCGKNNDAPAGTNITCTGNACPEVEKADATFLYSFRDSGVGDVTGFLALDNTNKLIVLSFRGSRSIENWIADLNFILIEINDICSGCRGHDGFTSSWFSVADTLRQKVEDAVREHPDYRVVFTGHSLGGALATVAGADLRGNGYDIDVFSYGAPRVGNRAFAEFLTVQTGGTLYRITHTNDIVPRLPPREFGYSHSSPEYWIKSGTLVPVRRRDIVKIEGIDATGGNNQPNIPAIYAHLWYFGAIGTCL

SEQ ID NO: 8141 - protein, 291 aa, Thermomyces lanuginosus
MRSSLVLFFVSAWTALASPIRREVSQDLFNQFNLFAQYSAAAYCGKNNDAPAGTNITCTGNACPEVEKADATFLYSFRDSGVGDVTGFLALDNTNKLIVLSFRGSRSIENWIADLNFILIEINDICSGCRGHDGFTSSWFSVADTLRQKVEDAVREHPDYRVVFTGHSLGGALATVAGADLRGNGYDIDVFSYGAPRVGNRAFAEFLTVQTGGTLYRITHTNDIVPRLPPREFGYSHSSPEYWIKSGTLVPVRRRDIVKIEGIDATGGNNQPNIPSISAHLWYFGAIGTCL

SEQ ID NO: 8142 - protein, 291 aa, Thermomyces lanuginosus
MRSSLVLFFVSAWTALASPIRREVSQDLFNQFNLFAQYSAAAYCGKNNDAPAGTNITCTGNACPEVEKADATFLYSFRDSGVGDVTGFLALDNTNKLIVLSFRGSRSIENWIADLNFILIEINDICSGCRGHDGFTSSWFSVADTLRQKVEDAVREHPDYRVVFTGHSLGGALATVAGADLRGNGYDIDVFSYGAPRVGNRAFAEFLTVQTGGTLYRITHTNDIVPRLPPREFGYSHSSPEYWIKSGTLVPVRRRDIVKIEGIDATGGNNQPNIPSVPAHLWYFGAIGTCL

SEQ ID NO: 8143 - protein, 291 aa, Thermomyces lanuginosus
MRSSLVLFFVSAWTALASPIRREVSQDLFNQFNLFAQYSAAAYCGKNNDAPAGTNITCTGNACPEVEKADATFLYSFEDSGVGCVTGFLALDNTNKLIVLSFRGTRSICNWILDLNYTPQEINDICSGCRGHDGFTSSWRSVADTLRQKVEDAVREHPDYRVVFTGHSLGGALATVAGADLRGNGYDIDVFSYGAPRVGNRAFAEFLTVQTGGTLYRITHTNDIVPRLPPREFGYSHSSPEYWIKSGTLVPVRRRDIVKIEGIDATGGNNQPNIPDIPAHLWYFGLIGTCL

SEQ ID NO: 8144 - protein, 291 aa, Thermomyces lanuginosus
MRSSLVLFFVSAWTALASPIRREVSQDLFNQFNLFAQYSAAAYCGRNNDAPAGTNITCTGNACPEVERADATFLYSFEDSGVGDVTGFLALDNTNRLIVLSFRGSRSVENWIGNLNFDLREINDICSGCRGHDGFTSSWRSVADTLRQRVEDAVREHPKYRVVFTGHSLGGGLATVAGADLRGNGYDIDVFSYGAPRVGNRAFAEFLTVQTGGTLYRITHTNDIVPRLPPREFGYSHSSPEYWIRSGTLVPVRRRDIVKIEGIDATGGNNQPNIPDIPAHLWYFGLIGTCL

SEQ ID NO: 8145 - protein, 291 aa, Thermomyces lanuginosus
MRSSLVLFFVSAWTALASPIRREVSVDLFNQFNLFAQYSAAAYCGKNNDAPAGTNITCTGNACPEVEKADATFLYSFEDAGSGDVTGFLALDNTNKLIVLSFRGTRSVENWIGNLNFDLKEINDICSGCRGHDGFTSSWRSVADTLRQKVEDAVREHPDYRVVFTGHSLGGGLATVAGADLRGNGYDIDVFSYGAPRVGNRAFAEFLTVQTGGTLYRITHTNDIVPRLPPRKFGYSHSSPEYWIKSGTGVPVRRRDIVKIEGIDATGGNNQPNIPDIKAHLWYFGLIGTCL

SEQ ID NO: 8146 - protein, 291 aa, Thermomyces lanuginosus
MRSSLVLFFVSAWTALASPIRREVSQDLFNQFNLFAQYSAAAYCGKNNDAPAGTNITCTANACPEVEKADATFLYSFEDSGVGDVTGFLALDNTNKLIVLSFRGSRSIENWIADLNFLLQEINDICSGCRGHAGFTSSWRSVADTLRQKVEDAVREHPDYRVVFTGHSLGGALATVAGADLRGNKYDIDVFSYGAPRVGNRAFAEFLTVQTGGTLYRITHTNDIVPRLPPREFGYSHSSPEYWIKSGTLVPVRRRDIVKIEGIDATGGNNQPNIPSITAHLWYFGLIGTCL

SEQ ID NO: 8147 - protein, 291 aa, Thermomyces lanuginosus
MRSSLVLFFVSAWTALASPIRREVSQDLFNQFNLFAQYSAAAYCGKNNDAPAGTXXTCTGNACPEVEKADATFLYSFEDXGVGDVTGFLALDNTNKLIVLSXRGSRSXENWIGNLNFDLKEINDICSGCRGXDGFTSSWRSVADTLRQKVEDAVREHPDYRVVFTGXSLGGALATVAGADLRGNGYDIDVFSXGAPRVGNRAFAEFLTVQTGGTLYRITXTNDIVPRLPPREFGYXXSSPEYWIKSGTLVPVTRNDIVKIEGIDATGGNNQPNIPDIPAHLWYFGLIGTCL

SEQ ID NO: 8148 - protein, 291 aa, Thermomyces lanuginosus
MRSSLVLFFVSAWTALASPIRREVSQDLFNQFNLFAQYSAAAYCGKNNDAPAGTNITCTGNACPEVEKADATFLYSFRDSGVGDVTGFLALDNTNKLIVLSFRGSRSIENWIADLNFILIEINDICSGCRGHDGFTSSWFSVADTLRQKVEDAVREHPDYRVVFTGHSLGGALATVAGADLRGNGYDIDVFSYGAPRVGNRAFAEFLTVQTGGTLYRITHTNDIVPRLPPREFGYSHSSPEYWIKSGTLVPVRRRDIVKIEGIDATGGNNQPNIPTINAHLWYFGAIGTCL

SEQ ID NO: 8149 - protein, 291 aa, Thermomyces lanuginosus
MRSSLVLFFVSAWTALASPIRREVSQDLFNQFNLFAQYSAAAYCGKNNDAPAGTNITCTGNACPEVEKADATFLYSFRDSGVGDVTGFLALDNTNKLIVLSFRGSRSIENWIADLNFILIEINDICSGCRGHDGFTSSWFSVADTLRQKVEDAVREHPDYRVVFTGHSLGGALATVAGADLRGNGYDIDVFSYGAPRVGNRAFAEFLTVQTGGTLYRITHTNDIVPRLPPREFGYSHSSPEYWIKSGTLVPVRRRDIVKIEGIDATGGNNQPNIPSITAHLWYFGAIGTCL

SEQ ID NO: 8150 - protein, 291 aa, Thermomyces lanuginosus
MRSSLVLFFVSAWTALASPIRREVSQDLFNQFNLFAQYSAAAYCGKNNDAPAGTNITCTGNACPEVEKADATFLYSFRDSGVGDVTGFLALDNTNKLIVLSFRGSRSIENWIADLNFILIEINDICSGCRGHDGFTSSWFSVADTLRQKVEDAVREHPDYRVVFTGHSLGGALATVAGADLRGNGYDIDVFSYGAPRVGNRAFAEFLTVQTGGTLYRITHTNDIVPRLPPREFGYSHSSPEYWIKSGTLVPVRRRDIVKIEGIDATGGNNQPNIPGIRAHLWYFGAIGTCL

SEQ ID NO: 8151 - protein, 291 aa, Thermomyces lanuginosus
MRSSLVLFFVSAWTALASPIRREVSQDLFNQFNLFAQYSAAAYCGKNNDAPAGTNITCTANACPEVEKADATFLYSFEDSGVGDVTGFLALDNTNKLIVLSFRGTRSLENWIADLNFILQEINDICSGCRGHAGFTSSWRSVADTLRQKVEDAVREHPDYRVVFTGHSLGGALATVAGADLRGNGYDIDVFSYGAPRVGNRAFAEFLTVQTGGTLYRITHTNDIVPRLPPREFGYSHSSPEYWIKSGTLVPVRRRDIVVIEGIDATGGNNQPNIPDIPAHLWYFGLIGTCL

SEQ ID NO: 8152 - protein, 291 aa, Thermomyces lanuginosus
MRSSLVLFFVSAWTALASPIRREVSQDLFNQFNLFAQYSAAAYCGKNNDAPAGTNITCTGNACPEVEKADATFLYSFRDSGVGDVTGFLALDNTNKLIVLSFRGSRSIENWIADLNFILIEINDICSGCRGHDGFTSSWFSVADTLRQKVEDAVREHPDYRVVFTGHSLGGALATVAGADLRGNGYDIDVFSYGAPRVGNRAFAEFLTVQTGGTLYRITHTNDIVPRLPPREFGYSHSSPEYWIKSGTLVPVRRRDIVKIEGIDATGGNNQPNIPSILAHLWYFGAIGTCL

SEQ ID NO: 8153 - protein, 291 aa, Thermomyces lanuginosus
MRSSLVLFFVSAWTALASPIRREVSQDLFNQFNLFAQYSAAAYCGKNNDAPAGTNITCTGNACPEVEKADATFLYSFRDSGVGDVTGFLALDNTNKLIVLSFRGSRSIENWIADLEFILIEINDICSGCRGHDGFTSSWFSVADTLRQKVEDAVREHPDYRVVFTGHSLGGALATVAGADLRGNGYDIDVFSYGAPRVGNRAFAEFLTVQTGGTLYRITHTNDIVPRLPPREFGYSHSSPEYWIKSGTLVPVRRRDIVKIEGIDATGGNNQPNIPSIPAHLWYFGAIGTCL

SEQ ID NO: 8154 - protein, 291 aa, Thermomyces lanuginosus
MRSSLVLFFVSAWTALASPIRREVSVDLFNQFNLFAQYSAAAYCGKNNRAPAGTNITCTANACPEVEKADATFLYSFEDSGVGDVTGFLALDNTNKLIVLSFRGSRSIENWITNLNFELKEINDICSGCRGHAGFTSSWRSVADTLRQKVEDAVREHPDYRVVFTGHSLGGALATVAGADLRGNKYDIDVFSYGAPRVGNRAFAEFLTVQTGGTLYRITHTNDIVPRLPPREFGYSHSSPEYWIKSGTLVPVRRRDIVKIEGIDATGGNNQPNIPSITAHLWYFGLIGTCL

SEQ ID NO: 8155 - protein, 291 aa, Thermomyces lanuginosus
MRSSLVLFFVSAWTALASPIRREVSQDLFNQFNLFAQYSAAAYCGKNNDAPAGTNITCTANACPEVEKADATFLYSFEDSGVGDVTGFLALDNTNKLIVLSFRGSRSIENWIADLNFILQEINDICSGCRGHAGFTSSWRSVADTLRQKVEDAVREHPDYRVVFTGHSLGGALATVAGADLRGNKYDIDVFSYGAPRVGNRAFAEFLTVQTGGTLYRITHTNDIVPRLPPREFGYSHSSPEYWIKSGTLVPVRRRDIVKIEGIDATGGNNQPNIPSITAHLWYFGLIGTCL

SEQ ID NO: 8156 - protein, 291 aa, Thermomyces lanuginosus
MRSSLVLFFVSAWTALASPIRREVSQDLFNQFNLFAQYSAAAYCGKNNDAPAGTNITCTGNACPEVEKADATFLYSFRDSGVGDVTGFLALDNTNKLIVLSFRGSRSIENWIADLNFILIEINDICSGCRGHDGFTSSWFSVADTLRQKVEDAVREHPDYRVVFTGHSLGGALATVAGADLRGNGYDIDVFSYGAPRVGNRAFAEFLTVQTGGTLYRITHTNDIVPRLPPREFGYSHSSPEYWIKSGTLVPVRRRDIVKIEGIDATGGNNQPNIPGLPAHLWYFGAIGTCL

SEQ ID NO: 8157 - protein, 291 aa, Thermomyces lanuginosus
MRSSLVLFFVSAWTALASPIRREVSQDLFNQFNLFAQYSAAAYCGKNNDAPAGTNITCTGNACPEVEKADATFLYSFRDSGVGDVTGFLALDNTNKLIVLSFRGSRSIENWIADLNFILIEINDICSGCRGHDGFTSSWFSVADTLRQKVEDAVREHPDYRVVFTGHSLGGALATVAGADLRGNGYDIDVFSYGAPRVGNRAFAEFLTVQTGGTLYRITHTNDIVPRLPPREFGYSHSSPEYWIKSGTLVPVRRRDIVKIEGIDATGGNNQPNIPLISAHLWYFGAIGTCL

SEQ ID NO: 8158 - protein, 291 aa, Thermomyces lanuginosus
MRSSLVLFFVSAWTALASPIRREVSQDLFNQFNLFAQYSAAAYCGKNNDAPAGTNITCTGNACPEVEKADATFLYSFRDSGVGDVTGFLALDNTNKLIVLSFRGSRSIENWIADLNFILIEINDICSGCRGHDGFTSSWFSVADTLRQKVEDAVREHPDYRVVFTGHSLGGALATVAGADLRGNGYDIDVFSYGAPRVGNRAFAEFLTVQTGGTLYRITHTNDIVPRLPPREFGYSHSSPEYWIKSGTLVPVRRRDIVKIEGIDATGGNNQPNIPSIRAHLWYFGAIGTCL

SEQ ID NO: 8159 - protein, 291 aa, Thermomyces lanuginosus
MRSSLVLFFVSAWTALASPIRREVSQDLFNQFNLFAQYSAAAYCGKNNDAPAGTNITCTGNACPEVEKADATFLYSFRDSGVGDVTGFLALDNTNKLIVLSFRGSRSIENWIADLNFILIEINDICSGCRGHDGFTSSWFSVADTLRQKVEDAVREHPDYRVVFTGHSLGGALATVAGADLRGNGYDIDVFSYGAPRVGNRAFAEFLTVQTGGTLYRITHTNDIVPRLPPREFGYSHSSPEYWIKSGTLVPVRRRDIVKIEGIDATGGNNQPNIPGVPAHLWYFGAIGTCL

SEQ ID NO: 8160 - protein, 290 aa, Thermomyces lanuginosus
MRSSLVLFFVSAWTALASPIRREVSQDLFNQFNLFAQYSAAAYCGKNNDAPAGTNITCTGNACPEVEKADATFLYSFRDSGVGDVTGFLALDNTNKLIVLSFRGTRSLENWIADLNFILQEINDICSGCRGHDGFTSSWFSVADTLRQKVEDAVREHPDYRVVFTGHSLGGALATVAGADLRGNGYDIDVFSYGAPRVGNRAFAEFLTVQTGGTLYRITHTNDIVPRLPPREFGYSHSSPEYWIKSGTLVPVRRRDIVKIEGIDATGGNNQPNIPSIPAHLWYFGLIGTC

SEQ ID NO: 8161 - protein, 275 aa, Synthetic construct
ASPRQRPGSQQMFNQFNLFAQYSAAAYCGKNNDAPAGTNITCTGNACPEVEKADATFLYSFEGSGVGDVTGFLALDNTNKLIVLSFRGSRSIENWIGNLKFLMKEINDICSGCRGHDGFTSSWRSVADTLRQKVEDAVREHPDYRVVFTGHSLGGALATVAGADLRGNGYDIDVFSYGAPRVGNRAFAEFLTVQTGGTLYRITHTNDIVPRLPPREFGYSHSSPEYWIKSGTLVPVTRNDIVKIEGIDATGGNNRPNIPDIPAHLWYFGLIGTCL

SEQ ID NO: 8162 - protein, 274 aa, Thermomyces lanuginosus
SPIRREVSQDLFNQFNLFAQYSAAAYCGKNNRAPAGTNITCTANACPEVEKADATFLYSFEDSGVGDVTGFLALDNTNKLIVLSFRGSRSIENWIADLNFLLQEINDICSGCRGHAGFTSSWRSVADTLRQKVEDAVREHPDYRVVFTGHSLGGALATVAGADLRGNKYDIDVFSYGAPRVGNRAFAEFLTVQTGGTLYRITHTNDIVPRLPPREFGYSHSSPEYWIKSGTLVPVRRRDIVKIEGIDATGGNNQPNIPSITAHLWYFGLIGTCV

SEQ ID NO: 8163 - protein, 274 aa, Thermomyces lanuginosus
SPIRREVSQDLYNQFKLFAHYSAAAYCGKNNDAPAGTNITCTGNACPEVEKADATFIYSFEDSGVGDVTGFLALDNTNKLIVLSFRGSRSIENWIANLNFDLKEINDICSGCRGHDGFWNSWRSVADTLRQKVEDAVREYPDYRVVFTGHSLGGALATVAGADLRGNGYDIDVFSYGAPRVGNRAFAEFLTVQTGGTLYRITHTNDIVPRLPPREFGYSHSSPEYWIKSGTLVPVTRNDIVVIEGIDATGGNNQPNIPDIPAHLWYFGLIGTCL

SEQ ID NO: 8164 - protein, 274 aa, Thermomyces lanuginosus
SPIRREVSQDLYNQFKLFAHYSAAAYCGKNNDAPAGTNITCTGNACPEVEKADATFIYSFEDSGVGDVTGFLALDNTNKLIVLSFRGSRSIENWIANLNFDLKEINDICSGCRGHDGFWESWRSVADTLRQKVEDAVREYPDYRVVFTGHSLGGALATVAGADLRGNGYDIDVFSYGAPRVGNRAFAEFLTVQTGGTLYRITHTNDIVPRLPPREFGYSHSSPEYWIKSGTLVPVTRNDIVVIEGIDATGGNNQPNIPDIPAHLWYFGLIGTCL

SEQ ID NO: 8165 - protein, 274 aa, Thermomyces lanuginosus
SPIRREVSQDLFNQFNLFAQYSAAAYCGKNNDAPAGTNITCTGNACPEVEKADATLLYSFRDSGVGDVTGFLALDNTNKLIVLSFRGSRSIENWIADLNFILIEINDICSGCRGHDGFTSSWFSVADTLRQKVEDAVREHPDYRVVFTGHSLGGALATVAGADLRGNGYDIDVFSYGAPRVGNRAFAEFLTVQTGGTLYRITHTNDIVPRLPPREFGYSHSSPEFWIKSGTLVPVRRRDIVKIEGIDAEGGNNQPNIPSIPAHLWYFGAIGTCL

SEQ ID NO: 8166 - protein, 274 aa, Thermomyces lanuginosus
SPIRREVSQDLFNQFNLFAQYSAAAYCGKNNDAPAGTNITCTGNACPEVEKADATFLYSFEDSGVGCVTGFLALDNTNKLIVLSFRTSRSICNWILDLNYTPQEINDICSGCRGHDGFTSSWRSVADTLRQKVEDAVREHPDYRVVFTGHSLGGALATVAGADLRGNGYDIDVFSYGAPRVGNRAFAEFLTVQTGGTLYRITHTNDIVPRLPPREFGYSHSSPEYWIKSGTLVPVTRNDIVKIEGIDATGGNNQPNIPDIPAHLWYFGLIGTCL

SEQ ID NO: 8167 - protein, 269 aa, Thermomyces lanuginosus
EKSQDLFNQFNLFAQYSAAAYCGKNNDAPAGTKITCTGNACPEVEKADATILYSFEDSGVGDVTGFLARDNTNKLIVLSFRGSRSIENWIGNLNFDLEEINDICSGCRGHDGFTSSWRSVADTLRQKVEDAVREHPDYRVVFAGHSLGGALATVAGADLRGNGYDIDVFSYGAPRLGNRAFAEFLTVQTGGTLYRITHTNDIVPRLPPRKFGYSHSSPEYWIKSGTGVPVRRRDIVKIEGIDATGGNNQPNIPDIPAHLWYFGLIGTCL

SEQ ID NO: 8168 - protein, 269 aa, Thermomyces lanuginosus
EVSQDLFNQFNLFAQYSAAAYCGKNNDAPAGTNITCTGNACPEVEKADATFLYSFEDTGKGDVTGFLALDNTNKLIVLSFRGTRSVENWIGNLKFDLKEINDICSGCRGHDGFTSSWRSVADTLRQKVEDAVREHPDYRVVFTGHSLGGGLATVAGADLRGNGYDIDVFSYGAPRVGNRAFAEFLTVQTGGTLYRITHTNDIVPRLPPRVFGYSHSSPEYWIKSGTGVPVRRRDIVKIEGIDATGGNNQPNIPDIKAHLWYFGLIGTCL

SEQ ID NO: 8169 - protein, 269 aa, Thermomyces lanuginosus
EYSQDLFNQFNLFAQYSAAAYCGKNNDAPAGTKITCTGNACPEVEKADATVLYSFEDSGVGDVTGFLARDNTNKLIVLSFRGSRSIENWIGNLNFDLEEINDICSGCRGHDGFTSSWRSVADTLRQKVEDAVREHPDYRVVFTGHSLGGALATVAGADLRGNGYDIDVFSYGAPRLGNRAFAEFLTVQTGGTLYRITHTNDIVPRLPPRKFGYSHSSPEYWIKSGTGVPVRRRDIVKIEGIDATGGNNQPNIPDIPIHLWYFGLIGTCL

SEQ ID NO: 8170 - protein, 269 aa, Thermomyces lanuginosus
EVSQDLFNQFNLFAQYSAAAYCSKNNNAPAGTNITCTGNACPEVEKADATILYSFRDSGVGDVTGFLALDNTNKLIVLSFRGSRSIENWIGNLNFDLIEINDICSGCRGHDGFTSSWFSVADTLRQKVEDAVREHPDYRVVFTGHSLGGALATVAGADLRGNGYDIDVFSYGAPRVGNRAFAEFLTVQTGGTLYRITHTNDIVPRLPPREFGYSHSSPEFWIKSGTLVPVRRRDIVKIEGIDAEGGNNQPNIPDITAHLWYFGLIGTCL

SEQ ID NO: 8171 - protein, 269 aa, Thermomyces lanuginosus
EVSQDLFNQFNLFAQYSAAAYCGKNNDAPAGTKITCTGNACPEVEKADATILYSFEDSGVGDVTGFLALDNTNKLIVLSFRGSRSIENWIGNLNFDLEEIDDICSGCRGHDGFTSSWRSVADTLRQKVEDAVREHPDYRVVFTGHSLGGALATVAGADLRNNGYDIDVFSYGAPRVGNRAFAEFLTVQTGGTLYRITSTNDIVPRLPPRKFGYSHSSPEFWIKSGTLVPVRRRDIVKIEGIDATGGNNQPNIPDIPVHLWYFGLIGTCL

SEQ ID NO: 8172 - protein, 269 aa, Thermomyces lanuginosus
EVSQDLFNQFNLFAQYSAAAYCGKNNDAPAGTNITCTGNACPEVEKADATFLYSFEDNGSGDVTGFLALDNTNKLIVLSFRGSRSVENWIGNLNFDLKEINDICSGCRGHDGFTSSWRSVADTLRQKVEDAVREHPDYRVVFTGHSLGGGLATVARADLRGNGYDIDVFSYGAPRVGNRAFAEFLTVQTGGTLYRITHTNDIVPRLPPRKFGYSHSSPEYWIKSGTGVPVRRRDIVKIEGIDATGGNNQPNIPDAKAHLWYFGLIGTCL

SEQ ID NO: 8173 - protein, 269 aa, Thermomyces lanuginosus
EYSQDLFNQFNLFAQYSAAAYCGKNNDAPAGTKITCTGNACPEVEKADATLLYSFEDSGVGDVTGFLARDNTNKLIVLSFRGSRSIENWIGNLNFDLEEINDICSGCRGHDGFTSSWRSVADTLRQKVEDAVREHPDYRVVFTGHSLGGALATVAGADLRGNGYDIDVFSYGAPRLGNRAFAEFLTVQTGGTLYRITHTNDIVPRLPPRKFGYSHSSPEYWIKFGTGVPVRRRDIVKIEGIDATGGNNQPNIPDIPAHLWYFGLIGTCL

SEQ ID NO: 8174 - protein, 269 aa, Thermomyces lanuginosus
EKSQDLFNQFNLFAQYSAAAYCGKNNDAPAGTKITCTGNACPEVEKADATVLYSFEDSGVGDVTGFLARDNTNKLIVLSFRGSRSIENWIGNLNFDLEEINDICSGCRGHDGFTSSWRSVADTLRQKVEDAVREHPDYRVVFTGHSLGGALATVAGADLRGNGYDIDVFSYGAPRLGNRAFAEFLTVQTGGTLYRITHTNDIVPRLPPRKFGYSHSSPEYWIKSGTGVPRRRRDIVKIEGIDATGGNNQPNIPDIPAHLWYFGLIGTCL

SEQ ID NO: 8175 - protein, 269 aa, Thermomyces lanuginosus
EVSQDLFNQFNLFAQYSAAAYCGKNNDAPAGTQITCTGNACPEVEKADATFLYSFEDAGSGDVTGFLALDNTNKLIVLSFRGSRSVENWIGNLNFDLKEINDICSGCRGHDGFTSSWRSVADTLRQKVEDAVREHPDYRVVFSGHSLGGGLATVAGADLRGNGYDIDVFSYGAPRVGNRAFAEFLTVQTGGTLYRITHTNDIVPRLPPREFGYSHSSPEYWIKSGTGVPVRRRDIVKIEGIDATGGNNQPNIPDAKAHLWYFGLIGTCL

SEQ ID NO: 8176 - protein, 269 aa, Thermomyces lanuginosus
EVSQDLFNQFNLFAQYSAAAYCGKNNRAPAGTNITCTANACPEVEKADATLLYSFKDSGVGDVTGFLALDNTNKLIVLSFRGSRSIENWIGNLNFELKEINDICSGCRGHAGFTSSWRSVADTLRQKVEDAVREHPDYRVVFTGHSLGGALATVAGADLRGNKYDIDVFSYGAPRVGNRAFAEFLTVQTGGTLYRITHTNDIVPRLPPREFGYSHSSPEYWIKSGTLVPVRRRDIVKIEGIDATGGNNQPNIPSITAHLWYFGLIGTCL

SEQ ID NO: 8177 - protein, 269 aa, Thermomyces lanuginosus
EYSQDLFNQFNLFAQYSAAAYCGKNNDAPAGTKITCTGNACPEVEKADATVLYSFEDSGVGDVTGFLARDNTNKLIVLSFRGSRSIENWIGNLNFDLEEINDICSGCRGHDGFTSSWRSVADTLRQKVEDAVREHPDYRVVFTGHSLGGALATVAGADLRGNGYDIDVFSYGAPRLGNRAFAEFLTVQTGGTLYRITITNDIVPRLPPRKFGYSHSSPEYWIKSGTGVPVRRRDIVKIEGIDATGGNNQPNIPDIPAHLWYFGLIGTCL

SEQ ID NO: 8178 - protein, 269 aa, Thermomyces lanuginosus
EYSQDLFNQFNLFAQYSAAAYCGKNNDAPAGTKITCTGNACPEVEKADATLLYSFEDSGVGDVTGFLARDNTNKLIVLSFRGSRSIENWIGNLNFDLEEINDICSGCRGHDGFTSSWRSVADTLRQKVEDAVREHPDYRVVFTGHSLGGALATVAGADLRGNGYDIDVFSYGAPRLGNRAFAEFLTVQTGGTLYRITLTNDIVPRLPPRKFGYSHSSPEYWIKSGTGVPVRRRDIVKIEGIDATGGNNQPNIPDIPAHLWYFGLIGTCL

SEQ ID NO: 8179 - protein, 269 aa, Thermomyces lanuginosus
EKSQDLFNQFNLFAQYSAAAYCGKNNRAPAGTKITCTANACPEVEKADATFLYSFEDSGVGDVTGFLALDNTNKLIVLSFRGSRSIENWIGNLNFELKEINDICSGCRGHAGFTSSWRSVADTLRQKVEDAVREHPDYRVVFTGHSLGGALATVAGADLRGNKYDIDVFSYGAPRVGNRAFAEFLTVQTGGTLYRITHTNDIVPRLPPREFGYSHSSPEYWIKSGTLVPVRRRDIVKIEGIDATGGNNQPNIPSITAHLWYFGLIGTCL

SEQ ID NO: 8180 - protein, 269 aa, Thermomyces lanuginosus
EKSQDLFNQFNLFAQYSAAAYCGKNNDAPAGTKITCTGNACPEVEKADATVLYSFEDSGVGDVTGFLARDNTNKLIVLSFRGSRSIENWIGNLNFDLEEINDICSGCRGHDGFTSSWRSVADTLRQKVEDAVREHPDYRVVFTGHSLGGALATVAGADLRGNGYDIDVFSYGAPRLGNRAFAEFLTVQTGGTLYRITSTNDIVPRLPPRKFGYSHSSPEYWIKSGTGVPVRRRDIVKIEGIDATGGNNQPNIPDIPAHLWYFGLIGTCL

SEQ ID NO: 8181 - protein, 269 aa, Thermomyces lanuginosus
EVSQDLFNQFNLFAQYSAAAYCGKNNRAPAGTQITCTANACPEVEKADATFLYSFEDSGVGDVTGFLALDNTNKLIVLSFRGSRSIENWITNLNFELKEINDICSGCRGHAGFTSSWRSVADTLRQKVEDAVREHPDYRVVFTGHSLGGALATVAGADLRGNKYDIDVFSYGAPRVGNRAFAEFLTVQTGGTLYRITHTNDIVPRLPPREFGYSHSSPEYWIKSGTLVPVRRRDIVKIEGIDATGGNNQPNIPSITAHLWYFGLIGTCL

SEQ ID NO: 8182 - protein, 269 aa, Thermomyces lanuginosus
EKSQDLFNQFNLFAQYSAAAYCGKNNRAPAGTNITCTANACPEVEKADATVLYSFEDSGVGDVTGFLALDNTNKLIVLSFRGSRSIENWIGNLNFELKEINDICSGCRGHAGFTSSWRSVADTLRQKVEDAVREHPDYRVVFTGHSLGGALATVAGADLRGNKYDIDVFSYGAPRVGNRAFAEFLTVQTGGTLYRITHTNDIVPRLPPREFGYSHSSPEYWIKSGTLVPVRRRDIVKIEGIDATGGNNQPNIPSITAHLWYFGLIGTCL

SEQ ID NO: 8183 - protein, 269 aa, Thermomyces lanuginosus
EVSQDLFNQFNLFAQYSAAAYCGKNNRAPAGTNITCTGNACPEVEKADATVLYSFEDSGVGDVTGFLALDNTNKLIVLSFRGSRSIKNWIGNLNFELEEINDICSGCRGHAGFTSSWRSVADTLRQKVEDAVREHPDYRVVFTGHSLGGALATVAGADLRGNKYDIDVFSYGAPRVGNRAFAEFLTVQTGGTLYRITHTNDIVPRLPPREFGYSHSSPEYWIKSGTLVPVRRRDIVKIEGIDATGGNNQPNIPSITAHLWYFGLIGTCL

SEQ ID NO: 8184 - protein, 269 aa, Thermomyces lanuginosus
EYSQDLFNQFNLFAQYSAAAYCGKNNDAPAGTKITCTGNACPEVEKADATVLYSFEDSGVGDVTGFLARDNTNKLIVLSFRGSRSIENWIGNLNFDLEEINDICSGCRGHDGFTSSWRSVADTLRQKVEDAVREHPDYRVVFTGHSLGGGLATVAGADLRGNGYDIDVFSYGAPRLGNRAFAEFLTVQTGGTLYRITHTNDIVPRLPPRKFGYSHSSPEYWIKSGTGVPVRRRDIVKIEGIDATGGNNQPNIPDIPAHLWYFGLIGTCL

SEQ ID NO: 8185 - protein, 269 aa, Thermomyces lanuginosus
EKSQDLFNQFNLFAQYSAAAYCGKNNDAPAGTKITCTGNACPEVEKADATILYSFEDSGVGDVTGFLARDNTNKLIVLSFRGSRSIENWIGNLNFDLEEINDICSGCRGHDGFTSSWRSVADTLRQKVEDAVREHPDYRVVFTGHSLGGALATVAGADLRGNGYDIDVFSYGAPRLGNRAFAEFLTVQTGGTLYRITHTNDIVPRLPPRKFGYSHSSPEYWIKSGTGVPVRRRDIVKIEGIDATGGNNQPNIPDIPVHLWYFGLIGTCL

SEQ ID NO: 8186 - protein, 269 aa, Thermomyces lanuginosus
EVSQDLFNQFNLFAQYSAAAYCGKNNDAPAGTKITCTGNACPEVEKADATVLYSFEDSGVGDVTGFLALDNTNKLIVLSFRGSRSIENWIGNLNFDLEEIDDICSGCRGHDGFTSSWRSVADTLRQKVEDAVREHPDYRVVFTGHSLGGALATVAGADLRNNGYDIDVFSYGAPRVGNRAFAEFLTVQTGGTLYRITSTNDIVPRLPPRKFGYSHSSPEFWIKSGTLVPVRRRDIVKIEGIDATGGNNQPNIPDIPVHLWYFGLIGTCL

SEQ ID NO: 8187 - protein, 269 aa, Thermomyces lanuginosus
EYSQDLFNQFNLFAQYSAAAYCGKNNDAPAGTKITCTGNACPEVEKADATLLYSFEDSGVGDVTGFLARDNTNKLIVLSFRGSRSIENWIGNLNFDLEEINDICSGCRGHDGFTSSWRSVADTLRQKVEDAVREHPDYRVVFTGHSLGGGLATVAGADLRGNGYDIDVFSYGAPRLGNRAFAEFLTVQTGGTLYRITHTNDIVPRLPPRKFGYSHSSPEYWIKSGTGVPVRRRDIVKIEGIDATGGNNQPNIPDIPAHLWYFGLIGTCL

SEQ ID NO: 8188 - protein, 269 aa, Thermomyces lanuginosus
EYSQDLFNQFNLFAQYSAAAYCGKNNDAPAGTKITCTGNACPEVEKADATILYSFEDSGVGDVTGFLARDNTNKLIVLSFRGSRSIENWIGNLNFDLEEINDICSGCRGHDGFTSSWRSVADTLRQKVEDAVREHPDYRVVFTGHSLGGALATVAGADLRGNGYDIDVFSYGAPRLGNRAFAEFLTVQTGGTLYRITHTNDIVPRLPPRKFGYSHSSPEYWIKSGTGVPVRRRDIVKIEGIDATGGNNQPNIPDIPIHLWYFGLIGTCL

SEQ ID NO: 8189 - protein, 269 aa, Thermomyces lanuginosus
EVSQDLFNQFNLFAQYSAAAYCGKNNRAPAGTNITCTANACPEVEKADATFLYSFEDSGVGDVTGFLALDNTNKLIVLSFRGSRSIENWIGNLNFELKEINDICSGCRGHAGFTSSWRSVADTLRQKVEDAVREHPDYRVVFTGHSLGGALATVAGADLRGNKYDIDVFSYGAPRVGNRAFAEFLTVQTGGTLYRITHTNDIVPRLPPREFGYSHSSPEYWIKSGTLVPVRRRDIVKIEGIDATGGNNQPNIPSTTVHLWYFGLIGTCL

SEQ ID NO: 8190 - protein, 269 aa, Thermomyces lanuginosus
EKSQDLFNQFNLFAQYSAAAYCGKNNDAPAGTKITCTGNACPEVEKADATVLYSFEDSGVGDVTGFLARDNTNKLIVLSFRGSRSIENWIGNLNFDLEEINDICSGCRGHDGFTSSWRSVADTLRQKVEDAVREHPDYRVVFTGHSLGGALATVAGADLRGNGYDIDVFSYGAPRLGNRAFAEFLTVQTGGTLYRITYTNDIVPRLPPRKFGYSHSSPEYWIKSGTGVPVRRRDIVKIEGIDATGGNNQPNIPDIPAHLWYFGLIGTCL

SEQ ID NO: 8191 - protein, 269 aa, Thermomyces lanuginosus
EYSQDLFNQFNLFAQYSAAAYCGKNNDAPAGTKITCTGNACPEVEKADATVLYSFEDSGVGDVTGFLARDNTNKLIVLSFRGSRSIENWIGNLNFDLEEINDICSGCRGHDGFTSSWRSVADTLRQKVEDAVREHPDYRVVFTGHSLGGALATVAGADLRGNGYDIDVFSYGAPRLGNRAFAEFLTVQTGGTLYRITHTNDIVPRLPPRKFGYSHSSPEYWIKSGTGVPVRRRDIVKIEGIDATGGNNQPNIPDIPVHLWYFGLIGTCL

SEQ ID NO: 8192 - protein, 269 aa, Thermomyces lanuginosus
EVSQDLFNQFKLFAQYSAAAYCQKNNSAPAGTNITCTGNACPEVEKADATFLYSFEDSGVGDVTGFLALDNTNKRIVLSFRGSRSIENWIGNLRFDLKEINDICSGCRGHAGFTSSWRSVADTLRQKVEDAVREHPDYRVVFTGHSLGGALATIAWADLRGNGYDIDVFSYGAPRVGNRAFAEFLTNQQGGTLYRITHTNDIVPRLPPREFGYSHSSPEYWIKSGTLVPVTRNDIVKIEGIDATGGNNQPNIPDIPAHLWYFGRIGTCL

SEQ ID NO: 8193 - protein, 269 aa, Thermomyces lanuginosus
EVSQDLFNQFNLFAQYSAAAYCGKNNRAPAGTQITCTGSACPEVEKADATFLYSFEDSGVGDVTGFLALDNTNKLIVLSFRGSRSIENWINNLRFDLKEINDICSGCRGHAGFTSSWRSVADTLRQKVEDAVREHPDYRVVFTGHSLGGALATVAGADLRGNGYDIDVFSYGAPRVGNRAFAEFLTVQTGGTLYRITHTNDIVPRLPPREFGYSHPSPEYWIKSGTGVPVRRRDIVKIEGIDATGGNNQPNIPDITAHLWYFGLIGTCL

SEQ ID NO: 8194 - protein, 269 aa, Thermomyces lanuginosus
EYSQDLFNQFNLFAQYSAAAYCGKNNDAPAGTKITCTGNACPEVEKADATLLYSFEDSGVGDVTGFLARDNTNKLIVLSFRGSRSIENWIGNLNFDLEEINDICSGCRGHDGFTSSWRSVADTLRQKVEDAVREHPDYRVVFTGHSLGGALATVAGADLRGNGYDIDVFSYGAPRLGNRAFAEFLTVQTGGTLYRITNTNDIVPRLPPRKFGYSHSSPEYWIKSGTGVPVRRRDIVKIEGIDATGGNNQPNIPDIPAHLWYFGLIGTCL

SEQ ID NO: 8195 - protein, 269 aa, Thermomyces lanuginosus
EVSQDLFNQFNLFAQYSKAAYCQKNNSAEAGTNITCTGNACPEVEKADATFLYSFEDMGVGDVTGFLALDNTNKQIILSFRGSRSIENWIGNLNFDLKEINDICSGCKGHDGFTSSWRSVADTLRQKVEDAVREFPDYRVVFTGHSLGGALATVAWADLRGNGYDIDVFSYGAPRVGNRAFAEFLTTQTGGTLYRITHTNDIVPRLPPREFGYSHSSPEYWIKSGTLVPVTRNDIVKIEGIDATGGNNQPNIPDIPAHLWYFGLIGTCL

SEQ ID NO: 8196 - protein, 269 aa, Thermomyces lanuginosus
EVSQDLFNQFNLFAQYSAAAYCGKNNRAPAGTKITCTANACPEVEKADATVLYSFEDSGVGDVTGFLALDNTNKLIVLSFRGSRSIENWIGNLNFELKEINDICSGCRGHAGFTSSWRSVADTLRQKVEDAVREHPDYRVVFTGHSLGGALATVAGADLRGNKYDIDVFSYGAPRVGNRAFAEFLTVQTGGTLYRITHTNDIVPRLPPREFGYSHSSPEYWIKSGTLVPVRRRDIVKIEGIDATGGNNQPNIPSITAHLWYFGLIGTCL

SEQ ID NO: 8197 - protein, 269 aa, Thermomyces lanuginosus
EVSQDLFNQFNLFAQYSAAAYCGKNNRAPAGTNITCTANACPEVEKADATFLYSFEDSGVGDVTGFLALDNTNKLIVLSFRGSRSIENWIGNLNFELKEINDICSGCRGHAGFTSSWRSVADTLRQKVEDAVREHPDYRVVFTGHSLGGALATVAGADLRGNKYDIDVFSYGAPRVGNRAFAEFLTVQTGGTLYRITHTNDIVPRLPPRKFGYSHSSPEYWIKSGTLVPVRRRDIVKIEGIDSTGGNNQPNIPSITAHLWYFGLIGTCL

SEQ ID NO: 8198 - protein, 269 aa, Thermomyces lanuginosus
EVSQDLFNQFNLFAQYSAAAYCSKNNNAPAGTNITCTGNICPEVEKADATILYSFRDSGEGDVTGFLALDNTNKLIVLSFRGSRSIENWIGNLNFDLKEINDICSGCRGHDGFTSSWFSVADTLRQKVEDAVREHPDYRVVFTGHSLGGALATVAGADLRGNGYDIDVFSYGAPRVGNRAFAEFLTVQTGGTLYRITHTNDIVPRLPPREFGYSHSSPEYWIKSGTLVPVRRRDIVKIEGIDAEGGNNQPNIPDITAHLWYFGLIGTCL

SEQ ID NO: 8199 - protein, 269 aa, Thermomyces lanuginosus
EYSQDLFNQFNLFAQYSAAAYCGKNNDAPAGTKITCTGNACPEVEKADATVLYSFEDSGVGDVTGFLARDNTNKLIVLSFRGSRSIENWIGNLNFDLEEINDICSGCRGHDGFTSSWRSVADTLRQKVEDAVREHPDYRVVFTGHSLGGALATVAGADLRGNGYDIDVFSYGAPRLGNRAFAEFLTVQTGGTLYRITHTNDIVPRLPPRKFGYSHSSPEYWIKSGTGVPVRRRDIVKIEGIDATGGNNQPNIPDGPAHLWYFGLIGTCL

SEQ ID NO: 8200 - protein, 269 aa, Thermomyces lanuginosus
EYSQDLFNQFNLFAQYSAAAYCGKNNDAPAGTKITCTGNACPEVEKADATILYSFEDSGVGDVTGFLARDNTNKLIVLSFRGSRSIENWIGNLNFDLEEINDICSGCRGHDGFTSSWRSVADTLRQKVEDAVREHPDYRVVFTGHSLGGALATVAGADLRGNGYDIDVFSYGAPRLGNRAFAEFLTVQTGGTLYRITHTNDIVPRLPPRKFGYSHSSPEYWIKIGTGVPVRRRDIVKIEGIDATGGNNQPNIPDIPAHLWYFGLIGTCL

SEQ ID NO: 8201 - protein, 269 aa, Thermomyces lanuginosus
EYSQDLFNQFNLFAQYSAAAYCGKNNDAPAGTKITCTGNACPEVEKADATLLYSFEDSGVGDVTGFLARDNTNKLIVLSFRGSRSIENWIGNLNFDLEEINDICSGCRGHDGFTSSWRSVADTLRQKVEDAVREHPDYRVVFTGHSLGGALATVAGADLRGNGYDIDVFSYGAPRLGNRAFAEFLTVQTGGTLYRITHTNDIVPRLPPRKFGYSHSSPEYWIKSGTGVPVRRRDIVKIEGIDATGGNNQPNIPDIPIHLWYFGLIGTCL

SEQ ID NO: 8202 - protein, 269 aa, Thermomyces lanuginosus
EVSVDLFNQFNLFAQYSAAAYCGKNNDAPAGTNITCTGNACPEVEKADATFLYSFEDAGSGDVTGFLALDNTNKLIVLSFRGTRSVENWIGNLNFDLKEINDICSGCRGHDGFTSSWRSVADTLRQKVEDAVREHPDYRVVFTGHSLGGGLATVAGADLRGNGYDIDVFSYGAPRVGNRAFAEFLTVQTGGTLYRITHTNDIVPRLPPRKFGYSHSSPEYWIKSGTGVPVRRRDIVKIEGIDATGGNNQPNIPDIKAHLWYFGLIGTCL

SEQ ID NO: 8203 - protein, 269 aa, Thermomyces lanuginosus
EVSQDLFNQFNLFAQYSKAAYCKKNNDAPAGTNITCTGNACPEVEKADATFLYSFEDSGVGDVTGFLALDNTNKRIVLSFRGSRSIENWIGNLRFDLKEINDICSGCRGHAGFTSSWRSVADTLRQKVEAAVREHPDYRVVFTGHSLGGALATIAWADLRGNGYDIDVFSYGAPRVGNRAFAEFLTNQQGGTLYRITHTNDIVPRLPPREFGYSHSSPEYWIKSGTLVPVTRNDIVKIEGIDATGGNNQPNIPDIPAHLWYFGRIGTCL

SEQ ID NO: 8204 - protein, 269 aa, Thermomyces lanuginosus
EYSQDLFNQFNLFAQYSAAAYCGKNNDAPAGTKITCTGNACPEVEKADATLLYSFEDSGVGDVTGFLARDNTNKLIVLSFRGSRSIENWIGNLNFDLEEINDICSGCRGHDGFTSSWRSVADTLRQKVEDAVREHPDYRVVFTGHSLGGALATVAGADLRGNGYDIDVFSYGAPRLGNRAFAEFLTVQTGGTLYRITHTNDIVPRLPPRKFGYSHSSPEYWIKSGTGVPRRRRDIVKIEGIDATGGNNQPNIPDIPAHLWYFGLIGTCL

SEQ ID NO: 8205 - protein, 269 aa, Thermomyces lanuginosus
EYSQDLFNQFNLFAQYSAAAYCGKNNDAPAGTKITCTGNACPEVEKADATVLYSFEDSGVGDVTGFLARDNTNKLIVLSFRGSRSIENWIGNLNFDLEEINDICSGCRGHDGFTSSWRSVADTLRQKVEDAVREHPDYRVVFTGHSLGGALATVAGADLRGNGYDIDVFSYGAPRLGNRAFAEFLTVQTGGTLYRITHTNDIVPRLPPRKFGYSHSSPEYWIKPGTGVPVRRRDIVKIEGIDATGGNNQPNIPDIPAHLWYFGLIGTCL

SEQ ID NO: 8206 - protein, 269 aa, Thermomyces lanuginosus
EYSQDLFNQFNLFAQYSAAAYCGKNNDAPAGTKITCTGNACPEVEKADATVLYSFEDSGVGDVTGFLARDNTNKLIVLSFRGSRSIENWIGNLNFDLEEINDICSGCRGHDGFTSSWRSVADTLRQKVEDAVREHPDYRVVFTGHSLGGALATVAGADLRGNGYDIDVFSYGAPRLGNRAFAEFLTVQTGGTLYRITYTNDIVPRLPPRKFGYSHSSPEYWIKSGTGVPVRRRDIVKIEGIDATGGNNQPNIPDIPAHLWYFGLIGTCL

SEQ ID NO: 8207 - protein, 269 aa, Thermomyces lanuginosus
EKSQDLFNQFNLFAQYSAAAYCGKNNDAPAGTKITCTGNACPEVEKADATVLYSFEDSGVGDVTGFLARDNTNKLIVLSFRGSRSIENWIGNLNFDLEEINDICSGCRGHDGFTSSWRSVADTLRQKVEDAVREHPDYRVVFTGHSLGGALATVAGADLRGNGYDIDVFSYGAPRLGNRAFAEFLTVQTGGTLYRITHTNDIVPRLPPRKFGYSHSSPEYWIKSGTGVPVRRRDIVKIEGIDATGGNNQPNIPDIPIHLWYFGLIGTCL

SEQ ID NO: 8208 - protein, 269 aa, Thermomyces lanuginosus
EYSQDLFNQFNLFAQYSAAAYCGKNNDAPAGTKITCTGNACPEVEKADATLLYSFEDSGVGDVTGFLARDNTNKLIVLSFRGSRSIENWIGNLNFDLEEINDICSGCRGHDGFTSSWRSVADTLRQKVEDAVREHPDYRVVFTGHSLGGALATVAGADLRGNGYDIDVFSYGAPRLGNRAFAEFLTVQTGGTLYRITITNDIVPRLPPRKFGYSHSSPEYWIKSGTGVPVRRRDIVKIEGIDATGGNNQPNIPDIPAHLWYFGLIGTCL

SEQ ID NO: 8209 - protein, 269 aa, Thermomyces lanuginosus
EYSQDLFNQFNLFAQYSAAAYCGKNNDAPAGTKITCTGNACPEVEKADATLLYSFEDSGVGDVTGFLARDNTNKLIVLSFRGSRSIENWIGNLNFDLEEINDICSGCRGHDGFTSSWRSVADTLRQKVEDAVREHPDYRVVFTGHSLGGALATVAGADLRGNGYDIDVFSYGAPRLGNRAFAEFLTVQTGGTLYRITHTNDIVPRLPPRKFGYSHSSPEYWIKSGTGVPVRRRDIVKIEGIDATGGNNQPNIPDIPVHLWYFGLIGTCL

SEQ ID NO: 8210 - protein, 269 aa, Thermomyces lanuginosus
EVSQDLFNQFNLFAQYSAAAYCGKNNRAPAGTNITCTANACPEVEKADATVLYSFEDSGVGDVTGFLALDNTNKLIVLSFRGSRSIENWIGNLNFELKEINDICSGCRGHAGFTSSWRSVADTLRQKVEDAVREHPDYRVVFTGHSLGGALATVAGADLRGNKYDIDVFSYGAPRLGNRAFAEFLTVQTGGTLYRITHTNDIVPRLPPREFGYSHSSPEYWIKSGTLVPVRRRDIVKIEGIDATGGNNQPNIPSITAHLWYFGLIGTCL

SEQ ID NO: 8211 - protein, 269 aa, Thermomyces lanuginosus
EVSQDLFNQFNLFAQYSAAAYCGKNNRAPAGTNITCTGNACPEVEKADATVLYSFEDSGVGDVTGFLALDNTNKLIVLSFRGSRSIENWIGNLNFELEEIDDICSGCRGHAGFTSSWRSVADTLRQKVEDAVREHPDYRVVFTGHSLGGALATVAGADLRGNKYDIDVFSYGAPRVGNRAFAEFLTVQTGGTLYRITHTNDIVPRLPPREFGYSHSSPEYWIKSGTLVPVRRRDIVKIEGIDATGGNNQPNIPSITAHLWYFGLIGTCL

SEQ ID NO: 8212 - protein, 269 aa, Thermomyces lanuginosus
EVSQDLFNQFNLFAQYSAAAYCGKNNRAPAGTQITCTGNACPEVEKADATFLYSFEDSGVGDVTGFLALDNTNKLIVLSFRGSRSIENWITNLNFEQKEINDICSGCRGHAGFTSSWRSVADTLRQKVEDAVREHPDYRVVFTGHSLGGALATVAGADLRGNKYDIDVFSYGAPRVGNRAFAEFLTVQTGGTLYRITHTNDIVPRLPPREFGYSHSSPEYWIKSGTLVPVRRRDIVKIEGIDATGGNNQPNIPSITAHLWYFGLIGTCL

SEQ ID NO: 8213 - protein, 269 aa, Thermomyces lanuginosus
EVSQDLFNQFNLFAQYSAAAYCGKNNRAPAGTPITCTANACPEVEKADATVLYSFEDSGVGDVTGFLALDNTNKLIVLSFRGSRSIENWIGNLNFELKEINDICSGCRGHAGFTSSWRSVADTLRQKVEDAVREHPDYRVVFTGHSLGGALATVAGADLRGNKYDIDVFSYGAPRVGNRAFAEFLTVQTGGTLYRITHTNDIVPRLPPREFGYSHSSPEYWIKSGTLVPVRRRDIVKIEGIDATGGNNQPNIPSITAHLWYFGLIGTCL

SEQ ID NO: 8214 - protein, 269 aa, Thermomyces lanuginosus
EVSQDLFNQFNLFAQYSKAAYCLKNNDAPAGTNITCTGNACPEVEKADATFLYSFEDSGVGDVTGFLALDNTNKRIVLSFRGSRSIENWIGNLRFDLKEINDICSGCRGHAGFTSSWRSVADTLRQKVEAAVREHPDYRVVFTGHSLGGALATIAWADLRGNGYDIDVFSYGAPRVGNRAFAEFLTNQQGGTLYRITHTNDIVPRLPPREFGYSHSSPEYWIKSGTLVPVTRNDIVKIEGIDATGGNNQPNIPDIPAHLWYFGRIGTCL

SEQ ID NO: 8215 - protein, 269 aa, Thermomyces lanuginosus
EYSQDLFNQFNLFAQYSAAAYCGKNNDAPAGTKITCTGNACPEVEKADATILYSFEDSGVGDVTGFLARDNTNKLIVLSFRGSRSIENWIGNLNFDLEEINDICSGCRGHDGFTSSWRSVADTLRQKVEDAVREHPDYRVVFTGHSLGGALATVAGADLRGNGYDIDVFSYGAPRLGNRAFAEFLTVQTGGTLYRITYTNDIVPRLPPRKFGYSHSSPEYWIKSGTGVPVRRRDIVKIEGIDATGGNNQPNIPDIPAHLWYFGLIGTCL

SEQ ID NO: 8216 - protein, 269 aa, Thermomyces lanuginosus
EYSQDLFNQFNLFAQYSAAAYCGKNNDAPAGTKITCTGNACPEVEKADATILYSFEDSGVGDVTGFLARDNTNKLIVLSFRGSRSIENWIGNLNFDLEEINDICSGCRGHDGFTSSWRSVADTLRQKVEDAVREHPDYRVVFAGHSLGGALATVAGADLRGNGYDIDVFSYGAPRLGNRAFAEFLTVQTGGTLYRITHTNDIVPRLPPRKFGYSHSSPEYWIKSGTGVPVRRRDIVKIEGIDATGGNNQPNIPDIPAHLWYFGLIGTCL

SEQ ID NO: 8217 - protein, 269 aa, Thermomyces lanuginosus
EVSRDLFNQFNLFAQYSAAAYCGKNNQAPAGTQITCTGNACPEVEKADATFLYSFEDSGVGDVTGFLALDNTNKLIVLSFRGSRSIENWITNLSFDLKEINDICSGCRGHAGFTSSWRSVADTLRQKVEDAVREHPDYRVVFTGHSLGGALATVAGADLRGNGYDIDVFSYGAPRVGNRAFAEFLTVQTGGTLYRITHTNDIVPRLPPREFGYSHPSPEYWIKSGTGVPVRRRDIVKIEGIDATGGNNQPNIPDITAHLWYFGLIGTCL

SEQ ID NO: 8218 - protein, 269 aa, Thermomyces lanuginosus
EVSRDLFNQFNLFAQYSAAAYCGKNNDAPAGTKITCTGNACPEVEKADATILYSFEDSGVGDVTGFLALDNTNKLIVLSFRGSRSIENWIGNLNFDLKEINDICSGCRGHDGFTSSWRSVADTLRQKVEDAVREHPDYRVVFTGHSLGGALATVAGADLRGNNYSIDVFSYGAPRVGNRAFAEFLTVQTGGTLYRITNTNDCVPRLPPRQFGYSHSSPEYWIKSGTLPPVRRNDIVKIEGIDATGGNNQPNICDIPAHLWYFGLIGTCL

SEQ ID NO: 8219 - protein, 269 aa, Thermomyces lanuginosus
EYSQDLFNQFNLFAQYSAAAYCGKNNDAPAGTKITCTGNACPEVEKADATLLYSFEDSGVGDVTGFLARDNTNKLIVLSFRGSRSIENWIGNLNFDLEEINDICSGCRGHDGFTSSWRSVADTLRQKVEDAVREHPDYRVVFTGHSLGGALATVAGADLRGNGYDIDVFSYGAPRLGNRAFAEFLTVQTGGTLYRITSTNDIVPRLPPRKFGYSHSSPEYWIKSGTGVPVRRRDIVKIEGIDATGGNNQPNIPDIPAHLWYFGLIGTCL

SEQ ID NO: 8220 - protein, 269 aa, Thermomyces lanuginosus
EVSQDLFNQFNLFAQYSAAAYCGKNNRAPAGTNITCTANACPEVEKADATVLYSFEDSGVGDVTGFLALDNTNKLIVLSFRGSRSIENWIGNLNFELEEINDICSGCRGHAGFTSSWRSVADTLRQKVEDAVREHPDYRVVFTGHSLGGALATVAGADLRGNKYDIDVFSYGAPRVGNRAFAEFLTVQTGGTLYRITHTNDIVPRLPPREFGYSHSSPEYWIKSGTLVPVRRRDIVKIEGIDATGGNNQPNIPSITAHLWYFGLIGTCL

SEQ ID NO: 8221 - protein, 269 aa, Thermomyces lanuginosus
EVSQDLFNQFNLFAQYSAAAYCSKNNNAPAGTNITCTGNICPEVEKADATILYSFRDSGKGDVTGFLALDNTNKLIVLSFRGSRSIENWIGNLNFDLKEINDICSGCRGHDGFTSSWFSVADTLRQKVEDAVREHPDYRVVFTGHSLGGALATVAGADLRGNGYDIDVFSYGAPRVGNRAFAEFLTVQTGGTLYRITHTNDIVPRLPPREFGYSHSSPEYWIKSGTLVPVRRRDIVKIEGIDAEGGNNQPNIPDITAHLWYFGLIGTCL

SEQ ID NO: 8222 - protein, 269 aa, Thermomyces lanuginosus
EKSQDLFNQFNLFAQYSAAAYCGKNNDAPAGTKITCTGNACPEVEKADATVLYSFEDSGVGDVTGFLARDNTNKLIVLSFRGSRSIENWIGNLNFDLEEINDICSGCRGHDGFTSSWRSVADTLRQKVEDAVREHPDYRVVFTGHSLGGALATVAGADLRGNGYDIDVFSYGAPRLGNRAFAEFLTVQTGGTLYRITNTNDIVPRLPPRKFGYSHSSPEYWIKSGTGVPVRRRDIVKIEGIDATGGNNQPNIPDIPAHLWYFGLIGTCL

SEQ ID NO: 8223 - protein, 269 aa, Thermomyces lanuginosus
EKSQDLFNQFNLFAQYSAAAYCGKNNDAPAGTKITCTGNACPEVEKADATILYSFEDSGVGDVTGFLARDNTNKLIVLSFRGSRSIENWIGNLNFDLEEINDICSGCRGHDGFTSSWRSVADTLRQKVEDAVREHPDYRVVFTGHSLGGALATVAGADLRGNGYDIDVFSYGAPRLGNRAFAEFLTVQTGGTLYRITHTNDIVPRLPPRKFGYSHSSPEYWIKFGTGVPVRRRDIVKIEGIDATGGNNQPNIPDIPAHLWYFGLIGTCL

SEQ ID NO: 8224 - protein, 269 aa, Thermomyces lanuginosus
EKSQDLFNQFNLFAQYSAAAYCGKNNDAPAGTKITCTGNACPEVEKADATILYSFEDSGVGDVTGFLARDNTNKLIVLSFRGSRSIENWIGNLNFDLEEINDICSGCRGHDGFTSSWRSVADTLRQKVEDAVREHPDYRVVFTGHSLGGALATVAGADLRGNGYDIDVFSYGAPRLGNRAFAEFLTVQTGGTLYRITHTNDIVPRLPPRKFGYSHSSPEYWIKSGTGPPVRRRDIVKIEGIDATGGNNQPNIPDIPAHLWYFGLIGTCL

SEQ ID NO: 8225 - protein, 269 aa, Thermomyces lanuginosus
EVSQDLFNQFNLFAQYSAAAYCGKNNRAPAGTNITCTANACPEVEKADATVLYSFEDSGVGDVTGFLALDNTNKLIVLSFRGSRSIENWIGNLNFELKEINDICSGCRGHAGFTSSWRSVADTLRQKVEDAVREHPDYRVVFTGHSLGGALATVAGADLRGNKYDIDVFSYGAPRVGNRAFAEFLTVQTGGTLYRITHTNDIVPRLPPRKFGYSHSSPEYWIKSGTLVPVRRRDIVKIEGIDATGGNNQPNIPSITAHLWYFGLIGTCL

SEQ ID NO: 8226 - protein, 269 aa, Thermomyces lanuginosus
EVSQDLFNQFNLFAQYSAAAYCGKNNRAPAGTQITCTGNACPEVEKADATFLYSFEDSGVGDVTGFLALDNTNKLIVLSFRGSRSIENWINNLRFDLIEINDICSGCRGHAGFTSSWRSVADTLRQKVEDAVREHPDYRVVFTGHSLGGALATVAGADLRGNGYDIDVFSYGAPRVGNRAFAEFLTVQTGGTLYRITHTNDIVPRLPPREFGYSHPSPEYWIKSGTGVPVRRRDIVKIEGIDATGGNNQPNIPDITAHLWYFGLIGTCL

SEQ ID NO: 8227 - protein, 269 aa, Thermomyces lanuginosus
EVSQDLFNQFNLFAQYSAAAYCGKNNRAPAGTQITCTGNACPEVEKADATFLYSFEDSGVGDVTGFLALDNTNKLIVLSFRGSRSIENWINNLRFDLKEINDICSGCRGHAGFTSSWRSVADTLRQKVEDAVREHPDYRVVFTGHSLGGALATIAGADLRGNGYDIDVFSYGAPRVGNRAFAEFLTVQTGGTLYRITHTNDIVPRLPPREFGYSHPSPEYWIKSGTGVPVRRRDIVKIEGIDATGGNNQPNIPDITAHLWYFGLIGTCL

SEQ ID NO: 8228 - protein, 269 aa, Thermomyces lanuginosus
EVSQDLFNQFNLFAQYSAAAYCGKNNRAPAGTKITCTANACPEVEKADATLLYSFEDSGVGDVTGFLALDNTNKLIVLSFRGSRSIENWIGNLNFELKEINDICSGCRGHAGFTSSWRSVADTLRQKVEDAVREHPDYRVVFTGHSLGGALATVAGADLRGNKYDIDVFSYGAPRVGNRAFAEFLTVQTGGTLYRITHTNDIVPRLPPREFGYSHSSPEYWIKSGTLVPVRRRDIVKIEGIDATGGNNQPNIPSITAHLWYFGLIGTCL

SEQ ID NO: 8229 - protein, 269 aa, Thermomyces lanuginosus
EVSQDLFNQFNLFAQYSAAAYCGKNNRAPAGTNITCTANACPEVEKADATLLYTFEDSGVGDVTGFLALDNTNKLIVLSFRGSRSIENWIGNLNFELKEINDICSGCRGHAGFTSSWRSVADTLRQKVEDAVREHPDYRVVFTGHSLGGALATVAGADLRGNKYDIDVFSYGAPRVGNRAFAEFLTVQTGGTLYRITHTNDIVPRLPPREFGYSHSSPEYWIKSGTLVPVRRRDIVKIEGIDATGGNNQPNIPSITAHLWYFGLIGTCL

SEQ ID NO: 8230 - protein, 269 aa, Synthetic construct
EVSQDLFNQFNLFAQYSAAAYCGKNNDAPAGTNITCTGNACPEVEKADATFLYSFRGFGVGCVRGFLALDNTNKLIVLSFRGSRSIGNWIANLNLPLIEINDICSGCRGHDGFTSSWRSVADTLRQKVEDAVREHPDYRVVFTGHSLGGALATVAGADLRGNGYDIDVFSYGAPRVGNRAFAEFLTVQTGGTLYRITHTNDIVPRLPPREFGYSHSSPEYWIKSGTLVPVTRNDIVMIEGIDATGGNNQPNIPDIPAHLWYFGLIGTCL

SEQ ID NO: 8231 - protein, 269 aa, Thermomyces lanuginosus
EKSQDLFNQFNLFAQYSAAAYCGKNNDAPAGTKITCTGNACPEVEKADATVLYSFEDSGVGDVTGFLARDNTNKLIVLSFRGSRSIENWIGNLNFDLEEINDICSGCRGHDGFTSSWRSVADTLRQKVEDAVREHPDYRVVFTGHSLGGALATVAGADLRGNGYDIDVFSYGAPRLGNRAFAEFLTVQTGGTLYRITHTNDIVPRLPPRKFGYSHSSPEYWIKPGTGVPVRRRDIVKIEGIDATGGNNQPNIPDIPAHLWYFGLIGTCL

SEQ ID NO: 8232 - protein, 269 aa, Thermomyces lanuginosus
EYSQDLFNQFNLFAQYSAAAYCGKNNDAPAGTKITCTGNACPEVEKADATILYSFEDSGVGDVTGFLARDNTNKLIVLSFRGSRSIENWIGNLNFDLEEINDICSGCRGHDGFTSSWRSVADTLRQKVEDAVREHPDYRVVFTGHSLGGALATVAGADLRGNGYDIDVFSYGAPRLGNRAFAEFLTVQTGGTLYRITSTNDIVPRLPPRKFGYSHSSPEYWIKSGTGVPVRRRDIVKIEGIDATGGNNQPNIPDIPAHLWYFGLIGTCL

SEQ ID NO: 8233 - protein, 269 aa, Thermomyces lanuginosus
EVSQDLFNQFKLFAQYSAAAYCQKNNSAPAGTNITCTGNACPEVEKADATFLYSFEDSGVGDVTGFLALDNTNKQIVLSFRGSRSIENWIGNLRFDLKEINDICSGCRGHAGFTSSWRSVADTLRQKVEDAVREHPDYRVVFTGHSLGGALATIAWADLRGNGYDIDVFSYGAPRVGNRAFAEFLTNQQGGTLYRITHTNDIVPRLPPREFGYSHSSPEYWIKSGTLVPVTRNDIVKIEGIDATGGNNQPNIPDIPAHLWYFGRIGTCL

SEQ ID NO: 8234 - protein, 269 aa, Thermomyces lanuginosus
EVSQDLFNQFNLFAQYSAAAYCGKNNRAPAGTKITCTANACPEVEKADATFLYSFEDSGVGDVTGFLALDNTNKLIVLSFRGSRSIENWIGNLNFELTEINDICSGCRGHAGFTSSWRSVADTLRQKVEDAVREHPDYRVVFTGHSLGGALATVAGADLRGNPYDIDVFSYGAPRVGNRAFAEFLTVQTGGTLYRITHTNDIVPRLPPREFGYSHSSPEYWIKSGTLVPVRRRDIVKIEGIDATGGNNQPNIPSITAHLWYFGLIGTCL

SEQ ID NO: 8235 - protein, 269 aa, Thermomyces lanuginosus
EYSQDLFNQFNLFAQYSAAAYCGKNNDAPAGTKITCTGNACPEVEKADATILYSFEDSGVGDVTGFLARDNTNKLIVLSFRGSRSIENWIGNLNFDLEEINDICSGCRGHDGFTSSWRSVADTLRQKVEDAVREHPDYRVVFTGHSLGGALATVAGADLRGNGYDIDVFSYGAPRLGNRAFAEFLTVQTGGTLYRITHTNDIVPRLPPRKFGYSHSSPEYWIKSGTGVPRRRRDIVKIEGIDATGGNNQPNIPDIPAHLWYFGLIGTCL

SEQ ID NO: 8236 - protein, 269 aa, Thermomyces lanuginosus
EYSQDLFNQFNLFAQYSAAAYCGKNNDAPAGTKITCTGNACPEVEKADATILYSFEDSGVGDVTGFLARDNTNKLIVLSFRGSRSIENWIGNLNFDLEEINDICSGCRGHDGFTSSWRSVADTLRQKVEDAVREHPDYRVVFTGHSLGGALATVAGADLRGNGYDIDVFSYGAPRLGNRAFAEFLTVQTGGTLYRITHTNDIVPRLPPRKFGYSHSSPEYWIKSGTGPPVRRRDIVKIEGIDATGGNNQPNIPDIPAHLWYFGLIGTCL

SEQ ID NO: 8237 - protein, 269 aa, Thermomyces lanuginosus
EVSQDLFNQFNLFAQYSAAAYCGKNNRAPAGTNITCTANACPEVEKADATFLYSFEDSGVGDVTGFLALDNTNKLIVLSFRGSRSIENWIGNLNFELKEINDICSGCRGHAGFTSSWRSVADTLRQKVEDAVREHPDYRVVFTGHSLGGALATVAGADLRGNKYDIDVFSYGAPRVGNRAFAEFLTVQTGGTLYRITHTNDIVPRLPPREFGYSHSSPEYWIKSGTLVPVRRRDIVKIEGIDATGGNNQPNIPSITAHFHYFGLIGTCL

SEQ ID NO: 8238 - protein, 269 aa, Thermomyces lanuginosus
EVSQDLFNQFNLFAQYSAAAYCGKNNRAPAGTNITCTANACPEVEKADATFLYTFEDSGVGDVTGFLALDNTNKLIVLSFRGSRSIENWIGNLNFELKEINDICSGCRGHAGFTSSWRSVADTLRQKVEDAVREHPDYRVVFTGHSLGGALATVAGADLRGNPYDIDVFSYGAPRLGNRAFAEFLTVQTGGTLYRITHTNDIVPRLPPREFGYSHSSPEYWIKSGTLVPVRRRDIVKIEGIDATGGNNQPNIPSITAHLWYFGLIGTCL

SEQ ID NO: 8239 - protein, 269 aa, Thermomyces lanuginosus
EYSQDLFNQFNLFAQYSAAAYCGKNNDAPAGTKITCTGNACPEVEKADATILYSFEDSGVGDVTGFLARDNTNKLIVLSFRGSRSIENWIGNLNFDLEEINDICSGCRGHDGFTSSWRSVADTLRQKVEDAVREHPDYRVVFTGHSLGGALATVAGADLRGNGYDIDVFSYGAPRLGNRAFAEFLTVQTGGTLYRITHTNDIVPRLPPRKFGYSHSSPEYWIKFGTGVPVRRRDIVKIEGIDATGGNNQPNIPDIPAHLWYFGLIGTCL

SEQ ID NO: 8240 - protein, 269 aa, Thermomyces lanuginosus
EYSQDLFNQFNLFAQYSAAAYCGKNNDAPAGTKITCTGNACPEVEKADATILYSFEDSGVGDVTGFLARDNTNKLIVLSFRGSRSIENWIGNLNFDLEEINDICSGCRGHDGFTSSWRSVADTLRQKVEDAVREHPDYRVVFTGHSLGGALATVAGADLRGNGYDIDVFSYGAPRLGNRAFAEFLTVQTGGTLYRITHTNDIVPRLPPRKFGYSHSSPEYWIKPGTGVPVRRRDIVKIEGIDATGGNNQPNIPDIPAHLWYFGLIGTCL

SEQ ID NO: 8241 - protein, 269 aa, Thermomyces lanuginosus
EYSQDLFNQFNLFAQYSAAAYCGKNNDAPAGTKITCTGNACPEVEKADATLLYSFEDSGVGDVTGFLARDNTNKLIVLSFRGSRSIENWIGNLNFDLEEINDICSGCRGHDGFTSSWRSVADTLRQKVEDAVREHPDYRVVFTGHSLGGALATVAGADLRGNGYDIDVFSYGAPRLGNRAFAEFLTVQTGGTLYRITHTNDIVPRLPPRKFGYSHSSPEYWIKIGTGVPVRRRDIVKIEGIDATGGNNQPNIPDIPAHLWYFGLIGTCL

SEQ ID NO: 8242 - protein, 269 aa, Thermomyces lanuginosus
EVSQDLFNQFNLFAQYSAAAYCGKNNRAPAGTNITCTANACPEVEKADATVLYSFEDSGVGDVTGFLALDNTNKLIVLSFRGSRSIENWIGNLNFDLEEINDICSGCRGHAGFTSSWRSVADTLRQKVEDAVREHPDYRVVFTGHSLGGALATVAGADLRGNKYDIDVFSYGAPRVGNRAFAEFLTVQTGGTLYRITHTNDIVPRLPPRKFGYSHSSPEYWIKSGTLVPVRRRDIVKIEGIDATGGNNQPNIPSITAHLWYFGLIGTCL

SEQ ID NO: 8243 - protein, 269 aa, Thermomyces lanuginosus
EYSQDLFNQFNLFAQYSAAAYCGKNNDAPAGTKITCTGNACPEVEKADATVLYSFEDSGVGDVTGFLARDNTNKLIVLSFRGSRSIENWIGNLNFDLEEINDICSGCRGHDGFTSSWRSVADTLRQKVEDAVREHPDYRVVFTGHSLGGALATVAGADLRGNGYDIDVFSYGAPRLGNRAFAEFLTVQTGGTLYRITHTNDIVPRLPPRKFGYSHSSPEYWIKSGTGPPVRRRDIVKIEGIDATGGNNQPNIPDIPAHLWYFGLIGTCL

SEQ ID NO: 8244 - protein, 269 aa, Thermomyces lanuginosus
EKSQDLFNQFNLFAQYSAAAYCGKNNDAPAGTKITCTGNACPEVEKADATVLYSFEDSGVGDVTGFLARDNTNKLIVLSFRGSRSIENWIGNLNFDLEEINDICSGCRGHDGFTSSWRSVADTLRQKVEDAVREHPDYRVVFTGHSLGGALATVAGADLRGNGYDIDVFSYGAPRLGNRAFAEFLTVQTGGTLYRITLTNDIVPRLPPRKFGYSHSSPEYWIKSGTGVPVRRRDIVKIEGIDATGGNNQPNIPDIPAHLWYFGLIGTCL

SEQ ID NO: 8245 - protein, 269 aa, Thermomyces lanuginosus
EVSQDLFNQFNLFAQYSAAAYCGKNNIAPAGTQITCTGNACPEVEKADATFLYSFEDSGVGDVTGFLALDNTNKLIVLSFRGSRSIENWITNLNFELTEINDICSGCRGHDGFISSWRSVADTLRQKVEDAVREHPDYRVVFTGHSLGGALATVAGADLRGNKYDIDVFSYGAPRVGNRAFAEFLTVQTGGTLYRITHTNDIVPRLPPRDFGYSHSSPEYWIKSGTLVPVRRRDIVKIEGIDATGGNNQPNIPDITAHLWYFGLIGTCL

SEQ ID NO: 8246 - protein, 269 aa, Thermomyces lanuginosus
EYSQDLFNQFNLFAQYSAAAYCGKNNDAPAGTKITCTGNACPEVEKADATVLYSFEDSGVGDVTGFLARDNTNKLIVLSFRGSRSIENWIGNLNFDLEEINDICSGCRGHDGFTSSWRSVADTLRQKVEDAVREHPDYRVVFTGHSLGGALATVAGADLRGNGYDIDVFSYGAPRLGNRAFAEFLTVQTGGTLYRITLTNDIVPRLPPRKFGYSHSSPEYWIKSGTGVPVRRRDIVKIEGIDATGGNNQPNIPDIPAHLWYFGLIGTCL

SEQ ID NO: 8247 - protein, 269 aa, Thermomyces lanuginosus
EVSQDLFNQFRLFAQYSAAAYCGKNNDAPAGTQITCTANACPEVEKADATFLYSFEDSGVGDVTGFLALDNTNKLIVLSFRGSRSIENWITNLNFDLKEINGICSGCRGHDGFTLSWRSVADTLRQKVEDAVREHPDYRVVFTGHSLGGALATVAGADLRGNKYDIDVFSYGAPRVGNRAFAEFLTVQTGGTLYRITHTNDIVPRLPPREFGYSHSSPEYWIKSGTLVPVRRRDIVKIEGIDATGGNNQPNIPSITAHLWYFGLIGTCL

SEQ ID NO: 8248 - protein, 269 aa, Thermomyces lanuginosus
EKSQDLFNQFNLFAQYSAAAYCGKNNDAPAGTKITCTGNACPEVEKADATILYSFEDSGVGDVTGFLARDNTNKLIVLSFRGSRSIENWIGNLNFDLEEINDICSGCRGHDGFTSSWRSVADTLRQKVEDAVREHPDYRVVFTGHSLGGALATVAGADLRGNGYDIDVFSYGAPRLGNRAFAEFLTVQTGGTLYRITSTNDIVPRLPPRKFGYSHSSPEYWIKSGTGVPVRRRDIVKIEGIDATGGNNQPNIPDIPAHLWYFGLIGTCL

SEQ ID NO: 8249 - protein, 269 aa, Thermomyces lanuginosus
EKSQDLFNQFNLFAQYSAAAYCGKNNDAPAGTKITCTGNACPEVEKADATILYSFEDSGVGDVTGFLARDNTNKLIVLSFRGSRSIENWIGNLNFDLEEINDICSGCRGHDGFTSSWRSVADTLRQKVEDAVREHPDYRVVFTGHSLGGALATVAGADLRGNGYDIDVFSYGAPRLGNRAFAEFLTVQTGGTLYRITLTNDIVPRLPPRKFGYSHSSPEYWIKSGTGVPVRRRDIVKIEGIDATGGNNQPNIPDIPAHLWYFGLIGTCL

SEQ ID NO: 8250 - protein, 269 aa, Thermomyces lanuginosus
EVSQDLFNQFNLFAQYSAAAYCGKNNDAPAGTKITCTGNACPEVEKADATILYSFEDSGVGDVTGFLALDNTNKLIVLSFRGSRSIENWIGNLNFDLKEINDICSGCRGHDGFTSSWRSVADTLRQKVEDAVREHPDYRVVFTGHSLGGALATVAGADLRGNNYSIDVFSYGAPRVGNRAFAEFLTVQTGGTLYRITNTNDCVPRLPPRQFGYSHSSPEYWIKSGTLPPVRRRDIVKIEGIDATGGNNQPNICDIPAHLWYFGLIGTCL

SEQ ID NO: 8251 - protein, 269 aa, Thermomyces lanuginosus
EKSQDLFNQFNLFAQYSAAAYCGKNNDAPAGTKITCTGNACPEVEKADATVLYSFEDSGVGDVTGFLARDNTNKLIVLSFRGSRSIENWIGNLNFDLEEINDICSGCRGHDGFTSSWRSVADTLRQKVEDAVREHPDYRVVFTGHSLGGALATVAGADLRGNGYDIDVFSYGAPRLGNRAFAEFLTVQTGGTLYRITHTNDIVPRLPPRKFGYSHSSPEYWIKFGTGVPVRRRDIVKIEGIDATGGNNQPNIPDIPAHLWYFGLIGTCL

SEQ ID NO: 8252 - protein, 269 aa, Thermomyces lanuginosus
EKSQDLFNQFNLFAQYSAAAYCGKNNDAPAGTKITCTGNACPEVEKADATILYSFEDSGVGDVTGFLARDNTNKLIVLSFRGSRSIENWIGNLNFDLEEINDICSGCRGHDGFTSSWRSVADTLRQKVEDAVREHPDYRVVFTGHSLGGALATVAGADLRGNGYDIDVFSYGAPRLGNRAFAEFLTVQTGGTLYRITNTNDIVPRLPPRKFGYSHSSPEYWIKSGTGVPVRRRDIVKIEGIDATGGNNQPNIPDIPAHLWYFGLIGTCL

SEQ ID NO: 8253 - protein, 269 aa, Thermomyces lanuginosus
EYSQDLFNQFNLFAQYSAAAYCGKNNDAPAGTKITCTGNACPEVEKADATVLYSFEDSGVGDVTGFLARDNTNKLIVLSFRGSRSIENWIGNLNFDLEEINDICSGCRGHDGFTSSWRSVADTLRQKVEDAVREHPDYRVVFTGHSLGGALATVAGADLRGNGYDIDVFSYGAPRLGNRAFAEFLTVQTGGTLYRITHTNDIVPRLPPRKFGYSHSSPEYWIKFGTGVPVRRRDIVKIEGIDATGGNNQPNIPDIPAHLWYFGLIGTCL

SEQ ID NO: 8254 - protein, 269 aa, Thermomyces lanuginosus
EVSQDLFNQFRLFAQYSAAAYCGKNNRAPAGTQITCTGNACPEVEKADATFLYSFEDSGVGDVTGFLALDNTNKLIVLSFRGSRSIENWITNLNFELKEINDICSGCRGHAGFTSSWRSVADTLRQKVEDAVREHPDYRVVFTGHSLGGALATVAGADLRGNKYDIDVFSYGAPRVGNRAFAEFLTVQTGGTLYRITHTNDIVPRLPPREFGYSHSSPEYWIKSGTLVPVRRRDIVKIEGIDATGGNNQPNIPSITAHLWYFGLIGTCL

SEQ ID NO: 8255 - protein, 269 aa, Thermomyces lanuginosus
EVSQDLFNQFNLFAQYSAAAYCGKNNRAPAGTKITCTANACPEVEKADATFLYSFEDSGVGDVTGFLALDNTNKLIVLSFRGSRSIENWIGNLNFELEEINDICSGCRGHAGFTSSWRSVADTLRQKVEDAVREHPDYRVVFTGHSLGGALATVAGADLRGNKYDIDVFSYGAPRVGNRAFAEFLTVQTGGTLYRITHTNDIVPRLPPREFGYSHSSPEYWIKSGTLVPVRRRDIVKIEGIDATGGNNQPNIPSITAHLWYFGLIGTCL

SEQ ID NO: 8256 - protein, 269 aa, Thermomyces lanuginosus
EVSQDLFNQFNLFAQYSAAAYCGKNNDAPAGTQITCTGNACPEVEKADATFLYSFEDSGVGDVTGFLALDNTNKLIVLSFRGSRSIENWITNLNFELTEINDICSGCRGHDGFISSWRSVADTLRQKVEDAVREHPDYRVVFTGHSLGGALATVAGADLRGNSYDIDVFSYGAPRVGNRAFAEFLTVQTGGTLYRITHTNDIVPRLPPRVFGYSHSSPEYWIKSGTLVPVRRRDIVKIEGIDATGGNNQPNIPKIAAHLWYFGLIGTCL

SEQ ID NO: 8257 - protein, 269 aa, Thermomyces lanuginosus
EVSRDLFNQFNLFAQYSAAAYCGKNNRAPAGTQITCTGNACPEVEKADATFLYSFEDSGVGDVTGFLALDNTNKLIVLSFRGSRSIENWITNLSFDLKEINDICSGCRGHAGFTSSWRSVADTLRQKVEDAVREHPDYRVVFTGHSLGGALATVAGADLRGNGYDIDVFSYGAPRVGNRAFAEFLTVQTGGTLYRITHTNDIVPRLPPREFGYSHPSPEYWIKSGTGVPVRRRDIVKIEGIDATGGNNQPNIPDITAHLWYFGLIGTCL

SEQ ID NO: 8258 - protein, 269 aa, Thermomyces lanuginosus
EKSQDLFNQFNLFAQYSAAAYCGKNNDAPAGTKITCTGNACPEVEKADATVLYSFEDSGVGDVTGFLARDNTNKLIVLSFRGSRSIENWIGNLNFDLEEINDICSGCRGHDGFTSSWRSVADTLRQKVEDAVREHPDYRVVFTGHSLGGALATVAGADLRGNGYDIDVFSYGAPRLGNRAFAEFLTVQTGGTLYRITHTNDIVPRLPPRKFGYSHSSPEYWIKSGTGVPVRRRDIVKIEGIDATGGNNQPNIPDIPVHLWYFGLIGTCL

SEQ ID NO: 8259 - protein, 269 aa, Thermomyces lanuginosus
EVSQDLFNQFNLFAQYSAAAYCGKNNRAPAGTNITCTANACPEVEKADATFLYSFEDSGVGDVTGFLALDNTNKLIVLSFRGSRSIKNWIGNLNFELKEINDICSGCRGHAGFTSSWRSVADTLRQKVEDAVREHPDYRVVFTGHSLGGALATVAGADLRGNKYDIDVFSYGAPRVGNRAFAEFLTVQTGGTLYRITHTNDIVPRLPPREFGYSHSSPEYWIKSGTLVPVRRRDIVKIEGIDSTGGNNQPNIPSITAHLWYFGLIGTCL

SEQ ID NO: 8260 - protein, 269 aa, Thermomyces lanuginosus
EYSQDLFNQFNLFAQYSAAAYCGKNNDAPAGTKITCTGNACPEVEKADATILYSFEDSGVGDVTGFLARDNTNKLIVLSFRGSRSIENWIGNLNFDLEEINDICSGCRGHDGFTSSWRSVADTLRQKVEDAVREHPDYRVVFTGHSLGGALATVAGADLRGNGYDIDVFSYGAPRLGNRAFAEFLTVQTGGTLYRITHTNDIVPRLPPRKFGYSHSSPEYWIKSGTGVPVRRRDIVKIEGIDATGGNNQPNIPDGPAHLWYFGLIGTCL

SEQ ID NO: 8261 - protein, 269 aa, Thermomyces lanuginosus
EKSQDLFNQFNLFAQYSAAAYCGKNNDAPAGTKITCTGNACPEVEKADATVLYSFEDSGVGDVTGFLARDNTNKLIVLSFRGSRSIENWIGNLNFDLEEINDICSGCRGHDGFTSSWRSVADTLRQKVEDAVREHPDYRVVFAGHSLGGALATVAGADLRGNGYDIDVFSYGAPRLGNRAFAEFLTVQTGGTLYRITHTNDIVPRLPPRKFGYSHSSPEYWIKSGTGVPVRRRDIVKIEGIDATGGNNQPNIPDIPAHLWYFGLIGTCL

SEQ ID NO: 8262 - protein, 269 aa, Thermomyces lanuginosus
EVSQDLFNQFNLFAQYSAAAYCGKNNRAPAGTNITCTANACPEVEKADATFLYSFEDSGVGDVTGFLALDNTNKLIVLSFRGTRSIENWIGNLNYLLKEINDICSGCRGHAGFTSSWRSVADTLRQKVEDAVREHPDYRVVFTGHSLGGALATVAGADLRGNKYDIDVFSYGAPRVGNRAFAEFLTVQTGGTLYRITHTNDIVPRLPPREFGYSHSSPEYWIKSGTLVPVRRRDIVKIEGIDATGGNNQPNIPSITAHLWYFGLIGTCL

SEQ ID NO: 8263 - protein, 269 aa, Thermomyces lanuginosus
EYSQDLFNQFNLFAQYSAAAYCGKNNDAPAGTKITCTGNACPEVEKADATILYSFEDSGVGDVTGFLARDNTNKLIVLSFRGSRSIENWIGNLNFDLEEINDICSGCRGHDGFTSSWRSVADTLRQKVEDAVREHPDYRVVFTGHSLGGALATVAGADLRGNGYDIDVFSYGAPRLGNRAFAEFLTVQTGGTLYRITNTNDIVPRLPPRKFGYSHSSPEYWIKSGTGVPVRRRDIVKIEGIDATGGNNQPNIPDIPAHLWYFGLIGTCL

SEQ ID NO: 8264 - protein, 269 aa, Thermomyces lanuginosus
EYSQDLFNQFNLFAQYSAAAYCGKNNDAPAGTKITCTGNACPEVEKADATILYSFEDSGVGDVTGFLARDNTNKLIVLSFRGSRSIENWIGNLNFDLEEINDICSGCRGHDGFTSSWRSVADTLRQKVEDAVREHPDYRVVFTGHSLGGALATVAGADLRGNGYDIDVFSYGAPRLGNRAFAEFLTVQTGGTLYRITITNDIVPRLPPRKFGYSHSSPEYWIKSGTGVPVRRRDIVKIEGIDATGGNNQPNIPDIPAHLWYFGLIGTCL

SEQ ID NO: 8265 - protein, 269 aa, Thermomyces lanuginosus
EKSQDLFNQFNLFAQYSAAAYCGKNNDAPAGTKITCTGNACPEVEKADATVLYSFEDSGVGDVTGFLARDNTNKLIVLSFRGSRSIENWIGNLNFDLEEINDICSGCRGHDGFTSSWRSVADTLRQKVEDAVREHPDYRVVFTGHSLGGALATVAGADLRGNGYDIDVFSYGAPRLGNRAFAEFLTVQTGGTLYRITITNDIVPRLPPRKFGYSHSSPEYWIKSGTGVPVRRRDIVKIEGIDATGGNNQPNIPDIPAHLWYFGLIGTCL

SEQ ID NO: 8266 - protein, 269 aa, Thermomyces lanuginosus
EVSQDLFNQFNLFAQYSAAAYCGKNNRAPAGTQITCTANACPEVEKADATFLYSFEDSGVGDVTGFLALDNTNKLIVLSFRGSRSIENWITNLNFELKEINDICSGCRGHAGFTSSWRSVADTLRQKVEDAVREHPDYRVVFTGHSLGGALATVAGADLRGNAYDIDVFSYGAPRVGNRAFAEFLTVQTGGTLYRITHTNDIVPRLPPREFGYSHSSPEYWIKSGTLVPVRRRDIVKIEGIDATGGNNQPNIPSITAHLWYFGLIGTCL

SEQ ID NO: 8267 - protein, 269 aa, Thermomyces lanuginosus
EVSQDLFNQFNLFAQYSKAAYCQKNNSAPAGTNITCTGNACPEVFKADVTFLYSFEDMGVGDVTGFLALDNTSKQIVLSFRGSRSIENWIGNLNFDLKEINDICSGCKGHDGFTSSWRSVADTLRQKVEDAVREHPDYRVVFTGHSLGGALATVAGADLRGNGYDIDVFSYGAPRVGNRAFAEFLTTQDGGTLYRITHTNDIVPRLPPREFGYSHSSPEYWIKSGTLVPVTRNDIVKIEGIDATGGNNQPNIPDIPAHLWYFGLIGTCL

SEQ ID NO: 8268 - protein, 269 aa, Thermomyces lanuginosus
EYSQDLFNQFNLFAQYSAAAYCGKNNDAPAGTKITCTGNACPEVEKADATILYSFEDSGVGDVTGFLARDNTNKLIVLSFRGSRSIENWIGNLNFDLEEINDICSGCRGHDGFTSSWRSVADTLRQKVEDAVREHPDYRVVFTGHSLGGGLATVAGADLRGNGYDIDVFSYGAPRLGNRAFAEFLTVQTGGTLYRITHTNDIVPRLPPRKFGYSHSSPEYWIKSGTGVPVRRRDIVKIEGIDATGGNNQPNIPDIPAHLWYFGLIGTCL

SEQ ID NO: 8269 - protein, 269 aa, Thermomyces lanuginosus
EKSQDLFNQFNLFAQYSAAAYCGKNNDAPAGTKITCTGNACPEVEKADATILYSFEDSGVGDVTGFLARDNTNKLIVLSFRGSRSIENWIGNLNFDLEEINDICSGCRGHDGFTSSWRSVADTLRQKVEDAVREHPDYRVVFTGHSLGGALATVAGADLRGNGYDIDVFSYGAPRLGNRAFAEFLTVQTGGTLYRITHTNDIVPRLPPRKFGYSHSSPEYWIKIGTGVPVRRRDIVKIEGIDATGGNNQPNIPDIPAHLWYFGLIGTCL

SEQ ID NO: 8270 - protein, 269 aa, Thermomyces lanuginosus
EVSQDLFNQFNLFAQYSAAAYCGKNNDAPAGTKITCTGNACPEVEKADATLLYSFEDSGVGDVTGFLALDNTNKLIVLSFRGSRSIENWIGNLNFDLEEIDDICSGCRGHDGFTSSWRSVADTLRQKVEDAVREHPDYRVVFTGHSLGGALATVAGADLRNNGYDIDVFSYGAPRVGNRAFAEFLTVQTGGTLYRITSTNDIVPRLPPRKFGYSHSSPEFWIKSGTLVPVRRRDIVKIEGIDATGGNNQPNIPDIPVHLWYFGLIGTCL

SEQ ID NO: 8271 - protein, 269 aa, Thermomyces lanuginosus
EVSQDLFNQFNLFAQYSAAAYCGKNNRAPAGTNITCTANACPEVERADATFLYTFEDSGVGDVTGFLALDNTNKLIVLSFRGSRSIENWIGNLNFELKEINDICSGCRGHAGFTSSWRSVADTLRQKVEDAVREHPDYRVVFTGHSLGGALATVAGADLRGNKYDIDVFSYGAPRVGNRAFAEFLTVQTGGTLYRITHTNDIVPRLPPREFGYSHSSPEYWIKSGTLVPVRRRDIVKIEGIDATGGNNQPNIPSITAHLWYFGLIGTCL

SEQ ID NO: 8272 - protein, 269 aa, Thermomyces lanuginosus
EKSQDLFNQFNLFAQYSAAAYCGKNNDAPAGTKITCTGNACPEVEKADATVLYSFEDSGVGDVTGFLARDNTNKLIVLSFRGSRSIENWIGNLNFDLEEINDICSGCRGHDGFTSSWRSVADTLRQKVEDAVREHPDYRVVFTGHSLGGALATVAGADLRGNGYDIDVFSYGAPRLGNRAFAEFLTVQTGGTLYRITHTNDIVPRLPPRKFGYSHSSPEYWIKSGTGPPVRRRDIVKIEGIDATGGNNQPNIPDIPAHLWYFGLIGTCL

SEQ ID NO: 8273 - protein, 269 aa, Thermomyces lanuginosus
EYSQDLFNQFNLFAQYSAAAYCGKNNDAPAGTKITCTGNACPEVEKADATVLYSFEDSGVGDVTGFLARDNTNKLIVLSFRGSRSIENWIGNLNFDLEEINDICSGCRGHDGFTSSWRSVADTLRQKVEDAVREHPDYRVVFAGHSLGGALATVAGADLRGNGYDIDVFSYGAPRLGNRAFAEFLTVQTGGTLYRITHTNDIVPRLPPRKFGYSHSSPEYWIKSGTGVPVRRRDIVKIEGIDATGGNNQPNIPDIPAHLWYFGLIGTCL

SEQ ID NO: 8274 - protein, 269 aa, Thermomyces lanuginosus
EKSQDLFNQFNLFAQYSAAAYCGKNNDAPAGTKITCTGNACPEVEKADATILYSFEDSGVGDVTGFLARDNTNKLIVLSFRGSRSIENWIGNLNFDLEEINDICSGCRGHDGFTSSWRSVADTLRQKVEDAVREHPDYRVVFTGHSLGGGLATVAGADLRGNGYDIDVFSYGAPRLGNRAFAEFLTVQTGGTLYRITHTNDIVPRLPPRKFGYSHSSPEYWIKSGTGVPVRRRDIVKIEGIDATGGNNQPNIPDIPAHLWYFGLIGTCL

SEQ ID NO: 8275 - protein, 269 aa, Thermomyces lanuginosus
EVSQDLFNQFNLFAQYSAAAYCGKNNRAPAGTQITCTGNACPEVEKADATFLYSFKDSGVGDVTGFLALDNTNKLIVLSFRGSRSIENWINNLRFDLKEINDICSGCRGHAGFTSSWRSVADTLRQKVEDAVREHPDYRVVFTGHSLGGALATVAGADLRGNGYDIDVFSYGAPRVGNRAFAEFLTVQTGGTLYRITHTNDIVPRLPPREFGYSHPSPEYWIKSGTGVPVRRRDIVKIEGIDATGGNNQPNIPDITAHLWYFGLIGTCL

SEQ ID NO: 8276 - protein, 269 aa, Thermomyces lanuginosus
EYSQDLFNQFNLFAQYSAAAYCGKNNDAPAGTKITCTGNACPEVEKADATVLYSFEDSGVGDVTGFLARDNTNKLIVLSFRGSRSIENWIGNLNFDLEEINDICSGCRGHDGFTSSWRSVADTLRQKVEDAVREHPDYRVVFTGHSLGGALATVAGADLRGNGYDIDVFSYGAPRLGNRAFAEFLTVQTGGTLYRITHTNDIVPRLPPRKFGYSHSSPEYWIKSGTGVPRRRRDIVKIEGIDATGGNNQPNIPDIPAHLWYFGLIGTCL

SEQ ID NO: 8277 - protein, 269 aa, Thermomyces lanuginosus
EYSQDLFNQFNLFAQYSAAAYCGKNNDAPAGTKITCTGNACPEVEKADATLLYSFEDSGVGDVTGFLARDNTNKLIVLSFRGSRSIENWIGNLNFDLEEINDICSGCRGHDGFTSSWRSVADTLRQKVEDAVREHPDYRVVFTGHSLGGALATVAGADLRGNGYDIDVFSYGAPRLGNRAFAEFLTVQTGGTLYRITYTNDIVPRLPPRKFGYSHSSPEYWIKSGTGVPVRRRDIVKIEGIDATGGNNQPNIPDIPAHLWYFGLIGTCL

SEQ ID NO: 8278 - protein, 269 aa, Thermomyces lanuginosus
EYSQDLFNQFNLFAQYSAAAYCGKNNDAPAGTKITCTGNACPEVEKADATVLYSFEDSGVGDVTGFLARDNTNKLIVLSFRGSRSIENWIGNLNFDLEEINDICSGCRGHDGFTSSWRSVADTLRQKVEDAVREHPDYRVVFTGHSLGGALATVAGADLRGNGYDIDVFSYGAPRLGNRAFAEFLTVQTGGTLYRITNTNDIVPRLPPRKFGYSHSSPEYWIKSGTGVPVRRRDIVKIEGIDATGGNNQPNIPDIPAHLWYFGLIGTCL

SEQ ID NO: 8279 - protein, 269 aa, Thermomyces lanuginosus
EVSQDLFNQFNLFAQYSAAAYCGKNNRAPAGTNITCTANACPEVEKADATVLYSFEDSGVGDVTGFLALDNTNKLIVLSFRGSRSIENWIGNLNFELKEINDICSGCRGHAGFTSSWRSVADTLRQKVEDAVREHPDYRVVFTGHSLGGALATVAGADLRGNKYDIDVFSYGAPRVGNRAFAEFLTVQTGGTLYRITHTNDIVPRLPPREFGYSHSSPEYWIKSGTLVPVRRRDIVKIEGIDSTGGNNQPNIPSITAHLWYFGLIGTCL

SEQ ID NO: 8280 - protein, 269 aa, Thermomyces lanuginosus
EYSQDLFNQFNLFAQYSAAAYCGKNNDAPAGTKITCTGNACPEVEKADATVLYSFEDSGVGDVTGFLARDNTNKLIVLSFRGSRSIENWIGNLNFDLEEINDICSGCRGHDGFTSSWRSVADTLRQKVEDAVREHPDYRVVFTGHSLGGALATVAGADLRGNGYDIDVFSYGAPRLGNRAFAEFLTVQTGGTLYRITHTNDIVPRLPPRKFGYSHSSPEYWIKIGTGVPVRRRDIVKIEGIDATGGNNQPNIPDIPAHLWYFGLIGTCL

SEQ ID NO: 8281 - protein, 269 aa, Thermomyces lanuginosus
EVSQDLFNQFNLFAQYSAAAYCGKNNRAPAGTQITCTGNACPEVEKADATFLYSFEDSGVGDVTGFLALDNTNKLIVLSFRGSRSIENWINNLRFDLKEINDICSGCRGHAGFTSSWRSVADTLRQKVEDAVREHPDYRVVFTGHSLGGALATVAGADLRGNKYDIDVFSYGAPRVGNRAFAEFLTVQTGGTLYRITHTNDIVPRLPPREFGYSHPSPEYWIKSGTGVPVRRRDIVKIEGIDATGGNNQPNIPDITAHLWYFGLIGTCL

SEQ ID NO: 8282 - protein, 269 aa, Thermomyces lanuginosus
EVSQDLFNQFNLFAQYSAAAYCGKNNRAPAGTNITCTANACPEVEKADATVLYSFEDSGVGDVTGFLARDNTNKLIVLSFRGSRSIENWIGNLNFELKEINDICSGCRGHAGFTSSWRSVADTLRQKVEDAVREHPDYRVVFTGHSLGGALATVAGADLRGNKYDIDVFSYGAPRVGNRAFAEFLTVQTGGTLYRITHTNDIVPRLPPREFGYSHSSPEYWIKSGTLVPVRRRDIVKIEGIDATGGNNQPNIPSITAHLWYFGLIGTCL

SEQ ID NO: 8283 - protein, 269 aa, Thermomyces lanuginosus
EVSQDLFNQFNLFAQYSAAAYCGKNNRAPAGTKITCTANACPEVEKADATFLYTFEDSGVGDVTGFLALDNTNKLIVLSFRGSRSIENWIGNLNFELKEINDICSGCRGHAGFTSSWRSVADTLRQKVEDAVREHPDYRVVFTGHSLGGALATVAGADLRGNKYDIDVFSYGAPRVGNRAFAEFLTVQTGGTLYRITHTNDIVPRLPPREFGYSHSSPEYWIKSGTLVPVRRRDIVKIEGIDATGGNNQPNIPSITAHLWYFGLIGTCL

SEQ ID NO: 8284 - protein, 269 aa, Thermomyces lanuginosus
EKSQDLFNQFNLFAQYSAAAYCGKNNDAPAGTKITCTGNACPEVEKADATVLYSFEDSGVGDVTGFLARDNTNKLIVLSFRGSRSIENWIGNLNFDLEEINDICSGCRGHDGFTSSWRSVADTLRQKVEDAVREHPDYRVVFTGHSLGGALATVAGADLRGNGYDIDVFSYGAPRLGNRAFAEFLTVQTGGTLYRITHTNDIVPRLPPRKFGYSHSSPEYWIKSGTGVPVRRRDIVKIEGIDATGGNNQPNIPDGPAHLWYFGLIGTCL

SEQ ID NO: 8285 - protein, 269 aa, Thermomyces lanuginosus
EKSQDLFNQFNLFAQYSAAAYCGKNNDAPAGTKITCTGNACPEVEKADATVLYSFEDSGVGDVTGFLARDNTNKLIVLSFRGSRSIENWIGNLNFDLEEINDICSGCRGHDGFTSSWRSVADTLRQKVEDAVREHPDYRVVFTGHSLGGGLATVAGADLRGNGYDIDVFSYGAPRLGNRAFAEFLTVQTGGTLYRITHTNDIVPRLPPRKFGYSHSSPEYWIKSGTGVPVRRRDIVKIEGIDATGGNNQPNIPDIPAHLWYFGLIGTCL

SEQ ID NO: 8286 - protein, 269 aa, Thermomyces lanuginosus
EKSQDLFNQFNLFAQYSAAAYCGKNNDAPAGTKITCTGNACPEVEKADATILYSFEDSGVGDVTGFLARDNTNKLIVLSFRGSRSIENWIGNLNFDLEEINDICSGCRGHDGFTSSWRSVADTLRQKVEDAVREHPDYRVVFTGHSLGGALATVAGADLRGNGYDIDVFSYGAPRLGNRAFAEFLTVQTGGTLYRITHTNDIVPRLPPRKFGYSHSSPEYWIKPGTGVPVRRRDIVKIEGIDATGGNNQPNIPDIPAHLWYFGLIGTCL

SEQ ID NO: 8287 - protein, 269 aa, Thermomyces lanuginosus
EKSQDLFNQFNLFAQYSAAAYCGKNNDAPAGTKITCTGNACPEVEKADATILYSFEDSGVGDVTGFLARDNTNKLIVLSFRGSRSIENWIGNLNFDLEEINDICSGCRGHDGFTSSWRSVADTLRQKVEDAVREHPDYRVVFTGHSLGGALATVAGADLRGNGYDIDVFSYGAPRLGNRAFAEFLTVQTGGTLYRITHTNDIVPRLPPRKFGYSHSSPEYWIKSGTGVPRRRRDIVKIEGIDATGGNNQPNIPDIPAHLWYFGLIGTCL

SEQ ID NO: 8288 - protein, 269 aa, Thermomyces lanuginosus
EVSQDLFNQFNLFAQYSAAAYCGKNNRAPAGTPITCTANACPEVEKADATLLYSFEDSGVGDVTGFLALDNTNKLIVLSFRGSRSIENWIGNLNFELKEINDICSGCRGHAGFTSSWRSVADTLRQKVEDAVREHPDYRVVFTGHSLGGALATVAGADLRGNKYDIDVFSYGAPRVGNRAFAEFLTVQTGGTLYRITHTNDIVPRLPPREFGYSHSSPEYWIKSGTLVPVRRRDIVKIEGIDATGGNNQPNIPSITAHLWYFGLIGTCL

SEQ ID NO: 8289 - protein, 269 aa, Thermomyces lanuginosus
EYSQDLFNQFNLFAQYSAAAYCGKNNDAPAGTKITCTGNACPEVEKADATLLYSFEDSGVGDVTGFLARDNTNKLIVLSFRGSRSIENWIGNLNFDLEEINDICSGCRGHDGFTSSWRSVADTLRQKVEDAVREHPDYRVVFAGHSLGGALATVAGADLRGNGYDIDVFSYGAPRLGNRAFAEFLTVQTGGTLYRITHTNDIVPRLPPRKFGYSHSSPEYWIKSGTGVPVRRRDIVKIEGIDATGGNNQPNIPDIPAHLWYFGLIGTCL

SEQ ID NO: 8290 - protein, 269 aa, Thermomyces lanuginosus
EYSQDLFNQFNLFAQYSAAAYCGKNNDAPAGTKITCTGNACPEVEKADATILYSFEDSGVGDVTGFLARDNTNKLIVLSFRGSRSIENWIGNLNFDLEEINDICSGCRGHDGFTSSWRSVADTLRQKVEDAVREHPDYRVVFTGHSLGGALATVAGADLRGNGYDIDVFSYGAPRLGNRAFAEFLTVQTGGTLYRITLTNDIVPRLPPRKFGYSHSSPEYWIKSGTGVPVRRRDIVKIEGIDATGGNNQPNIPDIPAHLWYFGLIGTCL

SEQ ID NO: 8291 - protein, 269 aa, Thermomyces lanuginosus
EVSQDLFNQFNLFAQYSAAAYCGKNNVAPAGTQITCTGNACPEVEKADATFLYSFEDSGVGDVTGFLALDNTNKLIVLSFRGSRSIENWIANLRFDLKEINDICSGCRGHAGFTSSWRSVADTLRQKVEDAVREHPDYRVVFTGHSLGGALATVAGADLRGNKYDIDVFSYGAPRVGNRAFAEFLTVQTGGTLYRITHTNDIVPRLPPREFGYSHSSPEYWIKSGTFVPVRRRDIVKIEGIDATGGNNRPNIPSIPAHLWYFGLIGTCL

SEQ ID NO: 8292 - protein, 269 aa, Thermomyces lanuginosus
EKSQDLFNQFNLFAQYSAAAYCGKNNDAPAGTKITCTGNACPEVEKADATILYSFEDSGVGDVTGFLARDNTNKLIVLSFRGSRSIENWIGNLNFDLEEINDICSGCRGHDGFTSSWRSVADTLRQKVEDAVREHPDYRVVFTGHSLGGALATVAGADLRGNGYDIDVFSYGAPRLGNRAFAEFLTVQTGGTLYRITYTNDIVPRLPPRKFGYSHSSPEYWIKSGTGVPVRRRDIVKIEGIDATGGNNQPNIPDIPAHLWYFGLIGTCL

SEQ ID NO: 8293 - protein, 269 aa, Thermomyces lanuginosus
EYSQDLFNQFNLFAQYSAAAYCGKNNDAPAGTKITCTGNACPEVEKADATLLYSFEDSGVGDVTGFLARDNTNKLIVLSFRGSRSIENWIGNLNFDLEEINDICSGCRGHDGFTSSWRSVADTLRQKVEDAVREHPDYRVVFTGHSLGGALATVAGADLRGNGYDIDVFSYGAPRLGNRAFAEFLTVQTGGTLYRITHTNDIVPRLPPRKFGYSHSSPEYWIKSGTGPPVRRRDIVKIEGIDATGGNNQPNIPDIPAHLWYFGLIGTCL

SEQ ID NO: 8294 - protein, 269 aa, Thermomyces lanuginosus
EYSQDLFNQFNLFAQYSAAAYCGKNNDAPAGTKITCTGNACPEVEKADATLLYSFEDSGVGDVTGFLARDNTNKLIVLSFRGSRSIENWIGNLNFDLEEINDICSGCRGHDGFTSSWRSVADTLRQKVEDAVREHPDYRVVFTGHSLGGALATVAGADLRGNGYDIDVFSYGAPRLGNRAFAEFLTVQTGGTLYRITHTNDIVPRLPPRKFGYSHSSPEYWIKSGTGVPVRRRDIVKIEGIDATGGNNQPNIPDGPAHLWYFGLIGTCL

SEQ ID NO: 8295 - protein, 269 aa, Thermomyces lanuginosus
EYSQDLFNQFNLFAQYSAAAYCGKNNDAPAGTKITCTGNACPEVEKADATLLYSFEDSGVGDVTGFLARDNTNKLIVLSFRGSRSIENWIGNLNFDLEEINDICSGCRGHDGFTSSWRSVADTLRQKVEDAVREHPDYRVVFTGHSLGGALATVAGADLRGNGYDIDVFSYGAPRLGNRAFAEFLTVQTGGTLYRITHTNDIVPRLPPRKFGYSHSSPEYWIKPGTGVPVRRRDIVKIEGIDATGGNNQPNIPDIPAHLWYFGLIGTCL

SEQ ID NO: 8296 - protein, 269 aa, Thermomyces lanuginosus
EVSQDLFNQFNLFAQYSAAAYCGKNNRAPAGTNITCTANACPEVEKADATVLYSFEDSGVGDVTGFLALDNTNKLIVLSFRGSRSIKNWIGNLNFELKEINDICSGCRGHAGFTSSWRSVADTLRQKVEDAVREHPDYRVVFTGHSLGGALATVAGADLRGNKYDIDVFSYGAPRVGNRAFAEFLTVQTGGTLYRITHTNDIVPRLPPREFGYSHSSPEYWIKSGTLVPVRRRDIVKIEGIDATGGNNQPNIPSITAHLWYFGLIGTCL

SEQ ID NO: 8297 - protein, 269 aa, Synthetic construct
EVSQDLFNQFNLFAQYSAAAYCGKNNDAPAGTNITCTGNACPEVEKADATFLYSFEDSGVGDVTGFLALDNTNKLIVLSFRGSRSIENWIGNLKFLLKKINDICSGCRGHNGFTSSWRSVADTLRQKVEDAVREHPDYRVVFTGHSLGGALATVAGADLRGNGYDIDVFSYGAPRVGNRAFAEFLTVQTGGTLYRITHTNDIVPRLPPREAGYSHSSPEYWIKSPTLVPVRRRRIVKIEGIDATGGNNRPNIPDIPAHLWYFGLIGRCL

SEQ ID NO: 8298 - protein, 269 aa, Thermomyces lanuginosus
EVSQDLFNQFNLFAQYSAAAYCGKNNRAPAGTQITCTGNACPEVEKADATFLYSFEDSGVGDVTGFLALDNTNKLIVLSFRGSRSIENWIANLNFEQKEINDICSGCRGHAGFTSSWRSVADTLRQKVEDAVREHPDYRVVFTGHSLGGALATVAGADLRGNGYDIDVFSYGAPRVGNRAFAEFLTVQTGGTLYRITHTNDIVPRLPPREFGYSHPSPEYWIKSGTGVPVRRRDIVKIEGIDATGGNNQPNIPDITAHLWYFGLIGTCL

SEQ ID NO: 8299 - protein, 269 aa, Thermomyces lanuginosus
EVSQDLFNQFNLFAQYSAAAYCGKNNRAPAGTQITCTGNACPEVEKADATFLYSFSDSGVGDVTGFLALDNTNKLIVLSFRGSRSIENWINNLRFDLKEINDICSGCRGHAGFTSSWRSVADTLRQKVEDAVREHPDYRVVFTGHSLGGALATVAGADLRGNGYDIDVFSYGAPRVGNRAFAEFLTVQTGGTLYRITHTNDIVPRLPPREFGYSHPSPEYWIKSGTGVPVRRRDIVKIEGIDATGGNNQPNIPDITAHLWYFGLIGTCL

SEQ ID NO: 8300 - protein, 269 aa, Thermomyces lanuginosus
EYSQDLFNQFNLFAQYSAAAYCGKNNDAPAGTKITCTGNACPEVEKADATILYSFEDSGVGDVTGFLARDNTNKLIVLSFRGSRSIENWIGNLNFDLEEINDICSGCRGHDGFTSSWRSVADTLRQKVEDAVREHPDYRVVFTGHSLGGALATVAGADLRGNGYDIDVFSYGAPRLGNRAFAEFLTVQTGGTLYRITHTNDIVPRLPPRKFGYSHSSPEYWIKSGTGVPVRRRDIVKIEGIDATGGNNQPNIPDIPVHLWYFGLIGTCL

SEQ ID NO: 8301 - protein, 269 aa, Thermomyces lanuginosus
EYSQDLFNQFNLFAQYSAAAYCGKNNDAPAGTKITCTGNACPEVEKADATVLYSFEDSGVGDVTGFLARDNTNKLIVLSFRGSRSIENWIGNLNFDLEEINDICSGCRGHDGFTSSWRSVADTLRQKVEDAVREHPDYRVVFTGHSLGGALATVAGADLRGNGYDIDVFSYGAPRLGNRAFAEFLTVQTGGTLYRITSTNDIVPRLPPRKFGYSHSSPEYWIKSGTGVPVRRRDIVKIEGIDATGGNNQPNIPDIPAHLWYFGLIGTCL

SEQ ID NO: 8302 - protein, 269 aa, Thermomyces lanuginosus
EVSQDLFNQFNLFAQYSAAAYCGKNNRAPAGTQITCTGNACPEVEKADATFLYSFEDSGVGDVTGFLALDNTNKLIVLSFRGSRSIENWINNLRFDLKEINDICSGCRGHSGFTSSWRSVADTLRQKVEDAVREHPDYRVVFTGHSLGGALATVAGADLRGNGYDIDVFSYGAPRVGNRAFAEFLTVQTGGTLYRITHTNDIVPRLPPREFGYSHPSPEYWIKSGTGVPVRRRDIVKIEGIDATGGNNQPNIPSITAHLWYFGLIGTCL

SEQ ID NO: 8303 - protein, 269 aa, Thermomyces lanuginosus
EVSQDLFNQFNLFAQYSAAAYCGKNNRAPAGTQITCTGNACPEVEKADATFLYSFEDSGVGDVTGFLALDNTNKLIVLSFRGSRSIENWINNLRFDLKEINDICSGCRGHAGFTSSWRSVADTLRQKVEDAVREHPDYRVVFTGHSLGGALATVAGADLRGNGYDIDVFSYGAPRVGNRAFAEFLTVQTGGTLYRITHTNDIVPRLPPREFGYSHPSPEYWIKSGTGVPVRRRDIVKIEGIDATGGNNQPNIPSITAHLWYFGLIGTCL

SEQ ID NO: 8304 - protein, 269 aa, Thermomyces lanuginosus
EKSQDLFNQFNLFAQYSAAAYCGKNNDAPAGTKITCTGNACPEVEKADATVLYSFEDSGVGDVTGFLARDNTNKLIVLSFRGSRSIENWIGNLNFDLEEINDICSGCRGHDGFTSSWRSVADTLRQKVEDAVREHPDYRVVFTGHSLGGALATVAGADLRGNGYDIDVFSYGAPRLGNRAFAEFLTVQTGGTLYRITHTNDIVPRLPPRKFGYSHSSPEYWIKIGTGVPVRRRDIVKIEGIDATGGNNQPNIPDIPAHLWYFGLIGTCL

SEQ ID NO: 8305 - protein, 269 aa, Thermomyces lanuginosus
EKSQDLFNQFNLFAQYSAAAYCGKNNDAPAGTKITCTGNACPEVEKADATILYSFEDSGVGDVTGFLARDNTNKLIVLSFRGSRSIENWIGNLNFDLEEINDICSGCRGHDGFTSSWRSVADTLRQKVEDAVREHPDYRVVFTGHSLGGALATVAGADLRGNGYDIDVFSYGAPRLGNRAFAEFLTVQTGGTLYRITHTNDIVPRLPPRKFGYSHSSPEYWIKSGTGVPVRRRDIVKIEGIDATGGNNQPNIPDIPIHLWYFGLIGTCL

SEQ ID NO: 8306 - protein, 269 aa, Thermomyces lanuginosus
EVSQDLFNQFNLFAQYSAAAYCGRNNDAPAGTNITCTGNACPEVERADATFLYSFEDSGVGDVTGFLALDNTNRLIVLSFRGSRSVENWIGNLNFDLREINDICSGCRGHDGFTSSWRSVADTLRQRVEDAVREHPKYRVVFTGHSLGGGLATVAGADLRGNGYDIDVFSYGAPRVGNRAFAEFLTVQTGGTLYRITHTNDIVPRLPPREFGYSHSSPEYWIRSGTLVPVRRRDIVKIEGIDATGGNNQPNIPDIPAHLWYFGLIGTCL

SEQ ID NO: 8307 - protein, 269 aa, Thermomyces lanuginosus
EKSQDLFNQFNLFAQYSAAAYCGKNNDAPAGTKITCTGNACPEVEKADATILYSFEDSGVGDVTGFLARDNTNKLIVLSFRGSRSIENWIGNLNFDLEEINDICSGCRGHDGFTSSWRSVADTLRQKVEDAVREHPDYRVVFTGHSLGGALATVAGADLRGNGYDIDVFSYGAPRLGNRAFAEFLTVQTGGTLYRITHTNDIVPRLPPRKFGYSHSSPEYWIKSGTGVPVRRRDIVKIEGIDATGGNNQPNIPDGPAHLWYFGLIGTCL

SEQ ID NO: 8308 - protein, 269 aa, Thermomyces lanuginosus
EVSQDLFNQFNLFAQYSAAAYCGKNNRAPAGTQITCTGNACPEVEKADATFLYSFEDSGVGDVTGFLALDNTNKLIVLSFRGSRSIENWIANXXXXLKEINDICSGCRGHAGFTSSWRSVADTLRQKVEDAVREHPDYRVVFTGHSLGGALATVAGADLRGNGYDIDVFSYGAPRVGNRAFAEFLTVQTGGTLYRITHTNDIVPRLPPREFGYSHSSPEYWIKSGTLVPVRRRDIVKIEGIDATGGNNQPNIPDITAHLWYFGLIGTCL

SEQ ID NO: 8309 - protein, 269 aa, Thermomyces lanuginosus
EVSQDLFNQFNLFAQYSAAAYCGKNNDAPAGTNITCTGNACPEVEKADATFLYSFEDNGSGDVTGFLALDNTNKLIVLSFRGSRSTENWIGNLNFDLKEINDICSGCRGHDGFTSSWRSVADTLRQKVEDAVREHPDYRVVFTGHSLGGALATVAGADLRGNGYDIDVFSYGAPRVGNRAFAEFLTVQTGGTLYRITHTNDIVPRLPPREFGYSHSSPEYWIKSGTGVPVKRRDIVKIEGIDATGGNNQPNIPDISAHLWYFGLIGTCL

SEQ ID NO: 8310 - protein, 269 aa, Thermomyces lanuginosus
EVSQDLFNQFNLFAQYSAAAYCGKNNDAPAGTNITCTGNACPEVEKADATFLYSFEDSGVGDVTGFLALDNTNKLIVLSFRGSRSIQNWIGNLNFDLKEINDICSGCRGHDGFTSSWRSVADTLRQKVEDAVREHPDYRVVFTGHSLGGALATVAGADLRGNGYDIDVFSYGAPRVGNRAFAEFLTVQTGGTLYRITHTNDIVPRLPPRQFGYSHSSPEYWIKSGTLVPVTRNDIVKIEGINATGGNNQPNIPNIPAHLWYFGLIGTCL

SEQ ID NO: 8311 - protein, 269 aa, Thermomyces lanuginosus
EVSQDLFNQFNLFAQYSAAAYCGKNNDAPAGTNITCTGNACPEVEKADATFLYSFEDNGSGDVTGFLALDNTNKLIVLSFRGSRSSENWIGNLNFDLKEINDICSGCRGHDGFTSSWRSVADTLRQKVEDAVREHPDYRVVFTGHSLGGALATVAGADLRGNGYDIDVFSYGAPRVGNRAFAEFLTVQTGGTLYRITHTNDIVPRLPPREFGYSHSSPEYWIKSGTGVPVKRRDIVKIEGIDATGGNNQPNIPDISAHLWYFGLIGTCL

SEQ ID NO: 8312 - protein, 269 aa, Thermomyces lanuginosus
EVSQDLFNQFNLFAQYSAAAYCGKNNDAPAGTQITCTGNACPEVEKADATFLYSFEDSGVGDVTGFLALDNTNKLIVLSFRGSRSIENWIGNLNFDLKEINDICSGCRGHDGFTSSWRSVADTLRQKVEDAVREHPDYRVVFTGHSLGGALATVAGADLRGNGYDIDVFSYGAPRVGNRAFAEFLTVQTGGTLYRITHTNDIVPRLPPREFGYSHSSPEYWIKSGTLVPVRRRDIVKIEGIDATGGNNQPNIPYIPAHLWYFGLIGTCL

SEQ ID NO: 8313 - protein, 269 aa, Thermomyces lanuginosus
EVSQDLFNQFNLFAQYSAAAYCGKNNDAPAGTNITCTGNACPEVEKADATFLYSFEDSGVGDVTGFLALDNTNKLIVLSFRGSRSIENWIQNLNFDLKEINDICSGCRGHDGFTSSWRSVADTLRQKVEDAVREHPDYRVVFTGHSLGGALATVAGADLRGNGYDIDVFSYGAPRVGNRAFAEFLTVQTGGTLYRITHTNDIVPRLPPRQFGYSHSSPEYWIKSGTLVPVRRRDIVKIEGIDATGGNNQRNIPDIPAHLWYFGLIGTCL

SEQ ID NO: 8314 - protein, 269 aa, Synthetic construct
EVSQDLFNQFNLFAQYSAAAYCGKNNDAPAGTNITCTGNACPEVEKADATFLYSFEDSGVGDVTGFLALDNTNKLIVLSFRGSRSIENWIGNLNFDLKEINDICSGCRGHDGFTSSWRSVADTLRQKVEDAVREHPGYRVVFTGHSLGGALATVAGADLRGNGYDIGVFSYGAPRVGNRAFAEFLTVQTGGTLYRITHTNDIVPRLPPREFGYSHSSPVYLIKSGTLVPVTRNDIVKIEGIDATGGNNQPNIPDIPAHLWYFGLIGTCL

SEQ ID NO: 8315 - protein, 269 aa, Thermomyces lanuginosus
EVSVDLFNQFNLFAQYSAAAYCGKNNRAPAGTNITCTANACPEVEKADATFLYSFEDSGVGDVTGFLALDNTNKLIVLSFRGSRSIENWITNLNFELKEINDICSGCRGHAGFTSSWRSVADTLRQKVEDAVREHPDYRVVFTGHSLGGALATVAGADLRGNKYDIDVFSYGAPRVGNRAFAEFLTVQTGGTLYRITHTNDIVPRLPPREFGYSHSSPEYWIKSGTLVPVRRRDIVKIEGIDATGGNNQPNIPSITAHLWYFGLIGTCL

SEQ ID NO: 8316 - protein, 269 aa, Thermomyces lanuginosus
EVSQDLFNQFNLFAQYSAAAYCGKNNDAPAGTNITCTGNACPEVEKADATFLYSFEDXGVGDVTGFLALDNTNKLIVLSFRGSRSIENWIGNLNFDLKEINDICSGCRGRDGFTSSWRSVADTLRQKVEDAVREHPDYRVVFTGXSLGGALATVAGADLRGNGYDIDVFSYGAPRVGNRAFAEFLTVQTGGTLYRITXTNDIVPRLPPREFGYSHSSPEYWIKSGTLVPVTRNDIVKIEGIDATGGNNQPNIPDIPAHLWYFGLIGTCL

SEQ ID NO: 8317 - protein, 269 aa, Thermomyces lanuginosus
EVSQDLFNQFNLFAQYSAAAYCGKNNDAPAGTNITCTGNACPEVEKADATFLYSFEDSGVGDVTGFLALDNTNKLIVLSFRGSRSIENWIGNLNFDLKEINDICSGCRGHDGFTSSWRSVADTLRQKVEDAVREHPDYRVVFTGHSLGGALATVAGADLRGNGYDIDVFSYGAPRVGNRAFAEFLTVQTGGTLYRITHTNDXVPRXPPREXGYSHSSPEYWIKSGTLVPVTRNDIVKIEGIDATGGNNQPNIPDXPAHLWYFGLIGTCL

SEQ ID NO: 8318 - protein, 269 aa, Thermomyces lanuginosus
EVSQDLFNQFNLFAQYSAAAYCGKNNDAPAGTQITCTGNACPEVEKADATFLYSFEDSGVGDVTGFLALDNTNKLIVLSFRGSRSIENWIGNLNFDLKEINDICSGCRGHDGFTSSWRSVADTLRQKVEDAVREHPDYRVVFTGHSLGGALATVAGADLRGNGYDIDVFSYGAPRVGNRAFAEFLTVQTGGTLYRITHTNDIVPRLPPREFGYSHSSPEYWIKSGTLVPVRRRDIVKIEGIDATGGNNQPNIPTIPAHLWYFGLIGTCL

SEQ ID NO: 8319 - protein, 269 aa, Thermomyces lanuginosus
EVSQDLFNQFNLFAQYSAAAYCGKNNDAPAGTQITCTGNACPEVEKADATFLYSFEDSGVGDVTGFLALDNTNKLIVLSFRGSRSIENWIGNLNFDLKEINDICSGCRGHDGFTSSWRSVADTLRQKVEDAVREHPDYRVVFTGHSLGGALATVAGADLRGNGYDIDVFSYGAPRVGNRAFAEFLTVQTGGTLYRITHTNDIVPRLPPREFGYSHSSPEYWIKSGTLVPVRRRDIVKIEGIDATGGNNQPNIPHIPAHLWYFGLIGTCL

SEQ ID NO: 8320 - protein, 268 aa, Thermomyces lanuginosus
EVSQDLFNQFNLFAQYSAAAYCSKNNNAPAGTNITCTGNICPEVEKADATILYSFRDSGVGDVTGFLALDNTNKLIVLSFRGSRSIENWIGNLNFDLEIDDICSGCRGHDGFTSSWFSVADTLRQKVEDAVREHPDYRVVFTGHSLGGALATVAGADLRGNGYDIDVFSYGAPRVGNRAFAEFLTVQTGGTLYRITHTNDIVPRLPPREFGYSHSSPEYWIKSGTLVPVRRRDIVKIEGIDAEGGNNQPNIPDITAHLWYFGLIGTCL

SEQ ID NO: 8321 - protein, 268 aa, Thermomyces lanuginosus
VSQDLFNQFNLFAQYSAAAYCGKNNDAPAGTNITCTGNACPEVEKADATVLYSFEDSGVGDVTGFLALDNTNKLIVLSFRGSRSIENWIGNLNFELIEINDICSGCRGHAGFTSSWRSVADTLRQKVEDAVREHPDYRVVFTGHSLGGALATVAGADLRGNKYDIDVFSYGAPRVGNRAFAEFLTVQTGGTLYRITSTNDIVPRLPPREFGYSHSSPEFWIKSGTLVPVRRCDIVKIEGIDATGGNNQPNIPSITAHLWYFGLIGTCL

SEQ ID NO: 8322 - protein, 268 aa, Thermomyces lanuginosus
EVSQDLFNQFNLFAQYSAAAYCGKNNDAPAGTNITCTGNACPEVEKADATFLYSFEDSGGGWVTGFLALDNTNKLIVLSFRGSWSIENWIANLNFFLKKINDICSGCRGHDGFTSSWRSVADTLRQKVEDAVREHPDYRVVFTGHSLGGALATVAGADLRGNGYDIDVFSYGAPRVGNRAFAEFLTVQTGGTLYRITHTNDIVPRLPPREFGYSHSSPEYWIKSGTLVPVTRNDIVKIEGIDATGGNNQPNIPDIPAHLWYFQATDAC

SEQ ID NO: 8323 - protein, 268 aa, Thermomyces lanuginosus
VSQDLFNQFNLFAQYSAAAYCGKNNDAPAGTNITCTGNACPEVEKADATVLYSFEDSGVGDVTGFLALDNTNKLIVLSFRGSRSIENWIGNLNFILIEINDICSGCRGHAGFTSSWRSVADTLRQKVEDAVREHPDYRVVFTGHSLGGALATVAGADLRGNKYDIDVFSYGAPRVGNRAFAEFLTVQTGGTLYRITSTNDIVPRLPPREFGYSHSSPEFWIKSGTLVPVRRCDIVKIEGIDATGGNNQPNIPSITAHLWYFGLIGTCL

SEQ ID NO: 8324 - protein, 268 aa, Thermomyces lanuginosus
EVSQDLFNQFNLFAQYSAAAYCGKNNDAPAGTNITCTGNACPEVEKADATFLYSFEDSGCGHVTGFLALDNTNKLIVLSFRGSWSIENWIANLNFFLKKINDICSGCRGHDGFTSSWRSVADTLRQKVEDAVREHPDYRVVFTGHSLGGALATVAGADLRGNGYDIDVFSYGAPRVGNRAFAEFLTVQTGGTLYRITHTNDIVPRLPPREFGYSHSSPEYWIKSGTLVPVTRNDIVKIEGIDATGGNNQPNIPDIPAHLWYFQATDAC

SEQ ID NO: 8325 - protein, 268 aa, Thermomyces lanuginosus
VSQDLFNQFNLFAQYSAAAYCGKNNRAPAGTNITCTGNACPEVEKADATLLYSFEDSGVGDVTGFLALDNTNKLIVLSFRGSRSIENWIGNLNFELIEINDICSGCRGHAGFTSSWRSVADTLRQKVEDAVREHPDYRVVFTGHSLGGALATVAGADLRGNKYDIDVFSYGAPRVGNRAFAEFLTVQTGGTLYRITSTNDIVPRLPPREFGYSHSSPEFWIKSGTLVPVRRCDIVKIEGIDATGGNNQPNIPDITAHLWYFGLIGTCL

SEQ ID NO: 8326 - protein, 268 aa, Thermomyces lanuginosus
VSQDLFNQFNLFAQYSAAAYCGKNNRAPAGTNITCTGNACPEVEKADATLLYSFEDSGVGDVTGFLALDNTNKLIVLSFRGSRSIENWIGNLNFELIEINDICSGCRGHAGFTSSWRSVADTLRQKVEDAVREHPDYRVVFTGHSLGGALATVAGADLRGNSYDIDVFSYGAPRVGNRAFAEFLTVQTGGTLYRITSTNDIVPRLPPREFGYSHSSPEFWIKSGTLVPVRRCDIVKIEGIDATGGNNQPNIPDITAHLWYFGLIGTCL

SEQ ID NO: 8327 - protein, 268 aa, Thermomyces lanuginosus
EVSQDLFNQFNLFAQYSAAAYCGKNNDAPAGTNITCTGNACPEVEKADATFLYSFEDSGKGLVTGFLALDNTNKLIVLSFRGSWSIENWIANLNFFLKKINDICSGCRGHDGFTSSWRSVADTLRQKVEDAVREHPDYRVVFTGHSLGGALATVAGADLRGNGYDIDVFSYGAPRVGNRAFAEFLTVQTGGTLYRITHTNDIVPRLPPREFGYSHSSPEYWIKSGTLVPVTRNDIVKIEGIDATGGNNQPNIPDIPAHLWYFQATDAC

SEQ ID NO: 8328 - protein, 268 aa, Thermomyces lanuginosus
VSQDLFNQFNLFAQYSAAAYCGKNNRAPAGTNITCTGNACPEVEKADATVLYSFEDSGVGDVTGFLALDNTNKLIVLSFRGSRSIENWIGNLNFDLIEINDICSGCRGHAGFTSSWRSVADTLRQKVEDAVREHPDYRVVFTGHSLGGALATVAGADLRGNKYDIDVFSYGAPRVGNRAFAEFLTVQTGGTLYRITSTNDIVPRLPPREFGYSHSSPEFWIKSGTLVPVRRCDIVKIEGIDATGGNNQPNIPSITAHLWYFGLIGTCL

SEQ ID NO: 8329 - protein, 268 aa, Thermomyces lanuginosus
VSQDLFNQFNLFAQYSAAAYCGKNNRAPAGTNITCTGNACPEVEKADATLLYSFEDSGVGDVTGFLALDNTNKLIVLSFRGSRSIENWIGNLNFILIEINDICSGCRGHAGFTSSWRSVADTLRQKVEDAVREHPDYRVVFTGHSLGGALATVAGADLRGNKYDIDVFSYGAPRVGNRAFAEFLTVQTGGTLYRITSTNDIVPRLPPREFGYSHSSPEFWIKSGTLVPVRRCDIVKIEGIDATGGNNQPNIPDITAHLWYFGLIGTCL

SEQ ID NO: 8330 - protein, 268 aa, Thermomyces lanuginosus
VSQDLFNQFNLFAQYSAAAYCGKNNDAPAGTNITCTGNACPEVEKADATILYSFEDSGVGDVTGFLALDNTNKLIVLSFRGSRSIENWIGNLNFELIEINDICSGCRGHAGFTSSWRSVADTLRQKVEDAVREHPDYRVVFTGHSLGGALATVAGADLRGNKYDIDVFSYGAPRVGNRAFAEFLTVQTGGTLYRITSTNDIVPRLPPREFGYSHSSPEFWIKSGTLVPVRRCDIVKIEGIDATGGNNQPNIPSITAHLWYFGLIGTCL

SEQ ID NO: 8331 - protein, 268 aa, Thermomyces lanuginosus
VSQDLFNQFNLFAQYSAAAYCGKNNDAPAGTNITCTANACPEVEKADATVLYSFEDSGVGDVTGFLALDNTNKLIVLSFRGSRSIENWIGNLNFELIEINDICSGCRGHAGFTSSWRSVADTLRQKVEDAVREHPDYRVVFTGHSLGGALATVAGADLRGNKYDIDVFSYGAPRVGNRAFAEFLTVQTGGTLYRITSTNDIVPRLPPREFGYSHSSPEFWIKSGTLVPVRRCDIVKIEGIDATGGNNQPNIPDITAHLWYFGLIGTCL

SEQ ID NO: 8332 - protein, 268 aa, Thermomyces lanuginosus
VSQDLFNQFNLFAQYSAAAYCGKNNRAPAGTNITCTGNACPEVEKADATVLYSFEDSGVGDVTGFLALDNTNKLIVLSFRGSRSIENWIGNLNFELIEINDICSGCRGHAGFTSSWRSVADTLRQKVEDAVREHPDYRVVFTGHSLGGALATVAGADLRGNKYDIDVFSYGAPRVGNRAFAEFLTVQTGGTLYRITSTNDIVPRLPPREFGYSHSSPEFWIKSGTLVPVRRCDIVKIEGIDATGGNNQPNIPDITAHLWYFGLIGTCL

SEQ ID NO: 8333 - protein, 268 aa, Thermomyces lanuginosus
EVSQDLFNQFNLFAQYSAAAYCGKNNDAPAGTNITCTGNACPEVEKADATFLYSFEDSGGGEVTGFLALDNTNKLIVLSFRGSWSIENWIANLNFFLKKINDICSGCRGHDGFTSSWRSVADTLRQKVEDAVREHPDYRVVFTGHSLGGALATVAGADLRGNGYDIDVFSYGAPRVGNRAFAEFLTVQTGGTLYRITHTNDIVPRLPPREFGYSHSSPEYWIKSGTLVPVTRNDIVKIEGIDATGGNNQPNIPDIPAHLWYFQATDAC

SEQ ID NO: 8334 - protein, 268 aa, Thermomyces lanuginosus
VSQDLFNQFNLFAQYSAAAYCGKNNDAPAGTNITCTGNACPEVEKADATLLYSFEDSGVGDVTGFLALDNTNKLIVLSFRGSRSIENWIGNLNFELIEINDICSGCRGHAGFTSSWRSVADTLRQKVEDAVREHPDYRVVFTGHSLGGALATVAGADLRGNKYDIDVFSYGAPRVGNRAFAEFLTVQTGGTLYRITSTNDIVPRLPPREFGYSHSSPEFWIKSGTLVPVRRCDIVKIEGIDATGGNNQPNIPSITAHLWYFGLIGTCL

SEQ ID NO: 8335 - protein, 268 aa, Thermomyces lanuginosus
EVSQDLFNQFNLFAQYSAAAYCGKNNDAPAGTNITCTGNACPEVEKADATFLYSFEDSGGGVVTGFLALDNTNKLIVLSFRGSWSIENWIANLNFFLKKINDICSGCRGHDGFTSSWRSVADTLRQKVEDAVREHPDYRVVFTGHSLGGALATVAGADLRGNGYDIDVFSYGAPRVGNRAFAEFLTVQTGGTLYRITHTNDIVPRLPPREFGYSHSSPEYWIKSGTLVPVTRNDIVKIEGIDATGGNNQPNIPDIPAHLWYFQATDAC

SEQ ID NO: 8336 - protein, 268 aa, Thermomyces lanuginosus
VSQDLFNQFNLFAQYSAAAYCGKNNDAPAGTNITCTGNACPEVEKADATFLYSFEDTGKGDVTGFLALDNTNKLIVLSFRGSRSVENWIGNLNFDLKEINAICSGCRGHDGFTSSWRSVADTLRQKVEDAVREHPDYRVVFSGHSLGGGLATVAGADLRGNGYDIDVFSYGAPRVGNRAFAEFLTVQTGGTLYRITHTNDIVPRLPPREFGYSHSSPEYWIKSGTGVPVRRRDIVKIEGIDATGGNNQPNIPDAKAHLWYFGLIGTCL

SEQ ID NO: 8337 - protein, 268 aa, Thermomyces lanuginosus
VSQDLFNQFNLFAQYSAAAYCGKNNRAPAGTNITCTANACPEVEKADATLLYSFEDSGVGDVTGFLALDNTNKLIVLSFRGSRSIENWIGNLNFDLIEINDICSGCRGHAGFTSSWRSVADTLRQKVEDAVREHPDYRVVFTGHSLGGALATVAGADLRGNSYDIDVFSYGAPRVGNRAFAEFLTVQTGGTLYRITSTNDIVPRLPPREFGYSHSSPEFWIKSGTLVPVRRCDIVKIEGIDATGGNNQPNIPDITAHLWYFGLIGTCL

SEQ ID NO: 8338 - protein, 268 aa, Thermomyces lanuginosus
EVSQDLFNQFNLFAQYSAAAYCGKNNDAPAGTNITCTGNACPEVEKADATFLYSFEDSGRGLVTGFLALDNTNKLIVLSFRGSWSIENWIANLNFFLKKINDICSGCRGHDGFTSSWRSVADTLRQKVEDAVREHPDYRVVFTGHSLGGALATVAGADLRGNGYDIDVFSYGAPRVGNRAFAEFLTVQTGGTLYRITHTNDIVPRLPPREFGYSHSSPEYWIKSGTLVPVTRNDIVKIEGIDATGGNNQPNIPDIPAHLWYFQATDAC

SEQ ID NO: 8339 - protein, 268 aa, Thermomyces lanuginosus
VSQDLFNQFNLFAQYSAAAYCGKNNDAPAGTNITCTGNACPEVEKADATFLYSFEDSGVGDVTGFLALDNTNKLIVLSFRGTRSIENWIGNLKFLLKEINDICSGCRGHDGFTSSWRSVADTLRQKVEDAVREHPDYRVVFTGHSLGGALATVAGADLRGNGYDIDVFSYGAPRVGNRAFAEFLTVQTGGTLYRITHTNDIVPRLPPREFGYSHSSPEYWIKSGTLVPVTRNDIVKICGIDATGGNNRPNIPDIPAHLWYFGLIGTCL

SEQ ID NO: 8340 - protein, 268 aa, Thermomyces lanuginosus
VSQDLFNQFNLFAQYSAAAYCGKNNDAPAGTNITCTGNACPEVEKADATFLYSFEDSGVGDVTGFLALDNTNKLIVLSFRGSRSIENWIGNLNFSLKEINDICSGCRGHDGFTSSWRSVADTLRQKVEDAVREHPDYRVVFTGHSLGGALATVAGADLRGNGYDIDVFSYGAPRVGNRAFAEFLTVQTGGTLYRITHTNDIVPRLPPREFGYSHSSPEYWIKSGTLVPVTRNDIVKICGIDATGGNNRPNIPDIPAHLWYFGLICTCL

SEQ ID NO: 8341 - protein, 268 aa, Thermomyces lanuginosus
VSQDLFNQFNLFAQYSAAAYCGKNNDAPAGTNITCTGNACPEVEKADATFLYSFEDSGVGDVTGFLALDNTNKLIVLSFRGSRSIENWIGNLNFDLKKINDICSGCRGHDGFTSSWRSVADTLRQKVEDAVREHPDYRVVFTGHSLGGALATVAGADLRGNGYDIDVFSYGAPRVGNRAFAEFLTVQTGGTLYRITHTNDIVPRLPPREFGYSHSSPEYWIKSGTLVPVTRNDIVKICGIDATGGNNRPNIPDIPAHLWYFGLIDTCL

SEQ ID NO: 8342 - protein, 268 aa, Thermomyces lanuginosus
VSQDLFNQFNLFAQYSAAAYCGKNNDAPAGTNITCTGNACPEVEKADATFLYSFEDSGVGDVTGFLALDNTNKLIVLSFRGSRSIENWIGNLNFDLDNINDICSGCRGHDGFTSSWRSVADTLRQKVEDAVREHPDYRVVFTGHSLGGALATVAGADLRGNGYDIDVFSYGAPRVGNRAFAEFLTVQTGGTLYRITHTNDIVPRLPPREFGYSHSSPEYWIKSGTLVPVTRNDIVKICGIDATGGNNRPNIPDIPAHLWYFGLIGTCL

SEQ ID NO: 8343 - protein, 268 aa, Thermomyces lanuginosus
VSQDLFNQFNLFAQYSAAAYCGKNNDAPAGTNITCTGNACPEVEKADATFLYSFEDSGVGDVTGFLALDNTNKLIVLSFRGSRSIENWIGNLNFDLKNINDICSGCRGHDGFTSSWRSVADTLRQKVEDAVREHPDYRVVFTGHSLGGALATVAGADLRGNGYDIDVFSYGAPRVGNRAFAEFLTVQTGGTLYRITHTNDIVPRLPPREFGYSHSSPEYWIKSGTLVPVTRNDIVKICGIDATGGNNRPNIPDIPAHLWYFGLIDTCL

SEQ ID NO: 8344 - protein, 268 aa, Synthetic construct
VSQDLFNQFNLFAQYSAAAYCGKNNDAPAGTNITCTGNACPEVEKADATFLYSFEDSGVGDVTGFLALDNTNKLIVLSFRGSRSIENWFGNLNFLLKKINDICSGCRGHDGFTSSWRSVADTLRQKVEDAVREHPDYRVVFTGHSLGGALATVAGADLRGNGYDIDVFSYGAPRVGNRAFAEFLTAQTGGTLYRITHTNDIVPRLPPREFGYSHSSPEYWIKSGTLVPVTRNDIVKIEGIDATGGNNQPNIPDIPAHLWYFGLIGTCL

SEQ ID NO: 8345 - protein, 268 aa, Synthetic construct
VSQDLFNQFNLFAQYSAAAYCGKNNDAPAGTNITCTGNACPEVEKADATFLYSFEDSGVGDVTGFLALDNTNKLIVLSFRGSRSIENWIGNLNFLLKKINDICSGCRGHDGFTSSWRSVADTLRQKVEDAVREHPDYRVVFTGHSLGGALATVAGADLRGNGYDIDVFSYGAPRVGNRAFAEFLTAQTGGTLYRITHTNDIVPRLPPREFGYSHSSPEYWIKSGTLVPVTRNDIVKIEGIDATGGNNRPNIPDIPAHLWYFGLIGTCL

SEQ ID NO: 8346 - protein, 268 aa, Thermomyces lanuginosus
VSQDLFNQFNLFAQYSAAAYCGKNNDAPAGTNITCTGNACPEVEKADATFLYSFEDSGVGDVTGFLALDNTNKLIVLSFRGSRSIENWIANLNFWLKEINDICSGCRGHDGFTSSWRSVADTLRQKVEDAVREHPDYRVVFTGHSLGGALATVAGADLRGNGYDIDVFSYGAPRVGNRAFAEFLTVQTGGTLYRITHTNDIVPRLPPREFGYSHSSPEYWIKSGTLVPVTRNDIVKICGIDATGGNNRPNIPDIPAHLWYFGLISTCL

SEQ ID NO: 8347 - protein, 268 aa, Thermomyces lanuginosus
VSQDLFNQFNLFAQYSAAAYCGKNNDAPAGTNITCTGNACPEVEKADATFLYSFEDSGVGDVTGFLALDNTNKLIVLSFRGSRSIENWIGNLNFDLKNINDICSGCRGHDGFTSSWRSVADTLRQKVEDAVREHPDYRVVFTGHSLGGALATVAGADLRGNGYDIDVFSYGAPRVGNRAFAEFLTVQTGGTLYRITHTNDIVPRLPPREFGYSHSSPEYWIKSGTLVPVTRNDIVKICGIDATGGNNRPNIPDIPAHLWYFGLIATCL

SEQ ID NO: 8348 - protein, 268 aa, Synthetic construct
VSQDLFNQFNLFAQYSAAAYCGKNNDAPAGTNITCTGNACPEVEKADATFLYSFEGSGVGRVTGFLALDNTNKLIVLSFRGSRSIENWIGNLKFLLKEINDICSGCRGHDGFTSSWRSVADTLRQKVEDAVREHPDYRVVFTGHSLGGALATVAGADLRGNGYDIDVFSYGAPRVGNRAFAEFLTVQTGGTLYRITHTNDIVPRLPPREFGYSHSSPEYWIKSGTLVPVTRNDIVKIEGIDATGGNNRPNIPDIPAHLWYFGLIGTCL

SEQ ID NO: 8349 - protein, 268 aa, Thermomyces lanuginosus
VSQDLFNQFNLFAQYSAAAYCGKNNDAPAGTNITCTGNACPEVEKADATFLYSFEDSGVGDVTGFLALDNTNKLIVLSFRGSRSIENWIGNLNFSLKEINDICSGCRGHDGFTSSWRSVADTLRQKVEDAVREHPDYRVVFTGHSLGGALATVAGADLRGNGYDIDVFSYGAPRVGNRAFAEFLTVQTGGTLYRITHTNDIVPRLPPREFGYSHSSPEYWIKSGTLVPVTRNDIVKICGIDATGGNNRPNIPDIPAHLWYFGLIATCL

SEQ ID NO: 8350 - protein, 268 aa, Thermomyces lanuginosus
VSQDLFNQFNLFAQYSAAAYCGKNNDAPAGTNITCTGNACPEVEKADATFLYSFEDSGVGDVTGFLALDNTNKLIVLSFRGSRSIENWIGNLNFSLKEINDICSGCRGHDGFTSSWRSVADTLRQKVEDAVREHPDYRVVFTGHSLGGALATVAGADLRGNGYDIDVFSYGAPRVGNRAFAEFLTVQTGGTLYRITHTNDIVPRLPPREFGYSHSSPEYWIKSGTLVPVTRNDIVKICGIDATGGNNRPNIPDIPAHLWYFGLISTCL

SEQ ID NO: 8351 - protein, 268 aa, Thermomyces lanuginosus
VSQDLFNQFNLFAQYSAAAYCGKNNDAPAGTNITCTGNACPEVEKADATFLYSFEDSGVGDVTGFLALDNTNKLIVLSFRGSRSIENWIANLNFWLKEINDICSGCRGHDGFTSSWRSVADTLRQKVEDAVREHPDYRVVFTGHSLGGALATVAGADLRGNGYDIDVFSYGAPRVGNRAFAEFLTVQTGGTLYRITHTNDIVPRLPPREFGYSHSSPEYWIKSGTLVPVTRNDIVKICGIDATGGNNRPNIPDIPAHLWYFGLIDTCL

SEQ ID NO: 8352 - protein, 268 aa, Thermomyces lanuginosus
VSQDLFNQFNLFAQYSAAAYCGKNNDAPAGTNITCTGNACPEVEKADATFLYSFEDSGVGDVTGFLALDNTNKLIVLSFRGSRSIENWIGNLNFSLKEINDICSGCRGHDGFTSSWRSVADTLRQKVEDAVREHPDYRVVFTGHSLGGALATVAGADLRGNGYDIDVFSYGAPRVGNRAFAEFLTVQTGGTLYRITHTNDIVPRLPPREFGYSHSSPEYWIKSGTLVPVTRNDIVKICGIDATGGNNRPNIPDIPAHLWYFGLIDTCL

SEQ ID NO: 8353 - protein, 268 aa, Thermomyces lanuginosus
EVSQDLFNQFNLFAQYSAAAYCGKNNDAPAGTNITCTGNACPEVEKADATFLYSFEDSGAGSVTGFLALDNTNKLIVLSFRGSRSIENWIANLNFWLKKINDICSGCRGHDGFTSSWRSVADTLRQKVEDAVREHPDYRVVFTGHSLGGALATVAGADLRGNGYDIDVFSYGAPRVGNRAFAEFLTVQTGGTLYRITHTNDIVPRLPPREFGYSHSSPEYRIKSGTLVPVTRNDIVKIEGIDATGGNNQPNIPDIPAHLWYFQATDAC

SEQ ID NO: 8354 - protein, 268 aa, Thermomyces lanuginosus
EVSQDLFNQFNLFAQYSAAAYCGKNNDAPAGTNITCTGNACPEVEKADATFLYSFEDSGGGFVTGFLALDNTNKLIVLSFRGSWSIENWIANLNFWLKKINDICSGCRGHDGFTSSWRSVADTLRQKVEDAVREHPDYRVVFTGHSLGGALATVAGADLRGNGYDIDVFSYGAPRVGNRAFAEFLTVQTGGTLYRITHTNDIVPRLPPREFGYSHSSPEYWIKSGTLVPVTRNDIVKIEGIDATGGNNQPNIPDIPAHLWYFQATDAC

SEQ ID NO: 8355 - protein, 267 aa, Thermomyces lanuginosus
VSQDLFNQFNLFAQYSAAAYCGKNNDAPAGTNITCTGNACPEVEKADATFLYSFEDSGVGDVTGFLALDNTNKLIVLSFRGSRSIENWIANLNFWLKKINDICSGCRGHDGFTSSWRSVADTLRQKVEDAVREHPDYRVVFTGHSLGGALATVAGADLRGNGYDIDVFSYGAPRVGNRAFAEFLTVQTGGTLYRITHTNDIVPRLPPREFGYSHSSPEYWIKSGTLVPVTRNDIVKIEGIDATGGNTRPNIPDIPAHLQYFQATDAC

SEQ ID NO: 8356 - protein, 267 aa, Thermomyces lanuginosus
VSQDLFNQFNLFAQYSAAAYCGKNNDAPAGTNITCTGNACPEVEKADATFLYSFEDSGVGDVTGFLALDNTNKLIVLSFRGSRSIENWIANLNFWLKKINDICSGCRGHDGFTSSWRSVADTLRQKVEDAVREHPDYRVVFTGHSLGGALATVAGADLRGNGYDIDVFSYGAPRVGNRAFAEFLTVQTGGTLYRITHTNDIVPRLPPREFGYSHSSPEYWIKSGTLVPVTRNDIVKICGIDATGGNNRPNIPDIAAHLWYFQATDAC

SEQ ID NO: 8357 - protein, 291 aa, Synthetic construct
MRSSLVLFFVSAWTALASPIRREVSQDLFNQFNLFAQYSAAAYCGKNNDAPAGTNITCTGNACPEVEKADATFLYSFEDSGVGDVTGFLALDNTDKLIVLSFRGSPSIENWIGNLNFDLKEIKDICSGCRGHDGFTSSWRSVADRLRQKVEDAVRDHPDYRVVFTGHSLGGALATVAGADLRGNGYDIDVFSYGAPRVGNRAFAEFLTVQTGGTLYRITHTNDIVPRLPPREFGYSHSSPEYWIKSGTLVPVTRNDIVNIEGMDPTGCNNQPNIPEVRAHLWYFGLIGTCL

SEQ ID NO: 8358 - protein, 291 aa, Thermomyces lanuginosus
MRSSLVLFFVSAWTALASPIRREVSQDLFNQFNLFAQYSAAAYCGKNNDAPAGTNITCTGNACPEVEKADATFLYSFRDSGVGDVTGFLALDNTNKLIVLSFRGSRSIENWIADLNFILIEINDICSGCRGHDGFTSSWFSVADTLRQKVEDAVREHPDYRVVFTGHSLGGALATVAGADLRGNGYDIDVFSYGAPRVGNRAFAEFLTVQTGGTLYRITHTNDIVPRLPPREFGYSHSSPEYWIKSGTLVPVRRRDIVKIEGIDATGGNNQPNIPSSVAHLWYFGAIGTCL

SEQ ID NO: 8359 - protein, 291 aa, Thermomyces lanuginosus
MRSSLVLFFVSAWTALASPIRREVSQDLFNQFNLFAQYSAAAYCGKNNDAPAGTNITCTGNACPEVEKADATFLYSFRDSGVGDVTGFLALDNTNKLIVLSFRGTRSLENWIADLNFILQEINDICSGCRGHDGFTSSWFSVADTLRQKVEDAVREHPDYRVVFTGHSLGGALATVAGADLRGNGYDIDVFSYGAPRVGNRAFAEFLTVQTGGTLYRITHTNDIVPRLPPREFGYSHSSPEYWIKSGTLVPVRRRDIVKIEGIDATGGNNQPNIPSIPAHLWYFGAIGTCL

SEQ ID NO: 8360 - protein, 291 aa, Thermomyces lanuginosus
MRSSLVLFFVSAWTALASPIRREVSQDLFNQFNLFAQYSAAAYCGKNNDAPAGTNITCTGNACPEVEKADATFLYSFRDSGVGDVTGFLALDNTNKLIVLSFRGSRSIENWIADLNFILIEINDICSGCRGHDGFTSSWFSVADTLRQKVEDAVREHPDYRVVFTGHSLGGALATVAGADLRGNGYDIDVFSYGAPRVGNRAFAEFLTVQTGGTLYRITHTNDIVPRLPPREFGYSHSSPEYWIKSGTLVPVRRRDIVKIEGIDATGGNNQPNIPSGAAHLWYFGAIGTCL

SEQ ID NO: 8361 - protein, 291 aa, Thermomyces lanuginosus
MRSSLVLFFVSAWTALASPIRREVSQDLFNQFNLFAQYSAAAYCGKNNRAPAGTNITCTANACPEVEKADATFLYSFEDSGVGDVTGFLALDNTNKLIVLSFRGTRSIENWIADLNFILQEINDICSGCRGHDGFTSSWRSVADTLRQKVEDAVREHPDYRVVFTGHSLGGALATVAGADLRGNKYDIDVFSYGAPRVGNRAFAEFLTVQTGGTLYRITHTNDIVPRLPPREFGYSHSSPEYWIKSGTLVPVRRRDIVKIEGIDATGGNNQPNIPSITAHLWYFGLIGTCL

SEQ ID NO: 8362 - protein, 291 aa, Thermomyces lanuginosus
MRSSLVLFFVSAWTALASPIRREVSQDLFNQFNLFAQYSAAAYCGKNNDAPAGTNITCTGNACPEVEKADATFLYSFRDSGVGDVTGFLALDNTNKLIVLSFRGSRSIENWIADLNFILIEINDICSGCRGHDGFTSSWFSVADTLRQKVEDAVREHPDYRVVFTGHSLGGALATVAGADLRGNGYDIDVFSYGAPRVGNRAFAEFLTVQTGGTLYRITHTNDIVPRLPPREFGYSHSSPEYWIKSGTLVPVRRRDIVKIEGIDATGGNNQPNIPSMSAHLWYFGAIGTCL

SEQ ID NO: 8363 - protein, 291 aa, Thermomyces lanuginosus
MRSSLVLFFVSAWTALASPIRREVSQDLFNQFNLFAQYSAAAYCGKNNDAPAGTNITCTGNACPEVEKADATFLYSFEDSGVGDVTGFLALDNTNKLIVLSFRGTGSDTNLQLDTNYTLTEINDICSGCRGHDGFTSSWRSVADTLRQKVEDAVREHPDYRVVFTGHSLGGALATVAGADLRGNGYDIDVFSYGAPRVGNRAFAEFLTVQTGGTLYRITHTNDIVPRLPPREFGYSHSSPEYWIKSGTLVPVTRNDIVKIEGIDATGGNNQPNIPDIPAHLWYFGLIGTCL

SEQ ID NO: 8364 - protein, 291 aa, Thermomyces lanuginosus
MRSSLVLFFVSAWTALASPIRREVSQDLFNQFNLFAQYSAAAYCGKNNDAPAGTNITCTGNACPEVEKADATFLYSFRDSGVGDVTGFLALDNTNKLIVLSFRGSRSIENWIADLNFILIEINDICSGCRGHDGFTSSWFSVADTLRQKVEDAVREHPDYRVVFTGHSLGGALATVAGADLRGNGYDIDVFSYGAPRVGNRAFAEFLTVQTGGTLYRITHTNDIVPRLPPREFGYSHSSPEFWIKSGTLVPVRRRDIVKIEGIDAEGGNNQPNIPSIPAHLWYFGAIGTCL

SEQ ID NO: 8365 - protein, 291 aa, Thermomyces lanuginosus
MRSSLVLFFVSAWTALASPIRREVSQDLFNQFNLFAQYSAAAYCGRNNDAPAGTNITCTGNACPEVERADATFLYSFEDNGSGDVTGFLALDNTNRLIVLSFRGSRSVENWIGNLNFDLREINDICSGCRGHDGFTSSWRSVADTLRQRVEDAVREHPKYRVVFTGHSLGGALATVAGADLRGNGYDIDVFSYGAPRVGNRAFAEFLTVQTGGTLYRITHTNDIVPRLPPREFGYSHSSPEYWIRSGTLVPVRRRDIVKIEGIDATGGNNQPNIPDIPAHLWYFGLIGTCL

SEQ ID NO: 8366 - protein, 291 aa, Thermomyces lanuginosus
MRSSLVLFFVSAWTALASPIRREVSQDLFNQFNLFAQYSAAAYCGKNNRAPAGTNITCTANACPEVEKADATFLYSFEDSGVGDVTGFLALDNTNKLIVLSFRGTRSIENWIADLNFLLQEYNDICSGCRGHAGFTSSWRSVADTLRQKVEDAVREHPDYRVVFTGHSLGGALATVAGADLRGNKYDIDVFSYGAPRVGNRAFAEFLTVQTGGTLYRITHTNDIVPRLPPREFGYSHSSPEYWIKSGTLVPVRRRDIVKIEGIDATGGNNQPNIPDIPAHLWYFGLIGTCL

SEQ ID NO: 8367 - protein, 291 aa, Thermomyces lanuginosus
MRSSLVLFFVSAWTALASPIRREVSQDLFNQFNLFAQYSAAAYCGKNNDAPAGTNITCTGNACPEVEKADATFLYSFRDSGVGDVTGFLALDNTNKLIVLSFRGSRSIENWIADLNFILIEINDICSGCRGHDGFTSSWFSVADTLRQKVEDAVREHPDYRVVFTGHSLGGALATVAGADLRGNGYDIDVFSYGAPRVGNRAFAEFLTVQTGGTLYRITHTNDIVPRLPPREFGYSHSSPEYWIKSGTLVPVRRRDIVKIEGIDATGGNNQPNIPSGSAHLWYFGAIGTCL

SEQ ID NO: 8368 - protein, 291 aa, Thermomyces lanuginosus
MRSSLVLFFVSAWTALASPIRREVSQDLFNQFNLFAQYSAAAYCGKNNRAPAGTNITCTANACPEVEKADATFLYSFEDSGVGDVTGFLALDNTNKLIVLSFRGSRSIENWIADLNFLLQEINDICSGCRGHAGFTSSWRSVADTLRQKVEDAVREHPDYRVVFTGHSLGGALATVAGADLRGNKYDIDVFSYGAPRVGNRAFAEFLTVQTGGTLYRITHTNDIVPRLPPREFGYSHSSPEYWIKSGTLVPVRRRDIVKIEGIDATGGNNQPNIPSITAHLWYFGLIGTCL

SEQ ID NO: 8369 - protein, 194 aa, Humicola insolens
QLGAIQNGLESGSPNACPDAILIFARGSTEPGNMGITVGPALANGLKSYIPNIWIQGVGGPYDAALATNFLPRGTSQANIDEGKRLFALANQKCPNTPVVAGGYSQGAALIAAAVSELSGAVKEQVKGVALFGYTQNLQNRGGIPNYPRERTKVFCNVGDAVCTGTLIITPAHLSYTIQARGEAARFLRDRIRA

SEQ ID NO: 8370 - protein, 194 aa, Humicola insolens
QLGAIQNGLESGSPNACPDAILIFARGSTEPGNMGITVGPALANGLKSHIPNIWIQGVGGPYDAALATNFLPRGTSQANIDEGKRLFALANQKCPNTPVVAGGYSQGAALIAAAVSELSGAVKEQVKGVALFGYTQNLQNRGGIPNYPRERTKVFCNVGDAVCSGTLIITPAHLSYTIQARGEAARFLRDRIRA

SEQ ID NO: 8371 - protein, 194 aa, Humicola insolens
QLGAIQNGLESGSPNACPDAILIFARGSTEPGNMGITVGPALANGLKEHIPNIWIQGVGGPYDAAIATNFLPRGTSQANIDEGKRLFLLANQKCPNTPVVAGGYSQGAALIAAAVSELSGAVKEQVKGVALFGYTQNLQNRGGIPNYPRERTKVFCNVGDAVCTGTLIATPAHLSYTIQARGEAARFLHDRIRA

SEQ ID NO: 8372 - protein, 194 aa, Humicola insolens
QLGAIQNGLESGSPNACPDAILIFARGSTEPGNMGITVGPALANGLKSHIPNIWIQGVGGPYDAALATNFLPRGTSQANIDEGKRLFALANQKCPNTPVVAGGYSQGAALIAAAVSELSGAVKEQVKGVALFGYTQNLQNRGGIPNYPRERTKVFCNVGDAVCTGTLIITPAHFSYTIQARGEAARFLRDRIRA

SEQ ID NO: 8373 - protein, 194 aa, Humicola insolens
QLGAIENDLESGSADACPDAILIFARGSMEPGNMGITVGPALANGLEEHIRNIWIQGVGGPYDAALATNFLPRGTSQANIDEGKRLFHLAHQKCPNTPVVAGGYSQGAALIAAAVSELSGAVKEQVKGVVLFGYTQNLQNRGGIPNYPRERTKVFCNVGDAVCTGIPIITPAHLSYTIEARGEAARFLVDRIRA

SEQ ID NO: 8374 - protein, 194 aa, Humicola insolens
QLGAIXNGLESGSPNACPDAILIFARGSTEPGNMGITVGPALANGLKSHIPNIWIQGVGGPYDAALATNFLPRGTSQANIDEGKRLFALANQKCPNTPVVAGGYSQGAALIAAAVSELSGAVKEQVKGVALFGYTQNLQNRGGIPNYPRERTKVFCNVGDAVCTGTLIITPAHLSYTIQARGEAARFLRDRIRA

SEQ ID NO: 8375 - protein, 194 aa, Humicola insolens
QLGAIQNGLQSGSPNACPDAILIFARGSTEPGNMGITVGPALANGLKSHIPNIWIQGVGGPYDAALATNFLPRGTSQANIDEGKRLFALANQKCPNTPVVAGGYSQGAALIAAAVSELSGAVKEQVKGVALFGYTQNLQNRGGIPNYPRERTKVFCNVGDAVCTGTLIITPAHLSYTIQARGEAARFLRDRIRA

SEQ ID NO: 8376 - protein, 194 aa, Humicola insolens
QLGAIENGLESGSANACPDAILIFARGSTEPGNMGITVGPALANGLEEHIRNIWIQGVGGPYDAALATNFLPRGTSQANIDEGKRLFHLAHQKCPNTPVVAGGYSQGAALIAAAVSELSGAVKEQVKGVALFGYTQNLQNRGGIPNYPRERTKVFCNVGDAVCTGTLIITPAHLSYTIEARGEAARFLVDRIRA

SEQ ID NO: 8377 - protein, 194 aa, Humicola insolens
QLGAIENDLESGSPNACPDAILIFARGSTEPGNMGITVGPALANGLESHIPNIWIQGVGGPYDAALATNFLPRGTSQANIDEGKRLFALANQKCPNTPVVAGGYSQGAALIAAAVSELSGAVKEQVKGVALFGYTQNLQNRGGIPNYPRERTKVFCNVGDAVCTGTLIITPAHLSYTIQARGEAARFLRDRIRA

SEQ ID NO: 8378 - protein, 193 aa, Humicola insolens
QLGAICNDLESGSPDACPDAILIFARGSMEPGNMGITVGPALINGLKEHIPNIWCQGVGGPYDAALATNFLPRGTSQANIDEGKRLFHLAHQKCPNTPVVAGGYSQGAALIAAAVSELSGAVKEQVKGVVLFGYTQNLQNRGGIPNYPRERTKVFCNVGDLVCTGIPIITPAHLSYTIQAPEAARFLVDRIRA

SEQ ID NO: 8379 - protein, 193 aa, Humicola insolens
VGAIQNGLESGSPNACPDAILIFARGSTEPGNMGITVGPALANGLKSHIPNIWIQGVGGPYDAALATNFLPRGTSQANIDEGKRLFALANQKCPNTPVVAGGYSQGAALIAAAVSELSGAVKEQVKGVALFGYTQNLQNRGGIPNYPRERTKVFCNVGDAVCTGTLIITPAHLSYTIQARGEAARFLRDRIRA

SEQ ID NO: 8380 - protein, 274 aa, Thermomyces lanuginosus
SPIRREVSQDLFNQFNLFAQYSAAAYCGKNNDAPAGTNITCTGNACPEVEKADATFLYSFEDSGVGDVTGFLALDNTNKLIVLSFRGTGSDTNLQLDTNYTLTEINDICSGCRGHDGFTSSWRSVADTLRQKVEDAVREHPDYRVVFTGHSLGGALATVAGADLRGNGYDIDVFSYGAPRVGNRAFAEFLTVQTGGTLYRITHTNDIVPRLPPREFGYSHSSPEYWIKSGTLVPVRRRDIVKIEGIDATGGNNQPNIPDIPAHLWYFGLIGTCL

SEQ ID NO: 8381 - protein, 274 aa, Thermomyces lanuginosus
SPIRREVSQDLFNQFNLFAQYSAAAYCGKNNRAPAGTNITCTANACPEVEKADATFLYSFEDSGVGDVTGFLALDNTNKLIVLSFRGTRSIENWIADLNFLLQEYNDICSGCRGHAGFTSSWRSVADTLRQKVEDAVREHPDYRVVFTGHSLGGALATVAGADLRGNKYDIDVFSYGAPRVGNRAFAEFLTVQTGGTLYRITHTNDIVPRLPPREFGYSHSSPEYWIKSGTLVPVRRRDIVKIEGIDATGGNNQPNIPSITAHLWYFGLIGTCL

SEQ ID NO: 8382 - protein, 274 aa, Thermomyces lanuginosus
SPIRREVSRDLFNQFNLFAQYSAAAYCGKNNDAPAGTNITCTGNACPEVEKADATLLYSFRDSGVGDVTGFLALDNTNKLIVLSFRGSRSIENWIADLNFILIEINDICSGCRGHDGFTSSWFSVADTLRQKVEDAVREHPDYRVVFTGHSLGGALATVAGADLRGNGYDIDVFSYGAPRVGNRAFAEFLTVQTGGTLYRITHTNDIVPRLPPREFGYSHSSPEFWIKSGTLVPVRRRDIVKIEGIDAEGGNNQPNIPSIPAHLWYFGAIGTCL

SEQ ID NO: 8383 - protein, 274 aa, Thermomyces lanuginosus
SPIRREVSQDLYNQFKLFAHYAAAAYCGKNNDAPAGTNITCTGNACPEVEKADATFIYSFEDSGVGDVTGFLALDNTNKLIVLSFRGSRSIENWIANLNFDLKEINDICSGCRGHDGFYNSWRSVADTLRQKVEDAVREYPDYRVVFTGHSLGGALATVAGADLRGNGYDIDVFSYGAPRVGNRAFAEFLTVQTGGTLYRITHTNDIVPRLPPREFGYSHSSPEYWIKSGTLVPVTRNDIVVIEGIDATGGNNQPNIPDIPAHLWYFGLIGTCL

SEQ ID NO: 8384 - protein, 274 aa, Thermomyces lanuginosus
SPIRREVSQDLFNQFNLFAQYSAAAYCGKNNRAPAGTNITCTANACPEVEKADATVLYSFEDSGVGDVTGFLALDNTNKLIVLSFRGSRSIENWIADLNFLLQEINDICSGCRGHAGFTSSWRSVADTLRQKVEDAVREHPDYRVVFTGHSLGGALATVAGADLRGNKYDIDVFSYGAPRVGNRAFAEFLTVQTGGTLYRITHTNDIVPRLPPREFGYSHSSPEYWIKSGTLVPVRRRDIVKIEGIDATGGNNQPNIPSTTAHLWYFGLIGTCL

SEQ ID NO: 8385 - protein, 274 aa, Thermomyces lanuginosus
SPIRREVSQDLFNQFNLFAQYSAAAYCGKNNRAPAGTNITCTANACPEVEKADATFLYTFEDSGVGDVTGFLALDNTNKLIVLSFRGSRSIENWIADLNFLLQEINDICSGCRGHAGFTSSWRSVADTLRQKVEDAVREHPDYRVVFTGHSLGGALATVAGADLRGNKYDIDVFSYGAPRVGNRAFAEFLTVQTGGTLYRITHTNDIVPRLPPREFGYSHSSPEYWIKSGTLVPVRRRDIVKIEGIDATGGNNQPNIPSITAHLWYFGLIGTCV

SEQ ID NO: 8386 - protein, 273 aa, Synthetic construct
PRPRSGTPELFNQFNLFAQYSAAAYCGKNNDAPAGTNITCTGNACPEVEKADATFLYSFEGSGVGDVTGFLALDNTNKLIVLSFRGSRSIENWIGNLKFLMKEINDICSGCRGHDGFTSSWRSVADTLRQKVEDAVREHPDYRVVFTGHSLGGALATVAGADLRGNGYDIDVFSYGAPRVGNRAFAEFLTVQTGGTLYRITHTNDIVPRLPPREFGYSHSSPEYWIKSGTLVPVTRNDIVKIEGIDATGGNNRPNIPDIPAHLWYFGLIGTCL

SEQ ID NO: 8387 - protein, 269 aa, Thermomyces lanuginosus
EVSQDLFNQFNLFAQYSAAAYCSKNNNAPAGTNITCTGNICPEVEKADATILYSFRDSGVGDVTGFLALDNTNKLIVLSFRGSRSIENWIGNLNFDLIEIDDICSGCRGHDGFTSSWFSVADTLRQKVEDAVREHPDYRVVFTGHSLGGALATVAGADLRGNGYDIDVFSYGAPRVGNRAFAEFLTVQTGGTLYRITHTNDIVPRLPPREFGYSHSSPEYWIKSGTLVPVRRRDIVKIEGIDAEGGNNQPNIPDITAHLWYFGLIGTCL

SEQ ID NO: 8388 - protein, 269 aa, Thermomyces lanuginosus
EVSQDLFNQFNLFAQYSAAAYCGKNNRAPAGTNITCTANACPEVEKADATFLYTFEDSGVGDVTGFLALDNTNKLIVLSFRGSRSIENWIGNLNFELKEINDICSGCRGHAGFTSSWRSVADTLRQKVEDAVREHPDYRVVFTGHSLGGALATVAGADLRGNPYDIDVFSYGAPRLGNRAFAEFLTVQTGGTLYRITHTNDIVPRLPPRRFGYSHSSPEYWIKSGTLVPVRRRDIVKIEGIDATGGNNQPNIPSITAHLWYFGLIGTCL

SEQ ID NO: 8389 - protein, 269 aa, Thermomyces lanuginosus
EVSQDLFNQFNLFAQYSAAAYCGRNNDAPAGTNITCTGNACPEVERADATFLYSFEDNGSGDVTGFLALDNTNRLIVLSFRGSRSVENWIGNLNFDLREINDICSGCRGHDGFTSSWRSVADTLRQRVEDAVREHPKYRVVFTGHSLGGALATVAGADLRGNGYDIDVFSYGAPRVGNRAFAEFLTVQTGGTLYRITHTNDIVPRLPPREFGYSHSSPEYWIRSGTLVPVRRRDIVKIEGIDATGGNNQPNIPDIPAHLWYFGLIGTCL

SEQ ID NO: 8390 - protein, 269 aa, Thermomyces lanuginosus
EVSQDLFNQFNLFAQYSAAAYCGKNNRAPAGTQITCTGNACPEVEKADATFLYSFEDSGVGDVTGFLALDSTNKLIVLSFRGSRSIENWINNLRFDLKEINDICSGCRGHAGFTSSWRSVADTLRQKVEDAVREDPDYRVVFTGHSLGGALATVAGADLRGNGYDIDVFSYGAPRVGNRAFAEFLTVQTGGTLYRITHTNDIVPRLPPREFGYSHPSPEYWIKSGTGVPVRRRDIVKIEGIDATGGNNQPNIPDITAHLWYFGLIGTCL

SEQ ID NO: 8391 - protein, 269 aa, Thermomyces lanuginosus
EVSQDLFNQFNLFAQYSAAAYCGKNNRAPAGTNITCTANACPEVEKADATVLYSFEDSGVGDVTGFLALDNTNKLIVLSFRGSRSIENWIGNLNFELKEIDDICSGCRGHAGFTSSWRSVADTLRQKVEDAVREHPDYRVVFTGHSLGGALATVAGADLRGNKYDIDVFSYGAPRVGNRAFAEFLTVQTGGTLYRITHTNDIVPRLPPRKFGYSHSSPEYWIKSGTLVPVRRRDIVKIEGIDATGGNNQPNIPSITAHLWYFGLIGTCL

SEQ ID NO: 8392 - protein, 269 aa, Thermomyces lanuginosus
EVSQDLFNQFNLFAQYSAAAYCGKNNRAPAGTQITCTGNACPEVEKADATFLYSFEDSGVGDVTGFLALDNTNKLIVLSFRGSRSIENWINNLRFDLKEINDICSGCRGHSGFTSSWRSVADTLRQKVEDAVREHPDYRVVFTGHSLGGALATVVGADLRGNGYDIDVFSYGAPRVGNRAFAEFLTVQTGGTLYRITHTNDIVPRLPPREFGYSHPSPEYWIKSGTGVPVRRRDIVKIEGIDATGGNNQPNIPSITAHLWYFGLIGTCL

SEQ ID NO: 8393 - protein, 269 aa, Thermomyces lanuginosus
EKSQDLFNQFNLFAQYSAAAYCGKNNRAPAGTKITCTANACPEVEKADATILYSFEDSGVGDVTGFLALDNTNKLIVLSFRGSRSIENWIGNLNFELKEINDICSGCRGHAGFTSSWRSVADTLRQKVEDAVREHPDYRVVFTGHSLGGALATVAGADLRGNKYDIDVFSYGAPRVGNRAFAEFLTVQTGGTLYRITHTNDIVPRLPPREFGYSHSSPEYWIKSGTLVPVRRRDIVKIEGIDATGGNNQPNIPSITAHLWYFGLIGTCL

SEQ ID NO: 8394 - protein, 269 aa, Thermomyces lanuginosus
EVSHDLFNQFNLFAQYSAAAYCGKNNRAPAGTQITCTGNACPEVEKADATFLYSFEDSGVGDVTGFLALDNTNKLIVLSFRGSRSIENWINNLRFDLKEINDICSGCRGHAGFTSSWRSVADTLRQKVEDAVREHPDYRVVFTGHSLGGALATLAGADLRGNGYDIDVFSYGAPRVGNRAFAEFLTVQTGGTLYRITHTNDIVPRLPPREFGYSHPSPEYWIKSGTGVPVRRRDIVKIEGIDATGGNNQPNIPDITAHLWYFGLIGTCL

SEQ ID NO: 8395 - protein, 269 aa, Thermomyces lanuginosus
EVSQDLFNQFNLFAQYSKAAYCQKNNSAEAGTNITCTGNACPEVFKADVTFLYSFEDMGVGDVTGFLALDNTSKQIVLSFRGSRSIENWIGNLNFDLKEINDICSGCKGHDGFTSSWRSVADTLRQKVEDAVREHPDYRVVFTGHSLGGALATVAGADLRGNGYDIDVFSYGAPRVGNRAFAEFLTTQDGGTLYRITHTNDIVPRLPPREFGYSHSSPEYWIKSGTLVPVTRNDIVKIEGIDATGGNNQPNIPDIPAHLWYFGLIGTCL

SEQ ID NO: 8396 - protein, 269 aa, Thermomyces lanuginosus
EVSQDLFNQFNLFAQYSAAAYCGKNNRAPAGTQITCTGNACPEVEKADATFLYSFQNSGVGDVTGFLALDNTNKLIVLSFRGSRSIENWINNLRFDLKEINDICSGCRGHAGFTSSWRSVADTLRQKVEDAVREHPDYRVVFTGHSLGGALATVAGADLRGNGYDIDVFSYGAPRVGNRAFAEFLTVQTGGTLYRITHTNDIVPRLPPREFGYSHPSPEYWIKSGTGVPVRRRDIVKIEGIDATGGNNQPNIPDITAHLWYFGLIGTCL

SEQ ID NO: 8397 - protein, 269 aa, Thermomyces lanuginosus
EVSQDLFNQFNLFAQYSAAAYCGKNNRAPAGTNITCTANACPEVEKADATFLYSFEDSGVGDVTGFLALDNTNKLIVLSFRGSRSIENWIGNLNFELKEINDICSGCRGHAGFTSSWRSVADTLRQKVEDAVREHPDYRVVFTGHSLGGALATVAGADLRGNKYDIDVFSYGAPRVGNRAFAEFLTVQTGGTLYRITHTNDIVPRLPPREFGYSHSSPEYWIKSGTLVPLRRRDIVKIEGIDATGGNNQPNIPSITAHFHYFGLIGTCL

SEQ ID NO: 8398 - protein, 269 aa, Thermomyces lanuginosus
EVSQDLFNQFNLFAQYSAAAYCGKNNRAPAGTPITCTANACPEVEKADATVLYSFEDSGVGDVTGFLALDNTNKLIVLSFRGSRSIENWIGNLNFELEEINDICSGCRGHAGFTSSWRSVADTLRQKVEDAVREHPDYRVVFTGHSLGGALATVAGADLRGNKYDIDVFSYGAPRVGNRAFAEFLTVQTGGTLYRITHTNDIVPRLPPREFGYSHSSPEYWIKSGTLVPVRRRDIVKIEGIDATGGNNQPNIPSITAHLWYFGLIGTCL

SEQ ID NO: 8399 - protein, 269 aa, Thermomyces lanuginosus
EVSQDLFNQFNLFAQYSAAAYCGKNNRAPAGTKITCTANACPEVEKADATVLYSFEDSGVGDVTGFLALDNTNKLIVLSFRGSRSIENWIGNLNFELEEIDDICSGCRGHAGFTSSWRSVADTLRQKVEDAVREHPDYRVVFTGHSLGGALATVAGADLRGNGYDIDVFSYGAPRVGNRAFAEFLTVQTGGTLYRITHTNDIVPRLPPREFGYSHSSPEYWIKSGTLVPVRRRDIVKIEGIDATGGNNQPNIPSITAHLWYFGLIGTCL

SEQ ID NO: 8400 - protein, 269 aa, Thermomyces lanuginosus
EVSQDLFNQFNLFAQYSAAAYCGKNNRAPAGTKITCTANACPEVEKADATVLYSFEDSGVGDVTGFLALDNTNKLIVLSFRGSRSIENWIGNLNFELEEINDICSGCRGHAGFTSSWRSVADTLRQKVEDAVREHPDYRVVFTGHSLGGALATVAGADLRGNKYDIDVFSYGAPRVGNRAFAEFLTVQTGGTLYRITHTNDIVPRLPPREFGYSHSSPEYWIKSGTLVPVRRRDIVKIEGIDATGGNNQPNIPSITAHLWYFGLIGTCL

SEQ ID NO: 8401 - protein, 269 aa, Thermomyces lanuginosus
EVSQDLFNQFNLFAQYSAAAYCGKNNRAPAGTNITCTANACPEVEKADATFLYSFEDSGVGDVTGFLALDNTNKLIVLSFRGTRSIENWIADLNFTLKEINDICSGCRGHAGFTSSWRSVADTLRQKVEDAVREHPDYRVVFTGHSLGGALATVAGADLRGNKYDIDVFSYGAPRVGNRAFAEFLTVQTGGTLYRITHTNDIVPRLPPREFGYSHSSPEYWIKSGTLVPVRRRDIVKIEGIDATGGNNQPNIPSITAHLWYFGLIGTCL

SEQ ID NO: 8402 - protein, 269 aa, Thermomyces lanuginosus
EVSQDLFNQFNLFAQYSAAAYCGKNNRAPAGTNITCTANACPEVEKADATVLYSFEDSGVGDVTGFLALDNTNKLIVLSFRGSRSIKNWIGNLNFELEEINDICSGCRGHAGFTSSWRSVADTLRQKVEDAVREHPDYRVVFTGHSLGGALATVAGADLRGNKYDIDVFSYGAPRVGNRAFAEFLTVQTGGTLYRITHTNDIVPRLPPREFGYSHSSPEYWIKSGTLVPVRRRDIVKIEGIDATGGNNQPNIPSITAHLWYFGLIGTCL

SEQ ID NO: 8403 - protein, 269 aa, Thermomyces lanuginosus
EVSQDLFNQFNLFAQYSAAAYCGKNNRAPAGTNITCTANACPEVEKADATVLYSFEDSGVGDVTGFLALDNTNKLIVLSFRGSRSIENWIGNLNFELEEINDICSGCRGHAGFTSSWRSVADTLRQKVEDAVREHPDYRVVFTGHSLGGALATVAGADLRGNKYDIDVFSYGAPRVGNRAFAEFLTVQTGGTLYRITHTNDIVPRLPPRKFGYSHSSPEYWIKSGTLVPVRRRDIVKIEGIDATGGNNQPNIPSITAHLWYFGLIGTCL

SEQ ID NO: 8404 - protein, 269 aa, Thermomyces lanuginosus
EKSQDLFNQFNLFAQYSAAAYCGKNNRAPAGTKITCTANACPEVEKADATVLYSFEDSGVGDVTGFLALDNTNKLIVLSFRGSRSIENWIGNLNFELKEINDICSGCRGHAGFTSSWRSVADTLRQKVEDAVREHPDYRVVFTGHSLGGALATVAGADLRGNKYDIDVFSYGAPRVGNRAFAEFLTVQTGGTLYRITHTNDIVPRLPPREFGYSHSSPEYWIKSGTLVPVRRRDIVKIEGIDATGGNNQPNIPSITAHLWYFGLIGTCL

SEQ ID NO: 8405 - protein, 269 aa, Thermomyces lanuginosus
EVSQDLFNQFNLFAQYSAAAYCGKNNRAPAGTKITCTANACPEVEKADATVLYSFEDSGVGDVTGFLALDNTNKLIVLSFRGSRSIENWIGNLNFELIEINDICSGCRGHAGFTSSWRSVADTLRQKVEDAVREHPDYRVVFTGHSLGGALATVAGADLRGNKYDIDVFSYGAPRVGNRAFAEFLTVQTGGTLYRITHTNDIVPRLPPREFGYSHSSPEYWIKSGTLVPVRRRDIVKIEGIDATGGNNQPNIPSITAHLWYFGLIGTCL

SEQ ID NO: 8406 - protein, 269 aa, Thermomyces lanuginosus
EVSQDLFNQFNLFAQYSAAAYCGKNNDAPAGTNITCTGNACPEVEKADATFLYSFEDSGVGDVTGFLALDNTNKLIVLSFRGTGSDTLWQIDTNYDLKEINDICSGCRGHDGYTSSWRSVADTLRQKVEDAVREHPDYRVVFTGHSLGGALATVAGADLRGNGYDIDVFSYGAPRVGNRAFAEFLTVQTGGTLYRITHTNDIVPRLPPREEGYSHSSPEYWIKSGTLVPVTRNDIVKIEGIDATGGNNQPNIPDIPAHLWYFGLIGTCL

SEQ ID NO: 8407 - protein, 269 aa, Thermomyces lanuginosus
EVSQDLFNQFNLFAQYSAAAYCGKNNRAPAGTQITCTGNACPEVEKADATFLYSFEDSGVGDVTGFLALDNTNKLIVLSFRGSRSIENWINNLRFDLKEINDICSGCRGHAGFISSWRSVADTLRQKVEDAVREHPDYRVVFTGHSLGGALATVAGADLRGNGYDIDVFSYGAPRVGNTAFAEFLTVQTGGTLYRITHTNDIVPRLPPREFGYSHPSPEYWIKSGTGVPVRRRDIVKIEGIDATGGNNQPNIPDITAHLWYFGLIGTCL

SEQ ID NO: 8408 - protein, 269 aa, Thermomyces lanuginosus
EVSQDLFNQFNLFAQYSAAAYCGKNNRAPAGTQITCTGNACPEVEKADATFLYSFEDSGVGDVTGFLALDNTNKLTVLSFRGSRSIENWINNLRFDLKEINDICSGCMGHAGFTSSWRSVADTLRQKVEDAVREHPDYRVVFTGHSLGGALATVAGADLRGNGYDIDVFSYGAPRVGNRAFAEFLTVQTGGTLYRITHTNDIVPRLPPREFGYSHPSPEYWIKSGTGVPVRRRDIVKIEGIDATGGNNQPNIPDITAHLWYFGLIGTCL

SEQ ID NO: 8409 - protein, 269 aa, Thermomyces lanuginosus
EVSQDLFNQFRLFAQYSAAAYCGKNNRAPAGTQITCTGNACPEVEKADATFLYSFEGSGVGDVTGFLALDNTNKLIVLSFRGSRSIENWITNLNFELKEINDICSGCRGHAGFTSSWRSVADTLRQKVEDAVREHPDYRVVFTGHSLGGALATVAGADLRGNKYDIDVFSYGAPRVGNRAFAEFLTVQTGGTLYRITHTNDIVPRLPPREFGYSHSSPEYWIKSGTLVPVRRRDIVKIEGIDATGGNNQPNIPSITAHLWYFGLIGTCL

SEQ ID NO: 8410 - protein, 269 aa, Thermomyces lanuginosus
EVSQDLFNQFNLFAQYSAAAYCGKNNRAPAGTNITCTANACPEVEKADATFLYSFEDSGVGDVTGFLALDNTNKLIVLSFRGSRSIENWIADLNFLLQEINDICSGCRGHAGFTSSWRSVADTLRQKVEDAVREHPDYRVVFTGHSLGGALATVAGADLRGNKYDIDVFSYGAPRVGNRAFAEFLTVQTGGTLYRITHTNDIVPRLPPREFGYSHSSPEYWIKSGTLVPVRRRDIVKIEGIDATGGNNQPNIPSITAHLWYFGLIGTCL

SEQ ID NO: 8411 - protein, 269 aa, Thermomyces lanuginosus
EVSQDLFNQFNLFAQYSAAAYCGKNNDAPAGTNITCTGNACPEVEKADATFLYSFEDAGSGDVTGFLALDNTNKLIVLSFRGSRSVENWIGNLNFDLIKINDICSGCRGHDGFTSSWRSVADTLRQKVEDAVREHPDYRVVFSGHSLGGGLATVAGADLRGNGYDIDVFSYGAPRVGNRAFAEFLTVQTGGTLYRITHTNDIVPRLPPREFGYSHSSPEYWIKSGTGVPVRRRDIVKIEGIDATGGNNQPNIPDAKAHLWYFGLIGTCL

SEQ ID NO: 8412 - protein, 269 aa, Thermomyces lanuginosus
EKSQDLFNQFNLFAQYSAAAYCGKNNRAPAGTKITCTANACPEVEKADATFLYSFEDSGVGDVTGFLALDNTNKLIVLSFRGSRSIENWIGNLNFELKEINDICSGCRGHAGFTSSWRSVADTLRQKVEDAVREHPDYRVVFTGHSLGGALATVAGADLRGNKYDIDVFSYGAPRVGNRAFAEFLTVQTGGTLYRITHTNDIVPRLPPRKFGYSHSSPEYWIKSGTLVPVRRRDIVKIEGIDATGGNNQPNIPSITAHLWYFGLIGTCL

SEQ ID NO: 8413 - protein, 269 aa, Thermomyces lanuginosus
EYSQDLFNQFNLFAQYSAAAYCGKNNRAPAGTKITCTANACPEVEKADATVLYSFEDSGVGDVTGFLALDNTNKLIVLSFRGSRSIENWIGNLNFELKEINDICSGCRGHAGFTSSWRSVADTLRQKVEDAVREHPDYRVVFTGHSLGGALATVAGADLRGNKYDIDVFSYGAPRVGNRAFAEFLTVQTGGTLYRITHTNDIVPRLPPREFGYSHSSPEYWIKSGTLVPVRRRDIVKIEGIDATGGNNQPNIPSITAHLWYFGLIGTCL

SEQ ID NO: 8414 - protein, 269 aa, Thermomyces lanuginosus
EVSQDLFNQFNLFAQYSAAAYCGKNNRAPAGTNITCTANACPEVEKADATVLYSFEDSGVGDVTGFLARDNTNKLIVLSFRGSRSIENWIGNLNFDLEEINDICSGCRGHAGFTSSWRSVADTLRQKVEDAVREHPDYRVVFTGHSLGGALATVAGADLRGNKYDIDVFSYGAPRVGNRAFAEFLTVQTGGTLYRITHTNDIVPRLPPRKFGYSHSSPEYWIKSGTLVPVRRRDIVKIEGIDATGGNNQPNIPSITAHLWYFGLIGTCL

SEQ ID NO: 8415 - protein, 269 aa, Thermomyces lanuginosus
EVSQDLFNQFNLFAQYSAAAYCGKNNRAPAGTKITCTANACPEVEKADATFLYSFEDSGVGDVTGFLARDNTNKLIVLSFRGSRSIENWIGNLNFELEEINDICSGCRGHAGFTSSWRSVADTLRQKVEDAVREHPDYRVVFTGHSLGGALATVAGADLRGNPYDIDVFSYGAPRVGNRAFAEFLTVQTGGTLYRITHTNDIVPRLPPREFGYSHSSPEYWIKSGTLVPVRRRDIVKIEGIDATGGNNQPNIPSITAHLWYFGLIGTCL

SEQ ID NO: 8416 - protein, 269 aa, Thermomyces lanuginosus
EVSQDLFNQFNLFAQYSAAAYCGKNNDAPAGTNITCTGNACPEVEKADATFLYSFEDAGSGDVTGFLALDNTNKLIVLSFRGSRSVENWIGNLNFDLKEINDICSGCRGHDGFTSSWRSVADTLRQKVEDAVREHPDYRVVFSGHSLGGGLATVAGADLRGNKYDIDVFSYGAPRVGNRAFAEFLTVQTGGTLYRITHTNDIVPRLPPREFGYSHPSPEYWIKSGTGVPVRRRDIVKIEGIDATGGNNQPNIPDAKAHLWYFGLIGTCL

SEQ ID NO: 8417 - protein, 269 aa, Thermomyces lanuginosus
EYSQDLFNQFNLFAQYSAAAYCGKNNRAPAGTNITCTANACPEVEKADATFLYTFEDSGVGDVTGFLALDNTNKLIVLSFRGSRSIENWIGNLNFELKEINDICSGCRGHAGFTSSWRSVADTLRQKVEDAVREHPDYRVVFTGHSLGGALATVAGADLRGNPYDIDVFSYGAPRVGNRAFAEFLTVQTGGTLYRITHTNDIVPRLPPREFGYSHSSPEYWIKSGTLVPVRRRDIVKIEGIDATGGNNQPNIPSITAHLWYFGLIGTCV

SEQ ID NO: 8418 - protein, 269 aa, Thermomyces lanuginosus
EVSQDLFNQFNLFAQYSAAAYCGKNNDAPAGTKITCTGNACPEVEKADATILYSFEDSGVGDVTGFLALDNTNKLIVLSFRGSRSIENWIGNLNFDLKEINDICSGCRGHDGFTSSWRSVADTLRQKVEDAVREHPDYRVVFTGHSLGGALATVAGADLRGDNYSIDVFSYGAPRVGNRAFAEFLTVQTGGTLYRITNTNDCVPRLPPRQFGYSHSSPEYWIKSGTLPPVRRRDIVKIEGIDATGGNNQPNICDIPAHLWYFGLIGTCL

SEQ ID NO: 8419 - protein, 269 aa, Thermomyces lanuginosus
EVSQDLFNQFNLFAQYSAAAYCGKNNRAPAGTNITCTANACPEVEKADATVLYSFKDSGVGDVTGFLALDNTNKLIVLSFRGSRSIENWIGNLNFELKEINDICSGCRGHAGFTSSWRSVADTLRQKVEDAVREHPDYRVVFTGHSLGGALATVAGADLRGNKYDIDVFSYGAPRVGNRAFAEFLTVQTGGTLYRITHTNDIVPRLPPRKFGYSHSSPEYWIKSGTLVPVRRRDIVKIEGIDATGGNNQPNIPSITAHLWYFGLIGTCL

SEQ ID NO: 8420 - protein, 269 aa, Thermomyces lanuginosus
EKSQDLFNQFNLFAQYSAAAYCGKNNRAPAGTKITCTANACPEVEKADATLLYSFEDSGVGDVTGFLALDNTNKLIVLSFRGSRSIENWIGNLNFELKEINDICSGCRGHAGFTSSWRSVADTLRQKVEDAVREHPDYRVVFTGHSLGGALATVAGADLRGNKYDIDVFSYGAPRVGNRAFAEFLTVQTGGTLYRITHTNDIVPRLPPREFGYSHSSPEYWIKSGTLVPVRRRDIVKIEGIDATGGNNQPNIPSITAHLWYFGLIGTCL

SEQ ID NO: 8421 - protein, 269 aa, Thermomyces lanuginosus
EVSQDLFNQFNLFAQYSAAAYCGKNNRAPAGTQITCTGNACPEVEKADATFLYSFEDSGVGDVTGFLALDNTNKLIVLSFRGSRSIENWINNLRFDLIEINDICSGCRGHAGFTSSWRSVADTLRQKVEDAVREHPDYRVVFTGHSLGGALATVAGADLRGSGYDIDVFSYGAPRVGNRAFAEFLTVQTGGTLYRITHTNDIVPRLPPREFGYSHPSPEYWIKSGTGVPVRRRDIVKIEGIDATGGNNQPNIPDITAHLWYFGLIGTCL

SEQ ID NO: 8422 - protein, 269 aa, Thermomyces lanuginosus
EVSPDLFNQFNLFAQYSAAAYCGKNNRAPAGTQITCTGNACPEVEKADATFLYSFEDSGVGDVTGFLALDNTNKLIVLSFRGSRSIENWINNLRFDLKEINDICSGCRGHAGFTSSWRSVADTLRQKVEDAVREHPDYRVVFTGHSLGGALATVAGADLRGNGYDIDVFSYGAPRVGNRAFAEFLTVQTGGTLYRITHTNDIVPRFPPREFGYSHPSPEYWIKSGTGVPVRRRDIVKIEGIDATGGNNQPNIPDITAHLWYFGLIGTCL

SEQ ID NO: 8423 - protein, 269 aa, Thermomyces lanuginosus
EVSRDLFNQFNLFAQYSAAAYCGKNNRAPAGTQITCTGNACPEVEKADATFLYSFEDSGVGDVTGFLALDNTNKLIVLSFRGSRSIENWITNLSFDLKEINDICSGCRGHAGFTSSWRSVADTLRQKVEDAVREHPDYRVVFTGHSLGGALATVAGADLRGNGYDIDVFSYGAPRVGNRAFAEFLTVQTGGTLYRITHTNDIVPRLPPRDFGYSHPSPEYWIKSGTGVPVRRRDIVKIEGIDATGGNNQPNIPDITAHLWYFGLIGTCL

SEQ ID NO: 8424 - protein, 269 aa, Thermomyces lanuginosus
EVSQDLFNQFNLFAQYSAAAYCGKNNRAPAGTNITCTANACPEVEKADATFLYSFEDSGVGDVTGFLARDNTNKLIVLSFRGSRSIENWIGNLNFELEEINDICSGCRGHAGFTSSWRSVADTLRQKVEDAVREHPDYRVVFTGHSLGGALATVAGADLRGNKYDIDVFSYGAPRVGNRAFAEFLTVQTGGTLYRITHTNDIVPRLPPRKFGYSHSSPEYWIKSGTLVPVRRRDIVKIEGIDATGGNNQPNIPSITAHLWYFGLIGTCL

SEQ ID NO: 8425 - protein, 269 aa, Synthetic construct
KVSQDLFNQFNLFAQYSAAAYCGKNNDAPAGTNITCTGNACPEVEKADATFLYSFEDSGVGDVTGFLALDNTNKLIVLSFRGSRSIENWFGNLNFLLKKINDICSGCRGHDGFTSSWRSVADTLRQKVEDAVREHPDYRVVFTGHSLGGALATVAGADLRGNGYDIDVFSYGAPRVGNRAFAEFLTAQTGGTLYRITHTNDIVPRLPPREFGYSHSSPEYWIKSGTLVPVTRNDIVKIEGIDATGGNNQPNIPDIPAHLWYFGLIGTCL

SEQ ID NO: 8426 - protein, 269 aa, Thermomyces lanuginosus
EVSQDLFNQFNLFAQYSAAAYCGKNNDAPAGTNITCTGNACPEVEKADATFLYSFEDSGVGDVTGFLALDNTNKLIVLSFRGSRSPANWIANLDFIFDEINDICSGCRGHDGFTSSWRSVADTLRQKVEDAVREHPDYRVVFTGHSLGGALATVAGADLRGNGYDIDVFSYGAPRVGNRAFAEFLTVQTGGTLYRITHTNDIVPRLPPREFGYSHSSPEYWIKSGTLVPVTRNDIVKIEGIDATGGNNQPNIPDIPAHLWYFGLIGTCL

SEQ ID NO: 8427 - protein, 291 aa, Thermomyces lanuginosus
MRSSLVLFFVSAWTALASPIRREVSQDLFNQFNLFAQYSAAAYCGKNNDAPAGTNITCTGNACPEVEKADATFLYSFEDSGVGDVTGFLALDNTNKLIVLSFRGTGSDQNLQLETSYTLTEINDICSGCRGHDGFTSSWRSVADTLRQKVEDAVREHPDYRVVFTGHSLGGALATVAGADLRGNGYDIDVFSYGAPRVGNRAFAEFLTVQTGGTLYRITHTNDIVPRLPPREFGYSHSSPEYWIKSGTLVPVTRNDIVKIEGIDATGGNNQPNIPDIPAHLWYFGLIGTCL

SEQ ID NO: 8428 - protein, 291 aa, Thermomyces lanuginosus
MRSSLVLFFVSAWTALASPIRREVSQDLFNQFNLFAQYSAAAYCGKNNRAPAGTNITCTANACPEVEKADATFLYSFEDSGVGDVTGFLALDNTNKLIVLSFRGSRSIENWIADLNFLLQEINDICSGCRGHAGFTSSWRSVADTLRQKVEDAVREHPDYRVVFTGHSLGGALATVAGADLRGNKYDIDVFSYGAPRVGNRAFAEFLTVQTGGTLYRITHTNDIVPRLPPREFGYSHSSPEYWIKSGTLVPVRRRDIVKIEGIDATGGNNQPNIPSITAHLWYFGLIGTCV

SEQ ID NO: 8429 - protein, 291 aa, Thermomyces lanuginosus
MRSSLVLFFVSAWTALASPIRREVSQDLYNQFKLFAHYAAAAYCGKNNDAPAGTKITCTGNACPEVEKADATFIYSFEDSGVGDVTGFLALDNTNKLIVLSFRGSRSIENWIANLNFDLKEISDICSGCRGHRGFYNSWRSVADTLRQKVEDAVREYPDYRVVFTGHSLGGALATVAGADLRGNGYDIDVFSYGAPRVGNRAFAEFLTVQTGGTLYRITHTNDIVPRLPPREFGYSHSSPEYWIKSGTLVPVTRNDIVVIEGIDATGGNNQPNIPDIPAHLWYFGLIGTCL

SEQ ID NO: 8430 - protein, 291 aa, Thermomyces lanuginosus
MRSSLVLFFVSAWTALASPIRREVSQDLFNQFNLFAQYSAAAYCGKNNDAPAGTNITCTGNACPEVEKADATFLYSFEDSGVGCVTGFLALDNTNKLIVLSFRGTGSDCNLQLDTNYTLTEINDICSGCRGHDGFTSSWRSVADTLRQKVEDAVREHPDYRVVFTGHSLGGALATVAGADLRGNGYDIDVFSYGAPRVGNRAFAEFLTVQTGGTLYRITHTNDIVPRLPPREFGYSHSSPEYWIKSGTLVPVTRNDIVKIEGIDATGGNNQPNIPDIPAHLWYFGLIGTCL

SEQ ID NO: 8431 - protein, 291 aa, Thermomyces lanuginosus
MRSSLVLFFVSAWTALASPIRREVSQDLFNQFNLFAQYSAAAYCGKNNDAPAGTNITCTGNACPEVEKADATLLYSFRDSGVGDVTGFLALDNTNKLIVLSFRGSRSIENWIADLNFILIEINDICSGCRGHDGFTSSWFSVADTLRQKVEDAVREHPDYRVVFTGHSLGGALATVAGADLRGNGYDIDVFSYGAPRVGNRAFAEFLTVQTGGTLYRITHTNDIVPRLPPREFGYSHSSPEFWIKSGTLVPVRRRDIVKIEGIDAEGGNNQPNIPSIPAHLWYFGAIGTCL

SEQ ID NO: 8432 - protein, 268 aa, Thermomyces lanuginosus
VSQDLFNQFNLFAQYSAAAYCGKNNDAPAGTNITCTGNACPEVEKADATFLYSFEDAGSGDVTGFLALDNTNKLIVLSFRGSRSVENWIGNLNFDLIKINDICSGCRGHDGFTSSWRSVADTLRQKVEDAVREHPDYRVVFSGHSLGGGLATVAGADLRGNGYDIDVFSYGAPRVGNRAFAEFLTVQTGGTLYRITHTNDIVPRLPPREFGYSHSSPEYWIKSGTGVPVRRRDIVKIEGIDATGGNNQPNIPDAKAHLWYFGLIGTCL

SEQ ID NO: 8433 - protein, 268 aa, Thermomyces lanuginosus
VSQDLFNQFNLFAQYSAAAYCGKNNRAPAGTNITCTGNACPEVEKADATVLYSFEDSGVGDVTGFLALDNTNKLIVLSFRGSRSIENWIGNLNFELIEINDICSGCRGHAGFTSSWRSVADTLRQKVEDAVREHPDYRVVFTGHSLGGALATVAGADLRGNKYDIDVFSYGAPRVGNRAFAEFLTVQTGGTLYRITSTNDIVPRLPPREFGYSHSSPEFWIKSGTLVPVRRCDIVKIEGIDATGGNNQPNIPSITAHLWYFGLIGTCL

SEQ ID NO: 8434 - protein, 268 aa, Thermomyces lanuginosus
VSQDLFNQFNLFAQYSAAAYCGKNNDAPAGTNITCTRNACPEVEKADATVLYSFEDSGVGDVTGFLALDNTNKLIVLSFRGSRSIENWIGNLNFELIEINDICSGCRGHAGFTSSWRSVADTLRQKVEDAVREHPDYRVVFTGHSLGGALATVAGADLRGNKYDIDVFSYGAPRVGNRAFAEFLTVQTGGTLYRITSTNDIVPRLPPREFGYSHSSPEFWIKSGTLVPVRRCDIVKIEGIDATGGNNQPNIPSITAHLWYFGLIGTCL

SEQ ID NO: 8435 - protein, 268 aa, Thermomyces lanuginosus
EVSQDLFNQFNLFAQYSAAAYCGKNNDAPAGTNITCTGNACPEVEKADATFLYSFEDSGVGDVTGFLALDNTNKLIVLSFRGSSSIENWIANLNFFLKKINDICSGCRGHDGFTSSWRSVADTLRQKVADAVREHPDYRVVFTGHSLGGALATVAGADLRGNGYDIDVFSYGAPRVGNRAFAEFLTVQTGGTLYRITHTNDIIPRFPPREFGYSHSSPEYWIKSGTLVPVTRNDIVKIEGIDATGGNNQPNIPDIPAHLWYFQATDAC

SEQ ID NO: 8436 - protein, 268 aa, Thermomyces lanuginosus
VSQDLFNQFNLFAQYSAAAYCGKNNRAPAGTNITCTANACPEVEKADATVLYSFEDSGVGDVTGFLALDNTNKLIVLSFRGSRSIENWIGNLNFELIEINDICSGCRGHAGFTSSWRSVADTLRQKVEDAVREHPDYRVVFTGHSLGGALATVAGADLRGNKYDIDVFSYGAPRVGNRAFAEFLTVQTGGTLYRITSTNDIVPRLPPREFGYSHSSPEFWIKSGTLVPVRRCDIVKIEGIDATGGNNQPNIPDITAHLWYFGLIGTCL

SEQ ID NO: 8437 - protein, 268 aa, Thermomyces lanuginosus
VSQDLFNQFNLFAQYSAAAYCGKNNRAPAGTNITCTGNACPEVEKADATVLYSFEDSGVGDVTGFLALDNTNKLIVLSFRGSRSIENWIGNLNFILIEINDICSGCRGHAGFTSSWRSVADTLRQKVEDAVREHPDYRVVFTGHSLGGALATVAGADLRGNKYDIDVFSYGAPRVGNRAFAEFLTVQTGGTLYRITSTNDIVPRLPPREFGYSHSSPEFWIKSGTLVPVRRCDIVKIEGIDATGGNNQPNIPSITAHLWYFGLIGTCL

SEQ ID NO: 8438 - protein, 268 aa, Thermomyces lanuginosus
VSQDLFNQFNLFAQYSAAAYCGKNNRAPAGTNITCTGNACPEVEKADATLLYSFEDSGVGDVTGFLALDNTNKLIVLSFRGSRSIENWIGNLNFELIEINDICSGCRGHAGFTSSWRSVADTLRQKVEDAVREHPDYRVVFTGHSLGGALATVAGADLRGNKYDIDVFSYGAPRVGNRAFAEFLTVQTGGTLYRITSTNDIVPRLPPREFGYSHSSPEFWIKSGTLVPVRRCDIVKIEGIDATGGNNQPNIPSITAHLWYFGLIGTCL

SEQ ID NO: 8439 - protein, 268 aa, Thermomyces lanuginosus
EVSQDLFNQFNLFAQYSAAAYCGKNNRAPAGTQITCTGNACPEVEKADATFLYSFEDSGVGDVTGFLALDNTNKLIVLSFRGSRSIENWINNLRFDMKEINDICSGCRGHAGFTSSWRSVADTLRQKVEDAVREHPDYRVVFTGHSLGGALATVAGADLRGNGYDIDVFSYGAPRVGNRAFAEFLTVQTGGTLYRITHTNDIVPRLPPREFGYSHPSPEYWIKSGNGVPVRRRDIVKIEGIDATGGNNQPNIPDITAHLWYFGLIGTC

SEQ ID NO: 8440 - protein, 268 aa, Thermomyces lanuginosus
EVSQDLFNQFNLFAQYSAAAYCGKNNDAPAGTNITCTGNACPEVEKADATFLYSFEGSGQGPVTGFLALDNTNKLIVLSFRGSWSIENWIANLNFFLKKINDICSGCRGHDGFTSSWRSVADTLRQKVEDAVREHPDYRVVFTGHSLGGALATVAGADLRGNGYDIDVFSYGAPRVGNRAFAEFLTVQTGGTLYRITHTNDIVPRLPPREFGYSHSSPEYWIKSGTLVPVTRNDIVKIEGIDATGGNNQPNIPDIPAHLWYFQATDAC

SEQ ID NO: 8441 - protein, 268 aa, Thermomyces lanuginosus
VSQDLFNQFNLFAQYSAAAYCGKNNRAPAGTNITCTGNACPEVEKADATVLYSFEDSGVGDVTGFLALDNTNKLIVLSFRGSRSIENWIGNLNFELIEINDICSGCRGHAGFTSSWRSVADTLRQKVEDAVREHPDYRVVFTGHSLGGALATVAGADLRGNSYDIDVFSYGAPRVGNRAFAEFLTVQTGGTLYRITSTNDIVPRLPPREFGYSHSSPEFWIKSGTLVPVRRCDIVKIEGIDATGGNNQPNIPSITAHLWYFGLIGTCL

SEQ ID NO: 8442 - protein, 268 aa, Thermomyces lanuginosus
VSQDLFNQFNLFAQYSAAAYCGKNNRAPAGTKITCTANACPEVEKADATVLYSFEDSGVGDVTGFLALDNTNKLIVLSFRGSRSIENWIGNLNFELIEINDICSGCRGHAGFTSSWRSVADTLRQKVEDAVREHPDYRVVFTGHSLGGALATVAGADLRGNKYDIDVFSYGAPRVGNRAFAEFLTVQTGGTLYRITSTNDIVPRLPPREFGYSHSSPEFWIKSGTLVPVRRCDIVKIEGIDATGGNNQPNIPDIPAHLWYFGLIGTCL

SEQ ID NO: 8443 - protein, 268 aa, Thermomyces lanuginosus
EVSQDLFNQFNLFAQYSAAAYCGKNNDAPAGTNITCTGNACPEVEKADATFLYSFEDSGSGLVTGFLALDNTNKLIVLSFRGSWSIENWIANLNFFLKKINDICSGCRGHDGFTSSWRSVADTLRQKVEDAVREHPDYRVVFTGHSLGGALATVAGADLRGNGYDIDVFSYGAPRVGNRAFAEFLTVQTGGTLYRITHTNDIVPRLPPREFGYSHSSPEYWIKSGTLVPVTRNDIVKIEGIDATGGNNQPNIPDIPAHLWYLQATDAC

SEQ ID NO: 8444 - protein, 268 aa, Thermomyces lanuginosus
VSQDLFNQFNLFAQYSAAAYCGKNNDAPAGTNITCTANACPEVEKADATVLYSFEDSGVGDVTGFLALDNTNKLIVLSFRGSRSIENWIGNLNFELIEINDICSGCRGHAGFTSSWRSVADTLRQKVEDAVREHPDYRVVFTGHSLGGALATVAGADLRGNKYDIDVFSYGAPRVGNRAFAEFLTVQTGGTLYRITSTNDIVPRLPPREFGYSHSSPEFWIKSGTLVPVRRCDIVKIEGIDATGGNNQPNIPSITAHLWYFGLIGTCL

SEQ ID NO: 8445 - protein, 268 aa, Synthetic construct
VSQDLFNQFNLFAQYSAAAYCGKNNDAPAGTNITCTGNACPEVEKADATFLYSFEDSGVGRVTGFLALDNTNKLIVLSFRGSRSIENWFGNLNFLLKKINDICSGCRGHDGFTSSWRSVADTLRQKVEDAVREHPDYRVVFTGHSLGGALATVAGADLRGNGYDIDVFSYGAPRVGNRAFAEFLTAQTGGTLYRITHTNDIVPRLPPREFGYSHSSPEYWIKSGTLVPVTRNDIVKIEGIDATGGNNQPNIPDIPAHLWYFGLIGTCL

SEQ ID NO: 8446 - protein, 268 aa, Synthetic construct
VSQDLFNQFNLFAQYSAAAYCGKNNDAPAGTNITCTGNACPEVEKADATFLCSFEGSGVGDVTGFLALDNTNKLIVLSFRGSRSIENWIGNLKFLLKEINDICSGCRGHDGFTSSWRSVADTLRQCVEDAVREHPDYRVVFTGHSLGGALATVAGADLRGNGYDIDVFSYGAPRVGNRAFAEFLTVQTGGTLYRITHTNDIVPRLPPREFGYSHSSPEYWIKSGTLVPVTRNDIVKIEGIDATGGNNRPNIPDIPAHLWYFGLIGTCL

SEQ ID NO: 8447 - protein, 268 aa, Thermomyces lanuginosus
VSQDLFNQFNLFAQYSAAAYCGKNNDAPAGTNITCTGNACPEVEKADATFLYSFEDSGVGAVTGFLALDNTNKLIVLSFRGTRSIENWIGNLNFDLKNINDICSGCRGHDGFTSSWRSVADTLRQKVEDAVREHPDYRVVFTGHSLGGALATVAGADLRGNGYDIDVFSYGAPRVGNRAFAEFLTVQTGGTLYRITHTNDIVPRLPPREFGYSHSSPEYWIKSGTLVPVTRNDIVKICGIDATGGNNRPNIPDIPAHLWYFGLIGTCL

SEQ ID NO: 8448 - protein, 268 aa, Synthetic construct
VSQDLFNQFNLFAQYSAAAYCGKNNDAPAGTNITCTGNACPEVEKADATFLYSFEDSGVGDVTGFLALDNTNKLIVLSFRGSRSIENWFGNLNFLLKKINDICSGCRGHDGFTSSWRSVADTLRQKVEDAVREHPDYRVVFTGHSLGGALATVAGADLRGNGYDIDVFSYGAPRVGNRAFAEFLTAQTGGTLYRITHRNDIVPRLPPREFGYSHSSPEYWIKSGTLVPVTRNDIVKIEGIDATGGNNQPNIPDIPAHLWYFGLIGTCL

SEQ ID NO: 8449 - protein, 268 aa, Synthetic construct
VSQDLFNQFNLFAQYSAAAYCGKNNDAPAGTNITCTGNACPEVEKADATFLYSFEDSGVGDVTGFLALDNTNKLIVLSFRGSRSIENWFGNLNFLLKKINDICSGCRGHDGFTSSWRSVADTLRQKVEDAVREHPDYRVVFTGHSLGGALATVAGADLRGNGYDIDVFSYGAPRVGNRAFAEFLTAQTGGTLYRITHTNDIVPRLPPREFGYSHSSPEYWIKSGTLVPVTRNDIVKIEGIDATGGNNRPNIPDIPAHLWYFGLIGTCL

SEQ ID NO: 8450 - protein, 268 aa, Thermomyces lanuginosus
VSQDLFNQFNLFAQYSAAAKCGKNNDAPAGTNITCTGNACPEVEKADATFLYSFEDSGVGDVTGFLALDNTNKLIVLSFRGSRSIENWIGNLNFDLKNISDICSGCRGHDGFTSSWRSVADTLRQKVEDAVREHPDYRVVFTGHSLGGALATVAGADLRGNGYDIDVFSYGAPRVGNRAFAEFLTVQTGGTLYRITHTNDIVPRLPPREFGYSHSSPEYWIKSGTLVPVTRNDIVKICGIDATGGNNRPNIPDIPAHLWYFGLIGTCL

SEQ ID NO: 8451 - protein, 268 aa, Synthetic construct
VSQDLFNQFNLFAQYSAAAYCGKNNDAPAGTNITCTGNACPEVEKADATFLYSFEGSGVGDVTGFLALDNTNKLIVLSFRGSRSIENWIGNLKFLLKEINDICSGCRGHDGFTSSWRSVADTLRQKVEDAVREHPDYRVVFTGHSLGGALATVAGADLRGNGYDIDVFSYGAPRVGNRAFAEFLTVQTGGTLYRITHTRDIVPRLPPAEFGYSHSSPEYWIKSGTLVPVTRNDIVKIEGIDATGGNNRPNIPDIPAHLWYFGLIGTCL

SEQ ID NO: 8452 - protein, 268 aa, Synthetic construct
VSQDLFNQFNLFAQYSAAAYCGKNNDAPAGTNITCTGNACPEVEKADATFLYSFEGSGVGDVTGFLALDNTNKLIVLSFRGSRSIENWIGNLKFLLKEINDICSGCRGHDGFTSSWRSVADTLRQKVEDAVREHPDYRVVFTGHSLGGALATVAGADLRGNGYDIDVFSYGAPRVGNRAFAEFLTVQTGGTLYRITHRRDIVPRLPPREFGYSHSSPEYWIKSGTLVPVTRNDIVKIEGIDATGGNNRPNIPDIPAHLWYFGLIGTCL

SEQ ID NO: 8453 - protein, 268 aa, Thermomyces lanuginosus
VSQDLFNQFNLFAQYSAAAYCGKNNDAPAGTNITCTGNACPEVEKADATFLYSFEDSGVGDVTGFLALDNTNKLIVLSFRGSRSIENWIANLNFWLKEINDICSGCRGHDGFTSSWRSVADTLRQKVEDAVREHPDYRVVFTGHSLGGALATVAGADLRGNGYDIDVFSYGAPRVGNRAFAEFLTVQTGGTLYRITHTNDIVPRLPPREFGYSHSSPEYWIKSGTLVPVTRNDIVKICGIDATGGNNRPNIPDIPAHLWYFGPISTCL

SEQ ID NO: 8454 - protein, 268 aa, Synthetic construct
VSQDLFNQFNLFAQYSAAAYCGKNNDAPAGTNITCTGNACPEVEKADATFLYSFEDSGVGDVTGFLALDNTNKLIVLSFRGSRSIENWFGNLNFLLKKINDICSGCRGHDGFTSSWRSVADTLRQKVEDAVREHPDYRVVFTGHSLGGALATVAGADLRGNGYDIDVFSYGAPRVGNRAFAEFLTAQTGGTLYRITHTNDIVPRLPPREFGYSHSSPEYWIKSGTLVPVTRNDIVKIEGIDATGGNNQPNIRDIPAHLWYFGLIGTCL

SEQ ID NO: 8455 - protein, 268 aa, Synthetic construct
VSQDLFNQFNLFAQYSAAAYCGKNNDAPAGTNITCTGNACPEVEKADATFLYSFEGSGVGDVTGFLALDNTNKLIVLSFRGSRSIENWIGNLKFLLKEINDICSGCRGHDGFTSSWRSVADTLRQKVEDAVREHPDYRVVFTGHSLGGALATVAGADLRGNGYDIDVFSYGAPRVGNRAFAEFLTVQTGGTLYRITHRNDIVPRLPPAEFGYSHSSPEYWIKSGTLVPVTRNDIVKIEGIDATGGNNRPNIPDIPAHLWYFGLIGTCL

SEQ ID NO: 8456 - protein, 268 aa, Thermomyces lanuginosus
EVSQDLFNQFNLFAQYSAAAYCGKNNDAPAGTNITCTGNACPEVEKADATFLYSFEDSGVGDVTGFLALDNTNKLIVLSFRGSRSIENWIGNLNFDLKEINDICSGCRGHDGFTSSWRSVADTLRQKVEDAVREHPDYRVVFTGHSLGGALATVAGADLRGNGYDIDVFSYGAPRVGNRAFAEFLTVQTGGTLYRITHTNDIVPRLPPREFGYSHSSPEYWIKSGTLVPVTRNDIVKIEGIDATGGNNQPNIPDIPAHLWYFQATDAC

SEQ ID NO: 8457 - protein, 268 aa, Thermomyces lanuginosus
VSQDLFNQFNLFAQYSAAAYCGKNNDAPAGTNITCTGNACPEVEKADATFLYSFEDSGVGDVTGFLALDNTNKLIVLSFRGSRSIENWIGNKNFDLKKINDICSGCRGHDGFTSSWRSVADTLRQKVEDAVREHPDYRVVFTGHSLGGALATVAGADLRGNGYDIDVFSYGAPRVGNRAFAEFLTVQTGGTLYRITHTNDIVPRLPPREFGYSHSSPEYWIKSGTLVPVTRNDIVKICGIDATGGNNRPNIPDIPAHLWYFGLIDTCL

SEQ ID NO: 8458 - protein, 268 aa, Thermomyces lanuginosus
VSQDLFNQFNLFAQYSAAAYCGKNNDAPAGTNITCTGNACPEVEKADATFLYSFEDSGVGDVTGFLALDNTNKLIVLSFRGSRSIENWIGNLNFSLKEINDICSGCRGHDGFTSSWRSVADTLRQKVEDAVREHPDYRVVFTGHSLGGALATVAGADLRGNGYDIDVFSYGAPRVGNRAFAEFLTVQTGGTLYRITHTNDIVPRLPPREFGYSHSSPEYWIKSGTLVPVTRNDIVKICGIDATGGNNRPNIPDIPAHLWYFGLICACL

SEQ ID NO: 8459 - protein, 268 aa, Thermomyces lanuginosus
VSQDLFNQFNLFAQYSAAAYCGKNNDAPAGTNITCTGNACPEVEKADATFLYSFEDSGVGDVTGFLALDNTNKLIVLSFRGSRSIENWIANLNFWLKEINDICSGCRGHDGFTSSWRSVADTLRQKVEDAVREHPDYRVVFTGHSLGGALATVAGADLRGNGYDIDVFSYGAPRVGNRAFAEFLTVQTGGTLYRITHTNDIVPRLPPREFGYSHSSPEYWIKSGTLVPVTRNDIVKICGIDATGGNNRPNIPDIPAHLWYFELISTCL

SEQ ID NO: 8460 - protein, 268 aa, Thermomyces lanuginosus
EVSQDLFNQFNLFAQYSAAAYCGKNNDAPAGTNITCTGNACPEVEKADATFLYSFEDSGLGAVTGFLALDNTNKLIVLSFRGSWSIENWIANLNFWLKKINDICSGCRGHDGFTSSWRSVADTLKQKVEDAVREHPDYRVVFTGHSLGGALATVAGADLRGNGYDIDVFSYGAPRVGNRAFAEFLTVQTGGTLYRITHTNDIVPRLPPREFGYSHSSPEYWIKSGTLVPVTRNDIVKIEGIDATGGNNQPNIPDIPAHLWYFQATDAC

SEQ ID NO: 8461 - protein, 268 aa, Thermomyces lanuginosus
EVSQDLFNQFNLFAQYSAAAYCGKNNDAPAGTNITCTGNACPEVEKADATFLYSFEDSGGGGVTGFLALDNTNKLIVLSFRGSWSIENWIANLNFWLKKINDICSGCRGHDGFTSSWRSVADTLRQKVEDAVREHPDYRVVFTGHSLGGALATVAGADLRGNGYDIDVFSYGAPRVGNRAFAEFLTVQTGGTLYRITHTNDIVPRLPPREFGYSHSSPEYWIKSGTLAPVTRNDIVKIEGIDATGGNNQPNIPDIPAHLWYFQATDAC

SEQ ID NO: 8462 - protein, 267 aa, Thermomyces lanuginosus
SQDLFNQFNLFAQYSAAAYCGKNNRAPAGTKITCTANACPEVEKADATILYSFEDSGVGDVTGFLALDNTNKLIVLSFRGSRSIENWIGNLNFELKEINDICSGCRGHAGFTSSWRSVADTLRQKVEDAVREHPDYRVVFTGHSLGGALATVAGADLRGNKYDIDVFSYGAPRVGNRAFAEFLTVQTGGTLYRITHTNDIVPRLPPREFGYSHSSPEYWIKSGTLVPRRRCDIVKIEGIDATGGNNQPNIPSITAHLWYFGLIGTCL

SEQ ID NO: 8463 - protein, 267 aa, Thermomyces lanuginosus
SQDLFNQFNLFAQYSAAAYCGKNNRAPAGTKITCTANACPEVEKADATVLYSFEDSGVGDVTGFLALDNTNKLIVLSFRGSRSIENWIGNLNFELKEINDICSGCRGHAGFTSSWRSVADTLRQKVEDAVREHPDYRVVFTGHSLGGALATVAGADLRGNKYDIDVFSYGAPRVGNRAFAEFLTVQTGGTLYRITHTNDIVPRLPPREFGYSHSSPEYWIKSGTLVPVRRCDIVKIEGIDATGGNNQPNIPSITVHLWYFGLIGTCL

SEQ ID NO: 8464 - protein, 267 aa, Thermomyces lanuginosus
SQDLFNQFNLFAQYSAAAYCGKNNRAPAGTKITCTANACPEVEKADATVLYSFEDSGVGDVTGFLALDNTNKLIVLSFRGSRSIENWIGNLNFELKEINDICSGCRGHAGFTSSWRSVADTLRQKVEDAVREHPDYRVVFTGHSLGGALATVAGADLRGNKYDIDVFSYGAPRVGNRAFAEFLTVQTGGTLYRITHTNDIVPRLPPREFGYSHSSPEYWIKSGTDVPVRRCDIVKIEGIDATGGNNQPNIPSITAHLWYFGLIGTCL

SEQ ID NO: 8465 - protein, 267 aa, Thermomyces lanuginosus
SQDLFNQFNLFAQYSAAAYCGKNNRAPAGTKITCTANACPEVEKADATLLYSFEDSGVGDVTGFLALDNTNKLIVLSFRGSRSIENWIGNLNFELKEINDICSGCRGHAGFTSSWRSVADTLRQKVEDAVREHPDYRVVFTGHSLGGALATVAGADLRGNKYDIDVFSYGAPRVGNRAFAEFLTVQTGGTLYRITHTNDIVPRLPPREFGYSHSSPEYWIKSGTLVPRRRCDIVKIEGIDATGGNNQPNIPSITAHLWYFGLIGTCL

SEQ ID NO: 8466 - protein, 267 aa, Thermomyces lanuginosus
SQDLFNQFNLFAQYSAAAYCGKNNRAPAGTKITCTANACPEVEKADATVLYSFEDSGVGDVTGFLALDNTNKLIVLSFRGSRSIENWIGNLNFELKEINDICSGCRGHAGFTSSWRSVADTLRQKVEDAVREHPDYRVVFTGHSLGGALATVAGADLRGNKYDIDVFSYGAPRVGNRAFAEFLTVQTGGTLYRITHTNDIVPRLPPREFGYSHSSPEYWIKIGTLVPVRRCDIVKIEGIDATGGNNQPNIPSITAHLWYFGLIGTCL

SEQ ID NO: 8467 - protein, 267 aa, Thermomyces lanuginosus
SQDLFNQFNLFAQYSAAAYCGKNNRAPAGTKITCTANACPEVEKADATLLYSFEDSGVGDVTGFLALDNTNKLIVLSFRGSRSIENWIGNLNFELKEINDICSGCRGHAGFTSSWRSVADTLRQKVEDAVREHPDYRVVFTGHSLGGALATVAGADLRGNKYDIDVFSYGAPRVGNRAFAEFLTVQTGGTLYRITYTNDIVPRLPPREFGYSHSSPEYWIKSGTLVPVRRCDIVKIEGIDATGGNNQPNIPSITAHLWYFGLIGTCL

SEQ ID NO: 8468 - protein, 267 aa, Thermomyces lanuginosus
SQDLFNQFNLFAQYSAAAYCGKNNRAPAGTKITCTANACPEVEKADATILYSFEDSGVGDVTGFLALDNTNKLIVLSFRGSRSIENWIGNLNFELKEINDICSGCRGHAGFTSSWRSVADTLRQKVEDAVREHPDYRVVFTGHSLGGALATVAGADLRGNKYDIDVFSYGAPRVGNRAFAEFLTVQTGGTLYRITNTNDIVPRLPPREFGYSHSSPEYWIKSGTLVPVRRCDIVKIEGIDATGGNNQPNIPSITAHLWYFGLIGTCL

SEQ ID NO: 8469 - protein, 267 aa, Thermomyces lanuginosus
SQDLFNQFNLFAQYSAAAYCGKNNRAPAGTKITCTANACPEVEKADATLLYSFEDSGVGDVTGFLALDNTNKLIVLSFRGSRSIENWIGNLNFELKEINDICSGCRGHAGFTSSWRSVADTLRQKVEDAVREHPDYRVVFTGHSLGGALATVAGADLRGNKYDIDVFSYGAPRVGNRAFAEFLTVQTGGTLYRITHTNDIVPRLPPREFGYSHSSPEYWIKSGTLVPVRRCDIVKIEGIDATGGNNQPNIPSGTAHLWYFGLIGTCL

SEQ ID NO: 8470 - protein, 267 aa, Thermomyces lanuginosus
SQDLFNQFNLFAQYSAAAYCGKNNRAPAGTKITCTANACPEVEKADATILYSFEDSGVGDVTGFLALDNTNKLIVLSFRGSRSIENWIGNLNFELKEINDICSGCRGHAGFTSSWRSVADTLRQKVEDAVREHPDYRVVFTGHSLGGALATVAGADLRGNKYDIDVFSYGAPRVGNRAFAEFLTVQTGGTLYRITHTNDIVPRLPPREFGYSHSSPEYWIKSGTLPPVRRCDIVKIEGIDATGGNNQPNIPSITAHLWYFGLIGTCL

SEQ ID NO: 8471 - protein, 267 aa, Thermomyces lanuginosus
SQDLFNQFNLFAQYSAAAYCGKNNRAPAGTKITCTANACPEVEKADATVLYSFEDSGVGDVTGFLALDNTNKLIVLSFRGSRSIENWIGNLNFELKEINDICSGCRGHAGFTSSWRSVADTLRQKVEDAVREHPDYRVVFAGHSLGGALATVAGADLRGNKYDIDVFSYGAPRVGNRAFAEFLTVQTGGTLYRITHTNDIVPRLPPREFGYSHSSPEYWIKSGTLVPVRRCDIVKIEGIDATGGNNQPNIPSITAHLWYFGLIGTCL

SEQ ID NO: 8472 - protein, 267 aa, Thermomyces lanuginosus
SQDLFNQFNLFAQYSAAAYCGKNNRAPAGTKITCTANACPEVEKADATVLYSFEDSGVGDVTGFLALDNTNKLIVLSFRGSRSIENWIGNLNFELKEINDICSGCRGHAGFTSSWRSVADTLRQKVEDAVREHPDYRVVFTGHSLGGALATVAGADLRGNKYDIDVFSYGAPRVGNRAFAEFLTVQTGGTLYRITLTNDIVPRLPPREFGYSHSSPEYWIKSGTLVPVRRCDIVKIEGIDATGGNNQPNIPSITAHLWYFGLIGTCL

SEQ ID NO: 8473 - protein, 267 aa, Thermomyces lanuginosus
SQDLFNQFNLFAQYSAAAYCGKNNRAPAGTKITCTANACPEVEKADATLLYSFEDSGVGDVTGFLALDNTNKLIVLSFRGSRSIENWIGNLNFELKEINDICSGCRGHAGFTSSWRSVADTLRQKVEDAVREHPDYRVVFTGHSLGGALATVAGADLRGNKYDIDVFSYGAPRVGNRAFAEFLTVQTGGTLYRITITNDIVPRLPPREFGYSHSSPEYWIKSGTLVPVRRCDIVKIEGIDATGGNNQPNIPSITAHLWYFGLIGTCL

SEQ ID NO: 8474 - protein, 267 aa, Thermomyces lanuginosus
SQDLFNQFNLFAQYSAAAYCGKNNRAPAGTKITCTANACPEVEKADATLLYSFEDSGVGDVTGFLALDNTNKLIVLSFRGSRSIENWIGNLNFELKEINDICSGCRGHAGFTSSWRSVADTLRQKVEDAVREHPDYRVVFTGHSLGGALATVAGADLRGNKYDIDVFSYGAPRVGNRAFAEFLTVQTGGTLYRITHTNDIVPRLPPREFGYSHSSPEYWIKIGTLVPVRRCDIVKIEGIDATGGNNQPNIPSITAHLWYFGLIGTCL

SEQ ID NO: 8475 - protein, 267 aa, Thermomyces lanuginosus
SQDLFNQFNLFAQYSAAAYCGKNNRAPAGTKITCTANACPEVEKADATILYSFEDSGVGDVTGFLALDNTNKLIVLSFRGSRSIENWIGNLNFELKEINDICSGCRGHAGFTSSWRSVADTLRQKVEDAVREHPDYRVVFTGHSLGGALATVAGADLRGNKYDIDVFSYGAPRVGNRAFAEFLTVQTGGTLYRITHTNDIVPRLPPREFGYSHSSPEYWIKSGTLVPVRRCDIVKIEGIDATGGNNQPNIPSITVHLWYFGLIGTCL

SEQ ID NO: 8476 - protein, 267 aa, Thermomyces lanuginosus
SQDLFNQFNLFAQYSAAAYCGKNNRAPAGTKITCTANACPEVEKADATILYSFEDSGVGDVTGFLALDNTNKLIVLSFRGSRSIENWIGNLNFELKEINDICSGCRGHAGFTSSWRSVADTLRQKVEDAVREHPDYRVVFTGHSLGGALATVAGADLRGNKYDIDVFSYGAPRVGNRAFAEFLTVQTGGTLYRITHTNDIVPRLPPREFGYSHSSPEYWIKFGTLVPVRRCDIVKIEGIDATGGNNQPNIPSITAHLWYFGLIGTCL

SEQ ID NO: 8477 - protein, 267 aa, Thermomyces lanuginosus
SQDLFNQFNLFAQYSAAAYCGKNNRAPAGTKITCTANACPEVEKADATILYSFEDSGVGDVTGFLALDNTNKLIVLSFRGSRSIENWIGNLNFELKEINDICSGCRGHAGFTSSWRSVADTLRQKVEDAVREHPDYRVVFTGHSLGGALATVAGADLRGNKYDIDVFSYGAPRVGNRAFAEFLTVQTGGTLYRITHTNDIVPRLPPREFGYSHSSPEYWIKSGTLVPVRRCDIVKIEGIDATGGNNQPNIPSGTAHLWYFGLIGTCL

SEQ ID NO: 8478 - protein, 267 aa, Thermomyces lanuginosus
SQDLFNQFNLFAQYSAAAYCGKNNRAPAGTKITCTANACPEVEKADATLLYSFEDSGVGDVTGFLALDNTNKLIVLSFRGSRSIENWIGNLNFELKEINDICSGCRGHAGFTSSWRSVADTLRQKVEDAVREHPDYRVVFTGHSLGGGLATVAGADLRGNKYDIDVFSYGAPRVGNRAFAEFLTVQTGGTLYRITHTNDIVPRLPPREFGYSHSSPEYWIKSGTLVPVRRCDIVKIEGIDATGGNNQPNIPSITAHLWYFGLIGTCL

SEQ ID NO: 8479 - protein, 267 aa, Thermomyces lanuginosus
SQDLFNQFNLFAQYSAAAYCGKNNRAPAGTKITCTANACPEVEKADATILYSFEDSGVGDVTGFLALDNTNKLIVLSFRGSRSIENWIGNLNFELKEINDICSGCRGHAGFTSSWRSVADTLRQKVEDAVREHPDYRVVFTGHSLGGALATVAGADLRGNKYDIDVFSYGAPRVGNRAFAEFLTVQTGGTLYRITSTNDIVPRLPPREFGYSHSSPEYWIKSGTLVPVRRCDIVKIEGIDATGGNNQPNIPSITAHLWYFGLIGTCL

SEQ ID NO: 8480 - protein, 267 aa, Thermomyces lanuginosus
SQDLFNQFNLFAQYSAAAYCGKNNRAPAGTKITCTANACPEVEKADATLLYSFEDSGVGDVTGFLALDNTNKLIVLSFRGSRSIENWIGNLNFELKEINDICSGCRGHAGFTSSWRSVADTLRQKVEDAVREHPDYRVVFTGHSLGGALATVAGADLRGNKYDIDVFSYGAPRVGNRAFAEFLTVQTGGTLYRITHTNDIVPRLPPREFGYSHSSPEYWIKSGTLVPVRRCDIVKIEGIDATGGNNQPNIPSITVHLWYFGLIGTCL

SEQ ID NO: 8481 - protein, 267 aa, Thermomyces lanuginosus
SQDLFNQFNLFAQYSAAAYCGKNNRAPAGTKITCTANACPEVEKADATLLYSFEDSGVGDVTGFLALDNTNKLIVLSFRGSRSIENWIGNLNFELKEINDICSGCRGHAGFTSSWRSVADTLRQKVEDAVREHPDYRVVFTGHSLGGALATVAGADLRGNKYDIDVFSYGAPRVGNRAFAEFLTVQTGGTLYRITHTNDIVPRLPPREFGYSHSSPEYWIKSGTLVPVRRCDIVKIEGIDATGGNNQPNIPSITIHLWYFGLIGTCL

SEQ ID NO: 8482 - protein, 267 aa, Thermomyces lanuginosus
SQDLFNQFNLFAQYSAAAYCGKNNRAPAGTKITCTANACPEVEKADATLLYSFEDSGVGDVTGFLALDNTNKLIVLSFRGSRSIENWIGNLNFELKEINDICSGCRGHAGFTSSWRSVADTLRQKVEDAVREHPDYRVVFTGHSLGGALATVAGADLRGNKYDIDVFSYGAPRVGNRAFAEFLTVQTGGTLYRITLTNDIVPRLPPREFGYSHSSPEYWIKSGTLVPVRRCDIVKIEGIDATGGNNQPNIPSITAHLWYFGLIGTCL

SEQ ID NO: 8483 - protein, 267 aa, Thermomyces lanuginosus
SQDLFNQFNLFAQYSAAAYCGKNNRAPAGTKITCTANACPEVEKADATILYSFEDSGVGDVTGFLALDNTNKLIVLSFRGSRSIENWIGNLNFELKEINDICSGCRGHAGFTSSWRSVADTLRQKVEDAVREHPDYRVVFTGHSLGGALATVAGADLRGNKYDIDVFSYGAPRVGNRAFAEFLTVQTGGTLYRITHTNDIVPRLPPREFGYSHSSPEYWIKSGTDVPVRRCDIVKIEGIDATGGNNQPNIPSITAHLWYFGLIGTCL

SEQ ID NO: 8484 - protein, 267 aa, Thermomyces lanuginosus
SQDLFNQFNLFAQYSAAAYCGKNNRAPAGTKITCTANACPEVEKADATLLYSFEDSGVGDVTGFLALDNTNKLIVLSFRGSRSIENWIGNLNFELKEINDICSGCRGHAGFTSSWRSVADTLRQKVEDAVREHPDYRVVFTGHSLGGALATVAGADLRGNKYDIDVFSYGAPRVGNRAFAEFLTVQTGGTLYRITHTNDIVPRLPPREFGYSHSSPEYWIKSGTLPPVRRCDIVKIEGIDATGGNNQPNIPSITAHLWYFGLIGTCL

SEQ ID NO: 8485 - protein, 267 aa, Thermomyces lanuginosus
SQDLFNQFNLFAQYSAAAYCGKNNRAPAGTKITCTANACPEVEKADATVLYSFEDSGVGDVTGFLALDNTNKLIVLSFRGSRSIENWIGNLNFELKEINDICSGCRGHAGFTSSWRSVADTLRQKVEDAVREHPDYRVVFTGHSLGGALATVAGADLRGNKYDIDVFSYGAPRVGNRAFAEFLTVQTGGTLYRITHTNDIVPRLPPREFGYSHSSPEYWIKSGTLVPRRRCDIVKIEGIDATGGNNQPNIPSITAHLWYFGLIGTCL

SEQ ID NO: 8486 - protein, 267 aa, Thermomyces lanuginosus
SQDLFNQFNLFAQYSAAAYCGKNNRAPAGTKITCTANACPEVEKADATLLYSFEDSGVGDVTGFLALDNTNKLIVLSFRGSRSIENWIGNLNFELKEINDICSGCRGHAGFTSSWRSVADTLRQKVEDAVREHPDYRVVFTGHSLGGALATVAGADLRGNKYDIDVFSYGAPRVGNRAFAEFLTVQTGGTLYRITSTNDIVPRLPPREFGYSHSSPEYWIKSGTLVPVRRCDIVKIEGIDATGGNNQPNIPSITAHLWYFGLIGTCL

SEQ ID NO: 8487 - protein, 267 aa, Thermomyces lanuginosus
SQDLFNQFNLFAQYSAAAYCGKNNRAPAGTKITCTANACPEVEKADATLLYSFEDSGVGDVTGFLALDNTNKLIVLSFRGSRSIENWIGNLNFELKEINDICSGCRGHAGFTSSWRSVADTLRQKVEDAVREHPDYRVVFTGHSLGGALATVAGADLRGNKYDIDVFSYGAPRVGNRAFAEFLTVQTGGTLYRITHTNDIVPRLPPREFGYSHSSPEYWIKPGTLVPVRRCDIVKIEGIDATGGNNQPNIPSITAHLWYFGLIGTCL

SEQ ID NO: 8488 - protein, 267 aa, Thermomyces lanuginosus
SQDLFNQFNLFAQYSAAAYCGKNNRAPAGTKITCTANACPEVEKADATLLYSFEDSGVGDVTGFLALDNTNKLIVLSFRGSRSIENWIGNLNFELKEINDICSGCRGHAGFTSSWRSVADTLRQKVEDAVREHPDYRVVFTGHSLGGALATVAGADLRGNKYDIDVFSYGAPRVGNRAFAEFLTVQTGGTLYRITNTNDIVPRLPPREFGYSHSSPEYWIKSGTLVPVRRCDIVKIEGIDATGGNNQPNIPSITAHLWYFGLIGTCL

SEQ ID NO: 8489 - protein, 267 aa, Thermomyces lanuginosus
SQDLFNQFNLFAQYSAAAYCGKNNRAPAGTKITCTANACPEVEKADATILYSFEDSGVGDVTGFLALDNTNKLIVLSFRGSRSIENWIGNLNFELKEINDICSGCRGHAGFTSSWRSVADTLRQKVEDAVREHPDYRVVFTGHSLGGALATVAGADLRGNKYDIDVFSYGAPRVGNRAFAEFLTVQTGGTLYRITYTNDIVPRLPPREFGYSHSSPEYWIKSGTLVPVRRCDIVKIEGIDATGGNNQPNIPSITAHLWYFGLIGTCL

SEQ ID NO: 8490 - protein, 267 aa, Thermomyces lanuginosus
SQDLFNQFNLFAQYSAAAYCGKNNRAPAGTKITCTANACPEVEKADATVLYSFEDSGVGDVTGFLALDNTNKLIVLSFRGSRSIENWIGNLNFELKEINDICSGCRGHAGFTSSWRSVADTLRQKVEDAVREHPDYRVVFTGHSLGGALATVAGADLRGNKYDIDVFSYGAPRVGNRAFAEFLTVQTGGTLYRITHTNDIVPRLPPREFGYSHSSPEYWIKSGTLVPVRRCDIVKIEGIDATGGNNQPNIPSITIHLWYFGLIGTCL

SEQ ID NO: 8491 - protein, 267 aa, Thermomyces lanuginosus
SQDLFNQFNLFAQYSAAAYCGKNNRAPAGTKITCTANACPEVEKADATILYSFEDSGVGDVTGFLALDNTNKLIVLSFRGSRSIENWIGNLNFELKEINDICSGCRGHAGFTSSWRSVADTLRQKVEDAVREHPDYRVVFAGHSLGGALATVAGADLRGNKYDIDVFSYGAPRVGNRAFAEFLTVQTGGTLYRITHTNDIVPRLPPREFGYSHSSPEYWIKSGTLVPVRRCDIVKIEGIDATGGNNQPNIPSITAHLWYFGLIGTCL

SEQ ID NO: 8492 - protein, 267 aa, Thermomyces lanuginosus
SQDLFNQFNLFAQYSAAAYCGKNNRAPAGTKITCTANACPEVEKADATVLYSFEDSGVGDVTGFLALDNTNKLIVLSFRGSRSIENWIGNLNFELKEINDICSGCRGHAGFTSSWRSVADTLRQKVEDAVREHPDYRVVFTGHSLGGALATVAGADLRGNKYDIDVFSYGAPRVGNRAFAEFLTVQTGGTLYRITITNDIVPRLPPREFGYSHSSPEYWIKSGTLVPVRRCDIVKIEGIDATGGNNQPNIPSITAHLWYFGLIGTCL

SEQ ID NO: 8493 - protein, 267 aa, Thermomyces lanuginosus
SQDLFNQFNLFAQYSAAAYCGKNNRAPAGTKITCTANACPEVEKADATVLYSFEDSGVGDVTGFLALDNTNKLIVLSFRGSRSIENWIGNLNFELKEINDICSGCRGHAGFTSSWRSVADTLRQKVEDAVREHPDYRVVFTGHSLGGALATVAGADLRGNKYDIDVFSYGAPRVGNRAFAEFLTVQTGGTLYRITHTNDIVPRLPPREFGYSHSSPEYWIKSGTLPPVRRCDIVKIEGIDATGGNNQPNIPSITAHLWYFGLIGTCL

SEQ ID NO: 8494 - protein, 267 aa, Thermomyces lanuginosus
SQDLFNQFNLFAQYSAAAYCGKNNRAPAGTKITCTANACPEVEKADATILYSFEDSGVGDVTGFLALDNTNKLIVLSFRGSRSIENWIGNLNFELKEINDICSGCRGHAGFTSSWRSVADTLRQKVEDAVREHPDYRVVFTGHSLGGALATVAGADLRGNKYDIDVFSYGAPRVGNRAFAEFLTVQTGGTLYRITLTNDIVPRLPPREFGYSHSSPEYWIKSGTLVPVRRCDIVKIEGIDATGGNNQPNIPSITAHLWYFGLIGTCL

SEQ ID NO: 8495 - protein, 267 aa, Thermomyces lanuginosus
SQDLFNQFNLFAQYSAAAYCGKNNRAPAGTKITCTANACPEVEKADATILYSFEDSGVGDVTGFLALDNTNKLIVLSFRGSRSIENWIGNLNFELKEINDICSGCRGHAGFTSSWRSVADTLRQKVEDAVREHPDYRVVFTGHSLGGGLATVAGADLRGNKYDIDVFSYGAPRVGNRAFAEFLTVQTGGTLYRITHTNDIVPRLPPREFGYSHSSPEYWIKSGTLVPVRRCDIVKIEGIDATGGNNQPNIPSITAHLWYFGLIGTCL

SEQ ID NO: 8496 - protein, 267 aa, Thermomyces lanuginosus
SQDLFNQFNLFAQYSAAAYCGKNNRAPAGTKITCTANACPEVEKADATVLYSFEDSGVGDVTGFLALDNTNKLIVLSFRGSRSIENWIGNLNFELKEINDICSGCRGHAGFTSSWRSVADTLRQKVEDAVREHPDYRVVFTGHSLGGALATVAGADLRGNKYDIDVFSYGAPRVGNRAFAEFLTVQTGGTLYRITNTNDIVPRLPPREFGYSHSSPEYWIKSGTLVPVRRCDIVKIEGIDATGGNNQPNIPSITAHLWYFGLIGTCL

SEQ ID NO: 8497 - protein, 267 aa, Thermomyces lanuginosus
SQDLFNQFNLFAQYSAAAYCGKNNRAPAGTKITCTANACPEVEKADATILYSFEDSGVGDVTGFLALDNTNKLIVLSFRGSRSIENWIGNLNFELKEINDICSGCRGHAGFTSSWRSVADTLRQKVEDAVREHPDYRVVFTGHSLGGALATVAGADLRGNKYDIDVFSYGAPRVGNRAFAEFLTVQTGGTLYRITHTNDIVPRLPPREFGYSHSSPEYWIKPGTLVPVRRCDIVKIEGIDATGGNNQPNIPSITAHLWYFGLIGTCL

SEQ ID NO: 8498 - protein, 267 aa, Thermomyces lanuginosus
SQDLFNQFNLFAQYSAAAYCGKNNRAPAGTKITCTANACPEVEKADATVLYSFEDSGVGDVTGFLALDNTNKLIVLSFRGSRSIENWIGNLNFELKEINDICSGCRGHAGFTSSWRSVADTLRQKVEDAVREHPDYRVVFTGHSLGGGLATVAGADLRGNKYDIDVFSYGAPRVGNRAFAEFLTVQTGGTLYRITHTNDIVPRLPPREFGYSHSSPEYWIKSGTLVPVRRCDIVKIEGIDATGGNNQPNIPSITAHLWYFGLIGTCL

SEQ ID NO: 8499 - protein, 267 aa, Thermomyces lanuginosus
SQDLFNQFNLFAQYSAAAYCGKNNRAPAGTKITCTANACPEVEKADATVLYSFEDSGVGDVTGFLALDNTNKLIVLSFRGSRSIENWIGNLNFELKEINDICSGCRGHAGFTSSWRSVADTLRQKVEDAVREHPDYRVVFTGHSLGGALATVAGADLRGNKYDIDVFSYGAPRVGNRAFAEFLTVQTGGTLYRITHTNDIVPRLPPREFGYSHSSPEYWIKSGTLVPVRRCDIVKIEGIDATGGNNQPNIPSGTAHLWYFGLIGTCL

SEQ ID NO: 8500 - protein, 267 aa, Thermomyces lanuginosus
SQDLFNQFNLFAQYSAAAYCGKNNRAPAGTKITCTANACPEVEKADATVLYSFEDSGVGDVTGFLALDNTNKLIVLSFRGSRSIENWIGNLNFELKEINDICSGCRGHAGFTSSWRSVADTLRQKVEDAVREHPDYRVVFTGHSLGGALATVAGADLRGNKYDIDVFSYGAPRVGNRAFAEFLTVQTGGTLYRITSTNDIVPRLPPREFGYSHSSPEYWIKSGTLVPVRRCDIVKIEGIDATGGNNQPNIPSITAHLWYFGLIGTCL

SEQ ID NO: 8501 - protein, 267 aa, Thermomyces lanuginosus
SQDLFNQFNLFAQYSAAAYCGKNNRAPAGTKITCTANACPEVEKADATILYSFEDSGVGDVTGFLALDNTNKLIVLSFRGSRSIENWIGNLNFELKEINDICSGCRGHAGFTSSWRSVADTLRQKVEDAVREHPDYRVVFTGHSLGGALATVAGADLRGNKYDIDVFSYGAPRVGNRAFAEFLTVQTGGTLYRITITNDIVPRLPPREFGYSHSSPEYWIKSGTLVPVRRCDIVKIEGIDATGGNNQPNIPSITAHLWYFGLIGTCL

SEQ ID NO: 8502 - protein, 267 aa, Thermomyces lanuginosus
SQDLFNQFNLFAQYSAAAYCGKNNRAPAGTKITCTANACPEVEKADATILYSFEDSGVGDVTGFLALDNTNKLIVLSFRGSRSIENWIGNLNFELKEINDICSGCRGHAGFTSSWRSVADTLRQKVEDAVREHPDYRVVFTGHSLGGALATVAGADLRGNKYDIDVFSYGAPRVGNRAFAEFLTVQTGGTLYRITHTNDIVPRLPPREFGYSHSSPEYWIKSGTLVPVRRCDIVKIEGIDATGGNNQPNIPSITIHLWYFGLIGTCL

SEQ ID NO: 8503 - protein, 267 aa, Thermomyces lanuginosus
SQDLFNQFNLFAQYSAAAYCGKNNRAPAGTKITCTANACPEVEKADATVLYSFEDSGVGDVTGFLALDNTNKLIVLSFRGSRSIENWIGNLNFELKEINDICSGCRGHAGFTSSWRSVADTLRQKVEDAVREHPDYRVVFTGHSLGGALATVAGADLRGNKYDIDVFSYGAPRVGNRAFAEFLTVQTGGTLYRITYTNDIVPRLPPREFGYSHSSPEYWIKSGTLVPVRRCDIVKIEGIDATGGNNQPNIPSITAHLWYFGLIGTCL

SEQ ID NO: 8504 - protein, 267 aa, Thermomyces lanuginosus
SQDLFNQFNLFAQYSAAAYCGKNNRAPAGTKITCTANACPEVEKADATVLYSFEDSGVGDVTGFLALDNTNKLIVLSFRGSRSIENWIGNLNFELKEINDICSGCRGHAGFTSSWRSVADTLRQKVEDAVREHPDYRVVFTGHSLGGALATVAGADLRGNKYDIDVFSYGAPRVGNRAFAEFLTVQTGGTLYRITHTNDIVPRLPPREFGYSHSSPEYWIKPGTLVPVRRCDIVKIEGIDATGGNNQPNIPSITAHLWYFGLIGTCL

SEQ ID NO: 8505 - protein, 267 aa, Thermomyces lanuginosus
SQDLFNQFNLFAQYSAAAYCGKNNRAPAGTKITCTANACPEVEKADATILYSFEDSGVGDVTGFLALDNTNKLIVLSFRGSRSIENWIGNLNFELKEINDICSGCRGHAGFTSSWRSVADTLRQKVEDAVREHPDYRVVFTGHSLGGALATVAGADLRGNKYDIDVFSYGAPRVGNRAFAEFLTVQTGGTLYRITHTNDIVPRLPPREFGYSHSSPEYWIKIGTLVPVRRCDIVKIEGIDATGGNNQPNIPSITAHLWYFGLIGTCL

SEQ ID NO: 8506 - protein, 267 aa, Thermomyces lanuginosus
SQDLFNQFNLFAQYSAAAYCGKNNRAPAGTKITCTANACPEVEKADATVLYSFEDSGVGDVTGFLALDNTNKLIVLSFRGSRSIENWIGNLNFELKEINDICSGCRGHAGFTSSWRSVADTLRQKVEDAVREHPDYRVVFTGHSLGGALATVAGADLRGNKYDIDVFSYGAPRVGNRAFAEFLTVQTGGTLYRITHTNDIVPRLPPREFGYSHSSPEYWIKFGTLVPVRRCDIVKIEGIDATGGNNQPNIPSITAHLWYFGLIGTCL

SEQ ID NO: 8507 - protein, 267 aa, Thermomyces lanuginosus
SQDLFNQFNLFAQYSAAAYCGKNNRAPAGTKITCTANACPEVEKADATLLYSFEDSGVGDVTGFLALDNTNKLIVLSFRGSRSIENWIGNLNFELKEINDICSGCRGHAGFTSSWRSVADTLRQKVEDAVREHPDYRVVFAGHSLGGALATVAGADLRGNKYDIDVFSYGAPRVGNRAFAEFLTVQTGGTLYRITHTNDIVPRLPPREFGYSHSSPEYWIKSGTLVPVRRCDIVKIEGIDATGGNNQPNIPSITAHLWYFGLIGTCL

SEQ ID NO: 8508 - protein, 267 aa, Thermomyces lanuginosus
SQDLFNQFNLFAQYSAAAYCGKNNRAPAGTKITCTANACPEVEKADATLLYSFEDSGVGDVTGFLALDNTNKLIVLSFRGSRSIENWIGNLNFELKEINDICSGCRGHAGFTSSWRSVADTLRQKVEDAVREHPDYRVVFTGHSLGGALATVAGADLRGNKYDIDVFSYGAPRVGNRAFAEFLTVQTGGTLYRITHTNDIVPRLPPREFGYSHSSPEYWIKFGTLVPVRRCDIVKIEGIDATGGNNQPNIPSITAHLWYFGLIGTCL

SEQ ID NO: 8509 - protein, 267 aa, Thermomyces lanuginosus
SQDLFNQFNLFAQYSAAAYCGKNNRAPAGTKITCTANACPEVEKADATLLYSFEDSGVGDVTGFLALDNTNKLIVLSFRGSRSIENWIGNLNFELKEINDICSGCRGHAGFTSSWRSVADTLRQKVEDAVREHPDYRVVFTGHSLGGALATVAGADLRGNKYDIDVFSYGAPRVGNRAFAEFLTVQTGGTLYRITHTNDIVPRLPPREFGYSHSSPEYWIKSGTDVPVRRCDIVKIEGIDATGGNNQPNIPSITAHLWYFGLIGTCL

SEQ ID NO: 8510 - protein, 267 aa, Thermomyces lanuginosus
VSQDLFNQFNLFAQYSAAAYCGKNNDAPAGTNITCTGNACPEVEKADATFLYSFEDSGVGDVTGFLALDNTNKLIVLSFRGSRSIENWIANLNFWLKEINDICSGCRGHDGFTSSWRSVADTLRQKVEDAVREHPDYRVVFTGHSLGGALATVAGADLRGNGYDIDVFSYGAPRVGNRAFAEFLTVQTGGTLYRITHTNDIVPRLPPREFGYSHSSPEYWIKSGTLVPVTRNDIVKICGIDATGGNNRPNIPDIPAHLWYFGLISPC

SEQ ID NO: 8511 - protein, 267 aa, Thermomyces lanuginosus
VSQDLFNQFNLFAQYSAAAYCGKNNDAPAGTNITCTGNACPEVEKADATFLYSFEDSGVGDVTGFLALDNTNKLIVLSFRGSRSIENWIANLNFWLKEINDICSGCRGHDGFTSSWRSVADTLRQKVEDAVREHPDYRVVFTGHSLGGALATVAGADLRGNGYDIDVFSYGAPRVGNRAFAEFLTVQTGGTLYRITHTNDIVPRLPPREFGYSHSSPEYWIKSGTLVPVTRNDIVKICGIDATGGNNRPNIPDIPAHLWYFGLICPC

SEQ ID NO: 8512 - protein, 267 aa, Synthetic construct
TQDLFNQFNLFAQYSAAAYCGKNNDAPAGTNITCTGNACPEVEKADATFLYSFEGSGVGDVTGFLALDNTNKLIVLSFRGSRSIENWIGNLKFLMKEINDICSGCRGHDGFTSSWRSVADTLRQKVEDAVREHPDYRVVFTGHSLGGALATVAGADLRGNGYDIDVFSYGAPRVGNRAFAEFLTVQTGGTLYRITHTNDIVPRLPPREFGYSHSSPEYWIKSGTLVPVTRNDIVKIEGIDATGGNNRPNIPDIPAHLWYFGLIGTCL

SEQ ID NO: 8513 - protein, 289 aa, Thermomyces lanuginosus
ALTLIFTMAFSNMSASAAGKEVSQDLFNQFNLFAQYSAAAYCGKNNDAPAGTNITCTGNACPEVEKADATFLYSFEDSGVGDVTGFLALDNTNKLIVLSFRGSRSIENWIGNLNFDLKEINDICSGCRGHDGFTSSWRSVADTLRQKVEDAVREHPDYRVVFTGHSLGGALATVAGADLRGNGYDIDVFSYGAPRVGNRAFAEFLTVQTGGTLYRITHTNDIVPRLPPREFGYSHSSPEYWIKSGTLVPVTRNDIVKIEGIDATGGNNQPNIPDIPAHLWYFGLIGTCL

SEQ ID NO: 8514 - protein, 265 aa, Synthetic construct
ELFNQFNLFAQYSAAAYCGKNNDAPAGTNITCTGNACPEVEKADATFLYSFEGSGVGDVTGFLALDNTNKLIVLSFRGSRSIENWIGNLKFLMKEINDICSGCRGHDGFTSSWRSVADTLRQKVEDAVREHPDYRVVFTGHSLGGALATVAGADLRGNGYDIDVFSYGAPRVGNRAFAEFLTVQTGGTLYRITHTNDIVPRLPPREFGYSHSSPEYWIKSGTLVPVTRNDIVKIEGIDATGGNNRPNIPDIPAHLWYFGLIGTCL

SEQ ID NO: 8515 - protein, 194 aa, Humicola insolens
QLGAIQNGLESGSANACPDAILIFARGSTEPGNMGITVGPALANGLKSHIPNIWIQGVGGPYDAALATNFLPRGTSQANIDEGKRLFALANQKCPNTPVVAGGYSQGAALIAAAVSELSGAVKEQVKGVALFGYTQNLQNRGGIPNYPRERTKVFCNVGDAVCTGTLIITPAHLSYTIEARGEAARFLRDRIRA

SEQ ID NO: 8516 - protein, 194 aa, Humicola insolens
QLGAIENGLESGSPNACPDAILIFARGSTEPGNMGITVGPALANGLKSHIRNIWIQGVGGPYDAALATNFLPRGTSQANIDEGKRLFALANQKCPNTPVVAGGYSQGAALIAAAVSELSGAVKEQVKGVALFGYTQNLQNRGGIPNYPRERTKVFCNVGDAVCTGTLIITPAHLSYTIQARGEAARFLRDRIRA

SEQ ID NO: 8517 - protein, 194 aa, Humicola insolens
QLGAIXNGLESGSPNACPDAILIFARGSTEPGNMGITVGPALANGLKSHIPNIWIQGVGGPYDAALATNFLPRGTSQANIDEGKRLFALANQKCPNTPVVAGGYSQGAALIAAAVSELSGAVKEQVKGVALFGYTQNLQNRGGIPNYPRERTKVFCNVGDAVCTGTLIITPAHLSYTIXARGEAARFLRDRIRA

SEQ ID NO: 8518 - protein, 193 aa, Humicola insolens
VGAIQNGLESGSPNACPDAILIFARGSTEPGNMGITVGPALANGLKSHIPNIWIQGVGGPYDAALATNFLPRGTSQANIDEGKRLFALANQKCPNTPVVAGGYSQGAALIAAAVSELSDAVKEQVKGVALFGYTQNLQNRGGIPNYPRERTKVFCNVGDAVCTGTLIITPAHLSYTIQARGEAARFLRDRIRA

SEQ ID NO: 8519 - protein, 192 aa, Humicola insolens
GVIQNGLETGSPNACPDAILIFARGSTEPGNMGITVGPALANGLKSHIPNIWIQGVGGPYDAALATNFLPRGTSQANIDEGKRLFALANQKCPNTPVVAGGYSQGAALIAAAVSELSGAVKEQVKGVALFGYTQNLQNRGGIPNYPRERTKVFCNVGDAVCTGTLIITPAHLSYTIQARGEAARFLRDRIRA

SEQ ID NO: 8520 - protein, 274 aa, Thermomyces lanuginosus
SPIRREVSQDLFNQFNLFAQYSAAAYCGKNNDAPAGTNITCTGNACPEVEKADATLLYSFRDSGVGDVTGFLALDRTNKLIVLSFRGTRSIENWIADLNFILIEINDICSGCRGHDGFTSSWFSVADTLRQKVEDAVREHPDYRVVFTGHSLGGALATVAGADLRGNGYDIDVFSYGAPRVGNRAFAEFLTVQTGGTLYRITHTNDIVPRLPPREFGYSHSSPEFWIKSGTLVPVRRRDIVKIEGIDAEGGNNQPNIPSIPAHLWYFGAIGTCL

SEQ ID NO: 8521 - protein, 274 aa, Thermomyces lanuginosus
SPIRREVSQDLFNQFNLFAQYSAAAYCGKNNRAPAGTNITCTANACPEVEKADATFLYSFEDSGVGDVTGFLALDNTNKLIVLSFRGTNSIENWIADLNFILSEINDICSGCRGHAGFTSSWRSVADTLRQKVEDAVREHPDYRVVFTGHSLGGALATVAGADLRGNKYDIDVFSYGAPRVGNRAFAEFLTVQTGGTLYRITHTNDIVPILPPREFGYSHSSPEYWIKSGTLVPVRRRDIVKIEGIDATGGNNQPNIPSITAHLWYFGLIGTCL

SEQ ID NO: 8522 - protein, 274 aa, Thermomyces lanuginosus
SPIRREVSRDLFNQFNLFAQYSAAAYCGKNNDAPAGTNITCTGNACPEVEKADATLLYSFRDSGVGDVTGFLALDNTNKLIVLSFRGTRSIENWIADLNFILIEINDICSGCRGHDGFTSSWFSVADTLRQKVEDAVREHPDYRVVFTGHSLGGALATVAGADLRGNGYDIDVFSYGAPRVGNRAFAEFLTVQTGGTLYRITHTNDIVPRLPPREFGYSHSSPEFWIKSGTLVPVRRRDIVKIEGIDAEGGNNQPNIPSIPAHLWYFGAIGTCL

SEQ ID NO: 8523 - protein, 274 aa, Thermomyces lanuginosus
SPIRREVSQDLFNQFNLFAQYSAAAYCGKNNRAPAGTNITCTANACPEVEKADAKFLYTFEDSGVGDVTGFLALDNTNKLIVLSFRGSRSIENWIADLNFLLQEINDICSGCRGHAGFTSSWRSVADTLRQKVEDAVREHPDYRVVFTGHSLGGALATVAGADLRGNKYDIDVFSYGAPRVGNRAFAEFLTVQTGGTLYRITHTNDIVPRLPPREFGYSHSSPEYWIKSGTLVPVRQRDIVKIEGIDATGGNNQPNIPSITAHLWYFGLIGTCL

SEQ ID NO: 8524 - protein, 274 aa, Thermomyces lanuginosus
SPIRREVSQDLFNQFNLFAQYSAAAYCGKNNDAPAGTNITCTGNACPEVEKADATLLYSFRDSGVGDVTGFLALDNTNELIVLSFRGTRSIENWIADLNFILIEINDICSGCRGHDGFTSSWFSVADTLRQKVEDAVREHPDYRVVFTGHSLGGALATVAGADLRGNGYDIDVFSYGAPRVGNRAFAEFLTVQTGGTLYRITHTNDIVPRLPPREFGYSHSSPEFWIKSGTLVPVRRRDIVKIEGIDAEGGNNQPNIPSIPAHLWYFGAIGTCL

SEQ ID NO: 8525 - protein, 274 aa, Thermomyces lanuginosus
SPIRREVSQDLFNQFNLFAQYSAAAYCGKNNDAPAGTXXTCTGNACPEVEKADATFLYSFEDXGVGDVTGFLALDNTNKLIVLSXRGSRSXENWIGNLNFDLKEINDICSGCRGXDGFTSSWRSVADTLRQKVEDAVREHPDYRVVFTGXSLGGALATVAGADLRGNGYDIDVFSXGAPRVGNRAFAEFLTVQTGGTLYRITXTNDIVPRLPPREFGYXXSSPEYWIKSGTLVPVTRNDIVKIEGIDATGGNNQPNIPDIPAHLWYFGLIGTCL

SEQ ID NO: 8526 - protein, 274 aa, Thermomyces lanuginosus
SPIRREVSEDLFNQFNLFAQYSAAAYCGKNNDAPAGTNITCTGNACPEVEKADATLLYSFRDSGVGDVTGFLALDNTNKLIVLSFRGTRSIENWIADLNFILIEINDICSGCRGHDGFTSSWFSVADTLRQKVEDAVREHPDYRVVFTGHSLGGALATVAGADLRGNGYDIDVFSYGAPRVGNRAFAEFLTVQTGGTLYRITHTNDIVPRLPPREFGYSHSSPEFWIKSGTLVPVRRRDIVKIEGIDAEGGNNQPNIPSIPAHLWYFGAIGTCL

SEQ ID NO: 8527 - protein, 274 aa, Thermomyces lanuginosus
SPIRREVSQDLFNQFNLFAQYSAAAYCGKNNDAPAGTNITCTGNACPEVEKADATFLYSFEDSGVGDVTGFLALDNTNKLIVLSFRGTGSDQNLQLETSYTLTEINDICSGCRGHDGFTSSWRSVADTLRQKVEDAVREHPDYRVVFTGHSLGGALATVAGADLRGNGYDIDVFSYGAPRVGNRAFAEFLTVQTGGTLYRITHTNDIVPRLPPREFGYSHSSPEYWIKSGTLVPVRRRDIVKIEGIDATGGNNQPNIPDIPAHLWYFGLIGTCL

SEQ ID NO: 8528 - protein, 274 aa, Thermomyces lanuginosus
SPIRREVSQDLFNQFNLFAQYSAAAYCGKNNRAPAGTNITCTANACPEVEKADATFLYSFEDSGVGDVTGFLALDNTNKLIVLSFRGTNSLENWIADFNFILQEINDICSGCRGHDGFTSSWRSVADTLRQKVEDAVREHPDYRVVFTGHSLGGALATVAGADLRGNKYDIDVFSYGAPRVGNRAFAEFLTVQTGGTLYRITHTNDIVPRLPPREFGYSHSSPEYWIKSGTLVPVRRRDIVKIEGIDATGGNNQPNIPSITAHLWYFGLIGTCL

SEQ ID NO: 8529 - protein, 274 aa, Thermomyces lanuginosus
SPIRREVSQDLFNQFNLFAQYSAAAYCGKNNDAPAGTNITCTGNACPEVEKADATLLYSFRDSGVGDVTGFLALDNTNKLIVLSFRGTRSIENWIADLNFILIEINDICSGCRGHDGFTSSWFSFADTLRQKVEDAVREHPDYRVVFTGHSLGGALATVAGADLRGNGYDIDVFSYGAPRVGNRAFAEFLTVQTGGTLYRITHTNDIVPRLPPREFGYSHSSPEFWIKSGTLVPVRRRDIVKIEGIDAEGGNNQPNIPSIPAHLWYFGAIGTCL

SEQ ID NO: 8530 - protein, 274 aa, Thermomyces lanuginosus
SPIRREVSQDLFNQFNLFAQYSAAAYCGKNNDAPAGTNITCTGNACPEVEQADATLLYSFRDSGVGDVTGFLALDNTNKLIVLSFRGTRSIENWIADLNFILIEINDICSGCRGHDGFTSSWFSVADTLRQKVEDAVREHPDYRVVFTGHSLGGALATVAGADLRGNGYDIDVFSYGAPRVGNRAFAEFLTVQTGGTLYRITHTNDIVPRLPPREFGYSHSSPEFWIKSGTLVPVRRRDIVKIEGIDAEGGNNQPNIPSIPAHLWYFGAIGTCL

SEQ ID NO: 8531 - protein, 274 aa, Thermomyces lanuginosus
SPIRREVSQDLFNQFNLFAQYSAAAYCGKNNDAPAGTNITCTGNACPEVEKADATLLYSFRDSGVGDVTGFLALDNRNKLIVLSFRGTRSIENWIADLNFILIEINDICSGCRGHDGFTSSWFSVADTLRQKVEDAVREHPDYRVVFTGHSLGGALATVAGADLRGNGYDIDVFSYGAPRVGNRAFAEFLTVQTGGTLYRITHTNDIVPRLPPREFGYSHSSPEFWIKSGTLVPVRRRDIVKIEGIDAEGGNNQPNIPSIPAHLWYFGAIGTCL

SEQ ID NO: 8532 - protein, 274 aa, Synthetic construct
SPRQRPGSQQMFNQFNLFAQYSAAAYCGKNNDAPAGTNITCTGNACPEVEKADATFLYSFEGSGVGDVTGFLALDNTNKLIVLSFRGSRSIENWIGNLKFLMKEINDICSGCRGHDGFTSSWRSVADTLRQKVEDAVREHPDYRVVFTGHSLGGALATVAGADLRGNGYDIDVFSYGAPRVGNRAFAEFLTVQTGGTLYRITHTNDIVPRLPPREFGYSHSSPEYWIKSGTLVPVTRNDIVKIEGIDATGGNNRPNIPDIPAHLWYFGLIGTCL

SEQ ID NO: 8533 - protein, 274 aa, Thermomyces lanuginosus
SPIRREVSQDLFNQFNLFAQYSAAAYCGKNNDAPAGTNITCTGNACPEVEKADATFLYSFEDSGVGCVTGFLALDNTNKLIVLSFRGTGSDCNLQLDTNYTLTEINDICSGCRGHDGFTSSWRSVADTLRQKVEDAVREHPDYRVVFTGHSLGGALATVAGADLRGNGYDIDVFSYGAPRVGNRAFAEFLTVQTGGTLYRITHTNDIVPRLPPREFGYSHSSPEYWIKSGTLVPVRRRDIVKIEGIDATGGNNQPNIPDIPAHLWYFGLIGTCL

SEQ ID NO: 8534 - protein, 274 aa, Thermomyces lanuginosus
SPIRREVSQDLFNQFNLFAQYSAAAYCGKNNRAPAGTNITCTANACPEVEKADATFLYSFEDSGVGDVTGFLALDNTNKLIVLSFRGTRSPENWIADLNFLLQEINDICSGCRGHAGFTSSWRSVADTLRQKVEDAVREHPDYRVVFTGHSLGGALATVAGADLRGNKYDIDVFSYGAPRVGNRAFAEFLTVQTGGTLYRITHTNDIVPRLPPREFGYSHSSPEYWIKSGTLVPVRRRDIVKIEGIDATGGNNQPNIPSITAHLWYFGLIGTCV

SEQ ID NO: 8535 - protein, 291 aa, Thermomyces lanuginosus
MRSSLVLFFVSAWTALASPIRREVSRDLFNQFNLFAQYSAAAYCGKNNDAPAGTNITCTGNACPEVEKADATLLYSFRDSGVGDVTGFLALDNTNKLIVLSFRGSRSIENWIADLNFILIEINDICSGCRGHDGFTSSWFSVADTLRQKVEDAVREHPDYRVVFTGHSLGGALATVAGADLRGNGYDIDVFSYGAPRVGNRAFAEFLTVQTGGTLYRITHTNDIVPRLPPREFGYSHSSPEFWIKSGTLVPVRRRDIVKIEGIDAEGGNNQPNIPSIPAHLWYFGAIGTCL

SEQ ID NO: 8536 - protein, 291 aa, Thermomyces lanuginosus
MRSSLVLFFVSAWTALASPIRREVSQDLFNQFNLFAQYSAAAYCGKNNRAPAGTNITCTANACPEVEKADATFLYTFEDSGVGDVTGFLALDNTNKLIVLSFRGSRSIENWIADLNFLLQEINDICSGCRGHAGFTSSWRSVADTLRQKVEDAVREHPDYRVVFTGHSLGGALATVAGADLRGNKYDIDVFSYGAPRVGNRAFAEFLTVQTGGTLYRITHTNDIVPRLPPREFGYSHSSPEYWIKSGTLVPVRRRDIVKIEGIDATGGNNQPNIPSITAHLWYFGLIGTCV

SEQ ID NO: 8537 - protein, 291 aa, Thermomyces lanuginosus
MRSSLVLFFVSAWTALASPIRREVSQDLFNQFNLFAQYSAAAYCGKNNDAPAGTNITCTGNACPEVEKADATFLYSFEDSGVGDVTGFLALDNTNKLIVLSFRGTGSDTNLQLDTNYTLTEINDICSGCRGHDGFTSSWRSVADTLRQKVEDAVREHPDYRVVFTGHSLGGALATVAGADLRGNGYDIDVFSYGAPRVGNRAFAEFLTVQTGGTLYRITHTNDIVPRLPPREFGYSHSSPEYWIKSGTLVPVRRRDIVKIEGIDATGGNNQPNIPDIPAHLWYFGLIGTCL

SEQ ID NO: 8538 - protein, 291 aa, Thermomyces lanuginosus
MRSSLVLFFVSAWTALASPIRREVSQDLFNQFNLFAQYSAAAYCGKNNDAPAGTNITCTGNACPEVEKADATFLYSFEDSGVGCVTGFLALDNTNKLIVLSFRGTGSDCNLQLETSYTLTEINDICSGCRGHDGFTSSWRSVADTLRQKVEDAVREHPDYRVVFTGHSLGGALATVAGADLRGNGYDIDVFSYGAPRVGNRAFAEFLTVQTGGTLYRITHTNDIVPRLPPREFGYSHSSPEYWIKSGTLVPVTRNDIVKIEGIDATGGNNQPNIPDIPAHLWYFGLIGTCL

SEQ ID NO: 8539 - protein, 291 aa, Thermomyces lanuginosus
MRSSLVLFFVSAWTALASPIRREVSQDLFNQFNLFAQYSAAAYCGKNNRAPAGTNITCTANACPEVEKADATVLYSFEDSGVGDVTGFLALDNTNKLIVLSFRGSRSIENWIADLNFLLQEINDICSGCRGHAGFTSSWRSVADTLRQKVEDAVREHPDYRVVFTGHSLGGALATVAGADLRGNKYDIDVFSYGAPRVGNRAFAEFLTVQTGGTLYRITHTNDIVPRLPPREFGYSHSSPEYWIKSGTLVPVRRRDIVKIEGIDATGGNNQPNIPSTTAHLWYFGLIGTCL

SEQ ID NO: 8540 - protein, 291 aa, Thermomyces lanuginosus
MRSSLVLFFVSAWTALASPIRREVSQDLFNQFNLFAQYSAAAYCGKNNRAPAGTNITCTANACPEVEKADATFLYSFEDSGVGDVTGFLALDNTNKLIVLSFRGTRSIENWIADLNFLLQEYNDICSGCRGHAGFTSSWRSVADTLRQKVEDAVREHPDYRVVFTGHSLGGALATVAGADLRGNKYDIDVFSYGAPRVGNRAFAEFLTVQTGGTLYRITHTNDIVPRLPPREFGYSHSSPEYWIKSGTLVPVRRRDIVKIEGIDATGGNNQPNIPSITAHLWYFGLIGTCL

SEQ ID NO: 8541 - protein, 269 aa, Thermomyces lanuginosus
EVSQDLFNQFNLFAQYSAAAYCGKNNRAPAGTKITCTANACPEVEKADATVLYSFEDSGVGDVTGFLALDNTNKLIVLSFRGSRSIENWIGNLNFELEEIDDICSGCRGHAGFTSSWRSVADTLRQKVEDAVREHPDYRVVFTGHSLGGALATVAGADLRGNPYDIDVFSYGAPRVGNRAFAEFLTVQTGGTLYRITHTNDIVPRLPPREFGYSHSSPEYWIKSGTLVPVRRLDIVKIEGIDATGGNNQPNIPSITAHLWYFGLIGTCL

SEQ ID NO: 8542 - protein, 269 aa, Thermomyces lanuginosus
EKSQDLFNQFNLFAQYSAAAYCGKNNRAPAGTKITCTANACPEVEKADATLLYSFEDSGVGDVTGFLALDNTNKLIVLSFRGSRSIENWIGNLNFELKEINDICSGCRGHAGFTSSWRSVADTLRQKVEDAVREHPDYRVVFTGHSLGGALATVAGADLRGNKYDIDVFSYGAPRVGNRAFAEFLTVQTGGTLYRITHTNDIVPRLPPREFGYSHSSPEYWIKSGTLVPVRRRDIVKIEGIDATGGNNQPNIPSGTAHLWYFGLIGTCL

SEQ ID NO: 8543 - protein, 269 aa, Thermomyces lanuginosus
EYSQDLFNQFNLFAQYSAAAYCGKNNRAPAGTKITCTANACPEVEKADATILYSFEDSGVGDVTGFLALDNTNKLIVLSFRGSRSIENWIGNLNFELKEINDICSGCRGHAGFTSSWRSVADTLRQKVEDAVREHPDYRVVFTGHSLGGALATVAGADLRGNKYDIDVFSYGAPRVGNRAFAEFLTVQTGGTLYRITSTNDIVPRLPPREFGYSHSSPEYWIKSGTLVPVRRRDIVKIEGIDATGGNNQPNIPSITAHLWYFGLIGTCL

SEQ ID NO: 8544 - protein, 269 aa, Thermomyces lanuginosus
EYSQDLFNQFNLFAQYSAAAYCGKNNRAPAGTKITCTANACPEVEKADATVLYSFEDSGVGDVTGFLALDNTNKLIVLSFRGSRSIENWIGNLNFELKEINDICSGCRGHAGFTSSWRSVADTLRQKVEDAVREHPDYRVVFTGHSLGGALATVAGADLRGNKYDIDVFSYGAPRVGNRAFAEFLTVQTGGTLYRITHTNDIVPRLPPREFGYSHSSPEYWIKSGTDVPVRRRDIVKIEGIDATGGNNQPNIPSITAHLWYFGLIGTCL

SEQ ID NO: 8545 - protein, 269 aa, Thermomyces lanuginosus
EYSQDLFNQFNLFAQYSAAAYCGKNNRAPAGTKITCTANACPEVEKADATVLYSFEDSGVGDVTGFLALDNTNKLIVLSFRGSRSIENWIGNLNFELKEINDICSGCRGHAGFTSSWRSVADTLRQKVEDAVREHPDYRVVFTGHSLGGALATVAGADLRGNKYDIDVFSYGAPRVGNRAFAEFLTVQTGGTLYRITHTNDIVPRLPPREFGYSHSSPEYWIKFGTLVPVRRRDIVKIEGIDATGGNNQPNIPSITAHLWYFGLIGTCL

SEQ ID NO: 8546 - protein, 269 aa, Thermomyces lanuginosus
EVSQDLFNQFNLFAQYSAAAYCGKNNRAPAGTKITCTANACPEVEKADATVLYSFEGSGVGDVTGFLALDNTNKLIVLSFRGSRSIENWIGNLNFELIEINDICSGCRGHAGFTSSWRSVADTLRQKVEDAVREHPDYRVVFTGHSLGGALATVAGADLRGNKYDIDVFSYGAPRVGNRAFAEFLTVQTGGTLYRITHTNDIVPRLPPREFGYSHSSPEYWIKSGTLVPVRRRDIVKIEGIDATGGNNQPNIPSITAHLWYFGLIGTCL

SEQ ID NO: 8547 - protein, 269 aa, Thermomyces lanuginosus
EKSQDLFNQFNLFAQYSAAAYCGKNNRAPAGTKITCTANACPEVEKADATVLYSFEDSGVGDVTGFLALDNTNKLIVLSFRGSRSIENWIGNLNFELKEINDICSGCRGHAGFTSSWRSVADTLRQKVEDAVREHPDYRVVFTGHSLGGALATVAGADLRGNKYDIDVFSYGAPRVGNRAFAEFLTVQTGGTLYRITHTNDIVPRLPPREFGYSHSSPEYWIKSGTLVPVRRRDIVKIEGIDATGGNNQPNIPSITVHLWYFGLIGTCL

SEQ ID NO: 8548 - protein, 269 aa, Thermomyces lanuginosus
EYSQDLFNQFNLFAQYSAAAYCGKNNRAPAGTKITCTANACPEVEKADATLLYSFEDSGVGDVTGFLALDNTNKLIVLSFRGSRSIENWIGNLNFELKEINDICSGCRGHAGFTSSWRSVADTLRQKVEDAVREHPDYRVVFTGHSLGGALATVAGADLRGNKYDIDVFSYGAPRVGNRAFAEFLTVQTGGTLYRITLTNDIVPRLPPREFGYSHSSPEYWIKSGTLVPVRRRDIVKIEGIDATGGNNQPNIPSITAHLWYFGLIGTCL

SEQ ID NO: 8549 - protein, 269 aa, Thermomyces lanuginosus
EKSQDLFNQFNLFAQYSAAAYCGKNNRAPAGTKITCTANACPEVEKADATILYSFEDSGVGDVTGFLALDNTNKLIVLSFRGSRSIENWIGNLNFELKEINDICSGCRGHAGFTSSWRSVADTLRQKVEDAVREHPDYRVVFTGHSLGGALATVAGADLRGNKYDIDVFSYGAPRVGNRAFAEFLTVQTGGTLYRITHTNDIVPRLPPREFGYSHSSPEYWIKIGTLVPVRRRDIVKIEGIDATGGNNQPNIPSITAHLWYFGLIGTCL

SEQ ID NO: 8550 - protein, 269 aa, Thermomyces lanuginosus
EVSQDLFNQFNLFAQYSAAAYCGKNNRAPAGTKITCTANACPEVEKADATFLYSFKDSGVGDVTGFLARDNTNKLIVLSFRGSRSIENWIGNLNFELEEINDICSGCRGHAGFTSSWRSVADTLRQKVEDAVREHPDYRVVFTGHSLGGALATVAGADLRGNKYDIDVFSYGAPRVGNRAFAEFLTVQTGGTLYRITHTNDIVPRLPPREFGYSHSSPEYWIKSGTLVPVRRRDIVKIEGIDATGGNNQPNIPSITAHLWYFGLIGTCL

SEQ ID NO: 8551 - protein, 269 aa, Thermomyces lanuginosus
EYSQDLFNQFNLFAQYSAAAYCGKNNRAPAGTKITCTANACPEVEKADATVLYSFEDSGVGDVTGFLALDNTNKLIVLSFRGSRSIENWIGNLNFELKEINDICSGCRGHAGFTSSWRSVADTLRQKVEDAVREHPDYRVVFTGHSLGGALATVAGADLRGNKYDIDVFSYGAPRVGNRAFAEFLTVQTGGTLYRITYTNDIVPRLPPREFGYSHSSPEYWIKSGTLVPVRRRDIVKIEGIDATGGNNQPNIPSITAHLWYFGLIGTCL

SEQ ID NO: 8552 - protein, 269 aa, Thermomyces lanuginosus
EKSQDLFNQFNLFAQYSAAAYCGKNNRAPAGTKITCTANACPEVEKADATLLYSFEDSGVGDVTGFLALDNTNKLIVLSFRGSRSIENWIGNLNFELKEINDICSGCRGHAGFTSSWRSVADTLRQKVEDAVREHPDYRVVFTGHSLGGALATVAGADLRGNKYDIDVFSYGAPRVGNRAFAEFLTVQTGGTLYRITHTNDIVPRLPPREFGYSHSSPEYWIKSGTLVPVRRRDIVKIEGIDATGGNNQPNIPSITIHLWYFGLIGTCL

SEQ ID NO: 8553 - protein, 269 aa, Thermomyces lanuginosus
EKSQDLFNQFNLFAQYSAAAYCGKNNRAPAGTKITCTANACPEVEKADATILYSFEDSGVGDVTGFLALDNTNKLIVLSFRGSRSIENWIGNLNFELKEINDICSGCRGHAGFTSSWRSVADTLRQKVEDAVREHPDYRVVFTGHSLGGALATVAGADLRGNKYDIDVFSYGAPRVGNRAFAEFLTVQTGGTLYRITYTNDIVPRLPPREFGYSHSSPEYWIKSGTLVPVRRRDIVKIEGIDATGGNNQPNIPSITAHLWYFGLIGTCL

SEQ ID NO: 8554 - protein, 269 aa, Thermomyces lanuginosus
EKSQDLFNQFNLFAQYSAAAYCGKNNRAPAGTKITCTANACPEVEKADATILYSFEDSGVGDVTGFLALDNTNKLIVLSFRGSRSIENWIGNLNFELKEINDICSGCRGHAGFTSSWRSVADTLRQKVEDAVREHPDYRVVFTGHSLGGALATVAGADLRGNKYDIDVFSYGAPRVGNRAFAEFLTVQTGGTLYRITHTNDIVPRLPPREFGYSHSSPEYWIKSGTLVPVRRRDIVKIEGIDATGGNNQPNIPSITVHLWYFGLIGTCL

SEQ ID NO: 8555 - protein, 269 aa, Thermomyces lanuginosus
EYSQDLFNQFNLFAQYSAAAYCGKNNRAPAGTKITCTANACPEVEKADATILYSFEDSGVGDVTGFLALDNTNKLIVLSFRGSRSIENWIGNLNFELKEINDICSGCRGHAGFTSSWRSVADTLRQKVEDAVREHPDYRVVFTGHSLGGALATVAGADLRGNKYDIDVFSYGAPRVGNRAFAEFLTVQTGGTLYRITHTNDIVPRLPPREFGYSHSSPEYWIKSGTLVPVRRRDIVKIEGIDATGGNNQPNIPSGTAHLWYFGLIGTCL

SEQ ID NO: 8556 - protein, 269 aa, Thermomyces lanuginosus
EVSQDLFNQFNLFAQYSAAAYCGKNNRAPAGTKITCTANACPEVEKADATVLYSFEDSGVGDVTGFLALDNTNKLIVLSFRGSRSIENWIGNLNFELEEINDICSGCRGHAGFTSSWRSVADTLRQKVEDAVREHPDYRVVFTGHSLGGALATVAGADLRGNKYDIDVFSYGAPRVGNRAFAEFLTVQTGGTLYRITHTNDIVPRLPPRKFGYSHSSPEYWIKSGTLVPVRRRDIVKIEGIDATGGNNQPNIPSITAHLWYFGLIGTCL

SEQ ID NO: 8557 - protein, 269 aa, Thermomyces lanuginosus
EKSQDLFNQFNLFAQYSAAAYCGKNNRAPAGTKITCTANACPEVEKADATLLYSFEDSGVGDVTGFLALDNTNKLIVLSFRGSRSIENWIGNLNFELKEINDICSGCRGHAGFTSSWRSVADTLRQKVEDAVREHPDYRVVFTGHSLGGALATVAGADLRGNKYDIDVFSYGAPRVGNRAFAEFLTVQTGGTLYRITHTNDIVPRLPPREFGYSHSSPEYWIKSGTLPPVRRRDIVKIEGIDATGGNNQPNIPSITAHLWYFGLIGTCL

SEQ ID NO: 8558 - protein, 269 aa, Thermomyces lanuginosus
EYSQDLFNQFNLFAQYSAAAYCGKNNRAPAGTKITCTANACPEVEKADATILYSFEDSGVGDVTGFLALDNTNKLIVLSFRGSRSIENWIGNLNFELKEINDICSGCRGHAGFTSSWRSVADTLRQKVEDAVREHPDYRVVFTGHSLGGALATVAGADLRGNKYDIDVFSYGAPRVGNRAFAEFLTVQTGGTLYRITHTNDIVPRLPPREFGYSHSSPEYWIKFGTLVPVRRRDIVKIEGIDATGGNNQPNIPSITAHLWYFGLIGTCL

SEQ ID NO: 8559 - protein, 269 aa, Thermomyces lanuginosus
EKSQDLFNQFNLFAQYSAAAYCGKNNRAPAGTKITCTANACPEVEKADATVLYSFEDSGVGDVTGFLALDNTNKLIVLSFRGSRSIENWIGNLNFELKEINDICSGCRGHAGFTSSWRSVADTLRQKVEDAVREHPDYRVVFTGHSLGGALATVAGADLRGNKYDIDVFSYGAPRVGNRAFAEFLTVQTGGTLYRITSTNDIVPRLPPREFGYSHSSPEYWIKSGTLVPVRRRDIVKIEGIDATGGNNQPNIPSITAHLWYFGLIGTCL

SEQ ID NO: 8560 - protein, 269 aa, Thermomyces lanuginosus
EVSQDLFNQFNLFAQYSAAAYCGKNNRAPAGTKITCTANACPEVEKADATVLYSFEDSGVGDVTGFLALDNTNKLIVLSFRGSRSIENWIGNLNFELEEIDDICSGCRGHAGFTSSWRSVADTLRQKVEDAVREHPDYRVVFTGHSLGGALATVAGADLRGNKYDIDVFSYGAPRVGNRAFAEFLTVQTGGTLYRITHTNDIVPRLPPREFGYSHSSPEYWIKSGTLVPVRRRDIVKIEGIDATGGNNQPNIPSITAHLWYFGLIGTCL

SEQ ID NO: 8561 - protein, 269 aa, Thermomyces lanuginosus
EKSQDLFNQFNLFAQYSAAAYCGKNNRAPAGTKITCTANACPEVEKADATVLYSFEDSGVGDVTGFLALDNTNKLIVLSFRGSRSIENWIGNLNFELKEINDICSGCRGHAGFTSSWRSVADTLRQKVEDAVREHPDYRVVFTGHSLGGALATVAGADLRGNKYDIDVFSYGAPRVGNRAFAEFLTVQTGGTLYRITHTNDIVPRLPPREFGYSHSSPEYWIKSGTLVPVRRRDIVKIEGIDATGGNNQPNIPSITIHLWYFGLIGTCL

SEQ ID NO: 8562 - protein, 269 aa, Thermomyces lanuginosus
EKSQDLFNQFNLFAQYSAAAYCGKNNRAPAGTKITCTANACPEVEKADATILYSFEDSGVGDVTGFLALDNTNKLIVLSFRGSRSIENWIGNLNFELKEINDICSGCRGHAGFTSSWRSVADTLRQKVEDAVREHPDYRVVFTGHSLGGALATVAGADLRGNKYDIDVFSYGAPRVGNRAFAEFLTVQTGGTLYRITHTNDIVPRLPPREFGYSHSSPEYWIKPGTLVPVRRRDIVKIEGIDATGGNNQPNIPSITAHLWYFGLIGTCL

SEQ ID NO: 8563 - protein, 269 aa, Thermomyces lanuginosus
EYSQDLFNQFNLFAQYSAAAYCGKNNRAPAGTKITCTANACPEVEKADATVLYSFEDSGVGDVTGFLALDNTNKLIVLSFRGSRSIENWIGNLNFELKEINDICSGCRGHAGFTSSWRSVADTLRQKVEDAVREHPDYRVVFTGHSLGGALATVAGADLRGNKYDIDVFSYGAPRVGNRAFAEFLTVQTGGTLYRITHTNDIVPRLPPREFGYSHSSPEYWIKSGTLVPVRRRDIVKIEGIDATGGNNQPNIPSITIHLWYFGLIGTCL

SEQ ID NO: 8564 - protein, 269 aa, Thermomyces lanuginosus
EKSQDLFNQFNLFAQYSAAAYCGKNNRAPAGTKITCTANACPEVEKADATLLYSFEDSGVGDVTGFLALDNTNKLIVLSFRGSRSIENWIGNLNFELKEINDICSGCRGHAGFTSSWRSVADTLRQKVEDAVREHPDYRVVFTGHSLGGALATVAGADLRGNKYDIDVFSYGAPRVGNRAFAEFLTVQTGGTLYRITHTNDIVPRLPPREFGYSHSSPEYWIKPGTLVPVRRRDIVKIEGIDATGGNNQPNIPSITAHLWYFGLIGTCL

SEQ ID NO: 8565 - protein, 269 aa, Thermomyces lanuginosus
EYSQDLFNQFNLFAQYSAAAYCGKNNRAPAGTKITCTANACPEVEKADATILYSFEDSGVGDVTGFLALDNTNKLIVLSFRGSRSIENWIGNLNFELKEINDICSGCRGHAGFTSSWRSVADTLRQKVEDAVREHPDYRVVFAGHSLGGALATVAGADLRGNKYDIDVFSYGAPRVGNRAFAEFLTVQTGGTLYRITHTNDIVPRLPPREFGYSHSSPEYWIKSGTLVPVRRRDIVKIEGIDATGGNNQPNIPSITAHLWYFGLIGTCL

SEQ ID NO: 8566 - protein, 269 aa, Thermomyces lanuginosus
EKSQDLFNQFNLFAQYSAAAYCGKNNRAPAGTKITCTANACPEVEKADATLLYSFEDSGVGDVTGFLALDNTNKLIVLSFRGSRSIENWIGNLNFELKEINDICSGCRGHAGFTSSWRSVADTLRQKVEDAVREHPDYRVVFTGHSLGGGLATVAGADLRGNKYDIDVFSYGAPRVGNRAFAEFLTVQTGGTLYRITHTNDIVPRLPPREFGYSHSSPEYWIKSGTLVPVRRRDIVKIEGIDATGGNNQPNIPSITAHLWYFGLIGTCL

SEQ ID NO: 8567 - protein, 269 aa, Thermomyces lanuginosus
EKSQDLFNQFNLFAQYSAAAYCGKNNRAPAGTKITCTANACPEVEKADATILYSFEDSGVGDVTGFLALDNTNKLIVLSFRGSRSIENWIGNLNFELKEINDICSGCRGHAGFTSSWRSVADTLRQKVEDAVREHPDYRVVFAGHSLGGALATVAGADLRGNKYDIDVFSYGAPRVGNRAFAEFLTVQTGGTLYRITHTNDIVPRLPPREFGYSHSSPEYWIKSGTLVPVRRRDIVKIEGIDATGGNNQPNIPSITAHLWYFGLIGTCL

SEQ ID NO: 8568 - protein, 269 aa, Thermomyces lanuginosus
EYSQDLFNQFNLFAQYSAAAYCGKNNRAPAGTKITCTANACPEVEKADATLLYSFEDSGVGDVTGFLALDNTNKLIVLSFRGSRSIENWIGNLNFELKEINDICSGCRGHAGFTSSWRSVADTLRQKVEDAVREHPDYRVVFTGHSLGGALATVAGADLRGNKYDIDVFSYGAPRVGNRAFAEFLTVQTGGTLYRITHTNDIVPRLPPREFGYSHSSPEYWIKFGTLVPVRRRDIVKIEGIDATGGNNQPNIPSITAHLWYFGLIGTCL

SEQ ID NO: 8569 - protein, 269 aa, Thermomyces lanuginosus
EYSQDLFNQFNLFAQYSAAAYCGKNNRAPAGTKITCTANACPEVEKADATILYSFEDSGVGDVTGFLALDNTNKLIVLSFRGSRSIENWIGNLNFELKEINDICSGCRGHAGFTSSWRSVADTLRQKVEDAVREHPDYRVVFTGHSLGGALATVAGADLRGNKYDIDVFSYGAPRVGNRAFAEFLTVQTGGTLYRITITNDIVPRLPPREFGYSHSSPEYWIKSGTLVPVRRRDIVKIEGIDATGGNNQPNIPSITAHLWYFGLIGTCL

SEQ ID NO: 8570 - protein, 269 aa, Thermomyces lanuginosus
EVSQDLFNQFNLFAQYSAAAYCGKNNRAPAGTQITCTGNACPEVEKADATFLYSFQNSGVGDVTGFLALDNTNKLIVLSFRGSRSIENWINNLRFDLKEINDICSGCRGHAGFTSSWRSVADTLRQKVEDAVREHPDYRVVFTGHSLGGALATVAGADLRGNGYDIDVFSYGAPRVGNRAFAEFLTVQTGGTLYRITHTNDIVPRLPPREFGYSHPSPEYWIKSGTGVPVRRRDIVKIEGIDATGGNNQPNIPSITAHLWYFGLIGTCL

SEQ ID NO: 8571 - protein, 269 aa, Thermomyces lanuginosus
EYSQDLFNQFNLFAQYSAAAYCGKNNRAPAGTKITCTANACPEVEKADATLLYSFEDSGVGDVTGFLALDNTNKLIVLSFRGSRSIENWIGNLNFELKEINDICSGCRGHAGFTSSWRSVADTLRQKVEDAVREHPDYRVVFTGHSLGGALATVAGADLRGNKYDIDVFSYGAPRVGNRAFAEFLTVQTGGTLYRITNTNDIVPRLPPREFGYSHSSPEYWIKSGTLVPVRRRDIVKIEGIDATGGNNQPNIPSITAHLWYFGLIGTCL

SEQ ID NO: 8572 - protein, 269 aa, Thermomyces lanuginosus
EKSQDLFNQFNLFAQYSAAAYCGKNNRAPAGTKITCTANACPEVEKADATLLYSFEDSGVGDVTGFLALDNTNKLIVLSFRGSRSIENWIGNLNFELKEINDICSGCRGHAGFTSSWRSVADTLRQKVEDAVREHPDYRVVFTGHSLGGALATVAGADLRGNKYDIDVFSYGAPRVGNRAFAEFLTVQTGGTLYRITHTNDIVPRLPPREFGYSHSSPEYWIKSGTDVPVRRRDIVKIEGIDATGGNNQPNIPSITAHLWYFGLIGTCL

SEQ ID NO: 8573 - protein, 269 aa, Thermomyces lanuginosus
EYSQDLFNQFNLFAQYSAAAYCGKNNRAPAGTKITCTANACPEVEKADATVLYSFEDSGVGDVTGFLALDNTNKLIVLSFRGSRSIENWIGNLNFELKEINDICSGCRGHAGFTSSWRSVADTLRQKVEDAVREHPDYRVVFTGHSLGGALATVAGADLRGNKYDIDVFSYGAPRVGNRAFAEFLTVQTGGTLYRITNTNDIVPRLPPREFGYSHSSPEYWIKSGTLVPVRRRDIVKIEGIDATGGNNQPNIPSITAHLWYFGLIGTCL

SEQ ID NO: 8574 - protein, 269 aa, Thermomyces lanuginosus
EVSQDLFNQFNLFAQYSAAAYCGKNNRAPAGTNITCTANACPEVEKADATVLYSFEDSGVGDVTGFLARDNTNKLIVLSFRGSRSIKNWIGNLNFELEEINDICSGCRGHAGFTSSWRSVADTLRQKVEDAVREHPDYRVVFTGHSLGGALATVAGADLRGNKYDIDVFSYGAPRVGNRAFAEFLTVQTGGTLYRITHTNDIVPRLPPREFGYSHSSPEYWIKSGTLVPVRRRDIVKIEGIDATGGNNQPNIPSITAHLWYFGLIGTCL

SEQ ID NO: 8575 - protein, 269 aa, Thermomyces lanuginosus
EKSQDLFNQFNLFAQYSAAAYCGKNNRAPAGTKITCTANACPEVEKADATVLYSFEDSGVGDVTGFLALDNTNKLIVLSFRGSRSIENWIGNLNFELKEINDICSGCRGHAGFTSSWRSVADTLRQKVEDAVREHPDYRVVFTGHSLGGALATVAGADLRGNKYDIDVFSYGAPRVGNRAFAEFLTVQTGGTLYRITNTNDIVPRLPPREFGYSHSSPEYWIKSGTLVPVRRRDIVKIEGIDATGGNNQPNIPSITAHLWYFGLIGTCL

SEQ ID NO: 8576 - protein, 269 aa, Thermomyces lanuginosus
EVSQDLFNQFNLFAQYSAAAYCGKNNRAPAGTNITCTANACPEVEKADATILYSFEDSGVGDVTGFLARDNTNKLIVLSFRGSRSIENWIGNLNFELEEINDICSGCRGHAGFTSSWRSVADTLRQKVEDAVREHPDYRVVFTGHSLGGALATVAGADLRGNKYDIDVFSYGAPRVGNRAFAEFLTVQTGGTLYRITHTNDIVPRLPPRKFGYSHSSPEYWIKSGTLVPVRRRDIVKIEGIDATGGNNQPNIPSITAHLWYFGLIGTCL

SEQ ID NO: 8577 - protein, 269 aa, Thermomyces lanuginosus
EVSQDLFNQFNLFAQYSAAAYCGKNNRAPAGTKITCTANACPEVEKADATVLYSFEDSGVGDVTGFLARDNTNKLIVLSFRGSRSIENWIGNLNFELEEINDICSGCRGHAGFTSSWRSVADTLRQKVEDAVREHPDYRVVFTGHSLGGALATVAGADLRGNKYDIDVFSYGAPRVGNRAFAEFLTVQTGGTLYRITHTNDIVPRLPPREFGYSHSSPEYWIKSGTLVPVRRRDIVKIEGIDATGGNNQPNIPSITAHLWYFGLIGTCL

SEQ ID NO: 8578 - protein, 269 aa, Thermomyces lanuginosus
EYSQDLFNQFNLFAQYSAAAYCGKNNRAPAGTKITCTANACPEVEKADATILYSFEDSGVGDVTGFLALDNTNKLIVLSFRGSRSIENWIGNLNFELKEINDICSGCRGHAGFTSSWRSVADTLRQKVEDAVREHPDYRVVFTGHSLGGALATVAGADLRGNKYDIDVFSYGAPRVGNRAFAEFLTVQTGGTLYRITYTNDIVPRLPPREFGYSHSSPEYWIKSGTLVPVRRRDIVKIEGIDATGGNNQPNIPSITAHLWYFGLIGTCL

SEQ ID NO: 8579 - protein, 269 aa, Thermomyces lanuginosus
EVSQDLFNQFNLFAQYSAAAYCGKNNRAPAGTNITCTANACPEVEKADATLLYSFEDSGVGDVTGFLARDNTNKLIVLSFRGSRSIENWIGNLNFELEEINDICSGCRGHAGFTSSWRSVADTLRQKVEDAVREHPDYRVVFTGHSLGGALATVAGADLRGNKYDIDVFSYGAPRVGNRAFAEFLTVQTGGTLYRITHTNDIVPRLPPRKFGYSHSSPEYWIKSGTLVPVRRRDIVKIEGIDATGGNNQPNIPSITAHLWYFGLIGTCL

SEQ ID NO: 8580 - protein, 269 aa, Thermomyces lanuginosus
EVSQDLFNQFNLFAQYSAAAYCGKNNRAPAGTKITCTANACPEVEKADATVLYSFEDSGVGDVTGFLALDNTNKLIVLSFRGSRSIENWIGNLNFELIEINDICSGCRGHAGFTSSWRSVADTLRQKVEDAVREHPDYRVVFTGHSLGGALATVAGADLRGNKYDIDVFSYGAPRVGNRAFAEFLTVQTGGTLYRITHTNDIVPRLPPREFGYSHSSPEFWIKSGTLVPVRRRDIVKIEGIDATGGNNQPNIPSITAHLWYFGLIGTCL

SEQ ID NO: 8581 - protein, 269 aa, Thermomyces lanuginosus
EVSQDLFNQFNLFAQYSAAAYCGKNNRAPAGTNITCTANACPEVEKADATVLYSFEDSGVGDVTGFLALDNTNKLIVLSFRGSRSIENWIGNLNFELEEINDICSGCRGHAGFTSSWRSVADTLRQKVEDAVREHPDYRVVFTGHSLGGALATVAGADLRGNKYDIDVFSYGAPRVGNRAFAEFLTVQTGGTLYRITHTNDIVPRLPPRKFGYSHSSPEYWIKSGTLVPVRRRDIVKIEGIDATGGNNQPNIPSGTAHLWYFGLIGTCL

SEQ ID NO: 8582 - protein, 269 aa, Thermomyces lanuginosus
EKSQDLFNQFNLFAQYSAAAYCGKNNRAPAGTKITCTANACPEVEKADATILYSFEDSGVGDVTGFLALDNTNKLIVLSFRGSRSIENWIGNLNFELKEINDICSGCRGHAGFTSSWRSVADTLRQKVEDAVREHPDYRVVFTGHSLGGALATVAGADLRGNKYDIDVFSYGAPRVGNRAFAEFLTVQTGGTLYRITHTNDIVPRLPPREFGYSHSSPEYWIKSGTLVPVRRRDIVKIEGIDATGGNNQPNIPSGTAHLWYFGLIGTCL

SEQ ID NO: 8583 - protein, 269 aa, Thermomyces lanuginosus
EYSQDLFNQFNLFAQYSAAAYCGKNNRAPAGTKITCTANACPEVEKADATVLYSFEDSGVGDVTGFLALDNTNKLIVLSFRGSRSIENWIGNLNFELKEINDICSGCRGHAGFTSSWRSVADTLRQKVEDAVREHPDYRVVFTGHSLGGALATVAGADLRGNKYDIDVFSYGAPRVGNRAFAEFLTVQTGGTLYRITHTNDIVPRLPPREFGYSHSSPEYWIKIGTLVPVRRRDIVKIEGIDATGGNNQPNIPSITAHLWYFGLIGTCL

SEQ ID NO: 8584 - protein, 269 aa, Thermomyces lanuginosus
EVSQDLFNQFNLFAQYSAAAYCGKNNRAPAGTNITCTANACPEVEKADATVLYSFEDSGVGDVTGFLARDNTNKLIVLSFRGSRSIENWIGNLNFELEEINDICSGCRGHAGFTSSWRSVADTLRQKVEDAVREHPDYRVVFTGHSLGGALATVAGADLRGNKYDIDVFSYGAPRVGNRAFAEFLTVQTGGTLYRITHTNDIVPRLPPRKFGYSHSSPEYWIKSGTLVPVRRRDIVKIEGIDATGGNNQPNIPSITAHLWYFGLIGTCL

SEQ ID NO: 8585 - protein, 269 aa, Thermomyces lanuginosus
EKSQDLFNQFNLFAQYSAAAYCGKNNRAPAGTKITCTANACPEVEKADATLLYSFEDSGVGDVTGFLALDNTNKLIVLSFRGSRSIENWIGNLNFELKEINDICSGCRGHAGFTSSWRSVADTLRQKVEDAVREHPDYRVVFTGHSLGGALATVAGADLRGNKYDIDVFSYGAPRVGNRAFAEFLTVQTGGTLYRITNTNDIVPRLPPREFGYSHSSPEYWIKSGTLVPVRRRDIVKIEGIDATGGNNQPNIPSITAHLWYFGLIGTCL

SEQ ID NO: 8586 - protein, 269 aa, Thermomyces lanuginosus
EVSQDLFNQFNLFAQYSAAAYCGKNNRAPAGTQITCKGNACPEVEKADATFLYSFEDSGVGDVTGFLALDITNKLIVLSFRGSRSIENWINNLRFDLIEINDICSGCRGHAGFTSSWRSVADTLRQKVEDAVREHPDYRVVFTGHSLGGALATVAGADLRGNGYDIDVFSYGAPRVGNRAFAEFLTVQTGGTLYRITHTNDIVPRLPPREFGYSHPSPEYWIKSGTGVPVRRRDIVKIEGIDATGGNNQPNIPDITAHLWYFGLIGTCL

SEQ ID NO: 8587 - protein, 269 aa, Thermomyces lanuginosus
EYSQDLFNQFNLFAQYSAAAYCGKNNRAPAGTKITCTANACPEVEKADATVLYSFEDSGVGDVTGFLALDNTNKLIVLSFRGSRSIENWIGNLNFELKEINDICSGCRGHAGFTSSWRSVADTLRQKVEDAVREHPDYRVVFTGHSLGGALATVAGADLRGNKYDIDVFSYGAPRVGNRAFAEFLTVQTGGTLYRITHTNDIVPRLPPREFGYSHSSPEYWIKSGTLVPRRRRDIVKIEGIDATGGNNQPNIPSITAHLWYFGLIGTCL

SEQ ID NO: 8588 - protein, 269 aa, Thermomyces lanuginosus
EYSQDLFNQFNLFAQYSAAAYCGKNNRAPAGTKITCTANACPEVEKADATVLYSFEDSGVGDVTGFLALDNTNKLIVLSFRGSRSIENWIGNLNFELKEINDICSGCRGHAGFTSSWRSVADTLRQKVEDAVREHPDYRVVFTGHSLGGALATVAGADLRGNKYDIDVFSYGAPRVGNRAFAEFLTVQTGGTLYRITHTNDIVPRLPPREFGYSHSSPEYWIKPGTLVPVRRRDIVKIEGIDATGGNNQPNIPSITAHLWYFGLIGTCL

SEQ ID NO: 8589 - protein, 269 aa, Thermomyces lanuginosus
EKSQDLFNQFNLFAQYSAAAYCGKNNRAPAGTKITCTANACPEVEKADATVLYSFEDSGVGDVTGFLALDNTNKLIVLSFRGSRSIENWIGNLNFELKEINDICSGCRGHAGFTSSWRSVADTLRQKVEDAVREHPDYRVVFTGHSLGGALATVAGADLRGNKYDIDVFSYGAPRVGNRAFAEFLTVQTGGTLYRITHTNDIVPRLPPREFGYSHSSPEYWIKFGTLVPVRRRDIVKIEGIDATGGNNQPNIPSITAHLWYFGLIGTCL

SEQ ID NO: 8590 - protein, 269 aa, Thermomyces lanuginosus
EVSQDLFNQFNLFAQYSAAAYCGKNNRAPAGTNITCTANACPEVEKADATFLYSFEDSGVGDVTGFLALDNTNKLIVLSFRGSRSIANWILDLNFDPEEINDICSGCRGHAGFTSSWRSVADTLRQKVEDAVREHPDYRVVFTGHSLGGALATVAGADLRGNKYDIDVFSYGAPRVGNRAFAEFLTVQTGGTLYRITHTNDIVPRLPPREFGYSHSSPEYWIKSGTLVPVRRRDIVKIEGIDATGGNNQPNIPSITAHLWYFGLIGTCL

SEQ ID NO: 8591 - protein, 269 aa, Thermomyces lanuginosus
EKSQDLFNQFNLFAQYSAAAYCGKNNRAPAGTKITCTANACPEVEKADATVLYSFEDSGVGDVTGFLALDNTNKLIVLSFRGSRSIENWIGNLNFELKEINDICSGCRGHAGFTSSWRSVADTLRQKVEDAVREHPDYRVVFTGHSLGGALATVAGADLRGNKYDIDVFSYGAPRVGNRAFAEFLTVQTGGTLYRITYTNDIVPRLPPREFGYSHSSPEYWIKSGTLVPVRRRDIVKIEGIDATGGNNQPNIPSITAHLWYFGLIGTCL

SEQ ID NO: 8592 - protein, 269 aa, Thermomyces lanuginosus
EVSQDLFNQFNLFAQYSAAAYCGKNNRAPAGTNITCTANACPEVEKADATFLYSFEDSGVGDVTGFLALDNTNKLIVLSFRGTRSPENWILDLNFLLKEINDICSGCRGHAGFTSSWRSVADTLRQKVEDAVREHPDYRVVFTGHSLGGALATVAGADLRGNKYDIDVFSYGAPRVGNRAFAEFLTVQTGGTLYRITHTNDIVPRLPPREFGYSHSSPEYWIKSGTLVPVRRRDIVKIEGIDATGGNNQPNIPSITAHLWYFGLIGTCL

SEQ ID NO: 8593 - protein, 269 aa, Thermomyces lanuginosus
EYSQDLFNQFNLFAQYSAAAYCGKNNRAPAGTKITCTANACPEVEKADATLLYSFEDSGVGDVTGFLALDNTNKLIVLSFRGSRSIENWIGNLNFELKEINDICSGCRGHAGFTSSWRSVADTLRQKVEDAVREHPDYRVVFTGHSLGGALATVAGADLRGNKYDIDVFSYGAPRVGNRAFAEFLTVQTGGTLYRITHTNDIVPRLPPREFGYSHSSPEYWIKSGTLVPVRRRDIVKIEGIDATGGNNQPNIPSITVHLWYFGLIGTCL

SEQ ID NO: 8594 - protein, 269 aa, Thermomyces lanuginosus
EKSQDLFNQFNLFAQYSAAAYCGKNNRAPAGTKITCTANACPEVEKADATILYSFEDSGVGDVTGFLALDNTNKLIVLSFRGSRSIENWIGNLNFELKEINDICSGCRGHAGFTSSWRSVADTLRQKVEDAVREHPDYRVVFTGHSLGGALATVAGADLRGNKYDIDVFSYGAPRVGNRAFAEFLTVQTGGTLYRITITNDIVPRLPPREFGYSHSSPEYWIKSGTLVPVRRRDIVKIEGIDATGGNNQPNIPSITAHLWYFGLIGTCL

SEQ ID NO: 8595 - protein, 269 aa, Thermomyces lanuginosus
EKSQDLFNQFNLFAQYSAAAYCGKNNRAPAGTKITCTANACPEVEKADATLLYSFEDSGVGDVTGFLALDNTNKLIVLSFRGSRSIENWIGNLNFELKEINDICSGCRGHAGFTSSWRSVADTLRQKVEDAVREHPDYRVVFTGHSLGGALATVAGADLRGNKYDIDVFSYGAPRVGNRAFAEFLTVQTGGTLYRITHTNDIVPRLPPREFGYSHSSPEYWIKIGTLVPVRRRDIVKIEGIDATGGNNQPNIPSITAHLWYFGLIGTCL

SEQ ID NO: 8596 - protein, 269 aa, Thermomyces lanuginosus
EVSQDLFNQFNLFAQYSAAAYCGKNNRAPVGTQITCTGNACPEVEKADATFLYSFEDSGVGDVTGFLALDNTNKLIVLSFRGSRSIENWINNLRFDLKEINDICSGCRAHAGFTSSWRSVADTLRQKVEDAVREHPDYRVVFTGHSLGGALATVAGADLRGNGYDIDVFSYGAPRVGNRAFAEFLTVQTDGTLYRITHTNDIVPRLPPREFGYSHPSPEYWIKSGTGVPVRRRDIVKIEGIDATGGNNQPNIPDITAHLWYFGLIGTCL

SEQ ID NO: 8597 - protein, 269 aa, Thermomyces lanuginosus
EYSQDLFNQFNLFAQYSAAAYCGKNNRAPAGTKITCTANACPEVEKADATLLYSFEDSGVGDVTGFLALDNTNKLIVLSFRGSRSIENWIGNLNFELKEINDICSGCRGHAGFTSSWRSVADTLRQKVEDAVREHPDYRVVFTGHSLGGALATVAGADLRGNKYDIDVFSYGAPRVGNRAFAEFLTVQTGGTLYRITHTNDIVPRLPPREFGYSHSSPEYWIKPGTLVPVRRRDIVKIEGIDATGGNNQPNIPSITAHLWYFGLIGTCL

SEQ ID NO: 8598 - protein, 269 aa, Thermomyces lanuginosus
EKSQDLFNQFNLFAQYSAAAYCGKNNRAPAGTKITCTANACPEVEKADATILYSFEDSGVGDVTGFLALDNTNKLIVLSFRGSRSIENWIGNLNFELKEINDICSGCRGHAGFTSSWRSVADTLRQKVEDAVREHPDYRVVFTGHSLGGALATVAGADLRGNKYDIDVFSYGAPRVGNRAFAEFLTVQTGGTLYRITHTNDIVPRLPPREFGYSHSSPEYWIKSGTLPPVRRRDIVKIEGIDATGGNNQPNIPSITAHLWYFGLIGTCL

SEQ ID NO: 8599 - protein, 269 aa, Thermomyces lanuginosus
EVSQDLFNQFNLFAQYSAAAYCGKNNRAPAGTNITCTANACPEVEKADATVLYSFEGSGVGDVTGFLALDNTNKLIVLSFRGSRSIENWIGNLNFELKEIDDICSGCRGHAGFTSSWRSVADTLRQKVEDAVREHPDYRVVFTGHSLGGALATVAGADLRGNKYDIDVFSYGAPRVGNRAFAEFLTVQTGGTLYRITHTNDIVPRLPPRKFGYSHSSPEYWIKSGTLVPVRRRDIVKIEGIDATGGNNQPNIPSITAHLWYFGLIGTCL

SEQ ID NO: 8600 - protein, 269 aa, Thermomyces lanuginosus
EVSQDLFNQFNLFAQYSAAAYCGKNNRAPAGTKITCTANACPEVEKADATVLYSFEDSGVGDVTGFLALDNTNKLIVLSFRGSRSIENWIGNLNFELEEIDDICSGCRGHAGFTSSWRSVADTLRQKVEDAVREHPDYRVVFTGHSLGGALATVAGADLRGNPYDIDVFSYGAPRVGNRAFAEFLTVQTGGTLYRITHTNDIVPRLPPREFGYSHSSPEYWIKSGTLVPVRRRDIVKIEGIDATGGNNQPNIPSITAHLWYFGLIGTCL

SEQ ID NO: 8601 - protein, 269 aa, Thermomyces lanuginosus
EKSQDLFNQFNLFAQYSAAAYCGKNNRAPAGTKITCTANACPEVEKADATILYSFEDSGVGDVTGFLALDNTNKLIVLSFRGSRSIENWIGNLNFELKEINDICSGCRGHAGFTSSWRSVADTLRQKVEDAVREHPDYRVVFTGHSLGGALATVAGADLRGNKYDIDVFSYGAPRVGNRAFAEFLTVQTGGTLYRITHTNDIVPRLPPREFGYSHSSPEYWIKSGTDVPVRRRDIVKIEGIDATGGNNQPNIPSITAHLWYFGLIGTCL

SEQ ID NO: 8602 - protein, 269 aa, Thermomyces lanuginosus
EVSQDLFNQFNLFAQYSAAAYCGKNHRAPAGTQITCTGNACPEVEKADATFLYSFEDSGVGDVTGFLALDNTNKLIVLSFRGSRSIENWINNLRFDLKEINDICSGCRGHAGFTSSWRSVADTLRQKVEDAVREHPDYRVVFTGHSLGGALATFAGADLRGNGYDIDVFSYGAPRVGNRAFAEFLTVQTCGTLYRITHTNDIVPRLPPREFGYSHPSPEYWIKSGTGVPVRRRDIVKIEGIDATGGNNQPNIPDITAHLWYFGLIGTCL

SEQ ID NO: 8603 - protein, 269 aa, Thermomyces lanuginosus
EVSQDLFNQFNLFAQYSAAAYCGKNNRAPAGTKITCTANACPEVEKADATVLYTFEDSGVGDVTGFLALDNTNKLIVLSFRGSRSIENWIGNLNFELIEINDICSGCRGHAGFTSSWRSVADTLRQKVEDAVREHPDYRVVFTGHSLGGALATVAGADLRGNKYDIDVFSYGAPRVGNRAFAEFLTVQTGGTLYRITHTNDIVPRLPPREFGYSHSSPEYWIKSGTLVPVRRRDIVKIEGIDATGGNNQPNIPSITAHLWYFGLIGTCL

SEQ ID NO: 8604 - protein, 269 aa, Thermomyces lanuginosus
EVSQDLFNQFNLFAQYSKAAYCQKNNSAEAGTNITCTGNACPEVFKADVTFLYSFEDMGVGDVTGFLALDNTSKQIVLSFRGSRSIENWIGNLNFDLKEINDICSGCKGHDGFTSSWRSVADTLRQKVEDAVREFPDYRVVFTGHSLGGALATVAGADLRGNGYDIDVFSYGAPRVGNRAFAEFLTTQDGGTLYRITHTNDIVPRLPPREFGYSHSSPEYWIKSGTLVPVTRNDIVKIEGIDATGGNNQPNIPDIPAHLWYFGLIGTCL

SEQ ID NO: 8605 - protein, 269 aa, Thermomyces lanuginosus
EYSQDLFNQFNLFAQYSAAAYCGKNNRAPAGTKITCTANACPEVEKADATVLYSFEDSGVGDVTGFLALDNTNKLIVLSFRGSRSIENWIGNLNFELKEINDICSGCRGHAGFTSSWRSVADTLRQKVEDAVREHPDYRVVFTGHSLGGALATVAGADLRGNKYDIDVFSYGAPRVGNRAFAEFLTVQTGGTLYRITHTNDIVPRLPPREFGYSHSSPEYWIKSGTLVPVRRRDIVKIEGIDATGGNNQPNIPSGTAHLWYFGLIGTCL

SEQ ID NO: 8606 - protein, 269 aa, Thermomyces lanuginosus
EYSQDLFNQFNLFAQYSAAAYCGKNNRAPAGTKITCTANACPEVEKADATVLYSFEDSGVGDVTGFLALDNTNKLIVLSFRGSRSIENWIGNLNFELKEINDICSGCRGHAGFTSSWRSVADTLRQKVEDAVREHPDYRVVFTGHSLGGALATVAGADLRGNKYDIDVFSYGAPRVGNRAFAEFLTVQTGGTLYRITLTNDIVPRLPPREFGYSHSSPEYWIKSGTLVPVRRRDIVKIEGIDATGGNNQPNIPSITAHLWYFGLIGTCL

SEQ ID NO: 8607 - protein, 269 aa, Thermomyces lanuginosus
EYSQDLFNQFNLFAQYSAAAYCGKNNRAPAGTKITCTANACPEVEKADATILYSFEDSGVGDVTGFLALDNTNKLIVLSFRGSRSIENWIGNLNFELKEINDICSGCRGHAGFTSSWRSVADTLRQKVEDAVREHPDYRVVFTGHSLGGALATVAGADLRGNKYDIDVFSYGAPRVGNRAFAEFLTVQTGGTLYRITHTNDIVPRLPPREFGYSHSSPEYWIKSGTLVPVRRRDIVKIEGIDATGGNNQPNIPSITVHLWYFGLIGTCL

SEQ ID NO: 8608 - protein, 269 aa, Thermomyces lanuginosus
EKSQDLFNQFNLFAQYSAAAYCGKNNRAPAGTKITCTANACPEVEKADATLLYSFEDSGVGDVTGFLALDNTNKLIVLSFRGSRSIENWIGNLNFELKEINDICSGCRGHAGFTSSWRSVADTLRQKVEDAVREHPDYRVVFTGHSLGGALATVAGADLRGNKYDIDVFSYGAPRVGNRAFAEFLTVQTGGTLYRITLTNDIVPRLPPREFGYSHSSPEYWIKSGTLVPVRRRDIVKIEGIDATGGNNQPNIPSITAHLWYFGLIGTCL

SEQ ID NO: 8609 - protein, 269 aa, Thermomyces lanuginosus
EYSQDLFNQFNLFAQYSAAAYCGKNNRAPAGTKITCTANACPEVEKADATLLYSFEDSGVGDVTGFLALDNTNKLIVLSFRGSRSIENWIGNLNFELKEINDICSGCRGHAGFTSSWRSVADTLRQKVEDAVREHPDYRVVFTGHSLGGALATVAGADLRGNKYDIDVFSYGAPRVGNRAFAEFLTVQTGGTLYRITHTNDIVPRLPPREFGYSHSSPEYWIKSGTDVPVRRRDIVKIEGIDATGGNNQPNIPSITAHLWYFGLIGTCL

SEQ ID NO: 8610 - protein, 269 aa, Thermomyces lanuginosus
EYSQDLFNQFNLFAQYSAAAYCGKNNRAPAGTKITCTANACPEVEKADATVLYSFEDSGVGDVTGFLALDNTNKLIVLSFRGSRSIENWIGNLNFELKEINDICSGCRGHAGFTSSWRSVADTLRQKVEDAVREHPDYRVVFTGHSLGGALATVAGADLRGNKYDIDVFSYGAPRVGNRAFAEFLTVQTGGTLYRITHTNDIVPRLPPREFGYSHSSPEYWIKSGTLVPVRRRDIVKIEGIDATGGNNQPNIPSITVHLWYFGLIGTCL

SEQ ID NO: 8611 - protein, 269 aa, Thermomyces lanuginosus
EYSQDLFNQFNLFAQYSAAAYCGKNNRAPAGTKITCTANACPEVEKADATLLYSFEDSGVGDVTGFLALDNTNKLIVLSFRGSRSIENWIGNLNFELKEINDICSGCRGHAGFTSSWRSVADTLRQKVEDAVREHPDYRVVFTGHSLGGALATVAGADLRGNKYDIDVFSYGAPRVGNRAFAEFLTVQTGGTLYRITHTNDIVPRLPPREFGYSHSSPEYWIKSGTLPPVRRRDIVKIEGIDATGGNNQPNIPSITAHLWYFGLIGTCL

SEQ ID NO: 8612 - protein, 269 aa, Thermomyces lanuginosus
EVSQDLFNQFNLFAQYSAAAYCGKNNRAPAGTQITCTGNACPKVEMADATFLYSFEDSGVGDVTGFLALDNTNKLIVLSFRGSRSIENWVNNLNFDLKEINDICSGCRGHAGFISSWRSVADTLRQKVEDAVREHPDYRVVFTGHSLGGALATVAGADLRGNGYDIDVFSYGAPRVGNRAFAEFLTVQTGGTLYRITHTNDIVPRLPPREFGYSHPSPEYWIKSGTGVPVRRRDIVKIEGIDATGGNNQPNIPDITAHLWYFGLIGTCL

SEQ ID NO: 8613 - protein, 269 aa, Thermomyces lanuginosus
EKSQDLFNQFNLFAQYSAAAYCGKNNRAPAGTKITCTANACPEVEKADATVLYSFEDSGVGDVTGFLALDNTNKLIVLSFRGSRSIENWIGNLNFELKEINDICSGCRGHAGFTSSWRSVADTLRQKVEDAVREHPDYRVVFTGHSLGGALATVAGADLRGNKYDIDVFSYGAPRVGNRAFAEFLTVQTGGTLYRITHTNDIVPRLPPREFGYSHSSPEYWIKPGTLVPVRRRDIVKIEGIDATGGNNQPNIPSITAHLWYFGLIGTCL

SEQ ID NO: 8614 - protein, 269 aa, Thermomyces lanuginosus
EKSQDLFNQFNLFAQYSAAAYCGKNNRAPAGTKITCTANACPEVEKADATVLYSFEDSGVGDVTGFLALDNTNKLIVLSFRGSRSIENWIGNLNFELKEINDICSGCRGHAGFTSSWRSVADTLRQKVEDAVREHPDYRVVFTGHSLGGALATVAGADLRGNKYDIDVFSYGAPRVGNRAFAEFLTVQTGGTLYRITHTNDIVPRLPPREFGYSHSSPEYWIKSGTLVPVRRRDIVKIEGIDATGGNNQPNIPSGTAHLWYFGLIGTCL

SEQ ID NO: 8615 - protein, 269 aa, Thermomyces lanuginosus
EKSQDLFNQFNLFAQYSAAAYCGKNNRAPAGTKITCTANACPEVEKADATLLYSFEDSGVGDVTGFLALDNTNKLIVLSFRGSRSIENWIGNLNFELKEINDICSGCRGHAGFTSSWRSVADTLRQKVEDAVREHPDYRVVFTGHSLGGALATVAGADLRGNKYDIDVFSYGAPRVGNRAFAEFLTVQTGGTLYRITSTNDIVPRLPPREFGYSHSSPEYWIKSGTLVPVRRRDIVKIEGIDATGGNNQPNIPSITAHLWYFGLIGTCL

SEQ ID NO: 8616 - protein, 269 aa, Thermomyces lanuginosus
EVSQDLFNQFNLFAQYSAAAYCGKNNRAPAGTKITCTANACPEVEKADATVLYSFEDSGVGDVTGFLALDNTNKLIVLSFRGSRSIENWIGNLNFELEEIDDICSGCRGHAGFTSSWRSVADTLRQKVEDAVREHPDYRVVFTGHSLGGALATVAGADLRGNGYDIDVFSYGAPRVGNRAFAEFLTVQTGGTLYRITHTNDIVPRLPPREFGYSHSSPEFWIKSGTLVPVRRRDIVKIEGIDATGGNNQPNIPSITAHLWYFGLIGTCL

SEQ ID NO: 8617 - protein, 269 aa, Thermomyces lanuginosus
EKSQDLFNQFNLFAQYSAAAYCGKNNRAPAGTKITCTANACPEVEKADATVLYSFEDSGVGDVTGFLALDNTNKLIVLSFRGSRSIENWIGNLNFELKEINDICSGCRGHAGFTSSWRSVADTLRQKVEDAVREHPDYRVVFTGHSLGGALATVAGADLRGNKYDIDVFSYGAPRVGNRAFAEFLTVQTGGTLYRITITNDIVPRLPPREFGYSHSSPEYWIKSGTLVPVRRRDIVKIEGIDATGGNNQPNIPSITAHLWYFGLIGTCL

SEQ ID NO: 8618 - protein, 269 aa, Thermomyces lanuginosus
EVSQDLFNQFNLFAQYSAAAYCGKNNRAPAGTQITCTGNACPEVEKADTTFLYSFEDSGVGDVTGFLALDNTNKLIVLSFRGSRSIENWINNLRFDLKEINDICSGCRGHAGFTSSWRSVADTLRQKVEDAVREHPDFRVVFTGHSLGGALATVAGADLRGNRYDIDVFSYGAPRVGNRAFAEFLTVQTGGTLYRITHTNDIVPRLPPREFGYSHPSPEYWIKSGTGVPVRRRDIVKIEGIDATGGNNQPNIPDITAHLWYFGLIGTCL

SEQ ID NO: 8619 - protein, 269 aa, Thermomyces lanuginosus
EYSQDLFNQFNLFAQYSAAAYCGKNNRAPAGTKITCTANACPEVEKADATLLYSFEDSGVGDVTGFLALDNTNKLIVLSFRGSRSIENWIGNLNFELKEINDICSGCRGHAGFTSSWRSVADTLRQKVEDAVREHPDYRVVFTGHSLGGALATVAGADLRGNKYDIDVFSYGAPRVGNRAFAEFLTVQTGGTLYRITHTNDIVPRLPPREFGYSHSSPEYWIKSGTLVPVRRRDIVKIEGIDATGGNNQPNIPSITIHLWYFGLIGTCL

SEQ ID NO: 8620 - protein, 269 aa, Thermomyces lanuginosus
EKSQDLFNQFNLFAQYSAAAYCGKNNRAPAGTKITCTANACPEVEKADATILYSFEDSGVGDVTGFLALDNTNKLIVLSFRGSRSIENWIGNLNFELKEINDICSGCRGHAGFTSSWRSVADTLRQKVEDAVREHPDYRVVFTGHSLGGALATVAGADLRGNKYDIDVFSYGAPRVGNRAFAEFLTVQTGGTLYRITNTNDIVPRLPPREFGYSHSSPEYWIKSGTLVPVRRRDIVKIEGIDATGGNNQPNIPSITAHLWYFGLIGTCL

SEQ ID NO: 8621 - protein, 269 aa, Thermomyces lanuginosus
EYSQDLFNQFNLFAQYSAAAYCGKNNRAPAGTKITCTANACPEVEKADATLLYSFEDSGVGDVTGFLALDNTNKLIVLSFRGSRSIENWIGNLNFELKEINDICSGCRGHAGFTSSWRSVADTLRQKVEDAVREHPDYRVVFTGHSLGGALATVAGADLRGNKYDIDVFSYGAPRVGNRAFAEFLTVQTGGTLYRITSTNDIVPRLPPREFGYSHSSPEYWIKSGTLVPVRRRDIVKIEGIDATGGNNQPNIPSITAHLWYFGLIGTCL

SEQ ID NO: 8622 - protein, 269 aa, Thermomyces lanuginosus
EVSQDLFNQFNLFAQYSAAAYCGKNNRAPAGTNITCTANACPEVEKADATFLYTFEDSGVGDVTGFLALDNTNKLIVLSFRGSRSIENWIGNLNFELTEINDICSGCRGHAGFTSSWRSVADTLRQKVEDAVREHPDYRVVFTGHSLGGALATVAGADLRGNPYDIDVFSYGAPRLGNRAFAEFLTVQTGGTLYRITHTNDIVPRLPPREFGYSHSSPEYWIKSGTLVPVRRRDIVKIEGIDATGGNNQPNIPSITAHLYYFGLIGTCL

SEQ ID NO: 8623 - protein, 269 aa, Thermomyces lanuginosus
EVSQDLFNQFNLFAQYSAAAYCGKNNRAPAGTNITCTANACPEVEKADATVLYSFKDSGVGDVTGFLARDNTNKLIVLSFRGSRSIENWIGNLNFELEEINDICSGCRGHAGFTSSWRSVADTLRQKVEDAVREHPDYRVVFTGHSLGGALATVAGADLRGNKYDIDVFSYGAPRVGNRAFAEFLTVQTGGTLYRITHTNDIVPRLPPREFGYSHSSPEYWIKSGTLVPVRRRDIVKIEGIDATGGNNQPNIPSITAHLWYFGLIGTCL

SEQ ID NO: 8624 - protein, 269 aa, Thermomyces lanuginosus
EKSQDLFNQFNLFAQYSAAAYCGKNNRAPAGTKITCTANACPEVEKADATVLYSFEDSGVGDVTGFLALDNTNKLIVLSFRGSRSIENWIGNLNFELKEINDICSGCRGHAGFTSSWRSVADTLRQKVEDAVREHPDYRVVFTGHSLGGALATVAGADLRGNKYDIDVFSYGAPRVGNRAFAEFLTVQTGGTLYRITHTNDIVPRLPPREFGYSHSSPEYWIKIGTLVPVRRRDIVKIEGIDATGGNNQPNIPSITAHLWYFGLIGTCL

SEQ ID NO: 8625 - protein, 269 aa, Thermomyces lanuginosus
EKSQDLFNQFNLFAQYSAAAYCGKNNRAPAGTKITCTANACPEVEKADATVLYSFEDSGVGDVTGFLALDNTNKLIVLSFRGSRSIENWIGNLNFELKEINDICSGCRGHAGFTSSWRSVADTLRQKVEDAVREHPDYRVVFAGHSLGGALATVAGADLRGNKYDIDVFSYGAPRVGNRAFAEFLTVQTGGTLYRITHTNDIVPRLPPREFGYSHSSPEYWIKSGTLVPVRRRDIVKIEGIDATGGNNQPNIPSITAHLWYFGLIGTCL

SEQ ID NO: 8626 - protein, 269 aa, Thermomyces lanuginosus
EVSQDLFNQFNLFAQYSAAAYCGKNNRAPAGTPITCTANACPEVEKADATVLYSFEGSGVGDVTGFLALDNTNKLIVLSFRGSRSIENWIGNLNFELKEINDICSGCRGHAGFTSSWRSVADTLRQKVEDAVREHPDYRVVFTGHSLGGALATVAGADLRGNKYDIDVFSYGAPRVGNRAFAEFLTVQTGGTLYRITHTNDIVPRLPPRKFGYSHSSPEYWIKSGTLVPVRRRDIVKIEGIDATGGNNQPNIPSITAHLWYFGLIGTCL

SEQ ID NO: 8627 - protein, 269 aa, Thermomyces lanuginosus
EYSQDLFNQFNLFAQYSAAAYCGKNNRAPAGTKITCTANACPEVEKADATILYSFEDSGVGDVTGFLALDNTNKLIVLSFRGSRSIENWIGNLNFELKEINDICSGCRGHAGFTSSWRSVADTLRQKVEDAVREHPDYRVVFTGHSLGGALATVAGADLRGNKYDIDVFSYGAPRVGNRAFAEFLTVQTGGTLYRITHTNDIVPRLPPREFGYSHSSPEYWIKSGTLVPRRRRDIVKIEGIDATGGNNQPNIPSITAHLWYFGLIGTCL

SEQ ID NO: 8628 - protein, 269 aa, Thermomyces lanuginosus
EYSQDLFNQFNLFAQYSAAAYCGKNNRAPAGTKITCTANACPEVEKADATLLYSFEDSGVGDVTGFLALDNTNKLIVLSFRGSRSIENWIGNLNFELKEINDICSGCRGHAGFTSSWRSVADTLRQKVEDAVREHPDYRVVFAGHSLGGALATVAGADLRGNKYDIDVFSYGAPRVGNRAFAEFLTVQTGGTLYRITHTNDIVPRLPPREFGYSHSSPEYWIKSGTLVPVRRRDIVKIEGIDATGGNNQPNIPSITAHLWYFGLIGTCL

SEQ ID NO: 8629 - protein, 269 aa, Thermomyces lanuginosus
EYSQDLFNQFNLFAQYSAAAYCGKNNRAPAGTKITCTANACPEVEKADATVLYSFEDSGVGDVTGFLALDNTNKLIVLSFRGSRSIENWIGNLNFELKEINDICSGCRGHAGFTSSWRSVADTLRQKVEDAVREHPDYRVVFTGHSLGGGLATVAGADLRGNKYDIDVFSYGAPRVGNRAFAEFLTVQTGGTLYRITHTNDIVPRLPPREFGYSHSSPEYWIKSGTLVPVRRRDIVKIEGIDATGGNNQPNIPSITAHLWYFGLIGTCL

SEQ ID NO: 8630 - protein, 269 aa, Thermomyces lanuginosus
EYSQDLFNQFNLFAQYSAAAYCGKNNRAPAGTKITCTANACPEVEKADATILYSFEDSGVGDVTGFLALDNTNKLIVLSFRGSRSIENWIGNLNFELKEINDICSGCRGHAGFTSSWRSVADTLRQKVEDAVREHPDYRVVFTGHSLGGALATVAGADLRGNKYDIDVFSYGAPRVGNRAFAEFLTVQTGGTLYRITHTNDIVPRLPPREFGYSHSSPEYWIKSGTLVPVRRRDIVKIEGIDATGGNNQPNIPSITIHLWYFGLIGTCL

SEQ ID NO: 8631 - protein, 269 aa, Thermomyces lanuginosus
EKSQDLFNQFNLFAQYSAAAYCGKNNRAPAGTKITCTANACPEVEKADATVLYSFEDSGVGDVTGFLALDNTNKLIVLSFRGSRSIENWIGNLNFELKEINDICSGCRGHAGFTSSWRSVADTLRQKVEDAVREHPDYRVVFTGHSLGGALATVAGADLRGNKYDIDVFSYGAPRVGNRAFAEFLTVQTGGTLYRITHTNDIVPRLPPREFGYSHSSPEYWIKSGTDVPVRRRDIVKIEGIDATGGNNQPNIPSITAHLWYFGLIGTCL

SEQ ID NO: 8632 - protein, 269 aa, Thermomyces lanuginosus
EYSQDLFNQFNLFAQYSAAAYCGKNNRAPAGTKITCTANACPEVEKADATILYSFEDSGVGDVTGFLALDNTNKLIVLSFRGSRSIENWIGNLNFELKEINDICSGCRGHAGFTSSWRSVADTLRQKVEDAVREHPDYRVVFTGHSLGGALATVAGADLRGNKYDIDVFSYGAPRVGNRAFAEFLTVQTGGTLYRITHTNDIVPRLPPREFGYSHSSPEYWIKSGTDVPVRRRDIVKIEGIDATGGNNQPNIPSITAHLWYFGLIGTCL

SEQ ID NO: 8633 - protein, 269 aa, Thermomyces lanuginosus
EYSQDLFNQFNLFAQYSAAAYCGKNNRAPAGTKITCTANACPEVEKADATLLYSFEDSGVGDVTGFLALDNTNKLIVLSFRGSRSIENWIGNLNFELKEINDICSGCRGHAGFTSSWRSVADTLRQKVEDAVREHPDYRVVFTGHSLGGALATVAGADLRGNKYDIDVFSYGAPRVGNRAFAEFLTVQTGGTLYRITITNDIVPRLPPREFGYSHSSPEYWIKSGTLVPVRRRDIVKIEGIDATGGNNQPNIPSITAHLWYFGLIGTCL

SEQ ID NO: 8634 - protein, 269 aa, Thermomyces lanuginosus
EKSQDLFNQFNLFAQYSAAAYCGKNNRAPAGTKITCTANACPEVEKADATLLYSFEDSGVGDVTGFLALDNTNKLIVLSFRGSRSIENWIGNLNFELKEINDICSGCRGHAGFTSSWRSVADTLRQKVEDAVREHPDYRVVFTGHSLGGALATVAGADLRGNKYDIDVFSYGAPRVGNRAFAEFLTVQTGGTLYRITITNDIVPRLPPREFGYSHSSPEYWIKSGTLVPVRRRDIVKIEGIDATGGNNQPNIPSITAHLWYFGLIGTCL

SEQ ID NO: 8635 - protein, 269 aa, Thermomyces lanuginosus
EVSQDLFNQFNLFAQYSAAAYCGKNNRAPAGTNITCTANACPEVEKADATFLYTFEDSGVGDVTGFLALDNTNKLIVLSFRGSRSIENWIGNLNFELTEIDDICSGCRGHAGFTSSWRSVADTLRQKVEDAVREHPDYRVVFTGHSLGGALATVAGADLRGNPYDIDVFSYGAPRLGNRAFAEFLTVQTGGTLYRITHTNDIVPRLPPREFGYSHSSPEYWIKSGTLVPVRRRDIVKIEGIDATGGNNQPNIPSITAHLWYFGLIGTCL

SEQ ID NO: 8636 - protein, 269 aa, Thermomyces lanuginosus
EKSQDLFNQFNLFAQYSAAAYCGKNNRAPAGTKITCTANACPEVEKADATLLYSFEDSGVGDVTGFLALDNTNKLIVLSFRGSRSIENWIGNLNFELKEINDICSGCRGHAGFTSSWRSVADTLRQKVEDAVREHPDYRVVFTGHSLGGALATVAGADLRGNKYDIDVFSYGAPRVGNRAFAEFLTVQTGGTLYRITYTNDIVPRLPPREFGYSHSSPEYWIKSGTLVPVRRRDIVKIEGIDATGGNNQPNIPSITAHLWYFGLIGTCL

SEQ ID NO: 8637 - protein, 269 aa, Thermomyces lanuginosus
EKSQDLFNQFNLFAQYSAAAYCGKNNRAPAGTKITCTANACPEVEKADATILYSFEDSGVGDVTGFLALDNTNKLIVLSFRGSRSIENWIGNLNFELKEINDICSGCRGHAGFTSSWRSVADTLRQKVEDAVREHPDYRVVFTGHSLGGALATVAGADLRGNKYDIDVFSYGAPRVGNRAFAEFLTVQTGGTLYRITLTNDIVPRLPPREFGYSHSSPEYWIKSGTLVPVRRRDIVKIEGIDATGGNNQPNIPSITAHLWYFGLIGTCL

SEQ ID NO: 8638 - protein, 269 aa, Thermomyces lanuginosus
EYSQDLFNQFNLFAQYSAAAYCGKNNRAPAGTKITCTANACPEVEKADATVLYSFEDSGVGDVTGFLALDNTNKLIVLSFRGSRSIENWIGNLNFELKEINDICSGCRGHAGFTSSWRSVADTLRQKVEDAVREHPDYRVVFAGHSLGGALATVAGADLRGNKYDIDVFSYGAPRVGNRAFAEFLTVQTGGTLYRITHTNDIVPRLPPREFGYSHSSPEYWIKSGTLVPVRRRDIVKIEGIDATGGNNQPNIPSITAHLWYFGLIGTCL

SEQ ID NO: 8639 - protein, 269 aa, Thermomyces lanuginosus
EYSQDLFNQFNLFAQYSAAAYCGKNNRAPAGTNITCTANACPEVEKADATFLYTFEDSGVGDVTGFLALDNTNKLIVLSFRGSRSIENWIGNLNFELEEIDDICSGCRGHAGFTSSWRSVADTLRQKVEDAVREHPDYRVVFTGHSLGGALATVAGADLRGNPYDIDVFSYGAPRVGNRAFAEFLTVQTGGTLYRITHTNDIVPRLPPREFGYSHSSPEYWIKSGTLVPVRRRDIVKIEGIDATGGNNQPNIPSITAHLWYFGLIGTCL

SEQ ID NO: 8640 - protein, 269 aa, Thermomyces lanuginosus
EVSQDLFNQFNLFAQYSAAAYCGKNNDAPAGTKITCTGNACPEVEKADATILYSFEDSGVGDVTGFLALDNTNKLIVLSFRGSRSIENWIGNLNFDLKEINDICSGCRGHDGFTSSWRSVADTLRQKVEDAVREHPDYRVVFTGHSLGGALATVAGADLRGNNYSIDVFSYGAPRVGNRAFAEFLTVQTGGTLYRITNTNDCVPRLPPRQFGYSHSSPEYWIKSGTLPPVRRRDIVKCEGIDATCGNNQPNICDIPAHLWYFGLIGTCL

SEQ ID NO: 8641 - protein, 269 aa, Thermomyces lanuginosus
EKSQDLFNQFNLFAQYSAAAYCGKNNRAPAGTKITCTANACPEVEKADATVLYSFEDSGVGDVTGFLALDNTNKLIVLSFRGSRSIENWIGNLNFELKEINDICSGCRGHAGFTSSWRSVADTLRQKVEDAVREHPDYRVVFTGHSLGGALATVAGADLRGNKYDIDVFSYGAPRVGNRAFAEFLTVQTGGTLYRITLTNDIVPRLPPREFGYSHSSPEYWIKSGTLVPVRRRDIVKIEGIDATGGNNQPNIPSITAHLWYFGLIGTCL

SEQ ID NO: 8642 - protein, 269 aa, Thermomyces lanuginosus
EYSQDLFNQFNLFAQYSAAAYCGKNNRAPAGTKITCTANACPEVEKADATILYSFEDSGVGDVTGFLALDNTNKLIVLSFRGSRSIENWIGNLNFELKEINDICSGCRGHAGFTSSWRSVADTLRQKVEDAVREHPDYRVVFTGHSLGGALATVAGADLRGNKYDIDVFSYGAPRVGNRAFAEFLTVQTGGTLYRITLTNDIVPRLPPREFGYSHSSPEYWIKSGTLVPVRRRDIVKIEGIDATGGNNQPNIPSITAHLWYFGLIGTCL

SEQ ID NO: 8643 - protein, 269 aa, Thermomyces lanuginosus
EKSQDLFNQFNLFAQYSAAAYCGKNNRAPAGTKITCTANACPEVEKADATLLYSFEDSGVGDVTGFLALDNTNKLIVLSFRGSRSIENWIGNLNFELKEINDICSGCRGHAGFTSSWRSVADTLRQKVEDAVREHPDYRVVFTGHSLGGALATVAGADLRGNKYDIDVFSYGAPRVGNRAFAEFLTVQTGGTLYRITHTNDIVPRLPPREFGYSHSSPEYWIKSGTLVPRRRRDIVKIEGIDATGGNNQPNIPSITAHLWYFGLIGTCL

SEQ ID NO: 8644 - protein, 269 aa, Thermomyces lanuginosus
EYSQDLFNQFNLFAQYSAAAYCGKNNRAPAGTKITCTANACPEVEKADATVLYSFEDSGVGDVTGFLALDNTNKLIVLSFRGSRSIENWIGNLNFELKEINDICSGCRGHAGFTSSWRSVADTLRQKVEDAVREHPDYRVVFTGHSLGGALATVAGADLRGNKYDIDVFSYGAPRVGNRAFAEFLTVQTGGTLYRITHTNDIVPRLPPREFGYSHSSPEYWIKSGTLPPVRRRDIVKIEGIDATGGNNQPNIPSITAHLWYFGLIGTCL

SEQ ID NO: 8645 - protein, 269 aa, Thermomyces lanuginosus
EKSQDLFNQFNLFAQYSAAAYCGKNNRAPAGTKITCTANACPEVEKADATLLYSFEDSGVGDVTGFLALDNTNKLIVLSFRGSRSIENWIGNLNFELKEINDICSGCRGHAGFTSSWRSVADTLRQKVEDAVREHPDYRVVFTGHSLGGALATVAGADLRGNKYDIDVFSYGAPRVGNRAFAEFLTVQTGGTLYRITHTNDIVPRLPPREFGYSHSSPEYWIKFGTLVPVRRRDIVKIEGIDATGGNNQPNIPSITAHLWYFGLIGTCL

SEQ ID NO: 8646 - protein, 269 aa, Thermomyces lanuginosus
EVSRDLFNQFNLFAQYSAAAYCGKNNQAPAGTQITCTGNACPEVEKADATFLYSFEDSGVGDVTGFLALDNTNKLIVLSFRGSRSIENWITNLSFDLKDINDICSGCRGHAGFTSSWRSVADTLRQKVEDAVREHPDYRVVFTGHSLGGALATVAGADLRGNGYDIDVFSYGAPRVGNRAFAEFLTVQTGGTLYRITHTNDIVPRLPPRDFGYSHPSPEYWIKSGTGVPVRRRDIVKIEGIDATGGNNQPNIPDILAHLWYFGLIGTCL

SEQ ID NO: 8647 - protein, 269 aa, Thermomyces lanuginosus
EYSQDLFNQFNLFAQYSAAAYCGKNNRAPAGTKITCTANACPEVEKADATILYSFEDSGVGDVTGFLALDNTNKLIVLSFRGSRSIENWIGNLNFELKEINDICSGCRGHAGFTSSWRSVADTLRQKVEDAVREHPDYRVVFTGHSLGGGLATVAGADLRGNKYDIDVFSYGAPRVGNRAFAEFLTVQTGGTLYRITHTNDIVPRLPPREFGYSHSSPEYWIKSGTLVPVRRRDIVKIEGIDATGGNNQPNIPSITAHLWYFGLIGTCL

SEQ ID NO: 8648 - protein, 269 aa, Thermomyces lanuginosus
EVSQDLFNQFNLFAQYSAAAYCGKNNDAPAGTNITCTGNACPEVEKADATFLYSFEDAGSGDVTGFLALDNTNKLIVLSFRGSRSVENWIGNLNFDLIKINAICSGCRGHDGFTSSWRSVADTLRQKVEDAVREHPDYRVVFSGHSLGGGLATVAGADLRGNGYDIDVFSYGAPRVGNRAFAEFLTVQTGGTLYRITHTNDIVPRLPPREFGYSHSSPEYWIKSGTGVPVRRRDIVKIEGIDATGGNNQPNIPDAKAHLWYFGLIGTCL

SEQ ID NO: 8649 - protein, 269 aa, Thermomyces lanuginosus
EYSQDLFNQFNLFAQYSAAAYCGKNNRAPAGTKITCTANACPEVEKADATVLYSFEDSGVGDVTGFLALDNTNKLIVLSFRGSRSIENWIGNLNFELKEINDICSGCRGHAGFTSSWRSVADTLRQKVEDAVREHPDYRVVFTGHSLGGALATVAGADLRGNKYDIDVFSYGAPRVGNRAFAEFLTVQTGGTLYRITITNDIVPRLPPREFGYSHSSPEYWIKSGTLVPVRRRDIVKIEGIDATGGNNQPNIPSITAHLWYFGLIGTCL

SEQ ID NO: 8650 - protein, 269 aa, Thermomyces lanuginosus
EVSQDLFNQFNLFAQYSAAAYCGKNNRAPAGTNITCTANACPEVEKADATFLYSFEDSGVGDVTGFLALDNTNKLIVLSFRGSRSIENWIGNLNFELKEINDICSGCRGHAGFTSSWRSVADTLRQKVEDAVREHPDYRVVFTGHSLGGALATVAGADLRGNKYDIDVFSYGAPRVGNRAFAEFLTVQTGGTLYRITHTNDIVPRLPPREFGYSHSSPEYWIKSGTLVPVRRRDIVKCEGIDTYGCNNQPNIPSITAHLWYFGLIGTCL

SEQ ID NO: 8651 - protein, 269 aa, Thermomyces lanuginosus
EKSQDLFNQFNLFAQYSAAAYCGKNNRAPAGTKITCTANACPEVEKADATVLYSFEDSGVGDVTGFLALDNTNKLIVLSFRGSRSIENWIGNLNFELKEINDICSGCRGHAGFTSSWRSVADTLRQKVEDAVREHPDYRVVFTGHSLGGGLATVAGADLRGNKYDIDVFSYGAPRVGNRAFAEFLTVQTGGTLYRITHTNDIVPRLPPREFGYSHSSPEYWIKSGTLVPVRRRDIVKIEGIDATGGNNQPNIPSITAHLWYFGLIGTCL

SEQ ID NO: 8652 - protein, 269 aa, Thermomyces lanuginosus
EYSQDLFNQFNLFAQYSAAAYCGKNNRAPAGTKITCTANACPEVEKADATLLYSFEDSGVGDVTGFLALDNTNKLIVLSFRGSRSIENWIGNLNFELKEINDICSGCRGHAGFTSSWRSVADTLRQKVEDAVREHPDYRVVFTGHSLGGALATVAGADLRGNKYDIDVFSYGAPRVGNRAFAEFLTVQTGGTLYRITHTNDIVPRLPPREFGYSHSSPEYWIKSGTLVPVRRRDIVKIEGIDATGGNNQPNIPSGTAHLWYFGLIGTCL

SEQ ID NO: 8653 - protein, 269 aa, Thermomyces lanuginosus
EVSQDLFNQFNLFAQYSAAAYCGKNNRAPAGTNITCTANACPEVEKADATFLYSFEDSGVGDVTGFLALDNTNKLIVLSFRGSRSPENWILKLNFEPKEINDICSGCRGHAGFTSSWRSVADTLRQKVEDAVREHPDYRVVFTGHSLGGALATVAGADLRGNKYDIDVFSYGAPRVGNRAFAEFLTVQTGGTLYRITHTNDIVPRLPPREFGYSHSSPEYWIKSGTLVPVRRRDIVKIEGIDATGGNNQPNIPSITAHLWYFGLIGTCL

SEQ ID NO: 8654 - protein, 269 aa, Thermomyces lanuginosus
EYSQDLFNQFNLFAQYSAAAYCGKNNRAPAGTKITCTANACPEVEKADATVLYSFEDSGVGDVTGFLALDNTNKLIVLSFRGSRSIENWIGNLNFELKEINDICSGCRGHAGFTSSWRSVADTLRQKVEDAVREHPDYRVVFTGHSLGGALATVAGADLRGNKYDIDVFSYGAPRVGNRAFAEFLTVQTGGTLYRITSTNDIVPRLPPREFGYSHSSPEYWIKSGTLVPVRRRDIVKIEGIDATGGNNQPNIPSITAHLWYFGLIGTCL

SEQ ID NO: 8655 - protein, 269 aa, Thermomyces lanuginosus
EKSQDLFNQFNLFAQYSAAAYCGKNNRAPAGTKITCTANACPEVEKADATILYSFEDSGVGDVTGFLALDNTNKLIVLSFRGSRSIENWIGNLNFELKEINDICSGCRGHAGFTSSWRSVADTLRQKVEDAVREHPDYRVVFTGHSLGGALATVAGADLRGNKYDIDVFSYGAPRVGNRAFAEFLTVQTGGTLYRITHTNDIVPRLPPREFGYSHSSPEYWIKFGTLVPVRRRDIVKIEGIDATGGNNQPNIPSITAHLWYFGLIGTCL

SEQ ID NO: 8656 - protein, 269 aa, Thermomyces lanuginosus
EYSQDLFNQFNLFAQYSAAAYCGKNNRAPAGTKITCTANACPEVEKADATILYSFEDSGVGDVTGFLALDNTNKLIVLSFRGSRSIENWIGNLNFELKEINDICSGCRGHAGFTSSWRSVADTLRQKVEDAVREHPDYRVVFTGHSLGGALATVAGADLRGNKYDIDVFSYGAPRVGNRAFAEFLTVQTGGTLYRITHTNDIVPRLPPREFGYSHSSPEYWIKPGTLVPVRRRDIVKIEGIDATGGNNQPNIPSITAHLWYFGLIGTCL

SEQ ID NO: 8657 - protein, 269 aa, Thermomyces lanuginosus
EKSQDLFNQFNLFAQYSAAAYCGKNNRAPAGTKITCTANACPEVEKADATILYSFEDSGVGDVTGFLALDNTNKLIVLSFRGSRSIENWIGNLNFELKEINDICSGCRGHAGFTSSWRSVADTLRQKVEDAVREHPDYRVVFTGHSLGGALATVAGADLRGNKYDIDVFSYGAPRVGNRAFAEFLTVQTGGTLYRITHTNDIVPRLPPREFGYSHSSPEYWIKSGTLVPRRRRDIVKIEGIDATGGNNQPNIPSITAHLWYFGLIGTCL

SEQ ID NO: 8658 - protein, 269 aa, Thermomyces lanuginosus
EKSQDLFNQFNLFAQYSAAAYCGKNNRAPAGTKITCTANACPEVEKADATILYSFEDSGVGDVTGFLALDNTNKLIVLSFRGSRSIENWIGNLNFELKEINDICSGCRGHAGFTSSWRSVADTLRQKVEDAVREHPDYRVVFTGHSLGGGLATVAGADLRGNKYDIDVFSYGAPRVGNRAFAEFLTVQTGGTLYRITHTNDIVPRLPPREFGYSHSSPEYWIKSGTLVPVRRRDIVKIEGIDATGGNNQPNIPSITAHLWYFGLIGTCL

SEQ ID NO: 8659 - protein, 269 aa, Thermomyces lanuginosus
EKSQDLFNQFNLFAQYSAAAYCGKNNRAPAGTKITCTANACPEVEKADATLLYSFEDSGVGDVTGFLALDNTNKLIVLSFRGSRSIENWIGNLNFELKEINDICSGCRGHAGFTSSWRSVADTLRQKVEDAVREHPDYRVVFAGHSLGGALATVAGADLRGNKYDIDVFSYGAPRVGNRAFAEFLTVQTGGTLYRITHTNDIVPRLPPREFGYSHSSPEYWIKSGTLVPVRRRDIVKIEGIDATGGNNQPNIPSITAHLWYFGLIGTCL

SEQ ID NO: 8660 - protein, 269 aa, Thermomyces lanuginosus
EYSQDLFNQFNLFAQYSAAAYCGKNNRAPAGTKITCTANACPEVEKADATILYSFEDSGVGDVTGFLALDNTNKLIVLSFRGSRSIENWIGNLNFELKEINDICSGCRGHAGFTSSWRSVADTLRQKVEDAVREHPDYRVVFTGHSLGGALATVAGADLRGNKYDIDVFSYGAPRVGNRAFAEFLTVQTGGTLYRITHTNDIVPRLPPREFGYSHSSPEYWIKIGTLVPVRRRDIVKIEGIDATGGNNQPNIPSITAHLWYFGLIGTCL

SEQ ID NO: 8661 - protein, 269 aa, Thermomyces lanuginosus
EKSQDLFNQFNLFAQYSAAAYCGKNNRAPAGTKITCTANACPEVEKADATVLYSFEDSGVGDVTGFLALDNTNKLIVLSFRGSRSIENWIGNLNFELKEINDICSGCRGHAGFTSSWRSVADTLRQKVEDAVREHPDYRVVFTGHSLGGALATVAGADLRGNKYDIDVFSYGAPRVGNRAFAEFLTVQTGGTLYRITHTNDIVPRLPPREFGYSHSSPEYWIKSGTLVPRRRRDIVKIEGIDATGGNNQPNIPSITAHLWYFGLIGTCL

SEQ ID NO: 8662 - protein, 269 aa, Thermomyces lanuginosus
EKSQDLFNQFNLFAQYSAAAYCGKNNRAPAGTKITCTANACPEVEKADATLLYSFEDSGVGDVTGFLALDNTNKLIVLSFRGSRSIENWIGNLNFELKEINDICSGCRGHAGFTSSWRSVADTLRQKVEDAVREHPDYRVVFTGHSLGGALATVAGADLRGNKYDIDVFSYGAPRVGNRAFAEFLTVQTGGTLYRITHTNDIVPRLPPREFGYSHSSPEYWIKSGTLVPVRRRDIVKIEGIDATGGNNQPNIPSITVHLWYFGLIGTCL

SEQ ID NO: 8663 - protein, 269 aa, Thermomyces lanuginosus
EVSPDLFNQFNLFAQYSAAAYCGKNNRAPAGTQITCTGNACPEVEKADATFLYSFEDSGVGDVTGFLALDNTNKLIVLSFRGSRSIENWINNLRFDLKEINDICSGCRGHAGFTSSWRSVADTLRQKVEDAVREHPDYRVVFTGHSLGGALATVAGADLRGNGYDIDVFSYGAPRVGNRAFAEFLTVQTGGTLYRITHTNDIVPIFPPREFGYSHPSPEYWIKSGTGVPVRRRDIVKIEGIDATGGNNQPNIPDITAHLWYFGLIGTCL

SEQ ID NO: 8664 - protein, 269 aa, Thermomyces lanuginosus
EYSQDLFNQFNLFAQYSAAAYCGKNNRAPAGTKITCTANACPEVEKADATLLYSFEDSGVGDVTGFLALDNTNKLIVLSFRGSRSIENWIGNLNFELKEINDICSGCRGHAGFTSSWRSVADTLRQKVEDAVREHPDYRVVFTGHSLGGALATVAGADLRGNKYDIDVFSYGAPRVGNRAFAEFLTVQTGGTLYRITHTNDIVPRLPPREFGYSHSSPEYWIKIGTLVPVRRRDIVKIEGIDATGGNNQPNIPSITAHLWYFGLIGTCL

SEQ ID NO: 8665 - protein, 269 aa, Thermomyces lanuginosus
EYSQDLFNQFNLFAQYSAAAYCGKNNRAPAGTKITCTANACPEVEKADATLLYSFEDSGVGDVTGFLALDNTNKLIVLSFRGSRSIENWIGNLNFELKEINDICSGCRGHAGFTSSWRSVADTLRQKVEDAVREHPDYRVVFTGHSLGGALATVAGADLRGNKYDIDVFSYGAPRVGNRAFAEFLTVQTGGTLYRITYTNDIVPRLPPREFGYSHSSPEYWIKSGTLVPVRRRDIVKIEGIDATGGNNQPNIPSITAHLWYFGLIGTCL

SEQ ID NO: 8666 - protein, 269 aa, Thermomyces lanuginosus
EKSQDLFNQFNLFAQYSAAAYCGKNNRAPAGTKITCTANACPEVEKADATILYSFEDSGVGDVTGFLALDNTNKLIVLSFRGSRSIENWIGNLNFELKEINDICSGCRGHAGFTSSWRSVADTLRQKVEDAVREHPDYRVVFTGHSLGGALATVAGADLRGNKYDIDVFSYGAPRVGNRAFAEFLTVQTGGTLYRITHTNDIVPRLPPREFGYSHSSPEYWIKSGTLVPVRRRDIVKIEGIDATGGNNQPNIPSITIHLWYFGLIGTCL

SEQ ID NO: 8667 - protein, 269 aa, Thermomyces lanuginosus
EVSQDLFNQFNLFAQYSAAAYCGKNNRAPAGTNITCTANACPEVEKADATVLYSFKDSGVGDVTGFLALDNTNKLIVLSFRGSRSIKNWIGNLNFELEEINDICSGCRGHAGFTSSWRSVADTLRQKVEDAVREHPDYRVVFTGHSLGGALATVAGADLRGNKYDIDVFSYGAPRVGNRAFAEFLTVQTGGTLYRITHTNDIVPRLPPREFGYSHSSPEYWIKSGTLVPVRRRDIVKIEGIDATGGNNQPNIPSITAHLWYFGLIGTCL

SEQ ID NO: 8668 - protein, 269 aa, Thermomyces lanuginosus
EYSQDLFNQFNLFAQYSAAAYCGKNNRAPAGTKITCTANACPEVEKADATILYSFEDSGVGDVTGFLALDNTNKLIVLSFRGSRSIENWIGNLNFELKEINDICSGCRGHAGFTSSWRSVADTLRQKVEDAVREHPDYRVVFTGHSLGGALATVAGADLRGNKYDIDVFSYGAPRVGNRAFAEFLTVQTGGTLYRITNTNDIVPRLPPREFGYSHSSPEYWIKSGTLVPVRRRDIVKIEGIDATGGNNQPNIPSITAHLWYFGLIGTCL

SEQ ID NO: 8669 - protein, 269 aa, Thermomyces lanuginosus
EKSQDLFNQFNLFAQYSAAAYCGKNNRAPAGTKITCTANACPEVEKADATVLYSFEDSGVGDVTGFLALDNTNKLIVLSFRGSRSIENWIGNLNFELKEINDICSGCRGHAGFTSSWRSVADTLRQKVEDAVREHPDYRVVFTGHSLGGALATVAGADLRGNKYDIDVFSYGAPRVGNRAFAEFLTVQTGGTLYRITHTNDIVPRLPPREFGYSHSSPEYWIKSGTLPPVRRRDIVKIEGIDATGGNNQPNIPSITAHLWYFGLIGTCL

SEQ ID NO: 8670 - protein, 269 aa, Thermomyces lanuginosus
EKSQDLFNQFNLFAQYSAAAYCGKNNRAPAGTKITCTANACPEVEKADATILYSFEDSGVGDVTGFLALDNTNKLIVLSFRGSRSIENWIGNLNFELKEINDICSGCRGHAGFTSSWRSVADTLRQKVEDAVREHPDYRVVFTGHSLGGALATVAGADLRGNKYDIDVFSYGAPRVGNRAFAEFLTVQTGGTLYRITSTNDIVPRLPPREFGYSHSSPEYWIKSGTLVPVRRRDIVKIEGIDATGGNNQPNIPSITAHLWYFGLIGTCL

SEQ ID NO: 8671 - protein, 269 aa, Thermomyces lanuginosus
EVSQDLFNQFNLFAQYSAAAYCGKNNRAPAGTNITCTANACPEVEKADATFLYSFEDSGVGDVTGFLALDNTNKLIVLSFRGSRSIENWLGNLNLELKEINDICSGCRGHAGFTSSWRSVADTLRQKVEDAVREHPDYRVVFTGHSLGGALATVAGADLRGNKYDIDVFSYGAPRVGNRAFAEFLTVQTGGTLYRITHTNDIVPRLPPRELGYSHSSPEYWIKSGTLVPVRRRDIVKIEGIDATGGNNQPNTPSITAHLWYFGLIGTCL

SEQ ID NO: 8672 - protein, 269 aa, Thermomyces lanuginosus
EYSQDLFNQFNLFAQYSAAAYCGKNNRAPAGTKITCTANACPEVEKADATILYSFEDSGVGDVTGFLALDNTNKLIVLSFRGSRSIENWIGNLNFELKEINDICSGCRGHAGFTSSWRSVADTLRQKVEDAVREHPDYRVVFTGHSLGGALATVAGADLRGNKYDIDVFSYGAPRVGNRAFAEFLTVQTGGTLYRITHTNDIVPRLPPREFGYSHSSPEYWIKSGTLPPVRRRDIVKIEGIDATGGNNQPNIPSITAHLWYFGLIGTCL

SEQ ID NO: 8673 - protein, 269 aa, Thermomyces lanuginosus
EVSQDLFNQFNLFAQYSAAAYCGKNNDAPAGTNITCTGNACPEVEKADATFLYSFEDAGVGDVTGFLALDNTNKLIVLSFRGSRSIENWIGNLNFDLKEINDICSGCRGRDGFTSSWRSVADTLRQKVEDAVREHPDYRVVFTGXSLGGALATVAGADLRGNGYDIDVFSYGAPRVGNRAFAEFLTVQTGGTLYRITXTNDIVPRLPPREFGYXXSSPEYWIKSGTLVPVTRNDIVKIEGIDATGGNNQPNIPDIPAHLWYFGLIGTCL

SEQ ID NO: 8674 - protein, 269 aa, Thermomyces lanuginosus
EVSQDLFNQFNLFAQYSAAAYCGKNNRAPAGTNITCTANACPEVEKADATFLYSFEDSGVGDVTGFLALDNTNKLIVLSFRGSRSIENWIADLNFLLQEINDICSGCRGHAGFTSSWRSVADTLRQKVEDAVREHPDYRVVFTGHSLGGALATVAGADLRGNKYDIDVFSYGAPRVGNRAFAEFLTVQTGGTLYRITHTNDIVPRLPPREFGYSHSSPEYWIKSGTLVPVRRRDIVKIEGIDATGGNNQPNIPSITAHLWYFGLIGTCV

SEQ ID NO: 8675 - protein, 269 aa, Thermomyces lanuginosus
EVSQDLFNQFNLFAQYSAAAYCGKNNDAPAGTNITCTGNACPEVEKADATFLYSFEDXGVGDVTGFLALDNTNKLIVLSFRGSRSXENWIGNLNFDLKEINDICSGCRGXDGFTSSWRSVADTLRQKVEDAVREHPDYRVVFTGXSLGGALATVAGADLRGNGYDIDVFSYGAPRVGNRAFAEFLTVQTGGTLYRITXTNDIVPRLPPREFGYXHSSPEYWIKSGTLVPVTRNDIVKIEGIDATGGNNQPNIPDIPAHLWYFGLIGTCL

SEQ ID NO: 8676 - protein, 269 aa, Thermomyces lanuginosus
EVSQDLFNQFNLFAQYSAAAYCGKNNRAPAGTNITCTANACPEVEKADATFLYSFEDSGVGDVTGFLALDNTNKLIVLSFRGSRSIENWIADLNFILQEINDICSGCRGHDGFTSSWRSVADTLRQKVEDAVREHPDYRVVFTGHSLGGALATVAGADLRGNKYDIDVFSYGAPRVGNRAFAEFLTVQTGGTLYRITHTNDIVPRLPPREFGYSHSSPEYWIKSGTLVPVRRRDIVKIEGIDATGGNNQPNIPSITAHLWYFGLIGTCL

SEQ ID NO: 8677 - protein, 269 aa, Thermomyces lanuginosus
EVSQDLFNQFNLFAQYSAAAYCGKNNDAPAGTNITCTGNACPEVEKADATFLYSFEDSGVGCVTGFLALDNTNKLIVLSFRGSRSPCNWIANLDFIFDEINDICSGCRGHDGFTSSWRSVADTLRQKVEDAVREHPDYRVVFTGHSLGGALATVAGADLRGNGYDIDVFSYGAPRVGNRAFAEFLTVQTGGTLYRITHTNDIVPRLPPREFGYSHSSPEYWIKSGTLVPVTRNDIVKIEGIDATGGNNQPNIPDIPAHLWYFGLIGTCL

SEQ ID NO: 8678 - protein, 269 aa, Thermomyces lanuginosus
EVSQDLFNQFNLFAQYSAAAYCGKNNRAPAGTNITCTGNACPEVEKADATLLYSFQDSGVGDVTGFLALDNTNKLIVLSFRGSRSIENWIADLNFDLQEINDICSGCRGHDGFTSSWRSVADTLRQKVEDAVREHPDYRVVFTGHSLGGALATVAGADLRGNGYDIDVFSYGAPRVGNRAFAEFLTVQTGGTLYRITHTNDIVPRLPPREFGYSHSSPEYWIKSGTLVPVRRRDIVKIEGIDATGGNNQPNIPSIPAHLWYFGLIGTCL

SEQ ID NO: 8679 - protein, 269 aa, Thermomyces lanuginosus
EVSQDLFNQFNLFAQYSAAAYCGKNNDAPAGTNITCTANACPEVEKADATFLYSFEDSGVGDVTGFLALDNTNKLIVLSFRGSRSIENWIADLNFILQEINDICSGCRGHAGFTSSWRSVADTLRQKVEDAVREHPDYRVVFTGHSLGGALATVAGADLRGNKYDIDVFSYGAPRVGNRAFAEFLTVQTGGTLYRITHTNDIVPRLPPREFGYSHSSPEYWIKSGTLVPVRRRDIVKIEGIDATGGNNQPNIPSITAHLWYFGLIGTCL

SEQ ID NO: 8680 - protein, 270 aa, Synthetic construct
EVSQDLFNQFNLFAQYSAAAYCGKNNDAPAGTNITCTGNACPEVEKADATFLYSFEGSVVGDVTGFLALDNTNKLIVLSFRGSRSIENWIGNLNFLMKEINDICSGCRGHDGFTSPWRSVADTLRQKVEDAVREHPDYRVVFTGHSLGGALATVAGADLRGNGYDIDVFPYGAPRVGNRAFAEFLTVQTGGTLYRITHTNDIVPRLPPREFGYSHSSPEYWIKSGTLVPVTRNDIVKIEGIDATGGNRNQPNIPDIPAHLWYFGLIGTCL

SEQ ID NO: 8681 - protein, 269 aa, Thermomyces lanuginosus
EVSQDLFNQFNLFAQYSAAAYCGKNNDAPAGTNITCTANACPEVEKADATFLYSFEDSGVGDVTGFLALDNTNKLIVLSFRGSRSIENWIADLNFLLQEINDICSGCRGHAGFTSSWRSVADTLRQKVEDAVREHPDYRVVFTGHSLGGALATVAGADLRGNKYDIDVFSYGAPRVGNRAFAEFLTVQTGGTLYRITHTNDIVPRLPPREFGYSHSSPEYWIKSGTLVPVRRRDIVKIEGIDATGGNNQPNIPSITAHLWYFGLIGTCL

SEQ ID NO: 8682 - protein, 269 aa, Thermomyces lanuginosus
EVSQDLFNQFNLFAQYSAAAYCGKNNDAPAGTNITCTANACPEVEKADATFLYSFEDSGVGDVTGFLALDNTNKLIVLSFRGSRTIENWIADLNFLLKEINDICSGCRGHAGFTSSWRSVADTLRQKVEDAVREHPDYRVVFTGHSLGGALATVAGADLRGNKYDIDVFSYGAPRVGNRAFAEFLTVQTGGTLYRITHTNDIVPRLPPREFGYSHSSPEYWIKSGTLVPVRRRDIVKIEGIDATGGNNQPNIPSITAHLWYFGLIGTCL

SEQ ID NO: 8683 - protein, 268 aa, Thermomyces lanuginosus
EVSQDLFNQFNLFAQYSAAAYCGKNNRAPAGTKITCTANACPEVEKADATVLYSFEDSGVGDVTGFLALDNTNKLIVLSFRGSRSIENWIGNRVHLKEINDICSGCRGHAGFTSSWRSVADTLRQKVEDAVREHPDYRVVFTGHSLGGALATVAGADLRGNKYDIDVFSYGAPRVGNRAFAEFLTVQTGGTLYRITHTNDIVPRLPPREFGYSHSSPEYWIKSGTLVPVRRRDIVKIEGIDATGGNNQPNIPSITAHLWYFGLIGTCL

SEQ ID NO: 8684 - protein, 268 aa, Thermomyces lanuginosus
VSQDLFNQFNLFAQYSAAAYCGKNNDAPAGTNITCTGNACPEVEKADATFLYSFEDAGSGDVTGFLALDNTNKLIVLSFRGSRSVENWIGNLNFDLIKINDICSGCRGHDGFTSSWRSVADTLRQKVEDAVREHPDYRVVFSGHSLGGGLATVAGADLRGNGYDIDVFSYGAPRVGNRAFAEFLTVQTGGTLYRITHTNDIVPRLPPREFGYSHSSPEYWIKSGTGVPVRRRDIVKIEGIDATGGNNQPNIPDAKAHFWYFGLIGTCL

SEQ ID NO: 8685 - protein, 268 aa, Thermomyces lanuginosus
VSQDLFNQFNLFAQYSAAAYCGKNNRAPAGTNITCTANACPEVEKADATVLYSFEDSGVGDVTGFLALDNTNKLIVLSFRGSRSIENWIGNLNFELIEINDICSGCRGHAGFTSSWRSVADTLRQKVEDAVREHPDYRVVFTGHSLGGALATVAGADLRGNKYDIDVFSYGAPRVGNRAFAEFLTVQTGGTLYRITSTNDIVPRLPPREFGYSHSSPEFWIKSGTLVPVRRCDIVKIEGIDATGGNNQPNIPSITAHLWYFGLIGTCL

SEQ ID NO: 8686 - protein, 268 aa, Thermomyces lanuginosus
VSQDLFNQFNLFAQYSAAAYCGKNNDAPAGTNITCTGNACPEVEKADATFLYSFEDAGVGDVTGFLALDNTNKLIVLSFRGSRSVENWIGNLNFDLIKINDICSGCRGHDGFTSSWRSVADTLRQKVEDAVREHPDYRVVFSGHSLGGGLATVAGADLRGNGYDIDVFSYGAPRVGNRAFAEFLTVQTGGTLYRITHTNDIVPRLPPRAFGYSHPSPEYWIKSGTGVPVRRRDIVKIEGIDATGGNNQPNIPDAKAHLWYFGLIGTCL

SEQ ID NO: 8687 - protein, 268 aa, Thermomyces lanuginosus
VSQDLFNQFNLFAQYSAAAYCGKNNRAPAGTNITCTANACPEVEKADATLLYSFEDSGVGDVTGFLALDNTNKLIVLSFRGSRSIENWIGNLNFELIEINDICSGCRGHAGFTSSWRSVADTLRQKVEDAVREHPDYRVVFTGHSLGGALATVAGADLRGNKYDIDVFSYGAPRVGNRAFAEFLTVQTGGTLYRITSTNDIVPRLPPREFGYSHSSPEFWIKSGTLVPVRRCDIVKIEGIDATGGNNQPNIPSITAHLWYFGLIGTCL

SEQ ID NO: 8688 - protein, 268 aa, Thermomyces lanuginosus
VSQDLFNQFNLFAQYSAAAYCGKNNRAPAGTNITCTRNACPEVEKADATVLYSFEDSGVGDVTGFLALDNTNKLIVLSFRGSRSIENWIGNLNFELIEINDICSGCRGHAGFTSSWRSVADTLRQKVEDAVREHPDYRVVFTGHSLGGALATVAGADLRGNKYDIDVFSYGAPRVGNRAFAEFLTVQTGGTLYRITSTNDIVPRLPPREFGYSHSSPEFWIKSGTLVPVRRCDIVKIEGIDATGGNNQPNIPSITAHLWYFGLIGTCL

SEQ ID NO: 8689 - protein, 268 aa, Thermomyces lanuginosus
VSQDLFNQFNLFAQYSAAAYCGKNNRAPAGTNITCTANACPEVEKADATILYSFEDSGVGDVTGFLALDNTNKLIVLSFRGSRSIENWIGNLNFELIEINDICSGCRGHAGFTSSWRSVADTLRQKVEDAVREHPDYRVVFTGHSLGGALATVAGADLRGNKYDIDVFSYGAPRVGNRAFAEFLTVQTGGTLYRITSTNDIVPRLPPREFGYSHSSPEFWIKSGTLVPVRRCDIVKIEGIDATGGNNQPNIPSITAHLWYFGLIGTCL

SEQ ID NO: 8690 - protein, 268 aa, Thermomyces lanuginosus
VSQDLFNQFNLFAQYSAAAYCGKNNDAPAGTNITCTGNACPEVEKADATFLYSFEDAGSGDVTGFLALDNTNKLIVLSFRGSRSVENWIGNLNFDLIKINDICSGCRGHDGFTSSWRSVADTLRQKVEDAVREHPDYRVVFSGHSLGGGLATVAGADLRGNGYDIDVFSYGAPRVGNRAFAEFLTVQTGGTLYRITHTNDIVPRLPPREFGYSHPSPEYWIKSGTGVPVRRRDIVKIEGIDATGGNNQPNIPDAKAHLWYFGLIGTCL

SEQ ID NO: 8691 - protein, 268 aa, Thermomyces lanuginosus
VSQDLFNQFNLFAQYSAAAYCGKNNRAPAGTNITCTRNACPEVEKADATLLYSFEDSGVGDVTGFLALDNTNKLIVLSFRGSRSIENWIGNLNFELIEINDICSGCRGHAGFTSSWRSVADTLRQKVEDAVREHPDYRVVFTGHSLGGALATVAGADLRGNKYDIDVFSYGAPRVGNRAFAEFLTVQTGGTLYRITSTNDIVPRLPPREFGYSHSSPEFWIKSGTLVPVRRCDIVKIEGIDATGGNNQPNIPSITAHLWYFGLIGTCL

SEQ ID NO: 8692 - protein, 268 aa, Thermomyces lanuginosus
VSQDLFNQFNLFAQYSAAAYCGKNNDAPAGTNITCTGNACPEVEKADATFLYSFEDSGVGDVTGFLALDNTNKLIVLSFRGSRSIENWIGNLNFSLKEINDICSGCRGHDGFTSSWRSVADTLRQKVEDAVREHPDYRVVFTGHSLGGALATVAGADLRGNGYDIDVFSYGAPRVGNRAFAEFLTVQTGGTLYRITHTNDIVPRLPPREFGYSHSSPEYWIKSGTLVPVTRNDIVKICGIDATGGNNRPNMPDIPAHLWYFGQIDTCL

SEQ ID NO: 8693 - protein, 268 aa, Thermomyces lanuginosus
EVSQDLFNQFNLFAQYSAAAYCGKNNDAPAGTNITCTGNACPEVEKADATFLYSFEDTGKGDVTGFLALDNTNKLIVLSFRGSRVENWIGNLNFDLKEINAICSGCRGHDGFTSSWRSVADTLRQKVEDAVREHPDYRVVFTGHSLGGGLATVAGADLRGNGYDIDVFSYGAPRVGNRAFAEFLTVQTGGTLYRITHTNDIVPRLPPREFGYSHSSPEYWIKSGTGVPVRRRDIVKIEGIDATGGNNQPNIPDIKAHLWYFGLIGTCL

SEQ ID NO: 8694 - protein, 268 aa, Synthetic construct
VSQDLFNQFNLFAQYSAAAYCGKNNDAPAGTNITCTGNACPEVEKADATFLYSFEDSGVGDVTGFLALDNTNKLIVLSFRGSRSIENWFGNLNFLLKKINDICSGCRGHDGFTSSWRSVADTLRQKVEDAVREHPDYRVVFTGHSLGGALATVAGADLRGNGYDIDVFSYGAPRVGNRAFAEFLTAQTGGTLYRITHTRDIVPRLPPAEFGYSHSSPEYWIKSGTLVPVTRNDIVKIEGIDATGGNNQPNIPDIPAHLWYFGLIGTCL

SEQ ID NO: 8695 - protein, 268 aa, Synthetic construct
VSQDLFNQFNLFAQYSAAAYCGKNNDAPAGTNITCTGNACPEVEKADATFLYSFEDSGVGDVTGFLALDNTNKLIVLSFRGSRSIENWFGNLNFLLKKINDICSGCRGHDGFTSSWRSVADTLRQKVEDAVREHPGYRVVFTGHSLGGALATVAGADLRGNGYDIDVFSYGAPRVGNRAFAEFLTAQTGGTLYRITHTNDIVPRLPPREFGYSHSSPEYWIKSGTLVPVTRNDIVKIEGIDATGGNNRPNIPDIPAHLWYFGLIGTCL

SEQ ID NO: 8696 - protein, 268 aa, Thermomyces lanuginosus
VSQDLFNQFNLFAQYSAAAYCGKNNDAPAGTNITCTGNACPEVEKADATFLYSFEDSGVGDVTGFLALDNTNKLIVLSFRGSRSIENWIGNLNFDLKEINDICSGCRGHDGFTSSWRSVADTLRQKVEDAVREHPDYRVVFTGHSLGGALATVAGADLRGNGYDIDVFSYGAPRVGNRAFAEFLTVQTGGTLYRITHTNDIVPRLPPREFGYSHSSPEYWIKSGTLVPVTRNDIVKICGIDATGGNNRPNIPDIPAHLWYFFAISECL

SEQ ID NO: 8697 - protein, 268 aa, Thermomyces lanuginosus
VSQDLFNQFNLFAQYSAAAYCGKNNDAPAGTNITCTGNACPEVEKADATFLYSFEDSGGGDVTGFLALDNTNKLIVLSFRGSRSIENWIGNLNFDLKNINDICSGCRGHDGFTSSWRGVADTLRQKVEDAVREHPDYRVVFTGHSLGGALATVAGADLRGNGYDIDVFSYGAPRVGNRAFAEFLTVQTGGTLYRITHTNDIVPRLPPPEFGYSHSSPEYWIKSGTLVPVTRNDIVKICGIDATGGNNRPNIPDIPAHLWYFGLIGTCL

SEQ ID NO: 8698 - protein, 269 aa, Thermomyces lanuginosus
VSQDLFNQFNLFAQYSAAAYCGKNNDAPAGTNITCTGNACPEVEKADATFLYSFEDSGVGDVTGFLALDNTNKLIVLSFRGSRSIENWIGNLNFSLKEINDICSGCRGHDGFTSSWRSVADTLRQKVEDAVREHPDYRVVFTGHSLGGALATVAGADLRGNGYDIDVFSYGAPRVGNRAFAEFLTVQTGGTLYRITHTNDIVPRLPPREFGYSHSSPEYWIKSGTLVPVTRNDIVKICGIDATGGNNRPNIPDIPAHLWYFGINTGLCL

SEQ ID NO: 8699 - protein, 267 aa, Synthetic construct
SQQMFNQFNLFAQYSAAAYCGKNNDAPAGTNITCTGNACPEVEKADATFLYSFEGSGVGDVTGFLALDNTNKLIVLSFRGSRSIENWIGNLKFLMKEINDICSGCRGHDGFTSSWRSVADTLRQKVEDAVREHPDYRVVFTGHSLGGALATVAGADLRGNGYDIDVFSYGAPRVGNRAFAEFLTVQTGGTLYRITHTNDIVPRLPPREFGYSHSSPEYWIKSGTLVPVTRNDIVKIEGIDATGGNNRPNIPDIPAHLWYFGLIGTCL

SEQ ID NO: 8700 - protein, 274 aa, Thermomyces lanuginosus
SPIRREVSQDLFNQFNLFAQYSAAAYCGKNNRAPAGTNITCTANACPEVEKADATFLYTFEDSGVGDVTGFLALDNTNKLIVLSFRGTRSIENWIADLEFLLQEINDICSGCRGHAGFTSSWRSVADTLRQKVEDAVREHPDYRVVFTGHSLGGALATVAGADLRGNKYDIDVFSYGAPRVGNRAFAEFLTVQTGGTLYRITHTNDIVPRLPPREFGYSHSSPEYWIKSGTLVPVRRRDIVKIEGIDATGGNNQPNIPSITAHLWYFGLIGTCV

SEQ ID NO: 8701 - protein, 274 aa, Thermomyces lanuginosus
SPIRREVSQDLFNQFNLFAQYSAAAYCGKNNDAPAGTNITCTGNACPEVEKADATFLYSFEDSGVGCVTGFLALDNTNKLIVLSFRGTGSDCNLQLETSYTLTEINDICSGCRGHDGFTSSWRSVADTLRQKVEDAVREHPDYRVVFTGHSLGGALATVAGADLRGNGYDIDVFSYGAPRVGNRAFAEFLTVQTGGTLYRITHTNDIVPRLPPREFGYSHSSPEYWIKSGTLVPVRRRDIVKIEGIDATGGNNQPNIPDIPAHLWYFGLIGTCL

SEQ ID NO: 8702 - protein, 274 aa, Thermomyces lanuginosus
SPIRREVSQDLFNQFNLFAQYSAAAYCGKNNDAPAGTNITCTGNACPEVEKADATFLYSFEDSGVGDVTGFLALDNTNKLIVLSFRGTGSDTNLQLDTNYTLTEINDICSGCRGHDGFTSSWRSVADTLRQKVEDAVREHPDYRVVFTGHSLGGALATVAGADLRGNGYDIDVFSYGAPRVGNRAFAEFLTVQTGGTLYRITHTNDIVPRLPPREFGYSHSSPEYWIKSGTLVPVTRNDIVKIEGIDATGGNNQPNIPDIPAHLWYFGLIGTCL

SEQ ID NO: 8703 - protein, 274 aa, Synthetic construct
SPIRREVSQDLFNQFNLFAQYSAAAYCGKNNDAPAGTNITCTGNACPEVEKADATFLYSFEDSGVGDVTGFLALDNTDKLIVLSFRGSPSIENWIGNLNFDLKEIKDICSGCRGHDGFTSSWRSVADRLRQKVEDAVRDHPDYRVVFTGHSLGGALATVAGADLRGNGYDIDVFSYGAPRVGNRAFAEFLTVQTGGTLYRITHTNDIVPRLPPREFGYSHSSPEYWIKSGTLVPVTRNDIVNIEGMDPTGCNNQPNIPEVRAHLWYFGLIGTCL

SEQ ID NO: 8704 - protein, 274 aa, Thermomyces lanuginosus
SPIRREVSEDLFNQFNLFAQYSAAAYCGKNNDAPAGTNITCTGNACPEVEKADATLLYSFRDSGVGDVTGFLALDNTNKLIVLSFRGTRSIENWIADLDFILIEINDICSGCRGHDGFTSSWFSVADTLRQKVEDAVREHPDYRVVFTGHSLGGALATVAGADLRGNGYDIDVFSYGAPRVGNRAFAEFLTVQTGGTLYRITHTNDIVPRLPPREFGYSHSSPEFWIKSGTLVPVRRRDIVKIEGIDAEGGNNQPNIPSIPAHLWYFGAIGTCL

SEQ ID NO: 8705 - protein, 291 aa, Thermomyces lanuginosus
MRSSLVLFFVSAWTALASPIRREVSQDLFNQFNLFAQYSAAAYCGKNNDAPAGTNITCTGNACPEVEKADATLLYSFRDSGVGDVTGFLALDNTNKLIVLSFRGTRSIENWIADLNFILIEINDICSGCRGHDGFTSSWFSFADTLRQKVEDAVREHPDYRVVFTGHSLGGALATVAGADLRGNGYDIDVFSYGAPRVGNRAFAEFLTVQTGGTLYRITHTNDIVPRLPPREFGYSHSSPEFWIKSGTLVPVRRRDIVKIEGIDAEGGNNQPNIPSIPAHLWYFGAIGTCL

SEQ ID NO: 8706 - protein, 291 aa, Thermomyces lanuginosus
MRSSLVLFFVSAWTALASPIRREVSRDLFNQFNLFAQYSAAAYCGKNNDAPAGTNITCTGNACPEVEKADATLLYSFRDSGVGDVTGFLALDNTNKLIVLSFRGTRSIENWIADLNFILIEINDICSGCRGHDGFTSSWFSVADTLRQKVEDAVREHPDYRVVFTGHSLGGALATVAGADLRGNGYDIDVFSYGAPRVGNRAFAEFLTVQTGGTLYRITHTNDIVPRLPPREFGYSHSSPEFWIKSGTLVPVRRRDIVKIEGIDAEGGNNQPNIPSIPAHLWYFGAIGTCL

SEQ ID NO: 8707 - protein, 291 aa, Thermomyces lanuginosus
MRSSLVLFFVSAWTALASPIRREVSQDLFNQFNLFAQYSAAAYCGKNNDAPAGTNITCTGNACPEVEKADATFLYSFEDSGVGCVTGFLALDNTNKLIVLSFRGTGSDCNLQLDTNYTLTEINDICSGCRGHDGFTSSWRSVADTLRQKVEDAVREHPDYRVVFTGHSLGGALATVAGADLRGNGYDIDVFSYGAPRVGNRAFAEFLTVQTGGTLYRITHTNDIVPRLPPREFGYSHSSPEYWIKSGTLVPVRRRDIVKIEGIDATGGNNQPNIPDIPAHLWYFGLIGTCL

SEQ ID NO: 8708 - protein, 291 aa, Thermomyces lanuginosus
MRSSLVLFFVSAWTALASPIRREVSQDLFNQFNLFAQYSAAAYCGKNNRAPAGTNITCTANACPEVEKADATFLYSFEDSGVGDVTGFLALDNTNKLIVLSFRGTRSPENWIADLNFLLQEINDICSGCRGHAGFTSSWRSVADTLRQKVEDAVREHPDYRVVFTGHSLGGALATVAGADLRGNKYDIDVFSYGAPRVGNRAFAEFLTVQTGGTLYRITHTNDIVPRLPPREFGYSHSSPEYWIKSGTLVPVRRRDIVKIEGIDATGGNNQPNIPSITAHLWYFGLIGTCV

SEQ ID NO: 8709 - protein, 291 aa, Thermomyces lanuginosus
MRSSLVLFFVSAWTALASPIRREVSQDLFNQFNLFAQYSAAAYCGKNNRAPAGTNITCTANACPEVEKADATFLYSFEDSGVGDVTGFLALDNTNKLIVLSFRGTNSLENWIADFNFILQEINDICSGCRGHDGFTSSWRSVADTLRQKVEDAVREHPDYRVVFTGHSLGGALATVAGADLRGNKYDIDVFSYGAPRVGNRAFAEFLTVQTGGTLYRITHTNDIVPRLPPREFGYSHSSPEYWIKSGTLVPVRRRDIVKIEGIDATGGNNQPNIPSITAHLWYFGLIGTCL

SEQ ID NO: 8710 - protein, 291 aa, Thermomyces lanuginosus
MRSSLVLFFVSAWTALASPIRREVSQDLFNQFNLFAQYSAAAYCGKNNRAPAGTNITCTANACPEVEKADAKFLYTFEDSGVGDVTGFLALDNTNKLIVLSFRGSRSIENWIADLNFLLQEINDICSGCRGHAGFTSSWRSVADTLRQKVEDAVREHPDYRVVFTGHSLGGALATVAGADLRGNKYDIDVFSYGAPRVGNRAFAEFLTVQTGGTLYRITHTNDIVPRLPPREFGYSHSSPEYWIKSGTLVPVRQRDIVKIEGIDATGGNNQPNIPSITAHLWYFGLIGTCL

SEQ ID NO: 8711 - protein, 291 aa, Thermomyces lanuginosus
MRSSLVLFFVSAWTALASPIRREVSQDLFNQFNLFAQYSAAAYCGKNNDAPAGTNITCTGNACPEVEQADATLLYSFRDSGVGDVTGFLALDNTNKLIVLSFRGTRSIENWIADLNFILIEINDICSGCRGHDGFTSSWFSVADTLRQKVEDAVREHPDYRVVFTGHSLGGALATVAGADLRGNGYDIDVFSYGAPRVGNRAFAEFLTVQTGGTLYRITHTNDIVPRLPPREFGYSHSSPEFWIKSGTLVPVRRRDIVKIEGIDAEGGNNQPNIPSIPAHLWYFGAIGTCL

SEQ ID NO: 8712 - protein, 291 aa, Thermomyces lanuginosus
MRSSLVLFFVSAWTALASPIRREVSQDLFNQFNLFAQYSAAAYCGKNNDAPAGTNITCTGNACPEVEKADATLLYSFRDSGVGDVTGFLALDRTNKLIVLSFRGTRSIENWIADLNFILIEINDICSGCRGHDGFTSSWFSVADTLRQKVEDAVREHPDYRVVFTGHSLGGALATVAGADLRGNGYDIDVFSYGAPRVGNRAFAEFLTVQTGGTLYRITHTNDIVPRLPPREFGYSHSSPEFWIKSGTLVPVRRRDIVKIEGIDAEGGNNQPNIPSIPAHLWYFGAIGTCL

SEQ ID NO: 8713 - protein, 291 aa, Thermomyces lanuginosus
MRSSLVLFFVSAWTALASPIRREVSEDLFNQFNLFAQYSAAAYCGKNNDAPAGTNITCTGNACPEVEKADATLLYSFRDSGVGDVTGFLALDNTNKLIVLSFRGTRSIENWIADLNFILIEINDICSGCRGHDGFTSSWFSVADTLRQKVEDAVREHPDYRVVFTGHSLGGALATVAGADLRGNGYDIDVFSYGAPRVGNRAFAEFLTVQTGGTLYRITHTNDIVPRLPPREFGYSHSSPEFWIKSGTLVPVRRRDIVKIEGIDAEGGNNQPNIPSIPAHLWYFGAIGTCL

SEQ ID NO: 8714 - protein, 291 aa, Thermomyces lanuginosus
MRSSLVLFFVSAWTALASPIRREVSQDLFNQFNLFAQYSAAAYCGKNNRAPAGTNITCTANACPEVEKADATFLYSFEDSGVGDVTGFLALDNTNKLIVLSFRGTNSIENWIADLNFILSEINDICSGCRGHAGFTSSWRSVADTLRQKVEDAVREHPDYRVVFTGHSLGGALATVAGADLRGNKYDIDVFSYGAPRVGNRAFAEFLTVQTGGTLYRITHTNDIVPILPPREFGYSHSSPEYWIKSGTLVPVRRRDIVKIEGIDATGGNNQPNIPSITAHLWYFGLIGTCL

SEQ ID NO: 8715 - protein, 291 aa, Thermomyces lanuginosus
MRSSLVLFFVSAWTALASPIRREVSQDLFNQFNLFAQYSAAAYCGKNNDAPAGTNITCTGNACPEVEKADATLLYSFRDSGVGDVTGFLALDNTNELIVLSFRGTRSIENWIADLNFILIEINDICSGCRGHDGFTSSWFSVADTLRQKVEDAVREHPDYRVVFTGHSLGGALATVAGADLRGNGYDIDVFSYGAPRVGNRAFAEFLTVQTGGTLYRITHTNDIVPRLPPREFGYSHSSPEFWIKSGTLVPVRRRDIVKIEGIDAEGGNNQPNIPSIPAHLWYFGAIGTCL

SEQ ID NO: 8716 - protein, 291 aa, Thermomyces lanuginosus
MRSSLVLFFVSAWTALASPIRREVSQDLFNQFNLFAQYSAAAYCGKNNDAPAGTNITCTGNACPEVEKADATLLYSFRDSGVGDVTGFLALDNRNKLIVLSFRGTRSIENWIADLNFILIEINDICSGCRGHDGFTSSWFSVADTLRQKVEDAVREHPDYRVVFTGHSLGGALATVAGADLRGNGYDIDVFSYGAPRVGNRAFAEFLTVQTGGTLYRITHTNDIVPRLPPREFGYSHSSPEFWIKSGTLVPVRRRDIVKIEGIDAEGGNNQPNIPSIPAHLWYFGAIGTCL

SEQ ID NO: 8717 - protein, 291 aa, Thermomyces lanuginosus
MRSSLVLFFVSAWTALASPIRREVSQDLFNQFNLFAQYSAAAYCGKNNDAPAGTNITCTGNACPEVEKADATFLYSFEDSGVGDVTGFLALDNTNKLIVLSFRGTGSDQNLQLETSYTLTEINDICSGCRGHDGFTSSWRSVADTLRQKVEDAVREHPDYRVVFTGHSLGGALATVAGADLRGNGYDIDVFSYGAPRVGNRAFAEFLTVQTGGTLYRITHTNDIVPRLPPREFGYSHSSPEYWIKSGTLVPVRRRDIVKIEGIDATGGNNQPNIPDIPAHLWYFGLIGTCL

SEQ ID NO: 8718 - protein, 194 aa, Humicola insolens
QLGAIXNGLXSGSPNACPDAILIFARGSTEPGNMGITVGPALANGLKSHIPNIWIQGVGGPYDAALATNFLPRGTSQANIDEGKRLFALANQKCPNTPVVAGGYSQGAALIAAAVSELSGAVKEQVKGVALFGYTQNLQNRGGIPNYPRERTKVFCNVGDAVCTGTLIITPAHLSYTIXARGEAARFLRDRIRA

SEQ ID NO: 8719 - protein, 194 aa, Humicola insolens
QLGAIQNGLESGSPNACPDAILIFARGSTEPGNMGITVGPALANGLKSHIPNIWIQGVGGPYDAALATNFLPRGTSQANIDEGKRLFVLANQKCPNTPVVAGGYSQGAALIAAAVKELPGAVKEQVKGVALFGYTQNLRNRGGIPNYPRERTKVFCNVGDAVCTGTLIVTPAHLSYTIQARGEAARFLVDRIRA

SEQ ID NO: 8720 - protein, 194 aa, Humicola insolens
QLGAIENGLESGSPNACPDAILIFARGSTEPGNMGITVGPALANGLKSHIRNIWIQGVGGPYDAALATNFLPRGTSQANIDEGKRLFALANQKCPNTPVVAGGYSQGAALIAAAVSELSGAVKEQVKGVALFGYTQNLQNRGGIPNYPRERTKVFCNVGDAVCTGTLIITPAHLSYTIXARGEAARFLRDRIRA

SEQ ID NO: 8721 - protein, 194 aa, Humicola insolens
QLGAIXNGLESGSANACPDAILIFARGSTEPGNMGITVGPALANGLKSHIPNIWIQGVGGPYDAALATNFLPRGTSQANIDEGKRLFALANQKCPNTPVVAGGYSQGAALIAAAVSELSGAVKEQVKGVALFGYTQNLQNRGGIPNYPRERTKVFCNVGDAVCTGTLIITPAHLSYTIEARGEAARFLRDRIRA

SEQ ID NO: 8722 - protein, 194 aa, Humicola insolens
QLGAIENGLESGSPNACPDAILIFARGSTEPGNMGITVGPALANGLKSHIRNIWIQGVGGPYDAALATNFLPRGTSQANIDEGKRLFALANQKCPNTPVVAGGYSQGAALIAAAVSELSGAVKEQVKGVALFGYTQNLQNRGGIPNYPRERTKVFCNVGDAVCTGTLIITPAHLSYTIEARGEAARFLRDRIRA

SEQ ID NO: 8723 - protein, 269 aa, Thermomyces lanuginosus
EVSQDLFNQFNLFAQYSAAAYCEKNNRAPAGTQITCTGNACPEVEKADATFRYSFEDSGVGDVTGFLALDNTNKLIVLSFRGSRSIENWINNLRFDLKEINDICSGCRGHAGFISSWRSVADTLRQKVEDAVREHPDYREVFTGHSLGGALATVAGADLRGNGYDIDVFSYGAPRVGNRAFAEFLTVQTGGTLYRITHTNDIVPRLPPREFGYSHPSPEYWIKSGTGVPVRRRDIVKIEGIDATGGNNQPNIPDITAHLWYFGLIGTCL

SEQ ID NO: 8724 - protein, 269 aa, Thermomyces lanuginosus
EVSQDLFNQFNLFAQYSAAAYCGKNNRAPAGTKITCTANACPEVEKADATILYSFKDSGVGDVTGFLARDNTNKLIVLSFRGSRSIENWIGNLNFELEEINDICSGCRGHAGFTSSWRSVADTLRQKVEDAVREHPDYRVVFTGHSLGGALATVAGADLRGNKYDIDVFSYGAPRVGNRAFAEFLTVQTGGTLYRITHTNDIVPRLPPREFGYSHSSPEYWIKSGTLVPVRRRDIVKIEGIDATGGNNQPNIPSITAHLWYFGLIGTCL

SEQ ID NO: 8725 - protein, 269 aa, Thermomyces lanuginosus
EVSQDLFNQFNLFAQYSAAAYCGKNNRAPAGTKITCTANACPEVEKADATVLYSFEDSGVGDVTGFLALDNTNKLIVLSFRGSRSIENWIGNLNFELEEINDICSGCRGHAGFTSSWRSVADTLRQKVEDAVREHPDYRVVFTGHSLGGALATVAGADLRGNKYDIDVFSYGAPRVGNRAFAEFLTVQTGGTLYRITHTNDIVPRLPPRKFGYSHSSPEYWIKSGTLVPVRRRDIVKIEGIDATGGNNQPNIPSGTAHLWYFGLIGTCL

SEQ ID NO: 8726 - protein, 269 aa, Thermomyces lanuginosus
EVSQDLFNQFNLFAQYSAAAYCGKNNRAPAGTKITCTANACPEVEKADATVLYSFEDSGVGDVTGFLALDNTNKLIVLSFRGSRSIENWIGNWRVPLKEINDICSGCRGHAGFTSSWRSVADTLRQKVEDAVREHPDYRVVFTGHSLGGALATVAGADLRGNKYDIDVFSYGAPRVGNRAFAEFLTVQTGGTLYRITHTNDIVPRLPPREFGYSHSSPEYWIKSGTLVPVRRRDIVKIEGIDATGGNNQPNIPSITAHLWYFGLIGTCL

SEQ ID NO: 8727 - protein, 269 aa, Thermomyces lanuginosus
EVSQDLFNQFNLFAQYSAAAYCGKNNRAPAGTNITCTANACPEVEKADATFLYSFEDSGVGDVTGFLALDNTNKLIVLSFRGTRSWENWILDLNYTLKEINDICSGCRGHAGFTSSWRSVADTLRQKVEDAVREHPDYRVVFTGHSLGGALATVAGADLRGNKYDIDVFSYGAPRVGNRAFAEFLTVQTGGTLYRITHTNDIVPRLPPREFGYSHSSPEYWIKSGTLVPVRRRDIVKIEGIDATGGNNQPNIPSITAHLWYFGLIGTCL

SEQ ID NO: 8728 - protein, 269 aa, Thermomyces lanuginosus
EVSQDLFNQFNLFAQYSAAAYCGKNNRAPAGTQITCTGNACPKVEMADATFLYSFEDSGVGDVTGFLALDNTNKLIVLSFRGSRSIENWVNNLRFDLKEINDICSGCRGHAGFISSWRSVADTLRQKVEDAVREHPDYRVVFTGHSLGGALATVAGADLRGNGYDIDVFSYGAPRVGNRAFAEFLTVQTGGTLYRITHTNDIVPRLPPREFGYSHPSPEYWIKSGTGVPVRRRDIVKIEGIDATGGNNQPNIPDITAHLWYFGLIGTCL

SEQ ID NO: 8729 - protein, 269 aa, Thermomyces lanuginosus
EVSRDLFNQFNLFAQYSAAAYCGKNNAAPAGTQITCTGNACPEVEKADATFLYSFEDSGVGDVTGFLALDNTNKLIVLSFRGSRSIENWITNLSFDLKDINDICSGCRGHAGFTSSWRSVADTLRQKVEDAVREHPDYRVVFTGHSLGGALATVAGADLRGNGYDIDVFSYGAPRIGNRAFAEFLTVQTGGTLYRITHTNDIVPRLPPRVFGYSHPSPEYWIKSGTGVPVRRRDIVKIEGIDATGGNNQPNIPDILAHLWYFGLIGTCL

SEQ ID NO: 8730 - protein, 269 aa, Thermomyces lanuginosus
EVSQDLFNQFNLFAQYSAAAYCGKNNRAPAGTNITCTANACPEVEKADATFLYSFEDSGVGDVTGFLALDNTNKLIVLSFRGTRSWENWILDLNYELKEINDICSGCRGHAGFTSSWRSVADTLRQKVEDAVREHPDYRVVFTGHSLGGALATVAGADLRGNKYDIDVFSYGAPRVGNRAFAEFLTVQTGGTLYRITHTNDIVPRLPPREFGYSHSSPEYWIKSGTLVPVRRRDIVKIEGIDATGGNNQPNIPSITAHLWYFGLIGTCL

SEQ ID NO: 8731 - protein, 269 aa, Thermomyces lanuginosus
EVSQDLFNQFNLFAQYSAAAYCGKNNRAPAGTKITCTANACPEVEKADATVLYTFEDSGVGDVTGFLALDNTNKLIVLSFRGSRSIENWIGNLNFELEEINDICSGCRGHAGFTSSWRSVADTLRQKVEDAVREHPDYRVVFTGHSLGGALATVAGADLRGNKYDIDVFSYGAPRVGNRAFAEFLTVQTGGTLYRITHTNDIVPRLPPREFGYSHSSPEYWIKSGTLVPVRRRDIVKIEGIDATGGNNQPNIPSITAHLYYFGLIGTCL

SEQ ID NO: 8732 - protein, 269 aa, Thermomyces lanuginosus
EVSQDLFNQFNLFAQYSAAAYCGKNNRAPAGTNITCTANACPEVEKADATVLYSFEDSGVGDVTGFLARDNTNKLIVLSFRGSRSIENWIGNLNFELEEINDICSGCRGHAGFTSSWRSVADTLRQKVEDAVREHPDYRVVFTGHSLGGALATVAGADLRGNKYDIDVFSYGAPRVGNRAFAEFLTVQTGGTLYRITHTNDIVPRLPPRKFGYSHSSPEYWIKSGTLVPVRRRDIVKIEGIDATGGNNQPNIPSGTAHLWYFGLIGTCL

SEQ ID NO: 8733 - protein, 269 aa, Thermomyces lanuginosus
EVSQDLFNQFNLFAQYSAAAYCGKNNRAPAGTKITCTANACPEVEKADATVLYSFEDSGVGDVTGFLALDNTNKLIVLSFRGSRSIENWIGNLNFELEEIDDICSGCRGHAGFTSSWRSVADTLRQKVEDAVREHPDYRVVFTGHSLGGALATVAGADLRGNPYDIDVFSYGAPRVGNRAFAEFLTVQTGGTLYRITHTNDIVPRLPPREFGYSHSSPEFWIKSGTLVPVRRRDIVKIEGIDATGGNNQPNIPSITAHLWYFGLIGTCL

SEQ ID NO: 8734 - protein, 269 aa, Thermomyces lanuginosus
EVSQDLFNQFNLFAQYSAAAYCGKNNRAPAGTKITCTANACPEVEKADATVLYSFEDSGVGDVTGFLALDNTNKLIVLSFRGSRSIENWIGNLNFELEEINDICSGCRGHAGFTSSWRSVADTLRQKVEDAVREHPDYRVVFTGHSLGGALATVAGADLRGNKYDIDVFSYGAPRVGNRAFAEFLTVQTGGTLYRITHTNDIVPRLPPRRFGYSHSSPEYWIKSGTLVPVRRRDIVKIEGIDATGGNNQPNIPSITAHLYYFGLIGTCL

SEQ ID NO: 8735 - protein, 269 aa, Thermomyces lanuginosus
EVSQDLFNQFNLFAQYSAAAYCGKNNRAPAGTNITCTANACPEVEKADATFLYTFEDSGVGDVTGFLALDNTNKLIVLSFRGSRSIENWIGNLNFELVEIDDICSGCRGHAGFTSSWRSVADTLRQKVEDAVREHPDYRVVFTGHSLGGALATVAGADLRGNPYDIDVFSYGAPRLGNRAFAEFLTVQTGGTLYRITHTNDIVPRLPPREFGYSHSSPEYWIKSGTLVPVRRRDIVKIEGIDATGGNNQPNIPSITAHLWYFGLIGTCV

SEQ ID NO: 8736 - protein, 269 aa, Thermomyces lanuginosus
EVSQDLFNQFNLFAQYSAAAYCEKNNRAPAGTQITCTGNACPEVEKADATFRYSFEDSGVGDVTGFLALDNTNKLIVLSFRGSRSIENWINNLRFDLKEINDICSGCRGHAGFISSWRSVADTLRQKVEDAVREHPDYRVEFTGHSLGGALATVAGADLRGNGYDIDVFSYGAPRVGNRAFAEFLTVQTGGTLYRITHTNDIVPRLPPREFGYSHPSPEYWIKSGTGVPVRRRDIVKIEGIDATGGNNQPNIPDITAHLWYFGLIGTCL

SEQ ID NO: 8737 - protein, 269 aa, Thermomyces lanuginosus
EVSQDLFNQFNLFAQYSAAAYCGKNNRAPAGTNITCTANACPEVEKADATFLYSFEDSGVGDVTGFLALDNTNKLIVLSFRGTRSPTNWIADLNFTLKEINDICSGCRGHAGFTSSWRSVADTLRQKVEDAVREHPDYRVVFTGHSLGGALATVAGADLRGNKYDIDVFSYGAPRVGNRAFAEFLTVQTGGTLYRITHTNDIVPRLPPREFGYSHSSPEYWIKSGTLVPVRRRDIVKIEGIDATGGNNQPNIPSITAHLWYFGLIGTCL

SEQ ID NO: 8738 - protein, 269 aa, Thermomyces lanuginosus
EVSQDLFNQFNLFAQYSAAAYCGKNNRAPAGTNITCTANACPEVEKADATFLYSFEDSGVGDVTGFLALDNTNKLIVLSFRGTRSIRNWIADLNYTLKEINDICSGCRGHAGFTSSWRSVADTLRQKVEDAVREHPDYRVVFTGHSLGGALATVAGADLRGNKYDIDVFSYGAPRVGNRAFAEFLTVQTGGTLYRITHTNDIVPRLPPREFGYSHSSPEYWIKSGTLVPVRRRDIVKIEGIDATGGNNQPNIPSITAHLWYFGLIGTCL

SEQ ID NO: 8739 - protein, 269 aa, Thermomyces lanuginosus
EVSRDLFNQFNLFAQYSAAAYCGKNNAAPAGTQITCTGNACPEVEKADATFLYSFEDSGVGDVTGFLALDNTNKLIVLSFRGSRSIENWITNLSFDLKDINDICSGCRGHAGFTSSWRSVADTLRQKVEDAVREHPDYRVVFTGHSLGGALATVAGADLRGNAYDIDVFSYGAPRVGNRAFAEFLTVQTGGTLYRITHTNDIVPRLPPRVFGYSHPSPEYWIKSGTGVPVRRRDIVKIEGIDATGGNNQPNIPDILAHLWYFGLIGTCL

SEQ ID NO: 8740 - protein, 269 aa, Thermomyces lanuginosus
EVSQDLFNQFNLFAQYSAAAYCGKNNRAPAGTQITCTGNACPEVEKADATFLYSFQNSGVGDVTGFLALDNTNKLIVLSFRGSRSIENWINNLRFDLKEINDICSGCRGHSGFTSSWRSVADTLRQKVEDAVREHPDYRVVFTGHSLGGALATVAGADLRGNGYDIDVFSYGAPRVGNRAFAEFLTVQTGGTLYRITHTNDIVPRLPPREFGYSHPSPEYWIKSGTGVPVRRRDIVKIEGIEATGGNNQPNIPSITAHLWYFGLIGTCL

SEQ ID NO: 8741 - protein, 269 aa, Thermomyces lanuginosus
EVSQDLFNQFNLFAQYSAAAYCGKNNRAPAGTQITCTANACPEVEKADATFLYSFQNSGVGDVTGFLALDNTNKLIVLSFRGSRSIENWINNLRFDLKEINDICSGCRGHSGFTSSWRSVADTLRQKVEDAVREHPDYRVVFTGHSLGGALATVAGADLRGNGYDIDVFSYGAPRVGNRAFAEFLTVQTGGTLYRITHTNDIVPRLPPREFGYSHPSPEYWIKSGTGVPVRRRDIVKIEGIDATGGNNQPNIPSITAHLWYFGLIGTCL

SEQ ID NO: 8742 - protein, 269 aa, Thermomyces lanuginosus
EVSQDLFNQFNLFAQYSAAAYCGKNNRAPAGTKITCTANACPEVEKADATVLYSFKDSGVGDVTGFLARDNTNKLIVLSFRGSRSIENWIGNLNFELEEINDICSGCRGHAGFTSSWRSVADTLRQKVEDAVREHPDYRVVFTGHSLGGALATVAGADLRGNKYDIDVFSYGAPRVGNRAFAEFLTVQTGGTLYRITHTNDIVPRLPPREFGYSHSSPEYWIKSGTLVPVRRRDIVKIEGIDATGGNNQPNIPSITAHLWYFGLIGTCL

SEQ ID NO: 8743 - protein, 269 aa, Thermomyces lanuginosus
EVSQDLFNQFNLFAQYSAAAYCGKNNRAPAGTNITCTANACPEVEKADATVLYSFEDSGVGDVTGFLARDNTNKLIVLSFRGSRSIENWIGNLNFELEEINDICSGCRGHAGFTSSWRSVADTLRQKVEDAVREHPDYRVVFTGHSLGGALATVAGADLRGNKYDIDVFSYGAPRVGNRAFAEFLTVQTGGTLYRITHTNDIVPRLPPRKFGYSHSSPEFWIKSGTLVPVRRRDIVKIEGIDATGGNNQPNIPSITAHLWYFGLIGTCL

SEQ ID NO: 8744 - protein, 269 aa, Thermomyces lanuginosus
EVSQDLFNQFNLFAQYSAAAYCGKNNRAPAGTNITCTANACPEVEKADATFLYSFEDSGVGDVTGFLALDNTNKLIVLSFRGTRSPENWIADLNYTLKEINDICSGCRGHAGFTSSWRSVADTLRQKVEDAVREHPDYRVVFTGHSLGGALATVAGADLRGNKYDIDVFSYGAPRVGNRAFAEFLTVQTGGTLYRITHTNDIVPRLPPREFGYSHSSPEYWIKSGTLVPVRRRDIVKIEGIDATGGNNQPNIPSITAHLWYFGLIGTCL

SEQ ID NO: 8745 - protein, 269 aa, Thermomyces lanuginosus
EYSQDLFNQFNLFAQYSAAAYCGKNNRAPAGTNITCTANACPEVEKADATFLYTFEDSGVGDVTGFLALDNTNKLIVLSFRGSRSIENWIGNLNFELREINDICSGCRGHAGFTSSWRSVADTLRQKVEDAVREHPDYRVVFTGHSLGGALATVAGADLRGNPYDIDVFSYGAPRLGNRAFAEFLTVQTGGTLYRITHTNDIVPRLPPREFGYSHSSPEYWIKSGTLVPVRRRDIVKIEGIDATGGNNQPNIPSITAHLYYFGLIGTCL

SEQ ID NO: 8746 - protein, 269 aa, Thermomyces lanuginosus
EVSQDLFNQFNLFAQYSAAAYCGKNNRAPAGTNITCTANACPEVEKADATFLYSFEDSGVGDVTGFLALDNTNKLIVLSFRGTRSPENWIADLNYLLKEINDICSGCRGHAGFTSSWRSVADTLRQKVEDAVREHPDYRVVFTGHSLGGALATVAGADLRGNKYDIDVFSYGAPRVGNRAFAEFLTVQTGGTLYRITHTNDIVPRLPPREFGYSHSSPEYWIKSGTLVPVRRRDIVKIEGIDATGGNNQPNIPSITAHLWYFGLIGTCL

SEQ ID NO: 8747 - protein, 269 aa, Thermomyces lanuginosus
EYSQDLFNQFNLFAQYSAAAYCGKNNRAPAGTKITCTANACPEVEKADATFLYSFEDSGVGDVTGFLALDNTNKLIVLSFRGSRSIENWIGNLNFELKEINDICSGCRGHAGFTSSWRSVADTLRQKVEDAVREHPDYRVVFTGHSLGGALATVAGADLRGNKYDIDVFSYGAPRLGNRAFAEFLTVQTGGTLYRITHTNDIVPRLPPREFGYSHSSPEYWIKSGTLVPVRRRDIVKIEGIDATGGNNQPNIPSITAHLYYFGLIGTCV

SEQ ID NO: 8748 - protein, 269 aa, Thermomyces lanuginosus
EYSQDLFNQFNLFAQYSAAAYCGKNNRAPAGTKITCTANACPEVEKADATLLYSFEDSGVGDVTGFLALDNTNKLIVLSFRGSRSIENWIGNLNFELKEINDICSGCRGHAGFTSSWRSVADTLRQKVEDAVREHPDYRVVFTGHSLGGGLATVAGADLRGNKYDIDVFSYGAPRVGNRAFAEFLTVQTGGTLYRITHTNDIVPRLPPREFGYSHSSPEYWIKSGTLVPRRRRDIVKIEGIDATGGNNQPNIPSITAHLWYFGLIGTCL

SEQ ID NO: 8749 - protein, 269 aa, Thermomyces lanuginosus
EVSQDLFNQFNLFAQYSAAAYCGKNNRAPAGTKITCTANACPEVEKADATVLYTFKDSGVGDVTGFLALDNTNKLIVLSFRGSRSIENWIGNLNFELIEINDICSGCRGHAGFTSSWRSVADTLRQKVEDAVREHPDYRVVFTGHSLGGALATVAGADLRGNKYDIDVFSYGAPRVGNRAFAEFLTVQTGGTLYRITHTNDIVPRLPPREFGYSHSSPEYWIKSGTLVPVRRRDIVKIEGIDATGGNNQPNIPSITAHLWYFGLIGTCL

SEQ ID NO: 8750 - protein, 269 aa, Thermomyces lanuginosus
EVSQDLFNQFNLFAQYSAAAYCGKNNRAPAGTNITCTANACPEVEKADATFLYSFEDSGVGDVTGFLALDNTNKLIVLSFRGSRSIKNWIADLDFLLQEINDICSGCRGHAGFTSSWRSVADTLRQKVEDAVREHPDYRVVFTGHSLGGALATVAGADLRGNKYDIDVFSYGAPRVGNRAFAEFLTVQTGGTLYRITHTNDIVPRLPPREFGYSHSSPEYWIKSGTLVPVRRRDIVKIEGIDATGGNNQPNIPSITAHLWYFGLIGTCL

SEQ ID NO: 8751 - protein, 269 aa, Thermomyces lanuginosus
EVSQDLFNQFNLFAQYSAAAYCGKNNRAPAGTNITCTANACPEVEKADATFLYSFEDSGVGDVTGFLALDNTNKLIVLSFRGTRSPKNWIADLNYDLKEINDICSGCRGHAGFTSSWRSVADTLRQKVEDAVREHPDYRVVFTGHSLGGALATVAGADLRGNKYDIDVFSYGAPRVGNRAFAEFLTVQTGGTLYRITHTNDIVPRLPPREFGYSHSSPEYWIKSGTLVPVRRRDIVKIEGIDATGGNNQPNIPSITAHLWYFGLIGTCL

SEQ ID NO: 8752 - protein, 269 aa, Thermomyces lanuginosus
EVSQDLFNQFNLFAQYSAAAYCGKNNRAPAGTNITCTANACPEVEKADATFLYSFEDSGVGDVTGFLALDNTNKLIVLSFRGTRSPENWIADLNFLLQEINDICSGCRGHAGFTSSWRSVADTLRQKVEDAVREHPDYRVVFTGHSLGGALATVAGADLRGNKYDIDVFSYGAPRVGNRAFAEFLTVQTGGTLYRITHTNDIVPRLPPREFGYSHSSPEYWIKSGTLVPVRRRDIVKIEGIDATGGNNQPNIPSITAHLWYFGLIGTCL

SEQ ID NO: 8753 - protein, 269 aa, Thermomyces lanuginosus
EVSQDLFNQFNLFAQYSAAAYCEKNNRAPAGTQITCTGNACPEVEKADATFRYSFEDSGVGDVTGFLALDNTNKLIVLSFRGSRSIENWINNLRFDLKEINDICSGCRGHAGFISSWRSVADTLRQKVEDAVREHPDYRVEFTGHSLGGALATVAGADLRGNGYDIDVFSYGAPRVGNRAFAEFLTVQTGGTLYRITHTNDIVPRLPPREFGYSHPSPEYWIKSGTLGPVRRRDIVKIEGIDATGGNNQPNIPDITAHLWYFGLIGTCL

SEQ ID NO: 8754 - protein, 269 aa, Thermomyces lanuginosus
EVSQDLFNQFNLFAQYSAAAYCGKNNRAPAGTKITCTANACPEVEKADATVLYSFEDSGVGDVTGFLALDNTNKLIVLSFRGSRSIENWIGNLNFELEEIDDICSGCRGHAGFTSSWRSVADTLRQKVEDAVREHPDYRVVFTGHSLGGALATVAGADLRGNKYDIDVFSYGAPRVGNRAFAEFLTVQTGGTLYRITHTNDIVPRLPPREFGYSHSSPEFWIKSGTLVPVRRRDIVKIEGIDATGGNNQPNIPSITAHLWYFGLIGTCL

SEQ ID NO: 8755 - protein, 269 aa, Thermomyces lanuginosus
EVSQDLFNQFNLFAQYSAAAYCGKNNRAPAGTNITCTANACPEVEKADATFLYSFEDSGVGDVTGFLALDNTNKLIVLSFRGTRSIANWILDLNYLLKEINDICSGCRGHAGFTSSWRSVADTLRQKVEDAVREHPDYRVVFTGHSLGGALATVAGADLRGNKYDIDVFSYGAPRVGNRAFAEFLTVQTGGTLYRITHTNDIVPRLPPREFGYSHSSPEYWIKSGTLVPVRRRDIVKIEGIDATGGNNQPNIPSITAHLWYFGLIGTCL

SEQ ID NO: 8756 - protein, 269 aa, Thermomyces lanuginosus
EVSQDLFNQFNLFAQYSAAAYCGKNNRAPAGTQITCTGNACPEVEKADATFLYSFQNSGVGDVTGFLALDNTNKLIVLSFRGSRSIENWINNLRFDLKEINDICSGCRGHSGFTSSWRSVADTLRQKVEDAVREHPDYRVVFTGHSLGGALATVAGADLRGNGYDIDVFSYGAPRVGNRAFAEFLTVQTGGTLYRITHTNDIVPRLPPREFGYSHPSPDYWIKSGTGVPVRRRDIVKIEGIDATGGNNQPNIPSITAHLWYFGLIGTCL

SEQ ID NO: 8757 - protein, 269 aa, Thermomyces lanuginosus
EVSQDLFNQFNLFAQYSAAAYCGKNNRAPAGTNITCTANACPEVEKADATFLYTFEDSGVGDVTGFLALDNTNKLIVLSFRGSRSIENWIGNLNFELTEINDICSGCRGHAGFTSSWRSVADTLRQKVEDAVREHPDYRVVFTGHSLGGALATVAGADLRGNPYDIDVFSYGAPRLGNRAFAEFLTVQTGGTLYRITHTNDIVPRLPPREFGYSHSSPEYWIKSGTLVPVRRRDIVKIEGIDATGGNNQPNIPSITAHLYYFGLIGTCV

SEQ ID NO: 8758 - protein, 269 aa, Thermomyces lanuginosus
EVSQDLFNQFNLFAQYSAAAYCGKNNRAPAGTKITCTANACPEVEKADATVLYSFEDSGVGDVTGFLALDNTNKLIVLSFRGSRSIENWIGNLNFELEEIDDICSGCRGHAGFTSSWRSVADTLRQKVEDAVREHPDYRVVFTGHSLGGALATVAGADLRGNKYDIDVFSYGAPRVGNRAFAEFLTVQTGGTLYRITSTNDIVPRLPPREFGYSHSSPEYWIKSGTLVPVRRRDIVKIEGIDATGGNNQPNIPSITAHLWYFGLIGTCL

SEQ ID NO: 8759 - protein, 269 aa, Thermomyces lanuginosus
EVSQDLFNQFNLFAQYSAAAYCGKNNRAPAGTQITCTGNACPEVEKADATFLYSFQNSGVGDVTGFLALDNTNKLIVLSFRGSRSIENWINNLRFDLKEINDICSGCRGHSGFTSSWRSVADTLRQKVEDAVREHPDYRVVFTGHSLGGALATVAGADLRGNGYDIDVFSYGAPRVGNRAFAEFLTVQTGGTLYRITHTNDIVPRLPPREFGYSHPSPEYWIKSGTGVPVRRRDIVKIEGIDATGGNNRPNIPSITAHLWYFGLIGTCL

SEQ ID NO: 8760 - protein, 269 aa, Thermomyces lanuginosus
EVSQDLFNQFNLFAQYSAAAYCGKNNRAPAGTKITCTANACPEVEKADATLLYSFKDSGVGDVTGFLARDNTNKLIVLSFRGSRSIENWIGNLNFELEEINDICSGCRGHAGFTSSWRSVADTLRQKVEDAVREHPDYRVVFTGHSLGGALATVAGADLRGNKYDIDVFSYGAPRVGNRAFAEFLTVQTGGTLYRITHTNDIVPRLPPREFGYSHSSPEYWIKSGTLVPVRRRDIVKIEGIDATGGNNQPNIPSITAHLWYFGLIGTCL

SEQ ID NO: 8761 - protein, 269 aa, Thermomyces lanuginosus
EVSQDLFNQFRLFAQYSAAAYCGKNNRAPAGTQITCTGNACPEVEKADATFLYSFQNSGVGDVTGFLALDNTNKLIVLSFRGSRSIENWINNLRFDLKEINDICSGCRGHSGFTSSWRSVADTLRQKVEDAVREHPDYRVVFTGHSLGGALATVAGADLRGNGYDIDVFSYGAPRVGNRAFAEFLTVQTGGTLYRITHTNDIVPRLPPREFGYSHPSPEYWIKSGTGVPVRRRDIVKIEGIDATGGNNQPNIPSITAHLWYFGLIGTCL

SEQ ID NO: 8762 - protein, 269 aa, Thermomyces lanuginosus
EVSQDLFNQFNLFAQYSAAAYCGKNNRAPAGTQITCTGNACPEVEKADATFLYSFQNSGVGDVTGFLALDNTNKLIVLSFRGSRSIENWINNLRFDLKEINDICSGCRGHSGFTSSWRSVADTLRQKVEDAVREHPDYRVVFTGHSLGGALATVAGADLRGNTYDIDVFSYGAPRVGNRAFAEFLTVQTGGTLYRITHTNDIVPRLPPREFGYSHPSPEYWIKSGTGVPVRRRDIVKIEGIDATGGNNQPNIPSITAHLWYFGLIGTCL

SEQ ID NO: 8763 - protein, 269 aa, Thermomyces lanuginosus
EVSQDLFNQFNLFAQYSAAAYCGKNNRAPAGTKITCTANACPEVEKADATLLYSFEDSGVGDVTGFLALDNTNKLIVLSFRGSRSIENWIGNLNFELEEIDDICSGCRGHAGFTSSWRSVADTLRQKVEDAVREHPDYRVVFTGHSLGGALATVAGADLRGNKYDIDVFSYGAPRVGNRAFAEFLTVQTGGTLYRITSTNDIVPRLPPREFGYSHSSPEYWIKSGTLVPVRRRDIVKIEGIDATGGNNQPNIPSITAHLWYFGLIGTCL

SEQ ID NO: 8764 - protein, 269 aa, Thermomyces lanuginosus
EVSQDLFNQFNLFAQYSAAAYCGKNNRAPAGTNITCTANACPEVEKADATFLYSFEDSGVGDVTGFLALDNTNKLIVLSFRGSRSITNWIADLDFLLQEINDICSGCRGHAGFTSSWRSVADTLRQKVEDAVREHPDYRVVFTGHSLGGALATVAGADLRGNKYDIDVFSYGAPRVGNRAFAEFLTVQTGGTLYRITHTNDIVPRLPPREFGYSHSSPEYWIKSGTLVPVRRRDIVKIEGIDATGGNNQPNIPSITAHLWYFGLIGTCL

SEQ ID NO: 8765 - protein, 269 aa, Thermomyces lanuginosus
EVSQDLFNQFNLFAQYSAAAYCGKNNRAPAGTNITCTANACPEVEKADATFLYSFEDSGVGDVTGFLALDNTNKLIVLSFRGTRSPENWILDLNFLPKEINDICSGCRGHAGFTSSWRSVADTLRQKVEDAVREHPDYRVVFTGHSLGGALATVAGADLRGNKYDIDVFSYGAPRVGNRAFAEFLTVQTGGTLYRITHTNDIVPRLPPREFGYSHSSPEYWIKSGTLVPVRRRDIVKIEGIDATGGNNQPNIPSITAHLWYFGLIGTCL

SEQ ID NO: 8766 - protein, 269 aa, Thermomyces lanuginosus
EVSQDLFNQFNLFAQYSAAAYCGKNNRAPAGTNITCTANACPEVEKADATVLYSFEDSGVGDVTGFLALDNTNKLIVLSFRGSRSIKNWIGNLNFELEEIDDICSGCRGHAGFTSSWRSVADTLRQKVEDAVREHPDYRVVFTGHSLGGALATVAGADLRGNKYDIDVFSYGAPRVGNRAFAEFLTVQTGGTLYRITHTNDIVPRLPPREFGYSHSSPEYWIKSGTLVPVRRRDIVKIEGIDATGGNNQPNIPSITAHLYYFGLIGTCL

SEQ ID NO: 8767 - protein, 269 aa, Thermomyces lanuginosus
EVSQDLFNQFNLFAQYSAAAYCGKNNRAPAGTNITCTANACPEVEKADATFLYSFEDSGVGDVTGFLALDNTNKLIVLSFRGTRSIKNWILDLNYDLQEINDICSGCRGHAGFTSSWRSVADTLRQKVEDAVREHPDYRVVFTGHSLGGALATVAGADLRGNKYDIDVFSYGAPRVGNRAFAEFLTVQTGGTLYRITHTNDIVPRLPPREFGYSHSSPEYWIKSGTLVPVRRRDIVKIEGIDATGGNNQPNIPSITAHLWYFGLIGTCL

SEQ ID NO: 8768 - protein, 269 aa, Thermomyces lanuginosus
EVSQDLFNQFNLFAQYSAAAYCGKNNNAPAGTNITCTGNACPEVEKADATFLYSFEDAGSGDVTGFLALDNTNKLIVLSFRGSRSVENWINNLRFDLKEINDICSGCRGHNGFTSSWRSVADTLRQKVEDAVREHPDYRVVFSGHSLGGGLATVAGADLRGNGYDIDVFSYGAPRVGNRAFAEFLTVQTGGTLYRITHTNDIVPRLPPREFGYSHSSPEYWIKSGTGVPVRRRDIVKIEGIDATGGNNQPNIPDAKAHLWYFGLIGTCL

SEQ ID NO: 8769 - protein, 269 aa, Thermomyces lanuginosus
EVSQDLFNQFNLFAQYSAAAYCGKNNRAPAGTNITCTANACPEVEKADATFLYSFEDSGVGDVTGFLALDNTNKLIVLSFRGTRSPENWILDLNYTLKEINDICSGCRGHAGFTSSWRSVADTLRQKVEDAVREHPDYRVVFTGHSLGGALATVAGADLRGNKYDIDVFSYGAPRVGNRAFAEFLTVQTGGTLYRITHTNDIVPRLPPREFGYSHSSPEYWIKSGTLVPVRRRDIVKIEGIDATGGNNQPNIPSITAHLWYFGLIGTCL

SEQ ID NO: 8770 - protein, 269 aa, Thermomyces lanuginosus
EVSQDLFNQFNLFAQYSAAAYCGKNNRAPAGTNITCTANACPEVEKADATFLYSFEDSGVGDVTGFLALDNTNKLIVLSFRGTRSIENWILDLNFELQEINDICSGCRGHAGFTSSWRSVADTLRQKVEDAVREHHDYRVVFTGHSLGGALATVAGADLRGNKYDIDVFSYGAPRVGNRAFAEFLTVQTGGTLYRITHTNDIVPRLPPREFGYSHSSPEYWIKSGTLVPVRRRDIVKIEGIDATGGNNQPNIPSITAHLWYFGLIGTCL

SEQ ID NO: 8771 - protein, 269 aa, Thermomyces lanuginosus
EVSQDLFNQFNLFAQYSAAAYCGKNNRAPAGTNITCTANACPEVEKADATFLYSFEDSGVGDVTGFLALDNTNKLIVLSFRGTRSPENWIADLNFTLQEINDICSGCRGHAGFTSSWRSVADTLRQKVEDAVREHPDYRVVFTGHSLGGALATVAGADLRGNKYDIDVFSYGAPRVGNRAFAEFLTVQTGGTLYRITHTNDIVPRLPPREFGYSHSSPEYWIKSGTLVPVRRRDIVKIEGIDATGGNNQPNIPSITAHLWYFGLIGTCL

SEQ ID NO: 8772 - protein, 269 aa, Thermomyces lanuginosus
EVSQDLFNQFNLFAQYSAAAYCGKNNRAPAGTNITCTANACPEVEKADATFLYTFEDSGVGDVTGFLALDNTNKLIVLSFRGSRSIENWIGNLNFELTEINDICSGCRGHAGFTSSWRSVADTLRQKVEDAVREHPDYRVVFTGHSLGGALATVAGADLRGNPYDIDVFSYGAPRLGNRAFAEFLTVQTGGTLYRITHTNDIVPRLPPRRFGYSHSSPEYWIKSGTLVPVRRRDIVKIEGIDATGGNNQPNIPSITAHLWYFGLIGTCV

SEQ ID NO: 8773 - protein, 269 aa, Thermomyces lanuginosus
EVSQDLFNQFNLFAQYSAAAYCGKNNRAPAGTKITCTANACPEVEKADATFLYTFEDSGVGDVTGFLALDNTNKLIVLSFRGSRSIENWIGNLNFELVEIDDICSGCRGHAGFTSSWRSVADTLRQKVEDAVREHPDYRVVFTGHSLGGALATVAGADLRGNPYDIDVFSYGAPRVGNRAFAEFLTVQTGGTLYRITHTNDIVPRLPPREFGYSHSSPEFWIKSGTLVPVRRRDIVKIEGIDATGGNNQPNIPSITAHLWYFGLIGTCL

SEQ ID NO: 8774 - protein, 269 aa, Thermomyces lanuginosus
EVSQDLFNQFNLFAQYSAAAYCGKNNRAPAGTKITCTANACPEVEKADATVLYSFKDSGVGDVTGFLALDNTNKLIVLSFRGSRSIENWIGNLNFELEEINDICSGCRGHAGFTSSWRSVADTLRQKVEDAVREHPDYRVVFTGHSLGGALATVAGADLRGNPYDIDVFSYGAPRVGNRAFAEFLTVQTGGTLYRITHTNDIVPRLPPRKFGYSHSSPEYWIKSGTLVPVRRRDIVKIEGIDATGGNNQPNIPSITAHLWYFGLIGTCL

SEQ ID NO: 8775 - protein, 269 aa, Thermomyces lanuginosus
EVSQDLFNQFNLFAQYSAAAYCGKNNRAPAGTNITCTANACPEVEKADATFLYTFEDSGVGDVTGFLALDNTNKLIVLSFRGSRSIENWIADLNFLLQEINDICSGCRGHAGFTSSWRSVADTLRQKVEDAVREHPDYRVVFTGHSLGGALATVAGADLRGNKYDIDVFSYGAPRVGNRAFAEFLTVQTGGTLYRITHTNDIVPRLPPREFGYSHSSPEYWIKSGTLVPVRRRDIVKIEGIDATGGNNQPNIPSITAHLWYFGLIGTCV

SEQ ID NO: 8776 - protein, 269 aa, Thermomyces lanuginosus
EVSQDLFNQFNLFAQYSAAAYCGKNNRAPAGTNITCTANACPEVEKADATFLYSFEDSGVGDVTGFLALDNTNKLIVLSFRGTRSIENWIADLNFLLQEYNDICSGCRGHAGFTSSWRSVADTLRQKVEDAVREHPDYRVVFTGHSLGGALATVAGADLRGNKYDIDVFSYGAPRVGNRAFAEFLTVQTGGTLYRITHTNDIVPRLPPREFGYSHSSPEYWIKSGTLVPVRRRDIVKIEGIDATGGNNQPNIPSITAHLWYFGLIGTCL

SEQ ID NO: 8777 - protein, 269 aa, Thermomyces lanuginosus
EVSQDLFNQFNLFAQYSAAAYCGKNNDAPAGTNITCTGNACPEVEKADATFLYSFEDSGVGDVTGFLALDNTNKLIVLSFRGTRSITNWILDLNYTPQEINDICSGCRGHDGFTSSWRSVADTLRQKVEDAVREHPDYRVVFTGHSLGGALATVAGADLRGNGYDIDVFSYGAPRVGNRAFAEFLTVQTGGTLYRITHTNDIVPRLPPREFGYSHSSPEYWIKSGTLVPVTRNDIVKIEGIDATGGNNQPNIPDIPAHLWYFGLIGTCL

SEQ ID NO: 8778 - protein, 269 aa, Thermomyces lanuginosus
EVSQDLFNQFNLFAQYSAAAYCGKNNRAPAGTNITCTANACPEVEKADATFLYSFEDSGVGDVTGFLALDNTNKLIVLSFRGTRSIENWIADLNFLLQEYNDICSGCRGHAGFTSSWRSVADTLRQKVEDAVREHPDYRVVFTGHSLGGALATVAGADLRGNKYDIDVFSYGAPRVGNRAFAEFLTVQTGGTLYRITHTNDIVPRLPPREFGYSHSSPEYWIKSGTLVPVRRRDIVKIEGIDATGGNNQPNIPDIPAHLWYFGLIGTCL

SEQ ID NO: 8779 - protein, 269 aa, Thermomyces lanuginosus
EVSQDLFNQFNLFAQYSAAAYCGKNNDAPAGTNITCTGNACPEVEKADATFLYSFEDSGVGDVTGFLALDNTNKLIVLSFRGSRSPANWIANLDFIFDEINDICSGCRGHDGFTSSWRSVADTLRQKVEDAVREHPDYRVVFTGHSLGGALATVAGADLRGNGYDIDVFSYGAPRVGNRAFAEFLTVQTGGTLYRITHTNDIVPRLPPREFGYSHSSPEYWIKSGTLVPVRRRDIVKIEGIDATGGNNQPNIPDIPAHLWYFGLIGTCL

SEQ ID NO: 8780 - protein, 269 aa, Thermomyces lanuginosus
EVSQDLFNQFNLFAQYSAAAYCGKNNRAPAGTNITCTANACPEVEKADATFLYSFEDSGVGDVTGFLALDNTNKLIVLSFRGTRSIENWIADLNFILQEINDICSGCRGHDGFTSSWRSVADTLRQKVEDAVREHPDYRVVFTGHSLGGALATVAGADLRGNKYDIDVFSYGAPRVGNRAFAEFLTVQTGGTLYRITHTNDIVPRLPPREFGYSHSSPEYWIKSGTLVPVRRRDIVKIEGIDATGGNNQPNIPSITAHLWYFGLIGTCL

SEQ ID NO: 8781 - protein, 269 aa, Thermomyces lanuginosus
EVSQDLFNQFNLFAQYSAAAYCGKNNRAPAGTNITCTANACPEVEKADATVLYSFEDSGVGDVTGFLALDNTNKLIVLSFRGSRSIENWIADLNFLLQEINDICSGCRGHAGFTSSWRSVADTLRQKVEDAVREHPDYRVVFTGHSLGGALATVAGADLRGNKYDIDVFSYGAPRVGNRAFAEFLTVQTGGTLYRITHTNDIVPRLPPREFGYSHSSPEYWIKSGTLVPVRRRDIVKIEGIDATGGNNQPNIPSTTAHLWYFGLIGTCL

SEQ ID NO: 8782 - protein, 269 aa, Synthetic construct
EVSQDLFNQFNLFAQYSAAAYCGKNNDAPAGTNITCTGNACPEVEKADATFLYSFEDSGVGDVTGFLALDNTDKLIVLSFRGSPSIENWIGNLNFDLKEIKDICSGCRGHDGFTSSWRSVADRLRQKVEDAVRDHPDYRVVFTGHSLGGALATVAGADLRGNGYDIDVFSYGAPRVGNRAFAEFLTVQTGGTLYRITHTNDIVPRLPPREFGYSHSSPEYWIKSGTLVPVTRNDIVKIEGIDAPGGNNQPNIPDVPAHLWYFGLIGTCL

SEQ ID NO: 8783 - protein, 192 aa, Humicola insolens
GAIENDLESGSADACPDAILIFARGSTEPGNMGITVGPALADGLESHIRNIWIQGVGGPYDAALATNFLPRGTSQANIDEGKRLFALANQKCPNTPVVAGGYSQGAALIAAAVSELSGAVKEQVKGVVLFGYTQNLQNRGGIPNYPRERTKVFCNVGDAVCTGTLIITPAHLSYTIEARGEAARFLRDRIRA

SEQ ID NO: 8784 - protein, 192 aa, Humicola insolens
GAIENDLESGSADACPDAILIFARGSTEPGNMGITVGPALANGLESHIRNIWIQGVGGPYDAALATNFLPRGTSQANIDEGKRLFALANQKCPNTPVVAGGYSQGAALIAAAVSELSGAVKEQVKGVALFGYTQNLQNRGGIPNYPRERTKVFCNVGDAVCTGTLIITPAHLSYTIEARGEAARFLRDRIRA

SEQ ID NO: 8785 - protein, 268 aa, Thermomyces lanuginosus
EVSQDLFNQFNLFAQYSAAAYCGKNNRAPAGTKITCTANACPEVEKADATVLYSFEDSGVGDVTGFLALDNTNKLIVLSFRGSRSIENWIGNRVPLKTINDICSGCRGHAGFTSSWRSVADTLRQKVEDAVREHPDYRVVFTGHSLGGALATVAGADLRGNKYDIDVFSYGAPRVGNRAFAEFLTVQTGGTLYRITHTNDIVPRLPPREFGYSHSSPEYWIKSGTLVPVRRRDIVKIEGIDATGGNNQPNIPSITAHLWYFGLIGTCL

SEQ ID NO: 8786 - protein, 268 aa, Thermomyces lanuginosus
VSQDLFNQFNLFAQYSAAAYCGKNNDAPAGTNITCTGNACPEVEKADATFLYSFEDAGSGDVTGFLALDNTNKLIVLSFRGSRSVENWIGNLNFDLIKINAICSGCRGHDGFTSSWRSVADTLRQKVEDAVREHPDYRVVFSGHSLGGGLATVAGADLRGNGYDIDVFSYGAPRVGNRAFAEFLTVQTGGTLYRITHTNDIVPRLPPREFGYSHPSPEYWIKSGTGVPVRRRDIVKIEGIDATGGNNQPNIPDAKAHLWYFGLIGTCL

SEQ ID NO: 8787 - protein, 268 aa, Thermomyces lanuginosus
VSQDLFNQFNLFAQYSAAAYCGKNNDAPAGTNITCTGNACPEVEKADATFLYSFEDSGVGDVTGFLALDNTNKLIVLSFRGSRSIENWIGNLNFDLKNISDICSGCRGHDGFTSSWRSVADTLRQKVEDAVREHPDYRVVFTGHSLGGALATVAGADLRGNGYDIDVFSYGAPRVGNRAFAEFLTVQTGGTLYRITHTNDIVPRLPPREFGYSHSSPEYWIKSGTLVPVKGNGIVKICGIDATGGNNRPNIPDIPAHLWYFGLIGTCL

SEQ ID NO: 8788 - protein, 268 aa, Thermomyces lanuginosus
VSQDLFNQFNLFAQYSAAAYCGKNNDAPAGTNITCTGNACPEVEKADATFLYSFEDSGVGDVTGFLALDNTNKLIVLSFRGSRSIENWIGNLNFSLKEINDICSGCRGHDGFTSSWRSVADTLRQKVEDAVREHPDYRVVFTGHSLGGALATVAGADLRGNGYDIDVFSYGAPRVGNRAFAEFLTVQTGGTLYRITHTNDIVPRLPPREFGYSHSSPEYWIKSGTLVPVTRNDIVKICGIDATGGNNRPNIPDIPAHLWYFFAISECL

SEQ ID NO: 8789 - protein, 269 aa, Thermomyces lanuginosus
VSQDLFNQFNLFAQYSAAAYCGKNNDAPAGTNITCTGNACPEVEKADATFLYSFEDSGVGDVTGFLALDNTNKLIVLSFRGSRSIENWIGNLNFSLKEINDICSGCRGHDGFTSSWRSVADTLRQKVEDAVREHPDYRVVFTGHSLGGALATVAGADLRGNGYDIDVFSYGAPRVGNRAFAEFLTVQTGGTLYRITHTNDIVPRLPPREFGYSHSSPEYWIKSGTLVPVTRNDIVKICGIDATGGNNRPNIPDIPAHLWYFDINEGSCL

SEQ ID NO: 8790 - protein, 268 aa, Synthetic construct
VSQDLFNQFNLFAQYSAAAYCGKNNDAPAGTNITCTGNACPEVEKADATFLYSFEDSGVGDVTGFLALDNTNKLIVLSFRGSRSIENWFGNLNFLLKKINDICSGCRGHDGFTSSWRSVADTLRQKVEDAVREHPDYRVVFTGHSLGGALATVAGADLRGNGYDIDVFSYGAPRVGNRAFAEFLTAQTGGTLYRITHRRDIVPRLPPAEFGYSHSSPEYWIKSGTLVPVTRNDIVKIEGIDATGGNNQPNIPDIPAHLWYFGLIGTCL

SEQ ID NO: 8791 - protein, 268 aa, Synthetic construct
EVSQDLFNQFNLFAQYSAAAYCGKNNDAPAGTNITCTGNACPEVEKADATFLYSFEDSGVGDVTGFLALDNTDKLIVLSFRGSPSIENWIGNLNFDLKEIKDICSGCRGHDGFTSSWRSVADRLRQKVEDAVRDHPDYRVVFTGHSLGGALATVAGADLRGNGYDIDVFSYGAPRVGNRAFAEFLTVQTGGTLYRITHTNDIVPRLPPREFGYSHSSPEYWIKSPTLVPVTRNDIVKIEGIDPGGNNQPNIPDIPAHLWYFGLIGTCL

SEQ ID NO: 8792 - protein, 268 aa, Thermomyces lanuginosus
VSQDLFNQFNLFAQYSAAAYCGKNNDAPAGTNITCTGNACPEVEKADATFLYSFEDSGVGDVTGFLALDNTNKLIVLSFRGSRSIENWIGNLNFDLKEINDICSGCRGHDGFTSSWRSVADTLRQKVEDAVREHPDYRVVFTGHSLGGALATVAGADLRGNGYDIDVFSYGAPRVGNRAFAEFLTVQTGGTLYRITHTNDIVPRLPPREFGYSHSSPEYWIKSGTLVPVTRNDIVKICGIDATGGNNRPNIPDIPAHLWYFQATDACL

SEQ ID NO: 8793 - protein, 268 aa, Synthetic construct
VSQDLFNQFNLFAQYSAAAYCGKNNDAPAGTNITCTGNACPEVEKADATFLYSFEDSGVGDVTGFLALDNTNKLIVLSFRGSRSIENWFGNLNFLLKKINDICSGCRGHDGFTSSWRSVADTLRQKVEDAVREHPGYRVVFTGHSLGGALATVAGADLRGNGYDIGVFSYGAPRVGNRAFAEFLTAQTGGTLYRITHTNDIVPRLPPREFGYSHSSPEYWIKSGTLVPVTRNDIVKIEGIDATGGNNRPNIPDIPAHLWYFGLIGTCL

SEQ ID NO: 8794 - protein, 267 aa, Thermomyces lanuginosus
EVSQDLFNQFNLFAQYSAAAYCGKNNDAPAGTNITCTGNACPEVEKADATFLYSFEDSGVGDVTGFLALDNTNKLIVLSFRGSRSIENWIANLNFWLKKINDICSGCRGHDGFTSSWRSVADTLRQKVEDAVREHPDYRVVFTGHSLGGALATVAGADLRGNGYDIDVFSYGAPRVGNRAFAEFLTVQTGGTLYRITHTNDIVPRLPPREFGYSHSSPEYWIKSGTLVPVTRNDIVKIEGIDATGGNNQKTFRYLAHLWYFQATDAC

SEQ ID NO: 8795 - protein, 274 aa, Thermomyces lanuginosus
SPIRREVSQDLFNQFNLFAQYSAAAYCGKNNDAPAGTNITCTGNACPEVEKADATFLYSFEDSGVGDVTGFLALDNTNKLIVLSFRGTGSDQNLQLETSYTLTEINDICSGCRGHDGFTSSWRSVADTLRQKVEDAVREHPDYRVVFTGHSLGGALATVAGADLRGNGYDIDVFSYGAPRVGNRAFAEFLTVQTGGTLYRITHTNDIVPRLPPREFGYSHSSPEYWIKSGTLVPVTRNDIVKIEGIDATGGNNQPNIPDIPAHLWYFGLIGTCL

SEQ ID NO: 8796 - protein, 274 aa, Thermomyces lanuginosus
SPIRREVSQDLFNQFNLFAQYSAAAYCGKNNDAPAGTNITCTGNACPEVEKADATFLYSFEDSGVGCVTGFLALDNTNKLIVLSFRGTGSDCNLQLDTNYTLTEINDICSGCRGHDGFTSSWRSVADTLRQKVEDAVREHPDYRVVFTGHSLGGALATVAGADLRGNGYDIDVFSYGAPRVGNRAFAEFLTVQTGGTLYRITHTNDIVPRLPPREFGYSHSSPEYWIKSGTLVPVTRNDIVKIEGIDATGGNNQPNIPDIPAHLWYFGLIGTCL

SEQ ID NO: 8797 - protein, 274 aa, Thermomyces lanuginosus
SPIRREVSQDLYNQFKLFAHYAAAAYCGKNNDAPAGTKITCTGNACPEVEKADATFIYSFEDSGVGDVTGFLALDNTNKLIVLSFRGSRSIENWIANLNFDLKEISDICSGCRGHRGFYNSWRSVADTLRQKVEDAVREYPDYRVVFTGHSLGGALATVAGADLRGNGYDIDVFSYGAPRVGNRAFAEFLTVQTGGTLYRITHTNDIVPRLPPREFGYSHSSPEYWIKSGTLVPVTRNDIVVIEGIDATGGNNQPNIPDIPAHLWYFGLIGTCL

SEQ ID NO: 8798 - protein, 291 aa, Thermomyces lanuginosus
MRSSLVLFFVSAWTALASPIRREVSQDLFNQFNLFAQYSAAAYCGKNNRAPAGTNITCTANACPEVEKADATFLYTFEDSGVGDVTGFLALDNTNKLIVLSFRGTRSIENWIADLEFLLQEINDICSGCRGHAGFTSSWRSVADTLRQKVEDAVREHPDYRVVFTGHSLGGALATVAGADLRGNKYDIDVFSYGAPRVGNRAFAEFLTVQTGGTLYRITHTNDIVPRLPPREFGYSHSSPEYWIKSGTLVPVRRRDIVKIEGIDATGGNNQPNIPSITAHLWYFGLIGTCV

SEQ ID NO: 8799 - protein, 291 aa, Thermomyces lanuginosus
MRSSLVLFFVSAWTALASPIRREVSEDLFNQFNLFAQYSAAAYCGKNNDAPAGTNITCTGNACPEVEKADATLLYSFRDSGVGDVTGFLALDNTNKLIVLSFRGTRSIENWIADLDFILIEINDICSGCRGHDGFTSSWFSVADTLRQKVEDAVREHPDYRVVFTGHSLGGALATVAGADLRGNGYDIDVFSYGAPRVGNRAFAEFLTVQTGGTLYRITHTNDIVPRLPPREFGYSHSSPEFWIKSGTLVPVRRRDIVKIEGIDAEGGNNQPNIPSIPAHLWYFGAIGTCL

SEQ ID NO: 8800 - protein, 291 aa, Thermomyces lanuginosus
MRSSLVLFFVSAWTALASPIRREVSQDLFNQFNLFAQYSAAAYCGKNNDAPAGTNITCTGNACPEVEKADATFLYSFEDSGVGCVTGFLALDNTNKLIVLSFRGTGSDCNLQLETSYTLTEINDICSGCRGHDGFTSSWRSVADTLRQKVEDAVREHPDYRVVFTGHSLGGALATVAGADLRGNGYDIDVFSYGAPRVGNRAFAEFLTVQTGGTLYRITHTNDIVPRLPPREFGYSHSSPEYWIKSGTLVPVRRRDIVKIEGIDATGGNNQPNIPDIPAHLWYFGLIGTCL

SEQ ID NO: 8801 - protein, 269 aa, Thermomyces lanuginosus
EVSQDLFNQFNLFAQYSAAAYCGKNNRAPAGTKITCTANACPEVEKADATVLYTFKDSGVGDVTGFLALDNTNKLIVLSFRGSRSIENWIGNLNFELIEINDICSGCRGHAGFTSSWRSVADTLRQKVEDAVREHPDYRVVFTGHSLGGALATVAGADLRGNKYDIDVFSYGAPRVGNRAFAEFLTVQTGGTLYRITHTNDIVPRLPPREFGYSHSSPEYWIKIGTLVPVRRRDIVKIEGIDATGGNNQPNIPSITAHLWYFGLIGTCL

SEQ ID NO: 8802 - protein, 269 aa, Thermomyces lanuginosus
EVSQDLFNQFNLFAQYSAAAYCGKNNRAPAGTKITCTANACPEVEKADATVLYSFKDSGVGDVTGFLARDNTNKLIVLSFRGSRSIENWIGNLNFELEEINDICSGCRGHAGFTSSWRSVADTLRQKVEDAVREHPDYRVVFTGHSLGGALATVAGADLRGNKYDIDVFSYGAPRVGNRAFAEFLTVQTGGTLYRITHTNDIVPRLPPREFGYSHSSPEYWIKSGTLPPVRRRDIVKIEGIDATGGNNQPNIPSITAHLWYFGLIGTCL

SEQ ID NO: 8803 - protein, 269 aa, Thermomyces lanuginosus
EVSQDLFNQFNLFAQYSAAAYCGKNNRAPAGTKITCTANACPEVEKADATILYTFKDSGVGDVTGFLALDNTNKLIVLSFRGSRSIENWIGNLNFELIEINDICSGCRGHAGFTSSWRSVADTLRQKVEDAVREHPDYRVVFTGHSLGGALATVAGADLRGNKYDIDVFSYGAPRVGNRAFAEFLTVQTGGTLYRITSTNDIVPRLPPREFGYSHSSPEYWIKSGTLVPVRRRDIVKIEGIDATGGNNQPNIPSITAHLWYFGLIGTCL

SEQ ID NO: 8804 - protein, 269 aa, Thermomyces lanuginosus
EVSQDLFNQFNLFAQYSAAAYCGKNNRAPAGTKITCTANACPEVEKADATLLYTFKDSGVGDVTGFLALDNTNKLIVLSFRGSRSIENWIGNLNFELIEINDICSGCRGHAGFTSSWRSVADTLRQKVEDAVREHPDYRVVFTGHSLGGALATVAGADLRGNKYDIDVFSYGAPRVGNRAFAEFLTVQTGGTLYRITHTNDIVPRLPPREFGYSHSSPEYWIKIGTLVPVRRRDIVKIEGIDATGGNNQPNIPSITAHLWYFGLIGTCL

SEQ ID NO: 8805 - protein, 269 aa, Thermomyces lanuginosus
EVSQDLFNQFNLFAQYSAAAYCGKNNRAPAGTKITCTANACPEVEKADATLLYTFKDSGVGDVTGFLALDNTNKLIVLSFRGSRSIENWIGNLNFELIEINDICSGCRGHAGFTSSWRSVADTLRQKVEDAVREHPDYRVVFAGHSLGGALATVAGADLRGNKYDIDVFSYGAPRVGNRAFAEFLTVQTGGTLYRITHTNDIVPRLPPREFGYSHSSPEYWIKSGTLVPVRRRDIVKIEGIDATGGNNQPNIPSITAHLWYFGLIGTCL

SEQ ID NO: 8806 - protein, 269 aa, Thermomyces lanuginosus
EVSQDLFNQFNLFAQYSAAAYCGKNNRAPAGTKITCTANACPEVEKADATVLYSFKDSGVGDVTGFLARDNTNKLIVLSFRGSRSIENWIGNLNFELEEINDICSGCRGHAGFTSSWRSVADTLRQKVEDAVREHPDYRVVFTGHSLGGALATVAGADLRGNKYDIDVFSYGAPRVGNRAFAEFLTDQTGGTLYRITHTNDIVPRLPPREFGYSHSSPEYWIKSGTLVPVRRRDIVKIEGIDATGGNNQPNIPSITAHLWYFGLIGTCL

SEQ ID NO: 8807 - protein, 269 aa, Thermomyces lanuginosus
EVSQDLFNQFNLFAQYSAAAYCGKNNRAPAGTQITCTGNACPEVEKADATFLYSFQNSGVGDVTGFLALDNTNKLIVLSFRGSRSIENWINNLRFDLKEINDICSGCRGHSGFTSSWRSVADTLRQKVEDAVREHPDYRVVFTGHSLGGALATVAGADLRGNTYDIDVFSYGAPRVGNRAFAEFLTVQTGGTLYRITHTNDIVPRLPPREFGYSHPSPEYWIKSGTGVPVRRRDIVKIEGIDATGGNNRPNIPSITAHLWYFGLIGTCL

SEQ ID NO: 8808 - protein, 269 aa, Thermomyces lanuginosus
EVSQDLFNQFNLFAQYSAAAYCGKNNRAPAGTNITCTANACPEVEKADATFLYSFEDSGVGDVTGFLALDNTNKLIVLSFRGTRSITNWIADLNYLLQEINDICSGCRGHAGFTSSWRSVADTLRQKVEDAVREHPDYRVVFTGHSLGGALATVAGADLRGNKYDIDVFSYGAPRVGNRAFAEFLTVQTGGTLYRITHTNDIVPRLPPREFGYSHSSPEYWIKSGTLVPVRRRDIVKIEGIDATGGNNQPNIPSITAHLWYFGLIGTCL

SEQ ID NO: 8809 - protein, 269 aa, Thermomyces lanuginosus
EVSQDLFNQFNLFAQYSAAAYCGKNNRAPAGTKITCTANACPEVEKADATILYSFKDSGVGDVTGFLARDNTNKLIVLSFRGSRSIENWIGNLNFELEEINDICSGCRGHAGFTSSWRSVADTLRQKVEDAVREHPDYRVVFTGHSLGGALATVAGADLRGNKYDIDVFSYGAPRVGNRAFAEFLTVQTGGTLYRITHTNDIVPRLPPREFGYSHSSPEYWIKPGTLVPVRRRDIVKIEGIDATGGNNQPNIPSITAHLWYFGLIGTCL

SEQ ID NO: 8810 - protein, 269 aa, Thermomyces lanuginosus
EVSQDLFNQFNLFAQYSAAAYCGKNNRAPAGTKITCTANACPEVEKADATLLYTFKDSGVGDVTGFLALDNTNKLIVLSFRGSRSIENWIGNLNFELIEINDICSGCRGHAGFTSSWRSVADTLRQKVEDAVREHPDYRVVFTGHSLGGALATVAGADLRGNKYDIDVFSYGAPRVGNRAFAEFLTVQTGGTLYRITHTNDIVPRLPPREFGYSHSSPEYWIKSGTLVPVRRRDIVKIEGIDATGGNNQPNIPSITIHLWYFGLIGTCL

SEQ ID NO: 8811 - protein, 269 aa, Thermomyces lanuginosus
EVSQDLFNQFNLFAQYSAAAYCGKNNRAPAGTKITCTANACPEVEKADATILYTFKDSGVGDVTGFLALDNTNKLIVLSFRGSRSIENWIGNLNFELIEINDICSGCRGHAGFTSSWRSVADTLRQKVEDAVREHPDYRVVFTGHSLGGALATVAGADLRGNKYDIDVFSYGAPRVGNRAFAEFLTVQTGGTLYRITHTNDIVPRLPPREFGYSHSSPEYWIKSGTLVPVRRRDIVKIEGIDATGGNNQPNIPSGTAHLWYFGLIGTCL

SEQ ID NO: 8812 - protein, 269 aa, Thermomyces lanuginosus
EVSQDLFNQFNLFAQYSAAAYCGKNNRAPAGTKITCTANACPEVEKADATILYSFKDSGVGDVTGFLARDNTNKLIVLSFRGSRSIENWIGNLNFELEEINDICSGCRGHAGFTSSWRSVADTLRQKVEDAVREHPDYRVVFTGHSLGGALATVAGADLRGNKYDIDVFSYGAPRVGNRAFAEFLTVQTGGTLYRITHTNDIVPRLPPREFGYSHSSPEYWIKSGTLVPRRRRDIVKIEGIDATGGNNQPNIPSITAHLWYFGLIGTCL

SEQ ID NO: 8813 - protein, 269 aa, Thermomyces lanuginosus
EVSQDLFNQFNLFAQYSAAAYCGKNNRAPAGTKITCTANACPEVEKADATVLYSFEDSGVGDVTGFLARDNTNKLIVLSFRGSRSIENWIGNLNFELEEIDDICSGCRGHAGFTSSWRSVADTLRQKVEDAVREHPDYRVVFTGHSLGGALATVAGADLRGNKYDIDVFSYGAPRVGNRAFAEFLTVQTGGTLYRITHTNDIVPRLPPREFGYSHSSPEFWIKSGTLVPVRRRDIVKIEGIDATGGNNQPNIPSITAHLWYFGLIGTCL

SEQ ID NO: 8814 - protein, 269 aa, Thermomyces lanuginosus
EVSQDLFNQFNLFAQYSAAAYCGKNNRAPAGTKITCTANACPEVEKADATVLYTFKDSGVGDVTGFLALDNTNKLIVLSFRGSRSIENWIGNLNFELIEINDICSGCRGHAGFTSSWRSVADTLRQKVEDAVREHPDYRVVFTGHSLGGALATVAGADLRGNKYDIDVFSYGAPRVGNRAFAEFLTVQTGGTLYRITHTNDIVPRLPPREFGYSHSSPEYWIKSGTLVPRRRRDIVKIEGIDATGGNNQPNIPSITAHLWYFGLIGTCL

SEQ ID NO: 8815 - protein, 269 aa, Thermomyces lanuginosus
EVSQDLFNQFNLFAQYSAAAYCGKNNRAPAGTKITCTANACPEVEKADATVLYSFKDSGVGDVTGFLARDNTNKLIVLSFRGSRSIENWIGNLNFELEEINDICSGCRGHAGFTSSWRSVADTLRQKVEDAVREHPDYRVVFTGHSLGGALATVAGADLRGNKYDIDVFSYGAPRVGNRAFAEFLTVQTGGTLYRITHTNDIVPRLPPREFGYSHSSPEYWIKSGTLVPVRRRDIVKIEGIDATGGNNQPNIPSITIHLWYFGLIGTCL

SEQ ID NO: 8816 - protein, 269 aa, Thermomyces lanuginosus
EVSQDLFNQFNLFAQYSAAAYCGKNNRAPAGTKITCTANACPEVEKADATLLYSFKDSGVGDVTGFLARDNTNKLIVLSFRGSRSIENWIGNLNFELEEINDICSGCRGHAGFTSSWRSVADTLRQKVEDAVREHPDYRVVFTGHSLGGALATVAGADLRGNKYDIDVFSYGAPRVGNRAFAEFLTVQTGGTLYRITHTNDIVPRLPPREFGYSHSSPEYWIKSGTLPPVRRRDIVKIEGIDATGGNNQPNIPSITAHLWYFGLIGTCL

SEQ ID NO: 8817 - protein, 269 aa, Thermomyces lanuginosus
EVSQDLFNQFNLFAQYSAAAYCGKNNRAPAGTKITCTANACPEVEKADATFLYSFEDSGVGDVTGFLALDNTNKLIVLSFRGSRSIENWIGNLNFELVEINDICSGCRGHAGFTSSWRSVADTLRQKVEDAVREHPDYRVVFTGHSLGGALATVAGADLRGNKYDIDVFSYGAPRLGNRAFAEFLTVQTGGTLYRITHTNDIVPRLPPREFGYSHSSPEFWIKSGTLVPVRRRDIVKIEGIDATGGNNQPNIPSITAHLYYFGLIGTCV

SEQ ID NO: 8818 - protein, 269 aa, Thermomyces lanuginosus
EVSQDLFNQFNLFAQYSAAAYCGKNNRAPAGTKITCTANACPEVEKADATVLYTFKDSGVGDVTGFLALDNTNKLIVLSFRGSRSIENWIGNLNFELIEINDICSGCRGHAGFTSSWRSVADTLRQKVEDAVREHPDYRVVFTGHSLGGALATVAGADLRGNKYDIDVFSYGAPRVGNRAFAEFLTVQTGGTLYRITSTNDIVPRLPPREFGYSHSSPEYWIKSGTLVPVRRRDIVKIEGIDATGGNNQPNIPSITAHLWYFGLIGTCL

SEQ ID NO: 8819 - protein, 269 aa, Thermomyces lanuginosus
EVSQDLFNQFNLFAQYSAAAYCGKNNRAPAGTQITCTGNACPEVEKADATFIYSFEDSGEGDVTGFLALDNTNKLIVLSFRGSRSIENWINNLRFDLKEINDICSGCRGHAGFISSWRSVADTLRQKVEDAVREHPDYRVVFTGHSLGGALATVAGADLRGNGYDIDMFSYGAPRVGNRAFAEFLTVQTGGTLYRITHTNDIVPRLPPRDFGYSHPSPEYWIKSGTGVPVRRRDIVKIEGIDATGGNNQPNIPDITAHLWYFGLIGTCL

SEQ ID NO: 8820 - protein, 269 aa, Thermomyces lanuginosus
EVSQDLFNQFNLFAQYSAAAYCGKNNRAPAGTKITCTANACPEVEKADATILYTFKDSGVGDVTGFLALDNTNKLIVLSFRGSRSIENWIGNLNFELIEINDICSGCRGHAGFTSSWRSVADTLRQKVEDAVREHPDYRVVFTGHSLGGALATVAGADLRGNKYDIDVFSYGAPRVGNRAFAEFLTVQTGGTLYRITYTNDIVPRLPPREFGYSHSSPEYWIKSGTLVPVRRRDIVKIEGIDATGGNNQPNIPSITAHLWYFGLIGTCL

SEQ ID NO: 8821 - protein, 269 aa, Thermomyces lanuginosus
EVSQDLFNQFNLFAQYSAAAYCGKNNRAPAGTKITCTANACPEVEKADATLLYTFKDSGVGDVTGFLALDNTNKLIVLSFRGSRSIENWIGNLNFELIEINDICSGCRGHAGFTSSWRSVADTLRQKVEDAVREHPDYRVVFTGHSLGGALATVAGADLRGNKYDIDVFSYGAPRVGNRAFAEFLTVQTGGTLYRITHTNDIVPRLPPREFGYSHSSPEYWIKSGTLVPVRRRDIVKIEGIDATGGNNQPNIPSITVHLWYFGLIGTCL

SEQ ID NO: 8822 - protein, 269 aa, Thermomyces lanuginosus
EYSQDLFNQFNLFAQYSAAAYCGKNNRAPAGTNITCTANACPEVEKADATFLYTFEDSGVGDVTGFLALDNTNKLIVLSFRGSRSIENWIGNLNFELTEIDDICSGCRGHAGFTSSWRSVADTLRQKVEDAVREHPDYRVVFTGHSLGGALATVAGADLRGNPYDIDVFSYGAPRLGNRAFAEFLTVQTGGTLYRITHTNDIVPRLPPREFGYSHSSPEYWIKSGTLVPVRRRDIVKIEGIDATGGNNQPNIPSITAHLYYFGLIGTCL

SEQ ID NO: 8823 - protein, 269 aa, Thermomyces lanuginosus
EVSQDLFNQFNLFAQYSAAAYCGKNNRAPAGTKITCTANACPEVEKADATVLYSFKDSGVGDVTGFLARDNTNKLIVLSFRGSRSIENWIGNLNFELEEINDICSGCRGHAGFTSSWRSVADTLRQKVEDAVREHPDYRVVFTGHSLGGALATVAGADLRGNKYDIDVFSYGAPRVGNRAFAEFLTVQTGGTLYRITHTNDIVPRLPPREFGYSHSSPEYWIKSGTLVPVRRRDIVKIEGIDATGGNNQPNIPSITVHLWYFGLIGTCL

SEQ ID NO: 8824 - protein, 269 aa, Thermomyces lanuginosus
EVSQDLFNQFNLFAQYSAAAYCGKNNRAPAGTKITCTANACPEVEKADATVLYSFKDSGVGDVTGFLARDNTNKLIVLSFRGSRSIENWIGNLNFELEEINDICSGCRGHAGFTSSWRSVADTLRQKVEDAVREHPDYRVVFTGHSLGGALATVAGADLRGNKYDIDVFSYGAPRVGNRAFAEFLTVQTGGTLYRITSTNDIVPRLPPREFGYSHSSPEYWIKSGTLVPVRRRDIVKIEGIDATGGNNQPNIPSITAHLWYFGLIGTCL

SEQ ID NO: 8825 - protein, 269 aa, Thermomyces lanuginosus
EVSQDLFNQFRLFAQYSAAAYCGKNNRAPAGTQITCTGNACPEVEKADATFLYSFQNSGVGDVTGFLALDNTNKLIVLSFRGSRSIENWINNLRFDLKEINDICSGCRGHSGFTSSWRSVADTLRQKVEDAVREHPDYRVVFTGHSLGGALATVAGADLRGNTYDIDVFSYGAPRVGNRAFAEFLTVQTGGTLYRITHTNDIVPRLPPREFGYSHPSPEYWIKSGTGVPVRRRDIVKIEGIDATGGNNQPNIPSITAHLWYFGLIGTCL

SEQ ID NO: 8826 - protein, 269 aa, Thermomyces lanuginosus
EVSQDLFNQFNLFAQYSAAAYCGKNNRAPAGTKITCTANACPEVEKADATLLYSFKDSGVGDVTGFLARDNTNKLIVLSFRGSRSIENWIGNLNFELEEINDICSGCRGHAGFTSSWRSVADTLRQKVEDAVREHPDYRVVFTGHSLGGALATVAGADLRGNKYDIDVFSYGAPRVGNRAFAEFLTVQTGGTLYRITYTNDIVPRLPPREFGYSHSSPEYWIKSGTLVPVRRRDIVKIEGIDATGGNNQPNIPSITAHLWYFGLIGTCL

SEQ ID NO: 8827 - protein, 269 aa, Thermomyces lanuginosus
EVSQDLFNQFNLFAQYSAAAYCGKNNRAPAGTKITCTANACPEVEKADATVLYSFKDSGVGDVTGFLARDNTNKLIVLSFRGSRSIENWIGNLNFELEEINDICSGCRGHAGFTSSWRSVADTLRQKVEDAVREHPDYRVVFTGHSLGGALATVAGADLRGNKYDIDVFSYGAPRVGNRAFAEFLTVQTGGTLYRITLTNDIVPRLPPREFGYSHSSPEYWIKSGTLVPVRRRDIVKIEGIDATGGNNQPNIPSITAHLWYFGLIGTCL

SEQ ID NO: 8828 - protein, 269 aa, Thermomyces lanuginosus
EVSQDLFNQFNLFAQYSAAAYCGKNNRAPAGTKITCTANACPEVEKADATILYSFKDSGVGDVTGFLARDNTNKLIVLSFRGSRSIENWIGNLNFELEEINDICSGCRGHAGFTSSWRSVADTLRQKVEDAVREHPDYRVVFTGHSLGGALATVAGADLRGNKYDIDVFSYGAPRVGNRAFAEFLTVQTGGTLYRITNTNDIVPRLPPREFGYSHSSPEYWIKSGTLVPVRRRDIVKIEGIDATGGNNQPNIPSITAHLWYFGLIGTCL

SEQ ID NO: 8829 - protein, 269 aa, Thermomyces lanuginosus
EVSQDLFNQFNLFAQYSAAAYCGKNNRAPAGTKITCTANACPEVEKADATVLYSFKDSGVGDVTGFLARDNTNKLIVLSFRGSRSIENWIGNLNFELEEINDICSGCRGHAGFTSSWRSVADTLRQKVEDAVREHPDYRVVFTGHSLGGALATVAGADLRGNKYDIDVFSYGAPRVGNRAFAEFLTVQTGGTLYRITITNDIVPRLPPREFGYSHSSPEYWIKSGTLVPVRRRDIVKIEGIDATGGNNQPNIPSITAHLWYFGLIGTCL

SEQ ID NO: 8830 - protein, 269 aa, Thermomyces lanuginosus
EVSQDLFNQFNLFAQYSAAAYCGKNNRAPAGTKITCTANACPEVEKADATILYSFKDSGVGDVTGFLARDNTNKLIVLSFRGSRSIENWIGNLNFELEEINDICSGCRGHAGFTSSWRSVADTLRQKVEDAVREHPDYRVVFTGHSLGGGLATVAGADLRGNKYDIDVFSYGAPRVGNRAFAEFLTVQTGGTLYRITHTNDIVPRLPPREFGYSHSSPEYWIKSGTLVPVRRRDIVKIEGIDATGGNNQPNIPSITAHLWYFGLIGTCL

SEQ ID NO: 8831 - protein, 269 aa, Thermomyces lanuginosus
EVSQDLFNQFNLFAQYSAAAYCGKNNRAPAGTKITCTANACPEVEKADATVLYSFKDSGVGDVTGFLARDNTNKLIVLSFRGSRSIENWIGNLNFELEEINDICSGCRGHAGFTSSWRSVADTLRQKVEDAVREHPDYRVVFTGHSLGGALATVAGADLRGNKYDIDVFSYGAPRVGNRAFAEFLTVQTGGTLYRITHTNDIVPRLPPREFGYSHSSPEYWIKSPTLVPVRRRDIVKIEGIDATGGNNQPNIPSITAHLWYFGLIGTCL

SEQ ID NO: 8832 - protein, 269 aa, Thermomyces lanuginosus
EVSQDLFNQFNLFAQYSAAAYCGKNNRAPAGTKITCTANACPEVEKADATLLYTFKDSGVGDVTGFLALDNTNKLIVLSFRGSRSIENWIGNLNFELIEINDICSGCRGHAGFTSSWRSVADTLRQKVEDAVREHPDYRVVFTGHSLGGALATVAGADLRGNKYDIDVFSYGAPRVGNRAFAEFLTVQTGGTLYRITNTNDIVPRLPPREFGYSHSSPEYWIKSGTLVPVRRRDIVKIEGIDATGGNNQPNIPSITAHLWYFGLIGTCL

SEQ ID NO: 8833 - protein, 269 aa, Thermomyces lanuginosus
EVSQDLFNQFNLFAQYSAAAYCGKNNRAPAGTKITCTANACPEVEKADATVLYTFKDSGVGDVTGFLALDNTNKLIVLSFRGSRSIENWIGNLNFELIEINDICSGCRGHAGFTSSWRSVADTLRQKVEDAVREHPDYRVVFTGHSLGGALATVAGADLRGNKYDIDVFSYGAPRVGNRAFAEFLTVQTGGTLYRITHTNDIVPRLPPREFGYSHSSPEYWIKSGTLVPVRRRDIVKIEGIDATGGNNQPNIPSITVHLWYFGLIGTCL

SEQ ID NO: 8834 - protein, 269 aa, Thermomyces lanuginosus
EVSQDLFNQFNLFAQYSAAAYCGKNNRAPAGTKITCTANACPEVEKADATLLYSFKDSGVGDVTGFLARDNTNKLIVLSFRGSRSIENWIGNLNFELEEINDICSGCRGHAGFTSSWRSVADTLRQKVEDAVREHPDYRVVFTGHSLGGALATVAGADLRGNKYDIDVFSYGAPRVGNRAFAEFLTVQTGGTLYRITLTNDIVPRLPPREFGYSHSSPEYWIKSGTLVPVRRRDIVKIEGIDATGGNNQPNIPSITAHLWYFGLIGTCL

SEQ ID NO: 8835 - protein, 269 aa, Thermomyces lanuginosus
EVSQDLFNQFNLFAQYSAAAYCGKNNRAPAGTKITCTANACPEVEKADATVLYSFKDSGVGDVTGFLARDNTNKLIVLSFRGSRSIENWIGNLNFELEEINDICSGCRGHAGFTSSWRSVADTLRQKVEDAVREHPDYRVVFTGHSLGGALATVAGADLRGNKYDIDVFSYGAPRVGNRAFAEFLTVQTGGTLYRITHTNDIVPRLPPREFGYSHSSPEYWIKFGTLVPVRRRDIVKIEGIDATGGNNQPNIPSITAHLWYFGLIGTCL

SEQ ID NO: 8836 - protein, 269 aa, Thermomyces lanuginosus
EVSQDLFNQFNLFAQYSAAAYCGKNNRAPAGTNITCTANACPEVEKADATFLYSFEDSGVGDVTGFLALDNTNKLIVLSFRGTRSIENWIADLNYLPQEINDICSGCRGHAGFTSSWRSVADTLRQKVEDAVREHPDYRVVFTGHSLGGALATVAGADLRGNKYDIDVFSYGAPRVGNRAFAEFLTVQTGGTLYRITHTNDIVPRLPPREFGYSHSSPEYWIKSGTLVPVRRRDIVKIEGIDATGGNNQPNIPSITAHLWYFGLIGTCL

SEQ ID NO: 8837 - protein, 269 aa, Thermomyces lanuginosus
EVSQDLFNQFNLFAQYSAAAYCGKNNRAPAGTKITCTANACPEVEKADATVLYTFKDSGVGDVTGFLALDNTNKLIVLSFRGSRSIENWIGNLNFELIEINDICSGCRGHAGFTSSWRSVADTLRQKVEDAVREHPDYRVVFTGHSLGGALATVAGADLRGNKYDIDVFSYGAPRVGNRAFAEFLTVQTGGTLYRITYTNDIVPRLPPREFGYSHSSPEYWIKSGTLVPVRRRDIVKIEGIDATGGNNQPNIPSITAHLWYFGLIGTCL

SEQ ID NO: 8838 - protein, 269 aa, Thermomyces lanuginosus
EVSQDLFNQFNLFAQYSAAAYCGKNNRAPAGTKITCTANACPEVEKADATVLYSFEDSGVGDVTGFLALDNTNKLIVLSFRGSRSIENWIGNLNFELIEIDDICSGCRGHAGFTSSWRSVADTLRQKVEDAVREHPDYRVVFTGHSLGGALATVAGADLRGNKYDIDVFSYGAPRVGNRAFAEFLTVQTGGTLYRITHTNDIVPRLPPREFGYSHSSPEFWIKSGTLVPVRRRDIVKIEGIDATGGNNQPNIPSITAHLWYFGLIGTCV

SEQ ID NO: 8839 - protein, 269 aa, Thermomyces lanuginosus
EVSQDLFNQFNLFAQYSAAAYCGKNNRAPAGTKITCTANACPEVEKADATVLYSFKDSGVGDVTGFLARDNTNKLIVLSFRGSRSIENWIGNLNFELEEINDICSGCRGHAGFTSSWRSVADTLRQKVEDAVREHPDYRVVFTGHSLGGALATVAGADLRGNKYDIDVFSYGAPRVGNRAFAEFLTVQTGGTLYRITNTNDIVPRLPPREFGYSHSSPEYWIKSGTLVPVRRRDIVKIEGIDATGGNNQPNIPSITAHLWYFGLIGTCL

SEQ ID NO: 8840 - protein, 269 aa, Thermomyces lanuginosus
EVSQDLFNQFNLFAQYSAAAYCGKNNRAPAGTKITCTANACPEVEKADATVLYTFKDSGVGDVTGFLALDNTNKLIVLSFRGSRSIENWIGNLNFELIEINDICSGCRGHAGFTSSWRSVADTLRQKVEDAVREHPDYRVVFTGHSLGGALATVAGADLRGNKYDIDVFSYGAPRVGNRAFAEFLTVQTGGTLYRITHTNDIVPRLPPREFGYSHSSPEYWIKPGTLVPVRRRDIVKIEGIDATGGNNQPNIPSITAHLWYFGLIGTCL

SEQ ID NO: 8841 - protein, 269 aa, Thermomyces lanuginosus
EVSQDLFNQFNLFAQYSAAAYCGKNNRAPAGTKITCTANACPEVEKADATILYSFKDSGVGDVTGFLARDNTNKLIVLSFRGSRSIENWIGNLNFELEEINDICSGCRGHAGFTSSWRSVADTLRQKVEDAVREHPDYRVVFTGHSLGGALATVAGADLRGNKYDIDVFSYGAPRVGNRAFAEFLTVQTGGTLYRITHTNDIVPRLPPREFGYSHSSPEYWIKSGTLVPVRRRDIVKIEGIDATGGNNQPNIPSITIHLWYFGLIGTCL

SEQ ID NO: 8842 - protein, 269 aa, Thermomyces lanuginosus
EVSQDLFNQFNLFAQYSAAAYCGKNNRAPAGTKITCTANACPEVEKADATLLYSFKDSGVGDVTGFLARDNTNKLIVLSFRGSRSIENWIGNLNFELEEINDICSGCRGHAGFTSSWRSVADTLRQKVEDAVREHPDYRVVFTGHSLGGALATVAGADLRGNKYDIDVFSYGAPRVGNRAFAEFLTVQTGGTLYRITHTNDIVPRLPPREFGYSHSSPEYWIKIGTLVPVRRRDIVKIEGIDATGGNNQPNIPSITAHLWYFGLIGTCL

SEQ ID NO: 8843 - protein, 269 aa, Thermomyces lanuginosus
EVSQDLFNQFNLFAQYSAAAYCGKNNRAPAGTKITCTANACPEVEKADATILYSFKDSGVGDVTGFLARDNTNKLIVLSFRGSRSIENWIGNLNFELEEINDICSGCRGHAGFTSSWRSVADTLRQKVEDAVREHPDYRVVFTGHSLGGALATVAGADLRGNKYDIDVFSYGAPRVGNRAFAEFLTVQTGGTLYRITHTNDIVPRLPPREFGYSHSSPEYWIKSGTLVPVRRRDIVKIEGIDATGGNNQPNIPSGTAHLWYFGLIGTCL

SEQ ID NO: 8844 - protein, 269 aa, Thermomyces lanuginosus
EVSQDLFNQFNLFAQYSAAAYCGKNNRAPAGTKITCTANACPEVEKADATLLYSFKDSGVGDVTGFLARDNTNKLIVLSFRGSRSIENWIGNLNFELEEINDICSGCRGHAGFTSSWRSVADTLRQKVEDAVREHPDYRVVFTGHSLGGALATVAGADLRGNKYDIDVFSYGAPRVGNRAFAEFLTVQTGGTLYRITHTNDIVPRLPPREFGYSHSSPEYWIKPGTLVPVRRRDIVKIEGIDATGGNNQPNIPSITAHLWYFGLIGTCL

SEQ ID NO: 8845 - protein, 269 aa, Thermomyces lanuginosus
EVSQDLFNQFNLFAQYSAAAYCGKNNRAPAGTKITCTANACPEVEKADATILYTFKDSGVGDVTGFLALDNTNKLIVLSFRGSRSIENWIGNLNFELIEINDICSGCRGHAGFTSSWRSVADTLRQKVEDAVREHPDYRVVFTGHSLGGGLATVAGADLRGNKYDIDVFSYGAPRVGNRAFAEFLTVQTGGTLYRITHTNDIVPRLPPREFGYSHSSPEYWIKSGTLVPVRRRDIVKIEGIDATGGNNQPNIPSITAHLWYFGLIGTCL

SEQ ID NO: 8846 - protein, 269 aa, Thermomyces lanuginosus
EVSQDLFNQFNLFAQYSAAAYCGKNNRAPAGTKITCTANACPEVEKADATVLYSFKDSGVGDVTGFLARDNTNKLIVLSFRGSRSIENWIGNLNFELEEINDICSGCRGHAGFTSSWRSVADTLRQKVEDAVREHPDYRVVFTGHSLGGALATVAGADLRGNKYDIDVFSYGAPRVGNRAFAEFLTVQTGGTLYRITYTNDIVPRLPPREFGYSHSSPEYWIKSGTLVPVRRRDIVKIEGIDATGGNNQPNIPSITAHLWYFGLIGTCL

SEQ ID NO: 8847 - protein, 269 aa, Thermomyces lanuginosus
EVSQDLFNQFNLFAQYSAAAYCGKNNRAPAGTKITCTANACPEVEKADATLLYSFKDSGVGDVTGFLARDNTNKLIVLSFRGSRSIENWIGNLNFELEEINDICSGCRGHAGFTSSWRSVADTLRQKVEDAVREHPDYRVVFAGHSLGGALATVAGADLRGNKYDIDVFSYGAPRVGNRAFAEFLTVQTGGTLYRITHTNDIVPRLPPREFGYSHSSPEYWIKSGTLVPVRRRDIVKIEGIDATGGNNQPNIPSITAHLWYFGLIGTCL

SEQ ID NO: 8848 - protein, 269 aa, Thermomyces lanuginosus
EVSQDLFNQFNLFAQYSAAAYCGKNNRAPAGTKITCTANACPEVEKADATVLYTFKDSGVGDVTGFLALDNTNKLIVLSFRGSRSIENWIGNLNFELIEINDICSGCRGHAGFTSSWRSVADTLRQKVEDAVREHPDYRVVFTGHSLGGALATVAGADLRGNKYDIDVFSYGAPRVGNRAFAEFLTVQTGGTLYRITHTNDIVPRLPPREFGYSHSSPEYWIKSGTLVPVRRRDIVKIEGIDATGGNNQPNIPSITIHLWYFGLIGTCL

SEQ ID NO: 8849 - protein, 269 aa, Thermomyces lanuginosus
EVSQDLFNQFNLFAQYSAAAYCGKNNRAPAGTKITCTANACPEVEKADATLLYTFKDSGVGDVTGFLALDNTNKLIVLSFRGSRSIENWIGNLNFELIEINDICSGCRGHAGFTSSWRSVADTLRQKVEDAVREHPDYRVVFTGHSLGGALATVAGADLRGNKYDIDVFSYGAPRVGNRAFAEFLTVQTGGTLYRITHTNDIVPRLPPREFGYSHSSPEYWIKSGTLVPVRRRDIVKIEGIDATGGNNQPNIPSGTAHLWYFGLIGTCL

SEQ ID NO: 8850 - protein, 269 aa, Thermomyces lanuginosus
EVSQDLFNQFNLFAQYSAAAYCGKNNRAPAGTKITCTANACPEVEKADATILYSFKDSGVGDVTGFLARDNTNKLIVLSFRGSRSIENWIGNLNFELEEINDICSGCRGHAGFTSSWRSVADTLRQKVEDAVREHPDYRVVFTGHSLGGALATVAGADLRGNKYDIDVFSYGAPRVGNRAFAEFLTVQTGGTLYRITSTNDIVPRLPPREFGYSHSSPEYWIKSGTLVPVRRRDIVKIEGIDATGGNNQPNIPSITAHLWYFGLIGTCL

SEQ ID NO: 8851 - protein, 269 aa, Thermomyces lanuginosus
EVSQDLFNQFNLFAQYSAAAYCGKNNRAPAGTKITCTANACPEVEKADATLLYSFKDSGVGDVTGFLARDNTNKLIVLSFRGSRSIENWIGNLNFELEEINDICSGCRGHAGFTSSWRSVADTLRQKVEDAVREHPDYRVVFTGHSLGGALATVAGADLRGNKYDIDVFSYGAPRVGNRAFAEFLTVQTGGTLYRITNTNDIVPRLPPREFGYSHSSPEYWIKSGTLVPVRRRDIVKIEGIDATGGNNQPNIPSITAHLWYFGLIGTCL

SEQ ID NO: 8852 - protein, 269 aa, Thermomyces lanuginosus
EVSQDLFNQFNLFAQYSAAAYCGKNNRAPAGTKITCTANACPEVEKADATILYTFKDSGVGDVTGFLALDNTNKLIVLSFRGSRSIENWIGNLNFELIEINDICSGCRGHAGFTSSWRSVADTLRQKVEDAVREHPDYRVVFTGHSLGGALATVAGADLRGNKYDIDVFSYGAPRVGNRAFAEFLTVQTGGTLYRITITNDIVPRLPPREFGYSHSSPEYWIKSGTLVPVRRRDIVKIEGIDATGGNNQPNIPSITAHLWYFGLIGTCL

SEQ ID NO: 8853 - protein, 269 aa, Thermomyces lanuginosus
EVSQDLFNQFNLFAQYSAAAYCGKNNRAPAGTKITCTANACPEVEKADATILYTFKDSGVGDVTGFLALDNTNKLIVLSFRGSRSIENWIGNLNFELIEINDICSGCRGHAGFTSSWRSVADTLRQKVEDAVREHPDYRVVFAGHSLGGALATVAGADLRGNKYDIDVFSYGAPRVGNRAFAEFLTVQTGGTLYRITHTNDIVPRLPPREFGYSHSSPEYWIKSGTLVPVRRRDIVKIEGIDATGGNNQPNIPSITAHLWYFGLIGTCL

SEQ ID NO: 8854 - protein, 269 aa, Thermomyces lanuginosus
EVSQDLFNQFNLFAQYSAAAYCGKNNRAPAGTKITCTANACPEVEKADATLLYSFKDSGVGDVTGFLARDNTNKLIVLSFRGSRSIENWIGNLNFELEEINDICSGCRGHAGFTSSWRSVADTLRQKVEDAVREHPDYRVVFTGHSLGGALATVAGADLRGNKYDIDVFSYGAPRVGNRAFAEFLTVQTGGTLYRITHTNDIVPRLPPREFGYSHSSPEYWIKSGTDVPVRRRDIVKIEGIDATGGNNQPNIPSITAHLWYFGLIGTCL

SEQ ID NO: 8855 - protein, 269 aa, Thermomyces lanuginosus
EVSQDLFNQFNLFAQYSAAAYCGKNNRAPAGTKITCTANACPEVEKADATLLYSFKDSGVGDVTGFLARDNTNKLIVLSFRGSRSIENWIGNLNFELEEINDICSGCRGHAGFTSSWRSVADTLRQKVEDAVREHPDYRVVFTGHSLGGALATVAGADLRGNKYDIDVFSYGAPRVGNRAFAEFLTVQTGGTLYRITHTNDIVPRLPPREFGYSHSSPEYWIKSGTLVPVRRRDIVKIEGIDATGGNNQPNIPSITIHLWYFGLIGTCL

SEQ ID NO: 8856 - protein, 269 aa, Thermomyces lanuginosus
EVSQDLFNQFNLFAQYSAAAYCGKNNRAPAGTKITCTANACPEVEKADATLLYTFKDSGVGDVTGFLALDNTNKLIVLSFRGSRSIENWIGNLNFELIEINDICSGCRGHAGFTSSWRSVADTLRQKVEDAVREHPDYRVVFTGHSLGGALATVAGADLRGNKYDIDVFSYGAPRVGNRAFAEFLTVQTGGTLYRITSTNDIVPRLPPREFGYSHSSPEYWIKSGTLVPVRRRDIVKIEGIDATGGNNQPNIPSITAHLWYFGLIGTCL

SEQ ID NO: 8857 - protein, 269 aa, Thermomyces lanuginosus
EVSQDLFNQFNLFAQYSAAAYCGKNNRAPAGTKITCTANACPEVEKADATLLYSFKDSGVGDVTGFLARDNTNKLIVLSFRGSRSIENWIGNLNFELEEINDICSGCRGHAGFTSSWRSVADTLRQKVEDAVREHPDYRVVFTGHSLGGALATVAGADLRGNKYDIDVFSYGAPRVGNRAFAEFLTVQTGGTLYRITSTNDIVPRLPPREFGYSHSSPEYWIKSGTLVPVRRRDIVKIEGIDATGGNNQPNIPSITAHLWYFGLIGTCL

SEQ ID NO: 8858 - protein, 269 aa, Thermomyces lanuginosus
EVSQDLFNQFNLFAQYSAAAYCGKNNRAPAGTKITCTANACPEVEKADATILYTFKDSGVGDVTGFLALDNTNKLIVLSFRGSRSIENWIGNLNFELIEINDICSGCRGHAGFTSSWRSVADTLRQKVEDAVREHPDYRVVFTGHSLGGALATVAGADLRGNKYDIDVFSYGAPRVGNRAFAEFLTVQTGGTLYRITNTNDIVPRLPPREFGYSHSSPEYWIKSGTLVPVRRRDIVKIEGIDATGGNNQPNIPSITAHLWYFGLIGTCL

SEQ ID NO: 8859 - protein, 269 aa, Thermomyces lanuginosus
EVSQDLFNQFNLFAQYSAAAYCGKNNRAPAGTKITCTANACPEVEKADATILYSFKDSGVGDVTGFLARDNTNKLIVLSFRGSRSIENWIGNLNFELEEINDICSGCRGHAGFTSSWRSVADTLRQKVEDAVREHPDYRVVFTGHSLGGALATVAGADLRGNKYDIDVFSYGAPRVGNRAFAEFLTVQTGGTLYRITHTNDIVPRLPPREFGYSHSSPEYWIKFGTLVPVRRRDIVKIEGIDATGGNNQPNIPSITAHLWYFGLIGTCL

SEQ ID NO: 8860 - protein, 269 aa, Thermomyces lanuginosus
EVSQDLFNQFNLFAQYSAAAYCGKNNRAPAGTKITCTANACPEVEKADATLLYTFKDSGVGDVTGFLALDNTNKLIVLSFRGSRSIENWIGNLNFELIEINDICSGCRGHAGFTSSWRSVADTLRQKVEDAVREHPDYRVVFTGHSLGGALATVAGADLRGNKYDIDVFSYGAPRVGNRAFAEFLTVQTGGTLYRITYTNDIVPRLPPREFGYSHSSPEYWIKSGTLVPVRRRDIVKIEGIDATGGNNQPNIPSITAHLWYFGLIGTCL

SEQ ID NO: 8861 - protein, 269 aa, Thermomyces lanuginosus
EVSQDLFNQFNLFAQYSAAAYCGKNNRAPAGTKITCTANACPEVEKADATVLYTFKDSGVGDVTGFLALDNTNKLIVLSFRGSRSIENWIGNLNFELIEINDICSGCRGHAGFTSSWRSVADTLRQKVEDAVREHPDYRVVFTGHSLGGALATVAGADLRGNKYDIDVFSYGAPRVGNRAFAEFLTVQTGGTLYRITHTNDIVPRLPPREFGYSHSSPEYWIKSGTDVPVRRRDIVKIEGIDATGGNNQPNIPSITAHLWYFGLIGTCL

SEQ ID NO: 8862 - protein, 269 aa, Thermomyces lanuginosus
EVSQDLFNQFNLFAQYSAAAYCGKNNRAPAGTNITCTANACPEVEKADATFLYSFEDSGVGDVTGFLALDNTNKLIVLSFRGTRSIANWIANLDFIPDEINDICSGCRGHAGFTSSWRSVADTLRQKVEDAVREHPDYRVVFTGHSLGGALATVAGADLRGNKYDIDVFSYGAPRVGNRAFAEFLTVQTGGTLYRITHTNDIVPRLPPREFGYSHSSPEYWIKSGTLVPVRRRDIVKIEGIDATGGNNQPNIPSITAHLWYFGLIGTCL

SEQ ID NO: 8863 - protein, 269 aa, Thermomyces lanuginosus
EVSQDLFNQFNLFAQYSAAAYCGKNNRAPAGTKITCTANACPEVEKADATILYTFKDSGVGDVTGFLALDNTNKLIVLSFRGSRSIENWIGNLNFELIEINDICSGCRGHAGFTSSWRSVADTLRQKVEDAVREHPDYRVVFTGHSLGGALATVAGADLRGNKYDIDVFSYGAPRVGNRAFAEFLTVQTGGTLYRITLTNDIVPRLPPREFGYSHSSPEYWIKSGTLVPVRRRDIVKIEGIDATGGNNQPNIPSITAHLWYFGLIGTCL

SEQ ID NO: 8864 - protein, 269 aa, Thermomyces lanuginosus
EVSQDLFNQFNLFAQYSAAAYCGKNNRAPAGTNITCTANACPEVEKADATFLYSFEDSGVGDVTGFLALDNTNKLIVLSFRGTRSPENWIADLNFLPQEINDICSGCRGHAGFTSSWRSVADTLRQKVEDAVREHPDYRVVFTGHSLGGALATVAGADLRGNKYDIDVFSYGAPRVGNRAFAEFLTVQTGGTLYRITHTNDIVPRLPPREFGYSHSSPEYWIKSGTLVPVRRRDIVKIEGIDATGGNNQPNIPSITAHLWYFGLIGTCL

SEQ ID NO: 8865 - protein, 269 aa, Thermomyces lanuginosus
EYSQDLFNQFNLFAQYSAAAYCGKNNRAPAGTNITCTANACPEVEKADATFLYTFEDSGVGDVTGFLALDNTNKLIVLSFRGSRSIENWIGNLNFELKEIDDICSGCRGHAGFTSSWRSVADTLRQKVEDAVREHPDYRVVFTGHSLGGALATVAGADLRGNPYDIDVFSYGAPRLGNRAFAEFLTVQTGGTLYRITHTNDIVPRLPPREFGYSHSSPEFWIKSGTLVPVRRRDIVKIEGIDATGGNNQPNIPSITAHLYYFGLIGTCL

SEQ ID NO: 8866 - protein, 269 aa, Thermomyces lanuginosus
EVSQDLFNQFNLFAQYSAAAYCGKNNRAPAGTKITCTANACPEVEKADATVLYTFKDSGVGDVTGFLALDNTNKLIVLSFRGSRSIENWIGNLNFELIEINDICSGCRGHAGFTSSWRSVADTLRQKVEDAVREHPDYRVVFTGHSLGGALATVAGADLRGNKYDIDVFSYGAPRVGNRAFAEFLTVQTGGTLYRITLTNDIVPRLPPREFGYSHSSPEYWIKSGTLVPVRRRDIVKIEGIDATGGNNQPNIPSITAHLWYFGLIGTCL

SEQ ID NO: 8867 - protein, 269 aa, Thermomyces lanuginosus
EVSQDLFNQFNLFAQYSAAAYCGKNNRAPAGTKITCTANACPEVEKADATILYTFKDSGVGDVTGFLALDNTNKLIVLSFRGSRSIENWIGNLNFELIEINDICSGCRGHAGFTSSWRSVADTLRQKVEDAVREHPDYRVVFTGHSLGGALATVAGADLRGNKYDIDVFSYGAPRVGNRAFAEFLTVQTGGTLYRITHTNDIVPRLPPREFGYSHSSPEYWIKIGTLVPVRRRDIVKIEGIDATGGNNQPNIPSITAHLWYFGLIGTCL

SEQ ID NO: 8868 - protein, 269 aa, Thermomyces lanuginosus
EVSQDLFNQFNLFAQYSAAAYCGKNNRAPAGTKITCTANACPEVEKADATVLYSFKDSGVGDVTGFLARDNTNKLIVLSFRGSRSIENWIGNLNFELEEINDICSGCRGHAGFTSSWRSVADTLRQKVEDAVREHPDYRVVFTGHSLGGALATVAGADLRGNKYDIDVFSYGAPRVGNRAFAEFLTVQTGGTLYRITHTNDIVPRLPPRKFGYSHSSPEYWIKSGTLVPVRRRDIVKIEGIDATGGNNQPNIPSITAHLWYFGLIGTCL

SEQ ID NO: 8869 - protein, 269 aa, Thermomyces lanuginosus
EVSQDLFNQFNLFAQYSAAAYCGKNNRAPAGTKITCTANACPEVEKADATILYTFKDSGVGDVTGFLALDNTNKLIVLSFRGSRSIENWIGNLNFELIEINDICSGCRGHAGFTSSWRSVADTLRQKVEDAVREHPDYRVVFTGHSLGGALATVAGADLRGNKYDIDVFSYGAPRVGNRAFAEFLTVQTGGTLYRITHTNDIVPRLPPREFGYSHSSPEYWIKSGTLVPRRRRDIVKIEGIDATGGNNQPNIPSITAHLWYFGLIGTCL

SEQ ID NO: 8870 - protein, 269 aa, Thermomyces lanuginosus
EVSQDLFNQFNLFAQYSAAAYCGKNNRAPAGTKITCTANACPEVEKADATLLYTFKDSGVGDVTGFLALDNTNKLIVLSFRGSRSIENWIGNLNFELIEINDICSGCRGHAGFTSSWRSVADTLRQKVEDAVREHPDYRVVFTGHSLGGALATVAGADLRGNKYDIDVFSYGAPRVGNRAFAEFLTVQTGGTLYRITHTNDIVPRLPPREFGYSHSSPEYWIKFGTLVPVRRRDIVKIEGIDATGGNNQPNIPSITAHLWYFGLIGTCL

SEQ ID NO: 8871 - protein, 269 aa, Thermomyces lanuginosus
EVSQDLFNQFNLFAQYSAAAYCGKNNRAPAGTKITCTANACPEVEKADATLLYTFKDSGVGDVTGFLALDNTNKLIVLSFRGSRSIENWIGNLNFELIEINDICSGCRGHAGFTSSWRSVADTLRQKVEDAVREHPDYRVVFTGHSLGGALATVAGADLRGNKYDIDVFSYGAPRVGNRAFAEFLTVQTGGTLYRITHTNDIVPRLPPREFGYSHSSPEYWIKSGTLPPVRRRDIVKIEGIDATGGNNQPNIPSITAHLWYFGLIGTCL

SEQ ID NO: 8872 - protein, 269 aa, Thermomyces lanuginosus
EVSQDLFNQFNLFAQYSAAAYCGKNNRAPAGTKITCTANACPEVEKADATILYSFKDSGVGDVTGFLARDNTNKLIVLSFRGSRSIENWIGNLNFELEEINDICSGCRGHAGFTSSWRSVADTLRQKVEDAVREHPDYRVVFTGHSLGGALATVAGADLRGNKYDIDVFSYGAPRVGNRAFAEFLTVQTGGTLYRITITNDIVPRLPPREFGYSHSSPEYWIKSGTLVPVRRRDIVKIEGIDATGGNNQPNIPSITAHLWYFGLIGTCL

SEQ ID NO: 8873 - protein, 269 aa, Thermomyces lanuginosus
EVSQDLFNQFNLFAQYSAAAYCGKNNRAPAGTKITCTANACPEVEKADATLLYTFKDSGVGDVTGFLALDNTNKLIVLSFRGSRSIENWIGNLNFELIEINDICSGCRGHAGFTSSWRSVADTLRQKVEDAVREHPDYRVVFTGHSLGGALATVAGADLRGNKYDIDVFSYGAPRVGNRAFAEFLTVQTGGTLYRITITNDIVPRLPPREFGYSHSSPEYWIKSGTLVPVRRRDIVKIEGIDATGGNNQPNIPSITAHLWYFGLIGTCL

SEQ ID NO: 8874 - protein, 269 aa, Thermomyces lanuginosus
EVSQDLFNQFNLFAQYSAAAYCGKNNRAPAGTKITCTANACPEVEKADATILYSFKDSGVGDVTGFLARDNTNKLIVLSFRGSRSIENWIGNLNFELEEINDICSGCRGHAGFTSSWRSVADTLRQKVEDAVREHPDYRVVFTGHSLGGALATVAGADLRGNKYDIDVFSYGAPRVGNRAFAEFLTVQTGGTLYRITYTNDIVPRLPPREFGYSHSSPEYWIKSGTLVPVRRRDIVKIEGIDATGGNNQPNIPSITAHLWYFGLIGTCL

SEQ ID NO: 8875 - protein, 269 aa, Thermomyces lanuginosus
EVSQDLFNQFNLFAQYSAAAYCGKNNRAPAGTKITCTANACPEVEKADATVLYSFKDSGVGDVTGFLARDNTNKLIVLSFRGSRSIENWIGNLNFELEEINDICSGCRGHAGFTSSWRSVADTLRQKVEDAVREHPDYRVVFTGHSLGGALATVAGADLRGNKYDIDVFSYGAPRVGNRAFAEFLTVQTGGTLYRITHTNDIVPRLPPREFGYSHSSPEYWIKIGTLVPVRRRDIVKIEGIDATGGNNQPNIPSITAHLWYFGLIGTCL

SEQ ID NO: 8876 - protein, 269 aa, Thermomyces lanuginosus
EVSQDLFNQFNLFAQYSAAAYCGKNNRAPAGTKITCTANACPEVEKADATLLYSFKDSGVGDVTGFLARDNTNKLIVLSFRGSRSIENWIGNLNFELEEINDICSGCRGHAGFTSSWRSVADTLRQKVEDAVREHPDYRVVFTGHSLGGALATVAGADLRGNKYDIDVFSYGAPRVGNRAFAEFLTVQTGGTLYRITHTNDIVPRLPPREFGYSHSSPEYWIKSGTLVPVRRRDIVKIEGIDATGGNNQPNIPSITVHLWYFGLIGTCL

SEQ ID NO: 8877 - protein, 269 aa, Thermomyces lanuginosus
EVSQDLFNQFNLFAQYSAAAYCGKNNRAPAGTKITCTANACPEVEKADATILYSFKDSGVGDVTGFLARDNTNKLIVLSFRGSRSIENWIGNLNFELEEINDICSGCRGHAGFTSSWRSVADTLRQKVEDAVREHPDYRVVFTGHSLGGALATVAGADLRGNKYDIDVFSYGAPRVGNRAFAEFLTVQTGGTLYRITHTNDIVPRLPPREFGYSHSSPEYWIKSGTLVPVRRRDIVKIEGIDATGGNNQPNIPSITVHLWYFGLIGTCL

SEQ ID NO: 8878 - protein, 269 aa, Thermomyces lanuginosus
EVSQDLFNQFNLFAQYSAAAYCGKNNRAPAGTKITCTANACPEVEKADATVLYTFKDSGVGDVTGFLALDNTNKLIVLSFRGSRSIENWIGNLNFELIEINDICSGCRGHAGFTSSWRSVADTLRQKVEDAVREHPDYRVVFTGHSLGGALATVAGADLRGNKYDIDVFSYGAPRVGNRAFAEFLTVQTGGTLYRITNTNDIVPRLPPREFGYSHSSPEYWIKSGTLVPVRRRDIVKIEGIDATGGNNQPNIPSITAHLWYFGLIGTCL

SEQ ID NO: 8879 - protein, 269 aa, Thermomyces lanuginosus
EVSQDLFNQFNLFAQYSAAAYCGKNNRAPAGTKITCTANACPEVEKADATILYSFKDSGVGDVTGFLARDNTNKLIVLSFRGSRSIENWIGNLNFELEEINDICSGCRGHAGFTSSWRSVADTLRQKVEDAVREHPDYRVVFAGHSLGGALATVAGADLRGNKYDIDVFSYGAPRVGNRAFAEFLTVQTGGTLYRITHTNDIVPRLPPREFGYSHSSPEYWIKSGTLVPVRRRDIVKIEGIDATGGNNQPNIPSITAHLWYFGLIGTCL

SEQ ID NO: 8880 - protein, 269 aa, Thermomyces lanuginosus
EVSQDLFNQFNLFAQYSAAAYCGKNNRAPAGTKITCTANACPEVEKADATILYSFKDSGVGDVTGFLARDNTNKLIVLSFRGSRSIENWIGNLNFELEEINDICSGCRGHAGFTSSWRSVADTLRQKVEDAVREHPDYRVVFTGHSLGGALATVAGADLRGNKYDIDVFSYGAPRVGNRAFAEFLTVQTGGTLYRITHTNDIVPRLPPREFGYSHSSPEYWIKIGTLVPVRRRDIVKIEGIDATGGNNQPNIPSITAHLWYFGLIGTCL

SEQ ID NO: 8881 - protein, 269 aa, Thermomyces lanuginosus
EVSQDLFNQFNLFAQYSAAAYCGKNNRAPAGTKITCTANACPEVEKADATLLYSFKDSGVGDVTGFLARDNTNKLIVLSFRGSRSIENWIGNLNFELEEINDICSGCRGHAGFTSSWRSVADTLRQKVEDAVREHPDYRVVFTGHSLGGGLATVAGADLRGNKYDIDVFSYGAPRVGNRAFAEFLTVQTGGTLYRITHTNDIVPRLPPREFGYSHSSPEYWIKSGTLVPVRRRDIVKIEGIDATGGNNQPNIPSITAHLWYFGLIGTCL

SEQ ID NO: 8882 - protein, 269 aa, Thermomyces lanuginosus
EVSQDLFNQFNLFAQYSAAAYCGKNNRAPAGTKITCTANACPEVEKADATVLYTFKDSGVGDVTGFLALDNTNKLIVLSFRGSRSIENWIGNLNFELIEINDICSGCRGHAGFTSSWRSVADTLRQKVEDAVREHPDYRVVFTGHSLGGGLATVAGADLRGNKYDIDVFSYGAPRVGNRAFAEFLTVQTGGTLYRITHTNDIVPRLPPREFGYSHSSPEYWIKSGTLVPVRRRDIVKIEGIDATGGNNQPNIPSITAHLWYFGLIGTCL

SEQ ID NO: 8883 - protein, 269 aa, Thermomyces lanuginosus
EVSQDLFNQFNLFAQYSAAAYCGKNNRAPAGTKITCTANACPEVEKADATILYTFKDSGVGDVTGFLALDNTNKLIVLSFRGSRSIENWIGNLNFELIEINDICSGCRGHAGFTSSWRSVADTLRQKVEDAVREHPDYRVVFTGHSLGGALATVAGADLRGNKYDIDVFSYGAPRVGNRAFAEFLTVQTGGTLYRITHTNDIVPRLPPREFGYSHSSPEYWIKFGTLVPVRRRDIVKIEGIDATGGNNQPNIPSITAHLWYFGLIGTCL

SEQ ID NO: 8884 - protein, 269 aa, Thermomyces lanuginosus
EVSQDLFNQFNLFAQYSAAAYCGKNNRAPAGTKITCTANACPEVEKADATVLYSFKDSGVGDVTGFLARDNTNKLIVLSFRGSRSIENWIGNLNFELEEINDICSGCRGHAGFTSSWRSVADTLRQKVEDAVREHPDYRVVFTGHSLGGGLATVAGADLRGNKYDIDVFSYGAPRVGNRAFAEFLTVQTGGTLYRITHTNDIVPRLPPREFGYSHSSPEYWIKSGTLVPVRRRDIVKIEGIDATGGNNQPNIPSITAHLWYFGLIGTCL

SEQ ID NO: 8885 - protein, 269 aa, Thermomyces lanuginosus
EVSQDLFNQFNLFAQYSAAAYCGKNNRAPAGTKITCTANACPEVEKADATILYSFKDSGVGDVTGFLARDNTNKLIVLSFRGSRSIENWIGNLNFELEEINDICSGCRGHAGFTSSWRSVADTLRQKVEDAVREHPDYRVVFTGHSLGGALATVAGADLRGNKYDIDVFSYGAPRVGNRAFAEFLTVQTGGTLYRITHTNDIVPRLPPREFGYSHSSPEYWIKSGTLPPVRRRDIVKIEGIDATGGNNQPNIPSITAHLWYFGLIGTCL

SEQ ID NO: 8886 - protein, 269 aa, Thermomyces lanuginosus
EVSQDLFNQFNLFAQYSAAAYCGKNNRAPAGTKITCTANACPEVEKADATLLYSFKDSGVGDVTGFLARDNTNKLIVLSFRGSRSIENWIGNLNFELEEINDICSGCRGHAGFTSSWRSVADTLRQKVEDAVREHPDYRVVFTGHSLGGALATVAGADLRGNKYDIDVFSYGAPRVGNRAFAEFLTVQTGGTLYRITHTNDIVPRLPPREFGYSHSSPEYWIKSGTLVPVRRRDIVKIEGIDATGGNNQPNIPSGTAHLWYFGLIGTCL

SEQ ID NO: 8887 - protein, 269 aa, Thermomyces lanuginosus
EVSQDLFNQFNLFAQYSAAAYCGKNNRAPAGTKITCTANACPEVEKADATVLYTFKDSGVGDVTGFLALDNTNKLIVLSFRGSRSIENWIGNLNFELIEINDICSGCRGHAGFTSSWRSVADTLRQKVEDAVREHPDYRVVFTGHSLGGALATVAGADLRGNKYDIDVFSYGAPRVGNRAFAEFLTVQTGGTLYRITHTNDIVPRLPPREFGYSHSSPEYWIKSGTLVPVRRRDIVKIEGIDATGGNNQPNIPSGTAHLWYFGLIGTCL

SEQ ID NO: 8888 - protein, 269 aa, Thermomyces lanuginosus
EYSQDLFNQFNLFAQYSAAAYCGKNNRAPAGTKITCTANACPEVEKADATVLYSFKDSGVGDVTGFLARDNTNKLIVLSFRGSRSIENWIGNLNFELEEINDICSGCRGHAGFTSSWRSVADTLRQKVEDAVREHPDYRVVFTGHSLGGALATVAGADLRGNKYDIDVFSYGAPRVGNRAFAEFLTVQTGGTLYRITHTNDIVPRLPPREFGYSHSSPEYWIKSGTLVPVRRRDIVKIEGIDATGGNNQPNIPSITAHLWYFGLIGTCL

SEQ ID NO: 8889 - protein, 269 aa, Thermomyces lanuginosus
EVSQDLFNQFNLFAQYSAAAYCGKNNRAPAGTKITCTANACPEVEKADATILYTFKDSGVGDVTGFLALDNTNKLIVLSFRGSRSIENWIGNLNFELIEINDICSGCRGHAGFTSSWRSVADTLRQKVEDAVREHPDYRVVFTGHSLGGALATVAGADLRGNKYDIDVFSYGAPRVGNRAFAEFLTVQTGGTLYRITHTNDIVPRLPPREFGYSHSSPEYWIKSGTLVPVRRRDIVKIEGIDATGGNNQPNIPSITVHLWYFGLIGTCL

SEQ ID NO: 8890 - protein, 269 aa, Thermomyces lanuginosus
EVSQDLFNQFNLFAQYSAAAYCGKNNRAPAGTKITCTANACPEVEKADATVLYSFKDSGVGDVTGFLARDNTNKLIVLSFRGSRSIENWIGNLNFELEEINDICSGCRGHAGFTSSWRSVADTLRQKVEDAVREHPDYRVVFTGHSLGGALATVAGADLRGNKYDIDVFSYGAPRVGNRAFAEFLTVQTGGTLYRITHTNDIVPRLPPREFGYSHSSPEYWIKSGTDVPVRRRDIVKIEGIDATGGNNQPNIPSITAHLWYFGLIGTCL

SEQ ID NO: 8891 - protein, 269 aa, Thermomyces lanuginosus
EVSQDLFNQFNLFAQYSAAAYCGKNNRAPAGTNITCTANACPEVEKADATFLYSFEDSGVGDVTGFLALDNTNKLIVLSFRGSRSPTNWILNLDFIFDEINDICSGCRGHAGFTSSWRSVADTLRQKVEDAVREHPDYRVVFTGHSLGGALATVAGADLRGNKYDIDVFSYGAPRVGNRAFAEFLTVQTGGTLYRITHTNDIVPRLPPREFGYSHSSPEYWIKSGTLVPVRRRDIVKIEGIDATGGNNQPNIPSITAHLWYFGLIGTCL

SEQ ID NO: 8892 - protein, 269 aa, Thermomyces lanuginosus
EVSQDLFNQFNLFAQYSAAAYCGKNNRAPAGTKITCTANACPEVEKADATLLYSFKDSGVGDVTGFLARDNTNKLIVLSFRGSRSIENWIGNLNFELEEINDICSGCRGHAGFTSSWRSVADTLRQKVEDAVREHPDYRVVFTGHSLGGALATVAGADLRGNKYDIDVFSYGAPRVGNRAFAEFLTVQTGGTLYRITITNDIVPRLPPREFGYSHSSPEYWIKSGTLVPVRRRDIVKIEGIDATGGNNQPNIPSITAHLWYFGLIGTCL

SEQ ID NO: 8893 - protein, 269 aa, Thermomyces lanuginosus
EVSQDLFNQFNLFAQYSAAAYCGKNNRAPAGTKITCTANACPEVEKADATVLYSFKDSGVGDVTGFLARDNTNKLIVLSFRGSRSIENWIGNLNFELEEINDICSGCRGHAGFTSSWRSVADTLRQKVEDAVREHPDYRVVFAGHSLGGALATVAGADLRGNKYDIDVFSYGAPRVGNRAFAEFLTVQTGGTLYRITHTNDIVPRLPPREFGYSHSSPEYWIKSGTLVPVRRRDIVKIEGIDATGGNNQPNIPSITAHLWYFGLIGTCL

SEQ ID NO: 8894 - protein, 269 aa, Thermomyces lanuginosus
EVSQDLFNQFNLFAQYSAAAYCGKNNRAPAGTKITCTANACPEVEKADATLLYTFKDSGVGDVTGFLALDNTNKLIVLSFRGSRSIENWIGNLNFELIEINDICSGCRGHAGFTSSWRSVADTLRQKVEDAVREHPDYRVVFTGHSLGGALATVAGADLRGNKYDIDVFSYGAPRVGNRAFAEFLTVQTGGTLYRITLTNDIVPRLPPREFGYSHSSPEYWIKSGTLVPVRRRDIVKIEGIDATGGNNQPNIPSITAHLWYFGLIGTCL

SEQ ID NO: 8895 - protein, 269 aa, Thermomyces lanuginosus
EVSQDLFNQFNLFAQYSAAAYCGKNNRAPAGTKITCTANACPEVEKADATILYTFKDSGVGDVTGFLALDNTNKLIVLSFRGSRSIENWIGNLNFELIEINDICSGCRGHAGFTSSWRSVADTLRQKVEDAVREHPDYRVVFTGHSLGGALATVAGADLRGNKYDIDVFSYGAPRVGNRAFAEFLTVQTGGTLYRITHTNDIVPRLPPREFGYSHSSPEYWIKPGTLVPVRRRDIVKIEGIDATGGNNQPNIPSITAHLWYFGLIGTCL

SEQ ID NO: 8896 - protein, 269 aa, Thermomyces lanuginosus
EVSQDLFNQFNLFAQYSAAAYCGKNNRAPAGTKITCTANACPEVEKADATLLYSFKDSGVGDVTGFLARDNTNKLIVLSFRGSRSIENWIGNLNFELEEINDICSGCRGHAGFTSSWRSVADTLRQKVEDAVREHPDYRVVFTGHSLGGALATVAGADLRGNKYDIDVFSYGAPRVGNRAFAEFLTVQTGGTLYRITHTNDIVPRLPPREFGYSHSSPEYWIKSGTLVPRRRRDIVKIEGIDATGGNNQPNIPSITAHLWYFGLIGTCL

SEQ ID NO: 8897 - protein, 269 aa, Thermomyces lanuginosus
EVSQDLFNQFNLFAQYSAAAYCGKNNRAPAGTKITCTANACPEVEKADATLLYTFKDSGVGDVTGFLALDNTNKLIVLSFRGSRSIENWIGNLNFELIEINDICSGCRGHAGFTSSWRSVADTLRQKVEDAVREHPDYRVVFTGHSLGGALATVAGADLRGNKYDIDVFSYGAPRVGNRAFAEFLTVQTGGTLYRITHTNDIVPRLPPREFGYSHSSPEYWIKPGTLVPVRRRDIVKIEGIDATGGNNQPNIPSITAHLWYFGLIGTCL

SEQ ID NO: 8898 - protein, 269 aa, Thermomyces lanuginosus
EVSQDLFNQFNLFAQYSAAAYCGKNNRAPAGTKITCTANACPEVEKADATILYSFKDSGVGDVTGFLARDNTNKLIVLSFRGSRSIENWIGNLNFELEEINDICSGCRGHAGFTSSWRSVADTLRQKVEDAVREHPDYRVVFTGHSLGGALATVAGADLRGNKYDIDVFSYGAPRVGNRAFAEFLTVQTGGTLYRITLTNDIVPRLPPREFGYSHSSPEYWIKSGTLVPVRRRDIVKIEGIDATGGNNQPNIPSITAHLWYFGLIGTCL

SEQ ID NO: 8899 - protein, 269 aa, Thermomyces lanuginosus
EVSQDLFNQFNLFAQYSAAAYCGKNNRAPAGTNITCTANACPEVEKADATFLYSFEDSGVGDVTGFLALDNTNKLIVLSFRGTRSITNWILDLNFIFDEINDICSGCRGHAGFTSSWRSVADTLRQKVEDAVREHPDYRVVFTGHSLGGALATVAGADLRGNKYDIDVFSYGAPRVGNRAFAEFLTVQTGGTLYRITHTNDIVPRLPPREFGYSHSSPEYWIKSGTLVPVRRRDIVKIEGIDATGGNNQPNIPSITAHLWYFGLIGTCL

SEQ ID NO: 8900 - protein, 269 aa, Thermomyces lanuginosus
EVSQDLFNQFNLFAQYSAAAYCGKNNRAPAGTNITCTANACPEVEKADATFLYSFKDSGVGDVTGFLALDNTNKLIVLSFRGTRSIENWIADLDFLLQEINDICSGCRGHAGFTSSWRSVADTLRQKVEDAVREHPDYRVVFTGHSLGGALATVAGADLRGNGYDIDVFSYGAPRVGNRAFAEFLTVQTGGTLYRITHTNDIVPRLPPREFGYSHSSPEYWIKSGTLVPVRRRDIVKIPGIDATGGNNQPNIPSITAHLWYFGLIGTCL

SEQ ID NO: 8901 - protein, 269 aa, Thermomyces lanuginosus
EVSQDLFNQFNLFAQYSAAAYCGKNNRAPAGTNITCTANACPEVEKADATFLYSFEDSGVGDVTGFLALDNTNKLIVLSFRGSRSPTNWIADLNFLPQEINDICSGCRGHAGFTSSWRSVADTLRQKVEDAVREHPDYRVVFTGHSLGGALATVAGADLRGNKYDIDVFSYGAPRVGNRAFAEFLTVQTGGTLYRITHTNDIVPRLPPREFGYSHSSPEYWIKSGTLVPVRRRDIVKIEGIDATGGNNQPNIPSITAHLWYFGLIGTCL

SEQ ID NO: 8902 - protein, 269 aa, Thermomyces lanuginosus
EVSQDLFNQFNLFAQYSAAAYCGKNNRAPAGTKITCTANACPEVEKADATILYSFKDSGVGDVTGFLARDNTNKLIVLSFRGSRSIENWIGNLNFELEEINDICSGCRGHAGFTSSWRSVADTLRQKVEDAVREHPDYRVVFTGHSLGGALATVAGADLRGNKYDIDVFSYGAPRVGNRAFAEFLTVQTGGTLYRITHTNDIVPRLPPREFGYSHSSPEYWIKSGTDVPVRRRDIVKIEGIDATGGNNQPNIPSITAHLWYFGLIGTCL

SEQ ID NO: 8903 - protein, 269 aa, Thermomyces lanuginosus
EVSQDLFNQFNLFAQYSAAAYCGKNNRAPAGTKITCTANACPEVEKADATVLYSFEDSGVGDVTGFLALDNTNKLIVLSFRGSRSIENWIGNLNFELEEIDDICSGCRGHAGFTSSWRSVADTLRQKVEDAVREHPDYRVVFTGHSLGGALATVAGADLRGNKYDIDVFSYGAPRVGNRAFAEFLTVQTGGTLYRITHTNDIVPRLPPRKFGYSHSSPEFWIKSGTLVPVRRRDIVKIEGIDATGGNNQPNIPSITAHLWYFGLIGTCL

SEQ ID NO: 8904 - protein, 269 aa, Thermomyces lanuginosus
EVSQDLFNQFNLFAQYSAAAYCGKNNRAPAGTKITCTANACPEVEKADATLLYTFKDSGVGDVTGFLALDNTNKLIVLSFRGSRSIENWIGNLNFELIEINDICSGCRGHAGFTSSWRSVADTLRQKVEDAVREHPDYRVVFTGHSLGGALATVAGADLRGNKYDIDVFSYGAPRVGNRAFAEFLTVQTGGTLYRITHTNDIVPRLPPREFGYSHSSPEYWIKSGTDVPVRRRDIVKIEGIDATGGNNQPNIPSITAHLWYFGLIGTCL

SEQ ID NO: 8905 - protein, 269 aa, Thermomyces lanuginosus
EVSQDLFNQFNLFAQYSAAAYCGKNNRAPAGTKITCTANACPEVEKADATLLYTFKDSGVGDVTGFLALDNTNKLIVLSFRGSRSIENWIGNLNFELIEINDICSGCRGHAGFTSSWRSVADTLRQKVEDAVREHPDYRVVFTGHSLGGGLATVAGADLRGNKYDIDVFSYGAPRVGNRAFAEFLTVQTGGTLYRITHTNDIVPRLPPREFGYSHSSPEYWIKSGTLVPVRRRDIVKIEGIDATGGNNQPNIPSITAHLWYFGLIGTCL

SEQ ID NO: 8906 - protein, 269 aa, Thermomyces lanuginosus
EVSQDLFNQFNLFAQYSAAAYCGKNNRAPAGTKITCTANACPEVEKADATVLYTFKDSGVGDVTGFLALDNTNKLIVLSFRGSRSIENWIGNLNFELIEINDICSGCRGHAGFTSSWRSVADTLRQKVEDAVREHPDYRVVFTGHSLGGALATVAGADLRGNKYDIDVFSYGAPRVGNRAFAEFLTVQTGGTLYRITHTNDIVPRLPPREFGYSHSSPEYWIKFGTLVPVRRRDIVKIEGIDATGGNNQPNIPSITAHLWYFGLIGTCL

SEQ ID NO: 8907 - protein, 269 aa, Thermomyces lanuginosus
EVSRDLFNQFNLFAQYSAAAYCGKNNNAPAGTQITCTANACPEVEKADATFLYSFEDSGVGDVTGFLALDNTNKLIVLSFRGSRSIENWITNLSFDLKDINDICSGCRGHAGFTSSWRSVADTLRQKVEDAVREHPDYRVVFTGHSLGGALATVAGADLRGNGYDIDVFSYGAPRIGNRAFAEFLTVQTGGTLYRITHTNDIVPRLPPRVFGYSHPSPEYWIKSGTGVPVRRRDIVKIEGIDATGGNNQPNIPDILAHLWYFGLIGTCL

SEQ ID NO: 8908 - protein, 269 aa, Thermomyces lanuginosus
EVSQDLFNQFNLFAQYSAAAYCGKNNRAPAGTKITCTANACPEVEKADATILYTFKDSGVGDVTGFLALDNTNKLIVLSFRGSRSIENWIGNLNFELIEINDICSGCRGHAGFTSSWRSVADTLRQKVEDAVREHPDYRVVFTGHSLGGALATVAGADLRGNKYDIDVFSYGAPRVGNRAFAEFLTVQTGGTLYRITHTNDIVPRLPPREFGYSHSSPEYWIKSGTLPPVRRRDIVKIEGIDATGGNNQPNIPSITAHLWYFGLIGTCL

SEQ ID NO: 8909 - protein, 269 aa, Thermomyces lanuginosus
EVSQDLFNQFNLFAQYSAAAYCGKNNRAPAGTKITCTANACPEVEKADATVLYSFKDSGVGDVTGFLARDNTNKLIVLSFRGSRSIENWIGNLNFELEEINDICSGCRGHAGFTSSWRSVADTLRQKVEDAVREHPDYRVVFTGHSLGGALATVAGADLRGNKYDIDVFSYGAPRVGNRAFAEFLTVQTGGTLYRITHTNDIVPRLPPREFGYSHSSPEYWIKSGTLVPVRRRDIVKIEGIDATGGNNQPNIPSGTAHLWYFGLIGTCL

SEQ ID NO: 8910 - protein, 269 aa, Thermomyces lanuginosus
EVSQDLFNQFNLFAQYSAAAYCGKNNRAPAGTKITCTANACPEVEKADATILYTFKDSGVGDVTGFLALDNTNKLIVLSFRGSRSIENWIGNLNFELIEINDICSGCRGHAGFTSSWRSVADTLRQKVEDAVREHPDYRVVFTGHSLGGALATVAGADLRGNKYDIDVFSYGAPRVGNRAFAEFLTVQTGGTLYRITHTNDIVPRLPPREFGYSHSSPEYWIKSGTDVPVRRRDIVKIEGIDATGGNNQPNIPSITAHLWYFGLIGTCL

SEQ ID NO: 8911 - protein, 269 aa, Thermomyces lanuginosus
EVSQDLFNQFNLFAQYSAAAYCGKNNRAPAGTKITCTANACPEVEKADATVLYTFKDSGVGDVTGFLALDNTNKLIVLSFRGSRSIENWIGNLNFELIEINDICSGCRGHAGFTSSWRSVADTLRQKVEDAVREHPDYRVVFTGHSLGGALATVAGADLRGNKYDIDVFSYGAPRVGNRAFAEFLTVQTGGTLYRITHTNDIVPRLPPREFGYSHSSPEYWIKSGTLPPVRRRDIVKIEGIDATGGNNQPNIPSITAHLWYFGLIGTCL

SEQ ID NO: 8912 - protein, 269 aa, Thermomyces lanuginosus
EVSQDLFNQFRLFAQYSAAAYCGKNNRAPAGTQITCTGNACPEVEKADATFLYSFQNSGVGDVTGFLALDNTNKLIVLSFRGSRSIENWINNLRFDLKEINDICSGCRGHSGFTSSWRSVADTLRQKVEDAVREHPDYRVVFTGHSLGGALATVAGADLRGNKYDIDVFSYGAPRVGNRAFAEFLTVQTGGTLYRITHTNDIVPRLPPREFGYSHPSPEYWIKSGTGVPVRRRDIVKIEGIDATGGNNQPNIPSITAHLWYFGLIGTCL

SEQ ID NO: 8913 - protein, 269 aa, Thermomyces lanuginosus
EVSQDLFNQFNLFAQYSAAAYCGKNNRAPAGTKITCTANACPEVEKADATVLYSFKDSGVGDVTGFLARDNTNKLIVLSFRGSRSIENWIGNLNFELEEINDICSGCRGHAGFTSSWRSVADTLRQKVEDAVREHPDYRVVFTGHSLGGALATVAGADLRGNKYDIDVFSYGAPRVGNRAFAEFLTVQTGGTLYRITHTNDIVPRLPPREFGYSHSSPEYWIKPGTLVPVRRRDIVKIEGIDATGGNNQPNIPSITAHLWYFGLIGTCL

SEQ ID NO: 8914 - protein, 269 aa, Thermomyces lanuginosus
EVSQDLFNQFNLFAQYSAAAYCGKNNRAPAGTKITCTANACPEVEKADATLLYTFKDSGVGDVTGFLALDNTNKLIVLSFRGSRSIENWIGNLNFELIEINDICSGCRGHAGFTSSWRSVADTLRQKVEDAVREHPDYRVVFTGHSLGGALATVAGADLRGNKYDIDVFSYGAPRVGNRAFAEFLTVQTGGTLYRITHTNDIVPRLPPREFGYSHSSPEYWIKSGTLVPRRRRDIVKIEGIDATGGNNQPNIPSITAHLWYFGLIGTCL

SEQ ID NO: 8915 - protein, 269 aa, Thermomyces lanuginosus
EVSQDLFNQFNLFAQYSAAAYCGKNNRAPAGTKITCTANACPEVEKADATLLYSFKDSGVGDVTGFLARDNTNKLIVLSFRGSRSIENWIGNLNFELEEINDICSGCRGHAGFTSSWRSVADTLRQKVEDAVREHPDYRVVFTGHSLGGALATVAGADLRGNKYDIDVFSYGAPRVGNRAFAEFLTVQTGGTLYRITHTNDIVPRLPPREFGYSHSSPEYWIKFGTLVPVRRRDIVKIEGIDATGGNNQPNIPSITAHLWYFGLIGTCL

SEQ ID NO: 8916 - protein, 269 aa, Thermomyces lanuginosus
EVSQDLFNQFNLFAQYSAAAYCGKNNRAPAGTKITCTANACPEVEKADATILYTFKDSGVGDVTGFLALDNTNKLIVLSFRGSRSIENWIGNLNFELIEINDICSGCRGHAGFTSSWRSVADTLRQKVEDAVREHPDYRVVFTGHSLGGALATVAGADLRGNKYDIDVFSYGAPRVGNRAFAEFLTVQTGGTLYRITHTNDIVPRLPPREFGYSHSSPEYWIKSGTLVPVRRRDIVKIEGIDATGGNNQPNIPSITIHLWYFGLIGTCL

SEQ ID NO: 8917 - protein, 269 aa, Thermomyces lanuginosus
EVSQDLFNQFNLFAQYSAAAYCGKNNRAPAGTKITCTANACPEVEKADATVLYTFKDSGVGDVTGFLALDNTNKLIVLSFRGSRSIENWIGNLNFELIEINDICSGCRGHAGFTSSWRSVADTLRQKVEDAVREHPDYRVVFAGHSLGGALATVAGADLRGNKYDIDVFSYGAPRVGNRAFAEFLTVQTGGTLYRITHTNDIVPRLPPREFGYSHSSPEYWIKSGTLVPVRRRDIVKIEGIDATGGNNQPNIPSITAHLWYFGLIGTCL

SEQ ID NO: 8918 - protein, 269 aa, Thermomyces lanuginosus
EVSQDLFNQFNLFAQYSAAAYCGKNNRAPAGTKITCTANACPEVEKADATVLYSFKDSGVGDVTGFLARDNTNKLIVLSFRGSRSIENWIGNLNFELEEINDICSGCRGHAGFTSSWRSVADTLRQKVEDAVREHPDYRVVFTGHSLGGALATVAGADLRGNKYDIDVFSYGAPRVGNRAFAEFLTVQTGGTLYRITHTNDIVPRLPPREFGYSHSSPEYWIKSGTLVPRRRRDIVKIEGIDATGGNNQPNIPSITAHLWYFGLIGTCL

SEQ ID NO: 8919 - protein, 269 aa, Thermomyces lanuginosus
EVSQDLFNQFNLFAQYSAAAYCGKNNRAPAGTNITCTANACPEVEKADAKFLYTFEDSGVGDVTGFLALDNTNKLIVLSFRGSRSIENWIADLNFLLQEINDICSGCRGHAGFTSSWRSVADTLRQKVEDAVREHPDYRVVFTGHSLGGALATVAGADLRGNKYDIDVFSYGAPRVGNRAFAEFLTVQTGGTLYRITHTNDIVPRLPPREFGYSHSSPEYWIKSGTLVPVRQRDIVKIEGIDATGGNNQPNIPSITAHLWYFGLIGTCL

SEQ ID NO: 8920 - protein, 269 aa, Thermomyces lanuginosus
EVSQDLFNQFNLFAQYSAAAYCGKNNRAPAGTNITCTANACPEVEKADATFLYTFEDSGVGDVTGFLALDNTNKLIVLSFRGTRSIENWIADLEFLLQEINDICSGCRGHAGFTSSWRSVADTLRQKVEDAVREHPDYRVVFTGHSLGGALATVAGADLRGNKYDIDVFSYGAPRVGNRAFAEFLTVQTGGTLYRITHTNDIVPRLPPREFGYSHSSPEYWIKSGTLVPVRRRDIVKIEGIDATGGNNQPNIPSITAHLWYFGLIGTCV

SEQ ID NO: 8921 - protein, 269 aa, Thermomyces lanuginosus
EVSQDLFNQFNLFAQYSAAAYCGKNNDAPAGTNITCTGNACPEVEKADATFLYSFEDSGVGCVTGFLALDNTNKLIVLSFRTSRSICNWILDLNYTPQEINDICSGCRGHDGFTSSWRSVADTLRQKVEDAVREHPDYRVVFTGHSLGGALATVAGADLRGNGYDIDVFSYGAPRVGNRAFAEFLTVQTGGTLYRITHTNDIVPRLPPREFGYSHSSPEYWIKSGTLVPVTRNDIVKIEGIDATGGNNQPNIPDIPAHLWYFGLIGTCL

SEQ ID NO: 8922 - protein, 269 aa, Thermomyces lanuginosus
EVSQDLFNQFNLFAQYSAAAYCGKNNDAPAGTNITCTGNACPEVEKADATFLYSFRDSGVGDVTGFLALDNTNKLIVLSFRGSRSIENWIADLNFILIEINDICSGCRGHDGFTSSWFSVADTLRQKVEDAVREHPDYRVVFTGHSLGGALATVAGADLRGNGYDIDVFSYGAPRVGNRAFAEFLTVQTGGTLYRITHTNDIVPRLPPREFGYSHSSPEYWIKSGTLVPVRRRDIVKIEGIDATGGNNQPNIPSITAHLWYFGAIGTCL

SEQ ID NO: 8923 - protein, 269 aa, Thermomyces lanuginosus
EVSQDLFNQFNLFAQYSAAAYCGKNNDAPAGTNITCTGNACPEVEKADATFLYSFEDXGVGDVTGFLALDNTNKLIVLSFRGSRSXENWIGNLNFDLKEINDICSGCRGRDGFTSSWRSVADTLRQKVEDAVREHPDYRVVFTGXSLGGALATVAGADLRGNGYDIDVFSYGAPRVGNRAFAEFLTVQTGGTLYRITRTNDIVPRLPPREFGYSHSSPEYWIKSGTLVPVTRNDIVKXCGIDATGGNNQPNIPDIPAHLHYFGLIGTCL

SEQ ID NO: 8924 - protein, 269 aa, Thermomyces lanuginosus
EVSQDLYNQFKLFAHYSAAAYCGKNNDAPAGTNITCTGNACPEVEKADATFIYSFEDSGVGDVTGFLALDNTNKLIVLSFRGSRSIENWIANLNFDLKEINDICSGCRGHDGFWESWRSVADTLRQKVEDAVREYPDYRVVFTGHSLGGALATVAGADLRGNGYDIDVFSYGAPRVGNRAFAEFLTVQTGGTLYRITHTNDIVPRLPPREFGYSHSSPEYWIKSGTLVPVTRNDIVVIEGIDATGGNNQPNIPDIPAHLWYFGLIGTCL

SEQ ID NO: 8925 - protein, 269 aa, Thermomyces lanuginosus
EVSQDLYNQFKLFAHYSAAAYCGKNNDAPAGTNITCTGNACPEVEKADATFIYSFEDSGVGDVTGFLALDNTNKLIVLSFRGSRSIENWIANLNFDLKEINDICSGCRGHDGFWNSWRSVADTLRQKVEDAVREYPDYRVVFTGHSLGGALATVAGADLRGNGYDIDVFSYGAPRVGNRAFAEFLTVQTGGTLYRITHTNDIVPRLPPREFGYSHSSPEYWIKSGTLVPVTRNDIVVIEGIDATGGNNQPNIPDIPAHLWYFGLIGTCL

SEQ ID NO: 8926 - protein, 269 aa, Thermomyces lanuginosus
EVSQDLFNQFNLFAQYSAAAYCGKNNDAPAGTNITCTGNACPEVEKADATFLYSFEDSGVGCVTGFLALDNTNKLIVLSFRGSRSPCNWIANLDFIFDEINDICSGCRGHDGFTSSWRSVADTLRQKVEDAVREHPDYRVVFTGHSLGGALATVAGADLRGNGYDIDVFSYGAPRVGNRAFAEFLTVQTGGTLYRITHTNDIVPRLPPREFGYSHSSPEYWIKSGTLVPVRRRDIVKIEGIDATGGNNQPNIPDIPAHLWYFGLIGTCL

SEQ ID NO: 8927 - protein, 269 aa, Thermomyces lanuginosus
EVSQDLFNQFNLFAQYSAAAYCGKNNRAPAGTNITCTANACPEVEKADATFLYSFEDSGVGDVTGFLALDNTNKLIVLSFRGTNSIENWIADLNFILSEINDICSGCRGHAGFTSSWRSVADTLRQKVEDAVREHPDYRVVFTGHSLGGALATVAGADLRGNKYDIDVFSYGAPRVGNRAFAEFLTVQTGGTLYRITHTNDIVPILPPREFGYSHSSPEYWIKSGTLVPVRRRDIVKIEGIDATGGNNQPNIPSITAHLWYFGLIGTCL

SEQ ID NO: 8928 - protein, 269 aa, Synthetic construct
EVSQDLFNQFNLFAQYSAAAYCGKNNDAPAGTNITCTGNACPEVEKADATFLYSFEDSGVGDVTGFLALDNTNKLIVLSFRGSRSIENWIGNLNFDLKEINDICSGCRGHDGFTSSWRSVAHTLSQKVQDAEREHPDYRVLFTGHSLVGALATVAGADLRGNGYDIDVFSYGAPRVGNRAFAEFLTVQTGGTLYRITHTNDIVPRLPPREFGYSHSSPEYWIKSGTLVPVTRNANVKIEGIDATGGNNQPNIPDIPAHLWYFGLIGTCL

SEQ ID NO: 8929 - protein, 269 aa, Thermomyces lanuginosus
EVSQDLFNQFNLFAQYSAAAYCGKNNDAPAGTNITCTANACPEVEKADATFLYSFEDSGVGDVTGFLALDNTNKLIVLSFRGTRSLENWIADLNFILQEINDICSGCRGHAGFTSSWRSVADTLRQKVEDAVREHPDYRVVFTGHSLGGALATVAGADLRGNGYDIDVFSYGAPRVGNRAFAEFLTVQTGGTLYRITHTNDIVPRLPPREFGYSHSSPEYWIKSGTLVPVRRRDIVVIEGIDATGGNNQPNIPDIPAHLWYFGLIGTCL

SEQ ID NO: 8930 - protein, 269 aa, Thermomyces lanuginosus
EVSQDLFNQFNLFAQYSAAAYCGKNNRAPAGTNITCTANACPEVEKADATFLYSFEDSGVGDVTGFLALDNTNKLIVLSFRGTRSPENWIADLNFLLQEINDICSGCRGHAGFTSSWRSVADTLRQKVEDAVREHPDYRVVFTGHSLGGALATVAGADLRGNKYDIDVFSYGAPRVGNRAFAEFLTVQTGGTLYRITHTNDIVPRLPPREFGYSHSSPEYWIKSGTLVPVRRRDIVKIEGIDATGGNNQPNIPSITAHLWYFGLIGTCV

SEQ ID NO: 8931 - protein, 268 aa, Thermomyces lanuginosus
EVSQDLFNQFNLFAQYSAAAYCGKNNDAPAGTNITCTGNACPEVEKADATFLYSFEDSGVGDVTGFLALDNTNKLIVLSFRGSRSIENWIANLNFWLKKINDICSGCRGHDGFTSSWRSVADTLRQKVEDAVREHPDYRVVFTGHSLGGALATVAGADLRGNGYDIDVFSYGAPRVGNRAFAEFLTVQTGGTLYRITHTNDIVPRLPPREFGYSHSSPEYWIKSGTLVPVTRNDIVKIEGIDATGGSDKPTIMSILAHLWYFQATDAC

SEQ ID NO: 8932 - protein, 268 aa, Thermomyces lanuginosus
EVSQDLFNQFNLFAQYSAAAYCGKNNDAPAGTNITCTGNACPEVEKADATFLYSFRDSGVGDVTGFLALDNTNKLIVLSFRGTRSIENWIADLNFVLKEINDICSGCRGHDGFTSSWFSVADTLRQKVEDAVREHPDYRVVFTGHSLGGALATVAGADLRGNGYDIDVFSYGAPRVGNRAFAEFLTVQTGGTLYRITHTNDIVPRLPPREFGYSHSSPEYWIKSGTLVPVRRRDIVKIEGIDATGGNNQPNIPSIPAHLWYFGLIGTC

SEQ ID NO: 8933 - protein, 194 aa, Humicola insolens
QLGAIENGLESGSPNACPDAILIFARGSTEPGNMGITVGPALANGLESHIRNIWIQGVGGPYDAALATNFLPRGTSQANIDEGKRLFALANQKCPNTPVVAGGYSQGAALIAAAVSELSGAVKEQVKGVALFGYTQNLQNRGGIPNYPRERTKVFCNVGDAVCTGTLIITPAHLSYTIEARGEAARFLRDRIRA

SEQ ID NO: 8934 - protein, 194 aa, Humicola insolens
QLGAIENGLESGSANACPDAILIFARGSTEPGNMGITVGPALANGLESHIRNIWIQGVGGPYDAALATNFLPRGTSQANIDEGKRLFALANQKCPNTPVVAGGYSQGAALIAAAVSELSGAVKEQVKGVALFGYTQNLQNRGGIPNYPRERTKVFCNVGDAVCTGTLIITPAHLSYTIEARGEAARFLVDRIRA

SEQ ID NO: 8935 - protein, 194 aa, Humicola insolens
QLGAIENGLESGSANACPDAILIFARGSTEPGNMGITVGPALANGLESHIRNIWIQGVGGPYDAALATNFLPRGTSQANIDEGKRLFHLANQKCPNTPVVAGGYSQGAALIAAAVSELSGAVKEQVKGVALFGYTQNLQNRGGIPNYPRERTKVFCNVGDAVCTGTLIITPAHLSYTIEARGEAARFLRDRIRA

SEQ ID NO: 8936 - protein, 194 aa, Humicola insolens
QLGAIENGLESGSADACPDAILIFARGSTEPGNMGITVGPALANGLESHIRNIWIQGVGGPYDAALATNFLPRGTSQANIDEGKRLFALANQKCPNTPVVAGGYSQGAALIAAAVSELSGAVKEQVKGVALFGYTQNLQNRGGIPNYPRERTKVFCNVGDAVCTGTLIITPAHLSYTIEARGEAARFLRDRIRA

SEQ ID NO: 8937 - protein, 194 aa, Humicola insolens
QLGAIENDLESGSANACPDAILIFARGSTEPGNMGITVGPALANGLESHIRNIWIQGVGGPYDAALATNFLPRGTSQANIDEGKRLFALANQKCPNTPVVAGGYSQGAALIAAAVSELSGAVKEQVKGVALFGYTQNLQNRGGIPNYPRERTKVFCNVGDAVCTGTLIITPAHLSYTIEARGEAARFLRDRIRA

SEQ ID NO: 8938 - protein, 194 aa, Humicola insolens
QLGAIENGLESGSANACPDAILIFARGSTEPGNMGITVGPALANGLKSHIRNIWIQGVGGPYDAALATNFLPRGTSQANIDEGKRLFALANQKCPNTPVVAGGYSQGAALIAAAVSELSGAVKEQVKGVALFGYTQNLQNRGGIPNYPRERTKVFCNVGDAVCTGTLIITPAHLSYTIXARGEAARFLRDRIRA

SEQ ID NO: 8939 - protein, 194 aa, Humicola insolens
QLGAIENGLESGSANACPDAILIFARGSTEPGNMGITVGPALANGLEEHIRNIWIQGVGGPYDAALATNFLPRGTSQANIDEGKRLFALANQKCPNTPVVAGGYSQGAALIAAAVSELSGAVKEQVKGVALFGYTQNLQNRGGIPNYPRERTKVFCNVGDAVCTGTLIITPAHLSYTIEARGEAARFLRDRIRA

SEQ ID NO: 8940 - protein, 194 aa, Humicola insolens
QLGAIENGLESGSANACPDAILIFARGSTEPGNMGITVGPALANGLESHIRNIWIQGVGGPYDAALATNFLPRGTSQANIDEGKRLFALANQKCPNTPVVAGGYSQGAALIAAAVSELSGAVKEQVKGVALFGYTQNLQNRGGIPNYPRERTKVFCNVGDAVCTGTLIITPAHLSYTIQARGEAARFLRDRIRA

SEQ ID NO: 8941 - protein, 194 aa, Humicola insolens
QLGAIENGLESGSANACPDAILIFARGSTEPGNMGITVGPALANGLESHIPNIWIQGVGGPYDAALATNFLPRGTSQANIDEGKRLFALANQKCPNTPVVAGGYSQGAALIAAAVSELSGAVKEQVKGVALFGYTQNLQNRGGIPNYPRERTKVFCNVGDAVCTGTLIITPAHLSYTIEARGEAARFLRDRIRA

SEQ ID NO: 8942 - protein, 194 aa, Humicola insolens
QLGAIENGLESGSANACPDAILIFARGSTEPGNMGITVGPALANGLKSHIRNIWIQGVGGPYDAALATNFLPRGTSQANIDEGKRLFALANQKCPNTPVVAGGYSQGAALIAAAVSELSGAVKEQVKGVALFGYTQNLQNRGGIPNYPRERTKVFCNVGDAVCTGTLIITPAHLSYTIEARGEAARFLRDRIRA

SEQ ID NO: 8943 - protein, 194 aa, Humicola insolens
QLGAIENDLESGSADTCPDAILIFARGSTEPGNMGITVGPALANGLESHIRNIWIQGVGGPYDAALATNFLPRGTSQANIDEGKRLFALANQKCPNTPVVAGGYSQGAALIAAAVSELSGAVKEQVKGVALFGYTQNLQNRGGIPNYPRERTKVFCNVGDAVCTGTLIITPAHLSYTIEARGEAARFLRDRIRA

SEQ ID NO: 8944 - protein, 194 aa, Humicola insolens
QLGAIENGLESGSANACPDAILIFARGSTEPGNMGITVGPALANGLESHIRNIWIQGVGGPYDAALATNFLPRGTSQANIDEGKRLFALANQKCPNTPVVAGGYSQGAALIAAAVSELSGAVKEQVKGVVLFGYTQNLQNRGGIPNYPRERTKVFCNVGDAVCTGTLIITPAHLSYTIEARGEAARFLRDRIRA

SEQ ID NO: 8945 - protein, 194 aa, Humicola insolens
QLGAIENGLESGSANACPDAILIFARGSTEPGNMGITVGPALANGLESHIRNIWIQGVGGPYDAALATNFLPRGTSQANIDEGKRLFALAHQKCPNTPVVAGGYSQGAALIAAAVSELSGAVKEQVKGVALFGYTQNLQNRGGIPNYPRERTKVFCNVGDAVCTGTLIITPAHLSYTIEARGEAARFLRDRIRA

SEQ ID NO: 8946 - protein, 262 aa, Thermomyces lanuginosus
EVSQDLFNQFNLFAQYSAAAYCGKNNDAPAGTNITCTGNACPEVEKADATFLYSFEDSGVGDVTGFLALDNTNKLIVLSFRGSRSIENWIGNLNFDLKEINDICSGCRGHDGFTSSWRSVADTLRQKVEDAVREHPDYRVVFTGHSLGGALATVAGADLRGNGYDIDVFSYGAPRVGNRAFAEFLTVQTGGTLYRITHTNDIVPRLPPREFGYSHSSPEYWIKSGTLVPVRRRDIVKIEGFDGNTGTGLPLLTDFEAHIWYF

SEQ ID NO: 8947 - protein, 274 aa, Thermomyces lanuginosus
SPIRREVSQDLFNQFNLFAQYSAAAYCGKNNDAPAGTNITCTGNACPEVEKADATFLYSFEDSGVGCVTGFLALDNTNKLIVLSFRGTGSDCNLQLETSYTLTEINDICSGCRGHDGFTSSWRSVADTLRQKVEDAVREHPDYRVVFTGHSLGGALATVAGADLRGNGYDIDVFSYGAPRVGNRAFAEFLTVQTGGTLYRITHTNDIVPRLPPREFGYSHSSPEYWIKSGTLVPVTRNDIVKIEGIDATGGNNQPNIPDIPAHLWYFGLIGTCL

SEQ ID NO: 8948 - protein, 291 aa, Thermomyces lanuginosus
MRSSLVLFFVSAWTALASPIRREVSQDLYDQFKLFAHYAAAAYCGKNNDAPAGTKITCTGNNCPEVEKADATFIYSFEDSGVGDVTGFLALDNTNKLIVLSFRGSRSIENWIANLNFDLKDISDICSGCKGHKGFYNSWRSVADTLRQKVEDAVREYPDYRVVFTGHSLGGALATVAGADLRGNGYDIDVFSYGAPRVGNRAFAEFLTVQTGGTLYRITHTNDIVPRLPPREFGYSHSSPEYWIKSGTLVPVTRNDIVVIEGIDATGGNNQPNIPDIPAHLWYFGLIGTCL

SEQ ID NO: 8949 - protein, 291 aa, Thermomyces lanuginosus
MRSSLVLFFVSAWTALASPIRREVSQDLFNQFNLFAQYSAAAYCGKNNDAPAGTNITCTGNACPEVEKADATFLYSFEDSXXGDVTGFLALDNTNKLIVLSFRGSRXXXXWXXNXNXDLKEINDICSGCRGHDGFTSXWRSVADTLRQKVEDAVREHPDYRVVFTGHSLGGALATVAGADLRGNGYDIDVFSYGAPRVGNRAFAEFLTVQTGGTLYRITHTNDXVPRXPPREXGYSHSSPEYWIKSGTLVPVTRNDIVKIEGIDATGGNNQPNIPDXPAHXWYFGLXGTCL

SEQ ID NO: 8950 - protein, 291 aa, Thermomyces lanuginosus
MRSSLVLFFVSAWTALASPIRREVSQDLYDQFKLFAHYAAAAYCGKNNDAPAGTKITCTGNNCPEVEKADATFIYSFEDSGVGDVTGFLALDNTNKLIVLSFRGSRSIENWIANLNFDLTEISDICSGCKGHRGFYNSWRSVADTLRQKVEDAVREYPDYRVVFTGHSLGGALATVAGADLRGNGYDIDVFSYGAPRVGNRAFAEFLTVQTGGTLYRITHTNDIVPRLPPREFGYSHSSPEYWIKSGTLVPVTRNDIVVIEGIDATGGNNQPNIPDIPAHLWYFGLIGTCL

SEQ ID NO: 8951 - protein, 269 aa, Thermomyces lanuginosus
EVSQDLFNQFNLFAQYSAAAYCGKNNRAPAGTKITCTANACPEVEKADATLLYSFEDSGVGDVTGFLALDNTNKLIVLSFRGSRSIENWIGNLNFELEEIDDICSGCRGHAGFTSSWRSVADTLRQKVEDAVREHPDYRVVFTGHSLGGALATVAGADLRGNKYDIDVFSYGAPRVGNRAFAEFLTVQTGGTLYRITSTNDIVPRLPPRKFGYSHSSPEYWIKPGTLVPVRRRDIVKIEGIDATGGNNQPNIPSITAHLWYFGLIGTCL

SEQ ID NO: 8952 - protein, 269 aa, Thermomyces lanuginosus
EVSQDLFNQFNLFAQYSAAAYCGKNNRAPAGTKITCTANACPEVEKADATVLYSFKDSGVGDVTGFLALDNTNKLIVLSFRGSRSIENWIGNLNFELEEINDICSGCRGHAGFTSSWRSVADTLRQKVEDAVREHPDYRVVFTGHSLGGALATVAGADLRGNKYDIDVFSYGAPRLGNRAFAEFLTVQTGGTLYRITHTNDIVPRLPPRKFGYSHSSPEFWIKSGTLVPVRRRDIVKIEGIDATGGNNQPNIPSITAHLWYFGLIGTCL

SEQ ID NO: 8953 - protein, 269 aa, Thermomyces lanuginosus
EVSQDLFNQFNLFAQYSAAAYCGKNNRAPAGTNITCTANACPEVEKADATFLYSFEDSGVGDVTGFLALDNTNKLIVLSFRGTRSIKNWILDLNYTPQEINDICSGCRGHAGFTSSWRSVADTLRQKVEDAVREHPDYRVVFTGHSLGGALATVAGADLRGNKYDIDVFSYGAPRVGNRAFAEFLTVQTGGTLYRITHTNDIVPRLPPREFGYSHSSPEYWIKSGTLVPVRRRDIVKIEGIDATGGNNQPNIPSITAHLWYFGLIGTCL

SEQ ID NO: 8954 - protein, 269 aa, Thermomyces lanuginosus
EVSQDLFNQFNLFAQYSAAAYCGKNNRAPAGTKITCTANACPEVEKADATVLYSFEDSGVGDVTGFLARDNTNKLIVLSFRGSRSIENWIGNLNFELEEINDICSGCRGHAGFTSSWRSVADTLRQKVEDAVREHPDYRVVFTGHSLGGALATVAGADLRGNKYDIDVFSYGAPRLGNRAFAEFLTVQTGGTLYRITHTNDIVPRLPPRKFGYSHSSPEYWIKSGTGVPVRRRDIVKIEGIDATGGNNQPNIPSITAHLWYFGLIGTCL

SEQ ID NO: 8955 - protein, 269 aa, Thermomyces lanuginosus
EKSQDLFNQFNLFAQYSAAAYCGKNNRAPAGTKITCTANACPEVEKADATVLYSFEDSGVGDVTGFLARDNTNKLIVLSFRGSRSIENWIGNLNFELEEINDICSGCRGHAGFTSSWRSVADTLRQKVEDAVREHPDYRVVFTGHSLGGALATVAGADLRGNKYDIDVFSYGAPRVGNRAFAEFLTVQTGGTLYRITHTNDIVPRLPPRKFGYSHSSPEYWIKSGTGVPVRRRDIVKIEGIDATGGNNQPNIPSITAHLWYFGLIGTCL

SEQ ID NO: 8956 - protein, 269 aa, Thermomyces lanuginosus
EVSQDLFNQFNLFAQYSAAAYCGKNNRAPAGTKITCTANACPEVEKADATVLYSFEDSGVGDVTGFLALDNTNKLIVLSFRGSRSIENWIGNLNFELEEIDDICSGCRGHAGFTSSWRSVADTLRQKVEDAVREHPDYRVVFTGHSLGGALATVAGADLRGNKYDIDVFSYGAPRVGNRAFAEFLTVQTGGTLYRITSTNDIVPRLPPRKFGYSHSSPEYWIKPGTLVPVRRRDIVKIEGIDATGGNNQPNIPSITAHLWYFGLIGTCL

SEQ ID NO: 8957 - protein, 269 aa, Thermomyces lanuginosus
EVSQDLFNQFNLFAQYSAAAYCGKNNRAPAGTNITCTANACPEVEKADATFLYSFEDSGVGDVTGFLALDNTNKLIVLSFRGTRSPTNWIADLNYTLQEINDICSGCRGHAGFTSSWRSVADTLRQKVEDAVREHPDYRVVFTGHSLGGALATVAGADLRGNKYDIDVFSYGAPRVGNRAFAEFLTVQTGGTLYRITHTNDIVPRLPPREFGYSHSSPEYWIKSGTLVPVRRRDIVKIEGIDATGGNNQPNIPSITAHLWYFGLIGTCL

SEQ ID NO: 8958 - protein, 269 aa, Thermomyces lanuginosus
EVSQDLFNQFNLFAQYSAAAYCGKNNRAPAGTNITCTANACPEVEKADATFLYSFEDSGVGDVTGFLALDNTNKLIVLSFRGTRSITNWIADLNYTPQEINDICSGCRGHAGFTSSWRSVADTLRQKVEDAVREHPDYRVVFTGHSLGGALATVAGADLRGNKYDIDVFSYGAPRVGNRAFAEFLTVQTGGTLYRITHTNDIVPRLPPREFGYSHSSPEYWIKSGTLVPVRRRDIVKIEGIDATGGNNQPNIPSITAHLWYFGLIGTCL

SEQ ID NO: 8959 - protein, 269 aa, Thermomyces lanuginosus
EVSQDLFNQFNLFAQYSAAAYCGKNNRAPAGTKITCTANACPEVEKADATILYSFEDSGVGDVTGFLALDNTNKLIVLSFRGSRSIENWIGNLNFELEEIDDICSGCRGHAGFTSSWRSVADTLRQKVEDAVREHPDYRVVFTGHSLGGALATVAGADLRGNKYDIDVFSYGAPRVGNRAFAEFLTVQTGGTLYRITSTNDIVPRLPPRKFGYSHSSPEYWIKPGTLVPVRRRDIVKIEGIDATGGNNQPNIPSITAHLWYFGLIGTCL

SEQ ID NO: 8960 - protein, 269 aa, Thermomyces lanuginosus
EVSQDLFNQFNLFAQYSAAAYCGKNNRAPAGTKITCTANACPEVEKADATVLYTFKDSGVGDVTGFLALDNTNKLIVLSFRGSRSIENWIGNLNFELEEINDICSGCRGHAGFTSSWRSVADTLRQKVEDAVREHPDYRVVFTGHSLGGALATVAGADLRGNKYDIDVFSYGAPRVGNRAFAEFLTVQTGGTLYRITHTNDIVPRLPPRKFGYSHSSPEYWIKSGTLVPVRRRDIVKIEGIDATGGNNQPNIPSITAHLYYFGLIGTCL

SEQ ID NO: 8961 - protein, 269 aa, Thermomyces lanuginosus
EVSQDLFNQFNLFAQYSAAAYCGKNNRAPAGTKITCTANACPEVEKADATVLYTFKDSGVGDVTGFLARDNTNKLIVLSFRGSRSIENWIGNLNFELEEINDICSGCRGHAGFTSSWRSVADTLRQKVEDAVREHPDYRVVFTGHSLGGALATVAGADLRGNKYDIDVFSYGAPRVGNRAFAEFLTVQTGGTLYRITHTNDIVPRLPPREFGYSHSSPEYWIKSGTLVPVRRRDIVKIEGIDATGGNNQPNIPSITAHLYYFGLIGTCL

SEQ ID NO: 8962 - protein, 269 aa, Thermomyces lanuginosus
EKSQDLFNQFNLFAQYSAAAYCGKNNRAPAGTKITCTANACPEVEKADATFLYSFEDSGVGDVTGFLARDNTNKLIVLSFRGSRSIENWIGNLNFELEEINDICSGCRGHAGFTSSWRSVADTLRQKVEDAVREHPDYRVVFTGHSLGGALATVAGADLRGNKYDIDVFSYGAPRLGNRAFAEFLTVQTGGTLYRITHTNDIVPRLPPRKFGYSHSSPEYWIKSGTGVPVRRRDIVKIEGIDATGGNNQPNIPSITAHLWYFGLIGTCL

SEQ ID NO: 8963 - protein, 269 aa, Thermomyces lanuginosus
EVSQDLFNQFNLFAQYSAAAYCGKNNRAPAGTNITCTANACPEVEKADATFLYSFEDSGVGDVTGFLALDNTNKLIVLSFRGTRSPANWIADLNYTPKEINDICSGCRGHAGFTSSWRSVADTLRQKVEDAVREHPDYRVVFTGHSLGGALATVAGADLRGNKYDIDVFSYGAPRVGNRAFAEFLTVQTGGTLYRITHTNDIVPRLPPREFGYSHSSPEYWIKSGTLVPVRRRDIVKIEGIDATGGNNQPNIPSITAHLWYFGLIGTCL

SEQ ID NO: 8964 - protein, 269 aa, Thermomyces lanuginosus
EVSQDLFNQFNLFAQYSAAAYCGKNNDAPAGTNITCTGNACPEVEKADATFLYSFRDSGVGDVTGFLALDNTNKLIVLSFRGSRSIENWIADLNFILIEINDICSGCRGHDGFTSSWFSVADTLRQKVEDAVREHPDYRVVFTGHSLGGALATVAGADLRGNGYDIDVFSYGAPRVGNRAFAEFLTVQTGGTLYRITHTNDIVPRLPPREFGYSHSSPEYWIKSGTLVPVRRRDIVKIEGIDATGGNNQPNIPSIRAHLWYFGAIGTCL

SEQ ID NO: 8965 - protein, 269 aa, Thermomyces lanuginosus
EVSQDLFNQFNLFAQYSAAAYCGKNNDAPAGTNITCTGNACPEVEKADATFLYSFRDSGVGDVTGFLALDNTNKLIVLSFRGSRSIENWIADLNFILIEINDICSGCRGHDGFTSSWFSVADTLRQKVEDAVREHPDYRVVFTGHSLGGALATVAGADLRGNGYDIDVFSYGAPRVGNRAFAEFLTVQTGGTLYRITHTNDIVPRLPPREFGYSHSSPEYWIKSGTLVPVRRRDIVKIEGIDATGGNNQPNIPAIYAHLWYFGAIGTCL

SEQ ID NO: 8966 - protein, 269 aa, Thermomyces lanuginosus
EVSQDLFNQFNLFAQYSAAAYCGKNNDAPAGTNITCTGNACPEVEKADATFLYSFRDSGVGDVTGFLALDNTNKLIVLSFRGSRSIENWIADLNFILIEINDICSGCRGHDGFTSSWFSVADTLRQKVEDAVREHPDYRVVFTGHSLGGALATVAGADLRGNGYDIDVFSYGAPRVGNRAFAEFLTVQTGGTLYRITHTNDIVPRLPPREFGYSHSSPEYWIKSGTLVPVRRRDIVKIEGIDATGGNNQPNIPGIRAHLWYFGAIGTCL

SEQ ID NO: 8967 - protein, 269 aa, Thermomyces lanuginosus
EVSQDLFNQFNLFAQYSAAAYCGKNNDAPAGTNITCTGNACPEVEKADATFLYSFRDSGVGDVTGFLALDNTNKLIVLSFRGSRSIENWIADLNFILIEINDICSGCRGHDGFTSSWFSVADTLRQKVEDAVREHPDYRVVFTGHSLGGALATVAGADLRGNGYDIDVFSYGAPRVGNRAFAEFLTVQTGGTLYRITHTNDIVPRLPPREFGYSHSSPEYWIKSGTLVPVRRRDIVKIEGIDATGGNNQPNIPLISAHLWYFGAIGTCL

SEQ ID NO: 8968 - protein, 269 aa, Thermomyces lanuginosus
EVSQDLFNQFNLFAQYSAAAYCGKNNDAPAGTNITCTGNACPEVEKADATFLYSFRDSGVGDVTGFLALDNTNKLIVLSFRGSRSIENWIADLNFILIEINDICSGCRGHDGFTSSWFSVADTLRQKVEDAVREHPDYRVVFTGHSLGGALATVAGADLRGNGYDIDVFSYGAPRVGNRAFAEFLTVQTGGTLYRITHTNDIVPRLPPREFGYSHSSPEYWIKSGTLVPVRRRDIVKIEGIDATGGNNQPNIPTINAHLWYFGAIGTCL

SEQ ID NO: 8969 - protein, 269 aa, Thermomyces lanuginosus
EVSQDLYNQFKLFAHYAAAAYCGKNNDAPAGTNITCTGNACPEVEKADATFIYSFEDSGVGDVTGFLALDNTNKLIVLSFRGSRSIENWIANLNFDLKEINDICSGCRGHDGFYNSWRSVADTLRQKVEDAVREYPDYRVVFTGHSLGGALATVAGADLRGNGYDIDVFSYGAPRVGNRAFAEFLTVQTGGTLYRITHTNDIVPRLPPREFGYSHSSPEYWIKSGTLVPVTRNDIVVIEGIDATGGNNQPNIPDIPAHLWYFGLIGTCL

SEQ ID NO: 8970 - protein, 269 aa, Thermomyces lanuginosus
EVSQDLFNQFNLFAQYSAAAYCGKNNDAPAGTNITCTGNACPEVEKADATFLYSFRDSGVGDVTGFLALDNTNKLIVLSFRGSRSIENWIADLNFILIEINDICSGCRGHDGFTSSWFSVADTLRQKVEDAVREHPDYRVVFTGHSLGGALATVAGADLRGNGYDIDVFSYGAPRVGNRAFAEFLTVQTGGTLYRITHTNDIVPRLPPREFGYSHSSPEYWIKSGTLVPVRRRDIVKIEGIDATGGNNQPNIPSIPAHLWYFGPIGTCL

SEQ ID NO: 8971 - protein, 269 aa, Thermomyces lanuginosus
EVSQDLFNQFNLFAQYSAAAYCGKNNDAPAGTNITCTGNACPEVEKADATFLYSFRDSGVGDVTGFLALDNTNKLIVLSFRGSRSIENWIADLNFILIEINDICSGCRGHDGFTSSWFSVADTLRQKVEDAVREHPDYRVVFTGHSLGGALATVAGADLRGNGYDIDVFSYGAPRVGNRAFAEFLTVQTGGTLYRITHTNDIVPRLPPREFGYSHSSPEYWIKSGTLVPVRRRDIVKIEGIDATGGNNQPNIPSIQAHLWYFGAIGTCL

SEQ ID NO: 8972 - protein, 269 aa, Thermomyces lanuginosus
EVSQDLFNQFNLFAQYSAAAYCGKNNDAPAGTNITCTGNACPEVEKADATFLYSFRDSGVGDVTGFLALDNTNKLIVLSFRGSRSIENWIADLNFILIEINDICSGCRGHDGFTSSWFSVADTLRQKVEDAVREHPDYRVVFTGHSLGGALATVAGADLRGNGYDIDVFSYGAPRVGNRAFAEFLTVQTGGTLYRITHTNDIVPRLPPREFGYSHSSPEYWIKSGTLVPVRRRDIVKIEGIDATGGNNQPNIPSISAHLWYFGAIGTCL

SEQ ID NO: 8973 - protein, 269 aa, Thermomyces lanuginosus
EVSQDLFNQFNLFAQYSAAAYCGKNNDAPAGTNITCTGNACPEVEKADATFLYSFRDSGVGDVTGFLALDNTNKLIVLSFRGSRSIENWIADLEFILIEINDICSGCRGHDGFTSSWFSVADTLRQKVEDAVREHPDYRVVFTGHSLGGALATVAGADLRGNGYDIDVFSYGAPRVGNRAFAEFLTVQTGGTLYRITHTNDIVPRLPPREFGYSHSSPEYWIKSGTLVPVRRRDIVKIEGIDATGGNNQPNIPSIPAHLWYFGAIGTCL

SEQ ID NO: 8974 - protein, 269 aa, Thermomyces lanuginosus
EVSQDLFNQFNLFAQYSAAAYCGKNNDAPAGTNITCTGNACPEVEKADATFLYSFRDSGVGDVTGFLALDNTNKLIVLSFRGSRSIENWIADLNFILIEINDICSGCRGHDGFTSSWFSVADTLRQKVEDAVREHPDYRVVFTGHSLGGALATVAGADLRGNGYDIDVFSYGAPRVGNRAFAEFLTVQTGGTLYRITHTNDIVPRLPPREFGYSHSSPEYWIKSGTLVPVRRRDIVKIEGIDATGGNNQPNIPSILAHLWYFGAIGTCL

SEQ ID NO: 8975 - protein, 269 aa, Thermomyces lanuginosus
EVSQDLFNQFNLFAQYSAAAYCGKNNDAPAGTNITCTGNACPEVEKADATFLYSFRDSGVGDVTGFLALDNTNKLIVLSFRGTRSIENWIADLNFVLKEINDICSGCRGHDGFTSSWFSVADTLRQKVEDAVREHPDYRVVFTGHSLGGALATVAGADLRGNGYDIDVFSYGAPRVGNRAFAEFLTVQTGGTLYRITHTNDIVPRLPPREFGYSHSSPEYWIKSGTLVPVRRRDIVKIEGIDATGGNNQPNIPSIPAHLWYFGAIGTCL

SEQ ID NO: 8976 - protein, 269 aa, Thermomyces lanuginosus
EVSQDLFNQFNLFAQYSAAAYCGKNNDAPAGTNITCTGNACPEVEKADATFLYSFEDSGVGDVTGFLALDNTNKLIVLSFRGTRSITNWILDLNYTPQEINDICSGCRGHDGFTSSWRSVADTLRQKVEDAVREHPDYRVVFTGHSLGGALATVAGADLRGNGYDIDVFSYGAPRVGNRAFAEFLTVQTGGTLYRITHTNDIVPRLPPREFGYSHSSPEYWIKSGTLVPVRRRDIVKIEGIDATGGNNQPNIPDIPAHLWYFGLIGTCL

SEQ ID NO: 8977 - protein, 269 aa, Thermomyces lanuginosus
EVSQDLFNQFNLFAQYSAAAYCGKNNDAPAGTNITCTGNACPEVEKADATFLYSFRDSGVGDVTGFLALDNTNKLIVLSFRGSRSIENWIADLNFILIEINDICSGCRGHDGFTSSWFSVADTLRQKVEDAVREHPDYRVVFTGHSLGGALATVAGADLRGNGYDIDVFSYGAPRVGNRAFAEFLTVQTGGTLYRITHTNDIVPRLPPREFGYSHSSPEYWIKSGTLVPVRRRDIVKIEGIDATGGNNQPNIPSIGAHLWYFGAIGTCL

SEQ ID NO: 8978 - protein, 268 aa, Thermomyces lanuginosus
EVSQDLFNQFNLFAQYSAAAYCGKNNDAPAGTNITCTGNACPEVEKADATFLYSFRDSGVGDVTGFLALDNTNKLIVLSFRGSRSLENWIADLNFHLQEINDICSGCRGHDGFTSSWFSVADTLRQKVEDAVREHPDYRVVFTGHSLGGALATVAGADLRGNGYDIDVFSYGAPRVGNRAFAEFLTVQTGGTLYRITHTNDIVPRLPPREFGYSHSSPEYWIKSGTLVPVRRRDIVKIEGIDATGGNNQPNIPSIPAHLWYFGLIGTC

SEQ ID NO: 8979 - protein, 194 aa, Humicola insolens
QLGAIENGLESGSANACPDAILIFARGSTEPGNMGITVGPALANGLESHIRNIWIQGVGGPYDAALATNFLPRGTSQANIDEGKRLFALANQKCPNTPVVAGGYSQGAALIAAAVSELSGAVKEQVKGVALFGYTQNLQNRGGIPNYPRERTKVFCNVGDAVCTGTLIITPAHLSYTIXARGEAARFLRDRIRA

SEQ ID NO: 8980 - protein, 194 aa, Humicola insolens
QLGAIENGLESGSANACPDAILIFARGSTEPGNMGITVGPALANGLRSHIRNIWIQGVGGPYDAALATNFLPRGTSQANIDEGKRLFALANQKCPNTPVVAGGYSQGAALIAAAVSELSGAVKEQVKGVALFGYTQNLQNRGGIPNYPRERTKVFCNVGDAVCTGTLIITPAHLSYTIEARGEAARFLRDRIRA

SEQ ID NO: 8981 - protein, 194 aa, Humicola insolens
QLGAIENGLESGSPNACPDAILIFARGSTEPGNMGITVGPALANGLESHIRNIWIQGVGGPYDAALATNFLPRGTSQANIDEGKRLFALANQKCPNTPVVAGGYSQGAALIAAAVSELSGAVKEQVKGVALFGYTQNLQNRGGIPNYPRERTKVFCNVGDAVCTGTLIATPAHLSYTIEARGEAARFLRDRIRA

SEQ ID NO: 8982 - protein, 194 aa, Humicola insolens
QLGAIENGLESGSANACPDAILIFARGSTEPGNMGITVGPALANGLESHIRNIWIQGVGGPYDAALATNFLPRGTSQANIDEGKRLFLLANQKCPNTPVVAGGYSQGAALIAAAVSELSGAVKEQVKGVALFGYTQNLQNRGGIPNYPRERTKVFCNVGDAVCTGTLIITPAHLSYTIEARGEAARFLADRIRA

SEQ ID NO: 8983 - protein, 194 aa, Humicola insolens
QLGAIENGLESGSANACPDAILIFARGSTEPGNMGITVGPALANGLESHIRNIWIQGVGGPYDAALATNFLPRGTSQANIDEGKRLFVLANQKCPNTPVVAGGYSQGAALIAAAVSELSGAVKEQVKGVALFGYTQNLQNRGGIPNYPRERTKVFCNVGDAVCTGTLIITPAHLSYTIEARGEAARFLADRIRA

SEQ ID NO: 8984 - protein, 194 aa, Humicola insolens
QLGAIENGLESGSANACPDAILIFARGSTEPGNMGITVGPALADGLESHIRNIWIQGVGGPYDAALATNFLPRGTSQANIDEGKRLFALANQKCPNTPVVAGGYSQGAALIAAAVSELSGAVKEQVKGVVLFGYTQNLQNRGGIPNYPRERTKVFCNVGDAVCTGTLIITPAHLSYTIEARGEAARFLRDRIRA

SEQ ID NO: 8985 - protein, 194 aa, Humicola insolens
QLGAIENGLESGSANACPDAILIFARGSTEPGNMGITVGPALANGLEKHIRNIWIQGVGGPYDAALATNFLPRGTSQANIDEGKRLFHLANQKCPNTPVVAGGYSQGAALIAAAVSELSGAVKEQVKGVALFGYTQNLQNRGGIPNYPRERTKVFCNVGDAVCTGTLIGTPAHLSYTIEARGEAARFLHDRIRA

SEQ ID NO: 8986 - protein, 194 aa, Humicola insolens
QLGAIENGLESGSANACPDAILIFARGSTEPGNMGITVGPALANGLESHIRNIWIQGVGGPYDAALATNFLPRGTSQANIDEGKRLFALANQKCPNTPVVAGGYSQGAALIAAAVSELSGAVKEQVKGVALFGYTQNLQNRGGIPNYPRERTKVFCNVGDAVCTGTLIITPAHLSYTIEARGEAARFLRDRIRA

SEQ ID NO: 8987 - protein, 194 aa, Humicola insolens
QLGAIENGLESGSANACPDAILIFARGSTEPGNMGITVGPALANGLKSHIRNIWIQGVGGPYNAALATNFLPRGTSQANIDEGKRLFALANQKCPNTPVVAGGYSQGAALIAAAVSELSGAVKEQVKGVALFGYTQNLQNRGGIPNYPRERTKVFCNVGDAVCTGTLIITPAHLSYTIEARGEAARFLRDRIRA

SEQ ID NO: 8988 - protein, 192 aa, Humicola insolens
GAIENGLESGSANACPDAILIFARGSTEPGNMGITVGPALANGLESHIRNIWIQGVGGPYDAALATNFLPRGTSQANIDEGKRLFALANQKCPNTPVVAGGYSQGAALIAAAVSELSGAVKEQVKGVALFGYTQNLQNRGGIPNYPRERTKVFCNVGDAVCTGTLIITPAHLSYTIEARGEAARFLRDRIRA

SEQ ID NO: 8989 - protein, 269 aa, Thermomyces lanuginosus
EKSQDLFNQFNLFAQYSAAAYCGKNNRAPAGTKITCTANACPEVEKADATILYSFEDSGVGDVTGFLARDNTNKLIVLSFRGSRSIENWIGNLNFELEEINDICSGCRGHAGFTSSWRSVADTLRQKVEDAVREHPDYRVVFTGHSLGGALATVAGADLRGNKYDIDVFSYGAPRLGNRAFAEFLTVQTGGTLYRITHTNDIVPRLPPRKFGYSHSSPEYWIKSGTDVPVRRRDIVKIEGIDATGGNNQPNIPSITAHLWYFGLIGTCL

SEQ ID NO: 8990 - protein, 269 aa, Thermomyces lanuginosus
EVSQDLFNQFNLFAQYSAAAYCGKNNRAPAGTKITCTANACPEVEKADATLLYSFEDSGVGDVTGFLALDNTNKLIVLSFRGSRSIENWIGNLNFELEEIDDICSGCRGHAGFTSSWRSVADTLRQKVEDAVREHPDYRVVFTGHSLGGALATVAGADLRGNKYDIDVFSYGAPRVGNRAFAEFLTVQTGGTLYRITDTNDIVPRLPPRKFGYSHSSPEFWIKSGTLVPVRRRDIVKIEGIDATGGNNQPNIPSITVHLWYFGLIGTCL

SEQ ID NO: 8991 - protein, 269 aa, Thermomyces lanuginosus
EKSQDLFNQFNLFAQYSAAAYCGKNNRAPAGTKITCTANACPEVEKADATVLYSFEDSGVGDVTGFLARDNTNKLIVLSFRGSRSIENWIGNLNFELEEINDICSGCRGHAGFTSSWRSVADTLRQKVEDAVREHPDYRVVFTGHSLGGALATVAGADLRGNKYDIDVFSYGAPRLGNRAFAEFLTVQTGGTLYRITHTNDIVPRLPPRKFGYSHSSPEYWIKSGTGVPVRRRDIVKIEGIDATGGNNQPNIPSITAHLWYFGLIGTCL

SEQ ID NO: 8992 - protein, 269 aa, Thermomyces lanuginosus
EYSQDLFNQFNLFAQYSAAAYCGKNNRAPAGTKITCTANACPEVEKADATFLYSFEDSGVGDVTGFLARDNTNKLIVLSFRGSRSIENWIGNLNFELEEINDICSGCRGHAGFTSSWRSVADTLRQKVEDAVREHPDYRVVFTGHSLGGALATVAGADLRGNKYDIDVFSYGAPRLGNRAFAEFLTVQTGGTLYRITHTNDIVPRLPPRKFGYSHSSPEYWIKSGTGVPVRRRDIVKIEGIDATGGNNQPNIPSGTAHLWYFGLIGTCL

SEQ ID NO: 8993 - protein, 269 aa, Thermomyces lanuginosus
EVSQDLFNQFNLFAQYSAAAYCGKNNRAPAGTKITCTANACPEVEKADATILYSFEDSGVGDVTGFLALDNTNKLIVLSFRGSRSIENWIGNLNFELEEIDDICSGCRGHAGFTSSWRSVADTLRQKVEDAVREHPDYRVVFTGHSLGGALATVAGADLRGNKYDIDVFSYGAPRVGNRAFAEFLTVQTGGTLYRITSTNDIVPRLPPRKFGYSHSSPEFWIKSGTLVPVRRRDIVKIEGIDATGGNNQPNIPSITVHLWYFGLIGTCL

SEQ ID NO: 8994 - protein, 269 aa, Thermomyces lanuginosus
EVSQDLFNQFNLFAQYSAAAYCGKNNRAPAGTKITCTANACPEVEKADATILYSFEDSGVGDVTGFLALDNTNKLIVLSFRGSRSIENWIGNLNFELEEIDDICSGCRGHAGFTSSWRSVADTLRQKVEDAVREHPDYRVVFTGHSLGGALATVAGADLRGNKYDIDVFSYGAPRVGNRAFAEFLTVQTGGTLYRITSTNDIVPRLPPRKFGYSHSSPEFWIKSGTLVPVRRRDIVKIEGIDATGGNNQPNIPSITHHLWYFGLIGTCL

SEQ ID NO: 8995 - protein, 269 aa, Thermomyces lanuginosus
EVSQDLFNQFNLFAQYSAAAYCGKNNRAPAGTKITCTANACPEVEKADATVLYSFEDSGVGDVTGFLALDNTNKLIVLSFRGSRSIENWIGNLNFELEEIDDICSGCRGHAGFTSSWRSVADTLRQKVEDAVREHPDYRVVFTGHSLGGALATVAGADLRGNKYDIDVFSYGAPRVGNRAFAEFLTVQTGGTLYRITSTNDIVPRLPPRKFGYSHSSPEFWIKSGTLVPVRRRDIVKIEGIDATGGNNQPNIPSITHHLWYFGLIGTCL

SEQ ID NO: 8996 - protein, 269 aa, Thermomyces lanuginosus
EVSQDLFNQFNLFAQYSAAAYCGKNNRAPAGTKITCTANACPEVEKADATLLYSFEDSGVGDVTGFLALDNTNKLIVLSFRGSRSIENWIGNLNFELEEIDDICSGCRGHAGFTSSWRSVADTLRQKVEDAVREHPDYRVVFTGHSLGGALATVAGADLRGNKYDIDVFSYGAPRVGNRAFAEFLTVQTGGTLYRITSTNDIVPRLPPRKFGYSHSSPEFWIKSGTLVPVRRRDIVKIEGIDATGGNNQPNIPSITFHLWYFGLIGTCL

SEQ ID NO: 8997 - protein, 269 aa, Thermomyces lanuginosus
EVSQDLFNQFNLFAQYSAAAYCGKNNRAPAGTKITCTANACPEVEKADATILYSFEDSGVGDVTGFLALDNTNKLIVLSFRGSRSIENWIGNLNFELEEIDDICSGCRGHAGFTSSWRSVADTLRQKVEDAVREHPDYRVVFTGHSLGGALATVAGADLRGNKYDIDVFSYGAPRVGNRAFAEFLTVQTGGTLYRITSTNDIVPRLPPRKFGYSHSSPEFWIKSGTLVPVRRRDIVKIEGIDATGGNNQPNIPSITFHLWYFGLIGTCL

SEQ ID NO: 8998 - protein, 269 aa, Thermomyces lanuginosus
EKSQDLFNQFNLFAQYSAAAYCGKNNRAPAGTKITCTANACPEVEKADATLLYSFEDSGVGDVTGFLARDNTNKLIVLSFRGSRSIENWIGNLNFELEEINDICSGCRGHAGFTSSWRSVADTLRQKVEDAVREHPDYRVVFTGHSLGGALATVAGADLRGNKYDIDVFSYGAPRLGNRAFAEFLTVQTGGTLYRITHTNDIVPRLPPRKFGYSHSSPEYWIKSGTGVPVRRRDIVKIEGIDATGGNNQPNIPSITAHLWYFGLIGTCL

SEQ ID NO: 8999 - protein, 269 aa, Thermomyces lanuginosus
EVSQDLFNQFNLFAQYSAAAYCGKNNRAPAGTKITCTANACPEVEKADATVLYSFKDSGVGDVTGFLARDNTNKLIVLSFRGSRSIENWIGNLNFELEEINDICSGCRGHAGFTSSWRSVADTLRQKVEDAVREHPDYRVVFTGHSLGGALATVAGADLRGNKYDIDVFSYGAPRLGNRAFAEFLTVQTGGTLYRITHTNDIVPRLPPRKFGYSHSSPEFWIKSGTLVPVRRRDIVKIEGIDATGGNNQPNIPSITAHLWYFGLIGTCL

SEQ ID NO: 9000 - protein, 269 aa, Thermomyces lanuginosus
EVSQDLFNQFNLFAQYSAAAYCGKNNRAPAGTKITCTANACPEVEKADATVLYSFEDSGVGDVTGFLALDNTNKLIVLSFRGSRSIENWIGNLNFELEEIDDICSGCRGHAGFTSSWRSVADTLRQKVEDAVREHPDYRVVFTGHSLGGALATVAGADLRGNKYDIDVFSYGAPRVGNRAFAEFLTVQTGGTLYRITSTNDIVPRLPPRKFGYSHSSPEFWIKSGTLVPVRRRDIVKIEGIDATGGNNQPNIPSITFHLWYFGLIGTCL

SEQ ID NO: 9001 - protein, 269 aa, Thermomyces lanuginosus
EVSQDLFNQFNLFAQYSAAAYCGKNNRAPAGTKITCTANACPEVEKADATVLYTFKDSGVGDVTGFLARDNTNKLIVLSFRGSRSIENWIGNLNFELEEINDICSGCRGHAGFTSSWRSVADTLRQKVEDAVREHPDYRVVFTGHSLGGALATVAGADLRGNKYDIDVFSYGAPRVGNRAFAEFLTVQTGGTLYRITHTNDIVPRLPPRKFGYSHSSPEFWIKSGTLVPVRRRDIVKIEGIDATGGNNQPNIPSITAHLWYFGLIGTCL

SEQ ID NO: 9002 - protein, 269 aa, Thermomyces lanuginosus
EVSQDLFNQFNLFAQYSAAAYCGKNNRAPAGTNITCTANACPEVEKADATVLYSFEDSGVGDVTGFLALDNTNKLIVLSFRGSRSPANWIADLNYTPQEINDICSGCRGHAGFTSSWRSVADTLRQKVEDAVREHPDYRVVFTGHSLGGALATVAGADLRGNKYDIDVFSYGAPRVGNRAFAEFLTVQTGGTLYRITHTNDIVPRLPPREFGYSHSSPEYWIKSGTLVPVRRRDIVKIEGIDATGGNNQPNIPSITAHLWYFGLIGTCL

SEQ ID NO: 9003 - protein, 269 aa, Thermomyces lanuginosus
EYSQDLFNQFNLFAQYSAAAYCGKNNRAPAGTKITCTANACPEVEKADATLLYSFEDSGVGDVTGFLARDNTNKLIVLSFRGSRSIENWIGNLNFELEEINDICSGCRGHAGFTSSWRSVADTLRQKVEDAVREHPDYRVVFTGHSLGGALATVAGADLRGNKYDIDVFSYGAPRLGNRAFAEFLTVQTGGTLYRITHTNDIVPRLPPRKFGYSHSSPEYWIKSGTDVPVRRRDIVKIEGIDATGGNNQPNIPSITAHLWYFGLIGTCL

SEQ ID NO: 9004 - protein, 269 aa, Thermomyces lanuginosus
EVSQDLFNQFNLFAQYSAAAYCGKNNRAPAGTKITCTANACPEVEKADATVLYTFEDSGVGDVTGFLARDNTNKLIVLSFRGSRSIKNWIGNLNFELEEINDICSGCRGHAGFTSSWRSVADTLRQKVEDAVREHPDYRVVFTGHSLGGALATVAGADLRGNKYDIDVFSYGAPRVGNRAFAEFLTVQTGGTLYRITHTNDIVPRLPPRKFGYSHSSPEFWIKSGTLVPVRRRDIVKIEGIDATGGNNQPNIPSITAHLWYFGLIGTCL

SEQ ID NO: 9005 - protein, 269 aa, Thermomyces lanuginosus
EVSQDLFNQFNLFAQYSAAAYCGKNNRAPAGTKITCTANACPEVEKADATVLYSFEDSGVGDVTGFLALDNTNKLIVLSFRGSRSIENWIGNLNFELEEIDDICSGCRGHAGFTSSWRSVADTLRQKVEDAVREHPDYRVVFTGHSLGGALATVAGADLRGNKYDIDVFSYGAPRVGNRAFAEFLTVQTGGTLYRITDTNDIVPRLPPRKFGYSHSSPEFWIKSGTLVPVRRRDIVKIEGIDATGGNNQPNIPSITVHLWYFGLIGTCL

SEQ ID NO: 9006 - protein, 269 aa, Thermomyces lanuginosus
EVSQDLFNQFNLFAQYSAAAYCGKNNRAPAGTKITCTANACPEVEKADATVLYSFEDSGVGDVTGFLALDNTNKLIVLSFRGSRSIENWIGNLNFELEEIDDICSGCRGHAGFTSSWRSVADTLRQKVEDAVREHPDYRVVFTGHSLGGALATVAGADLRGNKYDIDVFSYGAPRVGNRAFAEFLTVQTGGTLYRITSTNDIVPRLPPRKFGYSHSSPEFWIKSGTLVPVRRRDIVKIEGIDATGGNNQPNIPSITVHLWYFGLIGTCL

SEQ ID NO: 9007 - protein, 269 aa, Thermomyces lanuginosus
EYSQDLFNQFNLFAQYSAAAYCGKNNRAPAGTKITCTANACPEVEKADATVLYSFEDSGVGDVTGFLARDNTNKLIVLSFRGSRSIENWIGNLNFELEEINDICSGCRGHAGFTSSWRSVADTLRQKVEDAVREHPDYRVVFTGHSLGGALATVAGADLRGNKYDIDVFSYGAPRLGNRAFAEFLTVQTGGTLYRITHTNDIVPRLPPRKFGYSHSSPEYWIKSGTDVPVRRRDIVKIEGIDATGGNNQPNIPSITAHLWYFGLIGTCL

SEQ ID NO: 9008 - protein, 269 aa, Thermomyces lanuginosus
EVSQDLFNQFNLFAQYSAAAYCGKNNRAPAGTKITCTANACPEVEKADATVLYSFEDSGVGDVTGFLALDNTNKLIVLSFRGSRSWENWMADLNALLKEINDICSGCRGHAGFTSSWRSVADTLRQKVEDAVREHPDYRVVFTGHSLGGALATVAGADLRGNKYDIDVFSYGAPRVGNRAFAEFLTVQTGGTLYRITHTNDIVPRLPPRELGYSHSSPEYWIKSGTLVPVRRRDIVKIEGIDATGGNNQPNIPSITAHLWYFGLIGTCL

SEQ ID NO: 9009 - protein, 269 aa, Thermomyces lanuginosus
EVSQDLFNQFNLFAQYSAAAYCGKNNRAPAGTNITCTANACPEVEKADATFLYSFEDSGVGDVTGFLALDNTNKLIVLSFRGSRSWANWIADLNYTLQEINDICSGCRGHAGFTSSWRSVADTLRQKVEDAVREHPDYRVVFTGHSLGGALATVAGADLRGNKYDIDVFSYGAPRVGNRAFAEFLTVQTGGTLYRITHTNDIVPRLPPREFGYSHSSPEYWIKSGTLVPVRRRDIVKIEGIDATGGNNQPNTPSTTAHLWYFGLIGTCL

SEQ ID NO: 9010 - protein, 269 aa, Thermomyces lanuginosus
EVSQDLFNQFNLFAQYSAAAYCGKNNRAPAGTKITCTANACPEVEKADATILYSFEDSGVGDVTGFLALDNTNKLIVLSFRGSRSIENWIGNLNFELEEIDDICSGCRGHAGFTSSWRSVADTLRQKVEDAVREHPDYRVVFTGHSLGGALATVAGADLRGNKYDIDVFSYGAPRVGNRAFAEFLTVQTGGTLYRITSTNDIVPRLPPRRFGYSHSSPEFWIKSGTLVPVRRRDIVKIEGIDATGGNNQPNIPSITVHLWYFGLIGTCL

SEQ ID NO: 9011 - protein, 269 aa, Thermomyces lanuginosus
EVSQDLFNQFNLFAQYSAAAYCGKNNRAPAGTKITCTANACPEVEKADATVLYSFEDSGVGDVTGFLALDNTNKLIVLSFRGSRSIENWIGNLNFELEEIDDICSGCRGHAGFTSSWRSVADTLRQKVEDAVREHPDYRVVFTGHSLGGALATVAGADLRGNKYDIDVFSYGAPRVGNRAFAEFLTVQTGGTLYRITSTNDIVPRLPPRRFGYSHSSPEFWIKSGTLVPVRRRDIVKIEGIDATGGNNQPNIPSITVHLWYFGLIGTCL

SEQ ID NO: 9012 - protein, 269 aa, Thermomyces lanuginosus
EVSQDLFNQFNLFAQYSAAAYCGKNNRAPAGTKITCTANACPEVEKADATLLYSFEDSGVGDVTGFLALDNTNKLIVLSFRGSRSIENWIGNLNFELEEIDDICSGCRGHAGFTSSWRSVADTLRQKVEDAVREHPDYRVVFTGHSLGGALATVAGADLRGNKYDIDVFSYGAPRVGNRAFAEFLTVQTGGTLYRITSTNDIVPRLPPRKFGYSHSSPEFWIKSGTLVPVRRRDIVKIEGIDATGGNNQPNIPSITVHLWYFGLIGTCL

SEQ ID NO: 9013 - protein, 269 aa, Thermomyces lanuginosus
EVSQDLFNQFNLFAQYSAAAYCGKNNRAPAGTKITCTANACPEVEKADATVLYSFEDSGVGDVTGFLALDNTNKLIVLSFRGSRSIENWIGNLNFELEEIDDICSGCRGHAGFTSSWRSVADTLRQKVEDAVREHPDYRVVFTGHSLGGALATVAGADLRGNKYDIDVFSYGAPRVGNRAFAEFLTVQTGGTLYRITSTNDIVPRLPPRKFGYSHSSPEFWIKSGTLPPVRRRDIVKIEGIDATGGNNQPNIPSITAHLWYFGLIGTCL

SEQ ID NO: 9014 - protein, 269 aa, Thermomyces lanuginosus
EVSQDLFNQFNLFAQYSAAAYCGKNNRAPAGTKITCTANACPEVEKADATVLYSFKDSGVGDVTGFLARDNTNKLIVLSFRGSRSIENWIGNLNFELEEINDICSGCRGHAGFTSSWRSVADTLRQKVEDAVREHPDYRVVFTGHSLGGALATVAGADLRGNKYDIDVFSYGAPRLGNRAFAEFLTVQTGGTLYRITHTNDIVPRLPPRKFGYSHSSPEYWIKSGTLVPVRRRDIVKIEGIDATGGNNQPNIPSITAHLYYFGLIGTCL

SEQ ID NO: 9015 - protein, 269 aa, Thermomyces lanuginosus
EVSQDLFNQFNLFAQYSAAAYCGKNNRAPAGTKITCTANACPEVEKADATLLYSFEDSGVGDVTGFLALDNTNKLIVLSFRGSRSIENWIGNLNFELEEIDDICSGCRGHAGFTSSWRSVADTLRQKVEDAVREHPDYRVVFTGHSLGGALATVAGADLRGNKYDIDVFSYGAPRVGNRAFAEFLTVQTGGTLYRITSTNDIVPRLPPRKFGYSHSSPEFWIKSGTLVPVRRRDIVKIEGIDATGGNNQPNIPSITHHLWYFGLIGTCL

SEQ ID NO: 9016 - protein, 269 aa, Thermomyces lanuginosus
EKSQDLFNQFNLFAQYSAAAYCGKNNRAPAGTKITCTANACPEVEKADATVLYSFEDSGVGDVTGFLARDNTNKLIVLSFRGSRSIENWIGNLNFELEEINDICSGCRGHAGFTSSWRSVADTLRQKVEDAVREHPDYRVVFTGHSLGGALATVAGADLRGNKYDIDVFSYGAPRLGNRAFAEFLTVQTGGTLYRITHTNDIVPRLPPRKFGYSHSSPEYWIKSGTDVPVRRRDIVKIEGIDATGGNNQPNIPSITAHLWYFGLIGTCL

SEQ ID NO: 9017 - protein, 269 aa, Thermomyces lanuginosus
EVSQDLFNQFNLFAQYSAAAYCGKNNRAPAGTKITCTANACPEVEKADATILYSFEDSGVGDVTGFLALDNTNKLIVLSFRGSRSIENWIGNLNFELEEIDDICSGCRGHAGFTSSWRSVADTLRQKVEDAVREHPDYRVVFTGHSLGGALATVAGADLRGNKYDIDVFSYGAPRVGNRAFAEFLTVQTGGTLYRITDTNDIVPRLPPRKFGYSHSSPEFWIKSGTLVPVRRRDIVKIEGIDATGGNNQPNIPSITVHLWYFGLIGTCL

SEQ ID NO: 9018 - protein, 269 aa, Thermomyces lanuginosus
EYSQDLFNQFNLFAQYSAAAYCGKNNRAPAGTKITCTANACPEVEKADATILYSFEDSGVGDVTGFLARDNTNKLIVLSFRGSRSIENWIGNLNFELEEINDICSGCRGHAGFTSSWRSVADTLRQKVEDAVREHPDYRVVFTGHSLGGALATVAGADLRGNKYDIDVFSYGAPRLGNRAFAEFLTVQTGGTLYRITHTNDIVPRLPPRKFGYSHSSPEYWIKSGTDVPVRRRDIVKIEGIDATGGNNQPNIPSITAHLWYFGLIGTCL

SEQ ID NO: 9019 - protein, 269 aa, Thermomyces lanuginosus
EVSQDLFNQFNLFAQYSAAAYCGKNNRAPAGTKITCTANACPEVEKADATLLYSFEDSGVGDVTGFLALDNTNKLIVLSFRGSRSIENWIGNLNFELEEIDDICSGCRGHAGFTSSWRSVADTLRQKVEDAVREHPDYRVVFTGHSLGGALATVAGADLRGNKYDIDVFSYGAPRVGNRAFAEFLTVQTGGTLYRITSTNDIVPRLPPRKFGYSHSSPEFWIKSGTLPPVRRRDIVKIEGIDATGGNNQPNIPSITAHLWYFGLIGTCL

SEQ ID NO: 9020 - protein, 269 aa, Thermomyces lanuginosus
EVSQDLFNQFNLFAQYSAAAYCGKNNRAPAGTKITCTANACPEVEKADATILYSFEDSGVGDVTGFLALDNTNKLIVLSFRGSRSIENWIGNLNFELEEIDDICSGCRGHAGFTSSWRSVADTLRQKVEDAVREHPDYRVVFTGHSLGGALATVAGADLRGNKYDIDVFSYGAPRVGNRAFAEFLTVQTGGTLYRITSTNDIVPRLPPRKFGYSHSSPEFWIKSGTLPPVRRRDIVKIEGIDATGGNNQPNIPSITAHLWYFGLIGTCL

SEQ ID NO: 9021 - protein, 269 aa, Thermomyces lanuginosus
EVSQDLFNQFNLFAQYSAAAYCGKNNRAPAGTKITCTANACPEVEKADATLLYSFEDSGVGDVTGFLALDNTNKLIVLSFRGSRSIENWIGNLNFELEEIDDICSGCRGHAGFTSSWRSVADTLRQKVEDAVREHPDYRVVFTGHSLGGALATVAGADLRGNKYDIDVFSYGAPRVGNRAFAEFLTVQTGGTLYRITSTNDIVPRLPPRRFGYSHSSPEFWIKSGTLVPVRRRDIVKIEGIDATGGNNQPNIPSITVHLWYFGLIGTCL

SEQ ID NO: 9022 - protein, 269 aa, Thermomyces lanuginosus
EVSQDLFNQFNLFAQYSAAAYCGKNNDAPAGTNITCTGNACPEVEKADATFLYSFRDSGVGDVTGFLALDNTNKLIVLSFRGSRSIENWIADLNFILIEINDICSGCRGHDGFTSSWFSVADTLRQKVEDAVREHPDYRVVFTGHSLGGALATVAGADLRGNGYDIDVFSYGAPRVGNRAFAEFLTVQTGGTLYRITHTNDIVPRLPPREFGYSHSSPEYWIKSGTLVPVRRRDIVKIEGIDATGGNNQPNIPSSVAHLWYFGAIGTCL

SEQ ID NO: 9023 - protein, 269 aa, Thermomyces lanuginosus
EVSQDLFNQFNLFAQYSAAAYCGKNNDAPAGTNITCTGNACPEVEKADATFLYSFRDSGVGDVTGFLALDNTNKLIVLSFRGSRSIENWIADLNFILIEINDICSGCRGHDGFTSSWFSVADTLRQKVEDAVREHPDYRVVFTGHSLGGALATVAGADLRGNGYDIDVFSYGAPRVGNRAFAEFLTVQTGGTLYRITHTNDIVPRLPPREFGYSHSSPEYWIKSGTLVPVRRRDIVKIEGIDATGGNNQPNIPSGAAHLWYFGAIGTCL

SEQ ID NO: 9024 - protein, 269 aa, Thermomyces lanuginosus
EVSQDLFNQFNLFAQYSAAAYCGKNNDAPAGTNITCTGNACPEVEKADATFLYSFRDSGVGDVTGFLALDNTNKLIVLSFRGSRSIENWIADLNFILIEINDICSGCRGHDGFTSSWFSVADTLRQKVEDAVREHPDYRVVFTGHSLGGALATVAGADLRGNGYDIDVFSYGAPRVGNRAFAEFLTVQTGGTLYRITHTNDIVPRLPPREFGYSHSSPEYWIKSGTLVPVRRRDIVKIEGIDATGGNNQPNIPGLPAHLWYFGAIGTCL

SEQ ID NO: 9025 - protein, 269 aa, Thermomyces lanuginosus
EVSQDLFNQFNLFAQYSAAAYCGKNNDAPAGTNITCTGNACPEVEKADATFLYSFRDSGVGDVTGFLALDNTNKLIVLSFRGSRSLENWIADLNFHLQEINDICSGCRGHDGFTSSWFSVADTLRQKVEDAVREHPDYRVVFTGHSLGGALATVAGADLRGNGYDIDVFSYGAPRVGNRAFAEFLTVQTGGTLYRITHTNDIVPRLPPREFGYSHSSPEYWIKSGTLVPVRRRDIVKIEGIDATGGNNQPNIPSIPAHLWYFGAIGTCL

SEQ ID NO: 9026 - protein, 269 aa, Thermomyces lanuginosus
EVSQDLFNQFNLFAQYSAAAYCGKNNDAPAGTNITCTGNACPEVEKADATFLYSFEDSGVGCVTGFLALDNTNKLIVLSFRGTRSICNWILDLNYTPQEINDICSGCRGHDGFTSSWRSVADTLRQKVEDAVREHPDYRVVFTGHSLGGALATVAGADLRGNGYDIDVFSYGAPRVGNRAFAEFLTVQTGGTLYRITHTNDIVPRLPPREFGYSHSSPEYWIKSGTLVPVRRRDIVKIEGIDATGGNNQPNIPDIPAHLWYFGLIGTCL

SEQ ID NO: 9027 - protein, 269 aa, Thermomyces lanuginosus
EVSQDLFNQFNLFAQYSAAAYCGKNNDAPAGTNITCTGNACPEVEKADATFLYSFRDSGVGDVTGFLALDNTNKLIVLSFRGSRSIENWIADLNFILIEINDICSGCRGHDGFTSSWFSVADTLRQKVEDAVREHPDYRVVFTGHSLGGALATVAGADLRGNGYDIDVFSYGAPRVGNRAFAEFLTVQTGGTLYRITHTNDIVPRLPPREFGYSHSSPEYWIKSGTLVPVRRRDIVKIEGIDATGGNNQPNIPGVPAHLWYFGAIGTCL

SEQ ID NO: 9028 - protein, 269 aa, Thermomyces lanuginosus
EVSQDLFNQFNLFAQYSAAAYCGKNNDAPAGTNITCTGNACPEVEKADATFLYSFRDSGVGDVTGFLALDNTNKLIVLSFRGSRSIENWIADLNFILIEINDICSGCRGHDGFTSSWFSVADTLRQKVEDAVREHPDYRVVFTGHSLGGALATVAGADLRGNGYDIDVFSYGAPRVGNRAFAEFLTVQTGGTLYRITHTNDIVPRLPPREFGYSHSSPEYWIKSGTLVPVRRRDIVKIEGIDATGGNNQPNIPSVPAHLWYFGAIGTCL

SEQ ID NO: 9029 - protein, 269 aa, Thermomyces lanuginosus
EVSQDLFNQFNLFAQYSAAAYCGKNNDAPAGTNITCTGNACPEVEKADATFLYSFRDSGVGDVTGFLALDNTNKLIVLSFRGSRSIENWIADLNFILIEINDICSGCRGHDGFTSSWFSVADTLRQKVEDAVREHPDYRVVFTGHSLGGALATVAGADLRGNGYDIDVFSYGAPRVGNRAFAEFLTVQTGGTLYRITHTNDIVPRLPPREFGYSHSSPEYWIKSGTLVPVRRRDIVKIEGIDATGGNNQPNIPSMSAHLWYFGAIGTCL

SEQ ID NO: 9030 - protein, 269 aa, Thermomyces lanuginosus
EVSQDLFNQFNLFAQYSAAAYCGKNNDAPAGTNITCTGNACPEVEKADATFLYSFRDSGVGDVTGFLALDNTNKLIVLSFRGSRSIENWIADLNFILIEINDICSGCRGHDGFTSSWFSVADTLRQKVEDAVREHPDYRVVFTGHSLGGALATVAGADLRGNGYDIDVFSYGAPRVGNRAFAEFLTVQTGGTLYRITHTNDIVPRLPPREFGYSHSSPEYWIKSGTLVPVRRRDIVKIEGIDATGGNNQPNIPSGSAHLWYFGAIGTCL

SEQ ID NO: 9031 - protein, 269 aa, Thermomyces lanuginosus
EVSQDLFNQFNLFAQYSAAAYCGKNNRAPAGTNITCTANACPEVEKADATFLYSFEDSGVGDVTGFLALDNTNKLIVLSFRGTNSLENWIADFNFILQEINDICSGCRGHDGFTSSWRSVADTLRQKVEDAVREHPDYRVVFTGHSLGGALATVAGADLRGNKYDIDVFSYGAPRVGNRAFAEFLTVQTGGTLYRITHTNDIVPRLPPREFGYSHSSPEYWIKSGTLVPVRRRDIVKIEGIDATGGNNQPNIPSITAHLWYFGLIGTCL

SEQ ID NO: 9032 - protein, 268 aa, Thermomyces lanuginosus
EKSQDLFNQFNLFAQYSAAAYCGKNNRAPAGTKITCTANACPEVEKADATILYSFEDSGVGDVTGFLARDNTNKLIVLSFRGSRSIENWIGNLNFELEEINDICSGCRGHAGFTSSWRSVADTLRQKVEDAVREHPDYRVVFTGHSLGGALATVAGADLRGNKYDIDVFSYGAPRLGNRAFAEFLTVQTGGTLYRITTNDIVPRLPPRKFGYSHSSPEYWIKSGTGVPVRRRDIVKIEGIDATGGNNQPNIPSITAHLWYFGLIGTCL

SEQ ID NO: 9033 - protein, 268 aa, Thermomyces lanuginosus
EVSQDLFNQFNLFAQYSAAAYCGKNNDAPAGTNITCTGNACPEVEKADATFLYSFEDSGVGDVTGFLALDNTNKLIVLSFRGSRSIENWIANLNFWLKKINDICSGCRGHDGFTSSWRSVADTLRQKVEDAVREHPDYRVVFTGHSLGGALATVAGADLRGNGYDIDVFSYGAPRVGNRAFAEFLTVQTGGTLYRITHTNDIVPRLPPREFGYSHSSPEYWIKSGTLVPVTRNDIVKIEGIDATGGSDRTTIMWIVGHLWYFQATDAC

SEQ ID NO: 9034 - protein, 268 aa, Thermomyces lanuginosus
EVSQDLFNQFNLFAQYSAAAYCGKNNDAPAGTNITCTGNACPEVEKADATFLYSFRDSGVGDVTGFLALDNTNKLIVLSFRGTRSLENWIADLNFILQEINDICSGCRGHDGFTSSWFSVADTLRQKVEDAVREHPDYRVVFTGHSLGGALATVAGADLRGNGYDIDVFSYGAPRVGNRAFAEFLTVQTGGTLYRITHTNDIVPRLPPREFGYSHSSPEYWIKSGTLVPVRRRDIVKIEGIDATGGNNQPNIPSIPAHLWYFGLIGTC

SEQ ID NO: 9035 - protein, 267 aa, Thermomyces lanuginosus
EVSQDLFNQFNLFAQYSAAAYCGKNNRAPAGTKITCTANACPEVEKADATVLYSFEDSGVGDVTGFLALDNTNKLIVLSFRGSRSIENWIADFDYLLEEINDICSGCRGHAGFTSSWRSVADTLRQKVEDAVREHPDYRVVFTGHSLGGALATVAGADLRGNKYDIDVFSYGAPRVGNRAFAEFLTVQTGGTLYRITHTNDIVPRLPPREFGYSHSSPEYWIKSGTLVPVRRRDIVKIEGIDATGGNNQPNIPSITAHLWYFGLIGT

SEQ ID NO: 9036 - protein, 269 aa, Thermomyces lanuginosus
EYSQDLFNQFNLFAQYSAAAYCGKNNRAPAGTKITCTANACPEVEKADATLLYSFEDSGVGDVTGFLARDNTNKLIVLSFRGSRSIENWIGNLNFELEEINDICSGCRGHAGFTSSWRSVADTLRQKVEDAVREHPDYRVVFTGHSLGGALATVAGADLRGNKYDIDVFSYGAPRLGNRAFAEFLTVQTGGTLYRITHTNDIVPRLPPRKFGYSHSSPEYWIKPGTGVPVRRRDIVKIEGIDATGGNNQPNIPSITAHLWYFGLIGTCL

SEQ ID NO: 9037 - protein, 269 aa, Thermomyces lanuginosus
EKSQDLFNQFNLFAQYSAAAYCGKNNRAPAGTKITCTANACPEVEKADATVLYSFEDSGVGDVTGFLARDNTNKLIVLSFRGSRSIENWIGNLNFELEEINDICSGCRGHAGFTSSWRSVADTLRQKVEDAVREHPDYRVVFTGHSLGGALATVAGADLRGNKYDIDVFSYGAPRLGNRAFAEFLTVQTGGTLYRITHTNDIVPRLPPRKFGYSHSSPEYWIKSGTGPPVRRRDIVKIEGIDATGGNNQPNIPSITAHLWYFGLIGTCL

SEQ ID NO: 9038 - protein, 269 aa, Thermomyces lanuginosus
EKSQDLFNQFNLFAQYSAAAYCGKNNRAPAGTKITCTANACPEVEKADATVLYSFEDSGVGDVTGFLARDNTNKLIVLSFRGSRSIENWIGNLNFELEEINDICSGCRGHAGFTSSWRSVADTLRQKVEDAVREHPDYRVVFAGHSLGGALATVAGADLRGNKYDIDVFSYGAPRLGNRAFAEFLTVQTGGTLYRITHTNDIVPRLPPRKFGYSHSSPEYWIKSGTGVPVRRRDIVKIEGIDATGGNNQPNIPSITAHLWYFGLIGTCL

SEQ ID NO: 9039 - protein, 269 aa, Thermomyces lanuginosus
EKSQDLFNQFNLFAQYSAAAYCGKNNRAPAGTKITCTANACPEVEKADATILYSFEDSGVGDVTGFLARDNTNKLIVLSFRGSRSIENWIGNLNFELEEINDICSGCRGHAGFTSSWRSVADTLRQKVEDAVREHPDYRVVFTGHSLGGALATVAGADLRGNKYDIDVFSYGAPRLGNRAFAEFLTVQTGGTLYRITLTNDIVPRLPPRKFGYSHSSPEYWIKSGTGVPVRRRDIVKIEGIDATGGNNQPNIPSITAHLWYFGLIGTCL

SEQ ID NO: 9040 - protein, 269 aa, Thermomyces lanuginosus
EVSQDLFNQFNLFAQYSAAAYCGKNNRAPAGTKITCTANACPEVEKADATVLYSFEDSGVGDVTGFLALDNTNKLIVLSFRGSRSIENWIGNLNFELEEIDDICSGCRGHAGFTSSWRSVADTLRQKVEDAVREHPDYRVVFTGHSLGGALATVAGADLRNNKYDIDVFSYGAPRVGNRAFAEFLTVQTGGTLYRITSTNDIVPRLPPRKFGYSHSSPEFWIKSGTLVPVRRRDIVKIEGIDATGGNNQPNIPSITVHLWYFGLIGTCL

SEQ ID NO: 9041 - protein, 269 aa, Thermomyces lanuginosus
EYSQDLFNQFNLFAQYSAAAYCGKNNRAPAGTKITCTANACPEVEKADATLLYSFEDSGVGDVTGFLARDNTNKLIVLSFRGSRSIENWIGNLNFELEEINDICSGCRGHAGFTSSWRSVADTLRQKVEDAVREHPDYRVVFTGHSLGGALATVAGADLRGNKYDIDVFSYGAPRLGNRAFAEFLTVQTGGTLYRITSTNDIVPRLPPRKFGYSHSSPEYWIKSGTGVPVRRRDIVKIEGIDATGGNNQPNIPSITAHLWYFGLIGTCL

SEQ ID NO: 9042 - protein, 269 aa, Thermomyces lanuginosus
EYSQDLFNQFNLFAQYSAAAYCGKNNRAPAGTKITCTANACPEVEKADATLLYSFEDSGVGDVTGFLARDNTNKLIVLSFRGSRSIENWIGNLNFELEEINDICSGCRGHAGFTSSWRSVADTLRQKVEDAVREHPDYRVVFTGHSLGGALATVAGADLRGNKYDIDVFSYGAPRLGNRAFAEFLTVQTGGTLYRITHTNDIVPRLPPRKFGYSHSSPEYWIKSGTGVPRRRRDIVKIEGIDATGGNNQPNIPSITAHLWYFGLIGTCL

SEQ ID NO: 9043 - protein, 269 aa, Thermomyces lanuginosus
EYSQDLFNQFNLFAQYSAAAYCGKNNRAPAGTKITCTANACPEVEKADATVLYSFEDSGVGDVTGFLARDNTNKLIVLSFRGSRSIENWIGNLNFELEEINDICSGCRGHAGFTSSWRSVADTLRQKVEDAVREHPDYRVVFTGHSLGGALATVAGADLRGNKYDIDVFSYGAPRLGNRAFAEFLTVQTGGTLYRITHTNDIVPRLPPRKFGYSHSSPEYWIKSGTGVPRRRRDIVKIEGIDATGGNNQPNIPSITAHLWYFGLIGTCL

SEQ ID NO: 9044 - protein, 269 aa, Thermomyces lanuginosus
EKSQDLFNQFNLFAQYSAAAYCGKNNRAPAGTKITCTANACPEVEKADATILYSFEDSGVGDVTGFLARDNTNKLIVLSFRGSRSIENWIGNLNFELEEINDICSGCRGHAGFTSSWRSVADTLRQKVEDAVREHPDYRVVFTGHSLGGALATVAGADLRGNKYDIDVFSYGAPRLGNRAFAEFLTVQTGGTLYRITHTNDIVPRLPPRKFGYSHSSPEYWIKSGTGVPRRRRDIVKIEGIDATGGNNQPNIPSITAHLWYFGLIGTCL

SEQ ID NO: 9045 - protein, 269 aa, Thermomyces lanuginosus
EYSQDLFNQFNLFAQYSAAAYCGKNNRAPAGTKITCTANACPEVEKADATLLYSFEDSGVGDVTGFLARDNTNKLIVLSFRGSRSIENWIGNLNFELEEINDICSGCRGHAGFTSSWRSVADTLRQKVEDAVREHPDYRVVFTGHSLGGALATVAGADLRGNKYDIDVFSYGAPRLGNRAFAEFLTVQTGGTLYRITHTNDIVPRLPPRKFGYSHSSPEYWIKFGTGVPVRRRDIVKIEGIDATGGNNQPNIPSITAHLWYFGLIGTCL

SEQ ID NO: 9046 - protein, 269 aa, Thermomyces lanuginosus
EYSQDLFNQFNLFAQYSAAAYCGKNNRAPAGTKITCTANACPEVEKADATLLYSFEDSGVGDVTGFLARDNTNKLIVLSFRGSRSIENWIGNLNFELEEINDICSGCRGHAGFTSSWRSVADTLRQKVEDAVREHPDYRVVFTGHSLGGALATVAGADLRGNKYDIDVFSYGAPRLGNRAFAEFLTVQTGGTLYRITHTNDIVPRLPPRKFGYSHSSPEYWIKSGTGVPVRRRDIVKIEGIDATGGNNQPNIPSGTAHLWYFGLIGTCL

SEQ ID NO: 9047 - protein, 269 aa, Thermomyces lanuginosus
EYSQDLFNQFNLFAQYSAAAYCGKNNRAPAGTKITCTANACPEVEKADATVLYSFEDSGVGDVTGFLARDNTNKLIVLSFRGSRSIENWIGNLNFELEEINDICSGCRGHAGFTSSWRSVADTLRQKVEDAVREHPDYRVVFTGHSLGGALATVAGADLRGNKYDIDVFSYGAPRLGNRAFAEFLTVQTGGTLYRITHTNDIVPRLPPRKFGYSHSSPEYWIKFGTGVPVRRRDIVKIEGIDATGGNNQPNIPSITAHLWYFGLIGTCL

SEQ ID NO: 9048 - protein, 269 aa, Thermomyces lanuginosus
EKSQDLFNQFNLFAQYSAAAYCGKNNRAPAGTKITCTANACPEVEKADATILYSFEDSGVGDVTGFLARDNTNKLIVLSFRGSRSIENWIGNLNFELEEINDICSGCRGHAGFTSSWRSVADTLRQKVEDAVREHPDYRVVFTGHSLGGALATVAGADLRGNKYDIDVFSYGAPRLGNRAFAEFLTVQTGGTLYRITHTNDIVPRLPPRKFGYSHSSPEYWIKIGTGVPVRRRDIVKIEGIDATGGNNQPNIPSITAHLWYFGLIGTCL

SEQ ID NO: 9049 - protein, 269 aa, Thermomyces lanuginosus
EYSQDLFNQFNLFAQYSAAAYCGKNNRAPAGTKITCTANACPEVEKADATILYSFEDSGVGDVTGFLARDNTNKLIVLSFRGSRSIENWIGNLNFELEEINDICSGCRGHAGFTSSWRSVADTLRQKVEDAVREHPDYRVVFTGHSLGGALATVAGADLRGNKYDIDVFSYGAPRLGNRAFAEFLTVQTGGTLYRITHTNDIVPRLPPRKFGYSHSSPEYWIKIGTGVPVRRRDIVKIEGIDATGGNNQPNIPSITAHLWYFGLIGTCL

SEQ ID NO: 9050 - protein, 269 aa, Thermomyces lanuginosus
EYSQDLFNQFNLFAQYSAAAYCGKNNRAPAGTKITCTANACPEVEKADATILYSFEDSGVGDVTGFLARDNTNKLIVLSFRGSRSIENWIGNLNFELEEINDICSGCRGHAGFTSSWRSVADTLRQKVEDAVREHPDYRVVFTGHSLGGALATVAGADLRGNKYDIDVFSYGAPRLGNRAFAEFLTVQTGGTLYRITHTNDIVPRLPPRKFGYSHSSPEYWIKSGTGVPVRRRDIVKIEGIDATGGNNQPNIPSGTAHLWYFGLIGTCL

SEQ ID NO: 9051 - protein, 269 aa, Thermomyces lanuginosus
EYSQDLFNQFNLFAQYSAAAYCGKNNRAPAGTKITCTANACPEVEKADATILYSFEDSGVGDVTGFLARDNTNKLIVLSFRGSRSIENWIGNLNFELEEINDICSGCRGHAGFTSSWRSVADTLRQKVEDAVREHPDYRVVFTGHSLGGALATVAGADLRGNKYDIDVFSYGAPRLGNRAFAEFLTVQTGGTLYRITHTNDIVPRLPPRKFGYSHSSPEYWIKSGTGVPVRRRDIVKIEGIDATGGNNQPNIPSITVHLWYFGLIGTCL

SEQ ID NO: 9052 - protein, 269 aa, Thermomyces lanuginosus
EKSQDLFNQFNLFAQYSAAAYCGKNNRAPAGTKITCTANACPEVEKADATVLYSFEDSGVGDVTGFLARDNTNKLIVLSFRGSRSIENWIGNLNFELEEINDICSGCRGHAGFTSSWRSVADTLRQKVEDAVREHPDYRVVFTGHSLGGALATVAGADLRGNKYDIDVFSYGAPRLGNRAFAEFLTVQTGGTLYRITSTNDIVPRLPPRKFGYSHSSPEYWIKSGTGVPVRRRDIVKIEGIDATGGNNQPNIPSITAHLWYFGLIGTCL

SEQ ID NO: 9053 - protein, 269 aa, Thermomyces lanuginosus
EVSQDLFNQFNLFAQYSAAAYCGKNNRAPAGTNITCTANACPEVEKADATFLYSFEDSGVGDVTGFLALDNTNKLIVLSFRGSRSWANWIADLNYTPQEINDICSGCRGHAGFTSSWRSVADTLRQKVEDAVREHPDYRVVFTGHSLGGALATVAGADLRGNKYDIDVFSYGAPRVGNRAFAEFLTVQTGGTLYRITHTNDIVPRLPPREFGYSHSSPEYWIKSGTLVPVRRRDIVKIEGIDATGGNNQPNTPSTTAHLWYFGLIGTCL

SEQ ID NO: 9054 - protein, 269 aa, Thermomyces lanuginosus
EYSQDLFNQFNLFAQYSAAAYCGKNNRAPAGTKITCTANACPEVEKADATILYSFEDSGVGDVTGFLARDNTNKLIVLSFRGSRSIENWIGNLNFELEEINDICSGCRGHAGFTSSWRSVADTLRQKVEDAVREHPDYRVVFTGHSLGGALATVAGADLRGNKYDIDVFSYGAPRLGNRAFAEFLTVQTGGTLYRITHTNDIVPRLPPRKFGYSHSSPEYWIKFGTGVPVRRRDIVKIEGIDATGGNNQPNIPSITAHLWYFGLIGTCL

SEQ ID NO: 9055 - protein, 269 aa, Thermomyces lanuginosus
EYSQDLFNQFNLFAQYSAAAYCGKNNRAPAGTKITCTANACPEVEKADATVLYSFEDSGVGDVTGFLARDNTNKLIVLSFRGSRSIENWIGNLNFELEEINDICSGCRGHAGFTSSWRSVADTLRQKVEDAVREHPDYRVVFTGHSLGGALATVAGADLRGNKYDIDVFSYGAPRLGNRAFAEFLTVQTGGTLYRITHTNDIVPRLPPRKFGYSHSSPEYWIKSGTGPPVRRRDIVKIEGIDATGGNNQPNIPSITAHLWYFGLIGTCL

SEQ ID NO: 9056 - protein, 269 aa, Thermomyces lanuginosus
EKSQDLFNQFNLFAQYSAAAYCGKNNRAPAGTKITCTANACPEVEKADATILYSFEDSGVGDVTGFLARDNTNKLIVLSFRGSRSIENWIGNLNFELEEINDICSGCRGHAGFTSSWRSVADTLRQKVEDAVREHPDYRVVFTGHSLGGGLATVAGADLRGNKYDIDVFSYGAPRLGNRAFAEFLTVQTGGTLYRITHTNDIVPRLPPRKFGYSHSSPEYWIKSGTGVPVRRRDIVKIEGIDATGGNNQPNIPSITAHLWYFGLIGTCL

SEQ ID NO: 9057 - protein, 269 aa, Thermomyces lanuginosus
EKSQDLFNQFNLFAQYSAAAYCGKNNRAPAGTKITCTANACPEVEKADATVLYSFEDSGVGDVTGFLARDNTNKLIVLSFRGSRSIENWIGNLNFELEEINDICSGCRGHAGFTSSWRSVADTLRQKVEDAVREHPDYRVVFTGHSLGGALATVAGADLRGNKYDIDVFSYGAPRLGNRAFAEFLTVQTGGTLYRITNTNDIVPRLPPRKFGYSHSSPEYWIKSGTGVPVRRRDIVKIEGIDATGGNNQPNIPSITAHLWYFGLIGTCL

SEQ ID NO: 9058 - protein, 269 aa, Thermomyces lanuginosus
EYSQDLFNQFNLFAQYSAAAYCGKNNRAPAGTKITCTANACPEVEKADATILYSFEDSGVGDVTGFLARDNTNKLIVLSFRGSRSIENWIGNLNFELEEINDICSGCRGHAGFTSSWRSVADTLRQKVEDAVREHPDYRVVFTGHSLGGALATVAGADLRGNKYDIDVFSYGAPRLGNRAFAEFLTVQTGGTLYRITSTNDIVPRLPPRKFGYSHSSPEYWIKSGTGVPVRRRDIVKIEGIDATGGNNQPNIPSITAHLWYFGLIGTCL

SEQ ID NO: 9059 - protein, 269 aa, Thermomyces lanuginosus
EKSQDLFNQFNLFAQYSAAAYCGKNNRAPAGTKITCTANACPEVEKADATILYSFEDSGVGDVTGFLARDNTNKLIVLSFRGSRSIENWIGNLNFELEEINDICSGCRGHAGFTSSWRSVADTLRQKVEDAVREHPDYRVVFTGHSLGGALATVAGADLRGNKYDIDVFSYGAPRLGNRAFAEFLTVQTGGTLYRITHTNDIVPRLPPRKFGYSHSSPEYWIKFGTGVPVRRRDIVKIEGIDATGGNNQPNIPSITAHLWYFGLIGTCL

SEQ ID NO: 9060 - protein, 269 aa, Thermomyces lanuginosus
EKSQDLFNQFNLFAQYSAAAYCGKNNRAPAGTKITCTANACPEVEKADATVLYSFEDSGVGDVTGFLARDNTNKLIVLSFRGSRSIENWIGNLNFELEEINDICSGCRGHAGFTSSWRSVADTLRQKVEDAVREHPDYRVVFTGHSLGGALATVAGADLRGNKYDIDVFSYGAPRLGNRAFAEFLTVQTGGTLYRITLTNDIVPRLPPRKFGYSHSSPEYWIKSGTGVPVRRRDIVKIEGIDATGGNNQPNIPSITAHLWYFGLIGTCL

SEQ ID NO: 9061 - protein, 269 aa, Thermomyces lanuginosus
EKSQDLFNQFNLFAQYSAAAYCGKNNRAPAGTKITCTANACPEVEKADATILYSFEDSGVGDVTGFLARDNTNKLIVLSFRGSRSIENWIGNLNFELEEINDICSGCRGHAGFTSSWRSVADTLRQKVEDAVREHPDYRVVFTGHSLGGALATVAGADLRGNKYDIDVFSYGAPRLGNRAFAEFLTVQTGGTLYRITHTNDIVPRLPPRKFGYSHSSPEYWIKSGTGVPVRRRDIVKIEGIDATGGNNQPNIPSITVHLWYFGLIGTCL

SEQ ID NO: 9062 - protein, 269 aa, Thermomyces lanuginosus
EKSQDLFNQFNLFAQYSAAAYCGKNNRAPAGTKITCTANACPEVEKADATILYSFEDSGVGDVTGFLARDNTNKLIVLSFRGSRSIENWIGNLNFELEEINDICSGCRGHAGFTSSWRSVADTLRQKVEDAVREHPDYRVVFTGHSLGGALATVAGADLRGNKYDIDVFSYGAPRLGNRAFAEFLTVQTGGTLYRITHTNDIVPRLPPRKFGYSHSSPEYWIKSGTGPPVRRRDIVKIEGIDATGGNNQPNIPSITAHLWYFGLIGTCL

SEQ ID NO: 9063 - protein, 269 aa, Thermomyces lanuginosus
EVSQDLFNQFNLFAQYSAAAYCGKNNRAPAGTKITCTANACPEVEKADATVLYTFKDSGVGDVTGFLARDNTNKLIVLSFRGSRSIENWIGNLNFELEEINDICSGCRGHAGFTSSWRSVADTLRQKVEDAVREHPDYRVVFTGHSLGGALATVAGADLRGNKYDIDVFSYGAPRVGNRAFAEFLTVQTGGTLYRITHTNDIVPRLPPRKFGYSHSSPEFWIKSGTLVPVRRRDIVKIEGIDATGGNNQPNIPSGTAHLWYFGLIGTCL

SEQ ID NO: 9064 - protein, 269 aa, Thermomyces lanuginosus
EYSQDLFNQFNLFAQYSAAAYCGKNNRAPAGTKITCTANACPEVEKADATVLYSFEDSGVGDVTGFLARDNTNKLIVLSFRGSRSIENWIGNLNFELEEINDICSGCRGHAGFTSSWRSVADTLRQKVEDAVREHPDYRVVFTGHSLGGALATVAGADLRGNKYDIDVFSYGAPRLGNRAFAEFLTVQTGGTLYRITHTNDIVPRLPPRKFGYSHSSPEYWIKSGTGVPVRRRDIVKIEGIDATGGNNQPNIPSITVHLWYFGLIGTCL

SEQ ID NO: 9065 - protein, 269 aa, Thermomyces lanuginosus
EYSQDLFNQFNLFAQYSAAAYCGKNNRAPAGTKITCTANACPEVEKADATLLYSFEDSGVGDVTGFLARDNTNKLIVLSFRGSRSIENWIGNLNFELEEINDICSGCRGHAGFTSSWRSVADTLRQKVEDAVREHPDYRVVFAGHSLGGALATVAGADLRGNKYDIDVFSYGAPRLGNRAFAEFLTVQTGGTLYRITHTNDIVPRLPPRKFGYSHSSPEYWIKSGTGVPVRRRDIVKIEGIDATGGNNQPNIPSITAHLWYFGLIGTCL

SEQ ID NO: 9066 - protein, 269 aa, Thermomyces lanuginosus
EYSQDLFNQFNLFAQYSAAAYCGKNNRAPAGTKITCTANACPEVEKADATLLYSFEDSGVGDVTGFLARDNTNKLIVLSFRGSRSIENWIGNLNFELEEINDICSGCRGHAGFTSSWRSVADTLRQKVEDAVREHPDYRVVFTGHSLGGALATVAGADLRGNKYDIDVFSYGAPRLGNRAFAEFLTVQTGGTLYRITHTNDIVPRLPPRKFGYSHSSPEYWIKSGTGPPVRRRDIVKIEGIDATGGNNQPNIPSITAHLWYFGLIGTCL

SEQ ID NO: 9067 - protein, 269 aa, Thermomyces lanuginosus
EKSQDLFNQFNLFAQYSAAAYCGKNNRAPAGTKITCTANACPEVEKADATILYSFEDSGVGDVTGFLARDNTNKLIVLSFRGSRSIENWIGNLNFELEEINDICSGCRGHAGFTSSWRSVADTLRQKVEDAVREHPDYRVVFTGHSLGGALATVAGADLRGNKYDIDVFSYGAPRLGNRAFAEFLTVQTGGTLYRITSTNDIVPRLPPRKFGYSHSSPEYWIKSGTGVPVRRRDIVKIEGIDATGGNNQPNIPSITAHLWYFGLIGTCL

SEQ ID NO: 9068 - protein, 269 aa, Thermomyces lanuginosus
EYSQDLFNQFNLFAQYSAAAYCGKNNRAPAGTKITCTANACPEVEKADATVLYSFEDSGVGDVTGFLARDNTNKLIVLSFRGSRSIENWIGNLNFELEEINDICSGCRGHAGFTSSWRSVADTLRQKVEDAVREHPDYRVVFTGHSLGGALATVAGADLRGNKYDIDVFSYGAPRLGNRAFAEFLTVQTGGTLYRITNTNDIVPRLPPRKFGYSHSSPEYWIKSGTGVPVRRRDIVKIEGIDATGGNNQPNIPSITAHLWYFGLIGTCL

SEQ ID NO: 9069 - protein, 269 aa, Thermomyces lanuginosus
EKSQDLFNQFNLFAQYSAAAYCGKNNRAPAGTKITCTANACPEVEKADATVLYSFEDSGVGDVTGFLARDNTNKLIVLSFRGSRSIENWIGNLNFELEEINDICSGCRGHAGFTSSWRSVADTLRQKVEDAVREHPDYRVVFTGHSLGGALATVAGADLRGNKYDIDVFSYGAPRLGNRAFAEFLTVQTGGTLYRITHTNDIVPRLPPRKFGYSHSSPEYWIKSGTGVPVRRRDIVKIEGIDATGGNNQPNIPSITIHLWYFGLIGTCL

SEQ ID NO: 9070 - protein, 269 aa, Thermomyces lanuginosus
EYSQDLFNQFNLFAQYSAAAYCGKNNRAPAGTKITCTANACPEVEKADATILYSFEDSGVGDVTGFLARDNTNKLIVLSFRGSRSIENWIGNLNFELEEINDICSGCRGHAGFTSSWRSVADTLRQKVEDAVREHPDYRVVFTGHSLGGALATVAGADLRGNKYDIDVFSYGAPRLGNRAFAEFLTVQTGGTLYRITHTNDIVPRLPPRKFGYSHSSPEYWIKSGTGVPVRRRDIVKIEGIDATGGNNQPNIPSITIHLWYFGLIGTCL

SEQ ID NO: 9071 - protein, 269 aa, Thermomyces lanuginosus
EYSQDLFNQFNLFAQYSAAAYCGKNNRAPAGTKITCTANACPEVEKADATLLYSFEDSGVGDVTGFLARDNTNKLIVLSFRGSRSIENWIGNLNFELEEINDICSGCRGHAGFTSSWRSVADTLRQKVEDAVREHPDYRVVFTGHSLGGALATVAGADLRGNKYDIDVFSYGAPRLGNRAFAEFLTVQTGGTLYRITLTNDIVPRLPPRKFGYSHSSPEYWIKSGTGVPVRRRDIVKIEGIDATGGNNQPNIPSITAHLWYFGLIGTCL

SEQ ID NO: 9072 - protein, 269 aa, Thermomyces lanuginosus
EYSQDLFNQFNLFAQYSAAAYCGKNNRAPAGTKITCTANACPEVEKADATVLYSFEDSGVGDVTGFLARDNTNKLIVLSFRGSRSIENWIGNLNFELEEINDICSGCRGHAGFTSSWRSVADTLRQKVEDAVREHPDYRVVFTGHSLGGALATVAGADLRGNKYDIDVFSYGAPRLGNRAFAEFLTVQTGGTLYRITITNDIVPRLPPRKFGYSHSSPEYWIKSGTGVPVRRRDIVKIEGIDATGGNNQPNIPSITAHLWYFGLIGTCL

SEQ ID NO: 9073 - protein, 269 aa, Thermomyces lanuginosus
EKSQDLFNQFNLFAQYSAAAYCGKNNRAPAGTKITCTANACPEVEKADATVLYSFEDSGVGDVTGFLARDNTNKLIVLSFRGSRSIENWIGNLNFELEEINDICSGCRGHAGFTSSWRSVADTLRQKVEDAVREHPDYRVVFTGHSLGGALATVAGADLRGNKYDIDVFSYGAPRLGNRAFAEFLTVQTGGTLYRITHTNDIVPRLPPRKFGYSHSSPEYWIKSGTGVPVRRRDIVKIEGIDATGGNNQPNIPSGTAHLWYFGLIGTCL

SEQ ID NO: 9074 - protein, 269 aa, Thermomyces lanuginosus
EVSQDLFNQFNLFAQYSAAAYCGKNNRAPAGTKITCTANACPEVEKADATVLYSFEDSGVGDVTGFLALDNTNKLIVLSFRGTRSIENWMADLNYLPQEINDICSGCRGHAGFTSSWRSVADTLRQKVEDAVREHPDYRVVFTGHSLGGALATVAGADLRGNKYDIDVFSYGAPRVGNRAFAEFLTVQTGGTLYRITHTNDIVPRLPPREFGYSHSSPEYWIKSGTLVPVRRRDIVKIEGIDATGGNNQPNIPSITAHLWYFGLIGTCL

SEQ ID NO: 9075 - protein, 269 aa, Thermomyces lanuginosus
EYSQDLFNQFNLFAQYSAAAYCGKNNRAPAGTKITCTANACPEVEKADATLLYSFEDSGVGDVTGFLARDNTNKLIVLSFRGSRSIENWIGNLNFELEEINDICSGCRGHAGFTSSWRSVADTLRQKVEDAVREHPDYRVVFTGHSLGGALATVAGADLRGNKYDIDVFSYGAPRLGNRAFAEFLTVQTGGTLYRITHTNDIVPRLPPRKFGYSHSSPEYWIKIGTGVPVRRRDIVKIEGIDATGGNNQPNIPSITAHLWYFGLIGTCL

SEQ ID NO: 9076 - protein, 269 aa, Thermomyces lanuginosus
EYSQDLFNQFNLFAQYSAAAYCGKNNRAPAGTKITCTANACPEVEKADATLLYSFEDSGVGDVTGFLARDNTNKLIVLSFRGSRSIENWIGNLNFELEEINDICSGCRGHAGFTSSWRSVADTLRQKVEDAVREHPDYRVVFTGHSLGGALATVAGADLRGNKYDIDVFSYGAPRLGNRAFAEFLTVQTGGTLYRITHTNDIVPRLPPRKFGYSHSSPEYWIKSGTGVPVRRRDIVKIEGIDATGGNNQPNIPSITIHLWYFGLIGTCL

SEQ ID NO: 9077 - protein, 269 aa, Thermomyces lanuginosus
EYSQDLFNQFNLFAQYSAAAYCGKNNRAPAGTKITCTANACPEVEKADATVLYSFEDSGVGDVTGFLARDNTNKLIVLSFRGSRSIENWIGNLNFELEEINDICSGCRGHAGFTSSWRSVADTLRQKVEDAVREHPDYRVVFTGHSLGGALATVAGADLRGNKYDIDVFSYGAPRLGNRAFAEFLTVQTGGTLYRITSTNDIVPRLPPRKFGYSHSSPEYWIKSGTGVPVRRRDIVKIEGIDATGGNNQPNIPSITAHLWYFGLIGTCL

SEQ ID NO: 9078 - protein, 269 aa, Thermomyces lanuginosus
EVSQDLFNQFNLFAQYSAAAYCGKNNRAPAGTKITCTANACPEVEKADATVLYSFEDSGVGDVTGFLALDNTNKLIVLSFRGTRSPENWFLDFNFLLKEINDICSGCRGHAGFTSSWRSVADTLRQKVEDAVREHPDYRVVFTGHSLGGALATVAGADLRGNKYDIDVFSYGAPRVGNRAFAEFLTVQTGGTLYRITHTNDIVPRLPPREFGYSHSSPEYWIKSGTLVPVRRRDIVKIEGIDATGGNNQPNIPSITAHFWYFGLIGTCL

SEQ ID NO: 9079 - protein, 269 aa, Thermomyces lanuginosus
EKSQDLFNQFNLFAQYSAAAYCGKNNRAPAGTKITCTANACPEVEKADATVLYTFEDSGVGDVTGFLARDNTNKLIVLSFRGSRSIENWIGNLNFELEEINDICSGCRGHAGFTSSWRSVADTLRQKVEDAVREHPDYRVVFTGHSLGGALATVAGADLRGNKYDIDVFSYGAPRLGNRAFAEFLTVQTGGTLYRITHTNDIVPRLPPRKFGYSHSSPEYWIKSGTLVPVRRRDIVKIEGIDATGGNNQPNIPSITAHLYYFGLIGTCL

SEQ ID NO: 9080 - protein, 269 aa, Thermomyces lanuginosus
EYSQDLFNQFNLFAQYSAAAYCGKNNRAPAGTKITCTANACPEVEKADATILYSFEDSGVGDVTGFLARDNTNKLIVLSFRGSRSIENWIGNLNFELEEINDICSGCRGHAGFTSSWRSVADTLRQKVEDAVREHPDYRVVFTGHSLGGALATVAGADLRGNKYDIDVFSYGAPRLGNRAFAEFLTVQTGGTLYRITLTNDIVPRLPPRKFGYSHSSPEYWIKSGTGVPVRRRDIVKIEGIDATGGNNQPNIPSITAHLWYFGLIGTCL

SEQ ID NO: 9081 - protein, 269 aa, Thermomyces lanuginosus
EYSQDLFNQFNLFAQYSAAAYCGKNNRAPAGTKITCTANACPEVEKADATVLYSFEDSGVGDVTGFLARDNTNKLIVLSFRGSRSIENWIGNLNFELEEINDICSGCRGHAGFTSSWRSVADTLRQKVEDAVREHPDYRVVFTGHSLGGALATVAGADLRGNKYDIDVFSYGAPRLGNRAFAEFLTVQTGGTLYRITYTNDIVPRLPPRKFGYSHSSPEYWIKSGTGVPVRRRDIVKIEGIDATGGNNQPNIPSITAHLWYFGLIGTCL

SEQ ID NO: 9082 - protein, 269 aa, Thermomyces lanuginosus
EVSQDLFNQFNLFAQYSAAAYCGKNNRAPAGTKITCTANACPEVEKADATLLYSFEDSGVGDVTGFLALDNTNKLIVLSFRGSRSIENWIGNLNFELEEIDDICSGCRGHAGFTSSWRSVADTLRQKVEDAVREHPDYRVVFTGHSLGGALATVAGADLRNNKYDIDVFSYGAPRVGNRAFAEFLTVQTGGTLYRITSTNDIVPRLPPRKFGYSHSSPEFWIKSGTLVPVRRRDIVKIEGIDATGGNNQPNIPSITVHLWYFGLIGTCL

SEQ ID NO: 9083 - protein, 269 aa, Thermomyces lanuginosus
EYSQDLFNQFNLFAQYSAAAYCGKNNRAPAGTKITCTANACPEVEKADATVLYSFEDSGVGDVTGFLARDNTNKLIVLSFRGSRSIENWIGNLNFELEEINDICSGCRGHAGFTSSWRSVADTLRQKVEDAVREHPDYRVVFTGHSLGGALATVAGADLRGNKYDIDVFSYGAPRLGNRAFAEFLTVQTGGTLYRITHTNDIVPRLPPRKFGYSHSSPEYWIKIGTGVPVRRRDIVKIEGIDATGGNNQPNIPSITAHLWYFGLIGTCL

SEQ ID NO: 9084 - protein, 269 aa, Thermomyces lanuginosus
EKSQDLFNQFNLFAQYSAAAYCGKNNRAPAGTKITCTANACPEVEKADATVLYSFEDSGVGDVTGFLARDNTNKLIVLSFRGSRSIENWIGNLNFELEEINDICSGCRGHAGFTSSWRSVADTLRQKVEDAVREHPDYRVVFTGHSLGGALATVAGADLRGNKYDIDVFSYGAPRLGNRAFAEFLTVQTGGTLYRITYTNDIVPRLPPRKFGYSHSSPEYWIKSGTGVPVRRRDIVKIEGIDATGGNNQPNIPSITAHLWYFGLIGTCL

SEQ ID NO: 9085 - protein, 269 aa, Thermomyces lanuginosus
EYSQDLFNQFNLFAQYSAAAYCGKNNRAPAGTKITCTANACPEVEKADATVLYSFEDSGVGDVTGFLARDNTNKLIVLSFRGSRSIENWIGNLNFELEEINDICSGCRGHAGFTSSWRSVADTLRQKVEDAVREHPDYRVVFAGHSLGGALATVAGADLRGNKYDIDVFSYGAPRLGNRAFAEFLTVQTGGTLYRITHTNDIVPRLPPRKFGYSHSSPEYWIKSGTGVPVRRRDIVKIEGIDATGGNNQPNIPSITAHLWYFGLIGTCL

SEQ ID NO: 9086 - protein, 269 aa, Thermomyces lanuginosus
EYSQDLFNQFNLFAQYSAAAYCGKNNRAPAGTKITCTANACPEVEKADATVLYSFEDSGVGDVTGFLARDNTNKLIVLSFRGSRSIENWIGNLNFELEEINDICSGCRGHAGFTSSWRSVADTLRQKVEDAVREHPDYRVVFTGHSLGGGLATVAGADLRGNKYDIDVFSYGAPRLGNRAFAEFLTVQTGGTLYRITHTNDIVPRLPPRKFGYSHSSPEYWIKSGTGVPVRRRDIVKIEGIDATGGNNQPNIPSITAHLWYFGLIGTCL

SEQ ID NO: 9087 - protein, 269 aa, Thermomyces lanuginosus
EYSQDLFNQFNLFAQYSAAAYCGKNNRAPAGTKITCTANACPEVEKADATILYSFEDSGVGDVTGFLARDNTNKLIVLSFRGSRSIENWIGNLNFELEEINDICSGCRGHAGFTSSWRSVADTLRQKVEDAVREHPDYRVVFTGHSLGGALATVAGADLRGNKYDIDVFSYGAPRLGNRAFAEFLTVQTGGTLYRITHTNDIVPRLPPRKFGYSHSSPEYWIKSGTGPPVRRRDIVKIEGIDATGGNNQPNIPSITAHLWYFGLIGTCL

SEQ ID NO: 9088 - protein, 269 aa, Thermomyces lanuginosus
EYSQDLFNQFNLFAQYSAAAYCGKNNRAPAGTKITCTANACPEVEKADATVLYSFEDSGVGDVTGFLARDNTNKLIVLSFRGSRSIENWIGNLNFELEEINDICSGCRGHAGFTSSWRSVADTLRQKVEDAVREHPDYRVVFTGHSLGGALATVAGADLRGNKYDIDVFSYGAPRLGNRAFAEFLTVQTGGTLYRITHTNDIVPRLPPRKFGYSHSSPEYWIKSGTGVPVRRRDIVKIEGIDATGGNNQPNIPSGTAHLWYFGLIGTCL

SEQ ID NO: 9089 - protein, 269 aa, Thermomyces lanuginosus
EKSQDLFNQFNLFAQYSAAAYCGKNNRAPAGTKITCTANACPEVEKADATILYSFEDSGVGDVTGFLARDNTNKLIVLSFRGSRSIENWIGNLNFELEEINDICSGCRGHAGFTSSWRSVADTLRQKVEDAVREHPDYRVVFTGHSLGGALATVAGADLRGNKYDIDVFSYGAPRLGNRAFAEFLTVQTGGTLYRITHTNDIVPRLPPRKFGYSHSSPEYWIKPGTGVPVRRRDIVKIEGIDATGGNNQPNIPSITAHLWYFGLIGTCL

SEQ ID NO: 9090 - protein, 269 aa, Thermomyces lanuginosus
EKSQDLFNQFNLFAQYSAAAYCGKNNRAPAGTKITCTANACPEVEKADATVLYSFEDSGVGDVTGFLARDNTNKLIVLSFRGSRSIENWIGNLNFELEEINDICSGCRGHAGFTSSWRSVADTLRQKVEDAVREHPDYRVVFTGHSLGGALATVAGADLRGNKYDIDVFSYGAPRLGNRAFAEFLTVQTGGTLYRITHTNDIVPRLPPRKFGYSHSSPEYWIKPGTGVPVRRRDIVKIEGIDATGGNNQPNIPSITAHLWYFGLIGTCL

SEQ ID NO: 9091 - protein, 269 aa, Thermomyces lanuginosus
EYSQDLFNQFNLFAQYSAAAYCGKNNRAPAGTKITCTANACPEVEKADATVLYSFEDSGVGDVTGFLARDNTNKLIVLSFRGSRSIENWIGNLNFELEEINDICSGCRGHAGFTSSWRSVADTLRQKVEDAVREHPDYRVVFTGHSLGGALATVAGADLRGNKYDIDVFSYGAPRLGNRAFAEFLTVQTGGTLYRITLTNDIVPRLPPRKFGYSHSSPEYWIKSGTGVPVRRRDIVKIEGIDATGGNNQPNIPSITAHLWYFGLIGTCL

SEQ ID NO: 9092 - protein, 269 aa, Thermomyces lanuginosus
EKSQDLFNQFNLFAQYSAAAYCGKNNRAPAGTKITCTANACPEVEKADATVLYSFEDSGVGDVTGFLARDNTNKLIVLSFRGSRSIENWIGNLNFELEEINDICSGCRGHAGFTSSWRSVADTLRQKVEDAVREHPDYRVVFTGHSLGGALATVAGADLRGNKYDIDVFSYGAPRLGNRAFAEFLTVQTGGTLYRITHTNDIVPRLPPRKFGYSHSSPEYWIKIGTGVPVRRRDIVKIEGIDATGGNNQPNIPSITAHLWYFGLIGTCL

SEQ ID NO: 9093 - protein, 269 aa, Thermomyces lanuginosus
EYSQDLFNQFNLFAQYSAAAYCGKNNRAPAGTKITCTANACPEVEKADATVLYSFEDSGVGDVTGFLARDNTNKLIVLSFRGSRSIENWIGNLNFELEEINDICSGCRGHAGFTSSWRSVADTLRQKVEDAVREHPDYRVVFTGHSLGGALATVAGADLRGNKYDIDVFSYGAPRLGNRAFAEFLTVQTGGTLYRITHTNDIVPRLPPRKFGYSHSSPEYWIKPGTGVPVRRRDIVKIEGIDATGGNNQPNIPSITAHLWYFGLIGTCL

SEQ ID NO: 9094 - protein, 269 aa, Thermomyces lanuginosus
EYSQDLFNQFNLFAQYSAAAYCGKNNRAPAGTKITCTANACPEVEKADATVLYSFEDSGVGDVTGFLARDNTNKLIVLSFRGSRSIENWIGNLNFELEEINDICSGCRGHAGFTSSWRSVADTLRQKVEDAVREHPDYRVVFTGHSLGGALATVAGADLRGNKYDIDVFSYGAPRLGNRAFAEFLTVQTGGTLYRITHTNDIVPRLPPRKFGYSHSSPEYWIKSGTGVPVRRRDIVKIEGIDATGGNNQPNIPSITIHLWYFGLIGTCL

SEQ ID NO: 9095 - protein, 269 aa, Thermomyces lanuginosus
EKSQDLFNQFNLFAQYSAAAYCGKNNRAPAGTKITCTANACPEVEKADATVLYSFEDSGVGDVTGFLARDNTNKLIVLSFRGSRSIENWIGNLNFELEEINDICSGCRGHAGFTSSWRSVADTLRQKVEDAVREHPDYRVVFTGHSLGGALATVAGADLRGNKYDIDVFSYGAPRLGNRAFAEFLTVQTGGTLYRITHTNDIVPRLPPRKFGYSHSSPEYWIKSGTGVPRRRRDIVKIEGIDATGGNNQPNIPSITAHLWYFGLIGTCL

SEQ ID NO: 9096 - protein, 269 aa, Thermomyces lanuginosus
EKSQDLFNQFNLFAQYSAAAYCGKNNRAPAGTKITCTANACPEVEKADATILYSFEDSGVGDVTGFLARDNTNKLIVLSFRGSRSIENWIGNLNFELEEINDICSGCRGHAGFTSSWRSVADTLRQKVEDAVREHPDYRVVFTGHSLGGALATVAGADLRGNKYDIDVFSYGAPRLGNRAFAEFLTVQTGGTLYRITYTNDIVPRLPPRKFGYSHSSPEYWIKSGTGVPVRRRDIVKIEGIDATGGNNQPNIPSITAHLWYFGLIGTCL

SEQ ID NO: 9097 - protein, 269 aa, Thermomyces lanuginosus
EKSQDLFNQFNLFAQYSAAAYCGKNNRAPAGTKITCTANACPEVEKADATILYSFEDSGVGDVTGFLARDNTNKLIVLSFRGSRSIENWIGNLNFELEEINDICSGCRGHAGFTSSWRSVADTLRQKVEDAVREHPDYRVVFTGHSLGGALATVAGADLRGNKYDIDVFSYGAPRLGNRAFAEFLTVQTGGTLYRITHTNDIVPRLPPRKFGYSHSSPEYWIKSGTGVPVRRRDIVKIEGIDATGGNNQPNIPSITIHLWYFGLIGTCL

SEQ ID NO: 9098 - protein, 269 aa, Thermomyces lanuginosus
EVSQDLFNQFNLFAQYSAAAYCGKNNRAPAGTKITCTANACPEVEKADATVLYSFEDSGVGDVTGFLALDNTNKLIVLSFRGTHSIENWIADFNALLEEINDICSGCRGHAGFTSSWRSVADTLRQKVEDAVREHPDYRVVFTGHSLGGALATVAGADLRGNKYDIDVFSYGAPRVGNRAFAEFLTVQTGGTLYRITHTNDIVPRLPPREFGYSHSSPEYWIKSGTLVPVRRRDIVKIEGIDATGGNNQPNIPSITAHLWYFGLIGTCL

SEQ ID NO: 9099 - protein, 269 aa, Thermomyces lanuginosus
EYSQDLFNQFNLFAQYSAAAYCGKNNRAPAGTKITCTANACPEVEKADATILYSFEDSGVGDVTGFLARDNTNKLIVLSFRGSRSIENWIGNLNFELEEINDICSGCRGHAGFTSSWRSVADTLRQKVEDAVREHPDYRVVFTGHSLGGALATVAGADLRGNKYDIDVFSYGAPRLGNRAFAEFLTVQTGGTLYRITHTNDIVPRLPPRKFGYSHSSPEYWIKSGTGVPRRRRDIVKIEGIDATGGNNQPNIPSITAHLWYFGLIGTCL

SEQ ID NO: 9100 - protein, 269 aa, Thermomyces lanuginosus
EKSQDLFNQFNLFAQYSAAAYCGKNNRAPAGTKITCTANACPEVEKADATVLYSFEDSGVGDVTGFLARDNTNKLIVLSFRGSRSIENWIGNLNFELEEINDICSGCRGHAGFTSSWRSVADTLRQKVEDAVREHPDYRVVFTGHSLGGALATVAGADLRGNKYDIDVFSYGAPRLGNRAFAEFLTVQTGGTLYRITHTNDIVPRLPPRKFGYSHSSPEYWIKSGTGVPVRRRDIVKIEGIDATGGNNQPNIPSITVHLWYFGLIGTCL

SEQ ID NO: 9101 - protein, 269 aa, Thermomyces lanuginosus
EYSQDLFNQFNLFAQYSAAAYCGKNNRAPAGTKITCTANACPEVEKADATLLYSFEDSGVGDVTGFLARDNTNKLIVLSFRGSRSIENWIGNLNFELEEINDICSGCRGHAGFTSSWRSVADTLRQKVEDAVREHPDYRVVFTGHSLGGALATVAGADLRGNKYDIDVFSYGAPRLGNRAFAEFLTVQTGGTLYRITNTNDIVPRLPPRKFGYSHSSPEYWIKSGTGVPVRRRDIVKIEGIDATGGNNQPNIPSITAHLWYFGLIGTCL

SEQ ID NO: 9102 - protein, 269 aa, Thermomyces lanuginosus
EKSQDLFNQFNLFAQYSAAAYCGKNNRAPAGTKITCTANACPEVEKADATILYSFEDSGVGDVTGFLARDNTNKLIVLSFRGSRSIENWIGNLNFELEEINDICSGCRGHAGFTSSWRSVADTLRQKVEDAVREHPDYRVVFAGHSLGGALATVAGADLRGNKYDIDVFSYGAPRLGNRAFAEFLTVQTGGTLYRITHTNDIVPRLPPRKFGYSHSSPEYWIKSGTGVPVRRRDIVKIEGIDATGGNNQPNIPSITAHLWYFGLIGTCL

SEQ ID NO: 9103 - protein, 269 aa, Thermomyces lanuginosus
EKSQDLFNQFNLFAQYSAAAYCGKNNRAPAGTKITCTANACPEVEKADATVLYSFEDSGVGDVTGFLARDNTNKLIVLSFRGSRSIENWIGNLNFELEEINDICSGCRGHAGFTSSWRSVADTLRQKVEDAVREHPDYRVVFTGHSLGGALATVAGADLRGNKYDIDVFSYGAPRLGNRAFAEFLTVQTGGTLYRITITNDIVPRLPPRKFGYSHSSPEYWIKSGTGVPVRRRDIVKIEGIDATGGNNQPNIPSITAHLWYFGLIGTCL

SEQ ID NO: 9104 - protein, 269 aa, Thermomyces lanuginosus
EYSQDLFNQFNLFAQYSAAAYCGKNNRAPAGTKITCTANACPEVEKADATILYSFEDSGVGDVTGFLARDNTNKLIVLSFRGSRSIENWIGNLNFELEEINDICSGCRGHAGFTSSWRSVADTLRQKVEDAVREHPDYRVVFTGHSLGGALATVAGADLRGNKYDIDVFSYGAPRLGNRAFAEFLTVQTGGTLYRITITNDIVPRLPPRKFGYSHSSPEYWIKSGTGVPVRRRDIVKIEGIDATGGNNQPNIPSITAHLWYFGLIGTCL

SEQ ID NO: 9105 - protein, 269 aa, Thermomyces lanuginosus
EKSQDLFNQFNLFAQYSAAAYCGKNNRAPAGTKITCTANACPEVEKADATILYSFEDSGVGDVTGFLARDNTNKLIVLSFRGSRSIENWIGNLNFELEEINDICSGCRGHAGFTSSWRSVADTLRQKVEDAVREHPDYRVVFTGHSLGGALATVAGADLRGNKYDIDVFSYGAPRLGNRAFAEFLTVQTGGTLYRITNTNDIVPRLPPRKFGYSHSSPEYWIKSGTGVPVRRRDIVKIEGIDATGGNNQPNIPSITAHLWYFGLIGTCL

SEQ ID NO: 9106 - protein, 269 aa, Thermomyces lanuginosus
EVSQDLFNQFNLFAQYSAAAYCGKNNRAPAGTKITCTANACPEVEKADATVLYSFEDSGVGDVTGFLALDNTNKLIVLSFRGTRSPENWITDLDALLQEINDICSGCRGHAGFTSSWRSVADTLRQKVEDAVREHPDYRVVFTGHSLGGALATVAGADLRGNKYDIDVFSYGAPRVGNRAFAEFLTVQTGGTLYRITHTNDIVPRLPPREFGYSHSSPEYWIKSGTLVPVRRRDIVKIEGIDATGGNNQPNIPSITAHLWYFGLIGTCL

SEQ ID NO: 9107 - protein, 269 aa, Thermomyces lanuginosus
EYSQDLFNQFNLFAQYSAAAYCGKNNRAPAGTKITCTANACPEVEKADATILYSFEDSGVGDVTGFLARDNTNKLIVLSFRGSRSIENWIGNLNFELEEINDICSGCRGHAGFTSSWRSVADTLRQKVEDAVREHPDYRVVFTGHSLGGALATVAGADLRGNKYDIDVFSYGAPRLGNRAFAEFLTVQTGGTLYRITHTNDIVPRLPPRKFGYSHSSPEYWIKPGTGVPVRRRDIVKIEGIDATGGNNQPNIPSITAHLWYFGLIGTCL

SEQ ID NO: 9108 - protein, 269 aa, Thermomyces lanuginosus
EKSQDLFNQFNLFAQYSAAAYCGKNNRAPAGTKITCTANACPEVEKADATVLYSFEDSGVGDVTGFLARDNTNKLIVLSFRGSRSIENWIGNLNFELEEINDICSGCRGHAGFTSSWRSVADTLRQKVEDAVREHPDYRVVFTGHSLGGALATVAGADLRGNKYDIDVFSYGAPRLGNRAFAEFLTVQTGGTLYRITHTNDIVPRLPPRKFGYSHSSPEYWIKFGTGVPVRRRDIVKIEGIDATGGNNQPNIPSITAHLWYFGLIGTCL

SEQ ID NO: 9109 - protein, 269 aa, Thermomyces lanuginosus
EYSQDLFNQFNLFAQYSAAAYCGKNNRAPAGTKITCTANACPEVEKADATILYSFEDSGVGDVTGFLARDNTNKLIVLSFRGSRSIENWIGNLNFELEEINDICSGCRGHAGFTSSWRSVADTLRQKVEDAVREHPDYRVVFAGHSLGGALATVAGADLRGNKYDIDVFSYGAPRLGNRAFAEFLTVQTGGTLYRITHTNDIVPRLPPRKFGYSHSSPEYWIKSGTGVPVRRRDIVKIEGIDATGGNNQPNIPSITAHLWYFGLIGTCL

SEQ ID NO: 9110 - protein, 269 aa, Thermomyces lanuginosus
EYSQDLFNQFNLFAQYSAAAYCGKNNRAPAGTKITCTANACPEVEKADATLLYSFEDSGVGDVTGFLARDNTNKLIVLSFRGSRSIENWIGNLNFELEEINDICSGCRGHAGFTSSWRSVADTLRQKVEDAVREHPDYRVVFTGHSLGGALATVAGADLRGNKYDIDVFSYGAPRLGNRAFAEFLTVQTGGTLYRITYTNDIVPRLPPRKFGYSHSSPEYWIKSGTGVPVRRRDIVKIEGIDATGGNNQPNIPSITAHLWYFGLIGTCL

SEQ ID NO: 9111 - protein, 269 aa, Thermomyces lanuginosus
EKSQDLFNQFNLFAQYSAAAYCGKNNRAPAGTKITCTANACPEVEKADATVLYSFEDSGVGDVTGFLARDNTNKLIVLSFRGSRSIENWIGNLNFELEEINDICSGCRGHAGFTSSWRSVADTLRQKVEDAVREHPDYRVVFTGHSLGGGLATVAGADLRGNKYDIDVFSYGAPRLGNRAFAEFLTVQTGGTLYRITHTNDIVPRLPPRKFGYSHSSPEYWIKSGTGVPVRRRDIVKIEGIDATGGNNQPNIPSITAHLWYFGLIGTCL

SEQ ID NO: 9112 - protein, 269 aa, Thermomyces lanuginosus
EVSQDLFNQFNLFAQYSAAAYCGKNNRAPAGTKITCTANACPEVEKADATILYSFEDSGVGDVTGFLALDNTNKLIVLSFRGSRSIENWIGNLNFELEEIDDICSGCRGHAGFTSSWRSVADTLRQKVEDAVREHPDYRVVFTGHSLGGALATVAGADLRNNKYDIDVFSYGAPRVGNRAFAEFLTVQTGGTLYRITSTNDIVPRLPPRKFGYSHSSPEFWIKSGTLVPVRRRDIVKIEGIDATGGNNQPNIPSITVHLWYFGLIGTCL

SEQ ID NO: 9113 - protein, 269 aa, Thermomyces lanuginosus
EVSQDLFNQFNLFAQYSAAAYCGKNNRAPAGTNITCTANACPEVEKADATFLYSFEDSGVGDVTGFLALDNTNKLIVLSFRGSRSPANWIADLNYTPQEINDICSGCRGHAGFTSSWRSVADTLRQKVEDAVREHPDYRVVFTGHSLGGALATVAGADLRGNKYDIDVFSYGAPRVGNRAFAEFLTVQTGGTLYRITHTNDIVPRLPPREFGYSHSSPEYWIKSGTLVPVRRRDIVKIEGIDATGGNNQPNTPSTTAHLWYFGLIGTCL

SEQ ID NO: 9114 - protein, 269 aa, Thermomyces lanuginosus
EYSQDLFNQFNLFAQYSAAAYCGKNNRAPAGTKITCTANACPEVEKADATILYSFEDSGVGDVTGFLARDNTNKLIVLSFRGSRSIENWIGNLNFELEEINDICSGCRGHAGFTSSWRSVADTLRQKVEDAVREHPDYRVVFTGHSLGGALATVAGADLRGNKYDIDVFSYGAPRLGNRAFAEFLTVQTGGTLYRITYTNDIVPRLPPRKFGYSHSSPEYWIKSGTGVPVRRRDIVKIEGIDATGGNNQPNIPSITAHLWYFGLIGTCL

SEQ ID NO: 9115 - protein, 269 aa, Thermomyces lanuginosus
EYSQDLFNQFNLFAQYSAAAYCGKNNRAPAGTKITCTANACPEVEKADATLLYSFEDSGVGDVTGFLARDNTNKLIVLSFRGSRSIENWIGNLNFELEEINDICSGCRGHAGFTSSWRSVADTLRQKVEDAVREHPDYRVVFTGHSLGGGLATVAGADLRGNKYDIDVFSYGAPRLGNRAFAEFLTVQTGGTLYRITHTNDIVPRLPPRKFGYSHSSPEYWIKSGTGVPVRRRDIVKIEGIDATGGNNQPNIPSITAHLWYFGLIGTCL

SEQ ID NO: 9116 - protein, 269 aa, Thermomyces lanuginosus
EKSQDLFNQFNLFAQYSAAAYCGKNNRAPAGTKITCTANACPEVEKADATILYSFEDSGVGDVTGFLARDNTNKLIVLSFRGSRSIENWIGNLNFELEEINDICSGCRGHAGFTSSWRSVADTLRQKVEDAVREHPDYRVVFTGHSLGGALATVAGADLRGNKYDIDVFSYGAPRLGNRAFAEFLTVQTGGTLYRITHTNDIVPRLPPRKFGYSHSSPEYWIKSGTGVPVRRRDIVKIEGIDATGGNNQPNIPSGTAHLWYFGLIGTCL

SEQ ID NO: 9117 - protein, 269 aa, Thermomyces lanuginosus
EYSQDLFNQFNLFAQYSAAAYCGKNNRAPAGTKITCTANACPEVEKADATLLYSFEDSGVGDVTGFLARDNTNKLIVLSFRGSRSIENWIGNLNFELEEINDICSGCRGHAGFTSSWRSVADTLRQKVEDAVREHPDYRVVFTGHSLGGALATVAGADLRGNKYDIDVFSYGAPRLGNRAFAEFLTVQTGGTLYRITITNDIVPRLPPRKFGYSHSSPEYWIKSGTGVPVRRRDIVKIEGIDATGGNNQPNIPSITAHLWYFGLIGTCL

SEQ ID NO: 9118 - protein, 269 aa, Thermomyces lanuginosus
EYSQDLFNQFNLFAQYSAAAYCGKNNRAPAGTKITCTANACPEVEKADATILYSFEDSGVGDVTGFLARDNTNKLIVLSFRGSRSIENWIGNLNFELEEINDICSGCRGHAGFTSSWRSVADTLRQKVEDAVREHPDYRVVFTGHSLGGALATVAGADLRGNKYDIDVFSYGAPRLGNRAFAEFLTVQTGGTLYRITNTNDIVPRLPPRKFGYSHSSPEYWIKSGTGVPVRRRDIVKIEGIDATGGNNQPNIPSITAHLWYFGLIGTCL

SEQ ID NO: 9119 - protein, 269 aa, Thermomyces lanuginosus
EYSQDLFNQFNLFAQYSAAAYCGKNNRAPAGTKITCTANACPEVEKADATLLYSFEDSGVGDVTGFLARDNTNKLIVLSFRGSRSIENWIGNLNFELEEINDICSGCRGHAGFTSSWRSVADTLRQKVEDAVREHPDYRVVFTGHSLGGALATVAGADLRGNKYDIDVFSYGAPRLGNRAFAEFLTVQTGGTLYRITHTNDIVPRLPPRKFGYSHSSPEYWIKSGTGVPVRRRDIVKIEGIDATGGNNQPNIPSITVHLWYFGLIGTCL

SEQ ID NO: 9120 - protein, 269 aa, Thermomyces lanuginosus
EYSQDLFNQFNLFAQYSAAAYCGKNNRAPAGTKITCTANACPEVEKADATILYSFEDSGVGDVTGFLARDNTNKLIVLSFRGSRSIENWIGNLNFELEEINDICSGCRGHAGFTSSWRSVADTLRQKVEDAVREHPDYRVVFTGHSLGGGLATVAGADLRGNKYDIDVFSYGAPRLGNRAFAEFLTVQTGGTLYRITHTNDIVPRLPPRKFGYSHSSPEYWIKSGTGVPVRRRDIVKIEGIDATGGNNQPNIPSITAHLWYFGLIGTCL

SEQ ID NO: 9121 - protein, 269 aa, Thermomyces lanuginosus
EVSQDLFNQFNLFAQYSAAAYCGKNNDAPAGTXXTCTGNACPEVEKADATFLYSFEDXGVGDVTGFLALDNTNKLIVLSXRGSRSXENWIGNLNFDLKEINDICSGCRGXDGFTSSWRSVADTLRQKVEDAVREHPDYRVVFTGXSLGGALATVAGADLRGNGYDIDVFSXGAPRVGNRAFAEFLTVQTGGTLYRITXTNDIVPRLPPREFGYXXSSPEYWIKSGTLVPVTRNDIVKIEGIDATGGNNQPNIPDIPAHLWYFGLIGTCL

SEQ ID NO: 9122 - protein, 269 aa, Synthetic construct
EVSQDLFNQFNLFAQYSAAAYCGKNNDAPAGTNITCTGNACPEVEKADATFLYSFEDSGVGDVTGFLALDNTDKLIVLSFRGSPSIENWIGNLNFDLKEIKDICSGCRGHDGFTSSWRSVADRLRQKVEDAVRDHPDYRVVFTGHSLGGALATVAGADLRGNGYDIDVFSYGAPRVGNRAFAEFLTVQTGGTLYRITHTNDIVPRLPPREFGYSHSSPEYWIKSGTLVPVTRNDIVNIEGMDPTGCNNQPNIPEVRAHLWYFGLIGTCL

SEQ ID NO: 9123 - protein, 269 aa, Thermomyces lanuginosus
EVSQDLFNQFNLFAQYSAAAYCGKNNDAPAGTNITCTGNACPEVEKADATFLYSFEDSGVGDVTGFLALDNTNKLIVLSFRGTGSDTNLQLDTNYTLTEINDICSGCRGHDGFTSSWRSVADTLRQKVEDAVREHPDYRVVFTGHSLGGALATVAGADLRGNGYDIDVFSYGAPRVGNRAFAEFLTVQTGGTLYRITHTNDIVPRLPPREFGYSHSSPEYWIKSGTLVPVTRNDIVKIEGIDATGGNNQPNIPDIPAHLWYFGLIGTCL

SEQ ID NO: 9124 - protein, 269 aa, Thermomyces lanuginosus
EVSQDLFNQFNLFAQYSAAAYCGKNNDAPAGTNITCTGNACPEVEKADATFLYSFRDSGVGDVTGFLALDNTNKLIVLSFRGSRSIENWIADLNFILIEINDICSGCRGHDGFTSSWFSVADTLRQKVEDAVREHPDYRVVFTGHSLGGALATVAGADLRGNGYDIDVFSYGAPRVGNRAFAEFLTVQTGGTLYRITHTNDIVPRLPPREFGYSHSSPEFWIKSGTLVPVRRRDIVKIEGIDAEGGNNQPNIPSIPAHLWYFGAIGTCL

SEQ ID NO: 9125 - protein, 269 aa, Thermomyces lanuginosus
EVSQDLFNQFNLFAQYSAAAYCGKNNDAPAGTNITCTGNACPEVEKADATFLYSFRDSGVGDVTGFLALDNTNKLIVLSFRGTRSLENWIADLNFILQEINDICSGCRGHDGFTSSWFSVADTLRQKVEDAVREHPDYRVVFTGHSLGGALATVAGADLRGNGYDIDVFSYGAPRVGNRAFAEFLTVQTGGTLYRITHTNDIVPRLPPREFGYSHSSPEYWIKSGTLVPVRRRDIVKIEGIDATGGNNQPNIPSIPAHLWYFGAIGTCL

SEQ ID NO: 9126 - protein, 269 aa, Thermomyces lanuginosus
EVSQDLFNQFNLFAQYSAAAYCGKNNDAPAGTNITCTGNACPEVEKADATFLYSFEDSGVGDVTGFLALDNTNKLIVLSFRGTGSDQNLQLETSYTLTEINDICSGCRGHDGFTSSWRSVADTLRQKVEDAVREHPDYRVVFTGHSLGGALATVAGADLRGNGYDIDVFSYGAPRVGNRAFAEFLTVQTGGTLYRITHTNDIVPRLPPREFGYSHSSPEYWIKSGTLVPVTRNDIVKIEGIDATGGNNQPNIPDIPAHLWYFGLIGTCL

SEQ ID NO: 9127 - protein, 269 aa, Thermomyces lanuginosus
EVSQDLYNQFKLFAHYAAAAYCGKNNDAPAGTKITCTGNACPEVEKADATFIYSFEDSGVGDVTGFLALDNTNKLIVLSFRGSRSIENWIANLNFDLKEISDICSGCRGHRGFYNSWRSVADTLRQKVEDAVREYPDYRVVFTGHSLGGALATVAGADLRGNGYDIDVFSYGAPRVGNRAFAEFLTVQTGGTLYRITHTNDIVPRLPPREFGYSHSSPEYWIKSGTLVPVTRNDIVVIEGIDATGGNNQPNIPDIPAHLWYFGLIGTCL

SEQ ID NO: 9128 - protein, 194 aa, Humicola insolens
QLGAIENGLESGSANACPDAILIFARGSTEPGNMGITVGPALANGLESHIRNIWIQGVGGPYDAALATNALPRGTSQANIDEGKRLFALANQKCPNTPVVAGGYSQGAALIAAAVSELSGAVKEQVKGVALFGYTQNLQNRGGIPNYPRERTKVFCNVGDAVCTGTLIITPAHLSYTIEARGEAARFLRDRIRA

SEQ ID NO: 9129 - protein, 194 aa, Humicola insolens
QLGAIENGLESGSANACPDAILIFARGSTEPGNMGITVGPALANGLESHIRNIWIQGVGGPYDAALATNFLPRGTSQANIDEGKRLFALANQKCPNTPVVAGGYSQGAALIAAAVSELSGAVKEQVKGVALFGYTQNLQNRGGIANYPRERTKVFCNVGDAVCTGTLIITPAHLSYTIEARGEAARFLRDRIRA

SEQ ID NO: 9130 - protein, 194 aa, Humicola insolens
QLGAIENGLESGSANACPDAILIFARGSTEPGNMGITVGPALANGLESHIRNIWIQGVGGPYDAAIATNFLPRGTSQANIDEGKRLFALANQKCPNTPVVAGGYSQGAALIAAAVSELSGAVKEQVKGVALFGYTQNLQNRGGIPNYPRERTKVFCNVGDAVCTGTLIITPAHLSYTIEARGEAARFLRDRIRA

SEQ ID NO: 9131 - protein, 194 aa, Humicola insolens
QLGAIENGLESGSPNACPDAILIFARGSTEPGNMGITVGPALANGLESHIREIWIQGVGGPYDAALATNFLPRGTSQANIDEGKRLFALANQKCPNTPVVAGGYSQGAALIAAAVSELSGAVKEQVKGVALFGYTQNLQNRGGIPNYPRERTKVFCNVGDAVCTGTLIATPAHLSYTIEARGEAARFLRDRIRA

SEQ ID NO: 9132 - protein, 194 aa, Humicola insolens
QLGAIENGLESGSANACPDAILIFARGSTEPGNMGITVGPALANGLESHIRNIWIQGVGGPYDAALATNFLPRGTSQANIDEGKRLFALANQKCPNTPVVAGGYSQGAALIAAAVSELSGAVKEQVKGVALFGYTQNLQNRGRIPNYPRERTKVFCNVGDAVCTGTLIITPAHLSYTIEARGEAARFLRDRIRA

SEQ ID NO: 9133 - protein, 194 aa, Humicola insolens
QLGAIENGLESGSANACPDAILIFARGSTEPGNMGITVGPALANGLESHIRNIWIQGVGGPYDAAVATNFLPRGTSQANIDEGKRLFALANQKCPNTPVVAGGYSQGAALIAAAVSELSGAVKEQVKGVALFGYTQNLQNRGGIPNYPRERTKVFCNVGDAVCTGTLIITPAHLSYTIEARGEAARFLRDRIRA

SEQ ID NO: 9134 - protein, 194 aa, Humicola insolens
QLGAIENGLESGSANACPDAILIFARGSTEPGNMGITVGPALANGLESHIRNIWIQGVGGPYDAALATNFLPRGTSQANIDEGKRLFALANQKCPNTPVVAGGYSQGAALIAAAVSELSGAVKEQVKGVALFGYTQNLQNRGGIPNYPRERTKVFCNVGDAVCTGTAIITPAHLSYTIEARGEAARFLRDRIRA

SEQ ID NO: 9135 - protein, 194 aa, Humicola insolens
QLGAIENGLESGSANACPDAILIFARGSTEPGNMGITVGPALANGLESHIRNIWIQGVGGPYDAALATNFLPRGTSQANIDEGKRLFALANQKCPNTPVVAGGYSQGAALIAAAVSELSGAVKEQVKGVALFGYTQNLQNRGGIPNYPRERTKVFCNVGDAVCTGTLIVTPAHLSYTIEARGEAARFLRDRIRA

SEQ ID NO: 9136 - protein, 194 aa, Humicola insolens
QLGAIENGLESGSANACPDAILIFARGSTEPGNMGITVGPALANGLESHIRNIWIQGVGGPYDAALATNFLPRGTSQANIDEGKRLFALANQKCPNTPVVAGGYSQGAALIAAAVSELSGAVKEQVKGVALFGYTQNLQNRGGIPNYPRERTKVFCNVGDAVCTGTLIITPAHFSYTIEARGEAARFLRDRIRA

SEQ ID NO: 9137 - protein, 194 aa, Humicola insolens
QLGAIENGLESGSANACPDAILIFARGSTEPGNMGITVGPALANGLESHIRNIWIQGVGGPYDAALATNFLPRGTSQANIDEGKRLFALANQKCPNTPVVAGGYSQGAALIAAAVSELSGAVKEQVKGVALFGYTQNLQNRGGIPNYPRERTKVFCNVGDAVCTGTLIITPAHNSYTIEARGEAARFLRDRIRA

SEQ ID NO: 9138 - protein, 194 aa, Humicola insolens
QLGAIENGLESGSANACPDAILIFARGSTEPGNMGQTVGPALANGLESHIRNIWIQGVGGPYDAALATNFLPRGTSQANIDEGKRLFALANQKCPNTPVVAGGYSQGAALIAAAVSELSGAVKEQVKGVALFGYTQNLQNRGGIPNYPRERTKVFCNVGDAVCTGTLIITPAHLSYTIEARGEAARFLRDRIRA

SEQ ID NO: 9139 - protein, 194 aa, Humicola insolens
QLGAIENGLESGSANACPDAILIFARGSTEPGNMGITVGPALANGLESHIRNIWIQGVGGPYDAALATNFLPRGTSQANIDEGKRLFALANQKCPNTPVVAGGYSQGAALIAAAVSELSGAVKEQVKGVALFGYTQNLQNRGGIPNYPRERTKVFCNVGDAVCTGTLIITPAHQSYTIEARGEAARFLRDRIRA

SEQ ID NO: 9140 - protein, 194 aa, Humicola insolens
QLGAIENGLESGSANACPDAILIFARGSTEPGNMGITVGPALANGLESYIRNIWIQGVGGPYDAALATNFLPRGTSQANIDEGKRLFALANQKCPNTPVVAGGYSQGAALIAAAVSELSGAVKEQVKGVALFGYTQNLQNRGGIPNYPRERTKVFCNVGDAVCTGTLIITPAHLSYTIEARGEAARFLRDRIRA

SEQ ID NO: 9141 - protein, 194 aa, Humicola insolens
QLGAIENGLESGSANACPDAILIFARGSTEPGNMGITVGPALANGLESHIRNIWIQGVGGPYDAALATNFLPRGTSQANIDEGKRLFALANQKCPNTPVVAGGYSQGAALIAAAVSELSGAVKEQVKGVALFGYTQNLQNRGGIPNYPRERTKVFCNVGDAVCTGTLILTPAHLSYTIEARGEAARFLRDRIRA

SEQ ID NO: 9142 - protein, 194 aa, Humicola insolens
QLGAIENGLESGSANACPDAILIFARGSTEPGNMGNTVGPALANGLESHIRNIWIQGVGGPYDAALATNFLPRGTSQANIDEGKRLFALANQKCPNTPVVAGGYSQGAALIAAAVSELSGAVKEQVKGVALFGYTQNLQNRGGIPNYPRERTKVFCNVGDAVCTGTLIITPAHLSYTIEARGEAARFLRDRIRA

SEQ ID NO: 9143 - protein, 194 aa, Humicola insolens
QLGAIENGLESGSANACPDAILIFARGSTEPGNMGITVGPALANGLESHIREIWIQGVGGPYDAALATNFLPRGTSQANIDEGKRLFALANQKCPNTPVVAGGYSQGAALIAAAVSELSGAVKEQVKGVALFGYTQNLQNRGGIPNYPRERTKVFCNVGDAVCTGTLIITPAHLSYTIEARGEAARFLRDRIRA

SEQ ID NO: 9144 - protein, 194 aa, Humicola insolens
QLGAIENGLESGSANACPDAILIFARGSTEPGNMGITVGPALANGLESHIRNIWIQGVGGPYDAALATNSLPRGTSQANIDEGKRLFALANQKCPNTPVVAGGYSQGAALIAAAVSELSGAVKEQVKGVALFGYTQNLQNRGGIPNYPRERTKVFCNVGDAVCTGTLIITPAHLSYTIEARGEAARFLRDRIRA

SEQ ID NO: 9145 - protein, 194 aa, Humicola insolens
QLGAIXNGLESGSANACPDAILIFARGSTEPGNMGITVGPALANGLESHIRNIWIQGVGGPYDAALATNFLPRGTSQANIDEGKRLFALANQKCPNTPVVAGGYSQGAALIAAAVSELSGAVKEQVKGVALFGYTQNIQNRGGIPNYPRERTKVFCNVGDAVCTGTLIITPAHLSYTIEARGEAARFLRDRIRA

SEQ ID NO: 9146 - protein, 194 aa, Humicola insolens
QLGAIENGLESGSANACPDAILIFARGSTEPGNMGITVGPALANGLESHIRNIWIQGVGGPYDAALATNFLPRGTSQANIDEGKRLFALANQKCPNTPVVAGGYSQGAALIAAAVSELSGAVKEQVKGVALFGYTQNLQNRGGIPNYPRERTKVFCNVGDAVCSGTLIITPAHLSYTIEARGEAARFLRDRIRA

SEQ ID NO: 9147 - protein, 194 aa, Humicola insolens
QLGAIENGLESGSANACPDAILIFARGSTEPGNMGSTVGPALANGLESHIRNIWIQGVGGPYDAALATNFLPRGTSQANIDEGKRLFALANQKCPNTPVVAGGYSQGAALIAAAVSELSGAVKEQVKGVALFGYTQNLQNRGGIPNYPRERTKVFCNVGDAVCTGTLIITPAHLSYTIEARGEAARFLRDRIRA

SEQ ID NO: 9148 - protein, 194 aa, Humicola insolens
QLGAIENGLESGSANACPDAILIFARGSTEPGNMGITVGPALANGLESHIRNIWIQGVGGPYDAALATNFLPRGTSQANIDEGKRLFALANQKCPNTPVVAGGYSQGAALIAAAVSELSSAVKEQVKGVALFGYTQNLQNRGGIPNYPRERTKVFCNVGDAVCTGTLIITPAHLSYTIEARGEAARFLRDRIRA

SEQ ID NO: 9149 - protein, 194 aa, Humicola insolens
QLGAIENGLESGSANACPDAILIFARGSTEPGNMGITVGPALANNLESHIRNIWIQGVGGPYDAALATNFLPRGTSQANIDEGKRLFALANQKCPNTPVVAGGYSQGAALIAAAVSELSGAVKEQVKGVALFGYTQNLQNRGGIPNYPRERTKVFCNVGDAVCTGTLIITPAHLSYTIEARGEAARFLRDRIRA

SEQ ID NO: 9150 - protein, 194 aa, Humicola insolens
QLGAIENGLESGSANACPDAILIFARGSTEVGNMGITVGPALANGLESHIRNIWIQGVGGPYDAALATNFLPRGTSQANIDEGKRLFALANQKCPNTPVVAGGYSQGAALIAAAVSELSGAVKEQVKGVALFGYTQNLQNRGGIPNYPRERTKVFCNVGDAVCTGTLIITPAHLSYTIEARGEAARFLRDRIRA

SEQ ID NO: 9151 - protein, 194 aa, Humicola insolens
QLGAIENGLESGSANACPDAILIFARGSTEPGNMGITVGPALANGLEEHIRNIWIQGVGGPYDAAIATNFLPRGTSQANIDEGKRLFLLANQKCPNTPVVAGGYSQGAALIAAAVSELSGAVKEQVKGVALFGYTQNLQNRGGIPNYPRERTKVFCNVGDAVCTGTLIATPAHLSYTIEARGEAARFLHDRIRA

SEQ ID NO: 9152 - protein, 194 aa, Humicola insolens
QLGAIENGLESGSANACPDAILIFARGSTEPGNMGITVGPALANGLESHIRNIWIQGVGGPYDAALATNFLPRGTSQANIDEGKRLFALANQKCPNTPVVAGGYSQGAALIAAAVSELSGAVKEQVKGVALFGYTQNLQNRGGIPNYPRERTKVFCNVGDAVCTGTLIATPAHLSYTIEARGEAARFLRDRIRA

SEQ ID NO: 9153 - protein, 194 aa, Humicola insolens
QLGAIENGLESGSANACPDAILIFARGSTEPGNMGITVGPALANGLESHIRNIWIQGVGGPYDAAAATNFLPRGTSQANIDEGKRLFALANQKCPNTPVVAGGYSQGAALIAAAVSELSGAVKEQVKGVALFGYTQNLQNRGGIPNYPRERTKVFCNVGDAVCTGTLIITPAHLSYTIEARGEAARFLRDRIRA

SEQ ID NO: 9154 - protein, 194 aa, Humicola insolens
QLGAIENGLESGSANACPDAILIFARGSTQPGNMGITVGPALANGLESHIRNIWIQGVGGPYDAALATNFLPRGTSQANIDEGKRLFALANQKCPNTPVVAGGYSQGAALIAAAVSELSGAVKEQVKGVALFGYTQNLQNRGGIPNYPRERTKVFCNVGDAVCTGTLIITPAHLSYTIEARGEAARFLRDRIRA

SEQ ID NO: 9155 - protein, 193 aa, Humicola insolens
VGAIENGLESGSANACPDAILIFARGSTEPGNMGITVGPALANGLESHIRNIWIQGVGGPYDAALATNFLPRGTSQANIDEGKRLFALANQKCPNTPVVAGGYSQGAALIAAAVSELSGAVKEQVKGVALFGYTQNLQNRGGIPNYPRERTKVFCNVGDAVCTGTLIITPAHLSYTIEARGEAARFLRDRIRA

SEQ ID NO: 9156 - protein, 274 aa, Thermomyces lanuginosus
SPIRREVSQDLYDQFKLFAHYAAAAYCGKNNDAPAGTKITCTGNNCPEVEKADATFIYSFEDSGVGDVTGFLALDNTNKLIVLSFRGSRSIENWIANLNFDLTEISDICSGCKGHRGFYNSWRSVADTLRQKVEDAVREYPDYRVVFTGHSLGGALATVAGADLRGNGYDIDVFSYGAPRVGNRAFAEFLTVQTGGTLYRITHTNDIVPRLPPREFGYSHSSPEYWIKSGTLVPVTRNDIVVIEGIDATGGNNQPNIPDIPAHLWYFGLIGTCL

SEQ ID NO: 9157 - protein, 274 aa, Thermomyces lanuginosus
SPIRREVSQDLFNQFNLFAQYSAAAYCGKNNDAPAGTNITCTGNACPEVEKADATFLYSFEDSXXGDVTGFLALDNTNKLIVLSFRGSRXXXXWXXNXNXDLKEINDICSGCRGHDGFTSXWRSVADTLRQKVEDAVREHPDYRVVFTGHSLGGALATVAGADLRGNGYDIDVFSYGAPRVGNRAFAEFLTVQTGGTLYRITHTNDXVPRXPPREXGYSHSSPEYWIKSGTLVPVTRNDIVKIEGIDATGGNNQPNIPDXPAHXWYFGLXGTCL

SEQ ID NO: 9158 - protein, 274 aa, Thermomyces lanuginosus
SPIRREVSQDLYDQFKLFAHYAAAAYCGKNNDAPAGTKITCTGNNCPEVEKADATFIYSFEDSGVGDVTGFLALDNTNKLIVLSFRGSRSIENWIANLNFDLKDISDICSGCKGHKGFYNSWRSVADTLRQKVEDAVREYPDYRVVFTGHSLGGALATVAGADLRGNGYDIDVFSYGAPRVGNRAFAEFLTVQTGGTLYRITHTNDIVPRLPPREFGYSHSSPEYWIKSGTLVPVTRNDIVVIEGIDATGGNNQPNIPDIPAHLWYFGLIGTCL

SEQ ID NO: 9159 - protein, 269 aa, Thermomyces lanuginosus
EVSQDLFNQFNLFAQYSKAAYCQKNNSAEAGTDITCTGNACPEVFKADVTFLYSFEDMGVGDVTGFLALDNTSSQIILSFRGSRSIENWIGNLNFDLKEIDDICSGCKGHDGFTSSWRSVADTLRQKVEDAVREFPVYRVVFTGHSLGGALATVAWADLRGNGYDIDVFSYGAPRVGNRAFAEFLTTQDGGTLYRITHTNDIVPRLPPREFGYSHSSPEYWIKSGTLVPVTRNDIVKIEGIDATGGNNQPNIPDIPAHLWYFGLIGTCL

SEQ ID NO: 9160 - protein, 269 aa, Thermomyces lanuginosus
EVSQDLFNQFNLFAQYSAAAYCGKNNRAPAGTNITCTANACPEVEKADATFLYSFEDSGVGDVTGFLALDNTNKLIVLSFRGSRSPANWIADFNYTPQEINDICSGCRGHAGFTSSWRSVADTLRQKVEDAVREHPDYRVVFTGHSLGGALATVAGADLRGNKYDIDVFSYGAPRVGNRAFAEFLTVQTGGTLYRITHTNDIVPRLPPREFGYSHSSPEYWIKSGTLVPVRRRDIVKIEGIDATGGNNQPNTPSTTAHLWYFGLIGTCL

SEQ ID NO: 9161 - protein, 269 aa, Thermomyces lanuginosus
EVSQDLFNQFNLFAQYSAAAYCGKNNDAPAGTNITCTGNACPEVEKADATLLYSFRDSGVGDVTGFLALDNTNKLIVLSFRGSRSIENWIADLNFILIEINDICSGCRGHDGFTSSWFSVADTLRQKVEDAVREHPDYRVVFTGHSLGGALATVAGADLRGNGYDIDVFSYGAPRVGNRAFAEFLTVQTGGTLYRITHTNDIVPRLPPREFGYSHSSPEFWIKSGTLVPVRRRDIVKIEGIDAEGGNNQPNIPSIPAHLWYFGAIGTCL

SEQ ID NO: 9162 - protein, 269 aa, Thermomyces lanuginosus
EVSQDLFNQFNLFAQYSAAAYCGKNNDAPAGTNITCTGNACPEVEKADATFLYSFEDSGVGCVTGFLALDNTNKLIVLSFRGTGSDCNLQLETSYTLTEINDICSGCRGHDGFTSSWRSVADTLRQKVEDAVREHPDYRVVFTGHSLGGALATVAGADLRGNGYDIDVFSYGAPRVGNRAFAEFLTVQTGGTLYRITHTNDIVPRLPPREFGYSHSSPEYWIKSGTLVPVTRNDIVKIEGIDATGGNNQPNIPDIPAHLWYFGLIGTCL

SEQ ID NO: 9163 - protein, 269 aa, Thermomyces lanuginosus
EVSQDLFNQFNLFAQYSAAAYCGKNNDAPAGTNITCTGNACPEVEKADATFLYSFEDSGVGCVTGFLALDNTNKLIVLSFRGTGSDCNLQLDTNYTLTEINDICSGCRGHDGFTSSWRSVADTLRQKVEDAVREHPDYRVVFTGHSLGGALATVAGADLRGNGYDIDVFSYGAPRVGNRAFAEFLTVQTGGTLYRITHTNDIVPRLPPREFGYSHSSPEYWIKSGTLVPVTRNDIVKIEGIDATGGNNQPNIPDIPAHLWYFGLIGTCL

SEQ ID NO: 9164 - protein, 194 aa, Humicola insolens
QLGAIENGLESGSANACPDAILIFARGSTEPGNMGITVGPALANGLESHIRNIWIQGVGGPYDAAAATNFLPRGTSQANIDEGKRLFALANQKCPNTPVVAGGYSQGAALIAAAVSELSGAVKEQVKGVALFGYTQNLQNRGGIPNYPRERTKVFCNVGDAVCTGTLILTPAHLSYTIEARGEAARFLRDRIRA

SEQ ID NO: 9165 - protein, 195 aa, Humicola insolens
QLGAIENGLESGSANACPDAILIFARGSTEPGNMGITVGPALANGLESHIRNIWIQGVGGPYDAALATNFLPRGTSQANIDEGKRLFALANQICCPNTPVVAGGYSQGAALIAAAVSELSGAVKEQVKGVALFGYTQNLQNRGGIPNYPRERTKVFCNVGDAVCTGTLIITPAHLSYTIEARGEAARFLRDRLRA

SEQ ID NO: 9166 - protein, 194 aa, Humicola insolens
QLGAIENGLESGSANACPDAILIFARGSTEPGNMGITVGPALANGLESHIRNIWIQGVGGPYDAAAATNFLPRGTSQANIDEGKRLFALANQKCPNTPVVAGGYSQGAALIAAAVSELSGAVKEQVKGVALFGYTQNLQNRGGIPNYPRERTKVFCNVGDAVCTGTLIATPAHLSYTIEARGEAARFLRDRIRA

SEQ ID NO: 9167 - protein, 193 aa, Humicola insolens
VGAIENGLESGSANACPDAILIFARGSTEPGNMGITVGPALANGLESHIRNIWIQGVGGPYDAALATNFLPRGTSQANIDEGKRLFALANQKCPNTPVVAGGYSQGAALIAAAVSELSDAVKEQVKGVALFGYTQNLQNRGGIPNYPRERTKVFCNVGDAVCTGTLIITPAHLSYTIEARGEAARFLRDRIRA

SEQ ID NO: 9168 - protein, 192 aa, Humicola insolens
GVIENGLETGSANACPDAILIFARGSTEPGNMGITVGPALANGLESHIRNIWIQGVGGPYDAALATNFLPRGTSQANIDEGKRLFALANQKCPNTPVVAGGYSQGAALIAAAVSELSGAVKEQVKGVALFGYTQNLQNRGGIPNYPRERTKVFCNVGDAVCTGTLIITPAHLSYTIEARGEAARFLRDRIRA

SEQ ID NO: 9169 - protein, 269 aa, Thermomyces lanuginosus
EVSQDLFNQFNLFAQYSAAAYCGKNNDAPAGTNITCTGNACPEVEKADATFLYSFEDSGVGDVTGFLALDNTNKLIVLSFRGTGSDQNLQLETSYTLTEINDICSGCRGHDGFTSSWRSVADTLRQKVEDAVREHPDYRVVFTGHSLGGALATVAGADLRGNGYDIDVFSYGAPRVGNRAFAEFLTVQTGGTLYRITHTNDIVPRLPPREFGYSHSSPEYWIKSGTLVPVRRRDIVKIEGIDATGGNNQPNIPDIPAHLWYFGLIGTCL

SEQ ID NO: 9170 - protein, 269 aa, Thermomyces lanuginosus
EVSQDLFNQFNLFAQYSAAAYCGKNNDAPAGTNITCTGNACPEVEKADATFLYSFEDSGVGDVTGFLALDNTNKLIVLSFRGTGSDTNLQLDTNYTLTEINDICSGCRGHDGFTSSWRSVADTLRQKVEDAVREHPDYRVVFTGHSLGGALATVAGADLRGNGYDIDVFSYGAPRVGNRAFAEFLTVQTGGTLYRITHTNDIVPRLPPREFGYSHSSPEYWIKSGTLVPVRRRDIVKIEGIDATGGNNQPNIPDIPAHLWYFGLIGTCL

SEQ ID NO: 9171 - protein, 269 aa, Thermomyces lanuginosus
EVSRDLFNQFNLFAQYSAAAYCGKNNDAPAGTNITCTGNACPEVEKADATLLYSFRDSGVGDVTGFLALDNTNKLIVLSFRGSRSIENWIADLNFILIEINDICSGCRGHDGFTSSWFSVADTLRQKVEDAVREHPDYRVVFTGHSLGGALATVAGADLRGNGYDIDVFSYGAPRVGNRAFAEFLTVQTGGTLYRITHTNDIVPRLPPREFGYSHSSPEFWIKSGTLVPVRRRDIVKIEGIDAEGGNNQPNIPSIPAHLWYFGAIGTCL

SEQ ID NO: 9172 - protein, 194 aa, Humicola insolens
QLGAIENGLESGSANACPDAILIFARGSTEPGNMGITVGPALANGLESHIRNIWIQGVGGPYDAALATNFLPRGTSQANIDEGKRLFVLANQKCPNTPVVAGGYSQGAALIAAAVKELPGAVKEQVKGVALFGYTQNLRNRGGIPNYPRERTKVFCNVGDAVCTGTLIVTPAHLSYTIEARGEAARFLVDRIRA

SEQ ID NO: 9173 - protein, 193 aa, Humicola insolens
VGAIENGLECGSATACPDAILIYARGSTEPGNMGITVGPALANGIKSHIRNIWIQGVGGPYDAALATNFLPRGTSQANIDEGKRLFALANQKCPNTPVVAGGYSQGAALIAAAVSELSGAVKEQVKGVALFGYTQNLQNRGGIPNYPRERTKVFCNVGDAVCTGTLIITPAHLSYTIEARGEAARFLRDRIRA

SEQ ID NO: 9174 - protein, 269 aa, Thermomyces lanuginosus
EVSQDLFNQFNLFAQYSAAAYCGKNNDAPAGTNITCTGNACPEVEKADATLLYSFRDSGVGDVTGFLALDRTNKLIVLSFRGTRSIENWIADLNFILIEINDICSGCRGHDGFTSSWFSVADTLRQKVEDAVREHPDYRVVFTGHSLGGALATVAGADLRGNGYDIDVFSYGAPRVGNRAFAEFLTVQTGGTLYRITHTNDIVPRLPPREFGYSHSSPEFWIKSGTLVPVRRRDIVKIEGIDAEGGNNQPNIPSIPAHLWYFGAIGTCL

SEQ ID NO: 9175 - protein, 269 aa, Thermomyces lanuginosus
EVSEDLFNQFNLFAQYSAAAYCGKNNDAPAGTNITCTGNACPEVEKADATLLYSFRDSGVGDVTGFLALDNTNKLIVLSFRGTRSIENWIADLDFILIEINDICSGCRGHDGFTSSWFSVADTLRQKVEDAVREHPDYRVVFTGHSLGGALATVAGADLRGNGYDIDVFSYGAPRVGNRAFAEFLTVQTGGTLYRITHTNDIVPRLPPREFGYSHSSPEFWIKSGTLVPVRRRDIVKIEGIDAEGGNNQPNIPSIPAHLWYFGAIGTCL

SEQ ID NO: 9176 - protein, 269 aa, Thermomyces lanuginosus
EVSQDLFNQFNLFAQYSAAAYCGKNNDAPAGTNITCTGNACPEVEKADATLLYSFRDSGVGDVTGFLALDNTNELIVLSFRGTRSIENWIADLNFILIEINDICSGCRGHDGFTSSWFSVADTLRQKVEDAVREHPDYRVVFTGHSLGGALATVAGADLRGNGYDIDVFSYGAPRVGNRAFAEFLTVQTGGTLYRITHTNDIVPRLPPREFGYSHSSPEFWIKSGTLVPVRRRDIVKIEGIDAEGGNNQPNIPSIPAHLWYFGAIGTCL

SEQ ID NO: 9177 - protein, 269 aa, Thermomyces lanuginosus
EVSQDLFNQFNLFAQYSAAAYCGKNNDAPAGTNITCTGNACPEVEKADATLLYSFRDSGVGDVTGFLALDNRNKLIVLSFRGTRSIENWIADLNFILIEINDICSGCRGHDGFTSSWFSVADTLRQKVEDAVREHPDYRVVFTGHSLGGALATVAGADLRGNGYDIDVFSYGAPRVGNRAFAEFLTVQTGGTLYRITHTNDIVPRLPPREFGYSHSSPEFWIKSGTLVPVRRRDIVKIEGIDAEGGNNQPNIPSIPAHLWYFGAIGTCL

SEQ ID NO: 9178 - protein, 269 aa, Thermomyces lanuginosus
EVSQDLFNQFNLFAQYSAAAYCGKNNDAPAGTNITCTGNACPEVEKADATFLYSFEDSGVGCVTGFLALDNTNKLIVLSFRGTGSDCNLQLETSYTLTEINDICSGCRGHDGFTSSWRSVADTLRQKVEDAVREHPDYRVVFTGHSLGGALATVAGADLRGNGYDIDVFSYGAPRVGNRAFAEFLTVQTGGTLYRITHTNDIVPRLPPREFGYSHSSPEYWIKSGTLVPVRRRDIVKIEGIDATGGNNQPNIPDIPAHLWYFGLIGTCL

SEQ ID NO: 9179 - protein, 269 aa, Thermomyces lanuginosus
EVSQDLFNQFNLFAQYSAAAYCGKNNDAPAGTNITCTGNACPEVEQADATLLYSFRDSGVGDVTGFLALDNTNKLIVLSFRGTRSIENWIADLNFILIEINDICSGCRGHDGFTSSWFSVADTLRQKVEDAVREHPDYRVVFTGHSLGGALATVAGADLRGNGYDIDVFSYGAPRVGNRAFAEFLTVQTGGTLYRITHTNDIVPRLPPREFGYSHSSPEFWIKSGTLVPVRRRDIVKIEGIDAEGGNNQPNIPSIPAHLWYFGAIGTCL

SEQ ID NO: 9180 - protein, 269 aa, Thermomyces lanuginosus
EVSQDLFNQFNLFAQYSAAAYCGKNNDAPAGTNITCTGNACPEVEKADATFLYSFEDSGVGCVTGFLALDNTNKLIVLSFRGTGSDCNLQLDTNYTLTEINDICSGCRGHDGFTSSWRSVADTLRQKVEDAVREHPDYRVVFTGHSLGGALATVAGADLRGNGYDIDVFSYGAPRVGNRAFAEFLTVQTGGTLYRITHTNDIVPRLPPREFGYSHSSPEYWIKSGTLVPVRRRDIVKIEGIDATGGNNQPNIPDIPAHLWYFGLIGTCL

SEQ ID NO: 9181 - protein, 269 aa, Thermomyces lanuginosus
EVSRDLFNQFNLFAQYSAAAYCGKNNDAPAGTNITCTGNACPEVEKADATLLYSFRDSGVGDVTGFLALDNTNKLIVLSFRGTRSIENWIADLNFILIEINDICSGCRGHDGFTSSWFSVADTLRQKVEDAVREHPDYRVVFTGHSLGGALATVAGADLRGNGYDIDVFSYGAPRVGNRAFAEFLTVQTGGTLYRITHTNDIVPRLPPREFGYSHSSPEFWIKSGTLVPVRRRDIVKIEGIDAEGGNNQPNIPSIPAHLWYFGAIGTCL

SEQ ID NO: 9182 - protein, 269 aa, Thermomyces lanuginosus
EVSEDLFNQFNLFAQYSAAAYCGKNNDAPAGTNITCTGNACPEVEKADATLLYSFRDSGVGDVTGFLALDNTNKLIVLSFRGTRSIENWIADLNFILIEINDICSGCRGHDGFTSSWFSVADTLRQKVEDAVREHPDYRVVFTGHSLGGALATVAGADLRGNGYDIDVFSYGAPRVGNRAFAEFLTVQTGGTLYRITHTNDIVPRLPPREFGYSHSSPEFWIKSGTLVPVRRRDIVKIEGIDAEGGNNQPNIPSIPAHLWYFGAIGTCL

SEQ ID NO: 9183 - protein, 269 aa, Thermomyces lanuginosus
EVSQDLFNQFNLFAQYSAAAYCGKNNDAPAGTNITCTGNACPEVEKADATLLYSFRDSGVGDVTGFLALDNTNKLIVLSFRGTRSIENWIADLNFILIEINDICSGCRGHDGFTSSWFSFADTLRQKVEDAVREHPDYRVVFTGHSLGGALATVAGADLRGNGYDIDVFSYGAPRVGNRAFAEFLTVQTGGTLYRITHTNDIVPRLPPREFGYSHSSPEFWIKSGTLVPVRRRDIVKIEGIDAEGGNNQPNIPSIPAHLWYFGAIGTCL

SEQ ID NO: 9184 - protein, 269 aa, Thermomyces lanuginosus
EVSQDLYDQFKLFAHYAAAAYCGKNNDAPAGTKITCTGNNCPEVEKADATFIYSFEDSGVGDVTGFLALDNTNKLIVLSFRGSRSIENWIANLNFDLTEISDICSGCKGHRGFYNSWRSVADTLRQKVEDAVREYPDYRVVFTGHSLGGALATVAGADLRGNGYDIDVFSYGAPRVGNRAFAEFLTVQTGGTLYRITHTNDIVPRLPPREFGYSHSSPEYWIKSGTLVPVTRNDIVVIEGIDATGGNNQPNIPDIPAHLWYFGLIGTCL

SEQ ID NO: 9185 - protein, 269 aa, Thermomyces lanuginosus
EVSQDLYDQFKLFAHYAAAAYCGKNNDAPAGTKITCTGNNCPEVEKADATFIYSFEDSGVGDVTGFLALDNTNKLIVLSFRGSRSIENWIANLNFDLKDISDICSGCKGHKGFYNSWRSVADTLRQKVEDAVREYPDYRVVFTGHSLGGALATVAGADLRGNGYDIDVFSYGAPRVGNRAFAEFLTVQTGGTLYRITHTNDIVPRLPPREFGYSHSSPEYWIKSGTLVPVTRNDIVVIEGIDATGGNNQPNIPDIPAHLWYFGLIGTCL

SEQ ID NO: 9186 - protein, 269 aa, Thermomyces lanuginosus
EVSQDLFNQFNLFAQYSAAAYCGKNNRAPAGTNITCTANACPEVEKADATFLYSFEDSGVGDVTGFLALDNTNKLIVLSFQGTHTLTQWMAKFKALLQEINDICSGCRGHAGFTSSWRSVADTLRQKVEDAVREHPDYRVVFTGHSLGGALATVAGADLRGNKYDIDVFSYGAPRVGNRAFAEFLTVQTGGTLYRITHTNDIVPRLPPREFGYSHSSPEYWIKSGTLVPVRRRDIVKIEGIDATGGNNQPNIPSITAHLWYFGLIGTCL

SEQ ID NO: 9187 - protein, 269 aa, Thermomyces lanuginosus
EVSQDLFNQFNLFAQYSAAAYCGKNNDAPAGTNITCTGNACPEVEKADATFLYSFEDSXXGDVTGFLALDNTNKLIVLSFRGSRXXXXWXXNXNXDLKEINDICSGCRGHDGFTSXWRSVADTLRQKVEDAVREHPDYRVVFTGHSLGGALATVAGADLRGNGYDIDVFSYGAPRVGNRAFAEFLTVQTGGTLYRITHTNDXVPRXPPREXGYSHSSPEYWIKSGTLVPVTRNDIVKIEGIDATGGNNQPNIPDXPAHXWYFGLXGTCL

SEQ ID NO: 9188 - protein, 291 aa, Thermomyces lanuginosus
MRSSLVLFFVSAWTALASPIRREVSQDLFNQFNLFAQYSAAAYCGKNNXAPAGTNITCTGNACPEVEKADATFLYSFXXSGVGXVTGFLALDNTNKLIVLSFRGSRXIXXWIGXLNFXLKXINDICSGCRGHXGFTSSWRSVADTLRQKVEDAVREHPDYRVVFTGHSLGGALATVAGADLRGNGYDIDVFSYGAPRVGNRAFAEFLTVQTGGTLYRITHTNDXXPRXPPRXFGYSHSSPXYWIKSGXXVPVTRNXIVKIXGIXATGGNNQPNIPXXPAHXWYFGLIGXCL

SEQ ID NO: 9189 - protein, 291 aa, Thermomyces lanuginosus
MRSSLVLFFVSAWTALASPIRREVSQDLYDQFKLFAHYAAAAYCGKNNDAPAGTKITCTGNNCPEVEKADATFIYSFEDSGVGDVTGFLALDNTNKLIVLSFRGSRSIENWIANLDFLLTDISDICSGCKAHRGFYNAWRSVADTLRAKVEDAVREYPDYRVVFTGHSLGGALATVAGADLRGNGYDIDVFSYGAPRVGNRAFAEFLTVQTGGTLYRITHTNDIVPRLPPREFGYSHSSPEYWIKSGTLVPVTRNDIVVIEGIDSTGGNNQTNIPDIPAHLWYFGVIGTCL

SEQ ID NO: 9190 - protein, 291 aa, Thermomyces lanuginosus
MRSSLVLFFVSAWTALASPIRREVSQDLYDQFKLFAHYAAAAYCGKNNDAPAGTKITCTGNNCPEVEKADATFIYSFEDSGVGDVTGFLALDNTNKLIVLSFRGSRSIENWIANLDFLLTDISDICSGCKAHRGFWDAWRSVADTLRAKVEDAVREYPDYRVVFTGHSLGGALATVAGADLRGNGYDIDVFSYGAPRVGNRAFAEFLTVQTGGTLYRITHTNDIVPRLPPREFGYSHSSPEYWIKSGTLVPVTRNDIVVIEGIDSTGGNNQTNIPDIPAHLWYFGVIGTCL

SEQ ID NO: 9191 - protein, 267 aa, Thermomyces lanuginosus
VSQDLFNQFNLFAQYSAAAYCGCNNDAPAGTQITCTGNACPEVEKADATFLYSFEDSGGGXVTGFLALDNTNKLIVLSFRGTWSIKNWIXNLKFXLKXISDGCSGCRGHDGFTSSWRSVADTLRQKVEDAVREHPDYRVVFTGHSLGGALATVAGADLRGNGYDIDVFSYGAPRVGNRAFAEFLTVQGGGTLYRITHTNDIVPRLPPPEFGYSHSSPEYWIKSPTLIPVTRNDIVKIEGIDARGGNNRPDIPDRPAHLWYFQATSAC

SEQ ID NO: 9192 - protein, 274 aa, Thermomyces lanuginosus
SPIRREVSQDLFNQFNLFAQYSAAAYCGKNNXAPAGTNITCTGNACPEVEKADATFLYSFXXSGVGXVTGFLALDNTNKLIVLSFRGSRXIXXWIGXLNFXLKXINDICSGCRGHXGFTSSWRSVADTLRQKVEDAVREHPDYRVVFTGHSLGGALATVAGADLRGNGYDIDVFSYGAPRVGNRAFAEFLTVQTGGTLYRITHTNDXXPRXPPRXFGYSHSSPXYWIKSGXXVPVTRNXIVKIXGIXATGGNNQPNIPXXPAHXWYFGLIGXCL

SEQ ID NO: 9193 - protein, 274 aa, Thermomyces lanuginosus
SPIRREVSQDLYDQFKLFAHYAAAAYCGKNNDAPAGTKITCTGNNCPEVEKADATFIYSFEDSGVGDVTGFLALDNTNKLIVLSFRGSRSIENWIANLDFLLTDISDICSGCKAHRGFYNAWRSVADTLRAKVEDAVREYPDYRVVFTGHSLGGALATVAGADLRGNGYDIDVFSYGAPRVGNRAFAEFLTVQTGGTLYRITHTNDIVPRLPPREFGYSHSSPEYWIKSGTLVPVTRNDIVVIEGIDSTGGNNQTNIPDIPAHLWYFGVIGTCL

SEQ ID NO: 9194 - protein, 274 aa, Thermomyces lanuginosus
SPIRREVSQDLYDQFKLFAHYAAAAYCGKNNDAPAGTKITCTGNNCPEVEKADATFIYSFEDSGVGDVTGFLALDNTNKLIVLSFRGSRSIENWIANLDFLLTDISDICSGCKAHRGFWDAWRSVADTLRAKVEDAVREYPDYRVVFTGHSLGGALATVAGADLRGNGYDIDVFSYGAPRVGNRAFAEFLTVQTGGTLYRITHTNDIVPRLPPREFGYSHSSPEYWIKSGTLVPVTRNDIVVIEGIDSTGGNNQTNIPDIPAHLWYFGVIGTCL

SEQ ID NO: 9195 - protein, 291 aa, Talaromyces thermophilus
MRSSLVLFFVSAWTALASPVRREVSQDLFDQFNLFAQYSAAAYCAKNNDAPAGANVTCRGSICPEVEKADATFLYSFEDSGVGDVTGFLALDNTNRLIVLSFRGSRSLENWIGNINLDLKGIDDICSGCKGHDGFTSSWRSVANTLTQQVQNAVREHPDYRVVFTGHSLGGALATVAGASLRGNGYDIDVFSYGAPRVGNRAFAEFLTAQTGGTLYRITHTNDIVPRLPPRELGYSHSSPEYWITSGTLVPVTKNDIVKVEGIDSTDGNNQPNTPDIAAHLWYFGLIGTCL

SEQ ID NO: 9196 - protein, 194 aa, Scytalidium thermophilum
QLGAIENGLERGNANACPDAILIFARGSTEPGNMGITVGPALANGLESSIRNLWIQGVGGPYDAALATNFLPRGTSQANINEGKRLFALANQKCPNTPVVAGGYSQGAALIAAAVSELSGAVKEQVKGVALFGYTQNLQNRGAIPNYPRERTKIFCNVGDAVCTGTLIITPAHLSYTVEARGEAARFLRDRIRA

SEQ ID NO: 9197 - protein, 267 aa, Thermomyces lanuginosus
VSQDLFNQFNLFAQYSAAAYCGCNNDAPAGTQITCTGNACPEVEKADATFLYSFEDSGGGXVTGFLALDNTNKLIVLSFRGTWSIKNWIXNLKFXLKXISDGCSGCRGHDGFTSSWRSVADTLRQKVEDAVREHPDYRVVFTGHSLGGALATVAGADLRGNGYDIDVFSYGAPRVGNRAFAEFLTVQGGGTLYRITHTNDIVPRLPPPEFGYSHSSPEYWIKSPTLIPVRRRDIVKIEGIDARGGNNRPDIPDRPAHLWYFQATSAC

SEQ ID NO: 9198 - protein, 274 aa, Synthetic construct
SPVRREVSQDLFDQFNLFAQYSAAAYCAKNNDAPAGANVTCRGNICPEVEKADATFLYSFEDSGVGDVTGFLALDNTNRLIVLSFRGSRSLENWIGNINLDLKGIDDICSGCKGHDGFTSSWRSVANTLTQQVQNAVREHPDYRVVFTGHSLGGALATVAGASLRGNGYDIDVFSYGAPRVGNRAFAEFLTAQTGGTLYRITHTNDIVPRLPPRELGYSHSSPEYWITSGTLVPVTKNDIVKVEGIDSTDGNNQPNTPDIAAHLWYFGLIGTCL

SEQ ID NO: 9199 - protein, 269 aa, Thermomyces dupontii
EVSQDLFDQFNLFAQYSAAAYCAKNNDAPAGANVTCRGSICPEVEKADATFLYSFEDSGVGDVTGFLALDNTNRLIVLSFRGSRSLENWIGNINLDLKGIDDICSGCKGHDGFTSSWRSVANTLTQQVQNAVREHPDYRVVFTGHSLGGALATVAGASLRGNGYDIDVFSYGAPRVGNRAFAEFLTAQTGGTLYRITHTNDIVPRLPPRELGYSHSSPEYWITSGTLVPVTKNDIVKVEGIDSTDGNNQPNTPDIAAHLWYFGLIGTCL

SEQ ID NO: 9200 - protein, 269 aa, Thermomyces lanuginosus
EVSQDLFNQFNLFAQYSAAAYCGKNNXASAGSNITCTGNACPEVEKADATXLYSFEDSGVGDVTGFLALDNTNKLVVLSFRGSCSIENWXXNFXIXLKEIDDICSGCRGHXGFTSSWMSVADTLRQKVEDVVREYPNYRVVFTGHSLGGALATVAGADLRGRGYDIDVFSYGAPRVGNRAFAEFLTIQTGGTLYRITHTNDIVPRLPPREYGYSHPSPEYWIKXPNXXPVTRNDIVKVEGIDATGGNNQPNIPDITAHLWYFGLIGTCL

SEQ ID NO: 9201 - protein, 269 aa, Thermomyces lanuginosus
EVSQDLFNQFNLFAQYSAAAYCGKNNXAPAGTNITCTGNACPEVEKADATFLYSFXXSGVGXVTGFLALDNTNKLIVLSFRGSRXIXXWIGXLNFXLKXINDICSGCRGHXGFTSSWRSVADTLRQKVEDAVREHPDYRVVFTGHSLGGALATVAGADLRGNGYDIDVFSYGAPRVGNRAFAEFLTVQTGGTLYRITHTNDXXPRXPPRXFGYSHSSPXYWIKSGXXVPVTRNXIVKIXGIXATGGNNQPNIPXXPAHXWYFGLIGXCL

SEQ ID NO: 9202 - protein, 274 aa, Synthetic construct
SPVRREVSQDLFDQFNLFAQYSAAAYCAKNNDAPAGANVTCSENVCPEVEKADATFLYSFEDSGVGDVTGFLALDNTNRLIVLSFRGSRSLENWIGNINLDLKGIDDICSGCKGHDGFTSSWRSVANTLTQQVQNAVREHPDYRVVFTGHSLGGALATVAGASLRGNGYDIDVFSYGAPRVGNRAFAEFLTAQTGGTLYRITHTNDIVPRLPPRELGYSHSSPEYWITSGTLVPVTKNDIVKVEGIDSTDGNNQPNTPDIAAHLWYFGLIGTCL

SEQ ID NO: 9203 - protein, 274 aa, unidentified
SPVRREVSQDLFDQFNLFAQYSAAAYCAKNNDAPAGANVTCRGSICPEVEKADATFLYSFEDSGVGDVTGFLALDNTNRLIVLSFRGSRSLENWIGNINLDLKGIDDICSGCKGHDGFTSSWRSVANTLTQQVQNAVREHPDYRVVFTGHSLGGALATVAGASLRGNGYDIDVFSYGAPRVGNRAFAEFLTAQTGGTLYRITHTNDIVPRLPPRELGYSHSSPEYWITSGTLVPVTKNDIVKVEGIDSTDGNNQPNTPDIAAHLWYFGLIGTCL

SEQ ID NO: 9204 - protein, 274 aa, Thermomyces dupontii
SPVRREVSQDLFDQFNLFAQYSAAAYCAKNNDAPAGANVTCRGNICPEVEKADATFLYSFEDSGVGDVTGFLALDNTNRLIVLSFRGSRSLENWIGNINLDLKGIDDICSGCKGHDGFTSSWRSVANTLTQQVQNAVREHPDYRVVFTGHSLGGALATVAGASLRGNGYDIDVFSYGAPRVGNRAFAVFLTAQTGGTLYRITHTNDIVPRLPPRELGYSHSSPEYWITSGTLVPVTKNDIVKVEGIDSTDGNNQPNTPDIAAHLWYFGLIGTCL

SEQ ID NO: 9205 - protein, 274 aa, Synthetic construct
SPVRREVSQDLFDQFNLFAQYSAAAYCAKNNDAPAGANVTCSENICPEVEKADATFLYSFEDSGVGDVTGFLALDNTNRLIVLSFRGSRSLENWIGNINLDLKGIDDICSGCKGHDGFTSSWRSVANTLTQQVQNAVREHPDYRVVFTGHSLGGALATVAGASLRGNGYDIDVFSYGAPRVGNRAFAEFLTAQTGGTLYRITHTNDIVPRLPPRELGYSHSSPEYWITSGTLVPVTKNDIVKVEGIDSTDGNNQPNTPDIAAHLWYFGLIGTCL

SEQ ID NO: 9206 - protein, 274 aa, Thermomyces lanuginosus
SPVRREVSQDLFDQFNLFAQYSAAAYCAKNNDAPAGANVTCRENICPEVEKADATFLYSFEDSGVGDVTGFLALDNTNRLIVLSFRGSRSLENWIGNINLDLKGIDDICSGCKGHDGFTSSWRSVANTLTQQVQNAVREHPDYRVVFTGHSLGGALATVAGASLRGNGYDIDVFSYGAPRVGNRAFAEFLTAQTGGTLYRITHTNDIVPRLPPRELGYSHSSPEYWITSGTLVPVTKNDIVKVEGIDSTDGNNQPNTPDIAAHLWYFGLIGTCL

SEQ ID NO: 9207 - protein, 274 aa, Thermomyces dupontii
SPVRREVSQDLFDQFNLFAQYSAAAYCAKNNDAPAGANVTCRGSICPEVEKADATFLYSFEDSGVGDVTGFLALDNTNRLIVLSFRGSRSLENWIGNLNLDLKGIDDICSGCKGHDGFTSSWRSVANTLTQQVQNAVREHPDYRVVFTGHSLGGALATVAGASLRGNGYDIDVFSYGAPRVGNRAFAVFLTAQTGGTLYRITHTNDIVPRLPPRELGYSHSSPEYWITSGTLVPVTKNDIVKVEGIDSTDGNNQPNTPDIAAHLWYFGLIGTCL

SEQ ID NO: 9208 - protein, 274 aa, Thermomyces dupontii
SPVRREVSQDLFDQFNLFAQYSAAAYCAKNNDAPAGANVTCRGSICPEVEKADATFLYSFEDSGVGDVTGFLALDNTNRLIVLSFRGSRSLENWIGNINLDLKEIDDICSGCKGHDGFTSSWRSVANTLTQQVQNAVREHPDYRVVFTGHSLGGALATVAGASLRGNGYDIDVFSYGAPRVGNRAFAVFLTAQTGGTLYRITHTNDIVPRLPPRELGYSHSSPEYWITSGTLVPVTKNDIVKVEGIDSTDGNNQPNTPDIAAHLWYFGLIGTCL

SEQ ID NO: 9209 - protein, 291 aa, Thermomyces lanuginosus
MRSSLVLFFVSAWTALASPIRRDVSQDLYDQFKLFAHYAAAAYCGKNNDAPPGTKITCTGNNCPEVEKADATFIYSFEDSGLGDVTGFLALDNTNKLIVLSFRGSRSIENWIANLDFLLTDISDICSGCKAHRGFYNAWRSVRDTLRAKVEDAVREYPDYRVVFTGHSLGGALATVAGADLRGNGYDIDVFSYGAPRVGNRAFAEFLTVQTGGTLYRITHTNDIVPRLPPREFGYSHSSPEYWIKSGTLVPVTRNDIVVCEGIDSTGGNNGTNIPDIPAHLWYFGIIGTCL

SEQ ID NO: 9210 - protein, 269 aa, Thermomyces dupontii
EVSQDLFDQFNLFAQYSAAAYCAKNNDAPAGANVTCRGSICPEVEKADATFLYSFEDSGVGDVTGFLALDNTNRLIVLSFRGSRSLENWIGNINLDLKGIDDICSGCKGHDGFTSSWRSVANTLTQQVQNAVREHPDYRVVFTGHSLGGALATVAGASLRGNGYDIDVFSYGAPRVGNRAFAEFLTAQTGGTLYRITHTNDIVPRLPPRELGYSHSSPEYWITSGTLVPVTKNDIVKVEGIDSTDGNNQPNTPDIAAHFWYFGLIGTCL

SEQ ID NO: 9211 - protein, 269 aa, Thermomyces dupontii
EVSQDLFDQFNLFAQYSAAAYCAKNNDAPAGANVTCRGSICPEVEKADATFLYSFEDSGVGDVTGFLALDNTNRLIVLSFRGSRSLENWIGNINLDLKGIDDICSGCKGHDGFTSSWRSVANTLTQQVQNAVREHPDYRVVFTGHSLGGALATVAGASLRGNGYDIDVFSYGAPRVGNRAFAEFLTAQTGGTLYRITHTNDIVPRLPPRELGYSHSSPEYWITSGTLVPVRRRDIVKVEGIDSTDGNNQPNTPDIAAHLWYFGLIGTCL

SEQ ID NO: 9212 - protein, 269 aa, Thermomyces dupontii
EVSQDLFDQFNLFAQYSAAAYCAKNNDAPAGANVTCRGSICPEVEKADATFLYSFEDSGVGDVTGFLALDNTNRLIVLSFRGTRSLENWIGNINLDLKGIDDICSGCKGHDGFTSSWRSVANTLTQQVQNAVREHPDYRVVFTGHSLGGALATVAGASLRGNGYDIDVFSYGAPRVGNRAFAEFLTAQTGGTLYRITHTNDIVPRLPPRELGYSHSSPEYWITSGTLVPVTKNDIVKVEGIDSTDGNNQPNTPDIAAHLWYFGLIGTCL

SEQ ID NO: 9213 - protein, 269 aa, Thermomyces lanuginosus
EVSQDLYDQFKLFAHYAAAAYCGKNNDAPAGTKITCTGNNCPEVEKADATFIYSFEDSGVGDVTGFLALDNTNKLIVLSFRGSRSIENWIANLDFLLTDISDICSGCKAHRGFYNAWRSVADTLRAKVEDAVREYPDYRVVFTGHSLGGALATVAGADLRGNGYDIDVFSYGAPRVGNRAFAEFLTVQTGGTLYRITHTNDIVPRLPPREFGYSHSSPEYWIKSGTLVPVTRNDIVVIEGIDSTGGNNQTNIPDIPAHLWYFGVIGTCL

SEQ ID NO: 9214 - protein, 269 aa, Thermomyces lanuginosus
EVSQDLYDQFKLFAHYAAAAYCGKNNDAPAGTKITCTGNNCPEVEKADATFIYSFEDSGVGDVTGFLALDNTNKLIVLSFRGSRSIENWIANLDFLLTDISDICSGCKAHRGFWDAWRSVADTLRAKVEDAVREYPDYRVVFTGHSLGGALATVAGADLRGNGYDIDVFSYGAPRVGNRAFAEFLTVQTGGTLYRITHTNDIVPRLPPREFGYSHSSPEYWIKSGTLVPVTRNDIVVIEGIDSTGGNNQTNIPDIPAHLWYFGVIGTCL

SEQ ID NO: 9215 - protein, 269 aa, Thermomyces dupontii
EVSQDLFDQFNLFAQYSAAAYCAKNNDAPAGANVTCRGSICPEVEKADATFLYSFEDSGVGDVTGFLALDNTNRLIVLSFRGSRSLENWIGNINLDLKGIDDICSGCKGHDGFTSSWRSVANTLTQQVQNAVREHPDYRVVFTGHSLGGALATVAGASLRGNGYDIDVFSYGAPRVGNRAFAVFLTAQTGGTLYRITHTNDIVPRLPPRELGYSHSSPEYWITSGTLVPVTKNDIVKVEGIDSTDGNNQPNTPDIAAHLWYFGLIGTCL

SEQ ID NO: 9216 - protein, 274 aa, Talaromyces thermophilus
SPVRREVSQDLFDQFNLFAQYSAAAYCAKNNDAPAGANVTCRESICPEVEKADATFLYSFEDSGVGDVTGFLALDNTNRLIVLSFRGSRSLENWIGNINLDLKGIDDICSGCKGHDGFTSSWRSVANTLTQQVQNAVREHPDYRVVFTGHSLGGALATVAGASLRGNGYDIDVFSYGAPRVGNRAFAEFLTAQTGGTLYRITHTNDIVPRLPPRELGYSHSSPEYWITSGTLVPVTKNDIVKVEGIDSTDGNNQPNTPDIAAHLWYFGLIGTCL

SEQ ID NO: 9217 - protein, 274 aa, Thermomyces dupontii
SPVRREVSQDLFDQFNLFAQYSAAAYCAKNNDAPAGANVTCRGSICPEVEKADATFLYSFEDSGVGDVTGFLALDNTNRLIVLSFRGSRSLENWIGNINLDLKGIDDICSGCKGHDGFTSSWRSVANTLTQQVQNAVREHPDYRVVFTGHSLGGALATVAGASLRGNGYDIDVFSYGAPRVGNRAFAVFLTAQTGGTLYRITHTNDIVPRLPPRELGYSHSSPEYWITSGTLVPVTKNDIVKVEGIDSTDGNNQPNTPDIAAHLWYFGLIGTCL

SEQ ID NO: 9218 - protein, 274 aa, Thermomyces dupontii
SPVRREVSQDLFDQFNLFAQYSAAAYCAKNNDAPAGANVTCRGSICPEVEKADATFLYSFEDSGVGDVTGFLALDNTNRLIVLSFRGSRSLENWIGNINADLKGIDDICSGCKGHDGFTSSWRSVANTLTQQVQNAVREHPDYRVVFTGHSLGGALATVAGASLRGNGYDIDVFSYGAPRVGNRAFAVFLTAQTGGTLYRITHTNDIVPRLPPRELGYSHSSPEYWITSGTLVPVTKNDIVKVEGIDSTDGNNQPNTPDIAAHLWYFGLIGTCL

SEQ ID NO: 9219 - protein, 274 aa, Thermomyces dupontii
SPVRREVSQDLFDQFNLFAQYSAAAYCAKNNDAPAGANVTCRGSICPEVEKADATFLYSFEDSGVGDVTGFLALDNTNRLIVLSFRGSRSLENWIGNINLDLKGIDDICSGCKGHDGFTSSWRSVANTLTQQVQNAVREHPDYRVVFTGHSLGGALATVAGASLRGNGYDIDVFSYGAPRVGNRAFAVFLTAQTGGTLYRITHTNDIVPRLPPRELGYSHSSPEYWITSGTLVPVTCNDIVKVEGIDSTDGNNQPNTPDIAAHLWYFGLIGTCL

SEQ ID NO: 9220 - protein, 274 aa, Thermomyces dupontii
SPVRREVSQDLFDQFNLFAQYSAAAYCAKNNDAPAGANVTCRGSVCPEVEKADATFLYSFEDSGVGDVTGFLALDNTNRLIVLSFRGSRSLENWIGNINLDLKGIDDICSGCKGHDGFTSSWRSVANTLTQQVQNAVREHPDYRVVFTGHSLGGALATVAGASLRGNGYDIDVFSYGAPRVGNRAFAVFLTAQTGGTLYRITHTNDIVPRLPPRELGYSHSSPEYWITSGTLVPVTKNDIVKVEGIDSTDGNNQPNTPDIAAHLWYFGLIGTCL

SEQ ID NO: 9221 - protein, 274 aa, Thermomyces dupontii
SPVRREVSQDLFDQFNLFAQYSAAAYCAKNNDAPAGANVTCSGSICPEVEKADATFLYSFEDSGVGDVTGFLALDNTNRLIVLSFRGSRSLENWIGNINLDLKGIDDICSGCKGHDGFTSSWRSVANTLTQQVQNAVREHPDYRVVFTGHSLGGALATVAGASLRGNGYDIDVFSYGAPRVGNRAFAVFLTAQTGGTLYRITHTNDIVPRLPPRELGYSHSSPEYWITSGTLVPVTKNDIVKVEGIDSTDGNNQPNTPDIAAHLWYFGLIGTCL

SEQ ID NO: 9222 - protein, 291 aa, Talaromyces thermophilus
MRSSLVLFFVSAWTALASPVRREVSQDLFDQFNLFAQYSAAAYCAKNNDAPAGGNVTCRGSICPEVEKADATFLYSFEDSGVGDVTGFLALDNTNRLIVLSFRGSRSLENWIGNINLDLKGIDDICSGCKGHDGFTSSWRSVANTLTQQVQNAVREHPDYRVVFTGHSLGGALATVAGASLRGNGYDIDVFSYGAPRVGNRAFAEFLTAQTGGTLYRITHTNDIVPRLPPRELGYSHSSPEYWITSGTLVPVTKNDIVKVEGIDSTDGNNQPNTPDIAAHLWYFGSMATCL

SEQ ID NO: 9223 - protein, 269 aa, Thermomyces dupontii
EVSQDLFDQFNLFAQYSAAAYCAKNNDAPAGANVTCRGSICPEVEKADATFLYSFEDSGVGDVTGFLALDNTNRLIVLSFRGSRSLENWIGNINLDLKGIDDICSGCKGHDGFTSSWRSVANTLTQQVQNAVREHPDYRVVFTGHSLGGALATVAGASLRGNGYDIDVFSYGAPRVGNRAFAEFLTAQTGGTLYRITHTNDIVPRFPPRELGYSHSSPEYWITSGTLVPVTKNDIVKVEGIDSTDGNNQPNTPDIAAHFWYFGLIGTCL

SEQ ID NO: 9224 - protein, 269 aa, Thermomyces dupontii
EVSQDLFDQFNLFAQYSAAAYCAKNNDAPAGANVTCRGSICPEVEKADATFLYSFEDSGVGDVTGFLALDNTNRLIVLSFRGSRSLENWIGNINLDLKGIDDICSGCKGHDGFTSSWRSVANTLTQQVQNAVREHPDYRVVFTGHSLGGALATVAGASLRGNGYDIDVFSYGAPRVGNRAFAEFLTAQTGGTLYRITHTNDIVPRLFPRELGYSHSSPEYWITSGTLVPVTKNDIVKVEGIDSTDGNNQPNTPDIAAHFWYFGLIGTCL

SEQ ID NO: 9225 - protein, 269 aa, Thermomyces dupontii
EVSQDLFDQFNLFAQYSAAAYCAKNNDAPAGANVTCRGSICPEVEKADATFLYSFEDMGVGDVTGFLALDNTNRLIVLSFRGTRSLENWIGNINLDLKGIDDICSGCKGHDGFTSSWRSVANTLTQQVQNAVREHPDYRVVFTGHSLGGALATVAGASLRGNGYDIDVFSYGAPRVGNRAFAEFLTAQTGGTLYRITHTNDIVPRLPPRELGYSHSSPEYWITSGTLVPVTKNDIVKVEGIDSTDGNNQPNTPDIAAHLWYFGLIGTCL

SEQ ID NO: 9226 - protein, 274 aa, Thermomyces dupontii
SPVRREVSQDLFDQFNLFAQYSAAAYCAKNNDAPAGANVTCRGSICPEVEKADATFLYSFEDSGVGDVTGFLALDNTNRLIVLSFRGSRSLENWIGNINLDLTGIDDICSGCKGHDGFTSSWRSVANTLTQQVQNAVREHPDYRVVFTGHSLGGALATVAGASLRGNGYDIDVFSYGAPRVGNRAFAVFLTAQTGGTLYRITHTNDIVPRLPPRELGYSHSSPEYWITSGTLVPVTKNDIVKVEGIDSTDGNNQPNTPDIAAHLWYFGLIGTCL

SEQ ID NO: 9227 - protein, 274 aa, Thermomyces dupontii
SPVRREVSQDLFDQFNLFAQYSAAAYCAKNNDAPAGANVTCRGSICPEVEKADATFLYSFEDSGVGDVTGFLALDNTNRLIVLSFRGSRSLENWIGNIALDLKGIDDICSGCKGHDGFTSSWRSVANTLTQQVQNAVREHPDYRVVFTGHSLGGALATVAGASLRGNGYDIDVFSYGAPRVGNRAFAVFLTAQTGGTLYRITHTNDIVPRLPPRELGYSHSSPEYWITSGTLVPVTKNDIVKVEGIDSTDGNNQPNTPDIAAHLWYFGLIGTCL

SEQ ID NO: 9228 - protein, 274 aa, Thermomyces dupontii
SPVRREVSQDLFDQFNLFAQYSAAAYCAKNNDAPAGANVTCRESICPEVEKADATFLYSFEDSGVGDVTGFLALDNTNRLIVLSFRGSRSLENWIGNINLDLKGIDDICSGCKGHDGFTSSWRSVANTLTQQVQNAVREHPDYRVVFTGHSLGGALATVAGASLRGNGYDIDVFSYGAPRVGNRAFAVFLTAQTGGTLYRITHTNDIVPRLPPRELGYSHSSPEYWITSGTLVPVTKNDIVKVEGIDSTDGNNQPNTPDIAAHLWYFGLIGTCL

SEQ ID NO: 9229 - protein, 274 aa, Thermomyces dupontii
SPVRREVSQDLFDQFNLFAQYSAAAYCAKNNDAPAGANVTCRGSICPEVEKADATFLYSFEDSGVGDVTGFLALDNTNRLIVLSFRGSRSLENWIGNINLDLKGIDDICSGCKGHDGFTSSWRSVANTLTQQVQNAVREHPDYRVVFTGHSLGGALATVAGASLRGNGYDIDVFSYGAPRVGNRAFAVFLTAQTGGTLYRITHTNDIVPRLPPRELGYSHSSPEYWITSGNLVPVTKNDIVKVEGIDSTDGNNQPNTPDIAAHLWYFGLIGTCL

SEQ ID NO: 9230 - protein, 274 aa, Synthetic construct
SPVRREVSQDLFDQFNLFAQYSAAAYCAKNNDAPAGANVTCSENVCPEVEKADATFLYSFEDSGVGDVTGFLALDNTNRLIVLSFRGSRSLENWIGNINLDLKGIDDICSGCKGHDGFTSSWRSVANTLTQQVQNAVREHPDYRVVFTGHSLGGALATVAGASLRGNGYDIDVFSYGAPRVGNRAFAVFLTAQTGGTLYRITHTNDIVPRLPPRELGYSHSSPEYWITSGTLVPVTKNDIVKVECIDCTDGNNQPNTPDIAAHLWYFGLIGTCL

SEQ ID NO: 9231 - protein, 274 aa, Thermomyces dupontii
SPVRREVSQDLCDQFNLFAQYSAAAYCAKNNDAPAGANVTCRGSICPEVEKADATFLYSFEDSGVGDVTGFLALDNTNRLIVLSFRGSRSLENWIGNINLDLKGIDDICSGCKGHDGFTSSWRSVANTLTQQVQNAVREHPDYRVVFTGHSLGGALATVAGASLRGNGYDIDVFSYGAPRVGNRAFAVFLTAQTGGTLYRITHTNDIVPRLPPRELGYSHSSPEYWITSGTLVPVTKNDIVKVEGIDSTDGNNQPNTPDIAAHLWYFGLIGTCL

SEQ ID NO: 9232 - protein, 274 aa, Thermomyces lanuginosus
SPIRRDVSADLLNQFKLFAQYSAAAYCGRNNDAPAGTNITCSANACPLVEAADATFLYSFENSGVGDVTGFLAVDNTNKLIVLSFRGSRSIENWITNLNFDLVDINDICSGCRGHDGFTSSWRSVADTLRQAVDDAVAAHPDYKVVVTGHSLGGALATLAGADLRNNGYDVDLYTYGAPRVGNRAFAEFITVQTGGTLYRVTHTNDVVPRLPPRQFGYSHPSPEYWIKSGTLVPVRRRDIVKIEGIDATGGNNQPNIPDIPAHLWYFGLIGTCI

SEQ ID NO: 9233 - protein, 274 aa, Thermomyces lanuginosus
SPIRRDVSADLLNQFKLFAQYSAAAYCGRNNDAPAGTNITCHANACPLVEAADATFLYSFENSGVGDVTGFLAVDNTNKLIVLSFRGSRSIENWITNLNFDLVDINDICSGCRGHDGFTSSWRSVADTLRQAVDDAVAAHPDYKVVVTGHSLGGALATLAGADLRNNGYDVDLYTYGAPRVGNRAFAEFITVQTGGTLYRVTHTNDVVPRLPPRQFGYSHPSPEYWIKSGTLVPVRRRDIVKIEGIDATGGNNQPNIPDIPAHLWYFGLIGTCI

SEQ ID NO: 9234 - protein, 274 aa, Thermomyces lanuginosus
SPIRRDVSADLLNQFKLFAQYSAAAYCGRNNDAPAGTNITCSANACPLVEAADATFLYSFENSGVGDVTGFLAVDNTNKLIVLSFRGSRSIENWITNLNFDLVDINDICSGCRGHDGFTSSWRSVADTLRQAVDDAVAAHPDYKVVITGHSLGGALATLAGADLRNNGYDVDLYTYGAPRVGNRAFAEFITVQTGGTLYRVTHTNDVVPRLPPRQFGYSHPSPEYWIKSGTLVPVRRRDIVKIEGIDATGGNNQPNIPDIPAHLWYFGLIGTCI

SEQ ID NO: 9235 - protein, 274 aa, Thermomyces lanuginosus
SPIRRDVSADLLNQFKLFAQYSAAAYCGRNNDAPAGTNITCSANACPLVEAADATFLYSFENSGVGDVTGFLAVDNTNKLIVLSFRGSRSIENWITNLNFDLVDINDICSGCRGHDGFTSSWRSVADTLRQAVDDAVAAHPDYKVVVTGHSLGGALATLAGADLRNNGYDVDLYTYGAPRVGNRAFAEFITVQTGGTLYRVTHTNDLVPRLPPRQFGYSHPSPEYWIKSGTLVPVRRRDIVKIEGIDATGGNNQPNIPDIPAHLWYFGLIGTCI

SEQ ID NO: 9236 - protein, 291 aa, Thermomyces lanuginosus
MRSSLVLFFVSAWTALASPIRRDVSADLLNQFKLFAQYSAAAYCGRNNDAPAGTNITCHANACPLVEAADATFLYSFENSGVGDVTGFLAVDNTNKLIVLSFRGSRSIENWITNLNFDLVDINDICSGCRGHDGFTSSWRSVADTLRQAVDDAVAAHPDYKVVVTGHSLGGALATLAGADLRNNGYDVDLYTYGAPRVGNRAFAEFITVQTGGTLYRVTHTNDVVPRLPPRQFGYSHPSPEYWIKSGTLVPVRRRDIVKIEGIDATGGNNQPNIPDIPAHLWYFGLIGTCI

SEQ ID NO: 9237 - protein, 291 aa, Thermomyces lanuginosus
MRSSLVLFFVSAWTALASPIRRDVSADLLNQFKLFAQYSAAAYCGRNNDAPAGTNITCSANACPLVEAADATFLYSFENSGVGDVTGFLAVDNTNKLIVLSFRGSRSIENWITNLNFDLVDINDICSGCRGHDGFTSSWRSVADTLRQAVDDAVAAHPDYKVVVTGHSLGGALATLAGADLRNNGYDVDLYTYGAPRVGNRAFAEFITVQTGGTLYRVTHTNDLVPRLPPRQFGYSHPSPEYWIKSGTLVPVRRRDIVKIEGIDATGGNNQPNIPDIPAHLWYFGLIGTCI

SEQ ID NO: 9238 - protein, 291 aa, Thermomyces lanuginosus
MRSSLVLFFVSAWTALASPIRRDVSADLLNQFKLFAQYSAAAYCGRNNDAPAGTNITCSANACPLVEAADATFLYSFENSGVGDVTGFLAVDNTNKLIVLSFRGSRSIENWITNLNFDLVDINDICSGCRGHDGFTSSWRSVADTLRQAVDDAVAAHPDYKVVVTGHSLGGALATLAGADLRNNGYDVDLYTYGAPRVGNRAFAEFITVQTGGTLYRVTHTNDVVPRLPPRQFGYSHPSPEYWIKSGTLVPVRRRDIVKIEGIDATGGNNQPNIPDIPAHLWYFGLIGTCI

SEQ ID NO: 9239 - protein, 291 aa, Thermomyces lanuginosus
MRSSLVLFFVSAWTALASPIRRDVSADLLNQFKLFAQYSAAAYCGRNNDAPAGTNITCSANACPLVEAADATFLYSFENSGVGDVTGFLAVDNTNKLIVLSFRGSRSIENWITNLNFDLVDINDICSGCRGHDGFTSSWRSVADTLRQAVDDAVAAHPDYKVVITGHSLGGALATLAGADLRNNGYDVDLYTYGAPRVGNRAFAEFITVQTGGTLYRVTHTNDVVPRLPPRQFGYSHPSPEYWIKSGTLVPVRRRDIVKIEGIDATGGNNQPNIPDIPAHLWYFGLIGTCI

SEQ ID NO: 9240 - protein, 269 aa, Thermomyces dupontii
EVSQDLFDQFNLFAQYSAAAYCAKNNDAPAGANVTCRGSICPEVEKADATFLYSFEDSGVGDVTGFLALDNTNRLIVLSFRGSRSLENWIGNINLDLKGIDDICSGCKGHDGFTSSWRSVANTLTQQVQNAVREHPDYRVVFTGHSLGGALATVAGASLRGNGYDIDVFSYGAPRVGNRAFAEFLTAQTGGTLYRITHTNDIVPRFFPRELGYSHSSPEYWITSGTLVPVTKNDIVKVEGIDSTDGNNQPNTPDIAAHFWYFGLIGTCL

SEQ ID NO: 9241 - protein, 291 aa, Thermomyces lanuginosus
MRSSLVLFFVSAWTALASPIRRDVSADLLNQFKLFAQYSAAAYCGRNNDAPAGTNITCSANACPLVEAADATFLYSFENSGVGDVTGFLAVDNTNKLIVLSFRGSRSIENWITNLNFDLVDINDICSGCRGHDGFTSSWRSVADTLRQAVDDAVAAHPDYKVVVTGHSLGGALATLAGADLRNNGYDVDLYTYGAPRVGNRAFAEFITVQTGGTLYRVTHTNDVVPRLPPRQFGYSHPSPEYWIKSGTLVPVRRNDIVKIEGIDATGGNNQNNTPDIPAHLWYFGLIGTCI

SEQ ID NO: 9242 - protein, 291 aa, Thermomyces lanuginosus
MRSSLVLFFVSAWTALASPIRRDVSADLLNQFKHFAQYSAAAYCGRNNDAPAGTNITCSANACPLVEAADATFLYSFENSGVGDVTGFLAVDNTNKLIVLSFRGSRSIENWITNLNFDLVDINDICSGCRGHDGFTSSWRSVADTLRQAVDDAVAAHPDYKVVVTGHSLGGALATLAGADLRNNGYDVDLYTYGAPRVGNRAFAEFITVQTGGTLYRVTHTNDVVPRLPPRQFGYSHPSPEYWIKSGTLVPVRRRDIVKIEGIDATGGNNQPNIPDIPAHLWYFGLIGTCI

SEQ ID NO: 9243 - protein, 291 aa, Thermomyces lanuginosus
MRSSLVLFFVSAWTALASPIRRDVSADLLNQFKLFAQYSAAAYCGRNNDAPAGTNITCSANACPLVEAADATFLYSFENSGVGDVTGFLAVDNTNKLIVLSFRGSRSIENWITNLNFDLVDINDICSGCRGHDGFTSSWRSVADTLRQAVDHAVAAHPDYKVVVTGHSLGGALATLAGADLRNNGYDVDLYTYGAPRVGNRAFAEFITVQTGGTLYRVTHTNDVVPRLPPRQFGYSHPSPEYWIKSGTLVPVRRRDIVKIEGIDATGGNNQPNIPDIPAHLWYFGLIGTCI

SEQ ID NO: 9244 - protein, 291 aa, Thermomyces lanuginosus
MRSSLVLFFVSAWTALASPIRRDVSADLLNQFKLFAQYSAAAYCGRNNDAPAGTNITCSANACPLVEAADATFLYSFENSGVGDVTGFLAVDNTNKLIVLSFRGSRSIENWITNLNFDLVDINDICSGCRGHDGFTSSWRSVADTLRQAVDDAVAAHPDYKVVVTGHSLGGALATLAGADLRNNGYDVDLYTYGAPRVGNRAFAEFITVQTGGTLYRVTHTNDVVPRLPPRQFGYSHPSPEYWIKSGTGVPVRRRDIVKIEGIDATGGNNQPNIPDIPAHLWYFGLIGTCI

SEQ ID NO: 9245 - protein, 291 aa, Thermomyces lanuginosus
MRSSLVLFFVSAWTALASPIRRDVSADLLNQFKLFAQYSAAAYCGRNNDAPAGTNITCSANACPLVEAADATFLYSFENSGVGDVTGFLAVDNTNKLIVLSFRGSRSIENWITNLNFDLVDINDICSGCRGHDGFTSSWRSVADTLRQAVDDAVAAHPDYKVVVTGHSLGGALATLAGADLRNNGYDVDLYTYGAPRVGNRAFAEFITVQTGGTLYRVTHTNDVVPRLPPRQGGYSHPSPEYWIKSGTLVPVRRRDIVKIEGIDATGGNNQPNIPDIPAHLWYFGLIGTCI

SEQ ID NO: 9246 - protein, 291 aa, Thermomyces lanuginosus
MRSSLVLFFVSAWTALASPIRRDVSADLLNQFKLFAQYSAAAYCGRNNDAPAGTNITCSANACPLVEAADATFLYSFENSGKGDVTGFLAVDNTNKLIVLSFRGSRSIENWITNLNFDLVDINDICSGCRGHDGFTSSWRSVADTLRQAVDDAVAAHPDYKVVVTGHSLGGALATLAGADLRNNGYDVDLYTYGAPRVGNRAFAEFITVQTGGTLYRVTHTNDVVPRLPPRQFGYSHPSPEYWIKSGTLVPVRRRDIVKIEGIDATGGNNQPNIPDIPAHLWYFGLIGTCI

SEQ ID NO: 9247 - protein, 291 aa, Thermomyces lanuginosus
MRSSLVLFFVSAWTALASPIRRDVSADLLNQFKLFAQYSAAAYCGRNNDAPAGTNITCSANACPLVEAADATFLYSFENSGVGDVTGFLAVDNTNKLIVLSFRGSRSIENWITNLNFDVVDINDICSGCRGHDGFTSSWRSVADTLRQAVDDAVAAHPDYKVVVTGHSLGGALATLAGADLRNNGYDVDLYTYGAPRVGNRAFAEFITVQTGGTLYRVTHTNDVVPRLPPRQFGYSHPSPEYWIKSGTLVPVRRRDIVKIEGIDATGGNNQPNIPDIPAHLWYFGLIGTCI

SEQ ID NO: 9248 - protein, 291 aa, Thermomyces lanuginosus
MRSSLVLFFVSAWTALASPIRRDVSADLLNQFKLFAQYSAAAYCGRNNDAPAGTNITCSANACPLVEAADATFLYSFENSGVGDVTGFLAVDNTNKLIVLSFRGSRSIENWITNLNFDLVDINDICSGCRGHDGFTSSWRSVADTLRQAVDDAVAAHPDYKVVVTGHSLGGALATLAGADLRNNGYDVDLYTYGAPRVGNRAFAEFITVQTGGTLYRVTHTNDCVPRLPPRQFGYSHPSPEYWIKSGTLVPVRRRDIVKIEGIDATGGNNQPNICDIPAHLWYFGLIGTCI

SEQ ID NO: 9249 - protein, 291 aa, Thermomyces lanuginosus
MRSSLVLFFVSAWTALASPIRRDVSADLLNQFKLFAQYSAAAYCGRNNDAPAGTNITCSANACPLVEAADATFLYSFENSGVGDVTGFLAVDNTNKLIVLSFRGSRSIENWITNLNFDLVDINDICSGCRGHDGFTSSWRSVADTLRQAVDDAVAAHPDYKVVVTGHSLGGALATLAGADLRNNGYDVDLYTYGAPRVGNRAFAEFITVQTGGTLYRVTHTNDVVPRLPPRQFGYSHPSPEYWIKSGTLVPVRRRDIVKIEGIDATGGNNQPNIPDDPAHLWYFGLIGTCI

SEQ ID NO: 9250 - protein, 291 aa, Thermomyces lanuginosus
MRSSLVLFFVSAWTALASPIRREVSADLLNQFKLFAQYSAAAYCGRNNDAPAGTNITCSANACPLVEAADATFLYSFENSGVGDVTGFLAVDNTNKLIVLSFRGSRSIENWITNLNFDLVDINDICSGCRGHDGFTSSWRSVADTLRQAVDDAVAAHPDYKVVVTGHSLGGALATLAGADLRNNGYDVDLYTYGAPRVGNRAFAEFITVQTGGTLYRVTHTNDVVPRLPPRQFGYSHPSPEYWIKSGTLVPVRRRDIVKIEGIDATGGNNQNNTPDIPAHLWYFGLIGTCI

SEQ ID NO: 9251 - protein, 291 aa, Thermomyces lanuginosus
MRSSLVLFFVSAWTALASPIRRDVSADLLNQFKLFAQYSAAAYCGRNNDAPAGTNITCSANACPLVEAADATFLYSFENSGVGDVTGFLAVDNTNKLIVLSFRGSRSIENWITNLNFDLVDINDICSGCRGHDGFTSSWRSVADTLRQAVDDAVAAHPDYKVVVTGHSLGGALATLAGADLRNNGYDVDLYTYGAPRVGNRAFAEFITVQTGGTLYRVTHTNDVVPRLPPREFGYSHPSPEYWIKSGTLVPVRRRDIVKIEGIDATGGNNQNNTPDIPAHLWYFGLIGTCI

SEQ ID NO: 9252 - protein, 291 aa, Thermomyces lanuginosus
MRSSLVLFFVSAWTALASPIRRDVSADLLNQFKLFAQYSAAAYCGRNNDAPAGTNITCSANACPLVEAADATFLYSFENSGVGDVTGFLAVDNTNKLIVLSFRGSRSIENWITNLNFDLVDINDICSGCRGHDGFTSSWRSVADTLRQAVDDAVAAHPDYKVVVTGHSLGGALATLAGADLRNNGYDVDLYTYGAPRVGNRAFAEFITVQTGGTLYRVTHTNDVVPRLPPRQFGYSHPSPEYWIKSGTLPPVRRRDIVKIEGIDATGGNNQPNIPDIPAHLWYFGLIGTCI

SEQ ID NO: 9253 - protein, 291 aa, Thermomyces lanuginosus
MRSSLVLFFVSAWTALASPIRRDVSRDLLNQFKLFAQYSAAAYCGRNNDAPAGTNITCSANACPLVEAADATFLYSFENSGVGDVTGFLAVDNTNKLIVLSFRGSRSIENWITNLNFDLVDINDICSGCRGHDGFTSSWRSVADTLRQAVDDAVAAHPDYKVVVTGHSLGGALATLAGADLRNNGYDVDLYTYGAPRVGNRAFAEFITVQTGGTLYRVTHTNDVVPRLPPRQFGYSHPSPEYWIKSGTLVPVRRNDIVKIEGIDATGGNNQNNAPDIPAHLWYFGLIGTCI

SEQ ID NO: 9254 - protein, 291 aa, Thermomyces lanuginosus
MRSSLVLFFVSAWTALASPIRRDVSADLLNQFKLFAQYSAAAYCARNNDAPAGTNITCSANACPLVEAADATFLYSFENSGVGDVTGFLAVDNTNKLIVLSFRGSRSIENWITNLNFDLVDINDICSGCRGHDGFTSSWRSVADTLRQAVDDAVAAHPDYKVVVTGHSLGGALATLAGADLRNNGYDVDLYTYGAPRVGNRAFAEFITVQTGGTLYRVTHTNDVVPRLPPRQFGYSHPSPEYWIKSGTLVPVRRRDIVKIEGIDATGGNNQPNIPDIPAHLWYFGLIGTCI

SEQ ID NO: 9255 - protein, 291 aa, Thermomyces lanuginosus
MRSSLVLFFVSAWTALASPIRRDVSADLLNQFKLFAQYSAAAYCGRNNDAPAGTNITCSANACPLVEAADATFLYSFENSGVGDVTGFLAVDNTNKLIVLSFRGSRSIENWITNLNFDLVDINDICSGCRGHDGFTSSWRSVADTLRQAVDDAVAAHPDYKVVVTGHSLGGGLATLAGADLRNNGYDVDLYTYGAPRVGNRAFAEFITVQTGGTLYRVTHTNDVVPRLPPRQFGYSHPSPEYWIKSGTLVPVRRRDIVKIEGIDATGGNNQPNIPDIPAHLWYFGLIGTCI

SEQ ID NO: 9256 - protein, 291 aa, Thermomyces lanuginosus
MRSSLVLFFVSAWTALASPIRRDVSADLLNQFKLFAQYSAAAYCGRNNDAPAGTNITCSANACPLVEAADATFLYSFENSGVGDVTGFLAVDNTNKLIVLSFRGSRSIENWITNLNFDLVDINDICSECRGHDGFTSSWRSVADTLRQAVDDAVAAHPDYKVVVTGHSLGGALATLAGADLRNNGYDVDLYTYGAPRVGNRAFAEFITVQTGGTLYRVTHTNDVVPRLPPRQFGYSHPSPEYWIKSGTLVPVRRRDIVKIEGIDATGGNNQPNIPDIPAHLWYFGLIGTCI

SEQ ID NO: 9257 - protein, 274 aa, Thermomyces dupontii
SPVRREVSQDLFDQFNLFAQYSAAAYCAKNNDAPAGANVTCRGSICPEVEKADATFLYSFEDSGVGDVTGFLALDNTNRLIVLSFRGSRSLENWIGNINLDLKGIDDICSGCKGHDGFTSSWRSVANTLTQQVQNAVREHPDYRVVFTGHSLGGALATVAGASLRCNGYDIDVFSYGAPRVGNRCFAVFLTAQTGGTLYRITHTNDIVPRLPPRELGYSHSSPEYWITSGTLVPVTKNDIVKVEGIDSTDGNNQPNTPDIAAHLWYFGLIGTCL

SEQ ID NO: 9258 - protein, 274 aa, Thermomyces dupontii
SPVRREVSQDLFDQFNLFAQYSAAAYCAKNNDAPAGANVTCRGSICPEVEKADATFLYSFEDSGVGDVTGFLALDNTNRLIVLSFRGSRSLENWIGNINLDLKGIDDCCSGCKGHDGFTSSWRSVANTLTQQVQNAVREHPDYRVVFTGHSLGGALATVAGCSLRGNGYDIDVFSYGAPRVGNRAFAVFLTAQTGGTLYRITHTNDIVPRLPPRELGYSHSSPEYWITSGTLVPVTKNDIVKVEGIDSTDGNNQPNTPDIAAHLWYFGLIGTCL

SEQ ID NO: 9259 - protein, 274 aa, Thermomyces dupontii
SPVRREVSQDLCDQFNLFAQYSAAAYCAKNNDAPAGANVTCSENVCPEVEKADATFLYSFEDSGVGDVTGFLALDNTNRLIVLSFRGSRSLENWIGNLAADLTEIDDICSGCKGHDGFTSSWRSVANTLTQQVQNAVREHPDYRVVFTGHSLGGALATVAGASLRGNGYDIDVFSYGAPRVGNRAFAVFLTAQTGGTLYRITHTNDIVPRLPPRELGYSHSSPEYWITSGNLVPVTCNDIVKVEGIDSTDGNNQPNTPDIAAHLWYFGLIGTCL

SEQ ID NO: 9260 - protein, 274 aa, unidentified
SPVRREVSQDLFDQFNLFAQYSAAAYCAKNNHAPVGADVTCRGSICPEVEKADATFLYSFEDSGVGDVTGFLALDNTNRLIVLSFRGSRSLENWIGNINLDLKGIDDICSGCKGHDGFTSSWRSVANTLTQQVQNAVREHPDYRVVFTGHSLGGALATVAGASLRGNGYDIDVFSYGAPRVGNRAFAEFLTAQTGGTLYRITHTNDIVPRLPPRELGYSHSSPEYWITSGTLVPVTKNDIVKVEGIDSTDGNNQPNTPDIAAHLWYFGLIGTCL

SEQ ID NO: 9261 - protein, 274 aa, Thermomyces lanuginosus
SPIRRDVSADLLNQFKLFAQYSAAAYCGRNNDAPAGTNITCSANACPLVEAADATFLYSFENSGVGDVTGFLAVDNTNKLIVLSFRGSRSIENWITNLNFDLVDINDICSGCRGHDGFTSSWRSVADTLRQAVDDAVAAHPDYKVVVTGHSLGGALATLAGADLRNNGYDVDLYTYGAPRVGNRAFAEFITVQTGGTLYRVTHTNDCVPRLPPRQFGYSHPSPEYWIKSGTLVPVRRRDIVKIEGIDATGGNNQPNICDIPAHLWYFGLIGTCI

SEQ ID NO: 9262 - protein, 274 aa, Thermomyces lanuginosus
SPIRRDVSADLLNQFKLFAQYSAAAYCGRNNDAPAGTNITCSANACPLVEAADATFLYSFENSGVGDVTGFLAVDNTNKLIVLSFRGSRSIENWITNLNFDLVDINDICSGCRGHDGFTSSWRSVADTLRQAVDDAVAAHPDYKVVVTGHSLGGGLATLAGADLRNNGYDVDLYTYGAPRVGNRAFAEFITVQTGGTLYRVTHTNDVVPRLPPRQFGYSHPSPEYWIKSGTLVPVRRRDIVKIEGIDATGGNNQPNIPDIPAHLWYFGLIGTCI

SEQ ID NO: 9263 - protein, 274 aa, Thermomyces lanuginosus
SPIRRDVSADLLNQFKLFAQYSAAAYCGRNNDAPAGTNITCSANACPLVEAADATFLYSFENSGVGDVTGFLAVDNTNKLIVLSFRGSRSIENWITNLNFDLVDINDICSGCRGHDGFTSSWRSVADTLRQAVDHAVAAHPDYKVVVTGHSLGGALATLAGADLRNNGYDVDLYTYGAPRVGNRAFAEFITVQTGGTLYRVTHTNDVVPRLPPRQFGYSHPSPEYWIKSGTLVPVRRRDIVKIEGIDATGGNNQPNIPDIPAHLWYFGLIGTCI

SEQ ID NO: 9264 - protein, 274 aa, Thermomyces lanuginosus
SPIRRDVSADLLNQFKLFAQYSAAAYCGRNNDAPAGTNITCSANACPLVEAADATFLYSFENSGKGDVTGFLAVDNTNKLIVLSFRGSRSIENWITNLNFDLVDINDICSGCRGHDGFTSSWRSVADTLRQAVDDAVAAHPDYKVVVTGHSLGGALATLAGADLRNNGYDVDLYTYGAPRVGNRAFAEFITVQTGGTLYRVTHTNDVVPRLPPRQFGYSHPSPEYWIKSGTLVPVRRRDIVKIEGIDATGGNNQPNIPDIPAHLWYFGLIGTCI

SEQ ID NO: 9265 - protein, 274 aa, Thermomyces lanuginosus
SPIRRDVSADLLNQFKLFAQYSAAAYCGRNNDAPAGTNITCSANACPLVEAADATFLYSFENSGVGDVTGFLAVDNTNKLIVLSFRGSRSIENWITNLNFDLVDINDICSGCRGHDGFTSSWRSVADTLRQAVDDAVAAHPDYKVVVTGHSLGGALATLAGADLRNNGYDVDLYTYGAPRVGNRAFAEFITVQTGGTLYRVTHTNDVVPRLPPRQGGYSHPSPEYWIKSGTLVPVRRRDIVKIEGIDATGGNNQPNIPDIPAHLWYFGLIGTCI

SEQ ID NO: 9266 - protein, 274 aa, Thermomyces lanuginosus
SPIRREVSADLLNQFKLFAQYSAAAYCGRNNDAPAGTNITCSANACPLVEAADATFLYSFENSGVGDVTGFLAVDNTNKLIVLSFRGSRSIENWITNLNFDLVDINDICSGCRGHDGFTSSWRSVADTLRQAVDDAVAAHPDYKVVVTGHSLGGALATLAGADLRNNGYDVDLYTYGAPRVGNRAFAEFITVQTGGTLYRVTHTNDVVPRLPPRQFGYSHPSPEYWIKSGTLVPVRRRDIVKIEGIDATGGNNQNNTPDIPAHLWYFGLIGTCI

SEQ ID NO: 9267 - protein, 274 aa, Thermomyces lanuginosus
SPIRRDVSADLLNQFKLFAQYSAAAYCGRNNDAPAGTNITCSANACPLVEAADATFLYSFENSGVGDVTGFLAVDNTNKLIVLSFRGSRSIENWITNLNFDLVDINDICSECRGHDGFTSSWRSVADTLRQAVDDAVAAHPDYKVVVTGHSLGGALATLAGADLRNNGYDVDLYTYGAPRVGNRAFAEFITVQTGGTLYRVTHTNDVVPRLPPRQFGYSHPSPEYWIKSGTLVPVRRRDIVKIEGIDATGGNNQPNIPDIPAHLWYFGLIGTCI

SEQ ID NO: 9268 - protein, 274 aa, Thermomyces lanuginosus
SPIRRDVSADLLNQFKLFAQYSAAAYCGRNNDAPAGTNITCSANACPLVEAADATFLYSFENSGVGDVTGFLAVDNTNKLIVLSFRGSRSIENWITNLNFDLVDINDICSGCRGHDGFTSSWRSVADTLRQAVDDAVAAHPDYKVVVTGHSLGGALATLAGADLRNNGYDVDLYTYGAPRVGNRAFAEFITVQTGGTLYRVTHTNDVVPRLPPRQFGYSHPSPEYWIKSGTLVPVRRRDIVKIEGIDATGGNNQPNIPDDPAHLWYFGLIGTCI

SEQ ID NO: 9269 - protein, 274 aa, Thermomyces lanuginosus
SPIRRDVSADLLNQFKHFAQYSAAAYCGRNNDAPAGTNITCSANACPLVEAADATFLYSFENSGVGDVTGFLAVDNTNKLIVLSFRGSRSIENWITNLNFDLVDINDICSGCRGHDGFTSSWRSVADTLRQAVDDAVAAHPDYKVVVTGHSLGGALATLAGADLRNNGYDVDLYTYGAPRVGNRAFAEFITVQTGGTLYRVTHTNDVVPRLPPRQFGYSHPSPEYWIKSGTLVPVRRRDIVKIEGIDATGGNNQPNIPDIPAHLWYFGLIGTCI

SEQ ID NO: 9270 - protein, 274 aa, Thermomyces lanuginosus
SPIRRDVSADLLNQFKLFAQYSAAAYCGRNNDAPAGTNITCSANACPLVEAADATFLYSFENSGVGDVTGFLAVDNTNKLIVLSFRGSRSIENWITNLNFDLVDINDICSGCRGHDGFTSSWRSVADTLRQAVDDAVAAHPDYKVVVTGHSLGGALATLAGADLRNNGYDVDLYTYGAPRVGNRAFAEFITVQTGGTLYRVTHTNDVVPRLPPRQFGYSHPSPEYWIKSGTGVPVRRRDIVKIEGIDATGGNNQPNIPDIPAHLWYFGLIGTCI

SEQ ID NO: 9271 - protein, 274 aa, Thermomyces lanuginosus
SPIRRDVSADLLNQFKLFAQYSAAAYCGRNNDAPAGTNITCSANACPLVEAADATFLYSFENSGVGDVTGFLAVDNTNKLIVLSFRGSRSIENWITNLNFDLVDINDICSGCRGHDGFTSSWRSVADTLRQAVDDAVAAHPDYKVVVTGHSLGGALATLAGADLRNNGYDVDLYTYGAPRVGNRAFAEFITVQTGGTLYRVTHTNDVVPRLPPRQFGYSHPSPEYWIKSGTLPPVRRRDIVKIEGIDATGGNNQPNIPDIPAHLWYFGLIGTCI

SEQ ID NO: 9272 - protein, 274 aa, Thermomyces lanuginosus
SPIRRDVSADLLNQFKLFAQYSAAAYCARNNDAPAGTNITCSANACPLVEAADATFLYSFENSGVGDVTGFLAVDNTNKLIVLSFRGSRSIENWITNLNFDLVDINDICSGCRGHDGFTSSWRSVADTLRQAVDDAVAAHPDYKVVVTGHSLGGALATLAGADLRNNGYDVDLYTYGAPRVGNRAFAEFITVQTGGTLYRVTHTNDVVPRLPPRQFGYSHPSPEYWIKSGTLVPVRRRDIVKIEGIDATGGNNQPNIPDIPAHLWYFGLIGTCI

SEQ ID NO: 9273 - protein, 274 aa, Thermomyces lanuginosus
SPIRRDVSADLLNQFKLFAQYSAAAYCGRNNDAPAGTNITCSANACPLVEAADATFLYSFENSGVGDVTGFLAVDNTNKLIVLSFRGSRSIENWITNLNFDLVDINDICSGCRGHDGFTSSWRSVADTLRQAVDDAVAAHPDYKVVVTGHSLGGALATLAGADLRNNGYDVDLYTYGAPRVGNRAFAEFITVQTGGTLYRVTHTNDVVPRLPPREFGYSHPSPEYWIKSGTLVPVRRRDIVKIEGIDATGGNNQNNTPDIPAHLWYFGLIGTCI

SEQ ID NO: 9274 - protein, 274 aa, Thermomyces lanuginosus
SPIRRDVSADLLNQFKLFAQYSAAAYCGRNNDAPAGTNITCSANACPLVEAADATFLYSFENSGVGDVTGFLAVDNTNKLIVLSFRGSRSIENWITNLNFDVVDINDICSGCRGHDGFTSSWRSVADTLRQAVDDAVAAHPDYKVVVTGHSLGGALATLAGADLRNNGYDVDLYTYGAPRVGNRAFAEFITVQTGGTLYRVTHTNDVVPRLPPRQFGYSHPSPEYWIKSGTLVPVRRRDIVKIEGIDATGGNNQPNIPDIPAHLWYFGLIGTCI

SEQ ID NO: 9275 - protein, 290 aa, Thermomyces lanuginosus
MRSSLVLFFVSAWTALASPIRRDVSADLLNQFKLFAQYSAAAYCGRNNDAPAGTNITCSANACPLVEAADATFLYSFENSGVGDVTGFLAVDNTNKLIVLSFRGSRSIENWITNLNFDLVDINDICSGCRGHDGFTSSWRSVADTLRQAVDDAVAAHPDYKVVVTGHSLGGALATLAGADLRNNGYDVDLYTYGAPRVGNRAFAEFITVQTGGTLYRVTHTNDVVPRLPPRQFGYSHPSPEYWIKSGTLVPVRRRDIVKIEGIDATGGNNQNNAPDIPAHLWYFGLIGTC

SEQ ID NO: 9276 - protein, 273 aa, Thermomyces dupontii
SPVRREVSQDLCDQFNLFAQYSAAAYCAKNNDAPAGANVTCSENVCPEVEKADATFLYSFEDSGVGDVTGFLALDNTNRLIVLSFRGSRSLENWIGNLAADLTEIDDICSGCKGHDGFTSSWRSVANTLTQQVQNAVREHPDYRVVFTGHSLGGALATVAGASLRGNGYDIDVFSYGAPRVGNRAFAVFLTAQTGGTLYRITHTNDIVPRLPPRELGYSHSSPEYWITSGNLVPVTCNDIVKVEGIDSTDGNNQPNTPDIAAHLWYFGLIGTC

SEQ ID NO: 9277 - protein, 273 aa, Thermomyces lanuginosus
SPIRRDVSADLLNQFKLFAQYSAAAYCGRNNDAPAGTNITCSANACPLVEAADATFLYSFENSGVGDVTGFLAVDNTNKLIVLSFRGSRSIENWITNLNFDLVDINDICSGCRGHDGFTSSWRSVADTLRQAVDDAVAAHPDYKVVVTGHSLGGALATLAGADLRNNGYDVDLYTYGAPRVGNRAFAEFITVQTGGTLYRVTHTNDVVPRLPPRQFGYSHPSPEYWIKSGTLVPVRRRDIVKIEGIDATGGNNQNNAPDIPAHLWYFGLIGTC

SEQ ID NO: 9278 - protein, 268 aa, Thermomyces dupontii
VSQDLFDQFNLFAQYSAAAYCAKNNDAPAGAXVTCRGSICPEVEKADATFLYSFEDSGVGDVTGFLALDNTNRLIVLSFRGSRSLENWIGNINXDLKGIDDICSGCKGHDGFTSSWRSVANTLTQQVQNAVREHPDYRVVFTGHSLGGALATVAGASLRGNGYDIDVFSYGAPRVGNRAFAEFLTAQTGGTLYRITHTNDIVPRLPPRELGYSHSSPEYWITSGTLVPVRRRDIVKVEGIDSTDGNNQPNTPDIAAHXWYFGXIGTCL

SEQ ID NO: 9279 - protein, 291 aa, Thermomyces lanuginosus
MRSSLVLFFVSAWTALASPIRRDVSADLLNQFKLFAQYSAAAYCGQNNDAPAGTNITCSANACPLVEAADATFLYSFENSGVGDVTGFLAVDNTNKLIVLSFRGSRSIENWITNLNFDLVDINDICSGCRGHDGFTSSWRSVADTLRQAVDDAVAAHPDYKVVVTGHSLGGALATLAGADLRNNGYDVDLYTYGAPRVGNRAFAEFITVQTGGTLYRVTHTNDVVPRLPPRQFGYSHPSPEYWIKSGTLVPVRRRDIVKIEGIDATGGNNQNNTPDIPAHLWYFGLIGTCI

SEQ ID NO: 9280 - protein, 291 aa, Thermomyces lanuginosus
MRSSLVLFFVSAWTALASPIRRDVSRDLLNQFKLFAQYSAAAYCGRNNDAPAGTNITCSANACPLVEAADATFLYSFENSGVGDVTGFLAVDNTNKLIVLSFRGSRSIENWITNLNFDLVDINDICSGCRGHDGFTSSWRSVADTLRQAVDDAVAAHPDYKVVVTGHSLGGALATLAGADLRNNGYDVDLYTYGAPRVGNRAFAEFITVQTGGTLYRVTHTNDVVPRLPPRQFGYSHPSPEYWIKSGTLVPVRRNDIVKIEGIDATGGNNQNNTPDIPAHLWYFGAIGTCI

SEQ ID NO: 9281 - protein, 291 aa, Thermomyces lanuginosus
MRSSLVLFFVSAWTALASPIRRDVSADLLNQFKLFAQYSAAAYCGRNNDAPAGTNITCSANACPLVEAADATFLYSFENSGVGDVTGFLAVDNTNKLIVLSFRGSRSIENWITNLNFDLVDINDICSGCRGHDGFTSSWRSVADTLRQAVDDAVAAHPDYKVVVTGHSLGGALATLAGADLRNNGYDVDLYTYGAPRVGNRAFAEFITVQTGGTLYRVTHTNDVVPRLPPRQFGYSHPSPEYCIKSGTLVPVRRRDIVKIEGIDATGCNNQPNIPDIPAHLWYFGLIGTCI

SEQ ID NO: 9282 - protein, 291 aa, Thermomyces lanuginosus
MRSSLVLFFVSAWTALASPIRRDVSADLLNQFKLFAQYSAAAYCGRNNDAPAGTNITCSANACPLVEAADATFLYSFENSGVGDVTGFLAVDNTNKLIVLSFRGSRSIENWITNLNFDLVDINDICSGCRGHDGFTSSWRSVADTLRQAVDDAVAAHPDYKVVVTGHSLGGALATLAGADLRNNGYDVDLYTYGAPRVGNRAFAEFITVQTGGTLYRVTHTNDVVPRLPPRQFGYSHPSPEYWIKSGTLVPVRRRDIVKIEGIDATGGNNQDNTPDIPAHLWYFGLIGTCI

SEQ ID NO: 9283 - protein, 291 aa, Thermomyces lanuginosus
MRSSLVLFFVSAWTALASPIRRDVSEDLLNQFKLFAQYSAAAYCGRNNDAPAGTNITCSANACPLVEAADATFLYSFENSGVGDVTGFLAVDNTNKLIVLSFRGSRSIENWITNLNFDLVDINDICSGCRGHDGFTSSWRSVADTLRQAVDDAVAAHPDYKVVVTGHSLGGALATLAGADLRNNGYDVDLYTYGAPRVGNRAFAEFITVQTGGTLYRVTHTNDVVPRLPPRQFGYSHPSPEYWIKSGTLVPVRRRDIVKIEGIDATGGNNQNNAPDIPAHLWYFGLIGTCI

SEQ ID NO: 9284 - protein, 291 aa, Thermomyces lanuginosus
MRSSLVLFFVSAWTALASPIRRDVSADLLNQFKLFAQYSAAAYCGRNNDAPAGTNITCSANACPLVEQADATFLYSFENSGVGDVTGFLAVDNTNKLIVLSFRGSRSIENWITNLNFDLVDINDICSGCRGHDGFTSSWRSVADTLRQAVDDAVAAHPDYKVVVTGHSLGGALATLAGADLRNNGYDVDLYTYGAPRVGNRAFAEFITVQTGGTLYRVTHTNDVVPRLPPRQFGYSHPSPEYWIKSGTLVPVRRRDIVKIEGIDATGGNNQNNTPDIPAHLWYFGLIGTCI

SEQ ID NO: 9285 - protein, 291 aa, Thermomyces lanuginosus
MRSSLVLFFVSAWTALASPIRRDVSRDLLNQFKLFAQYSAAAYCGRNNDAPAGTNITCSANACPLVEAADATFLYSFENSGVGDVTGFLAVDNTNKLIVLSFRGSRSIENWITNLNFDLVDINDICSGCRGHDGFTSSWRSVADTLRQAVDDAVAAHPDYKVVVTGHSLGGALATLAGADLRNNGYDVDLYTYGAPRVGNRAFAEFITVQTGGTLYRVTHTNDVVPRLPPRQFGYSHPSPEYWIKSGTLVPVRRRDIVKIEGIDATGGNNQNNTPDIPAHLWYFGLIGTCI

SEQ ID NO: 9286 - protein, 291 aa, Thermomyces lanuginosus
MRSSLVLFFVSAWTALASPIRRDVSRDLLNQFKLFAQYSAAAYCGRNNDAPAGTNITCSANACPLVEAADATFLYSFENSGVGDVTGFLAVDNTNKLIVLSFRGSRSIENWITNLNFDLVDINDICSGCRGHDGFTSSWRSVADTLRQAVDDAVAAHPDYKVVVTGHSLGGALATLAGADLRNNGYDVDLYTYGAPRVGNRAFAEFITVQTGGTLYRVTHTNDVVPRLPPRQFGYSHPSPEYWIKSGTGVPVRRNDIVKIEGIDATGGNNQNNTPDIPAHLWYFGLIGTCI

SEQ ID NO: 9287 - protein, 291 aa, Thermomyces lanuginosus
MRSSLVLFFVSAWTALASPIRRDVSADLLNQFKLFAQYSAAAYCGRNNDAPAGTNITCSANACPLVEAADATFLYSFENSGVGDVTGFLAVDNTNKLIVLSFRGSRSIENWITNLNFDLVDINDICSGCRGHDGFTSSWRSVADTLRQAVDDAVAAHPDYKVVVTGHSLGGALATLAGADLRNNGYDVDLYTYGAPRVGNRAFAEFITVQTGGTLYRVTHTNDVVPRLPPRQFGYSHPSPEYWIKSGTLVPVRRKDIVKIEGIDATGGNNQNNTPDIPAHLWYFGLIGTCI

SEQ ID NO: 9288 - protein, 291 aa, Thermomyces lanuginosus
MRSSLVLFFVSAWTALASPIRRDVSADLLNQFQLFAQYSAAAYCGRNNDAPAGTNITCSANACPLVEAADATFLYSFENSGVGDVTGFLAVDNTNKLIVLSFRGSRSIENWITNLNFDLVDINDICSGCRGHDGFTSSWRSVADTLRQAVDDAVAAHPDYKVVVTGHSLGGALATLAGADLRNNGYDVDLYTYGAPRVGNRAFAEFITVQTGGTLYRVTHTNDVVPRLPPRQFGYSHPSPEYWIKSGTLVPVRRRDIVKIEGIDATGGNNQNNTPDIPAHLWYFGLIGTCI

SEQ ID NO: 9289 - protein, 291 aa, Thermomyces lanuginosus
MRSSLVLFFVSAWTALASPIRRDVSADLLNQFKLFAQYSAAAYCGRNNDAPAGTNITCSANACPLVEAADATFLYSFENSGVGDVTGFLAVDNTNKLIVLSFRGSRSIENWITNLNFDLVDINDICSGCRGHDGFTSSWRSVADTLRQAVDDAVAAHPDYKVVVTGHSLGGALATLAGADLRNNGYDVDLYTYGAPRVGNRAFAEFITVQTGGTLYRVTHTNDVVPRLPPRQFGYSHPSPEYWIKSGTLVPVRRRDIVKIEGIDANGSNNQPNIPDIPAHLWYFGLIGTCI

SEQ ID NO: 9290 - protein, 291 aa, Thermomyces lanuginosus
MRSSLVLFFVSAWTALASPIRRDVSADLYNQFKLFAQYSAAAYCGRNNDAPAGTNITCSANACPLVEAADATFLYSFENSGVGDVTGFLAVDNTNKLIVLSFRGSRSIENWITNLNFDLVDINDICSGCRGHDGFTSSWRSVADTLRQAVDDAVAAHPDYKVVVTGHSLGGALATLAGADLRNNGYDVDLYTYGAPRVGNRAFAEFITVQTGGTLYRVTHTNDVVPRLPPRQFGYSHPSPEYWIKSGTLVPVRRRDIVKIEGIDATGGNNQNNTPDIPAHLWYFGLIGTCI

SEQ ID NO: 9291 - protein, 291 aa, Thermomyces lanuginosus
MRSSLVLFFVSAWTALASPIRRQVSADLLNQFKLFAQYSAAAYCGRNNDAPAGTNITCSANACPLVEAADATFLYSFENSGVGDVTGFLAVDNTNKLIVLSFRGSRSIENWITNLNFDLVDINDICSGCRGHDGFTSSWRSVADTLRQAVDDAVAAHPDYKVVVTGHSLGGALATLAGADLRNNGYDVDLYTYGAPRVGNRAFAEFITVQTGGTLYRVTHTNDVVPRLPPRQFGYSHPSPEYWIKSGTLVPVRRRDIVKIEGIDATGGNNQNNTPDIPAHLWYFGLIGTCI

SEQ ID NO: 9292 - protein, 291 aa, Thermomyces lanuginosus
MRSSLVLFFVSAWTALASPIRRDVSADLLNQFKLFAQYSAAAYCGRNNDAPAGTNITCSANACPLVEAADATFLYSFENSGVGDVTGFLAVDNTNKLIVLSFRGSRSIENWITNLNFDLVDINDICSGCRGHDGFTSSWRSVADTLRQAVDDAVAAHPDYKVVVTGHSLGGALATLAGADLRNNGYDVDLYTYGAPRVGNRAFAEFITVQTGGTLYRVTHTNDVVPRLPPRQFGYSHPSPEYWIKSGTLVPVRRQDIVKIEGIDATGGNNQNNTPDIPAHLWYFGLIGTCI

SEQ ID NO: 9293 - protein, 291 aa, Thermomyces lanuginosus
MRSSLVLFFVSAWTALASPIRRDVSADLLNQFKLFAQYSAAAYCGRNNDAPAGTNITCSANACPLVEAADATFLYSFENSGVGDVTGFLAVDNTNKLIVLSFRGSRSIENWITNLNFDLVDINDICSGCRGHDGFTSSWRSVADTLRQAVDDAVAAHPDYKVVVTGHSLGGALATLAGADLRNNGYDVDLYTYGAPRVGNRAFAEFITVQTGGTLYRVTHTNDVVPRLPPRQFGYSHPSPEYWIKSGTLVPVRRNDIVKIEGIDATGGNNQNNAPDIPAHLWYFGAIGTCI

SEQ ID NO: 9294 - protein, 291 aa, Thermomyces lanuginosus
MRSSLVLFFVSAWTALASPIRRDVSADLLNQFKLFAQYSAAAYCGRNNDAPAGTNITCSANACPLVEAADATFLYSFENSGVGDVTGFLAVDNTNKLIVLSFRGSRSIENWITNLNFDLVDINDICSGCRGHDGFTSSWRSVADTLRQAVDDAVAAHPDYKVVVTGHSLGGALATLAGADLRNNGYDVDLYTYGAPRVGNRAFAEFITVQTGGTLYRVTHTNDVVPRLPPRQFGYSHPSPEYWIKSGTLVPVRRRDIVKIEGIDATGGNNQPNIPNISAHLWYFGLIGTCI

SEQ ID NO: 9295 - protein, 291 aa, Thermomyces lanuginosus
MRSSLVLFFVSAWTALASPIRRDVSADLLNQFKLFAQYSAAAYCGRNNDAPAGTNITCSANACPLVEAADATFLYSFENSGVGDVTGFLAVDNTNKLIVLSFRGSRSIENWITNLNFDLVDINDICSGCRGHDGFTSSWRSVADTLRQAVDDAVAAHPDYKVVVTGHSLGGALATLAGADLRNNGYDVDLYTYGAPRVGNRAFAEFITVQTGGTLYRVTHTNDVVPRLPPRQFGYSHPSPEYWIKSGTLVPVRRRDIVKIEGIDATGGNNQNNTPDIPAHLWYFGLIGTCI

SEQ ID NO: 9296 - protein, 291 aa, Thermomyces lanuginosus
MRSSLVLFFVSAWTALASPIRRDVSKDLLNQFKLFAQYSAAAYCGRNNDAPAGTNITCSANACPLVEAADATFLYSFENSGVGDVTGFLAVDNTNKLIVLSFRGSRSIENWITNLNFDLVDINDICSGCRGHDGFTSSWRSVADTLRQAVDDAVAAHPDYKVVVTGHSLGGALATLAGADLRNNGYDVDLYTYGAPRVGNRAFAEFITVQTGGTLYRVTHTNDVVPRLPPRQFGYSHPSPEYWIKSGTLVPVTRRDIVKIEGIDATGGNNQNNAPDIPAHLWYFGAIGTCI

SEQ ID NO: 9297 - protein, 291 aa, Thermomyces lanuginosus
MRSSLVLFFVSAWTALASPIRRDVSADLFNQFKLFAQYSAAAYCGRNNDAPAGTNITCSANACPLVEAADATFLYSFENSGVGDVTGFLAVDNTNKLIVLSFRGSRSIENWIANLNFDLVDINDICSGCRGHDGFTSSWRSVADTLRQAVDDAVAAHPDYKVVVTGHSLGGGLATVAGADLRNNGYDVDLYTYGAPRVGNRAFAEFITVQTGGTLYRVTHTNDVVPRLPPRQFGYSHPSPEYWIKSGTLVPVRRRDIVKIEGIDATGGNNQNNAPDIPAHLWYFGAIGTCI

SEQ ID NO: 9298 - protein, 291 aa, Thermomyces lanuginosus
MRSSLVLFFVSAWTALASPIRRDVSADLLNQFKLFAQYSAAAYCGRNNDAPAGTNITCSANACPLVEAADATFLYSFEQSGVGDVTGFLAVDNTNKLIVLSFRGSRSIENWITNLNFDLVDINDICSGCRGHDGFTSSWRSVADTLRQAVDDAVAAHPDYKVVVTGHSLGGALATLAGADLRNNGYDVDLYTYGAPRVGNRAFAEFITVQTGGTLYRVTHTNDVVPRLPPRQFGYSHPSPEYWIKSGTLVPVRRRDIVKIEGIDATGGNNQNNTPDIPAHLWYFGLIGTCI

SEQ ID NO: 9299 - protein, 291 aa, Thermomyces lanuginosus
MRSSLVLFFVSAWTALASPIRRDVSADLLNQFKLFAQYSAAAYCGRNNDAPAGTNITCSANACPLVEAADATFLYSFENSGVGDVTGFLAVDNTNKLIVLSFRGSRSIENWITNLNFDLVDINDICSGCRGHDGFTSSWRSVADTLRQAVDDAVAAHPDYKVVVTGHSLGGALATLAGADLRNNGYDVDLYTYGAPRVGNRAFAEFITVQTGGTLYRVTHTNDVVPRLPPRQFGYSHPSPEYWIKSGTLVPVRRRDIVKIEGIDATGGNNNPSIPDIPAHLWYFGLIGTCI

SEQ ID NO: 9300 - protein, 291 aa, Thermomyces lanuginosus
MRSSLVLFFVSAWTALASPIRRDVSRDLLNQFKLFAQYSAAAYCGRNNDAPAGTNITCSANACPLVEAADATFLYSFENSGMGDVTGFLAVDNTNKLIVLSFRGSRSIENWITNLNFDLVDINDICSGCRGHDGFTSSWRSVADTLRQAVDDAVAAHPDYKVVVTGHSLGGALATLAGADLRNNGYDVDLYTYGAPRVGNRAFAEFITVQTGGTLYRVTHTNDVVPRLPPRQFGYSHPSPEYWIKSGTLVPVRRNDIVKIEGIDATGGNNQNNTPDIPAHLWYFGLIGTCI

SEQ ID NO: 9301 - protein, 291 aa, Thermomyces lanuginosus
MRSSLVLFFVSAWTALASPIRRDVSADLLNQFELFAQYSAAAYCGRNNDAPAGTNITCSANACPLVEAADATFLYSFENSGVGDVTGFLAVDNTNKLIVLSFRGSRSIENWITNLNFDLVDINDICSGCRGHDGFTSSWRSVADTLRQAVDDAVAAHPDYKVVVTGHSLGGALATLAGADLRNNGYDVDLYTYGAPRVGNRAFAEFITVQTGGTLYRVTHTNDVVPRLPPRQFGYSHPSPEYWIKSGTLVPVRRRDIVKIEGIDATGGNNQNNTPDIPAHLWYFGLIGTCI

SEQ ID NO: 9302 - protein, 291 aa, Thermomyces lanuginosus
MRSSLVLFFVSAWTALASPIRRDVSADLLNQFKLFAQYSAAAYCGNNNDAPAGTNITCSANACPLVEAADATFLYSFENSGVGDVTGFLAVDNTNKLIVLSFRGSRSIENWITNLNFDLVDINDICSGCRGHDGFTSSWRSVADTLRQAVDDAVAAHPDYKVVVTGHSLGGALATLAGADLRNNGYDVDLYTYGAPRVGNRAFAEFITVQTGGTLYRVTHTNDVVPRLPPRQFGYSHPSPEYWIKSGTLVPVRRRDIVKIEGIDATGGNNQNNTPDIPAHLWYFGLIGTCI

SEQ ID NO: 9303 - protein, 291 aa, Thermomyces lanuginosus
MRSSLVLFFVSAWTALASPIRRDVSADLLNQFKLFAQYSAAAYCGRNNDAPAGTNITCSANACPLVEAADATFLYSFENSGVGDVTGFLAVDNTNKLIVLSFRGSRSIENWITNLNFDLIDINDICSGCRGHDGFTSSWRSVADTLRQAVDDAVAAHPDYKVVVTGHSLGGALATLAGADLRNNGYDVDLYTYGAPRVGNRAFAEFITVQTGGTLYRVTHTNDVVPRLPPRQFGYSHPSPEYWIKSGTLVPVRRRDIVKIEGIDATGGNNQNNTPDIPAHLWYFGLIGTCI

SEQ ID NO: 9304 - protein, 291 aa, Thermomyces lanuginosus
MRSSLVLFFVSAWTALASPIRRDVSADLFNQFKLFAQYSAAAYCGRNNDAPAGTNITCSANACPLVEAADATFLYSFENSGVGDVTGFLAVDNTNKLIVLSFRGSRSIENWITNLNFDLVDINDICSGCRGHDGFTSSWRSVADTLRQAVDDAVAAHPDYKVVVTGHSLGGALATLAGADLRNNGYDVDLYTYGAPRVGNRAFAEFITVQTGGTLYRVTHTNDVVPRLPPRQFGYSHPSPEYWIKSGTLVPVRRRDIVKIEGIDATGGNNQNNAPDIPAHLWYFGAIGTCI

SEQ ID NO: 9305 - protein, 291 aa, Thermomyces lanuginosus
MRSSLVLFFVSAWTALASPIRRDVSADLLNQFKLFAQYSAAAYCGRNNDAPAGTNITCSANACPLVEAADATFLYSFENSGVGDVTGFLAVDNTNKLIVLSFRGSRSIENWITNLNFDLVDINDICSGCRGHDGFTSSWRSVADTLRQAVDDAVAAHPDYKVVVTGHSLGGALATLAGADLRNNGYDVDLYTYGAPRVGNRAFAEFITVQTGGTLYRVTHTNDVVPRLPPRQFGYSHPSPEYWIKSGTLVPVQRRDIVKIEGIDATGGNNQNNTPDIPAHLWYFGLIGTCI

SEQ ID NO: 9306 - protein, 291 aa, Thermomyces lanuginosus
MRSSLVLFFVSAWTALASPIRRDVSADLLNQFKLFAQYSAAAYCGRNNDAPAGTNITCSANACPLVEKADATFLYSFENSGVGDVTGFLAVDNTNKLIVLSFRGSRSIENWITNLNFDLVDINDICSGCRGHDGFTSSWRSVADTLRQAVDDAVAAHPDYKVVVTGHSLGGALATLAGADLRNNGYDVDLYTYGAPRVGNRAFAEFITVQTGGTLYRVTHTNDVVPRLPPRQFGYSHPSPEYWIKSGTLVPVRRRDIVKIEGIDATGGNNQNNAPDIPAHLWYFGAIGTCI

SEQ ID NO: 9307 - protein, 291 aa, Thermomyces lanuginosus
MRSSLVLFFVSAWTALASPIRRDVSADLLNQFKLFAQYSAAAYCGENNDAPAGTNITCSANACPLVEAADATFLYSFENSGVGDVTGFLAVDNTNKLIVLSFRGSRSIENWITNLNFDLVDINDICSGCRGHDGFTSSWRSVADTLRQAVDDAVAAHPDYKVVVTGHSLGGALATLAGADLRNNGYDVDLYTYGAPRVGNRAFAEFITVQTGGTLYRVTHTNDVVPRLPPRQFGYSHPSPEYWIKSGTLVPVRRRDIVKIEGIDATGGNNQNNTPDIPAHLWYFGLIGTCI

SEQ ID NO: 9308 - protein, 274 aa, Thermomyces lanuginosus
SPIRRDVSADLLNQFKLFAQYSAAAYCGNNNDAPAGTNITCSANACPLVEAADATFLYSFENSGVGDVTGFLAVDNTNKLIVLSFRGSRSIENWITNLNFDLVDINDICSGCRGHDGFTSSWRSVADTLRQAVDDAVAAHPDYKVVVTGHSLGGALATLAGADLRNNGYDVDLYTYGAPRVGNRAFAEFITVQTGGTLYRVTHTNDVVPRLPPRQFGYSHPSPEYWIKSGTLVPVRRRDIVKIEGIDATGGNNQNNTPDIPAHLWYFGLIGTCI

SEQ ID NO: 9309 - protein, 274 aa, Thermomyces lanuginosus
SPIRRDVSADLLNQFKLFAQYSAAAYCGRNNDAPAGTNITCSANACPLVEAADATFLYSFENSGVGDVTGFLAVDNTNKLIVLSFRGSRSIENWITNLNFDLVDINDICSGCRGHDGFTSSWRSVADTLRQAVDDAVAAHPDYKVVVTGHSLGGALATLAGADLRNNGYDVDLYTYGAPRVGNRAFAEFITVQTGGTLYRVTHTNDVVPRLPPRQFGYSHPSPEYWIKSGTLVPVRRRDIVKIEGIDATGGNNQNNTPDIPAHLWYFGLIGTCI

SEQ ID NO: 9310 - protein, 274 aa, Thermomyces lanuginosus
SPIRRDVSEDLLNQFKLFAQYSAAAYCGRNNDAPAGTNITCSANACPLVEAADATFLYSFENSGVGDVTGFLAVDNTNKLIVLSFRGSRSIENWITNLNFDLVDINDICSGCRGHDGFTSSWRSVADTLRQAVDDAVAAHPDYKVVVTGHSLGGALATLAGADLRNNGYDVDLYTYGAPRVGNRAFAEFITVQTGGTLYRVTHTNDVVPRLPPRQFGYSHPSPEYWIKSGTLVPVRRRDIVKIEGIDATGGNNQNNAPDIPAHLWYFGLIGTCI

SEQ ID NO: 9311 - protein, 274 aa, Thermomyces lanuginosus
SPIRRDVSADLLNQFKLFAQYSAAAYCGRNNDAPAGTNITCSANACPLVEAADATFLYSFENSGVGDVTGFLAVDNTNKLIVLSFRGSRSIENWITNLNFDLVDINDICSGCRGHDGFTSSWRSVADTLRQAVDDAVAAHPDYKVVVTGHSLGGALATLAGADLRNNGYDVDLYTYGAPRVGNRAFAEFITVQTGGTLYRVTHTNDVVPRLPPRQFGYSHPSPEYWIKSGTLVPVRRRDIVKIEGIDATGGNNQPNIPNISAHLWYFGLIGTCI

SEQ ID NO: 9312 - protein, 274 aa, Thermomyces lanuginosus
SPIRRDVSADLFNQFKLFAQYSAAAYCGRNNDAPAGTNITCSANACPLVEAADATFLYSFENSGVGDVTGFLAVDNTNKLIVLSFRGSRSIENWITNLNFDLVDINDICSGCRGHDGFTSSWRSVADTLRQAVDDAVAAHPDYKVVVTGHSLGGALATLAGADLRNNGYDVDLYTYGAPRVGNRAFAEFITVQTGGTLYRVTHTNDVVPRLPPRQFGYSHPSPEYWIKSGTLVPVRRRDIVKIEGIDATGGNNQNNAPDIPAHLWYFGAIGTCI

SEQ ID NO: 9313 - protein, 274 aa, Thermomyces lanuginosus
SPIRRDVSADLLNQFKLFAQYSAAAYCGRNNDAPAGTNITCSANACPLVEAADATFLYSFENSGVGDVTGFLAVDNTNKLIVLSFRGSRSIENWITNLNFDLVDINDICSGCRGHDGFTSSWRSVADTLRQAVDDAVAAHPDYKVVVTGHSLGGALATLAGADLRNNGYDVDLYTYGAPRVGNRAFAEFITVQTGGTLYRVTHTNDVVPRLPPRQFGYSHPSPEYWIKSGTLVPVRRRDIVKIEGIDATGGNNNPSIPDIPAHLWYFGLIGTCI

SEQ ID NO: 9314 - protein, 274 aa, Thermomyces lanuginosus
SPIRRDVSADLFNQFKLFAQYSAAAYCGRNNDAPAGTNITCSANACPLVEAADATFLYSFENSGVGDVTGFLAVDNTNKLIVLSFRGSRSIENWIANLNFDLVDINDICSGCRGHDGFTSSWRSVADTLRQAVDDAVAAHPDYKVVVTGHSLGGGLATVAGADLRNNGYDVDLYTYGAPRVGNRAFAEFITVQTGGTLYRVTHTNDVVPRLPPRQFGYSHPSPEYWIKSGTLVPVRRRDIVKIEGIDATGGNNQNNAPDIPAHLWYFGAIGTCI

SEQ ID NO: 9315 - protein, 274 aa, Thermomyces lanuginosus
SPIRRDVSADLLNQFKLFAQYSAAAYCGRNNDAPAGTNITCSANACPLVEAADATFLYSFENSGVGDVTGFLAVDNTNKLIVLSFRGSRSIENWITNLNFDLVDINDICSGCRGHDGFTSSWRSVADTLRQAVDDAVAAHPDYKVVVTGHSLGGALATLAGADLRNNGYDVDLYTYGAPRVGNRAFAEFITVQTGGTLYRVTHTNDVVPRLPPRQFGYSHPSPEYCIKSGTLVPVRRRDIVKIEGIDATGCNNQPNIPDIPAHLWYFGLIGTCI

SEQ ID NO: 9316 - protein, 274 aa, Thermomyces lanuginosus
SPIRRDVSQDLYDQFKLFAHYAAAAYCGKNNDAPPGTKITCTGNNCPEVEKADATFIYSFEDSGLGDVTGFLALDNTNKLIVLSFRGSRSIENWIANLDFLLTDISDICSGCKAHRGFYNAWRSVRDTLRAKVEDAVREYPDYRVVFTGHSLGGALATVAGADLRGNGYDIDVFSYGAPRVGNRAFAEFLTVQTGGTLYRITHTNDIVPRLPPREFGYSHSSPEYWIKSGTLVPVTRNDIVVCEGIDSTGGNNGTNIPDIPAHLWYFGIIGTCL

SEQ ID NO: 9317 - protein, 274 aa, Thermomyces lanuginosus
SPIRRQVSADLLNQFKLFAQYSAAAYCGRNNDAPAGTNITCSANACPLVEAADATFLYSFENSGVGDVTGFLAVDNTNKLIVLSFRGSRSIENWITNLNFDLVDINDICSGCRGHDGFTSSWRSVADTLRQAVDDAVAAHPDYKVVVTGHSLGGALATLAGADLRNNGYDVDLYTYGAPRVGNRAFAEFITVQTGGTLYRVTHTNDVVPRLPPRQFGYSHPSPEYWIKSGTLVPVRRRDIVKIEGIDATGGNNQNNTPDIPAHLWYFGLIGTCI

SEQ ID NO: 9318 - protein, 274 aa, Thermomyces lanuginosus
SPIRRDVSADLLNQFKLFAQYSAAAYCGRNNDAPAGTNITCSANACPLVEKADATFLYSFENSGVGDVTGFLAVDNTNKLIVLSFRGSRSIENWITNLNFDLVDINDICSGCRGHDGFTSSWRSVADTLRQAVDDAVAAHPDYKVVVTGHSLGGALATLAGADLRNNGYDVDLYTYGAPRVGNRAFAEFITVQTGGTLYRVTHTNDVVPRLPPRQFGYSHPSPEYWIKSGTLVPVRRRDIVKIEGIDATGGNNQNNAPDIPAHLWYFGAIGTCI

SEQ ID NO: 9319 - protein, 274 aa, Thermomyces lanuginosus
SPIRRDVSADLLNQFQLFAQYSAAAYCGRNNDAPAGTNITCSANACPLVEAADATFLYSFENSGVGDVTGFLAVDNTNKLIVLSFRGSRSIENWITNLNFDLVDINDICSGCRGHDGFTSSWRSVADTLRQAVDDAVAAHPDYKVVVTGHSLGGALATLAGADLRNNGYDVDLYTYGAPRVGNRAFAEFITVQTGGTLYRVTHTNDVVPRLPPRQFGYSHPSPEYWIKSGTLVPVRRRDIVKIEGIDATGGNNQNNTPDIPAHLWYFGLIGTCI

SEQ ID NO: 9320 - protein, 274 aa, Thermomyces lanuginosus
SPIRRDVSADLYNQFKLFAQYSAAAYCGRNNDAPAGTNITCSANACPLVEAADATFLYSFENSGVGDVTGFLAVDNTNKLIVLSFRGSRSIENWITNLNFDLVDINDICSGCRGHDGFTSSWRSVADTLRQAVDDAVAAHPDYKVVVTGHSLGGALATLAGADLRNNGYDVDLYTYGAPRVGNRAFAEFITVQTGGTLYRVTHTNDVVPRLPPRQFGYSHPSPEYWIKSGTLVPVRRRDIVKIEGIDATGGNNQNNTPDIPAHLWYFGLIGTCI

SEQ ID NO: 9321 - protein, 274 aa, Thermomyces lanuginosus
SPIRRDVSRDLLNQFKLFAQYSAAAYCGRNNDAPAGTNITCSANACPLVEAADATFLYSFENSGVGDVTGFLAVDNTNKLIVLSFRGSRSIENWITNLNFDLVDINDICSGCRGHDGFTSSWRSVADTLRQAVDDAVAAHPDYKVVVTGHSLGGALATLAGADLRNNGYDVDLYTYGAPRVGNRAFAEFITVQTGGTLYRVTHTNDVVPRLPPRQFGYSHPSPEYWIKSGTLVPVRRRDIVKIEGIDATGGNNQNNTPDIPAHLWYFGLIGTCI

SEQ ID NO: 9322 - protein, 274 aa, Thermomyces lanuginosus
SPIRRDVSADLLNQFELFAQYSAAAYCGRNNDAPAGTNITCSANACPLVEAADATFLYSFENSGVGDVTGFLAVDNTNKLIVLSFRGSRSIENWITNLNFDLVDINDICSGCRGHDGFTSSWRSVADTLRQAVDDAVAAHPDYKVVVTGHSLGGALATLAGADLRNNGYDVDLYTYGAPRVGNRAFAEFITVQTGGTLYRVTHTNDVVPRLPPRQFGYSHPSPEYWIKSGTLVPVRRRDIVKIEGIDATGGNNQNNTPDIPAHLWYFGLIGTCI

SEQ ID NO: 9323 - protein, 274 aa, Thermomyces lanuginosus
SPIRRDVSADLLNQFKLFAQYSAAAYCGRNNDAPAGTNITCSANACPLVEAADATFLYSFENSGVGDVTGFLAVDNTNKLIVLSFRGSRSIENWITNLNFDLVDINDICSGCRGHDGFTSSWRSVADTLRQAVDDAVAAHPDYKVVVTGHSLGGALATLAGADLRNNGYDVDLYTYGAPRVGNRAFAEFITVQTGGTLYRVTHTNDVVPRLPPRQFGYSHPSPEYWIKSGTLVPVRRRDIVKIEGIDATGGNNQDNTPDIPAHLWYFGLIGTCI

SEQ ID NO: 9324 - protein, 274 aa, Thermomyces lanuginosus
SPIRRDVSADLLNQFKLFAQYSAAAYCGQNNDAPAGTNITCSANACPLVEAADATFLYSFENSGVGDVTGFLAVDNTNKLIVLSFRGSRSIENWITNLNFDLVDINDICSGCRGHDGFTSSWRSVADTLRQAVDDAVAAHPDYKVVVTGHSLGGALATLAGADLRNNGYDVDLYTYGAPRVGNRAFAEFITVQTGGTLYRVTHTNDVVPRLPPRQFGYSHPSPEYWIKSGTLVPVRRRDIVKIEGIDATGGNNQNNTPDIPAHLWYFGLIGTCI

SEQ ID NO: 9325 - protein, 274 aa, Thermomyces lanuginosus
SPIRRDVSADLLNQFKLFAQYSAAAYCGRNNDAPAGTNITCSANACPLVEAADATFLYSFENSGVGDVTGFLAVDNTNKLIVLSFRGSRSIENWITNLNFDLIDINDICSGCRGHDGFTSSWRSVADTLRQAVDDAVAAHPDYKVVVTGHSLGGALATLAGADLRNNGYDVDLYTYGAPRVGNRAFAEFITVQTGGTLYRVTHTNDVVPRLPPRQFGYSHPSPEYWIKSGTLVPVRRRDIVKIEGIDATGGNNQNNTPDIPAHLWYFGLIGTCI

SEQ ID NO: 9326 - protein, 274 aa, Thermomyces lanuginosus
SPIRRDVSADLLNQFKLFAQYSAAAYCGRNNDAPAGTNITCSANACPLVEQADATFLYSFENSGVGDVTGFLAVDNTNKLIVLSFRGSRSIENWITNLNFDLVDINDICSGCRGHDGFTSSWRSVADTLRQAVDDAVAAHPDYKVVVTGHSLGGALATLAGADLRNNGYDVDLYTYGAPRVGNRAFAEFITVQTGGTLYRVTHTNDVVPRLPPRQFGYSHPSPEYWIKSGTLVPVRRRDIVKIEGIDATGGNNQNNTPDIPAHLWYFGLIGTCI

SEQ ID NO: 9327 - protein, 274 aa, Thermomyces lanuginosus
SPIRRDVSADLLNQFKLFAQYSAAAYCGRNNDAPAGTNITCSANACPLVEAADATFLYSFENSGVGDVTGFLAVDNTNKLIVLSFRGSRSIENWITNLNFDLVDINDICSGCRGHDGFTSSWRSVADTLRQAVDDAVAAHPDYKVVVTGHSLGGALATLAGADLRNNGYDVDLYTYGAPRVGNRAFAEFITVQTGGTLYRVTHTNDVVPRLPPRQFGYSHPSPEYWIKSGTLVPVRRRDIVKIEGIDANGSNNQPNIPDIPAHLWYFGLIGTCI

SEQ ID NO: 9328 - protein, 274 aa, Thermomyces lanuginosus
SPIRRDVSADLLNQFKLFAQYSAAAYCGENNDAPAGTNITCSANACPLVEAADATFLYSFENSGVGDVTGFLAVDNTNKLIVLSFRGSRSIENWITNLNFDLVDINDICSGCRGHDGFTSSWRSVADTLRQAVDDAVAAHPDYKVVVTGHSLGGALATLAGADLRNNGYDVDLYTYGAPRVGNRAFAEFITVQTGGTLYRVTHTNDVVPRLPPRQFGYSHPSPEYWIKSGTLVPVRRRDIVKIEGIDATGGNNQNNTPDIPAHLWYFGLIGTCI

SEQ ID NO: 9329 - protein, 274 aa, Thermomyces lanuginosus
SPIRRDVSADLLNQFKLFAQYSAAAYCGRNNDAPAGTNITCSANACPLVEAADATFLYSFEQSGVGDVTGFLAVDNTNKLIVLSFRGSRSIENWITNLNFDLVDINDICSGCRGHDGFTSSWRSVADTLRQAVDDAVAAHPDYKVVVTGHSLGGALATLAGADLRNNGYDVDLYTYGAPRVGNRAFAEFITVQTGGTLYRVTHTNDVVPRLPPRQFGYSHPSPEYWIKSGTLVPVRRRDIVKIEGIDATGGNNQNNTPDIPAHLWYFGLIGTCI

SEQ ID NO: 9330 - protein, 290 aa, Thermomyces lanuginosus
MRSSLVLFFVSAWTALASPIRRDVSADLLNQFKLFAQYSAAAYCGRNNDAPAGTNITCSANACPLVEAADATFLYSFENSGVGDVTGFLAVDNTNKLIVLSFRGSRSIENWITNLNFDLVDINDICSGCRGHDGFTSSWRSVADTLRQAVDDAVAAHPDYKVVVTGHSLGGALATLAGADLRNNGYDVDLYTYGAPRVGNRAFAEFITVQTGGTLYRVTHTNDVVPRLPPRQFGYSHPSPEYWIKSGTGVPVRRRDIVKIEGIDATGGNNQNNTPDIPAHLWYFGLIGTC

SEQ ID NO: 9331 - protein, 290 aa, Thermomyces lanuginosus
MRSSLVLFFVSAWTALASPIRRDVSADLLNQFKLFAQYSAAAYCGRNNDAPAGTNITCSANACPLVEAADATFLYSFENSGVGDVTGFLAVDNTNKLIVLSFRGSRSIENWITNLNFDLVDINDICSGCRGHDGFTSSWRSVADTLRQAVDDAVAAHPDYKVVVTGHSLGGALATLAGADLRNNGYDVDLYTYGAPRVGNRAFAEFITVQTGGTLYRVTHTNDVVPRLPPRQFGYSHPSPEYWIKSGTLVPVRRRDIVKIEGIDATGGNNQNNTPDIPAHLWYFGAIGTC

SEQ ID NO: 9332 - protein, 273 aa, Thermomyces lanuginosus
SPIRRDVSADLLNQFKLFAQYSAAAYCGRNNDAPAGTNITCSANACPLVEAADATFLYSFENSGVGDVTGFLAVDNTNKLIVLSFRGSRSIENWITNLNFDLVDINDICSGCRGHDGFTSSWRSVADTLRQAVDDAVAAHPDYKVVVTGHSLGGALATLAGADLRNNGYDVDLYTYGAPRVGNRAFAEFITVQTGGTLYRVTHTNDVVPRLPPRQFGYSHPSPEYWIKSGTGVPVRRRDIVKIEGIDATGGNNQNNTPDIPAHLWYFGLIGTC

SEQ ID NO: 9333 - protein, 273 aa, Thermomyces lanuginosus
SPIRRDVSADLLNQFKLFAQYSAAAYCGRNNDAPAGTNITCSANACPLVEAADATFLYSFENSGVGDVTGFLAVDNTNKLIVLSFRGSRSIENWITNLNFDLVDINDICSGCRGHDGFTSSWRSVADTLRQAVDDAVAAHPDYKVVVTGHSLGGALATLAGADLRNNGYDVDLYTYGAPRVGNRAFAEFITVQTGGTLYRVTHTNDVVPRLPPRQFGYSHPSPEYWIKSGTLVPVRRRDIVKIEGIDATGGNNQNNTPDIPAHLWYFGAIGTC

SEQ ID NO: 9334 - protein, 273 aa, Thermomyces dupontii
PTSSEVSQDLFDQFNLFAQYSAAAYCAKNNDAPAGANVTCRGSICPEVEKADATFLYSFEDSGVGDVTGFLALDNTNRLIVLSFRGSRSLENWIGNINLDLKGIDDICSGCKGHDGFTSSWRSVANTLTQQVQNAVREHPDYRVVFTGHSLGGALATVAGASLRGNGYDIDVFSYGAPRVGNRAFAEFLTAQTGGTLYRITHTNDIVPRLPPRELGYSHSSPEYWITSGTLVPVTKNDIVKVEGIDSTDGNNQPNTPDIAAHLWYFGLIGTCL

SEQ ID NO: 9335 - protein, 269 aa, Thermomyces lanuginosus
DVSADLLNQFKLFAQYSAAAYCGRNNDAPAGTNITCSANACPLVEAADATFLYSFENSGVGDVTGFLAVDNTNKLIVLSFRGSRSIENWITNLNFDLVDINDICSGCRGHDGFTSSWRSVADTLRQAVDDAVAAHPDYKVVVTGHSLGGALATLAGADLRNNGYDVDLYTYGAPRVGNRAFAEFITVQTGGTLYRVTHTNDVVPRLPPRQFGYSHPSPEYWIKSGTLVPVRRRDIVKIEGIDATGGNNQPNIPDIPAHLWYFGLIGTCI

SEQ ID NO: 9336 - protein, 269 aa, Thermomyces dupontii
DVSQDLFDQFNLFAQYSAAAYCAKNNDAPAGAIVTCRGSICPEVEKADATFLYSFEDSGVGDVTGFLALDNTNRLIVLSFRGSRSLENWIGNINMDLKGIDDICSGCKGHDGFTSSWRSVANTLTQQVQNAVREHPDYRVVFTGHSLGGALATVAGASLRGNGYDIDVFSYGAPRVGNRAFAEFLTAQTGGTLYRITHTNDIVPRLPPRELGYSHSSPEYWITSGTLVPVRRRDIVKVEGIDSTDGNNQPNTPDIAAHFWYFGSIGTCL

SEQ ID NO: 9337 - protein, 269 aa, Synthetic construct
EVSQDLFDQFNLFAQYSAAAYCAKNNDAPAGANVTCRGNICPEVEKADATFLYSFEDSGVGDVTGFLALDNTNRLIVLSFRGSRSLENWIGNINLDLKGIDDICSGCKGHDGFTSSWRSVANTLTQQVQNAVREHPDYRVVFTGHSLGGALATVAGASLRGNGYDIDVFSYGAPRVGNRAFAEFLTAQTGGTLYRITHTNDIVPRLPPRELGYSHSSPEYWITSGTLVPVTKNDIVKVEGIDSTDGNNQPNTPDIAAHLWYFGLIGTCL

SEQ ID NO: 9338 - protein, 291 aa, Thermomyces lanuginosus
MRSSLVLFFVSAWTALASPIRRDVSADLLNQFKLFAQYSAAAYCGRNNDAPAGTNITCSANACPLVEAADATFLYSFENSGVGDVTGFLAVDNTNKLIVLSFRGSRSIENWITNLNFDLVDINDICSGCRGHDGFTSSWRSVADTLRQAVDDAVAAHPDYKVVVTGHSLGGALATLAGADLRNNGYDVDLYTYGAPRVGNRAFAEFITVQTGGTLYRVTHTNDVVPRLPPRQFGYSHPSPEYWIKSGTLVPVRRRDIVKIEGIDATGGNNQNNTPDIPAHLWYFGAIGTCI

SEQ ID NO: 9339 - protein, 291 aa, Thermomyces lanuginosus
MRSSLVLFFVSAWTALASPIRRHVSADLLNQFKLFAQYSAAAYCGRNNDAPAGTNITCSANACPLVEAADATFLYSFENSGVGDVTGFLAVDNTNKLIVLSFRGSRSIENWITNLNFDLVDINDICSGCRGHDGFTSSWRSVADTLRQAVDDAVAAHPDYKVVVTGHSLGGALATLAGADLRNNGYDVDLYTYGAPRVGNRAFAEFITVQTGGTLYRVTHTNDVVPRLPPRQFGYSHPSPEYWIKSGTLVPVRRRDIVKIEGIDATGGNNQNNAPDIPAHLWYFGAIGTCI

SEQ ID NO: 9340 - protein, 291 aa, Thermomyces lanuginosus
MRSSLVLFFVSAWTALASPIRRDVSADLLNQFKLFAQYSAAAYCGRNNDAPAGTNITCSANACPLVEAADATFLYSFENSGMGDVTGFLAVDNTNKLIVLSFRGSRSIENWITNLNFDLVDINDICSGCRGHDGFTSSWRSVADTLRQAVDDAVAAHPDYKVVVTGHSLGGALATLAGADLRNNGYDVDLYTYGAPRVGNRAFAEFITVQTGGTLYRVTHTNDVVPRLPPRQFGYSHPSPEYWIKSGTGVPVRRNDIVKIEGIDATGGNNQNNTPDIPAHLWYFGLIGTCI

SEQ ID NO: 9341 - protein, 291 aa, Thermomyces lanuginosus
MRSSLVLFFVSAWTALASPIRRDVSADLLNQFKLFAQYSAAAYCGRNNDAPAGTNITCSANACPLVEAADATFLYSFENSGVGDVTGFLAVDNTNKLIVLSFRGSRSIENWITNLNFDLVDINDICSGCRGHDGFTSSWRSVADTLRQAVDDAVAAHPDYKVVVTGHSLGGALATLAGADLRNNGYDVDLYTYGAPRVGNRAFAEFITVQTGGTLYRVTHTNDVVPRLPPRQFGYSHPSPEYWIKSGTLVPVRRRDIVKIEGIDATGGNNQNNAPDIPAHLWYFGQIGTCI

SEQ ID NO: 9342 - protein, 291 aa, Thermomyces lanuginosus
MRSSLVLFFVSAWTALASPIRRDVSADLLNQFKLFAQYSAAAYCGRNNDAPAGTQITCSANACPLVEAADATFLYSFENSGVGDVTGFLAVDNTNKLIVLSFRGSRSIENWITNLNFDLVDINDICSGCRGHDGFTSSWRSVADTLRQAVDDAVAAHPDYKVVVTGHSLGGALATLAGADLRNNGYDVDLYTYGAPRVGNRAFAEFITVQTGGTLYRVTHTNDVVPRLPPRQFGYSHPSPEYWIKSGTLVPVRRRDIVKIEGIDATGGNNQNNTPDIPAHLWYFGLIGTCI

SEQ ID NO: 9343 - protein, 291 aa, Thermomyces lanuginosus
MRSSLVLFFVSAWTALASPIRRDVSADLLNQFLLFAQYSAAAYCGRNNDAPAGTNITCSANACPLVEAADATFLYSFENSGVGDVTGFLAVDNTNKLIVLSFRGSRSIENWITNLNFDLVDINDICSGCRGHDGFTSSWRSVADTLRQAVDDAVAAHPDYKVVVTGHSLGGALATLAGADLRNNGYDVDLYTYGAPRVGNRAFAEFITVQTGGTLYRVTHTNDVVPRLPPRQFGYSHPSPEYWIKSGTLVPVRRRDIVKIEGIDATGGNNQNNAPDIPAHLWYFGAIGTCI

SEQ ID NO: 9344 - protein, 291 aa, Thermomyces lanuginosus
MRSSLVLFFVSAWTALASPIRRDVSADLLDQFKLFAQYSAAAYCGRNNDAPAGTNITCSANACPLVEAADATFLYSFENSGVGDVTGFLAVDNTNKLIVLSFRGSRSIENWITNLNFDLVDINDICSGCRGHDGFTSSWRSVADTLRQAVDDAVAAHPDYKVVVTGHSLGGALATLAGADLRNNGYDVDLYTYGAPRVGNRAFAEFITVQTGGTLYRVTHTNDVVPRLPPRQFGYSHPSPEYWIKSGTLVPVRRRDIVKIEGIDATGGNNQNNTPDIPAHLWYFGLIGTCI

SEQ ID NO: 9345 - protein, 291 aa, Thermomyces lanuginosus
MRSSLVLFFVSAWTALASPIRRDVSADLLNQFKLFAQYSAAAYCGRNNDAPAGTNITCSANACPLVEAADATFLYSFENSGVGDVTGFLAVDNTNKLIVLSFRGSRSIENWITNLNFDLVDINDICSGCRGHDGFTSSWRSVADTLRQAVDDAVAAHPDYKVVVTGHSLGGALATLAGADLRNNGYDVDLYTYGAPRVGNRAFAEFITVQTGGTLYRVTHTNDVVPRLPPRQYGYSHPSPEYWIKSGTLVPVRRRDIVKIEGIDATGGNNQNNTPDIPAHLWYFGLIGTCI

SEQ ID NO: 9346 - protein, 291 aa, Thermomyces lanuginosus
MRSSLVLFFVSAWTALASPIRRDVSADLLNQFKLFAQYSAAAYCGRNNDAPAGTNITCSANACPLVEAADATFLYSFENSGVGDVTGFLAVDNTNKLIVLSFRGSRSIENWITNLNFDLVDINDICSGCRGHDGFTSSWRSVADTLRQAVDDAVAAHPDYKVVVTGHSLGGALATLAGADLRNNGYDVDLYTYGAPRVGNRAFAEFITVQTGGTLYRVTHTNDVVPRLPPRQFGYSHPSPEYWIKSGTLVPVRERDIVKIEGIDATGGNNQNNTPDIPAHLWYFGLIGTCI

SEQ ID NO: 9347 - protein, 291 aa, Thermomyces lanuginosus
MRSSLVLFFVSAWTALASPIRRDVSADLLNQFKLFAQYSAAAYCGRNNDAPAGTNITCSANACPLVEAADATFLYSFENSGVGQVTGFLAVDNTNKLIVLSFRGSRSIENWITNLNFDLVDINDICSGCRGHDGFTSSWRSVADTLRQAVDDAVAAHPDYKVVVTGHSLGGALATLAGADLRNNGYDVDLYTYGAPRVGNRAFAEFITVQTGGTLYRVTHTNDVVPRLPPRQFGYSHPSPEYWIKSGTLVPVRRRDIVKIEGIDATGGNNQNNTPDIPAHLWYFGLIGTCI

SEQ ID NO: 9348 - protein, 291 aa, Thermomyces lanuginosus
MRSSLVLFFVSAWTALASPIRRDVSADLLNQFKLFAQYSAAAYCGRNNDAPAGTNITCSANACPLVEAADATFLYSFENSGVGDVTGFLAVDNTNKLIVLSFRGSRSIENWITNLNFDLVDINDICSGCRGHDGFTSSWRSVADTLRQAVDDAVAAHPDYKVVVTGHSLGGALATLAGAQLRNNGYDVDLYTYGAPRVGNRAFAEFITVQTGGTLYRVTHTNDVVPRLPPRQFGYSHPSPEYWIKSGTLVPVRRRDIVKIEGIDATGGNNQNNTPDIPAHLWYFGLIGTCI

SEQ ID NO: 9349 - protein, 291 aa, Thermomyces lanuginosus
MRSSLVLFFVSAWTALASPIRRDVSADLLNQFKLFAQYSAAAYCGRNNDAPAGTNITCSANACPLVEAADATFLYSFENSGVGDVTGFLAVDNTNKLIVLSFRGSRSIENWITNLNFDLVDINDICSGCQGHDGFTSSWRSVADTLRQAVDDAVAAHPDYKVVVTGHSLGGALATLAGADLRNNGYDVDLYTYGAPRVGNRAFAEFITVQTGGTLYRVTHTNDVVPRLPPRQFGYSHPSPEYWIKSGTLVPVRRRDIVKIEGIDATGGNNQNNTPDIPAHLWYFGLIGTCI

SEQ ID NO: 9350 - protein, 291 aa, Thermomyces lanuginosus
MRSSLVLFFVSAWTALASPIRRFVSADLLNQFKLFAQYSAAAYCGRNNDAPAGTNITCSANACPLVEAADATFLYSFENSGVGDVTGFLAVDNTNKLIVLSFRGSRSIENWITNLNFDLVDINDICSGCRGHDGFTSSWRSVADTLRQAVDDAVAAHPDYKVVVTGHSLGGALATLAGADLRNNGYDVDLYTYGAPRVGNRAFAEFITVQTGGTLYRVTHTNDVVPRLPPRQFGYSHPSPEYWIKSGTLVPVRRRDIVKIEGIDATGGNNQNNAPDIPAHLWYFGAIGTCI

SEQ ID NO: 9351 - protein, 291 aa, Thermomyces lanuginosus
MRSSLVLFFVSAWTALASPIRRDVSADLLNQFKLFAQYSAAAYCGRNNDAPAGTNITCSANACPLVEAADATFLYSFENSGVGDVTGFLAQDNTNKLIVLSFRGSRSIENWITNLNFDLVDINDICSGCRGHDGFTSSWRSVADTLRQAVDDAVAAHPDYKVVVTGHSLGGALATLAGADLRNNGYDVDLYTYGAPRVGNRAFAEFITVQTGGTLYRVTHTNDVVPRLPPRQFGYSHPSPEYWIKSGTLVPVRRRDIVKIEGIDATGGNNQNNAPDIPAHLWYFGAIGTCI

SEQ ID NO: 9352 - protein, 291 aa, Thermomyces lanuginosus
MRSSLVLFFVSAWTALASPIRRDVSADLLNQFKLFAQYSAAAYCGRNNNAPAGTNITCSANACPLVEAADATFLYSFENSGVGDVTGFLAVDNTNKLIVLSFRGSRSIENWITNLNFDLVDINDICSGCRGHDGFTSSWRSVADTLRQAVDDAVAAHPDYKVVVTGHSLGGALATLAGADLRNNGYDVDLYTYGAPRVGNRAFAEFITVQTGGTLYRVTHTNDVVPRLPPRQFGYSHPSPEYWIKSGTLVPVRRRDIVKIEGIDATGGNNQNNTPDIPAHLWYFGLIGTCI

SEQ ID NO: 9353 - protein, 291 aa, Thermomyces lanuginosus
MRSSLVLFFVSAWTALASPIRRWVSADLLNQFKLFAQYSAAAYCGRNNDAPAGTNITCSANACPLVEAADATFLYSFENSGVGDVTGFLAVDNTNKLIVLSFRGSRSIENWITNLNFDLVDINDICSGCRGHDGFTSSWRSVADTLRQAVDDAVAAHPDYKVVVTGHSLGGALATLAGADLRNNGYDVDLYTYGAPRVGNRAFAEFITVQTGGTLYRVTHTNDVVPRLPPRQFGYSHPSPEYWIKSGTLVPVRRRDIVKIEGIDATGGNNQNNAPDIPAHLWYFGAIGTCI

SEQ ID NO: 9354 - protein, 291 aa, Thermomyces lanuginosus
MRSSLVLFFVSAWTALASPIRRDVSADLLNQFKLFAQYSAAAYCGRNNDAPAGTNITCSANACPLVEAADATFLYSFENSGSGDVTGFLAVDNTNKLIVLSFRGSRSIENWITNLNFDLVDINDICSGCRGHDGFTSSWRSVADTLRQAVDDAVAAHPDYKVVVTGHSLGGALATLAGADLRNNGYDVDLYTYGAPRVGNRAFAEFITVQTGGTLYRVTHTNDVVPRLPPRQFGYSHPSPEYWIKSGTLVPVRRRDIVKIEGIDATGGNNQNNTPDIPAHLWYFGLIGTCI

SEQ ID NO: 9355 - protein, 291 aa, Thermomyces lanuginosus
MRSSLVLFFVSAWTALASPIRRDVSADLLNQFKLFAQYSAAAYCGRNNDAPAGTNITCSANACPLVEAADATFLYSFENSGVGDVTGFLAVDNTSKLIVLSFRGSRSIENWITNLNFDLVDINDICSGCRGHDGFTSSWRSVADTLRQAVDDAVAAHPDYKVVVTGHSLGGALATLAGADLRNNGYDVDLYTYGAPRVGNRAFAEFITVQTGGTLYRVTHTNDVVPRLPPRQFGYSHPSPEYWIKSGTLVPVRRRDIVKIEGIDATGGNNQNNTPDIPAHLWYFGLIGTCI

SEQ ID NO: 9356 - protein, 291 aa, Thermomyces lanuginosus
MRSSLVLFFVSAWTALASPIRRDVSADLFNQFKLFAQYSAAAYCGRNNDAPAGTNITCSANACPLVEAADATFLYSFENSGVGDVTGFLAVDNTNKLIVLSFRGSRSIENWITNLNFDLVDINDICSGCRGHDGFTSSWRSVADTLRQAVDDAVAAHPDYKVVVTGHSLGGALATLAGADLRNNGYDVDLYTYGAPRVGNRAFAEFITVQTGGTLYRVTHTNDVVPRLPPRQFGYSHPSPEYWIKSGTGVPVRRRDIVKIEGIDATGGNNQNNAPDIPAHLWYFGAIGTCI

SEQ ID NO: 9357 - protein, 291 aa, Thermomyces lanuginosus
MRSSLVLFFVSAWTALASPIRRDVSADLLNQFKLFAQYSAAAYCGRNNDAPAGTNITCSANACPLVEAADATFLYSFKNSGVGDVTGFLAVDNTNKLIVLSFRGSRSIENWITNLNFDLVDINDICSGCRGHDGFTSSWRSVADTLRQAVDDAVAAHPDYKVVVTGHSLGGALATLAGADLRNNGYDVDLYTYGAPRVGNRAFAEFITVQTGGTLYRVTHTNDVVPRLPPRQFGYSHPSPEYWIKSGTLVPVRRRDIVKIEGIDATGGNNQNNTPDIPAHLWYFGLIGTCI

SEQ ID NO: 9358 - protein, 291 aa, Thermomyces lanuginosus
MRSSLVLFFVSAWTALASPIRRDVSADLLNQFKLFAQYSAAAYCGRNNDAPAGTNITCSANACPLVEAADATFLYSFENSGVGDVTGFLAVDNTNKLIVLSFRGSRSIENWITNLNFDLVDINDICSGCRGHDGFTSSWRSVADTLRQAVDDAVAAHPDYKVVVTGHSLGGALATLAGADLRNNGYDVDLYTYGAPRVGNRAFAEFITVQTGGTLYRVTHTQDVVPRLPPRQFGYSHPSPEYWIKSGTLVPVRRRDIVKIEGIDATGGNNQNNTPDIPAHLWYFGLIGTCI

SEQ ID NO: 9359 - protein, 291 aa, Thermomyces lanuginosus
MRSSLVLFFVSAWTALASPIRRDVSADLLNQFKLFAQYSAAAYCGRNNDAPAGTNITCSANACPLVEAADATFLYSFENSGVGDVTGFLAVDNTNKLIVLSFRGSRSIENWITNLNFDLVDINDICSGCRGHDGFTSSWRSVADTLRQAVDDAVAAHPDYKVVVTGHSLGGALATLAGADLRNNGYDVDLYTYGAPRVGNRAFAEFITVQTGGTLYRVTHTNDVVPRLPPRQFGYSHPSPEYWIKSGTLVPVRRRDIVKIEGIDATGGNNQNNTPDIPSHLWYFGLIGTCI

SEQ ID NO: 9360 - protein, 291 aa, Thermomyces lanuginosus
MRSSLVLFFVSAWTALASPIRRDVSADLLNQFKLFAQYSAAAYCGRNNDAPAGTNITCSANACPLVEAADATFLYSFENSGVGDVTGFLAVDNTNKLIVLSFRGSRSIENWITNLNFDLVDINDICSGCRGHDGFTSSWRSVADTLRQAVDDAVAAHPDYKVVVTGHSLGGALATLAGADLRNNGYDVDLYTYGAPRVGNRAFAEFITVQTGGTLYRVTHTNDVVPRLPPRQFGYSHPSPEYWIKSGTLVPVRRRDIVKIEGIDATGGNNQNNTPDIPAHLWYFGVIGTCI

SEQ ID NO: 9361 - protein, 291 aa, Thermomyces lanuginosus
MRSSLVLFFVSAWTALASPIRRDVSADLLNQFKLFAQYSAAAYCGRNNDAPAGTNITCSANACPLVEAADATFLYSFENSGVGDVTGFLAVDNTNKLIVLSFRGSRSIENWITNLNFNLSDINDICSGCRGHDGFTSSWRSVADTLRQAVDDAVAAHPDYKVVVTGHSLGGALATLAGADLRNNGYDVDLYTYGAPRVGNRAFAEFITVQTGGTLYRVTHTNDVVPRLPPRQFGYSHPSPEYWIKSGTLVPVRRRDIVKIEGIDATGGNNQNNTPDIPAHLWYFGLIGTCI

SEQ ID NO: 9362 - protein, 291 aa, Thermomyces lanuginosus
MRSSLVLFFVSAWTALASPIRRDVSADLLNQFKLFAQYSAAAYCGRNNDAPAGTNITCSANACPLVEAADATFLYSFENSGVGDVTGFLAVDNTNKLIVLSFRGSRSIEQWITNLNFDLVDINDICSGCRGHDGFTSSWRSVADTLRQAVDDAVAAHPDYKVVVTGHSLGGALATLAGADLRNNGYDVDLYTYGAPRVGNRAFAEFITVQTGGTLYRVTHTNDVVPRLPPRQFGYSHPSPEYWIKSGTLVPVRRRDIVKIEGIDATGGNNQNNTPDIPAHLWYFGLIGTCI

SEQ ID NO: 9363 - protein, 291 aa, Thermomyces lanuginosus
MRSSLVLFFVSAWTALASPIRRDVSADLLNQFKLFAQYSAAAYCGRNNDAPAGTNITCSANACPLVEAADATFLYSFENSGVGDVTGFLAVDNTNKLIVLSFRGSRSIENWITNLNFILVDINDICSGCRGHDGFTSSWRSVADTLRQAVDDAVAAHPDYKVVVTGHSLGGALATLAGADLRNNGYDVDLYTYGAPRVGNRAFAEFITVQTGGTLYRVTHTNDVVPRLPPRQFGYSHPSPEYWIKSGTLVPVRRRDIVKIEGIDATGGNNQNNTPDIPAHLWYFGLIGTCI

SEQ ID NO: 9364 - protein, 291 aa, Thermomyces lanuginosus
MRSSLVLFFVSAWTALASPIRRDVSADLLNQFKLFAQYSAAAYCGRNNDAPAGTNITCSANACPLVEAADATFLYSFENSGVGDVTGFLAVDNTNKLIVLSFRGSRSIENWITNLNFDLVDINDICSGCRGHDGFTSSWRSVADTLRQAVDDAVAAHPDYKVVVTGHSLGGALATLAGADLRNNGYDVDLYTYGAPRVGNRAFAEFITVQTGGTLYRVTHTNDVVPRLPPRQFGYSHPSPEYWIKSGTLEPVRRRDIVKIEGIDATGGNNQNNTPDIPAHLWYFGLIGTCI

SEQ ID NO: 9365 - protein, 291 aa, Thermomyces lanuginosus
MRSSLVLFFVSAWTALASPIRRDVSADLLNQFKLFAQYSAAAYCGRNNDAPAGTNITCSANACPLVEAADATFLYSFENSGVGDVTGFLAVDNTNKLIVLSFRGSRSIENWITNLNFDLVDINDICSGCRGHDGFTSSWRSVADTLRQAVDDAVAAHPDYKVVVTGHSLGGALATLAGADLRNNGYDVDLYTYGAPRVGNRAFAEFITVQTGGTLYRVTHTNDVVPRLPPQQFGYSHPSPEYWIKSGTLVPVRRRDIVKIEGIDATGGNNQNNTPDIPAHLWYFGLIGTCI

SEQ ID NO: 9366 - protein, 291 aa, Thermomyces lanuginosus
MRSSLVLFFVSAWTALASPIRRDVSADLLNQFKLFAQYSAAAYCGRNNDAPAGTNITCEANACPLVEAADATFLYSFENSGVGDVTGFLAVDNTNKLIVLSFRGSRSIENWITNLNFDLVDINDICSGCRGHDGFTSSWRSVADTLRQAVDDAVAAHPDYKVVVTGHSLGGALATLAGADLRNNGYDVDLYTYGAPRVGNRAFAEFITVQTGGTLYRVTHTNDVVPRLPPRQFGYSHPSPEYWIKSGTLVPVRRRDIVKIEGIDATGGNNQNNAPDIPAHLWYFGAIGTCI

SEQ ID NO: 9367 - protein, 291 aa, Thermomyces lanuginosus
MRSSLVLFFVSAWTALASPIRRDVSADLLNQFKLFAQYSAAAYCGRNNDAPAGTNITCSANACPLVEAADATFLYSFENSGVGDVTGFLAVDNTNKLIVLSFRGSRSIENWITNLNFDLVDINDICSGCRGHDGFTSSWRSVADTLRQAVDDAVAAHPDYKVVVTGHSLGGALATLAGADLRNDGYDVDLYTYGAPRVGNRAFAEFITVQTGGTLYRVTHTNDVVPRLPPRQFGYSHPSPEYWIKSGTLVPVRRRDIVKIEGIDATGGNNQNNTPDIPAHLWYFGLIGTCI

SEQ ID NO: 9368 - protein, 291 aa, Thermomyces lanuginosus
MRSSLVLFFVSAWTALASPIRRDVSAQLLNQFKLFAQYSAAAYCGRNNDAPAGTNITCSANACPLVEAADATFLYSFENSGVGDVTGFLAVDNTNKLIVLSFRGSRSIENWITNLNFDLVDINDICSGCRGHDGFTSSWRSVADTLRQAVDDAVAAHPDYKVVVTGHSLGGALATLAGADLRNNGYDVDLYTYGAPRVGNRAFAEFITVQTGGTLYRVTHTNDVVPRLPPRQFGYSHPSPEYWIKSGTLVPVRRRDIVKIEGIDATGGNNQNNTPDIPAHLWYFGLIGTCI

SEQ ID NO: 9369 - protein, 291 aa, Thermomyces lanuginosus
MRSSLVLFFVSAWTALASPIRRDVSADLLNQFKLFAQYSAAAYCGRNNDAPAGTNITCSANACPLVEAADATFLYSFENSGVGDVTGFLAVDNTNKLIVLSFRGSRSIENWITNLNFDLVDINDICSGCRGHDGFTSSWRSVADTLRQAVDDAVAAHPDYKVVVTGHSLGGALATLAGADLRNNGYDVDLYTYGAPRVGNRAFAEFITVQTGGTLYRVTHTNDVVPRLPPRQNGYSHPSPEYWIKSGTLVPVRRRDIVKIEGIDATGGNNQNNTPDIPAHLWYFGLIGTCI

SEQ ID NO: 9370 - protein, 291 aa, Thermomyces lanuginosus
MRSSLVLFFVSAWTALASPIRRDVSADLLNQFKLFAQYSAAAYCGRNNDAPAGTNITCSANACPLVEAADATFLYSFENSGVGDVTGFLAVDNTNKLIVLSFRGSRSIENWITNLNFDLVDINDICSGCRGHDGFTSSWRSVADTLRQAVDDAVAAHPDYKVVVTGHSLGGALATLAGADLRNNGYDVDLYTYGAPRVGNRAFAEFITVQTGGTLYRVTHTNDVVPRLPPRQFRYSHPSPEYWIKSGTLVPVRRRDIVKIEGIDATGGNNQNNTPDIPAHLWYFGLIGTCI

SEQ ID NO: 9371 - protein, 291 aa, Thermomyces lanuginosus
MRSSLVLFFVSAWTALASPIRRAVSADLLNQFKLFAQYSAAAYCGRNNDAPAGTNITCSANACPLVEAADATFLYSFENSGVGDVTGFLAVDNTNKLIVLSFRGSRSIENWITNLNFDLVDINDICSGCRGHDGFTSSWRSVADTLRQAVDDAVAAHPDYKVVVTGHSLGGALATLAGADLRNNGYDVDLYTYGAPRVGNRAFAEFITVQTGGTLYRVTHTNDVVPRLPPRQFGYSHPSPEYWIKSGTLVPVRRRDIVKIEGIDATGGNNQNNAPDIPAHLWYFGAIGTCI

SEQ ID NO: 9372 - protein, 291 aa, Thermomyces lanuginosus
MRSSLVLFFVSAWTALASPIRRDVSADLLNQFKLFAQYSAAAYCGRNNDAPAGTNITCSANACPLVEAADATFLYSFENSGVGDVTGFLAVDNTNKLIVLSFRGSRSIENWITNLNFDLVDIQDICSGCRGHDGFTSSWRSVADTLRQAVDDAVAAHPDYKVVVTGHSLGGALATLAGADLRNNGYDVDLYTYGAPRVGNRAFAEFITVQTGGTLYRVTHTNDVVPRLPPRQFGYSHPSPEYWIKSGTLVPVRRRDIVKIEGIDATGGNNQNNTPDIPAHLWYFGLIGTCI

SEQ ID NO: 9373 - protein, 291 aa, Thermomyces lanuginosus
MRSSLVLFFVSAWTALASPIRRDVSADLLNQFKLFAQYSAAAYCGRNNDAPAGTNITCSADACPLVEAADATFLYSFENSGVGDVTGFLAVDNTNKLIVLSFRGSRSIENWITNLNFDLVDINDICSGCRGHDGFTSSWRSVADTLRQAVDDAVAAHPDYKVVVTGHSLGGALATLAGADLRNNGYDVDLYTYGAPRVGNRAFAEFITVQTGGTLYRVTHTNDVVPRLPPRQFGYSHPSPEYWIKSGTLVPVRRRDIVKIEGIDATGGNNQNNTPDIPAHLWYFGLIGTCI

SEQ ID NO: 9374 - protein, 291 aa, Thermomyces lanuginosus
MRSSLVLFFVSAWTALASPIRRDVSADLLNQFKLFAQYSAAAYCGRNNDAPAGTNITCSANACPLVEAADATFLYSFENSGVGDVTGFLAVDNTNKLIVLSFRGSRSIENWITNLNFDLVDINDICSGCRGHDGFTSSWRSVADTLRQAVDDAVAAHPDYKVVVTGHSLGGALATLAGADLRNNGYDVDLYTYGAPRVGNRAFAEFITVQTGGTLYRVTHTNDVVPRLPPRQAGYSHPSPEYWIKSGTLVPVRRRDIVKIEGIDATGGNNQNNTPDIPAHLWYFGLIGTCI
